United States Patent Application Publication US 2014/0259212 A1 - sequence listing, part 26

SEQ ID NO: 84500 - protein, 249 aa, Agrobacterium tumefaciens str. C58
MSQTTSMIELQSVNKWYGPHFQVLTNCSLNVAKGEVVVICGPSGSGKSTLIKCVNALETIGNGVITVNGVEVTNPKTDMPKLRSRVGMVFQHFELFPHMTILENLCIGQEKVLGRTPAEALAKANALLERVGLTAHARKYPGQLSGGQQQRVAIARALAMDPVAMLFDEPTSALDPEMINEVLDVMVSLAQEGMTMMVVTHEMGFARKVADRIVFMDGGKIVEIGEGDSFFTDPKTERARSFLSKILAH

SEQ ID NO: 84501 - DNA, 1113 bp, Agrobacterium tumefaciens str. C58
  CDS (1)..(1113): transl_table=11
atggccaagatcaccctcaataatgtcaccaaaaactggggcgagacccaggttctgaagccgatgaacctcaccatcgagaacggcgagttcgtggccattctcggtccttccggctgcggcaaatcgacgacgctgtttctactcgccgggctttatgcgccgaccggcggcgagatcgcctttgatggccaaaacgtcaatcgcatcgatgcccgcgatcgcaatgtcggcgtcgttttccagtcctacgcgctttatccaaacctgacggtccgcgaaaacattgccttccccttacgtttcaaaagcatgggaaaagaggaagtcgccaggcgcatggacgaggccgcagcgctcgtgcagataagctcccttctcgatcgtcgtccctcgcagctttccggcgggcagcagcagcgtgtggcgcttgcccgcgcgctggtgaaggagccgaatattctcctcctcgacgaaccgctgtccaatctcgatgccacgctgcgcatcaccatgcgggcggagctcaagagcatccagaaacgcctcggcttcaccacattgatcgtcacccacgaccagatcgaagcgatcaccatggcggaccggatcatctgcatgaacaatggcgaaatcgcccagatcggcacgccggatgatctctatcgccgtcccaacaatctgttcgtcgcaggtttcatcggcacgccgcccatgaaccgtatgaaaggccatgccaaaggtggtcggctggagatcgccgaagcgtcttttgatttgacgtcagaccataccggcgaggttaccttcggtctgcggcccgaggatatcacgcttgtctctctcgagcgcgccgctctcaaaggtgaggtcgccagcgtcgagccgatggggcgtgaagtattctacacgatcgtcacgccggctggcccggttcatgcgctcgaatatggtgaaagcgtgcggtacgcgccgggagcgcaggtcggcatcgcctgcaaaccggatttcactctggtcttcgacaaggaaggcgatcgcatcatcggccttcatgccgatctctcgcatgacgcagaggcgcgtgccaggacactccaaccggcaaactga

SEQ ID NO: 84502 - protein, 370 aa, Agrobacterium tumefaciens str. C58
MAKITLNNVTKNWGETQVLKPMNLTIENGEFVAILGPSGCGKSTTLFLLAGLYAPTGGEIAFDGQNVNRIDARDRNVGVVFQSYALYPNLTVRENIAFPLRFKSMGKEEVARRMDEAAALVQISSLLDRRPSQLSGGQQQRVALARALVKEPNILLLDEPLSNLDATLRITMRAELKSIQKRLGFTTLIVTHDQIEAITMADRIICMNNGEIAQIGTPDDLYRRPNNLFVAGFIGTPPMNRMKGHAKGGRLEIAEASFDLTSDHTGEVTFGLRPEDITLVSLERAALKGEVASVEPMGREVFYTIVTPAGPVHALEYGESVRYAPGAQVGIACKPDFTLVFDKEGDRIIGLHADLSHDAEARARTLQPAN

SEQ ID NO: 84503 - DNA, 1098 bp, Agrobacterium tumefaciens str. C58
  CDS (1)..(1098): transl_table=11
ttgagctatatgaacaaaagcgtttccatccgcgatctttccctgtccttcggtgccgtcaccgtgctgaaagacctcaatctcgatatttacgacggcgaatttctcgtgctgctcggctcttccggctgcggcaagtcgacccttctcaattgtatcgccggccttctggagccgaccgacgggcaaatcttcatcaaggatcgcaacgtcacctgggaggagccgaaggaccgcggcatcggcatggtgttccagtcctatgcgctttatccgcagatgacggtggagaagaacctgtcgttcggccttcaggtcgcaaagatcccaaaggacgaaatcgaacggcgtgtgaaaagggcggccggcatcctgcagatcgagccgctgctgaagcgcaagccggccgaactttccggcggccagcgccagcgcgtggcgatcggccgggcgctggtgcgcgatgtggatgtgttcctgtttgacgaaccgctctccaacctcgacgctaaactgcgttcggaactgcgcgtcgaaatcaagcggctgcaccagtcgctgaagaacaccatgatctatgtaacgcacgaccagatcgaggcgctgacgctggcggatcgcatcgccatcatgaaaagcggcgtcatccagcaattggcggacccggtcaccatctataacaagccgcggaacctcttcgtcgccggtttcatcggctcgccgtcgatgaatttcctgcgcggtgaattgatcgagaaagacggcaaggtggtcttcaccaccaatggcgtcagtttttcgttggatggctatcagccggaaacgccgcttgccgccggtcgcgccgtcgttctcggcgtgcgtcccgaacatgtgcgtgtcgatgccgatatcctcagtggcgaggtgcatgaggctgtcgtcgatatcgaggagccgatgggtgctgacaatctgatctggctgaaacatgccggccacacaatgtcggtgcgcgtcggcggccacaggcggttttcgcccggcacaaaggttcgcctcggcctcgacctgaccatggcctcgttgttcgacgctgagagcgaggagcggctttag

SEQ ID NO: 84504 - protein, 365 aa, Agrobacterium tumefaciens str. C58
MSYMNKSVSIRDLSLSFGAVTVLKDLNLDIYDGEFLVLLGSSGCGKSTLLNCIAGLLEPTDGQIFIKDRNVTWEEPKDRGIGMVFQSYALYPQMTVEKNLSFGLQVAKIPKDEIERRVKRAAGILQIEPLLKRKPAELSGGQRQRVAIGRALVRDVDVFLFDEPLSNLDAKLRSELRVEIKRLHQSLKNTMIYVTHDQIEALTLADRIAIMKSGVIQQLADPVTIYNKPRNLFVAGFIGSPSMNFLRGELIEKDGKVVFTTNGVSFSLDGYQPETPLAAGRAVVLGVRPEHVRVDADILSGEVHEAVVDIEEPMGADNLIWLKHAGHTMSVRVGGHRRFSPGTKVRLGLDLTMASLFDAESEERL

SEQ ID NO: 84505 - DNA, 999 bp, Agrobacterium tumefaciens str. C58
  CDS (1)..(999): transl_table=11
atgggcagcatttcccttcagaacgtgtccaagctcttcggtgaggcgaaagtcatcccgtcgatcgatctggatatcaacgacggcgaattcgtcgtcttcgtcggcccgtccggctgcggcaagtcgacgcttctgcggctgattgccgggctggaagacgtctccgggggcaaaatcgtcatcgacggcaacgacgccaccgaaaaggcgccggccgagcgcggccttgccatggtgttccagtcctatgcgctctatccgcatatgagcgtgcgcaacaacatcgccttcccgctgaagatggccaagctcgacaaggccgtcatcgacaagaaggtcggggatgccgcccgcattctcaacctcaccgattatctggagcgccggccctcgcagctgtcgggcggccagcgccagcgcgtcgccatcggccgcgccatcgtgcgcgaacccaaggccttcctgttcgacgagccgctctccaacctcgatgcggctttgcgcggcaccatgcggctggaaatctccgagctgcacaacacgctgaagacgacgatgatctatgtcacccacgaccaggtggaagccatgaccatggccgacaagatcgtggtcctcaaccggggcaatatcgagcaggtcggctcgccgatgcagctttaccgctcgcccgccaacctgttcgtcgccggcttcatcggctcgccgcgcatgaacctgatgaccggcgattatgcccgcagcaagaacgccaccaccgccggcgtgcggcccgaacatctgacgctgtcgaaagaaaccggcctgtggcagggcaaggtgacggttgccgaacatctcggctccgataccttcctgcatctcgaggtgtcaggcatcggccccatcaccgccaggaccgacggtgaattcgaatgcaaacacggcgataccgtcttcatcacacccgatgataccaaaatccacagattcgatgacaagggcatcgctatatga

SEQ ID NO: 84506 - protein, 332 aa, Agrobacterium tumefaciens str. C58
MGSISLQNVSKLFGEAKVIPSIDLDINDGEFVVFVGPSGCGKSTLLRLIAGLEDVSGGKIVIDGNDATEKAPAERGLAMVFQSYALYPHMSVRNNIAFPLKMAKLDKAVIDKKVGDAARILNLTDYLERRPSQLSGGQRQRVAIGRAIVREPKAFLFDEPLSNLDAALRGTMRLEISELHNTLKTTMIYVTHDQVEAMTMADKIVVLNRGNIEQVGSPMQLYRSPANLFVAGFIGSPRMNLMTGDYARSKNATTAGVRPEHLTLSKETGLWQGKVTVAEHLGSDTFLHLEVSGIGPITARTDGEFECKHGDTVFITPDDTKIHRFDDKGIAI

SEQ ID NO: 84507 - DNA, 1179 bp, Agrobacterium tumefaciens str. C58
  CDS (1)..(1179): transl_table=11
ttgaaagccgctccgagcactcgttttcacgttcgtcgcggcaataaaaaacggaggggtgaggtattgataggtgagactctaaatcttgacgggctcgcgaagagctatggcaacgtcgttgcagtcgctggtgttgacgtccgcgtggagccaggcgagttcgtgtcagtgctgggcccatctgggtcaggcaagaccagcgtcctgacgatgattgccggttttgagcgtcccacggcaggcaggatcgtgatcggcgaccgagacgtgaccgaccttgcgccgaataagcgaaatatcgggatggtctttcagaaatacgcgcttttcccccatctcactgtccgtcagaacattgctttcccgctaaagctcagatcgcggtggcgctccggatggaggcagcgggcagacgacatgcttgacctcgttcacctagccggttttgctgacaggtttccttctgaactttcgggtggccagcagcagcgtgtggcggtcgcacgagcgcttgcgtttgagccgcccgttatgctgatggacgagcccctcggcgcgcttgacaagaaattgcgtgaagccatgcagttcgaaatcaagcgcatccagagacaggtgggagcaaccgtcctttacgtaacgcatgatcaggaagaagcgctgacgatgtccgatcgcgttgcgataatgcagggcggaaacatcgtccagataggggctccttctagtctttaccacgcgcccgcaacccgttttgttgctgatttcgtcggaaaaatgagcttcgtcggaggagagattgtttcttttgaagacgacgggatgctcgtgcgattggcggacgacgtatttgtccggaccgcttctgtcgatgcggcacgggcggcactccggcttggtgacgaggtaatcctggccatgcgtcccgagaggatcgccttgaaaaaacgaggtcctcgaggttttggggcaataccagctcagatcgagagccttgcattcgttggatcattccatgcgtacatggtccgtctggacctgcctggatcaccgctggtggaggttcaggtcgtgaccggaagtgaggtaaatttccgcgccggtgatacggtcgatctcgtacccgacccgcaggctgtcagctttttttcaaaagaggagacgtctgcggcatga

SEQ ID NO: 84508 - protein, 392 aa, Agrobacterium tumefaciens str. C58
MKAAPSTRFHVRRGNKKRRGEVLIGETLNLDGLAKSYGNVVAVAGVDVRVEPGEFVSVLGPSGSGKTSVLTMIAGFERPTAGRIVIGDRDVTDLAPNKRNIGMVFQKYALFPHLTVRQNIAFPLKLRSRWRSGWRQRADDMLDLVHLAGFADRFPSELSGGQQQRVAVARALAFEPPVMLMDEPLGALDKKLREAMQFEIKRIQRQVGATVLYVTHDQEEALTMSDRVAIMQGGNIVQIGAPSSLYHAPATRFVADFVGKMSFVGGEIVSFEDDGMLVRLADDVFVRTASVDAARAALRLGDEVILAMRPERIALKKRGPRGFGAIPAQIESLAFVGSFHAYMVRLDLPGSPLVEVQVVTGSEVNFRAGDTVDLVPDPQAVSFFSKEETSAA

SEQ ID NO: 84509 - DNA, 1272 bp, Agrobacterium tumefaciens str. C58
  CDS (1)..(1272): transl_table=11
ttgcaacatagcactgaaagcgtggttggcacgcggcttgcctctgctgtttccatgacccaaagcgaacccaaaattgttgatcgaaaacatttccccctgataccgacgagcaccgtgccctcggctgttcaggcgcaaccgaaggggacattcatgtcgcagacctcgaatgcagcagaaggcaagcagcttagcgttcgtggcctgacccatagctatggcggactgaatgcgatcagcgacatttctttcgagatagccgccggtgagatcgtcgcgctcctcggaccgagcggctgcggaaaatccaccgtgttgcgcgccatcgcaggcctgatccaaccgaaaagcggtgtgatccagctcggaggcgaagacatcgccaatgtttcggcgcgtgcgcgcggtatcggcatggttttccagaactatgcgctgtttccacacctgacggtcgccgagaacatcgcctatccgctggcatgccagaaagtgggacgcaccgagcgccgcgagcggattgaggaaatgctctcgctcgtgcagttgaagggatttggccatcggctgccgcgtgagctttccggtggccagcagcaacgcgtggcagtggcccgcgcgattgccggaaggccttcacttctgcttctcgacgaaccgttcggtgccttggaccgggcgctccgtttcgacctgcaggtcgagcttctccatctgcagaagacgcttggcatcacgacgttgatcgtgacgcatgaccaggaggaggcgcagagcctagctggccgtctggtgctcatgaacaagggcaatgtcgagcaaattgatacaccgatggccgtttatgaccgaccgaggtctctcttcgtcaataccttcatcggtcaggccaatgtgttgcatggaacggtggaccgggtggaggcggaggcaaccaccatctccctcgcgaatggcagggtcctcgttctgccgcgccgcctgaatttcacgacgggctccaagatcacgatcacctgccgccccgaagatgtgcgtctgtctgcggcaccgggcgcaccggccctgccggcacggctgaccgtgtcagtgccgcttggtcccacccttgtccatgatctccttctcgaagacgggacaaaccttcgctcctcggaggtccgcggaccttcgaccttcattcccgagccgggagcagagctctttgccgagatagacaccatcaggtgtcacgcctttccgagcgaaccggaagcatcccgtgaataa

SEQ ID NO: 84510 - protein, 423 aa, Agrobacterium tumefaciens str. C58
MQHSTESVVGTRLASAVSMTQSEPKIVDRKHFPLIPTSTVPSAVQAQPKGTFMSQTSNAAEGKQLSVRGLTHSYGGLNAISDISFEIAAGEIVALLGPSGCGKSTVLRAIAGLIQPKSGVIQLGGEDIANVSARARGIGMVFQNYALFPHLTVAENIAYPLACQKVGRTERRERIEEMLSLVQLKGFGHRLPRELSGGQQQRVAVARAIAGRPSLLLLDEPFGALDRALRFDLQVELLHLQKTLGITTLIVTHDQEEAQSLAGRLVLMNKGNVEQIDTPMAVYDRPRSLFVNTFIGQANVLHGTVDRVEAEATTISLANGRVLVLPRRLNFTTGSKITITCRPEDVRLSAAPGAPALPARLTVSVPLGPTLVHDLLLEDGTNLRSSEVRGPSTFIPEPGAELFAEIDTIRCHAFPSEPEASRE

SEQ ID NO: 84511 - DNA, 1071 bp, Yersinia pestis CO92
  CDS (1)..(1071): transl_table=11
atgattgaattatcggtagataacctgcatttaacctatggtgacaatcccgtgttgaaaggggtgtccatggaattaaaacggggcgaagttgtctcgctgctcgggccatcggggagcggtaaaaccaccttactgcgtgcggttgctgggctggagaaaccgagtcagggccacattatcattggtgaaaagacggtttatgacggctcatcccatagtgaaatacccgccgaagagcgcaatctaggcttagtattccagtcttatgctctgtggccacataaaacggtatctgagaacgttgcctatccactgaaattacgcaaaatctcaacgtcggaaatcagccagcgcgtacaagcggtgcttgaacagcttggactgggggcgcttggcaatcgccacccccatcaactttcgggagggcaacaacaacgggtcgctattggccgtgcgctggtctacaacccgcccgttatcctgttggatgaacctttatcgaatctggacgccaaattacgcgaagaagcacgagtatttctgcgtgaactgatcatgaatctcggtttgtccgcgctgatggtaacccacgatcaaaacgaagctatggcaatctccgaccgtatcttattgcttaataacggtaaaattgaacagcaggggacgccgcaggaaatgtacggctcgccatcaacgttgttcaccgccgagtttatgggcagtaacaaccgcttacatggcaagattatcgacgtccgtgatggtaaggcgcgtatcgaaggtaaagattgggggttgtggggatgggcgggggagggggttaccgcaggtcaagaaggaacggcggttatccgtgtggagcgggttcgtttaggggataacctggatggcaatcagcttgaattaccgttgctgaccagtatgtatctgggagaccgctgggagtatctgttccgcaccgtcgctgacgattttgtgatccgtgcttatggccctgaagttcgtggtaaagagtcctgtcatctctccttaccgactgaacatctgtggatttttcctaagctataa

SEQ ID NO: 84512 - protein, 356 aa, Yersinia pestis CO92
MIELSVDNLHLTYGDNPVLKGVSMELKRGEVVSLLGPSGSGKTTLLRAVAGLEKPSQGHIIIGEKTVYDGSSHSEIPAEERNLGLVFQSYALWPHKTVSENVAYPLKLRKISTSEISQRVQAVLEQLGLGALGNRHPHQLSGGQQQRVAIGRALVYNPPVILLDEPLSNLDAKLREEARVFLRELIMNLGLSALMVTHDQNEAMAISDRILLLNNGKIEQQGTPQEMYGSPSTLFTAEFMGSNNRLHGKIIDVRDGKARIEGKDWGLWGWAGEGVTAGQEGTAVIRVERVRLGDNLDGNQLELPLLTSMYLGDRWEYLFRTVADDFVIRAYGPEVRGKESCHLSLPTEHLWIFPKL

SEQ ID NO: 84513 - DNA, 1080 bp, Caulobacter crescentus CB15
  CDS (1)..(1080): transl_table=11
ttgagatcgctcagccggacgtgcgtggccgccgcggacactgaacggactacggaacccatgaccattgccatccgctccgtcgaaaagcagttcgggcgctatccggccttgaacaaggtcgatctggagatcgccgacggcgagctcctggcccttcttggcccttcggggtcggggaagacgacgctgttgcgcaccattgccggcctggagtttcctgacgcggggcaggtgctgttcgatgggcaggatgtgacctacgcctcggctgcggcgcgccgggtgggtttcgtcttccagcagtatgcgctgttcaagcacatgaccgtggccaaaaacatcgcgttcggcctcgacgtgcggaagggcaaggacaagccgtcgaaggccgagatcgcgcgccgggtcgaggagcttttgaagctggtcgaactcgaagggctgggcggtcggtacccgtcgcagctgtcgggtggacagcgccagcgtgtggctctgtcgcgcgccctggcggtgcagccgagcgtgctgctcctggacgaaccgtttggcgccctggacgccacggtgcgcaagtcgcttcgccgtgagcttcgccgcgttcatgacgccaccggggtcaccaccatcttcgtgactcacgaccaggaagaggcgctggaactggctgatcgcgtcgccatcctgaacaatggccgcatcgagcagatcggcacgcccgatcaggtccatgacgcgcccgaaaccgccttcgtctgcggctttgtcggcgaggcgaaccggtttgacggtcaagtcagcggcgggcgcttcaaggcgggcgccctgaccgtgccggcctccgccttgaaggacggtgcggcgacggcctatgtccggccccatgacttcgcgctggacgaagctggcttcgaggttctgatcgaacgcgcgcaggtccagggcgccctgaccgccgtgaccgcattgacgtcggatggccggcggcttgagatcagtgcttcccgcgctgatgccgaccgtttcacaggcgctgtgaagatcgtcgcgcgcaaggctcacgtttacgcggcttaa

SEQ ID NO: 84514 - protein, 359 aa, Caulobacter crescentus CB15
MRSLSRTCVAAADTERTTEPMTIAIRSVEKQFGRYPALNKVDLEIADGELLALLGPSGSGKTTLLRTIAGLEFPDAGQVLFDGQDVTYASAAARRVGFVFQQYALFKHMTVAKNIAFGLDVRKGKDKPSKAEIARRVEELLKLVELEGLGGRYPSQLSGGQRQRVALSRALAVQPSVLLLDEPFGALDATVRKSLRRELRRVHDATGVTTIFVTHDQEEALELADRVAILNNGRIEQIGTPDQVHDAPETAFVCGFVGEANRFDGQVSGGRFKAGALTVPASALKDGAATAYVRPHDFALDEAGFEVLIERAQVQGALTAVTALTSDGRRLEISASRADADRFTGAVKIVARKAHVYAA

SEQ ID NO: 84515 - DNA, 1134 bp, Sinorhizobium meliloti 1021
  CDS (1)..(1134): transl_table=11
atgcccacgatcaacctgcgcggtgcgcagaagaactacggcgtgaattccgcgaacgccgtgtccaacctcgacctcgagatccgcgacggcgaattcatgtgccttctcggcccttcgggctgcgggaaaaccacgacgctcagaatgattgccggactcgagaatctatcgggcggcgaaatcaggatcggcgaatgtgtggtcgactgcgtggccggcggggtcttcgtaccgccggagaagcgggagatgggcctcgtcttccaaagttatgccttgtggccgcatctgacgatcgagcgcaacacggacttcggcctcagactgcggaagctccccaaagccgaaagggaggagcgcgtcgagcgcatcatgcaggcgctcgatatcgccaaataccgggaccgttatccgtcgcaactgtccggcggccagcagcagcgagtggctcttgcccgcatgctggcgatcaaccccggcgtgctgctcctcgacgagccgctctccaatctcgatgcgcggttgcgcctggagatgcgggcggagctcaagcggctacataaggaattcaagacgaccatcgtcttcgtcacccatgatcaatgggaggcgatgacgctcgcgacgaccatcgcggtcatgaatgaggggactctgcagcagatgggcacgccgaacgacatctacgatcgtccggcgaaccggttcgtcgcagagtttgtcggcagccccccgataaacatattgaccttcggtcagacgggcacgtccgacgtggccgacaaggcggacgcctatcttgccgcccgttgtccgcacctcgcgggggtaggctccgtcggaatccgcccggaggcgatcggctatgcaacgcggattgaggacgtgccgaagggcagcttctccggggagacgaccgtgaccggcgttctgccgacggggggcaactggatcctggagctcaggagcgagagccacaccctgttcctgacgacccatgttctgccgcggatcgagcagggcgccagagtgttcttcttcgcgccgccggaggcgttgcatgtcttcgatacagatggccgccggattgcggaggcggacgcgcgactgagcggcctagcctacaactga

SEQ ID NO: 84516 - protein, 377 aa, Sinorhizobium meliloti 1021
MPTINLRGAQKNYGVNSANAVSNLDLEIRDGEFMCLLGPSGCGKTTTLRMIAGLENLSGGEIRIGECVVDCVAGGVFVPPEKREMGLVFQSYALWPHLTIERNTDFGLRLRKLPKAEREERVERIMQALDIAKYRDRYPSQLSGGQQQRVALARMLAINPGVLLLDEPLSNLDARLRLEMRAELKRLHKEFKTTIVFVTHDQWEAMTLATTIAVMNEGTLQQMGTPNDIYDRPANRFVAEFVGSPPINILTFGQTGTSDVADKADAYLAARCPHLAGVGSVGIRPEAIGYATRIEDVPKGSFSGETTVTGVLPTGGNWILELRSESHTLFLTTHVLPRIEQGARVFFFAPPEALHVFDTDGRRIAEADARLSGLAYN

SEQ ID NO: 84517 - DNA, 1176 bp, Sinorhizobium meliloti 1021
  CDS (1)..(1176): transl_table=11
ttggccacaattcgcatcgacaatcttcgcaagtccttcggctcccatgaaattttgaggggcatcgatctcgagatcgccgacggcgagttcgtctgctttctggggccgtccggctgcggcaagagcacgctcctgcgctcgatcgccggacttgaaaatctcgacgggggatcgatccgactcggcgaccgcgacatcaccgatctgccgtccgccaggcgcgacatcgccatggtcttccagaattacgcgctctatccgcatatgaatgtgcgcaagaacctttccttcggccttgcgctgaacggtatgaagcgaaacgagatcgaccggcgtgtcaacaatgcggccgaaattctgaggatcacggagctcctggaccgcaagccccgccagctttccggcggccagcgtcagcgtgtggcgatcggcagggcgatcgtgcgcgagccgaagctcttcctgctagacgagccgctctccaatctcgatgccggtttaagagtgacgatgcgcgtcgaactggcggcgctgcacgaacgcctcggcgtgacgatgatctatgtgacgcatgatcaggtggaggctatgaccctctccgatcgggtcgtggtgctcgacaagggacgcgtcagccagttcggcacgccgctcgaactgttctatcgtccggcaaatctcttcgtcgccggcttcatcggttcaccgcggatgaacttcctgccggcgggtgtcgcggagcaggctgcgacccgcgtgacgcttgccggaggcggcttatcgcggccggtgacgctcgatacgcgttcgtccgagtcgctcaaccgggatcgtccggtcaccctcggaattcgccccgacaagctcgaattgacctcgccggaggaggcgcatctcgccggcacggtgaggctcgtcgagcggctcggcacggaaagtcacgttcatatccgtgtcgagggcggtggtgatctgaccgccgtggtgcgcggcacccatccggtcgcgagccgagatcaagttcatctccgccttccccccgagcactgccatctgttcgatgccgaaggcacggcgatcgcgaggcggctcgatccggagacgaaggcacttatcgataacgagaaggcaaggggcgcgcgtgcgccggttttggaggagagacatgcctga

SEQ ID NO: 84518 - protein, 391 aa, Sinorhizobium meliloti 1021
MATIRIDNLRKSFGSHEILRGIDLEIADGEFVCFLGPSGCGKSTLLRSIAGLENLDGGSIRLGDRDITDLPSARRDIAMVFQNYALYPHMNVRKNLSFGLALNGMKRNEIDRRVNNAAEILRITELLDRKPRQLSGGQRQRVAIGRAIVREPKLFLLDEPLSNLDAGLRVTMRVELAALHERLGVTMIYVTHDQVEAMTLSDRVVVLDKGRVSQFGTPLELFYRPANLFVAGFIGSPRMNFLPAGVAEQAATRVTLAGGGLSRPVTLDTRSSESLNRDRPVTLGIRPDKLELTSPEEAHLAGTVRLVERLGTESHVHIRVEGGGDLTAVVRGTHPVASRDQVHLRLPPEHCHLFDAEGTAIARRLDPETKALIDNEKARGARAPVLEERHA

SEQ ID NO: 84519 - DNA, 1107 bp, Synechocystis sp. PCC 6803
  CDS (1)..(1107): transl_table=11
atgacagtcgcccaattttctcccgttgcccgcctttccatagaagactctgttttaacggtacaggacttaggcaaaagcttccgggggcaatccaccccagtactccagaaaatcaactttaatctagcgccaggggaaattctgggactattaggaccatcgggttgtggcaagacaactttgttgagaatcattgcaggctttgaaacccccaccagtggcaccgttcatttggagggggattgtgtttctggggaaaatggactcactcccccagaacagcgtcaaacaggcatggtctttcaggattacgccctgtttcctcacctcaccattaccgacaatatcgcctttggcctgcgccataaatcccaaaaattgaaccgtcaacaaatccaagggcgggtggcagaggtgctccatttggtgggattaacgggactggaaaaacgctatccccacgaactatccggtggtcaacaacaacgcattgccctggcccgggctttggcccctaaacctaacctaattttgttggatgaacccctcagtaatctggatgtgcaagtgcgccaaaggttacgccatgaaatccgccatatcctcaaagccaccggtacggccgctatttttgtcacccacgatcaggaagaagccatggccatttccgatcgcattggggtgatgtatcgggggaacttggagcaaatcggcaccccagaggaaatttatcgatcgcctgcttcccgttttgtggcggaatttgttacccaggccaattttgttccggcccagcgacagggaacactttgggccacggagtttggccaatggcctttaactttccaaggcattcagcctgaattgccctcagtgggggaactaatgttgagggaagaggaaattgaactgagccccgccagtgatggcccagtggtcatccgcgatcgccaatttttgggccgggaataccgctactgcttggaaaccccggccggtcgacagattcatgcccgtacttctttgcaaacggtaattccggtgggcagtcgggtcaacttaactcccaccaatccctgtcctcccctatttgcccagggctga

SEQ ID NO: 84520 - protein, 368 aa, Synechocystis sp. PCC 6803
MTVAQFSPVARLSIEDSVLTVQDLGKSFRGQSTPVLQKINFNLAPGEILGLLGPSGCGKTTLLRIIAGFETPTSGTVHLEGDCVSGENGLTPPEQRQTGMVFQDYALFPHLTITDNIAFGLRHKSQKLNRQQIQGRVAEVLHLVGLTGLEKRYPHELSGGQQQRIALARALAPKPNLILLDEPLSNLDVQVRQRLRHEIRHILKATGTAAIFVTHDQEEAMAISDRIGVMYRGNLEQIGTPEEIYRSPASRFVAEFVTQANFVPAQRQGTLWATEFGQWPLTFQGIQPELPSVGELMLREEEIELSPASDGPVVIRDRQFLGREYRYCLETPAGRQIHARTSLQTVIPVGSRVNLTPTNPCPPLFAQG

SEQ ID NO: 84521 - DNA, 1134 bp, Salmonella typhimurium LT2
  CDS (1)..(1134): transl_table=11
gtgaatgatgtcccccaccgcccgcaggtgaaaacccgtaaagcgctgacgccgcttctggaaattcgcaacctgacgaagtcattcgacgggcaacatgctgtcgatgatgtcagtctgactatctataaaggcgagatttttgccctgctgggcgcgtcaggttgtggaaaatcgactctgctacggatgctggcaggttttgaaccgccgagcagcgggcaaattatgctcgacggcgtcgatctggcgcatgttccgccgtatcagcgtccgattaatatgatgtttcagtcctatgcgttgtttccgcatatgacggtagagcagaacatcgcttttggtctgaagcaggacaaactgccgaaggcggagattaccagccgcgtcaatgagatgctgggtctggtgcacatgcaggagtttgcgaaacgtaagccgcatcagctttccggcggtcagcgtcagcgcgtggccctggcgcgcagcctggcgaaacgtcctaagctgctcttgttggatgaaccgatgggcgcgctggataaaaaattacgcgaccggatgcagctggaagtggtggatatccttgagcgcgtcggcgtgacctgcgtcatggtgacgcacgatcaggaagaagccatgacgatggcggggcgcattgccatcatgaaccgtggaaaatttgtgcaaattggcgaaccggaggagatttacgagcatccgacgacccgctacagcgccgaatttatcggatcggtaaatgtttttgagggcttactgaaagcgcgtgaggaggacggtctggtcattgacgcgcccggtttggttcatccgttaaaagtcgatgcagatgcctctgtcgttgataatgtgccggtatatgtggcgctacgtccggaaaaaatcatgctgtgtgagtcgccgcctgccgatggctataatttcgccgtcggcgaagtggcgcatattgcgtatctcggcgatctgtctatttatcatgtgcggctaaaaagcgggcagatgatcagcgctcaactgcagaatgcgcaccgttaccggaaagggttaccgacctggggcgatgaagtgcgtttgtgctgggaagcggatagctgcgtggtcctgacggtataa

SEQ ID NO: 84522 - protein, 377 aa, Salmonella typhimurium LT2
MNDVPHRPQVKTRKALTPLLEIRNLTKSFDGQHAVDDVSLTIYKGEIFALLGASGCGKSTLLRMLAGFEPPSSGQIMLDGVDLAHVPPYQRPINMMFQSYALFPHMTVEQNIAFGLKQDKLPKAEITSRVNEMLGLVHMQEFAKRKPHQLSGGQRQRVALARSLAKRPKLLLLDEPMGALDKKLRDRMQLEVVDILERVGVTCVMVTHDQEEAMTMAGRIAIMNRGKFVQIGEPEEIYEHPTTRYSAEFIGSVNVFEGLLKAREEDGLVIDAPGLVHPLKVDADASVVDNVPVYVALRPEKIMLCESPPADGYNFAVGEVAHIAYLGDLSIYHVRLKSGQMISAQLQNAHRYRKGLPTWGDEVRLCWEADSCVVLTV

SEQ ID NO: 84523 - DNA, 732 bp, Salmonella typhimurium LT2
  CDS (1)..(732): transl_table=11
atggctttactgaaactaaaagagataagtaaggaatattcaggaaaaaaggttcttgatacggttagtctgaaaattcaatcgggagacatgaaagtagtcatggggccatcaggttgtggaaaaacgacgcttttacgctgtctgcttcgattagaagaacctgattatggcaatatttattttcacgggaaaaatatttacgacaaagaatttactattcttgagttcagaaaaaaagttggttgtgtcttccagaattacgctttgtatcgccatcttaacgtcatggataatattacccttgccctatgtaaagtgtttggcatgccgggacaactagcccgggagaaagccttacatgagctacaaaaacttgatatggcctcgcatagcgcgaaatacccttcgcaattatcgggcggccagcaacagcgcgtcgccctggcccgaacaatggtcaccgacccagaactcattatttttgatgagccgacgtctgcgcttgatccgctcatgactcgtgaagtcggaatgttgatcaagcaacttcacgacaatggcgtcactatattatgcgtcactcatgatattcgcctcgccagattactaagcgataacgtaacgtttcttaatcatggcaaaattcgtgcagaaggcgcttttaccgatcttgccttacgagaaacggatccagatatccactgtttttttagcgaggcacaacgatga

SEQ ID NO: 84524 - protein, 243 aa, Salmonella typhimurium LT2
MALLKLKEISKEYSGKKVLDTVSLKIQSGDMKVVMGPSGCGKTTLLRCLLRLEEPDYGNIYFHGKNIYDKEFTILEFRKKVGCVFQNYALYRHLNVMDNITLALCKVFGMPGQLAREKALHELQKLDMASHSAKYPSQLSGGQQQRVALARTMVTDPELIIFDEPTSALDPLMTREVGMLIKQLHDNGVTILCVTHDIRLARLLSDNVTFLNHGKIRAEGAFTDLALRETDPDIHCFFSEAQR

SEQ ID NO: 84525 - DNA, 1071 bp, Salmonella typhimurium LT2
  CDS (1)..(1071): transl_table=11
atggctggtttaaaactacaggcagtaaccaaaagctgggacggcaaaacccaggtcattcaaccgctgacgctggacgtggcggatggcgaatttatcgtgatggtcgggccgtccggctgcggcaaatcaacgttgttgcggatggtggctggtctggaacgcgtgaccagcggcgatatctggattgatcgcaaacgggtcaccgagatggagcccaaagatcgcggcatcgcgatggtatttcagaactatgctctctatccccatatgagcgtagaggagaacatggcgtggggactaaaaattcgtggtatgagcaaagcgcatattgaagaacgtgtgcgggaggcggcgcgcattctggagctggacggcctgcttaaacgccgtccacgcgagctttccggcggtcaacggcagcgcgtggcaatggggcgcgcgatcgtccgcgagccggcagtctttttattcgacgaaccgctctctaacctcgacgccaagctgcgcgtgcagatgcgtctggagttacaacatctgcatcgtcgtcttcgtaccacctcgctctatgttactcacgatcaggtagaggcgatgacgctggcccagcgggtgatggtgatgaataaaggcgtcgcagaacagattggcacgccggtagaggtatatgaaaaaccggccagtcgcttcgtggcgagctttatcggcagcccggcgatgaacctgttggatggcgttatcagcgcttccggcgaccgtttcgaattgcctggcggtctggcgttaccgataggtgcggactatcggggtcatgccggacgtaacatgacgctgggtatccgaccggagcatattgcgttaagctcgcaggcggaaggcggcgtgccgctaacggtagatacgctggagattctgggcgcggataatctggcgcatgggcgctggggcgatcagaaactggtggtgcggttggcgcatcagcagcgcccggcggcgggcagtacgctatggctgcatctgccggaacatcagcgacatctttttgatggcgaaacaggacaacgtgtatga

SEQ ID NO: 84526 - protein, 356 aa, Salmonella typhimurium LT2
MAGLKLQAVTKSWDGKTQVIQPLTLDVADGEFIVMVGPSGCGKSTLLRMVAGLERVTSGDIWIDRKRVTEMEPKDRGIAMVFQNYALYPHMSVEENMAWGLKIRGMSKAHIEERVREAARILELDGLLKRRPRELSGGQRQRVAMGRAIVREPAVFLFDEPLSNLDAKLRVQMRLELQHLHRRLRTTSLYVTHDQVEAMTLAQRVMVMNKGVAEQIGTPVEVYEKPASRFVASFIGSPAMNLLDGVISASGDRFELPGGLALPIGADYRGHAGRNMTLGIRPEHIALSSQAEGGVPLTVDTLEILGADNLAHGRWGDQKLVVRLAHQQRPAAGSTLWLHLPEHQRHLFDGETGQRV

SEQ ID NO: 84527 - DNA, 1077 bp, Ralstonia solanacearum GMI1000
  CDS (1)..(1077): transl_table=11
atgattgaactcaccgtcaacgacctgcacctggaatacggcaacaacccggtgctcaagggtgtctcgatgcagttgcagaagggcgaagtggtgtcgctgctgggcccgtcgggctcgggcaagaccacgctgctgcgcgccgtcgccggcctggagcaggccagcagcggcacggtcaagatcggcgagcgcgtgatgttcgacgacgccgccggcctggacgtgccggccgaggcacgcaacctgggcctggtgttccagtcctacgcgctgtggccgcacaagaccgtcgccgagaacgtcgcctacccgctcaagctgcgcaagacgccacccgcgcagatcaaggaacgcgtgcaggccgtgctgcagcagctcggcctcggccacctgggcgagcgcttcccgagccagctctccggcggccagcagcagcgcgtggcgatcgcccgcgcgctggtgtacaacccgcccgtgatcctgctggacgagccgctgtccaacctcgacgccaagctgcgcgaagaggcccgcgccttcctgcgcgagctgatcgtgcgcctgggcctgtcggcactgatggtcacgcacgaccagggcgaggcgatggcgatgtcggatcgcatcctgctgctcaacaacggcgtgatcgaacagcagggcacgcccgagcagatgtacggcgcgccggaaacgctgtttaccgccgagttcatgggcagcaacaaccgcatcaacggcaagatcgccgaagtgcgcgacggcatggcgcggctggtggacgaagccggcggctggtcgctgtggggcgtggcgcgcggcgacctgaagcccggcgcgacggcgcatggcgtgatccggctggaacaggtgcgcgtcggcctggacaacgccgacaacaccatccgcctgccgctggccacgcgcatgtatctgggcgaccgctgggaatgcctgttccgcggcaccggcgcggccggcaccggcctgcgcgcctacgccagcaatgcacccggcgacggcgagtacgcgctgaccttcccgcgcgagcagttctggctgttcgcggcgtga

SEQ ID NO: 84528 - protein, 358 aa, Ralstonia solanacearum GMI1000
MIELTVNDLHLEYGNNPVLKGVSMQLQKGEVVSLLGPSGSGKTTLLRAVAGLEQASSGTVKIGERVMFDDAAGLDVPAEARNLGLVFQSYALWPHKTVAENVAYPLKLRKTPPAQIKERVQAVLQQLGLGHLGERFPSQLSGGQQQRVAIARALVYNPPVILLDEPLSNLDAKLREEARAFLRELIVRLGLSALMVTHDQGEAMAMSDRILLLNNGVIEQQGTPEQMYGAPETLFTAEFMGSNNRINGKIAEVRDGMARLVDEAGGWSLWGVARGDLKPGATAHGVIRLEQVRVGLDNADNTIRLPLATRMYLGDRWECLFRGTGAAGTGLRAYASNAPGDGEYALTFPREQFWLFAA

SEQ ID NO: 84529 - DNA, 1050 bp, Agrobacterium tumefaciens str. C58
  CDS (1)..(1050): transl_table=11
atggcaggcagcgcagcgcttgaactgaaatcggtgggaaaaagattcggcgatacggatgttctgtccgatattgatctttccgttgagcgtggcgaaattatttgcctcgttggacgttcaggctgtggaaaatcgactttgctgcgtatcgtggccggcgtggagacgccggatcgcggcagcgtctccctcaatggcaatgttgttgccgggcccgccgcctttgtcgagccggaaaagcgcaatatcggttttgtctttcaggattacgctttgttcccgcatctgaccgtggagcagaatgtcatgttcggcctccgggcgctgccgaaggcagaggcgcgtcgccgtgcagcggaaatgatcgaacatgttcatctgcaggatctggctaaacgttatccgcacacactttcgggcggtgagcagcagcgcgtggcactcgcccgcgcgctcgccccgcagcccggcctgctgctgatggatgagcccttttccaacctggaccgcggattacgcgacaatgtgcgtgaggaaacactcggccttctgcggcaactgggcaccacggcgatcatggttacccatgacccggaagaggcgctatcggcaggtgaccgtgtagtgctgatgcagcgcgggcgcatcgtccagagcggtacgggttacgaaatccatgacaatcccaaaagccgctatgccgccgattttttctgcgccttcaacaagatcgaaggccgggtgaaacagggccgggtcgaaacgccgcttgggctgctgggcgatgcctccgatctgcctgatggcctcgccgcgatcgcctatgttcgccccaatgcgatttcgatcatcgaggatggcgccgcgagagaaggcattgccggcgaaatatcgagccgtgtcttcctcggcgagatcgagcagcttggcatagccgtgcccggactgccctccgatctgcgcgtcaggacgatgcagcgcacgcccgccagaaccaaggccgtgcgttttggcatcgatcccaagggggtcctcatatttacctga

SEQ ID NO: 84530 - protein, 349 aa, Agrobacterium tumefaciens str. C58
MAGSAALELKSVGKRFGDTDVLSDIDLSVERGEIICLVGRSGCGKSTLLRIVAGVETPDRGSVSLNGNVVAGPAAFVEPEKRNIGFVFQDYALFPHLTVEQNVMFGLRALPKAEARRRAAEMIEHVHLQDLAKRYPHTLSGGEQQRVALARALAPQPGLLLMDEPFSNLDRGLRDNVREETLGLLRQLGTTAIMVTHDPEEALSAGDRVVLMQRGRIVQSGTGYEIHDNPKSRYAADFFCAFNKIEGRVKQGRVETPLGLLGDASDLPDGLAAIAYVRPNAISIIEDGAAREGIAGEISSRVFLGEIEQLGIAVPGLPSDLRVRTMQRTPARTKAVRFGIDPKGVLIFT

SEQ ID NO: 84531 - DNA, 762 bp, Agrobacterium tumefaciens str. C58
  CDS (1)..(762): transl_table=11
atgtcgcaatcctccgccgcacaggctccgctgatcgcccttgaaggggttggaaagtggtatggagccttccatgcgcttaaaggcgtcaacatgacggttcgcaaaggcgaaaagatcgttctttgcggcccgtccggttcgggcaaatccaccctcatccgctgcatcaaccatctggaggaaatccaggagggcaagatcaccgtcgagggcaccacgctgtcggattccagccgcgccatcgatgcggttcgccgcgaagtgggcatggtgttccagagcttcaatctcttcccgcacaagaccatcatggaaaactgtacccttgccccgatgcgggtgaagggtctctccaaggccgatgcggaggcgacggcgcgcaaatatctggaccgcgtacgcatcctcaaccaggccgacaaatacccggcacagctttccggcggccagcagcagcgtgcggccatcgcccgggcgctatgcatggaaccgaaagccatgctgttcgacgagccgacttcggcactcgacccggaaatggtgaaggaagtgctcgacaccatgatcggccttgcccgcgacggcatgacgatgatctgcgtgacccatgaaatgggtttcgcccgccaggtggccgaccgcgtggtcttcatgtcggaaggcgagatcatcgaggaaggcccgccggaagaattcttccgcgatcccaagcaccagcgcacgcgcacgttcctcggcgaaattctcgcccaccactga

SEQ ID NO: 84532 - protein, 253 aa, Agrobacterium tumefaciens str. C58
MSQSSAAQAPLIALEGVGKWYGAFHALKGVNMTVRKGEKIVLCGPSGSGKSTLIRCINHLEEIQEGKITVEGTTLSDSSRAIDAVRREVGMVFQSFNLFPHKTIMENCTLAPMRVKGLSKADAEATARKYLDRVRILNQADKYPAQLSGGQQQRAAIARALCMEPKAMLFDEPTSALDPEMVKEVLDTMIGLARDGMTMICVTHEMGFARQVADRVVFMSEGEIIEEGPPEEFFRDPKHQRTRTFLGEILAHH

SEQ ID NO: 84533 - DNA, 1104 bp, Agrobacterium tumefaciens str. C58
  CDS (1)..(1104): transl_table=11
atgggaagtctgaaactcgaaaacctcaacaaggcgttcggcgccgttcatgtgctgcatgatatcgatcttcagatcgaaaacggtgaattcgtcgttttcgtcggcccctccggctgcggaaaatcgacgctgctgcgcatcatcgcagggcttgaggacgtctcctccggcaccatcggcattggcgggcgcgatgtcagcgcgttgtcgccggccgagcgcaagatcgctatggtgttccagtcctatgcgctttatccacatatgagcgtgcgcaagaaccttgccttcggtctggaaaatctgcgcttcaagcgggcggaaatcgaaagccgcatcaacgaggcggcgcgtatgctcgccatcgagccctatctcgaccgcaagccgaaacagctttccggcggccagcgccagcgtgtcgccatcggccgcgcgatcgtgcgcgagcctgacatctttctgttcgacgagccgttgtcgaacctcgatgcggcactgcgcgtgcagacccgcgccgaaatcacgcggctgcaccgcgatatcaagacaacgatgatctatgtcacccacgatcaggtggaagccatgaccatggccgacaagatcgtggtgctgcgtgcaggacgcatcgagcaggtgggcagcccgcttgagcttttcgacaatccgcgcaacctcttcgttgccggtttcctcggttcaccgcgcatgaacatgctgaagggcaccatcaccaagggcgaggacggcaacatcgccatcgacgccggctacggcgtgtcgctcccctgcctcgtcgaccccgcaaccgtcagtcccggacagccggttctggcgggcatccgcccctcgcatttcgccatcgcggatgccggcctgcccttcgaggtgcaatatcacgaaagcctcggcaccgagacctatctctacggcaatcttcagggtgaaaaagagcagatcatcgtgcatcaggcgggccatttcgcgcccgcctccggctccgttctgaagatcatgccggcacgggaaaaggtgcatgtcttcgatcccgccaccgaactggcgctgccgcgcgccgcgagcgaagggagaggttag

SEQ ID NO: 84534 - protein, 367 aa, Agrobacterium tumefaciens str. C58
MGSLKLENLNKAFGAVHVLHDIDLQIENGEFVVFVGPSGCGKSTLLRIIAGLEDVSSGTIGIGGRDVSALSPAERKIAMVFQSYALYPHMSVRKNLAFGLENLRFKRAEIESRINEAARMLAIEPYLDRKPKQLSGGQRQRVAIGRAIVREPDIFLFDEPLSNLDAALRVQTRAEITRLHRDIKTTMIYVTHDQVEAMTMADKIVVLRAGRIEQVGSPLELFDNPRNLFVAGFLGSPRMNMLKGTITKGEDGNIAIDAGYGVSLPCLVDPATVSPGQPVLAGIRPSHFAIADAGLPFEVQYHESLGTETYLYGNLQGEKEQIIVHQAGHFAPASGSVLKIMPAREKVHVFDPATELALPRAASEGRG

SEQ ID NO: 84535 - DNA, 1116 bp, Agrobacterium tumefaciens str. C58
  CDS (1)..(1116): transl_table=11
atgagtggggtcgaactaaagggtgtttcgaagagttttggcgccgttgatgtcatccatgatatcgacctctccataacagccggcgagtttgtcgttttcgtcggaccgtcaggctgtggaaaatcgacgcttctacgcctgatcgccggactggaagagaccagccggggcgagatcctgatcggtggacgcgacgtgacggatgccgatccgtccgaccgggggattgccatggtgttccagtcttacgcgctctacccgcatatgaccgttgcccagaacatgggcttcggcttgcggatggcacatcgcccgaaagaggaggtcacagcgatggtgcggcacgctgccgaaatcctgcatctgacacctctgctcgaccggcgtcccggccagctctccggtggccagcgccagcgggttgccatcgggcgcgccattgttcgcaacccggaggtcttcctgttcgacgaaccgctctccaatctcgacgctgaattgcgggttggcatgcgcatcgagatcgccaggttgcacaaacagcttggcaacaccatgatctatgtcacgcacgatcagaccgaagccatgacgctggcagacaagatcgtcgttctcagggcagggcgcatcgaacagatcggctcaccctttgagctctatagtgatcccgataacctgttcgttgccggtttcatcggcagtccaaagatgaatttcgtcccagccgggcatgaggcgggcgcactcgttgtcgccggccaccgcttaacctttgccgcgcctgccggattgcctacgaactgccagttgcagcttggcatcaggccggagaacctgacgctgacccgtgacggtgaaaggggccttgccgttaccgtcggctttactgaatttctgggaggcacaacctatctctacggtcatatcgagccgggaatgccgctgatcgttcagggtgaagccggcccggcgcctctcgtcggccaaacggttttcgtgacttcgatccgacaaatgcccgatttttcgatgccgaggggatgcgtattcgtcatgttgaggaacgtcccgaagccgtttcaggcgattagctttcaaacagccgtttga

SEQ ID NO: 84536 - protein, 371 aa, Agrobacterium tumefaciens str. C58
MSGVELKGVSKSFGAVDVIHDIDLSITAGEFVVFVGPSGCGKSTLLRLIAGLEETSRGEILIGGRDVTDADPSDRGIAMVFQSYALYPHMTVAQNMGFGLRMAHRPKEEVTAMVRHAAEILHLTPLLDRRPGQLSGGQRQRVAIGRAIVRNPEVFLFDEPLSNLDAELRVGMRIEIARLHKQLGNTMIYVTHDQTEAMTLADKIVVLRAGRIEQIGSPFELYSDPDNLFVAGFIGSPKMNFVPAGHEAGALVVAGHRLTFAAPAGLPTNCQLQLGIRPENLTLTRDGERGLAVTVGFTEFLGGTTYLYGHIEPGMPLIVQGEAGPAPLVGQTVFVTSIRQMPDFSMPRGCVFVMLRNVPKPFQAISFQTAV

SEQ ID NO: 84537 - DNA, 1113 bp, Agrobacterium tumefaciens str. C58
  CDS (1)..(1113): transl_table=11
ttgataggtgagactctaaatcttgacgggctcgcgaagagctatggcaacgtcgttgcagtcgctggtgttgacgtccgcgtggagccaggcgagttcgtgtcagtgctgggcccatctgggtcaggcaagaccagcgtcctgacgatgattgccggttttgagcgtcccacggcaggcaggatcgtgatcggcgaccgagacgtgaccgaccttgcgccgaataagcgaaatatcgggatggtctttcagaaatacgcgcttttcccccatctcactgtccgtcagaacattgctttcccgctaaagctcagatcgcggtggcgctccggatggaggcagcgggcagacgacatgcttgacctcgttcacctagccggttttgctgacaggtttccttctgaactttcgggtggccagcagcagcgtgtggcggtcgcacgagcgcttgcgtttgagccgcccgttatgctgatggacgagcccctcggcgcgcttgacaagaaattgcgtgaagccatgcagttcgaaatcaagcgcatccagagacaggtgggagcaaccgtcctttacgtaacgcatgatcaggaagaagcgctgacgatgtccgatcgcgttgcgataatgcagggcggaaacatcgtccagataggggctccttctagtctttaccacgcgcccgcaacccgttttgttgctgatttcgtcggaaaaatgagcttcgtcggaggagagattgtttcttttgaagacgacgggatgctcgtgcgattggcggacgacgtatttgtccggaccgcttctgtcgatgcggcacgggcggcactccggcttggtgacgaggtaatcctggccatgcgtcccgagaggatcgccttgaaaaaacgaggtcctcgaggttttggggcaataccagctcagatcgagagccttgcattcgttggatcattccatgcgtacatggtccgtctggacctgcctggatcaccgctggtggaggttcaggtcgtgaccggaagtgaggtaaatttccgcgccggtgatacggtcgatctcgtacccgacccgcaggctgtcagctttttttcaaaagaggagacgtctgcggcatga

SEQ ID NO: 84538 - protein, 370 aa, Agrobacterium tumefaciens str. C58
MIGETLNLDGLAKSYGNVVAVAGVDVRVEPGEFVSVLGPSGSGKTSVLTMIAGFERPTAGRIVIGDRDVTDLAPNKRNIGMVFQKYALFPHLTVRQNIAFPLKLRSRWRSGWRQRADDMLDLVHLAGFADRFPSELSGGQQQRVAVARALAFEPPVMLMDEPLGALDKKLREAMQFEIKRIQRQVGATVLYVTHDQEEALTMSDRVAIMQGGNIVQIGAPSSLYHAPATRFVADFVGKMSFVGGEIVSFEDDGMLVRLADDVFVRTASVDAARAALRLGDEVILAMRPERIALKKRGPRGFGAIPAQIESLAFVGSFHAYMVRLDLPGSPLVEVQVVTGSEVNFRAGDTVDLVPDPQAVSFFSKEETSAA

SEQ ID NO: 84539 - DNA, 1116 bp, Agrobacterium tumefaciens str. C58
  CDS (1)..(1116): transl_table=11
atgtcgcagacctcgaatgcagcagaaggcaagcagcttagcgttcgtggcctgacccatagctatggcggactgaatgcgatcagcgacatttctttcgagatagccgccggtgagatcgtcgcgctcctcggaccgagcggctgcggaaaatccaccgtgttgcgcgccatcgcaggcctgatccaaccgaaaagcggtgtgatccagctcggaggcgaagacatcgccaatgtttcggcgcgtgcgcgcggtatcggcatggttttccagaactatgcgctgtttccacacctgacggtcgccgagaacatcgcctatccgctggcatgccagaaagtgggacgcaccgagcgccgcgagcggattgaggaaatgctctcgctcgtgcagttgaagggatttggccatcggctgccgcgtgagctttccggtggccagcagcaacgcgtggcagtggcccgcgcgattgccggaaggccttcacttctgcttctcgacgaaccgttcggtgccttggaccgggcgctccgtttcgacctgcaggtcgagcttctccatctgcagaagacgcttggcatcacgacgttgatcgtgacgcatgaccaggaggaggcgcagagcctagctggccgtctggtgctcatgaacaagggcaatgtcgagcaaattgatacaccgatggccgtttatgaccgaccgaggtctctcttcgtcaataccttcatcggtcaggccaatgtgttgcatggaacggtggaccgggtggaggcggaggcaaccaccatctccctcgcgaatggcagggtcctcgttctgccgcgccgcctgaatttcacgacgggctccaagatcacgatcacctgccgccccgaagatgtgcgtctgtctgcggcaccgggcgcaccggccctgccggcacggctgaccgtgtcagtgccgcttggtcccacccttgtccatgatctccttctcgaagacgggacaaaccttcgctcctcggaggtccgcggaccttcgaccttcattcccgagccgggagcagagctctttgccgagatagacaccatcaggtgtcacgcctttccgagcgaaccggaagcatcccgtgaataa

SEQ ID NO: 84540 - protein, 371 aa, Agrobacterium tumefaciens str. C58
MSQTSNAAEGKQLSVRGLTHSYGGLNAISDISFEIAAGEIVALLGPSGCGKSTVLRAIAGLIQPKSGVIQLGGEDIANVSARARGIGMVFQNYALFPHLTVAENIAYPLACQKVGRTERRERIEEMLSLVQLKGFGHRLPRELSGGQQQRVAVARAIAGRPSLLLLDEPFGALDRALRFDLQVELLHLQKTLGITTLIVTHDQEEAQSLAGRLVLMNKGNVEQIDTPMAVYDRPRSLFVNTFIGQANVLHGTVDRVEAEATTISLANGRVLVLPRRLNFTTGSKITITCRPEDVRLSAAPGAPALPARLTVSVPLGPTLVHDLLLEDGTNLRSSEVRGPSTFIPEPGAELFAEIDTIRCHAFPSEPEASRE

SEQ ID NO: 84541 - DNA, 1095 bp, Pyrococcus furiosus DSM 3638
  CDS (1)..(1095): transl_table=11
atggtcagcataaagctggaaggtattgttaaaaagtttggaaatttcactgctctagataacattaatttaaccataaaagacaaagaatttatggctctcttggggccatctggtagtggaaaatcgacgcttctctacacaatagcaggaatatacaaaccaactgcagggagaatttattttgacgatagggatgtaacggagcttcccccaaaagacaggaatgtagggctagtatttcaaaactgggctctttatccccacatgaccgtatacaaaaatatagcttttccattagagctaagaaagttgccaaaagaggaaatagacaagaaagttagggaagtggcaaagatacttcacatagaaaatttattggagaggtatccatggcaactcagcggcggacagcagcagagagtggcaatagcgagggcattagtcaaggagccagacgttctcttactagatgaacctctaagcaatcttgatgcccttctaagactagaggtgagagctgaattaaagagacttcagaaggacctagacattacggcagtctatgtgacccatgatcaggcagaagctttagccatggccgacagaatagctgttattaaggaggggaaaattctacaggttggagatcctgatgaagtctaccacaaaccaaaatacaagtttgtgggaggatttctaggcaacccaccaatgaacttcattgaggcaaaaattgaagatggaaaactcgttattagctccgaaaatatacttgatattccccctcaatacagagagatcatcaagaagctagatgtaaaagaagtgtatataggctttagaccacacgatgtagaaatagtaagagaaggtaaagaaggattagtgggggaaatatattccttcgagcccctgggaagggagcagatcctcacaatttttgttaatggaaatgtggttaaggtgttcgctcctgaagaggaacattttagatttggagagaaagttaacatcaaaataaaaagtgaatcaattgtgctgtttgacaagaaaaccgaaaaagctcttgaatttttagtaaatgaaccttga

SEQ ID NO: 84542 - protein, 364 aa, Pyrococcus furiosus DSM 3638
MVSIKLEGIVKKFGNFTALDNINLTIKDKEFMALLGPSGSGKSTLLYTIAGIYKPTAGRIYFDDRDVTELPPKDRNVGLVFQNWALYPHMTVYKNIAFPLELRKLPKEEIDKKVREVAKILHIENLLERYPWQLSGGQQQRVAIARALVKEPDVLLLDEPLSNLDALLRLEVRAELKRLQKDLDITAVYVTHDQAEALAMADRIAVIKEGKILQVGDPDEVYHKPKYKFVGGFLGNPPMNFIEAKIEDGKLVISSENILDIPPQYREIIKKLDVKEVYIGFRPHDVEIVREGKEGLVGEIYSFEPLGREQILTIFVNGNVVKVFAPEEEHFRFGEKVNIKIKSESIVLFDKKTEKALEFLVNEP

SEQ ID NO: 84543 - DNA, 1119 bp, Pyrococcus furiosus DSM 3638
  CDS (1)..(1119): transl_table=11
atggctggtgttaggcttgtagatgtttggaaggtgtttggggaggttactgctgttagggagttgagtttggaggttaaggatggggagtttatgattcttttgggcccgagtggttgtgggaagacaacaacgctcaggatgattgctgggctggaggagccgagtagggggcagatttacattggtgataggctggttgctgacccggagaagggaattttcgtcccgccgaaggatagggatattgcgatggtttttcagagttatgcgttgtacccgcatatgactgtttatgataatattgcttttccgttgaagctcaggaaggttccgaggcaggagattgaccagcgtgttagggaggttgctgagctcctcggtttgacggagcttttgaataggaagccgagggaattaagcggtgggcagaggcagcgtgttgcgttgggtagggcgattgttaggaagccgcaggtgtttttgatggatgagcctttgagtaatttggatgctaagttgagggttaggatgcgtgctgaactgaagaagttgcagaggcagcttggtgtgacgacgatttacgtgacccacgatcaggttgaggctatgacgatgggtgataggattgctgtgatgaatgggggtgttttgcagcaggttggttcgccggatgaggtttatgataagcctgcgaatacttttgtggctggttttattggaagcccgccgatgaattttcttgatgctattgttactgaggatgggtttgtggattttggggagtttaggttgaagcttcttccggatcagtttgaggttttgggggagttgggttatgttggtagggaggtaatctttggtattcgtccggaggatttgtatgatgcgatgtttgctcgggtgagggttcctggggagaatttggttagggctgtggttgagattgtggagaatttgggtagtgagaggattgtgcatttgcgtgttggtggtgtgacttttgttggtgcttttcgttcggagtctagggttagggagggtgtggaggttgatgttgtgtttgatatgaagaagattcacatcttcgacaaaaccacaggaaaagcaatattctag

SEQ ID NO: 84544 - protein, 372 aa, Pyrococcus furiosus DSM 3638
MAGVRLVDVWKVFGEVTAVRELSLEVKDGEFMILLGPSGCGKTTTLRMIAGLEEPSRGQIYIGDRLVADPEKGIFVPPKDRDIAMVFQSYALYPHMTVYDNIAFPLKLRKVPRQEIDQRVREVAELLGLTELLNRKPRELSGGQRQRVALGRAIVRKPQVFLMDEPLSNLDAKLRVRMRAELKKLQRQLGVTTIYVTHDQVEAMTMGDRIAVMNGGVLQQVGSPDEVYDKPANTFVAGFIGSPPMNFLDAIVTEDGFVDFGEFRLKLLPDQFEVLGELGYVGREVIFGIRPEDLYDAMFARVRVPGENLVRAVVEIVENLGSERIVHLRVGGVTFVGAFRSESRVREGVEVDVVFDMKKIHIFDKTTGKAIF

SEQ ID NO: 84545 - DNA, 1122 bp, Pyrococcus furiosus DSM 3638
  CDS (1)..(1122): transl_table=11
gtggggaataacactgaggtgataaagatggttgaggtaaggttagagaatctcacaaaaaagtttggagattttaccgcagttaatagcttaaatctcacgattaaggatggagaattcctagtgttattgggcccctcaggatgtggaaagacgacaactttgagaatgattgcagggcttgaagaaccaacgtctgggaaaatatacttcggggatagagacgtcacatacctccctccaaaagatagaaatgtaagcatggttttccagagctatgccgtgtggcctcacatgacagtttatgagaacatagcctttccgcttaagatcaagaagtatccaaaagatgagatagagaggagagtcaagtgggctgcagagctcctgcaaattgaagaattacttgacagatatccagcacagctctctggaggacagaggcagagagtcgcagttgccagggccatagttgtagagccagatgtattgcttatggatgagccgttaagcaacttggatgctaaattaagagtcgctatgagggctgagataaagaagttgcaacagaagcttaaggtcactacaatctacgtaacccacgaccaagttgaggcaatgactatgggagatagaattgcagtaatgaacagaggaaagttactccaagttggctcgcctactgaagtttacttaaaccccaactccgtctttgtagccacctttataggagctccagaaatgaatattttagaagtttcagtaggcgaaggatacctggaaggagaaggatttaagatagagctcccagatgacataatggaagcattgaggaactatatagggaaaaccgttctctttggaatacgtcccgaacatatggtaattgaagggataagcgaacttgcccacatgagaagaactgcaaagataaagggagttgtggatttcgttgaggcactgggaacagatacaatagtgcacgttaggttcgaggagtcaattataaaagttaagcttcctggccatattcctttggagataggaaaagaggtatctgtgctaatagatctagacaagattcatatatttgacaagaattcagaaaaggccataatttaa

SEQ ID NO: 84546 - protein, 373 aa, Pyrococcus furiosus DSM 3638
MGNNTEVIKMVEVRLENLTKKFGDFTAVNSLNLTIKDGEFLVLLGPSGCGKTTTLRMIAGLEEPTSGKIYFGDRDVTYLPPKDRNVSMVFQSYAVWPHMTVYENIAFPLKIKKYPKDEIERRVKWAAELLQIEELLDRYPAQLSGGQRQRVAVARAIVVEPDVLLMDEPLSNLDAKLRVAMRAEIKKLQQKLKVTTIYVTHDQVEAMTMGDRIAVMNRGKLLQVGSPTEVYLNPNSVFVATFIGAPEMNILEVSVGEGYLEGEGFKIELPDDIMEALRNYIGKTVLFGIRPEHMVIEGISELAHMRRTAKIKGVVDFVEALGTDTIVHVRFEESIIKVKLPGHIPLEIGKEVSVLIDLDKIHIFDKNSEKAII

SEQ ID NO: 84547 - DNA, 1071 bp, Fusobacterium nucleatum subsp. nucleatum ATCC 25586
  CDS (1)..(1071): transl_table=11
atggcatcagtaacaataacaggagttacaaaatcctttggaaatgtaacagtcctacaagaatttaatcaaaaatttgaagatggagaatttataacattactaggcccatctggttgtggaaaaacaactatgcttagacttattgcaggatttgaaaaaccaagtagtggagaaatatatataggtgataaattagtatcaagtgaaaaagaatttttaccacctgaaaaaagaggaattggaatggtatttcaatcttatgcagtatggcctcatatgaatgtatttgacaatattgcttatccattaaaaattcaaaaaattagtaaaaatgaaatagaagaaagagtaaatcaagttttaaaaattgtacacttagaacaatataaggatagatttccatctgagttatcaggaggacaacaacaaagggttgcattaggaagagccttagttgctcaaccagaaattttgttgttagatgaacctctttctaacctagatgcaaagttaagagaagaaatgagatatgaaataaaagaaataactaaaaaattaaaaataacagttatttatgtaactcatgaccaaatagaagcaatgaccatgagtaatagaattgtattgattaataaaggagaggtacaacaagttgcacctccacaagaaatatattctaaacctaaaaatatgtttgttgcaaactttgttggtaaggttgattttattacaggaaaggttgaaggaagtaaaattttactagataatagtaataatcaaatactttctaatacaagctcatttaaaggaaaggttgttgtagcaattcgtccagaaaatgctattctttctgatgatggagaaatcacaggaaaagtttattctaaattctatttaggagattgtaatgatttaagagttgaaattggaaatggaaatattttaagaataattgcaagagcttcaacttataacactttaaatgagggtgatgaagtaaaaataaaaatcttagattattttgtttttgaagatgatggaaaagaccaaattaaaattatgacataa

SEQ ID NO: 84548 - protein, 356 aa, Fusobacterium nucleatum subsp. nucleatum ATCC 25586
MASVTITGVTKSFGNVTVLQEFNQKFEDGEFITLLGPSGCGKTTMLRLIAGFEKPSSGEIYIGDKLVSSEKEFLPPEKRGIGMVFQSYAVWPHMNVFDNIAYPLKIQKISKNEIEERVNQVLKIVHLEQYKDRFPSELSGGQQQRVALGRALVAQPEILLLDEPLSNLDAKLREEMRYEIKEITKKLKITVIYVTHDQIEAMTMSNRIVLINKGEVQQVAPPQEIYSKPKNMFVANFVGKVDFITGKVEGSKILLDNSNNQILSNTSSFKGKVVVAIRPENAILSDDGEITGKVYSKFYLGDCNDLRVEIGNGNILRIIARASTYNTLNEGDEVKIKILDYFVFEDDGKDQIKIMT

SEQ ID NO: 84549 - DNA, 756 bp, Streptomyces coelicolor A3(2)
  CDS (1)..(756): transl_table=11
atgagcctgcacctgaccgacgtcaccctcacctaccccgacggcggggagcgcctgaccgcgctcgaccgggtcagcctggaggtccccagggggagcctgaccgccgtggtcggaccctccggctccggcaagtccagtctgctggccgtcgccgccacgctcatcacgcccgacgccggaaccgtcaccgtcgacggcacccccaccaccggcctgagccgcggcgagctggccgctctgcgccgccaccggatcggcatcgtcttccagcagcccaacctgctgccttccctcaccgccgtcgaacaactgcaggtgatggcccggatcgacggccgcaggccgcgcgccgcccggggccgggcgatggagctcctggacgcggtcgggctggccgggcaggccggccgccgcccccaccagctctccggcggccagcgtcagcgcgtcgccctcgcccgggccctgatgaacgaccccaccgtcctcctggtcgacgaacccacgagcgccctcgaccacgagcgcggcgccgccgtcatcgcactgatcacccgtctcacccacgagcgggcgggcgccaccctgctggtcacccacgaccgcacccacctcaccgccgcagaccggatcgccgaggtccgcgacggccgcctccgtccgtcggcaggggcttgcaccacgatacgttccgatatatcgttgaggcatcgcgacagatcaacgactgaatggagtgatggcgatgcgtaa

SEQ ID NO: 84550 - protein, 251 aa, Streptomyces coelicolor A3(2)
MSLHLTDVTLTYPDGGERLTALDRVSLEVPRGSLTAVVGPSGSGKSSLLAVAATLITPDAGTVTVDGTPTTGLSRGELAALRRHRIGIVFQQPNLLPSLTAVEQLQVMARIDGRRPRAARGRAMELLDAVGLAGQAGRRPHQLSGGQRQRVALARALMNDPTVLLVDEPTSALDHERGAAVIALITRLTHERAGATLLVTHDRTHLTAADRIAEVRDGRLRPSAGACTTIRSDISLRHRDRSTTEWSDGDA

SEQ ID NO: 84551 - DNA, 1338 bp, Streptomyces coelicolor A3(2)
  CDS (1)..(1338): transl_table=11
atgacacgcgccatctccctgcacgacgtgagcaagacctacgcgcgaggcgtccgcgtggtggaccggctgtcgctggacatcgcgccgggtgagttcctcgtcctgctcggcccctccggctgcggcaagtcgaccgtgctgcgcatgatcgccgggctggaggagatcaccgagggagagctgacgctggacggcgcgtacgccaacgacctgctccccgcggagcggcggatggcgatggtcttccagaacttcgccctgtaccccaacatgaccacccgcgggaacatcggcttcccgctgcgcgtcgaggacccgcagaccgaccacaccccccgcgtggacgccaccgcccgcatgctgggcatcgaggacctcctcgaccgcctccccgcccagctctccggcggcgaacgccagcgggtcgccatgggccgggccatctcccgccaccccacggccttcctgatggacgagccgctgtccaacctcgacgccaagctccgcaaccacctgcgcgcggagatcacccggctgacccgggagctgggcgtcaccacgatctacgtcacccacgaccagtccgaggccatgtcgctgggcgaccgtgtcgccgtcctgcgcggcggcgtcctccagcaggtggacaccccgcgcgccgtctacgccctgccccgcaacgtcttcgtcgccgccttcatcggcaccccccgcatcaacctgctgcggggcctcgtgcgcgccccgctggacggggcgatgaccatcagcctgggcaagcagttcctgcgcctgcccgaaccgctctccctggaccaccagttgctccgcgtccagcagggccgcgaggtcatcgtggggctgcgctcggaggccgtccggatcgcgaagccctcgtccgcccgtcccggcgaggtgctgctcaccgggctcgtggagcacgtcgagttccagggccacgaggtgctcgtgcacttcaacaccggctcacagccggccgtcgtgcccgacctggaggccccgcgccccgccgcccgcccggtcaggcgccgccgccgcgacggcacggtcctggagcggctgagggaacgcgcgggcgccctgcgcgccggtcccgtggtcgtcatggacgaaccgccggagcccggaccggcggtcgccgcccccgacggccgcctccccggcgacctgatcgtccggaccacccccgacatcgacctccgccacggcatgcaggtacccctcctcgtcgacctcgcccacctcttcgtcttcgaccagcacggcgaccggatctgccccgccccggcgcggctgccggacctggaggagtga

SEQ ID NO: 84552 - protein, 445 aa, Streptomyces coelicolor A3(2)
MTRAISLHDVSKTYARGVRVVDRLSLDIAPGEFLVLLGPSGCGKSTVLRMIAGLEEITEGELTLDGAYANDLLPAERRMAMVFQNFALYPNMTTRGNIGFPLRVEDPQTDHTPRVDATARMLGIEDLLDRLPAQLSGGERQRVAMGRAISRHPTAFLMDEPLSNLDAKLRNHLRAEITRLTRELGVTTIYVTHDQSEAMSLGDRVAVLRGGVLQQVDTPRAVYALPRNVFVAAFIGTPRINLLRGLVRAPLDGAMTISLGKQFLRLPEPLSLDHQLLRVQQGREVIVGLRSEAVRIAKPSSARPGEVLLTGLVEHVEFQGHEVLVHFNTGSQPAVVPDLEAPRPAARPVRRRRRDGTVLERLRERAGALRAGPVVVMDEPPEPGPAVAAPDGRLPGDLIVRTTPDIDLRHGMQVPLLVDLAHLFVFDQHGDRICPAPARLPDLEE

SEQ ID NO: 84553 - DNA, 771 bp, Streptomyces coelicolor A3(2)
  CDS (1)..(771): transl_table=11
gtgaccaccgcacccatcgccgaccggtccaccctcgtggccgcgcgcgccacggagctttccaagatctacggccagggcgagacccaggtggtcgccctggaccgggtctccatcgacttccggcaggccgagctcaccgcgatcatgggcccctccggctccggcaagtccacgctgatgcactgcgtcgcgggcctggacaccttctcgtccggctcggtgcgcatcggcgagaccgagctgggctcgctcaaggacaagcagctcaccaagctgcgccgggacaagatcggcttcatcttccaggcgttcaacctgctgccgacgctgacggcgctggagaacatcaccctcccgatggacatcgcgggccgcaagccggacaagcagtgggtggactccgtgatcgagatggtcgggctgtccggacgcctcgggcaccggcccgcccagctctccggcgggcagcagcagcgggtcgccgtggcgcgggcgctggcctcccggccggagatcatcttcggggacgagccgaccggaaacctcgactcccgttccggcgccgaggtgctgggcttcctgcgcaactcggtgcgggagctgggccagaccgtggtgatggtgacccacgacccggtggccgccgcctacgcggaccgggtggtcttcctcgcggacgggcgcatcgtcgacgaactgtacgggccgacggccgactcggtgctcgaccgtatgaagcggttcgacgccaagggccgcaccagctga

SEQ ID NO: 84554 - protein, 256 aa, Streptomyces coelicolor A3(2)
MTTAPIADRSTLVAARATELSKIYGQGETQVVALDRVSIDFRQAELTAIMGPSGSGKSTLMHCVAGLDTFSSGSVRIGETELGSLKDKQLTKLRRDKIGFIFQAFNLLPTLTALENITLPMDIAGRKPDKQWVDSVIEMVGLSGRLGHRPAQLSGGQQQRVAVARALASRPEIIFGDEPTGNLDSRSGAEVLGFLRNSVRELGQTVVMVTHDPVAAAYADRVVFLADGRIVDELYGPTADSVLDRMKRFDAKGRTS

SEQ ID NO: 84555 - DNA, 1065 bp, Streptomyces coelicolor A3(2)
  CDS (1)..(1065): transl_table=11
atgactcccctgtcctccactcccgcccccggcctgcgcctggagcagatcaccgtcacctatccggggcaccgcgagcccgtcctggacggcctcgacctcgatgtcgccgacggccgcctgctggccctgctcggcccctccggctgcggcaagaccaccaccgtgcaggtcgcctccggactcctcacccccggccggggcgccgtacacctccgtggcaccgaggtgacccgggttccgccggaacaccgcggtgccgcggtggtcttccagcagcccatgctgctgccgcaccgcacggcactggacaacgtggccttccccgcccgcatgcgcggccgctcccgccgcgacgcccgtaccagcgccctcgcacacctggagcgcgtcggcctcggcgcactcgcagcccgctacccccgccagctctccgggggccaggcccagcgcgtcgccctcgcccgggcactggccgccgaaccggccgtgctgctcctcgacgaaccgttcagcgcccttgacccgagcctgcggcacaccatgcgcgacctgctcaccacagtccagcgagagctggcagtgaccaccgttctggtcacccacgaccagacggaggccgcctcagtcgccgacaccatcgccctgctcgaccggggtggtctccttcagcaggcacagcccgccgacctctatgcccgcccggcctccctggccgtggcccacttcctcggctgccccaccgcgctccccggccacgtcaccccgcaaggacgtttcgcatgtcctctgggagaactggacctgcccgacaccgtcacccaccgcggccccggccacctggtgatccgccccgaggccgtccagctcggcaccggcccggacaccgtggccgccgtggtgcacagcgtgcgcccggaaggcgccttcaccgctctcgtcgccgacacggccgccggccccgtccacgtactgcttccgcccggcacaccacctgctccgtcggagcatgtccggctgcacctgcccgtcgcgcatcgctgggtggtcccccggctgggctga

SEQ ID NO: 84556 - protein, 354 aa, Streptomyces coelicolor A3(2)
MTPLSSTPAPGLRLEQITVTYPGHREPVLDGLDLDVADGRLLALLGPSGCGKTTTVQVASGLLTPGRGAVHLRGTEVTRVPPEHRGAAVVFQQPMLLPHRTALDNVAFPARMRGRSRRDARTSALAHLERVGLGALAARYPRQLSGGQAQRVALARALAAEPAVLLLDEPFSALDPSLRHTMRDLLTTVQRELAVTTVLVTHDQTEAASVADTIALLDRGGLLQQAQPADLYARPASLAVAHFLGCPTALPGHVTPQGRFACPLGELDLPDTVTHRGPGHLVIRPEAVQLGTGPDTVAAVVHSVRPEGAFTALVADTAAGPVHVLLPPGTPPAPSEHVRLHLPVAHRWVVPRLG

SEQ ID NO: 84557 - DNA, 684 bp, Streptomyces coelicolor A3(2)
  CDS (1)..(684): transl_table=11
atgtacgaactcagcggcgtcaccaagcactacacccgcggcaaaaccaccgtgcacgccctcgacggcgtcgacctgaccatcgccgacggcgaccggctggtcatccagggccccaccggcggcggcaagtccaccctgctccagatgctgggcgccctcgaccggcccagctcgggccggatcgtcctcgacggcaccgacctcgccacgctccccgaggccaggctgacccgggtgcgcagcgagagcatcggcttcgtcttccagtccttcaacctgatcccgaccctgaccgcccaggagaacgtcgagaccgccctggtcccgctcggcgtcaaggcgaaggagcggcgcgagcaggccgccgaggccctggcctccgtcggcctgggcgaacgcctcggccacctccccggcgagatgtccggcggccagcagcagcgcgtcgccatcgcccgcgccctggtgaagcagccgaaggtgctcctcgccgacgaacccaccggaaacctcgacgagtcgacccgcgacgagatcatggacgtgctcgaccgcatgtggaaggagctgggcctcaccttcgtcatggtcacccacgactcggcgatcgccaggaaggccccccgcgtggccaccatccgcaagggccgcatcaccgtcaaggagaacgcctcggcgtga

SEQ ID NO: 84558 - protein, 227 aa, Streptomyces coelicolor A3(2)
MYELSGVTKHYTRGKTTVHALDGVDLTIADGDRLVIQGPTGGGKSTLLQMLGALDRPSSGRIVLDGTDLATLPEARLTRVRSESIGFVFQSFNLIPTLTAQENVETALVPLGVKAKERREQAAEALASVGLGERLGHLPGEMSGGQQQRVAIARALVKQPKVLLADEPTGNLDESTRDEIMDVLDRMWKELGLTFVMVTHDSAIARKAPRVATIRKGRITVKENASA

SEQ ID NO: 84559 - DNA, 690 bp, Streptomyces coelicolor A3(2)
  CDS (1)..(690): transl_table=11
atgactccccccgcaggttccctgctctcggcggaccagctccgcaaggcctacggccccaccctcgccctcgacggcgccgagttctccatccaccccggcgaggtggtcgccgtcatgggcccctccggttccggcaagtcgacgctgctgcactgcctcgccggcatcgtgccgcccgactcggggacgatcacgtacaacgggcgcgagctgtcggcgatgtccgacgcccagcgcagtgcgctgcgccgctcggacttcgggttcgtgttccagttcggccagctcgtgccggagctgacctgtgtcgagaacgtcgccctgccgctgcgcctgaacggcacctcccgcaaggaggccgagcgggccgcgctgagctggatggagcggctggaggtcgacgacctcaggaagaagcggcccggcgaggtctcgggcggccaggggcagcgggtcgcggtggcgcgctcgctggtcaccaacccgcgcgtgctcttcgcggacgagccgaccggcgcgctggactccctcaacggggagcgcgtgatggagctgctcacggacgcggcccgctccaccaacgccgcggtcgtgctggtcacgcacgaggcacgggtggcggcctactccgaccgcgagatcgtcgtacgcgacggcaagtcccgggacatggagcgggccgtatga

SEQ ID NO: 84560 - protein, 229 aa, Streptomyces coelicolor A3(2)
MTPPAGSLLSADQLRKAYGPTLALDGAEFSIHPGEVVAVMGPSGSGKSTLLHCLAGIVPPDSGTITYNGRELSAMSDAQRSALRRSDFGFVFQFGQLVPELTCVENVALPLRLNGTSRKEAERAALSWMERLEVDDLRKKRPGEVSGGQGQRVAVARSLVTNPRVLFADEPTGALDSLNGERVMELLTDAARSTNAAVVLVTHEARVAAYSDREIVVRDGKSRDMERAV

SEQ ID NO: 84561 - DNA, 1086 bp, Streptomyces coelicolor A3(2)
  CDS (1)..(1086): transl_table=11
atgcctgagctggtcgtcgagaacatcaagaagtccttccacgggaccgcggtcctggaggacgtcaacttcaccgtcgcggacggggagttcttcactctgctcggcccgtcgggctgcggcaagtccaccaccttgtcgtgcgtcgcgggtctggagacccccgactcgggcaccatccgtgtcggcgaccaggtcttcttcgacggcacccggcgcagcacggtgccccccgaaggccgcaatctcggcctggtcttccagtcgtacgcgctctggccacacatgaccgtcgccgacaacctcgcactgccgctgaagctccgcaaggtcaccaagggcgagcaacggcgcctcatcgacgacgtcctcaccaaggtcgacatggctcacctgcgcgaccgctacccccaccagctctccggcggacagcagcagcgcgtcgccctcgcccgaggcatcgtctactcccccggcgtgctgctcctggacgaaccgctctccaacctggacgcgaagatgcgcgaccaggcccgcgtctggctcaaggacctccagcgggaggtcggcatcaccaccgtgtacgtcacccacgaccaggtcgaggccatgtccctgtccgaccgcatcgccgtgttcatgcacggacacctccagcaggtgggcacaccgaccgagatctacgagactcccgccactcccgaggtcgccggcttcatcggccgctgcaacctcctggaggggcgcgtcggcgccaccgagggcggagccgtacaggtcgaactgggtgagaccggtcagcgcttgagggtggccggcgcctgctccgcggggtcgtccgccaccgtgggcctgcgctcggaacgcatcacgctcaccgaccgcgccgacgccccgcacgacggtgccgtcaacgtgctccgggcgaggatcgagcagtgctcgtacaccggagcgcgattcgagtacgagctcagcatcggcgacgtgcgcgtccatgccgagagccccgtccggcacacggacggcgagatcaacctgatcatccgcccggacgactgcctgctgttccccgcacaggtctga

SEQ ID NO: 84562 - protein, 361 aa, Streptomyces coelicolor A3(2)
MPELVVENIKKSFHGTAVLEDVNFTVADGEFFTLLGPSGCGKSTTLSCVAGLETPDSGTIRVGDQVFFDGTRRSTVPPEGRNLGLVFQSYALWPHMTVADNLALPLKLRKVTKGEQRRLIDDVLTKVDMAHLRDRYPHQLSGGQQQRVALARGIVYSPGVLLLDEPLSNLDAKMRDQARVWLKDLQREVGITTVYVTHDQVEAMSLSDRIAVFMHGHLQQVGTPTEIYETPATPEVAGFIGRCNLLEGRVGATEGGAVQVELGETGQRLRVAGACSAGSSATVGLRSERITLTDRADAPHDGAVNVLRARIEQCSYTGARFEYELSIGDVRVHAESPVRHTDGEINLIIRPDDCLLFPAQV

SEQ ID NO: 84563 - DNA, 1122 bp, Thermosynechococcus elongatus BP-1
  CDS (1)..(1122): transl_table=11
gtgtttctggccaaagggctgcattgcagacagttcactttctgggtgccgatgacgacactttccctgatgccaacgctgaaaacggctgtccaggttgcccatttacacaagtcctttgggcgttttctggcaattcgcgatctcagcctctgggtccaggagggggaaattctgggtctattggggccgtcgggttgcggcaagacaacgttactgcgcctaattgccggtctggacacgccagatgctggggaaattagggtgggcgatcgctgtgtcgcaggggcaaatgtgtttataccgccagaacaacggtccttgggcatggtttttcaggactttgccctgtttccccatctaacggtggctgagaatattgcctttggtttgcaacaacaacgccttagtaagccgcaaattcaggagcgagtagcagcggttttggccctggtgcgcctagagggaatgcaaaagcgctatccccatgaactttctgggggacagcagcagcgagtggccttggcacgggcgatcgccccccaaccagccgtgatcctcctcgatgaacccctgagtaatcttgatgcccaggtgcgactgcaattgcggcaggaattgcgccagatccttaagggaacggggacaacggccatttttgttacccacgatcaggaagaggctctgagtctgtcggatcgcttggcggtgatgcgccagggcaaaattgagcaggtgggtaccccagaggagatctatcgctgtcctgcctcacgatttgtggctgggtttattacccaagccaactttttgcctgcctgtgccgaaggggctcaggtgcgcaccgatgttggcacgtttccccttttggaagctttggcgaagggggaaggagagctgatgattcgcgaagaagatctccagttgcagcccgatcctgaagccagtagttgctttgtgattcgcgatcgccagtttctcggtcgcgagtatcgctactgtattcaactgccttccggccaagaactccatgctcgccagcccctcgctgtggatattcccattggtactgctgtgaaagtggcggctgaggcggtgcgctttttcccgaaggaaaactaa

SEQ ID NO: 84564 - protein, 373 aa, Thermosynechococcus elongatus BP-1
MFLAKGLHCRQFTFWVPMTTLSLMPTLKTAVQVAHLHKSFGRFLAIRDLSLWVQEGEILGLLGPSGCGKTTLLRLIAGLDTPDAGEIRVGDRCVAGANVFIPPEQRSLGMVFQDFALFPHLTVAENIAFGLQQQRLSKPQIQERVAAVLALVRLEGMQKRYPHELSGGQQQRVALARAIAPQPAVILLDEPLSNLDAQVRLQLRQELRQILKGTGTTAIFVTHDQEEALSLSDRLAVMRQGKIEQVGTPEEIYRCPASRFVAGFITQANFLPACAEGAQVRTDVGTFPLLEALAKGEGELMIREEDLQLQPDPEASSCFVIRDRQFLGREYRYCIQLPSGQELHARQPLAVDIPIGTAVKVAAEAVRFFPKEN

SEQ ID NO: 84565 - DNA, 1125 bp, Pseudomonas putida KT2440
  CDS (1)..(1125): transl_table=11
atgagcgaggcgaagtcgaacgctgcaaccggcgaaacgctggtcagcttccgtggtgtgcagaagagctacgacggcgagtcgctgatcgtcaaagacctcaacctggatatccgcaagggcgagtttctcaccctgcttggcccgtccggctcgggcaagactaccagcctgatgatgctggcgggcttcgagacccccaccgccggtgaaatccagcttggcgggcgctcgatcaacaacgtgccgccgcacaaacgtgatatcggcatggtgttccagaactacgcgctctttccgcacatgaccgtggccgagaacctggcctttccgctgaccgtgcgcaacctgagcaagaccgacatcagcgagcgggtcaaacgcgtgctgaacatggtgcagctcgacgctttcgccaaacgctaccccggccagctgtctggcggccagcagcagcgtgtggcgctggcccgggcattggtgttcgagccacaactggtactgatggacgagccacttggcgcgctggacaagcagctgcgcgaacacatgcagatggagatcaagcacattcaccagcgcctgggtgtgaccgtggtgtacgtgacccacgaccagggcgaagcgctgaccatgtccgaccgcgtggcggtgttccaccagggcgaaatccagcagatcgccgacccgcgcacgctgtacgaagagccctgcaacaccttcgtcgccaacttcatcggcgagaacaaccgcatcagcggcaccctgctggccagcgatggcaaacgttgccaggtgcagttgcctcgcggcgagcgggtcgaggcgctggcggtgaatgtcggccaggccggcgagccggtgaccctgtcgatacgcccggagcgcgtgcgcctgaacggccacagtgaaagctgcgtcaaccggttctctggccgggtggccgaattcatttacctgggcgaccacgtgcgggtgcgtctggaggtttgcggcaaaggcgacttcttcgtgaagcagccgattgccgagctcgacccggcgttggccgtgggcgatgtagtaccgctgggctgggaggtggagcacgcccgcgcgctcgatccgattgccgaagcccattga

SEQ ID NO: 84566 - protein, 374 aa, Pseudomonas putida KT2440
MSEAKSNAATGETLVSFRGVQKSYDGESLIVKDLNLDIRKGEFLTLLGPSGSGKTTSLMMLAGFETPTAGEIQLGGRSINNVPPHKRDIGMVFQNYALFPHMTVAENLAFPLTVRNLSKTDISERVKRVLNMVQLDAFAKRYPGQLSGGQQQRVALARALVFEPQLVLMDEPLGALDKQLREHMQMEIKHIHQRLGVTVVYVTHDQGEALTMSDRVAVFHQGEIQQIADPRTLYEEPCNTFVANFIGENNRISGTLLASDGKRCQVQLPRGERVEALAVNVGQAGEPVTLSIRPERVRLNGHSESCVNRFSGRVAEFIYLGDHVRVRLEVCGKGDFFVKQPIAELDPALAVGDVVPLGWEVEHARALDPIAEAH

SEQ ID NO: 84567 - DNA, 1110 bp, Pseudomonas putida KT2440
  CDS (1)..(1110): transl_table=11
atgagtcaacccctactgctcaacctgcgcaacctcgcctgcggctatggcgaccagcgcatcgtccagaacctcaacctgcacctgaacgcaggcgacatcggttgcctgctgggttcatccggttgtggcaagaccaccaccctgcgcgccatcgccggtttcgagccggtgcacgaaggtgaaatccacctggccggtgaggtcatttcccgggctggcttcaccctggccccggaaaagcgccgcatcggcatggtatttcaggactacgcactgttcccgcacctgaccgtggcgcagaacattgcctttggtatcgccaaacacccacgccaggcggccgtcatcgaagagatgctggagctggtcaaactcggcgggctgggcgggcgttacccgcatgagctgtccggcggccagcagcaacgtgtcgccctggcccgggcgctggcgcccgagccgcaactgctgctgcttgacgagccattctccaacctcgacgtggagctgcgccggcgcctgagccatgaggttcgcgacattctcaaaagccgcggtaccagcgccattctggtcacccatgaccaggaagaagcctttgccgtcagcgaccaggtcggcgtcttcaaggaaggtcgcctggaacagtgggacacgccctacaacctttaccacgaaccgcagacgccattcgtggcgagtttcatcggccaggggtacttcatccgtgggcaaatgagcagccacgaggcggtcaataccgaagtgggtgagctgcgcggtaaccgcgcctacatcatggcgccgggcagctcggtggatgtactgctgcgcccggatgatatcgtgcatgcacctggcagcgcgctcatggcgaacatcgtgggcaagagtttccttggggcatccacgctctaccgcctgcagttgcccaccggtagccagctcgaagcgatcttccctagccataacgaccacgagatcggtgagaatgtggagattgcagtgaaggccgatcacctcgtgctattcccggtaccgggtagcgttgcggcacagttgccacgccaggagaatggcgtgcgtcgatacagttcggcgacttga

SEQ ID NO: 84568 - protein, 369 aa, Pseudomonas putida KT2440
MSQPLLLNLRNLACGYGDQRIVQNLNLHLNAGDIGCLLGSSGCGKTTTLRAIAGFEPVHEGEIHLAGEVISRAGFTLAPEKRRIGMVFQDYALFPHLTVAQNIAFGIAKHPRQAAVIEEMLELVKLGGLGGRYPHELSGGQQQRVALARALAPEPQLLLLDEPFSNLDVELRRRLSHEVRDILKSRGTSAILVTHDQEEAFAVSDQVGVFKEGRLEQWDTPYNLYHEPQTPFVASFIGQGYFIRGQMSSHEAVNTEVGELRGNRAYIMAPGSSVDVLLRPDDIVHAPGSALMANIVGKSFLGASTLYRLQLPTGSQLEAIFPSHNDHEIGENVEIAVKADHLVLFPVPGSVAAQLPRQENGVRRYSSAT

SEQ ID NO: 84569 - DNA, 1032 bp, Pseudomonas putida KT2440
  CDS (1)..(1032): transl_table=11
atgcccctagccgtccagttcacccaggtttcccgcaccttcggcgaggtcaaggccgtcgaccaggtcagcatcgacatcatcgatggcgagttcttttccatgctcggcccttccggctcgggcaagaccacctgcctgcgcctgatcgcaggcttcgagcaaccctccagcggttcgatccgcatccaaggggtcgaggccgctggcctgccgccctaccaacgtgacgtcaacactgtgttccaggactatgcgctgttcccgcacatgaacgtgctggagaacatcgcctatggcctgaaggtaaaaggcgtgggcaaggccgaacgccacagccgcgccgaagaagccctggccatggtggccctggccggctatggcgcgcgcaagccggcacagctgtctggcggccagcgtcagcgcgtggccctggcccgggcgttggtcaaccggccgcgggtgctgctgctggatgagccactgggcgcgctggacctgaaattgcgcgaacagatgcaaggcgagctgaaaaagctgcaacgccaactgggcatcaccttcatcttcgtcacccacgaccagaccgaggcgctgtcgatgtccgaccgggtcgcggtgttcaaccgcggccgtatcgaacaggtcgacaccccgcgcaacctgtacatgaagcccagcacaaccttcgtcgctgaatttgtcggcacgtccaacgtggtgcggggcgagctggccatgcagatcaacggcagcccggcgcccttttccatccgtcccgagctcattcgcctgggcgacccggtagtgaccagccatgaggtacaggtcagcggcgtgctgcacgatgtccagtaccaaggcagcgccacccgctacgaactgcagctggacaacggtcaactgctggcagtaagccaggccaatgaccgctggcagaagcagatgcaggcctggcagctcgggcaacgcctgcaggcgcactggccccgcgaggccatgacggtgctgcaggaaaccgagggccgctga

SEQ ID NO: 84570 - protein, 343 aa, Pseudomonas putida KT2440
MPLAVQFTQVSRTFGEVKAVDQVSIDIIDGEFFSMLGPSGSGKTTCLRLIAGFEQPSSGSIRIQGVEAAGLPPYQRDVNTVFQDYALFPHMNVLENIAYGLKVKGVGKAERHSRAEEALAMVALAGYGARKPAQLSGGQRQRVALARALVNRPRVLLLDEPLGALDLKLREQMQGELKKLQRQLGITFIFVTHDQTEALSMSDRVAVFNRGRIEQVDTPRNLYMKPSTTFVAEFVGTSNVVRGELAMQINGSPAPFSIRPELIRLGDPVVTSHEVQVSGVLHDVQYQGSATRYELQLDNGQLLAVSQANDRWQKQMQAWQLGQRLQAHWPREAMTVLQETEGR

SEQ ID NO: 84571 - DNA, 990 bp, Pseudomonas putida KT2440
  CDS (1)..(990): transl_table=11
atgagcttcgtcagcgtacagaaactgcagaaaagctacgccggcagcccggtgttcgagcgcatcgactgccacatcgaacgcggcgaattcgtcaccctgctcggcccgtccggctgcggcaagtccaccctgctgcgctgcattgccgggctgacctcggtggacagcgggcagatactgctcgacggccacgacatcgtgccgctaagcccgcaaaagcgtggcatcggcatggtgttccagagctacgcgctgttccctaacatgaccgtggagcagaatgtcgccttcggcctgcgcatgcagaaggtcaaggccgacgaaagccagctgcgggtacgcgaggtactggagctggtggagctgggcaagttcgccgggcgctacccgcaccagctttccggcggccagtgccagcgcgtggccctggcacgctcactggtcacccgcccgcgcctgctgctgctcgacgaaccgttgtcggcgctggatgcgcgtatccgcaagcacctgcgcgagcagattcgtgccatccagcgcgaactggggctgaccaccatcttcgtcactcacgatcaggaggaagcgctgaccatgtccgaccgcatcttcctgatgaaccaggggcgcatcgtccagagcggcgatgccgaaaccctctacaccgcccccgtggacctgtttgccgccggtttcatcggcaactacaacctgctcgacgccgacagcgccagccgcctgctgcagcgcccggtggccagccgcctggcgatccgcccggagtcgatcacccttggcgagcacggcgagctggacgccgaggtgcgcagccacagcctgctgggcaacgtgatccgctaccgggtacgggtacgcgaagtggagctggtggtcgatgtgctcaaccgctcgccggccgacttgcacgcggacggaaaacgggtaagcgtgtcgatcgaccccactgcgctgcgggaagtggcttaa

SEQ ID NO: 84572 - protein, 329 aa, Pseudomonas putida KT2440
MSFVSVQKLQKSYAGSPVFERIDCHIERGEFVTLLGPSGCGKSTLLRCIAGLTSVDSGQILLDGHDIVPLSPQKRGIGMVFQSYALFPNMTVEQNVAFGLRMQKVKADESQLRVREVLELVELGKFAGRYPHQLSGGQCQRVALARSLVTRPRLLLLDEPLSALDARIRKHLREQIRAIQRELGLTTIFVTHDQEEALTMSDRIFLMNQGRIVQSGDAETLYTAPVDLFAAGFIGNYNLLDADSASRLLQRPVASRLAIRPESITLGEHGELDAEVRSHSLLGNVIRYRVRVREVELVVDVLNRSPADLHADGKRVSVSIDPTALREVA

SEQ ID NO: 84573 - DNA, 1059 bp, Pseudomonas putida KT2440
  CDS (1)..(1059): transl_table=11
atgaaccacaccacccccggcgcacagattaaagtgcgcaacatccacaagcgcttcggtgcctttacggcgctcaacgatgtctctctggacatcgccgcgggcgaactggtgtgcctgctcggcccatccggctgtggcaagaccacgctgctgcgttgcattgccggcctggagcgccaggatcgcggtacgctgtacatcggcgaacgcgatatctccgatctgtccccccaggcgcgggactacggcatcctgttccagtcctacgcgctgtttcccaaccttaccgtcgaagccaatatcgcctatggcctgacgggcagtggtcgcgagcaggcccgccagcgggttgccgaaatgctcgaactggtaggcctgtctggcagcgagaagaagtacccaggccagctctccggtggccagcagcaacgtgtggccctggcccgcgcgctggcaccgtcgccatcgctgctgctgctcgatgagccgatgtcggcgctggacgcccgggtgcgcgagcacttgtgcaccgaactgcgtcagctgcagcgccaactgggcatcaccacgttgatggttacccacaaccaggacgaggccatgttgatggccgaccgcatcgcggtgatgaacaacggccaggtcgagcagtacgccaccccgcaggaaatctatgaccacccggccacgccgttcgtggccgagttcgtcggccagggcaactggctgccgttccagcgcagcagcgacagccatgccctggtcggcgacatgaacatgcgcctggcgccgggttcagcccaggccagcagtggccggctgttctgccgcccggaagcgatcacggtcaacccggtggtgcacgaagaaaatctgttcccggccatggtccgcgaaatcaccttcctcggtaaccgctgccgcatgagctttgaactcaaggccctgccaggccatgccctgctggccgagctggcccctgaggccatgccgcgcctgggctcgcaggacatctgggtggcgttgccgccgcagagcctgcaggtgtttgcctga

SEQ ID NO: 84574 - protein, 352 aa, Pseudomonas putida KT2440
MNHTTPGAQIKVRNIHKRFGAFTALNDVSLDIAAGELVCLLGPSGCGKTTLLRCIAGLERQDRGTLYIGERDISDLSPQARDYGILFQSYALFPNLTVEANIAYGLTGSGREQARQRVAEMLELVGLSGSEKKYPGQLSGGQQQRVALARALAPSPSLLLLDEPMSALDARVREHLCTELRQLQRQLGITTLMVTHNQDEAMLMADRIAVMNNGQVEQYATPQEIYDHPATPFVAEFVGQGNWLPFQRSSDSHALVGDMNMRLAPGSAQASSGRLFCRPEAITVNPVVHEENLFPAMVREITFLGNRCRMSFELKALPGHALLAELAPEAMPRLGSQDIWVALPPQSLQVFA

SEQ ID NO: 84575 - DNA, 1095 bp, Ruegeria sp. PR1b
  CDS (1)..(1095): transl_table=11
atgatcgacatttccgatgtcacccgaattttcgcaggcaccgtgcttgcgcttgactccgtctcgctgagcatcgaagcgggcgagttcgtcaccctgctcgggccgtccggctgtggcaagacgactttgctgcgcttgctggccgggttcgacacacccacaaaaggcaagatcctgctgaacgatgctgatgtaaccgacgtgccgccgtacgatcgcgatgtgaacatggtgtttcaggattatgccttgttcccccatctcagcgttggccgcaacgtcgcctttggactggaacggctgaaatggcccaaggccaaggtagccaccgctgtgcgcgacgcgctggatatggtcgaactcgcggacaagatcgaccgcatgccgcatgagctttccggagggcagcgtcagcgtgtagcactagcccgggcactggcgcgtggcccgaaggtgttactgttggatgaaccgctttcggcgctggacgccggtctgcgcgaggcgatgcaggtcgaactcaagcggctgcacaacaagctgggtatcaccttcgtcatggtcacccacgaccagaccgaagcactggccatgagcgaccgtattgtccttatgctggacgggcgagtggcacaggtcggcacgccggacgagttgtacaacgcccccgcctcgccctacgtggcgtccttcatcggcacgacgaacctgtttgatggccaagtaatcgactcttctgccgccgaattgctggtcgaaaccggggccggcagattgcactgcgcgccccgcaccgacattgcgcgcggcgcatcggtccgggtcggcatgcgccccgagcatctgcgccttgccgcagactccgaagcgagcgccgtcaacaccctgccctgccgaatcgaggacgccctgtttcacggcagtctcacccggttccgctgtgccactggcaccacgaccgaacagatctattgggactggcagaaatcggcccatcccgacgactccattcgcccgaccgaaggcagcaccgtgcatctttacgcgcctccggcggatatgtttgtctttccgcaggagggggcgcgatga

SEQ ID NO: 84576 - protein, 364 aa, Ruegeria sp. PR1b
MIDISDVTRIFAGTVLALDSVSLSIEAGEFVTLLGPSGCGKTTLLRLLAGFDTPTKGKILLNDADVTDVPPYDRDVNMVFQDYALFPHLSVGRNVAFGLERLKWPKAKVATAVRDALDMVELADKIDRMPHELSGGQRQRVALARALARGPKVLLLDEPLSALDAGLREAMQVELKRLHNKLGITFVMVTHDQTEALAMSDRIVLMLDGRVAQVGTPDELYNAPASPYVASFIGTTNLFDGQVIDSSAAELLVETGAGRLHCAPRTDIARGASVRVGMRPEHLRLAADSEASAVNTLPCRIEDALFHGSLTRFRCATGTTTEQIYWDWQKSAHPDDSIRPTEGSTVHLYAPPADMFVFPQEGAR

SEQ ID NO: 84577 - DNA, 993 bp, Bacillus cereus ATCC 14579
  CDS (1)..(993): transl_table=11
atggatattaaaattagtggattagaaaagacatttggaaaaacacaggcgttaaagccgttgcagattgtaatgaaacaaggggaatttactacacttttagggccttcggggtgtgggaaaacgactttacttagaatgatagcagggcttgaggaaccggataagggagaaatatattttggagaccagtgcatgtattctgctgcaaaaaagataaagacatctcctcatgaacggaatatcggtatggtatttcaagattttgctttatggccgcacatgactgtttttgaaaatgttgcatttggtttaagggctacaaagcaaacgaatcatttacgagaaaaagtagaagatgcgataaagcgagttcgcctgcaaggtatggagaaacggtatccacacgaactttctggtggacagcaacaacgtgtcgcattcgctagagcaattgtaacaaaacctcattttattttgtttgatgaaccgctaagtgcactcgatgcaattttgcgagaagaaatgagaatagagcttatggatatcgttcattccattggtttaactgcactgtatgtcactcacgaccaaacagaagcaatgtcaatgtcagatcaaattattgtcatgaaacaaggagaagtattacaaaaaggaacaccggaagatatttatgtgaaaccgtctcatgaatttgttgccaaatttgttggtaaggcgaattggcttgtagagggtgaaaaaatgattcgtccagagcatgtgagttggacaaaaaatgatgtgtgcgaaatgtatacaggtgaaattcagcacgttacatatgtaggagaacgttatgaagtgaaagtaaatatggggactttaggcatctggacagcctatcacaatagtaagctaagcatcggtaaaccagtatcgttatatgtgccaaaaaaatgtattcatcatatagggggagaatcgtatgaagaaattcagttcgcttaa

SEQ ID NO: 84578 - protein, 330 aa, Bacillus cereus ATCC 14579
MDIKISGLEKTFGKTQALKPLQIVMKQGEFTTLLGPSGCGKTTLLRMIAGLEEPDKGEIYFGDQCMYSAAKKIKTSPHERNIGMVFQDFALWPHMTVFENVAFGLRATKQTNHLREKVEDAIKRVRLQGMEKRYPHELSGGQQQRVAFARAIVTKPHFILFDEPLSALDAILREEMRIELMDIVHSIGLTALYVTHDQTEAMSMSDQIIVMKQGEVLQKGTPEDIYVKPSHEFVAKFVGKANWLVEGEKMIRPEHVSWTKNDVCEMYTGEIQHVTYVGERYEVKVNMGTLGIWTAYHNSKLSIGKPVSLYVPKKCIHHIGGESYEEIQFA

SEQ ID NO: 84579 - DNA, 957 bp, Bacillus anthracis str. Ames
  CDS (1)..(957): transl_table=11
atggatattcaaattagtggattagaaaagaattttggaaaaacgcaggcgttaaagccattacaaattgttatgaaacaaggtgaatttaccacacttttaggaccttcgggatgtgggaaaacgactttacttagaatgattgcaggactggaagaaccagataaaggtgaaatatatttcggggatacgtgcatgtattcttctactaaaaaaataaaaacatctcctcatgaacgtaatataggtatggtatttcaagattttgctttatggccacacatgactgtatttgaaaatgttgcatttggtttaagggctacaaagcaaacgaatcaattacgggaaaaagtagaagaggcaataaagagagtgcgcttacaagggatggagaaacgttatccgcatgaactctctggcggacagcagcaacgtgtcgcatttgcgagagcgattgtaacaaagccgcatttcattttgtttgatgaaccgctcagtgcactcgatgcaattttgcgagaagaaatgcgattagagcttatggatatcgttcattccattggtttaacggcattgtatgtaacccacgatcaaacagaagctatgtcaatgtcagaccaaatcattgtcatgaaacaaggagaagtattacaaaaaggaacaccagaagacatttatgtgaagccatctcatgaatttgttgcaaaatttgttggtaaggcaaattggcttgtagaggggaaacaaatggttcgtccagagcatgtaagctggacgaaaaatgaagtgtgcgaaatatatacaggtgaaattcagcacgttacatatgtaggggaacgttatgaagtgaaagtaaacatggggacactcggaatatggacagcttatcacaatagtaagctaagcattgggaaaccagtatcgttatatgtaccaaaaaatgtattcatcatatag

SEQ ID NO: 84580 - protein, 318 aa, Bacillus anthracis str. Ames
MDIQISGLEKNFGKTQALKPLQIVMKQGEFTTLLGPSGCGKTTLLRMIAGLEEPDKGEIYFGDTCMYSSTKKIKTSPHERNIGMVFQDFALWPHMTVFENVAFGLRATKQTNQLREKVEEAIKRVRLQGMEKRYPHELSGGQQQRVAFARAIVTKPHFILFDEPLSALDAILREEMRLELMDIVHSIGLTALYVTHDQTEAMSMSDQIIVMKQGEVLQKGTPEDIYVKPSHEFVAKFVGKANWLVEGKQMVRPEHVSWTKNEVCEIYTGEIQHVTYVGERYEVKVNMGTLGIWTAYHNSKLSIGKPVSLYVPKNVFII

SEQ ID NO: 84581 - DNA, 1077 bp, Bordetella pertussis Tohama I
  CDS (1)..(1077): transl_table=11
atgtcccggggcagcgacgcattcctgtcgatacgcaatctggtcaagcactatggcgcccatcgggcgctggccgacgtgtcgctggacatcggggcgggcgagctggtgtgcctgctcggcccctcgggctgcggcaagaccaccctgctgcgcgccatcgccggcctggagcgccaggacggcggcgccatcgtgctgggcggccgcgatatctcgaacgagccgccgcaggcgcgcgactacggcatcctgttccagtcgtatgcgctgtttcccaacctgacggtggcgcagaacgtggcctacgggctgagcggccggcgcggcgaccgcgagcgcgtggccgcccgcgtcgatgaaatgctggccctggtcgggctgagcggcgcggcccgcaagtatccggggcagatttccggcggccagcagcagcgcgtggcgctggcgcgcgccctggcgccggcgccgtcgctgctgctgctcgacgagcccatgtcggcgctggatgcgcgcgtgcgcgaccgcctgcgcggcgaactgcgcgccttgcagcggcgcctttccatcaccacgctgatggtgacccacgaccaggaagaggccatggtcatggccgaccggatcgcggtgatgaacggcggcgtcatcgagcagtacggcacgccgcgcgaactctatcgcgatccccgttcggcattcatcgccgacttcgtgggcgaggccaactggctgcggtaccagcgcatcgacgcccaccgcgcgcgcgtcggccagctcgaactggacgtcgagcagccgctggaggccgacagcggccgcctgttcgtgcggccggaggcggtgcggctgagcgcatcgggtacgccggcctcggccaacaccgtgctggccgatgtgctcgatggcgttttcctggggcgcggctatcgcatctcgctgcggctggaaggaataccgggcgccaccgtgcagtccgtggtttccgctgaaaccggtgacgccctgctgggcgcccatgctgccggccgttgctgggtggagctgccgcgccatgcgctaagtgcctacgcttga

SEQ ID NO: 84582 - protein, 358 aa, Bordetella pertussis Tohama I
MSRGSDAFLSIRNLVKHYGAHRALADVSLDIGAGELVCLLGPSGCGKTTLLRAIAGLERQDGGAIVLGGRDISNEPPQARDYGILFQSYALFPNLTVAQNVAYGLSGRRGDRERVAARVDEMLALVGLSGAARKYPGQISGGQQQRVALARALAPAPSLLLLDEPMSALDARVRDRLRGELRALQRRLSITTLMVTHDQEEAMVMADRIAVMNGGVIEQYGTPRELYRDPRSAFIADFVGEANWLRYQRIDAHRARVGQLELDVEQPLEADSGRLFVRPEAVRLSASGTPASANTVLADVLDGVFLGRGYRISLRLEGIPGATVQSVVSAETGDALLGAHAAGRCWVELPRHALSAYA

SEQ ID NO: 84583 - DNA, 1065 bp, Bordetella pertussis Tohama I
  CDS (1)..(1065): transl_table=11
gtgaaggcaattcgcatccaaggtcttaccaagcactatggcgcacaccaggttctgcgcggcatcgatctggagctggcccaaggcgagctgctggccttgctcggcccctcgggctgcggcaagtcgaccaccctgcaaatgcttgcaggcttcgaccagccgaccgacggccagatatggatcggcgatcgccaggtttcgggcgcgggcgtcatggtgccgcccgagcggcgcaatatctcgctggtgttccagaactacgccgtatggccgcacatgacggtcttcgagaacgttgcctatggcctgcaggtacgcaaggtggctcgcaccgagctcgcgcagcgggtcaagcgcgcgctcgacacggtccgcctcacggcgctcgcgcaacgctatccgtcggagctctccggcggacagcagcagcgggttgcgctggcgcgggcgctggtggtcgagcccgacatcctcttgctggacgaacccttgtccaatctcgatgcgcatctgcgcgaggagatgcgctacgagatccgccaggtgcacgatcttctgggcctgaccacggtctatgtcacgcacgaccagggcaaagcgctggtcaccgccgacaagatcgccgtcatgcagtccgggcaggtgcagcagttcgacagccccgtcaatgtgttctcgcggccggccaacacgtttgtcgcctcgttcatcggcaccaacaacgagctgcatggccagcttgccgaaccgggggccttgcgggtcggggacagggttctgcatggcgacgaccgcagtcaggccggtgccggcggcgcggcttgcctgtgcattcggccttcggccgtcaaactgggcgccgcgcccggcgccaatacgctgagcggcaccgtgacgcgggtcgcgtacctgggcgagtaccgtgacgtccaggtcgagctggcggcggggcaattcgtgcgcgcctacgtcgacccgtcctcgacgctggagccgggccagcgcgtcgaggttcatctgcccatcgagcattgccagatcctgagcgtcaccacttcctag

SEQ ID NO: 84584 - protein, 354 aa, Bordetella pertussis Tohama I
MKAIRIQGLTKHYGAHQVLRGIDLELAQGELLALLGPSGCGKSTTLQMLAGFDQPTDGQIWIGDRQVSGAGVMVPPERRNISLVFQNYAVWPHMTVFENVAYGLQVRKVARTELAQRVKRALDTVRLTALAQRYPSELSGGQQQRVALARALVVEPDILLLDEPLSNLDAHLREEMRYEIRQVHDLLGLTTVYVTHDQGKALVTADKIAVMQSGQVQQFDSPVNVFSRPANTFVASFIGTNNELHGQLAEPGALRVGDRVLHGDDRSQAGAGGAACLCIRPSAVKLGAAPGANTLSGTVTRVAYLGEYRDVQVELAAGQFVRAYVDPSSTLEPGQRVEVHLPIEHCQILSVTTS

SEQ ID NO: 84585 - DNA, 1065 bp, Bordetella parapertussis 12822
  CDS (1)..(1065): transl_table=11
gtgaaggcaattcgcatccaaggtcttaccaagcactatggcgcacaccaggttctgcgcggcatcgatctggagctggcccaaggcgagctgctggccttgctcggcccctcgggctgcggcaagtcgaccaccctgcaaatgcttgcaggcttcgaccagccgaccgacggccagatatggatcggcgatcgccaggtttcgggcgcgggcgtcatggtgccgcccgagcggcgcaatatctcgctggtgttccagaactacgccgtatggccgcacatgacggtcttcgagaacgtcgcctatggcctgcaggtacgcaaggtggcccgcacggagctcgcgcagcgggtcaagcgcgcgctcgacacggtccgcctcacggcgctcgcgcaacgctatccgtcggagctctccggcggacagcagcagcgggttgcgctggcgcgggcgctggtggtcgagcccgacatcctcctgctggacgaacccttgtccaatctcgatgcgcatctgcgcgaggagatgcgctacgagatccgccaggtgcacgatcttctgggcctgaccacggtctatgtcacgcacgaccagggcgaagcgctggtcaccgccgacaagatcgccgtcatgcagtccgggcaggtgcagcagttcgacagccccgtcaatgtgttctcgcggccggccaacacgtttgtcgcctcgttcatcggcaccaacaacgagctgcatggccagcttgccgaaccgggggccttgcgggtcggggacagggttctgcatggcgacgaccgcaggcaggccggtgccggcggcgcggcctgcctgtgcattcggccttcggccgtcaagctgggcgccgcgcccggcgccaatacgctgagcggcaccgtgacacgggtcgcgtacctgggcgagtaccgtgacgtccaggtcgagctggcggcggggcaattcgtgcgcgcctacgtcgacccgtcctcgacgctggagccgggccagcgtgtcgaggttcatctgcccatcgagcattgccagatcctgagcgtcaccacttcctag

SEQ ID NO: 84586 - protein, 354 aa, Bordetella parapertussis 12822
MKAIRIQGLTKHYGAHQVLRGIDLELAQGELLALLGPSGCGKSTTLQMLAGFDQPTDGQIWIGDRQVSGAGVMVPPERRNISLVFQNYAVWPHMTVFENVAYGLQVRKVARTELAQRVKRALDTVRLTALAQRYPSELSGGQQQRVALARALVVEPDILLLDEPLSNLDAHLREEMRYEIRQVHDLLGLTTVYVTHDQGEALVTADKIAVMQSGQVQQFDSPVNVFSRPANTFVASFIGTNNELHGQLAEPGALRVGDRVLHGDDRRQAGAGGAACLCIRPSAVKLGAAPGANTLSGTVTRVAYLGEYRDVQVELAAGQFVRAYVDPSSTLEPGQRVEVHLPIEHCQILSVTTS

SEQ ID NO: 84587 - DNA, 1065 bp, Bordetella bronchiseptica RB50
  CDS (1)..(1065): transl_table=11
gtgaaggcaattcgcatccaaggtcttaccaagcactatggcgcacaccaggttctgcgcggcatcgatctggagctggcccaaggcgagctgctggccttgctcggcccctcgggctgcggcaagtcgaccaccctgcaaatgcttgcaggcttcgaccagccgaccgacggccagatatggatcggcgatcgccaggtttcgggcgcgggcgtcatggtgccgcccgagcggcgcaatatctcgctggtgttccagaactacgccgtatggccgcacatgacggtcttcgagaacgtcgcctatggcctgcaggtacgcaaggtggcccgcacggagctcgcgcagcgggtcaagcgcgcgctcgacacggtccgcctcacggcgctcgcgcaacgctatccgtcggagctctccggcggacagcagcagcgggttgcgctggcgcgggcgctggtggtcgagcccgacatcctcctgctggacgaacccttgtccaatctcgatgcgcatctgcgcgaggagatgcgctacgagatccgccaggtgcacgatcttctgggcctgaccacggtctatgtcacgcacgaccagggcgaagcgctggtcaccgccgacaagatcgccgtcatgcagtccgggcaggtgcagcagttcgacagccccgtcaatgtgttctcgcggccggccaacgcgtttgtcgcctcgttcatcgggaccaacaacgagctgcatggccagcttgccgaaccgggggccttgcgggtcggggacagggttctgcatggcgacgaccgcagccaggccggtgccggcggcgcggcctgcctgtgcattcggccttcggccgtcaagctgggcgccgcgcccggcgccaatacgctgagcggcaccgtgacacgggtcgcgtacctgggcgagtaccgtgacgtccaggtcgagctggcggcggggcaattcgtgcgcgcctacgtcgacccgtcctcgacgctggagccgggccagcgtgtcgaggttcatctgcccatcgagcattgccagatcctgagcgtcaccacttcctag

SEQ ID NO: 84588 - protein, 354 aa, Bordetella bronchiseptica RB50
MKAIRIQGLTKHYGAHQVLRGIDLELAQGELLALLGPSGCGKSTTLQMLAGFDQPTDGQIWIGDRQVSGAGVMVPPERRNISLVFQNYAVWPHMTVFENVAYGLQVRKVARTELAQRVKRALDTVRLTALAQRYPSELSGGQQQRVALARALVVEPDILLLDEPLSNLDAHLREEMRYEIRQVHDLLGLTTVYVTHDQGEALVTADKIAVMQSGQVQQFDSPVNVFSRPANAFVASFIGTNNELHGQLAEPGALRVGDRVLHGDDRSQAGAGGAACLCIRPSAVKLGAAPGANTLSGTVTRVAYLGEYRDVQVELAAGQFVRAYVDPSSTLEPGQRVEVHLPIEHCQILSVTTS

SEQ ID NO: 84589 - DNA, 1161 bp, Synechococcus sp. WH 8102
  CDS (1)..(1161): transl_table=11
atggccggatcgcagaatggaatcgatcatcgcgtttcgctgttgtcgcagacccaggccaccgttgccgtgcgtgacctctggcatcgctacgacggccctgctggaccctggacgctgcgtggcatcgacctggagcttgcagccggtgagctggtgggactgctggggccctccggctgcgggaaaaccaccctgttgcgattgatcgcaggctttgagcggccatcgcaggggtcggtgcacctgcagcagcgccctgtggcggggaacggccattggctgccgcctgagcggcgcgggattggcatggtttttcaggactacgccctgttcccccatctcacggcctggcagaacgcttgcttcggtcttcgtcctggtcaggacgacagccgagcggcctggttgctggagttgctggggctgaaggggctggagctgcgttatccccatcagctctcaggcggccagaagcaacgccttgccctggcccgtgctctggcaccagcccccaagcttgtgctgctcgatgagcccttctccaatctggatgttgaggtgaggctgcggttgcgcagtgaactcagttctgttctgcaggtttgtggagccacggggctgatcgtgacccacgaccccagcgaggcgctggccatttgtgatcgtgtggcggtgatgcgggacggggagttgcatcagtgcgccaccccaagagccctcgttgatgcccccgcatcaccgtttgtcggtcgctttgtccttcaaggcaatcttgtgcccctcgatggtccgatgcactgcctgatcggtgcattggagggcgacagtcccctgccaggttctgaacctgggcccgatgagcaactgctgctggtggatccagccttgatcaggcttcagcccgatccacagggtgaggccacggtcatgggacgggagttcctcggacaggcctggcagtaccgcgtgcagcaggggccctgcgacctccgcgtcaacgctgcgctggcgttggacgtaacgcgcggtacccgctgtcgactggcgtttcagcctggagccgaagtgattctctttccgcagcggatcaggctgcgcgccaatgatccttatgccgcctcaggcgtcccagctcttcggccgatgccgcccgcatga

SEQ ID NO: 84590 - protein, 386 aa, Synechococcus sp. WH 8102
MAGSQNGIDHRVSLLSQTQATVAVRDLWHRYDGPAGPWTLRGIDLELAAGELVGLLGPSGCGKTTLLRLIAGFERPSQGSVHLQQRPVAGNGHWLPPERRGIGMVFQDYALFPHLTAWQNACFGLRPGQDDSRAAWLLELLGLKGLELRYPHQLSGGQKQRLALARALAPAPKLVLLDEPFSNLDVEVRLRLRSELSSVLQVCGATGLIVTHDPSEALAICDRVAVMRDGELHQCATPRALVDAPASPFVGRFVLQGNLVPLDGPMHCLIGALEGDSPLPGSEPGPDEQLLLVDPALIRLQPDPQGEATVMGREFLGQAWQYRVQQGPCDLRVNAALALDVTRGTRCRLAFQPGAEVILFPQRIRLRANDPYAASGVPALRPMPPA

SEQ ID NO: 84591 - DNA, 1044 bp, Chromobacterium violaceum ATCC 12472
  CDS (1)..(1044): transl_table=11
atggacaagacgcttgaattcgacgcggtgagcctggctttcgccggccggccggtgctggacggcatgagcttcgcgctggaggcgggcgagatcgcctgcctgctgggcggctccggctgcggcaagaccaccgcgctgcgctgcatcgccggcttcgaaacgccgtccgccggccgcatccggctggagggcgagacggtattcggcgtcggcgccgcgctgcccgcgcatcggcggcgcgtcggcatggtgttccaagaccacgcgctgttcccgcatctgaccgtggccgccaacgtggcgttcggcctgcccgccttgcgccgggccgagcgcaaggccagggtggcggagacgctgcggctggtggggctggaagaggaggcggcgcgctatccgcaccagttgtccggcggccagcagcaacgggtggcgttggcgcgggcgctggcgccaaggccgcgcctgctgctgctggacgagcctttttccaatctggacgccgagctgcgcgagcggctggcgcgcgaagtgcgcgccatcctgcaatcccagggcatctcggccttgatggtcacccatgatcagcacgaggccttcgccgtcgccgaccgggtgggcgtgttgcaccaggggcggctgcagcagtgggatacgccggacgcgctctaccaccgcccggccaatcgctacgtggccggcttcatcggccagggcgtattcctgccgggccgggtcagcgggcgcgcggtgatgctggagaccggcgagctgcgggccgaggacgagctgggcttcgccgacggcgccgaggtggaggtgttgctgcgccccgacgcggtgcagccggagccgggcagcccgctgcgggccagggtggtggacagggtgctgcgcggcacggtcagccattacgcgctggaactgctgtccggccggcgcttgttggccgagttgggccacggacagccgctgcaagtcggggacatggtgggcatccggctgcagcctcggccgctgctggctttcgcccgggggtga

SEQ ID NO: 84592 - protein, 347 aa, Chromobacterium violaceum ATCC 12472
MDKTLEFDAVSLAFAGRPVLDGMSFALEAGEIACLLGGSGCGKTTALRCIAGFETPSAGRIRLEGETVFGVGAALPAHRRRVGMVFQDHALFPHLTVAANVAFGLPALRRAERKARVAETLRLVGLEEEAARYPHQLSGGQQQRVALARALAPRPRLLLLDEPFSNLDAELRERLAREVRAILQSQGISALMVTHDQHEAFAVADRVGVLHQGRLQQWDTPDALYHRPANRYVAGFIGQGVFLPGRVSGRAVMLETGELRAEDELGFADGAEVEVLLRPDAVQPEPGSPLRARVVDRVLRGTVSHYALELLSGRRLLAELGHGQPLQVGDMVGIRLQPRPLLAFARG

SEQ ID NO: 84593 - DNA, 1044 bp, Onion yellows phytoplasma OY-M
  CDS (1)..(1044): transl_table=11
atgggtataaaattagaacaagtttctaaaattttcatcgataaacaaactaaaaaagaaacttatgctgtaaaaaaaattgacatcaacattcctaaaggaaaattggtaagtcttttaggtccttcgggttgtggcaaatcgactactctttacatgattgcagggcttcatcctatttcggctggaaaaatattttttggcgacaaagatgtcactaacctgcctattgaaaaaagaggtattggtttagttttccaaaattacgctctatatcctcatatgacagttagacaaaatatttcctttccactggaaaatctaaaatttgcgcgcgacattattgtgcaaaaagtagaagaaattgccaagttagtgggaattgccgatcatttagacaaaaaacctcagcaactttcaggcggacaacaacaacgcgtagcaattgcaagagccttagtaaaagaacctcaagttttgcttttagatgagcccttatccaacttagatgcagggttacgcctcaaaactagagaagaaattagaagaatccaacgaaaaactggaatcactgctatttttgttacacacgaccaagaagaagcaatgtctattagtgatgaaatttgcttaatgaataaaggacaaatccaacaaaaaggcgctcctcaagaagtttatgccaatcctaacaacttgtttgttgccaaatttttaggcaatccgcttatctctatttttgaaggaaaaattacttttggaaaagtaactattggagattcacttctttttgatttttcttctaacaaaactttaaaaaacctaaatcaagaaatctatgtagccattcgtcccgaaggttattggtttgacacaaacggtaattttgaaatcgaacctctctttttagaaaatgtgggaagaaacctaatgatgttagcaagacatccgcaagctgttaaaaaaactttccaccttgtctttgatgaaaaaagtaaagatattattttttccccaaggatttgttgccaagaaaaaaattag

SEQ ID NO: 84594 - protein, 347 aa, Onion yellows phytoplasma OY-M
MGIKLEQVSKIFIDKQTKKETYAVKKIDINIPKGKLVSLLGPSGCGKSTTLYMIAGLHPISAGKIFFGDKDVTNLPIEKRGIGLVFQNYALYPHMTVRQNISFPLENLKFARDIIVQKVEEIAKLVGIADHLDKKPQQLSGGQQQRVAIARALVKEPQVLLLDEPLSNLDAGLRLKTREEIRRIQRKTGITAIFVTHDQEEAMSISDEICLMNKGQIQQKGAPQEVYANPNNLFVAKFLGNPLISIFEGKITFGKVTIGDSLLFDFSSNKTLKNLNQEIYVAIRPEGYWFDTNGNFEIEPLFLENVGRNLMMLARHPQAVKKTFHLVFDEKSKDIIFSPRICCQEKN

SEQ ID NO: 84595 - DNA, 993 bp, Bacillus cereus ATCC 10987
  CDS (1)..(993): transl_table=11
atggatattaaaattagtggattagaaaaatcatttggaaaagtacaagcgttaaagccgttacaaattgtgatgaaacaaggtgaattcactacacttttaggaccttcgggatgcgggaaaacgacattactcagaatgattgcaggactggaagagccagataaaggtgaaatatattttggagatacgtgcatgtattcttcttctaaaaaaataaaaacagctcctcatgaacgtaatattggtatggtatttcaagattttgctttatggccacacatgactgtatttgaaaatgttgcatttggtttaagagctacaaagcaaacgaatcaattacgggaaaaagtagaagaggcaataaagcgagttcgcttgcaaggaatggagaaaagatatccgcatgaactctctggcggacagcagcaacgtgtcgcatttgcgagagcaattgtaacgaaaccacatttcattttgtttgatgaaccgctcagtgcactcgatgcaattttgcgagaagaaatgagattagagcttatggatatcgttcattctattggtttaactgcattgtatgttactcacgatcaaacagaagcgatgtcaatgtcagaccaaattattgtcatgaaacaaggagaagtattacaaaaaggaacaccagaagacatttatgtgaagccatctcatgaatttgttgcaaaatttgttggtaaggcaaattggcttgtagagggggagaaaatggttcgcccagagcatataagttggacaaaaaatgaagtgtgcgaaatgtatacaggtgaagttcagcacgttacatatgtaggagaacgctatgaagtgaaagtaaatatgggggcaatcggaatatggacagcttatcacaataataagttaagcatcggaaagccagtatcgttatatgtaccgaaaaaatgtattcatcatatagggggagaatcgtatgaagaaattcagttcgcttaa

SEQ ID NO: 84596 - protein, 330 aa, Bacillus cereus ATCC 10987
MDIKISGLEKSFGKVQALKPLQIVMKQGEFTTLLGPSGCGKTTLLRMIAGLEEPDKGEIYFGDTCMYSSSKKIKTAPHERNIGMVFQDFALWPHMTVFENVAFGLRATKQTNQLREKVEEAIKRVRLQGMEKRYPHELSGGQQQRVAFARAIVTKPHFILFDEPLSALDAILREEMRLELMDIVHSIGLTALYVTHDQTEAMSMSDQIIVMKQGEVLQKGTPEDIYVKPSHEFVAKFVGKANWLVEGEKMVRPEHISWTKNEVCEMYTGEVQHVTYVGERYEVKVNMGAIGIWTAYHNNKLSIGKPVSLYVPKKCIHHIGGESYEEIQFA

SEQ ID NO: 84597 - DNA, 4413 bp, Ustilago maydis 521; identical to SEQ ID NO: 60003
  CDS (1)..(4413)

SEQ ID NO: 84598 - protein, 1470 aa, Ustilago maydis 521; identical to SEQ ID NO: 60004

SEQ ID NO: 84599 - DNA, 1038 bp, Chlorokybus atmophyticus
  CDS (1)..(1038): transl_table=11
gtgagtattttaatagacaatgtgtctaaaagatttggtagctttcaagctttaaaacatgttaatttagaaataaagagtggttctttaatggctttaattggtccttctgggtccggaaaatcaactctattacgtataattgcgggattagaaactcctgataccggaaaaatatggttatctgggaaagatgcaagtaattattctatacaatctcggaatattggttttgtttttcaaaactatgccttgtttaaacatatgacagtatatcaaaatatttcttttggtcttgaacttcgtggtctcgcaggaatacccaaaaaggtagaaaaattattagaattaattcaacttcaaaatcttgaaaatcgataccctattcaactttcggggggacaacgtcaacgtatagctttagctagagctttagcaattgaaccaaaagtattacttttggatgaaccttttggagcattagatgctagagttcgaagagaactacggggttggcttcgtaatcttcatgaaagattctctgtgactaccatacttgtaacccatgatcagcaagaagccatggaagttgctgatgaaattgtagtctttcacgctggtcgcattgagcaaattggaaaacctcaagagatttatgatcatccagcaaccccttttgtatttggttttttaggtggtgtaaacgttattccatctgatcaacctatttcaaagattttgcctcatgatttagttacatcagcgtcgaaccctttgaacaacaccaaactatttactgataaaaattctttttatataaggccacacgatatctctattcaaatatcacccgattcttttcattccccggctaaaattgatagtattgtttacataggtaactcagtcaatatagagttaatcttattacaactagaatggaaattaaaagttaatttaagccgtaaaagatttaaagaattaaaaatcaattctttgcaacaaatggtctatataaagattaacaaaagtgaatag

SEQ ID NO: 84600 - protein, 345 aa, Chlorokybus atmophyticus
MSILIDNVSKRFGSFQALKHVNLEIKSGSLMALIGPSGSGKSTLLRIIAGLETPDTGKIWLSGKDASNYSIQSRNIGFVFQNYALFKHMTVYQNISFGLELRGLAGIPKKVEKLLELIQLQNLENRYPIQLSGGQRQRIALARALAIEPKVLLLDEPFGALDARVRRELRGWLRNLHERFSVTTILVTHDQQEAMEVADEIVVFHAGRIEQIGKPQEIYDHPATPFVFGFLGGVNVIPSDQPISKILPHDLVTSASNPLNNTKLFTDKNSFYIRPHDISIQISPDSFHSPAKIDSIVYIGNSVNIELILLQLEWKLKVNLSRKRFKELKINSLQQMVYIKINKSE

SEQ ID NO: 84601 - DNA, 1047 bp, Mycobacterium sp. JLS
  CDS (1)..(1047): transl_table=11
gtgagcaccatcgaactgaccggtctgacaaagacatacggacacagcaccgtcgtcgacgacgtcacgctgaccctgccggacgggtcgttgaccgtcctggtcggaccgtcgggctgcgggaagtccacgacgctgcggatcgtcgccgggctcgaggcggccgacgggggagtggtgcgcatcggggatcgcgacgtcacccgcgccaccccgcgcgaccgcgacgtggcgatggtgttccagaactacgcgctctacccgcacctgtccgtggcgggcaacatcgcgtttccgttgcgcaacaacggcgtcgcccgggatgaggtgacgcggcgcgtcggtgaggccgccgagcgggtcggcatcaccgcgctgctcgaccgcaaaccacgccagctctccggcggtcagcagcagcgggtggcgatcgcccgagcgctggtccgcacgcctgcggtgttcctgttcgatgaaccgctgagcaacctcgacgccaagctgcgcgtcgaattgcgttcggaaatccggcggctgcagcaggagaccgggatcaccgccctctacgtcacccacgaccaggaggaggcgatgacgatcgccgaccaactcgtcgtcctgcacgccgggcgaatcgcgcagaagggcacgccggaggagctgtaccggcggccggccaacaccttcgtcgcggggttcatcggatcgccgtcgatgaacctggtgcccggcgacggggtgccgttcacggtgacgggctccggcgacgtgacgctcggggtgcggcccgaggacctgctggtgacgccgtcgccctccggtacgggccgcgtcgagctggtcgaactgctcggcccgcggtacgtgctgatcgtgcgggcgggggcacaccggttgacggcggtcatcgaggccgcgaccgtcgcgtcctggcccgccgtccccgcggttggggatgcggtcgaggtcgccgtccggcccgaacgggtgcaccggttcgaccgagcttcgggcgaacggatcagctcgggtccggtggcgtcctag

SEQ ID NO: 84602 - protein, 348 aa, Mycobacterium sp. JLS
MSTIELTGLTKTYGHSTVVDDVTLTLPDGSLTVLVGPSGCGKSTTLRIVAGLEAADGGVVRIGDRDVTRATPRDRDVAMVFQNYALYPHLSVAGNIAFPLRNNGVARDEVTRRVGEAAERVGITALLDRKPRQLSGGQQQRVAIARALVRTPAVFLFDEPLSNLDAKLRVELRSEIRRLQQETGITALYVTHDQEEAMTIADQLVVLHAGRIAQKGTPEELYRRPANTFVAGFIGSPSMNLVPGDGVPFTVTGSGDVTLGVRPEDLLVTPSPSGTGRVELVELLGPRYVLIVRAGAHRLTAVIEAATVASWPAVPAVGDAVEVAVRPERVHRFDRASGERISSGPVAS

SEQ ID NO: 84603 - DNA, 1050 bp, Mycobacterium sp. JLS
  CDS (1)..(1050): transl_table=11
gtgaccggccccgccatgctcgaagtccgcgccctggccaagacgttccacgaccacacggtgctcgatcacatcgacctcgacctggcaccgggcagcctgaccgccgtcgtcggagcctccggatgcgggaagaccaccctgctgcggctgatcgccgggttcgagaccccggactccggaaccatcgccatcgccggccggcaggtggcgagcgcgacgagttcggttccaccgcaccgccgcagcgtcggatacgtcgcccaggacggcgccctcttcccgcacctgaccgtcggccagaacatcgcctacggcctgtccggcaccacccgaagcgccgcggtgcgcaccagggtcgccgagctgctcgaaaccgtctctctggagccgagtttcgccgcccgccgtccccaccagctgtcgggcggccagcaacagcgcgtcgcgctggcccgtgcactggcccgcgaaccggacctgatgctgctcgatgaaccgttcagtgccctggacaccggcctgcgcgcgtccacccggaaggccgtcgcgggactgctgtcccggaccggcgtgaccacgctgctggtgacgcacgaccaggaggaggcgctgtcggtcgccgaccaggtcgccgtcatgcgcgacggccgcttcacccaggtcggcacgcccgaacacgtctaccgccggcccgtggaccggttcaccgccgaattcctcggcgactgcatcacgctgccgtgcaccgtcaccgccaacgtcgccgacagcgcgctgggacgcatcccggtgatcgccgacgacggtccgggaaccttgatcctgcgccccgaacagctcgtggcgacggtcgtctccgacagcggccggctcgacggcgtgggcaccgtcatcgccaccgaattcctcggtcacgacgtactgctcacgatcgacccggccggcgacggcgcgccgatcgtcgtgcgccagcacagcctcgcccctccgccggtggacgccaaggtgcgcatcgaggtggtgggtcacggagcggtgctgaaatga

SEQ ID NO: 84604 - protein, 349 aa, Mycobacterium sp. JLS
MTGPAMLEVRALAKTFHDHTVLDHIDLDLAPGSLTAVVGASGCGKTTLLRLIAGFETPDSGTIAIAGRQVASATSSVPPHRRSVGYVAQDGALFPHLTVGQNIAYGLSGTTRSAAVRTRVAELLETVSLEPSFAARRPHQLSGGQQQRVALARALAREPDLMLLDEPFSALDTGLRASTRKAVAGLLSRTGVTTLLVTHDQEEALSVADQVAVMRDGRFTQVGTPEHVYRRPVDRFTAEFLGDCITLPCTVTANVADSALGRIPVIADDGPGTLILRPEQLVATVVSDSGRLDGVGTVIATEFLGHDVLLTIDPAGDGAPIVVRQHSLAPPPVDAKVRIEVVGHGAVLK

SEQ ID NO: 84605 - DNA, 1068 bp, Burkholderia vietnamiensis G4
  CDS (1)..(1068): transl_table=11
atggataagctcatcgtcgacgacctgcatctcagctacggcgccaacccgatcctcaacggcgtgtcgttcgaactgaaggccggcgaagtcgtgtgcctgctcggcgcgtcgggcagcggcaagaccacgctgctgcgcgcggtggccggcctcgaacagccgtccggcgggcgcatccagctcgacggccgcgtgttcttcgacggcgcgcagcgcatcgacctgcccgtcgaacagcgctcgctcggcctcgtgttccagtcgtacgcgctgtggccgcaccgcaccgtcgccgacaacgtcggctacgggctcaagctgcggcgcgtggcggctgccgaacagaagcgccgcgtgcaggccgcgctcgaccagctcggcctcggtcatctggcggaacgcttcccgcatcaactgtcgggcggccagcagcagcgcgtcgcgatcgcgcgcgcgctcgtctacaacccgcccgtgatcctgctcgacgaaccgctgtcgaacctcgacgcgaagctgcgcgaggaagcgcgggcgtggctgcgcgagctgatcgtgtcgctcgggctgtcggcgctgtgcatgacgcacgaccagaccgaggcgatggcgatgtccgaccgcatcctgctgctgcgcaacggccgcatcgagcaggaaggcacgccggccgagctgtacggcgcaccgcgctcgctgtacacggccgaattcatgggcagcaacaaccggatcgatgcgcgcgtcgcggccgtcgacggcgagcgcgtgacgctggccggcgacggctggcagctgcaggcgctcgcgcgcgacgcgttcgcgcccggccagcccgcgcaggccgtgatccgcctcgaacgcgtgcaggtcgtcgacggccccggcgcgaaccggctgcaggccgatctcgtcacgtcgatgtatctcggcgatcgctgggaatacctgttccatcgcggcgacatgcggctgcgcgcgttcggccacgcaccgcgcgcggcgggcgcgcactggatcgaattcccggccaacgactgctgggcgttcgcgaaggcgggctga

SEQ ID NO: 84606 - protein, 355 aa, Burkholderia vietnamiensis G4
MDKLIVDDLHLSYGANPILNGVSFELKAGEVVCLLGASGSGKTTLLRAVAGLEQPSGGRIQLDGRVFFDGAQRIDLPVEQRSLGLVFQSYALWPHRTVADNVGYGLKLRRVAAAEQKRRVQAALDQLGLGHLAERFPHQLSGGQQQRVAIARALVYNPPVILLDEPLSNLDAKLREEARAWLRELIVSLGLSALCMTHDQTEAMAMSDRILLLRNGRIEQEGTPAELYGAPRSLYTAEFMGSNNRIDARVAAVDGERVTLAGDGWQLQALARDAFAPGQPAQAVIRLERVQVVDGPGANRLQADLVTSMYLGDRWEYLFHRGDMRLRAFGHAPRAAGAHWIEFPANDCWAFAKAG

SEQ ID NO: 84607 - DNA, 1008 bp, Bradyrhizobium sp. ORS278
  CDS (1)..(1008): transl_table=11
atgggacggatcacgctggaaggtgtgcagaaatcgttcgggccggtgcacatcatcaagggtgccgatctcgacattcccgacggcgccttcgtggtgttcgtcggcccgtccggctgcggcaagaccaccttgctgcggctgatcgcggggctggaggatgtctcgggcggacggatcctgatcgacggcaacaacgtcgtcgacgtgccgccggccaagcgcggcctgtcgatggtgttccagtcctatgcgctctatccacatatgagcgtgcgcggcaacattgccttcggcctgaagatggccgggctgccgaaggccgagatcaaccagaaggtcgaggccgccgcggcgacgttgaacctcacgccctatctcgaccgcaagccgcgcgagctgtccggcggccagcgccagcgtgtcgcgatcggccgcgccatcgtgcgcgagcccaaggcgttcctgttcgacgagccgctgtccaatctcgatgctgctttgcgcgtgcagatgcggctcgaggtgacgcggctgcagaagcagctcggcaccaccgcgatctatgtgacgcacgaccaggtcgaggccatgaccatggccgacaagatcgtggtgctgaacgccggccgcatcgagcagtacggctcgccgatcgaattgtatcagcgcccggccaacctgttcgtcgccggcttcatcggctcgccgaagatgaacttcatcgtcggcgaggaagccgcgcggcgcggcgccaccacgatcggcgtgcggccggagcatatcggcatcgtcgatgatggcggcgatggctggcgcggcaaggtgctgatcgccgagcatctcggcagcgacacttttctttacgtcgacaccggcgcgctgggaacgctcacggtgcgctgcgtcggcgagaagcggctcagcgccggcgatgccgtgacgctgcggcccgagccgaaccgcatctaccgcttcgacgagagcggccattccatcttcacatga

SEQ ID NO: 84608 - protein, 335 aa, Bradyrhizobium sp. ORS278
MGRITLEGVQKSFGPVHIIKGADLDIPDGAFVVFVGPSGCGKTTLLRLIAGLEDVSGGRILIDGNNVVDVPPAKRGLSMVFQSYALYPHMSVRGNIAFGLKMAGLPKAEINQKVEAAAATLNLTPYLDRKPRELSGGQRQRVAIGRAIVREPKAFLFDEPLSNLDAALRVQMRLEVTRLQKQLGTTAIYVTHDQVEAMTMADKIVVLNAGRIEQYGSPIELYQRPANLFVAGFIGSPKMNFIVGEEAARRGATTIGVRPEHIGIVDDGGDGWRGKVLIAEHLGSDTFLYVDTGALGTLTVRCVGEKRLSAGDAVTLRPEPNRIYRFDESGHSIFT

SEQ ID NO: 84609 - DNA, 1029 bp, Thermus thermophilus HB27
  CDS (1)..(1029): transl_table=11
atgctggcccaggccggcgtggggaccccggtaaaggggcctgggcgcttccccgggcccttccggtttaatgggagggtgctggagctttccctggaaaaggccttccccgggttccgcctctccgtggccctctccgtggccgagggcgagaccctagccctcctcggaccctcgggaagcgggaagagcaccctgctcaggctcgtggccgggctccttaagcccgataggggcttcgtgcgcttcctgggcgaggacctcaccccccttcccccggaaaggcggaaggtgggcttcctcttccaggactacgccctcttcccccacctcaccgtggaggaaaacgtcgccttcggccttgtggaggcccgctggccaagggaggcgagagaggggcgggtgcgggagctcctcaagcgcatggagctcaccccccacgccaggaagcgcccccaggagctttccgggggcgagcaacagagggtggccctggcccgggccctggcccctaggcccaggctcctcctcctggacgagcccttaggggccctggacctgaggcttcgggaagagctcctcttcttcctgcgccggacgctcaaggaggaaggggtcaccaccctcctcgtgacccacgaccagggggaggccttcctcctcgcccaccgggtggcccttctgcgggaggggcgcctggtccaggtgggccggcccgaggaggtctacgcccgccccaaggacccatgggccgcccgcttcctggggcacaagaacctcctctcccccggggaaagccaggccttagggcttcccccaaaggcccacctcctccccccaagggccctcgccctcggggggagcctggaaggggtggtggaggagcggctctttttcgggccacgggtggggctttgggtgcgggtgaggggggtcaggctctacctcgaggcccccgagggcccggaagagggcgcccccatagccctccgcctggaccccgcccaggcggtacccttggagggatga

SEQ ID NO: 84610 - protein, 342 aa, Thermus thermophilus HB27
MLAQAGVGTPVKGPGRFPGPFRFNGRVLELSLEKAFPGFRLSVALSVAEGETLALLGPSGSGKSTLLRLVAGLLKPDRGFVRFLGEDLTPLPPERRKVGFLFQDYALFPHLTVEENVAFGLVEARWPREAREGRVRELLKRMELTPHARKRPQELSGGEQQRVALARALAPRPRLLLLDEPLGALDLRLREELLFFLRRTLKEEGVTTLLVTHDQGEAFLLAHRVALLREGRLVQVGRPEEVYARPKDPWAARFLGHKNLLSPGESQALGLPPKAHLLPPRALALGGSLEGVVEERLFFGPRVGLWVRVRGVRLYLEAPEGPEEGAPIALRLDPAQAVPLEG

SEQ ID NO: 84611 - DNA, 729 bp, Erwinia carotovora subsp. atroseptica SCRI1043
  CDS (1)..(729): transl_table=11
atggatatcgcctcccgttattgcgcggaggtgataatgaccacggctgaactcgccacgcccgctgcgattgcgatcgataaattatcccacgctttcgcaggaaaaacggttctcgactcgatctgcctcaatgtgtcgagaggcaccattctggccttgctggggccttccggctgcggcaaaagtacgttgctaaaattgctggctgggttgttacaaccagatgcaggcaccattcattttggcgatcgtcaggttgccggtcatcagctatccctaccgcctgaacaacgcaatcttggcatggtatttcaggactacgcactgtggccacatatgaccgtggcacaaaacgtcgggtttccgctgctgatgaggaaggttccgcgcgatatctgccgccaacgagttgacgtcacgctagcgcgcgtaggtctggccgattttgccgatcgtaaacctgccgatttatccggcggtcagcaacagcgagtcgcgttggcacgcgccattatcgcagagccgaacatcctgctatttgatgaaccgttatccaatctcgaccgggatctacgtgaatcgctttgtcaggagatggcatcgctcttacgccatcttggtaccaccgccgtgtatgtcacccacgacagaggcgaagccaacatactggcgcaccgtattgttcacatgtcgcaaggctacattactgatatcaccacacgttaa

SEQ ID NO: 84612 - protein, 242 aa, Erwinia carotovora subsp. atroseptica SCRI1043
MDIASRYCAEVIMTTAELATPAAIAIDKLSHAFAGKTVLDSICLNVSRGTILALLGPSGCGKSTLLKLLAGLLQPDAGTIHFGDRQVAGHQLSLPPEQRNLGMVFQDYALWPHMTVAQNVGFPLLMRKVPRDICRQRVDVTLARVGLADFADRKPADLSGGQQQRVALARAIIAEPNILLFDEPLSNLDRDLRESLCQEMASLLRHLGTTAVYVTHDRGEANILAHRIVHMSQGYITDITTR

SEQ ID NO: 84613 - DNA, 690 bp, Erwinia carotovora subsp. atroseptica SCRI1043
  CDS (1)..(690): transl_table=11
gtgtctgaggctacactcgttctgaataatgtccacgtcgcctacgggcacaagcataatttccatcatgtgctgaacggtttctccatgcaggttgtcgcgggggaattggcctgtttgctaggtgcatccggatgcggcaaaaccacagcgttgcgcgccattgccggtttcgaacacgtgactcagggaacgattcacgtcggcggacgctgcgtggcgggcccagacatgcatctaccaccggaacagcgcaacgtcgggatggtgtttcaggactacgcgctgtttccccatctgactgccgcgcagaacattgcgtttggcctgcgaaaacagccgaaagatcttcagcaatcgcgcgtccgagccatgcttgaattggtcgatctcgccgcgttagggcagcgctatccacatgagatgtccggcggacaacagcagcgtatcgcgctggcacgcgcattagcgcctcaacctgccgtgctactgcttgacgaaccgctatccagcctcgaccccgacagccgaaaacgactcgggcaggaagtccgcgacatcctgcgcgacgccggacaaaccgcgctcttagtcacgcacagtgaacaggaagctgaactcatggccagccacattggctatttgaaagaaggcaaactcgacaatatgtcggtgaatcgagacgcctga

SEQ ID NO: 84614 - protein, 229 aa, Erwinia carotovora subsp. atroseptica SCRI1043
MSEATLVLNNVHVAYGHKHNFHHVLNGFSMQVVAGELACLLGASGCGKTTALRAIAGFEHVTQGTIHVGGRCVAGPDMHLPPEQRNVGMVFQDYALFPHLTAAQNIAFGLRKQPKDLQQSRVRAMLELVDLAALGQRYPHEMSGGQQQRIALARALAPQPAVLLLDEPLSSLDPDSRKRLGQEVRDILRDAGQTALLVTHSEQEAELMASHIGYLKEGKLDNMSVNRDA

SEQ ID NO: 84615 - DNA, 993 bp, Bacillus cereus E33L
  CDS (1)..(993): transl_table=11
atggacattcaaattagtggattagaaaagaattttggaaaaacgcaggcgttaaagccattacaaattgttatgagacaaggtgaatttaccacacttttaggaccttcgggatgtgggaaaacgactttacttagaatgattgcaggactggaagaaccagataaaggtgaaatatatttcggggatacgtgcatgtattcttctgctaaaaaaataaaaacatctcctcatgaacgtaatataggtatggtgtttcaagattttgctttatggccacacatgactgtatttgaaaatgttgcatttggtttaagggctacaaagcaaacgaatcaattacgggaaaaagtagaagaggcaataaagcgagttcgcttacaagggatggagaaacgttatccgcatgaactctctggcggacagcagcaacgtgtcgcatttgcgagagcgattgtaacaaagccgcatttcattttgtttgatgaaccgctcagtgcactcgatgcaattttgcgagaagaaatgcgattagagcttatggatatcgttcattccattggtttaacggcattgtatgtaacccacgatcaaacagaagctatgtcaatgtcagaccaaatcattgtcatgaaacaaggagaagtattacaaaaaggaacaccagaagacatttatgtgaagccatctcatgaatttgttgcaaaatttgttggtaaggcaaattggcttgtagaggggaaacaaatggttcgtccagagcatgtaagctggaagaaaaatgaagtgtgcgaaatatatacaggtgaaattcagcacgttacatatgtaggggaacgttatgaagtgaaagtaaacatggggacactcggaatatggacagcttatcacaatagtaagctaagcattgggaaaccagtatcgttatatgtaccaaaaaaatgtattcatcatatagggggagaatcgtatgaagaaattcagttcgcttaa

SEQ ID NO: 84616 - protein, 330 aa, Bacillus cereus E33L
MDIQISGLEKNFGKTQALKPLQIVMRQGEFTTLLGPSGCGKTTLLRMIAGLEEPDKGEIYFGDTCMYSSAKKIKTSPHERNIGMVFQDFALWPHMTVFENVAFGLRATKQTNQLREKVEEAIKRVRLQGMEKRYPHELSGGQQQRVAFARAIVTKPHFILFDEPLSALDAILREEMRLELMDIVHSIGLTALYVTHDQTEAMSMSDQIIVMKQGEVLQKGTPEDIYVKPSHEFVAKFVGKANWLVEGKQMVRPEHVSWKKNEVCEIYTGEIQHVTYVGERYEVKVNMGTLGIWTAYHNSKLSIGKPVSLYVPKKCIHHIGGESYEEIQFA

SEQ ID NO: 84617 - DNA, 1071 bp, Methylococcus capsulatus str. Bath
  CDS (1)..(1071): transl_table=11
atgggcagtatcgcattcgaacgcctgagcaaaacctacccgggcggttttgccgcgctgtccgacctgagtctcgacatcgccgacggcgaactcctggtcgtcgtcggaccgtcggggtgcggcaaatccacgctgttgcgactgatcgccgggctggaccgccccaccgccggctcgatccggatcggcggcacggacgtgaatgcgctcgcgcctgcggagcgcaacgtcgccatggttttccaggattacgcgctctatcccaacatgacggtgaggggcaacctcgaatttccgctgaagatgcgccgcatcggtcgagccgaacgccggcgccggatcgagcaggtggccgggatgctcgaactcatgccgctgctcgaccgccgccccgcccagctctcgggcggccagcgtcagcgcgtggccatgggacgggcgctggtccgcgatccctcggtgttcctgctcgacgaacccctcgccaacctggacgcccgtctgcgcgcgcaggttcgtgccgacattgccgaactgcagcggcggacggggacgaccatgatctatgtcacccacgaccaggtcgaggccatgaccctgggccagcgcatcgcggtcctcgccggcgggcggttgcaacaggccgcctcgccccgggaactctatgcccatccggccaacactttcgtcgccggtttcataggcaatccacccatgaatctcctgccggttcggatcgggcgctccggcgagaccgtcctccccgatttcggcggcgtgccactgccgggcagggcggatgcgccgaaagatgcagctatcgccggcatccggccggaagctgtccgcctggcggaaacgtcgtccgaggggatcgccgtccgcgtccgggaggtggaatatctcggccatgaaaccttgctgcatttcacccatgaagcgggagcggccagcctcatcgcccgccttcccggtctgccgccctttggccgcggcgatgccgtccgtctcgggatggcgccggaagactggcatttcttcgatcggagcggtcaggcgttgggctga

SEQ ID NO: 84618 - protein, 356 aa, Methylococcus capsulatus str. Bath
MGSIAFERLSKTYPGGFAALSDLSLDIADGELLVVVGPSGCGKSTLLRLIAGLDRPTAGSIRIGGTDVNALAPAERNVAMVFQDYALYPNMTVRGNLEFPLKMRRIGRAERRRRIEQVAGMLELMPLLDRRPAQLSGGQRQRVAMGRALVRDPSVFLLDEPLANLDARLRAQVRADIAELQRRTGTTMIYVTHDQVEAMTLGQRIAVLAGGRLQQAASPRELYAHPANTFVAGFIGNPPMNLLPVRIGRSGETVLPDFGGVPLPGRADAPKDAAIAGIRPEAVRLAETSSEGIAVRVREVEYLGHETLLHFTHEAGAASLIARLPGLPPFGRGDAVRLGMAPEDWHFFDRSGQALG

SEQ ID NO: 84619 - DNA, 1119 bp, Azoarcus sp. EbN1
  CDS (1)..(1119): transl_table=11
atgtctcaccttgaactcgccgatatcgacctcgcctacggcgctcagcgcgtcgtccgcaagctctccttgcgactcgaaaaaggcagcatcggatgtctgctggggccgtccggctgcggcaagacgacagtgctgcggtgcatcgccggcttcgaaccggtggcggcgggcgaaatccggctcgatggcgtggtcgtcagcggcagtggtcatcacctggctcccgagcgtcgccggatcggcatggtgttccaggactatgcgttgttcccccacctctcggtcgcggaaaacatcgcgttcggcctgcgcgacatggacaagacgcagcggcgcgagcgcgtcgacgaactgctgcgcatcgtcggcctcgaccgccagggacacaagtacccgcatgaaatgtccggcggccagcagcagcgcgtggccctggcgcgcgcactggctccgcgcccgagcctgttgctgctcgacgaaccgttctcgaatctcgacgtggaattgcgcgagcgcctgtcgcacgaagtgcgcgacatcatcaaggcgacccgcaccaccgccatcctcgtgacgcacgaccagaacgaagctttcgcggtcgccgacgaaatcggcatcatgaacgaggggcgcatccagcaatgggataccccgtacaacctgtaccatcggcccgcgaaccgtttcgtcgcggacttcatcggtcagggcgtgttcctgcccggcctggtgttgaacgatcaccaggtgaaagtcgaactcggcgtcctgaacagcgcgattcccgtcgagtgcggaatcggctgcgcgaactgcgaccgcgactgcacggtggaagtgctgctgcgccccgacgacatcgtccatgacgacgccagcgcgatgaaggccgaagtcatgcacaaggcgttccgcggggcagacatcctgtataccttgcggctgtcgagcggcgcgcgggtgttgtcgctggtgccgagccatcacaatcacgcgatcggcgaaaaaatcggcatccgcctcgatgtcgatcacgtcgtcacgttccagaaagactcgcaagacgcggtgcacactcgccaggagcaccggctcgtccacgtcccggcatga

SEQ ID NO: 84620 - protein, 372 aa, Azoarcus sp. EbN1
MSHLELADIDLAYGAQRVVRKLSLRLEKGSIGCLLGPSGCGKTTVLRCIAGFEPVAAGEIRLDGVVVSGSGHHLAPERRRIGMVFQDYALFPHLSVAENIAFGLRDMDKTQRRERVDELLRIVGLDRQGHKYPHEMSGGQQQRVALARALAPRPSLLLLDEPFSNLDVELRERLSHEVRDIIKATRTTAILVTHDQNEAFAVADEIGIMNEGRIQQWDTPYNLYHRPANRFVADFIGQGVFLPGLVLNDHQVKVELGVLNSAIPVECGIGCANCDRDCTVEVLLRPDDIVHDDASAMKAEVMHKAFRGADILYTLRLSSGARVLSLVPSHHNHAIGEKIGIRLDVDHVVTFQKDSQDAVHTRQEHRLVHVPA

SEQ ID NO: 84621 - DNA, 1074 bp, Bacillus clausii KSM-K16
  CDS (1)..(1074): transl_table=11
atgacgatcttactgaacaaaattgacaaacgctttgggaacacccatgttttaaagcaagtagatttacgggtagagcaaggtgagttgcttgctttgctcggaccctcgggatcggggaaaacaacgcttttgcgaatgatcgctggccttgaagcagttgactctggagaagtttggatcaatggaaaacatgtcacaaacgttaatccaagaaaacgaaaagttggattcgtgttccaacactatgcattatttgcccatatgacggttgagcagaacattgcttatggcttgaatgttttaaaacgatcggaacggccaagcaaagcagagattaaaagcattgtcgaacagctgctggcgcttgtcaagctagaaggacttgaaaagcgccgcccatcagagctttctggcggccaacgccaacgagtcgcccttgcccgggcgctggcgattaagcctgaagtgctgttgcttgatgagccatttggcgcccttgatgcccaagtgcggaaagaactaaggcgctggctaaggacgttgcacaaagaaacagggattacgactgtgtttgtcacacacgaccaagaagaagcgctagatgttgcagataaaattgtcgtgatgaataaaggcgagattgaacaggctggcacgccaacggaagtatatgaggagccaaacagcccattcgtttacgaatttctaggcaatgcctatccgtttaaaggcgttagccaatctgggaaattagccgttgccggtgccaagtgggagcttgctgcaatcgatgctacgacaaatggaccagtcgttggctatgctcgcccccatgaaatcgctgtttccaaaacgtatgaaggcgaaggggatttgcaagttgatattgtttccgtccatcctgtagggcccattgtatttattgaagcaaaatgggcgggagaaggcgatacgattgagattcagcaacctaaaaaaacatttgcgcaattggggctttctatcggtgataaagcgtacattcgaccagaaaaactaggcgtcttccaagtaagcgattataccatttag

SEQ ID NO: 84622 - protein, 357 aa, Bacillus clausii KSM-K16
MTILLNKIDKRFGNTHVLKQVDLRVEQGELLALLGPSGSGKTTLLRMIAGLEAVDSGEVWINGKHVTNVNPRKRKVGFVFQHYALFAHMTVEQNIAYGLNVLKRSERPSKAEIKSIVEQLLALVKLEGLEKRRPSELSGGQRQRVALARALAIKPEVLLLDEPFGALDAQVRKELRRWLRTLHKETGITTVFVTHDQEEALDVADKIVVMNKGEIEQAGTPTEVYEEPNSPFVYEFLGNAYPFKGVSQSGKLAVAGAKWELAAIDATTNGPVVGYARPHEIAVSKTYEGEGDLQVDIVSVHPVGPIVFIEAKWAGEGDTIEIQQPKKTFAQLGLSIGDKAYIRPEKLGVFQVSDYTI

SEQ ID NO: 84623 - DNA, 1056 bp, Mycobacterium tuberculosis H37Rv
  CDS (1)..(1056): transl_table=11
atgacctacgccatcgtcgtggccgacgccaccaaacgctacggcgacttcgtcgcacttgaccacgtggatttcgtcgtaccgaccggttcgctgaccgcattgttgggccccagcggttcgggcaagtcgacgctgttgcgcaccatagccggcctcgaccaaccggacaccggaaccatcacgatcaacggccgcgacgtcacccgggtgccgccacagcggcgtggcatcggattcgtcttccagcactacgcggcgttcaaacacctgactgtccgtgacaacgtggcgttcgggttgaagatccgtaagcgccccaaggccgagatcaaggccaaggtcgacaatctgctgcaggtggtgggcctgagcggatttcagagccgctaccccaatcagctctccggtgggcaacgacagcggatggcgctggccagggcgctggcggtcgatccggaggtgctgctgctcgacgagccgttcggcgcactcgatgccaaggtgcgcgaagagctgcgtgcctggctgcgccgcctgcacgacgaggtgcatgtcaccacggtgctggtcacccacgatcaggccgaagcgctggatgtggccgaccgcatcgccgtactccacaagggccgtatcgagcaggtcggatccccgaccgacgtttacgacgccccggcgaacgccttcgtgatgtccttcttgggagcggtttccacgttgaacggctccctggtgcgcccgcacgacatccgggtcggccggactcccaatatggccgtggccgccgctgacggcaccgccgggtccaccggtgtgctacgggctgttgtggatcgggtggtggtgctgggcttcgaggtccgcgtggagttgaccagcgcggccaccggcggggccttcaccgcccagatcacccgcggcgatgccgaggcgctggccctacgcgagggtgacaccgtctacgtgcgtgccacccgggtgccgccgattgccggtggcgtatcgggcgtcgacgatgccggcgtggaacgggtcaaagtcacatcgacgtga

SEQ ID NO: 84624 - protein, 351 aa, Mycobacterium tuberculosis H37Rv
MTYAIVVADATKRYGDFVALDHVDFVVPTGSLTALLGPSGSGKSTLLRTIAGLDQPDTGTITINGRDVTRVPPQRRGIGFVFQHYAAFKHLTVRDNVAFGLKIRKRPKAEIKAKVDNLLQVVGLSGFQSRYPNQLSGGQRQRMALARALAVDPEVLLLDEPFGALDAKVREELRAWLRRLHDEVHVTTVLVTHDQAEALDVADRIAVLHKGRIEQVGSPTDVYDAPANAFVMSFLGAVSTLNGSLVRPHDIRVGRTPNMAVAAADGTAGSTGVLRAVVDRVVVLGFEVRVELTSAATGGAFTAQITRGDAEALALREGDTVYVRATRVPPIAGGVSGVDDAGVERVKVTST

SEQ ID NO: 84625 - DNA, 1248 bp, Psychrobacter arcticus 273-4
  CDS (1)..(1248): transl_table=11
atggcgcaagctttagcggagaaggagttacaacacagcactgctagtttagatagctccttcgttcaacatcatgagaccgccgccactcagccgtattttagtgtacaagacttggtggttggctatgacgataccatagtggtcaatggtttatcgctaaacttgcagcaaggtgaaattggctgctttttgggttatagcggctgcggcaagaccacggcattaagagcgattgcgggattagaagagagtcgcggcggtaaaatcactctaaacactcagcggctgacagagcaagcagcacgtgtctcatttgccgttgcgccagccaaacgtgggatgggcatggtgtttcaagactatgcgctgttcggtcatttaagcgtggcaaaaaatatcgcctttggtctcaataaatggtctgctgccgacaaaaaagcccgcgttgctgagatgctcgcgctggtggcattgtctgaacatgccgataagcgcccaagcgagctatcaggcggacaacaacaacgggtggcgttggctcgtgcattagcgccaaagcctaagctgttgctgctcgacgagccgttttcgaacttggatgtggtgttgcgtgaatcactggcgatgaatgttcgcgatattcttaagcgcaccaataccactgctattttggtcactcacgatcaaaatgaagcgtttgcgcttgctgataaagtcggagttatgcatcagggtaagctggtacagtgggcaaccccaagtgagctatatcatgagccggtcagcccgtttgtcgctgagttcgtcggcgaaggcgcgatgatagatggcatcatcaaagaaggtcatgtcgagacggcacttggtgatatttatcgacggatggaagtctatgatgcgtcaggtcagccgcagtattgtgagtacgattatccaaatggtacgccgattaaagtattggtacgtcccgatgatattgtccatgatgatgaaagtacgcagactgcattagtggttggtcgggtgtttcgcggtgccaactatctctatcgcttgcaactggatgatggtcaaaccgtgttgtccttagtcgccagtcatcataatcatgacatcggcacgcaaattggcatcttaccgatactagagcatgtcgtggtatttgatgaaaaagatatcaatactacgacttggtcagaatatgatagatcagagagaattgaagaaataagatatagtcggtga

SEQ ID NO: 84626 - protein, 415 aa, Psychrobacter arcticus 273-4
MAQALAEKELQHSTASLDSSFVQHHETAATQPYFSVQDLVVGYDDTIVVNGLSLNLQQGEIGCFLGYSGCGKTTALRAIAGLEESRGGKITLNTQRLTEQAARVSFAVAPAKRGMGMVFQDYALFGHLSVAKNIAFGLNKWSAADKKARVAEMLALVALSEHADKRPSELSGGQQQRVALARALAPKPKLLLLDEPFSNLDVVLRESLAMNVRDILKRTNTTAILVTHDQNEAFALADKVGVMHQGKLVQWATPSELYHEPVSPFVAEFVGEGAMIDGIIKEGHVETALGDIYRRMEVYDASGQPQYCEYDYPNGTPIKVLVRPDDIVHDDESTQTALVVGRVFRGANYLYRLQLDDGQTVLSLVASHHNHDIGTQIGILPILEHVVVFDEKDINTTTWSEYDRSERIEEIRYSR

SEQ ID NO: 84627 - DNA, 1137 bp, Ralstonia eutropha JMP134
  CDS (1)..(1137): transl_table=11
atgagcattcaggtcaagaacgtagagaagcgctttggcgattttgtcgcgctggacaacgtctcgctggacttcgaagagggcgagctgaccgcgctgctcgggccatcgggctgcggcaagaccacgctgctgcgcattatcgcgggcctggagcgcgccgatgcgggccagatcgtgctggccgggcgcgatgcctccgagcagcatgtgcggcagcgccaggtcggcttcgtgttccagcactatgcgctgttcaagcacatgagcgtgttcgagaacgtggcgttcggcctgcgcgtgaagccgcgcaacgagcgcccgagcgaagcgaagatccgcgagaaggtgaagtcgctactggaactcgtccagctcgactggctggccgaccgctatcccgcgcagctttcgggtggccagcgccagcgtattgcgctggcccgcgcgcttgccgtggagccgcgcgtgctgctgctcgacgagccgttcggcgcgctcgacgccaaggtgcgcaaggaactgcgccgctggctgcgccgcctgcacgacgaactgcacgtgaccagcgtgttcgtgacgcacgaccaggaagaggcgctcgaagtggctgaccaggtggtgctgatgaatcgcgggcatgtcgagcagttcggctcgccggaagcggtctacaaccatccggctacgccgttcgtgttcggcttcctcggcaacgtcaacctgttccatggccgcctggaagtgggcgagagcggcggcctgttgcataccggcgaagcggtgctgccggtcgtgggcagcggccatgagaccgccggcgacgcggtggcctatgtgcggccgcacgaccttgatctcgaacgctatgcgccaggcaccgacggcatcgccgtcacgttgcgccgcgcattgacgctgggcccggtggcccagctcgaactcgagcgcgaggacaaccaggacgtgatcgaagtggcgctgccgctcgagcgcttccgccacgcgggcttccgcgaaggcgaactgctggcggtgcgtccgcgccagctgcgtgtcttcacccagcacacacaacaacaatcgaacgcgcgcgccaacggcgcgacgtcaagccggcaaggggcagtgcgatga

SEQ ID NO: 84628 - protein, 378 aa, Ralstonia eutropha JMP134
MSIQVKNVEKRFGDFVALDNVSLDFEEGELTALLGPSGCGKTTLLRIIAGLERADAGQIVLAGRDASEQHVRQRQVGFVFQHYALFKHMSVFENVAFGLRVKPRNERPSEAKIREKVKSLLELVQLDWLADRYPAQLSGGQRQRIALARALAVEPRVLLLDEPFGALDAKVRKELRRWLRRLHDELHVTSVFVTHDQEEALEVADQVVLMNRGHVEQFGSPEAVYNHPATPFVFGFLGNVNLFHGRLEVGESGGLLHTGEAVLPVVGSGHETAGDAVAYVRPHDLDLERYAPGTDGIAVTLRRALTLGPVAQLELEREDNQDVIEVALPLERFRHAGFREGELLAVRPRQLRVFTQHTQQQSNARANGATSSRQGAVR

SEQ ID NO: 84629 - DNA, 1077 bp, Pseudomonas fluorescens PfO-1
  CDS (1)..(1077): transl_table=11
atgaaccctgcaatcgcaactgccctgaccaaccccggcgcacagatgaaagtgcgcggcgtgcagaagcgcttcggcgccttcacggcgctggataacgtctccctcgatgtcgcggccggtgagctggtgtgcctgctcggcccgtcgggctgtggcaagacaacattgttgcgttgcatcgccggcctggagaaacaggacagcggcgagttgtacctcggcgagcgcgacgtttcccacctcgccccgcaggctcgggactacggcatcctgttccagtcgtacgcgctgtttcccaatctgaccgtcgaagcgaacattgcctacggcctcgccggcagcggtcgcgatgaagtgcgccgtcgcgtcggtcagatgctggaactggtcggcctcaccggcagtgagaaaaagtacccgggccagttatccggcggccagcagcaacgagtcgcattggcccgtgccctggcccccgcgccgtcgctgctgttgctcgacgaaccgatgtcggccctcgacgcccgggtccgcgagcatctgtgcactgaactgcgccaactgcaacgcaacctcggcatcaccaccctgatggtcacccacaatcaggatgaagccatgctgatggccgaccgcatcgccgtgatgaacaacggcaaggtcgagcagtacgccaccccgcaggacatctacaaccgcccggccactccgttcgtggccgagtttgtcggccaaggcaactggctgccgttccagcgcagcagcgacagccacgccaaggtcggcgggatgaacctgcgcctggccgacggcagcgtccacagtccgtcgggtcgactgttctgccgcccggaagcgatcaacgtcaatccgctggtacatgaggaaaacctgttcccggccaaagtccgcgagatcactttcctcggcaaccgctgccgcatgagcttcgagctcgatcaattgcccggccacgccttgctcgccgaactggcaccggaagccatgccgcgcctcggcgcccagcagatcatggtcgccttaccgccacgctgcttgcaggtgtttgcctga

SEQ ID NO: 84630 - protein, 358 aa, Pseudomonas fluorescens PfO-1
MNPAIATALTNPGAQMKVRGVQKRFGAFTALDNVSLDVAAGELVCLLGPSGCGKTTLLRCIAGLEKQDSGELYLGERDVSHLAPQARDYGILFQSYALFPNLTVEANIAYGLAGSGRDEVRRRVGQMLELVGLTGSEKKYPGQLSGGQQQRVALARALAPAPSLLLLDEPMSALDARVREHLCTELRQLQRNLGITTLMVTHNQDEAMLMADRIAVMNNGKVEQYATPQDIYNRPATPFVAEFVGQGNWLPFQRSSDSHAKVGGMNLRLADGSVHSPSGRLFCRPEAINVNPLVHEENLFPAKVREITFLGNRCRMSFELDQLPGHALLAELAPEAMPRLGAQQIMVALPPRCLQVFA

SEQ ID NO: 84631 - DNA, 1110 bp, Rhodobacter sphaeroides 2.4.1
  CDS (1)..(1110): transl_table=11
atggctgatctgaagctgaccggggtcgagaaggcctatggcgaggtgcgcgtcctgcgcgacatcgatctgaccatcgagaagggcgaactcatcgtcttcgtcgggccttcgggctgcggcaagtccacgctcctgcggatgatcgcggggctcgagcggatcagcggcggcacgctcgagatcgacgggcaggtggtcaacgacgtgccgcccgcgcagcgcggcatcgccatggtgttccagagctacgctctgtatccgcatatgaccgtgcggcagaacatggaattcgcgctgaagatcgcgggccagtcgaaggccgagatcgccctcgccgtcgagaacgcggcccggatcctgcagctcacgccctatctcgaccggctgccccgtgcgctctccggcgggcagcgccagagggtcgccatcggccgggccatcgtgcgcgatcccaaggtctatctcttcgacgagccgctctcgaacctcgatgcggcgctccgggtggccacgcggatcgagatcgcccagctcaaggagaagatgcccgaccggacgatgatctacgtcacgcacgatcaggtcgaggcgatgacgctggcaagccggatcgtcgtgctggagggtggcgggatcagccaggtgggcacgccgctcgagctctacacccgcccgcgcaatgccttcgtcgcccgcttcatcggctcgcccgcgatgaacctcctgccgggcgagatcgtcgagaccggccccgagacggtcgtgcggctcgattcaggcggcgtggcgcgcacggcgattccgacgagcccggaggatctggggcttctggtcgatctcggtgtgcgtcccgaagatctggtcaagaccgacggccctccgctctacgagggcgaggtcgagattaccgaggccctgggcgaggtgacgctgctctatttcgtgccgcgcgacgagggcgggcaggtggtggcgaagctgcccggcattcaggccgacctgcgccaccggaccgtgcgcctcggcgccgaccccgcccggctgcacctcttccacgagggccagtccctgctctaccgcgaccggacggagctcgccccggcctga

SEQ ID NO: 84632 - protein, 369 aa, Rhodobacter sphaeroides 2.4.1
MADLKLTGVEKAYGEVRVLRDIDLTIEKGELIVFVGPSGCGKSTLLRMIAGLERISGGTLEIDGQVVNDVPPAQRGIAMVFQSYALYPHMTVRQNMEFALKIAGQSKAEIALAVENAARILQLTPYLDRLPRALSGGQRQRVAIGRAIVRDPKVYLFDEPLSNLDAALRVATRIEIAQLKEKMPDRTMIYVTHDQVEAMTLASRIVVLEGGGISQVGTPLELYTRPRNAFVARFIGSPAMNLLPGEIVETGPETVVRLDSGGVARTAIPTSPEDLGLLVDLGVRPEDLVKTDGPPLYEGEVEITEALGEVTLLYFVPRDEGGQVVAKLPGIQADLRHRTVRLGADPARLHLFHEGQSLLYRDRTELAPA

SEQ ID NO: 84633 - DNA, 1050 bp, Burkholderia sp. 383
  CDS (1)..(1050): transl_table=11
atgagcgaactacgcatccacggcctgtcgaaatcgttcggatcgcataccgtcctgcacgacatcgacctcacggtgcggcgcggctcgcgcctcgcgctgctcggcccgtccggcagcggcaagaccaccctgctgcgcgtgctgtgcggcttcgagcgtgccgagcgcggcaccgtcgaaatcgacgggcgccgcgtggccgcacccgacgtgcacctgccgcccgaacagcgccggatcggctacgtgccgcaggaaggcgcgctgtttccgcatctgtcggtggccgacaacatcgcattcgggctgccgcgcgcggcgcggcggcgccatcatcgcgtcgacgagctgctcgagatggtcgggctgcccgcgtcgtatgcgagccgtgcgccgcagcaactgtccggcggacagcagcagcgcgtcgcgctggctcgcgcgctcgcgcccgagccgtcgctcgtgatcctcgacgaaccgttctcggcgctcgacacgtcgctgcgccacgaaacgcgcagcgcggtcgcggatgcgctcgcggcagcgggcgcgacctcggttctcgtcacgcacgaccagcccgaagcgatgacgcttggcgacgaagtggccgtgatgtggcacggccggctcgtgcagacggccgcgccgcagatgctgtaccggcagcccgtcacgcgcgacgtcgcgtcgttcgtcgggcaggccgtgctgctcgccggtcacgtgcgcagcatgcgcatcgcctgcgcgctcggcgaactgccgctcgtcgcgccgctgcccgacgggccggccgatgcgatgctgcgtcccgagcagatcggcatcgtgccggtcacgcacgccgacgcggcgcgcggccatacggcgcgcgtcgaagccgcgcagttcgcgggccaggacgccgacgtgctcgtacgcctcgatgccgatggcgacgtgctcgtgcgcgcacgcgtgccgggacaccggtgtccggccgtcggcgaacgtgtcgcactggtggtggatggcgcggtcatggcgtacgcgcgctga

SEQ ID NO: 84634 - protein, 349 aa, Burkholderia sp. 383
MSELRIHGLSKSFGSHTVLHDIDLTVRRGSRLALLGPSGSGKTTLLRVLCGFERAERGTVEIDGRRVAAPDVHLPPEQRRIGYVPQEGALFPHLSVADNIAFGLPRAARRRHHRVDELLEMVGLPASYASRAPQQLSGGQQQRVALARALAPEPSLVILDEPFSALDTSLRHETRSAVADALAAAGATSVLVTHDQPEAMTLGDEVAVMWHGRLVQTAAPQMLYRQPVTRDVASFVGQAVLLAGHVRSMRIACALGELPLVAPLPDGPADAMLRPEQIGIVPVTHADAARGHTARVEAAQFAGQDADVLVRLDADGDVLVRARVPGHRCPAVGERVALVVDGAVMAYAR

SEQ ID NO: 84635 - DNA, 774 bp, Burkholderia sp. 383
  CDS (1)..(774): transl_table=11
gtgaacctgctcgaactcgatgacctctgcctcgcgtacgacacgccgcacggccgccgcacggtggtcgacgggctgagccttgcactgccgcgcggcgacatcggctgcctgctcggcgcgtccggctgcggcaagaccaccgtgctgcgcgcgatcgccggcttcgaaccggtacgcatgggacgcatcgtgctggacggcgcgcccgtcgcggcgccgtcgctcgacgtgccgcccgagcggcgccgcatcggcatgatgttccaggactacgcgctgttcccgcacctgagcgcggcggacaacgtcgcgttcggcctgcggcgcatgccgaaagccgaacggcgcatgcgcgtcgcggagatgctcgacctcgtcggcctcgccgattccggcaacgcctatccgcacgaactgtcgggcggccagcagcagcgcgttgcactcgcgcgtgcgctcgcgccgtcgccggagctactgctgctcgacgagccgttctcgaatctcgacgtcgatacgcgcgagcggctcgcgttcgagctgcgcgacatcctgaaacgcaccggccacaccgcgatcctcgtcacgcacaaccaggccgaagcatttgcgatcgccgaccggatcggcgtgatgaaggacggccagctcgcgcaatgggatacgccgtacgcgctacatcaccatccggccagcccgttcgtcgcggatttcgtgcggcgcgacgcgctggccgacgaacgcgcgcgtgcactggcgcgcggccgctga

SEQ ID NO: 84636 - protein, 257 aa, Burkholderia sp. 383
MNLLELDDLCLAYDTPHGRRTVVDGLSLALPRGDIGCLLGASGCGKTTVLRAIAGFEPVRMGRIVLDGAPVAAPSLDVPPERRRIGMMFQDYALFPHLSAADNVAFGLRRMPKAERRMRVAEMLDLVGLADSGNAYPHELSGGQQQRVALARALAPSPELLLLDEPFSNLDVDTRERLAFELRDILKRTGHTAILVTHNQAEAFAIADRIGVMKDGQLAQWDTPYALHHHPASPFVADFVRRDALADERARALARGR

SEQ ID NO: 84637 - DNA, 1068 bp, Burkholderia sp. 383
  CDS (1)..(1068): transl_table=11
atggataagctcatcgtcgacgacctgcatctcagctacggcaccaatccgatcctcaagggcgtgtcgttcgaactgaaggccggcgaagtcgtgtgcctgctcggcgcgtcgggcagcggcaagaccacgctgctgcgcgcggtggccggcctcgaacagccgtccgacggccgcatccagctcgacgaccgcgtgttcttcgacggcgcgcagcgcgtcgacctgcccgtcgagcagcgctcgctcggcctcgtgttccagtcgtacgcgctgtggccgcaccgcaccgtcgccgacaacgtcggctacgggctgaagctgcgccgcgtcgcgccggcagaacagaaacgccgcgtgcagtctgcactcgaccagctcggccttggccatctcgcggaacgcttcccgcatcaactgtcgggcggccagcagcagcgcgtcgcgattgcgcgcgcgctcgtctacaacccgccggtgatcctgctcgacgagccgctgtcgaacctcgacgcaaagctgcgcgaggaagcacgcgcatggctgcgcgagctgatcgtgtcgctcggtctgtcggccctgtgcgtcacgcacgaccagaccgaggcgatggcgatgtccgaccgcatcctgctgctgcgcaacggccgcatcgaacaggaaggcacgccggccgagctgtacggcgcaccgcgctcgctgtacacggccgaattcatgggcagcaacaaccggatcgatgcgcgcgtcgcagccgtcaacggtgaacgcgtaacgctcgccggcgacggctgggaactgcaggcggtcgcccgcgacacgttcgcaccgggccaggacgcgcaggccgtgatccgcctcgaacgcgtgcaggtcgccgacggccccggcgcaaaccggctgcaggccgacctcgtcacgtcgatgtatctcggcgaccgctgggagtacctgttccattgcggcgagatgcgcctgcgcgccttcggacacgtgccgcgcgcagcgggcaagcactggatcgaattcccgaccaacgactgctgggcgttcgcgaaagcgggctga

SEQ ID NO: 84638 - protein, 355 aa, Burkholderia sp. 383
MDKLIVDDLHLSYGTNPILKGVSFELKAGEVVCLLGASGSGKTTLLRAVAGLEQPSDGRIQLDDRVFFDGAQRVDLPVEQRSLGLVFQSYALWPHRTVADNVGYGLKLRRVAPAEQKRRVQSALDQLGLGHLAERFPHQLSGGQQQRVAIARALVYNPPVILLDEPLSNLDAKLREEARAWLRELIVSLGLSALCVTHDQTEAMAMSDRILLLRNGRIEQEGTPAELYGAPRSLYTAEFMGSNNRIDARVAAVNGERVTLAGDGWELQAVARDTFAPGQDAQAVIRLERVQVADGPGANRLQADLVTSMYLGDRWEYLFHCGEMRLRAFGHVPRAAGKHWIEFPTNDCWAFAKAG

SEQ ID NO: 84639 - DNA, 1032 bp, Geobacter metallireducens GS-15
  CDS (1)..(1032): transl_table=11
atgagcatagagattgtcagtgtcaacaaagcttttggcagcttcaccgccctgaacgacgtgaacctcaccgtgccgtcgggggaactgacggcgctcctcggcccctcggggtcgggtaagacgaccctcctgcggatcatcgccgggttggagacccccgatgcgggctcgatccgcttcgacggcgaggagaccaccgaccgccacgtgcgggagcggcaagtggggttcgtcttccagcactatgcgctcttccggcacatgactgtggcagagaacgtcgccttcggcctcaccgtaaagccgcgcaaggagcggccgtcgaagaaggagatcagggagcgggtctttgaactcctgcgcctcgtgcaactcgaaggacttgccgaccgctacccgtcgcagctctcggggggccagcgacagcgggtggccctggcccgggccctggcggtggagccgaaggtgctcctccttgacgagcccttcggcgccttggacgccaaggtgcgggtggaactcagaaggtggctgcggcggctccatgacgagatccatgtcacgagcgtcttcgtcacccacgaccaggaggaggccctggaagtggccgaccggatcgtggtgatgaacaaggggcggatcgagcaggtggggaccccggccgaggtctacgatcagccggccaaccctttcgtcttcgacttcctcggcagcgtgaacctcttccactgccgggcggagcagggacaggcgcgggcagcggccccggaactttccgtggggtatgtccgctcccacgacatcgaggtggagcgcacccccaccgttgctgctgtagaggccgaggtgcgtcatgtccaggcggtgggtccggcggtgcgggtggagctcctcgtgcggggcaccggcaagacggtggaggcggaactctcccgggacggggccgagcgcctcgccctcggcataggtgaaacggtctacgcccggccccggaagatgcagaggtttgtgggtgattatcagatttag

SEQ ID NO: 84640 - protein, 343 aa, Geobacter metallireducens GS-15
MSIEIVSVNKAFGSFTALNDVNLTVPSGELTALLGPSGSGKTTLLRIIAGLETPDAGSIRFDGEETTDRHVRERQVGFVFQHYALFRHMTVAENVAFGLTVKPRKERPSKKEIRERVFELLRLVQLEGLADRYPSQLSGGQRQRVALARALAVEPKVLLLDEPFGALDAKVRVELRRWLRRLHDEIHVTSVFVTHDQEEALEVADRIVVMNKGRIEQVGTPAEVYDQPANPFVFDFLGSVNLFHCRAEQGQARAAAPELSVGYVRSHDIEVERTPTVAAVEAEVRHVQAVGPAVRVELLVRGTGKTVEAELSRDGAERLALGIGETVYARPRKMQRFVGDYQI

SEQ ID NO: 84641 - DNA, 1068 bp, Synechococcus elongatus PCC 7942
  CDS (1)..(1068): transl_table=11
atggcgtcatttgccctcgaactgcgtcaactgcgcaaagcctacagcccaagcgtggtgccggtggcgaacctgtcgctccagctccagcccggtgaatttctaacgctgctgggaccgtctggttgcggtaagtccacgaccctgcgcctgattgccggcttggatcaacccacgagcggcagtatttggctgggcgatcgcgagatcacgaccttgccaccgggcgatcgcgatatggccatggttttccagagctatgccctctatccacatctcaacgtgcgccaaaacttgacgctgggtctacaaattcgtcgcacgtccgccgcagaaattgagcagcgcctgcaacaggtcgcccacaatcttgagctggatcatctgctcgatcgccgaccggcccagctcagtggcggtcagcgccagcgagtcgccttaggaagagccctcgtgcggcaaccctcggttttcctgctcgatgaacccctcagtaatttggatgcgctactgcgcgagcaagtgcgtgcccagatgaaagcgctgtttagtcagcaagcctcgccggtggtctacgtcacccatgaccaaaccgaagcgctgagtttatcgcaccggattgccattctcaatggtgggcatctgcagcaactcgacagccccgatcgcatctaccaagcacccgccaatgcctttgtcgctggcttcatcggcagtccccgcatgaatctgctgccacttcccattcactccggtcaggcttggttgggatcacgcgccttgccaatcccctctcatctcgcggcgcgatcgcaggttttgtggggattgcgacccgaacatctcaaactggcgaccccagaggttgagcgagcgattccggttcagctgcacttgactgagaatctagggatgcagcgcttgttgaccgtggcgatcgcagcgaatcctgaagtacgcctccgcctgctgatgcccagcgatcaacccattcccacggatctacaggtcacgttcgaacctgaaagtcagcactggttttgcccatccaccggcgatcgcctgtag

SEQ ID NO: 84642 - protein, 355 aa, Synechococcus elongatus PCC 7942
MASFALELRQLRKAYSPSVVPVANLSLQLQPGEFLTLLGPSGCGKSTTLRLIAGLDQPTSGSIWLGDREITTLPPGDRDMAMVFQSYALYPHLNVRQNLTLGLQIRRTSAAEIEQRLQQVAHNLELDHLLDRRPAQLSGGQRQRVALGRALVRQPSVFLLDEPLSNLDALLREQVRAQMKALFSQQASPVVYVTHDQTEALSLSHRIAILNGGHLQQLDSPDRIYQAPANAFVAGFIGSPRMNLLPLPIHSGQAWLGSRALPIPSHLAARSQVLWGLRPEHLKLATPEVERAIPVQLHLTENLGMQRLLTVAIAANPEVRLRLLMPSDQPIPTDLQVTFEPESQHWFCPSTGDRL

SEQ ID NO: 84643 - DNA, 1017 bp, Synechococcus elongatus PCC 7942
  CDS (1)..(1017): transl_table=11
gtgggtatccaagtcagtcaggtcagtaagcagtttgggagtttccaagccgtcaaggatgtagatctgacggtggaaaccggcagcttggttgctctgttggggccgtcgggctcggggaaatccacgctactgcgcctgattgcggggctagaacaacctgatagcgggcgaatttttttgactgggcgcgatgcaaccaatgaatcggtgcgcgatcgccaaatcggttttgttttccagcactacgcactgttcaagcatctaacggtgcgtaaaaacattgcctttggtttggaactgcgcaagcacacgaaggaaaaagtccgggctcgcgtagaagagttgctggaactcgtgcagctgacagggttgggcgatcgctatccatctcagttgtcgggcgggcagcggcagcgggttgccttggcgcgggccttagcggttcaaccccaagtcttgctcttggatgagccctttggtgccttggatgccaaggtgcgtaaggaccttcgtagctggctgcgcaagctgcacgacgaagtgcacgtgacgacagtgtttgttacccacgaccaagaagaagcaatggaagtggctgaccaaattgttgttatgaaccacggcaaagtagaacaaattgggtcgcctgcggaaatctacgacaaccccgctaccccgtttgtgatgagctttatcgggccagtcaatgtcctacccaacagttcccacattttccaagcaggcggtctagatacgcctcacccagaagtctttctgcgtccccacgacatcgaaattgcgatcgatccgattcccgaaaccgtgccggctcgcatcgatcgcattgtccatttgggttgggaagtgcaggctgaagtccgtcttgaggatggccaagttttggttgcccatttaccccgcgatcgctatcgggatttgcaactggagccagaacaacaggtgtttgtacgccccaaacaagcgcgatcgttcccgctcaactactcgatttag

SEQ ID NO: 84644 - protein, 338 aa, Synechococcus elongatus PCC 7942
MGIQVSQVSKQFGSFQAVKDVDLTVETGSLVALLGPSGSGKSTLLRLIAGLEQPDSGRIFLTGRDATNESVRDRQIGFVFQHYALFKHLTVRKNIAFGLELRKHTKEKVRARVEELLELVQLTGLGDRYPSQLSGGQRQRVALARALAVQPQVLLLDEPFGALDAKVRKDLRSWLRKLHDEVHVTTVFVTHDQEEAMEVADQIVVMNHGKVEQIGSPAEIYDNPATPFVMSFIGPVNVLPNSSHIFQAGGLDTPHPEVFLRPHDIEIAIDPIPETVPARIDRIVHLGWEVQAEVRLEDGQVLVAHLPRDRYRDLQLEPEQQVFVRPKQARSFPLNYSI

SEQ ID NO: 84645 - DNA, 1074 bp, Rhodospirillum rubrum ATCC 11170
  CDS (1)..(1074): transl_table=11
atgatccatgccgcctccgccctaccgcccgccctagcctgtcgcgggctcagccatggctatggccagcgcgccgtgatccgcgccctcgaccttgaggtcgcggcgggcgagatcgtctgcctgctcggcccctcgggctgcggcaaaagcaccaccttgcggctggccgccgggctggaggacccgtggtcgggaacgatcgccctgggcggacgcccggtcagtggtcagggacggagcgttccgcccgaggagcgccgcattggctttctgttccaggacttcgcgctgtttccccatctgacggtgctgggcaatgtggcgttcgggctgcgcgccctgccccgaccggcgcgccggcagcgggccggggcctgtctggcgatggtcggcatggccgattatgccgaggcttatccccataccctgtcggggggacagcaacagcgcgtcgccctggcccgggccctggctcccgaaccgctgttgatgctgcttgacgaaccgttctccgggctcgattcgcgactgcgccggcggatccgcgaggagacggcccgggttctgcgcgcccgggacgtcgccgccctgatggtgacccacgatcccgaagaggccctggcgatggccgatcgcatcgccctgatggaggacggccgcatcgttcaatgcgccgcgccgcctctgctctatcaccagccggcgacgcccttcgccgcccgtttcctgggggatgtgaccgagatcaccgcgcggaccggcgcggatggccgcatcgagacaccattgggcagtgtgcccgcccccgccgggctggacgccggcaccgccgccctggtgatggtgcgccccgaggcggtcctccttcaccccgccgaaacggcggcggcggcccgcgggcgcgtcaccgcccaccgcgccttgggccggcttacggaactgcggatcgccatcgacggcatggccgagcccgtgctggtccaccaggacggcgacgggagctgggcgatcggcgatggcgtggccctcggcctgcgctccaagggcgtgttcgttttcgcccaaagctga

SEQ ID NO: 84646 - protein, 357 aa, Rhodospirillum rubrum ATCC 11170
MIHAASALPPALACRGLSHGYGQRAVIRALDLEVAAGEIVCLLGPSGCGKSTTLRLAAGLEDPWSGTIALGGRPVSGQGRSVPPEERRIGFLFQDFALFPHLTVLGNVAFGLRALPRPARRQRAGACLAMVGMADYAEAYPHTLSGGQQQRVALARALAPEPLLMLLDEPFSGLDSRLRRRIREETARVLRARDVAALMVTHDPEEALAMADRIALMEDGRIVQCAAPPLLYHQPATPFAARFLGDVTEITARTGADGRIETPLGSVPAPAGLDAGTAALVMVRPEAVLLHPAETAAAARGRVTAHRALGRLTELRIAIDGMAEPVLVHQDGDGSWAIGDGVALGLRSKGVFVFAQS

SEQ ID NO: 84647 - DNA, 1080 bp, Rhodospirillum rubrum ATCC 11170
  CDS (1)..(1080): transl_table=11
atggcaagactaagccttgacggcgtaagccgccagttcggcgcccgcaccgccgtcgaccgcgtgtcgctgaccctggagcccgggaccttcctggcgttgcttgggccttcgggttgcgggaaaaccaccctgctgcgcctgattgccggcttcgaccgccccgatggcggcaccatcaccctgggcgatggcattgtcgccagcgacaccgccttcgtgccgcccgagcgccggggggtgggcatggtcttccagtcctatgccctgtggccgcatatgacggtcgccgagaatgtcgcctatgccctgaagatccggggcgtcgcccgggccgaacgagccaggatcgttcagcgctgcctggatcaggtcggcctggggaccttgggggggcgcctgcccgccgccctgtcggggggccagcgccaaagggtggccttggcccgctgtctggcgatgaacccggcgatcttgctgcttgatgaaccgctggccaatctcgatgcccatctgcgcgaaagcatgcagcgcgaattccgcgccttccatgccaagaccggggcgaccatggtctatgtcacccatgatcaggccgaagcgctgtcgctggccgataaggtggcggttatggacggcggcgttcttcagcaggtcgccaccccggccgagctctatcgccgcccggccaccgatatggtcgcccgcttcgtcggccgcggcatggtgctgcccgcccacctcgggcgggcgaccgccggcggcggcgcggtggcggcgacgctgttcggtcaggcgatcagcgtcgactccccggcccatccggccggaccggcccgcctctgcctgcgctcggaggacctgagcctgaccgggccagatacccccgaaggtctgggctgtacggtctgcgacaccgtgttccacggcgatcatttcgccctcgacgtgcgcccccaggccgccccggaaacggtcttgcgggtcaggctcacccaggcgccgccgccccagggcagcccggttaccctgcgcatcggtggcgggtggatcctgccgcttgccaatggtggctgttga

SEQ ID NO: 84648 - protein, 359 aa, Rhodospirillum rubrum ATCC 11170
MARLSLDGVSRQFGARTAVDRVSLTLEPGTFLALLGPSGCGKTTLLRLIAGFDRPDGGTITLGDGIVASDTAFVPPERRGVGMVFQSYALWPHMTVAENVAYALKIRGVARAERARIVQRCLDQVGLGTLGGRLPAALSGGQRQRVALARCLAMNPAILLLDEPLANLDAHLRESMQREFRAFHAKTGATMVYVTHDQAEALSLADKVAVMDGGVLQQVATPAELYRRPATDMVARFVGRGMVLPAHLGRATAGGGAVAATLFGQAISVDSPAHPAGPARLCLRSEDLSLTGPDTPEGLGCTVCDTVFHGDHFALDVRPQAAPETVLRVRLTQAPPPQGSPVTLRIGGGWILPLANGGC

SEQ ID NO: 84649 - DNA, 1071 bp, Rhodospirillum rubrum ATCC 11170
  CDS (1)..(1071): transl_table=11
atgcggatcgatatcgaaaacatacgcaagaccttccgccatggaaccgcggccgccctggccggcgtcgatctggcggtggcttcgggtgaactggtcgccctgctcggcccctcgggctcgggcaagaccaccttgctgcggatcatcgccggcctggaattccccgatggcgggcgggtgttgttcgatggcgaggacgcctcggccctgccggtgcgcgaccgccatgtcggcttcgttttccagcaatacgccctgtttcgccatatgacggtgcttgagaacgtcgccttcggcctgcgggtgcggccgcgcggcacccggccctcggatggggagatcgatcgccgggttcgcgatctgctgaccctggttcagcttgaggggctggaggggcgctatccggcccagctttcgggcggacagcgccagcgcgtcgccctggcccgcgccctggcgatcgagcccggcgtgctgctgctcgacgagcccttcggcgcccttgacgcccgggtgcgcaaggacttgcggcgctggctgcgcgacctgcacgatcgcaccggccataccacggtcttcgtcacccacgatcaggaagaggccctggaactggccgatcgggtggtggtgttcagccaggggcggatcgaacaggccggcagcccggtcgaggtttatgaccgcccggccacgcccttcgtttacgacttcctggggtcggtcaaccgcctgcccgtcgaggtccgcgacggccacgtctggcttgaaggccacgcccagcctttggccaatggtcaggccgtcgacagcaccgggcttttcaccctgtatgcccgcccccatgacctgggcatcgccgatcagacattgccggcgggcgacgccctgcccggcatcgtcgccgccgtgcgtcaggccggcgccgtggtgcgccttgatgtgcgggtcgccggtcttgaccatctggtcgaggtcgaggtgtcggccggcgatgagcgctggcgggcctggaaaacgggaagcccggttgccctggtgcccgcccgcttcgatctgtttccccggtaa

SEQ ID NO: 84650 - protein, 356 aa, Rhodospirillum rubrum ATCC 11170
MRIDIENIRKTFRHGTAAALAGVDLAVASGELVALLGPSGSGKTTLLRIIAGLEFPDGGRVLFDGEDASALPVRDRHVGFVFQQYALFRHMTVLENVAFGLRVRPRGTRPSDGEIDRRVRDLLTLVQLEGLEGRYPAQLSGGQRQRVALARALAIEPGVLLLDEPFGALDARVRKDLRRWLRDLHDRTGHTTVFVTHDQEEALELADRVVVFSQGRIEQAGSPVEVYDRPATPFVYDFLGSVNRLPVEVRDGHVWLEGHAQPLANGQAVDSTGLFTLYARPHDLGIADQTLPAGDALPGIVAAVRQAGAVVRLDVRVAGLDHLVEVEVSAGDERWRAWKTGSPVALVPARFDLFPR

SEQ ID NO: 84651 - DNA, 1140 bp, Moorella thermoacetica ATCC 39073
  CDS (1)..(1140): transl_table=11
atgccggtaatagccggggatattctttttgacaaagtacgaaaagtttatggccgggtaacggcgttgcagcaactggacctcaaggtcgaggccggggaacgactggtactcctgggtccgtcaggttgtggcaagacgacagccttacgcctggtagccggtctggaaagggtgaccagcggtaaattgtacttaaacggccggctggccaacaatctggaacccggtgagcgggatgtggccatggtcttccagaactatgccctctatccccatatgacggtatgggagaacatcgcctttggactgcaggtgcggcgggtggcgaaggaggaaattaaagccagaattaaggaggctctggctatcctcggcctggaaggattggaggagcgccggccacgggaattgtcaggagggcagcgccagcgggtggcccttgcccgggctatagttaaacaggccccctatttcctcctggatgagcccctttctaacctggatgcccaattgcgtacccaggcccgcagtgagctggtacgcctgcatcggaaactgaattcgaccatgatctatgttacccatgaccaggtagaggccatgaccatagggcagcggatagccatcctggcaggcggcgtcctgcagcaggtagataccccggagaatatctacaaccgcccggccaatacctttgtggccaaatttataggcaacccgcccatgaacctcttgccgggaatagtaaaagggaaccagttgttcctcggcgaaggtctcaaacttataataccaggcaactggagcgcctggctcctgggtaagtcccaaagcaaggtgatcatgggccttaggcccgaagacgttaccttgagggaagaaggggtagccgaaggggaaggcctgccagtacgaattacctggcgagaaaattgtggtaaggagagattatattacctggcagccggcgacaaggagctaatagcttctttcagcgagggccgtacggaaccccggggaggagaattatggctgaccattgactggaataaggttcatttctttaccgaagggaatggcaattccctgggttacccctggaatacccgggagttgtcgctaaaggcttatgcctga

SEQ ID NO: 84652 - protein, 379 aa, Moorella thermoacetica ATCC 39073
MPVIAGDILFDKVRKVYGRVTALQQLDLKVEAGERLVLLGPSGCGKTTALRLVAGLERVTSGKLYLNGRLANNLEPGERDVAMVFQNYALYPHMTVWENIAFGLQVRRVAKEEIKARIKEALAILGLEGLEERRPRELSGGQRQRVALARAIVKQAPYFLLDEPLSNLDAQLRTQARSELVRLHRKLNSTMIYVTHDQVEAMTIGQRIAILAGGVLQQVDTPENIYNRPANTFVAKFIGNPPMNLLPGIVKGNQLFLGEGLKLIIPGNWSAWLLGKSQSKVIMGLRPEDVTLREEGVAEGEGLPVRITWRENCGKERLYYLAAGDKELIASFSEGRTEPRGGELWLTIDWNKVHFFTEGNGNSLGYPWNTRELSLKAYA

SEQ ID NO: 84653 - DNA, 1155 bp, Frankia sp. CcI3
  CDS (1)..(1155): transl_table=11
gtgacagcgctgagtgtcagccaggtcaccaaacggttcggcgccacgacagccctcgccgggatcgatctgcgagtgcccgacggcagtgtgacggccgtgctcgggccgtcgggctgcggcaagaccaccctgctacggctggtggcgggattcggcgacccggacggcgggacgatcgacttcggcgccgaacgggtgttcggccccggtcgcagcgttcccgcccagcggcggcgggtcgggtacgtcccgcaggaaggtgccctgttcccgcacgtggacgtcgcggccaacatcgggttcggcctgccccgcgccgaacgccgatccgccgggcgggccgccgagctgctcgacctcgtcgggctggacgcgagcctggcccgccggttccctcatcagctctccggcggccagcagcagcgcgtggcgctggcgcgggccctggccccgcggccgtccctggtgctgctcgacgagccgttctcctccctggacgcggggctccgcctgaacaccgcccgcgccgtcgtcgaagcgctgcgtgccaaccggaccactgcgctgctcgtcacgcacgaccagaacgaggcgctgtcactggccgaccaggtcgccgtcatggccgccggtcgcatcgcccagaccggcacaccccagggcgtctacgcctcacccggcaacccgaccgtcgcggccttcgtcggcgccgccgtgttcatgcccgccgtcgtcaccgggctcaccgcctcctgcgaccttggcgaactcgccgtccggcccgggtctccccagggcgaggcgcgcctgctcgtccggccggaacagatcaggctcctcgccgcggcggacggcgacaagaaccagaacgagaaccagaacgagaaccagaaccagcacgagagccaggaccgaaacgagaacgaagagcggaacgaagagcggaacaaggagcggaacaaggagcggaacgtggtggtcggccgggtcaccgaggtgcggtacttcggccacgacgccaccgtccagctccggctcgaccggtccggccgcaccgtgacggcgcgggtgccggggcgccagcttcccgaacccggcacccgcgtgcggctgtcgatcaccgggcccgtcacggccttcccaccccattga

SEQ ID NO: 84654 - protein, 384 aa, Frankia sp. CcI3
MTALSVSQVTKRFGATTALAGIDLRVPDGSVTAVLGPSGCGKTTLLRLVAGFGDPDGGTIDFGAERVFGPGRSVPAQRRRVGYVPQEGALFPHVDVAANIGFGLPRAERRSAGRAAELLDLVGLDASLARRFPHQLSGGQQQRVALARALAPRPSLVLLDEPFSSLDAGLRLNTARAVVEALRANRTTALLVTHDQNEALSLADQVAVMAAGRIAQTGTPQGVYASPGNPTVAAFVGAAVFMPAVVTGLTASCDLGELAVRPGSPQGEARLLVRPEQIRLLAAADGDKNQNENQNENQNQHESQDRNENEERNEERNKERNKERNVVVGRVTEVRYFGHDATVQLRLDRSGRTVTARVPGRQLPEPGTRVRLSITGPVTAFPPH

SEQ ID NO: 84655 - DNA, 1065 bp, Acidobacteria bacterium Ellin345
  CDS (1)..(1065): transl_table=11
atgacgacctcatccgttccggaaaacgtctcagtcgggcaggcgctgctcgcggtggactgcgtcgccaagcgctttggaaagaacatcgttcttcgagacgtttcccttacggtcgcgcaaggtgagttcctcagcatcctcggcgagagcggttccggcaaaacgacgctgctgcgtctcatcgcgggcttcgagcaaccggacggcggtaccatcaccatggccggcgagcgcatcgagaacctcccgccttacaagcgccgcgtaaacacggtcttccaaagctacgcgctcttcccacatctcaacgtggaagagaacgtcgcctacggattgaaggtcaacaaaacttccaaaggtgaaatccccaagcgtgtgcaggaagcgctcgccatggtgaagatggagagtttcgcaaagtcgaaaccatccaagctcagcggcggacagcagcagcgggttgcgctcgcgcgcgcattggtaaatcgtcccaagctcctattgctcgacgaaccgctgtccgcgctcgatgccaacctgcggcgcgaaatgcaattcgaattgaaatcgctccaacgcgaagtcggcatcgccttcgtctttgtcacgcacgaccaggaagaggcgatgaccatgtccgatcgcgtcgccctgctgcgttacggagcactggagcagattgccagtccgcgggaaatctatgccaagcccgccaccgcgtatgtcgcgcagttcatcggacacagtaacctcttgcgctgtacagtgagccgcggcatcgctcgctgcggtaacctgatgttcacaacctcggcgcccgacggccccgcggtcttctcgctccggccagaagcaatccgcatcgccagcacggcgagcgatcaagtcaggttcaaaggcaccgtcgctcgccaggtcttccagggcgccactgagctgtacgaactcgacgccggcggttttcggctgaatgcgaagatctatggttcgggagttccctcgggcgagagcgaattcgagtgttctcccgctgacatcgttgtcgtgaaggagagcctctag

SEQ ID NO: 84656 - protein, 354 aa, Acidobacteria bacterium Ellin345
MTTSSVPENVSVGQALLAVDCVAKRFGKNIVLRDVSLTVAQGEFLSILGESGSGKTTLLRLIAGFEQPDGGTITMAGERIENLPPYKRRVNTVFQSYALFPHLNVEENVAYGLKVNKTSKGEIPKRVQEALAMVKMESFAKSKPSKLSGGQQQRVALARALVNRPKLLLLDEPLSALDANLRREMQFELKSLQREVGIAFVFVTHDQEEAMTMSDRVALLRYGALEQIASPREIYAKPATAYVAQFIGHSNLLRCTVSRGIARCGNLMFTTSAPDGPAVFSLRPEAIRIASTASDQVRFKGTVARQVFQGATELYELDAGGFRLNAKIYGSGVPSGESEFECSPADIVVVKESL

SEQ ID NO: 84657 - DNA, 1071 bp, Silicibacter sp. TM1040
  CDS (1)..(1071): transl_table=11
atgactgcgactgcacaggggcaggccatcgcactcgagcaggtgcgcaaggtttggggcgagactgtcttgctcgaaggtctcagccttgacgttcctgcgggatcattcactgcggtgctgggtccgtcgggatgtggcaaatccacgacgcttcgcatcatagcaggccttgaggcggtgacgacggggcaggttcggatcgggaaccgcgatgtgacccagatgagccctgcgcagcgtggcatttccatggtgtttcagtcctatgccttgtttccccaccttaccgttgcggaaaacattgtttttggtctgaaagttgcagggctgccgcgacgcgagcgtcagcgccgtctgaaggatgtggccgaccttctcgaacttggcccctatctcggacgtaaacctgcggcgctttcaggaggccagcagcaacgggtggccctggggcgggctgtgatctcgcagcgcccggtttgcctgatggatgagcctctctccaatctggacgcccgattgcgcgacgagatgcggcgtgaaatccgccgtctgcagctcgcgctcggtttcacgatggtctatgtgacccacgatcagaccgaggcgatcaccatggctgatcgcgtggtcttgatgaacaaaggccagattgagcaagtcgccgccccggaagagatctacaaccgtcccgcgacgccctttgcggcgcggtttatcggtaacccgccgatgaatcttctgtctcctgcagcctttggggcggcgcttgaggccgcgcccgagagtcttcggatcggggtgcgacccgaagcactcacggaatccgcccaaggcccgatcctcgcggaggtcaaaggtgcggaattcctcggcgcggacactctggtagagctgacctgcgcaggcggcgacattttggccaagctgcccggcacacgcggtcttacccccggcgagacgctgagattggcggttccgcccgagcagatccatgcctttgacctgacacggaacgcgcgtctggaagatccaggcctgatcgcgcgtctgcaggagattcactcatga

SEQ ID NO: 84658 - protein, 356 aa, Silicibacter sp. TM1040
MTATAQGQAIALEQVRKVWGETVLLEGLSLDVPAGSFTAVLGPSGCGKSTTLRIIAGLEAVTTGQVRIGNRDVTQMSPAQRGISMVFQSYALFPHLTVAENIVFGLKVAGLPRRERQRRLKDVADLLELGPYLGRKPAALSGGQQQRVALGRAVISQRPVCLMDEPLSNLDARLRDEMRREIRRLQLALGFTMVYVTHDQTEAITMADRVVLMNKGQIEQVAAPEEIYNRPATPFAARFIGNPPMNLLSPAAFGAALEAAPESLRIGVRPEALTESAQGPILAEVKGAEFLGADTLVELTCAGGDILAKLPGTRGLTPGETLRLAVPPEQIHAFDLTRNARLEDPGLIARLQEIHS

SEQ ID NO: 84659 - DNA, 1128 bp, Silicibacter sp. TM1040
  CDS (1)..(1128): transl_table=11
atgccagagcagaggaccaaatccgcgctgccctccgtacaagcggaagggcacgaggtgacgccccggctggaaatccgcaatatccgcaggttctttgagggccgcgcggtggtggatgatgtctcgctgaccgtgctgccggggcaggtgacctgccttctggggccttcgggctgtggcaagtccaccaccctgcgcatgatcgcaggcgtggaaatgcaggacgagggcgaaatctacgtcgatggcaagctgatctgcgacaccatttttcgcgtcccgcccgagcggcgcgagattggtctgatgtttcaggactttgccctgtttccgcatctgagcgttggcgataatgtggcctttggcctgaagggcagcaaggaccagaaacgcgcccgcgcccgcgagcttttggaccgggtgtcgctggcgcaatacatagatgactatccacatcagctctcgggcggggaacagcagagggtggcgctggcgcgcgcgctcgcgccgagccccaagatcatgctgatggatgagccgttttcggggctggacaatcgcctgcgcgatggcatccgagacgagactttgagccttctgaaagaagaagacactgccgttctgcttgtcacccacgaacccgaagaagcgatgcgcatggccgatgagattgcgctcatgcgcgacgggcgtatcgtgcagcagggcgcgccctacaatgtctacacccgtcctgtcgacaaggctgcggtggcgtttttctcggatgtgaacacgctgccagcacaggtcaatggcgcgcttgccgagaccccctttggccagttcctcgcgcccggcgtgccggatggcacagatgtggaaatcgtattccgcccgcagcatctgcgcatcgattttgaccgcaatggtcgaggcccggaagccacggcccgcgatggtgtgcccgcacgcggcatcgtgcagcgtgcgcgattcctcggcaatgagagccttgtggaattccgaatggacttcgacggctcgatcctcaaggccacggtgcccaatgtgttcttgcccgccgaggggcgcgcaatgtggctgacggtgccgcgcgaccggtgttttgtcttcacacggtga

SEQ ID NO: 84660 - protein, 375 aa, Silicibacter sp. TM1040
MPEQRTKSALPSVQAEGHEVTPRLEIRNIRRFFEGRAVVDDVSLTVLPGQVTCLLGPSGCGKSTTLRMIAGVEMQDEGEIYVDGKLICDTIFRVPPERREIGLMFQDFALFPHLSVGDNVAFGLKGSKDQKRARARELLDRVSLAQYIDDYPHQLSGGEQQRVALARALAPSPKIMLMDEPFSGLDNRLRDGIRDETLSLLKEEDTAVLLVTHEPEEAMRMADEIALMRDGRIVQQGAPYNVYTRPVDKAAVAFFSDVNTLPAQVNGALAETPFGQFLAPGVPDGTDVEIVFRPQHLRIDFDRNGRGPEATARDGVPARGIVQRARFLGNESLVEFRMDFDGSILKATVPNVFLPAEGRAMWLTVPRDRCFVFTR

SEQ ID NO: 84661 - DNA, 1056 bp, Myxococcus xanthus DK 1622
  CDS (1)..(1056): transl_table=11
atggcccggttgttcgtcgaggacctccacgtccggctcggcgcgaatgacatcctgaagggcatcaccgccgacttccgagatggcgaggtggtggcgctgctgggccgctccggcagcggcaagtccacgctgctgcgctccgtcgccgggctggagacgccggtgcgagggcgcatccacattggcgagcgcacggtgttcgacgcggcggcgaaggtgaacctgccgccagagcggcgtgacctggggctggtgttccagtcctacgcgctgtggccacacaagacggtgttcgacaacgtggcctacggcctgcggctgcgcaagcagccccgcgagcaggtggagcgggccgtgcgcgaggtgctccagggggtgggcctggaggggtacggcgaccggttccccagccagctctccggtgggcagcagcagcgcgtggcgctggcgcgggcgctcgtctacgggccgccgctggtgctcctggatgagcccttgtccaacctggacgcgaagctgcgggaggaggcgcgcgtgtggattcgcgcgctcatcaagcggctggggctcaccgcgctcttcgtcacccatgaccaggtggaggccatggccatcgccgaccgcatcatgctgctggacggtgggcggatggtgcaggacgggacgccggagcagctctacacggagccccggagcctgttcgccgccgacttcatgggggtgaacaacaccttgtccggccgtgtggtggagcggcgcggcggcgaagcgcggctccaggtgggaagccagtcattgtggggcctgcggcgtggggacggctccggtggcgacacggccaccggcgtcatccgcgtggaggaactccaactggcatccgggcccggggagaaccggctcccggccgcgctggtgaactccatctacgtgggcgggcgctgggagcaccagttccatgccgcagggcagacactgcgcgcctcgacgcgccaggtgttggccccgggggcctacacgctcgcgttccccaaggagcgcctctggattttctga

SEQ ID NO: 84662 - protein, 351 aa, Myxococcus xanthus DK 1622
MARLFVEDLHVRLGANDILKGITADFRDGEVVALLGRSGSGKSTLLRSVAGLETPVRGRIHIGERTVFDAAAKVNLPPERRDLGLVFQSYALWPHKTVFDNVAYGLRLRKQPREQVERAVREVLQGVGLEGYGDRFPSQLSGGQQQRVALARALVYGPPLVLLDEPLSNLDAKLREEARVWIRALIKRLGLTALFVTHDQVEAMAIADRIMLLDGGRMVQDGTPEQLYTEPRSLFAADFMGVNNTLSGRVVERRGGEARLQVGSQSLWGLRRGDGSGGDTATGVIRVEELQLASGPGENRLPAALVNSIYVGGRWEHQFHAAGQTLRASTRQVLAPGAYTLAFPKERLWIF

SEQ ID NO: 84663 - DNA, 1068 bp, Myxococcus xanthus DK 1622
  CDS (1)..(1068): transl_table=11
atgagcatcgtcgtcgaacagctcgcccgtcggttcaatcggggtggcagtcccgccgtgtccaaggtgtccttccaggcccccgaaggtgccatcacctcgctgctggggccgtccggcgcgggcaagtccacgttgctgcggctcatcgccgggctggagattcccgacgagggccgtgtcctcatcgacggcgtggacagcacgcagatgcccgtgcagcagcgtggcgtgggggtggtcttccagagctacgcgctcttcaagcacctcacggtccggcagaacgtggcctttggcctggaggtccggcgcgttcccaaggcggagcgcgaggcccgtgtggaggagatgctccgcatggtgcaactggagcacctgggcggccgctatcccggccagctctccggcgggcagcggcagcgcgtggccttcgcacgcgccctggccatccgcccccgcgtgctgctgctggacgagcccttcggcgcgctggacacgcgggtgcgcgaggagcttcgggaatggctccatgccctgcacgagcgcacgcggttgacgacgttgctggtgacgcacgatcagcaggaggccttggagatatcccagcacgtggtggtgctgagcgagggccgcgtggcccaggcgggctctccctcggacatctacgaccggcccgcgtcccccttcgtcgcctcattcattggaggcgccagcgtgctgcgtggccacgtccaggcgggcagggcggccatgggggcgctgtccgtgacggctcccgccgccgcgcgcgagggcgagccggtgcatgcctttgtccgtccgcatgacatcaagctggcgaaggcagtcgcgggcgcggcgagcgcgtccaccgccaccggccgcgtcgagcggctcaaacccgtgggaggctacgtgaaggtgttccttcgcctaccaagcggggacgaagtcacggtggaggtgccgcgctcggagttcgacgcgctgggcgtggcggagggggactccgtgcgcgccgacgtccggtccgccaccgtcttcgtgggggactactccatctag

SEQ ID NO: 84664 - protein, 355 aa, Myxococcus xanthus DK 1622
MSIVVEQLARRFNRGGSPAVSKVSFQAPEGAITSLLGPSGAGKSTLLRLIAGLEIPDEGRVLIDGVDSTQMPVQQRGVGVVFQSYALFKHLTVRQNVAFGLEVRRVPKAEREARVEEMLRMVQLEHLGGRYPGQLSGGQRQRVAFARALAIRPRVLLLDEPFGALDTRVREELREWLHALHERTRLTTLLVTHDQQEALEISQHVVVLSEGRVAQAGSPSDIYDRPASPFVASFIGGASVLRGHVQAGRAAMGALSVTAPAAAREGEPVHAFVRPHDIKLAKAVAGAASASTATGRVERLKPVGGYVKVFLRLPSGDEVTVEVPRSEFDALGVAEGDSVRADVRSATVFVGDYSI

SEQ ID NO: 84665 - DNA, 1092 bp, Zygnema circumcarinatum
  CDS (1)..(1092): transl_table=11
gtgagttttttagtttacaaagtatccaagctgtccaataatgaaagaattttagaccggatcagtttatatgtgcctaaaggatctttggctgctctcttgggtccttctgggtcagggaaatcaagtctgttaagggtcatagcgggactagataaacccacttacggtagtatatggctgaatggtagggatgcaacttatgtacctgcacagtatcgaaaaatgggttttgtgtttcaaagttttgcactctttcaacacatgaatgttatagacaatatatgttttggactcaaattacgcaagctttctgaagaacaaataactgctcgagtggactattttttagattctctacgtattacagatatagcttttcaatatccatctcaactttcaggaggacaaaaacaacgtgtagctttggcaagaagcttagcagttcaaccagaatttctattattagatgaaccatttggagcattagatggagaattgcgaagacatttaagtaaatggttaaaacattatcttaaaattaatagaataactgctattatggtaacgcatgatcaaaaagaagctgtatcgatggcagatgaaatcctcgtgctaaaacacggacatttagttcaacaaggcgaggctcgagcagtttatgatcaacccatcaatcgatttgtaggcaattttttgggtacattaatagaggcacctaaaattccattctctttgcaaacagttttcaagaatatcaattcgtttgccgttgatccagtatggtctcatacattagataatcgttctgttgacaaatataaattttttgtacgacctcacgaacttcatttgcagtcacaagctgatttagaagcatcattggccatagttgaaaatattacatataaaagatatgtggttcaactagagttatttgtacctgcttttgaatggaagttaacactgcaacttggatataatgcatttcaaaatttaaatattcgttctttatcccagcaattatatgtaaagcctagaccaaaagtacttcaaagagcgtatccagttgaaaattcaatgtctttataa

SEQ ID NO: 84666 - protein, 363 aa, Zygnema circumcarinatum
MSFLVYKVSKLSNNERILDRISLYVPKGSLAALLGPSGSGKSSLLRVIAGLDKPTYGSIWLNGRDATYVPAQYRKMGFVFQSFALFQHMNVIDNICFGLKLRKLSEEQITARVDYFLDSLRITDIAFQYPSQLSGGQKQRVALARSLAVQPEFLLLDEPFGALDGELRRHLSKWLKHYLKINRITAIMVTHDQKEAVSMADEILVLKHGHLVQQGEARAVYDQPINRFVGNFLGTLIEAPKIPFSLQTVFKNINSFAVDPVWSHTLDNRSVDKYKFFVRPHELHLQSQADLEASLAIVENITYKRYVVQLELFVPAFEWKLTLQLGYNAFQNLNIRSLSQQLYVKPRPKVLQRAYPVENSMSL

SEQ ID NO: 84667 - DNA, 1029 bp, Rubrobacter xylanophilus DSM 9941
  CDS (1)..(1029): transl_table=11
gtgagcgccgcgatggtgcgcctggagaacgtctcccgccgctacgggccggtgcgggcggtggaggggctgagcctcgaggtgaggcgcggcgagatcctggccctcctcggcccctccgggtgcggcaagaccaccacgctgcggctcctcgcgggcttcgagcccccggacggggggaggatcgagatctccggccgaccggtggccgcgccgggcgtcttcgtcccccccgagcggcggcggacgggcgtggtcttccaggactacgccctcttcccccacctcaccgtccggcagaacgttgcctacgggctggggcgcgagaagcgggaggcccggctggaggcggtgctgcggctggcccgcctggaggggctcgaggagaggatgccgcacgagctctccggcggccagcagcagcgcgtggccctggcgcgggccctcgccccggagccggcggtcgtgctgctggacgagcccttctccaacctggacgcggcgctccgggcgcgggtgcgggccgagatgcggcgcatcctgctcgccgccgggaccaccgccctcttcgtcacccacgaccaggaggaggccctctccctggcggaccgggtcgcggtgatgttcgaggggagggtggtgcagagcgcaaccccggaagagctctacgagcggccggccgaccgccgggtggccggcttcgtgggggaggcgaacctcctgcccgggacggcggagggcgagagggcgctgtgcgccctcggggaggtgccgctgcgggagcccgcccggggcggcgtggagctgatgctccggcccgagcagctcgcgctcgagccctccccggagggggaggcggaggtggcggagagggagttctacggccacgaccagctcgtccggctgcgcctccccggcggcgaggggctgcaggcccggctgccggggagcatccgcctcaggcccggcgagagggtgcgcgtacgggcgctctcccccgccgtggccttcccccgccccgcgcactag

SEQ ID NO: 84668 - protein, 342 aa, Rubrobacter xylanophilus DSM 9941
MSAAMVRLENVSRRYGPVRAVEGLSLEVRRGEILALLGPSGCGKTTTLRLLAGFEPPDGGRIEISGRPVAAPGVFVPPERRRTGVVFQDYALFPHLTVRQNVAYGLGREKREARLEAVLRLARLEGLEERMPHELSGGQQQRVALARALAPEPAVVLLDEPFSNLDAALRARVRAEMRRILLAAGTTALFVTHDQEEALSLADRVAVMFEGRVVQSATPEELYERPADRRVAGFVGEANLLPGTAEGERALCALGEVPLREPARGGVELMLRPEQLALEPSPEGEAEVAEREFYGHDQLVRLRLPGGEGLQARLPGSIRLRPGERVRVRALSPAVAFPRPAH

SEQ ID NO: 84669 - DNA, 1110 bp, Mesorhizobium sp. BNC1
  CDS (1)..(1110): transl_table=11
atgcccgccgttgagcttgaaaatcttactagaaaatacggtgccgttacagcggtcgatgatatcagccttgtcttgtcggaaggcgagatgctggcaatgcttggccccagcggatgcggaaaaaccacgacgctgcggatgcttgcggggctggagcatcctacatcaggctctattcgcataggcgaaacggtattggccaacggacgcaagtccgtgccgcccgaggaccgcggtatcggcatggtgttccagagctatgccctctggccgcatatgaaggtcttcgacaacgtcgcgtacggtctcaagctgaggaaggttccgaaggccgaaatagcccagagagtgtcgaacgtattggccatagtggacatggcgccctacagtgacaggtttccggcccagctgagcggcgggcagcagcagcgcgtggcactcgcccgcgcaatcgccctcgaacccaacgtgctcctgttcgacgagcctctcagcaatctcgacgcagccctgcgcgagtccatgcgctttgagattcgtcacctgcagcagcggctcggcacaaccagcctctatgtgacgcacagccaggaagaagcgctggcgatggccgatcgcattgctgtcatgcaggcgggaagaatcctccaggtcgatcgacccgatgaaatctatcacaggcccaccaaccggttcgtcggcaaagtggtcggggttgcaaactttctgcgtggccgcgtttccgccaggagcagccatgacgtacatgtgatggtcggagagagcatctgcatcagggccgccaggtcgatcgataccatcgccatgtctcaggatgtggatgtaatgttccggcccgacgccgtagagataagccgcctgggcgacgccaagagcgaaacaccaaacggcgaaaacagcttcgtctgtactgtcagcaagatcagctatctcgggagtgtggtcgaatacttccttgatatcgaaggtgtcgattctgctttccgggtccagggtcgctcacccgtggtcgcaaatatatccgagaaagtcgtcgtgtcattcggcgacgacgttccatgggtcatgcccgtgatggacgactag

SEQ ID NO: 84670 - protein, 369 aa, Mesorhizobium sp. BNC1
MPAVELENLTRKYGAVTAVDDISLVLSEGEMLAMLGPSGCGKTTTLRMLAGLEHPTSGSIRIGETVLANGRKSVPPEDRGIGMVFQSYALWPHMKVFDNVAYGLKLRKVPKAEIAQRVSNVLAIVDMAPYSDRFPAQLSGGQQQRVALARAIALEPNVLLFDEPLSNLDAALRESMRFEIRHLQQRLGTTSLYVTHSQEEALAMADRIAVMQAGRILQVDRPDEIYHRPTNRFVGKVVGVANFLRGRVSARSSHDVHVMVGESICIRAARSIDTIAMSQDVDVMFRPDAVEISRLGDAKSETPNGENSFVCTVSKISYLGSVVEYFLDIEGVDSAFRVQGRSPVVANISEKVVVSFGDDVPWVMPVMDD

SEQ ID NO: 84671 - DNA, 1014 bp, Rhodococcus sp. RHA1
  CDS (1)..(1014): transl_table=11
atgattaccgtgaccggcgcccggaagaactacgggtcctttgctgctctcgacgacgtcacgatcgacatcccctcgggttcgctgaccgcgctcctcgggcccagtggttcgggcaagtcgacgctgctccgatccatcgccggactggagtccctcgactccggcaccgtcgtgatcggcgggaacgacgtcaccgacatctccccgcagaagcgggacatcggcttcgtgttccagcactacgcggcgttcaagcacatgacggtgcgcgacaacgtcgcgttcggcctgaagatccgcaagcggcccaagccggagatcgacaagaaggtcaacgagcttctcgagatcgtcggcctcgacggctttcagcaccgttatccggcgcaactgtcgggcggtcagcgtcagcggatggcgctcgcgcgggccctggccgtggaccctaaggtgcttctcctcgacgagccgttcggcgcgctcgacgcgaaggtccgcacggacctgcgcacctggctgcgccggttgcacgacgaggtgcacgtgaccaccgtgctggtcacccacgaccaggaggaggcgctcgacgtcgccgaccggatcgcggtcctcaacaagggccggatcgagcagatcggtgaaccggaggacctctacgaccgcccccacaacgatttcgtgatgtcgttcctcgggtcggtggccaagctcaacggtcagctggttcgaccgcacgacatccgcctcggccgcgatcccgacctcgccctcgcgcaggaggccggcacggccgaatcgctcggcgtcacccgggcgaccgtcgagcgagtggtgcacctggggttcgaggtgcgggtggatctgcgtaacgaggccaccggtgagcccttctccgcgcaggtgactcgcggcgacagcgcggcgctcggcctgcaggaaggcgagaccgtgtacgcgcgggccacgcgggctcccgaactcccggaggccgaagttccggtctccctgtaa

SEQ ID NO: 84672 - protein, 337 aa, Rhodococcus sp. RHA1
MITVTGARKNYGSFAALDDVTIDIPSGSLTALLGPSGSGKSTLLRSIAGLESLDSGTVVIGGNDVTDISPQKRDIGFVFQHYAAFKHMTVRDNVAFGLKIRKRPKPEIDKKVNELLEIVGLDGFQHRYPAQLSGGQRQRMALARALAVDPKVLLLDEPFGALDAKVRTDLRTWLRRLHDEVHVTTVLVTHDQEEALDVADRIAVLNKGRIEQIGEPEDLYDRPHNDFVMSFLGSVAKLNGQLVRPHDIRLGRDPDLALAQEAGTAESLGVTRATVERVVHLGFEVRVDLRNEATGEPFSAQVTRGDSAALGLQEGETVYARATRAPELPEAEVPVSL

SEQ ID NO: 84673 - DNA, 1131 bp, Shewanella sp. MR-7
  CDS (1)..(1131): transl_table=11
atgagtattcgtttaactaatatttccaaaaaatttggccaatttcaggcgctctcgccgctcaatctcgatattcaagaaggcgagatgataggtcttctcggcccttccggctcgggtaaaaccaccctattgcggattattgccggccttgaaggcgctgatagcggccaaatccatttcggtaatcgcgatgtgactcaagtgcatgtgcgtgaccgcagagtggggtttgtgtttcaaaactacgccctgttccgccatatgacggtcgccgataacgtcgcctttggactcgaagtcattccgaaaaatcagcgcccctctaaggccgaaatccaaaagcgcgttagccatttactcgaaatggtgcaactgggccatttagcccagcgctaccctgagcagctttcgggcggacaaaaacagcgtatcgccttggcccgcgccttagcgactcagcccgaagtgctgttactcgacgaaccctttggcgccctcgatgccaaggtgcgtaaagaactgcgccgctggttgcgcagccttcacgatgagctgaaattcactagcgtgtttgtgacccacgatcaggacgaagccttagagctttccgatagagtggtggtgatgagcaacggccatattgaacaggttaatacgcccattgagttgtatgcccagcccaatagccgctttgtgtttgatttcttgggtaacgtcaatcggtttgaagcaagctggcaacagaatcgttggaccaacggtgacgccttcttagtgccgccagagcaagtgccactgcaacaaaacggcgcgctctatgtgcgtagccacgagctggcactggcggataaacccaacagccaagcccatattccctttaccatagtggcaataacaccagttggagcagaagtgcgcgtcgaactcgcgcctatcggctggcagagtgaagaactgtgggaagccacctttacccaccaccatctgcaagaattaggactgcaaaaaggcagtgtggtctacgccaccccaagaacggcttatttctttggagaacaaagtgatggctcgcctattcgtcaaagctggcccttcctcccaccgggcagcttggccttcgatatttaa

SEQ ID NO: 84674 - protein, 376 aa, Shewanella sp. MR-7
MSIRLTNISKKFGQFQALSPLNLDIQEGEMIGLLGPSGSGKTTLLRIIAGLEGADSGQIHFGNRDVTQVHVRDRRVGFVFQNYALFRHMTVADNVAFGLEVIPKNQRPSKAEIQKRVSHLLEMVQLGHLAQRYPEQLSGGQKQRIALARALATQPEVLLLDEPFGALDAKVRKELRRWLRSLHDELKFTSVFVTHDQDEALELSDRVVVMSNGHIEQVNTPIELYAQPNSRFVFDFLGNVNRFEASWQQNRWTNGDAFLVPPEQVPLQQNGALYVRSHELALADKPNSQAHIPFTIVAITPVGAEVRVELAPIGWQSEELWEATFTHHHLQELGLQKGSVVYATPRTAYFFGEQSDGSPIRQSWPFLPPGSLAFDI

SEQ ID NO: 84675 - DNA, 1008 bp, Hyphomonas neptunium ATCC 15444
  CDS (1)..(1008): transl_table=11
gtgagcgctgccctttctgcccatcaggtgacccgccgctatggtgaccgcgccgtcgttgacggggtgagcctcaccctgccgcccggccagatcacagccctgctgggcggttccggcgcgggcaagtcgacgctcctgcgccttttcgcgggcctggaaggtgtcgatgaaggcgaaatccgcatcggcgaggaagtcctctccgcccccggccgcaccgtgcccgccgagaagcgccgcatcggcctgatctttcaggactttgctctcttcccccatcttaccgccgcccgcaacgtcgccttcggcctcaaacacctgccaaaaaccgaagccgctgaccgggcgcaagcctggcttgcccggctgggccttgagccacgcgcgggtgcctatcctcacgagctctctggcggcgagcaacagcgcgtggccatcgcccgcgccctggcgccggagccttccgccatcctgatggacgaacccttctcgggcctcgatcccagcctgcgcgacagcgtgcgggacgccgccctcgacgccatccgcgccgccggcattcccgccctcctcgtgacccatgatcccgccgaagccctcgaacacgccgatcgcatcgcgatcctcagccagggcaagctgcttcaggaaggccccgcccacgagatctacacccggccggccagtgccgccgtcgccggcgcgctcggcccggtcaaccgcttccgcgcaagcgctgttccgccaggtcttctccacgggcaagcgccggaggcgctgatcctcgtccgtccggaaggcgtgctgatcgacacggcctctccagttcgcgccaccctgctttcggcgcgcatgacggggccgctgatacggttgaaactggacctcaatggcctccgattgaccgctcttgtcccgcccgtgaccggaattgtcccaggaatggagaccggcgtccgcctcgatccggccctgacgttcactttcgcgtcaggcgaactctga

SEQ ID NO: 84676 - protein, 335 aa, Hyphomonas neptunium ATCC 15444
MSAALSAHQVTRRYGDRAVVDGVSLTLPPGQITALLGGSGAGKSTLLRLFAGLEGVDEGEIRIGEEVLSAPGRTVPAEKRRIGLIFQDFALFPHLTAARNVAFGLKHLPKTEAADRAQAWLARLGLEPRAGAYPHELSGGEQQRVAIARALAPEPSAILMDEPFSGLDPSLRDSVRDAALDAIRAAGIPALLVTHDPAEALEHADRIAILSQGKLLQEGPAHEIYTRPASAAVAGALGPVNRFRASAVPPGLLHGQAPEALILVRPEGVLIDTASPVRATLLSARMTGPLIRLKLDLNGLRLTALVPPVTGIVPGMETGVRLDPALTFTFASGEL

SEQ ID NO: 84677 - DNA, 1086 bp, Rhizobium leguminosarum bv. viciae 3841
  CDS (1)..(1086): transl_table=11
ttgagaatggcacatctggcgatcgagggcgtttcgaagctgttcgggaccacctttgccgttcgcgacttctcgctcgaagtgggcgacggcgagctcgtatgcctgctcggcccatccggttccggcaagtcgacgcttctcaggatgatcggcggcttcgagcacccgaccggcggaacgatccgcatcgacgcgaagaatgtgacgacgctgccgcccgagcgacggccgaccggcatggtattccagagccatgcgctctggacgcacatggatgtcttcaacaacatcgccttcggcctgaagctccgccggctaccgaaagtggagatccgccagcgtgtcgaggatgctttggccctggtcggcctcgccgattacgggcggcggatgacgacgcaactctctggcggccagcagcagcgcgttgcgcttgcccgctcgctggtgctcgagccgaagatccttctgctcgacgagcccttcgccagcctcgaccagcatttacgcgaaaggctgcgggaggaggtgcgcgatatccagcagcgcctcggcatcaccacgctcttcgtcacccatggccaggatgaggccttagcgctcgccgaccgcatcgtcgtcatgcgcgacgggggcaccgaacagatcgcgccgccgagcaccatctaccggcagcctcagaccgccttcgtcgccggtttcatcggctcgatgaattttgtccagagccgcaccaggaacggtgtctgcgagcatccgctgttcccgcttgcggttcccgtcgaggatgggccggtgacgctggccgcccgcccggaagcgctgacgatccgttcctcgggccgggtcgatgctgcgacagtccatcgcatcgtcgatttcggcacccacaagatggtcgatatcgatcttgccgacggcacccgcctgaaggcaatggtggcgccggacgatcggatccgggccgggatgagggtcgagccgagtttcgccggctttttcgtcttccgcgacaacgagctcgtccatcagtcgatgccggcaaagggcgacgtggagatcgaagagctgctgcgggtttag

SEQ ID NO: 84678 - protein, 361 aa, Rhizobium leguminosarum bv. viciae 3841
MRMAHLAIEGVSKLFGTTFAVRDFSLEVGDGELVCLLGPSGSGKSTLLRMIGGFEHPTGGTIRIDAKNVTTLPPERRPTGMVFQSHALWTHMDVFNNIAFGLKLRRLPKVEIRQRVEDALALVGLADYGRRMTTQLSGGQQQRVALARSLVLEPKILLLDEPFASLDQHLRERLREEVRDIQQRLGITTLFVTHGQDEALALADRIVVMRDGGTEQIAPPSTIYRQPQTAFVAGFIGSMNFVQSRTRNGVCEHPLFPLAVPVEDGPVTLAARPEALTIRSSGRVDAATVHRIVDFGTHKMVDIDLADGTRLKAMVAPDDRIRAGMRVEPSFAGFFVFRDNELVHQSMPAKGDVEIEELLRV

SEQ ID NO: 84679 - DNA, 1125 bp, Rhizobium leguminosarum bv. viciae 3841
  CDS (1)..(1125): transl_table=11
gtgtcgtcggcttcgacactgtcgtcggtcagggtttgtttcgttcatgaggacaatacgatgaattctgccgtggaatttcaaggggtcagcaagcgcttcggcgaaactgtcgccctcggtgatatctccttctcggtgaacccaggtgaaacaatcgcactgcttgggccgagcggctgcggcaagaccaccattcttcggctcattgccggattcgagcggcccgacaaaggttcgatcctgatcgacggcgagccgatggccggattgaaaccctatcagcgcaatgtcgggctgctgttccagcactacgctcttttcccgcatatgaccgtcgaacagaacatcggctacggacttcgccatcgcaaccatccgccgggacaaataccgcgccgcattgccgagatgcttgagctcgtccggctcgtcggtttcggacagcggcggccgcaccagttgagcggcggccagcagcagcgtgttgcgcttgcgcgggcgcttgccacccatccgagcctcgttcttctggatgagcccctgtcggccctcgacgccaaacttcggcatgagctgcgcaccgaattgaaggatgtgctcgccgcggtcggctcgaccgccatcgtggtaacccacgaccaggaggaagcgatgagcctgggagagcgcatattcgtgatgaaccgtggagcaatcatgcaatccggcaggccggacgatgtgtattggcgtccagactcgcgtttcgtcgcggatttcatgggtcggacgaattggattcatggctcgatttcggccgccggcggaacggccggcaaatttcgctccgaatccggctgggagtttccggtcgtgtccacgggaagtctttcaggtgccgccgagatttgcgtgaggccggaaagcgtcgagatatcgtccggcgctccggctgccggagccatgagcgggcgcgttgccgacgtcgtgacgctcggtgccttcagacatgtcgttctggacctcgccagtggcgaccggataatctcggcttgcccgaaccgtccagacatagccttcgcgcgcgggcaggagatcagcgtttccattccgcccgaggcatgcgttctcttcgcgcgataa

SEQ ID NO: 84680 - protein, 374 aa, Rhizobium leguminosarum bv. viciae 3841
MSSASTLSSVRVCFVHEDNTMNSAVEFQGVSKRFGETVALGDISFSVNPGETIALLGPSGCGKTTILRLIAGFERPDKGSILIDGEPMAGLKPYQRNVGLLFQHYALFPHMTVEQNIGYGLRHRNHPPGQIPRRIAEMLELVRLVGFGQRRPHQLSGGQQQRVALARALATHPSLVLLDEPLSALDAKLRHELRTELKDVLAAVGSTAIVVTHDQEEAMSLGERIFVMNRGAIMQSGRPDDVYWRPDSRFVADFMGRTNWIHGSISAAGGTAGKFRSESGWEFPVVSTGSLSGAAEICVRPESVEISSGAPAAGAMSGRVADVVTLGAFRHVVLDLASGDRIISACPNRPDIAFARGQEISVSIPPEACVLFAR

SEQ ID NO: 84681 - DNA, 1089 bp, Mycobacterium avium 104
  CDS (1)..(1089): transl_table=11
gtgaccgacgccggtaccgaccgcggcgacatcgccatcactgtgcgcgacgcctacaaacgctacggcgacttcgtcgcactggaccacgtggacttcgtggtgccgaccggttcgctgacggccttgttgggtcccagcggatcgggcaaatcgacgctgctgcgcaccatcgccggcctggaccagcccgacaccgggacggtgaccatctacggccgggacgtgacccgggtgccgccgcagcgccgcggcatcggcttcgtgttccagcattacgcggcgttcaagcacctgacggtccgcgacaacgtggcctacggcctcaaggtgcgcaagcggcccaaggccgagatcaaggccaaggtggacaatctgctggaagtggtggggctgagcggttttcagggccgctaccccaaccagttgtccggtgggcaacggcagcggatggcgctggcgcgggcgctggccgtcgacccgcaggtgctgctgctcgacgagccgttcggcgcgctggacgccaaggtgcgcgaggacctgcgcgcctggctgcgccggttgcacgacgaggtgcacgtgaccacggtgctggtcacccacgaccaggccgaggcgctggatgtcgccgatcggatcgcggtgctcaaccagggccgcatcgagcagatcggatccccgaccgaggtgtacgacgcgccgacgaacgcgttcgtgatgtcgtttctgggtgcggtgtccacgctcaacggcactttggtgcgaccgcacgacatccgggtgggccgcactcccgagatggcggtggcggccgaggacggcacagccgagtcgacgggtgtggcccgggccatcgtcgaccgggtggtcaagctgggtttcgaggtgcgggtcgagttgaccagcgcggccaccggcgggcccttcacggcgcagatcacccgcggtgacgccgaggcgctggccctgcgcgagggcgacaccgtctacgtgcgggccacccgggttccgccgatcactgccggtgcgacgacggtgcccgcggtctcccgcgacggcgccgacgaggccaccctgacgtcggcgtaa

SEQ ID NO: 84682 - protein, 362 aa, Mycobacterium avium 104
MTDAGTDRGDIAITVRDAYKRYGDFVALDHVDFVVPTGSLTALLGPSGSGKSTLLRTIAGLDQPDTGTVTIYGRDVTRVPPQRRGIGFVFQHYAAFKHLTVRDNVAYGLKVRKRPKAEIKAKVDNLLEVVGLSGFQGRYPNQLSGGQRQRMALARALAVDPQVLLLDEPFGALDAKVREDLRAWLRRLHDEVHVTTVLVTHDQAEALDVADRIAVLNQGRIEQIGSPTEVYDAPTNAFVMSFLGAVSTLNGTLVRPHDIRVGRTPEMAVAAEDGTAESTGVARAIVDRVVKLGFEVRVELTSAATGGPFTAQITRGDAEALALREGDTVYVRATRVPPITAGATTVPAVSRDGADEATLTSA

SEQ ID NO: 84683 - DNA, 1086 bp, Mycobacterium smegmatis str. MC2 155
  CDS (1)..(1086): transl_table=11
atgtctgacaccagtacgcaaaccaacacgagcgcgatcgtggtgcgcggcgccaacaagcactacggcgatttcgcggcgctcgacaacatcgacttcgaggtgccctccggctcgctgaccgcgctgctgggccccagcggttcgggcaagtcgacactgctgcgggccatcgccggattggatcagcccgattcgggcaccgtcaccatcaacgggcgtgacgtcaccggggtgcccccgcagcagcgcggtatcggtttcgtgttccagcactatgcggcgttcaagcacctgtcggtgcgcgacaacgtggccttcggcctgaagatccgcaagcgtcccaaggccgagatcgccgagcgtgtggacaacctcctggaagtcgtggggctcagcggcttccagacccgctatcccaaccagctgtccggcggtcagcgtcagcgcatggccctggcccgtgcactcgcggtggatccgcaggtgctgctgctcgacgaaccgttcggtgcgctggacgccaaggtccgtgacgacctgcggacgtggctgcgtcgcctgcacgacgaggtgcacgtcaccacggtgctggtgacccacgaccagtcggaggcgctcgatgtggccgaccgcatcgccgtgctcaacaagggccgcatcgaacagatcgggtcgccgaccgaggtgtacgaccagccggccaacgcgttcgtgatgtcgttcctcggcgcggtgtcggagatcaacgggatcctggtgcgcccgcacgatatccgggtgggccgcaccccggagatggcgatcgccgcgagcgacgggacggcggaggccaccggggtgctacgcgcgacgatcgaccgcatcgtgatgctgggcttcgaggtgcgcgtcgaactcaccagcgccgcatcgcatgtgccgttcaccgcgcagatcacgcggggcgacgccgaggcgctcgggttggaagagggcgacacggtgtacgtgcgcgcgacgcgcgtaccgcacatcgcgggtgaggcccaggtgccgcggaccgccaccaacaacgtgaacgccgacgccgcactggcgcagtag

SEQ ID NO: 84684 - protein, 361 aa, Mycobacterium smegmatis str. MC2 155
MSDTSTQTNTSAIVVRGANKHYGDFAALDNIDFEVPSGSLTALLGPSGSGKSTLLRAIAGLDQPDSGTVTINGRDVTGVPPQQRGIGFVFQHYAAFKHLSVRDNVAFGLKIRKRPKAEIAERVDNLLEVVGLSGFQTRYPNQLSGGQRQRMALARALAVDPQVLLLDEPFGALDAKVRDDLRTWLRRLHDEVHVTTVLVTHDQSEALDVADRIAVLNKGRIEQIGSPTEVYDQPANAFVMSFLGAVSEINGILVRPHDIRVGRTPEMAIAASDGTAEATGVLRATIDRIVMLGFEVRVELTSAASHVPFTAQITRGDAEALGLEEGDTVYVRATRVPHIAGEAQVPRTATNNVNADAALAQ

SEQ ID NO: 84685 - DNA, 1062 bp, Nocardioides sp. JS614
  CDS (1)..(1062): transl_table=11
atgaccaaggcgctggaggtcagcggcctcaccgtcggctacggggaccacacggtcctgcacgcggtcgacctcgtcgtcgaggacggcatcacggcggtgctcggggtctccggctgcggcaagtcgaccctgctgcgcaccgtcgccggcttcctccgcccccgcgcgggcaccatccggctggccggcacggaggtgtcctcgccgacccggtccgtggcgccccgcggtcgcaacatcggctacgtgccccaggagggggcattgttcccgcacctggacgtggcgcacaacatcgccttcgggctgccgcgcgggcagcgccggcgcccccgggagcgggtcgcggagatgctcgagctggtcgacctgccggccgggctcgccacccgctacccgcaccacctctccgggggccagcagcagcgggtcgcactggcccgcgcgctcgcggcccggccgtccctggtcctgctcgacgagccgttctcgtccctggacgccgggctgcgcgaggagaccgggcgggcggtcgtcgacgcgctgcgcgccaccgggtccgcggcgctgctggtcacccacgaccagggcgaggcgctgtcgctggccgaccaggtcgcgatcatgtccggcgggcacttcctccaggccgcggcgccgcgcaccatctacctctcccccgccaacgaggccgtcgcctccttcctcgggcacgccgcgctgatccgcggcgaggtcgcgcccggcgagccgtcccgggcgacctgcgtcctcgggtccgtgcgggtcaccggccacccggcgccgggaccggtcaccctggcgctgcggcccgagcaggtgcaggtgcggcccgccgagagcggtgagggcgtcgccgccgaggtgatcgacgtgagcttcttcggccacgacgccaccgtccgggcccggctggacggccaccccgacctggtcatcgcccgcaccccggccgacacgctgccccggcccggcgaccacgtgcgcctcgtcgtcaccggcgaggtgcgctgcttcgccccaggggcgggcgcgtga

SEQ ID NO: 84686 - protein, 353 aa, Nocardioides sp. JS614
MTKALEVSGLTVGYGDHTVLHAVDLVVEDGITAVLGVSGCGKSTLLRTVAGFLRPRAGTIRLAGTEVSSPTRSVAPRGRNIGYVPQEGALFPHLDVAHNIAFGLPRGQRRRPRERVAEMLELVDLPAGLATRYPHHLSGGQQQRVALARALAARPSLVLLDEPFSSLDAGLREETGRAVVDALRATGSAALLVTHDQGEALSLADQVAIMSGGHFLQAAAPRTIYLSPANEAVASFLGHAALIRGEVAPGEPSRATCVLGSVRVTGHPAPGPVTLALRPEQVQVRPAESGEGVAAEVIDVSFFGHDATVRARLDGHPDLVIARTPADTLPRPGDHVRLVVTGEVRCFAPGAGA

SEQ ID NO: 84687 - DNA, 1032 bp, Mycobacterium sp. KMS
  CDS (1)..(1032): transl_table=11
atgacagacgcgatcatcgtgcgcggcgccaacaagcactacggcgacttcgcggcgctggacaacatcgacttcgaggttccggccggttcgctcaccgcactgctcggtcccagcggttcgggcaagtcgacgttgctgcgggcgatcgccggcctcgaccagcccgacaccggcaccatcacgatcaacgggcgcgacgtcaccgcggtaccgccccagcgccgcggcatcggcttcgtcttccagcattacgcggcgttcaagcacctctcggtgcgcgagaacgtcgcgttcgggttgaagatccgcaagcggcccaaggcggagatcaaggagaaggtcgacaacctgctcgaggtcgtcgggttggccggcttccagaaccgctaccccaaccagctctccggcgggcagcggcagcggatggcgctggcccgcgcgctggcggtcgatccgcaggtgctgctgctcgacgagccgttcggcgcgctcgacgcgaaggtgcgcgaggatctgcgggcctggctgcgccgcctgcacgacgaggtccacgtcaccaccgtgctggtcacccacgaccaggccgaggcgctcgacgtcgccgaccgcatcgcggtgctcaacaagggccggatcgaacaggtcggttcaccgaccgaggtgtacgacaccccggccaacgcgttcgtgatgtcgttcctgggcgcggtgtcgtcgctcaacggcacgctcgtgcgcccgcacgacatccgggtcggccgcaatccggaactgccgatctacgagagcgagtcgatccaggccaccggcgtggtcaaggccgtcatcgaccgaatcgtggtgctgggcttcgaggttcgcctcgagctgaccaatgcggcgacgcatgcgccgttcaccgcgcagatcacccgcggtgacgcggaggcgctcgggctgcgcgaaggggagacggtctacgtgcgggccacgcgcgtgccggagatccccggggacaccgaggcgccgaaggcggccgtgctgcgctga

SEQ ID NO: 84688 - protein, 343 aa, Mycobacterium sp. KMS
MTDAIIVRGANKHYGDFAALDNIDFEVPAGSLTALLGPSGSGKSTLLRAIAGLDQPDTGTITINGRDVTAVPPQRRGIGFVFQHYAAFKHLSVRENVAFGLKIRKRPKAEIKEKVDNLLEVVGLAGFQNRYPNQLSGGQRQRMALARALAVDPQVLLLDEPFGALDAKVREDLRAWLRRLHDEVHVTTVLVTHDQAEALDVADRIAVLNKGRIEQVGSPTEVYDTPANAFVMSFLGAVSSLNGTLVRPHDIRVGRNPELPIYESESIQATGVVKAVIDRIVVLGFEVRLELTNAATHAPFTAQITRGDAEALGLREGETVYVRATRVPEIPGDTEAPKAAVLR

SEQ ID NO: 84689 - DNA, 1041 bp, Acidovorax sp. JS42
  CDS (1)..(1041): transl_table=11
atgtcactgatcgaacttgatgcggttgccaagtcctgggggagcaccacggcattgcagtccatgaacctgcgcattgagcccggttctttctgcgtgctgctgggaccctcgggctgcggcaaatcgaccacgctgcgcatcattgcggggctggagtcacccacatcgggcagcgtgcgcatcgacgggcaggacgtcacgcagctgccgccagcgcggcgcggcatcgcgatggtgtttcagaactatgcgctgtttccgcatctgagcgtggcgcagaacatcggctttggactggcggtgcgcaaggtgcccaaggccgaggccgcgcagcgcgtggcgcatgcggccgagctgctcggcctggccccgctgctggagcgccggcccgcccagttgtctggcgggcagcagcagcgcgtggcgctgggccgcgccctggtggcccaggcgcgggtatgcctgatggacgagccgctgtccaacctggatgcgcaattgcgccaggagatgcgcaccgagctgcgtgagctgcagcagcgcctgggcctcaccgtggtgtacgtgacgcacgaccaggccgaggccatgagcatggccgaccaggtggtgctgctgcaccaggggcgtgtggagcagtgcgcgccgccgcgcgatgtgtacgccgcgcccgcttccacctttgccgcgcgcttcatcggcacgcccgccatgaacctggtgcgcctggaacagggccgcatcgcgggcaccgatatcgccgtgggtcgcacgcaggcgcactggctcggcctgcgtcccgaggccgtggccctggacgatggcagcggtgggtcgagcggcgtggccgcctccgtgcacagccaggaatacctgggcgcggatgccgtgctgcgctgcgctatcggcaccgaattcatcaccgtgcgcgcgccggggcagcacgcccccgcagccaacggccagggtgtgcgcctgcggtggtgcgggcacgaccagcatttctttgacgcccagggccagcgcctggcggcttga

SEQ ID NO: 84690 - protein, 346 aa, Acidovorax sp. JS42
MSLIELDAVAKSWGSTTALQSMNLRIEPGSFCVLLGPSGCGKSTTLRIIAGLESPTSGSVRIDGQDVTQLPPARRGIAMVFQNYALFPHLSVAQNIGFGLAVRKVPKAEAAQRVAHAAELLGLAPLLERRPAQLSGGQQQRVALGRALVAQARVCLMDEPLSNLDAQLRQEMRTELRELQQRLGLTVVYVTHDQAEAMSMADQVVLLHQGRVEQCAPPRDVYAAPASTFAARFIGTPAMNLVRLEQGRIAGTDIAVGRTQAHWLGLRPEAVALDDGSGGSSGVAASVHSQEYLGADAVLRCAIGTEFITVRAPGQHAPAANGQGVRLRWCGHDQHFFDAQGQRLAA

SEQ ID NO: 84691 - DNA, 1077 bp, Acidovorax sp. JS42
  CDS (1)..(1077): transl_table=11
atgtttctggaagtgtctcaattggacgtgcggtacgccaaccgcccgcaagccgccgtgcgcggcgtgaccttgggcctggccgccggcgagatcggtgtgctcatcggcccctcgggctgcggcaagaccaccctgctgcgcgcggtggcggggctggaacccgtcgccgaaggagccatccgcctggggggcgaggtggtgggcgcaccggggcgcagcatgccccccgagcagcggcgcatgggcatggtgttccaggactatgcgctgtttccgcacctcagcgtcgggcgcaacgtggctttcggcatccacgcactcccccgggcggagcaggccgaacgcgtgcgcgagtccctggccctggtgggtctggagggcagcgaggcgcgctttccgcacgagctctcgggcggccagcagcagcgcgtggcattggcgcgcgcgctggcaccgcgcccgcggctgatgctgctggacgagccgttttccaacctggatgtggacttgcgcgagcggctggcccacgaggtgcgcagcatcctcaagaccgccggcgccacggcactgttcgtcacgcacgaccagttggaggccttcgccatcggcgaccgcatcggcgtgctggagggcggccacctgcaccagtgggacgatgcctactccctctaccaccgccccgccacgcgcttcgtggccgacttcatcggccatggcgtgttcgcccccgccacgctggtgcagcagggcagccatgtggtggcgcgcaccccgctgggcgacctgaccgacatcgacggctgcctgctgccggcaagctaccccggcggcgaatgcgacgtgctgctgcgtgccgacgacgtggtgcatgacgacagctcacccgtgcgggcgcgcatcgtgcgcaaggcctttcgcggttcggaatttctgtacacgctggaactggccaacggcctcaccgtgatggcccacgtgcccagccaccatgaccatgccatgggcgaatggatcggcattcgcacgcaggtcgaccacgtggtggcgttcgcacgggagagcgccgcacgctga

SEQ ID NO: 84692 - protein, 358 aa, Acidovorax sp. JS42
MFLEVSQLDVRYANRPQAAVRGVTLGLAAGEIGVLIGPSGCGKTTLLRAVAGLEPVAEGAIRLGGEVVGAPGRSMPPEQRRMGMVFQDYALFPHLSVGRNVAFGIHALPRAEQAERVRESLALVGLEGSEARFPHELSGGQQQRVALARALAPRPRLMLLDEPFSNLDVDLRERLAHEVRSILKTAGATALFVTHDQLEAFAIGDRIGVLEGGHLHQWDDAYSLYHRPATRFVADFIGHGVFAPATLVQQGSHVVARTPLGDLTDIDGCLLPASYPGGECDVLLRADDVVHDDSSPVRARIVRKAFRGSEFLYTLELANGLTVMAHVPSHHDHAMGEWIGIRTQVDHVVAFARESAAR

SEQ ID NO: 84693 - DNA, 993 bp, Bacillus cereus G9241
  CDS (1)..(993): transl_table=11
atggatattaaaattagtggattagaaaaggcgtttggaaaaacgcaggcgttaaaaccgctacaaattgttatgaaacaaggtgaattcaccacacttttaggaccttcgggatgcgggaaaacgactttacttagaatgattgcaggacttgaagagccagataaaggtgaaatatattttggggatacgtgcatgtattctggtgcgaaaaaaataaaaacatctcctcatgaacgtaatatcggtatggtatttcaagattttgctttatggccccatatgactgtatttgaaaatgttgcatttggtttaagagctacaaagcaaacaaatcatttacgggaaaaagtagaagatgcgataaagcgagttcgcttgcaagggatggagaaaagatatccacatgaactttctggtggacagcagcaacgtgtcgcatttgctagagcaattgtaacaaaaccacattttattttgttcgatgaaccgctcagtgcactcgatgcaattttgcgagaagaaatgcggttagagcttatggatattgttcattccattagtttaacggcattgtatgtaacgcacgatcaaacagaagctatgtcaatgtcagaccaaattattgtcatgaaacaaggagaagtattacaaaaaggaacaccagaagatatttatgtaaagccatgtcatgaatttgttgcaaaatttgttggtaaggcaaattggcttgtagagggtaaacaaatggttcgtccagagcatgtgagctggacaaaaaatgaagtgtgtgaaatgtatacaggtgaagtccagcacgttacatatgtaggagagcgttatgaagtgaaagtaaacatggggacactcggaatatggacagcttatcacaatagtaaaccaagcattgggaaaccagtagcgttatatgtaccgaaaaaatatattcatcatatagggggagaatcgtatgaagaaattcagttcgcttaa

SEQ ID NO: 84694 - protein, 330 aa, Bacillus cereus G9241
MDIKISGLEKAFGKTQALKPLQIVMKQGEFTTLLGPSGCGKTTLLRMIAGLEEPDKGEIYFGDTCMYSGAKKIKTSPHERNIGMVFQDFALWPHMTVFENVAFGLRATKQTNHLREKVEDAIKRVRLQGMEKRYPHELSGGQQQRVAFARAIVTKPHFILFDEPLSALDAILREEMRLELMDIVHSISLTALYVTHDQTEAMSMSDQIIVMKQGEVLQKGTPEDIYVKPCHEFVAKFVGKANWLVEGKQMVRPEHVSWTKNEVCEMYTGEVQHVTYVGERYEVKVNMGTLGIWTAYHNSKPSIGKPVALYVPKKYIHHIGGESYEEIQFA

SEQ ID NO: 84695 - DNA, 1065 bp, Crocosphaera watsonii WH 8501
  CDS (1)..(1065): transl_table=11
atgatgacagactctattattctccaggtagatcgaattgctaaacaatttgctgctgatacccttcgggtggttgatgaagttagctttcaattagccccaggagaaattttaggcttattgggtccgtcaggttgcggcaaaaccacccttctacgcatgattgccgggtttgagcaacccaccaccggaacgataaccttaggaggggatatggttgccagtgcctctcggttgctacccccggaaaaacgtaacacgggaatggtttttcaagattacgctttgtttccccatctcaacatcgctaaaaatattgcttttggcttaaataagagacgattaaacaaaaaacagataaaacaacgtatcgacgaagtattaaccctgatcggactagaaggcttagaaaaacgctatcctcaccaactctcaggaggacaacaacaacgggtagctttagctagagcattagccccccaacccgccttaattttactcgatgaacccctcagtaacctggatgtacaagttcgtgttaggctgtgccacgaaattcgccaaattctcaaagcaacgggtataaccgccatttttgttacccacgaccaagaagaagctttagccatctgcgatcgcattggggtcatgtctcaaggcaaaatcgaacaactgggaacccctgaagccatttatactcgtccggcttctcgttttgtggctgaatttgtcacccaggctaattttatccctgctcaaagacaaggacaactcttgatcacagaaataggtgcatgggagcttacttcttctcaggaaacggtttctcaaggagacttaatggtgagacaagaggatatcagtttaaaagccgatgatacagctaaggtagttatcagcgatcgccagtttttagggagagaataccgctactgtttacaaaccccttccggtggtcaaattcatgctagaacgactttacatactcagttagaagttggtactaaagttcaactagcgatcgcttctcagtctgctcaaatctttccggctgtttcttcatag

SEQ ID NO: 84696 - protein, 354 aa, Crocosphaera watsonii WH 8501
MMTDSIILQVDRIAKQFAADTLRVVDEVSFQLAPGEILGLLGPSGCGKTTLLRMIAGFEQPTTGTITLGGDMVASASRLLPPEKRNTGMVFQDYALFPHLNIAKNIAFGLNKRRLNKKQIKQRIDEVLTLIGLEGLEKRYPHQLSGGQQQRVALARALAPQPALILLDEPLSNLDVQVRVRLCHEIRQILKATGITAIFVTHDQEEALAICDRIGVMSQGKIEQLGTPEAIYTRPASRFVAEFVTQANFIPAQRQGQLLITEIGAWELTSSQETVSQGDLMVRQEDISLKADDTAKVVISDRQFLGREYRYCLQTPSGGQIHARTTLHTQLEVGTKVQLAIASQSAQIFPAVSS

SEQ ID NO: 84697 - DNA, 1104 bp, Sulfitobacter sp. EE-36
  CDS (1)..(1104): transl_table=11
atgactgaagtgactgacgtgcacccgagactggaaatcaagaacctgcagcgcgcctatggcgggcgggccgtcgtggatgatgtcagcctgaaaatcatgccggggcaggtgacctgcctgctggggccatcgggctgtggcaagtcgaccaccctgcggatgatcgccggcgtcgagatgcaggacagcgggacgatccacgtcgacggcaagctgatctgtgacacggttttccgcgtgccccccgaacggcgcgagatcgggttgatgtttcaggatttcgcgctgtttccgcatcttagcgtggccgacaacgtgggctttggcttgaaaaccggcaccaaggccgaacgccgcgcccgtatcgaggaactgcttgaacgtgtggacctgctgcgatttatcgacggctatccccatcaactgtcagggggcgaacaacagcgcgtggcgctggcgcgtgccttggccccacggcccaagatcatgctgatggacgagcccttctcgggtcttgataaccggctgcgcgatgacatccgggacgagactttgggcatcctgaaagaggaaggtaccgccgtcttgctggtcacccacgagcccgaggaagccatgcgcatggcagacgagatcgccttgatgcgcgatggcaagattgtgcagcagggggccccctataacgtgtacacgcgtcccgtcgaccgcgcgtcggtggcttttttctcggacgcgaatgtgctgcgggccgaggtgtctggggcgctggcgcatacggtctttggccggtttctggcccccggcgtgccggatgggacgcaggtggatatcgtgtttcggccccagcatttgcgcatcgactttgaccgagcgggcaaggggccgttgccaacctcgaccgacggcaccgcagcccgcgccgttgttgcgcgtgcgcgtttcatggggaatgaaagtctcgtggaatttgtcatggaccatgacggcagcaccctgcgcgccaccgtgcccaatgtctttttgccgcagcccggggccgtcatgtggctcaccgtgcgccgcgatcgttgttttgtctttccggtgcatgcggcagggtag

SEQ ID NO: 84698 - protein, 367 aa, Sulfitobacter sp. EE-36
MTEVTDVHPRLEIKNLQRAYGGRAVVDDVSLKIMPGQVTCLLGPSGCGKSTTLRMIAGVEMQDSGTIHVDGKLICDTVFRVPPERREIGLMFQDFALFPHLSVADNVGFGLKTGTKAERRARIEELLERVDLLRFIDGYPHQLSGGEQQRVALARALAPRPKIMLMDEPFSGLDNRLRDDIRDETLGILKEEGTAVLLVTHEPEEAMRMADEIALMRDGKIVQQGAPYNVYTRPVDRASVAFFSDANVLRAEVSGALAHTVFGRFLAPGVPDGTQVDIVFRPQHLRIDFDRAGKGPLPTSTDGTAARAVVARARFMGNESLVEFVMDHDGSTLRATVPNVFLPQPGAVMWLTVRRDRCFVFPVHAAG

SEQ ID NO: 84699 - DNA, 1107 bp, Roseovarius nubinhibens ISM
  CDS (1)..(1107): transl_table=11
atgcccgagccgactgtcccgagactggagatcagcaagctgacgcgccgctatggcgggcgggcggtggtcgaagacctgtcgctgtcggtgccgccggggcaggtgacttgcctcttgggaccgtcaggctgtggcaaatccacgacgctgcgcatggtcgcgggggtcgagacgccggatgcgggcgagatccgcgtcgatggcgagttgatctgtgccaacggccagggtctgccgccagaacagcggcgcatcgggcttatgtttcaggatttcgcgctcttcccgcatctgagcgtcgccgataacgtggcctttggcctcagcggtgccaaggacgcgcaggggcgtcgggtggcggagctgctcgagcgggtggggcttggccaatatggcgcgaaatatcctcatgagctctcgggcggcgaacagcagcgggtggcgctggcgcgggccttggcgccgaacccgtcgatcatgctcatggatgagccgttttccgggctcgacaaccggcttcgcgatggcatccgcgacgagacgatcgacatcttgcgcgaacagggcgcggcggttctgctggtcacccatgagccggaagaggcgatgcgcatggccgatgagatcgctctcatgcgggccgggcggatcgtgcagaagggcgcgccctataacatctataacgcgccggtcgaccgcgactgcatggcgtttttcagcgatgtgaacgtgctcacggggcgggtgcatggggcgctcaccgagaccgcctttggtcagttctttacccccggtgtgcccgatggcgacgaggtcgagatcgtgatccggccgcagcatatcaagatcgatttcgaccgcaacgggcgcggcccgaacccgaccatggccgagggcacggcggtgcgcggtgtggtgcagcgggcgcgattcatgggcaatgagagcctcgttgagtttcgcatggatcacgacggatccttgatgcgggcgacggtgccgaatgtgtttttgcccaatcccggcaatgcgctctggctgatgatccggcgcgacaaatgctttctttttcccaagcgggatctgcaatcgcgcatagaatga

SEQ ID NO: 84700 - protein, 368 aa, Roseovarius nubinhibens ISM
MPEPTVPRLEISKLTRRYGGRAVVEDLSLSVPPGQVTCLLGPSGCGKSTTLRMVAGVETPDAGEIRVDGELICANGQGLPPEQRRIGLMFQDFALFPHLSVADNVAFGLSGAKDAQGRRVAELLERVGLGQYGAKYPHELSGGEQQRVALARALAPNPSIMLMDEPFSGLDNRLRDGIRDETIDILREQGAAVLLVTHEPEEAMRMADEIALMRAGRIVQKGAPYNIYNAPVDRDCMAFFSDVNVLTGRVHGALTETAFGQFFTPGVPDGDEVEIVIRPQHIKIDFDRNGRGPNPTMAEGTAVRGVVQRARFMGNESLVEFRMDHDGSLMRATVPNVFLPNPGNALWLMIRRDKCFLFPKRDLQSRIE

SEQ ID NO: 84701 - DNA, 1005 bp, Oceanicola batsensis HTCC2597
  CDS (1)..(1005): transl_table=11
atgggacgtatcacgctggacaatgtcaccaagagcttcgggccggttcaggtcatcccgccgctgaacctcaccatcgaggacggggagttcacggtcttcgtcggcccctcgggctgcggcaagtcgaccctgctgcggctgatcgcggggctcgaggacgtgagctcgggcgagatccggatcgaccggcaggatgccacccacgtcccgccggccaagcggggcctggcgatggtcttccagtcctacgcgctttatccgcacatgtcggtgcgcaggaacatcgcctttccgctgcgcatggccaagatggaccaggccgagatcgaccgccgggtgaacagcgcggccgaggtgctgaacctcggcgactacctcgaccggcgtccggggcagctttcgggcggtcagcgccagcgggtcgccatcggccgcgccatcgtgcgcgaaccggcggccttcctcttcgacgaaccgctgtcgaacctcgacgccgcgctgcgtgtcggcatgcgtctcgagatcagcgagctgcacgaacggctcaggaccacgatgatctatgtcacccacgaccaggtcgaggccatgaccatggccgacaagatcgtcgtgctgcgcgccggcgtgatcgaacaggtgggcagcccgctcgagctctaccgcacgccccgcaacctctttgtcgcgggcttcatcggctcgccgcggatgaacctgatcgaagggcccgaggccgagagacgcggcgcccataccatcggcatccgccccgaacatatcgaggtgaccgagggcccgggggcctggtccggcaccgtcggcgtggccgagcacctcggttcggacaccttctttcatgtccacgagaccggcctggccgaaaccatcaccgtgcgcgccggcggcgaggtcgggttcgatcacggcgaccgcatccacctgactccgcgtgaggacctgatccaccggttcggcgccgacgggctgcggttcgaatga

SEQ ID NO: 84702 - protein, 334 aa, Oceanicola batsensis HTCC2597
MGRITLDNVTKSFGPVQVIPPLNLTIEDGEFTVFVGPSGCGKSTLLRLIAGLEDVSSGEIRIDRQDATHVPPAKRGLAMVFQSYALYPHMSVRRNIAFPLRMAKMDQAEIDRRVNSAAEVLNLGDYLDRRPGQLSGGQRQRVAIGRAIVREPAAFLFDEPLSNLDAALRVGMRLEISELHERLRTTMIYVTHDQVEAMTMADKIVVLRAGVIEQVGSPLELYRTPRNLFVAGFIGSPRMNLIEGPEAERRGAHTIGIRPEHIEVTEGPGAWSGTVGVAEHLGSDTFFHVHETGLAETITVRAGGEVGFDHGDRIHLTPREDLIHRFGADGLRFE

SEQ ID NO: 84703 - DNA, 1062 bp, Oceanicola batsensis HTCC2597
  CDS (1)..(1062): transl_table=11
gtgacggaagaagcagcagtcgaagcaagaaacgcggcccggtactacgggtcgggcgaggcgacggtcaaggcgctcgacgatgtctcgctgacgatccggaaaggagagttctttaccctcctcggcccatccggctgcggcaagaccactctcctgcgcctgatcgcggggttcgagacgccgaccgagggccagatcctgctctccggccgggacattaccgacatcccgccaaaccgccgccgggtgaacaccgtcttccagagctacgcgctctttccccacctctccgtcgcccgcaacatcgctttcggcctcgagatgctgggccagtcccgcgccgaggtcggcagacgcgtggaggagatgctggacctcgtccggctcgaccggatggcggaccgcaagcccgccatgctctcgggcggtcagcagcagcgtgtcgcgctggcccgcgccctggcccccgcgcccgaggtgctgcttctcgacgaaccgctctcggcgctcgacctcaagctccgcaaggaaatgcagctcgaactcaagcggttgcagaccgaaaccgggatcaccttcgtcttcgtcacccacgaccaggaagaggcgctcaccatgtcggaccgcatcggtgtcatgcggtcgggccggctccagcaggtcggcggcccgcgcgagatctacaacggccccgtcaaccgtttcgtggccgatttcatcggcgagaccaatttcctgaaaggcatgctcgaggggggcagggtccgcctcgcctcgggcgagtcgctcgaggtcccgggcgcggcggggcagggcgaagtcacccttgccatccgtcccgaacagatccgcatcacggacgacgggccgatcgaggccacgctgacgcagaccgtctatttcggcaccgacacccactgtcacctgcatctcagggacgggaccgagatcgtcgcccgcctgcaatccccgccctccggcgaggtcggcctcaccaccggagagaccctgcgcctcgcgcccgtgcccggcgcggtccaggtcctggagggcgactga

SEQ ID NO: 84704 - protein, 353 aa, Oceanicola batsensis HTCC2597
MTEEAAVEARNAARYYGSGEATVKALDDVSLTIRKGEFFTLLGPSGCGKTTLLRLIAGFETPTEGQILLSGRDITDIPPNRRRVNTVFQSYALFPHLSVARNIAFGLEMLGQSRAEVGRRVEEMLDLVRLDRMADRKPAMLSGGQQQRVALARALAPAPEVLLLDEPLSALDLKLRKEMQLELKRLQTETGITFVFVTHDQEEALTMSDRIGVMRSGRLQQVGGPREIYNGPVNRFVADFIGETNFLKGMLEGGRVRLASGESLEVPGAAGQGEVTLAIRPEQIRITDDGPIEATLTQTVYFGTDTHCHLHLRDGTEIVARLQSPPSGEVGLTTGETLRLAPVPGAVQVLEGD

SEQ ID NO: 84705 - DNA, 1041 bp, Oceanicola batsensis HTCC2597
  CDS (1)..(1041): transl_table=11
atgtacctgaccgttcgcgacgccacgaaaacctacggctccttcaccgcgctcgaccgcgtctcgatcgggatcgaccaaggggaattcgtgtgcctgctgggcccgtccggctgcggaaaaaccacgctgttgcggctgatcgcggggctgtcggacctggatggcggccagatcctgctcgagggcgcagcattgtccgacctgcccgcccgcaagcggggcttcggcatcgtgttccagtcctattcgcttttcccgaacatgaccgtggccgagaatatcggctacgggctgaagatccgcggcacgcaccggtccgaggtcgcccggcgggtaagcgagctgctcgaactggtgaagctaccgcagctggcggacaactttcccggccagctttcggggggacagcagcaacggatcgcgctggcccgcgccatcgccgtcgatccgcgggtgctgctgctggatgagcctctctcggcgctcgatgccaaggtccggtccgagttgcgggacgaaatccgtcatgtccagcgctctctcgggattcccaccctgatggtcacccatgaccaggaggaggcgctggcgctggccgacaagatcatctgcatgaaccacggcgtcgtggtacaggcgggcacgccggaacacctctaccaccgaccccggacacggttcgtggccgagttcatgggcatcagtaaccttctgactgccgacgcggtccgacgggccttccccgacctcccggcgaggcagcccggcggaacggagggaaaccatgtcgcctgcatccgccccgaacagatcggcgtgaccccggccccggacggaaacgccaccgtgcgcaacatcagctttctcggcaacctgcggcggctagaggtggacagcgccggcggtccgctggtggtcgaaacccacggctccgacgcctgccgcgaaggcgaccgcgtgatgctccggctcgcgccggacgcctgcacctgggtcgctgacgaccttgcccgggacccggccgaggtacgggcatga

SEQ ID NO: 84706 - protein, 346 aa, Oceanicola batsensis HTCC2597
MYLTVRDATKTYGSFTALDRVSIGIDQGEFVCLLGPSGCGKTTLLRLIAGLSDLDGGQILLEGAALSDLPARKRGFGIVFQSYSLFPNMTVAENIGYGLKIRGTHRSEVARRVSELLELVKLPQLADNFPGQLSGGQQQRIALARAIAVDPRVLLLDEPLSALDAKVRSELRDEIRHVQRSLGIPTLMVTHDQEEALALADKIICMNHGVVVQAGTPEHLYHRPRTRFVAEFMGISNLLTADAVRRAFPDLPARQPGGTEGNHVACIRPEQIGVTPAPDGNATVRNISFLGNLRRLEVDSAGGPLVVETHGSDACREGDRVMLRLAPDACTWVADDLARDPAEVRA

SEQ ID NO: 84707 - DNA, 1071 bp, Prochlorococcus marinus str. MIT 9211
  CDS (1)..(1071): transl_table=11
ttgactgatattcacctacatataaacaatcttagccactactatggcagttcaagtcagactatacctaccttacgatcaataaatttatcacttattagaggcgaattacttggtattttaggcccatcaggttgtggcaaaaccacactcttgcgactgatagctggtttagagtctccatcacaaggaaatatttgtattgaaaatagaatagtttcttctccagagcatgttctgccaactgaacgtaggggcataggaatggtttttcaggattacgcattattcccacatctaaatgtatggagaaatgtctgttttgggctatccacaaatagcgacaaagctaaggctaattggttactagaactcgttgggttgattgatttgcgagatagttaccctcatcaactatctggtggacaaaaacaaaggctagccttagcaagggcacttgctccaggcacttcattactgcttttagatgaacctttttgcagcttagatgtagaggtaagacataatcttcgcaatgtactaactagtgtacttagatcctgttcagctacagcaatattagttactcatgacccacatgaagccttaggcatttgtgatcgagtggcggtattaaaggatggctctttacaccagtgctcctcccctgtcgatatgttacaaaagccacttacatcctttgtaggtaaatttgtctttcaaaataatatagtaaatatacactcaaatggtaatagtttcaatacaccatatggttcgatcattgctcaatctcatctttttaaatcacagccaaatgtcctcatgtttgatgaaaactccttatctatatcattaaatccctgcggtaaatgtacgattataagcaaagagtttcgagcttctcaatggatttgtagaattcaggattctcaaaatatacttagggtttcagtaacattggatgctaatattaagataggagataaatgcgacctcaaatttattaatggtaaatatgcttttctttatccaggctgtgtttcttgtattcttaaagcaaataattag

SEQ ID NO: 84708 - protein, 356 aa, Prochlorococcus marinus str. MIT 9211
MTDIHLHINNLSHYYGSSSQTIPTLRSINLSLIRGELLGILGPSGCGKTTLLRLIAGLESPSQGNICIENRIVSSPEHVLPTERRGIGMVFQDYALFPHLNVWRNVCFGLSTNSDKAKANWLLELVGLIDLRDSYPHQLSGGQKQRLALARALAPGTSLLLLDEPFCSLDVEVRHNLRNVLTSVLRSCSATAILVTHDPHEALGICDRVAVLKDGSLHQCSSPVDMLQKPLTSFVGKFVFQNNIVNIHSNGNSFNTPYGSIIAQSHLFKSQPNVLMFDENSLSISLNPCGKCTIISKEFRASQWICRIQDSQNILRVSVTLDANIKIGDKCDLKFINGKYAFLYPGCVSCILKANN

SEQ ID NO: 84709 - DNA, 1122 bp, Xanthobacter autotrophicus Py2
  CDS (1)..(1122): transl_table=11
atgagaggaagagttgcggtgctgatcgacgacatcgtggagaccaattccgtgcgcagccgcacgccagccgccatcgccaagggcctcgccttcgatgccgtggaactcgcctatggcggcgtgcctgccgtgaagggcgtgagccttgccgttaagccgggggaggtcttgtgcctgctcggccagtcgggctgcggcaagacctcgctgctgcgccttgccgccggcatcgagcggccggaccggggccgcatcctcatcgacggagaggcggtggcggggcagggcaccttcgtgccgccggagcgccggggcgtggggctggtgtttcaggactatgcgctgtttccccacctcaccaatctggagaacgtgctgttcggcctcggcggcctgaaacgggcggaggccgagcgcgaggcccgcctggcgctggcccgcgtggacctcgccgatcttgccgacgcctatccccacgagctctccggcggccagcagcagcgcgtcgcgttggcccgcgccatggcgccgcgcccgggcatcctgttgctcgatgagccgttctccgggctcgacaagcggctgcgcgaccaggtccgcgccgacacgctggcggtgctgcgggacgcgaaggccaccgccatcatcgtcacccacgatccggaagaggccatgcggctggccgaccgcatcgctctgttgcgcaagggcgagttggtgcagcttggcccgccggcggagctgtatcgccgcccggcggacctcggcgtcgcccgcttcttctgtgaattgaacgagatggaggcggtggcgctggagggacaagtggacaccccgctcggccgctttcccgctcccgccgggcaaagggagggcgaggtggtggtggcggtgcgcccgcagggcatcgcgctcgcgcccgctggcctcggcatcgccggccgggtggtggagcggcgcttcctgggcgagctcgatctcgtggaagtgatcgtggacggtctcgagcgtccgcttctgatccgccttcgggatgcaggcgccgtgcgcaagggcgacgaggtggggcttgtggtcgaccccgccgatgtccttgttttcgccgcgggcggggcctag

SEQ ID NO: 84710 - protein, 373 aa, Xanthobacter autotrophicus Py2
MRGRVAVLIDDIVETNSVRSRTPAAIAKGLAFDAVELAYGGVPAVKGVSLAVKPGEVLCLLGQSGCGKTSLLRLAAGIERPDRGRILIDGEAVAGQGTFVPPERRGVGLVFQDYALFPHLTNLENVLFGLGGLKRAEAEREARLALARVDLADLADAYPHELSGGQQQRVALARAMAPRPGILLLDEPFSGLDKRLRDQVRADTLAVLRDAKATAIIVTHDPEEAMRLADRIALLRKGELVQLGPPAELYRRPADLGVARFFCELNEMEAVALEGQVDTPLGRFPAPAGQREGEVVVAVRPQGIALAPAGLGIAGRVVERRFLGELDLVEVIVDGLERPLLIRLRDAGAVRKGDEVGLVVDPADVLVFAAGGA

SEQ ID NO: 84711 - DNA, 1143 bp, Pseudomonas putida GB-1
  CDS (1)..(1143): transl_table=11
atggcagttgcctccggtgcctataagaaagccctcgagggtggccagcaacccaagcaggtgctggtcaaaatcgaccgggtcacgaagaagttcgacgaaaccatcgccgtagaggatgtgtccctggaaatccgcaagggtgagatcttcgccctgctgggtggctccggatccggcaagtccaccttgctgcgcatgctggccggcttcgagcgcccaaccgaagggcggattttcctcgatggcgtcgacatcaccgatatgccgccctacgagcggccgatcaacatgatgttccagtcctacgcgctgttcccgcatatgaccgtggcgcagaacatcgccttcggcctgcagcaggacaagatgcccaaggccgagatcgatgcccgtgtggccgagatgctcaagctggtgcacatgacccagtacgccaagcgcaagccgcaccagttgtcgggtggccagcgtcagcgtgtggcgttggcccgctcgctggccaagcgccccaagctgctgctgctcgacgagccaatgggtgcgctggacaagaaactgcgttcgcagatgcagctggaactggtggagatcatcgagcgcgtaggcgtgacctgcgtgatggtgacccacgaccaggaagaggccatgaccatggcccagcgcatcgccatcatgcacctgggctggatcgcccagatcggctcgccggtggacatctacgagacgcctaccagccgcctggtgtgcgaattcatcggtaacgtcaacctgttcgaaggtgaagtggtcgacgacgccgaaggccacgcgatcattgccagcccggagctggagcgcaagatctacgtgggccacggcatcaccacctcggtggaagacaagcacatcacctacgccttgcgcccggaaaagatgctggtcaccacccagcagccgacctgcgagcacaactggtcgcgcggcaaggtccacgacatcgcctacctgggcggccactcggtgttctacgtcgagctgccgagcggcaaggttgtccagtcgttcgtcgccaacgccgaacgccagggcactcgtccgacctggggcgatgaagtgtacgtatggtgggaagacgacagcggcgtggtactgcggtcatga

SEQ ID NO: 84712 - protein, 380 aa, Pseudomonas putida GB-1
MAVASGAYKKALEGGQQPKQVLVKIDRVTKKFDETIAVEDVSLEIRKGEIFALLGGSGSGKSTLLRMLAGFERPTEGRIFLDGVDITDMPPYERPINMMFQSYALFPHMTVAQNIAFGLQQDKMPKAEIDARVAEMLKLVHMTQYAKRKPHQLSGGQRQRVALARSLAKRPKLLLLDEPMGALDKKLRSQMQLELVEIIERVGVTCVMVTHDQEEAMTMAQRIAIMHLGWIAQIGSPVDIYETPTSRLVCEFIGNVNLFEGEVVDDAEGHAIIASPELERKIYVGHGITTSVEDKHITYALRPEKMLVTTQQPTCEHNWSRGKVHDIAYLGGHSVFYVELPSGKVVQSFVANAERQGTRPTWGDEVYVWWEDDSGVVLRS

SEQ ID NO: 84713 - DNA, 990 bp, Pseudomonas putida GB-1
  CDS (1)..(990): transl_table=11
atgtcgatcgaagttcgtaatgtcagcaagcgcttcaacagcttccaggccctgaacaacatcaacctggacatcaacagcggcgagctggtggccttgctcggcccgtccggctgcggcaagaccacgctgctgcgcatcatcgccggcctggaaaccccggaccagggcaacatcgtgttccatggcgaggacgtgtctggccatgacgtgcgtgaccgtaacgttgggttcgtgttccagcactatgcgctgttccgccatatgagcgtgttcgacaacgtcgccttcggcctgcgcatgaagcccaagggcgagcgcccgagcgagagcaagatcgccgagaaggtgcacgagctgctgaacatggtgcagttggactggttgtccgatcgctaccccgagcagctgtctggcggccagcgtcagcgtatcgccctggcccgcgccctggcggtggagcccaaggtgctgctgctggacgagccgttcggtgcgctggatgccaaggtgcgcaaggagctgcgccgctggctggcgcggttgcacgaggatatcaacctgacctcggtgttcgtgactcacgaccaggaagaagccatggaagtggctgaccgcatcgtggtgatgaacaagggcgtgatcgagcagatcggttcgccgggcgaggtgtacgagaagccagccaacgatttcgtctaccacttcctcggcgattccaaccgcctggcactgagcgaaggccaccacgtgctgttccgtccgcacgaggtgtcgctgtcgcggcatgagaccgaagggcaccatgcggccgaggtgcgggacatccggccgttgggcgcgaccacgcgggtgactttgaaggtggaagggcagagcgagctgatcgaggccgaagtggtcaaggaccatgacagcctgaccggcttggcgcgtggggagacgttgttcttccggccgaaggtttggcagaaggtggcggatatctga

SEQ ID NO: 84714 - protein, 329 aa, Pseudomonas putida GB-1
MSIEVRNVSKRFNSFQALNNINLDINSGELVALLGPSGCGKTTLLRIIAGLETPDQGNIVFHGEDVSGHDVRDRNVGFVFQHYALFRHMSVFDNVAFGLRMKPKGERPSESKIAEKVHELLNMVQLDWLSDRYPEQLSGGQRQRIALARALAVEPKVLLLDEPFGALDAKVRKELRRWLARLHEDINLTSVFVTHDQEEAMEVADRIVVMNKGVIEQIGSPGEVYEKPANDFVYHFLGDSNRLALSEGHHVLFRPHEVSLSRHETEGHHAAEVRDIRPLGATTRVTLKVEGQSELIEAEVVKDHDSLTGLARGETLFFRPKVWQKVADI

SEQ ID NO: 84715 - DNA, 1059 bp, Pseudomonas putida GB-1
  CDS (1)..(1059): transl_table=11
atgaaccacaccacccccggcgcacaaatgaccgtgcgcaacatccacaagcgcttcggtgccttcacggcgctgaacgatgtctcgctggacatcgccgccggcgaactggtgtgcctgcttggcccgtccggttgcggcaagaccacgctgttgcgttgcattgccggcctggagcgccaggaccgcggtacgctgtacatcggcgaacgcgatatttccgagctgccgccccaggcccgtgactacggcatcctgttccagtcctacgcgctgtttcccaacctcaccgtcgaagccaacatcgcctacggcctgaccggcagtggccgcgagcaggcccgtcagcgtgtggccgaaatgctcgagctggtgggccttgccggcagcgagaaaaagtaccccggccagctttccggtggccagcagcaacgtgtggccctggcccgcgcgttggcaccgtcgccttccttgttgctgctcgacgaaccgatgtcggcgctggacgcgcgggtgcgcgagcacctgtgcaccgagctgcgccagctgcaacgccagctgggcatcaccaccttgatggtgacccacaaccaggacgaggccatgttgatggccgaccgcattgcggtaatgaacaacggccaggtcgagcagtacgccaccccgcaggaaatctacgaccagccggccacgccgttcgtcgccgagttcgtcggccagggtaattggctgccgtttcagcgcagcagcgacagccatgcccaggtcggcggcatgaacatgcgcctggcgccgggttcggcccaggccagcagcggtcggctgttctgccgcccagaggcgatcacggtcaacccggtggtacacgaagaaaacctgttcccggccatggttcgcgaaatcaccttcctcggtaatcgctgtcgcatgagctttgaactcaaggccttgccaggccatgccttgctggctgaactggcccccgaagccatgccgcgcctgggttcgcaggacatctgggtggcactgccgccgcagagcctgcaggtgtttgcctga

SEQ ID NO: 84716 - protein, 352 aa, Pseudomonas putida GB-1
MNHTTPGAQMTVRNIHKRFGAFTALNDVSLDIAAGELVCLLGPSGCGKTTLLRCIAGLERQDRGTLYIGERDISELPPQARDYGILFQSYALFPNLTVEANIAYGLTGSGREQARQRVAEMLELVGLAGSEKKYPGQLSGGQQQRVALARALAPSPSLLLLDEPMSALDARVREHLCTELRQLQRQLGITTLMVTHNQDEAMLMADRIAVMNNGQVEQYATPQEIYDQPATPFVAEFVGQGNWLPFQRSSDSHAQVGGMNMRLAPGSAQASSGRLFCRPEAITVNPVVHEENLFPAMVREITFLGNRCRMSFELKALPGHALLAELAPEAMPRLGSQDIWVALPPQSLQVFA

SEQ ID NO: 84717 - DNA, 735 bp, Pseudomonas putida GB-1
  CDS (1)..(735): transl_table=11
gtgattgaagtccgtgacctgctgaaagtcttcgacacccgtggccaggtggtacgggctgtggataacgtcaccacccaggtcgccaagggcgaagtggtggtagtgctcggcccgtcggggtcgggcaagtcgaccttcctgcgttgcctcaacggcctggagcatttcgaccagggccatgtggccatcgacggtctgcagctggccgaccccaagaccgacatcaacgcctaccgccgcgaagtcggcatggtgttccagcacttcaacctgttcccgcacatgaccgtgctggaaaacctgtgcctggcgcagaaggtggtgcgcaagcgcaacaaggctgaccgcgaagccaaggcccgggcgctgctggaaaaggtcggcattgcgcaaaaggccaacgagttcccgtctcggctttctggcgggcagcagcagcgcgtagcgattgcccgagcgctggcgatggacccgaaagtgatgctgttcgacgaaccaacctcggcgctcgacccggaaatggtcggcgaggtactggacgtgatgaagaccttggcccaggaaggcatgaccatggtctgcgtcacccacgaaatgggctttgcccgcgaagtggccgaccgtgtgctgttcttcgatcatggcaagctgctggaggattcggccccggccgcgttcttcgccgccccgaaagacccgcgtgcgcaggccttcctgcgccaggtgctgtaa

SEQ ID NO: 84718 - protein, 244 aa, Pseudomonas putida GB-1
MIEVRDLLKVFDTRGQVVRAVDNVTTQVAKGEVVVVLGPSGSGKSTFLRCLNGLEHFDQGHVAIDGLQLADPKTDINAYRREVGMVFQHFNLFPHMTVLENLCLAQKVVRKRNKADREAKARALLEKVGIAQKANEFPSRLSGGQQQRVAIARALAMDPKVMLFDEPTSALDPEMVGEVLDVMKTLAQEGMTMVCVTHEMGFAREVADRVLFFDHGKLLEDSAPAAFFAAPKDPRAQAFLRQVL

SEQ ID NO: 84719 - DNA, 990 bp, Pseudomonas putida GB-1
  CDS (1)..(990): transl_table=11
atgagcttcgtcagcgtacagaaactgcagaagagctacgccggcagcccggtattcgagaacatcgactgccacatcgaacgcggcgagttcgtcaccttgctgggcccgtccggctgcggcaaatccaccctgctgcgctgcatcgccgggctgaccccggtggacagcgggcagatcctcctcgacggccacgacatcgtgccgctaagcccgcaaaaacgtggcatcggcatggtgttccaaagctacgcactgttccccaacatgaccgtggagcagaacgtcgcctttggcctgcgcatgcagaaagtcaaagccgacgaaagccagctgcgagtgcgcgaggccctggagctggttgagctgggcacattcgccgggcgctacccgcaccagttgtctggcggccagtgccaacgcgtggccctggcccgctcgctggtcacccgcccgcgcctgctgctgctcgacgagccgctgtcggcactggatgcgcgtatccgcaagcacctgcgcgagcagattcgcgccatccagcgcgagctggggctgaccaccatcttcgtcacccacgaccaggaagaggcgctgaccctgtccgaccgcatcttcctgatgaaccagggccgcatcgtccagagtggtgatgccgaaactctgtacacagcgcctgtggacctgtttgccgccggcttcatcggcaactacaacctgctcgacgccgacagcgccagccgcctgctgcagcgcccggtggccagccgcctggcgatccgcccggagtcgatcaccctgggcgtgaacggcgaactagacgcagaagtgcgtagccacagcctgctgggcaacgtgattcgctaccgcgtaaaggtgcgcgaagtggagctggtggtcgatgtgctcaaccgctcgccggcagacctgcacgcggacggaaaacgggtaagcttgtcgatcgaccccacggcgctgcgggaagtggcctaa

SEQ ID NO: 84720 - protein, 329 aa, Pseudomonas putida GB-1
MSFVSVQKLQKSYAGSPVFENIDCHIERGEFVTLLGPSGCGKSTLLRCIAGLTPVDSGQILLDGHDIVPLSPQKRGIGMVFQSYALFPNMTVEQNVAFGLRMQKVKADESQLRVREALELVELGTFAGRYPHQLSGGQCQRVALARSLVTRPRLLLLDEPLSALDARIRKHLREQIRAIQRELGLTTIFVTHDQEEALTLSDRIFLMNQGRIVQSGDAETLYTAPVDLFAAGFIGNYNLLDADSASRLLQRPVASRLAIRPESITLGVNGELDAEVRSHSLLGNVIRYRVKVREVELVVDVLNRSPADLHADGKRVSLSIDPTALREVA

SEQ ID NO: 84721 - DNA, 1110 bp, Pseudomonas putida GB-1
  CDS (1)..(1110): transl_table=11
atgcctgatcctgccttttcgcgggtttacccgcgcaaaggcaggatcaggagcaagcccattgcccggagcccacgcatgcccctagccgtccagttcacccaggtttcccgcaccttcggcgaggtcaaggccgtcgaccaggtcagcatcgatatcatcgatggcgagttcttctccatgcttggcccttccggctcgggtaagaccacttgcctgcgcctgatcgccggcttcgaacaaccctccagcggttcgatccgcatccacggggtggaggccgctggcatgccgccctaccaacgtgacgtcaacaccgtgttccaggactacgcactgttcccgcacatgaacgtgttggacaacatcgcctatggcctgaaggtaaagggcgtggccaaggccgaacgccatagtcgcgccgaagaagccctggccatggtggccctggccggctacggcacgcgcaaaccagcgcaactgtctggcggccagcgccagcgtgtggccctggcccgtgcactggtcaaccggccgcgcgtgctgctgctggacgagccgctgggcgcactggacctgaagttgcgcgaacagatgcaaggggagctgaaaaagctgcaacgccagctgggcatcaccttcatcttcgtcacccacgaccagaccgaagcgctgtcgatgtccgaccgggtcgcggtgttcaaccgtggccgcatcgaacaggtcgacaccccgcgcaatctgtacatgaagcccgccaccaccttcgtcgccgaattcgtcggcacctccaacgtggtacgtggcgagctggccatgcagctcaacggcagcccggcccccttctccatccgtcccgagcacatccgcctgggcgaccttgtggtcaccagccacgaagtgcaggtaagcggcctgttgcgcgatatccagtaccagggcagcgccacccgctacgagctgcaattggacaacggccaactgctggcggtaagccaggccaacgaccgctggcaggcacaggcacaggcctggcagaccgggcagcggctgcaggcgcactggccccgcgaggcaatgacggtgctgcaggaaaccgagggccgctga

SEQ ID NO: 84722 - protein, 369 aa, Pseudomonas putida GB-1
MPDPAFSRVYPRKGRIRSKPIARSPRMPLAVQFTQVSRTFGEVKAVDQVSIDIIDGEFFSMLGPSGSGKTTCLRLIAGFEQPSSGSIRIHGVEAAGMPPYQRDVNTVFQDYALFPHMNVLDNIAYGLKVKGVAKAERHSRAEEALAMVALAGYGTRKPAQLSGGQRQRVALARALVNRPRVLLLDEPLGALDLKLREQMQGELKKLQRQLGITFIFVTHDQTEALSMSDRVAVFNRGRIEQVDTPRNLYMKPATTFVAEFVGTSNVVRGELAMQLNGSPAPFSIRPEHIRLGDLVVTSHEVQVSGLLRDIQYQGSATRYELQLDNGQLLAVSQANDRWQAQAQAWQTGQRLQAHWPREAMTVLQETEGR

SEQ ID NO: 84723 - DNA, 774 bp, Pseudomonas putida GB-1
  CDS (1)..(774): transl_table=11
atggctcaggccacgcccgcgctggaaatccgcaatctgcacaaacgctacggcgagcaggaaattctcaagggcatttcgctgaccgcacgcgacggtgacgtgatctccatcctggggtcgtccggctccggcaagtccaccctgctgcgctgcatcaacctgctcgagaacccgcaccagggcgaaatcctggtcgccggcgaagccctcaagctcaaggccgccaagaacggcgacctggtcgcagccgacaaccgccagatcaatcgcctgcgcagcgaaatcggctttgtcttccagaacttcaacctgtggccgcacatgtcgatcctcgacaacatcatcgaggcgccacgccgcgtgctcggccaaagcaaggccgaggccatcgaagccgccgaagcgctgctgaacaaggtcggcatctacgacaagcgccacagctaccccgcccagctttccggtggccagcaacagcgcgccgccattgcccgtaccctggccatgaagcccaaagtgatcctgttcgacgagcccacctcggcgctcgatccggaaatggtccaggaagtgctaaacgttatccgcgcattggccgaagaaggccgtaccatgctgctggtgacgcacgagatgagctttgcccgccatgtgtccagtgaagtcgtcttcctgcaccaaggcctggtcgaagagcagggatcgccgcagcaggtcttcgaaaacccgacctcggcgcgttgcaagcaattcatgtccagccaccgctaa

SEQ ID NO: 84724 - protein, 257 aa, Pseudomonas putida GB-1
MAQATPALEIRNLHKRYGEQEILKGISLTARDGDVISILGSSGSGKSTLLRCINLLENPHQGEILVAGEALKLKAAKNGDLVAADNRQINRLRSEIGFVFQNFNLWPHMSILDNIIEAPRRVLGQSKAEAIEAAEALLNKVGIYDKRHSYPAQLSGGQQQRAAIARTLAMKPKVILFDEPTSALDPEMVQEVLNVIRALAEEGRTMLLVTHEMSFARHVSSEVVFLHQGLVEEQGSPQQVFENPTSARCKQFMSSHR

SEQ ID NO: 84725 - DNA, 1137 bp, Marinobacter sp. ELB17
  CDS (1)..(1137): transl_table=11
atgagtattaccgttgatggcatcaaaaagcgctttggcaagtttcaggcgctgaataacgtctctctggatattcccgagggcaaactcaccgctttgctgggcccctccggctcgggcaaaacgactttgctgcgcattattgccgggctggagtctgcagacagcgggcaaatctcgttttcaggccgggatgttaccgggcttcacgtacgcgatcgcaacatcggttttgtgtttcagcactatgctctgttccgccacatgactgtggcacagaacattgctttcggtctggattctctgccgcgcaaacagcgcccggcaaaagcgggcattcagaagcgcgttagtgagctgctggaaatgattcagttaccccacctggcccaacgctacccggcgcaattgtccggtggtcagaaacagcgggtggcattggcccgctcgattgcgacccaaccgaaaattctgctcttggatgaaccctttggagcgctggacgccaaagtacgtaaagacttgcgccgttggctgcgcaatctgcacgatgaattccacttcaccagcattttcgtgacccacgaccaagaagaagcgttggaactgtctgatcaggtggtggttatgagccagggccgtgtggagcaggtgaatgaacccatagagctttacgctcggccagagagccgctttgtgttcgattttttgggccaggtaaatgtaatttctggccaagtaaagcaaggcagcctgaaccaaggtaatgcttgggtaaccgtacccggggtgcagcacaagggagacgcccagctctacctgcggccacatgaagtccggcttgcaacagcaccggtggcgcatgccaatttgccgctgcgcattgaagcggtcagcctgattggctcggaagtgcgggttgagttacgccccgagggctggcaaagcgaaggctcgaataacatctgggaagtgggtatcagccatgctgaattcaacagtcagcgccctactcgcggcgatctgcgttatgcagtgccggaggtcgggcatctgtttaccggcaacgacgctcagcccgcaacggtcaactgggccgaagcagaactggcaccccgggttcgcttgatcagctga

SEQ ID NO: 84726 - protein, 378 aa, Marinobacter sp. ELB17
MSITVDGIKKRFGKFQALNNVSLDIPEGKLTALLGPSGSGKTTLLRIIAGLESADSGQISFSGRDVTGLHVRDRNIGFVFQHYALFRHMTVAQNIAFGLDSLPRKQRPAKAGIQKRVSELLEMIQLPHLAQRYPAQLSGGQKQRVALARSIATQPKILLLDEPFGALDAKVRKDLRRWLRNLHDEFHFTSIFVTHDQEEALELSDQVVVMSQGRVEQVNEPIELYARPESRFVFDFLGQVNVISGQVKQGSLNQGNAWVTVPGVQHKGDAQLYLRPHEVRLATAPVAHANLPLRIEAVSLIGSEVRVELRPEGWQSEGSNNIWEVGISHAEFNSQRPTRGDLRYAVPEVGHLFTGNDAQPATVNWAEAELAPRVRLIS

SEQ ID NO: 84727 - DNA, 795 bp, Thermus thermophilus
  CDS (1)..(795): transl_table=11
atgctggcccaggccggcgtggggaccccggtaaaggggcctgggcgcaaccccgggcccttccggtttaatgggagggtgctggagctttccctggaaaaggccttctccgggttccgcctctctgtggccctctccgtggccgagggcgagaccctggccctcctcggaccctcgggaagcgggaagagcaccctgctcaggctcgtggccgggctcctcaggcccgataggggcttcgtgcgcttcctgggcgaggacctcaacccccttcccccggaaaggcggaaagtgggcttcctcttccaggactacgccctcttcccccacctcaccgtggaggaaaacgtcgccttcggccttgtggaggccgctggccaagggaggcgagagagggtgcgggagctcctcaagcgcatggagctcaccccccacgccaggaagcgcccccaggagctttccgggggcgagcaacagagggtggccctggcccgggccctggcccctaggcccaggctcctcctcctggacgagcccttaggggccctggacctgaggcttcgggaagagctcctcttcttcctgcgccggacgctcaaggaggaaggggtcaccaccctcctcgtgacccacgaccagggggaggccttcctcctcgcccaccgggtggcccttctgcgggaggggcgcctggtccaggtgggccggcccgaggaggtctacgcccgccccaaggacccatgggccgcccgcttcctggggcacaagaacctcctctcccccggggaaagctag

SEQ ID NO: 84728 - protein, 264 aa, Thermus thermophilus
MLAQAGVGTPVKGPGRNPGPFRFNGRVLELSLEKAFSGFRLSVALSVAEGETLALLGPSGSGKSTLLRLVAGLLRPDRGFVRFLGEDLNPLPPERRKVGFLFQDYALFPHLTVEENVAFGLVEAAGQGRRERVRELLKRMELTPHARKRPQELSGGEQQRVALARALAPRPRLLLLDEPLGALDLRLREELLFFLRRTLKEEGVTTLLVTHDQGEAFLLAHRVALLREGRLVQVGRPEEVYARPKDPWAARFLGHKNLLSPGES

SEQ ID NO: 84729 - DNA, 1077 bp, Rhodobacter capsulatus
  CDS (1)..(1077): transl_table=11
atgacacctgcgcccttgcccgccgcttcctggcttcgtcttgatcgcgtcagccgccgtttcggtgcggtgacggcgcttgcggagatttccttcaaccttggtcagggcgaaatcctgtgtctgctgggcgcgtcgggctgcggcaagtccacgctgctgcgcctgatcgccggggtcgagcgcccggacagcggcgagatcgtgctggcggggcgggtgctggcggggccggggcggttcgtcgaccccgaggcgcgcggcatcggcttcatgtttcaggattacgcgctgtttccgcatctgagcgtggcggaaaacgtggccttcggcctgcgcggggcgccctctgcggagctgaaggcccgggtggccgaggttctggcggtggcgggggtaagcgctttggcggaccgctatccgcaccagctttcgggcggggaaagccagcgcgtggcgctggcgcgggcgctggcgccgaggcccgggcttttgctgatggacgagccgttttccaacctggatcaggggctgcgcgacagcgtccgggccgagacgctggcgctgttgcgccagatcggggtggcggcgatccttgtcacccatgacccggccgaggcgctggcggtggccgatcatctggccgtgatgcaggcgggcaagatcgaggctttggccgatccgcgcagcctttatcacgcgccgccaacgctttacgccgcgcgctttctcggtccgggcagcaccctgccggggcaggtggcgggcggcgcgctggtgacgccgctgggccggtttgccgccccggggctggccgaggggcaggcggcggtggccttctttcgcccgcaggcgcttgcgctttgcgatccggccgcgggggccccggcgcggatcgaacgggccgaatttctgggcgcgcaggagcggctggtcctgcggcttgaggcgggcggggtggagctgcggcttgacctgccctcaacccggcagccgcgccccccggggcgggtcggtctgcggcttgacccgggggcggtgcaggtctttgccgccgcgccggagacggcgtcctga

SEQ ID NO: 84730 - protein, 358 aa, Rhodobacter capsulatus
MTPAPLPAASWLRLDRVSRRFGAVTALAEISFNLGQGEILCLLGASGCGKSTLLRLIAGVERPDSGEIVLAGRVLAGPGRFVDPEARGIGFMFQDYALFPHLSVAENVAFGLRGAPSAELKARVAEVLAVAGVSALADRYPHQLSGGESQRVALARALAPRPGLLLMDEPFSNLDQGLRDSVRAETLALLRQIGVAAILVTHDPAEALAVADHLAVMQAGKIEALADPRSLYHAPPTLYAARFLGPGSTLPGQVAGGALVTPLGRFAAPGLAEGQAAVAFFRPQALALCDPAAGAPARIERAEFLGAQERLVLRLEAGGVELRLDLPSTRQPRPPGRVGLRLDPGAVQVFAAAPETAS

SEQ ID NO: 84731 - DNA, 5228 bp, Aureobasidium pullulans
  CDS (542)..(4450)
gctagccactgacgacagagtcggctcgtgcgcatctgataccctgctcatcatcacaaaaaccgcgcttccaaatgcaagagacgttgaacgcttctcttcggcccactgatttacaagtgtcagaatgtcactgtccactcgggtgctcagctgccgtcttcacgcgtcgtaagattttttcctgacttgccgaagctgtatgtgatcatcgggcagcactatgaggaaactaagtccagcgagtgtgcgcccatagaacctcgggtacccagtctcaacaccacaagttgtttctgcccaacaatgatctccttcatcaggagttgcgcgagacacaagtaaccatgccacttcttggctgtatgctccaaggtgttttcattctacgaaatacgaattgtcctgaggcttgaagtttaacgtaacttcttccactgtaaaaaggaaattcggtgccagaaaagcttcttgtctgaagacaccgttaagcctgcgtcatcttcaagggccacggcattcgggttcaagaatcttcaatatgtcttctgccgacggcagacgaacagtttcatctgattatggccatccacgaccttcaatggccaacgtcgaagcggatcacaactttgagacgacgactttgaattctgctcaaccgcgatcatggcacactgagtttgtcttcgtctcccggaaattgattcaacaaattcttggtaaaaatccgttcaagagttcatatctggatttgttcaagcttgtcaacgatgcgaagtcgaaggccgttctttgggctggcatactgttggcaatagctgctggttgtccattgcccatcattggctatattttcggccagatcattacttctttcccgcctccggaagatgttctgcgagatagactgtatcagcttgttggtgtcgcttgtggctactttatcgttacgactggatatgcaattgcgtggggattgactggagagaagatctcgcgtcgttttcgagaaacgcttgttgagcgcctgcttggtcttgagcaggcatacttcgacatcaaagatccagacattacgaaccttctgaccgagaagattgaagcgatccagataggaacatctgaaaaagtcggcatattcatccagtcgatcagctacttcgttgctgcctttattgttgggttcatcttgaacgccaaactcaccggtattctattcgctgccgtcatacctctcatggctttgatcgttactgtcggctcctccagaatcgcaaagtacaccaaagcagccaccgaatacaccgaagccgctggaaggatcgctgaaagtgctatccatgctgtcaaggttgtgcaggcttttggcatggccgaaaatctcagcaaagaacactaccgtctgctcaaactgtctgcaagatacgccatccggaagtcagtttctgctgcgttcatgcttggcttggtctattttactgcttacagtgccaatgcgcttgccttttgggagggctcacgtctcgctgcagaatctggctcaaacaatgctggtaccgtctatgccgtggtcttcttgattatagacgcttcgtttgttgtcggccaatttggaccattccttggtagcttcgccaccgctgcagctgctggagaaagtgtttacgaaatcctcaaccatccacagtctgaaatcaacgtctactcggaggctgggcaagaagccacagagagcgacatgaaagctgatttggtctttcgcaatgtcacatttgtttatcccgcgaggacatctgctcgtgctctggaagagatgagtcttatcctcaaagccggacagatgaacgcgattgtcggcacgagtggttgcggcaaaagcactcttgtgtctctgctcttgaggctgtacgacatatcctctggtcaattgacaataggaagccatgatatcaaggacttcaacgtaaggagtttgagaaaatacacagccctggtagaccaagactctgtcctgttctctggttcggtccttgaaaacatcagttatggacttggtgaacattcattatcagacgatgttgtcttggagaggtgtactgaggctgcgaaagctgccaacctggactttgtcgacttcttgccacagggtattcacacgcgaatcggtaatggtggctatacgagtctctcgggtggtcagaaccagaggatttgcttggctcgagccctggtcaagaagcctgctctacttctgctagatgagccgaccgcggccctcgacgcaaacagcgaaggacttatcatggacgccgtcaaaagcgtggctgccacaggcacaacagtggtcatggtagcgcaccgactctccactgtgtcagactcgcccaacatcgtgctcatgggtgcaggcaaggtcattgagcaaggaaaccatgatgaactcatgcagttggaaggcgcctacttcaatcttatccaggcgcaacaactaaatgatgcagatgagtcatcggcagaggtatctgcagcaaccaccagtcaagtcaccccacaaaaagcaagcaagtccgaagattcggctgcttccagtgacaccgagacggtgcctccacaggcgaagaaggaagacaagccagccaaaaaggctggattctggaagctccttttgagatgtttgcgtctagccaaatccgactcgcccatcatcgctctgggtctcgctgcctcaatcgtatcgggtggcatcattctcggcgaagccatcgtcttcggcaacctcatctcggtgctgaacgatctcgagagtccagacttccgaagcagagcagaccttttctcactcctcttcttcatactggcactcattgcgctcttctcatacgccggcaatggatgctgtttcggtatcgtctcttcacattttgtcgccaaaattcaacatatctctcttgctagtatcttgcgacaagatatgcaatggttctcgggccagtcagtgccttcactcatgagcagtctcagctcagatgctggtcagcttgcttgcttgtccggagtggctattggcaccatattcacggtgtgtgtctccatcactggtggtatcatccttgcccacgtggtggcttggaaaattgctgttgtcctcctggctgctgtccccgttatgatcacggctggctacgtcagactacgcgtgctcgcactcgcggagagtagacacagatctgcttacaatgatgctgcttctatcgccgccgaggcttgtagaggcatccgcaccattgcttctctcggcagagagcgtggagtgtctagagcatccaacgcagcggtcaaagagccatacgacaagggcatccgattcaccttgattaccaataccttgctggccttgagtttctcaatcacttactttgtatatgcccttgcctactggtggggagccaagcaagtcagaaatggaacatacagtcaattggactttttcattgttcttcctgctcttctgttctctgcgcagagcgctggacagatcttcagtctgtcaccagagatgtcgcgtgctggtgtcgccgctcgcaacgtctttgggctacatgatcagaagccgaccatagtggatgttgacgcgaagcaatctggagcactgccaagctcgaccttgtctattcctactctagaggacaaggcaagtccatcatctggaggctggattgagttcaagaacgtcagtctatgctatccgtccaaacctcagcacccagcattgcagaatgtcaacatctccatcagaccaggagagttcattgcacttgtcggccctagcggagcaggcaagtcgaccattctctctctgctacagcgcttctacgatcccactgctggcagcgtacagctagatgggcaggacatccgcgaggttgctgtaccacaacacagaggtcgattggggctggtacctcaagagccagacctcttccctggctcgatctcctacaacatcggcttgggcgcagcgccaggtcagttggtgacgagagatgatatcgagaagatttgcgcaaagtgtggcattcacgagttcatcatgagtctgcccgaaggctacagcacagagtgcggcaccaatggttcgaaactctccggaggtcagaagcaacgtattgctgtcgccagagcattgatcaggtcaccggaagtgcttctcctggacgagtatacatccgctctggacgcccactccgagcaacagatcaaagaagcagttgatggagccagtgtggatcggactacgattgtggtcgcacatcgattgtccacggtgcagaacgcagatagaatctttgtgtttgatgatggacgtgtggtggaggttggtagccatgctgagcttgttgctcaagggggtttgtatgcaggcatggttctggcgcagacactcacatgaatgtttcattgttacatctttatgtactgcatatagcatgcttgcaggggtcaaaagttatgctagaatatcacgagaaatgaagccaaaatctgtatgccaccaacgagactcggtgtaacctgtgcaaccgatgccttagttgatgacgctgtccatcaggagggctagacaactaagcatcgtctccctttacctcacgaaaacccgtacgggtgaaaggaaacttgttatcagatgatcttgatcccaacagaaacagcagatgcgcgagttcagcccgcgatactggcgtggtggccctggtgggaacaaaattttgatggcgagatgggtcacagtctgtgcgtggctgtggaagcggatctgataactttacttcgggcgccaccggttcgtgcttagacgaggacaagggagcgagctccgatgacggcaagcatgtgggacgggaatcgatatgcatagtgttgctcagagatcgagtgggactgcttttttgtgacaagagctgagctgaaaggcggcagagagaccacggaagacagatttcagaagatcttctcagcacactgccgaggcaggtcaagaaggatcgtgacaacgcacgactatttttttttctcgcaacaacgtggccgcgctcgggatcgcttgacttgacgccctgcagctgccagaaaggcccgtggtttgagcggtggtggtgccccactgtggtacggactagctcgcgaattgatccttgatcagtggtggatgatctgattagactagt

SEQ ID NO: 84732 - protein, 1302 aa, Aureobasidium pullulans; identical to SEQ ID NO: 60158

SEQ ID NO: 84733 - DNA, 735 bp, Pseudomonas chlororaphis
  CDS (1)..(735): transl_table=11
atgcctctgcttagaatttccgccctgcataaatattacggcgaccatcatgtgctcaagggcatcgacctcagtatcgaggaaggccaggtggtggcgatcatcggccgcagcggctcgggcaagagcactttgctgcgcaccctcaacggcctggagtcgatcaacgacggggtcatcgaagtcgacggcgaataccttgacgccgcccgcgccgacctgcgcagcctgcggcagaaggtcggcatggtgttccagcagttcaacctgttcccacacctgaccgtcggcgagaacgtcatgctcgcgccgcaagtggtgcaaaaggtgcccaaggccaaggccgccgaactggcgcgcgagatgctgaaacgggtcggcctggaagagaagttcgacgccttcccggaccgcttgtccggtggccagcagcagcgggtagcgattgcccgggccctggccatgtcgcccaaggtgctgctgtgcgacgagatcacctcggccctcgacccggaactggtcaacgaagtcctgagcgtggtgcgccagctggccaaggacggcatgaccctgatcatggtgacccacgagatgcgttttgcccgggaagtgggcgacaagctggtgttcatgcaccagggcaaggtgcatgaagtgggcgacccgaaagtgctattcgccaacccgcagacgccggagctggcgaacttcatcgggaccaacgaaagcgcttga

SEQ ID NO: 84734 - protein, 244 aa, Pseudomonas chlororaphis
MPLLRISALHKYYGDHHVLKGIDLSIEEGQVVAIIGRSGSGKSTLLRTLNGLESINDGVIEVDGEYLDAARADLRSLRQKVGMVFQQFNLFPHLTVGENVMLAPQVVQKVPKAKAAELAREMLKRVGLEEKFDAFPDRLSGGQQQRVAIARALAMSPKVLLCDEITSALDPELVNEVLSVVRQLAKDGMTLIMVTHEMRFAREVGDKLVFMHQGKVHEVGDPKVLFANPQTPELANFIGTNESA

SEQ ID NO: 84735 - DNA, 1116 bp, Enterobacter sakazakii
  CDS (1)..(1116): transl_table=11
atggcgcaacttcgtttagagaaagtccagaaacgctacggcacccatgccgaagtgattaagccgctcgatttacagatcaacagcggcgaatttgtggtggtggttggcccgtccggctgcggcaaatcgacgctgctgcgcctggtcgccgggcttgaggagataaccgacggcgatatgtatatcgatgaccagcgggttaacgacgattcgccatccgagcgcggcatcggcatggtgtttcagtcctatgcgctctatccgcatatgacggtctatcagaatatggcgttcgcgcttgaaatggcgaaggtgcccgagaaggagattgacgagcgggtgcgcgaaagcgcgcggattttacagctggagcatctgctggatcgccgcccgaaagatctctccggcggccagcgccagcgcgtggccataggccgcgcgattgtgcgcgagccgagcctgtttctcttcgacgaaccgctctctaacctcgacgcctcgctgcgcgtgcagatgcgcatggagatagcggcgctgcacaggcgtattcacgccaccattctgtatgtgacccacgatcaggtggaggcgatgacgctcgccgaccgcatcgttgtgttaaaccagggccagattgaacaggtcggtacaccgcttgagctttacgacaccccggccaacgtgtttgtcgcgcagtttatcggctcgccgaagatgaacctcattcccggcaaaatgctccgcgtgatggagcacgcctgcgaggtggagctggaaaacggcctgcgcctgacgctgccagtgcaggccgccgccgggcaggagggcgacacggtgcagcttggcattcgcccggagcatgtagaggtcatggcgcttgcgaaagcagacgtggagggcgaagtgttattcgttgagcatatgggaaacgaaaccttggtttatgtgaacggcggttatggcgcagaaccgctggtcatgcgccatactgagaggctggaagtccggccggagcatcatctggggctgaaactgccagtggaacactgttacctttttgacagcgcgggcaacgcgtttgcgcgcttaagcggcccgaaaacccagcattaa

SEQ ID NO: 84736 - protein, 371 aa, Enterobacter sakazakii
MAQLRLEKVQKRYGTHAEVIKPLDLQINSGEFVVVVGPSGCGKSTLLRLVAGLEEITDGDMYIDDQRVNDDSPSERGIGMVFQSYALYPHMTVYQNMAFALEMAKVPEKEIDERVRESARILQLEHLLDRRPKDLSGGQRQRVAIGRAIVREPSLFLFDEPLSNLDASLRVQMRMEIAALHRRIHATILYVTHDQVEAMTLADRIVVLNQGQIEQVGTPLELYDTPANVFVAQFIGSPKMNLIPGKMLRVMEHACEVELENGLRLTLPVQAAAGQEGDTVQLGIRPEHVEVMALAKADVEGEVLFVEHMGNETLVYVNGGYGAEPLVMRHTERLEVRPEHHLGLKLPVEHCYLFDSAGNAFARLSGPKTQH

SEQ ID NO: 84737 - DNA, 1131 bp, Klebsiella oxytoca
  CDS (1)..(1131): transl_table=11
atggcaacggttagtttgcggaaaattgaaaaaagatatgaaaatggctttaaggctgtccatggtatcgatctcgaaatccatgacggtgaatttatggtttttgtcgggccttccggttgtgcgaaatcaacaactttgagaatgattgccggtcttgaagatattagcggaggcgaaatttatatcggaaatagaaaggttaatgaccttccgcccaaagaccgtggtattgccatggttttccaaaactatgcactttatccgcataaaaccgttttcgacaacatggcttttggtctaaaaatgcagaaacgacctaaggatgagattaaacgccgggttgaagacgcggccgaaaaacttgaaattaccgaactgctttatcgtaagccgaaagaaatgtcgggcggacagcgccagcgtgtcgctgttggccgggcgattgtacgtaaacctgatgtttttttattcgatgagcctttatcaaaccttgatgccaagctcagggtatcgatgcggatgaaaattgcccaactacatcgttctctgaaagaggaggggcatcctgctacaatgatttatgttactcacgatcagactgaagcgttaactctaggagatcgcatttgtgttcttaaccatgggaatatcatgcaggttgatacacctactgatctttataattatcctaataataagttcgttgccagttttatcggttcaccatcaattaatttgatagatactgctatccgtaagaataatgagaggttgtatgttgaaattgctcctggcgttgaaatattaattccacatagtaagcaagtgttgcttgaaggttatattaataagcctgtgtgttttggtattagaccagagcatatctctcttgctagcgatgatgatgaccttaatacctttgagggagttttaacggtggttgaaaatatggggagcgaaaaatttttatattttatcgttggtgggaaggaacttattgccagagttgatacacaagatattaatccatttcatatagggaaaactttaagatttaatcttaatactgccttttgtcatgtttttgatttctataatgagaacaatctgacaaatgtaagagtgtga

SEQ ID NO: 84738 - protein, 376 aa, Klebsiella oxytoca
MATVSLRKIEKRYENGFKAVHGIDLEIHDGEFMVFVGPSGCAKSTTLRMIAGLEDISGGEIYIGNRKVNDLPPKDRGIAMVFQNYALYPHKTVFDNMAFGLKMQKRPKDEIKRRVEDAAEKLEITELLYRKPKEMSGGQRQRVAVGRAIVRKPDVFLFDEPLSNLDAKLRVSMRMKIAQLHRSLKEEGHPATMIYVTHDQTEALTLGDRICVLNHGNIMQVDTPTDLYNYPNNKFVASFIGSPSINLIDTAIRKNNERLYVEIAPGVEILIPHSKQVLLEGYINKPVCFGIRPEHISLASDDDDLNTFEGVLTVVENMGSEKFLYFIVGGKELIARVDTQDINPFHIGKTLRFNLNTAFCHVFDFYNENNLTNVRV

SEQ ID NO: 84739 - DNA, 2253 bp, Chlamydomonas reinhardtii
  CDS (18)..(1415)
gtacttcaattgtcagaatggcgtcgctgctcgctcaaacaacatcgcgccttggcgctcgcccagctgcgcaagctggccctgtcgcccaaatggcaccgatggcaagccgagtgcagccggcgatgcctagcgcgctgctcccactgcacgccagagcgacaacaacttcagtcgcttgccgggcagccagcatcgacaaacctgtcgtttacactcctcgagattcgtcgcaacagtcctccaatggggcaggagaagtgtccatgtccatatcatccatggacgaggttggaccctcttatgagggaatcattacagacgcgcctacacgaccaacggggctttatgtgcgggtgcgcaacatggtgaagcacttcagcaccgccaaaggcctgttcagggcggtggacggcgtggacgtggacatcgagcccagctccatcgtggcgctgctggggcccagcggcagcggcaagaccacattgctgcgcctcattgcaggcctggagcagcccacgggcggcaacatctactttgacgacacggacgcgaccaacctgtccgtccaggaccgccagatcggcttcgtgttccagagctatgcgctgttcaaccacaagacagttgcggagaacatcaagtttggactggaggtgcgcaagctcaacatcgaccacgacaagcgcgtggcggagctgctggcgctggtgcagctcaccggcctgggcgaccgctacccgcgccaactgtcgggcggccagcggcagcgtgtggcgctggcgcgcgccctggcctccaacccgcggctgctgctgctggacgagccctttggcgcgctggacgcggtggtgcgcaagcagctgcgcacggggctgcgcgagatcgtgcgcagcgtgggcgtgaccaccatcattgtgacgcacgaccaggaggaggcgttcgacctggcggacaaggtggtggtgttcaacaggggcctggtggagcagcagggcagccccaccgagatcatcaagcggccgcgcacgcccttcattatgaagttcgtgggcgagaccaacgtggtgccggccacgtcgctgctggccaagcgcatgcgcttcaacacctccaagaccagcgtcatgttccggccgcacgacattaagctgttcaagacggtgccgccggagagcggcgagggcgcgctgaccacggtgggcgccaacgtggcggacaaagccaacctgggctgggtggtcaagtacacgctgcgcttcgatgacgacgtggagtgcgagctgcagctcagccgcgaccaggacgagcgcgagtacaacctggtggtgggcagccgcgtgttcgtgcacgtgccgcaccgcaccatgatgggcttcaacgccagcgacgtggacagcacgcccatcgtgtaatgtgcggggttggcggctgtggccagcgattgttgcaatgcagtccagcgtgctcttggtttggttccagtgacacccatccagggcacaggtccctgagcagcgggtgttggtgatgggttggagcagttgtacccgattctcgcatgcaagggggcggggcgcccacggggtgggagagcggaatggcggtgaggtgggctactgcatgcggccgtggaggaacggaggggtgcacaggcgggcaggtagacaggcggagcgggctgggtgagcggggctgtagtttgggggtggaggccgtgcagactggttgggatactgacagatcaatgagcggcgtctgctccatgggtcagtaggagagcggtgtgggtgtgtgcagttgcgagttctggagcgttgtgcgcctcgcgctgtgtgcgcgcgcccgtgcgtctgcgggcgctgtcggagacgggcgatgtacatgaagctggacctgggcctgtctcacaaatatcccttatgttaatagtaggatgtcgcaatcgtgccttggagcccacctgatgtgtgtgtcacaggtggcagtagtttggccttgcgggaggtagcacgtctttcatgagagtgcgtgtgcgtgaccgcttttacattgccaatcacgctggaaggtgaaaccatgcatcatgcgtgctatcaggagatgcagacggcggattgctgccaaaatgttctgttgttggtgtgcagacttggtggcgaaggggccaggcgcccaggggtatgctgcgtgccaaggagctgctgccgccacgagtgaccagcgaaacttgtaaattgaatattgtatcct

SEQ ID NO: 84740 - protein, 465 aa, Chlamydomonas reinhardtii
MASLLAQTTSRLGARPAAQAGPVAQMAPMASRVQPAMPSALLPLHARATTTSVACRAASIDKPVVYTPRDSSQQSSNGAGEVSMSISSMDEVGPSYEGIITDAPTRPTGLYVRVRNMVKHFSTAKGLFRAVDGVDVDIEPSSIVALLGPSGSGKTTLLRLIAGLEQPTGGNIYFDDTDATNLSVQDRQIGFVFQSYALFNHKTVAENIKFGLEVRKLNIDHDKRVAELLALVQLTGLGDRYPRQLSGGQRQRVALARALASNPRLLLLDEPFGALDAVVRKQLRTGLREIVRSVGVTTIIVTHDQEEAFDLADKVVVFNRGLVEQQGSPTEIIKRPRTPFIMKFVGETNVVPATSLLAKRMRFNTSKTSVMFRPHDIKLFKTVPPESGEGALTTVGANVADKANLGWVVKYTLRFDDDVECELQLSRDQDEREYNLVVGSRVFVHVPHRTMMGFNASDVDSTPIV

SEQ ID NO: 84741 - DNA, 1155 bp, Alicyclobacillus acidocaldarius
  CDS (1)..(1155): transl_table=11
gtggctcgcgtgttgctcgagcacatttacaagacctaccccggccagacggagccgacggtgaaggacttcaacctcgacattcaggacaaggaattcaccgtgttcgtcggcccctccggctgcggcaagacgacgacgcttcgcatgatcgctggactcgaggacatcacggagggcaacctgtatatcggcgatcgccgcgtgaacgacgtgccgccgaaggatcgggacattgcgatggtgttccaaaactacgcgctctatccccatatgacggtgtatcagaacatggcgttcggcctgaagctgcgcaaggtgccgaaggccgagatcgaccggcgggtgcaggaggcggcgaagatcctcgacatcgcgcacctgctcgaccggaagccgaaggcgctctccggcggtcagcgccagcgcgtggcgttgggtcgcgccattgtgcgcgagccgcaggtgttcctgatggatgagccgctgtcgaacctggacgcgaagctgcgcgtgcagatgcgcgcggagatccgcaagctccatcagcgcttgcaaacgaccgtcatttacgttacacatgatcagacggaagccatgacgatgggcgatcgcatcgtggtcatgcgcgacggcgtcatccagcaggcggatacgccgcaggtcgtgtactcccagccgaagaacatgtttgtcgccggcttcattgggtctcctgccatgaactttattcgcggcgagatcgtgcaggacggcgatgcgttctacttccgcgcgccttccatttcgctgcgcctgccggagggccgctacggcgtgctgaaggcgtcgggggccattgggaagccggtcgtgctcggcgtgcggccggaagacctgcacgatgaggaagtgttcatgacgacgtatcccgactccgtgctgcagatgcaggtggaagtcgtggaacacatgggctcggaggtctatctgcacacgagtatcgggccgaacacgatcgtcgcgcgcgtgaacccgcgccacgtctaccacgtcggaagctcggtcaagctcgcgattgacttgaacaagatccacatcttcgacgcggagacggaggagtccatcggcttcgccgcaggtcctgcgggtgaacgtcaagaagctttggtgtga

SEQ ID NO: 84742 - protein, 384 aa, Alicyclobacillus acidocaldarius
MARVLLEHIYKTYPGQTEPTVKDFNLDIQDKEFTVFVGPSGCGKTTTLRMIAGLEDITEGNLYIGDRRVNDVPPKDRDIAMVFQNYALYPHMTVYQNMAFGLKLRKVPKAEIDRRVQEAAKILDIAHLLDRKPKALSGGQRQRVALGRAIVREPQVFLMDEPLSNLDAKLRVQMRAEIRKLHQRLQTTVIYVTHDQTEAMTMGDRIVVMRDGVIQQADTPQVVYSQPKNMFVAGFIGSPAMNFIRGEIVQDGDAFYFRAPSISLRLPEGRYGVLKASGAIGKPVVLGVRPEDLHDEEVFMTTYPDSVLQMQVEVVEHMGSEVYLHTSIGPNTIVARVNPRHVYHVGSSVKLAIDLNKIHIFDAETEESIGFAAGPAGERQEALV

SEQ ID NO: 84743 - DNA, 744 bp, Bacillus amyloliquefaciens
  CDS (1)..(744): transl_table=11
atgctttccgtcaaaggattaaataaatcattcggacagaatgaaattttaaaaaagatagatatggagatagaaaaagggaaagtcatcgccgttctggggccgtccggttcaggaaaaacgacgcttctgcgctgtctgaacgcgcttgagatccccaatcgcggcgagctggcattctccgatttttcaatagatttctccaaaaaagtgaagcaggctgatattcttcgcctccgccgcaaatcaggcatggtctttcaggcgtatcatctgtttcctcaccgcacggcgcttgaaaacgtcatggaaggacccgttcaagtgcaaaagcgcgacaaggagcaagtcagaaaagaagcgatggaacttctggaaaaagtcggactcaaagacaaaatggatttatatccgttccagctttccggcggtcagcagcagcgggtcggcatcgcccgcgcgcttgcgattcagcccgagctgatgctgtttgacgaaccgacgtcagcgcttgatccggagctcgtcggcgaggtgctcaaagtgattaaggatttggcgaacgaaggctggacgatggtcgtcgtcacccatgaaatcaaattcgcgcaggaagtggccgatgaagtcatcttcattgacggcggcgtcattgtggaacaaggaccgccggagcaaattttctccgcgccgaaagaagaacgcacgcagcggtttttaaatcgtatactgaatcctttgtag

SEQ ID NO: 84744 - protein, 247 aa, Bacillus amyloliquefaciens
MLSVKGLNKSFGQNEILKKIDMEIEKGKVIAVLGPSGSGKTTLLRCLNALEIPNRGELAFSDFSIDFSKKVKQADILRLRRKSGMVFQAYHLFPHRTALENVMEGPVQVQKRDKEQVRKEAMELLEKVGLKDKMDLYPFQLSGGQQQRVGIARALAIQPELMLFDEPTSALDPELVGEVLKVIKDLANEGWTMVVVTHEIKFAQEVADEVIFIDGGVIVEQGPPEQIFSAPKEERTQRFLNRILNPL

SEQ ID NO: 84745 - DNA, 681 bp, Bacillus thuringiensis subsp
  CDS (1)..(681): transl_table=11
atgattacgttaaataatattgctaaaacgtattatcaaggaaaattggcggtgccgattttgcatgatattagtttaacaattcagagcggtgagttcgtttcgattatgggaccgtctggttctggtaagtcgacgcttatgaatattatcggttgtttagatcgtccaacagaaggcgaatatatgctgaatgacgtgaatatcttaacagcagacgagtcaaagcttgctttaattcgtaatgaatatatcggctttgtattccagcattttaatttactgccacgtctttctgcggtggaaaatgttgaacttccgctcgtatatggtggcgtgaagaaagcagagcgtcataagcgtgctttagaggcgttaggtaaagttggattagcagaccgcgtacatcatttaccgaatgaattatcaggtggacagaagcaacgtgtagcgattgcaagagcgattgcgaataatccaacgttcattatggccgatgaaccgactggtgcacttgatacgaagtctggtgagcaagttatggatattttcacgaagctcaatgccgaaggtacgacaattgtcatggttacgcatgaagaggaagtagcagcgtattcttcccgccgcattgtactgcgagatgggaaaattactgaagatagaaggtgtgcggtatga

SEQ ID NO: 84746 - protein, 226 aa, Bacillus thuringiensis subsp
MITLNNIAKTYYQGKLAVPILHDISLTIQSGEFVSIMGPSGSGKSTLMNIIGCLDRPTEGEYMLNDVNILTADESKLALIRNEYIGFVFQHFNLLPRLSAVENVELPLVYGGVKKAERHKRALEALGKVGLADRVHHLPNELSGGQKQRVAIARAIANNPTFIMADEPTGALDTKSGEQVMDIFTKLNAEGTTIVMVTHEEEVAAYSSRRIVLRDGKITEDRRCAV

SEQ ID NO: 84747 - DNA, 708 bp, Erwinia chrysanthemi
  CDS (1)..(708): transl_table=11
atgacgatcctggttcaacttgataatgtgcataaaatttttcttaccgatgaaattgaaacgcatgcccttagcaagataaacctttctattcactcgggagaatacgtctctatcgcgggaccgtccggttgtgggaaatcgacgctgctgtccatcatgggcctactggacacgccaacggaagggcactaccggctgaacggcgcggatgtagaacgtatcggccgccgggagatggcccgcctgcgcaaccgggaaatcggctttatctttcagtcatttaatctgataagcgacctgactatcgcggaaaacgtggcgttgccgctcacttaccgcaatgacctgtcgcgcttggagcaaaaagcgcgggtcattcaggcgctggaaaaagtcaacatgtcgcatcgggtgcgccactacccgtcacagctttccggcggtcaacaacagcgggtgccggtggcgcgggcaattgtcggcaagccgtcgttgttgctggcggacgaaccgaccgggaatctggattccgccaacgccgaagcggtgatgaatattctggatgaactgcatcaggacggcgcgaccatctgcatcgttacccatgatccgcgttccgccatgcgcgctcagcgcaccattgtgctgtctgacgggcaggtggtggctgatggcgaaaacggacaattacgtcaggcggtataa

SEQ ID NO: 84748 - protein, 235 aa, Erwinia chrysanthemi
MTILVQLDNVHKIFLTDEIETHALSKINLSIHSGEYVSIAGPSGCGKSTLLSIMGLLDTPTEGHYRLNGADVERIGRREMARLRNREIGFIFQSFNLISDLTIAENVALPLTYRNDLSRLEQKARVIQALEKVNMSHRVRHYPSQLSGGQQQRVPVARAIVGKPSLLLADEPTGNLDSANAEAVMNILDELHQDGATICIVTHDPRSAMRAQRTIVLSDGQVVADGENGQLRQAV

SEQ ID NO: 84749 - DNA, 1062 bp, Thermoplasma volcanium
  CDS (1)..(1062): transl_table=11
gtgaccaaaatggtgaacgtaagagtagtggatgtatacaaatcatacggtaaagtacaagtattgaaaggtataaatttcaatatagaagacggggaattttttgtattgctagggtcttccggcgctggaaaatcaactttattaaatattctcgccggtttggaagctgtagacagtggaagtatcttctttgatgataagattgttaatgacttgccacctgtagagaggggggtagctatggtttttcaaaattatgcattatatccccacatgacagtatataaaaatatggcgtttccattgaaaatgctaaattataaaaaagatagtatagatcgaatcgtcaaaaaagtagctgaaactttagatataacatggttacttaatagatacccgcgtgaattatctggagggcaagcacaacgagttgcacttggaagagcattagtacgtgatccaaagatatttttattggatgaaccactaagtaatctagatgcgaatataagatcaaagataagaaacgaattaaaattaatgcaaaaacaattaaataaaacatttatttatgtaacacatgatcaaatggaggcaatgtcacttggagaccacataggaattttacacaatggcgtattggaacaatatggaaggccaatagatatatataataacccgataaatgaatatattgcaacctttcttggagatccagaaataaatatgctatcatgcataaaatatcgggatgtatatgaatgcgatggctccataaaatttaaattggatttagatgataaaaagattacattaggaataagaccagaaaatatatatcttcatagacaaaatgataatgacatagaaggaaaaataatacctaaagtctcagaattgttaggttcgcatacattgataattggatctgtagaaaataaagaaataagaatcgttactgaagaaacaaatataagcatagggaaggaaattccaatatacattaatttgaataaatgtcttatatttaatgaaaaaggagaaaatattaataaataa

SEQ ID NO: 84750 - protein, 353 aa, Thermoplasma volcanium
MTKMVNVRVVDVYKSYGKVQVLKGINFNIEDGEFFVLLGSSGAGKSTLLNILAGLEAVDSGSIFFDDKIVNDLPPVERGVAMVFQNYALYPHMTVYKNMAFPLKMLNYKKDSIDRIVKKVAETLDITWLLNRYPRELSGGQAQRVALGRALVRDPKIFLLDEPLSNLDANIRSKIRNELKLMQKQLNKTFIYVTHDQMEAMSLGDHIGILHNGVLEQYGRPIDIYNNPINEYIATFLGDPEINMLSCIKYRDVYECDGSIKFKLDLDDKKITLGIRPENIYLHRQNDNDIEGKIIPKVSELLGSHTLIIGSVENKEIRIVTEETNISIGKEIPIYINLNKCLIFNEKGENINK

SEQ ID NO: 84751 - DNA, 1110 bp, Erwinia rhapontici
  CDS (1)..(1110): transl_table=11
atggcgcagttgacgctggataagattcaaaaacgctatggcgcgaaggcggaggtcatccgttcgctgaatttgcagattaaaagcggagagtttgtggtgattgtcgggccttctggctgcggcaagtcaacgctgctgcgtatgattgccgggctggaggagatcagtggtgggggcatgtacatcgatggtcactacgccaatgacgacagcccggccgaacgcggtatcggcatggttttccagtcatatgcactgtatccgcatatgagtgtttatcagaatatggcattcgcgctggagcttgcgcactgttcaaaggcggagattgatcagcgggtgagggagtgtgcacgcattttacagctggagccgttgctggaacgacggccaaaagatttgtcgggtggccagcgtcagcgcgtggcgatcgggcgtgccattatacgcgaaccgcgcttgttcctgttcgatgaaccgctatccaaccttgatgcctcgctgcgggtgcagatgcgtatggaagtctctgccctgcataaacgtctgggtgtcaccattatttatgtgacgcacgatcaggtcgaggcgatgacgctggctgaccggatcgtggtgctcaatcagggcaatatcgaacaggtgggaacgccgcttgagctgtacgaccagcccgccaatgaatttgtcgcccagtttatcggttcaccgaagatgaatctgatcccggcgacgctgcgccggtcgggcgaacagcaaagcgtggtggaactggacaatggcaaaacgctggtgttatccatcgccaccccggccgaggcggagggccgcagcgtcaacatcggtattcgtccagaacatattcgcagtggcaatgtggaacagtgcgaataccagggcgaggtgatgtttgtggaacagatgggcaatgaaaccctgctgtatctggacaacggcaatgcgggcgaaccctgggtcgtgcggcatgccgagcgttccgccatccatgttggccaaaccgttggggtacggcttccggtggaatgctgttacctgttcgacagtcacggccaggcgttccaacgtcatctggcaaaagtacactaa

SEQ ID NO: 84752 - protein, 369 aa, Erwinia rhapontici
MAQLTLDKIQKRYGAKAEVIRSLNLQIKSGEFVVIVGPSGCGKSTLLRMIAGLEEISGGGMYIDGHYANDDSPAERGIGMVFQSYALYPHMSVYQNMAFALELAHCSKAEIDQRVRECARILQLEPLLERRPKDLSGGQRQRVAIGRAIIREPRLFLFDEPLSNLDASLRVQMRMEVSALHKRLGVTIIYVTHDQVEAMTLADRIVVLNQGNIEQVGTPLELYDQPANEFVAQFIGSPKMNLIPATLRRSGEQQSVVELDNGKTLVLSIATPAEAEGRSVNIGIRPEHIRSGNVEQCEYQGEVMFVEQMGNETLLYLDNGNAGEPWVVRHAERSAIHVGQTVGVRLPVECCYLFDSHGQAFQRHLAKVH

SEQ ID NO: 84753 - DNA, 1032 bp, Alicyclobacillus acidocaldarius
  CDS (1)..(1032): transl_table=11
gtgaccattgagttcgtcggcgttgaaaagatctacccaggcggcgcgcgatccgtccgaggtgtctcctttcaaattcgcgagggagagatggtgggactgctgggtccgagcggaagcggaaagaccaccatcctgcgcttaatcgcgggactcgaacgtccaaccaagggcgatgtgtggattgggggcaagcgggtcacggatctgccccctcaaaagcgaaatgtggggctcgtgtttcagaactacgcgctgtttcagcacatgactgtttatgacaacgtatcctttggcctcagggaaaaacgggttccgaaagacgagatggacgcgcgcgtgagggaactcctgcggttcatgcggctggagtcgtatgcgaatcgctttccgcacgagctctcgggagggcagcagcagcgcgtggcattggcgcgcgcattggctcctcgcccgcaggtgctcctctttgacgaacccttcgccgccattgacacacagattcggcgcgaactgaggacgtttgtccgccaggtccacgatgaaatgggcgtgacgagcgtatttgtcacacacgatcaggaggaggcgctggaagtggcggaccgggtgctcgtcctgcacgaggggaacgtcgaacagttcgggacgccggaagaggtttatgaaaagcctgggacgcttttcgtggcctcctttatcggggagtccaacgtgtggacgcgcgccgtgcaaaacggccgaatcgaggtggcgggcgcggctctgcccgtcgatcccgccgtgtccgagggctccgaggtcgccgtggtggtgcgcccaaaggatgtcgagcttcagcctgcgagcgaacgcgaagcgcacgcgcaggtggtgcgatccgccttcaaaggctcgtacagcgcgtgctggattcgcacgaaggatggcgaagtgtgggaggttcacgtcccgagcgcggatcgccatcgctggtccccgggcgcgtgggtgcacatgaacgtgacgaggtggtttatctttccgcgctga

SEQ ID NO: 84754 - protein, 343 aa, Alicyclobacillus acidocaldarius
MTIEFVGVEKIYPGGARSVRGVSFQIREGEMVGLLGPSGSGKTTILRLIAGLERPTKGDVWIGGKRVTDLPPQKRNVGLVFQNYALFQHMTVYDNVSFGLREKRVPKDEMDARVRELLRFMRLESYANRFPHELSGGQQQRVALARALAPRPQVLLFDEPFAAIDTQIRRELRTFVRQVHDEMGVTSVFVTHDQEEALEVADRVLVLHEGNVEQFGTPEEVYEKPGTLFVASFIGESNVWTRAVQNGRIEVAGAALPVDPAVSEGSEVAVVVRPKDVELQPASEREAHAQVVRSAFKGSYSACWIRTKDGEVWEVHVPSADRHRWSPGAWVHMNVTRWFIFPR

SEQ ID NO: 84755 - DNA, 1119 bp, Thermococcus litoralis
  CDS (1)..(1119): transl_table=11
atggctggtgttaggcttgtagatgtttggaaggtgtttggggaggttactgctgttagggagatgagtttggaggttaaggatggggagtttatgattcttttgggcccgagtggttgtgggaaaacaacaacgctcaggatgattgctgggctggaggagccgagtagggggcagatttatattggagacaaactcgtcgcagacccggagaagggaatttttgtgccaccgaaggacagggatattgcgatggtcttccaaagctacgccctttacccgcatatgactgtttatgataatattgcttttccgttgaagctcaggaaggttccgaggcaggagattgaccagcgtgttagggaggttgctgagctcctcggtttgacggagcttttgaataggaagccgagggaattaagcggtgggcagaggcagcgtgttgcgttgggtagggcgattgttaggaagccgcaggtgtttttaatggatgagcctttgagtaatttggatgctaagttgagggttaggatgcgtgctgaactgaagaagttgcagaggcagcttggtgtgacgacgatttacgtaacccacgatcaggttgaggctatgacgatgggtgataggattgctgtgatgaatcggggtgttttgcaacaagtgggttcgccggatgaggtttatgataagcctgcgaatacttttgtggctggttttattggaagcccgccgatgaattttcttgatgctattgttactgaggatgggtttgtggattttggggagtttaggttgaagcttcttccggatcagtttgaggttttgggggagttgggttatgttggtagggaggtaatctttggtattcgtccggaggatttgtatgatgcgatgtttgctcaggtgagggttcctggggagaatttggttagggctgtggttgagattgtggagaatttgggtagtgagaggattgtgcatttgcgtgttggtggtgtgacttttgtcggctcctttaggtcggagtctagggttagggagggtgtggaggttgatgttgtgtttgatatgaagaagattcacatcttcgacaaaaccacaggaaaagcaatattctag

SEQ ID NO: 84756 - protein, 372 aa, Thermococcus litoralis
MAGVRLVDVWKVFGEVTAVREMSLEVKDGEFMILLGPSGCGKTTTLRMIAGLEEPSRGQIYIGDKLVADPEKGIFVPPKDRDIAMVFQSYALYPHMTVYDNIAFPLKLRKVPRQEIDQRVREVAELLGLTELLNRKPRELSGGQRQRVALGRAIVRKPQVFLMDEPLSNLDAKLRVRMRAELKKLQRQLGVTTIYVTHDQVEAMTMGDRIAVMNRGVLQQVGSPDEVYDKPANTFVAGFIGSPPMNFLDAIVTEDGFVDFGEFRLKLLPDQFEVLGELGYVGREVIFGIRPEDLYDAMFAQVRVPGENLVRAVVEIVENLGSERIVHLRVGGVTFVGSFRSESRVREGVEVDVVFDMKKIHIFDKTTGKAIF

SEQ ID NO: 84757 - DNA, 1089 bp, Rhizobium meliloti
  CDS (1)..(1089): transl_table=11
atgacaggcctgctgctgaaagatatccgcaagtcctacggggccgtcgacgtaattcacggcatcgatctcgacatcaaggaaggcgagttcgtcgtcttcgtaggaccgtccggatgcgggaagtcgacacttctgcgcatgatcgccgggctcgaggaaataaccggcggcgacatgttcatcgacggcgagcgggtcaacgacgtgccgccttcgaagcgcggcatcgccatggtgttccagtcctatgcgctctatccgcatatgaccgtttacgacaacatggccttcggcatgcgcatcgccagggaatcgaaggaggagatcgaccggcgtgtgcgtggagccgcggatatgcttcagctcaccccatatctcgaccggcttccgaaggcgctttccggcggccagcggcagcgcgtggccatcggccgggcgatctgccgcaatcccaaggtcttccttttcgacgagccgctctccaacctcgacgccgcgctccgggtagcgacccgcatcgagatcgccaagctcagcgagcggatgtcggacaccaccatgatctacgtcacccatgaccaggtggaggcgatgacgctcgccgaccggatcgtggtcctctccgccggtcacatcgaacaggtcggggcgcccctcgaactctacgagcggccggcaaacctcttcgtcgcgcgtttcatcggctccccggccatgaacgtcatcccggcgacgatcactgccaccggccaacagaccgccgtctcgctcgcgggcggaaagtcggtgacgctcgatgttccgacgaatgcctccgaaaacggcaagacggcgagcttcggcgtccgcccggaagacctgcgggtgaccgaggccgacgacttcctgttcgagggcacggtctcgatcgtcgaggcgctgggcgaggtgaccttgctctacatcgaagggctggtcgaaaacgagccgatcatcgccaagatgcccggtatcgcccgggtcggccgcggcgacaaggtgcggttcacggccgacaaggccaagctgcatctcttcgacaccaatggacagagctatcgggcgtag

SEQ ID NO: 84758 - protein, 362 aa, Rhizobium meliloti
MTGLLLKDIRKSYGAVDVIHGIDLDIKEGEFVVFVGPSGCGKSTLLRMIAGLEEITGGDMFIDGERVNDVPPSKRGIAMVFQSYALYPHMTVYDNMAFGMRIARESKEEIDRRVRGAADMLQLTPYLDRLPKALSGGQRQRVAIGRAICRNPKVFLFDEPLSNLDAALRVATRIEIAKLSERMSDTTMIYVTHDQVEAMTLADRIVVLSAGHIEQVGAPLELYERPANLFVARFIGSPAMNVIPATITATGQQTAVSLAGGKSVTLDVPTNASENGKTASFGVRPEDLRVTEADDFLFEGTVSIVEALGEVTLLYIEGLVENEPIIAKMPGIARVGRGDKVRFTADKAKLHLFDTNGQSYRA

SEQ ID NO: 84759 - DNA, 1044 bp, Rhizobium meliloti
  CDS (1)..(1044): transl_table=11
atggaagtccgggtcgagagcctccgcaaagaattcggccgcttcccggcgctcgtcgacgtcacactcgacatcctctccggcgagctgattgcgctcctcggcccgtcgggttcaggaaagacgacgctgctcaggctaattgctggcctcgaaagcccgaccgagggcatgatcttcttcggcgacgaggacgcatcgaagaggaccgtccaggagcgcaatatcggcttcgtcttccagcactacgccctgttccgtcacatgacggtgctcgacaatgtcacattcgggctcaaggtacggcccgccaaccggcggccgcccgccgcagagatccgccgtcgtgcgctcgacctcatcgacttggtgcagctctctgggctcgaaaaacgctatccggcccagctttctgggggccagcggcagcgggtggcgctcgcccgcgctatggcggtcgaaccgagcgtgctgctgctcgacgagcccttcggcgcgctcgacgcgcaggttcgcaaggaacttcgccggtggctccgcgaaatccacgaccgcaccgggtacacgaccctcttcgtcacccatgaccaggaagaggcactcgagcttgccgaccgcgtcgtagtgatgagcaagggcgcgatcgagcaagtcggcacccccgacgagatctacgatcaccccgtctcgcctttcgtctacggcttcatcggtcagtccaattgtctcaacgtcacgcttgccaatggtgagatctggttcgagggccgcccaatcggccttcgcgccgcgaacgagccggacgggcaggcaaccctctttttccgcccgcacgacgtcgagctcattgagggtggcagtggctgtctcgccgggcgtgtcacggcgagtcggcgtgtagcgggcacgcgccacctcgaattggatctcggcaagacacagtcgtcgatcgaggttgagttgccgcccgagctcgcgtcctcggccgaccgcacccgtatcgcgctccgccccacgaagtggaagctgttttgtggcgagtag

SEQ ID NO: 84760 - protein, 347 aa, Rhizobium meliloti
MEVRVESLRKEFGRFPALVDVTLDILSGELIALLGPSGSGKTTLLRLIAGLESPTEGMIFFGDEDASKRTVQERNIGFVFQHYALFRHMTVLDNVTFGLKVRPANRRPPAAEIRRRALDLIDLVQLSGLEKRYPAQLSGGQRQRVALARAMAVEPSVLLLDEPFGALDAQVRKELRRWLREIHDRTGYTTLFVTHDQEEALELADRVVVMSKGAIEQVGTPDEIYDHPVSPFVYGFIGQSNCLNVTLANGEIWFEGRPIGLRAANEPDGQATLFFRPHDVELIEGGSGCLAGRVTASRRVAGTRHLELDLGKTQSSIEVELPPELASSADRTRIALRPTKWKLFCGE

SEQ ID NO: 84761 - DNA, 1026 bp, Agrobacterium tumefaciens
  CDS (1)..(1026): transl_table=11
atgaaaatccgcctcgaaaatgtggtgaagaccttcgataccttccgcgccgtgcgcgatgtttcgctggatatcgaaagcggcgagcttctggcgctgctcggcccttccggctccggcaagaccacgattttgcgcatggtcgcgggtctggaatatagcgatggcggccgcatctttttcggggatgaggatgccaccaatattccggtacgggaccgcggcgtcggtttcgtgttccagcattatgcgttgttcccgcatatgacgctgcatgaaaacatcgccttcggcatgaaggtttcgaaggtcaagcgcgacaaagcggcgattgatgcccgggtcaaggaacttctgaacctcgtcaaactcgatggtttgggtgaccgtttcccggcgcagatttccggcgggcagcggcaacgcgtggcgctggcccgcgccctttcggtcgatcccaaggtgctgctgctggacgaaccgttcggggcactggacgccaatgtgcgtcgcgacctgcggcgctggctgcgggaaattcacgattcgcttggtatcaccacgattttcgtgacccatgaccaggaagaggcgcttgatctggctgaccgcgtggtcattctcaatcagggcgggatcgtgcagcagggcacgccgaaagaggtgtgccgccagcccaacagttctttcgtcatgcgtttccttggcgatgccaaccgggtgtccggcgtggcgcgcggcggcaaggtctatgtcggcgaaaacgagctgcccttctcctatacccaaggcgacggcgccgtcgatatctatgcccgccccggcgatcttgaatgggaagatctacatgaggggattccggcttcggtggagcgtgtcctcgaccgcgctggcgagcgccgggtgatcgccagcaccgatggtggcgatatcctggaattcgatgtgccgccggaaaacgatgttacggccggagatcgcggttcggtcatcatccgccgggcgaagatttttccggtggcatag

SEQ ID NO: 84762 - protein, 341 aa, Agrobacterium tumefaciens
MKIRLENVVKTFDTFRAVRDVSLDIESGELLALLGPSGSGKTTILRMVAGLEYSDGGRIFFGDEDATNIPVRDRGVGFVFQHYALFPHMTLHENIAFGMKVSKVKRDKAAIDARVKELLNLVKLDGLGDRFPAQISGGQRQRVALARALSVDPKVLLLDEPFGALDANVRRDLRRWLREIHDSLGITTIFVTHDQEEALDLADRVVILNQGGIVQQGTPKEVCRQPNSSFVMRFLGDANRVSGVARGGKVYVGENELPFSYTQGDGAVDIYARPGDLEWEDLHEGIPASVERVLDRAGERRVIASTDGGDILEFDVPPENDVTAGDRGSVIIRRAKIFPVA

SEQ ID NO: 84763 - DNA, 1104 bp, Rhizobium meliloti
  CDS (1)..(1104): transl_table=11
atggaagtccgcgtccagaacattcgcaaggaattcggccgttttcccgcgctcgaagacgtttccctcgatatccggtcgggtgaactgattgcgctcctcggcccctccggctccggcaagaccacgctgctgaggctggtcgccgggctcgaaagcccgaccgaaggcacgatcttcttcggcgacgaggatgcgtcgaagaagaccgtccagcagcgcaacatcggcttcgttttccagcattacgcgctgttccgccacatgacggtgctcgacaacgtcgccttcggcctgaaggtgcggcccgccaaacggcggccgtcggctgccgacatccgccgcagagcggtcgacctgctggaactcgtgcagctctccgggctggagagacgctacccggcccagctttcgggcgggcagcgccagcgcgtcgcgctcgcccgcgccatggccgtcgaacccaacgttctgctcctggatgagcctttcggcgcgctcgatgcgcaggtgcgcaaggaactgaggcggtggctgcgcgaaatccacgaccgcaccggccataccacgatcttcgtcactcacgaccaggaggaagcactcgagcttgccgaccgcgtcgtcgtgatgagcaagggcgcgatcgagcaggtcggcacgcccgacgagatctatgaccatccggtctcgcccttcgtctacggcttcatcggacaatccaactgcctcgacgtcaccctcgccaatggcgaaatctggcacgaggaccgcccgatcggccttcgtgccgggaatgagccggacggcgccgcaaccctctatttccgcccgcacgacgtggaactcatcgacggctgcggcggttgcctcgccggcctggtcacggccagcaggcgcgtggcgggcacccggcatctggaactcgatctcggacgtaagcaccctccggtcgaaatcgagctgccgccggaacgcgccgcctccaccgaccacacgcgcatcgccttccggccgacgcgatggaagctattccgcaagggcggacaaaaggaagcaccgctgatagaggcggaggcgccggtgctcgcagccacgggcacgtga

SEQ ID NO: 84764 - protein, 367 aa, Rhizobium meliloti
MEVRVQNIRKEFGRFPALEDVSLDIRSGELIALLGPSGSGKTTLLRLVAGLESPTEGTIFFGDEDASKKTVQQRNIGFVFQHYALFRHMTVLDNVAFGLKVRPAKRRPSAADIRRRAVDLLELVQLSGLERRYPAQLSGGQRQRVALARAMAVEPNVLLLDEPFGALDAQVRKELRRWLREIHDRTGHTTIFVTHDQEEALELADRVVVMSKGAIEQVGTPDEIYDHPVSPFVYGFIGQSNCLDVTLANGEIWHEDRPIGLRAGNEPDGAATLYFRPHDVELIDGCGGCLAGLVTASRRVAGTRHLELDLGRKHPPVEIELPPERAASTDHTRIAFRPTRWKLFRKGGQKEAPLIEAEAPVLAATGT

SEQ ID NO: 84765 - DNA, 1017 bp, Anabaena sp
  CDS (1)..(1017): transl_table=11
gtgggcatagtagttgaaaacgtatccaaacaattcggcagtttccgagcggttgatcaggtgaacttagaaatccaaagcgggaaactggtagccctattggggccgtcgggatctggtaagtctactctgctccgcttaattgctggtctcgaaaagccagacgatggcagaattattctgacgggaaaagacgctacaaaccaaagtgtacaagaacgtaacatcgggtttgtatttcaacactatgctttatttaagcatctgacagtccggcaaaacatcgcctttgggttagagattcgcaaagcaccagcgaataaagtcaaaggacgggtagaacagttattagaactagtgcaattgagtgggctaggcgatcgctatccttcacagctttcgggtggtcaaagacaaagggtagccttagctagagccttagcagtagaacctagtgtattacttttagatgaaccttttggagcgcttgatgccaaagtccgtaaagacttacgcgcatggttacgccgcctccatgatgaagttcatgttaccacagtttttgtcacccacgaccaagaagaagcaatggaagtttctgatgaggtcgtggtgatgaatcaaggccgtgtagaacaggtaggaacacccgcagaaatttacgataaccccgccacatcctttgtgatgagcttcattgggccagtgaatgttttgccaagtagttccagaattttccaaagtagccagttagagatagaacatccaaacgtatttttacgcccacaagatgtagtgatcgagaaatctgctaacggtacaaccgcacctgctacagtcactcgattgatccatttgggctgggaaatcaaagttgaattaaccttagacgatgggcaagttgtcaacgctcatttaacacgcgatcgctacgatgagctacagttggaaccaaagcaaaaggtatatgtaaaacccaaggatgcgaaatcttttcctttgtattactcgatttaa

SEQ ID NO: 84766 - protein, 338 aa, Anabaena sp
MGIVVENVSKQFGSFRAVDQVNLEIQSGKLVALLGPSGSGKSTLLRLIAGLEKPDDGRIILTGKDATNQSVQERNIGFVFQHYALFKHLTVRQNIAFGLEIRKAPANKVKGRVEQLLELVQLSGLGDRYPSQLSGGQRQRVALARALAVEPSVLLLDEPFGALDAKVRKDLRAWLRRLHDEVHVTTVFVTHDQEEAMEVSDEVVVMNQGRVEQVGTPAEIYDNPATSFVMSFIGPVNVLPSSSRIFQSSQLEIEHPNVFLRPQDVVIEKSANGTTAPATVTRLIHLGWEIKVELTLDDGQVVNAHLTRDRYDELQLEPKQKVYVKPKDAKSFPLYYSI

SEQ ID NO: 84767 - DNA, 1158 bp, Anthoceros formosae
  CDS (6)..(1151)
ttactatgagtattcttgtgtatgaagtttccaaatcactaggtaatttaaaagttctggatcgagtaagtttatatgttcgtaaagtttctttggtagctcttttaggtccctcaggttcaggaaaatcaagtttgttacgaataatagcgggtcttgacagtcctgattacggaagtgtatggttgcatggtacagatatgactaatacttctactcaatatcgacacatggcttttgtttttcaacattatgctcttttcaaaaatatgactgtttatgaaaatatttcttttggacttcgtttaagaggattttcctaccagaaaattagaaataaagtaaatgatttgttagattgtcttcgaatttcagacattgtgtctgagtatccgggaaaattatcagggggacagaaacaacgtgttgctcttgctagaagtctggctattaaatcagattttcttttattggacgagccttttggagccttagatggagaattgcgaagacaccttagtaaatggttaaagcgttacttgaaagacaatggaattacaacaattatggttactcatgatcaaaaagaagctatttctatggctgacgaaattgtggttttgaagcaaggtcgtttcttgcaacaaggaagatccaaaaatctttatgatgaaccaattgattattttgttggtattttttcaggatcattcattgaatttcctcaattagaagaatctttggatgctccacttggtagtagtagtagtagtagtagtagtactaaaaaatccatggaaaaagatttcacgccatttattcctgatctaatatggtctcaaatatttactaatcaatcgatacatcactatcatttttttctaagacctcatgaactgtatctagaatctcaaatagatttgaaagcaatacctgttcaaataaaaaaaattatttataaaaggactttcgttcaattagatttatctataactccttcttcatggaacattactattcccataggttatcaagcctttcgaaaattaaatattcaatctttcgtgcagaagctctatataaagcctagaaatcaagtttatttacgggcttatcccaagaaaaaaaacatcattagtaaacaaatctaatttttta

SEQ ID NO: 84768 - protein, 381 aa, Anthoceros formosae
MSILVYEVSKSLGNLKVLDRVSLYVRKVSLVALLGPSGSGKSSLLRIIAGLDSPDYGSVWLHGTDMTNTSTQYRHMAFVFQHYALFKNMTVYENISFGLRLRGFSYQKIRNKVNDLLDCLRISDIVSEYPGKLSGGQKQRVALARSLAIKSDFLLLDEPFGALDGELRRHLSKWLKRYLKDNGITTIMVTHDQKEAISMADEIVVLKQGRFLQQGRSKNLYDEPIDYFVGIFSGSFIEFPQLEESLDAPLGSSSSSSSSTKKSMEKDFTPFIPDLIWSQIFTNQSIHHYHFFLRPHELYLESQIDLKAIPVQIKKIIYKRTFVQLDLSITPSSWNITIPIGYQAFRKLNIQSFVQKLYIKPRNQVYLRAYPKKKNIISKQI

SEQ ID NO: 84769 - DNA, 1035 bp, Bradyrhizobium japonicum
  CDS (1)..(1035): transl_table=11
gtgaccattgaagtcaggaatctcgtcaagaagttcggcagctttgccgccctcgatggcgtcaacctcaaggtcgacaatggcgagctgctggcgctgctcgggccttcgggctccggcaagaccacgctgctgcgcatcatcgctggcctcgactggcccgactcgggcgaggtctccttcaacggcgaggacgcgctggcgcagggcgcgcgtgagcggcacgtcggcttcgtgttccagcattacgcactgttccgccacatgacggtgttcgagaacgtcgccttcggcctgcgcgtgcagccgcgcgcggtccggaaagaggaagccaggatccgcgcccgggtgaaggagctgctcgatctcgtgcagctcgactggcttgccgaccgctacccgagccagctctccggcggccagcgccagcgcatcgcgctcgcccgcgcgctcgcgatcgagccgcgcatcctgttgctcgacgagccgttcggcgcgctcgatgcgaaggtgcggaaagaactgcgcaaatggctgcgctcgctgcatcacgagatcaacgtcacctcgatcttcgtcacccacgaccaggaggaagcgctggaagtcgccaaccgcgtcgtggtgatggacaagggcaggatcgagcagatcggctcgcccgaagacgtctatgaaagcccggcgactgcttttgtccacggcttcatcggcgaatccatcgagctcccggtcaggattgacgacggcgtggtccggctcggcgagcggccgctccggcttgcggcggacggacttgcgcctggcgcgtcgcgactgttcgtgcggcgacatgacatgctggtcggtccgcccggcactggcgccttcgagggcgccgtgcggcatgtccggaatttcggcccggtgcagcgggccgaggtggcgctgttcggcggcgaaaccatcgagatcgacgctccccgcgacagggaactccgcgccggagacagggtcggcctcgagccccgccgctaccggatattcgcgggttaa

SEQ ID NO: 84770 - protein, 344 aa, Bradyrhizobium japonicum
MTIEVRNLVKKFGSFAALDGVNLKVDNGELLALLGPSGSGKTTLLRIIAGLDWPDSGEVSFNGEDALAQGARERHVGFVFQHYALFRHMTVFENVAFGLRVQPRAVRKEEARIRARVKELLDLVQLDWLADRYPSQLSGGQRQRIALARALAIEPRILLLDEPFGALDAKVRKELRKWLRSLHHEINVTSIFVTHDQEEALEVANRVVVMDKGRIEQIGSPEDVYESPATAFVHGFIGESIELPVRIDDGVVRLGERPLRLAADGLAPGASRLFVRRHDMLVGPPGTGAFEGAVRHVRNFGPVQRAEVALFGGETIEIDAPRDRELRAGDRVGLEPRRYRIFAG

SEQ ID NO: 84771 - DNA, 1080 bp, Caulobacter crescentus; identical to SEQ ID NO: 84513
  CDS (61)..(1080): transl_table=11

SEQ ID NO: 84772 - protein, 339 aa, Caulobacter crescentus
MTIAIRSVEKQFGRYPALNKVDLEIADGELLALLGPSGSGKTTLLRTIAGLEFPDAGQVLFDGQDVTYASAAARRVGFVFQQYALFKHMTVAKNIAFGLDVRKGKDKPSKAEIARRVEELLKLVELEGLGGRYPSQLSGGQRQRVALSRALAVQPSVLLLDEPFGALDATVRKSLRRELRRVHDATGVTTIFVTHDQEEALELADRVAILNNGRIEQIGTPDQVHDAPETAFVCGFVGEANRFDGQVSGGRFKAGALTVPASALKDGAATAYVRPHDFALDEAGFEVLIERAQVQGALTAVTALTSDGRRLEISASRADADRFTGAVKIVARKAHVYAA

SEQ ID NO: 84773 - DNA, 711 bp, Chlorella vulgaris
  CDS (1)..(711)
atgagtattttaattgagaatatatcgaagaggtttggttcttttcaagctttagatagagtaaatttagaaattaaaaatggttcattagttggtttattagggccatctggatcaggaaaatcaacacttttacgagttttagccggactggaaaaaccagattccggccggatttggttagagggccaagatgctactcaaatgaaactccaggatcgagaaattgggtttgtgtttcaaaattacgcattatttccccatcttacagtatctgaaaatgtagcttttgggcttgaaatccaaaaaatcgactctcttttgaaaaaaaaacgagtcaatgaattacttaaattaatgcaattagaaaaatttggagattcatatccaaatcagttatcgggcggacaacgccaacgagtagcacttgcaagagcattagctatggaaccaaaggttttattattagatgaaccttttgccgctttggacgcgaaaattagaaaacaacttcgctcgtggttacgtgaattacaccataaaatttcagttacgactgtttttgttacacatgattattcagaagctatggaattagcacaagagattgtacttttagaaaatgggaaaattattcaaattggtagtgcacaagaactttcagatcacccaacgaatacatttgttaccaattttttaggtcttaaatag

SEQ ID NO: 84774 - protein, 236 aa, Chlorella vulgaris
MSILIENISKRFGSFQALDRVNLEIKNGSLVGLLGPSGSGKSTLLRVLAGLEKPDSGRIWLEGQDATQMKLQDREIGFVFQNYALFPHLTVSENVAFGLEIQKIDSLLKKKRVNELLKLMQLEKFGDSYPNQLSGGQRQRVALARALAMEPKVLLLDEPFAALDAKIRKQLRSWLRELHHKISVTTVFVTHDYSEAMELAQEIVLLENGKIIQIGSAQELSDHPTNTFVTNFLGLK

SEQ ID NO: 84775 - DNA, 1098 bp, Escherichia coli O157
  CDS (1)..(1098): transl_table=11
atgagcattgagattgccaatattaagaagtcgtttggtcgcacccaggtgctgaacgatatctcactggatattccttcaggtcagatggtcgcgttgctggggccgtccggttccgggaaaaccacgctgctgcgcattatcgctgggctggagcatcaaaccagcgggcatattcgcttccacggcaccgacgtgagccgcctgcacgcacgtgatcgtaaagtcggtttcgtgttccagcattacgcgctgttccgccatatgacggtgttcgacaatatcgcttttggcctgacggtgctgccgcgtcgcgagcgcccgaatgccgcagccatcaaagcgaaagtgacaaaattgctggaaatggtccagcttgcccatctggcggatcgttatccggcgcagctttccggcggccagaaacagcgtgtagcgctggcgcgtgcgcttgctgtagaaccgcaaattctgctgcttgatgaaccgtttggcgcgctggatgcgcaggtgcgtaaagagctgcgtcgatggctgcgtcaactccatgaagaactaaaattcaccagcgtttttgtgacccacgatcaggaagaagcgaccgaagtagctgatcgtgtagttgtgatgagccagggcaatattgaacaggctgacgcgccggatcaggtatggcgcgaaccggcgacccgttttgtgctcgaatttatgggcgaagtgaaccgcctgcagggaaccattcgcggcgggcagttccatgttggcgcacatcgctggccgctgggctacacacctgcgtatcaggggccggtggatctcttcctgcgcccgtgggaagtggatatcagccgccgtaccagcctcgattcgccgctgccggtacaggtactggaagccagcccgaaaggtcactacacccaattagtggtgcagccgctggggtggtacaacgaaccgctgacggtcgtgatgcatggcgacgatgccccgcagcgtggcgagcgtttattcgttggtctgcaacatgcgcggctgtataacggcgacgagcgtatcgaaccccgagatgaggaacttgctctcgcacaaagcgcctga

SEQ ID NO: 84776 - protein, 365 aa, Escherichia coli O157
MSIEIANIKKSFGRTQVLNDISLDIPSGQMVALLGPSGSGKTTLLRIIAGLEHQTSGHIRFHGTDVSRLHARDRKVGFVFQHYALFRHMTVFDNIAFGLTVLPRRERPNAAAIKAKVTKLLEMVQLAHLADRYPAQLSGGQKQRVALARALAVEPQILLLDEPFGALDAQVRKELRRWLRQLHEELKFTSVFVTHDQEEATEVADRVVVMSQGNIEQADAPDQVWREPATRFVLEFMGEVNRLQGTIRGGQFHVGAHRWPLGYTPAYQGPVDLFLRPWEVDISRRTSLDSPLPVQVLEASPKGHYTQLVVQPLGWYNEPLTVVMHGDDAPQRGERLFVGLQHARLYNGDERIEPRDEELALAQSA

SEQ ID NO: 84777 - DNA, 1098 bp, Escherichia coli
  CDS (1)..(1098): transl_table=11
atgagcattgagattgccaatattaagaagtcgtttggtcgcacccaggtgctgaacgatatctcactggatattccttcaggtcagatggtcgcgttgctggggccgtccggttccgggaaaaccacgctgctgcgcattatcgccgggctggagcatcaaaccagcgggcatattcgcttccacggcaccgacgtgagccgcctgcacgcacgtgatcgtaaagtcggtttcgtgttccagcattacgcgctgttccgccatatgacggtgttcgacaatatcgcttttggcctgacggtgctgccgcgtcgcgagcgcccgaatgccgcagccatcaaagcgaaagtgacaaaattgctggaaatggtccagcttgcccatctggcggatcgttatccggcgcagctttccggcggccagaaacagcgcgtggcgctggcgcgcgcgctggctgtggaaccgcaaattctgctgcttgatgaaccgtttggcgcgctggatgcgcaggtgcgtaaagagctgcgtcgctggctgcgtcaactccatgaagaactaaaattcaccagcgtttttgtgacccacgatcaggaagaagcgaccgaagtagctgatcgtgtagttgtgatgagccagggcaatattgaacaggctgacgcgccggatcaggtatggcgcgaaccggcgacccgttttgtgctcgaatttatgggcgaagtgaaccgcctgcagggaaccattcgcggcgggcagttccatgttggcgcgcatcgctggccgctgggctacacacctgcgtatcaggggccggtggatctcttcctgcgcccttgggaagtggatatcagccgccgtaccagcctcgattcgccgctgccggtacaggtactggaagccagcccgaaaggtcactacacccaattagtggtgcagccgctggggtggtacaacgaaccgctgacggtcgtgatgcatggcgacgatgccccgcagcgtggcgagcgtttattcgttggtctgcaacatgcgcggctgtataacggcgacgagcgtatcgaaacccgcgatgaggaacttgctctcgcacaaagcgcctga

SEQ ID NO: 84778 - protein, 365 aa, Escherichia coli
MSIEIANIKKSFGRTQVLNDISLDIPSGQMVALLGPSGSGKTTLLRIIAGLEHQTSGHIRFHGTDVSRLHARDRKVGFVFQHYALFRHMTVFDNIAFGLTVLPRRERPNAAAIKAKVTKLLEMVQLAHLADRYPAQLSGGQKQRVALARALAVEPQILLLDEPFGALDAQVRKELRRWLRQLHEELKFTSVFVTHDQEEATEVADRVVVMSQGNIEQADAPDQVWREPATRFVLEFMGEVNRLQGTIRGGQFHVGAHRWPLGYTPAYQGPVDLFLRPWEVDISRRTSLDSPLPVQVLEASPKGHYTQLVVQPLGWYNEPLTVVMHGDDAPQRGERLFVGLQHARLYNGDERIETRDEELALAQSA

SEQ ID NO: 84779 - DNA, 993 bp, Erwinia carotovora subsp
  CDS (1)..(993): transl_table=11
atgagcattgagattcgcaatattaataaacaatttggccagtttcgggcactgaacgagattaatttgtcgatccacagcggcgagctggtggcgctgctggggccatcgggctgtggtaagacgacgttgctgcgtattatcgccgggctggagcagccggatagcggcagtattatctttcacggtcaggatgtgtccgtccacgatgtgcgtaaacgcaatgtgggatttgtcttccagcactatgcgctgttccgccacatgacggtgttcgataacgtcgcgtttgggttgcgaatgaagccgaaaaatatccgcccgtcaaagagtgatatcgaaaagaaagtgcatgaattgctgaatctggtgcaattggactggctaggtgatcgctatcctgaacagctttccggcggccagcgtcagcgtattgcgctggcacgtgcgttgattgttgaaccgagcattctgctgttggatgaaccttttggggcactggatgccaaggtacgtaaagagctgcgtcgctggttatctcagttgcatgaagatatcgatctgacatcggtatttgtgacacacgatcaggaagaggcgatggaagtggccgaccgtattgtgctgatgaataaaggcgtgattgagcaaattggtacgcctgcggaagtgtataaccatcctgccagcgaatttgtttatcatttccttggcgacagtaaccggctgaaagtagcgcaaacggaagaaaccattctgtttcgtccgcatgaagtgtcgttgtctgttcaggctcaggatggctatcaggcggtgacggttcgcgatattcgcccgctaggagctttgacgcgcctgtcgttgaaattgggtgagcagtcagagctaattgaagccgaagttgcaaaagacgatgtgagtctggaagggttgcagaaaggtgacgttattcagttcaagcccaagcgctataatcacgattgggaaatctga

SEQ ID NO: 84780 - protein, 330 aa, Erwinia carotovora subsp
MSIEIRNINKQFGQFRALNEINLSIHSGELVALLGPSGCGKTTLLRIIAGLEQPDSGSIIFHGQDVSVHDVRKRNVGFVFQHYALFRHMTVFDNVAFGLRMKPKNIRPSKSDIEKKVHELLNLVQLDWLGDRYPEQLSGGQRQRIALARALIVEPSILLLDEPFGALDAKVRKELRRWLSQLHEDIDLTSVFVTHDQEEAMEVADRIVLMNKGVIEQIGTPAEVYNHPASEFVYHFLGDSNRLKVAQTEETILFRPHEVSLSVQAQDGYQAVTVRDIRPLGALTRLSLKLGEQSELIEAEVAKDDVSLEGLQKGDVIQFKPKRYNHDWEI

SEQ ID NO: 84781 - DNA, 1035 bp, Gloeobacter violaceus
  CDS (1)..(1035): transl_table=11
gtgtcgatacttatcgataatgtttccaagaacttcggtgattttcaggcggtagccgacattcgcctggagatccagcccggcaacctggtggctcttttggggccttccggctgcggcaaatcgacgctgctgcgcctgatcgccgggctcgaactgcccgacagcggccaaatctggttggaggggcaggacgccacccgccagcggctgcaggagcgcaatatcggttttgtctttcagcactacgcgcttttcaagcacctgaccgtcgcccagaacatcgcctttggcctggaggtgcgcaagacgcccaaggcccagatcaaagcccgtgtcgaagagctgctcgaattggtgcaactggcgggctacggcggtcgctacccggcccaactctccggtggccagcgccagcgggtggccctcgcacgcgccctggctgtcgaaccgcgggtgctgctcctcgatgagcccttcggtgccctcgacgccagggtgcgcaaagacttgagagcctggctgcgtcgtctgcacgacgaagtgcacgtcacgaccatctttgtcacccacgaccccgaagaagcgctcgaagtctccgacacgatcgtggtcatgaacaagggccgtgtcgagcaggtgggttcgccggtcgagatttacgaccatccggagagtgcttttgtgatgagctttttggggcaggtcaataccttgcccaacagcccggaactgttcccgcaactgagcgaggcggtccgcgaggtgctggtgcgcccccacgatctgagcttgagcgtccaggcgggcggacccgccctagctgcccgcgtcgagcggctgatgtacctcggctggcaggtccaggccgaattggtgctggaggcaggccagccgctgatcgtccagctcagccgcgagcaggcggaccgcctgcagttgcgtcccgaccagcccgtctacgtacaggtgcgcaatccgaagatcttcccggcggtcgcagccgacaaacaactggccgaagccgccgcctag

SEQ ID NO: 84782 - protein, 344 aa, Gloeobacter violaceus
MSILIDNVSKNFGDFQAVADIRLEIQPGNLVALLGPSGCGKSTLLRLIAGLELPDSGQIWLEGQDATRQRLQERNIGFVFQHYALFKHLTVAQNIAFGLEVRKTPKAQIKARVEELLELVQLAGYGGRYPAQLSGGQRQRVALARALAVEPRVLLLDEPFGALDARVRKDLRAWLRRLHDEVHVTTIFVTHDPEEALEVSDTIVVMNKGRVEQVGSPVEIYDHPESAFVMSFLGQVNTLPNSPELFPQLSEAVREVLVRPHDLSLSVQAGGPALAARVERLMYLGWQVQAELVLEAGQPLIVQLSREQADRLQLRPDQPVYVQVRNPKIFPAVAADKQLAEAAA

SEQ ID NO: 84783 - DNA, 1113 bp, Marchantia polymorpha
  CDS (1)..(1113)
atgagtattttgatttataaagtttctaaatcattaggtaatttaaaaattttagatcgagttagtttgtatgtacctaaattttctttaatagcacttttaggtccttctggttcgggaaaatccagtttattacgaattattgcaggtcttgacaattgtgattatggaaatatatggttacatggtatagatgttactaatatttctacacaatatagaagaatgagttttgtttttcaacattatgcactttttaaacatatgactgtttatgaaaatatttcatttggacttcgattacgaggattttctgctcaaaaaataaccaataaggtcaatgatttattaaattgtttacgaattgcagatatttcttttgaatatcctgcccaactttcaggaggacagaaacaacgtgttgctcttgcacgaagtttagcaattcaaccagattttcttttattagatgaaccttttggtgccttagatggagaattacgaagacatttaagtaaatggttaaaacgttatttgcaagataacaaaattacaacaattatggttacacatgatcaaaaagaagcgatttctatggctgatgaaattgtgattttaaaagaaggtcgtctgttacagcaaggaaaacctaaaaatttatatgaccaaccaattaatttttttgttggtatttttttaggattacttatagaaattccaaaattaaatgaatcaattactttaaaaaacataccatcaaaaactccacaaaatttaaaaaaatttgcttttgatcctatatgggtgaaaatatttgctaatcgatcaataaacaaatatcgattttttttaagaccttatgaattttgtataaaatctgaaatggatttggaagcaacaccagttcaaattaaaacaataatttataaaagaacttttgttcagttggatctttttgtaacttcttttttatggaatttaacaattccaataggttatcaatctttccgaaatttacatattgaatcttttatgcaaacactttatataaaacctagacttcaagtttttttaagagcatatcctatattaacaaatatcaaaaaaaattaa

SEQ ID NO: 84784 - protein, 370 aa, Marchantia polymorpha
MSILIYKVSKSLGNLKILDRVSLYVPKFSLIALLGPSGSGKSSLLRIIAGLDNCDYGNIWLHGIDVTNISTQYRRMSFVFQHYALFKHMTVYENISFGLRLRGFSAQKITNKVNDLLNCLRIADISFEYPAQLSGGQKQRVALARSLAIQPDFLLLDEPFGALDGELRRHLSKWLKRYLQDNKITTIMVTHDQKEAISMADEIVILKEGRLLQQGKPKNLYDQPINFFVGIFLGLLIEIPKLNESITLKNIPSKTPQNLKKFAFDPIWVKIFANRSINKYRFFLRPYEFCIKSEMDLEATPVQIKTIIYKRTFVQLDLFVTSFLWNLTIPIGYQSFRNLHIESFMQTLYIKPRLQVFLRAYPILTNIKKN

SEQ ID NO: 84785 - DNA, 996 bp, Nocardia farcinica
  CDS (1)..(996): transl_table=11
atgatcaccgtcaccaacgcccgcaagaactacggcaacttcgccgcgctcgacgacgtcaccatcgagatcccctcgggtgagctgaccgcgctgctcggcccgtccggctccggcaagtcgacgctgttgcgctcgatcgccggtctggaagccctcgacgacggcgtcgtggtgatcgcgggcaaggacgtcacccgggtggcgccgcagaagcgcgacatcgggttcgtcttccagcactacgcggcgttcaagcacatgaccgtgcgcgacaacgtcgccttcggcctgaagatccgcaagcggcccaaggccgagatcaccaaacgggtcgacgaactgctgggcatcgtcggcttggacggcttccagcaccgctatcccgcgcagctgtccggcggccagcgccagcgcatggcgctggcccgcgcgttggcggtggacccgcaggtgctgctgctggacgagccgttcggcgccctcgacgccaaggtgcgcgccgatctgcgcacctggctgcgcaggctgcacgaggaggtgcacgtcaccacggtgctggtcacccacgaccaggaggaggcgctcgacgtcgccgaccggatcgcggtgatgaacaagggccgcatcgagcaggtcggcacccccgaggacgtctacgaccggcccgcgaacgagttcgtgatgtccttcctcggtgacgtcgcccggctcaacggccacctggtgcggccgcacgacatccgggtgggccgcgatcccagcatggcgctggccgcgcacgagggcaccgcggagtcggcgggtgtcacccgggccacggtggagcgggtggtgcacctcgggttcgaggtcagggtggagctgcgcaacgccgcgaccggcgacctgttctccgcgcaggtgacccgcggcgacgccgaggcgctgcgcctgaccgacggggagacggtgtacgcgcgggccacccggattccggagctgccgacgcagtaa

SEQ ID NO: 84786 - protein, 331 aa, Nocardia farcinica
MITVTNARKNYGNFAALDDVTIEIPSGELTALLGPSGSGKSTLLRSIAGLEALDDGVVVIAGKDVTRVAPQKRDIGFVFQHYAAFKHMTVRDNVAFGLKIRKRPKAEITKRVDELLGIVGLDGFQHRYPAQLSGGQRQRMALARALAVDPQVLLLDEPFGALDAKVRADLRTWLRRLHEEVHVTTVLVTHDQEEALDVADRIAVMNKGRIEQVGTPEDVYDRPANEFVMSFLGDVARLNGHLVRPHDIRVGRDPSMALAAHEGTAESAGVTRATVERVVHLGFEVRVELRNAATGDLFSAQVTRGDAEALRLTDGETVYARATRIPELPTQ

SEQ ID NO: 84787 - DNA, 1098 bp, Salmonella typhimurium
  CDS (1)..(1098): transl_table=11
atgagcattgagatcgccagaattaagaaatcctttggtcgcactcaggtactgaatgatatctcgctggatattccttccggccagatggttgccttgttggggccgtcaggttccggcaaaacgacgctgctgcgcattattgccgggctggagcatcagtccagcggtcatattcgtttccacggtacggacgttagccgcctgcacgcgcgtgagcgtaaagtcggttttgtgtttcagcactatgcgctgtttcgccatatgacggtgtttgacaacatcgcttttggcctgacggtgctgccgcgacgcgaccgcccaactgcggcggcgattaaaacgaaagtgacgcaattgctggagatggtgcaactggcgcacctcgcggatcgcttccccgcccagctttccggcggacaaaaacagcgcgtggcgctggcgcgcgcgcttgccgtggaaccgcaaattctactgctggatgaaccctttggcgcgctggatgcccaggtacgtaaagagttacgtcgctggttgcgccagctacatgaagaactgaaattcaccagcgtctttgtcacccacgatcaggaagaggcgacggaagtggcggatcgggtggtggtgatgagtcagggcaatatcgaacaggctgatgcgccggatcgggtgtggcgtgaaccggcaacccgcttcgtactggagtttatgggcgaggtgaaccgcctgacaggcaccgtccgcggcgggcagtttcacgttggcgcgcatcgctggccgctgggttatacgcccgcgtaccaggggccggtcgatctgttcctgcgtccgtgggaggtggatattagccgccgcaccagcctggattctcctctaccagtacaggtcattgaggccagcccgaaaggtcactatacacagttagtggtacagccgctggggtggtatcacgatccgctgacggtggtgatggcgggtgaggatgttccggttcgcggcgagcgtttgtttgttggactgcaaaaagcgcgtctgtataacggcgaccagcgtattgaaacgcgtgaagaggaacttgctctggcgcaatcggcctga

SEQ ID NO: 84788 - protein, 365 aa, Salmonella typhimurium
MSIEIARIKKSFGRTQVLNDISLDIPSGQMVALLGPSGSGKTTLLRIIAGLEHQSSGHIRFHGTDVSRLHARERKVGFVFQHYALFRHMTVFDNIAFGLTVLPRRDRPTAAAIKTKVTQLLEMVQLAHLADRFPAQLSGGQKQRVALARALAVEPQILLLDEPFGALDAQVRKELRRWLRQLHEELKFTSVFVTHDQEEATEVADRVVVMSQGNIEQADAPDRVWREPATRFVLEFMGEVNRLTGTVRGGQFHVGAHRWPLGYTPAYQGPVDLFLRPWEVDISRRTSLDSPLPVQVIEASPKGHYTQLVVQPLGWYHDPLTVVMAGEDVPVRGERLFVGLQKARLYNGDQRIETREEELALAQSA

SEQ ID NO: 84789 - DNA, 1011 bp, Synechococcus elongatus
  CDS (1)..(1011): transl_table=11
atgggcatcaccattgaaaacgtttctaagtcctttggttcctttcaagcagtcaagcaggtggatttggatattgccagtggctctttagtggcgctgttggggccctccggttctggcaaatcaaccctactgcggctgattgcgggtctagagatgcccgacactggacggattctgctcacgggcaaggacgccacctatcaaagtgttcaagagcgtaatattggcttcgtctttcagcactatgccctttttaagcacatgacggtgcgccaaaatatcgcctttggcctagagctgcgcaaggtgccccgtgccaagatcaacgctcgggtggcggaactgctcgagttggtgcagttgactggcttgggcgatcgctacccctctcagctctcagggggacagcgccagcgggtggctcttgcccgtgcccttgcggtagagcccaaggtgctgttgctcgatgagccgtttggtgccctcgatgccaaagtgcgcaaggaactgcgagcatggttacgccgcctccatgacgatgtccatgtgacaacggtcttcgtgacccacgaccaagaggaagccatggaggtcgcagatcaaattgtcgtcatgaacaaagggcaagtggagcaggtgggcacccccgctgaaatttacgaccatcccgccagcccctttgtgatgagctttattggccccgtcaatgtcttacgctctcgggttttccaacaaagtgaaggtacggctgctcactgcgatatttttctgcggccgcgcgacatcattattgaaacccgtcccaatggcaacaccgtctcagcccgcattcaccgcatcattcacttaggctgggaaattcaggtggaactgcgcctagacgatgggcaggaattgatggcccacctctcgcgagagcgatttgacgagctgcaccttgaaccccaacagcaggtctttattaagccacgggaggcaaagtcctttcccctttactacagcatttag

SEQ ID NO: 84790 - protein, 336 aa, Synechococcus elongatus
MGITIENVSKSFGSFQAVKQVDLDIASGSLVALLGPSGSGKSTLLRLIAGLEMPDTGRILLTGKDATYQSVQERNIGFVFQHYALFKHMTVRQNIAFGLELRKVPRAKINARVAELLELVQLTGLGDRYPSQLSGGQRQRVALARALAVEPKVLLLDEPFGALDAKVRKELRAWLRRLHDDVHVTTVFVTHDQEEAMEVADQIVVMNKGQVEQVGTPAEIYDHPASPFVMSFIGPVNVLRSRVFQQSEGTAAHCDIFLRPRDIIIETRPNGNTVSARIHRIIHLGWEIQVELRLDDGQELMAHLSRERFDELHLEPQQQVFIKPREAKSFPLYYSI

SEQ ID NO: 84791 - DNA, 1035 bp, Synechococcus sp
  CDS (1)..(1035): transl_table=11
gtgccgaaggataaagctgtgggtatccaagtcagtcaggtcagtaagcagtttgggagtttccaagccgtcaaggatgtagatctgacggtggaaaccggcagcttggttgctctgttggggccgtcgggctcggggaaatccacgctactgcgcctgattgcggggctagaacaacctgatagcgggcgaatttttttgactgggcgcgatgcaaccaatgaatcggtgcgcgatcgccaaatcggttttgttttccagcactacgcactgttcaagcatctaacggtgcgtaaaaacattgcctttggtttggaactgcgcaagcacacgaaggaaaaagtccgggctcgcgtagaagagttgctggaactcgtgcagctgacagggttgggcgatcgctatccatctcagttgtcgggcgggcagcggcagcgggttgccttggcgcgggccttagcggttcaaccccaagtcttgctcttggatgagccctttggtgccttggatgccaaggtgcgtaaggaccttcgtagctggctgcgcaagctgcacgacgaagtgcacgtgacgacagtgtttgttacccacgaccaagaagaagcaatggaagtggctgaccaaattgttgttatgaaccacggcaaagtagaacaaattgggtcgcctgcggaaatctacgacaaccccgctaccccgtttgtgatgagctttatcgggccagtcaatgtcctacccaacagttcccacattttccaagcaggcggtctagatacgcctcacccagaagtctttctgcgtccccacgacatcgaaattgcgatcgatccgattcccgaaaccgtgccggctcgcatcgatcgcattgtccatttgggttgggaagtgcaggctgaagtccgtcttgaggatggccaagttttggttgcccatttaccccgcgatcgctatcgggatttgcaactggagccagaacaacaggtgtttgtacgccccaaacaagcgcgatcgttcccgctcaactactcgatttag

SEQ ID NO: 84792 - protein, 344 aa, Synechococcus sp
MPKDKAVGIQVSQVSKQFGSFQAVKDVDLTVETGSLVALLGPSGSGKSTLLRLIAGLEQPDSGRIFLTGRDATNESVRDRQIGFVFQHYALFKHLTVRKNIAFGLELRKHTKEKVRARVEELLELVQLTGLGDRYPSQLSGGQRQRVALARALAVQPQVLLLDEPFGALDAKVRKDLRSWLRKLHDEVHVTTVFVTHDQEEAMEVADQIVVMNHGKVEQIGSPAEIYDNPATPFVMSFIGPVNVLPNSSHIFQAGGLDTPHPEVFLRPHDIEIAIDPIPETVPARIDRIVHLGWEVQAEVRLEDGQVLVAHLPRDRYRDLQLEPEQQVFVRPKQARSFPLNYSI

SEQ ID NO: 84793 - DNA, 1059 bp, Erwinia carotovora subsp
  CDS (1)..(1059): transl_table=11
gtgattaccttgaatactgaaaaaagctttgtcgaactgaagcacatcactaaacgtttcggcaacaacaccgtcattgatgatttgaatctggcgatcccacagggaaaaatggtcacgctgctcgggccatcaggctgcggtaaaaccacggtactccgcgcggttgccgggttggaaaaaccgacagaaggccagattttcatcgacggcgaagacgtcaccgagcgctcgattcaacagcgtgatatctgcatggtgttccagtcttacgcccttttcccgcatatgtcgttgggcgaaaatatcggctacgggctaaaaatgctcggtcgcccgaaggcagaaatcaatcaacgcgtgaaagaagcgctggcgctggtcgatctggaagggtttgaagatcgctatgtcgaccagatttccggtgggcagcaacagcgtgtcgctctggcgcgtgcgctgatccttaaacctaaagtcctgctgttcgatgagccactgagtaaccttgacgccaacctgcgccgcagtatgcgtgagaaaatccgtgagcttcagcagcagttcaacatcacctcgctgtacgtcacgcacgatcagagcgaagcctttgcggtgtccgacatggttctggtgatgaacaaaggcaaaatcatgcagttgggcgcaccacaggaactctatcgccagcccgcttcccgcttcatggccagctttatgggagatgccaatatcttccctgccaccttcacggcagacagcgtaaatatctatggctacctcattccgcgcccgcaggggtttgctgcgggattaagtgaatcgaccgtcggtattcgcccggaagctattacactcagccatcagggtgaagaaagccagcgctgcaccatcacgcaggtcgcctatatggggccacagtacgaagtgcaggtggactggcacggtcagtcgatgctgttgcaggttaacgccactcagcttcagccgaatccgggcgacagttactatctgcaaattcacccttacggcatgtttgtcctgtccgaacagtaa

SEQ ID NO: 84794 - protein, 352 aa, Erwinia carotovora subsp
MITLNTEKSFVELKHITKRFGNNTVIDDLNLAIPQGKMVTLLGPSGCGKTTVLRAVAGLEKPTEGQIFIDGEDVTERSIQQRDICMVFQSYALFPHMSLGENIGYGLKMLGRPKAEINQRVKEALALVDLEGFEDRYVDQISGGQQQRVALARALILKPKVLLFDEPLSNLDANLRRSMREKIRELQQQFNITSLYVTHDQSEAFAVSDMVLVMNKGKIMQLGAPQELYRQPASRFMASFMGDANIFPATFTADSVNIYGYLIPRPQGFAAGLSESTVGIRPEAITLSHQGEESQRCTITQVAYMGPQYEVQVDWHGQSMLLQVNATQLQPNPGDSYYLQIHPYGMFVLSEQ

SEQ ID NO: 84795 - DNA, 1041 bp, Erwinia carotovora subsp
  CDS (1)..(1041): transl_table=11
atgttggaacttcatcgcgtcagtaaaagctttaacggacgcaccgtgctgtctgacattcatttaacgttagaaaacagccgtcgcacggcgattgtcggcccatccggttcagggaaaaccaccctgctgcgcctgattgccgggttcgaaacaccggataccggcgtcattacgctaaacggccaaacgctctgcgataacgggttctccgtccctgcccatcagcgcagaattggctatgtcccgcaggacggcgcgctgtttccgcatctctgcatcgcggacaacatcgcctttgggctcaaaggctcgaaagcggaaaaacaaaaacgcgtagatgaattgatggcgctggtttcgcttcccacgcatttacagaaacactcaccgcatgaaatttccggtggtcaacagcagcgtgtcgcactggcccgcgcgctggcgcagcgccctgcgttgatgctgctggatgaaccgttttccgcgctggacaccggactgcgtgccgccacccgtaaggcggtaatggacgtattgcagcaggctaacgtggcttcgattctggtgacacacgatcagggggaagcgctgtcttttgccgatagggtggtcgtcatgcgtgagggtcaactgtcgcaatcgggttccccctgggcgctctaccaccagcccaacagtgaagacatcgccactttcctcggtgaaacgctgattctcaatgcacagattgacggtggtaaggctgactgcctgcttgggcgcatcgcagtagatcgcccaacggcaaacggtcgagtaagaatcatgctcaggccggagcagataacgattcaggataccgagataacgagcacggcacatatgcgtgccactatccgcaacgtcgagttttccggcttcgtctctacactgacgctacgcatccacaacgcagaagccgatgtcattgaacttaaaaccgtcagtcacgccgctttcatcgtcggccaacaggttagcctaagcgtgaacggtgccgcacacgttttcagtcaataa

SEQ ID NO: 84796 - protein, 346 aa, Erwinia carotovora subsp
MLELHRVSKSFNGRTVLSDIHLTLENSRRTAIVGPSGSGKTTLLRLIAGFETPDTGVITLNGQTLCDNGFSVPAHQRRIGYVPQDGALFPHLCIADNIAFGLKGSKAEKQKRVDELMALVSLPTHLQKHSPHEISGGQQQRVALARALAQRPALMLLDEPFSALDTGLRAATRKAVMDVLQQANVASILVTHDQGEALSFADRVVVMREGQLSQSGSPWALYHQPNSEDIATFLGETLILNAQIDGGKADCLLGRIAVDRPTANGRVRIMLRPEQITIQDTEITSTAHMRATIRNVEFSGFVSTLTLRIHNAEADVIELKTVSHAAFIVGQQVSLSVNGAAHVFSQ

SEQ ID NO: 84797 - DNA, 1188 bp, Rhizobium meliloti
  CDS (1)..(1188): transl_table=11
atgcatattgcccaggagcttgcggatgaaacatgcaacagcccccgcggagccggccatgcccgcctccgctacccgtcagatcgaaggacggccattcctcgaaatcgacggcctctggaaggcctatggcgatttcgtcgcgtgcgcgacatcgaccttcaggtgaaggagggcgaattcatctgtttcctcggaccttccggctgcggaaagaccacgctactgagggccatcgccggcctcgacatccagtcgcggggcaccatttgccaaggcggacaggatatttcgaggttgccgccggcgcagcgggactatggcatcgtctttcagtcctatgcgctcttcccgaatcttaccatcgagaagaacatcgccttcgggctcgagaatatcggccgcccgcggcgcgaaatcgcctcacgcgtttctgagcttctggagctcgtcggtttgagcagccagggccggaaatacccggcccagctatccggcggacagcagcagcgcgtggctcttgcccgcgccatggcgatctcgccgggcctgctgcttctcgacgagcccctgtcggcgctcgacgccaaggtgcgcgtgcatctgagacacgagatcaaggagctgcagcgcaagctcggcgtcaccacgatcatggtcacgcacgatcaggaagaggcgctcgccatggccgaccgcatcgtcgtcatgaaccaaggcggcatcgaacaggtaggtacgccgaccgagatctatcgccacccgaagacactcttcgtcgccgacttcatcggagagaccaatcagttccccgcaacggtcgggaagggggcgcaggtcgagatcgggcacacgcgatttgcctgtgccgagcaccggctgccatcaggtgcatcggtcgtagccgctgtccggccggccgatatcatcccgcacggcgccgccgcccatcgggcgaccgggctcgatgccgtaggcaatgcggacaatctcatcgacgcgcatgtggaggatatggagtttctcggcatgttctggcgcacacggctctcggccccgcgcctgaaagagaaggcgctcgtggcggacttctcgacgaacgcggttcgccgcctgagcatcgagatcggcagcgccatccaggtcgaaatcccgcaggaacgcctgctcctttttgcaaaggcctga

SEQ ID NO: 84798 - protein, 395 aa, Rhizobium meliloti
MHIAQELADETCNSPRGAGHARLRYPSDRRTAIPRNRRPLEGLWRFRRVRDIDLQVKEGEFICFLGPSGCGKTTLLRAIAGLDIQSRGTICQGGQDISRLPPAQRDYGIVFQSYALFPNLTIEKNIAFGLENIGRPRREIASRVSELLELVGLSSQGRKYPAQLSGGQQQRVALARAMAISPGLLLLDEPLSALDAKVRVHLRHEIKELQRKLGVTTIMVTHDQEEALAMADRIVVMNQGGIEQVGTPTEIYRHPKTLFVADFIGETNQFPATVGKGAQVEIGHTRFACAEHRLPSGASVVAAVRPADIIPHGAAAHRATGLDAVGNADNLIDAHVEDMEFLGMFWRTRLSAPRLKEKALVADFSTNAVRRLSIEIGSAIQVEIPQERLLLFAKA

SEQ ID NO: 84799 - DNA, 1047 bp, Escherichia coli
  CDS (1)..(1047): transl_table=11
atgactcagaaaaatttcgttgaactgcgcaacgtcactaaacgatttggcagtaatacggtaatcgacaatatcaacctcaccatcccgcaggggcaaatggtgacgctgctcggcccgtccggctgcggcaaaaccactattttgcgcctggttgccgggctggaaaaaccgagcgaagggcaaattttcattgatggcgaagacgtcacccatcgctctattcagcagcgcgatatctgtatggtgtttcagtcctatgccctgttcccgcatatgtcgctgggagagaatgtcggttatggcctgaaaatgctcggcgtaccgcgcgcagagctgaaagcccgcgtcaaagaggcgttggcgatggtggatctggaaggattcgaagaccgctttgtcgatcagatctccggcgggcagcagcagcgcgtggcgctggcccgcgcgctgatcctcaagccgaaagtgctgctgtttgatgagccgttgagtaacctcgacgccaacctgcgtcgcagcatgcgcgacaagatccgcgagttgcaaaagcagtttgatatcacctcgctgtacgtcacccacgatcagagcgaagcctttgcggtttctgatactgtgctggtgatgaacaagggacacatcatgcagatcggctcaccgcaggatctttaccgccagcccgcctcccgctttatggcgagctttatgggcgatgccaacctgttcccggcaaccttcagcgacggatacgttgatatctacggctatcatctgccgcgcccgctgcactttggtacacagggtgaagggatggtcggtgtgcgcccggaagcgatcacgctcagcgatcgcggcgaagagagccagcgctgcgtgatccgccatgtcgcctatatggggccgcagtatgaagtgacggtggaatggcacgggcaggagatattattgcaggtcaacgctacgcgtctgcaaccggacgtcggcgagcagtattatcttgaaatccatccgtacggcatgtttgttctggcggatgcggcataa

SEQ ID NO: 84800 - protein, 348 aa, Escherichia coli
MTQKNFVELRNVTKRFGSNTVIDNINLTIPQGQMVTLLGPSGCGKTTILRLVAGLEKPSEGQIFIDGEDVTHRSIQQRDICMVFQSYALFPHMSLGENVGYGLKMLGVPRAELKARVKEALAMVDLEGFEDRFVDQISGGQQQRVALARALILKPKVLLFDEPLSNLDANLRRSMRDKIRELQKQFDITSLYVTHDQSEAFAVSDTVLVMNKGHIMQIGSPQDLYRQPASRFMASFMGDANLFPATFSDGYVDIYGYHLPRPLHFGTQGEGMVGVRPEAITLSDRGEESQRCVIRHVAYMGPQYEVTVEWHGQEILLQVNATRLQPDVGEQYYLEIHPYGMFVLADAA

SEQ ID NO: 84801 - DNA, 1065 bp, Pseudomonas fluorescens
  CDS (1)..(1065): transl_table=11
atgaacgctctcgaactccacgcagtgcacaaatccttcggcggcgtgccggcggtgcaggacatcagcctcagcatgcccgccggcagccgcacggctatcgtcggcccttcgggctcgggcaagaccaccttgctgcgaatgatcgccggcttcgagtttcccgatcgcgggcgcatcagcctcaatggccaggtgctggcggacgctcagggcgcggtgccggcccatcagcgcctgatcggctatgtaccccaggatggcgcgctgtttccgcacctcaacgtggcggccaatatcggcttcggcctgacgggcaagaacccgcagaggcagcagcgcattgccgagctgctggacatggtggctctggatagcagcctggccgcccgttggccccacgagctttccggcggccagcagcagcgggttgccctggcccgggccctggcgcagcgcccgcggctgatgctcctggacgaacccttttccgccctcgataccggcctgcgggcctcgatgcgcaaggccgtggcacggctcctggctgaggccggggtgaccaccattctggtcacccatgaccaggccgaggccttgtcctttgccgaccagttggcggtgatgcgccagggccggctggtgcaggccggtgcgccgctggagctgtaccagcacccgcgggatgcccagactgcgctgtttctcggcgaggcggtgctgctgccggcgcagctggaccaggggctggcccaatgtgacctggggcaggtgccgatccgcgagcgctcgctcaagggcccggcgcggatcatgctgcgccccgagcaactgctggtgctggcggacgacggcgatggcgccggcagttgcccgggagtggtcagggactgcgactttgccggcaacacctgcaccctgagcatcggcgtggccggtgccgggggccatgaacaactggtgccggtccgcagttccggcctgcatgcgctaccggtcggcagccgggtgcgcatccgcaccctggggcatgcccatgtgctgggggcggcccccggtgcttga

SEQ ID NO: 84802 - protein, 354 aa, Pseudomonas fluorescens
MNALELHAVHKSFGGVPAVQDISLSMPAGSRTAIVGPSGSGKTTLLRMIAGFEFPDRGRISLNGQVLADAQGAVPAHQRLIGYVPQDGALFPHLNVAANIGFGLTGKNPQRQQRIAELLDMVALDSSLAARWPHELSGGQQQRVALARALAQRPRLMLLDEPFSALDTGLRASMRKAVARLLAEAGVTTILVTHDQAEALSFADQLAVMRQGRLVQAGAPLELYQHPRDAQTALFLGEAVLLPAQLDQGLAQCDLGQVPIRERSLKGPARIMLRPEQLLVLADDGDGAGSCPGVVRDCDFAGNTCTLSIGVAGAGGHEQLVPVRSSGLHALPVGSRVRIRTLGHAHVLGAAPGA

SEQ ID NO: 84803 - DNA, 1038 bp, Serratia marcescens
  CDS (1)..(1038): transl_table=11
atgagcacgctcgaactgcacggtatcggaaaatcttacaacgccatcagagtgctggaacacatcgacctgcaggttgccgccggcagccgcacggcgatcgtcggcccttccggctccggcaaaaccactctgctgcgcatcatcgccggctttgaaatccccgacggcggccagatcctgctgcagggacaagccatgggcaacggcagcggctgggtgcctgcgcatctgcgcggcatcggtttcgttccgcaggatggcgcgttgttcccgcactttaccgtcgccggcaacatcggttttggcctcaaaggcggcaagcgcgagaaacagcggcgcatcgaggcgctgatggagatggtggcgctggatcgccgtctggcggcgctgtggccgcacgagttgtccggcgggcagcaacagcgggtcgcgctggcgcgcgccctgtcgcagcaaccccggctgatgctgctggatgaaccgttctcggcgctggataccggcctgcgcgccgccacccgcaaagcggtggccgaactgctgacggaggccaaggtggcatcgattctggtcacccacgatcagagcgaggcgctgtcgttcgccgatcaggtggcggtgatgcgcagcggccggctggcgcaggtgggcgcgccgcaggatctctatctgcggccggttgatgagccgaccgccagcttccttggcgaaacgctggtgctgaccgccgaactggcgcacggctgggccgactgcgcactggggcgcatcgccgtcgacgatcgccaacgcagcggcccggcgcgcatcatgctgcgcccggagcagattcaaatcggtttgtccgatccggcgcagcgcggccaggcggtgatcaccggcatcgatttcgccggcttcgtctccaccctcaatctgcaaatggcggccaccggggcacagctcgagatcaaaaccgtcagccgcgaaggcctgcggcccggtgctcaggtcactctcaacgtgatgggccaggcgcatattttcgccggctga

SEQ ID NO: 84804 - protein, 345 aa, Serratia marcescens
MSTLELHGIGKSYNAIRVLEHIDLQVAAGSRTAIVGPSGSGKTTLLRIIAGFEIPDGGQILLQGQAMGNGSGWVPAHLRGIGFVPQDGALFPHFTVAGNIGFGLKGGKREKQRRIEALMEMVALDRRLAALWPHELSGGQQQRVALARALSQQPRLMLLDEPFSALDTGLRAATRKAVAELLTEAKVASILVTHDQSEALSFADQVAVMRSGRLAQVGAPQDLYLRPVDEPTASFLGETLVLTAELAHGWADCALGRIAVDDRQRSGPARIMLRPEQIQIGLSDPAQRGQAVITGIDFAGFVSTLNLQMAATGAQLEIKTVSREGLRPGAQVTLNVMGQAHIFAG

SEQ ID NO: 84805 - DNA, 1038 bp, Streptomyces avermitilis
  CDS (1)..(1038): transl_table=11
atgctgctgagcctgaaggccgcgaccgtacgcttcggcgggcgggccgtgctcgacgccgtcgacctcgatgtcgccgagcacgagaccgtgtgtgtgctcgggccgagcggcagcggcaagtcgacgctgttgcgggcggtcgccgggctccagccgctcgacgagggacaggtggtcctggggggccgggcgatggactcggtgcctccgcacaagcggggggtgggtctgatgttccaggaccatcaactgttcccgcagcgggacgtgggcgggaacgtcgctttcgggctccgtatgcacggggcttcgcggtccgaacaggagggccgggtgcgggagttgctcgacctcgtcgggctgccgggcgccgcgcggcgggccgtcgcctccctctccggcggcgagcagcagcgggtcgcgctggcccgcgcgctggcgccccgtccccggctgttgatgctcgacgagccgctcggccagctcgaccggtcgctgcgtgaacgcctggtcgtcgaactccgggaactgttcaccgaactgggtacgaccgtgctcgccgtcacccatgaccagggcgaggcgttcgcgctcgcggaccgggtcgtcgtgatgcgcgccgggcggatcgcccagtccggtacgccccttgaggtgtggcggcagccggccgacgagttcgtggcccgcttcctcggcttcgacaacgtggtcggtgcgaccgtcgccggggaggccgccgacacgccgtggggcaaggtcccggtgccggaggggtccccgcaggggccgggcacgctgctcgtcaggcccgccggcgtgcggctggcggatgccaccgaggggcttcgctgcaccgtggccgcccgcacgttccggggcacccatgtcgccgtgcacctccagccggaggacgacgcaccgcgactggaagcggcgtgcgcgctgcgggacgcgccggagcccggggagacggtcggggtggcgttcgacgtggccgacatcgtcgtactcggaggcgcttccggcgcatag

SEQ ID NO: 84806 - protein, 345 aa, Streptomyces avermitilis
MLLSLKAATVRFGGRAVLDAVDLDVAEHETVCVLGPSGSGKSTLLRAVAGLQPLDEGQVVLGGRAMDSVPPHKRGVGLMFQDHQLFPQRDVGGNVAFGLRMHGASRSEQEGRVRELLDLVGLPGAARRAVASLSGGEQQRVALARALAPRPRLLMLDEPLGQLDRSLRERLVVELRELFTELGTTVLAVTHDQGEAFALADRVVVMRAGRIAQSGTPLEVWRQPADEFVARFLGFDNVVGATVAGEAADTPWGKVPVPEGSPQGPGTLLVRPAGVRLADATEGLRCTVAARTFRGTHVAVHLQPEDDAPRLEAACALRDAPEPGETVGVAFDVADIVVLGGASGA

SEQ ID NO: 84807 - DNA, 1047 bp, Streptomyces coelicolor
  CDS (1)..(1047): transl_table=11
atgccgcccagcctgttgagcctggaaggcgcgaccgtccgcttcggcgggcgggccgtactcgacgacgtcggcctgggggtcgccgagcacgaggtggtgtgcgtgctcgggcccagcggcagcggcaagtcgacgctgctgcgggccgtcgccgggctccagccgctggacgccgggcgggtgacgctggacggccgggaccagtccggggtgcccgcgcacaagcgcgaggtcgggctgatgttccaggaccaccagctgttcccgcagcgggacgtggccgggaacatcgccttcgggccgcggatgcgcggcgcgtcccgggccgagcagcaggcccgggtggcggagttgctgcaactggtcggactgccgggcgccgcccgccggtccgtcgccgcgctctccggcggggagcagcagcgggtggccctggcccgcgcgctcgcgccccggccacggctgctgatgctggacgagccgctcggccagctggaccgttcgctgcgggagcgcctcgtggtcgaactgcgcgagctgttcgggcggctgggcaccacggtgctcgcggtgacgcacgaccagggcgaggcgttcgcgctcgccgaccgggtcgtggtgatgcgggacgggcggatcgcccagtcgggaacgcccctggaggtgtggcagcggccggcggacgcgttcgtggcccgcttcctcggcttcgagaacgtggccgaggcgtccgtcgccggacaggccgcggacaccccgtggggcaaggtgccggtccccgaggacgccccgcaggggacgcgtacggtgctcgtgcggccggccggcgtccgggtcgtccccgccgacgagggcctgcgctgcacggtcacggcccgcaccttccgcggcacgcacgtcgccgtgcacctccagcccgagggcgcgccccgtcttgaggcggcctgcgcgctgcgggcggcgccggaggtcggggccgcggtcggcgtggagttcgacgcggcggacgtcgtcgtgctcggcggatcaggcgttccggagtga

SEQ ID NO: 84808 - protein, 348 aa, Streptomyces coelicolor
MPPSLLSLEGATVRFGGRAVLDDVGLGVAEHEVVCVLGPSGSGKSTLLRAVAGLQPLDAGRVTLDGRDQSGVPAHKREVGLMFQDHQLFPQRDVAGNIAFGPRMRGASRAEQQARVAELLQLVGLPGAARRSVAALSGGEQQRVALARALAPRPRLLMLDEPLGQLDRSLRERLVVELRELFGRLGTTVLAVTHDQGEAFALADRVVVMRDGRIAQSGTPLEVWQRPADAFVARFLGFENVAEASVAGQAADTPWGKVPVPEDAPQGTRTVLVRPAGVRVVPADEGLRCTVTARTFRGTHVAVHLQPEGAPRLEAACALRAAPEVGAAVGVEFDAADVVVLGGSGVPE

SEQ ID NO: 84809 - DNA, 1050 bp, Yersinia pseudotuberculosis
  CDS (1)..(1050): transl_table=11
atgagcacgcttgaacttcatcatatcggtaagtcttatcaatctgtcatggtactggaccgaattgatttacatgtcccgccaggtagccgcaccgccattgtcgggccatcggggtcaggcaaaacgacactgttgcggatcattgccggttttgaaacaccggatgcgggcaaagtgatcttgcaagggaaggcgatgttcgatggcacaacctacgtccctgcccacaaacgaggcattggttttgtaccgcaagatggggcgctctttccgcatttcacggttgctggaaatattggttacggattgaaaggcagtcagcgggataaagagcgccgaattaatgagttgatggatatggttgcgctggatcggcggttatctgcactgtggccacatgagatttcaggtgggcagcagcagcgggtggcccttgccagagcactggcccagcgccctgtgctgatgctactggacgaaccgttttcagcattggataccgcgttaagagcctcaacccgcaaagccgtggctgagctattgtcagaagccaatattgcctcaattctggttacccatgatcaaaccgaagcattgtcttttgccgaccaggttgccgtgatgcgagcagggaaattagcccatgtcggcccgccacaagagctttacttacggccagtggatgagcccaccgccacgtttctgggagagacgctgatgctcaccgctcagctaggtaccgggctggcacactgtgcacttggtcaggtaaaagtggataacccacatcgccgtggtgaggctcgtattatgttgcggccagaacagatcaccctcaccccgctacggcctgaacaatataacgccgcatcctgcctagcaaaggttgtagccattgattttgccggttttatttcgacactcaccctgcaaatcattagcagtggggaaaccatagaaatcaaaacgattagccgagaagatctccatgtcggcttaacagttggcctggatatcatgggccaggcacatatttttgccgagtag

SEQ ID NO: 84810 - protein, 349 aa, Yersinia pseudotuberculosis
MSTLELHHIGKSYQSVMVLDRIDLHVPPGSRTAIVGPSGSGKTTLLRIIAGFETPDAGKVILQGKAMFDGTTYVPAHKRGIGFVPQDGALFPHFTVAGNIGYGLKGSQRDKERRINELMDMVALDRRLSALWPHEISGGQQQRVALARALAQRPVLMLLDEPFSALDTALRASTRKAVAELLSEANIASILVTHDQTEALSFADQVAVMRAGKLAHVGPPQELYLRPVDEPTATFLGETLMLTAQLGTGLAHCALGQVKVDNPHRRGEARIMLRPEQITLTPLRPEQYNAASCLAKVVAIDFAGFISTLTLQIISSGETIEIKTISREDLHVGLTVGLDIMGQAHIFAE

SEQ ID NO: 84811 - DNA, 726 bp, Escherichia coli O157
  CDS (1)..(726): transl_table=11
  misc_feature (366)..(366): r is g or a
atgattaccctgaaaaatgtttcaaaatggtatggtcactttcaggtgctgaccgactgctcaaccgaagtgaaaaaaggcgaagtggtggtggtttgcggcccgtctggttccggcaaatcaacgctgattaaaaccgtcaacggcctcgaaccagtgcagcaaggtgaaatcaccgtcgatggtatcgtggttaacgacaagaaaaccgatctggcaaagctgcgttctcgcgtcgggatggtattccaacatttcgagctgttccctcatctgtcgattatcgaaaacctgaccctggcgcaggtgaaagtgcttaaacgcgataaagcaccggctcgtgaaaaagcattgaaattgctggarcgcgtgggactttccgcacatgccaataaatttccggcgcagctttccggcggccagcagcagcgtgtggcaattgctcgcgcattgtgtatggatcctattgcgatgctgttcgacgaacccacatcggcactagacccggagatgatcaacgaagtactggacgtgatggtggaactggcgaacgaggggatgaccatgatggtggtgacccacgaaatgggctttgcccgtaaagtggcgaatcgggtgatctttatggatgagggtaaaattgttgaagactcgccgaaagatgcgttcttcgatgatccgaaatcggaccgcgcaaaagacttcctcgcgaaaatcctgcattaa

SEQ ID NO: 84812 - protein, 241 aa, Escherichia coli O157
MITLKNVSKWYGHFQVLTDCSTEVKKGEVVVVCGPSGSGKSTLIKTVNGLEPVQQGEITVDGIVVNDKKTDLAKLRSRVGMVFQHFELFPHLSIIENLTLAQVKVLKRDKAPAREKALKLLERVGLSAHANKFPAQLSGGQQQRVAIARALCMDPIAMLFDEPTSALDPEMINEVLDVMVELANEGMTMMVVTHEMGFARKVANRVIFMDEGKIVEDSPKDAFFDDPKSDRAKDFLAKILH

SEQ ID NO: 84813 - DNA, 1041 bp, Bradyrhizobium japonicum
  CDS (1)..(1041): transl_table=11
atggtccgtttcgaaggcatctcgaagacctatccggcctatcgcggcaagcccggcgtcaacgccctgcaggacatcgacttcgcgatcccgcgcggctcgatcaccggcgtgatcggccgctccggcgccggcaagtcgagcctggtccggctgatcaacgggctggagaagccaaccacgggacgcgtgatcgtcgacaacaaggatatctcggcgctggcgggccgcgagttgcggctggcgcagcgctcgatcggcatgatcttccagcatttcaacctgctgtcgtcgcgcaccgcggccgacaacatcgcgttgccgcttgagatcgccggctgggccagggcggatatcaaggcccgcgtcgccgagctgctggcgctggtcggcatcgccgacaagcacgaccgttatccctcggaactgtccggcggccagaagcagcgcgtcggcattgcgcgggcgctggcgacacggccgagcgtgctgctgtcggacgaggcgacgtccgcgctcgatccgcagaccacgcgcgcgatcctcgatctgcttgccaacatcaaccgcgagcttggcgtgaccatcgtgctgatcacccacgagatgtccgtggtgcgccagctcgccagggaagtcgtggtgctcgatgccggccacgtcgtcgagagcggccatgtcgccgacattttcacccatccaaagcatccgatcacgcagtccttcctggccgaagtggtcggcgacagcctgccggtgtcgctggcgagccggatcgtgtcggagccgtctgccggcgggcaggccgtgatccgcgtgcaggtgcgcggggcaggggccggcgacacggtggtggcgcggcttgcgcgcgagctcggcctcgacgttgcgctgcttgcggcgcgcatcgacgagatcggcggccagcatgtgggctcgctcgttctcggtgtacccggcagcgaggacgtgcaggcgcgggttctcgcctggctctctcaataccaattcccggcggagcgtctcggctatgtcgcctga

SEQ ID NO: 84814 - protein, 346 aa, Bradyrhizobium japonicum
MVRFEGISKTYPAYRGKPGVNALQDIDFAIPRGSITGVIGRSGAGKSSLVRLINGLEKPTTGRVIVDNKDISALAGRELRLAQRSIGMIFQHFNLLSSRTAADNIALPLEIAGWARADIKARVAELLALVGIADKHDRYPSELSGGQKQRVGIARALATRPSVLLSDEATSALDPQTTRAILDLLANINRELGVTIVLITHEMSVVRQLAREVVVLDAGHVVESGHVADIFTHPKHPITQSFLAEVVGDSLPVSLASRIVSEPSAGGQAVIRVQVRGAGAGDTVVARLARELGLDVALLAARIDEIGGQHVGSLVLGVPGSEDVQARVLAWLSQYQFPAERLGYVA

SEQ ID NO: 84815 - DNA, 807 bp, Escherichia coli O157
  CDS (1)..(807): transl_table=11
atgactttacttaacgtctccgacctttcccatcactatgcccacggtgggtttagcggaaaacatcagcaccaggcggtgctgaataacgtttccctgaccctgaaaagcggtgaaaccgtcgccctgctgggacgcagcggctgcggaaaaagcactctctcgcggctactggtaggcttagaatcgccctcacagggaaatattagctggcgtggcgaatcgttggcaaagctcaatcgcgcccagcgtaaagcgttccgccgcgatattcagatggtatttcaggactccatcagcgccgtgaatccgcgcaaaaccgtgcgcgagatcctgcgggaaccgatgcgccacctgctatcgctgaaaaaatccgaacaactggcgcgtgccagcgaaatgctgcacgcggtcgatctcgacgacagcgtgctcgacaagcgcccaccgcagttaagcggcggccagctccagcgcgtctgcctggcacgcgcgctggcggtcgaaccgaaattgctgattctggatgaagccgtttctaaccttgatctcgtgttacaggcgggcgtcattcgcctgctgaaaaagctacaacaacagtttggcactgcctgcctgttcatcactcatgacttacgcctggtggaacgcttttgccagcgagtgatggtgatggacaacggacaaatcgtcgaaacccaggcggtgggagagaaattaaccttttcctctgacgccggacgtgtgctacaaaacgcgatattacccgcattccccgtgcgccgtcgcgccacagaaaaggtttaa

SEQ ID NO: 84816 - protein, 268 aa, Escherichia coli O157
MTLLNVSDLSHHYAHGGFSGKHQHQAVLNNVSLTLKSGETVALLGRSGCGKSTLSRLLVGLESPSQGNISWRGESLAKLNRAQRKAFRRDIQMVFQDSISAVNPRKTVREILREPMRHLLSLKKSEQLARASEMLHAVDLDDSVLDKRPPQLSGGQLQRVCLARALAVEPKLLILDEAVSNLDLVLQAGVIRLLKKLQQQFGTACLFITHDLRLVERFCQRVMVMDNGQIVETQAVGEKLTFSSDAGRVLQNAILPAFPVRRRATEKV

SEQ ID NO: 84817 - DNA, 789 bp, Rhizobium meliloti
  CDS (1)..(789): transl_table=11
atgtctaactcggttcgcccagcggtcaagcttaccggcatacggaagaacttcggcctgctcgaagtgctgcacggcgtgtcactgacagccaatcaaggtgaggtgatatcgatccttgggtcttcgggatcgggcaagtcgacgctgttgcgatgcgttaatatgctcgaggtgccgaattccggtagtgtgtcgatcatgggcgaggagattgccctcaatcatcgttccgggcacccatcccggccaaagtatccaaagcaggtcaacaggctccgcgagagagcggcgatggttttccagagcttccatctctggtcccatctcacaattcttcagaacgtcatggaagctcctttgcatgtccagcgacgtgatcgcaaagaatgtcacgctgaagccgaagccttgttagagcgggttgggattgcttcaaaacgcaatgcttttccgtccgagctctcaggcggccagcagcaacgagccgcaatcgctcgcgcccttgcaatgcgcccggaggttctccttttcgatgagcccacatcggctctcgacccggaactggtcggcgaagttctcagggtgatgcgcaatcttgctgcagaaggccgcacgatgctcatcgtcacgcacgagatggatttcgctcgcgatgtctcgtcgcgctcggtgttcttgcatcaaggcgtcatcgctgaagaaggcctttcctccgaaatgttcgccaacccgcgcactgaacgcttccgacagttcctgcgacgggatggtgctgcatcccactga

SEQ ID NO: 84818 - protein, 262 aa, Rhizobium meliloti
MSNSVRPAVKLTGIRKNFGLLEVLHGVSLTANQGEVISILGSSGSGKSTLLRCVNMLEVPNSGSVSIMGEEIALNHRSGHPSRPKYPKQVNRLRERAAMVFQSFHLWSHLTILQNVMEAPLHVQRRDRKECHAEAEALLERVGIASKRNAFPSELSGGQQQRAAIARALAMRPEVLLFDEPTSALDPELVGEVLRVMRNLAAEGRTMLIVTHEMDFARDVSSRSVFLHQGVIAEEGLSSEMFANPRTERFRQFLRRDGAASH

SEQ ID NO: 84819 - DNA, 1110 bp, Salmonella choleraesuis
  CDS (1)..(1110): transl_table=11
atgctgatgaaaacgaccgccgttcacgcccctgcatcgcaggggacatcggggatagtcctcgactcgctgcgcgttgcgtatcacggcaacgtggtgcttaaaccgctctctttgacgattgaacctggcgaagtgctggcgctgattggcccatcaggatctggaaaaacgacggtgctgcgtgcggttgcgggctttgtgcaacctgcaggcggtcgtattctgattggcgatacggacgtcacccatctgccaccctataaacgcgggttggcgatggtggtgcagaactacgccttgttcccgcatctgaaagtggaagacaacgtcgcttttggcctgcgtgcgcagaagcagccaaaggcgctaattaatgagcgtgtaacgcaggcgctgaaaacggttggcatgagtgattacgccgcccgttatccgcatcaactttccggcggccagcagcaacgcgtggccatcgcccgcgcgattgccgtgcgcccgcgcgtgctgttgctggatgaaccactgtcagcgctggacgcacagattcgtcataatatggtggaagaactcgcccgtcttcaccgtgagctgccggaactcactattctctacgtcacccacgatcaaacggaagcgctcactctggccgataaaatcggcattatgaaggatggctcgctgattgctcacggcgaaacccgcgcgctatatcagcatccgcccaatcgttttgcctccgaattcttaggtcgcgccaatattctctccgctatcgcgctggggataacggaggctccggggctggtgcacgtcagctgcggcggtgcagtgattcgcgcgttcagccggggcagccaccacggttacaacaaactactgtgcattcgtcctcagcacctcagcctgacgccgcgttcggcctacagcaaccgcttcaacgccacactgcaatcggtgcactggcaaggcgatttaacccatctgctgtgtgacgttgctggcgaaacggtgcggatggtgttgacgcatgtcaatccgctgccgcgcgtgggcgacaagctggcgctgtggttcgaaccggatgatgcggtcctgattgaggtataa

SEQ ID NO: 84820 - protein, 369 aa, Salmonella choleraesuis
MLMKTTAVHAPASQGTSGIVLDSLRVAYHGNVVLKPLSLTIEPGEVLALIGPSGSGKTTVLRAVAGFVQPAGGRILIGDTDVTHLPPYKRGLAMVVQNYALFPHLKVEDNVAFGLRAQKQPKALINERVTQALKTVGMSDYAARYPHQLSGGQQQRVAIARAIAVRPRVLLLDEPLSALDAQIRHNMVEELARLHRELPELTILYVTHDQTEALTLADKIGIMKDGSLIAHGETRALYQHPPNRFASEFLGRANILSAIALGITEAPGLVHVSCGGAVIRAFSRGSHHGYNKLLCIRPQHLSLTPRSAYSNRFNATLQSVHWQGDLTHLLCDVAGETVRMVLTHVNPLPRVGDKLALWFEPDDAVLIEV

SEQ ID NO: 84821 - DNA, 1110 bp, Salmonella typhimurium
  CDS (1)..(1110): transl_table=11
atgctgatgaaaacgaccaccgttcacgcccctgcatcgcaggggacatcggggatagtcctcgactcgctgcgcgttgcgtatcacggcaacgtggtgcttaaaccgctctctttgacgattgaacctggcgaagtgctggcgctgattggcccatcaggatctggaaaaacgacggtgctgcgtgcggttgcgggctttgtgcaacctgcaggcggtcgtattctgattggcgatacggacgtcacccatctgccaccctataaacgcgggttggcgatggtggtgcagaactacgccttgttcccgcatctgaaagtggaagacaacgtcgcttttggcctgcgtgcgcagaagcagccaaaggcgctaattaatgagcgtgtaacgcaggcgctgaaaacggttggcatgagtgattacgccgcccgttatccgcatcaactttccggcggccagcagcaacgcgtggccatcgcccgcgcgattgccgtgcgcccgcgcgtgctgttgctggatgaaccactgtcagcgctggacgcacagattcgtcataatatggtggaagaaatcgcccgtcttcaccgtgagctgccggaactcactattctctacgtcacccacgatcaaacggaagcgctcactctggccgataaaatcggcattatgaaggatggctcgctgattgctcacggcgaaacccgcgcgctatatcagcatccgcccaatcgttttgccgccgaattcttaggtcgcgccaatattctctccgccatcgcgctggggataacggaggctccggggctggtggacgtcagctgcggcggtgcggtgattcgcgcgttcagccggggcagccaccacggttacaacaaactgctgtgcattcgtcctcagcacctcagcctgacgccgcgttcggcctacagcaaccgcttcaacgccacactgcaatcggtgcactggcagggcgatttaacccatctgctgtgtgacgttgctggcgaaacggtgcggatggtgttgacgcatgtcaatccgctgccgcgcgtgggcgacaagctggcgctgtggttcgaaccggatgatgcggtcctgattgaggtataa

SEQ ID NO: 84822 - protein, 369 aa, Salmonella typhimurium
MLMKTTTVHAPASQGTSGIVLDSLRVAYHGNVVLKPLSLTIEPGEVLALIGPSGSGKTTVLRAVAGFVQPAGGRILIGDTDVTHLPPYKRGLAMVVQNYALFPHLKVEDNVAFGLRAQKQPKALINERVTQALKTVGMSDYAARYPHQLSGGQQQRVAIARAIAVRPRVLLLDEPLSALDAQIRHNMVEEIARLHRELPELTILYVTHDQTEALTLADKIGIMKDGSLIAHGETRALYQHPPNRFAAEFLGRANILSAIALGITEAPGLVDVSCGGAVIRAFSRGSHHGYNKLLCIRPQHLSLTPRSAYSNRFNATLQSVHWQGDLTHLLCDVAGETVRMVLTHVNPLPRVGDKLALWFEPDDAVLIEV

SEQ ID NO: 84823 - DNA, 1137 bp, Escherichia coli O157
  CDS (1)..(1137): transl_table=11
atgggacagagtaaaaaattgaataaacaaccgagttcgctttcaccgctggtgcaattggcgggaattcgcaaatgctttgatggtaaagaggtcattccccagctggatctgactatcaacaatggcgagttcctcacgctgcttggcccttctggctgcggtaaaacaaccgttcttcgcctgattgcaggtctggaaactgttgattccggacgcatcatgttggataacgaggacatcacccacgttccggcggaaaaccgctatgtgaacactgttttccaaagctacgcacttttcccccacatgaccgtgttcgaaaatgtggcctttgggttgcgcatgcaaaaaacccccgctgctgaaattacgccccgcgtgatggaagccctgcggatggtgcagctggaaaccttcgctcaacgtaaaccgcatcagctctctggtggtcaacagcaacgcgtcgccattgctcgcgcggtggttaacaagcctcgtctgttgttgctggatgagtcgctctcagcgctggattacaaactgcgtaagcaaatgcagaacgagctgaaagcgttacagcgtaagcttggcattacattcgtcttcgtgactcacgatcaggaagaagcactcaccatgtcagacaggattgtggtgatgcgcgatggtcgcattgagcaagacggcacgccgcgtgaaatctacgaagagccgaaaaacctgtttgttgccgggttcattggcgaaatcaatatgtttaacgccactgtcatcgaacgtctcgacgagcagcgcgtacgcgccaacgttgaaggccgcgaatgtaatatctacgttaacttcgccgttgaaccggggcaaaaactgcatgttctgctgcgcccggaagacttacgtgttgaagagattaacgacgacaaccacgctgaagggctgattggttacgttcgcgagcgtaactacaaaggcatgacgctggagtcggttgttgaactggaaaatggcaagatggtgatggtcagcgaattcttcaatgaagacgatcctgactttgaccactctctcgaccaaaaaatggccattaattgggtagaaagctgggaggtcgtactggctgatgaagaacacaagtaa

SEQ ID NO: 84824 - protein, 378 aa, Escherichia coli O157
MGQSKKLNKQPSSLSPLVQLAGIRKCFDGKEVIPQLDLTINNGEFLTLLGPSGCGKTTVLRLIAGLETVDSGRIMLDNEDITHVPAENRYVNTVFQSYALFPHMTVFENVAFGLRMQKTPAAEITPRVMEALRMVQLETFAQRKPHQLSGGQQQRVAIARAVVNKPRLLLLDESLSALDYKLRKQMQNELKALQRKLGITFVFVTHDQEEALTMSDRIVVMRDGRIEQDGTPREIYEEPKNLFVAGFIGEINMFNATVIERLDEQRVRANVEGRECNIYVNFAVEPGQKLHVLLRPEDLRVEEINDDNHAEGLIGYVRERNYKGMTLESVVELENGKMVMVSEFFNEDDPDFDHSLDQKMAINWVESWEVVLADEEHK

SEQ ID NO: 84825 - DNA, 1152 bp, Erwinia carotovora subsp
  CDS (1)..(1152): transl_table=11
ttgatctgccaaatcaggaaacagagctataccttaatgaaagaaaactccctgactgtgccggtcgttgaattgctcaacgtccataaaggctttgatggcaaagacatcatttcgcattttaatctcaccattaataacggtgaattcctgacgatcctcgggccatccggctgcggaaaaaccaccgtactgcgtctgattgccggtctggaaacagtcgatagcggcaatatcatgctggaaaagcaggatattacccaccagcccgccgagcagcggcacgttaataccgtattccaaagttacgcattgttccctcatctcagcgtgtttgaaaacgtagcatttggcctgcgtatgcagaaaacacccgccgtagaaatgactccgcgcgtgattgaagcgctaaaaatggtgcagttggacgagctggcgcagcgtcgcccgcaccaattatccggcggccagcaacaacgcgtcgctatcgcccgcgccgtcgtcaaccagccaaaggttctgctgctggatgaatctttgtccgcactcgattataagctgcgtaaacagatgcagaacgagttgaaagcgctgcaacgtaagctgggtattacctttattttcgtcacgcacgatcaggaagaagccctgaccatgtccgaccgcatcgtggtgatgcgtgatggccgcatcgagcaagacggcacgccgcgtgaaatctacgaagaaccaaaaaatctatttgtcgccagttttatcggtgaaatcaatatttttgatgccatcgtactagatctgttggatgaacagcgagtgcgcgctctggtcgaaggccacgaatgtgttatcaccgtcagctttttggtcaacatcggccaacacctcaacgtgctgctgcggccggaagatttacgcgttgaagagctgggcgacggcatgcaggcggaagggatggttggctacgtgcgcgagcgcaactataaaggcatgacgctggaatccaacatcgagttggaaaacggcaaaatggtcatggtcagcgagttctttaacgaagacgatcccgacttcgatcactcactcgaccagaaggtggacgttacctgggtggaaagttgggaggtagtcctgcacgatgaagacgtcgcgtaa

SEQ ID NO: 84826 - protein, 383 aa, Erwinia carotovora subsp
MICQIRKQSYTLMKENSLTVPVVELLNVHKGFDGKDIISHFNLTINNGEFLTILGPSGCGKTTVLRLIAGLETVDSGNIMLEKQDITHQPAEQRHVNTVFQSYALFPHLSVFENVAFGLRMQKTPAVEMTPRVIEALKMVQLDELAQRRPHQLSGGQQQRVAIARAVVNQPKVLLLDESLSALDYKLRKQMQNELKALQRKLGITFIFVTHDQEEALTMSDRIVVMRDGRIEQDGTPREIYEEPKNLFVASFIGEINIFDAIVLDLLDEQRVRALVEGHECVITVSFLVNIGQHLNVLLRPEDLRVEELGDGMQAEGMVGYVRERNYKGMTLESNIELENGKMVMVSEFFNEDDPDFDHSLDQKVDVTWVESWEVVLHDEDVA

SEQ ID NO: 84827 - DNA, 1107 bp, Thermotoga maritima
  CDS (1)..(1107): transl_table=11
ttgatcggaggagaagtttcaataaagaacgtcagcaaatttttcgatgatttccaggttttgaagaacgtttccctggatataaagaaaggagagtttttctccatactcggcccatcgggttgtggaaaaacaacgcttcttcgtgtgatagcgggcttcgagggtgtggaaagtggagatgttctcctggatggaaagtcgatactgaatttgcctccgaacaaaaggcccgtgaacatcatatttcagaactacgctctgttccctcatctcacagtttttgaaaacatcgcgttccccttgaaactcaaaaaactatccgagaacgaaataaatcagagagtgaacgaactgctttcgctcataagaatggaagaacacgctcagaaaatgccttcccaactgtctggtggtcagaagcagagagtggcgatagcgagggccctcgccaacgagccgagggtcctccttctcgatgaaccgctgagcgctctcgacgcaaaactgagacaggaactccttgtcgagctcgacaaccttcatgacagagtcggtatcaccttcatttacgtaacacacgatcaggctgaagcaatcagtgtttcagacagagtcgccctcatgaacgaaggagaaatcgttcaggttggaactccctacgaggtgtatgagagcccggtcaacgtctttgcagcgactttcatcggagaaacgaacctcatgaaagccgaggttgttgaagtggaagatgaatattacgtcgtagaaagtccgggaatcggccagttcaggtgttacagagacaaggaagcaaagaagggtgatagattgctcatcacccttagacccgaaaagatcagaatctcaaggaaacagtttcgttccgaggaaaccttcaatgtatttcacggagttgtggatgaggaaatatacatggggcaccagacgaagtacttcgttcgactcgacgaaggctacataatgaaagtttacaagcaacatgcaaggtacatactcgatgagccgatcataaaatgggaagatgaagtgttcatcacatggaatccagatgacagcttcattgtagaggtgcttgaagaatga

SEQ ID NO: 84828 - protein, 368 aa, Thermotoga maritima
MIGGEVSIKNVSKFFDDFQVLKNVSLDIKKGEFFSILGPSGCGKTTLLRVIAGFEGVESGDVLLDGKSILNLPPNKRPVNIIFQNYALFPHLTVFENIAFPLKLKKLSENEINQRVNELLSLIRMEEHAQKMPSQLSGGQKQRVAIARALANEPRVLLLDEPLSALDAKLRQELLVELDNLHDRVGITFIYVTHDQAEAISVSDRVALMNEGEIVQVGTPYEVYESPVNVFAATFIGETNLMKAEVVEVEDEYYVVESPGIGQFRCYRDKEAKKGDRLLITLRPEKIRISRKQFRSEETFNVFHGVVDEEIYMGHQTKYFVRLDEGYIMKVYKQHARYILDEPIIKWEDEVFITWNPDDSFIVEVLEE

SEQ ID NO: 84829 - DNA, 738 bp, Nocardia farcinica
  CDS (1)..(738): transl_table=11
atgagcaccgaaccgatcgcggtctcgatcaccggactgcggaagtccttcggcgacaagaccgttctcgacggggtcgacctgaccatccgccgcggcgagttcgtggtcctgctcgggccgagcggcaccggcaagaccacgctgctgcggctgctgaccgggctggaggtccccgacgcgggcgaggtgctggtaccgggccgccggaccaccgtctaccaggaacctcggctcatcccgtccaaacgggtgctggccaatgtgctcgtcggcttgcgccgtacccggagcaaccgggcggccgggctggccgcgctggcggaggtgcagctcgacggcaaggccgaccagtggcccgccacgctctccggcggtgaggcgcagcgtgccgcgctggccagggcgctggtccgggaaccggagctgctgctgctcgacgagccgttcgccgcgctcgacgcgctgacccggctgcggatgcaggacctggtcggcgatctggtcgcccggcaccgccccgccgtgttgatggtcacccacgatgtcgacgaggccgtgcgcctggccgaccgggtgatcgtgctcgaccgcggccgcttcgcggtcgacaccgccatcaccgcgccccgtccgcgcgagcgcgccgaccccgacatcctgcgctaccagaccgaattcctcgcccatctcggcgtcggcggctccgaccgccgccccatcaggagtgcttcatga

SEQ ID NO: 84830 - protein, 245 aa, Nocardia farcinica
MSTEPIAVSITGLRKSFGDKTVLDGVDLTIRRGEFVVLLGPSGTGKTTLLRLLTGLEVPDAGEVLVPGRRTTVYQEPRLIPSKRVLANVLVGLRRTRSNRAAGLAALAEVQLDGKADQWPATLSGGEAQRAALARALVREPELLLLDEPFAALDALTRLRMQDLVGDLVARHRPAVLMVTHDVDEAVRLADRVIVLDRGRFAVDTAITAPRPRERADPDILRYQTEFLAHLGVGGSDRRPIRSAS

SEQ ID NO: 84831 - DNA, 732 bp, Corynebacterium glutamicum
  CDS (1)..(732): transl_table=11
atgactgccacattgtcactcaaacccgcagccactgtccgtggattgcgcaaatcatacggaactaaagaagtcctccaaggaatcgacctcaccatcaactgcggcgaagtaaccgcgctgatcggacgctcaggttcaggaaaatccaccatcctgcgcgtgttggcgggcctatctaaagagcattccggctctgtagaaatttccggaaacccggccgttgccttccaagagcctcgcctgttgccgtggaaaacggtgctcgataatgtgacctttggcctcaaccgcactgatatttcctggtcagaagcacaagaacgcgcctcggcactgcttgcagaagtcaaacttcccgactccgacgccgcctggcccctcacgctctccggcggccaagcccagcgcgtctcccttgcgcgagcgctcatctccgagccagagcttttgcttctcgacgaacccttcggcgccctcgatgctctgacaagactgacagcccaagacctgctgctcaaaaccgtgaacacccgaaacttgggagttctgctggtcacccatgatgtttccgaggccatcgccctggccgaccacgtccttcttcttgacgacggcgccatcacacacagtttgactgtagatatccccggcgatcgccgcacccacccctcctttgcctcctacaccgctcaactccttgagtggctcgaaatcaccacacctgcctag

SEQ ID NO: 84832 - protein, 243 aa, Corynebacterium glutamicum
MTATLSLKPAATVRGLRKSYGTKEVLQGIDLTINCGEVTALIGRSGSGKSTILRVLAGLSKEHSGSVEISGNPAVAFQEPRLLPWKTVLDNVTFGLNRTDISWSEAQERASALLAEVKLPDSDAAWPLTLSGGQAQRVSLARALISEPELLLLDEPFGALDALTRLTAQDLLLKTVNTRNLGVLLVTHDVSEAIALADHVLLLDDGAITHSLTVDIPGDRRTHPSFASYTAQLLEWLEITTPA

SEQ ID NO: 84833 - DNA, 744 bp, Bacillus subtilis
  CDS (1)..(744): transl_table=11
atgcttaccgttaaaggattaaacaaatcattcggtgaaaatgaaattttaaaaaagatagatatgaagattgaaaaaggaaaagtcatcgccatacttgggccttcaggttcagggaaaacgacgctgctccgctgcctgaacgctctggagatcccgaatcgcggagagcttgcatttgatgatttctccatcgatttctccaaaaaggtgaaacaggcggatatcctaaagcttcgccgaaaatccccaatggtgtttcaggcgtatcacctgttcccgcaccgcacagccctcgaaaacgtgatggagggccctgttcaggtgcaaaaacggaacaaagaggaagtcagaaaagaagcgattcagcttcttgataaagtcggattgaaggacaaaatggatttatatccgttccagctttccggcggccagcagcagcgcgtcggcatcgcccgcgcactggcgatacagcctgagctcatgctgtttgacgaaccgacctcagcgcttgatcccgagcttgtcggagaggtgctgaaggttatcaaggacttggccaatgaaggctggaccatggtcgtcgtgacccacgaaatcaagttcgcgcaggaggttgcggatgaagtcatcttcatcgacggcggcgttatcgtggagcagggaccgccggagcaaattttctccgcaccaaaagaagaacggacacagcggttcttaaaccggattttgaacccgctgtaa

SEQ ID NO: 84834 - protein, 247 aa, Bacillus subtilis
MLTVKGLNKSFGENEILKKIDMKIEKGKVIAILGPSGSGKTTLLRCLNALEIPNRGELAFDDFSIDFSKKVKQADILKLRRKSPMVFQAYHLFPHRTALENVMEGPVQVQKRNKEEVRKEAIQLLDKVGLKDKMDLYPFQLSGGQQQRVGIARALAIQPELMLFDEPTSALDPELVGEVLKVIKDLANEGWTMVVVTHEIKFAQEVADEVIFIDGGVIVEQGPPEQIFSAPKEERTQRFLNRILNPL

SEQ ID NO: 84835 - DNA, 717 bp, Agrobacterium tumefaciens
  CDS (1)..(717): transl_table=11
atgacaggcgatgattttgccgttgcgctggataagatcaggctacggctcggaacgcagaacttcgatctcgattgcacctttccgcaaggtcaggtgactgcggttgtgggtgcctccggttcgggaaaatcgacgctcctcaatctcgttgccggtttcgaggtgccagattttggccgtgtggttatccacggacaggacatggcggcatcggacccttcggaaaggccggtttcatcgatctttcaggacaataatcttttcgcccatctcgatattttcaccaatgtcgctctcggagtcagtcccggcctgaaattgcgggcggaagaccggcagaggatcgaggtggcgctggcgcgcgtcggtcttgcgggtttcgacaagcgcctgccgggcacgctttccggcggcgaaagacaaagggcggcgctggcgcgtgcgctggtgcggcaaaaaccggtcatgctgctcgatgagcccttcgccgcgcttgatccgggactgcgggcgggcatgacggctctgcttctcgacttgcacgccgaaacaaaaaatacggtgattattgtcacgcatcaccccgacgacataaaaaagctggcgcaacgggtggtttttcttgatcgcggccgcgttgtctatgcaggctcgaccgcagatttcttcgccacacaaaatgtgaaggcggtagacagttttctgaatggctga

SEQ ID NO: 84836 - protein, 238 aa, Agrobacterium tumefaciens
MTGDDFAVALDKIRLRLGTQNFDLDCTFPQGQVTAVVGASGSGKSTLLNLVAGFEVPDFGRVVIHGQDMAASDPSERPVSSIFQDNNLFAHLDIFTNVALGVSPGLKLRAEDRQRIEVALARVGLAGFDKRLPGTLSGGERQRAALARALVRQKPVMLLDEPFAALDPGLRAGMTALLLDLHAETKNTVIIVTHHPDDIKKLAQRVVFLDRGRVVYAGSTADFFATQNVKAVDSFLNG

SEQ ID NO: 84837 - DNA, 699 bp, Escherichia coli
  CDS (1)..(699): transl_table=11
atgttaaaactgactgatatcacctggctttaccaccatttgccgatgcgttttagcttaacggtggaacgcggcgagcaggtggcgatcctcgggccaagcggcgcgggtaaaagtaccctgctgaatttgatcgccggttttctgacgccagccagcggttcgctgactatcgatggcgtagatcacacaactatgccgccgtcacgccgtccggtgtcgatgctgtttcaggagaacaacctgttcagccacctgacggtcgcacagaacatcgggctggggctaaatccgggattgaaactgaacgcggtacagcaggggaaaatgcacgctatcgcccgccagatggggattgataatttaatggcgcggttaccgggcgagctttccggcggtcagcgacagcgagtggcgttagcgcgttgtctggtacgcgaacagccgattttattgctcgatgaaccgttctctgcgctcgatccggcgttacgtcaggagatgttgacgctggtgagcacgagctgccagcagcaaaaaatgacgctattgatggtgtcgcacagcgtggaagatgcggcgcggatcgccacgcgctcggtagtagtcgccgacgggcgcatcgcctggcagggtatgaccaatgagttgttgagcggtaaggcgagtgcttcggcactattggggattacgggttag

SEQ ID NO: 84838 - protein, 232 aa, Escherichia coli
MLKLTDITWLYHHLPMRFSLTVERGEQVAILGPSGAGKSTLLNLIAGFLTPASGSLTIDGVDHTTMPPSRRPVSMLFQENNLFSHLTVAQNIGLGLNPGLKLNAVQQGKMHAIARQMGIDNLMARLPGELSGGQRQRVALARCLVREQPILLLDEPFSALDPALRQEMLTLVSTSCQQQKMTLLMVSHSVEDAARIATRSVVVADGRIAWQGMTNELLSGKASASALLGITG

SEQ ID NO: 84839 - DNA, 825 bp, Brassica napus
  CDS (1)..(825)
atgttactttcgacggtttcgagctccgcgcctgtcttccgtatcggtgaaccaccagcgtccgtaattggctggaagcaagcgttgagatttcggaggaggacgaaacgtagtgtaatctcttgcgattattcatgcctcgaggttagggatatatgctaccgtcctcctggaacagagttgaatattttgaatggtgttaatctttctctccgtgagaagagcttcggcttgatttttggcaagagcgggagtgggaaaactacccttctgcagcttctggcggggctgaacaaaccaacatcaggttcgatttgcatccaaagatatggggatgatggccagccaaatgcggattctgagttgttgcccactgaaaaagttggcatcgttttccagtttccagagagattctttgtggcagataatgtgcttgacgaaattacttttggttggccaaggcaaaagggtagtttgcagttaaaggagcgtctgacttcaaacctccagagagcatttaattgggttgggttagacagcatcccacttgataaagaccctcagttattaagtggaggttacaagcgtcggcttgcactagctattcaattggtgcaaactcctgatttattgattctggatgagcccctcgctggtcttgattggaaagcacgtgcagatgttgcaaagctcttgaagcacctaaagaaggaactgactttacttgttgtaagtcatgacctaagagagttagcaaccttggtcgatcagtcatggagaatggaatcaggtggtgttcttgttgcagagcgtccaccagtttag

SEQ ID NO: 84840 - protein, 274 aa, Brassica napus
MLLSTVSSSAPVFRIGEPPASVIGWKQALRFRRRTKRSVISCDYSCLEVRDICYRPPGTELNILNGVNLSLREKSFGLIFGKSGSGKTTLLQLLAGLNKPTSGSICIQRYGDDGQPNADSELLPTEKVGIVFQFPERFFVADNVLDEITFGWPRQKGSLQLKERLTSNLQRAFNWVGLDSIPLDKDPQLLSGGYKRRLALAIQLVQTPDLLILDEPLAGLDWKARADVAKLLKHLKKELTLLVVSHDLRELATLVDQSWRMESGGVLVAERPPV

SEQ ID NO: 84841 - DNA, 1263 bp, Glycine max
  CDS (1)..(1263)
atgctgttgattaagtgccaatggaatgattttctctgtctttggattctgcagcaactatctctaaaagggtttgctggagacacagccaaggctcatgcaaagacaagtatgatagcaggagagggagtgagcaacatcagaacagttgcagcattcaatgctcagaacaagatgttatcggtgttctgccacgagctccgagtgcctcagagccagagcctgcgccggagcctgacatccggcttcttgttcggtctctctcagcttgccctctatgcctccgaggctctcattctatggtatggtgcacatttggtcagcaaaggtgtttcaaccttctcaaaggtcatcaaggtgtttgtggtcctagtgatcactgcgaattcggtggctgaaaccgtgagccttgcaccggagattattcgcggtggcgaagctgttggttcagtgttctcaatcctcgatcgatcaacaagaattgaccctgatgatcctgatgctgatccggttgaatcgcttcgcggggaaattgagctcagacatgttgattttgcatacccttctaggcctgatgtgatggtgttcaaggattttaaccttaggatccgtgcaggccagagtcaggctcttgtgggggcaagtggttcggggaagagttctgttattgcattgattgagagattctatgaccttattgctggaaaagtgatggtggatggaaaggacattaggaagttgaacttgaagtctttgaggcttaaaattgggttggtgcagcaagagccagcactttttgcagcaagcattttcgagaacattgcatatgggaaagaaggtgcaaccgaggctgaggtgattgaggccgcgcgtgctgcgaacgtgcacggatttgtgagtggtttgcctgaaggttacaagacaccggttggcgagagaggcgtgcaactctctggagggcaaaagcaaaggattgccattgcaagagccgtgcttaaggaccccacaattcttctactagatgaggccacaagtgcacttgatgctgagtccgagtgtgtgctacaagaggccttggagaggctaatgaggggtcgcaccacggtgctcgtggctcatcgtttgtcaaccattagaggggttgattgcattggtgtggttcaagatgggcgcattgtggagcaaggtagccattctgaacttgtcagcaggcatgagggggcatattctagactcttgcagctacaacatcatcacatatga

SEQ ID NO: 84842 - protein, 420 aa, Glycine max
MLLIKCQWNDFLCLWILQQLSLKGFAGDTAKAHAKTSMIAGEGVSNIRTVAAFNAQNKMLSVFCHELRVPQSQSLRRSLTSGFLFGLSQLALYASEALILWYGAHLVSKGVSTFSKVIKVFVVLVITANSVAETVSLAPEIIRGGEAVGSVFSILDRSTRIDPDDPDADPVESLRGEIELRHVDFAYPSRPDVMVFKDFNLRIRAGQSQALVGASGSGKSSVIALIERFYDLIAGKVMVDGKDIRKLNLKSLRLKIGLVQQEPALFAASIFENIAYGKEGATEAEVIEAARAANVHGFVSGLPEGYKTPVGERGVQLSGGQKQRIAIARAVLKDPTILLLDEATSALDAESECVLQEALERLMRGRTTVLVAHRLSTIRGVDCIGVVQDGRIVEQGSHSELVSRHEGAYSRLLQLQHHHI

SEQ ID NO: 84843 - DNA, 825 bp, Brassica napus
  CDS (1)..(825)
atgttacggtcgacggttccgagctccgcgcctgtcttccgtatcggtgaaccaccagcgtccgtaattggctggaagcaagcgttgagatttcggaggaggacgaaacgtagtgtaatctcttgcgattattcatgcctcgaggttagggatatatgctaccgtccacctggcacagaattgaatattttgaatggtgttaatctttctctccgtgagaagagcttcggcttgatttttggcaagagcgggagtgggaaaactacccttcttcagcttctggcggggctgaacaaaccaacatcaggttcgatttgtatccaaagatatggggatgatggccaaccaaatgcggattctgagttgttacccactgaaaaagttggcatcgttttccagtttccagagagattctttgtggcagataatgtgcttgacgaaattacttttggttggccaaggcaaaagggtagtttgcagttaaaggagcgtctgacttcaaacctccagcgagcttttaattgggttgggttagacagcatcccacttgataaagacccccagttactaagtggaggctacaagcgtcggcttgcactagctattcaattggtgcaaactcctgatttattgattttggatgagcccctcgccggtcttgattggaaagcacgcgcggatgttgcaaagctcttgaagcacctgaagaaggaactgactttacttgttgtaagtcatgacctaagagagttagcaaccttggtcgaccagtcatggagaatggaatcaggtggtgttcttgttgcagagcgtccaccagtttag

SEQ ID NO: 84844 - protein, 274 aa, Brassica napus
MLRSTVPSSAPVFRIGEPPASVIGWKQALRFRRRTKRSVISCDYSCLEVRDICYRPPGTELNILNGVNLSLREKSFGLIFGKSGSGKTTLLQLLAGLNKPTSGSICIQRYGDDGQPNADSELLPTEKVGIVFQFPERFFVADNVLDEITFGWPRQKGSLQLKERLTSNLQRAFNWVGLDSIPLDKDPQLLSGGYKRRLALAIQLVQTPDLLILDEPLAGLDWKARADVAKLLKHLKKELTLLVVSHDLRELATLVDQSWRMESGGVLVAERPPV

SEQ ID NO: 84845 - DNA, 783 bp, Glycine max
  CDS (1)..(783)
atgtcttctcgcttagatgagtgcttgttggaggtggatgggtacggtgatggcgatggaaaggcgaaacccaaattcctgataaggaatctcagcagagtttcggaggatggggttcccatcctcaaaggcataaatcttgagatcccagagggtgtgatcgtgggagtgataggccccagtggtagcggcaagtcaacgttcttgagggcccttaaccgcctctgggagccaccctccgcctccgtcttcctcgacgcccaagacatctgccatctcgatgtcctctctctccgccgtaacgttgccatgctctttcagctcccggccctctttgaaggcagcgttgcggacaatgtgaggtacggaccacaactcagagggaaaaagctaagcgatgatgaggtgcgcaagttgcttctaatggccgacctggatgcttctttcatggataagtccggggctgaactctctgtcggtcaagctcaaagagttgcacttgctaggactttagctaattcaccccaggttttgttgctggatgagccaactagtgccttagatccaatatcgacagaaaacatagaggatgccctggtgaagctgaacaagaatcagggcatgacagtcatcatggtctctcatagcatcaagcaaatccaaaggatcgctcacatagtgtgcctgcttgttgatggtgaaattgttgaagttctcaaccctcataatctctctcaggccaaccatcccatggctaagaggtttcttcaactcagttcttaa

SEQ ID NO: 84846 - protein, 260 aa, Glycine max
MSSRLDECLLEVDGYGDGDGKAKPKFLIRNLSRVSEDGVPILKGINLEIPEGVIVGVIGPSGSGKSTFLRALNRLWEPPSASVFLDAQDICHLDVLSLRRNVAMLFQLPALFEGSVADNVRYGPQLRGKKLSDDEVRKLLLMADLDASFMDKSGAELSVGQAQRVALARTLANSPQVLLLDEPTSALDPISTENIEDALVKLNKNQGMTVIMVSHSIKQIQRIAHIVCLLVDGEIVEVLNPHNLSQANHPMAKRFLQLSS

SEQ ID NO: 84847 - DNA, 1902 bp, Glycine max; identical to SEQ ID NO: 7665
  CDS (1)..(1902)

SEQ ID NO: 84848 - protein, 633 aa, Glycine max; identical to SEQ ID NO: 7666

SEQ ID NO: 84849 - DNA, 3867 bp, Glycine max; identical to SEQ ID NO: 7667
  CDS (1)..(3867)

SEQ ID NO: 84850 - protein, 1288 aa, Glycine max; identical to SEQ ID NO: 7668

SEQ ID NO: 84851 - DNA, 789 bp, Zea mays
  CDS (1)..(789)
atgggctctgcttcatcagatggtctccgggagcacttgctggacgtggacggcggcggagcggcggcggtgcccaagatacgggtgcgcgggctgcggcgccgcgcggacgcgaccggcgaggagatcctccgcggcgtccacctcgacgtgccgcgcggggccgtcatgggcgtcatcggccccagcggcagcggcaagtccacgctgctccgcgcgctcaaccgcctctgggagcccgcgcccggcgccgtgctcctcgacggcgccgacatctgcgccctcgacgtcctcgccctgcgccgcaaggtcggcatgctcttccagctccccgccatgttcgacggaaccgtggctgacaacgtacgatacgggccgcagttgcgcggcaagaagctaaccgaggccgaagtgaagagcctgctgcacctggccgacctggaccctgctctgtgctccaagccggcgtccgagctgtcggtcgggcaggcacagcgcgtcgccctggcccggaccctcgccaacgaccccgaggtgctcctgctggacgagccgaccagcgcgctggaccccatctcgacgcagaacatcgaggaggccatcgtgcggctgaagaagacgagggggctcaccacggtgatcgtctcccacagcgtgaagcagatccagcgcatcgccgacctggtgtgcctcgtcgtcgccggcgaggtcgtggaggtgctcgcgccgtccgacctgtccgacgccaagcacccgatggccaggcgtttcttggagctcagcggctaa

SEQ ID NO: 84852 - protein, 262 aa, Zea mays
MGSASSDGLREHLLDVDGGGAAAVPKIRVRGLRRRADATGEEILRGVHLDVPRGAVMGVIGPSGSGKSTLLRALNRLWEPAPGAVLLDGADICALDVLALRRKVGMLFQLPAMFDGTVADNVRYGPQLRGKKLTEAEVKSLLHLADLDPALCSKPASELSVGQAQRVALARTLANDPEVLLLDEPTSALDPISTQNIEEAIVRLKKTRGLTTVIVSHSVKQIQRIADLVCLVVAGEVVEVLAPSDLSDAKHPMARRFLELSG

SEQ ID NO: 84853 - DNA, 4140 bp, Zea mays; identical to SEQ ID NO: 7669
  CDS (1)..(4140)

SEQ ID NO: 84854 - protein, 1379 aa, Zea mays; identical to SEQ ID NO: 7670

SEQ ID NO: 84855 - DNA, 678 bp, Zea mays
  CDS (1)..(678)
atgccgccgcttcggcctccgccgccgcggctcctgctcaacaacgtctcgtgcatgcggaacgcgcagacggtgctccgcgacatcaacctcagcgtccacgacggcacagccctcgtcctgaccggtgcgaacggctccggcaagaccaccctcctccgcatgctggcgggcttttcgcgtccctcggcgggggagatcctctggaatggtcacgacatcacctccccgggcgttttccagcagtacaagctgcagctcaactggatgtcgctcaaggacgccgtcaaagagaagctcacggtgctcgagaacgtccagtggttcgagctcctcgaggggaaggacggcagcaggtcgggcccagccatcgagctcatgggcctcggcaggctcatgaacgagaaggccaggatgctctccatggggcagaggaagcggctgcagctcgccaggctgctcgctatcgaccgacccatctggctgctggacgagccctcagtcgcgctggacgcagagggtaccaggctgcttgaatacattatcgcagagcatcggaagaagggtggcatcgtgtttgtggccacacatctgcccattcagattgaggattctatgtcgcttcggcttccgcagaggtttccccggaggaagacgctggttgatcttgtccgctga

SEQ ID NO: 84856 - protein, 225 aa, Zea mays
MPPLRPPPPRLLLNNVSCMRNAQTVLRDINLSVHDGTALVLTGANGSGKTTLLRMLAGFSRPSAGEILWNGHDITSPGVFQQYKLQLNWMSLKDAVKEKLTVLENVQWFELLEGKDGSRSGPAIELMGLGRLMNEKARMLSMGQRKRLQLARLLAIDRPIWLLDEPSVALDAEGTRLLEYIIAEHRKKGGIVFVATHLPIQIEDSMSLRLPQRFPRRKTLVDLVR

SEQ ID NO: 84857 - DNA, 1947 bp, Zea mays
  CDS (1)..(1947)
atggggaagaatatgcgcatcaagacggcgcccaaggcgaaccgtgtccccctcctcggcgacggggagacgtcaagggcgctctcggacctggaagagggcagcgacgtccagccagcgaacgtcggcttctgtcgggtcatcaaacttgcgaagcatgacgccggaaagctggtcctcgccaccgcggcgctgctcgtcgcctccctcagtaaccttctcgttcccaaatatggtggcaagataattgacattgtgtcaagagatgttcggcgcccagaagataaggcgcaagccctggaggatgtgaagggcacaattttgtacattgtgacaatcgtcttagtcggttcagtttgcacggctcttcgggcatggctattcaattctgctagtgagagagtagtcgctcgactaaggaaagacttgttcagccatctcataaaccaggaaatagcgttttttgatgtgactagaacaggagagctcttaagcaggctttctgaagatacacaaataataaagaatgctgctacaaccaacctatcagaggcactgcgcaatgtaactactacagctattggtcttggtttcatgttttcaacttcatggaagttaacattgctggcacttgtaattgtcccggttatatcagttgctgtgcgtagatttggacgttttcttcgtgagctttcacatcaaacacaagctgctgcagctgtagcttcatccatagctgaggaatctttcggtgccatccgcacagtaagatcctttgctcaggaatatcatgagatttcacgctatggtgaaaaagtagaggagacacttaaacttggtctcaaacaagctaaagttgttggcttgttttctggagggcttaatgctgcatcaaccatgtctgtggttattgttgttatttatggcgccaacttaaccatcaatggttacatgacaactggctctcttacatcattcatcttatacagccttacagttggttcgtcagtatctgccttgtcaggactatacacaactgtaatgaaagcctctggtgcaagccgtagggtttttcaacttttggaccgtgtttcgtcaatgacaaactctggggacaaatgtccaataaatgaaaaggatggggaagttgagcttgatgatgtctggtttgcatatccttctcgcccatctcatatgattcttaagggaataactctgaagctagcaccaggttcaaaggttgcacttgttgggccaagtggtggtggtaaaaccacaatagcaaatttgattgagcggttttatgaccctctaaagggaaggatcttgcttaatggagtaccgctggcagaaatttcacatcaatatcttcacagcaaggtaagcattgtcagccaggagcctacgctcttcaactgcaccatcgaagagaatattgcttatggactagagggcacaacgaactttgctgacgttgagagtgcagctaaaatggcgaatgcacacaacttcatatgcggctttcccgaccaatataagactgtcgtcggcgagcgggggatcaggttatccggcgggcagaagcagaggatcgccattgcgagagctttgcttatgaacccacgagtgcttctcctggacgaagccaccagtgccctggatgctgaaagcgaatatcttgtacaggatgcaatggactccttgatgaaagggaggactgtccttgtgatagcccaccggctctcgaccgtcaagagcgccgacaccgtcgccgtcatctccgacggcctaatcgtggagagcggcacgcacgacgaactcctggaccgcgacggcatatacacggccttggtgaagaggcagctgcaggggccgaagtttgaggccaccagcagcatcagcgaggcctccgaaattgaagcggaacccagcagtaatgggcaatag

SEQ ID NO: 84858 - protein, 648 aa, Zea mays; identical to SEQ ID NO: 7674

SEQ ID NO: 84859 - DNA, 1947 bp, Zea mays; identical to SEQ ID NO: 7677
  CDS (1)..(1947)

SEQ ID NO: 84860 - protein, 648 aa, Zea mays; identical to SEQ ID NO: 7678

SEQ ID NO: 84861 - DNA, 21 bp, Artificial sequence
  primer
atgatcagagttgaacaggtg

SEQ ID NO: 84862 - DNA, 21 bp, Artificial sequence
  primer
ttagggattggaatgggggac

SEQ ID NO: 84863 - protein, 273 aa, Artificial sequence
  consensus sequence
  Variant (2)..(6): Xaa in position 2 to 6 is any amino acid
  Variant (7)..(7): Xaa in position 7 is any or no amino acid
  Variant (12)..(12): Xaa in position 12 is any amino acid
  Variant (15)..(15): Xaa in position 15 is any amino acid
  Variant (17)..(17): Xaa in position 17 is any amino acid
  Variant (20)..(21): Xaa in position 20 to 21 is any amino acid
  Variant (24)..(29): Xaa in position 24 to 29 is any amino acid
  Variant (31)..(36): Xaa in position 31 to 36 is any amino acid
  Variant (37)..(61): Xaa in position 37 to 61 is any or no amino acid
  Variant (63)..(66): Xaa in position 63 to 66 is any amino acid
  Variant (70)..(70): Xaa in position 70 is any amino acid
  Variant (71)..(73): Xaa in position 71 to 73 is any or no amino acid
  Variant (76)..(80): Xaa in position 76 to 80 is any amino acid
  Variant (82)..(83): Xaa in position 82 to 83 is any amino acid
  Variant (85)..(88): Xaa in position 85 to 88 is any amino acid
  Variant (90)..(114): Xaa in position 90 to 114 is any amino acid
  Variant (115)..(137): Xaa in position 115 to 137 is any or no amino acid
  Variant (139)..(140): Xaa in position 139 to 140 is any amino acid
  Variant (146)..(146): Xaa in position 146 is any amino acid
  Variant (151)..(151): Xaa in position 151 is any amino acid
  Variant (155)..(158): Xaa in position 155 to 158 is any amino acid
  Variant (160)..(162): Xaa in position 160 to 162 is any amino acid
  Variant (164)..(164): Xaa in position 164 is any amino acid
  Variant (168)..(170): Xaa in position 168 to 170 is any amino acid
  Variant (173)..(175): Xaa in position 173 to 175 is any amino acid
  Variant (177)..(190): Xaa in position 177 to 190 is any amino acid
  Variant (191)..(197): Xaa in position 191 to 197 is any or no amino acid
  Variant (199)..(201): Xaa in position 199 to 201 is any amino acid
  Variant (206)..(207): Xaa in position 206 to 207 is any amino acid
  Variant (210)..(220): Xaa in position 210 to 220 is any amino acid
  Variant (221)..(221): Xaa in position 221 is any or no amino acid
  Variant (223)..(228): Xaa in position 223 to 228 is any amino acid
  Variant (229)..(258): Xaa in position 229 to 258 is any or no amino acid
  Variant (260)..(262): Xaa in position 260 to 262 is any amino acid
  Variant (263)..(272): Xaa in position 263 to 272 is any or no amino acid
GXXXXXXGPSGXGKXTXLRXXAGXXXXXXGXXXXXXXXXXXXXXXXXXXXXXXXXXXXXXXRXXXXVFQXXXXALXXXXXVXXNXXXXLXXXXXXXXXXXXXXXXXXXXXXXXXXXXXXXXXXXXXXXXXXXXXXXXPXXLSGGQXQRVAXARAXXXXPXXXLXDEPXXXLDXXXRXXXXXXXXXXXXXXXXXXXXXTXXXVTHDXXEAXXXXXXXXXXXXGXXXXXXXXXXXXXXXXXXXXXXXXXXXXXXXXXXXXPXXXXXXXXXXXXXF

SEQ ID NO: 84864 - protein, 18 aa, Artificial sequence
  protein pattern
  Variant (2)..(2): Xaa in position 2 is any amino acid
  Variant (3)..(3): Xaa in position 3 is Asn or Ser
  Variant (5)..(5): Xaa in position 5 is Ala, Cys or Ser
  Variant (8)..(8): Xaa in position 8 is Ser or Thr
  Variant (10)..(10): Xaa in position 10 is any or no amino acid
  Variant (12)..(14): Xaa in position 12 to 14 is any amino acid
  Variant (15)..(15): Xaa in position 15 is any or no amino acid
  Variant (18)..(18): Xaa in position 18 is Phe, Ile, Leu or Val
GXXGXGKXTXLXXXXAGX

SEQ ID NO: 84865 - DNA, 1173 bp, Synechocystis sp.
  CDS (1)..(1173): transl_table=11
atggttgccatcgataataatttgaaaattcccctaacttcagcggatcatcaatgggtgaaaaccattgccctccaatctggttgccagggagaaaaacttcaacggctcattaaaaaccttttggccgttagggcgatcgcccattggttggagatctacggcattgattatgacgagggggaaagttatagccgtcaaccaccaatccatttaggggaaacagtggctgatctttacctacctaatctcggtcgtttggaatgtcggggcattggtcaccaagaagaggaaatttattttggggcggaaagttggcaggacagattaggctatgcggtggtggaaattagtgaagacctgcgccaaggggaaatattcggttttttagaatcttttactgcggaaatagtgcctaaacaacagttacaacccatagaaggactattccgggttattgccactgcggaacaagcttcaatggttctcgccccagtggaagtagtgcaaaatgccgttaatcgggtgacagacgtgattcaaacttgggtggaacgggttaccactaccacttggcagttgggaacggagcaatgggtaccccagttaattcctgtccgtagcttgggcacagtggagcgcattatcgacaaatttcagggagccaaggatgaggctaccaagcaaagattaattattactctgggggaattagccaccgaaaatgatcaaccccaggcgatcgccaaattggtggaaatcattgatggcacgaacaatgaagatacccgctggttagccgctggcaccctagcccgcattgatgccaaacatccccaggcggtgcatagtgttaccaaaaccattgcccatgacctggctttagggcaaatcccgttgacgttaaccgtttctttgatgcctaggggtgaccataccattgccggtttgattacgttgcaacctttgcaatcaacacaaactttaccggcaggattagcattggcattgttaaccaccgatgaccagttaattgacagtattggggttggagaggaagaacaagggggaaaaaatctcctcaaaatgagcctagagattgaccccggcagtgattttcgcattcgggtatccctgggagaattagctgtaacggaagatattcatctttag

SEQ ID NO: 84866 - protein, 390 aa, Synechocystis sp.
MVAIDNNLKIPLTSADHQWVKTIALQSGCQGEKLQRLIKNLLAVRAIAHWLEIYGIDYDEGESYSRQPPIHLGETVADLYLPNLGRLECRGIGHQEEEIYFGAESWQDRLGYAVVEISEDLRQGEIFGFLESFTAEIVPKQQLQPIEGLFRVIATAEQASMVLAPVEVVQNAVNRVTDVIQTWVERVTTTTWQLGTEQWVPQLIPVRSLGTVERIIDKFQGAKDEATKQRLIITLGELATENDQPQAIAKLVEIIDGTNNEDTRWLAAGTLARIDAKHPQAVHSVTKTIAHDLALGQIPLTLTVSLMPRGDHTIAGLITLQPLQSTQTLPAGLALALLTTDDQLIDSIGVGEEEQGGKNLLKMSLEIDPGSDFRIRVSLGELAVTEDIHL

SEQ ID NO: 84867 - DNA, 24 bp, Artificial sequence
  primer
atggttgccatcgataataatttg

SEQ ID NO: 84868 - DNA, 20 bp, Artificial sequence
  primer
ctaaagatgaatatcttccg

SEQ ID NO: 84869 - DNA, 792 bp, Synechocystis sp.
  CDS (1)..(792): transl_table=11
atggttgttaggttgcaaaacggattgatgggcaaagtgtatttagttggagcggggcctggggatcctggcttgataactgttaagggtaaaactttgttggaaaatgccgaagcagtggtctatgacgctttggtgagtacagctattttagctatggttaatccccaagccgaattgattgatgcaggcaaaaggaggggcagacacaccaaattacagtcagaaactacacagttattggcgcaattagctgaaaaacacgccgtggtggtgcgcttgaaagggggagatccatttatttttggccgggggggggaagagatggaagacctagtcaaagctggcattgaggtggaagtggtaccgggcattacagcgggcattgctgcccctgcctacgctcaaattcccctcacccatcgggcttacagttcctccgtcacctttgtcacgggccatgaatcggcgggaaaatatcggcctgaagtcaattgggcggcgatcgccaagggctcggaaaccattgtgatttatatgggggtgtacagtttggccaccattttgccccagttaatgctggcggggttgggggaagatactcccattgccctaattcgttggggaacctgtccagaacaacagaaactagttggcacttttgccaccattttggcccagattgaagtagaaaattttcaagccccggcgatcgtggtcatcggggcagtggttaattatccggctaatctccgtcagcaattggcacctatactgggcggtgtcaattaa

SEQ ID NO: 84870 - protein, 263 aa, Synechocystis sp.
MVVRLQNGLMGKVYLVGAGPGDPGLITVKGKTLLENAEAVVYDALVSTAILAMVNPQAELIDAGKRRGRHTKLQSETTQLLAQLAEKHAVVVRLKGGDPFIFGRGGEEMEDLVKAGIEVEVVPGITAGIAAPAYAQIPLTHRAYSSSVTFVTGHESAGKYRPEVNWAAIAKGSETIVIYMGVYSLATILPQLMLAGLGEDTPIALIRWGTCPEQQKLVGTFATILAQIEVENFQAPAIVVIGAVVNYPANLRQQLAPILGGVN

SEQ ID NO: 84871 - DNA, 735 bp, Archaeoglobus fulgidus DSM 4304
  CDS (1)..(735): transl_table=11
atggtgggtaaggtttacatcgttggggcggggcccggaaagaaggatttgctcaccttaagagcctacgagctcataaagagggccgatgttattctgcacgacgagttgataggggaggttgctgagctactcaaggagagcagggctgaaatcgtggatgtgggaaagaggagcggaaggcacaagaagaggcaggaggagataaacaaacttctggttgagtacgcaaggcagggaaaaacagtggtgaggcttaaaggcggagacccctgcgtttttggaaggggtggggaggaagcagagtttctggcaaagcacggcatcccctttgaatttgtgccgggagtgacttcagccattgcagttccagaggctgtcggaattcccgtcacccaccgccgctacgaccctgccttggtgtttatcactggaagggagagcagggagaggctgaactggaaggcactggctgagcttaacgccaccatcgtgattctaatgggagtttcgagaattcctgaaatagcaaaaaatcttcttgagcatggcaaagatccggaaacggaggtggctataatagagagcggtttttccgacagggagagggttattttaaccactctcgggaaaatggccgaaagggctgagaaggaaagagttaagcctccagcaatcatcgtcataggcaaggttgtggagctttacggcgttttgtccagatggctgggttaa

SEQ ID NO: 84872 - protein, 244 aa, Archaeoglobus fulgidus DSM 4304
MVGKVYIVGAGPGKKDLLTLRAYELIKRADVILHDELIGEVAELLKESRAEIVDVGKRSGRHKKRQEEINKLLVEYARQGKTVVRLKGGDPCVFGRGGEEAEFLAKHGIPFEFVPGVTSAIAVPEAVGIPVTHRRYDPALVFITGRESRERLNWKALAELNATIVILMGVSRIPEIAKNLLEHGKDPETEVAIIESGFSDRERVILTTLGKMAERAEKERVKPPAIIVIGKVVELYGVLSRWLG

SEQ ID NO: 84873 - DNA, 819 bp, Mesorhizobium loti MAFF303099
  CDS (1)..(819): transl_table=11
gtgagcggcaccagcaaaaacaatggcggcaacgccacgctcgaacaggcgctcgcccggctgaacttcaagccgcgcccgctggagccgggccatgtctggctggccggcgccggccccggcgaccccggctgcctgacgctggaagtgctggcggctttggccgaagcggatgcgctggtctacgacgcgctggtctcgccggatgtcgtcgccgttgccgcaaacgccgagctgttctttgccggcaagcgcggcggccagccgtcgatgaagcaggatgacatcaccgctctgctggtccggctggcgcgtcagggccgccgcgttatcaggctcaagggcggcgatccctatattttcggtcgtggcggcgaagaagccttggcgctcgcacgcgaaaacattccattccgcgtgctgccgggcctgacgtccggcctcagcgcgctcgccgccaccggcatcccggccaccatgcgcggcatcaacaaggcggtgatcctggcgaccggccacgccgccggcactgatgacgatatcgactgggcggcgatcgcccgcaccggccagccagtcgtggtctatatgggcatggccaatttgcccctcatcgccgcagcactgctcgatggcgggctgtcgccctcgacgccggcggcggtgatcgtcgccgccaccacgccgcaggagcggaccgtcgtcgccacgctcgccacaatcgccgaggaagcggccgccgcggggctgacctcgccggcgctgatcgtcgtcggcggcatcgtcgccatgcgggcggcattgacgaggcaggcatga

SEQ ID NO: 84874 - protein, 272 aa, Mesorhizobium loti MAFF303099
MSGTSKNNGGNATLEQALARLNFKPRPLEPGHVWLAGAGPGDPGCLTLEVLAALAEADALVYDALVSPDVVAVAANAELFFAGKRGGQPSMKQDDITALLVRLARQGRRVIRLKGGDPYIFGRGGEEALALARENIPFRVLPGLTSGLSALAATGIPATMRGINKAVILATGHAAGTDDDIDWAAIARTGQPVVVYMGMANLPLIAAALLDGGLSPSTPAAVIVAATTPQERTVVATLATIAEEAAAAGLTSPALIVVGGIVAMRAALTRQA

SEQ ID NO: 84875 - DNA, 1452 bp, Mesorhizobium loti MAFF303099
  CDS (1)..(1452): transl_table=11
atgccgcaggccaatgccaagctcaatgccttccccgtcttcgtgcgggtcgagggcgaagccgtggccattgtcggcggtggcgacgaagccctggccaaagcgcggttgattggacagtcgagcgcggtgctgcgcatcatcgccgaaaatgccgagccggagctgcttgcctttattggtcagtccggcgccagccatgtcgcggcggcctacgacgcctcgcagctcgagggcgcggtcatggtgtttgccgccagcggcgatgaggcgctcgaccgccgtgtcgcggccgacgcgcgcgaactgggcattccggtcaatgccgttgaccggccggagctctgcgacttctttaccccggcgctggtcaaccgcgcgccggtcgccatcgccatcggaaccgaaggcgccggtccggtgctggcccagatgttgcggggccgcatcgatcagatgctgtcgccatcgctcggttcgctggcgacgctcgccgccacgctgcgtggggcagccgagaaattgctgccgaaaggcaatgcccgccgccgcttctggaacagttttttcgaaggtgcacctgcccatgccgtggaagccggccagctgtcgcaggcgcatgacgccgccgtcgatctgctgctgtcgaacgcgccggcttcgggtcacatcgccctggtcggtgccggtccgggcgccgaggatctgctgacgttgcgggcgcatcgcctgctgatggaggccgatgtcatcgtccatgatgcgctggtgccggaggcggtcgtcgccatgggccgccgcgatgccgagcgccttccggtcggcaaacgcaagggctgccacaccaagagccaggccgagatcaacgcgctgctggtcgagctcggccgccagggcaagcgcgtggtgcggctgaagtcgggcgatccgctggtgttcggtcgcgccggcgaggagatggcggcactgcgcgatgccggcatcgcctatgaggtggttccgggcgtcaccgcggcctttgccgccgccgccgatttcgaattgccgctgaccttgcgtggcgtctcctcgtcgatggtgttcaccaccggccatgacctcaagggcaattcattgcccgactgggccaagcttgcgatttctggcgccacggtcgccgtctatatgggccgctcggtggcggccgaagtcgccggccggctgatcgaggccggcctgtcgccggacacggcggtggccgtggtcgagaatgccagcctggccaaccgtcgccgctttcacggaacgttggccgacctgccgtcgctggaagcgcgtggcgatctttccgggccggtcatgacgatcatcggcgatgctgttgccggcgccaattttgaacggtccgagccgctcgccgcacataggaatgaaggcgcggccaaagttgccgcagagagagttcagccatga

SEQ ID NO: 84876 - protein, 483 aa, Mesorhizobium loti MAFF303099
MPQANAKLNAFPVFVRVEGEAVAIVGGGDEALAKARLIGQSSAVLRIIAENAEPELLAFIGQSGASHVAAAYDASQLEGAVMVFAASGDEALDRRVAADARELGIPVNAVDRPELCDFFTPALVNRAPVAIAIGTEGAGPVLAQMLRGRIDQMLSPSLGSLATLAATLRGAAEKLLPKGNARRRFWNSFFEGAPAHAVEAGQLSQAHDAAVDLLLSNAPASGHIALVGAGPGAEDLLTLRAHRLLMEADVIVHDALVPEAVVAMGRRDAERLPVGKRKGCHTKSQAEINALLVELGRQGKRVVRLKSGDPLVFGRAGEEMAALRDAGIAYEVVPGVTAAFAAAADFELPLTLRGVSSSMVFTTGHDLKGNSLPDWAKLAISGATVAVYMGRSVAAEVAGRLIEAGLSPDTAVAVVENASLANRRRFHGTLADLPSLEARGDLSGPVMTIIGDAVAGANFERSEPLAAHRNEGAAKVAAERVQP

SEQ ID NO: 84877 - DNA, 750 bp, Aeropyrum pernix K1
  CDS (1)..(750): transl_table=11
ttggcgagatgccgagggaaggtcgttatagtggggggtggacccggagacccgggcttgataaccgtcaaggggatgaaggctctagaggaggccgacgccatactctacgatagactggctcctaagggtcttgtggagaagctgcagacaccagcactaaagatatatgtgggtaagaagcctggagagggtatgtcgcaggaggagataaacaggcttatggagatccttgcatgcaggggcatgactgtagcgaggctgaagggcggcgacccctatacatacggcaggggagaggaggagtgcatgtaccttatggagaagggggtagaatgcattgttatacccggcgtgccaagctatatagctgcttcagccctccacgggataccgctaaccagcaggggcatctcctcctcgttcgccgtaataacaggcaaggaagcccccgggaagccggctggtaagagggtaaagctggaggatatagcgcgctccgtagacaccctggtaatacttatgggcgcctcaacgtcggctgaattagcggaacgcctaattaaagtgctaccgcctgagacgccggtagctatagcctcgagcgtgtcaacgccggaagcggaaactctggtgaccgatcttagagggttgagggagctcggtaggcagggcagggtgaaaagcccagcagttataatagtgggtgaggtagtaaagctgagggacaggttatacaaggaggcgtga

SEQ ID NO: 84878 - protein, 249 aa, Aeropyrum pernix K1
MARCRGKVVIVGGGPGDPGLITVKGMKALEEADAILYDRLAPKGLVEKLQTPALKIYVGKKPGEGMSQEEINRLMEILACRGMTVARLKGGDPYTYGRGEEECMYLMEKGVECIVIPGVPSYIAASALHGIPLTSRGISSSFAVITGKEAPGKPAGKRVKLEDIARSVDTLVILMGASTSAELAERLIKVLPPETPVAIASSVSTPEAETLVTDLRGLRELGRQGRVKSPAVIIVGEVVKLRDRLYKEA

SEQ ID NO: 84879 - DNA, 1110 bp, Arabidopsis thaliana
  CDS (1)..(1110)
atggctcttgttcagcggattccaatttcctcctccagtattcggaattggcaacaagcgaggaccaatttgactcctatttgttgtttacattacaatactgcatcttcttcttcttcaccctttacagagaagcactctgtggagagataccaaagggatcaatggctgtacaaagcggttgaaccaacgccaccatcgactccatctccatcgccatttgaagatgaagtctttgttagggaaaacgacattgcatcgcagctgcctgagctgaagaagcttttggcagtgctgaaagagaagagagttaaaggatgcaaaggtggtgattgtggaccaggagatgtgtatcttgttgggacagggccaggagatcctgagcttttgactcttaaagctgtcagagttattcaaagtgccgatcttttgctttacgacaggcttgtctccaatgatgtcttggagttggttgctcctgatgctagacttctttatgtcggcaaaactgctggttatcatagcagaactcaggaagagattcatgaactactcctaaattttgctgaagctggtgccactgttgtcaggcttaaaggtggagatcctctggtctttggacggggcggcgaagaaatggactttctgcaacagcaagggattcgagttcaagttataccagggataactgcggcgtcggggatagcagcagagttggggattccactaacacatcgaggtgttgcaactagtgtaaggtttctcactggtcattcaaggaaaggagggacagaccctctgtttgttgcagagaatgcagctgacccggatacaacacttgtcgtttatatgggtttgggaactttaccttctcttgcacaaaaactaatggaccatggtctcccttctgatacaccagctgttgcggttgaacgtggaaccactcctctacagcgtacagtttttgctgagcttaaagattttgcaactgagattcagtcagctggattggtgtcaccaacactcatcatcatagggaaagtcgttgagctctcacctttatggccacattgcacgaaagaatcctcctgccttgtagagacccggtag

SEQ ID NO: 84880 - protein, 369 aa, Arabidopsis thaliana
MALVQRIPISSSSIRNWQQARTNLTPICCLHYNTASSSSSPFTEKHSVERYQRDQWLYKAVEPTPPSTPSPSPFEDEVFVRENDIASQLPELKKLLAVLKEKRVKGCKGGDCGPGDVYLVGTGPGDPELLTLKAVRVIQSADLLLYDRLVSNDVLELVAPDARLLYVGKTAGYHSRTQEEIHELLLNFAEAGATVVRLKGGDPLVFGRGGEEMDFLQQQGIRVQVIPGITAASGIAAELGIPLTHRGVATSVRFLTGHSRKGGTDPLFVAENAADPDTTLVVYMGLGTLPSLAQKLMDHGLPSDTPAVAVERGTTPLQRTVFAELKDFATEIQSAGLVSPTLIIIGKVVELSPLWPHCTKESSCLVETR

SEQ ID NO: 84881 - DNA, 735 bp, Aquifex aeolicus VF5
  CDS (1)..(735): transl_table=11
atgggaaaggtttacctcataggagccggtcctggagaccctgagcttctgacacttaaagcttatcgtattctcaggaaagctgacgtagttctatacgatgccttggtaaacagggaaatacttcactttgccagacaagacagccttaagatatacgtgggcaagagagacggaaaacactccttgcctcaggaggagataaatgaacttcttcacaggtttgcacttagctacaaaattgtagttagacttaaaggcggtgacccttttgtgttcggaaggggcggagaagaactcctttacctaaaaagcaggggtgtggaagtggaaatagtaccgggtataacttcggcgatttctgcaccctcctccgctttcattcccgtaacacataggggaatagcctcgtcgtttgcggttgttacaggccaccccaacagagaaataaaatgggaggatttagtgaatatagatacactcgttgttcttatgggtgttaagaacagagaaaagatagcgagagaacttataggagcaggacgaaacccggacgaacccgttgcctttatagagaaggctacaactccggagcagagggaagttttcagcacattgaaagaagttgctcaaaacccgccggaggtaaacccgcccgctgtaatggttgtaggaaaggtcgtagaaataggagcaaaagtcctatgtgaacgtataatcggcgttacactttaa

SEQ ID NO: 84882 - protein, 244 aa, Aquifex aeolicus VF5
MGKVYLIGAGPGDPELLTLKAYRILRKADVVLYDALVNREILHFARQDSLKIYVGKRDGKHSLPQEEINELLHRFALSYKIVVRLKGGDPFVFGRGGEELLYLKSRGVEVEIVPGITSAISAPSSAFIPVTHRGIASSFAVVTGHPNREIKWEDLVNIDTLVVLMGVKNREKIARELIGAGRNPDEPVAFIEKATTPEQREVFSTLKEVAQNPPEVNPPAVMVVGKVVEIGAKVLCERIIGVTL

SEQ ID NO: 84883 - DNA, 900 bp, Vibrio cholerae O1 biovar eltor str. N16961
  CDS (1)..(900): transl_table=11
atgcctgcaacagaccaattaaggatcaagattatggcgcaggatgcggtaactccccttcgtaaaacccctcgcttagccgttgtagaaggctcaggttatgtgcgtgccgcgcgtagccaactgcaagcaggagaagtggcgctggtgggcgcaggccctggtgatcctgagctactcacagtcaaagcactcagttatctccaacaagcggatgtggtgctctacgactacttagtgtccgatgaaatcatggcgcttatcccaagtgagacgattttagtctgtgtggggaaacgcgcaggccatcacagtgtgccgcaggagaaaaccaatcaactcttggtcgattttgcccgtcaaggttatcgcgtggtgcgcatcaaaggcggcgacccttttatgtttggccgcggtggtgaagagttagaagtgctgtttgaagctggcgtgaaatttcaggttgtccccggcatcaccgcagccgctggtgcaacggcgtatgccggcattccgctcactcatcgtgattacgcccaatcggcgctgtttgtcaccggccatttgaaagcgcaagccgaggatctggattggtcaacgctggcgcgtggtaagcaaactttagtgatttacatgggcttgagcaacgctgcggcaatcgctgaacagctccagttgcatggccgtcaagcgagcacgcccgtggcaatcattgaacgtggtactcaagtcaatcaacaggtgctgattggcacattgcaaactttgcccagtttagccagccaagcgcaatctccggcgctgattgtggtgggtgaagtggtcgcgcttgccgccaagctgcactggtttggcgaacaaggcgcaacacagcagcttgatgcagcgcagtcagcgtaa

SEQ ID NO: 84884 - protein, 299 aa, Vibrio cholerae O1 biovar eltor str. N16961
MPATDQLRIKIMAQDAVTPLRKTPRLAVVEGSGYVRAARSQLQAGEVALVGAGPGDPELLTVKALSYLQQADVVLYDYLVSDEIMALIPSETILVCVGKRAGHHSVPQEKTNQLLVDFARQGYRVVRIKGGDPFMFGRGGEELEVLFEAGVKFQVVPGITAAAGATAYAGIPLTHRDYAQSALFVTGHLKAQAEDLDWSTLARGKQTLVIYMGLSNAAAIAEQLQLHGRQASTPVAIIERGTQVNQQVLIGTLQTLPSLASQAQSPALIVVGEVVALAAKLHWFGEQGATQQLDAAQSA

SEQ ID NO: 84885 - DNA, 1458 bp, Bacillus halodurans C-125
  CDS (1)..(1458): transl_table=11
atgaacaaacaaggaaaagtttacttagtaggagcgggacctggtgatcttcgccttatgacattaaaaggaaaagattgtttacaaaaggccgatgtcgtactgtatgaccgtttagtgaatccgctctttttagagtggacaaaacccgaagcggaattgatctattgcggaaaactgccagaccgccatttgcttaggcaggaagcgattaatgaactgttaattgaaaagggacgccaaggaaaagtcgtcgttcgcttaaaagggggagacccgagcgtattcggacgagttggagaggaagcagatgtgttaaaagaagcaggtttgccgtatgagatcgttcctgggataaccgcaggaattggcgcttctacctatgctggagttcccgtgactcatcgggattatggggcttcctttacggttgtaaccggccacgataaatcgccatctggacaaccgctcatcgattggcatgcattagctaacggtattgatacgatcgctttttacatgggggtaagcaaccttccgtacatcacggaacagcttatcgcccacggaagggatccagaaacgtgtgttctattaatccaatggggaacgatcgggaagcaacgtgtcgtcgaaggacgtttaaatacaattgtttcaagggtaaaggaggaaggtatcacaaacccggccattactctagtcggtaatatcggaaaattacgaacagagaaaagctggtttgagtcgcagcgtctttttggccatcaagtgttgatcgggaggacgactgcggaggaaggtgggctagcgaaaacacttatggaggcaggagccgaagtgttcgaatttccacgttggcatgtaacatcgaaaccatgggaagtaacccctggtgaagtgcaagaggcggatcacctcgttttcacttcaccccatagtgtccactttttctttgaaagcttaactgaacaaaggatggacattcgacacattcgcggctccttttttgcagcctcaaaaaaatcgcttaaaatcattcgttcatttgcctgtaccgcggccctcttgcaagagttgcctgctggagggaaaacgatcattttcggtgatgaagaaaatgaaatgaagcaaaaatacccgttcgaagaggcaagctatgtctcgacacatcaaaaaacattggtccctcaatcgcttcgaacctgtaggcggttgcttgatgaaggaagaattgaaacgcttgtgtttccgagtgccgcttctgtcaatgccgtaatagacggactagagaaatgcggggaatccgtagggacgttatcgcaagttaaaacggttattacgttcggacctgagtcctcaaatgcggcgaaagaagcaggatttcaagtggacattcaattagaagctccttctgctcaattgttaattgaaacgttggaagcagtaagagtatag

SEQ ID NO: 84886 - protein, 485 aa, Bacillus halodurans C-125
MNKQGKVYLVGAGPGDLRLMTLKGKDCLQKADVVLYDRLVNPLFLEWTKPEAELIYCGKLPDRHLLRQEAINELLIEKGRQGKVVVRLKGGDPSVFGRVGEEADVLKEAGLPYEIVPGITAGIGASTYAGVPVTHRDYGASFTVVTGHDKSPSGQPLIDWHALANGIDTIAFYMGVSNLPYITEQLIAHGRDPETCVLLIQWGTIGKQRVVEGRLNTIVSRVKEEGITNPAITLVGNIGKLRTEKSWFESQRLFGHQVLIGRTTAEEGGLAKTLMEAGAEVFEFPRWHVTSKPWEVTPGEVQEADHLVFTSPHSVHFFFESLTEQRMDIRHIRGSFFAASKKSLKIIRSFACTAALLQELPAGGKTIIFGDEENEMKQKYPFEEASYVSTHQKTLVPQSLRTCRRLLDEGRIETLVFPSAASVNAVIDGLEKCGESVGTLSQVKTVITFGPESSNAAKEAGFQVDIQLEAPSAQLLIETLEAVRV

SEQ ID NO: 84887 - DNA, 762 bp, Methanocaldococcus jannaschii DSM 2661
  CDS (1)..(762): transl_table=11
atgccaaaaaatataaacatttctggtgaaataatgacaggcaaagttatcttagtaggagcaggaccgggagacccagagttgataacaataaaaggtttaaaagctattaaagaggcagatgttgttgtttatgatgatttaatatcaaaagagctattaaattatgctaaaaaagatgccgagctaatttatgttggtaaaagaaagggaaaacattcatttaaacaagaagagattaataaaatattggttgagaaggcaaaggaaggaaagttagttgttagattaaaaggtggagacccatttgtttttggtagaggtggagaagagattttagagttaaagaagcataacataccttatgaggtaattccgggaataacgtcagctatagcagtcccagaggttgctgggattccagttactcatagaaaggtagctacctcctttacagtagttacagggcatgaggcagaggataagaaagagaaacaggtagatttaagcaagttaaatgctgatactattgtaattttaatgggaataactaatttggaaaatttggttaaagagttgttgcaaaacccaaaaagaagtaaagaaacaccagtagcaatcattatggagggaactacaaagaatcagagagttataaaagggactttgggagatattgttgaaaaggctaaaaaagaaaatgcaagacctccaggagttatagttgttggtgaggttgttaatgtgttagatagtcaataa

SEQ ID NO: 84888 - protein, 253 aa, Methanocaldococcus jannaschii DSM 2661
MPKNINISGEIMTGKVILVGAGPGDPELITIKGLKAIKEADVVVYDDLISKELLNYAKKDAELIYVGKRKGKHSFKQEEINKILVEKAKEGKLVVRLKGGDPFVFGRGGEEILELKKHNIPYEVIPGITSAIAVPEVAGIPVTHRKVATSFTVVTGHEAEDKKEKQVDLSKLNADTIVILMGITNLENLVKELLQNPKRSKETPVAIIMEGTTKNQRVIKGTLGDIVEKAKKENARPPGVIVVGEVVNVLDSQ

SEQ ID NO: 84889 - DNA, 840 bp, Pseudomonas aeruginosa PAO1
  CDS (1)..(840): transl_table=11
atgaacactaccgtgattccgccgtccctcctcgatgtcgatttccctgccggcagcgtcgccctggtcggcgccggccccggcgatccgggcctgctcaccctgcgcgcctgggccctgctgcaacaggccgaggtggtggtctacgaccgcctggtcgcccgcgagctgatcgcccttctgccggaaagctgccagcgcatctacgtcggcaagcgctgcggccaccacagcctgccgcaggaagaaatcaacgagctgctggtgcgcctggcccggcagcaacgccgggtggtccgcctgaaaggcggcgacccgttcatcttcggtcgcggcgccgaggagctggagcgcctgctcgaagccggcgtcgactgccaggtggtccccggcgtcaccgccgcctccggttgcagtacctacgccggcatcccgctgacccaccgcgacctcgcccagtcctgcaccttcgtcaccggccacctgcagaacgacggccgcctcgacctcgactgggccggcctggcgcgtggcaagcagaccctggtgttctacatgggcctgggcaacctcgccgagatcgccgcgcgcctggtcgagcacggcctcgccagcgacaccccggcggcgctggtcagccagggcacccaggcgggccagcaggtgacccgcggcgcccttgccgagctgccggcgctggcgcgacgctaccagttgaagccgccgacgctgatcgtcgtcggccaggtggtcgcgctcttcgccgagcgcgcgatggcgcatccgtcatacctgggcgccggctcgccggtcagccgcgaggccgtcgcatgcgcctga

SEQ ID NO: 84890 - protein, 279 aa, Pseudomonas aeruginosa PAO1
MNTTVIPPSLLDVDFPAGSVALVGAGPGDPGLLTLRAWALLQQAEVVVYDRLVARELIALLPESCQRIYVGKRCGHHSLPQEEINELLVRLARQQRRVVRLKGGDPFIFGRGAEELERLLEAGVDCQVVPGVTAASGCSTYAGIPLTHRDLAQSCTFVTGHLQNDGRLDLDWAGLARGKQTLVFYMGLGNLAEIAARLVEHGLASDTPAALVSQGTQAGQQVTRGALAELPALARRYQLKPPTLIVVGQVVALFAERAMAHPSYLGAGSPVSREAVACA

SEQ ID NO: 84891 - DNA, 1398 bp, Pseudomonas aeruginosa PAO1
  CDS (1)..(1398): transl_table=11
atggatttcctgccgctgttccactccttgcaagggcgcctcgcgctggtggtcggcggcggcgaagtcgccctgcgcaaggcgcgcctgctggccgacgccggcgcgcgcctgcgcgtggtcgcgccgcagatccacatcgaactgcggcatctggtggagcagggcggcggcgagctgctcgaacgcgactaccaggacggcgaccagcccggctgcgccctgatcatcgccgccaccgacgacgaaccgctgaacgccgaggtgtcgcgagcggccaatgcgcgcgggataccggtcaacgtggtggacgcgccggccctgtgcagcgtgatcttcccggccatcgtcgaccgttcgccgctggtggtggcggtctccagcggcggcgatgcgcccgtgctggcgcggctgatccgggccaagctggaaacctggattccctcgacctacgggcaactggccggactcgccagccgcttccgccaccgggtcaaggaattgctacccgacctgcagcagcgccgggtgttctgggaaaacctgttccagggcgagatcgccgagcgtgtcctggccggccgtccggcggaagccgagcgtctcctggaggagcacctggccggcggcctcgcgcacatagccacgggcgaggtatatctggtcggggccgggccgggggatccggacctgctgacgttccgtgccctgcgcctgatgcagcaggccgacgtggtgctctacgatcgcctggtggcgccgtcgatcctcgaattatgccgccgcgatgccgaacgcctgtacgtcggcaagcgccgcgccgaacatgcggtgccgcaggatcggatcaaccgcctgctggtggagctggccagccagggcaagcgcgtgctgcgcctgaagggtggcgacccgttcatcttcggccgcggcggtgaggaaatcgacgaactggctgcccacggcatacctttccaggtcgtgccgggaatcaccgcggccagcggctgcgcggcctacgccgggattccactgactcatcgcgatcatgcgcaatcggttcgtttcgtcaccggtcatctgaaggacggcaccaccgacctgccgtggcaggacctggtagcgcctggccagaccctggtgttctacatgggcctggtgggattgccggtgatctgcgagcaactggtcgcccacggtcgctccgcacagaccccggcggcgctgatccagcaggggaccaccgcccagcagcgggtattcaccggaaccctggaaaacctgccgcaactggtggctgagcacgaagtgcatgcgccgaccctggtgatcgtcggcgaagtcgtgcaactgcgcgacaagctggcctggttcgaaggcgcccgcgaggacgcctga

SEQ ID NO: 84892 - protein, 465 aa, Pseudomonas aeruginosa PAO1
MDFLPLFHSLQGRLALVVGGGEVALRKARLLADAGARLRVVAPQIHIELRHLVEQGGGELLERDYQDGDQPGCALIIAATDDEPLNAEVSRAANARGIPVNVVDAPALCSVIFPAIVDRSPLVVAVSSGGDAPVLARLIRAKLETWIPSTYGQLAGLASRFRHRVKELLPDLQQRRVFWENLFQGEIAERVLAGRPAEAERLLEEHLAGGLAHIATGEVYLVGAGPGDPDLLTFRALRLMQQADVVLYDRLVAPSILELCRRDAERLYVGKRRAEHAVPQDRINRLLVELASQGKRVLRLKGGDPFIFGRGGEEIDELAAHGIPFQVVPGITAASGCAAYAGIPLTHRDHAQSVRFVTGHLKDGTTDLPWQDLVAPGQTLVFYMGLVGLPVICEQLVAHGRSAQTPAALIQQGTTAQQRVFTGTLENLPQLVAEHEVHAPTLVIVGEVVQLRDKLAWFEGAREDA

SEQ ID NO: 84893 - DNA, 726 bp, Methanothermobacter thermautotrophicus str. Delta H
  CDS (1)..(726): transl_table=11
gtgatgctcatggtggtctatcttgttggggcaggacccggggaccctgaactcataacactcaaggcgataagggtccttgaaggggcagacgtggtgatctatgaccggcttgcaggtgaagagatactcagatacgcacctgatgacgccaggctcatatacgtcggtaagagggcaggtgaacaccacaggacccaggacgagataaacagaatactcgttgaggaaggaaaaaaacatgagaccgttgtgaggctcaagggcggcgaccccttcgtatttggaaggggtggtgaggagatcctggccctgaaggaagccggcatcccctacagggtcatccccggagtgacatcggctgttggtgtccccacatcagtcgggcttcctgtaacccacaggggcgttgcaacatccttcacggtggttacaggccacgaggacccatcaaagcccgctaagcaggtccactgggactacaatgcagatacgctcataatactcatgggtgttggcaacataagggagaacatggaggagatcatgaagcaccgccccgccgacaccccggtatgtgtgattgagagcggtacgctggatgatgagaggataatcctcgggacacttggagacatcgcagataaggacctgaggcctcccggcatcatagtggtgggtgatgttgtcaatgtctaccgtgaaattagagggactgagaaatag

SEQ ID NO: 84894 - protein, 241 aa, Methanothermobacter thermautotrophicus str. Delta H
MMLMVVYLVGAGPGDPELITLKAIRVLEGADVVIYDRLAGEEILRYAPDDARLIYVGKRAGEHHRTQDEINRILVEEGKKHETVVRLKGGDPFVFGRGGEEILALKEAGIPYRVIPGVTSAVGVPTSVGLPVTHRGVATSFTVVTGHEDPSKPAKQVHWDYNADTLIILMGVGNIRENMEEIMKHRPADTPVCVIESGTLDDERIILGTLGDIADKDLRPPGIIVVGDVVNVYREIRGTEK

SEQ ID NO: 84895 - DNA, 741 bp, Halobacterium sp. NRC-1
  CDS (1)..(741): transl_table=11
atgaccggcacagtctacctcgtggggagcggccccggtgatccggagctgctgacggtgaaggcgacgcggctgctggaggcggccgacgtggtgttacacgacaagctccccggtccggagatcctgtcgtcgatccccgaggggaaacgcgaggacgtcgggaagcgcgcgggcggcgagcgcaccccccagtcggagacgaacgcgcgactcgtcgagctcgccgaggacggcaacgacgtggtgcggctgaagggcggcgacccgttcgtgttcgggcggggcggcgaggagatgctgtacctcgccgagcacggcgtcgacttcgaggtcgtgccgggcgtcacgtcgccggttgccgcgccggcggcggccgacatcccggtcacgcaccgcgaccacgcctcctcggtgtcgttcgtcaccggccacgaggaccccggcaaggacgaatccgccgtcgactggggggcgctggccgacaccggcggcaccatcgtcgtgttgatgggcgtcgggaagctgccggagtacaccgccgcgctccgggacgcggggatggaccccgagacgccggttgcgctcgtcgagaagggaacgcggcccggccagcaggtcgccacgggcaccctggccacgatcgttgcggcccgcgacgaggcggggatttcgccgcccgcgatcaccgtcatcggcggcgtcgctggcctctgggacggggtggagggcgagccgtga

SEQ ID NO: 84896 - protein, 246 aa, Halobacterium sp. NRC-1
MTGTVYLVGSGPGDPELLTVKATRLLEAADVVLHDKLPGPEILSSIPEGKREDVGKRAGGERTPQSETNARLVELAEDGNDVVRLKGGDPFVFGRGGEEMLYLAEHGVDFEVVPGVTSPVAAPAAADIPVTHRDHASSVSFVTGHEDPGKDESAVDWGALADTGGTIVVLMGVGKLPEYTAALRDAGMDPETPVALVEKGTRPGQQVATGTLATIVAARDEAGISPPAITVIGGVAGLWDGVEGEP

SEQ ID NO: 84897 - DNA, 1554 bp, Deinococcus radiodurans R1
  CDS (1)..(1554): transl_table=11
gtgaagaattgggttctcatcaggagacccccgcacaaggagaagtcacccatgtctgaagtttcgttgcctgccgcgctgcccgctcctttcgtttcgctggtgggggccggccccggtgaccccggcctgctcacgctgcgtgcccgcgaggtgctggcgcaggcggacgtggtgctgaccgacgcgctcgtcagcccggcgctgctggcgcactgcccccaggcgcgggtggtagaagtgggcaaacgcgggttcctgccctcagccaagcaggaagacatcaacgacctgatcgtgcgcgaggcgctcgcgggcggcggacagcgggtggtgcggctcaaggggggcgacccctttgtcttcgggcgcgggggcgaggaggcgctggcgtgccgggccgccggggtgccgtgcgaaatcgtgccaggggtgagcagcgccgtggcagcggcagcctacgcggggattccggtcacgcaccgggggctgagccgcagcttcgccgtgctgaccggcaccgaccggcacgggcccgccgcctatgccgagatcgccggggtggacacgctggtgtttctgatgggcgtgcggcacctgccgcagattacggcggacctgatcgcggcgggccgtgacccgcagacccccgccgccgctgtgcagtgggcgagcacgccgcagcagcgcacggtgcgcgcgaccctcggcacgctggcgcaacgggcagccgaggccggcttgggcgcgcccgccgtgaccgtggtgggtgcggtggccgcgctgcacgacgacctcgactggttttgcccggcgccgctgccgctgcaaggcgcgcaggtggccgttacccgcacccgcgaacagacgggcagcgaactcgcggccctgctcagcggacgcggcgcccaggtcagcgagattccgctgctccgtttcgtgccggccagcagcccgcgcacactggtgggcgccctgaacggcttcgatggctgggtgctcctgacaagcgaacaggcagtgcgggcactcgcgcggacactgctcgccgctgggcgtgacttgcgggtgctggcccgcgcccgcatcgctgccgtgggcagcggcaccgcctggactctacgcgagtacggcctcgctcccgatttcgtccccacgcgctccggctcgcgccacctcggggccgaactgcccgccgcgcccggtgaagttgcgctgcacgtcggctcgcaggacaccgacgcggtgctcgaaatggcgttgagcgcgcggggcatcgaatacgtggccgccgaagcctaccgcagcgaactcagcgagctgaccccggcccagcgcgagcagttgcaggaggcgcaagtggtgactctggcctcggcggtgggagcgcgcgcactcgcgcaggtggcgggcaccagttttaccgccgccgtcattggcccgcagaccgaactcgccgcccgcgaagccggatttacccgcctgattctggccgagcagcccaccctggcgagtctgagcgacgcggtgcagcgggcgtgccgggcggggtaa

SEQ ID NO: 84898 - protein, 517 aa, Deinococcus radiodurans R1
MKNWVLIRRPPHKEKSPMSEVSLPAALPAPFVSLVGAGPGDPGLLTLRAREVLAQADVVLTDALVSPALLAHCPQARVVEVGKRGFLPSAKQEDINDLIVREALAGGGQRVVRLKGGDPFVFGRGGEEALACRAAGVPCEIVPGVSSAVAAAAYAGIPVTHRGLSRSFAVLTGTDRHGPAAYAEIAGVDTLVFLMGVRHLPQITADLIAAGRDPQTPAAAVQWASTPQQRTVRATLGTLAQRAAEAGLGAPAVTVVGAVAALHDDLDWFCPAPLPLQGAQVAVTRTREQTGSELAALLSGRGAQVSEIPLLRFVPASSPRTLVGALNGFDGWVLLTSEQAVRALARTLLAAGRDLRVLARARIAAVGSGTAWTLREYGLAPDFVPTRSGSRHLGAELPAAPGEVALHVGSQDTDAVLEMALSARGIEYVAAEAYRSELSELTPAQREQLQEAQVVTLASAVGARALAQVAGTSFTAAVIGPQTELAAREAGFTRLILAEQPTLASLSDAVQRACRAG

SEQ ID NO: 84899 - DNA, 1431 bp, Xylella fastidiosa 9a5c
  CDS (1)..(1431): transl_table=11
gtgactgccaacgttctgttccccttattcgccaacctacacgaccgcgccgtcctggtggtcggcggcggtaaggttgccgaacgcaagacagaggcattactcaaagtgggcgccttgccgattatcggtgccccctctctgaccgcatcgttacagcactgggccgaaaccggccgcatcacctggcggcaagggacgtttgaaaacagctggctgcaagaagatatttggttggtcatcgccgccaccgatcaacccgaggtgaaccacgccgcggcgcgcgcagcacatgcgcaacggctattcgtcaacgtggtcgacgacattgcactctccaacgtgcaggtgccggccgtggtcgaacgcggcccgttgcggatcgcgatttctagcggcggtggcgcaccgatggtggcacgctatctgcgacaacaactggaaagcctcattgacgatagttggggacgactgaccacactgttcgcgcaacgccgcgacaccatccgcgcccgctatccaaacatagaagcacgccgccggttctttgaaacccaactcaccggcccactccaacgactgctacgcaagcaacgccacgcagaggccgaagcagtgctggaagcagcactcgccgagactccccccacggggtccggcagcgtcaccctggtgggcgctggcgccggcgacgccgggctactgaccttaaatgcactgcgcgccttgaatgaagccgacatcatcctctacgaccgcttggtcagcgacaccgtgttacaggtggcacggcgcgatgcggagcagatcgaagtaggcaaatccgcgacaggccacagtgtgcgccaagaagacattcacagcctgatgctgcaacacgcccgtgctggccagcgtgtcgtacggctgaaaggtggcgatccattcgtcttcggtcgtggcggcgaagaactggaatttttacgtacccacaacatcccctatgaggtcatccccggaatcactgccgccctggcctgtgccgcctatgccggtatccccttgacccaccgcgaccatgcccaatcgctatgcctgatcaccgcccattgccaatcctcgctagacaccctggactgggctgcactagcacaagaacgccaaacgctggcgttctacatgggcgtggcggggctacccaccatccagcaacgcctgtgtgaggctggacgcgccgaaacaacgccttttgcactgatcgaaaatggcgcacgcgcgcaacagcgggtgctcaccggaacgctgaaaacactcgcgcacaccgcacagacatatgccgtgcgcccccccgcactgctgatcctcggcgaagtcaccacgctggccgaacacctgcattggttcggcaccgcaccattatctgccccatgcccccccgcactcatcctataa

SEQ ID NO: 84900 - protein, 476 aa, Xylella fastidiosa 9a5c
MTANVLFPLFANLHDRAVLVVGGGKVAERKTEALLKVGALPIIGAPSLTASLQHWAETGRITWRQGTFENSWLQEDIWLVIAATDQPEVNHAAARAAHAQRLFVNVVDDIALSNVQVPAVVERGPLRIAISSGGGAPMVARYLRQQLESLIDDSWGRLTTLFAQRRDTIRARYPNIEARRRFFETQLTGPLQRLLRKQRHAEAEAVLEAALAETPPTGSGSVTLVGAGAGDAGLLTLNALRALNEADIILYDRLVSDTVLQVARRDAEQIEVGKSATGHSVRQEDIHSLMLQHARAGQRVVRLKGGDPFVFGRGGEELEFLRTHNIPYEVIPGITAALACAAYAGIPLTHRDHAQSLCLITAHCQSSLDTLDWAALAQERQTLAFYMGVAGLPTIQQRLCEAGRAETTPFALIENGARAQQRVLTGTLKTLAHTAQTYAVRPPALLILGEVTTLAEHLHWFGTAPLSAPCPPALIL

SEQ ID NO: 84901 - DNA, 729 bp, Sulfolobus solfataricus P2
  CDS (1)..(729): transl_table=11
atgagtggcaaagtttatttagtaggagctggtccgggagaccctgaattaattactgttaaaggcttaaagatcctacagagggctgatgttgtggtttacgataggctaatctctaaagagcttctaaatttttgtaagattgaggctgaaaaaatatacgttgggaagaatataggggattacgtaatacaagatgagataaatgagttactagtaaagaaggcgatggaaaataaagtagttgttagattaaaaggaggagacccatatgttttaggtaggggagaagaggaatgtttatacgttatatccaaaggtatagagtgtgaggtaattcccgggataactagtgcaattgctgttcccgcttatgcaggaatccctgtgaccagtagaatttactcagcaagtggatttactataatatctggaacaaaagcagaagataaattgatagatgaagattacataccaagaaaaggtacgctggtaatacttatgggtcttaggaagatagaaaatatggttaatattctaataaaattaagaaatgaaagagaaccagtcgctgtaattgaaaatggaactacagaaaaccagagagtttttactggggagttaaaggacctagttaacattgtcagaagtaataatgtaacgtctccagcggttattgtaattggcgaagtagttaaatttagggaatacttatggaaatttaagtga

SEQ ID NO: 84902 - protein, 242 aa, Sulfolobus solfataricus P2
MSGKVYLVGAGPGDPELITVKGLKILQRADVVVYDRLISKELLNFCKIEAEKIYVGKNIGDYVIQDEINELLVKKAMENKVVVRLKGGDPYVLGRGEEECLYVISKGIECEVIPGITSAIAVPAYAGIPVTSRIYSASGFTIISGTKAEDKLIDEDYIPRKGTLVILMGLRKIENMVNILIKLRNEREPVAVIENGTTENQRVFTGELKDLVNIVRSNNVTSPAVIVIGEVVKFREYLWKFK

SEQ ID NO: 84903 - DNA, 696 bp, Sulfolobus solfataricus P2
  CDS (1)..(696): transl_table=11
atgggtaaggtagttttagtaggtgctggtcctggtgatcctgaactaataacgttaaagggtattaaatatttacaaatggctgatgtaatagtctacgataagttagtgtccagagaactcattaattacgctaagccgtcgagttttgtaatattcctcagtaatgatgatattgaagttgatttattgagaaagtacgctttggaagataagcttgtgattaggctaaaaaacggagatccctacatatttggaaggggagggaaaatttgtcaagagttaattaaagacggtatagagtgtgaggtaatacccggagtttcgtcagttaactcagtccctgcgtatgctgggataccactcactttcaacggagtctccgatatggtaacaatcgtaagtgcagtttcacaaggtgggaagctctttaactttcaaaaaattccagattatggtactctagtagttttaatgggaggcaggagattagaggaggtgagtaaatggttgatggctaagagagatccttcagaagacgtagcagttatagaaagagggacttatctggatcagaaggtacacgtcaacaaattggagaaactagctgaagttggtaataatttagctactccttctttgttggttttaggaaacgttgtgagattgagagaaattctatggaaatttagataa

SEQ ID NO: 84904 - protein, 231 aa, Sulfolobus solfataricus P2
MGKVVLVGAGPGDPELITLKGIKYLQMADVIVYDKLVSRELINYAKPSSFVIFLSNDDIEVDLLRKYALEDKLVIRLKNGDPYIFGRGGKICQELIKDGIECEVIPGVSSVNSVPAYAGIPLTFNGVSDMVTIVSAVSQGGKLFNFQKIPDYGTLVVLMGGRRLEEVSKWLMAKRDPSEDVAVIERGTYLDQKVHVNKLEKLAEVGNNLATPSLLVLGNVVRLREILWKFR

SEQ ID NO: 84905 - DNA, 1473 bp, Clostridium acetobutylicum ATCC 824
  CDS (1)..(1473): transl_table=11
atgaaaagatctggtaaggtttatataataggagcaggacctggagaggaagagcttataaccttaaaggcaataagaaaaatgaaagaatgcacagctgtgctttatgatagacttgtaggacagggaatacttaaatatttgaatgaaaagtgtgagatttattattgtggaaaagagcctgggtgtcattataaaacccaagatgagataaatgaaatgataataaagctagctaaagaaggacatattgttggtagaataaaaggaggagacccatatatttttggaagaggaggggaagagggactaagtcttttaaaagagaatatagaatttgaagtgatttcaggggttacttctcccgtagctgttttaaattatgctggaattcctgtaacgcacaggggcatagcaagaagctttcatgtatttacggcaaaaacagccaatgacgattctataaattttagtgcagcggctaaaattgatgggacactgatatttttaatgggatataggcagcttaacgatataactagaaagctaatagaaaatggaatggattcaaaaatgccctgcgctgttgtaatgaggggaactactagtcttcagaaaaaggttataggaaatcttagtgatataaaagaaaaatgtgataatgctaatatgacttcaccttgtataatagtagtaggaaaagttgttggtttcaatcagcagctaaattggtatgagaaaaagcctctttttggcagaaatatatgtataacaagatctaaaaatcaaagcaaaactatgagagaagagcttcttgaccttggagcagaagtaacagaagtacattctatagaaatagaaaatacagcctcaaatttagaagaatacattaataaaatttcagagtatgattatataatcttgaccagtgtaaatgctgtggaggtcttatttgattatcttgcttcaaaggattatgatgtaagaaaagtaagggccaagtttgcagttataggaaatgctacaaaagaagcgctaaagaaaagaggaattgttccagagatagtatctagaaaacacaatggagaaggtctttttgatgagattagaggctatttaaagaaggatgataagatatttatccccaggagtgaaaattctagaaagtatataaaggaacaacttgtaagcttagggttaagtgttgacgagtgttttatatacagaacagttcctggaaagctttatgataaggctgcttttgaaaatgctgatacaattgtttttacaagtccatcaacggtaaaaaatatgatagctctttttggagaaaagaacataaagaaaaagagtataatcgccataggacctataacaggaagagagcttggaaaaataaatgcagaatattctacatgcagtgaatgcagtgtagatgcaataattagggagtgtttgaacagtgacaaataa

SEQ ID NO: 84906 - protein, 490 aa, Clostridium acetobutylicum ATCC 824
MKRSGKVYIIGAGPGEEELITLKAIRKMKECTAVLYDRLVGQGILKYLNEKCEIYYCGKEPGCHYKTQDEINEMIIKLAKEGHIVGRIKGGDPYIFGRGGEEGLSLLKENIEFEVISGVTSPVAVLNYAGIPVTHRGIARSFHVFTAKTANDDSINFSAAAKIDGTLIFLMGYRQLNDITRKLIENGMDSKMPCAVVMRGTTSLQKKVIGNLSDIKEKCDNANMTSPCIIVVGKVVGFNQQLNWYEKKPLFGRNICITRSKNQSKTMREELLDLGAEVTEVHSIEIENTASNLEEYINKISEYDYIILTSVNAVEVLFDYLASKDYDVRKVRAKFAVIGNATKEALKKRGIVPEIVSRKHNGEGLFDEIRGYLKKDDKIFIPRSENSRKYIKEQLVSLGLSVDECFIYRTVPGKLYDKAAFENADTIVFTSPSTVKNMIALFGEKNIKKKSIIAIGPITGRELGKINAEYSTCSECSVDAIIRECLNSDK

SEQ ID NO: 84907 - DNA, 1482 bp, Agrobacterium tumefaciens str. C58
  CDS (1)..(1482): transl_table=11
atgcgggatatatgtccaatgcacaacgaacatgatttttctgctgctggcgaccgcctttcaaccttccccgctttcttccgggtcgagggacggcaggtcgctgttttcggaaatggcgatgaagccttcgcgaaggtgaggctgctcgccaataccaacgcgcatatcgttgcctatgccgatcacccggaagcggattttgcgcgttacatcagcgaaaacagtatcgatcaccgtgctctggccttcgccagcccgttggttgacgacgccaccctggtgttcgccgcaacaggcgatgaagcgctggatcgcgaaatcgtctctgtagcgcgcacgaagaaaatccccgccaatgcggtggatcagcccgaattctgcgacttcttcacgcctgcactcgttgcccgcgcgccagttgccattgccattggcacggaaggggcagggccggttcttgcccagatgatccgcgcgcgtatcgaccagatgctgtcgccgtcgctcggcaagctcgcacgtcttgcggtgcaatatcgtgatgcggccgaggagaacgtgccgaagggcgcgttgcggcgcaatttctggcgccggttcttttcgggcgcggttgcggatgccgttgctctcggtgatacctcttccgcccgtcatgccgcagatcgcctgctgcaatcgccggaacgcagcgaaggtcgcgtctggcttgttggcgccggtccaggtgcagaagatctgctgacgctgcgcgcgcagcgcgtgttgatggaagccgacgtgatcgtctacgacgccctggtgccgcaggcgattgtcgatatgggccgccgcgatgctgaaaggctctctgtcggcaagcgcaagggctgccacagcaagtcgcaaaatgatatcaaccgcctgctggtgcgtctaggcctggaaggaaagcgagtcgtgcggctcaaatccggtgatccgctggtctacggccgcgcgggcgaggaaatggcagcgctgcgcgaggctggtgtcgcttatgaaatcgtgccgggcatcacctccgcctttgccgcggctgcggatttcgaattaccactgacgctgcgcggtgtcgcctcttcgctgattttcaccactggtcacgacctgatgggcgacgttctgcctgattgggcacgacttgccgtctccggggccaccattgccgtctatatgggccgcagtgttgccgcttcggtggccaagcggctgattgatgcgggacttggcgtcgaaaccaccgtcgccgtcatcgaaaatgccagccgcgcggatcgccgcctgctgcacggcacattaaacgatttgcccgacctcgaatatcgtgatgaactgatcggcccggtcatggtcatcatcggcgatgcggtggcgggcgctaatttcgacagatccgaggcgcttgcgcttgcagccaagccggcgagcctcaaacgggagtatgtgaatggttga

SEQ ID NO: 84908 - protein, 493 aa, Agrobacterium tumefaciens str. C58
MRDICPMHNEHDFSAAGDRLSTFPAFFRVEGRQVAVFGNGDEAFAKVRLLANTNAHIVAYADHPEADFARYISENSIDHRALAFASPLVDDATLVFAATGDEALDREIVSVARTKKIPANAVDQPEFCDFFTPALVARAPVAIAIGTEGAGPVLAQMIRARIDQMLSPSLGKLARLAVQYRDAAEENVPKGALRRNFWRRFFSGAVADAVALGDTSSARHAADRLLQSPERSEGRVWLVGAGPGAEDLLTLRAQRVLMEADVIVYDALVPQAIVDMGRRDAERLSVGKRKGCHSKSQNDINRLLVRLGLEGKRVVRLKSGDPLVYGRAGEEMAALREAGVAYEIVPGITSAFAAAADFELPLTLRGVASSLIFTTGHDLMGDVLPDWARLAVSGATIAVYMGRSVAASVAKRLIDAGLGVETTVAVIENASRADRRLLHGTLNDLPDLEYRDELIGPVMVIIGDAVAGANFDRSEALALAAKPASLKREYVNG

SEQ ID NO: 84909 - DNA, 894 bp, Agrobacterium tumefaciens str. C58
  CDS (1)..(894): transl_table=11
gtgcccgtggtccagccgcggcgaagggtctttccatccgtttccatatgcattcctatagccgggacggctttttccgtcatcgttaaaaagcagccaagaacaatgtcgataccgcagattttgaacagcatcgccgcaaaaggtccggtctttgaagccggccacgtctggctcgcgggcgcggggccgggcgatgtgcggtatctgacgctcgaagtggcgctcgcgctgtcgcaggccgatatcatcgtgcgcgatgcgctggtgagcgatgatgtcgtggcgctcggtccgcaggcggaagtcgtctttgccggcaagcgtggcggcaagccctccgcgacgcaggatgacattaccgcgtcgctgatcgattttgctctgcagggcaaaaaggtgctgcgactgaagggcggcgatccctttattttcgggcgtggcggcgaagaggcggaggcgcttgtccatgccggcattccgtttcgcatattgccgggcatgacctcgtcgtttaccgcgctcgcttcggcacgcattcctgccaccatgcgcggcatcagccgcgccgtgacgctcgctaccggccacgcggcgggcacagaagaggatctcgactggctggcactggcgaaaacgcaggaacctatcgtcgtttatatggggctgaagaatatcggcactattgccggtcttctgatgcagggtggacgttcgggaaaaacgccggtcgccgtcatcatgtcggcaactactgcgaaagaacggattttcatcggtacattgcaaagcatagctgacgatgcaaaacgggagagcttcgaagcgccggctttgattattatcggcgagattgtttcgatgcgggatcgtcttggagtgtcgggctcatga

SEQ ID NO: 84910 - protein, 297 aa, Agrobacterium tumefaciens str. C58
MPVVQPRRRVFPSVSICIPIAGTAFSVIVKKQPRTMSIPQILNSIAAKGPVFEAGHVWLAGAGPGDVRYLTLEVALALSQADIIVRDALVSDDVVALGPQAEVVFAGKRGGKPSATQDDITASLIDFALQGKKVLRLKGGDPFIFGRGGEEAEALVHAGIPFRILPGMTSSFTALASARIPATMRGISRAVTLATGHAAGTEEDLDWLALAKTQEPIVVYMGLKNIGTIAGLLMQGGRSGKTPVAVIMSATTAKERIFIGTLQSIADDAKRESFEAPALIIIGEIVSMRDRLGVSGS

SEQ ID NO: 84911 - DNA, 1467 bp, Agrobacterium tumefaciens str. C58
  CDS (1)..(1467): transl_table=11
atggatgccttaaaaccgcagcggaatgaaccggcccgtatggagaggctcgccaaattgccggtcttctgggggctcgagggtaagcgcgtcgttctgacaggcggatcggacggagcagcctggaaggcggaactgttgttggcctgcggggcgcagcttgatctttattgcgaggaaagcgggctttcggaaagcctcgcgacgctcgtcgcaaaaagcccgatgctgacatggcatgaccgttgctgggatgcagatattttcaaaggggcggaactggcgctggcagattgcgaagctgaagaggaagccggaagattttatcatgccgcgcgggcagcaggcgtgccggtcaatgtcatcgacaagccggaattctgccagttccagtttggttcgatcgtcaatcgctcaccggtggtggtgtcgatctccaccgatggtgccgcgcccattctggcgcaggccatccgccggcgcatcgagacattgctgccgctttcgctcaaggactggggcgctcttgcccagacaattcgagagcgcgttaatctgcggcttgcgcctggcgcggcacggcgctctttctgggaaaagtttgtcgaccgggcttttaccgaaagactggacgagggtagcgaagaacggctgctgaaagatgtagcgacgcggacggggctggcagaatcgggacgtggttttgtgacgctggtgggcgcagggccaggtgatgccgagcttttaaccctgaaagcggtgcgtgccctgcaggcggccgatgtcatcctgttcgacgatctcgtctcagcggaggtgctggaactggcgcggcgggaggccaagcgcatgctggtcggcaagcgcggcggccgcgaaagctgcaaacaggaagacatcaacgacatgatgatccgcttcgccaaggccggtagacgggtggtgcggctgaaatccggcgatccgatgattttcgggcgcgccggcgaggagatcgcggcgctggaagccgaaaatatcccggtcgaggttgtgcccggcatcaccgccgcaagcgccatggcctcacgtctcggcgtttccctgacccatcgcgaccatgcccaatccgttcggttcgtcaccggacattcgcggcagggaaagctgccggaaaatatcgactggcagtccctgtcgaacccttcggtgaccacggtgttttacatgggcgggcgaaccgccgcggacatccagtcttgcctgctcgcccacggcatgcccgcctcgacccccgtggttgtgatgatttccgtcagccgggtgaatgaacaacgctggtgcggttcgctcgcgcaactggttgctgcagtcgagaggctgggcgtgaacgaacccgtgctgatcggtgtcggggatgcgttccgttccgcttctgtcaacggcggagaacagaccgctgctgcgccttttcaaaaagccggctaa

SEQ ID NO: 84912 - protein, 488 aa, Agrobacterium tumefaciens str. C58
MDALKPQRNEPARMERLAKLPVFWGLEGKRVVLTGGSDGAAWKAELLLACGAQLDLYCEESGLSESLATLVAKSPMLTWHDRCWDADIFKGAELALADCEAEEEAGRFYHAARAAGVPVNVIDKPEFCQFQFGSIVNRSPVVVSISTDGAAPILAQAIRRRIETLLPLSLKDWGALAQTIRERVNLRLAPGAARRSFWEKFVDRAFTERLDEGSEERLLKDVATRTGLAESGRGFVTLVGAGPGDAELLTLKAVRALQAADVILFDDLVSAEVLELARREAKRMLVGKRGGRESCKQEDINDMMIRFAKAGRRVVRLKSGDPMIFGRAGEEIAALEAENIPVEVVPGITAASAMASRLGVSLTHRDHAQSVRFVTGHSRQGKLPENIDWQSLSNPSVTTVFYMGGRTAADIQSCLLAHGMPASTPVVVMISVSRVNEQRWCGSLAQLVAAVERLGVNEPVLIGVGDAFRSASVNGGEQTAAAPFQKAG

SEQ ID NO: 84913 - DNA, 720 bp, Sulfolobus tokodaii str. 7
  CDS (1)..(720): transl_table=11
atgggaaaggtttttattgtaggtgcaggtccaggagaccctgagctaattacacttaaggcttataacttgataaaaaaggctaatgtaattatttacgatagattagttccaaagacgttattagaagatacaaaagcagaacttatatatgtaggaaaagagataggggactcaaaacttcaagattatataaatgaactcttagtagaaaaagcaaagacaaatagcattgttgtgagattaaaggggggagatccttatgttttcggaaggggagaagaagagtgtatttacgtattatctcacggaattgaatgcgaagtagttccgggagtaagtagtgctattgcagtgccggcttatgcgggcattccggttacaagcagattaacaaactcctctagctttacagtaattacagggactagggctgataataaaatcattgatgcaagttatattccaagagaaggaactctaataatcttgatgggaattcacgtaatagaacaattagagagagttttactctcagtgagagattatgaggaatatgtagctattatagagaacggtacaactgaaaaacaaagagttataacgggaaggctaaaagacttatctaaactaataatagaacataaaataagacctcctgcaataattgttgttggagatgttgtgaaattaagagagaaactttggaagttaacttaa

SEQ ID NO: 84914 - protein, 239 aa, Sulfolobus tokodaii str. 7
MGKVFIVGAGPGDPELITLKAYNLIKKANVIIYDRLVPKTLLEDTKAELIYVGKEIGDSKLQDYINELLVEKAKTNSIVVRLKGGDPYVFGRGEEECIYVLSHGIECEVVPGVSSAIAVPAYAGIPVTSRLTNSSSFTVITGTRADNKIIDASYIPREGTLIILMGIHVIEQLERVLLSVRDYEEYVAIIENGTTEKQRVITGRLKDLSKLIIEHKIRPPAIIVVGDVVKLREKLWKLT

SEQ ID NO: 84915 - DNA, 1458 bp, Sinorhizobium meliloti 1021
  CDS (1)..(1458): transl_table=11
atgtcgcagaaattgtccgtctttccggcattctttcgcgtcgcgcagaaaagcgtggcggtgttcggcaatggggacgaggccttcgccaagttacggttgctgctgaacaccgaggcgcgcatcgtcgcctatgcggatcgcccggaaccggcattcgatgcttttctggatgccaacaatatcgagaccgtgcgcgaaccctttggggctcatcaggtcgaaggctccgtcctcgtctttgccgcaaccggcgatgcggcgcttgaccgcgttgtcgtgactgcggcgcgcgagcggaaaatccccgcaaatgccgtggatcagccggactattgcgatttcctcacgccggcactcgtcaaccgggcgcccgtcgcagttgcgatcggcaccgaaggggcagggccggttctggcgcagatgatccgcgcgcagatcgatcaattgctgtcgccgtccttgggtatcgttgcctctttggctgcgaactatcgcgacgccgtcgagcgcctcgtgccgcgcggcgtcgctcggcgtgtcttctggcgccgcttcttctcgggccctgtggcggatcaagtagcgctcggcgatcttgcatccgcgcgccgcgaggcctcgaggcttctggatgccgcggggggcgtggccggccatgtgtggctggtcggcgccggaccgggcgccgaagacctgctgacgctccgggcgcagcgcgtgatgatggaagcggatgccatcgtttatgatgcgctggtgccgcaagcgatcgtcgacatgggccgccgcgacgccgagcggctttcggtcggcaagcgcaagggctgccataccaagtcgcaggacgagatcaatcagttgctggtgaagcttgccggcgaaggcaagcgcgtcgtccggctgaagtccggcgaccctctggtctacggccgggcaggcgaggaaatggcggcactgcgtgaagccggcatcagctacgaggtggtgccggggatcacatcggcctttgccgcggccgccgatttcgaactgccgctgacgctgcgcggcgtggcatcgtcgctggttttcacgacggggcacgatctgacaggcagcgttcttcccgattgggcgcgactggcggtttccggcgcgacgattgccgtctatatgggccgcaccgttgcggcctccgtcgcctcgcggctcatgcaggccggtctgccgcaggacacgaccgtcgcggtgatcgagaatgcgagccgtgccgagcgccgtctcctgcacggaacgctccgcgatctgccggatctcgaggcccgcacggaactggacgggccggtcatggtgatcatcggcgaagcggttgcgggcgcgaatttcgaacggtccgagccgctggcggccggccgcaccaagtatagcggtgccagcaaagtttcggcgaaacgcaccgaacagatctggaattga

SEQ ID NO: 84916 - protein, 485 aa, Sinorhizobium meliloti 1021
MSQKLSVFPAFFRVAQKSVAVFGNGDEAFAKLRLLLNTEARIVAYADRPEPAFDAFLDANNIETVREPFGAHQVEGSVLVFAATGDAALDRVVVTAARERKIPANAVDQPDYCDFLTPALVNRAPVAVAIGTEGAGPVLAQMIRAQIDQLLSPSLGIVASLAANYRDAVERLVPRGVARRVFWRRFFSGPVADQVALGDLASARREASRLLDAAGGVAGHVWLVGAGPGAEDLLTLRAQRVMMEADAIVYDALVPQAIVDMGRRDAERLSVGKRKGCHTKSQDEINQLLVKLAGEGKRVVRLKSGDPLVYGRAGEEMAALREAGISYEVVPGITSAFAAAADFELPLTLRGVASSLVFTTGHDLTGSVLPDWARLAVSGATIAVYMGRTVAASVASRLMQAGLPQDTTVAVIENASRAERRLLHGTLRDLPDLEARTELDGPVMVIIGEAVAGANFERSEPLAAGRTKYSGASKVSAKRTEQIWN

SEQ ID NO: 84917 - DNA, 840 bp, Sinorhizobium meliloti 1021
  CDS (1)..(840): transl_table=11
atgaccgacatgtttgctggcctgcctgaactcgagccgggttcggtctggctcgtcggtgcgggcccgggggatcccggccttctgaccctacacgcagccaatgcgcttcgccaggcggatgtcatcgttcacgatgcgctggtcaacggtgattgcctcaagctcgccaaagcgagtgcagcactcgaatttgcgggcaaacgcggcggcaagccttcgccgaaacagcgcgacatctcgctgcggctcgtcgaactggcgcgtgaagggaagagggtgctgcgcctcaagggtggcgatccctttgtcttcggccgaggcggagaggaggcgctgaccctggtcgagcaccgcatcccgttccgcatcgttcccgggatcaccgcgggcataggcgggcttgcctatgccggcattccggtcacgcatcgggaggtcaaccacgcggtgactttccttaccggccatgactcttccggcgtcgtgccggacaggatcaattgggaaggcattgccaagggctctccggtaatcgtcatgtacatggcgatgaagcatatcggccagatctccgccaatctgatggccgccggccgctcgccggacgagccggtggccttcgtctgcaatgcggcgacaccggaacaggtggtgctggaaaccactctttcgtccgctgaagccgatgtgaccgcttctgggctcgagccgccggcaatcgtcgtcgtcggcgaggtcgtccggcttcgcgcctcgctcgactggcttggcgcgctcgatggccgggcgctcgctcccgatccgttttcgagccgcattctccggaacccggcatga

SEQ ID NO: 84918 - protein, 279 aa, Sinorhizobium meliloti 1021
MTDMFAGLPELEPGSVWLVGAGPGDPGLLTLHAANALRQADVIVHDALVNGDCLKLAKASAALEFAGKRGGKPSPKQRDISLRLVELAREGKRVLRLKGGDPFVFGRGGEEALTLVEHRIPFRIVPGITAGIGGLAYAGIPVTHREVNHAVTFLTGHDSSGVVPDRINWEGIAKGSPVIVMYMAMKHIGQISANLMAAGRSPDEPVAFVCNAATPEQVVLETTLSSAEADVTASGLEPPAIVVVGEVVRLRASLDWLGALDGRALAPDPFSSRILRNPA

SEQ ID NO: 84919 - DNA, 774 bp, Bacillus subtilis subsp. subtilis str. 168
  CDS (1)..(774): transl_table=11
atggggaaagtatatattgtaggagcgggtcccggtgaccctgatctgctgacaattaaagcgctgaaagccattgaaaaagctgatgtcatcttatatgacagattagtaaataaagagattttacaatatgccaaagagcaagcagacctgatctactgcgggaagcttccggattttcatacgatgaagcaggaaaccatcaatcgatttcttgtgaagtatgcgcaaaaagggaaaatggttgtcagactgaaaggcggagacccttttgtgttcgggagaggaggggaagaagcggaatgcctctctgaaaatggaattccgtttgaaatcattcccggcattacgtctggaatcgcggcagccgcttatgccgggattcctgttacccatcgggatgcgggctctaacgtcgcttttgtaacgggtcactataaaaaagaagaagattttgaggaaaagtggaaagcgctggctacaggaattgatacacttgtcatctatatgggtatcaaaaacgtgcagcagattgaaagaaaactccttgaaaatggccgggacggttctacgccagcagcctttattcattgggggacaacggacaagcaaaaatctgttttttgtacagttgacaccctttcagaaacggtgataaaagaaaacattacaaatccgagtttaattgtcattggaaatgttgtaaattatcactataagctggaatggtttgaatctgaactaaaaaaacaagatttaagcgaggcgttgtaa

SEQ ID NO: 84920 - protein, 257 aa, Bacillus subtilis subsp. subtilis str. 168
MGKVYIVGAGPGDPDLLTIKALKAIEKADVILYDRLVNKEILQYAKEQADLIYCGKLPDFHTMKQETINRFLVKYAQKGKMVVRLKGGDPFVFGRGGEEAECLSENGIPFEIIPGITSGIAAAAYAGIPVTHRDAGSNVAFVTGHYKKEEDFEEKWKALATGIDTLVIYMGIKNVQQIERKLLENGRDGSTPAAFIHWGTTDKQKSVFCTVDTLSETVIKENITNPSLIVIGNVVNYHYKLEWFESELKKQDLSEAL

SEQ ID NO: 84921 - DNA, 741 bp, Thermoplasma acidophilum DSM 1728
  CDS (1)..(741): transl_table=11
atgaaatcgagaaaatactatatcgtcggtgccggcccgggcgatccaggccttatcacagttcgtgctgttaaggccatcgcagaatccgatcttgttctcgtagacagcctggtcccagacgagatcatagaatccgtctgcgctggcaagcgcgttttacgtgtgggccacagggcatctggcggccattcgggaataatcgataggatatcggcgatccttgacagcacggaattcagcgttgcctctcatctgaaggagggcgatccttctgtattttcacacctgtacgaggagatacggatgatcatggatcgcggcatagaatacgaggtgatccctggcgtctcatcggccatagcggttccggaggcagccggaattgtacttaccggccggggcagatcagaatcgttcaccgttgtctccgcgagcgatgcttcaggaggcttcaatgaggctgagataaggtctgccctgaatgcctctggatcagtggtcataatgatgggatcgaggtatctcggcagaattcgcgatcttcttatcggtatccgttacgaatggccaattgcgataatagagaatggcacgcgtacggatcagagggttttggtttaccgtgatgcatggcatattggcgatcaagagatccggatgccggccataatcgttgttggccgcatgatcatggttgacggggtgatagagaaggatgaggctggaatacgaaattga

SEQ ID NO: 84922 - protein, 246 aa, Thermoplasma acidophilum DSM 1728
MKSRKYYIVGAGPGDPGLITVRAVKAIAESDLVLVDSLVPDEIIESVCAGKRVLRVGHRASGGHSGIIDRISAILDSTEFSVASHLKEGDPSVFSHLYEEIRMIMDRGIEYEVIPGVSSAIAVPEAAGIVLTGRGRSESFTVVSASDASGGFNEAEIRSALNASGSVVIMMGSRYLGRIRDLLIGIRYEWPIAIIENGTRTDQRVLVYRDAWHIGDQEIRMPAIIVVGRMIMVDGVIEKDEAGIRN

SEQ ID NO: 84923 - DNA, 1413 bp, Yersinia pestis CO92
  CDS (1)..(1413): transl_table=11
atggactacttcccgatcttctgccaactgcaacacaaagcctgcctgctggttggcggtggagaaattgctgaacgcaaagcgcggctgttattggatgcaggtgcgttagtcaccgtcaatgcctgcgagttcaccccccagtttcaccattgggcagatcaggggcaactttcattaatcagcggtgaatttgtgcccgaactgttggccgataaatggctggtcattgccgccaccgatcagttgtccgtcaatgcattagtctatcaaagcgccaaccagcaacggatcttctgcaatgtggttgatgatccgaaacgcaccagctttatcatgccatctattattgatcgctcccccatcatgatcgcggtctcctctggcggtaaagcgcccgtgttggcccggttgttacgcgaaaaactggaagccctgttaccgcaacatttggggcaactggcggggaacttacgccagcgggtgaagcagcattttaccgtgatgaccgaacgtcgccggttctgggaaaagttgctgacccacgaccgtctggcacaatctttagccaataacgatcacgtgcaagccgatcaacatgttgaacaactgtttagtgctccactcactgatcgtggcgaagtggtgttggtcggtgcagggccgggagatgctggtttattgaccttaaaagggttgcagcagatccaacaggccgatgtggtggtctatgaccggctggtctccgatgaggtgatgaatttggtccggcgtgatgccgagcgcatctttgtcggcaaacaatcgggccaccactgtgtgccgcaagagcaaatcaaccaaatcctgttacagcaggcacagtcaggtaagcgggtagtgcgtttgaaaggtggcgacccgtttatttttggtcggggcggcgaagagttagaagagttggcgggctacggtattcctttctccgtggtcccaggcattaccgccgcatccggttgctcggcttacagtggtattccactgactcaccgtgaccatgcgcaaagcgtgcgactggtcaccggtcatgccaaaaaagagggccagttagattgggcaaatctggcggcagagaaacaaacattagttttttatatggggctatcgcaggctggagagatccaacagcaattgattcaacatggtatgccagcgaccactcaggttgccttagtcgaaaacggcacctcacggcatcagcgggttgtgagtggcgagttaagccaattggccttactctcccaacaggtcagtagccctagcctgattatcgtcggtagcgtggtcagcctacgggaaaaactgaattggttttccagccgccatcacgatgatcagcccaaagtgactgaatgtgtggctcatgttggttaa

SEQ ID NO: 84924 - protein, 470 aa, Yersinia pestis CO92
MDYFPIFCQLQHKACLLVGGGEIAERKARLLLDAGALVTVNACEFTPQFHHWADQGQLSLISGEFVPELLADKWLVIAATDQLSVNALVYQSANQQRIFCNVVDDPKRTSFIMPSIIDRSPIMIAVSSGGKAPVLARLLREKLEALLPQHLGQLAGNLRQRVKQHFTVMTERRRFWEKLLTHDRLAQSLANNDHVQADQHVEQLFSAPLTDRGEVVLVGAGPGDAGLLTLKGLQQIQQADVVVYDRLVSDEVMNLVRRDAERIFVGKQSGHHCVPQEQINQILLQQAQSGKRVVRLKGGDPFIFGRGGEELEELAGYGIPFSVVPGITAASGCSAYSGIPLTHRDHAQSVRLVTGHAKKEGQLDWANLAAEKQTLVFYMGLSQAGEIQQQLIQHGMPATTQVALVENGTSRHQRVVSGELSQLALLSQQVSSPSLIIVGSVVSLREKLNWFSSRHHDDQPKVTECVAHVG

SEQ ID NO: 84925 - DNA, 1419 bp, Yersinia pestis CO92
  CDS (1)..(1419): transl_table=11
gtggactatctacctctatttgccgacttgaaacaacgcccggtattgatcgttggcggcggcgaagttgctgcgcgaaaaattgaactactgcaccgcgcaggtgcgcaggtatgggtagtggcgcaaaccctctcatctgaactcgaacagcagtatcaggatggccgtatccattggctggcacaggattttctgcctgaacagttggacaacgtgtttctggtgattgccgcaactaacgataccgtactgaatgccgctgttttcgcggcggcagatcaacggtgtattttggcgaatgtggtggatgaccaacccctttgttcgtttattttcccttcgattgttgatcgttcaccgctggtggtcgcgatctcgtcttccggccaggcaccggtgctggcgcggatactgcgtgagaagttagaagccttactgcccactcgtctcagtgatatggccgctatagctgggcgctggcgtgggcgggttaagcagcatatggcctctatgggggagcgccgccgcttttgggaacatgcattcagcgggcgctttgccagccttatcagccgtggtcagttaaccgaggctgaaaatgaattacaactgtcgctagagggccaacaccgtgcactcggcgaagtggctttggtcggtgcaggtcctggcgatgcagggttattaacgttacgtggtttgcaagtgatgcagcaggcagatgtggtgctgtatgaccatttagtcagtccggaagtcttggatttggtgcgtcgcgatgctgaacgcatctgtgtggggaaacgggcgggggcgcattcggttacccaagaggcaaccaatcagttgttggtcactctggcacagcaaggaaaacgggtcgtacggctaaaaggtggcgatccctttatttttggtcgggggggggaagagttacaagttgtggcgcaagcggggatcccgtttcaggtggtaccgggggtgacggctgctgcgggggcgacagcctatgccggtattcccctgacacaccgcgatcatgcgcaaagcgtgacatttattaccgggcattgccgtcctgatggtgatgatcttgattggcagacgctggcccgtggtcgtcagacgctggcgatctacatgggaacagtgaaagcggcggcaatcagccaacagttgatcgcccatggccggtccagtaccacgccggtggcagtgattggccgtggaacccgtgtggaccagcaggtgctgatcggtacgttggcacaacttgaatcactcgcacagcaggcaccgacaccagcactactggtgattggtgaagtggtgaatttacatcaccaaattgcctggtttgggcaacaaccgcagactgaatcggcgatcagcccatcagtcgtgaatttggcataa

SEQ ID NO: 84926 - protein, 472 aa, Yersinia pestis CO92
MDYLPLFADLKQRPVLIVGGGEVAARKIELLHRAGAQVWVVAQTLSSELEQQYQDGRIHWLAQDFLPEQLDNVFLVIAATNDTVLNAAVFAAADQRCILANVVDDQPLCSFIFPSIVDRSPLVVAISSSGQAPVLARILREKLEALLPTRLSDMAAIAGRWRGRVKQHMASMGERRRFWEHAFSGRFASLISRGQLTEAENELQLSLEGQHRALGEVALVGAGPGDAGLLTLRGLQVMQQADVVLYDHLVSPEVLDLVRRDAERICVGKRAGAHSVTQEATNQLLVTLAQQGKRVVRLKGGDPFIFGRGGEELQVVAQAGIPFQVVPGVTAAAGATAYAGIPLTHRDHAQSVTFITGHCRPDGDDLDWQTLARGRQTLAIYMGTVKAAAISQQLIAHGRSSTTPVAVIGRGTRVDQQVLIGTLAQLESLAQQAPTPALLVIGEVVNLHHQIAWFGQQPQTESAISPSVVNLA

SEQ ID NO: 84927 - DNA, 924 bp, Caulobacter crescentus CB15
  CDS (1)..(924): transl_table=11
atggcccgccagccagtccgaaatcgcccgccgggacttgtcgtcgtgggcggaaagcgcgcgggtcgcgcgctcggcgttgtctggctggtcggggccggtccgggggacccggacctgctgacattccgggcgttcaacgccctgcgggccgccgatgtcgtggtgcacgacgggctggtgtccgaagagattctcgacctcgctcccagccgcgcccggcggatcaacgtcgccaagcgcaagtcgcgccacacgctgccgcaggacgacatcaaccagctgctggtcgccctggcgcaggaggggctgaccgtcgtccggctgaagggcggcgatcctttcctgttcggtcggggcggcgaggagctggccgcgtgccgcgaggcgggcgtcgaatgccatgtagtgcccggcgtcacggcggccctggccgcgagcgccggcgctggcgcgccgctgacccatcggggtgcggcccaagcggtgaccttcgtcaccggtcacgcggcccatggcgagcccgacctcgactgggtcgccctggcgcgccccaaccagacggtcgtcgtctacatgggcgtttcgaccgccgccctgatcgctgagcgcttggtcgcggccggccgcgcggcgtcgacgcgggccctgatcgtcgagaatgcgagccgcgcggacgagcgtcggatcctgacgaccttgtccgggttggccgaagccgccgcctcggtgcgcggccccgcgctgctgatggtgggcgaggccatggcgatggcggaaattcaatctcctcccccgttgacgggggaggggcaccgcgaagcggtggagggggcgctcgccgcaaagcgcgccccctccgtcatctcgcccctgggcgagctgacacctcccccgcttcgctggggaggagagttcaaatga

SEQ ID NO: 84928 - protein, 307 aa, Caulobacter crescentus CB15
MARQPVRNRPPGLVVVGGKRAGRALGVVWLVGAGPGDPDLLTFRAFNALRAADVVVHDGLVSEEILDLAPSRARRINVAKRKSRHTLPQDDINQLLVALAQEGLTVVRLKGGDPFLFGRGGEELAACREAGVECHVVPGVTAALAASAGAGAPLTHRGAAQAVTFVTGHAAHGEPDLDWVALARPNQTVVVYMGVSTAALIAERLVAAGRAASTRALIVENASRADERRILTTLSGLAEAAASVRGPALLMVGEAMAMAEIQSPPPLTGEGHREAVEGALAAKRAPSVISPLGELTPPPLRWGGEFK

SEQ ID NO: 84929 - DNA, 1617 bp, Synechocystis sp. PCC 6803
  CDS (1)..(1617): transl_table=11
atggctgaaaaactacctcacccacaatgccttggtgtccccggccgatcgccccggcgcgaaagtaacctaatttttacaatgctaagtacagattccagagccaaagtttatctgatgggggctggcttggggcccgtggcctacctgactcaaagggcgatcgccgtgttgggtagggcaaatgtggtaatttatgacgccttggtgtcccaggagctttttgatctcctgccgccagattgtgagcgaattttcgtcggcaaacgggggggacaacccagcactccccaggccaaaattaatcagttattggtggaccattaccgacggggcaaacaggtagtacggctgaaaagcggtgatccctggatttttggccgcattatgccggaattggcaaccctagtgacccaccattgtgcctatgaagtagtaccaggaatttcctcggcgatcgccggggcaggactagcaagcattcccctcacagccaaagatagcggggcgggtttttttgtcatggacggccatgatccccaccgttggccttggcctgccctggcccaattgcccactttggtaattctcatggggaccaaaaatttgtcgttgttggtcaatgagttagtccgagcaggtaaatctccccacacccccatggcagtgattaaaaatgccggcagaccggaacagcaaacctgggaaggaaccctagctgatatggtggaaaaaacccaaggacagtccctcgccccagcggtaattgtcattggagatgttgttagtcaaaggattattcccgccttgcctcccctgcccctgaccgaaaaaactattctggttaccagggccgccgaccaagcgagccagtttaccgagcttttgcaccagcaaggggccaccgtcttagccatggctgccctggaaattgtgccccccaaggactggcaacccctcgaccaggcgatcgccaagttgggggattttgactggctaattctgacttccgccaatggggtggagttcttttttcaaagattgcaacaccacggtttggacagtagggccctggcgggattaaagttggcggtagtgggcaaaaagaccgcccaaagcctagaaaaatttggtctcaagccagatttcattcccccggatttcattgccgatgccctggtggaacattttccccactccccagcaggactaaaaatactttttccccgggtggaaagtggtggccgggcccaattagtccaagaattgagccaaaaacaagccttggttacggaagtcccctcctatcaatccgcctgccctggccatatgcccgaagaagtgtggcaaagtatcgttaatcaaacggtggatgtgatcacctttgccagttccaaaaccgtcagccattttcggcaactgttggcccagactagccaagctaacggttaccaagattggcgttccctaattaaccattgccaaatcgcttccattggcccccaaacttccgaacgctgtttacgggaattgggtcgggtggacattgaagcaacggagtacaccctagaaggcctaaccggggccattactaattatgtttaccaaaatccgtga

SEQ ID NO: 84930 - protein, 538 aa, Synechocystis sp. PCC 6803
MAEKLPHPQCLGVPGRSPRRESNLIFTMLSTDSRAKVYLMGAGLGPVAYLTQRAIAVLGRANVVIYDALVSQELFDLLPPDCERIFVGKRGGQPSTPQAKINQLLVDHYRRGKQVVRLKSGDPWIFGRIMPELATLVTHHCAYEVVPGISSAIAGAGLASIPLTAKDSGAGFFVMDGHDPHRWPWPALAQLPTLVILMGTKNLSLLVNELVRAGKSPHTPMAVIKNAGRPEQQTWEGTLADMVEKTQGQSLAPAVIVIGDVVSQRIIPALPPLPLTEKTILVTRAADQASQFTELLHQQGATVLAMAALEIVPPKDWQPLDQAIAKLGDFDWLILTSANGVEFFFQRLQHHGLDSRALAGLKLAVVGKKTAQSLEKFGLKPDFIPPDFIADALVEHFPHSPAGLKILFPRVESGGRAQLVQELSQKQALVTEVPSYQSACPGHMPEEVWQSIVNQTVDVITFASSKTVSHFRQLLAQTSQANGYQDWRSLINHCQIASIGPQTSERCLRELGRVDIEATEYTLEGLTGAITNYVYQNP

SEQ ID NO: 84931 - DNA, 1482 bp, Listeria monocytogenes EGD-e
  CDS (1)..(1482): transl_table=11
atgggaaaagttatgttaattggtgcagggcctggggatgcgcaactactgacagtgaaaggtttagctgcactacaaaaggcagatgttattgtttacgatcgcctcgtcgaaccagcgatgctccaagaacgaaaagctagttgtaaactaatttatgttggaaaagaaccacttcatcatccaattccacaagatgaaatcgaacgaattcttgtaagagaagcggcaacgaatgagcttgtcgtccgtttaaaagcaggtgatccttatgtatttggacgaggtggcgaagaaggagagacactccataaagcaggaattccgtttgaagttatccctggaatcacttcagctattggtgggctcgcctatgctggaatccctgtaacacatcgtgattttgcttcaagttttcatgtcattaccggacatttgaagaaagggcgcgatccactagattgggaagcacttgctagactggaaggtacacttgttttcttaatggggatgactaatttacctaatatctgtgcgaatttattagaacacggtcaaaagccagaaactggtgttgcaattgtacaatgggcaactcgaggcaaacaattaacagtaactggaaatttgcaaaccatcgaacaaaaagtagctgagtcgggtatttcctctccagcacttatcgttgttggcgatgtagttagcttacgaccacaactgaacttttttgaggaaatgccactttttcataccaaagtattacttccaagagcacgagcaggaaagagtatgctcgcggaacaaattcgtgatttaggcggagaagtaacaatgtacccaaatattcaagtattagatgttgcgccaacgaaaacaaaagaacaactaagcgaagtaagcgaactgcttttcacatcaaaagaagctgtagaacgattttttgattatttagccaagcttgatttagatattcgttctcttaaaaatagccatctgacggctattggaaagcaaacgaaggaagcatttagcgaaaaaggaattattccagatagttttattaaaagacggagcacggaattgattttagagcatttaccacgattacagaaaaatgtgagtaatttaattatcggaagcgtagttgatacgaccgaagttaatgttattttagctgatgtaaaagctattgaaatgatgccgttatatgatatgcgcccagtgacagaacgaccatttgatctcgaaagctttgaacaagtatgtttttcaagttcgcgttccgtccaaaatctacttgatgtactaacaatagaagaaaaggcgattttacaaacgaaaacaatcctttcgattggaaggttcacgagcgcaactttagcgtcattcggtatgaacaatttcatagaagccgaaagcgccacaccagagagcttaatcgaactaatccaaaaaacaaaattagaaggagtaccacaatga

SEQ ID NO: 84932 - protein, 493 aa, Listeria monocytogenes EGD-e
MGKVMLIGAGPGDAQLLTVKGLAALQKADVIVYDRLVEPAMLQERKASCKLIYVGKEPLHHPIPQDEIERILVREAATNELVVRLKAGDPYVFGRGGEEGETLHKAGIPFEVIPGITSAIGGLAYAGIPVTHRDFASSFHVITGHLKKGRDPLDWEALARLEGTLVFLMGMTNLPNICANLLEHGQKPETGVAIVQWATRGKQLTVTGNLQTIEQKVAESGISSPALIVVGDVVSLRPQLNFFEEMPLFHTKVLLPRARAGKSMLAEQIRDLGGEVTMYPNIQVLDVAPTKTKEQLSEVSELLFTSKEAVERFFDYLAKLDLDIRSLKNSHLTAIGKQTKEAFSEKGIIPDSFIKRRSTELILEHLPRLQKNVSNLIIGSVVDTTEVNVILADVKAIEMMPLYDMRPVTERPFDLESFEQVCFSSSRSVQNLLDVLTIEEKAILQTKTILSIGRFTSATLASFGMNNFIEAESATPESLIELIQKTKLEGVPQ

SEQ ID NO: 84933 - DNA, 1482 bp, Listeria innocua Clip11262
  CDS (1)..(1482): transl_table=11
atgggaaaagtcatgttaattggcgcaggtcctggtgatgcacaacttctaacagtaaaaggattagccgcacttcaaaaagcggatgttatagtctatgatcgcctcgttgaaccagcgatgctccaagaacgaaaagctagttgtaaactaatttatgtcggaaaagaaccacttcatcatccaatcccgcaagatgaaatcgaacaaattcttgtaagagaagcagcaacaaatgagctagttgttcgtttaaaagcgggtgatccgtacgtatttgggcgcggcggcgaggaaggcgaaacacttcataaagcaggtattccttttgaagtcatcccaggaattacttcagctattggcgggcttgcttatgcgggaattccggtcacgcaccgtgattttgcttctagttttcatgtgattacaggtcacttgaaaaaaaggcgcgatccactagattgggaagcacttgcaagactcgaaggaacccttgtttttctgatgggaatgacaaacttacctaacatttgcgccaatctactagcaaatggacaaaaaccggagacaggcgtggcaattgtacagtgggcatcgcgtggtaagcaattaaccgttacaggaactttgcaaacaatcgaacaaaaagtagcagaatctggtatttcatctcctgcgcttatcgtagttggtgatgtagtgagcttacgtccacagcttaacttttttgaagaaatgccacttttccatacaaaagtattacttccaagagcacgcgcaggtaaaagtatgctcgctgaaaaaattcgcgatttaggcggagaagtaacgatgtatccaaatattcaagtgctggatattctgccaacgaaaacaaaagcagaattatgtgaaactagcgaacttcttttcacttcaaaagaggctgtagagcgctttttcgattatctagcaacacttgagttggatattcgttccctaaaaaatacccatcttaccgctatcggaaaacaaacgaaagaagcatttagtgaaaaaggaatcattccagatagttttattaaaagacggagcacagaactaattttagagcatatagctcgttttcaaaaaaatgctagcaacttaattatcggtagtgttgttgatacagcagaggttagtgctatcttatctgaagtgaaaacaaccgaaatgatgccattgtacgatatgcgtccagtgacagagcgcccatttgacctcgaaagttttgaacaaatatgcttttccagttctcgttcagtccaaaatctactcgatgtactaacaaccgaagaaaaagcgattttacaaacgaaaacgattctctcgataggaagattcacgagcgcaaccttgcagtcatttggcattaatgaatttgaagaagctgagaatgctacaccagagagcttaattgaactaattcaaaaaacaaaattagaaggagtaccacaatga

SEQ ID NO: 84934 - protein, 493 aa, Listeria innocua Clip11262
MGKVMLIGAGPGDAQLLTVKGLAALQKADVIVYDRLVEPAMLQERKASCKLIYVGKEPLHHPIPQDEIEQILVREAATNELVVRLKAGDPYVFGRGGEEGETLHKAGIPFEVIPGITSAIGGLAYAGIPVTHRDFASSFHVITGHLKKRRDPLDWEALARLEGTLVFLMGMTNLPNICANLLANGQKPETGVAIVQWASRGKQLTVTGTLQTIEQKVAESGISSPALIVVGDVVSLRPQLNFFEEMPLFHTKVLLPRARAGKSMLAEKIRDLGGEVTMYPNIQVLDILPTKTKAELCETSELLFTSKEAVERFFDYLATLELDIRSLKNTHLTAIGKQTKEAFSEKGIIPDSFIKRRSTELILEHIARFQKNASNLIIGSVVDTAEVSAILSEVKTTEMMPLYDMRPVTERPFDLESFEQICFSSSRSVQNLLDVLTTEEKAILQTKTILSIGRFTSATLQSFGINEFEEAENATPESLIELIQKTKLEGVPQ

SEQ ID NO: 84935 - DNA, 783 bp, Nostoc sp. PCC 7120
  CDS (1)..(783): transl_table=11
atgaaccgcacagacaatcaggggcaaaagggtttgggtaaggtctatttagtaggtgcggggccaggcgatccaggactgatgacggtgaagggcaaaggtatattagaatgtgccgatgtggtcatatatgatgctttagtcagtccagcaattttggcaatgattaatccccaagcagagcagattaatgctggtaagcgcatggggcgacattctctattgcaggacgaaacaactcaactactaattgaacaagcccaaaatcacgctgttgttgtgcggttaaaaggtggtgacccctttattttcggtcgtggcggggaagagatggctgatttaattgcggctggggttccggtggaggttgtgccagggattacatcaggaattgcagcgccagcctatgcagggattcccctgactcatcgcttatatagttcatctgtaacttttgtaactgggcatgagtcggcaggtaagtatcgaccgaaagtcaattggcaagcgatcgcccacggttcagaaacgattgtcatttatatgggtatccacaatctaccttatattgtggaacagttgaaaatggctggtttgagtttagcaacaccaatcgctctagtgcgctggggtacacgtcccgaacaggaagaattaattggcgaattagggacaattgtagaactagtggagaaaacaggatttgaagcgccagcgatcgcagtcattggctctgtagtcaatatgcacagtattttatctgtagcagcccgtgttaattga

SEQ ID NO: 84936 - protein, 260 aa, Nostoc sp. PCC 7120
MNRTDNQGQKGLGKVYLVGAGPGDPGLMTVKGKGILECADVVIYDALVSPAILAMINPQAEQINAGKRMGRHSLLQDETTQLLIEQAQNHAVVVRLKGGDPFIFGRGGEEMADLIAAGVPVEVVPGITSGIAAPAYAGIPLTHRLYSSSVTFVTGHESAGKYRPKVNWQAIAHGSETIVIYMGIHNLPYIVEQLKMAGLSLATPIALVRWGTRPEQEELIGELGTIVELVEKTGFEAPAIAVIGSVVNMHSILSVAARVN

SEQ ID NO: 84937 - DNA, 1554 bp, Nostoc sp. PCC 7120
  CDS (1)..(1554): transl_table=11
atgactcaacaaaatggcaaagtttaccttgtaggtgcggggccgggagatgtggcatacctcacagtgaaagcttataatctactggctacggctcaagtgttggtttatgatgccctagtggatgagcaattgttgcagtgtgtatcatctgattgtctgaaactagatgtagggaagcgtggcggtaaacccagcacaccgcaaacggaaatcaataatttattagttaagttctgccaagaaggtgcattagtcgttaggttgaaatcaggtgacccgtttatttttggtcggagtacctcagaaattgaggctttgaaagcagcaggctgtgaatttgaagtagtaccaggaatttcctcagctatagcagcacctttattagcaggaatcccgcttacagacccggtgatgagtcgttgctttgcagtgctgacagcccatgaaccagaagttttagactgggaggcgctatcaaggttagacaccctagtcatattaatgggtgggaaaaacctcgcagatattgtacatgaacttctacggagagagcgatcgcatctcacacctatagctattattcgctgggcaggaacccccagtcaagaaatttggactggtcaactgggggatattctccaacaaacagcaggtttatctctctccccagtcgttatcgtcattggtgaagtcgtcaggctacgcaagtacctacaacctgagaaaatatttccagagaactcaactacacctatgtccagcaaccaacctctcactggaaaaaccatcctcgtcacccgttcatctggtcaatcgagtcaatttagcgatcgcctaactacacttggcgctacagtaattgaaatgccagcgttagaaataggccccccttctagttggaaagagttagatcaggcgatcgctaatttatctcactttgactggttaattctcacttccaccaacggcgtagattatttctttgaaaggctatatatccaaggtaaagatactcgtgctttagctgggttaaaaatcgctgtcgttggggaaaaaacctcccaaagcctcaaacaaagaggaatccaagcagattttattccccctaactttgtggctgattctttagtagagcattttcccgaatcactactaaataaaaagattttattccccagagtggaaagcggcggtagggaaattttagtcaaagaattatccgcaaaaggtgcagatgtcattgaagtagctgcttatcaatcttgttgtcccactagtattcccctagcagcagaactagccttaaaaaatcgcacaatacatatcattacctttgccagttctaaaaccgtgcagtttttctgtcaacttgcagacaaaatatttcctcacaatattcccaatgctttagaaggaatatgtattgcttccatcggaccccaaacttcaaaaacttgtcataccctattaggtagagtcgatatagaagctgaagaatacaccttagatggattaacccaagcaatcatccaatggtcattaaaaccctaa

SEQ ID NO: 84938 - protein, 517 aa, Nostoc sp. PCC 7120
MTQQNGKVYLVGAGPGDVAYLTVKAYNLLATAQVLVYDALVDEQLLQCVSSDCLKLDVGKRGGKPSTPQTEINNLLVKFCQEGALVVRLKSGDPFIFGRSTSEIEALKAAGCEFEVVPGISSAIAAPLLAGIPLTDPVMSRCFAVLTAHEPEVLDWEALSRLDTLVILMGGKNLADIVHELLRRERSHLTPIAIIRWAGTPSQEIWTGQLGDILQQTAGLSLSPVVIVIGEVVRLRKYLQPEKIFPENSTTPMSSNQPLTGKTILVTRSSGQSSQFSDRLTTLGATVIEMPALEIGPPSSWKELDQAIANLSHFDWLILTSTNGVDYFFERLYIQGKDTRALAGLKIAVVGEKTSQSLKQRGIQADFIPPNFVADSLVEHFPESLLNKKILFPRVESGGREILVKELSAKGADVIEVAAYQSCCPTSIPLAAELALKNRTIHIITFASSKTVQFFCQLADKIFPHNIPNALEGICIASIGPQTSKTCHTLLGRVDIEAEEYTLDGLTQAIIQWSLKP

SEQ ID NO: 84939 - DNA, 810 bp, Ralstonia solanacearum GMI1000
  CDS (1)..(810): transl_table=11
atggaagcgaagaccatccccacgaccaagggccgcgtgagcctgattggtgcgggccccggtgcggcggacctcattacggtgcgcggtgcacggctgttgggcgaagccgaggtcgtgctgcacgacgcgctggtctcgcccgaagtcttccagtattgcccgcaggcggtgctgatcccggtcggcaagcgctgcggcaagcgctcgacggcgcagcgcttcatcaaccggcagctcgtcgatctggcgaccaagtaccagcgcgtggtgcgcctcaagggcggcgacccgatgctgttcggccgcgccgacgaggaactgcaggcgctcgaggccgccggcatcgaatacgaggtcgtgccgggcatcaccgcggcgctggcggcggcttcggcgatccgccagccgctcaccaagcgcggcgtggctcgcagcgtggccttcgtcacgcaggccaaggccgccgaccccgatacgccggcacccgagggcgcggcgccggaacccgccgtgcaggccgattccctggtctactacatgggccgcgaccaggccgcctccatcgccgccgacctgatcgcgcgcggccgcgcgccgtccacgcccgcgtgggtggtcgaggccgccaccatgccgcagcagcgctcggcatgcttcacgctgcagcagatggccgagggggccgccgccgcgtggatccaccccgagcacccgagcctgctgatgatcggcgaggcgtttgccgggcgggccgcgtcggctgcgcccgcgcagtgccccggcgcgccgcacgttctggcggcctga

SEQ ID NO: 84940 - protein, 269 aa, Ralstonia solanacearum GMI1000
MEAKTIPTTKGRVSLIGAGPGAADLITVRGARLLGEAEVVLHDALVSPEVFQYCPQAVLIPVGKRCGKRSTAQRFINRQLVDLATKYQRVVRLKGGDPMLFGRADEELQALEAAGIEYEVVPGITAALAAASAIRQPLTKRGVARSVAFVTQAKAADPDTPAPEGAAPEPAVQADSLVYYMGRDQAASIAADLIARGRAPSTPAWVVEAATMPQQRSACFTLQQMAEGAAAAWIHPEHPSLLMIGEAFAGRAASAAPAQCPGAPHVLAA

SEQ ID NO: 84941 - DNA, 1464 bp, Agrobacterium tumefaciens str. C58
  CDS (1)..(1464): transl_table=11
atgcacaacgaacatgatttttctgctgctggcgaccgcctttcaaccttccccgctttcttccgggtcgagggacggcaggtcgctgttttcggaaatggcgatgaagccttcgcgaaggtgaggctgctcgccaataccaacgcgcatatcgttgcctatgccgatcacccggaagcggattttgcgcgttacatcagcgaaaacagtatcgatcaccgtgctctggccttcgccagcccgttggttgacgacgccaccctggtgttcgccgcaacaggcgatgaagcgctggatcgcgaaatcgtctctgtagcgcgcacgaagaaaatccccgccaatgcggtggatcagcccgaattctgcgacttcttcacgcctgcactcgttgcccgcgcgccagttgccattgccattggcacggaaggggcagggccggttcttgcccagatgatccgcgcgcgtatcgaccagatgctgtcgccgtcgctcggcaagctcgcacgtcttgcggtgcaatatcgtgatgcggccgaggagaacgtgccgaagggcgcgttgcggcgcaatttctggcgccggttcttttcgggcgcggttgcggatgccgttgctctcggtgatacctcttccgcccgtcatgccgcagatcgcctgctgcaatcgccggaacgcagcgaaggtcgcgtctggcttgttggcgccggtccaggtgcagaagatctgctgacgctgcgcgcgcagcgcgtgttgatggaagccgacgtgatcgtctacgacgccctggtgccgcaggcgattgtcgatatgggccgccgcgatgctgaaaggctctctgtcggcaagcgcaagggctgccacagcaagtcgcaaaatgatatcaaccgcctgctggtgcgtctaggcctggaaggaaagcgagtcgtgcggctcaaatccggtgatccgctggtctacggccgcgcgggcgaggaaatggcagcgctgcgcgaggctggtgtcgcttatgaaatcgtgccgggcatcacctccgcctttgccgcggctgcggatttcgaattaccactgacgctgcgcggtgtcgcctcttcgctgattttcaccactggtcacgacctgatgggcgacgttctgcctgattgggcacgacttgccgtctccggggccaccattgccgtctatatgggccgcagtgttgccgcttcggtggccaagcggctgattgatgcgggacttggcgtcgaaaccaccgtcgccgtcatcgaaaatgccagccgcgcggatcgccgcctgctgcacggcacattaaacgatttgcccgacctcgaatatcgtgatgaactgatcggcccggtcatggtcatcatcggcgatgcggtggcgggcgctaatttcgacagatccgaggcgcttgcgcttgcagccaagccggcgagcctcaaacgggagtatgtgaatggttga

SEQ ID NO: 84942 - protein, 487 aa, Agrobacterium tumefaciens str. C58
MHNEHDFSAAGDRLSTFPAFFRVEGRQVAVFGNGDEAFAKVRLLANTNAHIVAYADHPEADFARYISENSIDHRALAFASPLVDDATLVFAATGDEALDREIVSVARTKKIPANAVDQPEFCDFFTPALVARAPVAIAIGTEGAGPVLAQMIRARIDQMLSPSLGKLARLAVQYRDAAEENVPKGALRRNFWRRFFSGAVADAVALGDTSSARHAADRLLQSPERSEGRVWLVGAGPGAEDLLTLRAQRVLMEADVIVYDALVPQAIVDMGRRDAERLSVGKRKGCHSKSQNDINRLLVRLGLEGKRVVRLKSGDPLVYGRAGEEMAALREAGVAYEIVPGITSAFAAAADFELPLTLRGVASSLIFTTGHDLMGDVLPDWARLAVSGATIAVYMGRSVAASVAKRLIDAGLGVETTVAVIENASRADRRLLHGTLNDLPDLEYRDELIGPVMVIIGDAVAGANFDRSEALALAAKPASLKREYVNG

SEQ ID NO: 84943 - DNA, 789 bp, Agrobacterium tumefaciens str. C58
  CDS (1)..(789): transl_table=11
atgtcgataccgcagattttgaacagcatcgccgcaaaaggtccggtctttgaagccggccacgtctggctcgcgggcgcggggccgggcgatgtgcggtatctgacgctcgaagtggcgctcgcgctgtcgcaggccgatatcatcgtgcgcgatgcgctggtgagcgatgatgtcgtggcgctcggtccgcaggcggaagtcgtctttgccggcaagcgtggcggcaagccctccgcgacgcaggatgacattaccgcgtcgctgatcgattttgctctgcagggcaaaaaggtgctgcgactgaagggcggcgatccctttattttcgggcgtggcggcgaagaggcggaggcgcttgtccatgccggcattccgtttcgcatattgccgggcatgacctcgtcgtttaccgcgctcgcttcggcacgcattcctgccaccatgcgcggcatcagccgcgccgtgacgctcgctaccggccacgcggcgggcacagaagaggatctcgactggctggcactggcgaaaacgcaggaacctatcgtcgtttatatggggctgaagaatatcggcactattgccggtcttctgatgcagggtggacgttcgggaaaaacgccggtcgccgtcatcatgtcggcaactactgcgaaagaacggattttcatcggtacattgcaaagcatagctgacgatgcaaaacgggagagcttcgaagcgccggctttgattattatcggcgagattgtttcgatgcgggatcgtcttggagtgtcgggctcatga

SEQ ID NO: 84944 - protein, 262 aa, Agrobacterium tumefaciens str. C58
MSIPQILNSIAAKGPVFEAGHVWLAGAGPGDVRYLTLEVALALSQADIIVRDALVSDDVVALGPQAEVVFAGKRGGKPSATQDDITASLIDFALQGKKVLRLKGGDPFIFGRGGEEAEALVHAGIPFRILPGMTSSFTALASARIPATMRGISRAVTLATGHAAGTEEDLDWLALAKTQEPIVVYMGLKNIGTIAGLLMQGGRSGKTPVAVIMSATTAKERIFIGTLQSIADDAKRESFEAPALIIIGEIVSMRDRLGVSGS

SEQ ID NO: 84945 - DNA, 1428 bp, Agrobacterium tumefaciens str. C58
  CDS (1)..(1428): transl_table=11
atggagaggctcgccaaattgccggtcttctgggggctcgagggtaagcgcgtcgttctgacaggcggatcggacggagcagcctggaaggcggaactgttgttggcctgcggggcgcagcttgatctttattgcgaggaaagcgggctttcggaaagcctcgcgacgctcgtcgcaaaaagcccgatgctgacatggcatgaccgttgctgggatgcagatattttcaaaggggcggaactggcgctggcagattgcgaagctgaagaggaagccggaagattttatcatgccgcgcgggcagcaggcgtgccggtcaatgtcatcgacaagccggaattctgccagttccagtttggttcgatcgtcaatcgctcaccggtggtggtgtcgatctccaccgatggtgccgcgcccattctggcgcaggccatccgccggcgcatcgagacattgctgccgctttcgctcaaggactggggcgctcttgcccagacaattcgagagcgcgttaatctgcggcttgcgcctggcgcggcacggcgctctttctgggaaaagtttgtcgaccgggcttttaccgaaagactggacgagggtagcgaagaacggctgctgaaagatgtagcgacgcggacggggctggcagaatcgggacgtggttttgtgacgctggtgggcgcagggccaggtgatgccgagcttttaaccctgaaagcggtgcgtgccctgcaggcggccgatgtcatcctgttcgacgatctcgtctcagcggaggtgctggaactggcgcggcgggaggccaagcgcatgctggtcggcaagcgcggcggccgcgaaagctgcaaacaggaagacatcaacgacatgatgatccgcttcgccaaggccggtagacgggtggtgcggctgaaatccggcgatccgatgattttcgggcgcgccggcgaggagatcgcggcgctggaagccgaaaatatcccggtcgaggttgtgcccggcatcaccgccgcaagcgccatggcctcacgtctcggcgtttccctgacccatcgcgaccatgcccaatccgttcggttcgtcaccggacattcgcggcagggaaagctgccggaaaatatcgactggcagtccctgtcgaacccttcggtgaccacggtgttttacatgggcgggcgaaccgccgcggacatccagtcttgcctgctcgcccacggcatgcccgcctcgacccccgtggttgtgatgatttccgtcagccgggtgaatgaacaacgctggtgcggttcgctcgcgcaactggttgctgcagtcgagaggctgggcgtgaacgaacccgtgctgatcggtgtcggggatgcgttccgttccgcttctgtcaacggcggagaacagaccgctgctgcgccttttcaaaaagccggctaa

SEQ ID NO: 84946 - protein, 475 aa, Agrobacterium tumefaciens str. C58
MERLAKLPVFWGLEGKRVVLTGGSDGAAWKAELLLACGAQLDLYCEESGLSESLATLVAKSPMLTWHDRCWDADIFKGAELALADCEAEEEAGRFYHAARAAGVPVNVIDKPEFCQFQFGSIVNRSPVVVSISTDGAAPILAQAIRRRIETLLPLSLKDWGALAQTIRERVNLRLAPGAARRSFWEKFVDRAFTERLDEGSEERLLKDVATRTGLAESGRGFVTLVGAGPGDAELLTLKAVRALQAADVILFDDLVSAEVLELARREAKRMLVGKRGGRESCKQEDINDMMIRFAKAGRRVVRLKSGDPMIFGRAGEEIAALEAENIPVEVVPGITAASAMASRLGVSLTHRDHAQSVRFVTGHSRQGKLPENIDWQSLSNPSVTTVFYMGGRTAADIQSCLLAHGMPASTPVVVMISVSRVNEQRWCGSLAQLVAAVERLGVNEPVLIGVGDAFRSASVNGGEQTAAAPFQKAG

SEQ ID NO: 84947 - DNA, 879 bp, Brucella melitensis 16M
  CDS (1)..(879): transl_table=11
atgagcaaagctgacgaagcggctgcctgtgtgatcgcgaaaagcaaagtggctttgcccgtgatggagcccggccatgtctggcttgtcggggccggtccgggcgatcccggtcttttgaccctccatgcggtgaacgctttgcaacaggcggatgtgatcgtctatgacgcgctggtcgatgattcctgtctttcgctgaagaatgctaccgctacgttggaatatgccggcaagcgcggcggcaaaccatcgcccaggcaacgcgacatctcgctgcggctggtggagcttgcacggcaaggcaagaaggtgctgcggctcaagggtggcgatcctttcgtgttcgggcgcggggcggaagaggcgctcacgcttgttgagtatcatgttccgtttcgcatcgtgccgggggtcacagccggggttggcgggcttgcctatgcgggaattgccgccacgcatcgcgatatcaatcaggcggtaacgtttctgaccgggcatgacgcaaccggcgccatgcccgatggcgtcgattgggcgggtattgcccgatcgtcgccggtcatcgtcatgtatatggcgatgaaacatatcggcctcatagccgggcggctgatcgaggctggacgttcgccagatgagccggtggccttcgtctgcaatgccagcctgccggaccagaccgtgcttgaaacaacgttgggccgggctgcaatcgaggtggaagcagccgggctgcaaccgccagccattgtggttgtgggtgaggtggtgcgcttgcgtgccgggctggactggatcggcgcaatggcgggaaaaagccttgtcagcgatccgctgggcaagagaacgcaacagggagtgcagagcgcatga

SEQ ID NO: 84948 - protein, 292 aa, Brucella melitensis 16M
MSKADEAAACVIAKSKVALPVMEPGHVWLVGAGPGDPGLLTLHAVNALQQADVIVYDALVDDSCLSLKNATATLEYAGKRGGKPSPRQRDISLRLVELARQGKKVLRLKGGDPFVFGRGAEEALTLVEYHVPFRIVPGVTAGVGGLAYAGIAATHRDINQAVTFLTGHDATGAMPDGVDWAGIARSSPVIVMYMAMKHIGLIAGRLIEAGRSPDEPVAFVCNASLPDQTVLETTLGRAAIEVEAAGLQPPAIVVVGEVVRLRAGLDWIGAMAGKSLVSDPLGKRTQQGVQSA

SEQ ID NO: 84949 - DNA, 1428 bp, Brucella melitensis 16M
  CDS (1)..(1428): transl_table=11
gtgtctttatcgcaaacgcgacttctggctgattttcctgctttcttccgggtttcgggcgaagtggtggcggtcgtgggtggtggcgaggaagccttgaacaaggctcgcctcgtggcgcagacggctgcgcgcctgcgcatcattgctgaaaaggctgagccgcatcttgccgcttttattgaaagccatggggtggagcatattgcgtcaccctttgcgccggaactgctggatggtgcgaagctcgtttttgtcgcgaccggcgatgaggccggggatcgtgccgccgctgccgccgcaagggcccgcaaaattccggtcaatgtggtggaccgtcccgccctttgcgattttctgacacctgccatcgtcaatcgtgcgccggtcacgatcgccatcggttcgcagggaaccgccccggttttggcgcagatggtgcgtgcgcgtatcgatgcagccttttcgccgcgtcttggcgagcttgcgcattttgcggaaagctggcgccctctggtcgagcgggcgcttccaaaagggcttgcgcggcgtggtttctggcgcacattcttttcgggaaaagtggcccgcgcggtggagagtggcgaccacgaggcggcgcacagggctgcggcggaactgatcgggcaggggcaggacgcttccggccatgtctggctggttggggccggtcccggtgctgaagaccttttgacgctgcgcgcccagcgcgtgctgatggaagccgatgtgatcgttcatgatgcgctggtgccggaaggcgtcatcgccatgggacgccgcgacgccgagcgcctgccggtaggcaagcgcaagggttgccattccaaaagccagggtgagatcaaccgcctgctggtgaagctggggcaggagggcaagcgcgtggtgcgcctgaaatccggcgatccgctggtctttggccgtgcgggtgaggaaatggccgccttgcgcgccgccggaataggctttgaggtggtgccgggcatcacctctgcctttgccgctgccgccgatatggaactgccgctgaccttgcgcggcgtcgcgtcctcgctcgtcttcaccacgggccatgacatgaccggcgatgtgctgcccggctgggcgaagcttgccgtctccggcgctacgattgccgtctatatgggctccacggttgccgcttccgttgcctcgcgtctgattgccgccggcctgcatgaggatacggcggttgcagtggtggaaaatgcaagccgcagcaacaagcgcatgttccatggcacgctgaaggatttgccgcagcttgaaaaccgcaaggagctttccggcccggtcatggtggtcattggcgatgccgtcgccggtgccgccattggcagggcgcaggccctttccctgaaacctgttcccgtcgcagcctga

SEQ ID NO: 84950 - protein, 475 aa, Brucella melitensis 16M
MSLSQTRLLADFPAFFRVSGEVVAVVGGGEEALNKARLVAQTAARLRIIAEKAEPHLAAFIESHGVEHIASPFAPELLDGAKLVFVATGDEAGDRAAAAAARARKIPVNVVDRPALCDFLTPAIVNRAPVTIAIGSQGTAPVLAQMVRARIDAAFSPRLGELAHFAESWRPLVERALPKGLARRGFWRTFFSGKVARAVESGDHEAAHRAAAELIGQGQDASGHVWLVGAGPGAEDLLTLRAQRVLMEADVIVHDALVPEGVIAMGRRDAERLPVGKRKGCHSKSQGEINRLLVKLGQEGKRVVRLKSGDPLVFGRAGEEMAALRAAGIGFEVVPGITSAFAAAADMELPLTLRGVASSLVFTTGHDMTGDVLPGWAKLAVSGATIAVYMGSTVAASVASRLIAAGLHEDTAVAVVENASRSNKRMFHGTLKDLPQLENRKELSGPVMVVIGDAVAGAAIGRAQALSLKPVPVAA

SEQ ID NO: 84951 - DNA, 726 bp, Pyrobaculum aerophilum str. IM2
  CDS (1)..(726): transl_table=11
gtggggtcagtctatatcgtgggggctgggccgggggatccggagctcattacagtaaagggcttgcggcttattgagagagccgacgttattcttcacgacaggcttgtctcaagagagcttttaaaggcggcgaagcccggcgctttgattatagacgtaggtaaaagcccaggcggcgtcgggccgagccaggaggagattaacaaaatgttgttgagctacgccacgagttacgacattgtagtaaggctacacggcggcgatcccttggtgtttgggagggggtttgaggagtgtaaatacctcgtggagaggggcattccctgcgagatagtcccaggcgttaccagcggcttggcggctcctgctaaatactacataccccccgtgctgagaggcgttgccagctccgtggctttagtcacggggagagaggatccctccaaggggacgcgccaagtggattttaaaaaactggcctcggcggtagacaccataattatatatatgggagcctccgttgctggagacgtggcgagggagctaattgccggaggcctatcgcctaatacgcccgtagctgttataaaatccgccttcttccccgacgaggagtttatagtaactacgcttggcgggctctccgccgtgccgaatccgagcataatcgttgtgggcgaggtggtaaagagaggagtagacctatggaagcggaggttgtag

SEQ ID NO: 84952 - protein, 241 aa, Pyrobaculum aerophilum str. IM2
MGSVYIVGAGPGDPELITVKGLRLIERADVILHDRLVSRELLKAAKPGALIIDVGKSPGGVGPSQEEINKMLLSYATSYDIVVRLHGGDPLVFGRGFEECKYLVERGIPCEIVPGVTSGLAAPAKYYIPPVLRGVASSVALVTGREDPSKGTRQVDFKKLASAVDTIIIYMGASVAGDVARELIAGGLSPNTPVAVIKSAFFPDEEFIVTTLGGLSAVPNPSIIVVGEVVKRGVDLWKRRL

SEQ ID NO: 84953 - DNA, 753 bp, Corynebacterium glutamicum ATCC 13032
  CDS (1)..(753): transl_table=11
atgacgatttcccaagaaaaccagccaataatccagccagtctccttaattggtggaggtcctggtgcatgggacttaattacggtgcgtgggatgaatcgccttcaggaggctgatgtcattttggctgatcacttggggcccactgatgagttggaaaaattgtgcgacatcagctcgaagactgttgttgatgtgtccaagcttccgtatgggcggcaggtcactcaggagcgtactaatgagatgcttgttgaatacgcacagcagggactaaaggtggttcgccttaaaggtggtgacccttatgtcttcggtcggggttttgaagagttggagtttttgggcgagcatggaattgaatgcgaggtcattccgggtgtgaccagtgcggtgtccgttccagcggcggcaggtattcctattactaatcggggagtggtgcattcctttaccgtggtgtctggacatttgcctccaggccatccgaagtcactggttgattgggctgcgttggccaaatcgggtggcaccttgtccatcatcatgggtgtgaaaaatgcgggtgcgattgccgaggcgctcatggacggcgggcttgatgcagatactccagcagctgttattcaggaaggcactactgatgcacaacgctcagttcggtgcaccttgggcacattgggtgcagtcatggtggaggaagagattaagcctccagctgtgtatgtcattggacaagttgctggcctctaa

SEQ ID NO: 84954 - protein, 250 aa, Corynebacterium glutamicum ATCC 13032
MTISQENQPIIQPVSLIGGGPGAWDLITVRGMNRLQEADVILADHLGPTDELEKLCDISSKTVVDVSKLPYGRQVTQERTNEMLVEYAQQGLKVVRLKGGDPYVFGRGFEELEFLGEHGIECEVIPGVTSAVSVPAAAGIPITNRGVVHSFTVVSGHLPPGHPKSLVDWAALAKSGGTLSIIMGVKNAGAIAEALMDGGLDADTPAAVIQEGTTDAQRSVRCTLGTLGAVMVEEEIKPPAVYVIGQVAGL

SEQ ID NO: 84955 - DNA, 1458 bp, Fusobacterium nucleatum subsp. nucleatum ATCC 25586
  CDS (1)..(1458): transl_table=11
atgaaaaaaggaaaagcatacataattggagcagggccaggagactttgaactattaactataaaagcaaaaagaataattgaaaatgcagattgcattatatatgatagattaattagtgatgatgtattgaaacttgctaaaaaggatgcagagcttatatatcttggaaaaggaaatactgagggtggtttaattcaagatgaaataaatcaaactcttgtaaataaatgtcttgacggaaaaaatgttgctagagtaaaaggtggagacccttttgtctttggtagaggtggagaagaaattgaagccttatttaaaaatgaaatagaatttgaagttatcccagggataacttcttctatatctgtaccagcctatgcaggaatacctgtaacacatagaggacttgcaaggtcttttcatatttttacagggcatactatggaaaatggaaagtggcataattttgaaaatattgcaaaattagagggaactttaatttttttaatgggagttaaaaatttagatttaatagtcaacgatttaattaaatatggtaaagatagtaaaactcctgttgccattatagaaaaaggtgcaactaaaaatcaaagagtaacagttggaaatttagaaaatattttaggacttgttgaaaaaaataaaataactccacctgccataactataattggagaagtagttaatttaagagaaacttttaaatggtttgaaactgaaaatcttgcaaaaaaaatattagtaacaagagataaaaaacaagctgttgaaatgtctgaaaatatttctaaaaggggaggaattcctgttgaattaccttttatagaaatagaaaatttaaagattgatttaaaagatttagaaaagtataaggctattttatttaattcacctaatggagttaaagcattctttgaaaatataaaagacataagatgtttagcaaatataaaaattggagctgttggagttaaaactaaggaaattttagaaaaatataaaatagttccagattttgttcctaatgaatatttagtagataaattagcagaagaagtggtgaaatacacaaatgaaaatgataatattttaatagttacttctgatatttctccttgtgatacagataaatataattctttatataaaagaaattatgaaaaagttgtagcttataatacaaaaaaattaaaagttgatagagagaaagttcttgaaactttaaaagatatagatattataacttttttaagttcatcaacagtggaagcattttatgaaaatttagatggagatttctttattttaggagataaaaaaattgcctctattggacctatgacaagtgaaactataaaaaaattaggaatgaaagttgattatgaagctgaaaaatatacagctgatggtctgcttgatgtaatttttaaataa

SEQ ID NO: 84956 - protein, 485 aa, Fusobacterium nucleatum subsp. nucleatum ATCC 25586
MKKGKAYIIGAGPGDFELLTIKAKRIIENADCIIYDRLISDDVLKLAKKDAELIYLGKGNTEGGLIQDEINQTLVNKCLDGKNVARVKGGDPFVFGRGGEEIEALFKNEIEFEVIPGITSSISVPAYAGIPVTHRGLARSFHIFTGHTMENGKWHNFENIAKLEGTLIFLMGVKNLDLIVNDLIKYGKDSKTPVAIIEKGATKNQRVTVGNLENILGLVEKNKITPPAITIIGEVVNLRETFKWFETENLAKKILVTRDKKQAVEMSENISKRGGIPVELPFIEIENLKIDLKDLEKYKAILFNSPNGVKAFFENIKDIRCLANIKIGAVGVKTKEILEKYKIVPDFVPNEYLVDKLAEEVVKYTNENDNILIVTSDISPCDTDKYNSLYKRNYEKVVAYNTKKLKVDREKVLETLKDIDIITFLSSSTVEAFYENLDGDFFILGDKKIASIGPMTSETIKKLGMKVDYEAEKYTADGLLDVIFK

SEQ ID NO: 84957 - DNA, 741 bp, Methanopyrus kandleri AV19
  CDS (1)..(741): transl_table=11
gtggccggtaagctcgtactagtaggagcgggacccggagacccggagctgctcacctttaaggcggctcgggccatctcgcgaggcgacgtgatactcaaggaccggctggtaccggatgagataatcaaggaacacgcgccggaggacgccgaagtcatagacgtagggaagaaacccgggggcgaagggtggacccaggaggagatcaacgagctcatagttcgggaagggtccaagggcaagaccgttgtccgcgtgaagagcggagacccgttgatattcggtcgtggggcggaggagatagaggtggccttgaagcacggaatggatgtcgaggtcgtgccgggggtaacctcggccatcggtgtaccgacgtccctaggactccctctcactcatcgaaagtgcgcttcaagcttcgccgtcgccacgggacatgaggatccctcgaaacccgaaaaccgcgttgatttcggcgctctggccgaggccgcggacaccctggtggtactgatgggggcccgacgccttcgggaaatagcccgagagatcctggaaaagcgggggaacgagcccgtcgctatactggagcgaggaactaccgagcaagagcgtgtcaaggtagggacgctggaggacgcggcggaaggcaagctgaaagcccgtccccccgccgttgtcgtggtgggagaggtcgtcaagtggtggagggaggtactgggtagggagacgcgttga

SEQ ID NO: 84958 - protein, 246 aa, Methanopyrus kandleri AV19
MAGKLVLVGAGPGDPELLTFKAARAISRGDVILKDRLVPDEIIKEHAPEDAEVIDVGKKPGGEGWTQEEINELIVREGSKGKTVVRVKSGDPLIFGRGAEEIEVALKHGMDVEVVPGVTSAIGVPTSLGLPLTHRKCASSFAVATGHEDPSKPENRVDFGALAEAADTLVVLMGARRLREIAREILEKRGNEPVAILERGTTEQERVKVGTLEDAAEGKLKARPPAVVVVGEVVKWWREVLGRETR

SEQ ID NO: 84959 - DNA, 768 bp, Methanosarcina acetivorans C2A
  CDS (1)..(768): transl_table=11
atgtcagaaaattacggaaaagtttaccttgtgggttcgggtcccggagaccccgaacttctcactctgaaagcccgccggctcatagacaatgcagaagtaatcgtctacgaccagcttccgggaaaatctatcctgggctccatgccgaaaagtgcggaaaaaatcgatgttgggaaatacgccggaaaccacacgatgacccagtccgaaatcaatgaagtgcttgtctggaaagcaaaggaaggaaagatggtggtccggctgaaaggaggggacccctacgtattcgggaggggaggagaagaagccgaggtgcttgtagcagaaggcatcgaatttgaaatcgtgcccgggatcacctccgcaatcgcagtacctgcttatgcaggaattcctgtaacccacagggaaagcacatcgatggtcacctttataacagggcacgaggaccccacaaaagaagaaagcggcctggactgggagaccctggctaagttcgacgggaccattgtaatctttatgggcgtaaagatgctcaggcggaataccgaagagcttatgaagtatggcaaggacccgaaaacccctgttgcagtcatagagagaggtacccggcctgaccagcgagtaaccgtgggctccctagaaaacatcgctgacctggcagaagaaagaaaagtaaaggctcctgccatcacggttataggcgacgttgtcaacctccacgctattcttggcgagcagatagcaggaaaggatttctga

SEQ ID NO: 84960 - protein, 255 aa, Methanosarcina acetivorans C2A
MSENYGKVYLVGSGPGDPELLTLKARRLIDNAEVIVYDQLPGKSILGSMPKSAEKIDVGKYAGNHTMTQSEINEVLVWKAKEGKMVVRLKGGDPYVFGRGGEEAEVLVAEGIEFEIVPGITSAIAVPAYAGIPVTHRESTSMVTFITGHEDPTKEESGLDWETLAKFDGTIVIFMGVKMLRRNTEELMKYGKDPKTPVAVIERGTRPDQRVTVGSLENIADLAEERKVKAPAITVIGDVVNLHAILGEQIAGKDF

SEQ ID NO: 84961 - DNA, 1233 bp, Streptomyces coelicolor A3(2)
  CDS (1)..(1233): transl_table=11
atggccgaacaccccgcctaccccgtaggcctccgtctcgcgggccgtcgcgtggtcgtcctcggcggcggacaggtcgcccagcgccgcctgcccgccctcgtcgcggccggtgccgacatccgcctcgtctccccggaggcgactccgtccgtcgaggcgatggcggacgcgggcgagatcacctgggagcagcgcccgtacgcggagggggacctcgccgacgcctggtacgccctgatcgccaccagcgacaccgcggccaacgacgccgcctccgccgagggtgagcggcaccgcgtgtggtgcgtccgctccgacgacgccgaccgggccacggcctggaccccggcgaccggacacagcgagggcgtcaccgtcgccgtactcaccaccgaagcacgccaccgcgacccccggcacacggccgccatccgcgacgcggtggtggagggcctgcgcgacggcaccctcgtcgccccgcaccggcgcacccgcacacccggcgtcgccctggtcggcggcggtcccggcgacccggacctgatcaccgtccgcggccgccgcctgctcgccgaggccgacgtcgtcatcgccgaccggctcggcccccgcgacctgctcgccgagctgccgccgcacgtcgaggtcatcgacgccgccaagatcccgtacggccgcttcatggcccaggaggccatcaacaacgcgctgatcgagcacgcccggcagggcaaggcggtcgtacggctgaagggcggcgacccgttcgtcttcggccggggcatggaggaggcgcaggcgctggccgaggcgggcatcgcgtgcaccgtcgtccccggcatctccagcacgatctcggtccccggtgcggccggcatcccggtcacccaccggggcgtcgcccacgagttcaccgtggtcagcgggcacgtcgcccccgacgacgagcgctccctggtcgactggccgtccctcgcgaagctgaccggcacgctcgtgatcctcatgggcgtcgacaagatcggcaagatcgccgggaccctgatcgcgcacggcaagtcccccgacaccccggtcgccctcgtccaggagggcaccacggccgcccagcgccgggtggacgcgaccctcgccaccgtcgccgaggtggccgtcgccgaagaggtcaggccgcccgccgtcatcgtcgtcggcgaggtcgtcgccgtcggcccgcacgggacggcctga

SEQ ID NO: 84962 - protein, 410 aa, Streptomyces coelicolor A3(2)
MAEHPAYPVGLRLAGRRVVVLGGGQVAQRRLPALVAAGADIRLVSPEATPSVEAMADAGEITWEQRPYAEGDLADAWYALIATSDTAANDAASAEGERHRVWCVRSDDADRATAWTPATGHSEGVTVAVLTTEARHRDPRHTAAIRDAVVEGLRDGTLVAPHRRTRTPGVALVGGGPGDPDLITVRGRRLLAEADVVIADRLGPRDLLAELPPHVEVIDAAKIPYGRFMAQEAINNALIEHARQGKAVVRLKGGDPFVFGRGMEEAQALAEAGIACTVVPGISSTISVPGAAGIPVTHRGVAHEFTVVSGHVAPDDERSLVDWPSLAKLTGTLVILMGVDKIGKIAGTLIAHGKSPDTPVALVQEGTTAAQRRVDATLATVAEVAVAEEVRPPAVIVVGEVVAVGPHGTA

SEQ ID NO: 84963 - DNA, 768 bp, Methanosarcina mazei Go1
  CDS (1)..(768): transl_table=11
atgtcaggaaattacggaaaagtctatcttgtgggttccggtccaggtgaccctgagcttcttaccctgaaagcccgccggctgatcgacagtgctgaagtcataatctatgaccagcttccgggaaaaacaattttaagctcaatgccggaaaccgcagaaaaaattgatgtaggaaaatatgcgggcaaccataccatgactcagtctgagatcaacgatgtacttgtgcggaaagcaaaagagggtaaaatggtagtccgcctgaaagggggagacccttacgttttcggaagaggaggagaggaagccgaggtacttgtagcagaaggtatagaatttgaagtcgtgccagggatcacttccgcaatcgcagtgcctgcctacgccggaattcctgtaacccacagggaaagcacttcaatggttactttcataaccggccacgaagacccaacaaaggaagaaagcggactcgactggaagactctggcaaagtttaacggaaccattgtaatcttcatgggcgtaaagatgctcaggcgaaatgcagaagagctcataaagcacggcaaagaccctgaaacccctgtggcagtcattgaaaggggaacccggcctgaccagagggtaaccgtgggcacccttgaaaatatcgccgacctggcggaagagagaaaagtaaaagcccctgccatcacagtcgtaggagaggtagttaacctgcacgaaattctaggggaacagcttacaggggctgagttttaa

SEQ ID NO: 84964 - protein, 255 aa, Methanosarcina mazei Go1
MSGNYGKVYLVGSGPGDPELLTLKARRLIDSAEVIIYDQLPGKTILSSMPETAEKIDVGKYAGNHTMTQSEINDVLVRKAKEGKMVVRLKGGDPYVFGRGGEEAEVLVAEGIEFEVVPGITSAIAVPAYAGIPVTHRESTSMVTFITGHEDPTKEESGLDWKTLAKFNGTIVIFMGVKMLRRNAEELIKHGKDPETPVAVIERGTRPDQRVTVGTLENIADLAEERKVKAPAITVVGEVVNLHEILGEQLTGAEF

SEQ ID NO: 84965 - DNA, 777 bp, Xanthomonas campestris pv. campestris str. ATCC 33913
  CDS (1)..(777): transl_table=11
atgatcaactcgtcctcccgctgccgtgatgtggtgttgctctccgccggccccggcgacctggaactgctcaccatcaaggcggtgaaggcgctggccactgcgcaggtgctgctgctcgacgatctggccaacccgcagatcgtggaactggcaccgcaggcgcgcgtgatccgggtgggcaagcgcggtggctgccgctccacgccgcaggacttcatctgccggctgatgcgccgctacgcgctgcaaggcgtgcaggtggtgcgcgtcaagggcggcgatgccttgttgttcgggcgtgcgggcgaagagatcgcctttctgcgcgccgccggggtgggcgtgcaggtgatcaacggggtcagcgcggcgttcgcggccgcggcggcgctggaggtctcgctgacccatcgtgcgcattgccacggcatcaccttcgtcaccgcgcatacgcacgaccacggcgggccgaactggggcgcgctggcggccagcggcaccacgctgggcatctacatggggctgcgccgggccgacgcagtggccagtgccttgctggcgcatctgccggccacgacaccggcggccatcgtgcaggcggccacgcgcgccgagcagcagcgccggctcaccacgctgggcgagctgggccgcactgctgccacgctgccgccggacctgcccacgctgttgctggtgggtggggcaatggccgaagccaatgccgcgtgcgatgactcgcttggcctgctgctgcagcaggccgtgggttga

SEQ ID NO: 84966 - protein, 258 aa, Xanthomonas campestris pv. campestris str. ATCC 33913
MINSSSRCRDVVLLSAGPGDLELLTIKAVKALATAQVLLLDDLANPQIVELAPQARVIRVGKRGGCRSTPQDFICRLMRRYALQGVQVVRVKGGDALLFGRAGEEIAFLRAAGVGVQVINGVSAAFAAAAALEVSLTHRAHCHGITFVTAHTHDHGGPNWGALAASGTTLGIYMGLRRADAVASALLAHLPATTPAAIVQAATRAEQQRRLTTLGELGRTAATLPPDLPTLLLVGGAMAEANAACDDSLGLLLQQAVG

SEQ ID NO: 84967 - DNA, 1206 bp, Xanthomonas campestris pv. campestris str. ATCC 33913
  CDS (1)..(1206): transl_table=11
gtgactgccctgttcccgctccttgccgatctgcgtggccgtgccgtcctggtggtcggcggcggccgcgctgccgaaagcgccaccgccagcctgctgcaggccggcgcggtgccgctggtgggcgcgccggaactgacaccggcgttgcgcggctgggcgcagtccggtcaggtgcgctggctggtgggcagctttgacccgcagtggctggcgctgccggaccagccggtctggctgaccattgcggccagcgatgtgccggccgtgaacgctgccttgcgcagcgtcgccggcgcacaacggctgctgacccatgaggccgctcccgcagcggcagcattgccgcccatcgccagcgaaccaccgccaccagcaagccgcctcaccctcacgcccggcagcgtggcgctggtcggtgccggcccgggcgaccccggcctgctcacccgcaatgcggtgcgcgcgctgcggcaggccgaggtgatcctgtacgaccgcctggtcagcccgcagatcctgcgtctggcccagcgcgcagcgcgctgcatcgaagtgggcaaatccgcccaaggccacagcacgcgccaggagcagatccatgcgctgatgctcgaacatgcgcgcgccgggcggcgcgtggtgcgcctgaaaggtggcgacccgttcgtgtttggccgcggcggcgaagagctcgaattcctgcacgcgcacggcatcggtttccaggtggtgcccggcatcactgccgcagtggcctgtgccgcctacgccggtatcccgctcacccaccgcgaccatgcgcaatcgctgcgcctgatcaccgcgcactgcaaggattcgctggacacgctggactggcacgcattgggccaggagcggcagacgctggccttctacatgggcgtggccggcctggatagcatccagcagcgcctgctgcaggccggccgcgccgcggacacgccatttgcgctggtcgaaaatggctcgcgcccggaacagcgcgtggtcaccggcaccttgtcgcagctggccgccaccgcgcgcttgcatgcggtgcgctcgcccgcactgttgatcctgggcgacgtcgccgcgctgtcgcagtcgctgcactggttcggcgccgcgccgctcaccggccagcccgcgcactcacccatcgcaacgccccacgcgcccacactcgcccacgcagcctga

SEQ ID NO: 84968 - protein, 401 aa, Xanthomonas campestris pv. campestris str. ATCC 33913
MTALFPLLADLRGRAVLVVGGGRAAESATASLLQAGAVPLVGAPELTPALRGWAQSGQVRWLVGSFDPQWLALPDQPVWLTIAASDVPAVNAALRSVAGAQRLLTHEAAPAAAALPPIASEPPPPASRLTLTPGSVALVGAGPGDPGLLTRNAVRALRQAEVILYDRLVSPQILRLAQRAARCIEVGKSAQGHSTRQEQIHALMLEHARAGRRVVRLKGGDPFVFGRGGEELEFLHAHGIGFQVVPGITAAVACAAYAGIPLTHRDHAQSLRLITAHCKDSLDTLDWHALGQERQTLAFYMGVAGLDSIQQRLLQAGRAADTPFALVENGSRPEQRVVTGTLSQLAATARLHAVRSPALLILGDVAALSQSLHWFGAAPLTGQPAHSPIATPHAPTLAHAA

SEQ ID NO: 84969 - DNA, 1272 bp, Xanthomonas axonopodis pv. citri str. 306
  CDS (1)..(1272): transl_table=11
atgaagtcatttccgacggctataagccggcgttacggtctggccctcccccaacgatgctgccgaaccgtgactcctgcgttcccgctgcttgccgacctgcgtggccgtgccgtcctggtggtcggcggcggcgccgacgccgagcgcgccactggccagttgctgcaggccggtgcgctgccgctggtcggcgcgcccgagctcacggcgcagttgcggcactgggcgcaggcaggccggctgcgctggttggccggtcggttcgacccggcatggctggcgcagtccgaccaaccgctatggctcaccatcgccgccagcgaatcggcagcgctcaacgacgccctgcgccaagcagcaagtgcccatcggctgctgacccacgccgcagcgcctgcggcgtccgcaacggttcctgcgcgctccacaggaccgcgcagcgcgatcggcacgctggcgcccggcaacgtgagcctggtcggcgccggccccggcgatccgggcctgctcacccggcatgcgctgcgcgcactgcgtcaggccgaggtggtgctgcacgaccgcctggtcagcccgcagatcctgcgcctggctcggcacggcgcgcacctcatcgaggtcggcaagtcggcgcaaggccatagcacccggcaggaacagattcacggcctgatgctggaacacgcccgggccggtcgccgcgtggtacggctgaagggcggcgacccattcgtgttcggccgcggcggcgaagagctggaattcctgcgcgcgcacggcatcggcttccaggtgattcccggcatcaccgccgccatcgcctgcgccgcctatgccggcattccgctcacccaccgcgaccatgcgcaatcgctgcggctgatcaccgcgcactgcaaggattcgctggacacgctggattggcaggcgcttggccaggaacgccagaccctggcgttctacatgggcgtggccggtctggacgccatccagcaacgtctgctgcaggccggccgcgcacccaccaccccgttcgcgctggtcgaaaacggctcgcgcccgcagcaacgggtaatcaccggtacgctcgccagcctggccgccagcgcccggcagcacgccgtgaccgcaccggcgctgctgatcctgggcgaggtaacggcactggcgcagacgctgcattggttcggcagcgcgccgctgagcgcctcgccgccgcactcacccggcgcaacgccccacacgcccacactggcccacgcagcctga

SEQ ID NO: 84970 - protein, 423 aa, Xanthomonas axonopodis pv. citri str. 306
MKSFPTAISRRYGLALPQRCCRTVTPAFPLLADLRGRAVLVVGGGADAERATGQLLQAGALPLVGAPELTAQLRHWAQAGRLRWLAGRFDPAWLAQSDQPLWLTIAASESAALNDALRQAASAHRLLTHAAAPAASATVPARSTGPRSAIGTLAPGNVSLVGAGPGDPGLLTRHALRALRQAEVVLHDRLVSPQILRLARHGAHLIEVGKSAQGHSTRQEQIHGLMLEHARAGRRVVRLKGGDPFVFGRGGEELEFLRAHGIGFQVIPGITAAIACAAYAGIPLTHRDHAQSLRLITAHCKDSLDTLDWQALGQERQTLAFYMGVAGLDAIQQRLLQAGRAPTTPFALVENGSRPQQRVITGTLASLAASARQHAVTAPALLILGEVTALAQTLHWFGSAPLSASPPHSPGATPHTPTLAHAA

SEQ ID NO: 84971 - DNA, 804 bp, Chlorobium tepidum TLS
  CDS (1)..(804): transl_table=11
atgagcgacggtaagggtaaggtttttctggtgggcggcgggccgggcgatccggagctgctgaccatacgtgcacacaacgtgctgcaatcggcggacgtggtgctgcatgacgcgctcatcagcccggaaattcttgcgttgctgccgaacggcgcggagcggatcagcgtcggcaagcgcctcggcgacggcaaggatcagaccgaccgccagacgaagatcaacgacctgctcgtccgtcacgccagagagggtaaatgcgtcgtacggctgaaggctggcgaccccttcatgttcgggcgcggcatcgaggaggtgcgtgcgctcgccgccgccggagtgccgtgcgaggtggtgccgggcatcacgacgggcatcgccgccgctgacctctgcggcatcccgctcaccgaacgccaccggaacagctcggtgctcttctgcaccggccacacggcggactactcgcttgggcatttcgcggcggtgatcgagctgatgaaggcgggtacgccgctggtgatgtacatgggtttcgagaatctggacaagatcgtcgagcgcttcatcgactccgggctgtcgccggaactcccggcgtgcgcggtttcgcgcgtctcgcggagcgaccagacgctggttgcggccacgatcggcacgattgtccagcagattcgcgagcgcgagctatccctgccggtggtgttcatcatcggcgaacacgccgttcccgagggggcgtgcccagatcagtccgatgcgtccgatccgtctgatcaaaatcacaatgaacagcaatga

SEQ ID NO: 84972 - protein, 267 aa, Chlorobium tepidum TLS
MSDGKGKVFLVGGGPGDPELLTIRAHNVLQSADVVLHDALISPEILALLPNGAERISVGKRLGDGKDQTDRQTKINDLLVRHAREGKCVVRLKAGDPFMFGRGIEEVRALAAAGVPCEVVPGITTGIAAADLCGIPLTERHRNSSVLFCTGHTADYSLGHFAAVIELMKAGTPLVMYMGFENLDKIVERFIDSGLSPELPACAVSRVSRSDQTLVAATIGTIVQQIRERELSLPVVFIIGEHAVPEGACPDQSDASDPSDQNHNEQQ

SEQ ID NO: 84973 - DNA, 1386 bp, Chlorobium tepidum TLS
  CDS (1)..(1386): transl_table=11
atgaccggttcaatccatacagagccgcaggccgcggcaaagagaggctacgtctatatcgcgggcgcggggccgggtgatccggagctgctcacgctcaaggctgatcgggtgctgcgcggggcggacgtgattctcttcgacgatctcgtgctgccccagatgcttgaaccctacaaggccgagaagatctataccggcaagcgcaaggatgcgcatcacttcgcgcaggacgaaatcaaccaggagatcgtgcgccatgcgctcatgggcaagaccgtcgtgaggctcaagggcggcgatcccttcatctttggacgcggcggcgaggagatcgagacgctgcgccagcacggcatcggttacgagatcattcccggcatcaccgcagcgcacggagctagcgcctacagtgaaattccgctcaccatgcgcaaggtctcctcgtcggtcgccttctgcaccggccatccggtcaacagcatccaggtgcccgataccgacacgatcgtctattacatggtggcctcgaacgtgcacgacgtgctcgacaaggtggcggcgtcggggcggagcggcgagacgatggtcgccgtggttcagaacgccacgcgctataaccagcgcgtcattaccagcacgctcgacgagttccgcaagcgcgaaaaggcggtttactcaccggcgttgcttatcatcggccagaacatcagccagtacatcgaagagaactggttctcccgcaagaagaaggtgctcatgaccggcgaagcgccgaaaaaatacccgcctgccgactacatcaccgtgcccttcccgtgccaacaggtggcgggcgcggatctcggcgcggtgaaagcctgcatcgaggggatcgaccggttctcgatgctctttttccagaaccgcttcgccgtccggtatttctttaaatatctcttcgaacatggccgcgacgtgaggcatctggcgcatctcgtcatctgcaccgcgaaccgttcggtcgcctcggcgttgcaggagtacggcatcattcccgactgctgccttgaccgggagggcgtggatgcgatcgccgcgatgctgcgcaaggaggaactcaccggccagcgcattcttctgtcgggcgcggagcatgtcgatgagctggtggccgggcaactccgtgaggggggcaacgaggtcacgccgctcgtcgtttacgtgcatggcgcgcaggatcaggtcgagaagatcgacctcgacttcatcgacgaaatctacttcgcctcggcagattgcgtgaaaaaattcagagggatgtacgacgcgattcccgcccgaatcgccgtcaccccggcggacgagcgcaccgcagaggagatgcggcgtcagtttggcggatag

SEQ ID NO: 84974 - protein, 461 aa, Chlorobium tepidum TLS
MTGSIHTEPQAAAKRGYVYIAGAGPGDPELLTLKADRVLRGADVILFDDLVLPQMLEPYKAEKIYTGKRKDAHHFAQDEINQEIVRHALMGKTVVRLKGGDPFIFGRGGEEIETLRQHGIGYEIIPGITAAHGASAYSEIPLTMRKVSSSVAFCTGHPVNSIQVPDTDTIVYYMVASNVHDVLDKVAASGRSGETMVAVVQNATRYNQRVITSTLDEFRKREKAVYSPALLIIGQNISQYIEENWFSRKKKVLMTGEAPKKYPPADYITVPFPCQQVAGADLGAVKACIEGIDRFSMLFFQNRFAVRYFFKYLFEHGRDVRHLAHLVICTANRSVASALQEYGIIPDCCLDREGVDAIAAMLRKEELTGQRILLSGAEHVDELVAGQLREGGNEVTPLVVYVHGAQDQVEKIDLDFIDEIYFASADCVKKFRGMYDAIPARIAVTPADERTAEEMRRQFGG

SEQ ID NO: 84975 - DNA, 1449 bp, Yersinia pestis KIM
  CDS (1)..(1449): transl_table=11
ttgccctgcaacagactgaaaactgaaggattgccgatggactacttcccgatcttctgccaactgcaacacaaagcctgcctgctggttggcggtggagaaattgctgaacgcaaagcgcggctgttattggatgcaggtgcgttagtcaccgtcaatgcctgcgagttcaccccccagtttcaccattgggcagatcaggggcaactttcattaatcagcggtgaatttgtgcccgaactgttggccgataaatggctggtcattgccgccaccgatcagttgtccgtcaatgcattagtctatcaaagcgccaaccagcaacggatcttctgcaatgtggttgatgatccgaaacgcaccagctttatcatgccatctattattgatcgctcccccatcatgatcgcggtctcctctggcggtaaagcgcccgtgttggcccggttgttacgcgaaaaactggaagccctgttaccgcaacatttggggcaactggcggggaacttacgccagcgggtgaagcagcattttaccgtgatgaccgaacgtcgccggttctgggaaaagttgctgacccacgaccgtctggcacaatctttagccaataacgatcacgtgcaagccgatcaacatgttgaacaactgtttagtgctccactcactgatcgtggcgaagtggtgttggtcggtgcagggccgggagatgctggtttattgaccttaaaagggttgcagcagatccaacaggccgatgtggtggtctatgaccggctggtctccgatgaggtgatgaatttggtccggcgtgatgccgagcgcatctttgtcggcaaacaatcgggccaccactgtgtgccgcaagagcaaatcaaccaaatcctgttacagcaggcacagtcaggtaagcgggtagtgcgtttgaaaggtggcgacccgtttatttttggtcggggcggcgaagagttagaagagttggcgggctacggtattcctttctccgtggtcccaggcattaccgccgcatccggttgctcggcttacagtggtattccactgactcaccgtgaccatgcgcaaagcgtgcgactggtcaccggtcatgccaaaaaagagggccagttagattgggcaaatctggcggcagagaaacaaacattagttttttatatggggctatcgcaggctggagagatccaacagcaattgattcaacatggtatgccagcgaccactcaggttgccttagtcgaaaacggcacctcacggcatcagcgggttgtgagtggcgagttaagccaattggccttactctcccaacaggtcagtagccctagcctgattatcgtcggtagcgtggtcagcctacgggaaaaactgaattggttttccagccgccatcacgatgatcagcccaaagtgactgaatgtgtggctcatgttggttaa

SEQ ID NO: 84976 - protein, 482 aa, Yersinia pestis KIM
MPCNRLKTEGLPMDYFPIFCQLQHKACLLVGGGEIAERKARLLLDAGALVTVNACEFTPQFHHWADQGQLSLISGEFVPELLADKWLVIAATDQLSVNALVYQSANQQRIFCNVVDDPKRTSFIMPSIIDRSPIMIAVSSGGKAPVLARLLREKLEALLPQHLGQLAGNLRQRVKQHFTVMTERRRFWEKLLTHDRLAQSLANNDHVQADQHVEQLFSAPLTDRGEVVLVGAGPGDAGLLTLKGLQQIQQADVVVYDRLVSDEVMNLVRRDAERIFVGKQSGHHCVPQEQINQILLQQAQSGKRVVRLKGGDPFIFGRGGEELEELAGYGIPFSVVPGITAASGCSAYSGIPLTHRDHAQSVRLVTGHAKKEGQLDWANLAAEKQTLVFYMGLSQAGEIQQQLIQHGMPATTQVALVENGTSRHQRVVSGELSQLALLSQQVSSPSLIIVGSVVSLREKLNWFSSRHHDDQPKVTECVAHVG

SEQ ID NO: 84977 - DNA, 768 bp, Thermosynechococcus elongatus BP-1
  CDS (1)..(768): transl_table=11
atgagttcatcacaattaattggcaaagtatatttggtgggcgcaggccccggcgatgcggggctactgacggtgcgtgccaagaacctgctggagtgggcggatgtggtgctctacgatgccctaattagccccgaaattcttaacttgatcaaccccaaagcagaaaaaattcatgtgggcaagcggcggggcaaccataccctttcccaaccagagatttgccgcctgttgattgagttggcacagcgccatgcggtcattgtccgcctcaagggcggtgatccgtttgtctttggccgagggggtgaagagtgtttggcgctaatcgaggctggcattactgtggaggtggtgccggggattaccagtggcgtggctgcacctgcctatgcgcacattcccctcacccatcgggattttagttcttcggtggtctttgtcactggccatgaggctgctggtcgctaccaaccccgcgtcaattggccagctctggcaactgcggtggatacgatcgtgatttacatggggctccaccatctgggggaaattgtgccgcaattgctggcaggggggcgatcgccccagactcccttggcctttattgaatcagggacaacaccgcaacaacgggtagtggtgacaaccctagagcgcgcgatcgccacctatgacgaggcccagattcaaacgcctgctttgattgtcattggtgaggtcattcacctgcgctcccagctagggggaagtctccaccaagcctga

SEQ ID NO: 84978 - protein, 255 aa, Thermosynechococcus elongatus BP-1
MSSSQLIGKVYLVGAGPGDAGLLTVRAKNLLEWADVVLYDALISPEILNLINPKAEKIHVGKRRGNHTLSQPEICRLLIELAQRHAVIVRLKGGDPFVFGRGGEECLALIEAGITVEVVPGITSGVAAPAYAHIPLTHRDFSSSVVFVTGHEAAGRYQPRVNWPALATAVDTIVIYMGLHHLGEIVPQLLAGGRSPQTPLAFIESGTTPQQRVVVTTLERAIATYDEAQIQTPALIVIGEVIHLRSQLGGSLHQA

SEQ ID NO: 84979 - DNA, 774 bp, Oceanobacillus iheyensis HTE831
  CDS (1)..(774): transl_table=11
atggggaaggtttatttagttggagccggtcctggtgacccggaactgattacgctcaaaggcttaaaagcaattcagcaatctgacattatcttatatgacagactagtgaatgaggagttattaggctacgcttctaagaatgccgagttgatatattgtggtaagagtccagaacaccattcacttacgcaggacaatataaacaaattactctgcgcatatgcgaaggaggataaaattgtcacgagactaaaaggcggtgatccgtttatctttgggagaggtggggaagaagcgatggttctaagagaaaatggattgatttttgaaatcattcctggaattacttctggttccgctgctcctacctatgctggtatacctttaacccatcgggactacagttcttccgtatcttttgtatctggggttagtaaaactggtgaggagcatgaaagatattgggaacatcttgcgaaaagttcagatactctttgcatttatatgggagtgaaaagcttaccagagatttgtgaacgattaatccgctatggccgtcattccacaacaccaattgcagttattcattggggaacgactgaaatgcaacaaaccgtcacagggacattggaagatatcacccatgttacagaaaagttaaaaaatccttccatgattattatcggtgaagtagtgcgacttagggatgagattcaatggtttaatgaggaaacgatagaacactttaatccagaagtggttattggatag

SEQ ID NO: 84980 - protein, 257 aa, Oceanobacillus iheyensis HTE831
MGKVYLVGAGPGDPELITLKGLKAIQQSDIILYDRLVNEELLGYASKNAELIYCGKSPEHHSLTQDNINKLLCAYAKEDKIVTRLKGGDPFIFGRGGEEAMVLRENGLIFEIIPGITSGSAAPTYAGIPLTHRDYSSSVSFVSGVSKTGEEHERYWEHLAKSSDTLCIYMGVKSLPEICERLIRYGRHSTTPIAVIHWGTTEMQQTVTGTLEDITHVTEKLKNPSMIIIGEVVRLRDEIQWFNEETIEHFNPEVVIG

SEQ ID NO: 84981 - DNA, 1434 bp, Brucella suis 1330
  CDS (1)..(1434): transl_table=11
atgcccgtgtctttatcgcaaacgcgacttctggctgattttcctgctttcttccgggtttcgggcgaagtggtggcggtcgtgggtggtggcgaggaagccttgaacaaggctcgcctcgtggcgcagacggctgcgcgcctgcgcatcattgctgaaaaggctgagccgcatcttgccgcttttattgaaagccatggggtggagcatattgcgtcaccctttgcgccggaactgctggatggtgcgaagctcgtttttgtcgcgaccggcgatgaggccggggatcgtgccgccgctgccgccgcaagggcccgcaaaattccggtcaatgtggtggaccgtcctgccctttgcgattttctgacacctgccatcgtcaatcgtgcgccggtcacgatcgccatcggttcgcagggaaccgccccggttttggcgcagatggtgcgtgcgcgtatcgatgcagccttttcgccgcgtcttggcgagcttgcgcattttgcggaaagctggcgccctctggtcgagcgggcgcttccaaaagggcttgcgcggcgtggtttctggcgcacattcttttcgggaaaagtggcccgcgcggtggagagtggcgaccacgaggcggcgcacagggctgcggcggaactgatcgggcaggggcaggacgcttccggccatgtctggctggttggggccggtcccggtgctgaagaccttttgacgctgcgcgcccagcgcgtgctgatggaagccgatgtgatcgttcatgatgcgctggtgccggaaggcgtcatcgccatgggacgccgcgacgccgagcgcctgccggtcggcaagcgcaagggttgccattccaaaagccaggatgagatcaaccgcctgctggtgaagctggggcaggagggcaagcgcgtggtgcgcctgaaatccggcgatccgctggtctttggccgtgcgggtgaggaaatggccgccttgcgcgccgccggaataggctttgaggtggtgccgggcatcacctctgcctttgccgctgccgccgatatggaactgccgctgaccttgcgcggcgtcgcgtcctcgctcgtcttcaccacgggccatgacatgaccggcgatgtgctgcccggctgggcgaagcttgccgtctccggcgctacgattgccgtctatatgggctccacggttgccgcttccgttgcctcgcgtctgattgccgccggcctgcatgaggatacggcggttgcagtggtggaaaatgcaagccgcagcaacaagcgcatgttccatggcacgctgaaggatttgccgcagcttgaaaaccgcaaggagctttccggcccggtcatggtggtcattggcgatgccgtcgccggtgccgccatcggcagggcgcaggccctttccctgaaacctgttcccgtcgcagcctga

SEQ ID NO: 84982 - protein, 477 aa, Brucella suis 1330
MPVSLSQTRLLADFPAFFRVSGEVVAVVGGGEEALNKARLVAQTAARLRIIAEKAEPHLAAFIESHGVEHIASPFAPELLDGAKLVFVATGDEAGDRAAAAAARARKIPVNVVDRPALCDFLTPAIVNRAPVTIAIGSQGTAPVLAQMVRARIDAAFSPRLGELAHFAESWRPLVERALPKGLARRGFWRTFFSGKVARAVESGDHEAAHRAAAELIGQGQDASGHVWLVGAGPGAEDLLTLRAQRVLMEADVIVHDALVPEGVIAMGRRDAERLPVGKRKGCHSKSQDEINRLLVKLGQEGKRVVRLKSGDPLVFGRAGEEMAALRAAGIGFEVVPGITSAFAAAADMELPLTLRGVASSLVFTTGHDMTGDVLPGWAKLAVSGATIAVYMGSTVAASVASRLIAAGLHEDTAVAVVENASRSNKRMFHGTLKDLPQLENRKELSGPVMVVIGDAVAGAAIGRAQALSLKPVPVAA

SEQ ID NO: 84983 - DNA, 849 bp, Brucella suis 1330
  CDS (1)..(849): transl_table=11
gtgatcgcgaaaagcaaagtggctttgcccgtgatggagcccggccatgtctggcttgtcggggccggtccgggcgatcccggtcttttgaccctccatgcggtgaacgctttgcaacaggcggatgtgatcgtctatgacgcgctggtcgatgattcctgtctttcgctgaagaatgcgaccgccacgttggaatatgccggcaagcgcggcggcaaaccatcgcccaggcaacgcgacatctcgctgcggctggtggagcttgcacggcaaggcaagaaggtgctgcggctcaagggtggcgatcctttcgtgttcgggcgcggggcggaagaggcgctcacgcttgttgagtatcatgttccgtttcgcatcgtgccgggggtcacagccggggttggcgggcttgcctatgcgggaattgccgccacgcatcgcgatatcaatcaggcggtaacgtttctgaccgggcatgacgcaaccggcgccatgcccgatggcgtcgattgggcgggtattgcccgatcgtcgccggtcatcgtcatgtatatggcgatgaaacatatcggcctcatagccgggcggctgatcgaggctggacgttcgccagatgagccggtggccttcgtctgcaatgccagcctgccggaccagaccgtgcttgaaacaacgttgggccgggctgcaatcgaggtggaagcagccgggctgcaaccgccagccattgtggttgtgggtgaggtggtgcgcttgcgtgccgggctggactggatcggcgcaatggcgggaaaaagccttgtcagcgatccgctgggcaagagaacgcaacagggagtgcagagcgcatga

SEQ ID NO: 84984 - protein, 282 aa, Brucella suis 1330
MIAKSKVALPVMEPGHVWLVGAGPGDPGLLTLHAVNALQQADVIVYDALVDDSCLSLKNATATLEYAGKRGGKPSPRQRDISLRLVELARQGKKVLRLKGGDPFVFGRGAEEALTLVEYHVPFRIVPGVTAGVGGLAYAGIAATHRDINQAVTFLTGHDATGAMPDGVDWAGIARSSPVIVMYMAMKHIGLIAGRLIEAGRSPDEPVAFVCNASLPDQTVLETTLGRAAIEVEAAGLQPPAIVVVGEVVRLRAGLDWIGAMAGKSLVSDPLGKRTQQGVQSA

SEQ ID NO: 84985 - DNA, 1374 bp, Shigella flexneri 2a str. 301
  CDS (1)..(1374): transl_table=11
gtggatcatttgcctatattttgccaattacgcgatcgcgactgtctgattgtcggcggtggtgatgtcgcggaacgcaaagcaaggttgctgttagacgcaggcgctcgcttaacggtgaatgcattagcgtttattccacagttcaccgcatgggcagatgcaggcatgttaaccctcgtcgaagggccatttgatgaaagccttctcgacacctgctggctggcgattgcagcgacggatgatgacacgcttaaccagcgcgtcagcgaagccgctgaagctcgtcgcatcttctgtaacgtagttgatgcgccgaaagccgccagctttattatgccgtcgattattgaccgctcaccgctaatggtagcggtctcctctggcggcacctctccggttctggcgcgcctgttgcgcgaaaaactcgaatcactgctgccgttgcatctgggccaggtggcgaaatatgccgggcaattacgcgggcgagtgaaacaacagttcgccacgatgagtgagcgtcgccgtttctgggagaaattgttcgttaacgaccgcctggcgcagtcgctggcaaacaacgatcagaaagccattactgaaacgaccgaacagttaatcaacgaaccgctcgaccatcgcggtgaagtggtgctggttggtgcaggtccgggcgatgccgggctgctgacgctgaaaggactgcaacaaattcagcaggcagatgtggtggtctacgaccgtctggtttctgacgatattatgaatctggtacgccgcgatgctgatcgcgttttcgtcggcaaacgcgcgggataccactgtgtaccgcaggaagagattaaccagatcctgctgcgggaagcgcaaaaaggcaaacgcgtggtgcggctgaaaggtggcgatccgtttatttttggccgtggtggcgaagagctggaaacactgtgcaacgcgggtattccgttctcggtggttccgggtattaccgcagcttctggttgctctgcctattcgggtattccactcacgcatcgcgattatgcccagagcgtacgcttaattaccggacacttaaaaaccggtggcgagctggactgggaaaacctggcggcagaaaaacagacgctggtgttctatatggggttgaatcaggccgcgactattcagcaaaagctgattgaacacggtatgcctggcgaaatgccggtggcaattgtcgaaaacggaacggcagtcacgcagcgcgtgattgacggtacgctcacgcaactcggtgaacttgctcagcaaatgaacagtccatcgctaattattattggtcgggttgttggcctgcgcgataaactgaactggttctccaatcattaa

SEQ ID NO: 84986 - protein, 457 aa, Shigella flexneri 2a str. 301
MDHLPIFCQLRDRDCLIVGGGDVAERKARLLLDAGARLTVNALAFIPQFTAWADAGMLTLVEGPFDESLLDTCWLAIAATDDDTLNQRVSEAAEARRIFCNVVDAPKAASFIMPSIIDRSPLMVAVSSGGTSPVLARLLREKLESLLPLHLGQVAKYAGQLRGRVKQQFATMSERRRFWEKLFVNDRLAQSLANNDQKAITETTEQLINEPLDHRGEVVLVGAGPGDAGLLTLKGLQQIQQADVVVYDRLVSDDIMNLVRRDADRVFVGKRAGYHCVPQEEINQILLREAQKGKRVVRLKGGDPFIFGRGGEELETLCNAGIPFSVVPGITAASGCSAYSGIPLTHRDYAQSVRLITGHLKTGGELDWENLAAEKQTLVFYMGLNQAATIQQKLIEHGMPGEMPVAIVENGTAVTQRVIDGTLTQLGELAQQMNSPSLIIIGRVVGLRDKLNWFSNH

SEQ ID NO: 84987 - DNA, 840 bp, Leptospira interrogans serovar Lai str. 56601
  CDS (1)..(840): transl_table=11
gtgttaaacgctgatacaaataaagattctcgtcccggcaaagtttaccttgttggggccggtccgggaaatccggaagatctgactttgcgcgcgtatcgaattttaaccaaagccgaaattattttgtacgacgctcttttagacccttcttttctcgaaatttttccaaagtccgcgatcgttcactacgtcggaaaaagatccggagcacattccgcgactcaagaggagatcaatcaacttcttctttcttatgctctttccggaaaaaacgtagttcgtttgaaaggaggagatccttttgtttttggaagaggtggcgaagaattaattacattagttaatcataatataaaatatgaaattgttccaggcgtaagctctttgaacgcaggttcttcttttgcaggttttcctttgactcataggggtttgtcccgccaggttttgatcatggacggtcatacggttctgaacgaggaaactgattgggagtggtttgccaaattcaaaggaacgattgcgctttttatgggaacctcttcccttccaaaaatcgcgaatttacttttacaacatggtagttcggccgatctgccggttgcacttgttgaaaatgcttctttagaaaattttaatattcaaatctgttctttaaaagaagctgcaaattcttatttggaaaagaaaacacaaggccctgggattatttacattggaaaagtggttcgatttttggaaaataagaaattgacttcgaccttttctcagttttcgaaagaatcttttttagggcaaatttcttccgagatccaaggaggaaagaatgagtcgtaa

SEQ ID NO: 84988 - protein, 279 aa, Leptospira interrogans serovar Lai str. 56601
MLNADTNKDSRPGKVYLVGAGPGNPEDLTLRAYRILTKAEIILYDALLDPSFLEIFPKSAIVHYVGKRSGAHSATQEEINQLLLSYALSGKNVVRLKGGDPFVFGRGGEELITLVNHNIKYEIVPGVSSLNAGSSFAGFPLTHRGLSRQVLIMDGHTVLNEETDWEWFAKFKGTIALFMGTSSLPKIANLLLQHGSSADLPVALVENASLENFNIQICSLKEAANSYLEKKTQGPGIIYIGKVVRFLENKKLTSTFSQFSKESFLGQISSEIQGGKNES

SEQ ID NO: 84989 - DNA, 831 bp, Shewanella oneidensis MR-1
  CDS (1)..(831): transl_table=11
atggaaattttatcgttaccgggccaaagcgcgaagggtaaagtctggctggttggcgcgggtcccggagatgttgagctattaactctcaaggcatggcgtatcctaaagtctgccgatgcggtgttgtatgatgcgctcgtcagtcaagatattctcgatctaatccccaaagatgctgaaaaaattgctgtcggtaagcgcgctggcaagcatagtgcggcgcaagacgacataaatcagttactggtgactaaagcctatacccgtaaaaatgtcgtgcgcttaaaggggggcgatccctttatttttggtcgcggcggtgaagagctacaaaccttggttgatgcgggcgttgaatttgaagtggtacccggtatcaccgccgccagtggcacagcggcttatacaggcattccattaacgcatcgggattatgctcaaggagtgacgtttattactggccattgtcagttagaaagccgtccaatggattggcagggttatgctaatccaaacaatactttggtcgtatatatgggaattttgaacgcgggcgtgatccgagctggattaatcaacgcaggtcgtagcccacaaacaccagtggcaattgtttcgaaggcgactactcagtcgcagcaacgttttattgggcaattagattcactcgaacaactcgcggccgatcccaagttgcagatgcccgccttaatgatcattggtgaagtggtggggttgtctgaaaccttaaattggtttcaacctaaggccgaaggctcgcagtcgcttgaagcgttaaatgctcccaaagtcgcagtaaaaatttag

SEQ ID NO: 84990 - protein, 276 aa, Shewanella oneidensis MR-1
MEILSLPGQSAKGKVWLVGAGPGDVELLTLKAWRILKSADAVLYDALVSQDILDLIPKDAEKIAVGKRAGKHSAAQDDINQLLVTKAYTRKNVVRLKGGDPFIFGRGGEELQTLVDAGVEFEVVPGITAASGTAAYTGIPLTHRDYAQGVTFITGHCQLESRPMDWQGYANPNNTLVVYMGILNAGVIRAGLINAGRSPQTPVAIVSKATTQSQQRFIGQLDSLEQLAADPKLQMPALMIIGEVVGLSETLNWFQPKAEGSQSLEALNAPKVAVKI

SEQ ID NO: 84991 - DNA, 741 bp, Pseudomonas putida KT2440
  CDS (1)..(741): transl_table=11
atgaatgcaaaagtatggctggtcggtgccggccctggtgaccctgaactgctcaccctcaaggcagtgcgtgcgttgcagcaagccgccgtggtcatggtagacgacctcgtcaacccggcagtgctcgagcattgcccgcaggcccggataatgaccgtgggcaagcgcggcggctgccgctctacaccgcaagcgttcattcagcgcctgatgctgcgccacgcgcgacagggccgttgcgtggtgcggctcaagggcggcgacccttgcattttcggccgtggcggtgaagaggcgctgtggttgcaagggcatggcatcgaagtggaggtgatcaatggcatcaccgccggcctggccggggccacccaatgcgggattcccctgacttcacggggcgtgagccgaggggtgacgctggtgacggcgcacacccaggacgatagcgagctgaactgggcggccttggctcagggcgggacaacgctggtggtctacatgggagtggcgcggctggaacaagtgcgccaaggattgctggcggggggcatggcgccgggaatgccggtggcgatgatcgaaaatgcctcgttgccgcagcagcgggagtgcagaagcgatgtgcagggaatggtggaagctgcgcgggcgtttggtttgcgtagcccggcaatcctggtgattggggaggtggttggggagcagcaggctatggggcggatcgcaatcgcaggctga

SEQ ID NO: 84992 - protein, 246 aa, Pseudomonas putida KT2440
MNAKVWLVGAGPGDPELLTLKAVRALQQAAVVMVDDLVNPAVLEHCPQARIMTVGKRGGCRSTPQAFIQRLMLRHARQGRCVVRLKGGDPCIFGRGGEEALWLQGHGIEVEVINGITAGLAGATQCGIPLTSRGVSRGVTLVTAHTQDDSELNWAALAQGGTTLVVYMGVARLEQVRQGLLAGGMAPGMPVAMIENASLPQQRECRSDVQGMVEAARAFGLRSPAILVIGEVVGEQQAMGRIAIAG

SEQ ID NO: 84993 - DNA, 753 bp, Pseudomonas putida KT2440
  CDS (1)..(753): transl_table=11
atgaccatctactttatcggtgccggccccggcgacccggagctgatcacggtcaagggccaacggctgattcgccagtgcccggtgatcatttatgccggttcactggtacccgccgccgtgctcgaaggccaccaggccgaaaccgtgatcaacagcgccgaactgcacctggaacagatcatcgccgccatgcgcagcgcacatgaaaaaggtcaggatgtggcccgggtgcacagcggcgaccccagcctgtacggcgccatcggtgagcagattcgccacctgcaagcgctgggcatcgattaccagatcatccccggcgttaccgccacggcagcgagcgccgccctgctcggctgcgagctgacgttgcctcaagtggcgcagaccgtgatcctcacccgctatggcgacagctcgcccatgccgccgggtgagcagttgggtgacctggcgcgccatggcagcaccctggcaattcatctgggggtcaagcacctgtcgcgcattgtcgctgagttgatgccgcactacggcgcgcactgcccggttgcggtggtgcatcgggccacctggccagaccaggattgggtgtgcggcaacctcggcgatatcgtcgaacgcgtagcggccaaggatttccggcgcacggcgctgattctggtaggccacgtcctgggggatacaccgttcgccgaatcggcgttgtaccgtgccgggcatgcccacctgtaccgacctggcgactga

SEQ ID NO: 84994 - protein, 250 aa, Pseudomonas putida KT2440
MTIYFIGAGPGDPELITVKGQRLIRQCPVIIYAGSLVPAAVLEGHQAETVINSAELHLEQIIAAMRSAHEKGQDVARVHSGDPSLYGAIGEQIRHLQALGIDYQIIPGVTATAASAALLGCELTLPQVAQTVILTRYGDSSPMPPGEQLGDLARHGSTLAIHLGVKHLSRIVAELMPHYGAHCPVAVVHRATWPDQDWVCGNLGDIVERVAAKDFRRTALILVGHVLGDTPFAESALYRAGHAHLYRPGD

SEQ ID NO: 84995 - DNA, 1392 bp, Pseudomonas putida KT2440
  CDS (1)..(1392): transl_table=11
atggattacctgccgctgttccacaagctgcagggcggccgcgtgctggtcgtcggtggcggtgagatcgccttgcgcaaggcgcgcctgctggccgatgccggcggcgtgctgcgcgtggtggcgccggacgtcgacggccagttggccgcgttggcccgggaaggtggcggtgaggtgctggtgcgtggctatcaggcagccgacctggtcggttgccggctggtgatcgcggcgactgacgaccctgggctgaatgcccaggtgtcggccgatgcgcaggcccttagcctgccggtcaatgtggtggatgcgccggccctgtgtacggtgatcttcccggcgatcgtggaccgttcgccgctggtaatcgctgtttccagcggcggtgacgccccggtactggcacgcctgattcgagccaagctcgaggcgtggatcccttcggcctatggtgagctggccgggctggctgcacgcttccggcacaaggtcaaatccctgtacccggacgtcaaccagcgtcgcggcttttgggaaaccgtgttccaggggccgatcgccgagcgtcagctggccgggcagggggctgaagccgaacgtctgttgcaggcgatggtggacggcgcaccggtgcagcagggtggtgaggtgtacttggttggtgcaggcccgggtgatccggacttgctgaccttccgtgccttgcgcctgatgcagcaggccgacgtggtgctgtacgaccgcctggtcgcacccgccatcatcgatatgtgtcgtcgtgatgccgagcgcatctatgtaggcaagcgccgcgctgatcattcagtgccgcaggaccagatcaaccgcctgttggtcgatctggctcggcagggcaagcgggtgctgcgcctgaagggtggcgacccgttcatcttcggccggggcggcgaagagatcgaagagctggccgagcatggcattccgttccaggtggtgccaggcattacggcggccagcggctgctccgcgtatggcggcattccgctgactcaccgcgactatgcccagtcggtgcgcttcgtcaccgggcacctcaaggacggcaccagcaacctgccttggaatgacctggtggcgccggcgcagaccttggtgttctacatgggcttggtgggcttgccgaccatctgtgccgagctgattcgccacgggcgcgccgcgagtaccccggcggcgttggtgcagcaggggaccacgcgtaatcagcgcgtgttcaccggcaccttggcggacttgccagacctggtggcccagcatgaggtgcatgcgccgaccctggtgattgtgggggaagtggtgcagttgcgtgacaagctggcctggttcgaaggttcgcagaacagctga

SEQ ID NO: 84996 - protein, 463 aa, Pseudomonas putida KT2440
MDYLPLFHKLQGGRVLVVGGGEIALRKARLLADAGGVLRVVAPDVDGQLAALAREGGGEVLVRGYQAADLVGCRLVIAATDDPGLNAQVSADAQALSLPVNVVDAPALCTVIFPAIVDRSPLVIAVSSGGDAPVLARLIRAKLEAWIPSAYGELAGLAARFRHKVKSLYPDVNQRRGFWETVFQGPIAERQLAGQGAEAERLLQAMVDGAPVQQGGEVYLVGAGPGDPDLLTFRALRLMQQADVVLYDRLVAPAIIDMCRRDAERIYVGKRRADHSVPQDQINRLLVDLARQGKRVLRLKGGDPFIFGRGGEEIEELAEHGIPFQVVPGITAASGCSAYGGIPLTHRDYAQSVRFVTGHLKDGTSNLPWNDLVAPAQTLVFYMGLVGLPTICAELIRHGRAASTPAALVQQGTTRNQRVFTGTLADLPDLVAQHEVHAPTLVIVGEVVQLRDKLAWFEGSQNS

SEQ ID NO: 84997 - DNA, 1374 bp, Escherichia coli CFT073
  CDS (1)..(1374): transl_table=11
gtggatcatttgcctatattttgccaattacgcgatcgcgactgtctgattgtcggcggtggtgatgtcgcggaacgcaaagcaaggttgctgttagacgcaggcgctcgcttaacggtgaatgcattagcgtttattccacagttcaccgcatgggcagatgcaggcatgttaaccctcgtcgaagggccatttgatgaaagccttctcgacacctgctggctggcgattgcagcgacagatgatgacgcgcttaaccagcgcgtcagcgaagccgctgaagctcgtcgcatcttctgtaacgtggtcgatgcgccgaaagccgccagctttattatgccgtcgattattgaccgctcgccgctcatggtagcggtctcctctggcggcacctctccggttctggcgcgcctgttgcgcgaaaaactcgaatcactgctgccgttacatctgggccaggtagcgaaatacgccgggcaattacgcgggcgagtgaaacaacagttcgccacgatgggtgagcgtcgccgtttctgggagaaattattcgttaacgaccgcctggcgcagtcgctggccaacaacgatcagaaagccattactgaaaccaccgaacagttaatcaacgaaccgctcgaccatcgcggtgaagtggtgctggttggtgcaggtccgggcgatgccggactgctgacactgaaaggtctgcaacaaattcagcaggcagatgtggtggtctacgaccgtctggtttctgacgatattatgaatctggtacgccgcgatgctgatcgcgttttcgtcggcaaacgcgcgggataccactgcgtaccgcaggaagagattaaccagatcctgctgcgggaagcgcaaaaaggtaaacgcgtggtgcgtctgaaaggcggcgatccgtttattttcgggcgtggcggagaagagctggaaacactgtgcaacgcgggtattccattctcggtggttccgggtattaccgcagcttctggttgctctgcctattcgggtattccgctcacgcatcgcgattatgcccagagcgtacgcttaattactggacacttaaaaaccggtggcgagctggactgggaaaacctggcggcagaaaaacagacgctggtgttttatatggggctgaatcaggctgcaactattcagcaaaagctgattgaatacggtatgcctggtgaaatgccggtggcaattgtcgaaaacggaacggcagtcacgcagcgcgtgattgacggtacgctcacgcagctgggcgaactggcgcagcaaatgaacagtccatcgctaattattattggtcgggttgttggcctgcgcgataaattgaactggttctctaaccattaa

SEQ ID NO: 84998 - protein, 457 aa, Escherichia coli CFT073
MDHLPIFCQLRDRDCLIVGGGDVAERKARLLLDAGARLTVNALAFIPQFTAWADAGMLTLVEGPFDESLLDTCWLAIAATDDDALNQRVSEAAEARRIFCNVVDAPKAASFIMPSIIDRSPLMVAVSSGGTSPVLARLLREKLESLLPLHLGQVAKYAGQLRGRVKQQFATMGERRRFWEKLFVNDRLAQSLANNDQKAITETTEQLINEPLDHRGEVVLVGAGPGDAGLLTLKGLQQIQQADVVVYDRLVSDDIMNLVRRDADRVFVGKRAGYHCVPQEEINQILLREAQKGKRVVRLKGGDPFIFGRGGEELETLCNAGIPFSVVPGITAASGCSAYSGIPLTHRDYAQSVRLITGHLKTGGELDWENLAAEKQTLVFYMGLNQAATIQQKLIEYGMPGEMPVAIVENGTAVTQRVIDGTLTQLGELAQQMNSPSLIIIGRVVGLRDKLNWFSNH

SEQ ID NO: 84999 - DNA, 894 bp, Vibrio vulnificus CMCP6
  CDS (1)..(894): transl_table=11
atggatacaagcatcagcactcaattacgcgatcgcagctatagcgaacatgcgattagttaccactcatcacgcaggttgcaagccaagaatcgcccaacgtcaacagggatggccgcatcgggttttgtctacttagtcggcgcagggccgggcgatccggaaatgctgacggtgaaggcggtcaacgcgctgcaacagtgcgatctgttggtttatgaccgcttggtcagcaaagaaattctggcactggtgccagagcacgtggacaaaatttatgtgggtaaacgctgtggtgagccgagtctaaagcaagatgagatcaatcagatcctcgtcagctttgcgcaacttggacgcaaaatcgttcggctcaaagggggtgaccccttcatctttggccgtggcggcgaagaggcgttagcgctggttgagcacaacattcattactgtgtggttcccggcatcacggcggccatcggctgcgcggcgagctgtgccattccgctcacacaccgagaagttgcgcgcagtgtcacgctcgtgactggcactgtggtgacggggtcacttcctgcttggtctgcaattgttgaagcggggcaaacattggtgttttacatggggttggaatcggcacgcgcgatcgagcaaggcttgctcgggcagggggttcgtgcagattttcccgttgcgatcgtgacgcaaggttcgacacctgagcagaaaacgtacgtgacaaccctggccacgttggaaaaaacagcagtggcgctaaaaggggtgagtccggcattgatcattatgggggaagtcgtcaaactgcgggaaagattaaagaccacccttgcggcagtcgcgcccatggctaacgcctcatttgttaatgagtga

SEQ ID NO: 85000 - protein, 297 aa, Vibrio vulnificus CMCP6
MDTSISTQLRDRSYSEHAISYHSSRRLQAKNRPTSTGMAASGFVYLVGAGPGDPEMLTVKAVNALQQCDLLVYDRLVSKEILALVPEHVDKIYVGKRCGEPSLKQDEINQILVSFAQLGRKIVRLKGGDPFIFGRGGEEALALVEHNIHYCVVPGITAAIGCAASCAIPLTHREVARSVTLVTGTVVTGSLPAWSAIVEAGQTLVFYMGLESARAIEQGLLGQGVRADFPVAIVTQGSTPEQKTYVTTLATLEKTAVALKGVSPALIIMGEVVKLRERLKTTLAAVAPMANASFVNE

SEQ ID NO: 85001 - DNA, 936 bp, Staphylococcus epidermidis ATCC 12228
  CDS (1)..(936): transl_table=11
atgtctataacttatcctggcacagtatatctaatcggtgcaggaccaggcaatccaaacttattaactaaaaaagctgaacggttaattagatcagctgacgtgattttatttgatcgtctcgtaaatcctttcatcttacagtatgcttcttctcaaacaaaagtgatcaatgtgggaaagaaaccttattgtaaacacattcaacaagaggagattaatcaaaaaattgttgaagtagctaatcaatatcaatgtgtggtgagactaaagggaggagatcctgcgatttttggtagaattacagaagaagtacaaacattagaaaatcatcatattcattacgagattgtccctggtgtgacatcagcaagtgctgccgtagcaactatgaatatgggattaacgatgcgttctatcgcaccgagtgtgactttctcaactggtcattttaaagattcggttaatcacgatacggatattaggaacttgattaatggaggcactttagctatttatatgggtgtgaaaagattaggtcaaattattaaacaaattgaatcatatacgaatgaagactaccccattgcaatagtgtttaatgcttcctgctacaatgaaaagattgttataggtcatttaagtacgattgaagaacaattggtttctcaacaactagaaggtcatccaggcatatgcattttaggtaatatacttgatgacattaatcgtacgttattgaataataataagaatgacaagggaaatctatatttaatcaagggagataaagaacgtgcaattgcaaaggctgaaactttatatgatgaaggaatccaatgtctgattgattttgaccatagctaccacatttctcaacaaaacgtgtataacgaaatgattaaacacaagagtattaaaacaatatatgtataa

SEQ ID NO: 85002 - protein, 311 aa, Staphylococcus epidermidis ATCC 12228
MSITYPGTVYLIGAGPGNPNLLTKKAERLIRSADVILFDRLVNPFILQYASSQTKVINVGKKPYCKHIQQEEINQKIVEVANQYQCVVRLKGGDPAIFGRITEEVQTLENHHIHYEIVPGVTSASAAVATMNMGLTMRSIAPSVTFSTGHFKDSVNHDTDIRNLINGGTLAIYMGVKRLGQIIKQIESYTNEDYPIAIVFNASCYNEKIVIGHLSTIEEQLVSQQLEGHPGICILGNILDDINRTLLNNNKNDKGNLYLIKGDKERAIAKAETLYDEGIQCLIDFDHSYHISQQNVYNEMIKHKSIKTIYV

SEQ ID NO: 85003 - DNA, 789 bp, Staphylococcus epidermidis ATCC 12228
  CDS (1)..(789): transl_table=11
gtggttcatatggggaaagtatatttagttggagctggacctggtgatccagaattaataacgttaaaaggtttaaaagccattaaagaagccgatgtcatcctttatgaccgacttgtaaataaagaaatacttaattatgcttctccttctactaagttcttctattgcggtaaggatcctcacaggcactccttaccgcaggaagaaacaaataaaatgatggtaaccttagccaaaaaagggcacatagttacacgtttaaagggtggcgatccatttgtttttggacgtggcggagaagaagcagaggaattagcatgtcataatatccactttgaaattatacctggaattacatcgggaattgcagcaccagcatatgctggaattccagtaacacatcgtgattatagttcttctgtagcatttgtaactgcagtgaataaacctggtatggataaaggcaaatactggcaacatttggccaatggtcctgaaactttatgtatttatatgggggttaagagactcagtgaaatttgtgagttgttaatacaatatggtcgttcgtcagaaacaccagtagctctcgtgcatatgggaacgtcaaaacagcaaatgacagtgactgggacactcgatacaattcaagaacgagcacatcatattcagaatccagcaatgattattgtaggcgaagtggttaagatgagagaaaaaattaattggtttgtagaacaggcaactgttcaaaatgaaacgttaacggaaatgtcatcaacttag

SEQ ID NO: 85004 - protein, 262 aa, Staphylococcus epidermidis ATCC 12228
MVHMGKVYLVGAGPGDPELITLKGLKAIKEADVILYDRLVNKEILNYASPSTKFFYCGKDPHRHSLPQEETNKMMVTLAKKGHIVTRLKGGDPFVFGRGGEEAEELACHNIHFEIIPGITSGIAAPAYAGIPVTHRDYSSSVAFVTAVNKPGMDKGKYWQHLANGPETLCIYMGVKRLSEICELLIQYGRSSETPVALVHMGTSKQQMTVTGTLDTIQERAHHIQNPAMIIVGEVVKMREKINWFVEQATVQNETLTEMSST

SEQ ID NO: 85005 - DNA, 1425 bp, Bradyrhizobium japonicum USDA 110
  CDS (1)..(1425): transl_table=11
atgcggttcttgccggtgttcctcgatctcaaggccggtccggtggtcctcatcggtgcgggtgagcttttgcgcgccaagctgcgcgtgctcactgcggccggtgcgcgcatccgcgtgcacgcgatcgacggcaatcaggacatgggccttagctccgaggacgcggcgcgcgtcgacatcgcgaccggcgatccgctcatcgccgatctctcaggcgtcatcgcgatcgtctgcgccggggcgggcgatgtcggcgttgcgatgtcggcgcgggcgaaggcgctcggcctgccggtcaacgtcatggacgatctcgagcattccagcttcatcttcccggccatcgtcgatcgcggcgatgtcgtggtcgcggtcggcaccggcggcacctctccggtggtggcgcggcgcgtgcgcgagaagatcgaggcgctgctgcctgcgcgcatcggcgagctcgccgagttcatcggcgacttccgcaaatccatcaacgagcgcattgccgagtttccgctgcgccgccgcttctgggagcgcgtcatcgacggcccgatcggtggtgccgtgctcgccggccgcaagggcgaggcggacgcggcgctcaaggccattgccgatcccgccgcgttcgcgcgtgccgacaagccggaaggctccgttgcgctggtcggcgccggtccgggcgatcccgatcttctcactatcaaggcgctgcgcgcgctccaggacgccgacatcgtcttccatgacgagctggtctcgcgcgaaattctcgatcgcatccgccgcgacacgacgcgcgttgcggtcggccgccgcgtcggcaagcccggcatcggccaggacgccatcaacacgcgcatgatcgaggccgcgcagtcaggtcagcgcgtggtgcggctgaagggcggcgatcccttcgtgttcggccgcggcggcgaagaggtcgaagcgctgcgctcggcgggcgttgcctattcgatcattcccggcatcaccgccgggctcggcggcgccgccgatttcgaggtgccgctcacctatcgtcatgaagcgacccgcatcaccttcctcaccgcgcacagggcgcgcgatgcggaagccgtggactggtcgacgctcaccgacaccaagatgaccgtcgtggtctacatgggcatgaccgcggcaccggccgtgcgcgcaggcctgttcgccgccggccgctcgcccgaaacgccggtcggcgtgttcgcccgcgtcacgcggcccgatgcgcaaggcgcgatcggcacgctgcgcgatcttcccgagctcgtgcggcggacccatggcggtcctgccatgctcatcatcggcgacgtggtccggcatgccggctcgcttcgccgccagacacccaagcaaatcatctccgacctattggatgctgccgaatga

SEQ ID NO: 85006 - protein, 474 aa, Bradyrhizobium japonicum USDA 110
MRFLPVFLDLKAGPVVLIGAGELLRAKLRVLTAAGARIRVHAIDGNQDMGLSSEDAARVDIATGDPLIADLSGVIAIVCAGAGDVGVAMSARAKALGLPVNVMDDLEHSSFIFPAIVDRGDVVVAVGTGGTSPVVARRVREKIEALLPARIGELAEFIGDFRKSINERIAEFPLRRRFWERVIDGPIGGAVLAGRKGEADAALKAIADPAAFARADKPEGSVALVGAGPGDPDLLTIKALRALQDADIVFHDELVSREILDRIRRDTTRVAVGRRVGKPGIGQDAINTRMIEAAQSGQRVVRLKGGDPFVFGRGGEEVEALRSAGVAYSIIPGITAGLGGAADFEVPLTYRHEATRITFLTAHRARDAEAVDWSTLTDTKMTVVVYMGMTAAPAVRAGLFAAGRSPETPVGVFARVTRPDAQGAIGTLRDLPELVRRTHGGPAMLIIGDVVRHAGSLRRQTPKQIISDLLDAAE

SEQ ID NO: 85007 - DNA, 732 bp, Bradyrhizobium japonicum USDA 110
  CDS (1)..(732): transl_table=11
gtgagcggttttgtctccttcatctccgccggtcccggcgaccccgagcttctcacgctcaagggtgccgcgcggctgcgcgaggccgatgtcgtgctttatgacgacctcgcgtccggcgcgattctcgatctcgcccgtcccggcgccaatctcgttgcggtcgggaaacgggccgggcggccctcgaccaagcagcatcacgtcaaccgcctgctggtcgattatgccgcgaccggcgcgcgcgtggtgcggttgaagtcgggcgacgccggcatcttcggacggctcgaggaggagctcgaaacgctgcgcgaggccggcatcggctacgagatcgttcccggcgtcacctcggcctgcgtggccgctgcgcaagccggcatccccctgacccggcgccacacctcgcgtcgcgtgcagttcgtgaccggagccgacgtcaccggcgagctgccgcaaaacctgaactgggcggcactggccgatccggaggcgactaccgtggtctatatgggccgccgcacctttccggcgcttgccgcaaaattgatcgcgcacggcctcgcgccgaccaccccggcgctgttcgccgaatccctcggccgccccgacgagcggctggtccgcaccacgattgccgagcttgccgagcagcttgcgcggggcggggctgcctcgacggccgccgtgatcctgttcggcgcactggcgggagaatacccgtcatga

SEQ ID NO: 85008 - protein, 243 aa, Bradyrhizobium japonicum USDA 110
MSGFVSFISAGPGDPELLTLKGAARLREADVVLYDDLASGAILDLARPGANLVAVGKRAGRPSTKQHHVNRLLVDYAATGARVVRLKSGDAGIFGRLEEELETLREAGIGYEIVPGVTSACVAAAQAGIPLTRRHTSRRVQFVTGADVTGELPQNLNWAALADPEATTVVYMGRRTFPALAAKLIAHGLAPTTPALFAESLGRPDERLVRTTIAELAEQLARGGAASTAAVILFGALAGEYPS

SEQ ID NO: 85009 - DNA, 1437 bp, Xylella fastidiosa Temecula1
  CDS (1)..(1437): transl_table=11
gtgactgccaacgttctgttccccttatttgccaacctacacgaccgcgccgtcctggtggtcggcggcggtaaggttgcagaacgcaagacagaggcattactcaaagtgggcgccttgccgattatcggcgccccctctctgaccgcatcgttacagcgctgggccgaaaccggtcgcatcacgtggcggcaagggacgtttgaaaacagctggctgcaagaagatatttggttggtcatcgccgccaccgatcaacccgaggtgaaccacgccgcggcgcgcgcagcacatgcgcaacggttattcgtcaacgtggtcgacgacattgcactctccaacgtgcaggtcccggccgtggtcgaacgcggcccgttgcggatcgcgatttctagcggcggtggcgcaccgatggtggcacgctatctgcgacaacaactggaaagcctcattgacgatagttggggacgactgaccacactgttcgcgcaacgccgcgacactatccgcgcccgctatccaaacatagaagcacgccgccgcttctttgaaacccaactcgccggcccactccaacgattgctacgcaagcaacgccacgcagaggccgaagcagtgctggaagcagcactcgccaagactccccccacggagtccggcagcgtcaccctggtgggcgctggcgccggcgacgccgggctactgaccttaaatgcactgcgcgccttgaatgaagccgacatcatcctctacgaccgcctggtcagcgacaccgtgttacagatggcacggcgcgatgcggagcagatcgaagtaggcaaatccgcaacgggccacagtgtgcgccaagaagacattcacaccctgatgctgcaacacgcccgtgctggtcagcgtgtcgtacggctgaaaggtggcgatccattcgtcttcggtcgtggtggcgaggaactggaattcttacgtacccacggcatcccctatgaggtcatccccggaatcaccgccgcccttgcctgtgccgcctatgcgggtatccccttgacccaccgcgaccacgcccaatcgctatgcctgatcaccgcccattgccaatcctccctagataccctgaactgggctgcactggcacaagaacgtcaaacgctggcgttctacatgggcgtggcgggactacccaccatacagcaacgcctgtgtgaggctggacggaccgaaacaacgccttttgcactgatcgaaaatggcgcacgcgcgcaacagcgggtgctcacaggaacgctgaaaacactcgcgcacaccgcacagacatacgccgtgcgtccccccgcactgctgatcctcggcgaagtcaccgcgctggccgaacacctgcattggttcggcaccacaccattatctgccccatgccccccacgcacgcatcctataagctga

SEQ ID NO: 85010 - protein, 478 aa, Xylella fastidiosa Temecula1
MTANVLFPLFANLHDRAVLVVGGGKVAERKTEALLKVGALPIIGAPSLTASLQRWAETGRITWRQGTFENSWLQEDIWLVIAATDQPEVNHAAARAAHAQRLFVNVVDDIALSNVQVPAVVERGPLRIAISSGGGAPMVARYLRQQLESLIDDSWGRLTTLFAQRRDTIRARYPNIEARRRFFETQLAGPLQRLLRKQRHAEAEAVLEAALAKTPPTESGSVTLVGAGAGDAGLLTLNALRALNEADIILYDRLVSDTVLQMARRDAEQIEVGKSATGHSVRQEDIHTLMLQHARAGQRVVRLKGGDPFVFGRGGEELEFLRTHGIPYEVIPGITAALACAAYAGIPLTHRDHAQSLCLITAHCQSSLDTLNWAALAQERQTLAFYMGVAGLPTIQQRLCEAGRTETTPFALIENGARAQQRVLTGTLKTLAHTAQTYAVRPPALLILGEVTALAEHLHWFGTTPLSAPCPPRTHPIS

SEQ ID NO: 85011 - DNA, 1458 bp, Clostridium tetani E88
  CDS (1)..(1458): transl_table=11
atgggtaaggtatatctaataggggcaggaccaggagatgaagaacttataacattaaaagccactagaatgttgcaaaagtgcactgctgttatgtatgacagattagcagggccaggattcttaaaatatttaaatgaggattgtgagatttattactgtggtaaggaaccaggttgtcattataaaactcaagatgagataaatgaaatgcttgcaaagctagctaaaaaaggtcacgtagttggaagagtaaaaggtggagatccttttatatttggacgtggaggagaagaaatattaagacttttagaagataatatagagtttgaagtaataccaggaataacttcagcaatatccgttccaagctatgctggaattccagtaactcatagagctattgctcaaggttttcatgtatttacaggaatgacagcagaaaaacttgatatagattggaaagctgttgcaaatgtagggggaactttaatatttttaatgggttatagaaatttagatataattcgcaatagattaatggaaaatggaatgaatgaaaatactccttgtgcaattataatgagaggaactacttctaatcaaaaaaaggtagtgggtactttaaaagatatttcagaaaaagcagagaaacaaggtgtaacttctccttgtataatactaattggagatgtagtacaatttaatgataaatttaattggtatgaaaagaaaagactttttggcaaaaatatatgtgtaactcgttcaagagttcaggcaaaagaattaagagaaaagttatcagatttaggagcacaggttacagagataaatgctatcaaaataaaaagtagagacgatgagttagaaaaatatgtagaaagattaaaagattataaatttatagttttaacaagtgtaaatgcggtaaatatacttttcgattatctagtaaaaaaagaatatgatataagaaatataaaaggaagatttgcagtaatagggcctgcaacagaaaaagcattattaaaaagaggtataaaagcggatataattgctaaagagtttgtagcggaagatttatttaatgaattaaaaccttatttaaataaggatgataaaatatttgtacctcattctaaacaagctagacagtatttagtagaagccctaaaagataaagggtgccatgtagaagaagtctatagttatgaagtggttaaaggagaagttcctaatttagaaatatttgatgatgtagatatagttttatatactagtccaagtatagttagaaacatgatagatatgataggtttagaaaaacttaagaaaaagacttcaatatccataggacctataacagccaaggaactagataaaaatggtatagattatattatctgtgatgaatatactacagatggaatgatagaaaaacttttaactttataa

SEQ ID NO: 85012 - protein, 485 aa, Clostridium tetani E88
MGKVYLIGAGPGDEELITLKATRMLQKCTAVMYDRLAGPGFLKYLNEDCEIYYCGKEPGCHYKTQDEINEMLAKLAKKGHVVGRVKGGDPFIFGRGGEEILRLLEDNIEFEVIPGITSAISVPSYAGIPVTHRAIAQGFHVFTGMTAEKLDIDWKAVANVGGTLIFLMGYRNLDIIRNRLMENGMNENTPCAIIMRGTTSNQKKVVGTLKDISEKAEKQGVTSPCIILIGDVVQFNDKFNWYEKKRLFGKNICVTRSRVQAKELREKLSDLGAQVTEINAIKIKSRDDELEKYVERLKDYKFIVLTSVNAVNILFDYLVKKEYDIRNIKGRFAVIGPATEKALLKRGIKADIIAKEFVAEDLFNELKPYLNKDDKIFVPHSKQARQYLVEALKDKGCHVEEVYSYEVVKGEVPNLEIFDDVDIVLYTSPSIVRNMIDMIGLEKLKKKTSISIGPITAKELDKNGIDYIICDEYTTDGMIEKLLTL

SEQ ID NO: 85013 - DNA, 762 bp, Pseudomonas syringae pv. tomato str. DC3000
  CDS (1)..(762): transl_table=11
atgagcgcaaaagtatggctggtaggcgcaggcccgggcgacccggaattactgaccctcaaggcagttcgcgccttgcacgaagccgacgtggtgttgatcgatgatctggtcaataccgccgtgctcgagcactgcccgcaggcgcgagtgattgccgtcggcaagcgcggaggctgccgctcgacgccacaggagtttatccatcgcctgatgctgcgctacgtgcgccagggcaaatgcgtggtccgcctcaaaggcggcgacccgtgcatcttcgggcgtggcggtgaagaggcacagtggttgcaggagcgcggtgtcgcggtagaactggtcaacggcattaccgcaggcctggccggggcaactcaatgcgggatctcgctgaccctgcgcggtatcagtcgcggcgtgacgctggtgaccgcccacactcaggacgacagcagcctcaactggcaagcgctggcacaaggcgggacgacgctggtggtgtacatgggtgtggcgaaactggcggaaattcgcgaaagcctgctggcaggcggaatgattggcgacatgccggtggcgatgattgaaaacgcttcgctgccctggcagcgtgaatgccgcagcacactgaatgcgatgcagcgtgacgcagccgcattcgagctgaaaagcccggcgatcctggtgatcggcgcggtcgcggcgttcagcaacgagctgctgaatcagaccctggtagagcaagcacagctgcaagccagctga

SEQ ID NO: 85014 - protein, 253 aa, Pseudomonas syringae pv. tomato str. DC3000
MSAKVWLVGAGPGDPELLTLKAVRALHEADVVLIDDLVNTAVLEHCPQARVIAVGKRGGCRSTPQEFIHRLMLRYVRQGKCVVRLKGGDPCIFGRGGEEAQWLQERGVAVELVNGITAGLAGATQCGISLTLRGISRGVTLVTAHTQDDSSLNWQALAQGGTTLVVYMGVAKLAEIRESLLAGGMIGDMPVAMIENASLPWQRECRSTLNAMQRDAAAFELKSPAILVIGAVAAFSNELLNQTLVEQAQLQAS

SEQ ID NO: 85015 - DNA, 1395 bp, Pseudomonas syringae pv. tomato str. DC3000
  CDS (1)..(1395): transl_table=11
atggagtttctgccgctgttccataacctgcgtggcagccgcgtgctggtggtcggcggcggtgaaattgccttgcgcaaatcacgtctgatcgctgatgccggggctgtactgcgcgtggttgcgccggaaatagaaacccagttgcgcgagctggttgcacacagcggcggcgaattgattctgcgtggctacagcgaaagcgatcttgacggctgcgtgctgatcatcgccgccacggacgacgagccgctaaacgctcaggtttctcgcgatgcccggctacgctgcgtgccggttaacgtggtggatgctccggcgctgtgtaccgtcatcttcccggctattgtcgaccgttcaccgttggtgattgccgtgtccagcggcggcgatgcgccggtgctggcacgtctgatccgggccaagctggaaacctggattccctccagctacgggcagctcgccgggcttgccgcgcgttttcgcaatcaggtcaaaggcctgctccctaacgtgcagcaacgccgggcgttctgggaagaggtttttcagggggccattgccgatcgtcaactggccgggcagggtgccgaggccgagcgcctgctgatcgccaagatcgctggcgagccaccggcgcaaaccggtgaggtgtatctggtcggcgcaggtcctggcgatccggatttgctgacctttcgcgctttgcgtctgatgcagcaagcggacgtggtgttgtatgaccgccttgtcgcaccgacgatccttgatctgtgccgtcgcgatgccgaacgtgtctacgtcggcaagcgtcgtgcagagcatgctgtgcctcaggagcagatcaatcagcaactggttgcactggccaaacaaggcaaacgtgtcgtgcgcctgaaagggggcgatccgtttatcttcggccgtggtggcgaggaaatcgaagagctggcggcgcacggtattccgtttcaggtggttccgggtattaccgctgccagcggttgcgcggcgtacgcaggcataccgctgacgcaccgcgatcatgcgcagtcggtacggttcatcaccgggcacttgaaaaacggtacgacggacctgccctggtctgatctggtggcgcccgctcagacgctggtgttttacatgggcctgattggcttgccggtcatttgcgcagagctgatcaagcatggccgctctgccgacacacctgccgcgctggttcagcagggcaccacggtcaatcaacgggtgttcaccggcaccctggccaatctgccgcagctggttgccgagcatgaggttcatgcgccgacgctggtgattatcggcgaagtggtcaagttgcgtgagaagctggcctggttcgaaggcgctcaggccacgctctga

SEQ ID NO: 85016 - protein, 464 aa, Pseudomonas syringae pv. tomato str. DC3000
MEFLPLFHNLRGSRVLVVGGGEIALRKSRLIADAGAVLRVVAPEIETQLRELVAHSGGELILRGYSESDLDGCVLIIAATDDEPLNAQVSRDARLRCVPVNVVDAPALCTVIFPAIVDRSPLVIAVSSGGDAPVLARLIRAKLETWIPSSYGQLAGLAARFRNQVKGLLPNVQQRRAFWEEVFQGAIADRQLAGQGAEAERLLIAKIAGEPPAQTGEVYLVGAGPGDPDLLTFRALRLMQQADVVLYDRLVAPTILDLCRRDAERVYVGKRRAEHAVPQEQINQQLVALAKQGKRVVRLKGGDPFIFGRGGEEIEELAAHGIPFQVVPGITAASGCAAYAGIPLTHRDHAQSVRFITGHLKNGTTDLPWSDLVAPAQTLVFYMGLIGLPVICAELIKHGRSADTPAALVQQGTTVNQRVFTGTLANLPQLVAEHEVHAPTLVIIGEVVKLREKLAWFEGAQATL

SEQ ID NO: 85017 - DNA, 915 bp, Vibrio parahaemolyticus RIMD 2210633
  CDS (1)..(915): transl_table=11
atgcctgcatcacaatatcaatggacgatgagcaagcacatggcaacgaacgattcagtcactcctttacctgtacaaaagccgagattggtttctgacaaccaagtgtctggcgtcactcgttttgcaaagcagtcactcaaaccaggcgaagtagcattggttggtgctggccctggcgaccctgaacttctcaccattaaagcactgaactgtttacagcaggcggatgtggtcttgtacgactatttggtgtctgaagagatcatggcgctgatcccaagcgatacgattttagtttgtgttggcaagcgtgcagggcaccacagtgtaccgcaagaaaagacaaatcaacttttggttgattttgctaagcaaggctaccgagtagtacgagtaaaaggcggtgatcctttcgtatttggtcgcggtggagaagagctagaagtgttggctgatgctggcattcgttttcaagtggtgcctggtattactgccgcagcaggagcgacagcatatgctggcattccgttgacgcaccgtgattatgctcaatcggccatttttgttactggtcacttgaaagaagaaagtgatgagatggattggtcaacactggctcgtggtaatcagactttagtgatctacatgggactcatgaaatcacactatattcagaatcagctcattcagcacggaagagcggcttcaactccgattgctattatcgagcgcggtacccaaattcagcaaaaagtttttacgggagaactttcccaactatctgatttatcgaaggaagctcaggcgccatctttgattgtcgtaggagaggtagtgcgattgtctcaaaagttagattggtttttgtctagtactgatttcaacaaaagtgctattgccaactccatataa

SEQ ID NO: 85018 - protein, 304 aa, Vibrio parahaemolyticus RIMD 2210633
MPASQYQWTMSKHMATNDSVTPLPVQKPRLVSDNQVSGVTRFAKQSLKPGEVALVGAGPGDPELLTIKALNCLQQADVVLYDYLVSEEIMALIPSDTILVCVGKRAGHHSVPQEKTNQLLVDFAKQGYRVVRVKGGDPFVFGRGGEELEVLADAGIRFQVVPGITAAAGATAYAGIPLTHRDYAQSAIFVTGHLKEESDEMDWSTLARGNQTLVIYMGLMKSHYIQNQLIQHGRAASTPIAIIERGTQIQQKVFTGELSQLSDLSKEAQAPSLIVVGEVVRLSQKLDWFLSSTDFNKSAIANSI

SEQ ID NO: 85019 - DNA, 759 bp, Vibrio parahaemolyticus RIMD 2210633
  CDS (1)..(759): transl_table=11
atgactactgcgaactcatctttaaacagcggctttgtttctcttgttggtgctgggcctggcgatccggatttactgacggtcaaaggtttgaaagcgattcaagcggctgaagttgtggtgtatgaccgtttggtatcgaaagagattctagagttagcacaggcatccgcagagatgatttatgtcgggaaaaagctcgattttcactgcgtaccgcaagatcagatcaaccaaattttggtggaaaaagcgcaagaagggaaacgcgttgtgcgcctaaaaggtggagattcatttatctttggacgtggcggtgaagagttggaagagcttgcagaatacggtattcaatacgaagtggtgccagggatcaccgctgcggcgggggcgacggcttacgcaggtattccactaacgcaccgcgatcatgcgcaaagcgttcaatttattacaggtcacgtgcaaaaagacggtcgcgaaattgaatggcactcgttagcgcagtcaaacaacacgcttgtgttctacatggggttgaagcaaagcggccacattatggacaagctcatcacgcacggcttagacccagaaatgtcatgcgcaatcatcgaaaatgggacgcgaccagagcaacgcgtgttccaaggtaaactaaatgaactgtctagcatggcagagcaagccgtaagccctgcattgatagtggtggggagcgttacgcagctgcataataagttggcgtggttcggaaagtaa

SEQ ID NO: 85020 - protein, 252 aa, Vibrio parahaemolyticus RIMD 2210633
MTTANSSLNSGFVSLVGAGPGDPDLLTVKGLKAIQAAEVVVYDRLVSKEILELAQASAEMIYVGKKLDFHCVPQDQINQILVEKAQEGKRVVRLKGGDSFIFGRGGEELEELAEYGIQYEVVPGITAAAGATAYAGIPLTHRDHAQSVQFITGHVQKDGREIEWHSLAQSNNTLVFYMGLKQSGHIMDKLITHGLDPEMSCAIIENGTRPEQRVFQGKLNELSSMAEQAVSPALIVVGSVTQLHNKLAWFGK

SEQ ID NO: 85021 - DNA, 906 bp, Vibrio parahaemolyticus RIMD 2210633
  CDS (1)..(906): transl_table=11
atggaagcgccttatcaaaagtcttggtttaagaaaggacaagcgtaccagagtcaaaaacgctcgtctcgcttttctaggcatgaccaagcaagcaagctgaacaagcttttagaagaccaatccgtagatctcgacgcgaaccacaaaggttttgtctcgattgtcggagcaggcccgcacgatccagacttgttaacggtgaaggcagtgaaagcaattatgtcggcagaggtgctgctgtacgaccgtctggttaacaaagatattttggagttggcttcgccacaagccgattggatttacgtgggaaaacgatgcggacaacctagcatcggtcaggaagaaatctgcggtttaatggtgtcattagctcagcaaggcaaacgtgttgttcggctgaaaggaggcgatccgtttgtgtttgggcgaggtggcgaagaagcgttagccctagtcaaacatgcgattccgtatgaagtcatccccggtattactgcagcgattggttgttccgcaaatagcttgattccgttgactcatcgtggtgttgctcgcagcgttacctttgtgacagggcaagtggtaacaggcgcatttgaagcgtggagccaactgatgcaaagcggacaaacattagtcttctatatggggttagaaaagtcatcgcaaatacaaacgggtttaattagctctggtttgagagaaaatttccctgtcgcggtcatcactcatggttgtagcccccaacagcaagtgtatgttacccaactcaatcagctcaatgagttatcgattacactcaaaggcgtgagcccagcattgattgtgatgggagaagttgtcaaactgcgcgaacaactaatagaaaccgtacagtcagtgacggaatacgagggaatatga

SEQ ID NO: 85022 - protein, 301 aa, Vibrio parahaemolyticus RIMD 2210633
MEAPYQKSWFKKGQAYQSQKRSSRFSRHDQASKLNKLLEDQSVDLDANHKGFVSIVGAGPHDPDLLTVKAVKAIMSAEVLLYDRLVNKDILELASPQADWIYVGKRCGQPSIGQEEICGLMVSLAQQGKRVVRLKGGDPFVFGRGGEEALALVKHAIPYEVIPGITAAIGCSANSLIPLTHRGVARSVTFVTGQVVTGAFEAWSQLMQSGQTLVFYMGLEKSSQIQTGLISSGLRENFPVAVITHGCSPQQQVYVTQLNQLNELSITLKGVSPALIVMGEVVKLREQLIETVQSVTEYEGI

SEQ ID NO: 85023 - DNA, 1374 bp, Salmonella enterica subsp. enterica serovar Typhi Ty2
  CDS (1)..(1374): transl_table=11
gtggaccatttgcctatattttgtcaattgcgcgaccgcgactgtctgatcgtcggcggtggcgatgtcgcagaacgcaaagcacggttactgctggaagcaggcgcacgtttaacggtcaatgcgctaacatttattccgcagttcaccgtatgggtaaatgaaggcatgttgactctggttgaggggccgttcgacgaaacgcttctcgactcgtgttggctggcgatcgcggccactgacgacgataccgtcaaccagcgcgtcagcgaagcggcggaatcacgccgtatcttctgcaacgtggtggatgcgccgaaagccgccagctttatcatgccctccattatcgaccgctcgccgctgatggtcgccgtctcctccggcggcacctccccggtgctggcgcgtctgctgcgcgagaaactggaatcgctgctgccgcagcatctggggcaggtcgcgcgctatgccggacagctccgcgcccgagtgaaaaagcagtttgccaccatgggcgaacgtcgtcgcttctgggaaaaatttttcgtcaatgaccggctggcgcagtcgctggcgaatgccgatgagaaagcggttaacgcgacaactgaacacctgtttagcgagccgctggatcaccgtggcgaagtcgtgctggtcggcgccgggccgggcgatgccgggctgcttacgctgaaaggattacaacaaatccaacaggcggatatcgtggtttacgatcgcctcgtttccgacgacattatgaacctggtacgccgcgatgccgatcgggtctttgtggggaaacgcgcgggttaccactgcgtcccacaggaggaaatcaaccagatcctgctgcgtgaagcgcaaaaaggtaaacgcgtggtacgcctgaaaggcggcgatccctttatctttggtcgcggcggcgaagagctggaaacgctgtgtcatgccggtattcctttctcagtagtaccggggattaccgcggcttccggctgctccgcctactccggtattccgctaacccatcgcgattacgcacagagcgtacgtctggtcacgggtcacctgaaaaccggcggcgagctggactgggaaaacctggcggcagaaaaacagacgctggtgttctacatggggctgaatcaggcagcgactatccaggaaaaactgatcgcattcggtatggaggccaatatgccggttgcgctggtggaaaacggtacctccgtaaagcaacgcgtcgttcacggtgtgctgacgcagcttggtgaattagcgcaacaggttgaaagcccggcgctgattatcgttggtcgcgtggtagccttacgcgataaattaaattggttctctaatcattaa

SEQ ID NO: 85024 - protein, 457 aa, Salmonella enterica subsp. enterica serovar Typhi Ty2
MDHLPIFCQLRDRDCLIVGGGDVAERKARLLLEAGARLTVNALTFIPQFTVWVNEGMLTLVEGPFDETLLDSCWLAIAATDDDTVNQRVSEAAESRRIFCNVVDAPKAASFIMPSIIDRSPLMVAVSSGGTSPVLARLLREKLESLLPQHLGQVARYAGQLRARVKKQFATMGERRRFWEKFFVNDRLAQSLANADEKAVNATTEHLFSEPLDHRGEVVLVGAGPGDAGLLTLKGLQQIQQADIVVYDRLVSDDIMNLVRRDADRVFVGKRAGYHCVPQEEINQILLREAQKGKRVVRLKGGDPFIFGRGGEELETLCHAGIPFSVVPGITAASGCSAYSGIPLTHRDYAQSVRLVTGHLKTGGELDWENLAAEKQTLVFYMGLNQAATIQEKLIAFGMEANMPVALVENGTSVKQRVVHGVLTQLGELAQQVESPALIIVGRVVALRDKLNWFSNH

SEQ ID NO: 85025 - DNA, 1233 bp, Streptomyces avermitilis MA-4680
  CDS (1)..(1233): transl_table=11
atggccgaacaccccgcctaccccgtgggcctgcgcctcaccggccgccgcgtagtcgtcctcggcggcggccaggtcgcccagcgccgcctccccgcgctcatcgcggcgggcgcgaaggtccacctcgtgtctcccgaggcgaccccgtcggtcgaagccatggccgacacgggcgagatcacctggtcgaggcgccggtacgaggacggtgacctcgcggaggcctggtacgccctgatcgccaccagcgacgcggcggcgaacgtcgcggcctccgccgaagcggagcgcctccgtgtctggtgcgtccgctccgacgacgccgacgcggccaccgcctggaccccggccaccgggcacagcgagggcgtcacggtcgccgtcctcaccacgaacgccaagggccgcgacccgcgccacacggcggcgatccgggatgccgtggtcgagggcctgcgcgacggcaccctcgtcgccccccaccatcgcgtccgcacccccggcgtcgccctggtcggcggcggccccggcgaccccgacctcatcacggtgcgcggccgccgcctgctcgccgaggccgacgtggtcatcgcggaccgcctcggcccgcgcgatctgctcgccgaactcccgccgcacgtcgaggtgatcgacgcggcgaagatcccgtacggccgtttcatggcccaggaggccatcaacaacgcgctgatcgagcacgcccggcagggcaagtcggtcgtacggctgaagggcggcgaccccttcgtcttcggccgtggcatggaggaggcccaggcgctcgccgaggtgggcatcccctgcacggtcgtccccggtatctccagctcgatctcggttcccggcgcggccggcatcccggtcacccaccggggtgtcgcacacgagttcacggtggtcagcggccatgtggcccctgacgacgagcgctcgctggtcgactggccggccctcgcgaagctgcgcggcacgctcgtgatcctgatgggcgtcgacaagatcggaaagatcgccgacacgctcgtggcccacggcaagccggccggcacacccgtcgccctcgtccaggaaggcacgacggccgcccagcgccgtgtcgacgccacgctcgcgacggtcgcggagaccgtacgcgcccaggacgtgaagcccccggccgtcatcgtcatcggcgcggtcgtggacgtgggcccgcagactttcgagtaa

SEQ ID NO: 85026 - protein, 410 aa, Streptomyces avermitilis MA-4680
MAEHPAYPVGLRLTGRRVVVLGGGQVAQRRLPALIAAGAKVHLVSPEATPSVEAMADTGEITWSRRRYEDGDLAEAWYALIATSDAAANVAASAEAERLRVWCVRSDDADAATAWTPATGHSEGVTVAVLTTNAKGRDPRHTAAIRDAVVEGLRDGTLVAPHHRVRTPGVALVGGGPGDPDLITVRGRRLLAEADVVIADRLGPRDLLAELPPHVEVIDAAKIPYGRFMAQEAINNALIEHARQGKSVVRLKGGDPFVFGRGMEEAQALAEVGIPCTVVPGISSSISVPGAAGIPVTHRGVAHEFTVVSGHVAPDDERSLVDWPALAKLRGTLVILMGVDKIGKIADTLVAHGKPAGTPVALVQEGTTAAQRRVDATLATVAETVRAQDVKPPAVIVIGAVVDVGPQTFE

SEQ ID NO: 85027 - DNA, 780 bp, Bacillus cereus ATCC 14579
  CDS (1)..(780): transl_table=11
atgatggggaaggtttatattgttggagcgggtcctggcgatccagatttaattactgttaaaggattgaaatgtattgagaaggcagatgttattttatacgaccgacttgtgaataaagagctgctttcatacgcaaagcctgacgcggatttaatttattgtggaaaactcccgaattatcacacgatgaagcaagagacaattaacacgtttcttattaagtatgcgaaaaaaggaaaagttgtaacgaggctcaagggcggcgatccatttgtgtttggtagagggggagaagaagctgaagcattagcaaagcaaggtgtaccatttgaaatcattcctggtatttcagctggaatagctgctcctgcttatgcgggcattccagtgacgcaccgtgatgcaagtgcaagttttgctattgtgactgggcataggaaagaaggtgctgaagaagaagtgaaatgggaaagtttagcgaaaggtgtagagactttagcggtatatatgggggttagtaatttaccctacatatgtgagcaacttatgaagcatggaaaagataaaagtacgccagctgctattattgagcaggggacgacgtctatgcaacgcacagttgttggaacgttagggacaattgtagatgttgcgaaaaaagagcaaattcaaaatccgagtatgattgtaattggagaggttgtccgttttagagaaaaaattcattggtttgagaagcagacagaaaatgcttatcaagtaagtggagtgttgtaa

SEQ ID NO: 85028 - protein, 259 aa, Bacillus cereus ATCC 14579
MMGKVYIVGAGPGDPDLITVKGLKCIEKADVILYDRLVNKELLSYAKPDADLIYCGKLPNYHTMKQETINTFLIKYAKKGKVVTRLKGGDPFVFGRGGEEAEALAKQGVPFEIIPGISAGIAAPAYAGIPVTHRDASASFAIVTGHRKEGAEEEVKWESLAKGVETLAVYMGVSNLPYICEQLMKHGKDKSTPAAIIEQGTTSMQRTVVGTLGTIVDVAKKEQIQNPSMIVIGEVVRFREKIHWFEKQTENAYQVSGVL

SEQ ID NO: 85029 - DNA, 1425 bp, Bacillus cereus ATCC 14579
  CDS (1)..(1425): transl_table=11
atgaacggatatgtatatttagttggtgcaggaccaggtgatgaagggcttattacaaaaaaagcgatagagtgtttaaaacgtgcagatattgttttatatgaccgtttactaaaccctttctttcttagctatacaaaacaaacatgtgaacttatgtattgcggaaaaatgccaaagaatcatattatgcggcaagaaataattaacgcacaccttcttcaatttgcgaaagagggcaaaattgttgtccgattaaaaggcggagatccatctatttttggccgtgttggtgaagaagcagaaactttagcagcagcaaatattccatatgaaattgtaccaggcattacatctagcatcgccgctagtagctatgcaggtattcccctcacccaccgtgactacagtaatagtgtcactttattaaccggacatgcaaaaggtcccttaaccgatcatggaaaatataattcatctcacaatagcgacacgattgcctactacatgggtataaaaaacttacctacaatttgtgaaaacttactacaagcaggaaaaaaagaagatacgccagtagcagtcattgaatggggtacaactggtaaacagcgcgttgtcacagggacactgtctaccattgtttctattgtcaaaaacgaaaatatttctaatccttctatgacaattgttggtgatgttgttactttgcggaatcaaatctcttggaaagaacgtaaaccattgcacggcaagaaagttttatttgcagctgcaacaaataaaaaaagcgcaataaagcaaaagttacaagagtccggtgcagaaatatatcaaattccaactttcaaaaagaaagaatacacagtaacctctgaacaaatcaataagatttttaacgttgatcgtcttgtattttgttccgctgacagtgtagacatcttaatgcaatcatgcagtaaatatcataaagatattcgttccttacaggcagaacttcagtatatgaacctttctattcaagaaaagctcatgcaatatggattgttcagtaaacctgcgcaattttcttcgaattcaacgatttatttaggacgaaacattaaccgaattgctgttattcaagaaaaaattggtgctggttcctatatgatgactcatgagtacacaattgatcatcgcttcgatgaaattcattcacgtattctttctgaattctcatgggatagcattgtatttgaaggtcgtgcttctattgatacgtttctagcagaaataaaacgccttggctttatcaatattcttactctcccattctcgtataccgacgttccaactttacactatgcaaataaagttgggtttcataacgtagatcatcaattacaagaaactcttatgaagaaagacatggtgagacaatga

SEQ ID NO: 85030 - protein, 474 aa, Bacillus cereus ATCC 14579
MNGYVYLVGAGPGDEGLITKKAIECLKRADIVLYDRLLNPFFLSYTKQTCELMYCGKMPKNHIMRQEIINAHLLQFAKEGKIVVRLKGGDPSIFGRVGEEAETLAAANIPYEIVPGITSSIAASSYAGIPLTHRDYSNSVTLLTGHAKGPLTDHGKYNSSHNSDTIAYYMGIKNLPTICENLLQAGKKEDTPVAVIEWGTTGKQRVVTGTLSTIVSIVKNENISNPSMTIVGDVVTLRNQISWKERKPLHGKKVLFAAATNKKSAIKQKLQESGAEIYQIPTFKKKEYTVTSEQINKIFNVDRLVFCSADSVDILMQSCSKYHKDIRSLQAELQYMNLSIQEKLMQYGLFSKPAQFSSNSTIYLGRNINRIAVIQEKIGAGSYMMTHEYTIDHRFDEIHSRILSEFSWDSIVFEGRASIDTFLAEIKRLGFINILTLPFSYTDVPTLHYANKVGFHNVDHQLQETLMKKDMVRQ

SEQ ID NO: 85031 - DNA, 1506 bp, Nitrosomonas europaea ATCC 19718
  CDS (1)..(1506): transl_table=11
atgaggtcattgcatcattctggtaacattttcaacggatccaacgattccttgcttgttaagttccgttgcctgtatatggattatttacctgtttttctcaacatcaaacagcgtgactgcctggttgtgggcggcggggagattgccgttcgcaaaatcaggctgttgctgcgggcacatgcacgtatccatgtggtatctcctgccatcagcgaggagctgagtaatctgctgctgcaatcacctgtgatcacccatactgctgaatctttccggccggatcatttgcaggatagggcgctggccattgctgccaccaatgatcatgaagtgaatcgggcggtctccgctgccgccaggaaagcgggcattccggtaaatgtcgtagataatccggatttatgtaccttcatcatgccgtctattctcgaccgttctccgatcatcgttgcggtttcaagtggtggtacttctccgatattggcgaggctgttacgttcgcggctggaagcgctgattccttctgcctatggtcggctggccgagtatgccgcacggtttcgtgacaaggtcagacagcgttttatccatcaggagaatcgtcgttttttctgggagagaatgctgcaggggccgtttgcagaaatggttttcgccggcagagatcaggccgcacaggattatctgtcagaagcgttggaaaacagtaccgatcagtttccgaccggagaagtttatctggtgggtgcaggcccgggtgatcccgatttgcttactttccgggccatgcgcctgatgcagcaggcggatgtggtcatttatgaccggctggtttctcccgccattctcgatatggtcagacaggatgcaacgcgcatctatgttggaaaagtgcgtaatcagcataccctgccgcagacatcgatcaatgaactgctggtaaagctcgcccaggagggtaaacacgttctgcgcctgaaaggaggagatccctttattttcgggcgagggggtgaggaaatcgaaaccctgtcgcaacaccacattccgtttcaggtggttcccgggatcacggcggcttcaggcgtggccagttatgcagggattcccctgacccaccgtgatcatgcacaatcctgtgtctttgtgacgggacatctgaaagacaacaccatacagctcgactggccggcgctggcgcggccaaatcagaccatcgtcgtctatatggggctgctgggggtcaccgaactatgccggcaactgattgctcatggtctgcaggcaaccacaccggctgcgatcgttcagcagggtacgacccccaaccagcgcgtgctgacaggtacgctggaaacgttaccggacatcattcagcagaatccactgaaacctcccacactgatcatcgtgggaaacgtcgtcaagcttcatcaaaaactcgcctggttcaattcaacttcggaacccatgggcacatcttccgggccgggatacccttaa

SEQ ID NO: 85032 - protein, 501 aa, Nitrosomonas europaea ATCC 19718
MRSLHHSGNIFNGSNDSLLVKFRCLYMDYLPVFLNIKQRDCLVVGGGEIAVRKIRLLLRAHARIHVVSPAISEELSNLLLQSPVITHTAESFRPDHLQDRALAIAATNDHEVNRAVSAAARKAGIPVNVVDNPDLCTFIMPSILDRSPIIVAVSSGGTSPILARLLRSRLEALIPSAYGRLAEYAARFRDKVRQRFIHQENRRFFWERMLQGPFAEMVFAGRDQAAQDYLSEALENSTDQFPTGEVYLVGAGPGDPDLLTFRAMRLMQQADVVIYDRLVSPAILDMVRQDATRIYVGKVRNQHTLPQTSINELLVKLAQEGKHVLRLKGGDPFIFGRGGEEIETLSQHHIPFQVVPGITAASGVASYAGIPLTHRDHAQSCVFVTGHLKDNTIQLDWPALARPNQTIVVYMGLLGVTELCRQLIAHGLQATTPAAIVQQGTTPNQRVLTGTLETLPDIIQQNPLKPPTLIIVGNVVKLHQKLAWFNSTSEPMGTSSGPGYP

SEQ ID NO: 85033 - DNA, 777 bp, Bacillus anthracis str. Ames
  CDS (1)..(777): transl_table=11
atgggaaaagtatatatcgttggggcgggccctggggatccagatttaattactgtgaaaggattgaaatgtattgagaaggcagatgttattttgtacgaccgtcttgtaaataaagaattgctttcctatgcaaagcctgaagcggatttaatttattgcggaaaactaccaaattatcacacgatgaagcaagagacaattaacacgtttcttattaaatatgcgaaaaaaggaaaaattgtaacgagacttaagggtggggatccatttgtatttggtagagggggagaagaggccgaagcgttagcaaagcaaggtgtaccatttgaaattgttcctggtatttcagctggaatagctgcaccagcttatgcgggtattccagtgacacatcgtgatgcaagtgcaagctttgctattgtgacagggcatcgaaaagaagatgctgcagaggaagtgaaatggggaaatttagcgaaaggtgtagagactttagcagtatatatgggggttagcaatttaccctatatatgtgaacaactgatgaagcatggaaaagataaaagtacgcctgccgctattattgagcggggaactacatctatgcagcgcacagttgttgggacgttagggacaattgtagatgttgcgaaaaaagaacaaattcaaaatccgagcatgattgtaattggagaagtcgtccgttttagagaaaaaatccattggtttgaaaagcagacagaaagtacgtatcaagtaagtggagtgttataa

SEQ ID NO: 85034 - protein, 258 aa, Bacillus anthracis str. Ames
MGKVYIVGAGPGDPDLITVKGLKCIEKADVILYDRLVNKELLSYAKPEADLIYCGKLPNYHTMKQETINTFLIKYAKKGKIVTRLKGGDPFVFGRGGEEAEALAKQGVPFEIVPGISAGIAAPAYAGIPVTHRDASASFAIVTGHRKEDAAEEVKWGNLAKGVETLAVYMGVSNLPYICEQLMKHGKDKSTPAAIIERGTTSMQRTVVGTLGTIVDVAKKEQIQNPSMIVIGEVVRFREKIHWFEKQTESTYQVSGVL

SEQ ID NO: 85035 - DNA, 1533 bp, Rhodopirellula baltica SH 1
  CDS (1)..(1533): transl_table=11
ttgaattctgaacttgctctttctgaaacaacaccgggattcgtcgcattggtgggggcaggacccggccaccccggactgctgacactccgcggacgcgaatgcctgcaggattgcgaggtcgtcctttacgacgggctgagcaatgtcgaaatgctggtgcacgccccgcaggcggttcatcaatgcgtcggcaagcatggccaatctcgtatttggaagcaggatgaaatcatcgccgagatgatccggcacgccaaagagggcaaacgtgtcgtgcgtctgaaggggggcgacccggcggtgttcgccaggaccagcgaagaggtcaacgcgttgaaggcggagcggattccgtttgagatcgtcccgggaatcaccgcggcattggcggcgggatcgtatgcgggcattccgatcacgcatcgcggaattgcctcggcggtggctttggtgaccggtcacgaggaaccaggcaaggcaaaatcggatttggattggccagcactggcaagatttcccggaacgttggtgatctatatgggagtcacgacggcgaagcagtggactgacgcgttgattggcagcggcaaggatcccaagacaccctgcgcaattctgcggcgatgcagtttgccggaccagcagaagattcaatgtcggttggacgaggtcgccgggcacctgactcccgccagcaaatttcgtccgccggtgatcacgattgttggcgaggtcactgggttggctgagtcgatggattggttcagccgtcgaccgctctcgggaaaaaatgtcttggtcacacgtccgaaggaccaagcgaaccagttggcaaaaccgctcgaagaattgggggccaacgtgatcgtgcaaccggcgatcaagatttgcccgccggatgactggtcggaagtggatgctgcgattgatcagatcgagacttttgattcgttggtcttcacgagccgcaacggcgtgaagagttttctagatcgtttgctcgatgtcggccgtgacatgcgttgcttgggcggtctgaagatcgcggttgtcggtgacgcgacggcgaatgtcttggcaacctatcatttgcgagctgactggatccccgagtcttttgatgcggacgcattgttgacgactttgcaaaacgccgaaccaccactgaagtcaactttggttgtgcggactcagcgtggccgagatgtcgtcacggatggcttgcgtgcctcaggcactcaagtgcgtgaggtggtcgcttatgagaactgggacgtgcccgagatggatccagcgacacgcggcaaaatcgacgagcaaccactggactggatcacgttgaccagtcccgcgacagcgaggaatgttcaccgttggttgggtgatttcatcggcgagaccagaatcgcggtgatcagtccgctgaccgcccaaaccgttcgcgaattgggatggcgcgtcgacgcggtcgctgcgtctgccacaatgcaatctttgacccaagcgattctagacgcggagacaacatga

SEQ ID NO: 85036 - protein, 510 aa, Rhodopirellula baltica SH 1
MNSELALSETTPGFVALVGAGPGHPGLLTLRGRECLQDCEVVLYDGLSNVEMLVHAPQAVHQCVGKHGQSRIWKQDEIIAEMIRHAKEGKRVVRLKGGDPAVFARTSEEVNALKAERIPFEIVPGITAALAAGSYAGIPITHRGIASAVALVTGHEEPGKAKSDLDWPALARFPGTLVIYMGVTTAKQWTDALIGSGKDPKTPCAILRRCSLPDQQKIQCRLDEVAGHLTPASKFRPPVITIVGEVTGLAESMDWFSRRPLSGKNVLVTRPKDQANQLAKPLEELGANVIVQPAIKICPPDDWSEVDAAIDQIETFDSLVFTSRNGVKSFLDRLLDVGRDMRCLGGLKIAVVGDATANVLATYHLRADWIPESFDADALLTTLQNAEPPLKSTLVVRTQRGRDVVTDGLRASGTQVREVVAYENWDVPEMDPATRGKIDEQPLDWITLTSPATARNVHRWLGDFIGETRIAVISPLTAQTVRELGWRVDAVAASATMQSLTQAILDAETT

SEQ ID NO: 85037 - DNA, 786 bp, Prochlorococcus marinus subsp. marinus str. CCMP1375
  CDS (1)..(786): transl_table=11
atgaaagacaagcagctagggactgtctatttagttggtgctggccctggagatcctgacttattaactgttagggcacataggctcctgagtcaatgtgatgtcttggtatatgacgctttagtgccggatgaaattcttaaattagttaaaaaagactgtaaatctatttttgtggggaaattaagaggtcatcattcaacttcacaattgaaaactaatgcacttcttttggaattagtaaaaaagaacaaatgtgtagtgcgtttgaaagggggagacccttttgtttttggacgtggtggtgaagaggcagcttatttacataagaatggtattggtgttgaagttgttcctgccattacatctggtatagctgcttcagcatattttggtattcctttgacccatcgtattgcaagtagttcagtgacctttgtgacaggacatgaaggcattgataaacgccgaccttctgtgaattggaaagctcttgcaaaagcaagcaatactttagttatttatatgggtgtacataatctcagttatattgttaaggaattattagctgcaggcctgtccccaaagattccatcagcggttattcagcaggcaactgttaatggacaacgttgcttgagaacctcattagatagccttgtgaaagaagtaaaagagcaagaatttatttctccttccataatcatcatcggagaaaccataaattttcagattgaagcttgtgcaccatccccagcaaaagtcaccatgccaatttctttttaa

SEQ ID NO: 85038 - protein, 261 aa, Prochlorococcus marinus subsp. marinus str. CCMP1375
MKDKQLGTVYLVGAGPGDPDLLTVRAHRLLSQCDVLVYDALVPDEILKLVKKDCKSIFVGKLRGHHSTSQLKTNALLLELVKKNKCVVRLKGGDPFVFGRGGEEAAYLHKNGIGVEVVPAITSGIAASAYFGIPLTHRIASSSVTFVTGHEGIDKRRPSVNWKALAKASNTLVIYMGVHNLSYIVKELLAAGLSPKIPSAVIQQATVNGQRCLRTSLDSLVKEVKEQEFISPSIIIIGETINFQIEACAPSPAKVTMPISF

SEQ ID NO: 85039 - DNA, 1386 bp, Candidatus Blochmannia floridanus
  CDS (1)..(1386): transl_table=11
gtgcgatatttgccgttgtttgtgtatttgaacaataaacctgtcttagtagttggtgggggtatagttgcttttcgtaaggttcagattttgcaaaaaacaggtgctattattcaaatagtagcaaaaactttatgtttaaatttaaaaactactttatttaagaaaaaaataatttggattggcaaggtatttcaaatttctatgttagataatgtgtttttagttatcatcgctactgatgatactgattttaatgatatggtttttaaatatgctgaaaaacgtcatattttggtaaatacagtggatgatccagcaaaatgttcatttatttttcccgccattattgatcgatctccaattttaataggtatttcttcaggtggtcaagcgcccgtattaattcgaatgttgaaagaaaaattagaatcattaataccaatgtctattggttatgtagcatcgttggcaggtatatggcgtaataagataaaacaacatattacagatatagtttatagacgttttttttgggagaagttattttataatggacaaatttctttattagtagaaaaaggaaattttaggaaagcgaatcgtgttattaaagatgctgttttaaatcagttgcataatagaaagcaaggtagcgtatctttagtaggggcgggtccaggagataaaggattattaactattcgtggattacaagttatacaaacagcagatattatattatatgattatttagttaatccagatattttagatttatctcgtaaagatgcgaataaaatttgtgttggtaaaattgctaaaaagcattctatatctcaaaataatcttaatcattttatgattcaattggcacagcaaggtaataatgttgtcagattaaaaggaggtgattcgtttatatttggtcgaggaggagaagaattacaagcggtgtccaaagcaggtattatgtttcaagtggttccaggtattacatcaggtattggggtagctgcgtatgctggtattccattgacccatcgggaatatgcacatagcgttgtatttatgacaggacacaaaagacatcagggtgattataagataaattggagtttattatcggataataaacaaactatagttatatatatgggtcaacttaatgcggtgaatattagtaaaaatcttatttgtcatggaagacatatatatactcctgtagctataattagtagaggtacttatttagatcaaaagattttaataggtacattaatagaattggagaaattaatttatatggtaaaaaaacctacattattaattattggagatgtggtatcactacataatgaaataagttggtttggtaatgggtaa

SEQ ID NO: 85040 - protein, 461 aa, Candidatus Blochmannia floridanus
MRYLPLFVYLNNKPVLVVGGGIVAFRKVQILQKTGAIIQIVAKTLCLNLKTTLFKKKIIWIGKVFQISMLDNVFLVIIATDDTDFNDMVFKYAEKRHILVNTVDDPAKCSFIFPAIIDRSPILIGISSGGQAPVLIRMLKEKLESLIPMSIGYVASLAGIWRNKIKQHITDIVYRRFFWEKLFYNGQISLLVEKGNFRKANRVIKDAVLNQLHNRKQGSVSLVGAGPGDKGLLTIRGLQVIQTADIILYDYLVNPDILDLSRKDANKICVGKIAKKHSISQNNLNHFMIQLAQQGNNVVRLKGGDSFIFGRGGEELQAVSKAGIMFQVVPGITSGIGVAAYAGIPLTHREYAHSVVFMTGHKRHQGDYKINWSLLSDNKQTIVIYMGQLNAVNISKNLICHGRHIYTPVAIISRGTYLDQKILIGTLIELEKLIYMVKKPTLLIIGDVVSLHNEISWFGNG

SEQ ID NO: 85041 - DNA, 1422 bp, Bordetella pertussis Tohama I
  CDS (1)..(1422): transl_table=11
atgacgctgttcccgattttcgccgacctgacggggcggcgcgtactggtggtgggcggcggcgccgtcgccgtccgcaagacacaggccctgctgcaagccggcgccgaggtcgtcgtgggcgcgccgcgcctggatccggcgctcgccgccctggccgagcagggcggcatcgcccgcctggacggcggcttcgaacccgcctggctggccggcgcctggctggtggtggccgccaccgacgaccgcgccgtcaacgcggcggtcagcgaggccgcgcgggcgcgccgggtattctgcaacgtggtcgacgatgccgaactgtcgtccttccaggtgccgtccgtcgtcgaccggtcgccgctgatcgtggccatctcctcctcgggcgtggcgcccgtgctggcgcggcgcctgcgcgagcgcatcgagtcgctgttcgaccattcgctcggccagctggcagccctggcggcgcgctatcggccgcgcatccgcgccgcccgccccgacctcggccagcggcggcgtttctacgactggctgctcgacggcccggtcgcggcgcgcctgcgccagcaacagcccgggctggccgaacaggaactggaacaggcgctgcgcgcgccgcaggccgccccccggggcagcgtcgtgctggtgggcgcgggcccgggcgaccccggcctgctgacgctcaaggcgctgcgcgcgctcaatgaagccgacatcatcctgtacgaccgcctggtcagcgagggcgtgctggcgctggcgcgccgcgacgctgaacgcgtgcccgtgggcaagctgcccggcaaaggccacgacgccacccaggcgcgcatccacgccctcatgctggcccaggcgcgcgccggccggcgcgtggtgcgcctgaaaggcggcgatgccttcatcttcggacgcggcggcgaagaactggaatacctgcgcgcgcacggcgtgccgtacgaggtcgtgcccggcatcaccgcggcgctggcctgcgccgcctatgccggcatgcccctgacgcatcgcgaccatgcgcagtcggtgcgcatggtcaccgcccactgccgcgccgaccaggacaccctggactgggccggcctggcccgcgaccagcagaccctggcgttctacatgggcgtgggccagctcgattacgtcaccgcgcgcctgctcgaacacggccgcgcgccggccaccccgttcgccctgatcgaaaacggcagccggcccgaacaacgcgtcgtcaccggcacgctggccgacctgcccgagatcgcgcgccggcgcggcgtgcgccccccggcgctgctggtcatcggcgaagtcgccgccctggccgacaccctgcaatggttcggccagcaccagcgcggcctgcccggcccgcaggccctggccgcctga

SEQ ID NO: 85042 - protein, 473 aa, Bordetella pertussis Tohama I
MTLFPIFADLTGRRVLVVGGGAVAVRKTQALLQAGAEVVVGAPRLDPALAALAEQGGIARLDGGFEPAWLAGAWLVVAATDDRAVNAAVSEAARARRVFCNVVDDAELSSFQVPSVVDRSPLIVAISSSGVAPVLARRLRERIESLFDHSLGQLAALAARYRPRIRAARPDLGQRRRFYDWLLDGPVAARLRQQQPGLAEQELEQALRAPQAAPRGSVVLVGAGPGDPGLLTLKALRALNEADIILYDRLVSEGVLALARRDAERVPVGKLPGKGHDATQARIHALMLAQARAGRRVVRLKGGDAFIFGRGGEELEYLRAHGVPYEVVPGITAALACAAYAGMPLTHRDHAQSVRMVTAHCRADQDTLDWAGLARDQQTLAFYMGVGQLDYVTARLLEHGRAPATPFALIENGSRPEQRVVTGTLADLPEIARRRGVRPPALLVIGEVAALADTLQWFGQHQRGLPGPQALAA

SEQ ID NO: 85043 - DNA, 1422 bp, Bordetella bronchiseptica RB50
  CDS (1)..(1422): transl_table=11
atgacgctgttcccgattttcgccgacctgacggggcggcgcgtactggtggtaggcggcggcgccgtcgccgtccgcaagacacaggccctgctgcaggccggcgccgaggtcgtcgtgggcgcgccgcgcctggatccggcgctcgccgccctggccgagcagggcggcatcgcccgcctggacggcggcttcgaacccgcctggctggccggcgcctggctggtggtggccgccaccgacgaccgcgccgtcaacgcggcggtcagcgaggccgcgcgggcgcgccgggtattctgcaacgtggtcgacgatgccgaactgtcgtccttccaggtgccgtccgtcgtcgaccggtcgccgctgatcgtggccatctcctcctcgggcgtggcgccggtgctggcgcggcgcctgcgcgagcgcatcgagtcgctgttcgaccattcgctcggccagctggcggccctggcggcgcgctatcggccgcgcatccgcgccgcccgccccgacctcggccagcgacggcgtttctacgactggctgctcgacggcccggtcgcggcgcgcctgcgccagcaacagcccgggctggccgagcaggaactggaacaggcgctgcgcgcgccgcaggccgccccccggggcagcgtcgtgctggtgggcgcgggcccgggcgaccccggcctgctgacgctcaaggcgctgcgcgcgctcaatgaagccgacatcatcctgtacgaccgcctggtcagcgagggcgtgctggcgctggcgcgccgcgacgctgaacgcgtgcccgtgggcaagctgcccggcgaagaccacgacgccacccaggcgcgcatccacgccctcatgctggcccaggcgcgcgccggccggcgcgtggtgcgcctgaaaggcggcgacgccttcatcttcggacgcggcggcgaagagctggaatacctgcgcgcgcacgacgtgccgtacgaggtcgtgcccggcatcaccgcggcgctggcctgcgccgcctatgccggcatccccctgacgcatcgcgaccatgcgcagtcggtgcgcatggtcaccgcccactgccgcgccgaccaggacaccctggactgggccggcctggcccgcgaccagcagaccctggcgttctacatgggcgtgggccagctcgattacgtcaccgcgcgcctgctcgaacacggccgcgcgccggccaccccgttcgccctgatcgaaaacggcagccggcccgaacagcgcgtcgtcaccggaacgctggccgagctgcccgagatcgcgcgccggcgcagcgtgcgccccccggcgttgctggtcatcggcgaagtcgccgccctggccgacaccctgcaatggttcggccagcaccagcacggcctgcccggcccgcaggccctggccgcctga

SEQ ID NO: 85044 - protein, 473 aa, Bordetella bronchiseptica RB50
MTLFPIFADLTGRRVLVVGGGAVAVRKTQALLQAGAEVVVGAPRLDPALAALAEQGGIARLDGGFEPAWLAGAWLVVAATDDRAVNAAVSEAARARRVFCNVVDDAELSSFQVPSVVDRSPLIVAISSSGVAPVLARRLRERIESLFDHSLGQLAALAARYRPRIRAARPDLGQRRRFYDWLLDGPVAARLRQQQPGLAEQELEQALRAPQAAPRGSVVLVGAGPGDPGLLTLKALRALNEADIILYDRLVSEGVLALARRDAERVPVGKLPGEDHDATQARIHALMLAQARAGRRVVRLKGGDAFIFGRGGEELEYLRAHDVPYEVVPGITAALACAAYAGIPLTHRDHAQSVRMVTAHCRADQDTLDWAGLARDQQTLAFYMGVGQLDYVTARLLEHGRAPATPFALIENGSRPEQRVVTGTLAELPEIARRRSVRPPALLVIGEVAALADTLQWFGQHQHGLPGPQALAA

SEQ ID NO: 85045 - DNA, 786 bp, Prochlorococcus marinus subsp. pastoris str. CCMP1986
  CDS (1)..(786): transl_table=11
atggagattaatgtgcccggtatagtttatttagttggagcaggtcctggtgaccctgagctgctaactttaaaagccttacgacttatcaaaagttgtgatgctttggtccatgatgcgttagtttctccccaaatcataaaggagactaataagaaaactgaaatatttaatgtaggtaaaagggctgggttgtgttctgttcctcaggctgatactaatttacttattgtgaaattagcaaaagaaggaaagaatgttgtaaggcttaaaggaggtgatccttttgttttttcacgaggtggtgaagaagtatcttttttagaaaaaaatgggatttcagttgaaattgtccctgggataacttctggaatagctgctccttcaaattttgggatcccattaactcatcgagaagcaggaagctctataacttttgtcactggacatgaagatattaataaagataaaaagactgttaattggagattattagctaaatcatctgatggtttagtaatttatatgggcatgagaaatataggatttattgttaaagaattactaataggcggtttggatgaaaatactaaatgtgctgttattcaagaagcaactttaaataatcaaaaatgtttaatttcagaattaaagaatttggcagagacaataagtaacaaaggtttctcttcaccatcgattatcgttatcggaagtattgttgggtttaaagttaataactatataaataacctatctgatgctttttttccagaaaagaaataa

SEQ ID NO: 85046 - protein, 261 aa, Prochlorococcus marinus subsp. pastoris str. CCMP1986
MEINVPGIVYLVGAGPGDPELLTLKALRLIKSCDALVHDALVSPQIIKETNKKTEIFNVGKRAGLCSVPQADTNLLIVKLAKEGKNVVRLKGGDPFVFSRGGEEVSFLEKNGISVEIVPGITSGIAAPSNFGIPLTHREAGSSITFVTGHEDINKDKKTVNWRLLAKSSDGLVIYMGMRNIGFIVKELLIGGLDENTKCAVIQEATLNNQKCLISELKNLAETISNKGFSSPSIIVIGSIVGFKVNNYINNLSDAFFPEKK

SEQ ID NO: 85047 - DNA, 786 bp, Prochlorococcus marinus str. MIT 9313
  CDS (1)..(786): transl_table=11
atgagctctttggactttggcactgtgtatttggtgggtgcaggccctggtgatcctgatttgctcacactgaaggcttatcgtctgcttcgccagtgcggagccttggttcacgatgctctggtgcctaaggaagtactcgagttagtgcccgagtcttgtgaacggcattttgttggtaaacgtcgagaacgtcattgggttccacagtccaagacaaatgagttgcttgttgaattggctcagagtcattcctgtgtagtacgcctaaaaggtggtgatccttttttgtttgggcggggtggtgaggaggccgcctatttgcagagtcatggggtatcggtggaggtggtccctgggattacagcggggatggctgcgccggcctatgtgggtattcctctgacccatcgttgtggtggtagttctgtcacctttgtgacaggtcacgagaagatcgacaaacagcgcccttctgtgaattggaaggatcttgctagcgcaagtgacagcctggtgatttatatgggtttgcataaccttgcttatatcgtcgaagagttgattgccggtggactcgatccagctacgtccgcagcaatcattcaacagggcactgtcgtaggtcagcgctacctcaaagctcccttggaacagttggttcaaagggtgcagagcgaagggtttgcagcgccgtcgattgtgattgtgggtgcagtagttgatgaacaggttgcagagtgtgctcctcagccggctgaggttgtgatgccgatcaagtcttga

SEQ ID NO: 85048 - protein, 261 aa, Prochlorococcus marinus str. MIT 9313
MSSLDFGTVYLVGAGPGDPDLLTLKAYRLLRQCGALVHDALVPKEVLELVPESCERHFVGKRRERHWVPQSKTNELLVELAQSHSCVVRLKGGDPFLFGRGGEEAAYLQSHGVSVEVVPGITAGMAAPAYVGIPLTHRCGGSSVTFVTGHEKIDKQRPSVNWKDLASASDSLVIYMGLHNLAYIVEELIAGGLDPATSAAIIQQGTVVGQRYLKAPLEQLVQRVQSEGFAAPSIVIVGAVVDEQVAECAPQPAEVVMPIKS

SEQ ID NO: 85049 - DNA, 789 bp, Synechococcus sp. WH 8102
  CDS (1)..(789): transl_table=11
gtgaccaacgctgaacaaaccggaaccgtttatctggtgggagccggtcccggcgatcccgaattgctcacgctgaaggcgcatcggctgctgagccagtgcgatgccctggtgtacgactcgctggtgcccagagaagtgctggatcttgtgccggcgtcctgtgagcgccgttttgtcggcaagcgtcgcggacatcattcggtgccacaacccagcacgaatgccgtgctcgttgaaatggcccagaagcacagcacggtggtgcgtttgaaggggggtgatcctttcctgtttggtcgtggaggggaagaagcggcttacctggcggagcgaaacatccctgttcaagtggtgcctggtgtcaccgctggtattgccgcccctgcctacgccgggattcccgtcacccaccggcgggcgggctcatcggtgaccttcgtcaccggtcatgaggaaatcgacaagcgccgtccctccgtggattggcgcgctttggccacggccagtgacggattggtgatctacatggggctccacaacctgccccggatcgcagaggagctgatggcgggtggtttggccgcgacaacccccgtggcggtgatccagcaggggacggtggcggggcaacgctgcctcaaagccaccttggtagacgttgccgatcaatgccgagccgaagccttcaagtcgccctcgatcgttgtggtgggtgaggtgattgatcagcaggttgaagcttgcaggccctcaccggcagcggtcacgatgccgattctgttctga

SEQ ID NO: 85050 - protein, 262 aa, Synechococcus sp. WH 8102
MTNAEQTGTVYLVGAGPGDPELLTLKAHRLLSQCDALVYDSLVPREVLDLVPASCERRFVGKRRGHHSVPQPSTNAVLVEMAQKHSTVVRLKGGDPFLFGRGGEEAAYLAERNIPVQVVPGVTAGIAAPAYAGIPVTHRRAGSSVTFVTGHEEIDKRRPSVDWRALATASDGLVIYMGLHNLPRIAEELMAGGLAATTPVAVIQQGTVAGQRCLKATLVDVADQCRAEAFKSPSIVVVGEVIDQQVEACRPSPAAVTMPILF

SEQ ID NO: 85051 - DNA, 1413 bp, Chromobacterium violaceum ATCC 12472
  CDS (1)..(1413): transl_table=11
atggagttttttccgatatttctcaagctgcggcatcagcgctgcctgctggtgggcggcggcgaggtggccttgcgcaaggcgcggctgctgctggcggccggcgcgtcgctgcaggtggttgcacccgagctggcgccggaattggctgacttggccgagcgcggcgagctggagcacctgcccggacgctacgcgcccgcgctgctggacggcatgcggctggcggtggcggccaccgacgacgccgaggtgaaccgcgcggtggcggccgacgccgaagcgcgcggcatcctggtgaacgtggtggacgacgccgaggcgtcgcgctacatcagcccggccatcatagaccgttcgccgctgatggtggcggtggccagcggcggcagcgtgccggtgctggcgcgctcgatccgcgcgcggctggaaagcctgatcccggcgggctacggccggctggcgcgcttcggttcctctttccgcgacgcggtgaaggcgcgcttccccgatgtcgatgcccgccgccgtttctgggaaaccgtgctggaagggccgctggccgacgcggtgatgaacggagacgaggccgcggcgcgcgccgagatggagaagcggatcgccgccggcggcgccgaccgcgccggcgcggtctacctggtgggcgccggccccggcaacccggacttgctgaccttccgcgcgttgcggctgatgcagcaggccgacgtggtgctgtacgacaagctggtggcgccggagttgctggagctggtgcggcgcgacgccgagcgcgtctacgtcggcaaggcgcgggccaaccacgcgctgccgcaggacgacatcaaccaactgctggtggatctggcgcggcaaggcaagcgggtgctcaggctcaagggcggggatccgttcaccttcggccgcggcggcgaggagatcgccacgctggccgagcacggcatcgccttcgaggtggtgcctggcatcacttccgccagcggcgcggccgcctacgccggcatcccgctgacccaccgcgactacgcgcagtcggtgaccttcgtcaccggccacaagcaggacggcagcattgatctcgactggcaggcgctgacccgtccgcagcagacggtggtggtctatatgggcgtgtccaccgcggccgagctgtgccaggccttcgtcgacaatggccgcgcggcgtccacgccggcggcggcggtggagtgggccaccaccgagcgacagcgcacggtatgcggcactttggccgcgctgcccggtctgatggcctcgcacggcatcgcgtcgccggcgctgatcatcgtcggggaagtggtggaattggcggacaagctgtcctggtaccgccgcagcgagaattcagctgttacaattcaggaagattga

SEQ ID NO: 85052 - protein, 470 aa, Chromobacterium violaceum ATCC 12472
MEFFPIFLKLRHQRCLLVGGGEVALRKARLLLAAGASLQVVAPELAPELADLAERGELEHLPGRYAPALLDGMRLAVAATDDAEVNRAVAADAEARGILVNVVDDAEASRYISPAIIDRSPLMVAVASGGSVPVLARSIRARLESLIPAGYGRLARFGSSFRDAVKARFPDVDARRRFWETVLEGPLADAVMNGDEAAARAEMEKRIAAGGADRAGAVYLVGAGPGNPDLLTFRALRLMQQADVVLYDKLVAPELLELVRRDAERVYVGKARANHALPQDDINQLLVDLARQGKRVLRLKGGDPFTFGRGGEEIATLAEHGIAFEVVPGITSASGAAAYAGIPLTHRDYAQSVTFVTGHKQDGSIDLDWQALTRPQQTVVVYMGVSTAAELCQAFVDNGRAASTPAAAVEWATTERQRTVCGTLAALPGLMASHGIASPALIIVGEVVELADKLSWYRRSENSAVTIQED

SEQ ID NO: 85053 - DNA, 837 bp, Chromobacterium violaceum ATCC 12472
  CDS (1)..(837): transl_table=11
atgacgggcaaggtttacctgataggcgccggccccggcgacctggacatgctgacgctgaaggccgcgcgctgcctgcagctggccgacgtggcgctggtggacgatctggtccatccggacattcgcgccatgctgcggccggacgccgaaatcgtgccggtcggcaagcgcggcggctgcccgtcggcgtcgcaagccgccatcgaacagcggatggtcgacgaagcccacgccggcaaaacggtggcgcgcctcaagggcggcgatcccttcgtcttcggccgcggcggcgaggaaatgctgacgctgcaagcggccggcgtcgaggtggagatcgtcaacggccttagcgccggcctggcggtgccggccacgctgggcattccgttgacccaccgcagcttcgtccacggcgtgaccttcgtctccggccatccgcatcaggacggcgacgagcccaactggcaggcgctggcgcaaagcggcatgacgctggtgatctatatgggcgtcaaacggctgccgctgatccgcgccgagctgctgcgccacggcctgaaagccgacaccccggcggcggcgatagaaaacggcacgctgccgcagcagcgccaggtgctgagcaccctggacgctttggaacaagacatgggcgcggccggcatccacagcccggcgctgatcgtcatcggaccgacggtggcgctggcgtcctgtagcccctcagcactcgagcgcagcgaggctcccttgcagggcaagggcggcatgcgtgcgagccttgaggctcgctcagcggaaggatgggagcggatcaagatggctgccgactga

SEQ ID NO: 85054 - protein, 278 aa, Chromobacterium violaceum ATCC 12472
MTGKVYLIGAGPGDLDMLTLKAARCLQLADVALVDDLVHPDIRAMLRPDAEIVPVGKRGGCPSASQAAIEQRMVDEAHAGKTVARLKGGDPFVFGRGGEEMLTLQAAGVEVEIVNGLSAGLAVPATLGIPLTHRSFVHGVTFVSGHPHQDGDEPNWQALAQSGMTLVIYMGVKRLPLIRAELLRHGLKADTPAAAIENGTLPQQRQVLSTLDALEQDMGAAGIHSPALIVIGPTVALASCSPSALERSEAPLQGKGGMRASLEARSAEGWERIKMAAD

SEQ ID NO: 85055 - DNA, 1527 bp, Gloeobacter violaceus PCC 7421
  CDS (1)..(1527): transl_table=11
atgccgggtacggtctatctggtgggggcgggaccggccggggccgagtatttgaccgtccgcggccgggagctgttggagcaggccgaggtcgttctctacgacgatctggcagacccgcacttgctgaaactcgctagtgcggcccaactcatcgatgtcggcaagcgggccggccggccgggagccgaccagggcgagatcggccgcctgctggtaacccactgtcaggcgggccgtagggtggtgcggctaaaggcgggcgacccgcttgtctttggccgcgctgcggcggaactaggagcgctggtggcggccgggtgcaactttgagatcgtgccgggggtgagttccgcccttgccgcctgcgcgtttgccggcatcccgctcaccgaccgtgccctcggccgccacttttgcgtgatgagtggccacgatatcggcaccctaccctggcagcatctggcccacatcgacacgctcgtcatcttgatgggcacccgccacctcgaggcgatcgccgagcagctgatggactacggccgtccggcggcgatgccggtggcggtgatcttctgggcagggcggtccgagcagcgcacggtggtgggtaccctcgaagacatcgcaagccgggttgcgccctccggcgagccggcggtgatcgtcgtgggaccggtggtccgccgccgcgagtgcttcgactggtttgaccgccgagcgctgtttggaaaacacatcctcgtcacccgcgcggccgatcaagccgggggattcagtgcccaactggaggcactgggtgcctcggtcctggagatgcccgccctggtagtcactgcgcccaccagctgggaaccgctcgatcgggccattgcccagctggccggctaccgctggctgttgctgacctccgccaacggcgtggaggcgttctttgcgcgtctgacccaccacagacgcgacctgcgcgccctgggcggggtgcgcgtcgccgccgtcggacccaagactgcccaggccgcccgcacccatggactgatctgcgacttcgtaccgggtcagtacgtctccgacggactgcttaccgattttccggacatcgccgggatctatggggagcgggtgctctttgtgcgggtcgaatccggaggccgcgagacgatcaccgagcagtttcgccgctggggcgctcttgtcgatgaggtcgcaggctacgctaccggctgcccggatagcgccgagccgggctgcgtcgccgctctacgcgcaggccggatcgactgtgccaccttcgccagcgccaaaaccgtgcgccattttgcccgcctcctccaaggcgaggagctggaatcgcttctgagaaaagtgcgtattgcttcgatcgggccgcagaccagtgctgcctgccgcgagacactggggcgggtggacgtcgaggccgaagtctttaccctcgatggactcgcccaggcgattgtcgccgatctcggcaccggcagggcgaccgggccgacagacgaacaatga

SEQ ID NO: 85056 - protein, 508 aa, Gloeobacter violaceus PCC 7421
MPGTVYLVGAGPAGAEYLTVRGRELLEQAEVVLYDDLADPHLLKLASAAQLIDVGKRAGRPGADQGEIGRLLVTHCQAGRRVVRLKAGDPLVFGRAAAELGALVAAGCNFEIVPGVSSALAACAFAGIPLTDRALGRHFCVMSGHDIGTLPWQHLAHIDTLVILMGTRHLEAIAEQLMDYGRPAAMPVAVIFWAGRSEQRTVVGTLEDIASRVAPSGEPAVIVVGPVVRRRECFDWFDRRALFGKHILVTRAADQAGGFSAQLEALGASVLEMPALVVTAPTSWEPLDRAIAQLAGYRWLLLTSANGVEAFFARLTHHRRDLRALGGVRVAAVGPKTAQAARTHGLICDFVPGQYVSDGLLTDFPDIAGIYGERVLFVRVESGGRETITEQFRRWGALVDEVAGYATGCPDSAEPGCVAALRAGRIDCATFASAKTVRHFARLLQGEELESLLRKVRIASIGPQTSAACRETLGRVDVEAEVFTLDGLAQAIVADLGTGRATGPTDEQ

SEQ ID NO: 85057 - DNA, 741 bp, Gloeobacter violaceus PCC 7421
  CDS (1)..(741): transl_table=11
ttgccatcgcctagaggaaaagtctacctggtgggggccggaccgggcgatcccggacttttgactgtgcgcggcaagaccctcatcgagcactgcgatgcgattgtctacgacgcgctggtcagccctgaaattctggcgctcatcccggcgcgtaccgagcgcctctacgcaggaaagcgctccgggcgtcactcgctgacgcaagacgaaattaccgagcggctcatcgccctggtggagcggcacgcgagcgtggtccgcctcaaaggcggcgatccgttcatctttggccgggggggcgaggaagtcgccgccctgcgcgccgccggtgtcgcagtagaagtggtccccggcattaccgccggtatcgccgctccggcctacgcgggcattccgctcacccaccgcgacatgagcgcctcggtggcctttgtcaccggccacgaggccgtcgagacctaccgtccggagatccgttggggagagttggcccggggggctgagacgctggtgatctatatgggcgtgctgcagattgaatcgatcgtcgagcggttgttggcggcggggcgcgcccccgagacgcccgtggcgctgattcgctggggaacgactcctcgtcaggaggtactgaccggtaccctcgctacgatcgccccccgggtgcgcgcggcccacttcgagcctccggcggtgatcgtcgtgggcgaggtggcgagactggctcacaccggctga

SEQ ID NO: 85058 - protein, 246 aa, Gloeobacter violaceus PCC 7421
MPSPRGKVYLVGAGPGDPGLLTVRGKTLIEHCDAIVYDALVSPEILALIPARTERLYAGKRSGRHSLTQDEITERLIALVERHASVVRLKGGDPFIFGRGGEEVAALRAAGVAVEVVPGITAGIAAPAYAGIPLTHRDMSASVAFVTGHEAVETYRPEIRWGELARGAETLVIYMGVLQIESIVERLLAAGRAPETPVALIRWGTTPRQEVLTGTLATIAPRVRAAHFEPPAVIVVGEVARLAHTG

SEQ ID NO: 85059 - DNA, 1413 bp, Photorhabdus luminescens subsp. laumondii TTO1
  CDS (1)..(1413): transl_table=11
gtggattacttaccgatatttgttgagctgaaagggcggcttgtattacttgtcggtggtggagaggtggccgcacgtaaggcgactctactactacgggcaggtgcattattacaggttgtcgcgcctgaattgtgctctgaattacaacagcgttatcaagctggtgagttggaatggtatcagggagagttccaacctgaatatcttgatggcatctttttagttattgctgcgactgatgatcgtattctaaatcatcaggttttttctgaagctgataagcgcagtattttggtcaatgtcgttgatgatcaagttcattgctcatttatttttccatcaattattgaccgttctccggttttggtggcgatctcatcagcgggaaaagcgccggtattagcgcgtttaatccgggagaaactggaggcattactaccttccagtcttggtacgatggcaaaaatcgccgggaagtggcgtgagcgagtaaaacagcgattaacttccatgcgccagcgtcgttctttttgggaacaggctttcaatggtcgtttcgctatgttggttgcaaacggtcaaatccagcaggcggaaaaacagcttgagcaacaactagaacagtctgatttgcagggagaactggctctggttggggctggtcctggtgatccgggattactgacgctaaagggattgcaggttattcagcaggctgatgtggtgctttatgatcatctggtcagcagtgatgtactggatttgattcgccgtgatgcagataaaatttgcgttggcaaaagagcgggtaatcactctgtttctcaggaggagactaaccgattgatagtgaaatttgccagacaggggaaaaaagtcgttcgtcttaaaggcggtgatccctttatttttggccgtggtggtgaggaattacaggttgcagcatcagcaggcattccttttcaggttgtaccgggaattactgccgccatcggagcgacggcttacgcgggtattcctttgactcacagggaacactcacagagtatcacttttattacaggtcattgccgagaaaaggggaatgagctggattggccggctttagccagaggtcatcagactctggtgatttatatggggacggtcaaagccgccttgataagtcatcaattaattttacatgggcgagcggaagatacaccggtagccgtcattggttgtggtactcgtttagagcagcaagtgttaaccggcactttgcttgaactggaacagttagcacagcaggccccgtcgccggccttactagtggtgggagaggtggctcaacttcaccatcagatagcttggtttgggcagcaatctattgccaagataagccgtccggcagtagtcgattttgcataa

SEQ ID NO: 85060 - protein, 470 aa, Photorhabdus luminescens subsp. laumondii TTO1
MDYLPIFVELKGRLVLLVGGGEVAARKATLLLRAGALLQVVAPELCSELQQRYQAGELEWYQGEFQPEYLDGIFLVIAATDDRILNHQVFSEADKRSILVNVVDDQVHCSFIFPSIIDRSPVLVAISSAGKAPVLARLIREKLEALLPSSLGTMAKIAGKWRERVKQRLTSMRQRRSFWEQAFNGRFAMLVANGQIQQAEKQLEQQLEQSDLQGELALVGAGPGDPGLLTLKGLQVIQQADVVLYDHLVSSDVLDLIRRDADKICVGKRAGNHSVSQEETNRLIVKFARQGKKVVRLKGGDPFIFGRGGEELQVAASAGIPFQVVPGITAAIGATAYAGIPLTHREHSQSITFITGHCREKGNELDWPALARGHQTLVIYMGTVKAALISHQLILHGRAEDTPVAVIGCGTRLEQQVLTGTLLELEQLAQQAPSPALLVVGEVAQLHHQIAWFGQQSIAKISRPAVVDFA

SEQ ID NO: 85061 - DNA, 786 bp, Photorhabdus luminescens subsp. laumondii TTO1
  CDS (1)..(786): transl_table=11
atgatgaatagcggaaaagtttggttggtcggtgccggtcccggcgatgcggcgctaattactgtcagaggattacactgtatccgtcaggctgaggcgctggtgtatgatcgattagtcagcccggacctgttatccgaagcacctgatgattgcaaaatgattaatgtcggcaaaacgccgaactatcacccagtgccgcaacagcaaattaatcagatcttggtagagtgtgcgcaacaagggttaaatgtcgtccggctaaaaggaggcgatccttatgtgtttgggcgtggtggtgaagaagcggaagctttagcactggcgaagatcccttttgaagtggtaccgggcatcagttcatccattggtggtctggcttgtgccgggatcccggtcacccatcgtgattatgcctcaggttttcatgttgttaccggccatctgcgtcaggaaaatgaatcacaggattgggcgacactggcaaagttggaaggtacgttggtgatcttaatgggaatgactcaactggcgagcatctgtgagcaactgatcgcaggcggtaaagcgccgacaacgccggcggcggttgtgatgtatgctagccatcagcaacagcaggttgccagcgcaaccctgctaacgttggctcagcaggtagccgctcagggattgagtgcaccagcattgattgtgattggtgatgtggtgcgtttgcgggaaacactggcttttagtcgggatcatctattgttgtcttctgttccatcactgatggcactctga

SEQ ID NO: 85062 - protein, 261 aa, Photorhabdus luminescens subsp. laumondii TTO1
MMNSGKVWLVGAGPGDAALITVRGLHCIRQAEALVYDRLVSPDLLSEAPDDCKMINVGKTPNYHPVPQQQINQILVECAQQGLNVVRLKGGDPYVFGRGGEEAEALALAKIPFEVVPGISSSIGGLACAGIPVTHRDYASGFHVVTGHLRQENESQDWATLAKLEGTLVILMGMTQLASICEQLIAGGKAPTTPAAVVMYASHQQQQVASATLLTLAQQVAAQGLSAPALIVIGDVVRLRETLAFSRDHLLLSSVPSLMAL

SEQ ID NO: 85063 - DNA, 876 bp, Vibrio vulnificus YJ016
  CDS (1)..(876): transl_table=11
atgagcatggcagacaaggacacagcaacggttttcccctttaagcgccctagcgttgtggcaagtaatcctacggctggccgttatggtcacagccagctcaagcatggtgaagtggctttagtcggtgcgggtccgggtgacccggagctactgacgctcaaagcactcaattatctacagcaagccgaagtcgtgctgtacgactacctcgtctctgatgagatcatggctctggtacccaatgacgccattttagtgtgtgtcggtaagcgagcgggtcaccacagcgtgcctcaagagaaaaccaaccaactcctcgtggactttgccaagcaaggttacaaagtcgtgcgcatcaaagggggggatccgtttgtttttggccgtggcggcgaagaactagaagtgttagccgatgctggcattacctttcaagtggtcccaggtattactgccgcagcgggtgccacagcgtatgcgggcataccgcttacccatcgtgattacgcacaatccgctatgtttattacagggcatctcaaagcagaaagtgaccaattggattggtcgactctggcaagagggcagcaaacactggtgatttatatggggttgatgaagtcgaattacattcaagaacaattgatcaaacacggtcgtagagcacaaacaccgattgcaattatcgaacgtggaactcagttgtcacagaaagtttttaaaggtcaattgtcggaacttgctgatttagctaagaaagcagaggctccagcactgattgtgatcggtgaagtggtgcagttgtctcagaaattagattggttcttatctggtactcgaatcaacaatagtgctattgccaactcaatataa

SEQ ID NO: 85064 - protein, 291 aa, Vibrio vulnificus YJ016
MSMADKDTATVFPFKRPSVVASNPTAGRYGHSQLKHGEVALVGAGPGDPELLTLKALNYLQQAEVVLYDYLVSDEIMALVPNDAILVCVGKRAGHHSVPQEKTNQLLVDFAKQGYKVVRIKGGDPFVFGRGGEELEVLADAGITFQVVPGITAAAGATAYAGIPLTHRDYAQSAMFITGHLKAESDQLDWSTLARGQQTLVIYMGLMKSNYIQEQLIKHGRRAQTPIAIIERGTQLSQKVFKGQLSELADLAKKAEAPALIVIGEVVQLSQKLDWFLSGTRINNSAIANSI

SEQ ID NO: 85065 - DNA, 843 bp, Vibrio vulnificus YJ016
  CDS (1)..(843): transl_table=11
ttgctgataaaaagtaaacatttccctcacagagaggcgctgagtggtactctttatcatcaaatttattcaataggctcaaccatgacgctaacttctttatcctcattgcaaaatcaaggttttgtttctcttgtcggcgcgggccctggcgatccggatttgctcacggtaaagggctaccgagtgattcaacaagcggaagtggtggtatacgaccgtttggtttcaccggagattctcgcgttagccaacgaaaaggcggaaatgatctacgtgggtaagaagcttgattttcattgtgttccgcaagaagagatcaaccaaattctggtgagaaaagcgttggaaggcaaacgcgtggttcgcttgaaagggggcgactcgttcatcttcggtcgtggtggggaagagcttgaagagttagcggaacatggtgtgcgttttgaagtggtgccgggcatcaccgcggcggcgggggcaacggcctatgctggtattccgcttacccacagagatcacgcgcaaagcgtgcagtttattactgggcacattcaaaaagatggcaaagagatagagtggccatcattggcgcaggccaacaacactttggtgttttatatggggttaaagcagtgccgctatatcgcggagaaattgcttgaaaacgggttggatgcgtcaacgtcgtgcgcgattattgaaaatggcacccgtcgcgagcagcgcgtattgacgggcagcctgacacaactccctgaattggccactcaagcaatcagtcccgcgttgatcgtggtcggcagcgtgacttcgctgcatgacaaactcaagtggttttaa

SEQ ID NO: 85066 - protein, 280 aa, Vibrio vulnificus YJ016
MLIKSKHFPHREALSGTLYHQIYSIGSTMTLTSLSSLQNQGFVSLVGAGPGDPDLLTVKGYRVIQQAEVVVYDRLVSPEILALANEKAEMIYVGKKLDFHCVPQEEINQILVRKALEGKRVVRLKGGDSFIFGRGGEELEELAEHGVRFEVVPGITAAAGATAYAGIPLTHRDHAQSVQFITGHIQKDGKEIEWPSLAQANNTLVFYMGLKQCRYIAEKLLENGLDASTSCAIIENGTRREQRVLTGSLTQLPELATQAISPALIVVGSVTSLHDKLKWF

SEQ ID NO: 85067 - DNA, 999 bp, Vibrio vulnificus YJ016
  CDS (1)..(999): transl_table=11
gtgcggcaccaattgcgggtcgtgcattccgcagctcaaacaatattttgcccctgccatcgcgcagccaagccgttaatccactcggcaacgaaggaaagcattatggatacaagcatcagcactcaattacgcgatcgcagctatagcgaacatgcgattagttcccactcattacgcggttcgcaagccaagaatcggccaacgtcaactgggacggccgcatcgggttttgtctacttagtcggcgcagggccgggcgatccggaactgctgacggtgaaggcggtcaacgcgctgcaacagtgcgatctgttggtttatgaccgcttggtcagcaaagaaattctggcattggtaccagagcacgtggacaaaatttatgtgggtaaacgctgtggcgagccgagtctaaagcaagatgagatcaatcagatcctcgtcagctttgcgcaacttgggcgcaaaatcgttcggctcaaagggggggaccccttcatctttggccgtggcggcgaagaggcgttagcgctggtcgagcacaacattcgttactgtgtggttcccggcatcacggcggccatcggctgtgcggcgagctgcgccattccgctcacacaccgagaagttgcgcgcagtgttacgctcgtgactggcactgtggtgacggggtcacttcctgcttggtctgcgattgttgaagcggggcaaacattggtgttttacatgggattggaatcggcacgcgcgatcgaacaaggtttgcgtgggcagggggttcgtgcagatttcccggtcgctatcgtgacgcaaggttcgacacctgagcagaaaacgtacgtgacaaccctggccacgttggaaaaaacagcagtagcgctaaaaggggtgagtccggcattgatcattatgggggaagtcgtcaaactgcgggaaagattaaagaccacccttgcggcagtcgcgcccatggctaacgcctcatttgttgatgagtga

SEQ ID NO: 85068 - protein, 332 aa, Vibrio vulnificus YJ016
MRHQLRVVHSAAQTIFCPCHRAAKPLIHSATKESIMDTSISTQLRDRSYSEHAISSHSLRGSQAKNRPTSTGTAASGFVYLVGAGPGDPELLTVKAVNALQQCDLLVYDRLVSKEILALVPEHVDKIYVGKRCGEPSLKQDEINQILVSFAQLGRKIVRLKGGDPFIFGRGGEEALALVEHNIRYCVVPGITAAIGCAASCAIPLTHREVARSVTLVTGTVVTGSLPAWSAIVEAGQTLVFYMGLESARAIEQGLRGQGVRADFPVAIVTQGSTPEQKTYVTTLATLEKTAVALKGVSPALIIMGEVVKLRERLKTTLAAVAPMANASFVDE

SEQ ID NO: 85069 - DNA, 810 bp, Corynebacterium diphtheriae NCTC 13129
  CDS (1)..(810): transl_table=11
atgaaaaaattcacggagatttcaagccggaataggaagctgtttaaactggcaggtatgttttcgtcttcagaatcgtggaccgcttcggttagcctcattggtggtggccctggtgcgtgggacctcataacagttcgaggtatgcaccgtttgcaacaagcagatgttattttggcagatcatctggggccggctagtgagcttgctcaattatgcgatgtatccacgaaggacatcattgatgtatcgaagttgccgtatggtaagcaggtggctcaatctaagattaatgaactcttgattgagcatgctcaagctggcaagaaggttgcgcgactcaaaggtggcgatccttatattttcggtcgcggttttgaagaactccaagcgtgtgccaagcatggaattgcgtgcgaggtggttcctggtgttaccagtgcggtgtcggttccggcgctggctggaattccgattactcaacgcggtgtagttcattcctttaccgttatttctgggcatgtccctccgcagcatccgcagtcgctaaatgattgggaagcattagcccgcacaggaggtacgttgtctgtgattatgggcgtgaaaaacgctggtgccatcgctcaagcgcttatcgacgctggtcgaggcgctgataccccggttgcggtcgtgcaagaaggatcgacagaaaaccaaaagtcgtttaaaacgactttggctcagttggggcaagcgatgaaagataatgacatcaagcctccagctgtctatgtcattggtgaggtggcaggccttcaggcctag

SEQ ID NO: 85070 - protein, 269 aa, Corynebacterium diphtheriae NCTC 13129
MKKFTEISSRNRKLFKLAGMFSSSESWTASVSLIGGGPGAWDLITVRGMHRLQQADVILADHLGPASELAQLCDVSTKDIIDVSKLPYGKQVAQSKINELLIEHAQAGKKVARLKGGDPYIFGRGFEELQACAKHGIACEVVPGVTSAVSVPALAGIPITQRGVVHSFTVISGHVPPQHPQSLNDWEALARTGGTLSVIMGVKNAGAIAQALIDAGRGADTPVAVVQEGSTENQKSFKTTLAQLGQAMKDNDIKPPAVYVIGEVAGLQA

SEQ ID NO: 85071 - DNA, 750 bp, Rhodopseudomonas palustris CGA009
  CDS (1)..(750): transl_table=11
atgtccaagttgattgaaagcgctccggcagccggccgcatcacgctggttggcgccggcccgggtgatgccgacctgctgacgctgcgcgcgatcaagcgcctgcaggccgccgacgtcgtgctgtatgacgacctcgccggcgaagacttcatggcctatctgcatcccgacgccgagctcgtcgcggtcggcaagcgcgccggccatccctcgccgcgccaggacgaagtcagccgtctcgcgatcagctacgcgctccgcggcaagcatgtagtgcggctgaaggccggcgatccgacgctgttcgcccgcgccgacgaggagctgcgcgccgcgcgcgatgccggcatcgccgtcgagatcgtccccggcatcaccaccgcgactgcagccgcagctgcgatcggcgcgtcgctgaccaagcgcggcgtcgcgcgccgggtgcagttcgtcaccggccatgatgtcgacggccgcctgccgcgcgatctcgatctcgcagcactggccgacgcgacggccacgacctgcgtctatatgggcaaggccaccttccccgcccttgtggcgcaactgatcgcacgcggcctgagcgcggcgacgccggccgtgatggtcgaaagcctcggcacagacgcgaccaacgtgcagcgaggcagcgtcagcgagatcgccgcccgccttaccgccgatcggccgtccggcccctgcatgatcctgtacggtgctgcattggaagagagctga

SEQ ID NO: 85072 - protein, 249 aa, Rhodopseudomonas palustris CGA009
MSKLIESAPAAGRITLVGAGPGDADLLTLRAIKRLQAADVVLYDDLAGEDFMAYLHPDAELVAVGKRAGHPSPRQDEVSRLAISYALRGKHVVRLKAGDPTLFARADEELRAARDAGIAVEIVPGITTATAAAAAIGASLTKRGVARRVQFVTGHDVDGRLPRDLDLAALADATATTCVYMGKATFPALVAQLIARGLSAATPAVMVESLGTDATNVQRGSVSEIAARLTADRPSGPCMILYGAALEES

SEQ ID NO: 85073 - DNA, 1437 bp, Rhodopseudomonas palustris CGA009
  CDS (1)..(1437): transl_table=11
atgcgatttcttccagtctttctggatctggcgacggggccagtggtgctggtcggtgccggcgagatggcgcgcgccaagctgcggctgttgctcggcgccggtgcttccgtccgctggtacgtcaccgacggcgaccgcgatctggccggcctgaccgagccggagcggtcgcgcatcagctttccggaaggcgctccgctgcatgccgatctcaccggcgcgatcgcgctgctgtgcgccggggccggcgacgttgccgctccgctcgccgcgaaggcgcgcgcgctcggcgtgccggtcaatgtcatggacgagctgtcgcattcgaccttcatctttccggcgatcgtcgatcgcggcgacgtcgtggtggcgatcggcaccggcgggtcttcgccggtggtggcgcgccgcctccgcgaactgatcgagaccgtggtaccggcgcggatcggcgaactcgccgcgctgatcggccgctggcgcacgccgatcaaggcacggattcctgaattcccgctgcgccgccggttctgggagcgcgtcgtcgacggtccgatcggccgcgcggtgctcgaggggcggctgacggatgccgagaccgaactgaagacaatcgacgatgccaccgactacgcgcggcactcgctcggccgccgcgccgatggtcacgtcagcatcgtcggcgccggtcccggtgatcctgatctactcaccttgaaggcgctgcgggcgctgtcggacgccgacgtggtgttctacgacgagttggtttcgcccgagatcctcgaccgcatccggcgcgacgccaaacgcgtgccggtcggccgccgcgtcggccagccgggcatcggtcaggatgcgatcaacaagctgctgatcgaaaccgcccgctcaggccagcgcgcggtacggctgaagggcggcgatccgttcgtgttcggccgcggcggcgaagaggtcgaagcgctgcgcgaagccggcgtgtcctattcggtggtgccgggcatcagcgcggcgctcggcgcggcgtcgcagttcgaggtgccgctgacctatcgccacgaggcgctgcgcatcaccttcctgaccgcgcacaaggccaaggacgccgaagccgtcgactggtcggcgctgaccgatcagaagatgaccgtcgtggtctatatgggcatgagcgccgcaccgacgatccgtgacgggctgctcgccgccggccgcgcggccgatacgccggtcggcgtgttcgcacgggtgacgcgctccgacgctgtctcggctgtcggcacgctcaatgatctgccggcgctggtcgatgaggtcgacggcggaccggcactgctggtgatcggcgacgtcgtcgcgcactcggcgccgtggcgccagcaacaactcctgcaactcgtctcgacctatcagatggccgccgaatga

SEQ ID NO: 85074 - protein, 478 aa, Rhodopseudomonas palustris CGA009
MRFLPVFLDLATGPVVLVGAGEMARAKLRLLLGAGASVRWYVTDGDRDLAGLTEPERSRISFPEGAPLHADLTGAIALLCAGAGDVAAPLAAKARALGVPVNVMDELSHSTFIFPAIVDRGDVVVAIGTGGSSPVVARRLRELIETVVPARIGELAALIGRWRTPIKARIPEFPLRRRFWERVVDGPIGRAVLEGRLTDAETELKTIDDATDYARHSLGRRADGHVSIVGAGPGDPDLLTLKALRALSDADVVFYDELVSPEILDRIRRDAKRVPVGRRVGQPGIGQDAINKLLIETARSGQRAVRLKGGDPFVFGRGGEEVEALREAGVSYSVVPGISAALGAASQFEVPLTYRHEALRITFLTAHKAKDAEAVDWSALTDQKMTVVVYMGMSAAPTIRDGLLAAGRAADTPVGVFARVTRSDAVSAVGTLNDLPALVDEVDGGPALLVIGDVVAHSAPWRQQQLLQLVSTYQMAAE

SEQ ID NO: 85075 - DNA, 1548 bp, Geobacter sulfurreducens PCA
  CDS (1)..(1548): transl_table=11
atgaccatgtccacagcttcccgcaccaattgccttgtctacctcatcggcgccggccccggcgacccgggcctcattacggttcggggccgggaatgcatcgcacgggccgatgtggtcatttacgattacctggccaacgacgaactcctctccttcgcccgtcccgatgcggaactcatttatgccggcaaggttggggggcagcataaccgggcccagtggcagatcaatgagctcctggtccgcaaggcgcttgagggacgcatcgtggcgcgcctcaagggtggtgatcccttcgtcttcggccggggcggcgaggagtgcgaggccctggtcaccgccggcgtacccttcgaggtggtgccgggagtgactgcgggaatcggggcagcggcctacgccggcatcccccttacccaccgcaacgtcaccacatcggttgcctttgtcacgggtcacgagagcccgggcaagaaatcatcggacatcgattgggaggggctctccctcggcagcggcactgttgtgttttacatgggagtcaagagtctcccgcacattacggaaaacctcatggcccacggccggcgcgccgacaccccggtggccctcgtccgctggggaacccgaccggagcaggaagttctggtgggaacgctggccgacatcgccgacaaggtccgccgcacagggttcaaggcaccggccataaccgttgtgggcgaggtggtccggctgaggaaaacgcttcgctggttcgacaaccggccccttttcggtcgcagtatcatggtcacccgcgccgccgaccaagcgggcgaattcagcgtcatgctccgttccctgggcgcacgggtgcttgagtgtcccaccatcgccatcgcgccacccgagagctgggatgacctcgacagcgccatcagccgcatcgatacctttgactgggccatcttcacctcattcaacgcggttcgcttcttctttcagcggctggacgccgcgggccgtgactcgcgcgccctgggagcctgccggatctgcgtcgtgggcccgaaaacggccgaagcccttgcgccctacggaatccggcccgacctggtggccgcagactataaaggggaaggggttatcgaggcgcttcgcgacgtaccgttggccggcaagcgggtcctgtttcccaaaggggaccgggcgcgggacgtgatccccacgggccttgcagccttcggcgcccatgtcgaggcgccggtcgcctaccgcaacgctgcgcccgacgccctcccggccggcactatcgaggaactggaggaccggcgcatccactgcgtaacgtttacctcttcttccaccgtgcagaacctggcggccattcttggggagaacagaatgctccacctgttggaaggggttattatagcctccatcggccccatcacctcccgcagttgccgcgagctggggctgcaggtccacatcgagccgcaggagtacaccctggcggctctcaccgctgagatggtccgccacttctcggcacccgcctga

SEQ ID NO: 85076 - protein, 515 aa, Geobacter sulfurreducens PCA
MTMSTASRTNCLVYLIGAGPGDPGLITVRGRECIARADVVIYDYLANDELLSFARPDAELIYAGKVGGQHNRAQWQINELLVRKALEGRIVARLKGGDPFVFGRGGEECEALVTAGVPFEVVPGVTAGIGAAAYAGIPLTHRNVTTSVAFVTGHESPGKKSSDIDWEGLSLGSGTVVFYMGVKSLPHITENLMAHGRRADTPVALVRWGTRPEQEVLVGTLADIADKVRRTGFKAPAITVVGEVVRLRKTLRWFDNRPLFGRSIMVTRAADQAGEFSVMLRSLGARVLECPTIAIAPPESWDDLDSAISRIDTFDWAIFTSFNAVRFFFQRLDAAGRDSRALGACRICVVGPKTAEALAPYGIRPDLVAADYKGEGVIEALRDVPLAGKRVLFPKGDRARDVIPTGLAAFGAHVEAPVAYRNAAPDALPAGTIEELEDRRIHCVTFTSSSTVQNLAAILGENRMLHLLEGVIIASIGPITSRSCRELGLQVHIEPQEYTLAALTAEMVRHFSAPA

SEQ ID NO: 85077 - DNA, 777 bp, Bacillus cereus ATCC 10987
  CDS (1)..(777): transl_table=11
atgggaaaagtatatatcgttggagcgggccctggtgatccagatttaattactgtaaaaggattgaaatgcattgagaaagcagatgttattttatacgaccgtctcgtgaataaagaattgctttcttatgcaaagcctgaagcggatttaatttattgcggaaaactaccaaattatcacacgatgaagcaagagacaattaacacgtttcttattaaatatgcgaaaaaaggaaaagttgtaacgaggctaaaaggtggggatccatttgtatttggtagaggaggagaagaagctgaagcgttagcaaagcaaggtgtaccgtttgaaatcgttcctggtatttcagctggaatagctgctcctgcttatgctggtattccagtgacacatcgtgatgcaagtgcaagttttgctattgtgacagggcatagaaaagaagatgctgaagaggaagtgaagtgggaaaatttagcgaaaggtgtagagacgttagctgtatatatgggggttagcaatttaccctacatatgtgagcaactgataaagcatggaaaagataaaagtacgcctgctgctattattgagcggggaacgacatctatgcagcgcacagttgttgggacgttaggaacaattgtagatgttgcgaaaaaagaacaaattcaaaatccgagcatgattgtaattggagaagtcgtccgttttagaggaaaaatccattggtttgagaaacagatagaaagtacgtatcaagtaagtggagtgttataa

SEQ ID NO: 85078 - protein, 258 aa, Bacillus cereus ATCC 10987
MGKVYIVGAGPGDPDLITVKGLKCIEKADVILYDRLVNKELLSYAKPEADLIYCGKLPNYHTMKQETINTFLIKYAKKGKVVTRLKGGDPFVFGRGGEEAEALAKQGVPFEIVPGISAGIAAPAYAGIPVTHRDASASFAIVTGHRKEDAEEEVKWENLAKGVETLAVYMGVSNLPYICEQLIKHGKDKSTPAAIIERGTTSMQRTVVGTLGTIVDVAKKEQIQNPSMIVIGEVVRFRGKIHWFEKQIESTYQVSGVL

SEQ ID NO: 85079 - DNA, 720 bp, Methanococcus maripaludis S2
  CDS (1)..(720): transl_table=11
atgaaagttattttagtcggtgcaggccctggtgacgagggattaatcacattaaaaggcgtagaagcaataaaaaatgcagatgtaatagtttatgatgatttaattggggaaaaacttttaaaatatgctaaaacgggttctgaactcatctatgttggaaaaagaaaaggtaaacattcatacaaacaggaagaaataaacgagatattgattgataaagcaaaagaaaataaaaatgttgtaaggcttaaaggcggagattcttttgtatttggcagaggcggagaagaagttcttgctttaaaaaaagaaggaatagaatatgaaatgatccccggaattacttcttcaatttcagttccagaaatttttggaattcctgtaactcacagaaaagttgcaacgtcatttacggttgtaacgggtcacgaagcaggagacaagaccgaaaaagaaatgcaggtaaaattaagcgaattaaatgcggacacgatagtaatattgatgggaattacaactcttgaaaagcacgtaaaagaactgttgaaaaatccaaaaagaaatgaaaatacgcctgttgcaattttaatggatggaacaagagaaaatcaaagaatggttaaaggaaatttatcaaatattgttgaaaaggcaaaattggaaaatgtatgccctcctggaattattatcgttggaaatgttgtagatgtactttaa

SEQ ID NO: 85080 - protein, 239 aa, Methanococcus maripaludis S2
MKVILVGAGPGDEGLITLKGVEAIKNADVIVYDDLIGEKLLKYAKTGSELIYVGKRKGKHSYKQEEINEILIDKAKENKNVVRLKGGDSFVFGRGGEEVLALKKEGIEYEMIPGITSSISVPEIFGIPVTHRKVATSFTVVTGHEAGDKTEKEMQVKLSELNADTIVILMGITTLEKHVKELLKNPKRNENTPVAILMDGTRENQRMVKGNLSNIVEKAKLENVCPPGIIIVGNVVDVL

SEQ ID NO: 85081 - DNA, 1716 bp, Debaryomyces hansenii CBS767
  CDS (1)..(1716)
atgactaacttattagcgtcactcaagtgctcagacgatattcacttaataattggagcttctaatgtggcgtctttaagaataaactcgatacttgaagcgggtgctaaaccgatacttatatcgaaccaaccatctgaaaaatttccaaaatcaatacaggacaacatagctaaagggaatttgaagcatatagagaaggagtatgaaaatggagatctctcgagtttaggaagaagtgaggttgataacattgtggatagggtatttgtgactttacctatctcgcagtacgaagttaagaaagagatttaccagtcatgtcgtaaattaaggatcccggtcaatgtttcagattctcctgaattttgtacgttttcgttattatctacattcacatctggggacttccaaatgggagtgagtacgctgggaaaaggatgtaaattagctgctagaatcaagagagagttaagccatacgttaccaggtaacattggaagcatctgtgataaaataggggatttgagaaccaggatacaagaagaggacaaattggagttagaaaaattgcagggtgatattgactggattggtgagcacgacgatgatgcgataactactagcaagttgaactctttggttgaggagtttaatatgactaaagaacagagaaagttgcaaaggacgagatggctttctcagatcgttgagtatttccctttgactacgttagcagacttatcgttggaagatttgagtgtggcatacaaggaatacaattcaatagtgaaaaccgaggcagagcctaaggaaccaagccataagaaattgaagaccggcaagaaaggatctatatcattagttggatcaggaccagggtcaatatcgcttttaacactcggagcattacaggaaattcattctgcagatttaattcttgctgataaattggtaccgcaacaggtgctcgatcttataccgaaacatagaaccaaattatttatcgctcgtaaattcccaggaaatgccgagagggctcaaaaagagttattagatatgggacttgaaagcttaatgaaaaatgaaaaagttgtcaggttgaaacaaggtgatccatacattttcggtcgtggtggtgaggagttcaacttctttgctgaacatggatttacgccattagttttaccgggaatcacctctgcattggcagcaccagtattgacaaatataccagctacacaccgtgatgtagccgatcaagtattgatatgtactggtacaggccgtcgtggtactttaccaaaccttccagaattcatcaaatccagaacaacagtgtttttgatggcgttgcatagagttgttgatttaattccaaagttgatcgatgataaaaattgggatcctaacttaccagctgcaattatcgagagagcctcgtgtcctgatcagcgtattgtcagaacaacgttaagtaacgtggctcaagcagtcgaagcatgcggatcaagacctccaggattacttgttactggctatgcctgtgaagttataactaagcctaatacggatgaaaagtgggttatagaagaagggtgtgcatctgctagtaatccacttttagaaccatttctccaattggctagatctataggaaaggatcatctgcacgttctgcaaccacaaacaatatctctagaacaaacagcataa

SEQ ID NO: 85082 - protein, 571 aa, Debaryomyces hansenii CBS767
MTNLLASLKCSDDIHLIIGASNVASLRINSILEAGAKPILISNQPSEKFPKSIQDNIAKGNLKHIEKEYENGDLSSLGRSEVDNIVDRVFVTLPISQYEVKKEIYQSCRKLRIPVNVSDSPEFCTFSLLSTFTSGDFQMGVSTLGKGCKLAARIKRELSHTLPGNIGSICDKIGDLRTRIQEEDKLELEKLQGDIDWIGEHDDDAITTSKLNSLVEEFNMTKEQRKLQRTRWLSQIVEYFPLTTLADLSLEDLSVAYKEYNSIVKTEAEPKEPSHKKLKTGKKGSISLVGSGPGSISLLTLGALQEIHSADLILADKLVPQQVLDLIPKHRTKLFIARKFPGNAERAQKELLDMGLESLMKNEKVVRLKQGDPYIFGRGGEEFNFFAEHGFTPLVLPGITSALAAPVLTNIPATHRDVADQVLICTGTGRRGTLPNLPEFIKSRTTVFLMALHRVVDLIPKLIDDKNWDPNLPAAIIERASCPDQRIVRTTLSNVAQAVEACGSRPPGLLVTGYACEVITKPNTDEKWVIEEGCASASNPLLEPFLQLARSIGKDHLHVLQPQTISLEQTA

SEQ ID NO: 85083 - DNA, 1686 bp, Candida albicans SC5314
  CDS (1)..(1686): transl_table=12
atgattaatttgctaacttccaacataactaccggggagacccacttattgattgggtattctgctgtttccaataccagaatcgtttcaatcatagaatcaggtgcaaacccaattctcattaccgattcacaaccacaaaactttccacccaacatcatgcaatatgtaactgacaataaactaccggtattaattgataaagatttcccaaccaagatcccccattacttaactactctaggtcgagcagaggtggattctattgttgaccgagtttatgtgtcgttgcccagctcacagcttgccttgaagcaagagatatatcaaagatgtcgcaagttgcgcataccggtaaacacaaccgactcaccagatttatgtacatttacaatgttgtcaacctacacctcgggagatttccagttaggtgttaccaccaacgggaaaggatgcaagttagccctgagaataaaacgagagcttgtgaactcgttgcccagcgacattgatgcaatatgcaaacaggtgggagagttaagacgacaaatacaaatggaagacaaagctgaatctgagcacggagaacacgaagatgatgctatcaacaaccacaagttcaattcgtttgtgccagagttcaacaaaacgcaagaggacctaaagctacaaagggcaagatggttgtcgcaaattgtcgagtattacccattgaataaattaggttctatttcactcaaggatctaagcagtgcctataagttacacaaacaagctaacgtcccaggtgcaaaagaagaagactcggaagctggccagatgaccttggttggcagtggacctgggtctgtgtcgttgcttacgttgggagcgttacaggctatacagacagccgatttggtgctagcagataaactagttccgcaacaggtcttggatgtaatccccactacacaccacacaagattgttcattgccagaaagtttcctggtaatgctgagaaggcccaggaagagttgttgacactaggcctagaagcattgaggagaggtgaaaaagttgttcgtctaaagcaaggagacccatatatatttgggcgtggcggagaagagtttaactttttctcgcaacatgggttcaaaccaacggttgtgcctgggatcacctctgcattggcggcaccggtgttgtcaaacatcccaatgacacacagagacgttgctgaccaagttttgatttgcactggtacggggagacgcggtgccgtgcccaatttgcctgattttgtgtcgagcagaaccacggtgtttttgatggcgctacacagagtggttgagttgatcccattgttagtcaacgacaagaagtgggatgaaaacttgcccgtggcaatcgttgaacgtgcatcgtgtcccgatcagagagtcattcgcaccacgttgagtaaggtcggagacgctgttgaggcttgtgggtcgaggccacctggattgcttgtgacagggtatgcgtgtgaggtgatttgcaaaaatagtggtagcgagagcttaccttgggttgtggaagaaggttgtaattctggagatgatggtgagttgaagagaattgtcgagcttgtcaatggcaactgcaaggagagcactgctgttgtcagtcctaacttgcaaaaggaaatagctgcataa

SEQ ID NO: 85084 - protein, 561 aa, Candida albicans SC5314
MINLLTSNITTGETHLLIGYSAVSNTRIVSIIESGANPILITDSQPQNFPPNIMQYVTDNKLPVLIDKDFPTKIPHYLTTLGRAEVDSIVDRVYVSLPSSQLALKQEIYQRCRKLRIPVNTTDSPDLCTFTMLSTYTSGDFQLGVTTNGKGCKLASRIKRELVNSLPSDIDAICKQVGELRRQIQMEDKAESEHGEHEDDAINNHKFNSFVPEFNKTQEDLKLQRARWLSQIVEYYPLNKLGSISLKDLSSAYKLHKQANVPGAKEEDSEAGQMTLVGSGPGSVSLLTLGALQAIQTADLVLADKLVPQQVLDVIPTTHHTRLFIARKFPGNAEKAQEELLTLGLEALRRGEKVVRLKQGDPYIFGRGGEEFNFFSQHGFKPTVVPGITSALAAPVLSNIPMTHRDVADQVLICTGTGRRGAVPNLPDFVSSRTTVFLMALHRVVELIPLLVNDKKWDENLPVAIVERASCPDQRVIRTTLSKVGDAVEACGSRPPGLLVTGYACEVICKNSGSESLPWVVEEGCNSGDDGELKRIVELVNGNCKESTAVVSPNLQKEIAA

SEQ ID NO: 85085 - DNA, 804 bp, Prochlorococcus marinus str. AS9601
  CDS (1)..(804): transl_table=11
gtgcccggcattgtttatttagttggagcaggtcctggtgaccctgagcttctaactctaaaagctttacgcctaataaaaaattgtgatgcattagtacatgatgctttgatcccggatgaaataacaaaagaggcaggaaaacatacagaaattttccatgtaggtaaaagagctggaaagtgttctgtacctcagaaagaaactaatgctcttattttgaaattggcaaaagaaggcaaaaatgttgtaaggcttaaagggggagacccattcgttttttctagaggtggtgaagaggtatcaattttagaaaaaaatggaatttcagttgaaatagttcctggtattacttctggaatagctgcccctacatattttggtattccactaacccatagagatgctgcgagttccgtaactttcgtcactggacatgagcgtgtagataaagaaaaaaagacagtgaattggagagatttagctaaatcatcagatagcttagtaatttttatgggtataaaaaatattgaatttattgtggaagaattaattctaggtggtttagataagagtactaaatgcgctgttattcaagaagctactttaaaaaatcaaaaatgtttgatagaaaaattagataatcttccagataaaatcaaagataaagaatttttagctccatcaattatcattattggaaaaattgttgaatttaaggttaataacaatataactaaagtatctgatgtctatttaccagatattaataaagttcaactatataataaatcccaaaagtaa

SEQ ID NO: 85086 - protein, 267 aa, Prochlorococcus marinus str. AS9601
MPGIVYLVGAGPGDPELLTLKALRLIKNCDALVHDALIPDEITKEAGKHTEIFHVGKRAGKCSVPQKETNALILKLAKEGKNVVRLKGGDPFVFSRGGEEVSILEKNGISVEIVPGITSGIAAPTYFGIPLTHRDAASSVTFVTGHERVDKEKKTVNWRDLAKSSDSLVIFMGIKNIEFIVEELILGGLDKSTKCAVIQEATLKNQKCLIEKLDNLPDKIKDKEFLAPSIIIIGKIVEFKVNNNITKVSDVYLPDINKVQLYNKSQK

SEQ ID NO: 85087 - DNA, 768 bp, Prochlorococcus marinus str. MIT 9515
  CDS (1)..(768): transl_table=11
gtgcccggaatagtttatttagttggcgcagggcctggtgatcctgagctgttgacactaaaagccttacgacttataaaaagttgtgatgtattagtgcatgatgctctgatctctgcagaaataataaaagaaactaataaaaaggctgaaatatttaatgtagggaagagggctggtaagtgttcagttccccaatctgatacaaattccctaattttaaaattagcaaaagaaggaaagacagttgtaagactcaaaggaggagatccatttgttttttcaagaggaggtgaagaagtatctttcttagaaaaaaatgggatttcaatcgaaatagtaccaggtataacttcaggtatagcggctcctacttattatggaattccattaactcatcgagaagcaggcagctcaataactttcgtgacaggtcatgaacatataaataaggataaaaagaatgttaactggagagcattatctcaatcatctgatggtttagtaatttatatgggaataagaaatattgaatttattgttagtgaattaattttaggtggtttggataaaaataccaaatgtgctgttattcaagaagcaactttgaataatcaaaaatgcttaatttcagaattaaaaaacctagtagagaatattaggctaaaaggttttacttcaccatcaattgttgttattggtaggattgttgattttaaagttaataattatataactaatctacctaatgcttttttaacagattaa

SEQ ID NO: 85088 - protein, 255 aa, Prochlorococcus marinus str. MIT 9515
MPGIVYLVGAGPGDPELLTLKALRLIKSCDVLVHDALISAEIIKETNKKAEIFNVGKRAGKCSVPQSDTNSLILKLAKEGKTVVRLKGGDPFVFSRGGEEVSFLEKNGISIEIVPGITSGIAAPTYYGIPLTHREAGSSITFVTGHEHINKDKKNVNWRALSQSSDGLVIYMGIRNIEFIVSELILGGLDKNTKCAVIQEATLNNQKCLISELKNLVENIRLKGFTSPSIVVIGRIVDFKVNNYITNLPNAFLTD

SEQ ID NO: 85089 - DNA, 786 bp, Prochlorococcus marinus str. NATL1A
  CDS (1)..(786): transl_table=11
atgaatacaaatcagtttggcactgtgcatcttgtcggagcaggtcctggtgatcccgatttattaacagttaaagcgcaaaaactaattagtaaatgtgatgcgcttgtatacgactctttagttcctatagagctacttgaattagtttcttcaaattgtcaacttcattcagtgggtaagaggcgtggtcatcattcggttcctcagaggacaacgaatgatattttatttgatttagcaaagagttattcttgtattgttagattaaaaggtggtgatccatttttgtttggtagaggtgcggaagaagcttcttatcttcataaaaaaggggttccagtacaagtagtacctggggttacatcaggtatagctgctcctgcctatgttgggatacctattactcatagacgtgctggatcttcagtcacttttgtgactggacatgaggggattgataaaaaacgcccagctgtaaattggcggtctttagccaaatccagtgatggaatcgttatatatatgggtgttcataatttaaaatttatctcagcagagttgattgctggtggtatgaatcctgagacgtctgcggcagtaattgagcagggtactgttattggtcaacgtcatattaagagccctttggtaaagctttttgaccgagttcaagaagaaaatttaaggtctcctgcgattgttgtaataggttcagttgtggattttcaagtagaagcttgctctccaaagccagctgaagtgacatttccaattcctatatag

SEQ ID NO: 85090 - protein, 261 aa, Prochlorococcus marinus str. NATL1A
MNTNQFGTVHLVGAGPGDPDLLTVKAQKLISKCDALVYDSLVPIELLELVSSNCQLHSVGKRRGHHSVPQRTTNDILFDLAKSYSCIVRLKGGDPFLFGRGAEEASYLHKKGVPVQVVPGVTSGIAAPAYVGIPITHRRAGSSVTFVTGHEGIDKKRPAVNWRSLAKSSDGIVIYMGVHNLKFISAELIAGGMNPETSAAVIEQGTVIGQRHIKSPLVKLFDRVQEENLRSPAIVVIGSVVDFQVEACSPKPAEVTFPIPI

SEQ ID NO: 85091 - DNA, 786 bp, Prochlorococcus marinus str. MIT 9303
  CDS (1)..(786): transl_table=11
atgagctgcttggactttggcactgtgtatttggtgggtgcaggccctggtgatcctgatttgctcacactgaaggcttatcgtctgcttcgccaatgcggagccttggttcacgatgctctggtgcctaaggaagtactcgagttagtgcccgagtcttgtgaacggcattttgttggtaaacgtcgagaacgtcattgggttccacagtccaagacaaatgagttgcttgttgaattggctcagcgtcattcctgtgtagtacgcctaaaaggtggtgatccttttctgtttgggcggggtggtgaggaggccgcccatttgcagagtcatggggtatcggtggaggtggtccctgggattacagcggggatggctgcgccggcctatgtgggtattcctctgacccatcgttgtggtggtagttctgtcacctttgtgacaggtcacgagaagatcgacaaacagcgcccttctgtgaattggaaggatcttgctagcgcaagtgacagcctggtgatttatatgggtttgcataaccttgcttatatagtcgaagagttgattgccggtggacttgatccagctacgtctgcagcaatcattcaacagggcactgtcgtaggtcagcgctacctcaaagctcccttggaacagttggctcaaagggtgcagagcgaagggtttgcagctccgtcgattgtgattgtgggtgcagtagttgatgaacaggtggcagcgtgtgctcctcagccggctgaggttttgatgccgatcaagtcttga

SEQ ID NO: 85092 - protein, 261 aa, Prochlorococcus marinus str. MIT 9303
MSCLDFGTVYLVGAGPGDPDLLTLKAYRLLRQCGALVHDALVPKEVLELVPESCERHFVGKRRERHWVPQSKTNELLVELAQRHSCVVRLKGGDPFLFGRGGEEAAHLQSHGVSVEVVPGITAGMAAPAYVGIPLTHRCGGSSVTFVTGHEKIDKQRPSVNWKDLASASDSLVIYMGLHNLAYIVEELIAGGLDPATSAAIIQQGTVVGQRYLKAPLEQLAQRVQSEGFAAPSIVIVGAVVDEQVAACAPQPAEVLMPIKS

SEQ ID NO: 85093 - DNA, 1482 bp, Clostridium thermocellum ATCC 27405
  CDS (1)..(1482): transl_table=11
atggctgacggcaaaggaaaggtttacctggtgggagcgggaccgggagatgaggaacttcttactgttaaggcagccgatgttataaaaaaggcggatgtcatagtttatgacagacttataagcgatggtattctttcaaaaattcccgacaatgcggagaaaatctatgttggaaaaaatgccggcaatcatccggttcctcagcatgaaataaataaaatccttctggccaaagcactggaagctaaaattgttgttaggcttaaaggcggcgatccctttgtatttggcagagggggagaggagctggagttcttgcatcaaaacggcataccttttgaggtagtgccgggcattacttcggcaatagccgcagcagcatatgcaggcattcctgtcacccatagagatttttgctcgtcgctgcatattataaccggacatgtaaaagacggcggaaatccggacatcgactatgaatctttagtgaagctaaaaggaactctcatctttatgatgtcggtggcctcatttccgcaaatagcacagggccttatagaagccggcatggaatccgatatggatgcggcagtgatagaaaacggcacaatgccaaaccaaagaaaatttgtttcaaagctttgtgacatcccgaaagttatcgcagaaaatcaggttaaatcccctgcaataatcatagtcggaaaggtatgttccctttctgaaaagcttgattggttttcaaaattgcctctttacggatgcaatgtattggtaacaggcccaaagaaaacatcggagagattggcaggcaaactccgagggctcggagcacatgtagttgaatatccttgcatagaaacagaaccactcgactttgacattgatatacgagagcatagctggataattttcacaagcagcctgggtgtaacaatattctttaaaaaactgtatgaaaacaagcttgacagcagatatttgtacaataaaaaaattgcagcggtaggctcccagaccgccgaagaactgttaaaacacggaatatgcgccgactttgttcccggtaaatttgacggcagacatttagcggaagagcttttgcaaagcggcaaaataagccctgaagacaaagtggttattttcagggcaaaggacggaacccaggccattgtagatattttcgaaaacaataatatacactacactgatatctctgtatatgaaactaaatgcatagaaaatgagagaattgacataagtggttttaattatattacttttaccagcgaaagctgcgtaaaaggctttgcccactcctttaaaaacacaatagattattcaaaaatcaatgcaatatgcattggagaacaaacagccaaagctacaagggcttatggaatgaacacaattatttccgatgttgcaacggtttcttcaatggttgaaaaaattattgaaatgcattgcgctaaataa

SEQ ID NO: 85094 - protein, 493 aa, Clostridium thermocellum ATCC 27405
MADGKGKVYLVGAGPGDEELLTVKAADVIKKADVIVYDRLISDGILSKIPDNAEKIYVGKNAGNHPVPQHEINKILLAKALEAKIVVRLKGGDPFVFGRGGEELEFLHQNGIPFEVVPGITSAIAAAAYAGIPVTHRDFCSSLHIITGHVKDGGNPDIDYESLVKLKGTLIFMMSVASFPQIAQGLIEAGMESDMDAAVIENGTMPNQRKFVSKLCDIPKVIAENQVKSPAIIIVGKVCSLSEKLDWFSKLPLYGCNVLVTGPKKTSERLAGKLRGLGAHVVEYPCIETEPLDFDIDIREHSWIIFTSSLGVTIFFKKLYENKLDSRYLYNKKIAAVGSQTAEELLKHGICADFVPGKFDGRHLAEELLQSGKISPEDKVVIFRAKDGTQAIVDIFENNNIHYTDISVYETKCIENERIDISGFNYITFTSESCVKGFAHSFKNTIDYSKINAICIGEQTAKATRAYGMNTIISDVATVSSMVEKIIEMHCAK

SEQ ID NO: 85095 - DNA, 1509 bp, Clostridium difficile 630
  CDS (1)..(1509): transl_table=11
atgagaattatgaagggtaaggtttacttagtaggggcaggaccaggtgattataaactcatgactttaaaaggtttagagtgtataagaaaatcggatgtaatagtatatgatagattagcaaatagtagttatttaagagaagctaagcctgattgtgaacttatatatgtaggcaaggcatcaagtaatcatattttgccacaagaagatataaatagaattatagcagaaaaagctaaagaaggaaaaattgtaactcgtcttaaaggaggagacccttatgtatttggtagagggggagaagaagcagagactttagtagatgaaggtatagaatttgaagtagttccaggtataacttctgctataggaggtttatgttatgcgggtattcctataacacatagagaccatgcttcgtcatttcatgtaataacaggtcatttgaagggtgatgatagtggagaattaaactggaatgctcttgcaaataacaaaggtactcttgtgtttttgatgggaatttcaaacctagagaaaataagtgaaaacttaatgaaagaaggaaaagataaggatacacctgttgctcttataagttgggcaactagatataatcaaagagttgttacatctacacttgaaaatgtttatgaaactgctattaaagaagaagtaaaaccgccaactcttatagtagttgggagtgttgtaggacttagagaaaagttgaacttctttgaaagtaagcctttatttggaaaaagtattgctgtaactaggtctagaaatcaaaatagtgtattggtagaaaaaataatggatttaggtggaaatcctatagaaatacctactattaaggtagaaaaaatacaaaataatattaacttagaaaatgaaataaaaaatataaataagtataattatctaatactaaccagtaaaaatgccgtagaaatcttctttgaaaagatatatgaaatgaattttgatttaaggatattatctaatttaaaggtatgtgctataggttctgctacatcaaatgagttgaaaaaaagaggaattatagcggatatagtaccaaaaaaatttgtagcagagtcactgtatgaagagttagcgcctattttaaatgatgacgataatatacttatacctagagcagaaaatgctagagattatctggttgacaaacttaaggctatttgtgaagtaacagaagtacatatatatagaacagtaatagatgaggagaaaaaaggtgagatattagatattttaaattctaatgacatagattatataacatttactagttcctcaacagtaaataatcttgttgaaattataggaaaagaaaatattaaaatattagaaaaaataaaaacactatctataggtcctataactacagagacaataaatagtttgggaataaaattgtacaaagaatctgctacatctactatagattcgttagtagatttaattataaaaaattaa

SEQ ID NO: 85096 - protein, 502 aa, Clostridium difficile 630
MRIMKGKVYLVGAGPGDYKLMTLKGLECIRKSDVIVYDRLANSSYLREAKPDCELIYVGKASSNHILPQEDINRIIAEKAKEGKIVTRLKGGDPYVFGRGGEEAETLVDEGIEFEVVPGITSAIGGLCYAGIPITHRDHASSFHVITGHLKGDDSGELNWNALANNKGTLVFLMGISNLEKISENLMKEGKDKDTPVALISWATRYNQRVVTSTLENVYETAIKEEVKPPTLIVVGSVVGLREKLNFFESKPLFGKSIAVTRSRNQNSVLVEKIMDLGGNPIEIPTIKVEKIQNNINLENEIKNINKYNYLILTSKNAVEIFFEKIYEMNFDLRILSNLKVCAIGSATSNELKKRGIIADIVPKKFVAESLYEELAPILNDDDNILIPRAENARDYLVDKLKAICEVTEVHIYRTVIDEEKKGEILDILNSNDIDYITFTSSSTVNNLVEIIGKENIKILEKIKTLSIGPITTETINSLGIKLYKESATSTIDSLVDLIIKN

SEQ ID NO: 85097 - DNA, 804 bp, Prochlorococcus marinus str. MIT 9301
  CDS (1)..(804): transl_table=11
gtgcctggcattgtttatttagttggagctggtcctggtgaccctgagctcctaactctaaaagctttacgtctaatcaaaaactgtgatgcattagtacatgatgctttaatcccagatgaaataactaaagaagcaggaaaaaatacagcaatttttcatgttggcaaaagagctgggaagtgttctgtacctcaggctgaaactaatgctcttattttgaaattggcaaaagaaggcaaaaatgttgtaaggcttaaaggtggagatccattcgttttttctaggggtggtgaagaggtatcgattttagaaaaaaatggaatttcagttgaaattgttcctggcattacttctgggatagctgcccccacatattttggtattccattaacccatagagatgctgctagttccgtgactttcgtaactggtcatgaacgtgttgataaggaaagaaagagtgttaattggagagatctagctaaatcatcagatagcttagtaatttttatgggtataaaaaatattgaatttattgttgaagaattaatactaggtggtttagataggaatactaaatgcgctgttattcaagaggctactttaaaaaatcaaaaatgtttgattgagaatttagataatctcccagataaaatcaaagataaagaatttttatctccatcgattatcattattggaaaaattgttgaatttaaggttaataacgatataacgaaagtatctgatgtcgatttaccagatattaataaagttcaactatacaataagtcccaaaagtaa

SEQ ID NO: 85098 - protein, 267 aa, Prochlorococcus marinus str. MIT 9301
MPGIVYLVGAGPGDPELLTLKALRLIKNCDALVHDALIPDEITKEAGKNTAIFHVGKRAGKCSVPQAETNALILKLAKEGKNVVRLKGGDPFVFSRGGEEVSILEKNGISVEIVPGITSGIAAPTYFGIPLTHRDAASSVTFVTGHERVDKERKSVNWRDLAKSSDSLVIFMGIKNIEFIVEELILGGLDRNTKCAVIQEATLKNQKCLIENLDNLPDKIKDKEFLSPSIIIIGKIVEFKVNNDITKVSDVDLPDINKVQLYNKSQK

SEQ ID NO: 85099 - DNA, 801 bp, Herminiimonas arsenicoxydans
  CDS (1)..(801): transl_table=11
atggtggtcaggatggagcagttcggtaaggtatttttggtcggtgcaggtccgggcgatccggatctgctgacaatcaaggcggtcaaggccatcgcccgggcggatgtgatcctgatcgacgatctggtcaatcctgaagtgttgcaatatgcacaggcaattgcgcgcatcgtcagtgtcggcaagcgcggcggctgcaaacaaactccacaggaattcatcgaacggctgatgttgttcgaagcgcaagccggacagtgcgtcgtgcgcttgaaaggcggcgacccgtttatcttcggccgtggcggcgaagagcgcgatcatttgcaagctgaaggtgttgacgtggaagtgatcaacggcatcagcagcggcctcgctgcgccggcgtcgataggcgttcccctcacgcatcgtgactggagccagggcgtaatcttcattaccggtcacggcaagaacgccgagtccaatcccgactggtatacgctggccaagctcaatctgacgctggtgatttatatgggcgtcgcacgttgcacagaaatccaggcggccttgctggaaggcggcaaagccggcaggacgccggttgccgtgatccagtccgcaaccggggtggcgcagagacaattgattacgatcttgtcggaattgccgcaagcactggcgaaatcggctataggcagcccggccatcatcgtgatcggcgatgtggtgcgttgcgcgacggaattcgccaggcagtccaacgttcaaaccctgcgcgatatcgtgttgcaaaaaatgacagcatga

SEQ ID NO: 85100 - protein, 266 aa, Herminiimonas arsenicoxydans
MVVRMEQFGKVFLVGAGPGDPDLLTIKAVKAIARADVILIDDLVNPEVLQYAQAIARIVSVGKRGGCKQTPQEFIERLMLFEAQAGQCVVRLKGGDPFIFGRGGEERDHLQAEGVDVEVINGISSGLAAPASIGVPLTHRDWSQGVIFITGHGKNAESNPDWYTLAKLNLTLVIYMGVARCTEIQAALLEGGKAGRTPVAVIQSATGVAQRQLITILSELPQALAKSAIGSPAIIVIGDVVRCATEFARQSNVQTLRDIVLQKMTA

SEQ ID NO: 85101 - DNA, 732 bp, Herminiimonas arsenicoxydans
  CDS (1)..(732): transl_table=11
atgccgcaagaaaaaaaagcgtacggaaaagtctatctgatcggcgccggccccggtgccatcgatctgattaccgtacgcggtgcacgcatactggcgcaagccgacgtggtactgcacgatgcgctggtcacgcccgagatgctgacgctgtgcccgcaggcggaaaaaatttccgtcggcaagcgcagcggccagcgctccaccgcacagatcgccatcaatcagttgctgatcgaatgtgcggaaaaataccaattgatcgtacgcctgaaaggcggcgaccccatgctgttcgggcgcgccgatgaggagttgcaggcgctggaaacgcacggcattgcagtcgaaatcgtgcccggcatcactactgcattcgctgcagcagctgccacgcagcagccgctgaccaaacgcggcgttgcccgcagcattgccttcttcacctccagcacggcaccgaatcagcccgaccaattgacgctgccggactgcgatacgctgattcaatacatgggtggtcgcgaagccatcatcactgcgcaaaaactgctggaacaaggtcgctcgcccaggctgccggtggtggtagtggaaaactgcagcctggaaagtcagcgcatcatgcgcatgacgctccatgaactggaacagggattgggagaatgtcagggaccagtgctggtgatgataggagaagcgctggctgaacgcagcacttcaaaaaagtag

SEQ ID NO: 85102 - protein, 243 aa, Herminiimonas arsenicoxydans
MPQEKKAYGKVYLIGAGPGAIDLITVRGARILAQADVVLHDALVTPEMLTLCPQAEKISVGKRSGQRSTAQIAINQLLIECAEKYQLIVRLKGGDPMLFGRADEELQALETHGIAVEIVPGITTAFAAAAATQQPLTKRGVARSIAFFTSSTAPNQPDQLTLPDCDTLIQYMGGREAIITAQKLLEQGRSPRLPVVVVENCSLESQRIMRMTLHELEQGLGECQGPVLVMIGEALAERSTSKK

SEQ ID NO: 85103 - DNA, 771 bp, Burkholderia vietnamiensis G4
  CDS (1)..(771): transl_table=11
atgacgactggaaaagtcacgctgctgggcgccggccccggcgaccccgatctgctcaccctgaaggccgcgaaggcgctggccgccgccgacgtgctgctgctcgacgatctcgtcgcgccgggcatcgtcgagcttgcgccgcaggcgcgcgtgatccgcgtcggcaagcgcggcggctgccgctccacgccgcaggcgttcatcgagaaactgatgcgccgctacgcgctgcgcggcgcgcacgtcgtgcgcgtgaaaggcggcgacgcactgctgttcggccgcgccggcgaggagctcgcgacgctgcgcgccgccgcgatcccggtcgagatcgtcaacggcatctcgtcggggttcgcggccgccgcgagcctcggcatctcgctcacgcatcgcgaacattgccagggcgtcacgttcgtcaccgcgcaccgccaggatcacggcgagcccgactgggccgcgctggcggccaccggcaccacgctcgcgatctatatgggcatgagccgcgtcgacagcatcgcgacgggcctgctcgccgcgctgcccgccgcgacgccggccgccgccgtgcaatgggccggcacgccgcacgaacgccgctggaccggcacgctcggcggcctcgcgcgcggcatcgacgacgcgcggctcggcagcccggccgtgatcctcgtggacggcgcgatcggtgcagcgtgcgcgcagcgcaccgacaccgatcccgacaccgcagccgcaccgatgtcgtgggccgcgtga

SEQ ID NO: 85104 - protein, 256 aa, Burkholderia vietnamiensis G4
MTTGKVTLLGAGPGDPDLLTLKAAKALAAADVLLLDDLVAPGIVELAPQARVIRVGKRGGCRSTPQAFIEKLMRRYALRGAHVVRVKGGDALLFGRAGEELATLRAAAIPVEIVNGISSGFAAAASLGISLTHREHCQGVTFVTAHRQDHGEPDWAALAATGTTLAIYMGMSRVDSIATGLLAALPAATPAAAVQWAGTPHERRWTGTLGGLARGIDDARLGSPAVILVDGAIGAACAQRTDTDPDTAAAPMSWAA

SEQ ID NO: 85105 - DNA, 750 bp, Burkholderia vietnamiensis G4
  CDS (1)..(750): transl_table=11
atgagccgcgcgtggctcgtcggcgcgggccccggtgacgccgatctgctgacgctgaaggccgtgcgtgcgatcgccgcggccgacgtgctgctcgtcgacgatctcgtgaacccggacgtcctgcgccatgcgcgcgcggatgcccgcatcgagcacgtcggcaagcgcggcggccatgcgtcgacgccgcagcacgagatcgtcgcggcgatgctcgcgcatctgcgcgcgggccgcagcgtcgcgcgcctcaagggcggcgatccgttcgtgtttggccgcggcggcgaggagctgctcgcgctcggcgcggccggcttcccggtcgaggtcgtgaacggcatcacggccggcatcgcggcgccggccgcgctcgggattccggtcacgcatcgcggcgacgcgcagggcgtgatcttcgtcaccggtcacggcgcgggcgccgacgaacccgactggcgcgcgctggccgcgacgcggatgacgctcgtcatctacatggggattcgccggctcgccgcgatcgtcgccgcgcttggcgcgggcgggctgcccggcgacacgccgtgcgcggccatcgagaacgcgacgcgcgacgcgcagcggcacgtgctcgcgacgctcgagacggtcgtcgaacgcgtgaacgcggccggcatcggctcgccggcgatcgtcgtgatcgggcgcgtggccgcgctcgccgccgatccggcggtgcgcgccgcactcggcagcggcgcatga

SEQ ID NO: 85106 - protein, 249 aa, Burkholderia vietnamiensis G4
MSRAWLVGAGPGDADLLTLKAVRAIAAADVLLVDDLVNPDVLRHARADARIEHVGKRGGHASTPQHEIVAAMLAHLRAGRSVARLKGGDPFVFGRGGEELLALGAAGFPVEVVNGITAGIAAPAALGIPVTHRGDAQGVIFVTGHGAGADEPDWRALAATRMTLVIYMGIRRLAAIVAALGAGGLPGDTPCAAIENATRDAQRHVLATLETVVERVNAAGIGSPAIVVIGRVAALAADPAVRAALGSGA

SEQ ID NO: 85107 - DNA, 750 bp, Burkholderia vietnamiensis G4
  CDS (1)..(750): transl_table=11
atgggcaaggtgtatctgatcggagcagggccgggcgccgcggacctcatcacggtgcgcggcgcacggctgctcgagcaagccgacgtcgtgctgcacgacgcgctcgtcgagccggcgatgctcgactacgcgccgaacgcgcgccgcatcgcggtgggcaagcgctgcggccagcgttcgaccgcgcagcacttcatcaacaagcagatcgtcgatgcggcgcgcgagcatgcgtgcgtggtgcgtctgaagggcggcgacccgatgctgttcggtcgcgccgaagaagaaatgcgcgcgctcgaggcagccggcatcgactacgaggtcgtgccgggcatcaccgcggcgctggccggcgcggcgacgctgaagcgctcgctgacgctgcgcggcgtgtcgcgcagcgtcgcgttcgcgacgcacagccgcgcgcccggcagcgacgagatccgcgaggccgcgcgcgccgattcgatcgtctactacatggggcgcgacagcgcgccgggcatcgcgcagcagctgatcgacgcgggccgcgccccggcgacgccggtggcgatcgtcgaggcatgcagcaccgcgcgcgaacgcacgctgacgctgacgctcgcgcagatggccgcgggcgacgcgcagtcgtggctcgatccggccgaaccgagcctgctgatgatcggcgacgcgttcgccgaacgcgccgcgcgcgcgaacgagggtgatgcgttgcgcaacgccgcgtga

SEQ ID NO: 85108 - protein, 249 aa, Burkholderia vietnamiensis G4
MGKVYLIGAGPGAADLITVRGARLLEQADVVLHDALVEPAMLDYAPNARRIAVGKRCGQRSTAQHFINKQIVDAAREHACVVRLKGGDPMLFGRAEEEMRALEAAGIDYEVVPGITAALAGAATLKRSLTLRGVSRSVAFATHSRAPGSDEIREAARADSIVYYMGRDSAPGIAQQLIDAGRAPATPVAIVEACSTARERTLTLTLAQMAAGDAQSWLDPAEPSLLMIGDAFAERAARANEGDALRNAA

SEQ ID NO: 85109 - DNA, 1431 bp, Bradyrhizobium sp. ORS278
  CDS (1)..(1431): transl_table=11
atgcaatatctgccggtgtttctcgatctgaagaccggccccgtgctgctgatcggcgcgggcgagctcgtgcgcgcgaagcttagagtcttgctgtccgcgggtgcgcgcatccgctggttcgcgaccgatggcgatttcgatctcggaggattgcacgacgatcatggccagatcacgcgcgctgacggcgatccgctgaccaccgacctgtcgggcgtcatcgccgtgctgtgcgcgggcgccggcgatatcggcgtggcgatgtcggcgcgggcgcgcagcgtcggcctgccggtcaacgtgatggacgacctcgcgcattccagcttcatcttcccggcgatcgtcgatcgcggcgacgtcgtggtggcgatcggcaccggcggctcgtcgcccgtggtcgcgcgccgcgtgcgcgagcgcatcgaggcgctgctgccggcgcggatcggcgagctcgcgggtttcatcggcgacttccgcaagatcatcaacccgcggatcgcggagatgccgctgcgccgtcgcttctgggagcgtgttgtcgatggcccgatcggcgcgctggtgctggccggccgcaagcacgacgccgaggcggcgctgaacagcatcgccgatcctaccgcattcgcgggggccgatcatgccggccgcggcgaggggcatgtgaccctggtcggcgccgggcctggcgatcccgatctcttgacgatcaaggcgctgcgcgcgctgcaggacgccgacgtcgtgttctacgacgagctggtgacgccggagattctcgaccgcatccgccgcgacgcctcgcgcgttccggtgggccgccgcgtcggcaagcccggcatcggccaggacgcggtgaacaagctgctgatcgacgccgcgcgcgagggcaagcgcgcggtgcgcctgaagggcggcgacgctttcgtgttcggccgcggcggcgaggaggtcgacgcgctgcgccaggcgagcgtgtcctacacgatcgtgcccggcatcacggcgggcatcggcgccgccgcgcagttcgaggtgcccttgaccttccgcagcaaggcgctgcgcatcaccttcctcaccgcgcacaaggagcgcgatgccgaggcggtcgactggtcggcgctgaccgataccaagatgaccgtcgtcgtctacatgggcatgacagcggcgccggcggtgcgctccggcctgctcgcggcgggccgctcgccgcagacgccggtcggcgtgttcgcgcgcgtgacgcgccccgatgcgcaggccgcggtcggtacgctcgatcgattgccggatctcgtcgccaagatcgagggcggtccggccatcctcatcatcggtgatgtcgtggcgcattcggcgccgtggcgtcagcagactctcagtggcgtgattgcaaaactcctggaacccgtctga

SEQ ID NO: 85110 - protein, 476 aa, Bradyrhizobium sp. ORS278
MQYLPVFLDLKTGPVLLIGAGELVRAKLRVLLSAGARIRWFATDGDFDLGGLHDDHGQITRADGDPLTTDLSGVIAVLCAGAGDIGVAMSARARSVGLPVNVMDDLAHSSFIFPAIVDRGDVVVAIGTGGSSPVVARRVRERIEALLPARIGELAGFIGDFRKIINPRIAEMPLRRRFWERVVDGPIGALVLAGRKHDAEAALNSIADPTAFAGADHAGRGEGHVTLVGAGPGDPDLLTIKALRALQDADVVFYDELVTPEILDRIRRDASRVPVGRRVGKPGIGQDAVNKLLIDAAREGKRAVRLKGGDAFVFGRGGEEVDALRQASVSYTIVPGITAGIGAAAQFEVPLTFRSKALRITFLTAHKERDAEAVDWSALTDTKMTVVVYMGMTAAPAVRSGLLAAGRSPQTPVGVFARVTRPDAQAAVGTLDRLPDLVAKIEGGPAILIIGDVVAHSAPWRQQTLSGVIAKLLEPV

SEQ ID NO: 85111 - DNA, 789 bp, Synechococcus sp. WH 7803
  CDS (1)..(789): transl_table=11
gtgaccgcttcaaaccgttctggaactgtctatctcgtcggtgctggtccaggagaccctgaactgctcaccgtgaaggcgcaccgtctgctccaaacgtgtgatgcgctggtgtacgactcgctcgtgcctcgggaggttctggatcttgtgccagagcactgtgaacgtcacttcgttggcaagcgcagggggcaccattccgtcccgcagccgagcacgaatgctgtgcttgtggagctgtcggcacgtcacgcctgtgttgttcgcctcaaaggtggtgatccgttcctttttggtcgggggggtgaggaagcagcgcatctcgtgaaacatggtgtgcaggtggaagtggtgccgggggtgactgctgggattgcagcaccggcctatgcgggaatccccgtcacccatcggcgcgccgggtcttcggtcacgttcgtgacaggccacgaggagatcgataagcgccgaccatcggtgaactggcgttccctggcgtctgcgagcgatggcctggtgatctacatggggcttcacaacctgccgcgcatcgctgatgagctgatggctggaggcctcagccccgagacccccgtggccgtgatccagcagggaaccgtggccgggcagcgttgtctgcaggccgtgctctcgaccattgctgaacgggcgcgtcaggaacagttcgcatccccgtccatcgtggtggttggcgatgtggtgaaggagcagatcagcgcctgtgcacctgagccggcggccgtcaccatgcccattcccttctag

SEQ ID NO: 85112 - protein, 262 aa, Synechococcus sp. WH 7803
MTASNRSGTVYLVGAGPGDPELLTVKAHRLLQTCDALVYDSLVPREVLDLVPEHCERHFVGKRRGHHSVPQPSTNAVLVELSARHACVVRLKGGDPFLFGRGGEEAAHLVKHGVQVEVVPGVTAGIAAPAYAGIPVTHRRAGSSVTFVTGHEEIDKRRPSVNWRSLASASDGLVIYMGLHNLPRIADELMAGGLSPETPVAVIQQGTVAGQRCLQAVLSTIAERARQEQFASPSIVVVGDVVKEQISACAPEPAAVTMPIPF

SEQ ID NO: 85113 - DNA, 723 bp, Thermus thermophilus HB27
  CDS (1)..(723): transl_table=11
atgggtagggtctacctggtgggggcgggccccggggacccggagcttctgaccctcaaggcctaccgcctcctcaaggaggcccccgtggtcctctacgaccggctcgtggacgagagggtcctcgccctcacccccggggaaaaggtctacgtgggcaaggaggagggagaaagcgaaaaacaggaggaaatccaccgcctcctcctccgccacgcccgggcccaccccttcgtggtccgcctcaaagggggcgaccccatggtcttcggccggggcggggaggaggtcctcttcctcctccggcacggcgtccccgtggaggtcgtccccggggtgacgagcctcctcgcctccgggcttcccctcacccaccggggcctcgcccacggcttcgccgcggtctcgggggtcttggaggggggagggtatccggacctcaggcccttcgcccgggtccccaccctggtggtcctcatgggggtggggcgccgggtctggatcgccaaggagctcctccgcctggggcgaaaccccagggagcccaccctcttcgtggagcgggcctccaccccgaaggagcgccgcgtcttggccgccctcgaggaggtggcggaaggcaaggtggaggtgcgtccccccgccctttggatcctgggcgaggtggtgcgcgtgttcgccgagaaggaagcgcctgtggacgccttggccctgggaggttag

SEQ ID NO: 85114 - protein, 240 aa, Thermus thermophilus HB27
MGRVYLVGAGPGDPELLTLKAYRLLKEAPVVLYDRLVDERVLALTPGEKVYVGKEEGESEKQEEIHRLLLRHARAHPFVVRLKGGDPMVFGRGGEEVLFLLRHGVPVEVVPGVTSLLASGLPLTHRGLAHGFAAVSGVLEGGGYPDLRPFARVPTLVVLMGVGRRVWIAKELLRLGRNPREPTLFVERASTPKERRVLAALEEVAEGKVEVRPPALWILGEVVRVFAEKEAPVDALALGG

SEQ ID NO: 85115 - DNA, 1512 bp, Desulfovibrio vulgaris subsp. vulgaris str. Hildenborough
  CDS (1)..(1512): transl_table=11
atgaaggtctatctcatcggtgccggcccgggcgaccccggactgctcaccctcaagggcaaggaaatcctcgaacgtgcggacgtggtcgtctacgactttctggccaacgatgccttcctcgcctatgccaagcccgatgccgaaatcatctacgtgggcaagaagggcggcgaccataccctttcgcaggacggcatcaaccgcctcatcatcgaaaaggccaaagagggcaaggtcgtggcgcgcctcaagggtggcgacccctacatgttcgggcgtggcggtgaagaggccgaagaactgctcgacgcgggcgtgcccttcgaggaagtccccggcgtgaccagcgccatcgcagggcctgcctacgctggtattccgctcacccaccgttcgtatgcctcgtcggtgtcgttcatcaccgggcacgagaatcccgacaagcccgattcggcgcataactggcaggccctcgccgctggtaccagcacgctggtcttcttcatgggcatgaagaacctgcccgacatctcgcgcaagctcatcgccgcgggcatgtcgcctgacaagcccgccgcgctggtgcgctgggggacgaccccgcgtcaccgcagcctcgtcgccaccatcgccacgttgcccgaagaggccgtgaagcatggcttcagcaatccctcgctcatcgttgtgggtgatgtggtgcgtctgcgcgaccgtctcaactggttcgagcacaagcccctgctgggcaagggcgtcgtggtcacgcgcgcccgtgaacaggccagcggccttgctgcggcgttgcgtgaacttggggccgatgtcatccagtttcccaccatcgacatccaccccctcgacgattacgccccggtgcatgaggccatccgcgccctcgacacctacgactgggtggtcttcacctcggtcaacggcgtgaagcacttctggaaccagcttgcggcgctggggctcgacagccgtgccctcggcggacgcaaggtggcagccatcggccccgccacggcggatgccctgcgcgacaagggcatcgcccccgacttcatccccgagaagtacgtcgccgaaggcgtggtcgaagggatgctcgcccgcggtatgggcggcaagcgcgtgctgctgccccgcgccctcgaagcgcgtgaggtgctgcccgaagaacttcgcaaggccggtgccactgtcgacgtgctgcccgtgtacgtcaccgtgccctctgccgcacgccgtgacgacgttctggcgcgcatggaggcgggcgaggtgcattgcgtgaccttcggttcgtcgtccaccgtggagaacttcttctctctggtccctgccgatacggtgaaggcgcaccccgaagtgaagcttgcctgcatcggcccggtgaccaagaagacgctggagggcttcggcttcacctgccatatccagcccgacgactacaccatccccgcacttgtcgatgaactgacccgcgtattgcctgaattgtaa

SEQ ID NO: 85116 - protein, 503 aa, Desulfovibrio vulgaris subsp. vulgaris str. Hildenborough
MKVYLIGAGPGDPGLLTLKGKEILERADVVVYDFLANDAFLAYAKPDAEIIYVGKKGGDHTLSQDGINRLIIEKAKEGKVVARLKGGDPYMFGRGGEEAEELLDAGVPFEEVPGVTSAIAGPAYAGIPLTHRSYASSVSFITGHENPDKPDSAHNWQALAAGTSTLVFFMGMKNLPDISRKLIAAGMSPDKPAALVRWGTTPRHRSLVATIATLPEEAVKHGFSNPSLIVVGDVVRLRDRLNWFEHKPLLGKGVVVTRAREQASGLAAALRELGADVIQFPTIDIHPLDDYAPVHEAIRALDTYDWVVFTSVNGVKHFWNQLAALGLDSRALGGRKVAAIGPATADALRDKGIAPDFIPEKYVAEGVVEGMLARGMGGKRVLLPRALEAREVLPEELRKAGATVDVLPVYVTVPSAARRDDVLARMEAGEVHCVTFGSSSTVENFFSLVPADTVKAHPEVKLACIGPVTKKTLEGFGFTCHIQPDDYTIPALVDELTRVLPEL

SEQ ID NO: 85117 - DNA, 1482 bp, Listeria monocytogenes str. 4b F2365
  CDS (1)..(1482): transl_table=11
atgggaaaagtcatgttaattggtgcaggtcctggagatgcacagttgctaaccgtgaaaggcttagctgcactgcaaaaggcagatgttattgtatacgatcgcctcgttgaaccagcgatgctccaagaacgaaaagctagttgtaaactcatttatgtcggaaaagaaccacttcatcatccaattccccaagaggaaatcgagcaaattcttgttaaagaagctgcgacaaatgagctggttgttcgtctaaaagcaggagacccttatgtgtttggtcgcggcggggaagaaggagagacactctataaagcgggaattccatttgaagttattcctggaatcacatccgcaattggtgggcttgcctacgctggaatcccagtaacacatcgtgattttgcttcgagttttcacgtgattaccggacatttgaaaaaaggacgcgatccactagattgggaagcccttgctagactggaaggtacgctcgttttcctgatgggaatgactaatttgcctaatatttgtgcgaacttactagaaaatggtcgaaaagccgaaacgggtgttgcgattgtacaatgggcatctcgcggcaaacaattaacggttaccgggaacttacaaaacatcgaacaaaaagtagcggaatctggtatttcttcgccggcacttattgttgttggtgatgtggtgagcttacgaccgcagcttaacttctttgaggaaatgccacttttccatacaaaagtattacttccaagagcacgagctggaaaaagtatgctcgcggaacaaattcgcgatttaggcggagaagtaacaatgtatcccaatattcaagtagtagatgttgtgccaacgaaaacaaaagaagaactaagcgaagtaagcgaacttcttttcacatccaaagaagcggtagaacgattttttgattatttagcccagcttgatttagatattcgttctctaaaaaatacccatcttaccgctattggcaaacaaacaaaagaagcttttagtgaaaaaggaattattccagatagtttcattaaaaggcggagcacggaattaattttggagcatttaccacggttacagaaaaatgtgagcaacttaattatcggaagcatagttgatacggcagaagttaacgcaattttagcagaagtggaagcgatggaaatgatgccgttatatgatatgcgtcctgtgacagaacgaccatttgaccttgcaagctttgaacaagtttgtttctcaagttcgcgttccgttcaaaatttactcgacgtactaacaaccgaagaaaaagccattttacaaacgaaaacaattctttccattggaaggttcacgagcgcaacgttagcatcattcggtatcaacaattttatcgaagccgaaagcgccacaccagagagcttaattgaactaatccaaaaaacaaaattagaaggagtaccacaatga

SEQ ID NO: 85118 - protein, 493 aa, Listeria monocytogenes str. 4b F2365
MGKVMLIGAGPGDAQLLTVKGLAALQKADVIVYDRLVEPAMLQERKASCKLIYVGKEPLHHPIPQEEIEQILVKEAATNELVVRLKAGDPYVFGRGGEEGETLYKAGIPFEVIPGITSAIGGLAYAGIPVTHRDFASSFHVITGHLKKGRDPLDWEALARLEGTLVFLMGMTNLPNICANLLENGRKAETGVAIVQWASRGKQLTVTGNLQNIEQKVAESGISSPALIVVGDVVSLRPQLNFFEEMPLFHTKVLLPRARAGKSMLAEQIRDLGGEVTMYPNIQVVDVVPTKTKEELSEVSELLFTSKEAVERFFDYLAQLDLDIRSLKNTHLTAIGKQTKEAFSEKGIIPDSFIKRRSTELILEHLPRLQKNVSNLIIGSIVDTAEVNAILAEVEAMEMMPLYDMRPVTERPFDLASFEQVCFSSSRSVQNLLDVLTTEEKAILQTKTILSIGRFTSATLASFGINNFIEAESATPESLIELIQKTKLEGVPQ

SEQ ID NO: 85119 - DNA, 1425 bp, Bacillus thuringiensis serovar konkukian str. 97-27
  CDS (1)..(1425): transl_table=11
atgaacggatatgtatatttagttggtgcaggaccaggtgatgaagggcttattacaaagaaagcgatagagtgtttaaaacgtgcagatattgttttatatgaccgtttactaaaccctttctttcttagctatacaaaacaaacatgtgaacttatgtattgcggaaaaatgccaaagaatcatattatgcgacaagaaatgattaacgcacaccttcttcaatttgcgcaagagggaaaaattgttgtccgattaaaaggcggagatccatctatttttggccgtgttggtgaagaagcagaaactttagcagcagcaaatattccatatgaaattgtaccaggcattacatctagcaccgccgctagtagctatgcaggtatcccccttacccaccgtaactacagtaatagcgttactttactaaccggacatgcaaaaggttctttaaccgatcatggaaaatataattcatctcacaatagcgatacgattgcctactacatgggtataaaaaacttacctacaatttgtgaaaacttacgacaagcaggaaaaaaagaagatacgccagtagcagtcattgaatggggtacaactggtaaacagcgcgttgttacagggacactatctaccattgtttctatcgtcaaaaacgaaaatatttctaatccatctatgacaattgttggtgatgtcgtttcattacgagatcaaatcgcttggaaagaacataaaccattacatggtaaaaaagttttatttacatccgcaacaaataaaacaagtgtaatgaagcaaaagttacaagaagctggtgcagaaatatatcaaattccaactttcaaaaaggaagaatatacattaacacttgaacaaatcaatgaaatttttaacgttaatcgccttgttttttgttcagctgaaagtgtagaaattttgatgcaatcatgtagtaaatacaagaaagatattcgttccttacaggcagagctacaacacatgaacgttgccactcaagaaaaacttatgcaatatgggctactaagtaaagaagcaaagttctcttccgatacaactgtttatttaggcagaaatattaatcggattgcttttattcaagagaaaattggtgccggctcctatatgatgactcataagtatacaattgatcatcgtttcgatgaagtccattctcgtatgctttcagaattcttatgggatagcattgtatttgacggacgcgcttctattgatacgtttctagcagaagtaaaacgtcttggctttatcgatattgttactctcccattctcgtataccgacgttccaactttacactatgcaaataaagtcgggtttcataacattgattatcaattacaagaaactcttatgaagaaagacatggtaagacaatga

SEQ ID NO: 85120 - protein, 474 aa, Bacillus thuringiensis serovar konkukian str. 97-27
MNGYVYLVGAGPGDEGLITKKAIECLKRADIVLYDRLLNPFFLSYTKQTCELMYCGKMPKNHIMRQEMINAHLLQFAQEGKIVVRLKGGDPSIFGRVGEEAETLAAANIPYEIVPGITSSTAASSYAGIPLTHRNYSNSVTLLTGHAKGSLTDHGKYNSSHNSDTIAYYMGIKNLPTICENLRQAGKKEDTPVAVIEWGTTGKQRVVTGTLSTIVSIVKNENISNPSMTIVGDVVSLRDQIAWKEHKPLHGKKVLFTSATNKTSVMKQKLQEAGAEIYQIPTFKKEEYTLTLEQINEIFNVNRLVFCSAESVEILMQSCSKYKKDIRSLQAELQHMNVATQEKLMQYGLLSKEAKFSSDTTVYLGRNINRIAFIQEKIGAGSYMMTHKYTIDHRFDEVHSRMLSEFLWDSIVFDGRASIDTFLAEVKRLGFIDIVTLPFSYTDVPTLHYANKVGFHNIDYQLQETLMKKDMVRQ

SEQ ID NO: 85121 - DNA, 978 bp, Staphylococcus aureus subsp. aureus MRSA252
  CDS (1)..(978): transl_table=11
atgtctgtaaatggttacggcaaggtttacttgataggtgcgggcccaggtaatccgaattatttgactaaaaaggctgagcgtttaatacgcgaagcggatgttatactatatgatcgattagtgaatccgttgattttacaatattcgaagtcgacaactgagattatagatgttggtaaaaagccatatgcaaaacacattcagcaagaaaaaataaatgaatgtatcgtggaagcagcacgtcgatataacaaggttgtgaggcttaaaggtggcgacccagcaatatttggacgagttcaagaagaagttgacacactaaacaactttaatattgcgtttgaaattgtacctggtgtgacatctgcgagtgctgcagttgctacgatgcaaacaggattaacgatgcgtgctgttgctaaaagtgttacattttcgacggggtattttaaagattcagaagaaaatgaagtagatgtcaacgctttagtaaatggtggtacgttggcgatatatatgggagttaaacgtttagagaaaattatcgcccagatacaacagtacacagatattgattatccgatagcgattgtttttcaagcatcttgttttaatgaattcgtcgttaaagggcgcttaagtaatattgttgggaaactggagcattacgcaattgaggcaaaaccaggtatatgtattataggcgaagtagtgggttatacagaaaatgtctcaacaacttctaatccgactcagcaattttatgtagtaagtggttctaaacctgacgctcttatgctctgtgaacatttatatgacgaaggttatggctgtttgctaaacccaaatgatacatcgaatggtacatatcattcgtcgcaatatgattactatgatacgtttattaagcagcaagaaaatgtaacatatatttcaaccgatcgtgcagatactaatacagtgttatgtcactaa

SEQ ID NO: 85122 - protein, 325 aa, Staphylococcus aureus subsp. aureus MRSA252
MSVNGYGKVYLIGAGPGNPNYLTKKAERLIREADVILYDRLVNPLILQYSKSTTEIIDVGKKPYAKHIQQEKINECIVEAARRYNKVVRLKGGDPAIFGRVQEEVDTLNNFNIAFEIVPGVTSASAAVATMQTGLTMRAVAKSVTFSTGYFKDSEENEVDVNALVNGGTLAIYMGVKRLEKIIAQIQQYTDIDYPIAIVFQASCFNEFVVKGRLSNIVGKLEHYAIEAKPGICIIGEVVGYTENVSTTSNPTQQFYVVSGSKPDALMLCEHLYDEGYGCLLNPNDTSNGTYHSSQYDYYDTFIKQQENVTYISTDRADTNTVLCH

SEQ ID NO: 85123 - DNA, 978 bp, Staphylococcus aureus subsp. aureus MSSA476
  CDS (1)..(978): transl_table=11
atgtctgtagaggaatatggcaaggtttacttgataggtgcgggcccaggtaatccgaattatttgactaaaaaggctgagcgtttaatacgtgaagcggatgtcattctatatgatcgattagtgaatccgttaattttacaatatgcgaatttgactactgaaattatcgatgttggtaaaaagccgtatgcaaaacatattcagcaagaaaaaataaatgactgtatcgtggaagcagcgcgtcgatataacaaggttgttagacttaaaggtggcgatccagcgatatttggtcgtgtgcaagaagaagtcgacacactaaatgaacatcatattgcgtttgaaattgtaccaggggtgacatcagcgagcgcagcagttgctactatgcagacaggtttgacaatgcgtacagttgctaaaagtgtgacattttctacaggtcactttaaagattcagaagaaaatgaagtggatgtcaattccttagtgaatggtggcacgttagcaatttatatgggggtaaaacgtttagggaaaattatcacacagatacaacaatacacagatattgattacccgatagcgattgtctttcaagcatcgtgttttaacgagtttgttgttaaggggcgtttaagtaatattatttcaaaattgcaacactattcaattgaggcgaaaccaggtatatgtattattggggaagttgttggttatactgaaaatgtctcaacaacttctaatccgactcagcaattttatgtagtaagtggttctaaacatgacgcccttatgctctgtgaacatttatatgacgaaggttatggctgtttgctaaacccaaataatacatcgaatggcacatatcattcgtcgcaatatgattactatgatgcatttattaagcagcaagaaaatgtaacatatatttcaaccgatcgtgcagatgctaatacagtgttatgtcactaa

SEQ ID NO: 85124 - protein, 325 aa, Staphylococcus aureus subsp. aureus MSSA476
MSVEEYGKVYLIGAGPGNPNYLTKKAERLIREADVILYDRLVNPLILQYANLTTEIIDVGKKPYAKHIQQEKINDCIVEAARRYNKVVRLKGGDPAIFGRVQEEVDTLNEHHIAFEIVPGVTSASAAVATMQTGLTMRTVAKSVTFSTGHFKDSEENEVDVNSLVNGGTLAIYMGVKRLGKIITQIQQYTDIDYPIAIVFQASCFNEFVVKGRLSNIISKLQHYSIEAKPGICIIGEVVGYTENVSTTSNPTQQFYVVSGSKHDALMLCEHLYDEGYGCLLNPNNTSNGTYHSSQYDYYDAFIKQQENVTYISTDRADANTVLCH

SEQ ID NO: 85125 - DNA, 1374 bp, Acinetobacter sp. ADP1
  CDS (1)..(1374): transl_table=11
gtggaaatttttccaatttctcttaagttgcagcagcaacgttgtctgatcgtgggtgggggccatatcgcttatcgtaaagcgatcttgctggtcaaagcgggtgcaattctggatattgttgcgcctgatattgatccccagttgatgtcattgattgaacaaagtgctggtacagcctatgtaaagctttttgaagatcatgatctggatcgggtttatcgtttggtgattgctgccacagataatgcagatgtgaataagcgagtatttgaacaggcagagctgagaaatctgttggtcaatagtgtcgatgatattccaaactgtcgttttatggtgcctgcgatcatcgatcgttcgccgctattgatttcggtggcatccaatggtgcatcgccagtgttatcacgtcaattgcgtactcagattgaaacactggttccgcacggtatgggtaaactggctgagttttctggacagtggcgtagtcgagtaaaagcccaaattaccaatccagatgaacgtcggattttttgggaggagctgtatgcgagtcctcttaaagaacaggtatttaatgataatttagatattgccaaccaaatgatgactcaatcactggctgagtggactgcacccaaaggtgaagtctatctggttggtgctgggccaggagatcctgagttattgacgctaaaagcattacgtctaatgcaacaggcggatgtcgtgatttatgatcgtctggtctctgctccaattttagaactttgccgccgtgatgcagaaaaggtgtatgtcggaaaggcacgttctaatcatagtgtgccacaagagggcattaatgcgcttttagttaaatatgcgcaggctggtaagcgtgtttgccgtttaaagggtggagatccattcattttcggtcgtggtggagaggaaattcaggagctatttgctgctggcattccatttcaggtggtgcctggtattactgctgcatcgggttgttcggcctatgcaggaattccactgacccatcgtgattatgcgcaaagcgttcgtttcttgacaggacatctcaaagaaggttctccagagttgccttggagtgaactggtctatgaaaatcagacgctggtactatatatggggctggttggacttgagcatatctgtcagcaactgattgctcatggtcagcgtccagatatgccagtggcgttggtgtcgaaaggtaccacacctgagcaaaaggtcgtggtgggaacgctatctaatattgcgtctaaaatcgctgagtatcaaattcatgcgccaaccttaaccatcattggtgaagttgtcagtttacgtgagcagttacaatggttataa

SEQ ID NO: 85126 - protein, 457 aa, Acinetobacter sp. ADP1
MEIFPISLKLQQQRCLIVGGGHIAYRKAILLVKAGAILDIVAPDIDPQLMSLIEQSAGTAYVKLFEDHDLDRVYRLVIAATDNADVNKRVFEQAELRNLLVNSVDDIPNCRFMVPAIIDRSPLLISVASNGASPVLSRQLRTQIETLVPHGMGKLAEFSGQWRSRVKAQITNPDERRIFWEELYASPLKEQVFNDNLDIANQMMTQSLAEWTAPKGEVYLVGAGPGDPELLTLKALRLMQQADVVIYDRLVSAPILELCRRDAEKVYVGKARSNHSVPQEGINALLVKYAQAGKRVCRLKGGDPFIFGRGGEEIQELFAAGIPFQVVPGITAASGCSAYAGIPLTHRDYAQSVRFLTGHLKEGSPELPWSELVYENQTLVLYMGLVGLEHICQQLIAHGQRPDMPVALVSKGTTPEQKVVVGTLSNIASKIAEYQIHAPTLTIIGEVVSLREQLQWL

SEQ ID NO: 85127 - DNA, 834 bp, Erwinia carotovora subsp. atroseptica SCRI1043
  CDS (1)..(834): transl_table=11
atgatgacaacacaatcaatattggcgaagggccagcggcgtcagcccgtactcggcggtgaaatctggctggtgggggcagggccgggtgatgcggaactgttgacgttgaaggcactgcgggcaatccagcaggcggatgtagtggtctacgatcggctggtatcggcggaaattatggatctggtaccggagttggcgctgtgtattgacgtcggtaaaacgcgtggttgtcaccgcctgtcacaggaaaaaatcaatcagctgttggtcgagctggcgcaggctgggcagcgggtgatccgtctcaaaggtggcgacccgtttatttttgggcgcggtggtgaagagatggactatgcccagcaggcggggatcgtctgtcatgtggcgcccggtattactgctgcgacaggctgtgcggcggctgtaggactaccgctgacacatcgagcttgtgcgcagtcggtgcgtttcgtgaccggccattcgcgcgacggcgagccgcaactggactggccgacgctggcggacagccagcaaacgctggtgttttatatggggctgagccacagcagtcggctgtgccagcgtctgatcgagcacgggctgtcagcgcagacaccagtggcgattatcgaacgcggtacgcaaccggatcagcgattactgattgctacgctggcgaccttaccggcattgctggcacgctatcaaccacagtcgcccagcctgctggtggtcggtgatgtcgtccgcttctgccgccatcctgcgctgcatgttgaagcgacacccgcgctgctgacgatggaaaagcatgaagccgcctga

SEQ ID NO: 85128 - protein, 277 aa, Erwinia carotovora subsp. atroseptica SCRI1043
MMTTQSILAKGQRRQPVLGGEIWLVGAGPGDAELLTLKALRAIQQADVVVYDRLVSAEIMDLVPELALCIDVGKTRGCHRLSQEKINQLLVELAQAGQRVIRLKGGDPFIFGRGGEEMDYAQQAGIVCHVAPGITAATGCAAAVGLPLTHRACAQSVRFVTGHSRDGEPQLDWPTLADSQQTLVFYMGLSHSSRLCQRLIEHGLSAQTPVAIIERGTQPDQRLLIATLATLPALLARYQPQSPSLLVVGDVVRFCRHPALHVEATPALLTMEKHEAA

SEQ ID NO: 85129 - DNA, 1443 bp, Erwinia carotovora subsp. atroseptica SCRI1043
  CDS (1)..(1443): transl_table=11
gtgaactatctccctatatttgccgatcttcgtcagcgtccagtactggtcgttggcggtggtgaagttgctacgcgcaaaatcgatctgctgcaacgcgcgggtgcggaggtgaaaattgtcgcgttagcgctggcggaaccgttggctgcacagcatcaggccgggcaggttgaatggctggcgcaatcttttacaccggaactgttatctggcgtgtttctggtgattgccgcaacggatgacgccgagctgaatgcggcggtgtttgaggcggcgaatcagcgccatttgctggtcaacgtggtggacgatcagccgaagtgtacgtttattttcccctcgattgtggatcgctctccgctggtagtagcgatttcctcagggggacaggcaccggtgttagcacggttactgcgtgaaaaactggaatcactactgcctgccagcttgggcacgatggcggaaattgccggaagctggcgcgacagaattaaaacccggttgcattccatgccagcacgccgccgtttttgggagcggctgtttgtcggacgctttgcatcgctggtttctgccggacagctggagcaggccgaaggcgaactacaacagcagctggttaatcagcaagacgaacagcaactgcccgctgcagcacgaggcgaagtggcactggttggtgctggccccggtgatgctgggctgcttacgctgcgcggattgcaggtgatgcagcaggcggatgtagtgttgtatgaccatctggttagcgccgacgtgctggatttggtgcgccgcgatgccgaacgcatctgcgtcgggaaacgcgccagcacacactcgctgccgcagggtgagattaatcaactactagtgaagctggcgcaggaaggcaagcgggtagtgcgtctaaaaggcggcgatccctttatttttggccgcggcggcgaagagttgcaggcggtggcacaggcagggatcacgtttcaggttgtgcccggcgtgacggccgctgcgggcgtcacagcgtatgcaggtattccgttgacgcaccgtgaccatgcacagagcgtgatttttattaccggacactgtcgccctgatggcgattcgctggactggtcaacgctggcgcgtggacgtcagacgctggcgatttatatgggaacgatgaaggctgcggagatttcacagcagcttatcgcacatggccgctcagcgcagacgcctgtcgcggtgatcagccgcggcacccgacacgatcagcaggtacaaatcggtacgctgcaagagttagaacatttggcacggcaagcaccgacaccggcgctgctggtgattggcgaggtggtggatctgcatcaccagattgcctggtttggtcagacaacgccgacggtgccgcaagacagccgcccagcggtagtaaacttggcttaa

SEQ ID NO: 85130 - protein, 480 aa, Erwinia carotovora subsp. atroseptica SCRI1043
MNYLPIFADLRQRPVLVVGGGEVATRKIDLLQRAGAEVKIVALALAEPLAAQHQAGQVEWLAQSFTPELLSGVFLVIAATDDAELNAAVFEAANQRHLLVNVVDDQPKCTFIFPSIVDRSPLVVAISSGGQAPVLARLLREKLESLLPASLGTMAEIAGSWRDRIKTRLHSMPARRRFWERLFVGRFASLVSAGQLEQAEGELQQQLVNQQDEQQLPAAARGEVALVGAGPGDAGLLTLRGLQVMQQADVVLYDHLVSADVLDLVRRDAERICVGKRASTHSLPQGEINQLLVKLAQEGKRVVRLKGGDPFIFGRGGEELQAVAQAGITFQVVPGVTAAAGVTAYAGIPLTHRDHAQSVIFITGHCRPDGDSLDWSTLARGRQTLAIYMGTMKAAEISQQLIAHGRSAQTPVAVISRGTRHDQQVQIGTLQELEHLARQAPTPALLVIGEVVDLHHQIAWFGQTTPTVPQDSRPAVVNLA

SEQ ID NO: 85131 - DNA, 1380 bp, Erwinia carotovora subsp. atroseptica SCRI1043
  CDS (1)..(1380): transl_table=11
atggattacctgccaatattctgtcagctacacgataaaccttgtctgctggtagggggcggtgaaatagccgagcgcaaagctcggctattgttggatgctggcgcagtgattaccgtcaatgcgctcgattttaacgatcagtttcgggcgtgggagaaggatgctcaattaacactggtacacagcaccttcgatcccgcattactgaacgaggtgtggctggtgattgccgctacagacaatcaggacgtcaacaatcacgtttatgccagcgccagcgagcgccgaattttctgcaatgtcgtcgactcaccagaacgcgccagcttcattatgccgtcgatcatcgaccgctcaccgctaatggttgccgtatcttctggcggcaccgcgccggtattagctcggctactgcgggaaaaactggaaagtattctgccgcaaaatctcggtaaactggcagcattcgcaggcgaattgcgcagtcgggtaaaaattcgtttctgcaagatgagcgcacgccgtcgcttctgggaaaaactcttcgtacacgatcgactggcgcaggcgctagccagtgaagaccgcgagcgcgttcaacaactgacggaactgctgttctccgcaccattggatgacagaggggaagtgacgctggttggtgccgggccgggcgacgcagggttactgacgttgaaaggtctacagcatctccagcaggccgacattgtcgtttacgaccggctggtatcgaaagagattctcaacctgtcacgccgtgatgccgagcgtatcttcgtcggcaaagcgtctggctatcacagcgttcctcaagatcaaatcaatcagttgctggaagaaaaggcacgagcgggccatcgggtcgtcagactaaaaggcggcgatccctttatcttcggtcgtggtgccgaggagctagagtatctgcaacaggcgggcgtgcccttctctgtcgttcccggtattaccgccgcatcaggctgctccgcctacagcggtatcccgctcacccatcgcgatcactcgcagggcgtcagactgatcaccgggcacgtcaagcacgacaccgatctcgactggtccagtctcgcagcagaaaagcaaacgctggtgttttacatggggcttcagcaagctgaacacattcaaaataagctaatcgaacagcaactaccggaaaccgtgccggtcgccattatcgaaaacggcacctcaaccaaacaacgcgttctgagtggacagctctcacagctgggcgaattagcccaacaagccagcagtccgagcttgatcattatcggcaacgtcgtcggactacgggaaaaattgagctggttctctgaccagacagcataa

SEQ ID NO: 85132 - protein, 459 aa, Erwinia carotovora subsp. atroseptica SCRI1043
MDYLPIFCQLHDKPCLLVGGGEIAERKARLLLDAGAVITVNALDFNDQFRAWEKDAQLTLVHSTFDPALLNEVWLVIAATDNQDVNNHVYASASERRIFCNVVDSPERASFIMPSIIDRSPLMVAVSSGGTAPVLARLLREKLESILPQNLGKLAAFAGELRSRVKIRFCKMSARRRFWEKLFVHDRLAQALASEDRERVQQLTELLFSAPLDDRGEVTLVGAGPGDAGLLTLKGLQHLQQADIVVYDRLVSKEILNLSRRDAERIFVGKASGYHSVPQDQINQLLEEKARAGHRVVRLKGGDPFIFGRGAEELEYLQQAGVPFSVVPGITAASGCSAYSGIPLTHRDHSQGVRLITGHVKHDTDLDWSSLAAEKQTLVFYMGLQQAEHIQNKLIEQQLPETVPVAIIENGTSTKQRVLSGQLSQLGELAQQASSPSLIIIGNVVGLREKLSWFSDQTA

SEQ ID NO: 85133 - DNA, 777 bp, Propionibacterium acnes KPA171202
  CDS (1)..(777): transl_table=11
atgatctactccgcagacctcgttcccggcaccgtcactctcgtcggaggtggccctggtgatcccggattgctgaccgtcgcgggatttgaggcggttcgccaggccgacgtcatactttacgaccggctcgctccaaccgccgtcatggatgagaatccccaggccgagaggatcccggtcggtaaggtgccgcgcgggccttacgtcccccaggagcgcaccaacgaactgcttatcgagcacgccaaggctgggcgtaaggtggtgcgcctcaaaggcggcgattccttcgtttttggtcgcggtggcgaggagtggcaggcctgcgctgctgctggcgttccggtgcgcatcatccccggcgtcacttcatgcgtagccggtcccgagctcatggcggttccgctgacacatcgtcatatggtgcagggatttaccgtcgtttcgggtcacgtcgcccctggcgatactcggtccgaattggactgggcccagatcgccaagacaggcactaccctggtgattctcatgggagtggcccacattggcgacatcgctacccgcctcatggacggcgggttggccggcgacacaccggtcgccattattgctgatgcctcactgcccacccagcgttctctgacgacgaccctcgagaaggcagccgaagacatggcggaagccgagatcaacccgccggccatcaccgtcgtcggcgatgtcgccgggcttgacctcgacgggacccaggcccacgtcccgtctgatcactga

SEQ ID NO: 85134 - protein, 258 aa, Propionibacterium acnes KPA171202
MIYSADLVPGTVTLVGGGPGDPGLLTVAGFEAVRQADVILYDRLAPTAVMDENPQAERIPVGKVPRGPYVPQERTNELLIEHAKAGRKVVRLKGGDSFVFGRGGEEWQACAAAGVPVRIIPGVTSCVAGPELMAVPLTHRHMVQGFTVVSGHVAPGDTRSELDWAQIAKTGTTLVILMGVAHIGDIATRLMDGGLAGDTPVAIIADASLPTQRSLTTTLEKAAEDMAEAEINPPAITVVGDVAGLDLDGTQAHVPSDH

SEQ ID NO: 85135 - DNA, 1563 bp, Desulfotalea psychrophila LSv54
  CDS (1)..(1563): transl_table=11
atggaagaaaaaagaaaagatctaaaacttggcaaagtatatcttattggtgcaggtccgggtgatccaggcctcattacggtgcgtggtaagcaacttctcgaaaaggctgaggtggtggtatatgattaccttgccaatcctaagcttttaaagcttgtgccaaaatcgtcagagcttatctatgtgggaaaaaagggcaatattcatcatgcccatagccaggaagagatcaatcaaattctggtggataagtcccatgagggtaagctcatcgttcgcctcaagggtggtgacccctttatttttggtcgtggtggtgaagagcttcaggaaattcataaagagggcattccctttgaagttgtccccggtgtgacctctgcctcggcagcagccacctatgcaggtattcccattacccatcgtgatttcgctgcctccgtagcctttgtgacgggccatgaagatccgaataagaaagagtctaacgttgactgggcaaagcttgccacaggcgcgggcaccatcgtggtctatatgggcattaaaaatctgcccatcattgtcgacaatttgcttaagcacggaagagaccccgaaacacccgttgccgttgtccgttgggcatcgactcccgagcaggagtccgtggtgggaaccattgctaccattaaggatgtggtggccgatgcgggtattaaggctccagccctgatcattattggtggggtagtaagtctgcgcgataccatggactggtttgaaaaacgacctctctttggcaagaagatcattgttaccagaacccgtgagcaggcaagcgaacttgtccaggaactggaagaacagggcgctaattgtcttgagtgtgcgactattaagattagtccaatcaaggaacctaaggagttggataatgctcttgaacgtcttcaggagttccattggattctctttacctccattaacggtgtaaaatacttctttgagaggcttttttctaaaggaatggatgcccgtgacctgaaggggtgtgatattgccgtggttggacccagtactgcggactatctgcgtaaatatggtcttaatgccgatctctttccaccagtttttaccggtgagggtcttgctcaggcgcttttggatcagggtgttgagggacgcaatattcttattcctcgtgctcaacaggctcgagaaattgtcccggaaaatctccgtggagcgggcgctcaggtaaccgtcgcccccgtttatgtaaccaagcctatcgctgagaataaaaaagagatgagggctgagcttgagagcggcaccgttgatatggtgacctttaccagctcatcaaccgtgaccaattttatcaagatgctccagccggaaagcccagaagagttggcgagtctgcttaagggggtgcgtattgccgccattggtcctattacggcaaaaacagttacggacaatggtctgcaggtagatgttcagcctgaaaattataccattgccggcatgcttgatgccattgttgagtcctattcctctgagaagaaatag

SEQ ID NO: 85136 - protein, 520 aa, Desulfotalea psychrophila LSv54
MEEKRKDLKLGKVYLIGAGPGDPGLITVRGKQLLEKAEVVVYDYLANPKLLKLVPKSSELIYVGKKGNIHHAHSQEEINQILVDKSHEGKLIVRLKGGDPFIFGRGGEELQEIHKEGIPFEVVPGVTSASAAATYAGIPITHRDFAASVAFVTGHEDPNKKESNVDWAKLATGAGTIVVYMGIKNLPIIVDNLLKHGRDPETPVAVVRWASTPEQESVVGTIATIKDVVADAGIKAPALIIIGGVVSLRDTMDWFEKRPLFGKKIIVTRTREQASELVQELEEQGANCLECATIKISPIKEPKELDNALERLQEFHWILFTSINGVKYFFERLFSKGMDARDLKGCDIAVVGPSTADYLRKYGLNADLFPPVFTGEGLAQALLDQGVEGRNILIPRAQQAREIVPENLRGAGAQVTVAPVYVTKPIAENKKEMRAELESGTVDMVTFTSSSTVTNFIKMLQPESPEELASLLKGVRIAAIGPITAKTVTDNGLQVDVQPENYTIAGMLDAIVESYSSEKK

SEQ ID NO: 85137 - DNA, 1419 bp, Yersinia pseudotuberculosis IP 32953
  CDS (1)..(1419): transl_table=11
gtggactatctacctctatttgccgacttgaaacaacgcccggtattgatcgttggcggcggcgaagttgctgcgcgaaaaattgaactactgcaccgcgcaggtgcgcaggtatgggtagtggcgcaaaccctctcatctgaactcgaacagcagtatcaggatggccgtatccattggctggcacaggattttctgcctgaacagttggacaacgtgtttctggtgattgccgcaactaacgataccgtactgaatgccgctgttttcgcggcggcagatcaacggtgtattttggcgaatgtggtggatgaccaacccctttgttcgtttattttcccttcgattgttgatcgttcaccgctggtggtcgcgatctcgtcttccggccaggcaccggtgctggcgcggatactgcgtgagaagttagaagccttactgcccactcgtctcagtgatatggccgctatagctgggcgctggcgtgggcgggttaagcagcatatggcctctatgggggagcgccgccgcttttgggaacatgcattcagcgggcgctttgccagccttatcagccgtggtcagttaaccgaggctgaaaatgaattacaactgtcgctagagggccaacaccgtgcactcggcgaagtggctttggtcggtgcaggtcctggcgatgcagggttattaacgttacgtggtttgcaagtgatgcagcaggcagatgtggtgctgtatgaccatttagtcagtccggaagtcttggatttggtgcgtcgcgatgctgaacgcatctgtgtggggaaacgggcgggggcgcattcggttacccaagaggcaaccaatcagttgttggtcactctggcacagcaaggaaaacgggtcgtacggctaaaaggtggcgatccctttatttttggtcgggggggggaagagttacaagttgtggcgcaagcggggatcccgtttcaggtggtaccgggggtgacggctgctgcgggggcgacagcctatgccggtattcccctgacacaccgcgatcatgcgcaaagcgtgacatttattaccgggcattgccgtcctgatggcgatgatcttgattggcaggcgctggcccgtggtcgtcagacgctggcgatctacatgggaacagtgaaagcggcggcaatcagccaacagttgatcgcccatggccggtccagtaccacgccggtggcagtgattggccgtggaacccgtgtggaccagcaggtgctgatcggtacgttggcacaacttgaatcactcgcacagcaggcaccgacaccagcactactggtgattggtgaagtggtgaatttacatcaccaaattgcctggtttgggcaacaaccgcagactgaatcggcgatcagcccatcagtcgtgaatttggcataa

SEQ ID NO: 85138 - protein, 472 aa, Yersinia pseudotuberculosis IP 32953
MDYLPLFADLKQRPVLIVGGGEVAARKIELLHRAGAQVWVVAQTLSSELEQQYQDGRIHWLAQDFLPEQLDNVFLVIAATNDTVLNAAVFAAADQRCILANVVDDQPLCSFIFPSIVDRSPLVVAISSSGQAPVLARILREKLEALLPTRLSDMAAIAGRWRGRVKQHMASMGERRRFWEHAFSGRFASLISRGQLTEAENELQLSLEGQHRALGEVALVGAGPGDAGLLTLRGLQVMQQADVVLYDHLVSPEVLDLVRRDAERICVGKRAGAHSVTQEATNQLLVTLAQQGKRVVRLKGGDPFIFGRGGEELQVVAQAGIPFQVVPGVTAAAGATAYAGIPLTHRDHAQSVTFITGHCRPDGDDLDWQALARGRQTLAIYMGTVKAAAISQQLIAHGRSSTTPVAVIGRGTRVDQQVLIGTLAQLESLAQQAPTPALLVIGEVVNLHHQIAWFGQQPQTESAISPSVVNLA

SEQ ID NO: 85139 - DNA, 1422 bp, Yersinia pseudotuberculosis IP 32953
  CDS (1)..(1422): transl_table=11
atggactacttcccgatcttctgccaactgcaacacaaagcctgcctgctggttggcggtggagaaattgctgaacgcaaagcgcggctgttattggatgcaggtgcgttagtcaccgtcaatgcctgcgagttcaccccccagtttcaccattgggcagatcaggggcaactttcattaatcagcggtgaatttgtgcccgaactgttggccgataaatggctggtcattgccgccaccgatcagttgtccgtcaatgcattagtctatcaaagcgccaaccagcaacggatcttctgcaatgtggttgatgatccgaaacgcaccagctttatcatgccatctattattgatcgctcccccatcatgatcgcggtctcctctggcggtaaagcgcccgtgttggcccggttgttgcgcgaaaagctggaagccctgttaccgcaacatttggggcaactggcgcaactggcggggaacttacgccagcgggtgaagcagcattttgccgcgatgaccgaacgtcgccggttctgggaaaagttgctgacccacgaccgtctggcacaatctttagccaataacgatcacgtgcaagccgatcaacatgttgaacaactgtttagtgctccactcactgatcgtggcgaagtggtgttggtcggtgcagggccgggagatgctggtttattgaccttaaaagggttgcagcagatccaacaggccgatgtggtggtctatgaccggctggtctccgatgaggtgatgaatttggtccggcgtgatgccgagcgcatctttgtcggcaaacaatcgggccaccactgtgtgccgcaagagcaaatcaaccaaatcctgttacagcaggcacagtcaggtaagcgggtagtgcgtttgaaaggtggcgacccgtttatttttggtcggggcggcgaagagttagaagagttggcgggctacggtattcctttctccgtggtcccaggcattaccgccgcatccggttgctcggcttacagtggtattccactgactcaccgtgaccatgcgcaaagcgtgcgactggtcaccggtcatgccaaaaaagagggccagttagattgggcaaatctggcggcagagaaacaaacattagttttttatatggggctatcgcaggctggagagatccaacagcaattgattcaacatggtatgccagcgaccactcaggttgccttagtcgaaaacggcacctcacggcatcagcgggttgtgagtggcgagttaagccaattggccttactctcccaacaggtcagtagccctagcctgattatcgtcggtagcgtggtcagcctacgggaaaaactgaattggttttccagccgccatcacgatgatcagcccaaagtgactgaatgtgtggctcatgttggttaa

SEQ ID NO: 85140 - protein, 473 aa, Yersinia pseudotuberculosis IP 32953
MDYFPIFCQLQHKACLLVGGGEIAERKARLLLDAGALVTVNACEFTPQFHHWADQGQLSLISGEFVPELLADKWLVIAATDQLSVNALVYQSANQQRIFCNVVDDPKRTSFIMPSIIDRSPIMIAVSSGGKAPVLARLLREKLEALLPQHLGQLAQLAGNLRQRVKQHFAAMTERRRFWEKLLTHDRLAQSLANNDHVQADQHVEQLFSAPLTDRGEVVLVGAGPGDAGLLTLKGLQQIQQADVVVYDRLVSDEVMNLVRRDAERIFVGKQSGHHCVPQEQINQILLQQAQSGKRVVRLKGGDPFIFGRGGEELEELAGYGIPFSVVPGITAASGCSAYSGIPLTHRDHAQSVRLVTGHAKKEGQLDWANLAAEKQTLVFYMGLSQAGEIQQQLIQHGMPATTQVALVENGTSRHQRVVSGELSQLALLSQQVSSPSLIIVGSVVSLREKLNWFSSRHHDDQPKVTECVAHVG

SEQ ID NO: 85141 - DNA, 777 bp, Bacillus cereus E33L
  CDS (1)..(777): transl_table=11
atgggaaaagtatatatcgttggggcgggccctggggatccagatttaattactgtgaaaggattgaaatgtattgagaaggcagatgttattttgtacgaccgtctcgtaaataaagaattgctttcctatgcaaagcctgaagcggatttaatttattgcggaaaactaccaaattatcacacgatgaagcaagagacaattaacacgtttcttattaaatatgcgaaaaaaggaaaaattgtaacgagacttaagggtggggatccatttgtatttggtagaggaggagaagaggccgaagcgttagcaaagcaaggtgtagcatttgaaattgttcctggtatttcagctggaatagctgcacctgcttatgcgggtattccagtgacacatcgtgatgcaagtgcaagctttgctattgtgacagggcatcgaaaagaagatgttgcagaggaagtgaaatgggaaaatttagcgaaaggtgtagagactttagcggtatatatgggggttagcaatttaccctacatatgtgaacaactgatgaagcatggaaaagataaaagtacgcctgctgctattattgagcggggaacgacatctatgcaacgcacagttgttgggacgttaggaacaattgtagatgttgcgagaaaagaacaaattcaaaatccaagcatgattgtaattggagaagtcgtccgttttagagaaaaaatccattggtttgaaaagcagacagaaagcacgtatcaagtaagtggagtgttataa

SEQ ID NO: 85142 - protein, 258 aa, Bacillus cereus E33L
MGKVYIVGAGPGDPDLITVKGLKCIEKADVILYDRLVNKELLSYAKPEADLIYCGKLPNYHTMKQETINTFLIKYAKKGKIVTRLKGGDPFVFGRGGEEAEALAKQGVAFEIVPGISAGIAAPAYAGIPVTHRDASASFAIVTGHRKEDVAEEVKWENLAKGVETLAVYMGVSNLPYICEQLMKHGKDKSTPAAIIERGTTSMQRTVVGTLGTIVDVARKEQIQNPSMIVIGEVVRFREKIHWFEKQTESTYQVSGVL

SEQ ID NO: 85143 - DNA, 1425 bp, Bacillus cereus E33L
  CDS (1)..(1425): transl_table=11
atgaacggatatgtatatttagttggtgcaggacctggtgatgaagggcttattacaaagaaagcgatagagtgtttaaaacgtgcagatattgttttatatgaccgtttactaaaccctttctttcttagctatacaaaacaaacatgtgaacttatgtattgcggaaaaatgccaaagaatcatattatgcgacaagaaatgattaacgcacaccttcttcaatttgcaaaagagggaaaaattgttgtccgattaaaaggcggagatccatctatttttggccgtgttggtgaagaagcagaaactttagcagcagcaaatattccatatgaaattgtaccaggcattacatctagcatcgccgctagtagctatgcaggtatcccccttacccaccgtaactacagtaatagcgttactttactaaccggacatgcaaaaggtcctttaaccgatcatggaaaatataattcatctcacaatagcgatacgattgcctactacatgggtataaaaaacttacctacaatttgcgaaaacttacgacaagcaggaaagaaagaagatacgccagtagcagtcattgaatggggtacaactggtaaacagcgcgttgtcacagggacactatctaccattgtttctatcgtcaaaaatgaaaatatttctaacccttctatgacaattgttggtgatgtcgtttccttacgagatcaaatcgcttggaaagaacgtaaaccattacacggtaaaaaagttttatttacatccgcaacaaataaaacaagtgtaatgaagcaaaggttacaagaagctggtgcagaaatatatcaaattccaactttcaaaaaggaagaatatacattaacacttgaacaaatcaatgaaatttttaacgttgatcgccttgttttttgttcagctgaaagtgtagaaattttgatgcaatcatgtagtaaataccagaaagatattcgttccttacaggcagagctgcaacatatgaacgttgccactcaagaaaaacttatgcaatatggcctactaagtaaagaagcaaagttctcttccgatacaactgtttatttaggcagaaatattaatcggattgcttttattcaagagaaaattggtgccggctcctatatgatgactcataagtatacaattgatcatcgtttcgatgaagtccattctcgtatgctttcagaattcttatgggatagcattgtatttgaaggacgcgcttctattgatacgtttctagcagaagtaaaacgtcttggctttatcgatattgttactctcccattctcgtataccgacgttccaactttacactatgcaaataaagtcgggtttcataacgtagatcatcaattacaagaaactcttatgaaaaaagatatggtaagacaatga

SEQ ID NO: 85144 - protein, 474 aa, Bacillus cereus E33L
MNGYVYLVGAGPGDEGLITKKAIECLKRADIVLYDRLLNPFFLSYTKQTCELMYCGKMPKNHIMRQEMINAHLLQFAKEGKIVVRLKGGDPSIFGRVGEEAETLAAANIPYEIVPGITSSIAASSYAGIPLTHRNYSNSVTLLTGHAKGPLTDHGKYNSSHNSDTIAYYMGIKNLPTICENLRQAGKKEDTPVAVIEWGTTGKQRVVTGTLSTIVSIVKNENISNPSMTIVGDVVSLRDQIAWKERKPLHGKKVLFTSATNKTSVMKQRLQEAGAEIYQIPTFKKEEYTLTLEQINEIFNVDRLVFCSAESVEILMQSCSKYQKDIRSLQAELQHMNVATQEKLMQYGLLSKEAKFSSDTTVYLGRNINRIAFIQEKIGAGSYMMTHKYTIDHRFDEVHSRMLSEFLWDSIVFEGRASIDTFLAEVKRLGFIDIVTLPFSYTDVPTLHYANKVGFHNVDHQLQETLMKKDMVRQ

SEQ ID NO: 85145 - DNA, 1434 bp, Mannheimia succiniciproducens MBEL55E
  CDS (1)..(1434): transl_table=11
atgatgaattactttcccgttttcgccgatttaaataaccgtccggtgctggtggtaggcggcggtacgattgccgcgcgtaaagtgaacttgctgcttaaagccaatgcggaagtgcgcattacggcacaaaaattaaacgcggaattgaccgcacttgtcgagcaggatcgcattatctggattgccaaagaattccacggcgaacagattcgcaacgtatttttagtggtggcggcgacagatgacgaacaacttaacgaacaggttttccaggtggcggaaagccggcaaaaactggttaatgtggttgatgatcaagcgcgttgctcctttatttttccttccattatcgatcgcagcccgatccaggtcgccgtttcaagcggcggcgcggcaccggtacttgcccgcttattacgtgaaaaactggaagccttattaccgcaacatttgggtgtgatggcggatatttccggcaaatggcggcacaaagtaaaacaacaattaaaaacaattaccgaacgtcgtcgcttttgggaaagtttgttcaacggcagattcagccggctattaaaaaaccgtcagattgaagcggcgaaaaaagaattggaattacaactgaccaaagattatcaaggcggttcggtttccttagtgggtgccgggccgggtgatgcggggttattgacgctgaaaggcttgcaggaaatccagcaggcggatgtggtgttatatgacgctttggtttccgccgaaattctggatttggtacgtcgtgatgcggaattgatctttgttggcaaacgggcgcaggggcgtcaggtggcgcagcaagaaaccaatcagcttttagcggatcttgccctgcagggtaaacgtgtggtgcggttgaaaggcggcgatccttttgtgttcggccgcggcggtgaagagttggaagtactggcgcaacaaggtattccgttttccgtcgtgccgggcattacggcggcaattggcgccaccgcctatgcgggcattccgttgacccatcgggattatgcgcaaagtgcggttttcgtcaccgggcaccgcaaagccgatgcctcggatatagaatggcagactctcgcccgcagtaatcagacattagtgatttatatgggtaccttaaaagcggcaaccattgcgcaaagtttgcagcaatacggcagagccgcttcaacgcccgttgccgtaatttcgcaaggtacgcaggaaacccagcacacgcaaataggcaccctgaaaaatctggcggaactggcggaaaaagcgccgactccggctttaattgtggtgggtgaagtggtgtcgttacatgaaaaattagcctggttcggtgaagataaattcgcgcaaaaacgaccgcactttaccttggacagcctgcgtattgagcgagtagcttag

SEQ ID NO: 85146 - protein, 477 aa, Mannheimia succiniciproducens MBEL55E
MMNYFPVFADLNNRPVLVVGGGTIAARKVNLLLKANAEVRITAQKLNAELTALVEQDRIIWIAKEFHGEQIRNVFLVVAATDDEQLNEQVFQVAESRQKLVNVVDDQARCSFIFPSIIDRSPIQVAVSSGGAAPVLARLLREKLEALLPQHLGVMADISGKWRHKVKQQLKTITERRRFWESLFNGRFSRLLKNRQIEAAKKELELQLTKDYQGGSVSLVGAGPGDAGLLTLKGLQEIQQADVVLYDALVSAEILDLVRRDAELIFVGKRAQGRQVAQQETNQLLADLALQGKRVVRLKGGDPFVFGRGGEELEVLAQQGIPFSVVPGITAAIGATAYAGIPLTHRDYAQSAVFVTGHRKADASDIEWQTLARSNQTLVIYMGTLKAATIAQSLQQYGRAASTPVAVISQGTQETQHTQIGTLKNLAELAEKAPTPALIVVGEVVSLHEKLAWFGEDKFAQKRPHFTLDSLRIERVA

SEQ ID NO: 85147 - DNA, 1461 bp, Bacillus licheniformis ATCC 14580
  CDS (1)..(1461): transl_table=11
atggggaatgggaaagtttattttgtcggggccggaccgggcgattcaggattgatcacattaaaaggaagaacgctgatcgaggcggcggatgtcatattgtatgacaggctcgtcaattcccggctgcttgagcatgcaaaagcatcatgcgaatttgtctactgcggcaagctcccggaccgccattatatgaggcaaagtgaaatcaatgcactgctcattgaaaaggggctgaaaggcctcaaagtggtccggctgaaaggaggagacccgagcgtgtttggcagagtcggggaagaagcggccgccgtcagcgaacacggcatcccgtacgagatggtgccaggcattacatcgggaatcgccgctcctctttatgccggactgcctgtgacccaccgcgatttcgcttcatcctttgccgttgtcaccgcccatgataaatcgggcaaaccggagatgaattgggaagggctggccaagggcgtccaaaccctcgtcttttacatggggatcaaaaaccttggttatatatgcgagcagctgatgaaacacggcaagtccccccttgttcccgcaatggccatccaatggggcacatggggccggcagcggagtgttaaagggacattgcagaatatcagggagaaaataaccgagcatcagatcaaaaatcccgcgattatcgtcatcggcgacatcgtatcattcaggcagaacagctggtttgaagaaaagcctttgatcgggctgaacatcatggcagtcaaaagctgtgaagaagaacaaattccagtggaggcgcttcgtgaacaaggcgctgaagttgtggaatggccgaaatggaaatcggccgaaacggtgcctgacgatgcacttttaggtcgaatcgcttgttttgacagcctgctgttcacctcaagtgcgtcactgcgcagatttttcagccggcttgctgctttgaagatcgatgtcagggaaatgcgcggaaggctttacgcttcagatcagcatgtaaaagcagctcttgaagaacggggatttgaagcctttctgcaaacggaaatgccggtctcgggcagctgtttgctgatcggcagccgggaagccgtgcaaaattacccgcactccgggtgcgaggtattgattacacatgacagggtgatcgacagccgctttacctcgatcatcaaacgggaaattgatgagtttcctattgatatagtgttgttttcaaatcgaacatgcgtcgagctgttcgtaaacgaggcggagacagtcggcctccatccggaaaaaacggctgcccgtcttcaggcgttctgcctcactgaagaagcgggggagagagctgcagccgtagggtttcagcgcgttcatgcagtgaatgatcgcgatcgcctgccggatgtcatcaaagagatcaaccgaacagccgaatttgtctgtcagagctga

SEQ ID NO: 85148 - protein, 486 aa, Bacillus licheniformis ATCC 14580
MGNGKVYFVGAGPGDSGLITLKGRTLIEAADVILYDRLVNSRLLEHAKASCEFVYCGKLPDRHYMRQSEINALLIEKGLKGLKVVRLKGGDPSVFGRVGEEAAAVSEHGIPYEMVPGITSGIAAPLYAGLPVTHRDFASSFAVVTAHDKSGKPEMNWEGLAKGVQTLVFYMGIKNLGYICEQLMKHGKSPLVPAMAIQWGTWGRQRSVKGTLQNIREKITEHQIKNPAIIVIGDIVSFRQNSWFEEKPLIGLNIMAVKSCEEEQIPVEALREQGAEVVEWPKWKSAETVPDDALLGRIACFDSLLFTSSASLRRFFSRLAALKIDVREMRGRLYASDQHVKAALEERGFEAFLQTEMPVSGSCLLIGSREAVQNYPHSGCEVLITHDRVIDSRFTSIIKREIDEFPIDIVLFSNRTCVELFVNEAETVGLHPEKTAARLQAFCLTEEAGERAAAVGFQRVHAVNDRDRLPDVIKEINRTAEFVCQS

SEQ ID NO: 85149 - DNA, 774 bp, Bacillus licheniformis ATCC 14580
  CDS (1)..(774): transl_table=11
atggggaaagtatatatcgttggggcaggtcctggagaccccgatttactgacgatcaaagctttaaaagccatccagacagccgatgtcattttgtatgacaggcttgtgaataaacagattttacagcacgccaaggagggagcggatctcatctactgcggaaagcttccggactaccacatgatgaagcaggaaacgatcaatcattttctcgtcaagtatgcgaaaaaagggaaaaccgttgtcagactgaaaggcggcgatcctttcgtattcggcagaggcggcgaggaagcgcaaaccctcgctgagcacggggttgcttttgaaatcgtgccgggaatcacctcgggaatagctgccgctgcttatgcgggcattccggtgacacaccgggaagcgagttcaaacgttgctttcgtgacaggccattatcaaaaagaagaaaactttgaagagaagtggaaagcgttagccacagggatcgatacgcttgtcatttatatggggattaaaaacgtgaagcaaattgaaaggcttctgatcgaaaacggcagagacccgtcaacgccagccgctttcatccattggggaacgacagacaaacaaaaaacggtgctttgcacggttgaaacgcttgccggtacagtcgaaagcgaaaagattgaaaacccgagcctgattgtcatcggggatgtcgttcaattcagctcgcagttaagctggtttgaacctgagctgaaagatccggcattaagcgaggcgctttaa

SEQ ID NO: 85150 - protein, 257 aa, Bacillus licheniformis ATCC 14580
MGKVYIVGAGPGDPDLLTIKALKAIQTADVILYDRLVNKQILQHAKEGADLIYCGKLPDYHMMKQETINHFLVKYAKKGKTVVRLKGGDPFVFGRGGEEAQTLAEHGVAFEIVPGITSGIAAAAYAGIPVTHREASSNVAFVTGHYQKEENFEEKWKALATGIDTLVIYMGIKNVKQIERLLIENGRDPSTPAAFIHWGTTDKQKTVLCTVETLAGTVESEKIENPSLIVIGDVVQFSSQLSWFEPELKDPALSEAL

SEQ ID NO: 85151 - DNA, 1425 bp, Methylococcus capsulatus str. Bath
  CDS (1)..(1425): transl_table=11
atggattacctgccgattttcctcaagcttcgcgacctcccctgcctgatcgtggggggcggcgaggtcgccgtccgcaaactcggcctgctgctcgatgcgggcgcagcagtcaccgtgatcgctgccagcgccgaagcggtcatcgtcgaactcgccgaccgcggcctgatccgactacgtaccaaagttttcgaggcgaccgacagcgaaggtttccggctgatcattgcggcaaccgacgaccgcgcggtcaacgccgccgtcgcaaccgctgcgcggcgacacggcatcccggtcaacgtggtcgattgccccgacctgtgcgacttcatcttcccggccatcatcgaccgctcgccagtgctggtcgcggtttccaccggtggcgcctcacccgtgttggcccggcagcttcggacccgcatcgagacctgtattccctcccgtttcggtacgctggcccggctcgccgccgacttgcgggaacgggtccggcaggcgattcccgaaccgcgcgcccgccgccatttctgggagcggacactggaggggccagccgcagaactggcgctgcaggggcgcgccgaggacgcagagcgcgtgctgctcgaagcagcggacgcagccgcccggcaagaaagaccggcgtggggctcggtcgcgctggtcggcgcgggacccggcgatccggacctcctgacgctacgcgctctgcgcctgatccaggaagccgacgtcatcgtctatgaccgtctggtctcggccgagatcctggcgctggcgcgccgggacgcgcggcgcatctatgccggcaaggaacgcagccgccatagcatcccgcaggacgatatcaacgccctgctggcgaatctggccgccgaaggcaaccgggtggtccgcctcaaaggcggcgaccccttcattttcggccggggcggcgaagagatcgaaaccctgatggcctgcggcatcccattccaggtcgtcccgggaatcacggcggcgtcgggatgcgccgcctatgccggcatccccctgacccaccgcgcccatgcgcatgcctgcgtgttcgtcgccggccacctgaaggatggaaccctgcaggatctggactggtctcagctggtccaaccccaccagaccgtggtggtgtacatgggcttacagggcctgccacagatctgcgccgaactgatccgccacggcgcgccgccatcccgtcctgcagcgctgatccagcagggcaccacccgcgaccagaaggtcttgaccgccacgctggaaacgctcccggacaaggtcgccgacgcgggaatcaaggcccccaccctgatcatcatcggcgaggtggtagggctgcggaaaaaactcgcctggtaccgcagccgccaggaaaccgagggaaggtccggaaacggctga

SEQ ID NO: 85152 - protein, 474 aa, Methylococcus capsulatus str. Bath
MDYLPIFLKLRDLPCLIVGGGEVAVRKLGLLLDAGAAVTVIAASAEAVIVELADRGLIRLRTKVFEATDSEGFRLIIAATDDRAVNAAVATAARRHGIPVNVVDCPDLCDFIFPAIIDRSPVLVAVSTGGASPVLARQLRTRIETCIPSRFGTLARLAADLRERVRQAIPEPRARRHFWERTLEGPAAELALQGRAEDAERVLLEAADAAARQERPAWGSVALVGAGPGDPDLLTLRALRLIQEADVIVYDRLVSAEILALARRDARRIYAGKERSRHSIPQDDINALLANLAAEGNRVVRLKGGDPFIFGRGGEEIETLMACGIPFQVVPGITAASGCAAYAGIPLTHRAHAHACVFVAGHLKDGTLQDLDWSQLVQPHQTVVVYMGLQGLPQICAELIRHGAPPSRPAALIQQGTTRDQKVLTATLETLPDKVADAGIKAPTLIIIGEVVGLRKKLAWYRSRQETEGRSGNG

SEQ ID NO: 85153 - DNA, 831 bp, Azoarcus sp. EbN1
  CDS (1)..(831): transl_table=11
atgagcaagaatatcggcggcttcgatccagcggtaaggggtagcgatcttccgacgcgagtcgcgcgggctggcaaggtgtatctcgtcggcgccggtcccggcgacccggaactcctcacgctgaaagcggcacgcctgctggccggcgcacaggcagtagtctacgaccacctcgtcggcgacggcattctcgaactgatcaaccccacggcgcgaatgatctacgccggtaaggaggcgggacatcacgcccttccccaggatcagatcaatcacctgctcgtccaactcgcgcgcaccggcaccaacgtagtcaggctaaagggcggcgacccgttcatgttcggtcgcggcggcgaggagatggaggaactgctggcctgcggcatcgaatgcgagatcgtgcccggcatcacggcggcttgcgggatcgcagcctgtacaggaatcccgctgactcatcgcgaccacgcccgctcggtgatcttcacgaccggacatctcaaggacgacacggtcaacctcgattggcctgcccttgcacgaccgaaacagacggtcgtgatctacatggggctcgcggcgctcgaaatcatctgccaccagttgatggcccacggcctgcctgccgacacgcccgcggccgtgattcacgctggcacgacggaccggcaggtcatcgtcgctgatcgcatcgaccgccttgtcgccaccgcacgccacgcccagctcgaatcgcccgcactgatcatgatcggctcggtggtgtcgctccactccctcgcccatgacaatcgcacattccgggaactcgccctcacggcatga

SEQ ID NO: 85154 - protein, 276 aa, Azoarcus sp. EbN1
MSKNIGGFDPAVRGSDLPTRVARAGKVYLVGAGPGDPELLTLKAARLLAGAQAVVYDHLVGDGILELINPTARMIYAGKEAGHHALPQDQINHLLVQLARTGTNVVRLKGGDPFMFGRGGEEMEELLACGIECEIVPGITAACGIAACTGIPLTHRDHARSVIFTTGHLKDDTVNLDWPALARPKQTVVIYMGLAALEIICHQLMAHGLPADTPAAVIHAGTTDRQVIVADRIDRLVATARHAQLESPALIMIGSVVSLHSLAHDNRTFRELALTA

SEQ ID NO: 85155 - DNA, 861 bp, Azoarcus sp. EbN1
  CDS (1)..(861): transl_table=11
atgtccctgcctgatattccctcgccgcgtcccggtccgctcgccggtcacgtctatctcgtcggcgccggccctggcgaccccgagctgctgaccttgcgcggcgcgcgcctgatcgcaggcgccgacgccgtcgtcttcgacaacctcgtcagcccggtgatcgtcgacctcgcgccgcccgcggccgagcgccattacgtcggcaagaaggcgtcggaccacacgctgccgcagggcgagatcaaccgcctgctcgtgcggctcgcccaggcgggcaagcgcgtcgtgcggctcaagggcggcgatccgttcatcttcggccgcggcggcgaggagatggaagtgctcgtcggcgcgggaatcaccgtcgaagtcgttcccggcgtcaccgccgcggccggcatcgccgcgtacgcgggcattccgctgacgcaccgcgaccacgcgcgctcggtgatcttcactacgggctttctcaagaacggcgcgctcgatctcgactggccgatgctcgcgcggcccggccagacgctcgtcgtctacatgggcatttcgcggctcgccgaaatctgccgggagctgatcgcccatggcctcccggcgacgactccggccggcgtcgtcgagcggggtacgacgcgggcgcagcgcgtcgcggtcggtacgctcgcgacgcttgccgacgtcgttcgcgacgccgacatccgtccgccggcgctgacgatcgtcggcgacgtcgtcgggctgtacccgcggctcgcgtggttctcgcccgagcaggtcgaccctgtgcggcacgcgccgcatgttggctgcaccggggtgcatccggaaccggactgcgactcggccacctga

SEQ ID NO: 85156 - protein, 286 aa, Azoarcus sp. EbN1
MSLPDIPSPRPGPLAGHVYLVGAGPGDPELLTLRGARLIAGADAVVFDNLVSPVIVDLAPPAAERHYVGKKASDHTLPQGEINRLLVRLAQAGKRVVRLKGGDPFIFGRGGEEMEVLVGAGITVEVVPGVTAAAGIAAYAGIPLTHRDHARSVIFTTGFLKNGALDLDWPMLARPGQTLVVYMGISRLAEICRELIAHGLPATTPAGVVERGTTRAQRVAVGTLATLADVVRDADIRPPALTIVGDVVGLYPRLAWFSPEQVDPVRHAPHVGCTGVHPEPDCDSAT

SEQ ID NO: 85157 - DNA, 774 bp, Silicibacter pomeroyi DSS-3
  CDS (1)..(774): transl_table=11
atgacacccgccggacatgtccacctgatcggagcaggaccgggagatcccgacctgcttaccctgcgcgcgctgcgcctgctgcaagaggcccaggtggtggtctatgaccgtctggtcgatccccgcatcgtcgccatggcgcccgaaggggcccggatgatcccggtgggcaaatcgccgaaatgccatcccgtcccgcaggaccggatcaaccggatcctgctggacgaggcccgcgcgggccatgtggtggcccggctcaagggcggcgacccgatgatctttggccgcggctcggaagaggcggcctttctcatggcccacggggtgcgggtcgattacgcccccggcatcaccgccgcgcagggggcttcgagcgccaccggcgtgccgctgacccatcgtggtctggcaacgggcgtgcaatatgtcaccggccaccggcaggcgggccaggtgctggacctcgactggaaacggctcgccgaccccgacaccacgctggtggtctatatgggcgtggccaatatcggccagatcgccatcggcctgatgaccgagaacctgcccgccaccactccggttctggcgatcagccgcgccaccacaccgggtgaacgccgcctgctgtcgcggctcgaccggatcgcggcggatgcgcgggcagaggcgcttgaggcgccgaccctgttcatcatcggcaaggtggtctcgctttatgcacagcagccggtcaccgatctgctggaacaggcggtggcccatggctga

SEQ ID NO: 85158 - protein, 257 aa, Silicibacter pomeroyi DSS-3
MTPAGHVHLIGAGPGDPDLLTLRALRLLQEAQVVVYDRLVDPRIVAMAPEGARMIPVGKSPKCHPVPQDRINRILLDEARAGHVVARLKGGDPMIFGRGSEEAAFLMAHGVRVDYAPGITAAQGASSATGVPLTHRGLATGVQYVTGHRQAGQVLDLDWKRLADPDTTLVVYMGVANIGQIAIGLMTENLPATTPVLAISRATTPGERRLLSRLDRIAADARAEALEAPTLFIIGKVVSLYAQQPVTDLLEQAVAHG

SEQ ID NO: 85159 - DNA, 729 bp, Silicibacter pomeroyi DSS-3
  CDS (1)..(729): transl_table=11
atgagcggctttgtctcttttgtcggctcggggccgggcgacccggagctgttgacgctgaaggcggtggaccggctgggcaaggccgatgcggtgctgttcgacgatctgtcgagcggtccgatcctggcccatgcccgccccgacgccgatctggtgggggtgggcaaacgggcgggccgcccctcgcccaaacaggaccatgtaagccgcctgctggtggactatgcccagaccggcgcgcatgtcgtgcggctgaaatccggcgatggcggcctgttcggccggctggaggaggaactggtcgccctgcgcgcggccgggatcggctacgagatcattcccggcatcccctcggctgtggctgcggcggcggcagcgggtatcccgctgacccgcaggctgaccgcgcggcgggtgcaatttgtcaccggacatgacatcagcggcaaactgccccccgacctgaacctgcccgcgctggccgatccgcaggccacaacggtcgtgttcatgggcaagcgcacctttccgctgctgctggatgcgctcgaggcgcatggcctgccgcgctcgacacccgcgctgatggccgaaagtgtctcgacccccgaacagcgcctgacccgcgccaccatgggcgaactggccgagcggctggcagaggaggtcggcaccgcgcccgccctgatcctgtatggcccgctggcggagtttagcgatgactga

SEQ ID NO: 85160 - protein, 242 aa, Silicibacter pomeroyi DSS-3
MSGFVSFVGSGPGDPELLTLKAVDRLGKADAVLFDDLSSGPILAHARPDADLVGVGKRAGRPSPKQDHVSRLLVDYAQTGAHVVRLKSGDGGLFGRLEEELVALRAAGIGYEIIPGIPSAVAAAAAAGIPLTRRLTARRVQFVTGHDISGKLPPDLNLPALADPQATTVVFMGKRTFPLLLDALEAHGLPRSTPALMAESVSTPEQRLTRATMGELAERLAEEVGTAPALILYGPLAEFSDD

SEQ ID NO: 85161 - DNA, 756 bp, Synechococcus elongatus PCC 6301
  CDS (1)..(756): transl_table=11
gtgggtgctggccctggcgatccgggtctgttgaccttgcgaggcaaagcattactagaagctgctgaggtggttgtttatgacgccttggtcagtgatgcaatcttgtctttaatcaatcccaaggcagacaaaattcatgccggtaaacggcgtggacaacactcactgttgcaaactgaaacaacccagttactgattgaaaaggctcagcaacaagcggttgtggtgcgcttgaaaggtggcgacccgtttgtgtttggtcgggggggtgaggagatggccgacctccaagcagcaggcattgcagtggaggtggttcccggcgtgacggcaggggtggcggtgccagcctacgctggcattcccattacccaccgcgatcgcagttccagcgtcacgtttgtgactggtcatgaaatggcgggcaagtatcgccccagcattgcttgggaggcgattgcccggggcagcgaaacgattgtgatctacatgggcctgcacaatctggctctgatcattgagcagttgcagaccgcaggcttacccggcataaccccgatcgccttgattcgttggggtacgcgaccggagcaggaagaactgtttgccacgctagaaaccgttgtggcagccgttgccgaacgtcaatttcaagcacccgcgatcgcggtcatcggtcaggttgtcagcctgagtccgttgctgccgccgacaatgatgacagcgagcgatcgcggactaccgacggcctaa

SEQ ID NO: 85162 - protein, 251 aa, Synechococcus elongatus PCC 6301
MGAGPGDPGLLTLRGKALLEAAEVVVYDALVSDAILSLINPKADKIHAGKRRGQHSLLQTETTQLLIEKAQQQAVVVRLKGGDPFVFGRGGEEMADLQAAGIAVEVVPGVTAGVAVPAYAGIPITHRDRSSSVTFVTGHEMAGKYRPSIAWEAIARGSETIVIYMGLHNLALIIEQLQTAGLPGITPIALIRWGTRPEQEELFATLETVVAAVAERQFQAPAIAVIGQVVSLSPLLPPTMMTASDRGLPTA

SEQ ID NO: 85163 - DNA, 1431 bp, Bacillus clausii KSM-K16
  CDS (1)..(1431): transl_table=11
atggcacaaaagggaacggtttatttaattggtgcagggccgggcgattgtggtttattgacggcaaaggggcttgacattcttcgccaggcggacgttttattatacgaccgtcttgtcaacccacttttgctggaagaaaccaaaccaggggctgagctgctgtatgcaggcaagctgccgaaccgccatattcttcgccaagaagcgattcatgacgaaatggtgcgccatgcccaaaaaggaaaatgcgtcgtccgtttaaaaggcggcgatccaagcgtatttgggcgcgttggcgaagaagcagcctttctcgacgaatacgccataccttacgaaatcgttcctggggtgacagcaggaattgcggcgccggcttatgcaggcgttcccgtaacccatcgccttcacggcgccaactttgccgttgcgacagggcatagccgcagagacaccggcttgcctgaaatcgattggaatgggcttgcctccatcgacacggttgctttttatatgggcattaaacacttgccaaccattgcagaaaatttaatcacacatggccgcccaaaggacgaaaaagtgttgttaattcaatgggggacaacgagcaaacagcggactcttaccgccgacttaggcacgattgcccgaaaagcagaagcggaacagttcacgaatccggcgattgccctcattggtgatgtcgcagcccttaaccaaggaaaaagttggtttgagcgtaaaccattgtttggttcgtttccgctaattgccaatagtgacggtgctgcccagcttgcatctttattaaaagaagaaggggctgaaacgtttgtatacccccgtttccatgaggtagaggaggaagccccgcttattcattgggaaacggctacagacattgccttctatgaagagaaggatgtcattgtcttttttcgatggctccaaaaaagaggacttgatatccgtaccctctctgcccaatttagcggtgaaacggattcggcggtgcaggctcttcaacaacgtgggcttgcccctgttcaggggagcagaccaatagggtcagaccgactctttttaagccgagggggcttaggtggcaagcctggctggaaacacattcaaacacgggagcgaaccgttgccccatccacgcaaacgacgataaaccgtctactcgatgaagggcacttgactgatcttgtctttttaagccgtgagtccgttgaatgtttttgtgaagcgtttgctgcgattggcagagagaaggagataagcgagttaactgtgctttgtttaagcgatgaagcggaaaaagcagcgatttcctatggtttgtcgccgcaaattaagcaatcggtactgtcggcatggatggaggggaactatgcaggcgattttatatgtgggccacggtag

SEQ ID NO: 85164 - protein, 476 aa, Bacillus clausii KSM-K16
MAQKGTVYLIGAGPGDCGLLTAKGLDILRQADVLLYDRLVNPLLLEETKPGAELLYAGKLPNRHILRQEAIHDEMVRHAQKGKCVVRLKGGDPSVFGRVGEEAAFLDEYAIPYEIVPGVTAGIAAPAYAGVPVTHRLHGANFAVATGHSRRDTGLPEIDWNGLASIDTVAFYMGIKHLPTIAENLITHGRPKDEKVLLIQWGTTSKQRTLTADLGTIARKAEAEQFTNPAIALIGDVAALNQGKSWFERKPLFGSFPLIANSDGAAQLASLLKEEGAETFVYPRFHEVEEEAPLIHWETATDIAFYEEKDVIVFFRWLQKRGLDIRTLSAQFSGETDSAVQALQQRGLAPVQGSRPIGSDRLFLSRGGLGGKPGWKHIQTRERTVAPSTQTTINRLLDEGHLTDLVFLSRESVECFCEAFAAIGREKEISELTVLCLSDEAEKAAISYGLSPQIKQSVLSAWMEGNYAGDFICGPR

SEQ ID NO: 85165 - DNA, 1374 bp, Bacillus clausii KSM-K16
  CDS (1)..(1374): transl_table=11
atgtccatacaaggaaaggtgtacctcgtcggtgcagggcctggagacgccgaactgttgactgttaaagcacgaaaggtattacaacaagctgacgttgtgatttttgacaggcttgccaatcctgcgctcatcatggaagttagcgatcatgccaagttggtgtatgcaggcaagcagccgtgtaaacatgtgttgcgccaaggagacatccaaacagaaatgcttgtccacgcaaaaaaaggaaaaacggttgttcgcttaaaagggggcgatcctgccgtattcggcagagtaggagaggaagctgcctatttaaaaactcaccacattccatttgagattgtccctggtgtgacagcgggtacagccgcttctatttatgcaggtgtaccggcaacccatagaacgctttccagttcatttgcagtcgtaactgcttatcgcgacagagacgaaaaaaaagagccccctaattggcgagcacttgctcaatcggttgacacgctaatgatctatatgggcatgaaacaattagctgccattgttgaccagttaatgacacatggaaaaccagccggtacgcctgtgctcattgtcgagtggggcacatacagtcgacagcggtccgtggaaggaacactagaaacgattgtgaccaatgtcgctaacgctaacttggcgaatcctgctgttattttaatcggcgatgttgtcggtgtccgtggggctgtatcatggtttgagcacaagcccctttctggcatgggaatactttcgctaagaggagaaactgaaatgacgggaacgttgcgggcgcaaggggcggatgtctttgcggcccccctccaacaaaacaaggggaaaattgttactgatacggacatcgctgctgtgcttcaaactagtaaaaatcaagcagtcttgttttttgccaaggaggtgttgttcgcgtttttagcaaagcttggcgagaaaggctatgatattcgttctgtacaagggcaacttatggcgggaacacaggaggtggagcaaatcgctcgctcactcggtttgcaattggcgcgttattcgaaaaaatcaactctttcgcctgtcgtgattggtacagatgccattaaccgccgcttgttaccacaaaaaataactgttgcgattcgtcgtctgctagaagaaggccacttaactcatgccttttgtgaaacagagcaagaaattgatgatttgcgactcgttttagcagaatgtgcaaatgaagctgtattgcctattttaacgacgagcgatcaagttcaagcatatgctaagtctctttcgatgtacgcttctgtcgttctgcacaatcaaccactcgatcagacaatgtcttaa

SEQ ID NO: 85166 - protein, 457 aa, Bacillus clausii KSM-K16
MSIQGKVYLVGAGPGDAELLTVKARKVLQQADVVIFDRLANPALIMEVSDHAKLVYAGKQPCKHVLRQGDIQTEMLVHAKKGKTVVRLKGGDPAVFGRVGEEAAYLKTHHIPFEIVPGVTAGTAASIYAGVPATHRTLSSSFAVVTAYRDRDEKKEPPNWRALAQSVDTLMIYMGMKQLAAIVDQLMTHGKPAGTPVLIVEWGTYSRQRSVEGTLETIVTNVANANLANPAVILIGDVVGVRGAVSWFEHKPLSGMGILSLRGETEMTGTLRAQGADVFAAPLQQNKGKIVTDTDIAAVLQTSKNQAVLFFAKEVLFAFLAKLGEKGYDIRSVQGQLMAGTQEVEQIARSLGLQLARYSKKSTLSPVVIGTDAINRRLLPQKITVAIRRLLEEGHLTHAFCETEQEIDDLRLVLAECANEAVLPILTTSDQVQAYAKSLSMYASVVLHNQPLDQTMS

SEQ ID NO: 85167 - DNA, 978 bp, Staphylococcus aureus subsp. aureus COL
  CDS (1)..(978): transl_table=11
atgtctgtagaggaatatggcaaggtttacttgataggtgcgggtccaggtaatccgaattatttgacgaaaaaggctgagcgtttaatacgtgaagcggatgtcattctatatgatcgattagtgaatccgttaattttacaatatgcgaatttgactactgaaattatcgatgttggtaaaaagccgtatgcaaaacatattcagcaagaaaaaataaatgactgtatcgtggaagcagcgcgtcgatataacaaggttgttagacttaaaggtggcgatccagcgatatttggtcgtgtgcaagaagaagtcgacacactaaatgaacatcatattgcgtttgaaattgtaccaggggtgacatcagcgagcgcagcagttgctactatgcagacaggtttgacaatgcgtacagttgctaaaagtgtgacattttctacaggtcactttaaagattcagaagaaaatgaagtggatgtcaattccttagtgaatggtggcacgttagcaatttatatgggggtaaaacgtttagggaaaattatcacacagatacaacaatacacagatattgattacccgatagcgattgtctttcaagcatcgtgttttaacgagtttgttgttaaggggcgtttaagtaatattatttcaaaattgcaacactattcaattgaggcgaaaccaggtatatgtattataggggaagttgttgattatactgaaaacactcctaaatcatatgatcctatgaagcaattttatgtagtaagtggttctaaacatgacgcccttatgctctgtgaacatttatatgacgaaggttatggctgtttgctaaacccaaatgatacatcgaatggcacatatcattcgtcgcaatatgattactatgatgcatttattaagcagcaagaaaatgtaacatatatttcaaccgatcgtgcagatgctaatacagtgttatgtcactaa

SEQ ID NO: 85168 - protein, 325 aa, Staphylococcus aureus subsp. aureus COL
MSVEEYGKVYLIGAGPGNPNYLTKKAERLIREADVILYDRLVNPLILQYANLTTEIIDVGKKPYAKHIQQEKINDCIVEAARRYNKVVRLKGGDPAIFGRVQEEVDTLNEHHIAFEIVPGVTSASAAVATMQTGLTMRTVAKSVTFSTGHFKDSEENEVDVNSLVNGGTLAIYMGVKRLGKIITQIQQYTDIDYPIAIVFQASCFNEFVVKGRLSNIISKLQHYSIEAKPGICIIGEVVDYTENTPKSYDPMKQFYVVSGSKHDALMLCEHLYDEGYGCLLNPNDTSNGTYHSSQYDYYDAFIKQQENVTYISTDRADANTVLCH

SEQ ID NO: 85169 - DNA, 780 bp, Staphylococcus epidermidis RP62A
  CDS (1)..(780): transl_table=11
atggggaaagtatatttagttggagctggacctggtgatccagaattaataacgttaaaaggtttaaaagccattaaagaagccgatgtcatcctttatgaccgacttgtaaataaagaaatacttaattatgcttctctttctactaagttcttctattgcggtaaggatcctcacaggcactccttaccgcaggaagaaacaaataaaatgatggtaaccttagccaaaaaagggcacatagttacacgtttaaagggtggcgatccatttgtttttggacgtggcggagaagaagcagaggaattagcatgtcataatatccactttgaaattatacctggaattacatcgggaattgcagcaccagcatatgctggaattccagtaacacatcgtgattatagttcttctgtagcatttgtaactgcagtgaataaacctggtatggataaaggcaaatactggcaacatttggccaatggtcctgaaactttatgtatttatatgggggttaagagactcagtgaaatttgtgagttgttaatacaatatggtcgttcgtcagaaacaccagtagctctcgtgcatatgggaacgtcaaaacagcaaatgacagtgactgggacactcgatacaattcaagaacgagcacatcatattcagaatccagcaatgattattgtaggcgaagtggttaagatgagagaaaaaattaattggtttgtagaacaggcaactgttcaaaatgaaacgttaacggaaatgtcatcaacttag

SEQ ID NO: 85170 - protein, 259 aa, Staphylococcus epidermidis RP62A
MGKVYLVGAGPGDPELITLKGLKAIKEADVILYDRLVNKEILNYASLSTKFFYCGKDPHRHSLPQEETNKMMVTLAKKGHIVTRLKGGDPFVFGRGGEEAEELACHNIHFEIIPGITSGIAAPAYAGIPVTHRDYSSSVAFVTAVNKPGMDKGKYWQHLANGPETLCIYMGVKRLSEICELLIQYGRSSETPVALVHMGTSKQQMTVTGTLDTIQERAHHIQNPAMIIVGEVVKMREKINWFVEQATVQNETLTEMSST

SEQ ID NO: 85171 - DNA, 762 bp, Pseudomonas syringae pv. syringae B728a
  CDS (1)..(762): transl_table=11
atgagcgcaaaagtatggctggtaggcgcgggccccggcgacccggaattgctgaccctcaaggcagtacgcgccttgcatgaagccgacgtggtgctgatcgacgatctggtcaaccccgcagtgctggagcattgtccgggggcgcgggtgatcgcggtcggcaagcgcggcggttgccgctcgacgccgcaagcgtttatccatcgcctgatgctgcgctacgtccgtcagggcaaatgtgtggtccgcctcaaaggcggcgatccgtgcatcttcggacgtggtggtgaagaggctcaatggctgcaggaacacggtgtggccgtggagctggtcaacggcattacagcgggtcttgctggtgcaacacagtgcggcatttcgctgaccctgcgcggtataagccgtggcgtgacactggtcaccgcccacactcaggatgacagcacgctcaactggcaagcgctcgcgcaaggcggaaccaccctggtggtttacatgggcgtggcgaaactggcggaaattcgcgagagcctgctggcaggcggaatgagtggcgagatgccggtggcgatgatcgagaacgcttcgctgccatggcagcgcgaatgccgtagcaccctgaatgccatgcaacaggacgcagccgctttccagctgaagagccccgccattctggtgatcggcgcggttgcggcttacagcaatgagctgctgaatcaaaccctgatggaccacgcgcagctgaatgccagctga

SEQ ID NO: 85172 - protein, 253 aa, Pseudomonas syringae pv. syringae B728a
MSAKVWLVGAGPGDPELLTLKAVRALHEADVVLIDDLVNPAVLEHCPGARVIAVGKRGGCRSTPQAFIHRLMLRYVRQGKCVVRLKGGDPCIFGRGGEEAQWLQEHGVAVELVNGITAGLAGATQCGISLTLRGISRGVTLVTAHTQDDSTLNWQALAQGGTTLVVYMGVAKLAEIRESLLAGGMSGEMPVAMIENASLPWQRECRSTLNAMQQDAAAFQLKSPAILVIGAVAAYSNELLNQTLMDHAQLNAS

SEQ ID NO: 85173 - DNA, 1395 bp, Pseudomonas syringae pv. syringae B728a
  CDS (1)..(1395): transl_table=11
atggaatttctgccgctgttccataacctgcgtggcagccgggtgctggtggttggcggcggtgaaatcgccctgcgcaaatcacgtctgattgccgacgccggggcagtgctgcgcgtggttgcgccggaaatcgaggcgcaactgagcgagctggttgtccagagcggcggtgagatgatcctgcgcggctacagcgaatgcgaccttgatggttgcgtgctgattattgctgcgacggatgatgagccgctcaacgctcaggtgtcccgcgatgcccgcttgcgttgcgttccggtcaacgtcgtcgacgccccggcgttgtgtacggtgatctttccggccatcgtcgaccgatcgccgctggtgatcgccgtgtccagtggcggcgatgcgccggtgctggcacgtttgattcgcgccaagctggaaacctggattccgtcctcctacggtcagctcgccgggctggccgctcgttttcgcaatcaggtcaaaggcctgtttccgaacgtgcagcagcgtcgggcgttttgggaagaagtttttcagggggccatcgccgatcgccaactggccgggcagggcgccgaggccgagcgcatgctgatcgccaagattgccggcgagccgcctcccgagaccggtgaggtctatctggtcggtgcgggtcccggtgatccggatttgctgacttttcgggccttgcgcctgatgcagcaggcggatgtggtgctgtacgaccgcttggttgcaccgacgattcttgacctgtgccgtcgtgatgccgagcgggtctacgttggcaagcgccgtgcggaacatgccgttccgcaggagcagatcaaccagcaactggttgcgctggcaaagcagggcaagcgagtggtgcgtctgaagggcggtgatccgttcatattcggccgtggcggcgaggaaatcgaagagctggcggcgcatggcattccgttccaggtggtgcctggcatcaccgctgccagcggttgcgcggcgtatgcgggtataccgctgacgcaccgtgatcacgcgcaatcggtacgttttatcaccgggcacttgaaaaacggcacgaccgatctgccttggtcagacctggtagcgcctgcgcaaacactggtgttttacatggggctaatcggtttgccagtcatctgtgagcagttgatccggcacggtcgctctgccgacacgcctgctgcactggtcgagcagggcaccaccgtcaatcagcgtgtgttcacgggtacccttgcaaacctgccgcaactggtcgccgagcatgatgttcatgcgccgacgctggtgatcattggtgaggtggtcaaattgcgtgaaaagctggcgtggttcgagggcgctcaggcgactctctga

SEQ ID NO: 85174 - protein, 464 aa, Pseudomonas syringae pv. syringae B728a
MEFLPLFHNLRGSRVLVVGGGEIALRKSRLIADAGAVLRVVAPEIEAQLSELVVQSGGEMILRGYSECDLDGCVLIIAATDDEPLNAQVSRDARLRCVPVNVVDAPALCTVIFPAIVDRSPLVIAVSSGGDAPVLARLIRAKLETWIPSSYGQLAGLAARFRNQVKGLFPNVQQRRAFWEEVFQGAIADRQLAGQGAEAERMLIAKIAGEPPPETGEVYLVGAGPGDPDLLTFRALRLMQQADVVLYDRLVAPTILDLCRRDAERVYVGKRRAEHAVPQEQINQQLVALAKQGKRVVRLKGGDPFIFGRGGEEIEELAAHGIPFQVVPGITAASGCAAYAGIPLTHRDHAQSVRFITGHLKNGTTDLPWSDLVAPAQTLVFYMGLIGLPVICEQLIRHGRSADTPAALVEQGTTVNQRVFTGTLANLPQLVAEHDVHAPTLVIIGEVVKLREKLAWFEGAQATL

SEQ ID NO: 85175 - DNA, 1395 bp, Pseudomonas fluorescens Pf-5
  CDS (1)..(1395): transl_table=11
atggaatatctgccgctgtttcacaaccttcgcggcagtcgtgtgttggtggtcggcggaggggagattgccttgcgcaaatcccgtctgctggccgatgccggtgcgcagctgcgagtggtcgcacctgaaatagaagcgcaattgcaggaactgatcgtcgccagcggcggtgagtccctgttgcgcgggtatgtcgaggcggacctcgacggctgcaccctgatcatcgccgccaccgacgacgaatccctgaatgcccaggtctccgccgatgcccatcggcgttgcgtgccggtcaatgtggtggacgcgccggccctgtgcagcgtgatcttcccggccatcgtcgaccgttcgccgctggtcatcgcagtctccagtggcggcgatgcgccagtgctggcgcggctgatccgggccaagctggaaacctggattccttccacctacggccaactggccgggttggcggcgcgtttccgcgcccaggtcaaaggcctgtttccggatgtgcagcaacgccgggcgttctgggaggacgtgttccaagggcccattgccgatcgtcagctggcggggcagggcgcggaagccgaacgtctgttgcaggccaagattgcgggcaaggcgcctcatgcgccgggcgaggtgtatctggtgggcgcaggcccgggtgatccggacctgctgaccttccgcgccctgcgcctgatgcagcaggccgacgtggtgctctacgaccgcctggtggcgccggcgattctcgagctgtgccgccgcgacgccgaacgcatctacgtcggcaagcgtcgtgccgatcacgccgtgccccaggaacagatcaaccagcaactggtgaccttggcccagcaaggcaagcgtgtagtgcgtctcaaggggggcgatccgttcatcttcggccggggcggcgaagagatcgaagaactggcggcccacggcattccgttccaggtggtgccggggattaccgcggccagtggttgctcggcctatgccgggattcccctgactcaccgtgactacgcccagtcggtgcgcttcgtcaccggccatctcaaggacggcaccagcaacctgccctggagcgacctggtggcgccggcccagaccctggtgttctacatgggcctggtgggcttgccgaccatctgcgagcaactgatcaagcacggtcgcggcgccgacaccccggcggcgctggttcagcagggcaccaccagcaaccagcgtgtcttcaccggcaccctgggcaacctgcctgcgctggtggccgagcacgaagtgcacgcgccgaccctggtgatcgtcggcgaagtggtccagctacgcgaaaagctggcctggttcgaaggcgctcagtccgaggtctga

SEQ ID NO: 85176 - protein, 464 aa, Pseudomonas fluorescens Pf-5
MEYLPLFHNLRGSRVLVVGGGEIALRKSRLLADAGAQLRVVAPEIEAQLQELIVASGGESLLRGYVEADLDGCTLIIAATDDESLNAQVSADAHRRCVPVNVVDAPALCSVIFPAIVDRSPLVIAVSSGGDAPVLARLIRAKLETWIPSTYGQLAGLAARFRAQVKGLFPDVQQRRAFWEDVFQGPIADRQLAGQGAEAERLLQAKIAGKAPHAPGEVYLVGAGPGDPDLLTFRALRLMQQADVVLYDRLVAPAILELCRRDAERIYVGKRRADHAVPQEQINQQLVTLAQQGKRVVRLKGGDPFIFGRGGEEIEELAAHGIPFQVVPGITAASGCSAYAGIPLTHRDYAQSVRFVTGHLKDGTSNLPWSDLVAPAQTLVFYMGLVGLPTICEQLIKHGRGADTPAALVQQGTTSNQRVFTGTLGNLPALVAEHEVHAPTLVIVGEVVQLREKLAWFEGAQSEV

SEQ ID NO: 85177 - DNA, 1665 bp, Psychrobacter arcticus 273-4
  CDS (1)..(1665): transl_table=11
atgactggtcatactatgaatacctttcccctattttttaaattagaagatcgtaaagtgctgattgttggcggcggcgatgtggcgctacgcaaagctgatttgctcagccgtgctggcgcgtgtatcactgtccttgcgccaagcattaaccacgagatacaagctttgctaagtagcagtaagcacgagctgatttatgagcattataataaaacctatatgacaaactcgcgcgttattatcgccgccactgacgatgagaggctcaatcatcaaatacatgccgatgcaacggcattgaacatccctgtaaatgtcgtcgatacgccgcacttgtgcgatttcatcttccctgcaattgtggatcgtaatccaattgtgattggtatctcatcaaatggtaaagcgccggtgctggcacgtttactgcgggcacggctagaaacgttaattccacaaggttatggaaaactggccaagcttgctggcgagtttcgaggtgacgtgaaagccaaaatcccaacattgactgggcgtaggcagttttgggaacgggcatttgaaggtaaagtcagtcaattgatgtttgcgggtaatgaaaacgaagcccttgcccaactgcaggctgacttggataacacagcggcaagtatcactgcaaaagacgccacggatgataatgggctgagtaccgcttcaacatctgcgccagcgatagcaaatgaattcacagcagcccgaaataccatgggcgaagtctatatcgttggtgccggccccggtgacccagagctgttaacctttaaagcgctgcgtctgatgcagcaagcggatattgtctattatgatgcgctggtttcaccgcaagtattggatttatgccgccgcgatgccgataaagtatttgttggcaaaaaacgcagaaatcatgccgttgcgcaattaggcatcaatgagcttttggtcaatagcgcaaaagaaggtcggcgtgtggtgcgtctaaaaggcggtgacccatttatctttgggcgcggcggtgaagagattgaaagtctgcgcgcgcacaatatcccttatcaagtggtaccgggtattaccgctgccaatgctgctgctagttatgctggtattccccttacccatcgcgaccattcgcaatcagtacgttttgtgacagggtttttgaaggctggcgcacccaacaacaactttaaaaacttcttagataccgatgagaccgtggttttttatatgggtttgcattctctaccgcgcttaacggaaggcttgattgacgctggacgtagtgcggagaccccaattgccattgtctctaatgccagtatgcccaatcagcaagtattaacaggtacacttgccagcatcgttgaattacaagaaaaaaaccagctgccaacgcctgctctgctcatcatgggtgatgtcgtaagcttgcaccatgacttggcttggtataacttacacaatcagcagcataatcaaaacacttcagaaactgacaataactggttacgcggcggtactgctacaacaccaaaatctaatgctcaatttaatgctcaccagcaagcgcatgcgctatctatgattactaatttggcaacggaagatggcgatcttgagcagttgattattggttag

SEQ ID NO: 85178 - protein, 554 aa, Psychrobacter arcticus 273-4
MTGHTMNTFPLFFKLEDRKVLIVGGGDVALRKADLLSRAGACITVLAPSINHEIQALLSSSKHELIYEHYNKTYMTNSRVIIAATDDERLNHQIHADATALNIPVNVVDTPHLCDFIFPAIVDRNPIVIGISSNGKAPVLARLLRARLETLIPQGYGKLAKLAGEFRGDVKAKIPTLTGRRQFWERAFEGKVSQLMFAGNENEALAQLQADLDNTAASITAKDATDDNGLSTASTSAPAIANEFTAARNTMGEVYIVGAGPGDPELLTFKALRLMQQADIVYYDALVSPQVLDLCRRDADKVFVGKKRRNHAVAQLGINELLVNSAKEGRRVVRLKGGDPFIFGRGGEEIESLRAHNIPYQVVPGITAANAAASYAGIPLTHRDHSQSVRFVTGFLKAGAPNNNFKNFLDTDETVVFYMGLHSLPRLTEGLIDAGRSAETPIAIVSNASMPNQQVLTGTLASIVELQEKNQLPTPALLIMGDVVSLHHDLAWYNLHNQQHNQNTSETDNNWLRGGTATTPKSNAQFNAHQQAHALSMITNLATEDGDLEQLIIG

SEQ ID NO: 85179 - DNA, 792 bp, Colwellia psychrerythraea 34H
  CDS (1)..(792): transl_table=11
atggaaaatatcaacacaacaaaacaagcttttattgctggcgaagtagccctagttggcgccggtcccggagatccagatttacttactttgcaggcctatcgttttatcaaacaagctgaagttgttatctatgacaggctagtcagtgcggcaataatggcgttactgccaagtgattgccaacaaatatatgttggtaaaaaacaagcagatcatagagttccacaagaaggcatcaatcagttactcgttgattatgctttattgggtaaaaaagtggtgcgtttaaaaggcggcgacccttttgtttttggacgaggatctgaagaggctcaattcttattgagccatggcgttgcttgccatatagtcccaggaatgacagccgcatcggcttgtaccagttacgctggcattcccctaactcatcgaaaagtcgcacgaagttgcaccttcataacgggtaatgtgcaagataatggtgcattagatctaccttggcaggcattaaatgataaagagcagaccattgttttttacatggggataaaaagcttacctataatcaccgctcagctcacgggagccggtcgtgatataaatacgccagcagcattaatcaggaaaggcactcaccaagatcaacaagtaataaaagggacgttagcaaatttaactgacttagtggctttacataggattacgccacccagtttaattgtgattggtgatgttgtagggctattccccagtgagcaactaactaatttaggctacctaaccccttaa

SEQ ID NO: 85180 - protein, 263 aa, Colwellia psychrerythraea 34H
MENINTTKQAFIAGEVALVGAGPGDPDLLTLQAYRFIKQAEVVIYDRLVSAAIMALLPSDCQQIYVGKKQADHRVPQEGINQLLVDYALLGKKVVRLKGGDPFVFGRGSEEAQFLLSHGVACHIVPGMTAASACTSYAGIPLTHRKVARSCTFITGNVQDNGALDLPWQALNDKEQTIVFYMGIKSLPIITAQLTGAGRDINTPAALIRKGTHQDQQVIKGTLANLTDLVALHRITPPSLIVIGDVVGLFPSEQLTNLGYLTP

SEQ ID NO: 85181 - DNA, 879 bp, Colwellia psychrerythraea 34H
  CDS (1)..(879): transl_table=11
atgaatacaccatcagcaaatcaaccaaacagcctaatctcagcagataacgataaaatatcagcgagagggaaatcagtattaaatcaaggcgaagttgccctagttggctctggccctggtgatgctgaattactaactattcgtgcaatgcgctttattgagcaagctgaaatcgcaatttatgaccgattagtaagtgatgaaatattagcgctattgcctgataattgtgaacgattttacgtgggtaaagagcaagctaaacattgtgtaccacaagataaaattaacgaaattttagtacacgaagcgcgcttaggtaaaagagtattacgcctgaaaggtggcgacccgttcatttttggtcgtggtggtgaagaagcagaatacatgttgcaacatggtgtaagttgtcatatttgcccaggtattaccgccgcttctggctgtacaacgtatgcaggtattccgttaacacatcgcggtgttgcacaaggttgtacatttattactggtcatattcaaaacaatggtcagcttaatttgccatggcagagtttatgttgtccaacccaaacggttgtgttttacatgggcattaataccttatctaaaattgcagaaaaacttgttgagcatggccgagatattaatacgccagcggcattaattcgcaaaggcacacagcctgaacaaaaaacctatcgcggtactatcggtaacttggcggagcttgttgaaaaacacaacattaccccaccaacacttattgttattggtgatgtagtaaatcagctaactgaacaacaattaaaaacccctggttttttagatgctaatgactatgttcaaccacaagcaattaaaatagcttaa

SEQ ID NO: 85182 - protein, 292 aa, Colwellia psychrerythraea 34H
MNTPSANQPNSLISADNDKISARGKSVLNQGEVALVGSGPGDAELLTIRAMRFIEQAEIAIYDRLVSDEILALLPDNCERFYVGKEQAKHCVPQDKINEILVHEARLGKRVLRLKGGDPFIFGRGGEEAEYMLQHGVSCHICPGITAASGCTTYAGIPLTHRGVAQGCTFITGHIQNNGQLNLPWQSLCCPTQTVVFYMGINTLSKIAEKLVEHGRDINTPAALIRKGTQPEQKTYRGTIGNLAELVEKHNITPPTLIVIGDVVNQLTEQQLKTPGFLDANDYVQPQAIKIA

SEQ ID NO: 85183 - DNA, 762 bp, Pseudomonas syringae pv. phaseolicola 1448A
  CDS (1)..(762): transl_table=11
atgagcgcaaaagtatggctggtgggcgccggtcccggtgacccggaactactgaccctcaaggcagtgcgtgccttgcacgaagccgacgtggtgctgatagatgatctggtcaataccgcagtgcttgagcactgcccgaatgcgcgagtgatcgcggtcggcaaacgcggcggttgccgttcaacgccacaagcgttcatccatcgcctgatgctgcgctatgtacgtcagggcaaatgcgttgtgcgcctcaagggtggcgatccgtgcatctttggccgtggcggtgaagaggcgcagtggttgcaggaacgcggcgtcgcggtggaactggtcaacgggatcacggcggggctcgccggcgcaacacaatgcggcatttcgctgaccctgcgcggcataagccgtggcgtgacactggtcactgcccatacccaggacgacagcagcctcaactggcaggcccttgcacaaggcggaactactctggtggtttacatgggcgtggcaaagctggctgaaattcgcgagagcctgctggctggcggaatgagtggcgaaatgccggtggcgatgatcgagaatgcttcgctgccctggcagcgcgagtgccgcagcacgttgaacgcaatgcagcgcgacgccagcgctttcgagctgaagagccctgccattctggtgatcggcgcggttgctgcgtgcagcaatgagctgctgaatgaaacgctgattgatcacgcacagctgagtgctggctga

SEQ ID NO: 85184 - protein, 253 aa, Pseudomonas syringae pv. phaseolicola 1448A
MSAKVWLVGAGPGDPELLTLKAVRALHEADVVLIDDLVNTAVLEHCPNARVIAVGKRGGCRSTPQAFIHRLMLRYVRQGKCVVRLKGGDPCIFGRGGEEAQWLQERGVAVELVNGITAGLAGATQCGISLTLRGISRGVTLVTAHTQDDSSLNWQALAQGGTTLVVYMGVAKLAEIRESLLAGGMSGEMPVAMIENASLPWQRECRSTLNAMQRDASAFELKSPAILVIGAVAACSNELLNETLIDHAQLSAG

SEQ ID NO: 85185 - DNA, 1395 bp, Pseudomonas syringae pv. phaseolicola 1448A
  CDS (1)..(1395): transl_table=11
atggaatttctgccgctgttccataacctgcgtggcagccgggtgctggtggtcggcggtggtgaaattgccctgcgcaaatcacgcctgattgccgacgctggcgcagtgctgcgcgtggttgcgccagaaatcgaggcccaactgagcgagctggtcgtccagagcggcggtgagatgatcctgcgtggctacagcgaaagcgatcttgatggttgtgtgctgattattgccgcgacggatgacgagccgctcaatgcccaggtttcccatgacgcccggctgcgctgcgttccggtcaatgtggtggatgccccggcgttgtgtacggttatctttccggcgattgtcgaccgctcgccattggtgatcgctgtgtccagtggcggcgatgcgccggtgctggcacgtctgatccgtgccaagctggaaacctggattccctccacctacgggcagctcgccgggctggctgcgcgctttcgcaatcaggtcaaaggtctgtttccgaatgtgcagcaacgccgagcgttctgggaagatgtttttcagggtgccattgccgaccgccagttggccgggcagggggccgaggccgagcgtctgctgatcgccaagatcgctggcgagccgccgccggagaccggcgaggtgtatctggtcggtgctggccccggtgatcctgacttgctgaccttccgcgccttgcgcctgatgcagcaagcggatgtggtgctgtatgaccgccttgtcgcgccgacgattcttgacctgtgccgtcgcgatgccgagcgtgtctatgtcggcaagcgtcgtgcagagcatgctgttccgcaggagcagatcaaccagcagttggttgcactggccaagcaaggcaagcgggtagtgcgcctcaaaggcggcgatccgtttatcttcggccgtggcggcgaggaaatcgaagaactggctgtgcatggcattccgtttcaggtggttccaggtattaccgccgccagcggttgtgcggcgtatgccggtataccgctgacgcaccgtgatcatgcacagtctgtgcgtttcattaccggtcacttgaaagatggcacaacagacctgccctggtcagacctggttgcgcctgctcagacgctggtgttttacatggggctgatcggtttgccggtcatctgtgaagagctgatcaggcatggtcgctctgccgacacgcctgctgcgctggtccagcagggcacgacggtcaatcagcgtgtgtttaccggcactctggccaatctgccgcaactggttgccgagcatgaggtgcatgcgccaacgctggtaatcatcggcgaagtggtcaagttgcgtgaaaaactggcatggttcgaaggggctcaggcgactgtctga

SEQ ID NO: 85186 - protein, 464 aa, Pseudomonas syringae pv. phaseolicola 1448A
MEFLPLFHNLRGSRVLVVGGGEIALRKSRLIADAGAVLRVVAPEIEAQLSELVVQSGGEMILRGYSESDLDGCVLIIAATDDEPLNAQVSHDARLRCVPVNVVDAPALCTVIFPAIVDRSPLVIAVSSGGDAPVLARLIRAKLETWIPSTYGQLAGLAARFRNQVKGLFPNVQQRRAFWEDVFQGAIADRQLAGQGAEAERLLIAKIAGEPPPETGEVYLVGAGPGDPDLLTFRALRLMQQADVVLYDRLVAPTILDLCRRDAERVYVGKRRAEHAVPQEQINQQLVALAKQGKRVVRLKGGDPFIFGRGGEEIEELAVHGIPFQVVPGITAASGCAAYAGIPLTHRDHAQSVRFITGHLKDGTTDLPWSDLVAPAQTLVFYMGLIGLPVICEELIRHGRSADTPAALVQQGTTVNQRVFTGTLANLPQLVAEHEVHAPTLVIIGEVVKLREKLAWFEGAQATV

SEQ ID NO: 85187 - DNA, 765 bp, Dechloromonas aromatica RCB
  CDS (1)..(765): transl_table=11
atgaacactacaaaacaactgcagggcggcaaggtctggctggtcggcgccggtccgggcgatccggaacttctgaccatcaaggcagcgcgactgatttcaatggccgacgccattgtgtatgaccacctggtcggcaatggcatcatggatatggcccgggccgatgcccgcctggtctatgccggcaaggaatcctccaagcacacgatgccgcaggactccatcaaccaactactcgtcgacctcgccaacgaaggcttgtcggtggttcgactgaagggtggcgacccgttcattttcggacgcggcggcgaagaactcgaaaccctggtcgcctccggcgttccgttcgaggtggttccaggcgtcacggcggccgctggttgcgctgcctacgcaggcttcccgctgacccatcgcgatcacgcccagtcggttactttcgttaccgggcatttgaaggacggcaccgtcaatctcgattggaccgctttggcgcgcccctgccataccgtcgtcttctacatgggcatcggtgccgccgaggaaatctgccgacagatgatcaatcatggcctgccttcaatgacgcccgccgctgtcatccgcaatggcacgcaatccgaccagcgaaccctgctcgccacactcggcaccctgccccatcgcattgccgaatccggcatcaagccaccggcgctgatcgtcgtcggcagcgtggtcgggctgcacgaaaaactcaactggttcgaaaaacaatga

SEQ ID NO: 85188 - protein, 254 aa, Dechloromonas aromatica RCB
MNTTKQLQGGKVWLVGAGPGDPELLTIKAARLISMADAIVYDHLVGNGIMDMARADARLVYAGKESSKHTMPQDSINQLLVDLANEGLSVVRLKGGDPFIFGRGGEELETLVASGVPFEVVPGVTAAAGCAAYAGFPLTHRDHAQSVTFVTGHLKDGTVNLDWTALARPCHTVVFYMGIGAAEEICRQMINHGLPSMTPAAVIRNGTQSDQRTLLATLGTLPHRIAESGIKPPALIVVGSVVGLHEKLNWFEKQ

SEQ ID NO: 85189 - DNA, 1281 bp, Thermobifida fusca YX
  CDS (1)..(1281): transl_table=11
gtgacgtatctcctcggtttgcggcttcagggccgggacgtgctcgtcgtgggcggaggacaggtcgcccaacgtcgcgtccccgtgctcctggaggccggagcgcgggtcacagtggtctccccgcacgtcactactgcgctgcaagggctcgccgagagcggccgcatccactgggagcagcgcccctaccgccgcggtgacgtcaccgggctgggccgcttctggctggtccacgcagccacggacgatcccgaggtcaacgcggcggtggttgccgaagcagaggaagcacgcatctggtcggtgcacgccgacgaccgtcacgcctccagtgcctggactcccgcaacagggagcgcttccggagtcaccgtcggagtaatcaccggtactgatccccggcgtgccgcgggactacgcgacgctatcgtcaccggcttggccgacggaactctggacgcgcgcaggggacgcgctcctctgcgcggcgtggccctggtcggcggcggtccaggggaccccggactgatcacggtgcggggacggcagcttctcgcgcaagccgacgtggtcgtggtggatcggcttgcccccacgagcttgcttgaccaactgtccggcgacgtggagattatcgacgcggccaagatcccttacggccgttccatgtcccaagagggcatcaacgcggtgatcgtcgaccgtgcgcgacagggcaagttcgtggtccgtctcaagggcggcgaccccttcgttttcggacgcggtggcgaagagctcgcagcgtgcgtcgcggcaggcatccctgtcaccgtggtccctggcgtgaccagtgcgctcgctgctcccgcgagcgtgggcatcccggtgacgcaccgcggcgtcgcccagcacttccacgtcgtctccgcccatgtcgcaccaggcgacgagcgctccaccgtgaactgggagacgctcgcccgcagtggcggcaccatcgtggtgctcatgggagtggaacgcttgggacggattgccgaggcgctgatcaggtacggtcgtgatccccacactcctattgccgtcatccaggaggccaccctgccgagccagaccaccctggtcgccactctggaaacggtcgaaaaggaagcgcacgccgccggagtgcaccctccggcggtgctcgttatcggagaagtagtgaacacggcccaagagcttgacatactgcacagaagccaaaacgccgcagaaactccgatcgctcccgcaggaggaaacggtcggaattga

SEQ ID NO: 85190 - protein, 426 aa, Thermobifida fusca YX
MTYLLGLRLQGRDVLVVGGGQVAQRRVPVLLEAGARVTVVSPHVTTALQGLAESGRIHWEQRPYRRGDVTGLGRFWLVHAATDDPEVNAAVVAEAEEARIWSVHADDRHASSAWTPATGSASGVTVGVITGTDPRRAAGLRDAIVTGLADGTLDARRGRAPLRGVALVGGGPGDPGLITVRGRQLLAQADVVVVDRLAPTSLLDQLSGDVEIIDAAKIPYGRSMSQEGINAVIVDRARQGKFVVRLKGGDPFVFGRGGEELAACVAAGIPVTVVPGVTSALAAPASVGIPVTHRGVAQHFHVVSAHVAPGDERSTVNWETLARSGGTIVVLMGVERLGRIAEALIRYGRDPHTPIAVIQEATLPSQTTLVATLETVEKEAHAAGVHPPAVLVIGEVVNTAQELDILHRSQNAAETPIAPAGGNGRN

SEQ ID NO: 85191 - DNA, 786 bp, Prochlorococcus marinus str. NATL2A
  CDS (1)..(786): transl_table=11
atgaatacaaatcagtttggcactgtgcatcttgtcggagcaggtcctggtgatcccgatttattaacagtaaaagcgcaaaaactaattagtaaatgtgatgctcttgtatacgactctttagttcctgtagagctacttgcactagtttcttcaaattgtcaacttcattcagtaggcaagaggcgtggtcatcactcggttcctcaaaggacaacgaatgatattttgtttgatttatcaaagagttattcttgtattgttagattaaaaggtggtgatccatttttgtttggtagaggtgcggaagaagcttcttatcttcataaaaaaggggttccagtacaagtagtacctggcgttacttcaggtatagctgctcctgcttatgttgggatacctattactcatagacttgctggatcttcagttacttttgtgactggacatgaggggattgataaaaaacgcccagctgtaaattggcggtctttagcgaaatccagtgatggaatcgttatatatatgggtgttcataatttaaaatttatctcagcagagttgattgctggtggtatgaatcctgaaacttctgcggcagttattgagcaggggactgtaattggtcaacgttatattaagagccctttggtaaagctttttgaccgagttcaagaagaaaatttaaggtctcctgcgattgttgtaataggttcagttgtggattttcaggtagaagcttgctctccaaagccagctgaagtgacatttccaattcctatatag

SEQ ID NO: 85192 - protein, 261 aa, Prochlorococcus marinus str. NATL2A
MNTNQFGTVHLVGAGPGDPDLLTVKAQKLISKCDALVYDSLVPVELLALVSSNCQLHSVGKRRGHHSVPQRTTNDILFDLSKSYSCIVRLKGGDPFLFGRGAEEASYLHKKGVPVQVVPGVTSGIAAPAYVGIPITHRLAGSSVTFVTGHEGIDKKRPAVNWRSLAKSSDGIVIYMGVHNLKFISAELIAGGMNPETSAAVIEQGTVIGQRYIKSPLVKLFDRVQEENLRSPAIVVIGSVVDFQVEACSPKPAEVTFPIPI

SEQ ID NO: 85193 - DNA, 804 bp, Ralstonia eutropha JMP134
  CDS (1)..(804): transl_table=11
atggacaaggcaggcaaatcgaccggcaaggtctacctgatcggggcgggccccggggcggcggacctcattacggtgcgcggtgcacggttgttgggcgaagcccaggtcgtgctgcatgacgcactggtgtcgcccgagatgctggcctggtgtccgcaggccaggctggtggaagtgggcaagcgctgcggcaagcgttcgacggcacaactgttcatcaaccgccagatcatcgacatggcgacgaagtacgagcgcgtggtgcgtctcaagggcggcgatcctatgctgttcggccgcgccgatgaggaactccaggcgctggaagcggctggtatcgcgtacgaggtggtgcccggcattaccgcggcactcgcggccgcgtcggccatcgccaagccgctgaccaagcgcggcgtgtcgcgcagcgtggccttcgccacgcaggccaaggccgcggatggcacggaagtgccggcatccgccgcggacatcgaagcagatgtgcgcgccgatacgctcgtgtactacatgggccgcgaccaggccgcggccatcgccgcgcagctgatcgcccacggcaaggcgccgtcgacgccggcatgggtggtcgaggcggtcagcacgccccaccagcgcagccatgcctttacgctgcagcagatggcggcgggcgaagcagccggctggatcgacccgtcgcatccgagcctgctgatgatcggcgcggcgctggcggcgcgtgcgacggagccggtgacgcgcgatgtagccgcgacgatctcggcaaaggcggcctga

SEQ ID NO: 85194 - protein, 267 aa, Ralstonia eutropha JMP134
MDKAGKSTGKVYLIGAGPGAADLITVRGARLLGEAQVVLHDALVSPEMLAWCPQARLVEVGKRCGKRSTAQLFINRQIIDMATKYERVVRLKGGDPMLFGRADEELQALEAAGIAYEVVPGITAALAAASAIAKPLTKRGVSRSVAFATQAKAADGTEVPASAADIEADVRADTLVYYMGRDQAAAIAAQLIAHGKAPSTPAWVVEAVSTPHQRSHAFTLQQMAAGEAAGWIDPSHPSLLMIGAALAARATEPVTRDVAATISAKAA

SEQ ID NO: 85195 - DNA, 786 bp, Ralstonia eutropha JMP134
  CDS (1)..(786): transl_table=11
atgaaccctcccctcaagcccggcaaggtatggctggtcggcgccggccccggcagccccgaactcgtcacggtgcgcgcggcacgcgtgctggagcgcgcgcaggtctggctcgtggatgacctggtgtcgccggagatgacctgctatgccagcccgggcacgcacgtggaatgggtcggcaagcgcggcggacgctgctcggtgagccaggaccgcatcctgcaactgacgctgatgcatgccatggccggcaaggaggtcgcgcgcgtgaagggcggcgatccgctgctgttcgggcgcggcgccgaggaatcggcatttctgcgcgcgcatggtgtgccggtcgaggtcgtcaatggcatcagcagcggacaggccgccgcgcaggcgctgggcgtggcgctgacgcaccgcgcgcactgccatggcgtgagtttagtgaccgcgcacacgagtgatcacggcagccctgactggggcgcgctggcgcgcagcggcacgacgctggtgatctacatgggtatgagccggctcgcggcaatccgcgatgcgctgctggcggcaaacatgctgcccggcacgctcgcggcagtcgtcatgcacgcaggcggcaacgggcagcggtgctggaccggcacgcttgccacgctgggcgaagcgctcgacgcgggactggccagtcccgcggtgatcatggtcggcgcggtgctgtccgacgcattggcgccggtgcatgcgccggtgcatgaagagccagcgcctcagtacggcagcccgacgtaa

SEQ ID NO: 85196 - protein, 261 aa, Ralstonia eutropha JMP134
MNPPLKPGKVWLVGAGPGSPELVTVRAARVLERAQVWLVDDLVSPEMTCYASPGTHVEWVGKRGGRCSVSQDRILQLTLMHAMAGKEVARVKGGDPLLFGRGAEESAFLRAHGVPVEVVNGISSGQAAAQALGVALTHRAHCHGVSLVTAHTSDHGSPDWGALARSGTTLVIYMGMSRLAAIRDALLAANMLPGTLAAVVMHAGGNGQRCWTGTLATLGEALDAGLASPAVIMVGAVLSDALAPVHAPVHEEPAPQYGSPT

SEQ ID NO: 85197 - DNA, 768 bp, Methanosarcina barkeri str. Fusaro
  CDS (1)..(768): transl_table=11
atgtcaggaaattacggaaaagtctatcttgtgggttctggtccaggcgaccctgagctccttaccctgaaagcccgccggctaattgacagtgctgaagtaattgtttatgaccagcttcctggaaaagctattctggactcaatgccggcaagtgcggaaaaaattaatgttggaaaatacgccggcagccataccatgacccaggctgagattaatgaagtgcttgtgcagaaagcaaaagaaggaaagatggtagtcaggcttaaaggaggagatccctatgtcttcggaagaggcggagaagaagccgaggtactcgtagccgaagaaattgagtttgaagttgtgcctgggattacttctgcaatagcagtgcctgcttatgccggaattccggtaacccacagggaaagcacttcaatggtcactttcataacagggcatgaagaccctacaaaggaagagagtggacttgactgggaaaccctggcaaaattcggaggaacaattgtaatccttatgggcgtgaaaatgctcggccggaatgcagaagagctaatgaagcacggcaaagccccggacactcctgttgcagtcattgagagaggaaccagggccgaccagagagtaactgtagggacccttgcaaatatcgcaagcctggcagaagaacgaaaagtaaaggctccagctattacggttgtaggggatgttgtacacctgcacgatattctcggggaacagcggacaggagttgacttttaa

SEQ ID NO: 85198 - protein, 255 aa, Methanosarcina barkeri str. Fusaro
MSGNYGKVYLVGSGPGDPELLTLKARRLIDSAEVIVYDQLPGKAILDSMPASAEKINVGKYAGSHTMTQAEINEVLVQKAKEGKMVVRLKGGDPYVFGRGGEEAEVLVAEEIEFEVVPGITSAIAVPAYAGIPVTHRESTSMVTFITGHEDPTKEESGLDWETLAKFGGTIVILMGVKMLGRNAEELMKHGKAPDTPVAVIERGTRADQRVTVGTLANIASLAEERKVKAPAITVVGDVVHLHDILGEQRTGVDF

SEQ ID NO: 85199 - DNA, 1440 bp, Thiobacillus denitrificans ATCC 25259
  CDS (1)..(1440): transl_table=11
atgaactatctgccgattttcctcgacctgcgcgaccgtcactgtcttgtcgtgggcggttccgagacggccgcgcgcaaggccgaattgctgctgcgcgccggcgcgcacgtcgccgtcgccgcgccggccctgcacgcgggcttcgagcagttgcctgaccggcagcggctcacgcgtgtcgccgacaccttcagccccgcgctgctcgacggcaaggatgcggtcatcgtcgtcgaggacgatgcggcggcggcgcagatcgtcgccgacgctgcgcgcgcgcgtcacctgcccgtgaacgtcgccgacaagccggcgctgtgcagcttcatcctgccgtcgatcatcgaccgctcgccgatcatggtcgcggtctcgagcggcggcgaatcgccggtgctcgcccggctgctgcgcgcgcggctcgagacgttgattcctgccgcctacggccggctctcggcgctcgcctcgcgctacaaggcgcgtgtgcgcgaagcgatccagcctgggcagcgccgcgccttctgggaaaaggtcttcctctcgtcggtcgccgaaatggtgttttccgggcgcgacagcgaggccgaagcgcagctcgaggcgatgatcaaggacagcgccgcgcacgagccggcgcgcggcgaggtctacctcgtcggcgcgggtccgggcaaccccgacctgctgaccttccgcgcgctgcgcctgatgcagcaggccgacgtcgtcgtctacgaccgcctcgtctcgcagcccatcctcgacatgtgccggcgcgacgccgaacgcatctacgtcggcaaggaacgcgacgaccatgcggtgccgcaggaagaaatcaacatgatgctcgtgcgcctcgccaaggagggtaagcgcacgctgcgcctcaagggtggcgacccgttcatcttcggccgcggcggcgaggagatcgagacgctggtcgagcacggcgtggcattccaggtcgtccccggcatcacggcggcggcgggcgtcgcctcgtatgccggcattcctctgacccatcgcgattacgcgcagtcggtcgccttcgtcaccggtcacctgaaggaaaacaccttcaacatgaactgggagggcatcgcgcgccgcgaccagacgatcgtcatctacatggggctgaagggcttgccgatgctgtgcgaagccttgatcaagcacgggctgaccgccgacacgccggcggcgatcgtccagcacggcacgctgccgacgcagcgtgtcatcaccggcacgctcgcgacgctgccgacgctcgccgtggaggccggcctcaaggcaccgacgctgatcatcgtcggcaacgtcgtcaaattgcgcgagaagctcgcctggtaccggccgcaggccgccggcgaagcggccgccgccactccgctcgaagcccccgaccacctcgcctga

SEQ ID NO: 85200 - protein, 479 aa, Thiobacillus denitrificans ATCC 25259
MNYLPIFLDLRDRHCLVVGGSETAARKAELLLRAGAHVAVAAPALHAGFEQLPDRQRLTRVADTFSPALLDGKDAVIVVEDDAAAAQIVADAARARHLPVNVADKPALCSFILPSIIDRSPIMVAVSSGGESPVLARLLRARLETLIPAAYGRLSALASRYKARVREAIQPGQRRAFWEKVFLSSVAEMVFSGRDSEAEAQLEAMIKDSAAHEPARGEVYLVGAGPGNPDLLTFRALRLMQQADVVVYDRLVSQPILDMCRRDAERIYVGKERDDHAVPQEEINMMLVRLAKEGKRTLRLKGGDPFIFGRGGEEIETLVEHGVAFQVVPGITAAAGVASYAGIPLTHRDYAQSVAFVTGHLKENTFNMNWEGIARRDQTIVIYMGLKGLPMLCEALIKHGLTADTPAAIVQHGTLPTQRVITGTLATLPTLAVEAGLKAPTLIIVGNVVKLREKLAWYRPQAAGEAAAATPLEAPDHLA

SEQ ID NO: 85201 - DNA, 783 bp, Anabaena variabilis ATCC 29413
  CDS (1)..(783): transl_table=11
atgaaccgcacagacaatgaggggcaaaagagtttgggtaaggtctatttagtaggtgcggggccaggcgatccaggactgatgacggtgaaaggcaaaggtatattagaatgtgccgatgtggtcatatatgatgctttagtcagtccagcaattttggcaatgattaatccccaagcagagcaaattaacgctggtaagcgcatggggagacattccctattgcaggacgaaacaactcaactactaattgaacaagcccaaaatcatgctgttgttgtgcgcttaaaaggtggcgacccctttattttcggtcgtggtggggaagagatggctgatttgattgcggctggggttccggtggaggttgtaccaggtattacatcgggaattgcagcgccagcctatgcggggattcccttaactcatcgcttgtatagttcatctgtgacttttgtaactggacatgagtcggcgggtaagtatagaccgaaagtcaattggcaagcgatcgcccaaggttcggaaacgattgtcatttatatgggtatccacaatctaccttacattgtggaacagttgaagacggctgggttgagtttagcaacaccaattgctttagtacgttggggtacacgtcccgaacaagaagaattaattggtgagttagggacaattatagaactagtggagaaaaccggatttgaagcgccagcgatcgcagtcattggctctgttgtcaatatgcacagtattttatctgtagcaggtcgtgttcattga

SEQ ID NO: 85202 - protein, 260 aa, Anabaena variabilis ATCC 29413
MNRTDNEGQKSLGKVYLVGAGPGDPGLMTVKGKGILECADVVIYDALVSPAILAMINPQAEQINAGKRMGRHSLLQDETTQLLIEQAQNHAVVVRLKGGDPFIFGRGGEEMADLIAAGVPVEVVPGITSGIAAPAYAGIPLTHRLYSSSVTFVTGHESAGKYRPKVNWQAIAQGSETIVIYMGIHNLPYIVEQLKTAGLSLATPIALVRWGTRPEQEELIGELGTIIELVEKTGFEAPAIAVIGSVVNMHSILSVAGRVH

SEQ ID NO: 85203 - DNA, 1554 bp, Anabaena variabilis ATCC 29413
  CDS (1)..(1554): transl_table=11
atgactcaacaaaatggcaaagtctaccttgtgggtgcggggccgggagatgtggcatacctcacagtgaaagcttataatctactggctacggctcaagtgttggtttatgatgccctagttgatgagcaattgttgcagtgtgtatcacccgattgtcttaaactagatgtaggtaagcgtggcggtaaacccagcacaccacaagccgatatcaatcatttactagtcaaatactgccaagaaggtgcattagtcgttaggttgaaatcaggcgacccgtttatttttggacgctgtacctctgaaattgaggctttgaaagcagcaggctgtaaatttgaggtagtaccaggaatttcctcatccatagccgcgcctttattagcaggaatccctctcactgacccggtgatgagtcgttgctttgcagtgttgacagcccacgaaccagaagttttagactgggaggcgctgtcaaggttagacaccctggtcatactaatgggtgggaaaaacttagcagatataattaatgaacttttaagaagaggccaatcgcatctcacacccatagctattattcgctgggcaggaacccccagtcaacaaatctggactggtcaactgggcgatatccttgaacaaacaaggggtttatctctttccccagcagtcatcgtcattggtgaagttgtcggactacgcaagtacctacaacctgagaaaatatttccagagaactcaactacacctatgtccagcaaccaacctctcactggaaaaaccatcctcgtcacccgttcatctggtcaatcgagtcaatttagcgatcgcctaactacacttggcgctacagtaatagaaatgccagcattagaaataggctccccttctagttgggaggaattagatcaggcgatcgctaatttatctcaattcgagtggttaattctcacttctaccaacggtgtagattatttctttgaaagactcaacctccaaggtaaagatactcgtgctttagctggggtaaaaattgccgttgttggggaaaaaacctcccaaagcctcaaacaaagaggaatccaagcagattttatcccccctaactttgtagctgattctttagtagagcatttccctgaatcactactaaataaaaagattttatttcccagagttgaaagcggtggtagagaaattttagtcaaagaactatcagcaaaaggcgcagaagtaattgaagtagctgcttatcaatcttgttgtcctagtagtattcccccagcagcagaactagccttaaaaaatcacacaatagatatcatcacctttgccagttctaaaactgtgcaatttttccatcaacttgtagacaacatatttcctcacaatatccccaacactttagcaggaatatgtattgcttccatcggcccccaaacctcgaaaacttgtcataccctattaggtcgagtagatgtagaagctgaagaatatactttagatggattaacccaatccatcataaattgggcattaaaagtttaa

SEQ ID NO: 85204 - protein, 517 aa, Anabaena variabilis ATCC 29413
MTQQNGKVYLVGAGPGDVAYLTVKAYNLLATAQVLVYDALVDEQLLQCVSPDCLKLDVGKRGGKPSTPQADINHLLVKYCQEGALVVRLKSGDPFIFGRCTSEIEALKAAGCKFEVVPGISSSIAAPLLAGIPLTDPVMSRCFAVLTAHEPEVLDWEALSRLDTLVILMGGKNLADIINELLRRGQSHLTPIAIIRWAGTPSQQIWTGQLGDILEQTRGLSLSPAVIVIGEVVGLRKYLQPEKIFPENSTTPMSSNQPLTGKTILVTRSSGQSSQFSDRLTTLGATVIEMPALEIGSPSSWEELDQAIANLSQFEWLILTSTNGVDYFFERLNLQGKDTRALAGVKIAVVGEKTSQSLKQRGIQADFIPPNFVADSLVEHFPESLLNKKILFPRVESGGREILVKELSAKGAEVIEVAAYQSCCPSSIPPAAELALKNHTIDIITFASSKTVQFFHQLVDNIFPHNIPNTLAGICIASIGPQTSKTCHTLLGRVDVEAEEYTLDGLTQSIINWALKV

SEQ ID NO: 85205 - DNA, 753 bp, Pseudomonas fluorescens PfO-1
  CDS (1)..(753): transl_table=11
atgaacgcgaaagtctggctggtgggcgcgggccccggtgatcctgaactgctgacgctaaaagccgtacgtgccttgcgcgaggccgaggtggtactgatcgacgatctggtcaatgaggcggtacttgagcactgccctgctgcacggatcatcgcggtcggcaaacgcggcggctgccgctcgacgccccaggcgttcatccatcggctgatgctgcgatatgcccgtcagggcaaatgcgtggtgcggctcaagggcggcgatccgtgcattttcgggcgtggaggtgaggaagcgcagtggttgcgcgagcgcggggtcgaggtggagctggtcaatggcatcaccgccggactggccggcgcgacccagtgtgatattccgctgacgttgcgcggcgtggcccgaggcgtgacgctggtcacggcccatacccaggacgacagccacttgaactggcgggcgctggcgcaaggcgggacgacgctggtgatttacatgggagtggcgaagctcggagagattcgcgagcagctgttggctggggggatggcagcggatacgccggtggcgatgatcgagaacgcctcgttgccagagcagcgcgaatgccgcagtgatctgacagcgatggaagatgacgcccttggtttccagctcaagagccctgcgattctggtcataggcgccgttgcagcggctgcgacccaggtcggttcgattggctgggcagccgatcgcctggcctga

SEQ ID NO: 85206 - protein, 250 aa, Pseudomonas fluorescens PfO-1
MNAKVWLVGAGPGDPELLTLKAVRALREAEVVLIDDLVNEAVLEHCPAARIIAVGKRGGCRSTPQAFIHRLMLRYARQGKCVVRLKGGDPCIFGRGGEEAQWLRERGVEVELVNGITAGLAGATQCDIPLTLRGVARGVTLVTAHTQDDSHLNWRALAQGGTTLVIYMGVAKLGEIREQLLAGGMAADTPVAMIENASLPEQRECRSDLTAMEDDALGFQLKSPAILVIGAVAAAATQVGSIGWAADRLA

SEQ ID NO: 85207 - DNA, 1395 bp, Pseudomonas fluorescens PfO-1
  CDS (1)..(1395): transl_table=11
atgaaatatctgccgctgtttcacaacctgcgcggcagtcgtgtgttggttgttggtgggggggagattgccttgcgcaagtcccgcctgctggccgatgccggtgcgctgctgcgggtggtcgcacctgaaatcgaagcgcaactgcgcgaactggttgccgccagcggtggcgaatgcctgctgcgtggctacgccgaagcggatctggacggttgtgggctgatcattgccgccaccgacgacgaagcgttgaacgcgcacgtctccgccgatgcccaccggcgctgcgtgccggtcaatgtggtcgatgcgccggcgctgtgcagcgtgatcttcccggcaatcgtcgatcgttcaccgctgatcatcgcggtctccagcggcggcgatgcgccggtgctggcccggctgatccgcgccaagatcgaaacctggattccttcgacctacggccatctggccggtctggccgcgcggtttcgtgatcaggtcaaaggcctgtttcctgatgtgcagcagcgtcgcggtttttgggaagacgtgtttcaggggccgattgccgaccggcagctggcaggacagggcgccgaagccgaacgtttgctgcaagccaagattgacggcgaagccatggtcacgaccggtgaggtgtatctggttggggcaggacctggtgatccggatctgctgaccttccgcgccttgcgtctgatgcagcaagccgacgtggtgctgtacgaccgcttggtggctccggcgattcttgagctgtgccgtcgcgatgccgagcgggtctacgtcggcaagcgtcgcgccgatcacgccgtgccgcaggatcaaatcaaccagcaactggtggatctggccaaggccggcaagcgtgtggtgcggttgaagggcggggatccgttcatcttcggccgtggcggcgaagagatcgaggaactggcggcccatggcatcccgtttcaagtggtgccgggcatcacggcggccagcggttgcgcggcgtatgccgggattccgctgactcatcgcgactacgctcagtcggtgcgtttcgtcaccgggcacttgaaggacggttcgaccgatctgccgtggtcggatctcgtcgctccggctcagacgctggtgttctacatggggttggtggggctgccgatcatttgcgagcagttgatcaaacatggtcgtgcggccgaaacgccggccgcgctgatccagcagggcaccacggtcaatcaacgggtcttcaccggcacgctggctgacctgccacgtctggtggcggagcatgaagtgcatgcgccgacgctggtgatcgtcggcgaagtggtgcaactgcgcgagaaacttgcgtggttcgagggcgctcagggtcaaatctga

SEQ ID NO: 85208 - protein, 464 aa, Pseudomonas fluorescens PfO-1
MKYLPLFHNLRGSRVLVVGGGEIALRKSRLLADAGALLRVVAPEIEAQLRELVAASGGECLLRGYAEADLDGCGLIIAATDDEALNAHVSADAHRRCVPVNVVDAPALCSVIFPAIVDRSPLIIAVSSGGDAPVLARLIRAKIETWIPSTYGHLAGLAARFRDQVKGLFPDVQQRRGFWEDVFQGPIADRQLAGQGAEAERLLQAKIDGEAMVTTGEVYLVGAGPGDPDLLTFRALRLMQQADVVLYDRLVAPAILELCRRDAERVYVGKRRADHAVPQDQINQQLVDLAKAGKRVVRLKGGDPFIFGRGGEEIEELAAHGIPFQVVPGITAASGCAAYAGIPLTHRDYAQSVRFVTGHLKDGSTDLPWSDLVAPAQTLVFYMGLVGLPIICEQLIKHGRAAETPAALIQQGTTVNQRVFTGTLADLPRLVAEHEVHAPTLVIVGEVVQLREKLAWFEGAQGQI

SEQ ID NO: 85209 - DNA, 765 bp, Rhodobacter sphaeroides 2.4.1
  CDS (1)..(765): transl_table=11
atgctgaacccgctcaccgcccccggacaggtcatcttcgtcggcgccggccccggctccatcgaccacctgaccatgggcgcctgccgggcgctgacgcaggccgaggtcgtcatccatgaccggctggtcgggcccgagatcctcgatctgatcccgccgcaggcgctccggatcgaggcgggcaaggagggcttcggcccctcgaccccgcaggagacgatcaacgcgctgatcgtggaccatgccgcgtcggggcgccgcgtggtgcggctgaagtccggcgacagcggcatcttcggtaggctcgacgaagagatcgaggcgctcgatgccgcgggtctcggctggcgcatcgtgcccggcctgaccacggccgccgccgccgcggcggccatcggtcagggcctcacgaagcgcgggcgcaacgcggcgctgcggatcgtgaccggccacgacatggcgggctacgccgagcaggactggcgcgggctggcccgggtgggcgaggtcgccgccatctacatgggcaagaagtcggcccgcttcatccagggccgcctgatgatgcatggggcggaccccgagacccccgtgacggtgatcgagaacgtgagccgcgccgacgaacggatcgtcgccgccaccctcgccaccctgcccgaggccgtagccggcctctccggccccgccatcgtcctctacggcctcgcgccgcgccgggccgcagccgccctgcccctcctgaaggaagccaccgcatga

SEQ ID NO: 85210 - protein, 254 aa, Rhodobacter sphaeroides 2.4.1
MLNPLTAPGQVIFVGAGPGSIDHLTMGACRALTQAEVVIHDRLVGPEILDLIPPQALRIEAGKEGFGPSTPQETINALIVDHAASGRRVVRLKSGDSGIFGRLDEEIEALDAAGLGWRIVPGLTTAAAAAAAIGQGLTKRGRNAALRIVTGHDMAGYAEQDWRGLARVGEVAAIYMGKKSARFIQGRLMMHGADPETPVTVIENVSRADERIVAATLATLPEAVAGLSGPAIVLYGLAPRRAAAALPLLKEATA

SEQ ID NO: 85211 - DNA, 726 bp, Rhodobacter sphaeroides 2.4.1
  CDS (1)..(726): transl_table=11
atgaccggcttcgtctccttcgtctcctcggggccgggcgaccccgaacttctcacgctgaaggcggtggaccggctcggccgcgccgatgcggtgctgttcgacgacctttcctcggggccgatcctcgcccatgcccgtccggaggcggatctcgtgggcgtgggcaaacgcgcgggccgcgcctcgccgaagcaggatcatgtgagccggctgctcgtggattatgcccggacgggcgggcgcgtcgtgcggctgaaatcgggcgatgcggggcttttcgggcggctcgaggaggagatcgaggcgctcgaggcggcggggatcggctacgagatcgtgccgggcgtgccctcggcctgtgccgccgcggcggcggcgggcattcccctcactcgcaggctcacggcgcggcgggtgcagttcctgaccggggccgacgtgaccggcggcctgccgcagcagaacctcgcggcgctggccgatccggcggccacgacggtggtcttcatgggcaagcgtaccttcccgacactggccgcggcgctgttcgcggcgggactgcccgagaccacacccgcgctgctggccgaaggcgtctcgacgcccgcgcaacggatctggcgcggcacgctcgggacactcgtggaggaggtggcgcgggccggcgaggcgccggcgctgatcctctacgggccgctcgcggacgcggaggaagagcgatga

SEQ ID NO: 85212 - protein, 241 aa, Rhodobacter sphaeroides 2.4.1
MTGFVSFVSSGPGDPELLTLKAVDRLGRADAVLFDDLSSGPILAHARPEADLVGVGKRAGRASPKQDHVSRLLVDYARTGGRVVRLKSGDAGLFGRLEEEIEALEAAGIGYEIVPGVPSACAAAAAAGIPLTRRLTARRVQFLTGADVTGGLPQQNLAALADPAATTVVFMGKRTFPTLAAALFAAGLPETTPALLAEGVSTPAQRIWRGTLGTLVEEVARAGEAPALILYGPLADAEEER

SEQ ID NO: 85213 - DNA, 774 bp, Carboxydothermus hydrogenoformans Z-2901
  CDS (1)..(774): transl_table=11
atgaccaggtttgcaatgaacggcaaggtatatttagtaggggcgggaccgggagacccggagctcattacggtaaaagggataaaacttttaaaagaggctcaggtggtcgtttacgaccggctgataagccccgagcttctaaaatatgtaaatccttctgctgaactttactatgccggaaaagctcctggccgacacagtttaaatcaggaggagataaacgagcttttaatacaaaaagcccgggaaggaaaaatggtggtacggcttaaagggggagatccttttgtttttggccggggaggggaagaagctttggctttaacccgggccgggattccctttgaggtggttccgggagttacttcggcggtagcggtaccggcgtatgcgggtattccggtaactcaccgccggattgcttcaacttttacggtagttaccggcaatgaaacggaaaataaagaagagcgggaggtagactgggaaaaaattgcccgggtcgggggtaccattgtcattttaatgggattaagtaaccttccgtttataaaaggtgaacttttaaaatacttgcctgccaccacaccggtggcggtaatttaccggggaactacccccagccagaaaattgtcaccgggaccctggaagacattgtagaaaaggtattggcggcgggaatcaagcatccggcggtaattgtggtgggtgatgtggtaaaattacaaggggagcttggctggtattccccatcagcattaacggagtga

SEQ ID NO: 85214 - protein, 257 aa, Carboxydothermus hydrogenoformans Z-2901
MTRFAMNGKVYLVGAGPGDPELITVKGIKLLKEAQVVVYDRLISPELLKYVNPSAELYYAGKAPGRHSLNQEEINELLIQKAREGKMVVRLKGGDPFVFGRGGEEALALTRAGIPFEVVPGVTSAVAVPAYAGIPVTHRRIASTFTVVTGNETENKEEREVDWEKIARVGGTIVILMGLSNLPFIKGELLKYLPATTPVAVIYRGTTPSQKIVTGTLEDIVEKVLAAGIKHPAVIVVGDVVKLQGELGWYSPSALTE

SEQ ID NO: 85215 - DNA, 1503 bp, Carboxydothermus hydrogenoformans Z-2901
  CDS (1)..(1503): transl_table=11
atgcctggttttgtgtacctcgtgggtgccggcccgggagatccggatttgattaccgttaaaggtttaaatctaatcaaaaaagcggatgtgatagtttacgaccgcttggtaaacccggtactcttaacctatgcccgaaaagatgccgaacttatctatgccggaaaagctcctgaacgtcacgagtatttgcaggaagagattaacaagcttttggtggaaaaagcgttagcggggaaaacggtggtgaggttaaaagggggagatcccttcgttttcgggcgtggtggcgaagaagcattggagcttacccggcacgggattccttttgaggtggttccgggaataacttcggctattgccgttccggcgtatgcagggattccggtaacccaccgggaagtagcggcttccttttgcgtaataaccggtaacgaggacccgaccaaaaaagaaagtcaaattaactgggaaaaagtagctttagctgcggatacattggtctttttaatggggaggaaaaatctgccgcaaattgtagccaatttgctgaagtatggccgctcgccccaaacccctgttgccgtaatcaggcttgggacccgagcggaacaaaggacggtaaccgggtgtcttcaggatattgaggaaaaggtaagaaaggccgacttaaagcatccggtaattattgtggtgggggagacggttaagctccgggagcagcttaactggtttgaaacgaaaaggctaatgggcaagcgcatactggttactcaaagcagtaactccggtaaacttttggcttgccggttaaaagaacttggagctgaagtttggcatttgccccaggtggaatatttaaaacccgagagctaccgggaagtagaccgggaactccagaggcttaatgaatacaagtatatcttatttacaagtccaaacggtgtggagttttttttgaaccgtttaaagtgtttggagctatcaatagatgctttgcccgaaataattgctatcggagaaaaaactaagaaagctttggaaaattcagggataaatgtagcccataaaactgaccggtttttgccccgtgaagtggtaaaattcattgccgggcgccttcaagatggggaaaaaattctctttcccaaaagcgaaaaggctacaattttagaattaaaactccgtgaggagcgtttaccggtaaagtacctaccggtgtacaaggctgtcagggcaaaggttgaggcagaccatctttttgagttaattgatggtcggaaaattgattttattacctttgtaagcccggcagcagtaaataatttttttgaaagcttaacggacgaaaagcgagagaggttagcggaaataaaaatggtttcgatggggctaagcacaacggcggagattaaaaaatatggtgactttgagattcttgaggctaaacggcctggagttgatggcattttagaaaagatattagaagcagcaatttaa

SEQ ID NO: 85216 - protein, 500 aa, Carboxydothermus hydrogenoformans Z-2901
MPGFVYLVGAGPGDPDLITVKGLNLIKKADVIVYDRLVNPVLLTYARKDAELIYAGKAPERHEYLQEEINKLLVEKALAGKTVVRLKGGDPFVFGRGGEEALELTRHGIPFEVVPGITSAIAVPAYAGIPVTHREVAASFCVITGNEDPTKKESQINWEKVALAADTLVFLMGRKNLPQIVANLLKYGRSPQTPVAVIRLGTRAEQRTVTGCLQDIEEKVRKADLKHPVIIVVGETVKLREQLNWFETKRLMGKRILVTQSSNSGKLLACRLKELGAEVWHLPQVEYLKPESYREVDRELQRLNEYKYILFTSPNGVEFFLNRLKCLELSIDALPEIIAIGEKTKKALENSGINVAHKTDRFLPREVVKFIAGRLQDGEKILFPKSEKATILELKLREERLPVKYLPVYKAVRAKVEADHLFELIDGRKIDFITFVSPAAVNNFFESLTDEKRERLAEIKMVSMGLSTTAEIKKYGDFEILEAKRPGVDGILEKILEAAI

SEQ ID NO: 85217 - DNA, 750 bp, Burkholderia sp. 383
  CDS (1)..(750): transl_table=11
atgagccgcgcgtggctgatcggcgccggccccggtgacgccgacctgctgacgctcaaggccgtccacgcgatcggcgcggcggacgtgctgctcgtcgacgatctcgtgaaccccgacgtgctgcgccatgcccgcgtcgatgcgcacatcgagcacgtcggcaagcgtggcggacatgcatcgacaccgcaggagacgatcgtcgccgcgatgctcgtgcatctgcgcgcgggtcgcagcgtcgcgcgactcaagggcggcgatccgttcgtgttcggtcgcggcggcgaggaactggccgcactcggtgcggcgggattcccggtcgaggtcgtgaacggcgtcaccgcgggcatcgccgcgccggccgcgatcggcattccggtcacgcagcgcggcgacgcgcagggcgtgatcttcgtcacgggccacggcgcgggcgccgacgaacccgactggcgtgcgctcgcggccacgcgcatgacgatcgtcgtctacatgggcatccgcaggctcgacgcgattgctgcggcgctgcgtgaaggtggtctgcccggcgatacgccgtgcgcggcgatcgagaacgcgacgcgccccgaacagcggcacgtgctcgcgacgctcgacacgctcgtcgaacgcgtcggcacggccggcatcggttcaccggcgatcgtcgtgatcggccgcgtcgcggcgttcgccgacgatcccgcggtacgtgccgcactcggcagcggcgcatga

SEQ ID NO: 85218 - protein, 249 aa, Burkholderia sp. 383
MSRAWLIGAGPGDADLLTLKAVHAIGAADVLLVDDLVNPDVLRHARVDAHIEHVGKRGGHASTPQETIVAAMLVHLRAGRSVARLKGGDPFVFGRGGEELAALGAAGFPVEVVNGVTAGIAAPAAIGIPVTQRGDAQGVIFVTGHGAGADEPDWRALAATRMTIVVYMGIRRLDAIAAALREGGLPGDTPCAAIENATRPEQRHVLATLDTLVERVGTAGIGSPAIVVIGRVAAFADDPAVRAALGSGA

SEQ ID NO: 85219 - DNA, 750 bp, Burkholderia sp. 383
  CDS (1)..(750): transl_table=11
atgggcaaggtgtatctgatcggagcagggccgggcgcggccgacctcatcacggtgcgcggcgcgcggctgctcgcacaggcggacgtcgtgctgcacgacgcgctcgtcgagcccgcgatgctcgattacgcgccgaatgcgcgccggatcgcggtcggcaagcgctgcgggcagcgctcgaccgcgcagcacttcatcaacaagcagatcgtcgatgcggcacgcgagcatgcgcatgtcgtgcggctgaagggcggcgacccgatgctgttcggtcgtgccgaagaggagatgcgcgcgctggaagcagccggcatcgactacgaggtcgtgccgggcatcaccgcggcgctggccggggccgcgacgctgaagcgttcgctgacgttgcgcggcgtgtcgcgcagcgtcgcgttcgcgacgcacagccgtgcgccgggcagcgacgagattcgcgaagccgcgcgcgccgattcgatggtctattacatgggccgcgacagcgcacccggcatcgcgcaggaactgatcgacgcgggccgtgcgccggcgacgcccgtggcgatcgtcgaggcgtgcagcaccgcgcgcgaacgcacgttgacgctgacgctcgcgcagatggcggcgggcgacgcgcaggcgtggctcgatcctgcggaaccgagcctgctgatgatcggcgatgcgttcgccgagcgcgccgggcaggcaaaggcgggtgatgcgctgcgaaatgcggcctga

SEQ ID NO: 85220 - protein, 249 aa, Burkholderia sp. 383
MGKVYLIGAGPGAADLITVRGARLLAQADVVLHDALVEPAMLDYAPNARRIAVGKRCGQRSTAQHFINKQIVDAAREHAHVVRLKGGDPMLFGRAEEEMRALEAAGIDYEVVPGITAALAGAATLKRSLTLRGVSRSVAFATHSRAPGSDEIREAARADSMVYYMGRDSAPGIAQELIDAGRAPATPVAIVEACSTARERTLTLTLAQMAAGDAQAWLDPAEPSLLMIGDAFAERAGQAKAGDALRNAA

SEQ ID NO: 85221 - DNA, 855 bp, Burkholderia sp. 383
  CDS (1)..(855): transl_table=11
atgccggtgcgtttcgaccgcccgccgccgccgcgcagacaacgcgctatcgaccgccgcatgcaggcggccctggaacacgacatgacgacaggcaaagtcacgctgctgggcgccggccccggcgagcccgatctcctcacgctgaaggccgtgaaggcgctggccgccgccgacgtgctgctgctcgacgatctcgtcgcgcccggcatcgtcgaactcgcgccgcaggcgcgcgtgatccgcgtcggcaagcgcggcggctgccgctccacgccgcaggcattcatcgagaagctgatgcgccgctacgcgctgcgcggcgcgcacgtggtgcgcgtgaaaggcggcgatgcgctgctgttcgggcgtgccggcgaagaactggcgacgctgcgcgccgccgcgattccggtcgagatcgtcaacggcatctcgtcgggattcgcggccgccgcgagcctcggcatctcgctcacgcaccgcgagcattgccagggcgtcacgttcgttaccgcgcaccgccaggaccacggcgagcccgactgggcacgcctcgcggcgaccggcaccacgctcgcgatctacatgggcatgagccgcgtcgacagcattgccgccggcctgctcgccgtgctgtcgccctcgacgccggccgcggccgtgcaatgggccggcacgcccgacgaacgccgctggaccggcacgctcggtggcctcgcgcgcggcatcgacgaagcgcggctcggcagcccggccgtgatcctcgtcggcggcgcgatcggcgaagcggccgtgcagcacgtgccggatgcgggtgctgcgatcgaaacagccttgtcccgggccgcgtag

SEQ ID NO: 85222 - protein, 284 aa, Burkholderia sp. 383
MPVRFDRPPPPRRQRAIDRRMQAALEHDMTTGKVTLLGAGPGEPDLLTLKAVKALAAADVLLLDDLVAPGIVELAPQARVIRVGKRGGCRSTPQAFIEKLMRRYALRGAHVVRVKGGDALLFGRAGEELATLRAAAIPVEIVNGISSGFAAAASLGISLTHREHCQGVTFVTAHRQDHGEPDWARLAATGTTLAIYMGMSRVDSIAAGLLAVLSPSTPAAAVQWAGTPDERRWTGTLGGLARGIDEARLGSPAVILVGGAIGEAAVQHVPDAGAAIETALSRAA

SEQ ID NO: 85223 - DNA, 789 bp, Synechococcus sp. CC9605
  CDS (1)..(789): transl_table=11
gtgaccaccgctgaacaaaccggaaccgtttatctggtgggagctggtcccggcgatcccgagttgctcacgctaaaggcgcatcggctgctgagccattgcgatgccctggtgtacgactcgctggtgcccgaagaagtgctggatcttgtgccggctacctgcgaacgccgttttgtcggcaagcgtcgcggacatcattcggtgccacaacccagcaccaatgccgtgctggttgaaatggcccagaagcacagcacggtggtgcgcttgaaggggggtgatcccttcctgtttggacgtggaggggaagaagccgcatacctggcggagcggaatattcctgttcaggtggtgcctggtgttaccgctggcattgctgcccctgcctacgccggaattcccgttacccaccggcgagcgggatcatcggtgaccttcgtcaccggtcatgaggaaatcgacaagcgccgtccttccgtggattggcgtgctctggctgcggccagtgacggattggtgatctacatggggctgcacaacttgcctcggatcgcagaagagctgatggcgggtggtttggctgcgacgacccccgtggcggtgatccagcagggcacggtggcggggcaacgctgcctcaaagccagcttggttgacattgccgatcaatgccgagccgaggccttcaagtcaccctcgatcgttgtggtgggtgaggtgattgatcatcaggttgaagcctgcaggcccacacctgcagcggtcacgatgccgattccgttctga

SEQ ID NO: 85224 - protein, 262 aa, Synechococcus sp. CC9605
MTTAEQTGTVYLVGAGPGDPELLTLKAHRLLSHCDALVYDSLVPEEVLDLVPATCERRFVGKRRGHHSVPQPSTNAVLVEMAQKHSTVVRLKGGDPFLFGRGGEEAAYLAERNIPVQVVPGVTAGIAAPAYAGIPVTHRRAGSSVTFVTGHEEIDKRRPSVDWRALAAASDGLVIYMGLHNLPRIAEELMAGGLAATTPVAVIQQGTVAGQRCLKASLVDIADQCRAEAFKSPSIVVVGEVIDHQVEACRPTPAAVTMPIPF

SEQ ID NO: 85225 - DNA, 1542 bp, Geobacter metallireducens GS-15
  CDS (1)..(1542): transl_table=11
atgcccgataaatccctcaaaaaaccgttcgtccacctcatcggtgccggccccggcgacccggggctcatcaccgtcaagggtcgggagtccctgggaagagccgacgtggtcatctacgactacctggccaatgacgacctcctccgcttcgcacggcccgacgccgagctgatctacgccggcaagatcggcgggcaccacaaccgcgagcagtggcagatcaacgcgctcctggtggaaaaggccctggcggggaatgtggtggcacgactcaaggggggtgactcctttgtcttcggccgggggggtgaggagtgcgaggcccttgtggcggcgggaatcccctttgagatcgtccccggcgtcacggccgggatcggcgtcactgcctacgccggcatccccctcactcaccggggggtgaccacttccgtcaccttcgtcaccggccatgaggggcacgacaaggaggtctcccagatcgactgggagggtctctccctggggagcggcaccgtagtcttctacatggggatcaagaacctcccccagataacggcaaacctcatggcccacggcaggccgccggagaccccggtcgccctcatccgctgggggactcggcccgagcaggaagtactcaccggcaccctggccgacatcgccgagcaggcacggcggaccggcttccgggccccggccatcaccgtggtgggagaggtggtgcgcctgcgggagaagctccgctggttcgacaaccgtcccctcttcggcacaagcatcctcgttacccgtgccgcggaccaggcaggcgagttcggtgccatgctcggggcactgggggcccgggtcctggagtgccccaccattgccattgtcccccccgaaagctgggacaacctcgacgcagccatcgcctctctggatcggttccactgggccgtcttcacgtcggtcaacgcggtccgtttcttctttgagcgactcgccgcagccggaaaggactcccgcgccctggggaactgccgcgtctgcgccgtggggcccaagacggcagcagccctggcccccttcggcatccgaccggacctcattccggccgactacaagggtgaaggggtggtggaggtgttccgctcggaggagattgcagggaaacggatcatcttccccaagggagaccgggccagggacgtgatcccccagggcctcgcggagctggggggagaggtgaccgcgccggtcgcctaccgcaacgtgacgcccgactcccttcccgccggcgtcatcgccgagctggaagaacggcgcatcacctgcgtcaccttcacctcgtcatccaccgtggagaacctggccgccatcctcggggagaaccgcttcctccacctcctgaagggggtgacgatcgccgccatcggcccaatcaccgccagaacctgccgggaactggggcttgaggttcacgtggagccctcgaagtacaccctcgctgccatgacggacgccctcgtcgactttttttcacggtcgaagtag

SEQ ID NO: 85226 - protein, 513 aa, Geobacter metallireducens GS-15
MPDKSLKKPFVHLIGAGPGDPGLITVKGRESLGRADVVIYDYLANDDLLRFARPDAELIYAGKIGGHHNREQWQINALLVEKALAGNVVARLKGGDSFVFGRGGEECEALVAAGIPFEIVPGVTAGIGVTAYAGIPLTHRGVTTSVTFVTGHEGHDKEVSQIDWEGLSLGSGTVVFYMGIKNLPQITANLMAHGRPPETPVALIRWGTRPEQEVLTGTLADIAEQARRTGFRAPAITVVGEVVRLREKLRWFDNRPLFGTSILVTRAADQAGEFGAMLGALGARVLECPTIAIVPPESWDNLDAAIASLDRFHWAVFTSVNAVRFFFERLAAAGKDSRALGNCRVCAVGPKTAAALAPFGIRPDLIPADYKGEGVVEVFRSEEIAGKRIIFPKGDRARDVIPQGLAELGGEVTAPVAYRNVTPDSLPAGVIAELEERRITCVTFTSSSTVENLAAILGENRFLHLLKGVTIAAIGPITARTCRELGLEVHVEPSKYTLAAMTDALVDFFSRSK

SEQ ID NO: 85227 - DNA, 1512 bp, Desulfovibrio desulfuricans G20
  CDS (1)..(1512): transl_table=11
atgaaagtttacctgatcggtgccggtcccggcgaccccggactgctgaccatcaagggccgtgatattttgaagcgcgccgatgtcattgtgtacgactatctggccaacgacgcttttctgaattacgcggcccccggcgcggaaatcatctatgtgggcaaaaaaggcggcgaccataccctgtctcaggaaggcatcaacaggttgattgttgagaaggccagagaaggcaaggtggtggcgcgtctcaagggcggcgatccctatgtgttcggacggggtggcgaagaagcggaagaactgcttgacgccggcgtgaacttcgaggttgtgccgggagtcacttcggctgtggcaggccccgcatacgccggtattccgctgacgcaccgcagctattcctcctccgtttcattcataaccggccacgaagatccttctaagcccgaatcggctcataactggaaggcgctggccgccagtgccagcacgctggtgttctttatgggcatgaaaaatctgcccgaaatttcgcgcaagctcattgaggccggcatggaccccgatacgcctgcggcacttgtgcgctggggtaccacatcgcgccaccgcagtctggcagccaccattgccaccctgccggaagaaggcaaaaaagcgggattttcttctcccagccttattgttgtggggcatgtggtcaaactgcgcgaccggctgaactggtttgagcagctgccgctgctgggcaggggcattgtggttacccgcgcccgcgaacaggccagcggactggcagccagcctgacgcagctgggagcggaggtcattcagtttcccaccattctcatccgcccgctggaagattatgctcccgtgcatgacgccattcgcaggcttgccgaatatgactggcttgttttcacttctgtgaacggcgtgaaacatttctggcagcaaatgggcctgctggggctggacagcagagcgctgggcggtgtgaaagtggctgccatcggaccggcaacggcggacgtgctgcgtgaaaaagggatagagcctgattttattcctgaaaaatatgtggccgaaggcgtggtcaagggaatgatagagcgcggaatggacggcagcagggtgctgctgccccgtgcgcgtgtggctcgcgaagtgctgccggaagagcttgcccgtgccggtgcgcgtgtggatgtgctgccggtatacgaaaccgtgccgggcgacgccaaccgcagtcacgtgcttgaaatgctggaagagggccgcattgactgcatcaccttcggcagttcttccactgtggacaatttcttttcactggttgaaccggaagccatgcgccggtacgaacatgtgcatatggcctgcataggaccggtaacccgtaagactctggaacgctacggtttcacctgttccatccagccggaagattataccattccggcactggtggatgaactggtgcgtcagcttggcgcgcagtag

SEQ ID NO: 85228 - protein, 503 aa, Desulfovibrio desulfuricans G20
MKVYLIGAGPGDPGLLTIKGRDILKRADVIVYDYLANDAFLNYAAPGAEIIYVGKKGGDHTLSQEGINRLIVEKAREGKVVARLKGGDPYVFGRGGEEAEELLDAGVNFEVVPGVTSAVAGPAYAGIPLTHRSYSSSVSFITGHEDPSKPESAHNWKALAASASTLVFFMGMKNLPEISRKLIEAGMDPDTPAALVRWGTTSRHRSLAATIATLPEEGKKAGFSSPSLIVVGHVVKLRDRLNWFEQLPLLGRGIVVTRAREQASGLAASLTQLGAEVIQFPTILIRPLEDYAPVHDAIRRLAEYDWLVFTSVNGVKHFWQQMGLLGLDSRALGGVKVAAIGPATADVLREKGIEPDFIPEKYVAEGVVKGMIERGMDGSRVLLPRARVAREVLPEELARAGARVDVLPVYETVPGDANRSHVLEMLEEGRIDCITFGSSSTVDNFFSLVEPEAMRRYEHVHMACIGPVTRKTLERYGFTCSIQPEDYTIPALVDELVRQLGAQ

SEQ ID NO: 85229 - DNA, 804 bp, Prochlorococcus marinus str. MIT 9312
  CDS (1)..(804): transl_table=11
gtgcctggcattgtttatttagttggagcaggtcctggtgaccctgagcttttaactttaaaagctttacgtctaataaaaaattgtgatgcattagttcatgatgctttaatcccggatgaaataacaaaagaggcaggaaaaaatacagaaatttaccatgtaggtaaaagagcggggaagtgttctgtacctcagattgaaactaatgctcttattttgaaattgtcaaaagaaggcaaaaatgttgtaaggcttaaaggaggagatccatttgtcttttctaggggtggtgaagaagtatcgtttttagaaaaaaatggagtttcagttgaaatagttcctgggattacttctggtatagctgctcccacatattttggtattccacttacccatagagatgctgcgagttctgtaactttcgtcactggccatgagcatgttgataaggataaaaagagcgtcaattggagagatttagctaaatcttcagatagcttagttatttttatgggtataaaaaatattgaatttattgtagaggaattaattttaggcggcttatgtaagaatacaaaatgcgctgtaattcaggaagctactttgaaaaatcaaaaatgttttatagagaaattagataatctcgtagataaaatcaaagataaagaatttttagctccatcaattatcattattggaaaaattgttgaatataaagtcaataacaatatcactaaagtatctgatgtctatttaccagatattaataaagttcaactatataataaatcccaaaagtaa

SEQ ID NO: 85230 - protein, 267 aa, Prochlorococcus marinus str. MIT 9312
MPGIVYLVGAGPGDPELLTLKALRLIKNCDALVHDALIPDEITKEAGKNTEIYHVGKRAGKCSVPQIETNALILKLSKEGKNVVRLKGGDPFVFSRGGEEVSFLEKNGVSVEIVPGITSGIAAPTYFGIPLTHRDAASSVTFVTGHEHVDKDKKSVNWRDLAKSSDSLVIFMGIKNIEFIVEELILGGLCKNTKCAVIQEATLKNQKCFIEKLDNLVDKIKDKEFLAPSIIIIGKIVEYKVNNNITKVSDVYLPDINKVQLYNKSQK

SEQ ID NO: 85231 - DNA, 798 bp, Synechococcus elongatus PCC 7942
  CDS (1)..(798): transl_table=11
ttgaccctgatttcttctgttacaaaaggcaaagtttatctagtgggtgctggccctggcgatccgggtctgttgaccttgcgaggcaaagcattactagaagctgctgaggtggttgtttatgacgccttggtcagtgatgcaatcttgtctttaatcaatcccaaggcagacaaaattcatgccggtaaacggcgtggacaacactcactgttgcaaactgaaacaacccagttactgattgaaaaggctcagcaacaagcggttgtggtgcgcttgaaaggtggcgacccgtttgtgtttggtcgggggggtgaggagatggccgacctccaagcagcaggcattgcagtggaggtggttcccggcgtgacggcaggggtggcggtgccagcctacgctggcattcccattacccaccgcgatcgcagttccagcgtcacgtttgtgactggtcatgaaatggcgggcaagtatcgccccagcattgcttgggaggcgattgcccggggcagcgaaacgattgtgatctacatgggcctgcacaatctggctctgatcattgagcagttgcagaccgcaggcttacccggcataaccccgatcgccttgattcgttggggtacgcgaccggagcaggaagaactgtttgccacgctagaaaccgttgtggcagccgttgccgaacgtcaatttcaagcacccgcgatcgcggtcatcggtcaggttgtcagcctgagtccgttgctgccgccgacaatgatgacagcgagcgatcgcggactaccgacggcctaa

SEQ ID NO: 85232 - protein, 265 aa, Synechococcus elongatus PCC 7942
MTLISSVTKGKVYLVGAGPGDPGLLTLRGKALLEAAEVVVYDALVSDAILSLINPKADKIHAGKRRGQHSLLQTETTQLLIEKAQQQAVVVRLKGGDPFVFGRGGEEMADLQAAGIAVEVVPGVTAGVAVPAYAGIPITHRDRSSSVTFVTGHEMAGKYRPSIAWEAIARGSETIVIYMGLHNLALIIEQLQTAGLPGITPIALIRWGTRPEQEELFATLETVVAAVAERQFQAPAIAVIGQVVSLSPLLPPTMMTASDRGLPTA

SEQ ID NO: 85233 - DNA, 1500 bp, Rhodospirillum rubrum ATCC 11170
  CDS (1)..(1500): transl_table=11
atggacagcttcccgatttttctgacccttaccggggtccgcgttcttgtcgtcggcggcggcgccgccgcggccgccaaggcgcgtctggcgctcaaggccggcgccagggtcagcgttttcgcgcccgccttatcggccgattggcaagatctgcgcggccatcccgcccttgatcaccgccagggctttcccggccagggcggcgaggaggagtggcgcgacgtgcggttggtctatgccgccggcgaaagcctggaagaggacagggccgttcatgccgccgccagcgcccggggggtgctggtcaatgtcgtcgatcgccccgaattatgcgatttcctgacgccggccatcgtcgatcgcagcccgatcgtcgtggccatcggaactggggggcgggcgccggtgctggcgcgccgggtgcgcgccgccatcgaccgcttgctgcccgcccggctgggagccctcgcccggctggccgagggctttcgcggcacggtcgcccaagccctgcccgatggcgaccggcgccggcgcttctgggaccgcttcttcgacggcgccccggccctggccgccctggaaggcgacgagccgcgcgcccgaaccgccgccctgcgcctgctcaatgacggcgaggccctggacaacggcgcgccggccgccggggtcgttcatctggtcggcgccggaccgggagaccccgatcttctgaccctgaaggcccagcgcctgctccaggaggccgatgccctggtttatgacgatctggtgggcgaggggatcttggatatggcccggcgcgacgccgcgcggatctacgtcggcaagcgcaagggccgggcgagcctgacccaggagcagattggccggttgatgtgcgatctggccgcagcggggcgggtggtggtgcgcctgaaaggcggcgacccggcggttttcgcccgcctgtccgaggaaatcgacgccctggccgccgccggggtggcctggacggtggtgccggggatcaccgcggcttcggccgccgccgccgccatcggcatctcgctgaccgatcgtgacggggcgcccagcgtcaccttgctgtcgggccatcggcgcgctccggcggccggcgagagcgaggccgccgtcgattggcgggcggcggcgcggaccggtggcaccctggcggtctatatgggcctgtcacgggccacggcggcggccgaggggctgatcgaaggcgggctgtcggccgagaccccggtggccgtggttcatgacgccagccgccagggccagcgcgtttcgcgcggaaccctgggcgagctgccccggctggtcgcccaaggggccttggccgcgcccgatgccccggggctggtgctggtcggcaaggtcgtcgccaaggccggccgcctgccggcgatcgccccggttttttccaccccgcgcgccttcgccggcgatccgtccttcgcctcccaagccctgccgtcccaggcgggctga

SEQ ID NO: 85234 - protein, 499 aa, Rhodospirillum rubrum ATCC 11170
MDSFPIFLTLTGVRVLVVGGGAAAAAKARLALKAGARVSVFAPALSADWQDLRGHPALDHRQGFPGQGGEEEWRDVRLVYAAGESLEEDRAVHAAASARGVLVNVVDRPELCDFLTPAIVDRSPIVVAIGTGGRAPVLARRVRAAIDRLLPARLGALARLAEGFRGTVAQALPDGDRRRRFWDRFFDGAPALAALEGDEPRARTAALRLLNDGEALDNGAPAAGVVHLVGAGPGDPDLLTLKAQRLLQEADALVYDDLVGEGILDMARRDAARIYVGKRKGRASLTQEQIGRLMCDLAAAGRVVVRLKGGDPAVFARLSEEIDALAAAGVAWTVVPGITAASAAAAAIGISLTDRDGAPSVTLLSGHRRAPAAGESEAAVDWRAAARTGGTLAVYMGLSRATAAAEGLIEGGLSAETPVAVVHDASRQGQRVSRGTLGELPRLVAQGALAAPDAPGLVLVGKVVAKAGRLPAIAPVFSTPRAFAGDPSFASQALPSQAG

SEQ ID NO: 85235 - DNA, 876 bp, Rhodospirillum rubrum ATCC 11170
  CDS (1)..(876): transl_table=11
atgaaacagtctttcgccttttcccgactcgggttggcccttcctcccgtcgaacccggctgggtgtggctggttggcgccggtccgggcgatcccggcctgctgaccgtgctggccgcccatgccctggccgaggccgatgtggtggtccacgacgccctgatcgacggccgggtccttggcttggcgcgcgaggaggccgtgttgatcccggcgggcaaacgcggcggccgcccctcgcatagccagcccgatatttcggcccggctggtcgatctggcacgggccggcaagcgggtcgtccgtctcaagggcggagatccctttgtcttcgggcgcggcgccgaggaggcgcggaccctggtcgccgccggcgtgccctttcgcatcgtccccggggtgacggccggggtgggcgggctggcctatgccggcattcccgccaccacccgcgacaccaatgccaccgtgaccttcgtcaccggccatgcggcgaccggcgaggttcccgataccttcgattgggaagccctggcccgcttgccggtgctggttttctacatggcgctcaaaacccttgatgtgatcgccgcccggctgatggagcatggccggtcgggcgaaacgccggtcgccttcgtctccgacgccaccaccgccgcccaaagggtccatatcaccaccctggcccaggcggtgacggagcgcgatcgcctgggcatcgcgccgccggccctggtggttctgggcgatgtggtgccgctggcccgcgatctggcctggtggagcccgcccaagcaggggtgcggtggcgaggtctggcccgatcccatgcaatcgattcccggatcggcgaccccgctgattggcgattag

SEQ ID NO: 85236 - protein, 291 aa, Rhodospirillum rubrum ATCC 11170
MKQSFAFSRLGLALPPVEPGWVWLVGAGPGDPGLLTVLAAHALAEADVVVHDALIDGRVLGLAREEAVLIPAGKRGGRPSHSQPDISARLVDLARAGKRVVRLKGGDPFVFGRGAEEARTLVAAGVPFRIVPGVTAGVGGLAYAGIPATTRDTNATVTFVTGHAATGEVPDTFDWEALARLPVLVFYMALKTLDVIAARLMEHGRSGETPVAFVSDATTAAQRVHITTLAQAVTERDRLGIAPPALVVLGDVVPLARDLAWWSPPKQGCGGEVWPDPMQSIPGSATPLIGD

SEQ ID NO: 85237 - DNA, 1563 bp, Moorella thermoacetica ATCC 39073
  CDS (1)..(1563): transl_table=11
gtggaaaataccaggggtaaagtttttttagttggtgccggccccggcgacccgggcctgttgactgtcaaaggacgggagtgcctggcccgggccggggctgtagtctacgatcgcttgctcaaccctgctttactggaatatgccccgccggaggctgttaagatctacgtcggtaaagcgccggatcgccatgccttaagccaggacgagatcaacgacctcctggtggacctggcgcggcaggggaaacaggtggtgcgccttaaagggggcgacccctttgtctttggccgcggcggggaagaagccctggccctacgagctgccggcatccccttcgaagtagtgccaggggtcacggccgccgtggccgtgccggcctatgccggtattccggtaacccaccggggcctggcttcaacggcggccttcataactggcaacgaagacccccggaaaggaaacagcgccattaactgggagggtctggcccgggccgttgacaccctggtttttttaatgggtatggccaacctgccctacattgtcagccgcctcctggcctgcggtcgctctcccgatacaccggtggctctcatccgctggggcaccagggccgagcaggagacgctgaccggcaccctggcggatatcgagggccgggcccaggaagccggcttccgcaacccggccattatcatcatcggccaggtggtcaacctgcgttcaaccctggcctggctggaggataaacccctctttggccggcgggtgatcgttacccgcccacgggcccaggcagaaggcttgacccgaagcctggcggacctgggggcggaagtcataaatttcccggtgattaggacggaacctccggccgactggcaccccttggataccgccctggacgctatcggggagtttgattggatcatatttaccagtgccaacggtgtccgttacttctggcgacgacttctggaacgacaccaggatatccgttccctggccggaatcaggattgcggccatagggccggccacttcccgtgccctgaaggaacggggcctcctgaccgattggcaaccccgggaatatgtagccgaagccgtggcttccggactgggaccccgggtcaggggccggcgggttctcctaccccgggctgatatcgcccggcccttcctggccgtggacctccgccgccagggggcagaagtaacggaggtaacggcctaccggacggtaaagaatgaagaaaacgccgggtcccttaaagaaatgctggccgccggtaaagtagccgccgtcacctttaccagttcttcgacggtacgggccttccttgacctgctcggggacggggccctggatttagtgcaaggaatagacgttttttgcctcggcccggtcacggcggccacagcccgggaggccggcctgcaggtagccgccacggccggcgagtatacagaagaggggctggtgcgggccatggaaaactattatacaaccataagggccgggggcggagatagcaaccaatcccggagcctttaa

SEQ ID NO: 85238 - protein, 520 aa, Moorella thermoacetica ATCC 39073
MENTRGKVFLVGAGPGDPGLLTVKGRECLARAGAVVYDRLLNPALLEYAPPEAVKIYVGKAPDRHALSQDEINDLLVDLARQGKQVVRLKGGDPFVFGRGGEEALALRAAGIPFEVVPGVTAAVAVPAYAGIPVTHRGLASTAAFITGNEDPRKGNSAINWEGLARAVDTLVFLMGMANLPYIVSRLLACGRSPDTPVALIRWGTRAEQETLTGTLADIEGRAQEAGFRNPAIIIIGQVVNLRSTLAWLEDKPLFGRRVIVTRPRAQAEGLTRSLADLGAEVINFPVIRTEPPADWHPLDTALDAIGEFDWIIFTSANGVRYFWRRLLERHQDIRSLAGIRIAAIGPATSRALKERGLLTDWQPREYVAEAVASGLGPRVRGRRVLLPRADIARPFLAVDLRRQGAEVTEVTAYRTVKNEENAGSLKEMLAAGKVAAVTFTSSSTVRAFLDLLGDGALDLVQGIDVFCLGPVTAATAREAGLQVAATAGEYTEEGLVRAMENYYTTIRAGGGDSNQSRSL

SEQ ID NO: 85239 - DNA, 774 bp, Burkholderia thailandensis E264
  CDS (1)..(774): transl_table=11
atgggtaaggtgtatctgatcggcgcggggccgggcgcggcggacctcatcacggtgcgcggcgcgcgcctgctcgccgaagccgacgtcgtgctgcacgatgcgctcatcgagcccgcgatgctcgactacgcacggcgcgcgcgcaggatcgcggtcggcaagcgttgcgggcagcgctcgaccgcgcagcacttcatcaacaagcagatcgtcgacgcggcgcgcgaacacgcggtcgtcgtgcggctgaaggggggcgatccgatgctgttcggccgcgcggacgaggaaatgcgtgcgctcgaagcggccgggatcgattacgaagtcgtgccgggcatcactgcggcgctcgcgagcgccgcggcgctcaagcgctcgctgacgctgcgcggcgtcgcgcgcagcgtcgcgttcgcgacgaagagccgcgcgcccggcagcgacgagattcgcgagcaggtgaacgcggattcgctcgtctactacatgggccgcgacagcgcgcccggaatcgcgcagcaactgatcaacgcgggccgcgcgggcgcgacgcccgtggcgatcgtcgaggcgtgcagcacgccgcgcgagcgcatgctcacgctcacgctcgccgaaatggcggcgggggcggcgcaggcgtggctcgatccggcgcagccgagcctgctgatgatcggcgacgcgttcgccgagcgtgcgccgcagcttgcggacgaggcgtcgcgcgacgaaccgaacaggcgagggatgcgcaacgcggcttga

SEQ ID NO: 85240 - protein, 257 aa, Burkholderia thailandensis E264
MGKVYLIGAGPGAADLITVRGARLLAEADVVLHDALIEPAMLDYARRARRIAVGKRCGQRSTAQHFINKQIVDAAREHAVVVRLKGGDPMLFGRADEEMRALEAAGIDYEVVPGITAALASAAALKRSLTLRGVARSVAFATKSRAPGSDEIREQVNADSLVYYMGRDSAPGIAQQLINAGRAGATPVAIVEACSTPRERMLTLTLAEMAAGAAQAWLDPAQPSLLMIGDAFAERAPQLADEASRDEPNRRGMRNAA

SEQ ID NO: 85241 - DNA, 1551 bp, Syntrophus aciditrophicus SB
  CDS (1)..(1551): transl_table=11
atggggcaggggacggattcgatgagcaaaagggggagagtttacattattggcgcgggaccgggagatccgggactgatgacggtgaagggaacgaaatgccttgcggaagcggatgtcgtgatctacgaccatctgatcaatccgggaatccttcatcatgcccgcgaaaccgctcgtctggtgtatgcaggaaaagaaggaggaaaacataccctgtcacaggaagagatcaacgcgaggctggtgtcggaagctcagcaggggcatgtcgtggcccggctgaaagggggagatcccttcatcttcgggcgtggaggggaagaggcggaggtgctggcccgtgagggcatcccctttgaaatcgtccccggtgtgacttcggcgatcgccgtcgcttcctatgcgggcatcccgctgactcatcgccgccataccgccaccctggcctttgtcacgggacacgaagatcctttgaaaggacagagcgagatcgactggaaggccctggccggaatagggactcttgtttttctcatgggggtccgcaatctgtcccgcattgcggccggcctgatcgcccaggggaaaaagccggaaactcccgccgcgctgatccgctggggaacgacggcgaatcaggaaacgcttgtcggtacgctggagaatatcgccgaccttgccgaggcagccggatttgcgccgccggccatcctggtggtcggcggggtcgtgggactgcggaaggaactgaactggtttgagaccaggcccctctttggaaaggggatcgtgattacccgtcccgaatcccaggcggaatcactggccgcacttcttgaggacgccggagcgcgggtcatttcctttcccaccatccagatcgttgccccggagagctgggagggactggattcggcaattcgccgtctggaggattacgcctggctgatcttcaccagcgccaacggtgtgcgcttttttctggagcggctttacgtcacgggaaaagatgtgcgggatctcaagggaatacggctgtgcaccatcgggcccgccacggcggcggcgctggaaaaccgcggtctccgggtggatctggttccggaaacctacctgtccgaaggggtggtggcggccttcgagcgggttgcgatttcagggcagaggatactccttccccgggcggagaaggcccgcgatgtcattccagaggggctgacccgtcagggagcggtcgtggatgtcgtttcggcataccgcacggtgaattccggccgggatcgttcggagctggtggagctgattgcccagaggcgggtcgatgtcctgacctttacgagcccatccacagtcaccaattttctggagatcatggggccggattttcttcccctgcccgccggcatccgggtggcctgcatcggaccagtgactgcggccgccgctgaaaaagccggcctgcccgtggatatccttcaggaaatctacaccattcctgggctggtcgaatcgctcaaggtctttctggcaaaggataagccgcattga

SEQ ID NO: 85242 - protein, 516 aa, Syntrophus aciditrophicus SB
MGQGTDSMSKRGRVYIIGAGPGDPGLMTVKGTKCLAEADVVIYDHLINPGILHHARETARLVYAGKEGGKHTLSQEEINARLVSEAQQGHVVARLKGGDPFIFGRGGEEAEVLAREGIPFEIVPGVTSAIAVASYAGIPLTHRRHTATLAFVTGHEDPLKGQSEIDWKALAGIGTLVFLMGVRNLSRIAAGLIAQGKKPETPAALIRWGTTANQETLVGTLENIADLAEAAGFAPPAILVVGGVVGLRKELNWFETRPLFGKGIVITRPESQAESLAALLEDAGARVISFPTIQIVAPESWEGLDSAIRRLEDYAWLIFTSANGVRFFLERLYVTGKDVRDLKGIRLCTIGPATAAALENRGLRVDLVPETYLSEGVVAAFERVAISGQRILLPRAEKARDVIPEGLTRQGAVVDVVSAYRTVNSGRDRSELVELIAQRRVDVLTFTSPSTVTNFLEIMGPDFLPLPAGIRVACIGPVTAAAAEKAGLPVDILQEIYTIPGLVESLKVFLAKDKPH

SEQ ID NO: 85243 - DNA, 1527 bp, Frankia sp. CcI3
  CDS (1)..(1527): transl_table=11
gtgacggacgggcgaagtgtgggtgaggtctggctggtcggcgcgggtccgggcgatcccggtctgctcaccgttcgcggccgtgaggtgctggcgaacgcggacgtcgtggtcaccgaccggctcgccgcggccgtcctcctcggcgccgccccggccggcgccgagatcatccacgtgggcaagagcccggccgccccgtcgtggacccaggaggagatcaacgcggtcctcgtcgaccgggcgcgcgccggtgcgcgcgtcgtccgcctcaagggcggcgatccctacatgctcgggcgaggcagcgaggaggcgcaggcctgcgccgcggcgggggtcgcgtgcaccgtcgtgcccggcgtcacctcggcgctggccgtacccgcctgtgccggcatcccggtcacccatcgtggtctcgcgcaggaagttgccatcgtctcggggcacctgccacccggccatccggagtcgacggtggactgggccgctctcgcggcctcccgggcgaccatcgtcatcctgatgggggtggcgcgtctcatggacatcgccgacgcgctgctcaccggcggtcgccccgaggcgacgccggtcgcggtcatcgagcgcggggcgaccccggcgcagcgggtcctgcggaccaccctggacgcgctggcgatcgacgcgatcgcggccggtgtgcggtctcccgcggtgatcgtggtcggagaggtcgcggcgcgccgggacgcgctggccttggaggcggggccgctcaccgggatccgggtactcgtggcccgtacccggccgcggccgggtctgctggctcgccggctgcggcagctgggcgcggatgcggtcgagaccgtcgttgcccggcccgcgccggtcgaggacgccggtgccgcgctggtggcggcgctgccgggagcgggcggcctgctgctggccgatgcggacgaggtcgccgccgtggtgaccctgctgcgtcgagccggcaccgacgtgcgggcgttggccggcctgactctcgtcgcggcccgcgaggacgccgcggaagcgcttgacggcctgggcctcgcctcggtgcccgtcgccgagctgtccacggatccgctgtccgcggatccatcgtcgaccggtcccgccggtcccgccggtccgaccggctcgtcgcgggtgctgatcgccggcgcggcggacccgccggacgcggtgtgttccctgcgccgggtgccgctgctcaccgacgtgaccgccgagccggatccccggatcgccgaggagctccggcatggcgacttcgacgtcgcggtcttcgcgtcgtccaccgccgcccgcggcaccgccgagatctacggacctctcccgcccgatctgctcatcgcggcgatgggtcgacgcagcgcgctggcctgcgcggcggcgggcatgcgggtggacatcgtgcccaccgaacccggggtccatccgctcgcggccgccgtcgcggacttcgtcgtcaccagccggtccaccggctcgcctgggggttga

SEQ ID NO: 85244 - protein, 508 aa, Frankia sp. CcI3
MTDGRSVGEVWLVGAGPGDPGLLTVRGREVLANADVVVTDRLAAAVLLGAAPAGAEIIHVGKSPAAPSWTQEEINAVLVDRARAGARVVRLKGGDPYMLGRGSEEAQACAAAGVACTVVPGVTSALAVPACAGIPVTHRGLAQEVAIVSGHLPPGHPESTVDWAALAASRATIVILMGVARLMDIADALLTGGRPEATPVAVIERGATPAQRVLRTTLDALAIDAIAAGVRSPAVIVVGEVAARRDALALEAGPLTGIRVLVARTRPRPGLLARRLRQLGADAVETVVARPAPVEDAGAALVAALPGAGGLLLADADEVAAVVTLLRRAGTDVRALAGLTLVAAREDAAEALDGLGLASVPVAELSTDPLSADPSSTGPAGPAGPTGSSRVLIAGAADPPDAVCSLRRVPLLTDVTAEPDPRIAEELRHGDFDVAVFASSTAARGTAEIYGPLPPDLLIAAMGRRSALACAAAGMRVDIVPTEPGVHPLAAAVADFVVTSRSTGSPGG

SEQ ID NO: 85245 - DNA, 831 bp, Frankia sp. CcI3
  CDS (1)..(831): transl_table=11
atgaccggtgcgcagacagccccgggcggatgggtggcccttgtcggtggcggtcccgggcgggcggatctgatcaccgtacgcggtctacggctgctccaagctgcggatgtcgtggtggtcgaccggctggctccccgtgaactgctggacgaggtgcgacccggtaccgagatcatcgatgcgggcaaggcgccgcacggtcacaacctgacccaggacgagatcaacgcggtggtcgtcgatcggggactgcgcgggttcggtgtcgtccggctcaagggcggcgatccgttcgtcttcggtcgtggcggcgaggaggctctggcctgcgccgcggccggcctgccctgcgagatcgtccccggggtgacgagcgccgtcgcggtccccgcgctcgccgggatcccggtgacccaccggggcatcacccaggacgtggccgtcgtcagcggccacatcgatccttcgcatcccggttccactgccgactgggacgcgctcgctaccggtccgggcacggtcgtcgtgctgatgggcgtcggggcactctttgagatcagtcacgagctggtgaagcggggccgccggccggagactccgaccgcggtgatccacgctggcgggacagccgatgagacgattatcatcgggcccctggtggatatcgcccagctcgcggccgaagccgcgatcagttctcccgcggtcatcgtaatcggagatgtggttacgctacgtgatcgacttgcaggcgtgataggtaccgtcggggcggtcccagcgtggccgggctcaggagacgtgacgggcggcgaggaccgccagtag

SEQ ID NO: 85246 - protein, 276 aa, Frankia sp. CcI3
MTGAQTAPGGWVALVGGGPGRADLITVRGLRLLQAADVVVVDRLAPRELLDEVRPGTEIIDAGKAPHGHNLTQDEINAVVVDRGLRGFGVVRLKGGDPFVFGRGGEEALACAAAGLPCEIVPGVTSAVAVPALAGIPVTHRGITQDVAVVSGHIDPSHPGSTADWDALATGPGTVVVLMGVGALFEISHELVKRGRRPETPTAVIHAGGTADETIIIGPLVDIAQLAAEAAISSPAVIVIGDVVTLRDRLAGVIGTVGAVPAWPGSGDVTGGEDRQ

SEQ ID NO: 85247 - DNA, 771 bp, Novosphingobium aromaticivorans DSM 12444
  CDS (1)..(771): transl_table=11
atgagcaattcttcttcgagaatcgggacagtccatctcgtgggcgcgggtccgggcgatgccgacctcctcacgctgcgcgcggcgcggctggtgatgaatgcccgcgtgctggtgcacgacgggctggtggatccttcgatcctggcgatggcgcccaagggttgccggatgatctccgtcgccaagagccggtcgcgccacaccatgaagcagggcgagatcaacgccctgctggtgcgcgaggcgctggcgggcaacgacgtggtacgtctcaagggcggcgatccgttcgtgttcgggcgcggcggagaggaagcggaagactgccttgcggcgggcgttccggttcaggtcgtgcccggagtgagcgccgcaatgggcgcggcggcagcggcgatgatccctctcacccaccgcgagagcgcgagcatcgtgagcttcgtcgcgggccagtgcaagggcctgaccgaccagaactgggccggccttgcaggggttggcaggacgctggtgatctatatgggcgtcgccacttcggaagcgattgccgaaaagctgatggcggacgggctggcgcccgagatgccggtggccgtggtggaaaatgccgcacggccgcagatgcgcgtgctgcgcgggacgctggcgggcctcgggtgcctggtggcggacaacaaggtcaggagccctgccctcatcgtgatcggtgaagtggcaggccggggagacatgatggaattgagacaagttttggaggccgcgcgatga

SEQ ID NO: 85248 - protein, 256 aa, Novosphingobium aromaticivorans DSM 12444
MSNSSSRIGTVHLVGAGPGDADLLTLRAARLVMNARVLVHDGLVDPSILAMAPKGCRMISVAKSRSRHTMKQGEINALLVREALAGNDVVRLKGGDPFVFGRGGEEAEDCLAAGVPVQVVPGVSAAMGAAAAAMIPLTHRESASIVSFVAGQCKGLTDQNWAGLAGVGRTLVIYMGVATSEAIAEKLMADGLAPEMPVAVVENAARPQMRVLRGTLAGLGCLVADNKVRSPALIVIGEVAGRGDMMELRQVLEAAR

SEQ ID NO: 85249 - DNA, 780 bp, Novosphingobium aromaticivorans DSM 12444
  CDS (1)..(780): transl_table=11
atgaacgactttccggcgggaatggtctggctggtcggtgcgggacccggcgatcccgaactgctgacgcgcaaggccgaacggctgatcggcagagccagcgtcgtgttcttcgatgctcttgtcggccgcgaggtgctcgacctggccagcccgggcgcgcggctcgtcgacgtgggaaagcgctccggccgccactcgaaggaccagcgcacgatcgatgccctgatcgtcgaggccgcgctctccggggaacgggtggtgcgcctgaagggcggcgatccgtcgatcttcggccgcgcaaccgaggaactggaagcgtgccgatccgcgggcgtggtggttgccgtctgtccgggcgtgacggcggccagcgcggcagctgccgggctctcgcgctcgctcaccctgcgcggactggcgcgcaagctggtcttcgttaccgcccatgcgcgcgcgggcgatacgctggaccttgactgggcagcgctggcggacccgggtgcgacgctggcgatctacatgggcaagtcagcagccggcgcgatcgctcgggggttgcaggggacgggcatggcgggcgaaacgccggtggcgctggtcgagaatgccagccttcccgacgaacgccggatcgtgacgcgactggacctgctggagcttgccgcgcggacgctgggcgacgggccggcgctgctcctgatcggggaagcaatgcgtacgcccggtcgccgtgccgtggctgcggccgcgcaagccatggaaagggagacgccgtga

SEQ ID NO: 85250 - protein, 259 aa, Novosphingobium aromaticivorans DSM 12444
MNDFPAGMVWLVGAGPGDPELLTRKAERLIGRASVVFFDALVGREVLDLASPGARLVDVGKRSGRHSKDQRTIDALIVEAALSGERVVRLKGGDPSIFGRATEELEACRSAGVVVAVCPGVTAASAAAAGLSRSLTLRGLARKLVFVTAHARAGDTLDLDWAALADPGATLAIYMGKSAAGAIARGLQGTGMAGETPVALVENASLPDERRIVTRLDLLELAARTLGDGPALLLIGEAMRTPGRRAVAAAAQAMERETP

SEQ ID NO: 85251 - DNA, 1515 bp, Desulfitobacterium hafniense Y51
  CDS (1)..(1515): transl_table=11
ttggacaaaggatatgtatatttggtcggtgccgggccaggggatccgaaactcattacagttaagggcgcggagtgcattgccaaggccgatgtgctgatctacgatcgcctggcttcacgccgtctcctgaccttagcccgtcccgattgtgaacttatttatgtagggaaatccccggaccggcacaccctgcgccaggaagagatcaacgctcttctggttcagaaaggcctggagggtaaaatagtgacgcgtttaaaggggggggacccttttgtttttggacgcggtggggaagaagcagaggatctgcttcaggcagggattccctttgatattgttcccggtgttacctcagcgatttccgtacctgcttatgcaggtatcccggtgactcatcgtgatttaacctcttcttttgctgtcataaccggtcatgaagaccccactaaaaacagctcggctttggcttgggaacatttagccacggctcacgggactttaatctttttgatgggcatggaaaatctgtccttgatcgccactaaacttatggaaaatggccgttcaccgtcaacccctgtgggaattatccaatgggggacccggccggaacaaagggtgctggtcggtgaacttcaaaatattgctcaattggtaaaggaagaaggctttaccaacccctcgatcatcatcgtgggagaggttgttcaactaagggagaaactgcaatggttcgaaaagagacctctcttcggtcagcggatcattgtgacccgggccaggcatcaagccagtgccttgtctcaaggcattgaagatctgggcggagaaccctgggagttcccggcgattgaaatcgtaccccccagggaccctcagcccctgattcaggccatcaagaacctgaagcggtttgaatggctgatctttaccagtgtcaacggcgtggaggaattctttaaagttctcatggagcagggcagggacgttcgtgatctggccggtatggatgtggtcgctatcggtccggccaccagagatgctttggagaagcgctgcctgaaggtctcttttgttcctgaagaatatcgtgctgaaaaaatcatcgaagggctggccagccgggttctgcccggtcaaagtgtgctcctggcccgggccgaagaagcccgggatattctgcccgaatccctgaaagctttaggggcggatgtctgggatgttcccacctatcgtacagttttggggaatgccaacaaggaggaattgctgaagttgctggaggagaaagctgtatcggctgttacctttaccagttcctccacagtacgcaatttcctgcaattaattgatggcaggcaaagccttttggatggagttaaactctattctatcggtcccattaccagcaaaacagctcaggaatttgggttgagcatttaccgggaagcaaagcagtatactattaaggggctgcttgagactctggcaagggggaacgaggaatga

SEQ ID NO: 85252 - protein, 504 aa, Desulfitobacterium hafniense Y51
MDKGYVYLVGAGPGDPKLITVKGAECIAKADVLIYDRLASRRLLTLARPDCELIYVGKSPDRHTLRQEEINALLVQKGLEGKIVTRLKGGDPFVFGRGGEEAEDLLQAGIPFDIVPGVTSAISVPAYAGIPVTHRDLTSSFAVITGHEDPTKNSSALAWEHLATAHGTLIFLMGMENLSLIATKLMENGRSPSTPVGIIQWGTRPEQRVLVGELQNIAQLVKEEGFTNPSIIIVGEVVQLREKLQWFEKRPLFGQRIIVTRARHQASALSQGIEDLGGEPWEFPAIEIVPPRDPQPLIQAIKNLKRFEWLIFTSVNGVEEFFKVLMEQGRDVRDLAGMDVVAIGPATRDALEKRCLKVSFVPEEYRAEKIIEGLASRVLPGQSVLLARAEEARDILPESLKALGADVWDVPTYRTVLGNANKEELLKLLEEKAVSAVTFTSSSTVRNFLQLIDGRQSLLDGVKLYSIGPITSKTAQEFGLSIYREAKQYTIKGLLETLARGNEE

SEQ ID NO: 85253 - DNA, 1377 bp, Saccharophagus degradans 2-40
  CDS (1)..(1377): transl_table=11
atggattatctacccctctttttcgatttaaaagctaagccatgcttaatagtaggtggcggaacaatagccacgcgtaaagcgcgcttattacataaagcgggcgctaagctacatgttgttgcgccaaaggtttcggaagagctagagaagcttgttgctgcgtctaatggcaaggtgtttaagcaagagtacgatcaaacgtttctagacgatgtgattttggttatctctgcaaccgatatcgatgcggtaaatagcgttgtggcggcagattgtcacgcaattaaattaccggtgaatgtggtcgatagccccgcattgtgcagcgtgataatgccggccattattgatcgttcgcccctaattattggggtaaccagcggcggcgaagcgcctgtgttggcgcgccgtgtgcgcagtatgctggaaagctccattcccgctgcgtatggccaattggcacagctggccagtaaatttcgtcagcgcgcaaaggacgtattcgaaaatggcgatttgcgtagacgcttttgggaaaatattttaaatggccccattgccgaaaaagtactgggcggtaacttggcagctgcagagcagttaattgaggcgcagttagatagtgcatcggtagaaaaaacgggtgaagtctatttagtgggggcaggcccaggcgacccagatttgcttacctttaaggcgctgcgattaatgcagcaagcagaagtggtgctttacgataggctggtatcggaacctattttagaaatgactcgccgcgatgccgagcgtatttatgtaggtaaaaagcgcgccgagcacgcggtaccgcagcaaaaaatcaaccaaatgctgctagagctggcacagcagggcaagcgcgtattgcgcttaaaaggcggcgacccgtttatttttggccgtggcggcgaagaaatagacctgctcgccgagcacaaaatcccattccaagtggtgcctggtattacggccgcgtctggctgcgccagctattctggtattcctcttacgcatcgcgattactcgcagtctgtacgttttattactggtcatttacaagaaggtaaagagaatttccgctggtctgagtttgtcgataaacagcaaacgttggtgttttacatgggtttagcggggctagaaactatctgcagtaagttaattgagtatggcaaatcgccaagtacaccagcggccttaattgagcgcggcacgctgcctgagcagcgcgtacatgtgtctgatttagctggactggcggcaaaaatagagggtttggacgttcatgcgccaactttactgattattggtgatgtagttcgctgtcacgaaaaattaaattggtataaataa

SEQ ID NO: 85254 - protein, 458 aa, Saccharophagus degradans 2-40
MDYLPLFFDLKAKPCLIVGGGTIATRKARLLHKAGAKLHVVAPKVSEELEKLVAASNGKVFKQEYDQTFLDDVILVISATDIDAVNSVVAADCHAIKLPVNVVDSPALCSVIMPAIIDRSPLIIGVTSGGEAPVLARRVRSMLESSIPAAYGQLAQLASKFRQRAKDVFENGDLRRRFWENILNGPIAEKVLGGNLAAAEQLIEAQLDSASVEKTGEVYLVGAGPGDPDLLTFKALRLMQQAEVVLYDRLVSEPILEMTRRDAERIYVGKKRAEHAVPQQKINQMLLELAQQGKRVLRLKGGDPFIFGRGGEEIDLLAEHKIPFQVVPGITAASGCASYSGIPLTHRDYSQSVRFITGHLQEGKENFRWSEFVDKQQTLVFYMGLAGLETICSKLIEYGKSPSTPAALIERGTLPEQRVHVSDLAGLAAKIEGLDVHAPTLLIIGDVVRCHEKLNWYK

SEQ ID NO: 85255 - DNA, 789 bp, Saccharophagus degradans 2-40
  CDS (1)..(789): transl_table=11
atgtctaattcaaaacctggcaaagtatggttagtaggcgccggccccggtgacccagatttactaactgtaaaagcgcttcgagttatacagaatgcagaccttgtgttattcgataacctcgtaagccaagaaattcgagctttattccctaaatctgtgccggccttttatgtaggtaagtgcaaagataatcacagcatcgcacaaaaagatttaaacagcttgctcgttaaaaaagcggccaagggtttgaatgttgtgcgcattaaaggcggcgaccccttcgtgtttggtcgtggcggcgaagagttacttacccttattaaagccggagtagatgccgaggttgtacctggtattacatctgcttctggttgcacaaccgctgcaggtataccgcttactcatcgcggtttggcgcaaggctgcacttttgtaacagcacatgcagaaacagagttatccgtagactggaacgcgctagcgcaaattaatcatacgcttgttttttacatgggtgtgagtcgcgcagaaatgatcgccagcaacctattaaaagccggcttaagtgccgcaacgccagtggccattatcgaaaatggctgtcgtgaaaaccagcgcgaagtaatcggccaaataaaagatttggtatcgctggtagcaaacaacaacgttcaatcgcctgctctcattgtagtaggtgaggttgtttctcttgcaaatgatttaaaccccgaattaagagctgctgtgtcagccgaaacactgaatcaacacgtggcctaa

SEQ ID NO: 85256 - protein, 262 aa, Saccharophagus degradans 2-40
MSNSKPGKVWLVGAGPGDPDLLTVKALRVIQNADLVLFDNLVSQEIRALFPKSVPAFYVGKCKDNHSIAQKDLNSLLVKKAAKGLNVVRIKGGDPFVFGRGGEELLTLIKAGVDAEVVPGITSASGCTTAAGIPLTHRGLAQGCTFVTAHAETELSVDWNALAQINHTLVFYMGVSRAEMIASNLLKAGLSAATPVAIIENGCRENQREVIGQIKDLVSLVANNNVQSPALIVVGEVVSLANDLNPELRAAVSAETLNQHVA

SEQ ID NO: 85257 - DNA, 834 bp, Methylobacillus flagellatus KT
  CDS (1)..(834): transl_table=11
atgaggcaacggaacagcggccaacgccaagttggtcaatccagacagtttttaaccaagtattgttggcacaggcacaccatggcaggaaaagtttatttgataggcgccgggcccggcgacccggagctcatgacactgaaggcagtcaaggccatgcagcaggcggaggttgtcctcgtggacgacctggtcaatcgcgacattctccggcatgcgccgcacgcccgcgtcatcgaggtcggtaagcgtggcggctgcaaatccacgccacaacacttcatcaaccgcctgatggcggcactggcagagcaaggccagaccgtggtcaggctgaaaggcggggaccccttcctgttcggccgcggcggcgaggaaatgctggagctgcgggccgcaggcatcgaagtggaggtgattcccggcgtcaccagcggtattgccgtgccggccaccctgggcatcccggtcacccatcgtgcctacacgcacggcgtgagcttcgtcaccggccacctgcaggatggtgagagcgggcagaattggcaggccctggcgcaaagcggcaccacgctggtgatctacatgggcatgaaacacctcgccagcatcactcgcgaactgctggcggccggcatggcgccggataccccggcagcggcgatccagcacggctccctcccccagcagcggcacatcaccagcacattgtccttgctggcgacggcagtgcagcaggcaggcctcgccagcccggccattatcgtggtcggcgacgtggtccggctggcccacggcaaggcgctgctgcaatctatttcaatcgcggcataa

SEQ ID NO: 85258 - protein, 277 aa, Methylobacillus flagellatus KT
MRQRNSGQRQVGQSRQFLTKYCWHRHTMAGKVYLIGAGPGDPELMTLKAVKAMQQAEVVLVDDLVNRDILRHAPHARVIEVGKRGGCKSTPQHFINRLMAALAEQGQTVVRLKGGDPFLFGRGGEEMLELRAAGIEVEVIPGVTSGIAVPATLGIPVTHRAYTHGVSFVTGHLQDGESGQNWQALAQSGTTLVIYMGMKHLASITRELLAAGMAPDTPAAAIQHGSLPQQRHITSTLSLLATAVQQAGLASPAIIVVGDVVRLAHGKALLQSISIAA

SEQ ID NO: 85259 - DNA, 1482 bp, Methylobacillus flagellatus KT
  CDS (1)..(1482): transl_table=11
atgtccgcttgtaacagcattgcctgtgtcgttatgcctgatcccgtattcagatggaaatggaatagaatgtcgcggatggaaaccctgcctatcttcatgaaactgcgtgatcgcccttgcctagtggtcggaggtggtgaaattgcgagtcgcaaagttagcctactggaaaaagccggtgccagcgttacagtggtgtcgcctgagttgcacccgacgttggcaaagtcgctggcggaggggcggatccggcatcttgcctctgtattcgagcctgcgcagctggatggtgcggtactggtgatcgccgcgaccgatgatgccgaggtgaaccgtgcggtgtcacgggaggcacaggcccgcaatattcctgtgaatgtggtggatgcacctgagctgtgtacattcatcgtgccttcgatcgtggaccgatccccattgctggtggccgtatccagcggcgggacggcgccggtgctggcgcgcatgctgcgtaccaggattgaaacgctgatccccgcgacttatggccgcttggctgcctttgccgccgagttccgtgaggcagtgaagcagcgcttcagtaccggacagcaacggcgaattttctgggaggatgtattccagggggtgataggcgagcaagtgttgtccggccaggaagaggcggcaaggcatgccatgcagcaagtgctgtcggggcgtggcgagttgcaccatggcgaagtgtaccttgtcggtggtggtccgggtgacccggacttgctgactttccgcgcattgcgcctgatgcagcaggctgatgtatgcgtctatgacaagctcgtgagcaaagaggtgatggcgctggtgcggcgggatgccgagctgatttatgtgggcaagtcgcgagatcagcataccttgccgcaggaagacatcaatcaattgctggtgcgccttgccaaggaaggcaagcgagtactacgcctgaagggcggagatccgtttattttcgggcgcggcggcgaagagatcgagaccttgatggaaaatggcatcccattccaggtggtgcctggcattactgctgcaaacggggtgtccagctatgccggtattccgctcacgcatcgggattacgctcagtcgtgcctgttcacgaccggacatttgaaagacggctcggtcaatctggactgggatgcgctggtgcgtcctaaccagacggttgtgatttatatggggttggtgggcttgcccgagatatgcaggcagatggtggctcatggtgcccccgaaaatctgccgattgccattgtccagcaaggaaccacgcagcggcagagagtcgtggagggtacattggcaacattgccagggctggtggagcgtgcgggtctgcgcgctccctgcctgattattgtcggccaggttgtgcgtttacgcgaaaagcttgcttggtttgcgccgtcacctgaggttgtatcggcagggtaa

SEQ ID NO: 85260 - protein, 493 aa, Methylobacillus flagellatus KT
MSACNSIACVVMPDPVFRWKWNRMSRMETLPIFMKLRDRPCLVVGGGEIASRKVSLLEKAGASVTVVSPELHPTLAKSLAEGRIRHLASVFEPAQLDGAVLVIAATDDAEVNRAVSREAQARNIPVNVVDAPELCTFIVPSIVDRSPLLVAVSSGGTAPVLARMLRTRIETLIPATYGRLAAFAAEFREAVKQRFSTGQQRRIFWEDVFQGVIGEQVLSGQEEAARHAMQQVLSGRGELHHGEVYLVGGGPGDPDLLTFRALRLMQQADVCVYDKLVSKEVMALVRRDAELIYVGKSRDQHTLPQEDINQLLVRLAKEGKRVLRLKGGDPFIFGRGGEEIETLMENGIPFQVVPGITAANGVSSYAGIPLTHRDYAQSCLFTTGHLKDGSVNLDWDALVRPNQTVVIYMGLVGLPEICRQMVAHGAPENLPIAIVQQGTTQRQRVVEGTLATLPGLVERAGLRAPCLIIVGQVVRLREKLAWFAPSPEVVSAG

SEQ ID NO: 85261 - DNA, 795 bp, Burkholderia xenovorans LB400
  CDS (1)..(795): transl_table=11
atggcgcccgccatgcacgtcgcgatgacccgcgcctggctgatcggcgccggtcccggcgacgtcgaactcatgacgctcaaggccacccgtgcattggcgcaagccgacgtagtgctggtcgacgatctggtgaatcccgacgtactccagttcgcgcgcgccgacgcgcgcatcgtccatgtcggcaaacgcggcggacatccgtccacgccgcaggaaggcatcgtcgcgcaattgctcgagcacgtgcgggccgggcgcagcgtcgcgcgcctgaaaggcggcgatccgttcgtgttcggccgtggcggcgaagaacagcaggcgctgcatgcggcgggcatcgaggtggaagtcatcaacggcattacggcgggaatcgcggcgcccgcggcaatcggcattccggtcacgcatcgcgatcacgcgcaaggcgtggtgttcgtcaccgggcacggcgcgggcagcgccgagccggcttgggccgcgctggtggccacgcgcatgacactcgtgatctacatgggcatgcggcggctgggcgatatagtcgacgcgttgctcgcggccggcatgagcgccgaaacgccgtgcgcggcgatcgaatcggcgacccgtcccgggcaacgccacgtactcgcgcggctcggtgagtttgccgggagcgtctcgcgtgcgggactcggctcgccggcgatcgtggtaatcggcggtgtggcgtcgctcgcattggcgcgcgacgctgcgtatgccgacgccgcaacgttgccggcaaacggagacgtagcatga

SEQ ID NO: 85262 - protein, 264 aa, Burkholderia xenovorans LB400
MAPAMHVAMTRAWLIGAGPGDVELMTLKATRALAQADVVLVDDLVNPDVLQFARADARIVHVGKRGGHPSTPQEGIVAQLLEHVRAGRSVARLKGGDPFVFGRGGEEQQALHAAGIEVEVINGITAGIAAPAAIGIPVTHRDHAQGVVFVTGHGAGSAEPAWAALVATRMTLVIYMGMRRLGDIVDALLAAGMSAETPCAAIESATRPGQRHVLARLGEFAGSVSRAGLGSPAIVVIGGVASLALARDAAYADAATLPANGDVA

SEQ ID NO: 85263 - DNA, 756 bp, Burkholderia xenovorans LB400
  CDS (1)..(756): transl_table=11
atgggtaaggtttatctgatcggcgcaggcccgggtgctgcggacctgattacggtgcgtggcgcgcggctgcttgggttggccgatgtcgtgctgcacgatgcgctggtcgagccggctatgttggactatgcgccttcgcatgcgcggcggattgctgttgggaagcgttgtgggcagttgtcgaccgcgcagcagttcatcaataagcagattgtggatgctgctttggagcatgacgtggtcgtgcgccttaaaggcggcgatccgatgttgttcgggcgcgctgatgaggaaatgcgggcgctcgaggctgcgggcatcgagtatgaggttgtgcctgggattacggcggctctcgcgagcgctgcctctttgaaacggtcgctgacgttgcggggtgtgtcgcgcagcgttgcgttggctacttttagtcgggcgcctgggtctgaggagattcgcgagcaggttaatgcggattctctggtgttttatatgggccgggatagtggggttgagattgcgcagcagttgattgaggctgggcggtctgttgccacgcctgtggctattgttgaggcttgttctactgcgcgggagcggatgctttcgcttactcttgaagaactggccgccggcgatgcgcagaagtgggtcgatgcttcgcagcctagtttgctgatgattggggaggcttttgctgcgcggcaaagtggggtggttcgctccgcgggtgggttgttggtcgcggcttga

SEQ ID NO: 85264 - protein, 251 aa, Burkholderia xenovorans LB400
MGKVYLIGAGPGAADLITVRGARLLGLADVVLHDALVEPAMLDYAPSHARRIAVGKRCGQLSTAQQFINKQIVDAALEHDVVVRLKGGDPMLFGRADEEMRALEAAGIEYEVVPGITAALASAASLKRSLTLRGVSRSVALATFSRAPGSEEIREQVNADSLVFYMGRDSGVEIAQQLIEAGRSVATPVAIVEACSTARERMLSLTLEELAAGDAQKWVDASQPSLLMIGEAFAARQSGVVRSAGGLLVAA

SEQ ID NO: 85265 - DNA, 816 bp, Burkholderia xenovorans LB400
  CDS (1)..(816): transl_table=11
atgaatccgaacaccggcaaggtcaccttattgagcgcaggcccgggcgatctcgatctgctcacgctgaaagccgcgaaagcgctggcggccgccgacgtcgtgctgctcgacgacctcgcgaatcccgagatcgtgacgctggcgccgcaagcacgggtgatccgcgtcggcaagcgcggcggttgccggtctacgccgcaagcgttcatcgaacgcctgatgcggtgctatgcgctcaagggcttgcacgtggttcgcgtgaagggcggcgaagcgctgctgttcgggcgtgccggcgaggagctcgcagtattgcgcggcgccggtattccggtggaaatcgtcaacggcatctcgtcggggttcgcggccgccgcggggctcggtatttcgctcacgcatcgccgccattgccacggcgtgagtttcgtcaccgcgcatacggaagatcatggcgagcccgattgggccgcactggctgcgacccgcaccacgctggccatctatatggggatgcggcgcatcggcagtattgcggccgcgttgctcgcgagcctgccggccgacacgccggccgccgtcgtgcaatgggcggggggcggcaacgagcggcgcctgatgagccgcctcgatcgtcttgccgaggatgcggtgagcgcgggcttcggcagccctgcggttattctggtgggcagtgcgatcggcgagagcattgaacgcgcatggggagaagacagcgcagggcgcgatgaaaaggcggccatgcaggccgatatgcggatcgcgcgagaagcaattgcacaggccgcgtga

SEQ ID NO: 85266 - protein, 271 aa, Burkholderia xenovorans LB400
MNPNTGKVTLLSAGPGDLDLLTLKAAKALAAADVVLLDDLANPEIVTLAPQARVIRVGKRGGCRSTPQAFIERLMRCYALKGLHVVRVKGGEALLFGRAGEELAVLRGAGIPVEIVNGISSGFAAAAGLGISLTHRRHCHGVSFVTAHTEDHGEPDWAALAATRTTLAIYMGMRRIGSIAAALLASLPADTPAAVVQWAGGGNERRLMSRLDRLAEDAVSAGFGSPAVILVGSAIGESIERAWGEDSAGRDEKAAMQADMRIAREAIAQAA

SEQ ID NO: 85267 - DNA, 753 bp, Methanococcoides burtonii DSM 6242
  CDS (1)..(753): transl_table=11
atggctcaacaatacggaaaagtatatcttgtaggctccggacccggagaccctgaactgatgaccttgaaagcacgcagacttcttgacactgctgatgttatcatcttcgaccagcttccaggggaaaagatactggcttccatgcctgaggctgcagagaagatcgatgcaggtaaacatgcaggggaccacactctgacccagagtgagatcaacgatgctatcgtggaaaaagcaaaggaaggcaagattgtggtccgtctcaaaggcggagatccttatatgttcggacgtggcggcgaagaggctgaagaactggtgaaagcaggtatcgagttcgagatagttccgggcatcacatctgctcttgcagctacggcttatgctggtattcctgttacacacagggaccatgcttcaatggtcacttttataacaggtcatgaagaccctacaaaagaggaaactgcccttgactggaagacacttgctgcttttggaggtaccatcgttatcttcatgggtgtcaagatgctcgaacgtaacatgggcgagctgatgagatacggaaagaaccccaagaccccggttgcaatggtagagaggggaacacgcccggatcagcgcgtgaccattggtactgtcgagaccatcgcaaagatctcaaaggatgcaggggtaaaggctccggcacttactgttatcggcgatgttgtcaagcttcatgagatattgggttcccagatctga

SEQ ID NO: 85268 - protein, 250 aa, Methanococcoides burtonii DSM 6242
MAQQYGKVYLVGSGPGDPELMTLKARRLLDTADVIIFDQLPGEKILASMPEAAEKIDAGKHAGDHTLTQSEINDAIVEKAKEGKIVVRLKGGDPYMFGRGGEEAEELVKAGIEFEIVPGITSALAATAYAGIPVTHRDHASMVTFITGHEDPTKEETALDWKTLAAFGGTIVIFMGVKMLERNMGELMRYGKNPKTPVAMVERGTRPDQRVTIGTVETIAKISKDAGVKAPALTVIGDVVKLHEILGSQI

SEQ ID NO: 85269 - DNA, 765 bp, Ralstonia metallidurans CH34
  CDS (1)..(765): transl_table=11
atggacaggcagcacggcaaggccacgggcaaggtgtacctgattggtgcgggtcccggcgcggccgatctcattacggtgcgcggcgcacgactgttgggcgaggcgcaggtcgtgctgcacgatgcactcgtatcgcccgagatgctggcgtggtgtccgcaggccgaactggtcgaggtgggcaagcgctgcggccagcgttccacggcgcagctcttcatcaatcgccagatcgtcgacctggccacaaagcacgagcgcgtggtgcggctcaagggcggcgacccgatgctgtttggccgcgccgacgaggagttgcaggcgctggaagcggccggtatcgagtacgaggtggtgcccggcatcaccgcggcgctcgcggcggccagcgcgatcggccggcccttgaccaagcgtggtgtatcgcgcagcgtggcgttcgctacccaggccaaggcggccgatgccgtcgacgtggaggccgatgtgaaggcagacacgatcatctactacatgggccgtgatcaggcggcgaacattgcgacgcagttgatcgctcgcggcaagccggcgtcgacacccgcatgggtagtggaagccgctacgacgccgcgccagcgcagccaccagttcacgctgggccagatggcggcaggcgaggcggcacgctggatggacccggtgcagcccagcctgctgatgatcggcgaggccctggggagcagggcgacggagtacgtggaagccgaacgcgccgcgtga

SEQ ID NO: 85270 - protein, 254 aa, Ralstonia metallidurans CH34
MDRQHGKATGKVYLIGAGPGAADLITVRGARLLGEAQVVLHDALVSPEMLAWCPQAELVEVGKRCGQRSTAQLFINRQIVDLATKHERVVRLKGGDPMLFGRADEELQALEAAGIEYEVVPGITAALAAASAIGRPLTKRGVSRSVAFATQAKAADAVDVEADVKADTIIYYMGRDQAANIATQLIARGKPASTPAWVVEAATTPRQRSHQFTLGQMAAGEAARWMDPVQPSLLMIGEALGSRATEYVEAERAA

SEQ ID NO: 85271 - DNA, 858 bp, Ralstonia metallidurans CH34
  CDS (1)..(858): transl_table=11
atgcaaacgaccggaaaggtctggctggttggggtgggcccgggcgatccggaactcgccaccatgaaggcagtcagggcgctacgtgaagcggatgtctggctagtggacgatctcgtgccggaggccatgctgtgctatgcgaaccccgggacgcaaatcatctcggtcggcaagcgtggcggccgctgttcggtgagtcaatccagcattcacgagcaggcgctcgagcacgcgcaggctggccggtgcgtggcgcgtgtcaaaggcggcgacccattgttgttcggtcgcggcggcgaggaagcagagttcctgcgcgggcacggcatcgaagtggaaattgtcaacggcatcagcagtggcatggctgctgcgcaggcgcttggcattgcgctgacccatcgtcagcattgccacggtgtgaccttcgttaccgcgcatacgcgtgacgatggcgatcccgattgggccgcattggtcggcagccggacgacgctcgtcatctacatggggatgagccgtcttgccgccattcgcgacgccttgctgcaagcgggtatgcggtcggaaatgccggttgcggtggtgatgcatgctagccgtggggatgagaagcgttgggttggcagcctggccacattgaccgaggctgcggatgccgggcttgccagcccggcggtcattctggttggggaagtcgttgatatccccaaccctgcttcattgacggaccagcacgccttcggcgaccttgccgctgggctgccgtccaaacagcccgagcacgacctgcagcgagaacgacagcgcgcccaccaggaagaccacatcaccgaaggtacgcatccagcgtag

SEQ ID NO: 85272 - protein, 285 aa, Ralstonia metallidurans CH34
MQTTGKVWLVGVGPGDPELATMKAVRALREADVWLVDDLVPEAMLCYANPGTQIISVGKRGGRCSVSQSSIHEQALEHAQAGRCVARVKGGDPLLFGRGGEEAEFLRGHGIEVEIVNGISSGMAAAQALGIALTHRQHCHGVTFVTAHTRDDGDPDWAALVGSRTTLVIYMGMSRLAAIRDALLQAGMRSEMPVAVVMHASRGDEKRWVGSLATLTEAADAGLASPAVILVGEVVDIPNPASLTDQHAFGDLAAGLPSKQPEHDLQRERQRAHQEDHITEGTHPA

SEQ ID NO: 85273 - DNA, 774 bp, Acidobacteria bacterium Ellin345
  CDS (1)..(774): transl_table=11
atgggtaaggtctacctcgtcggcgcgggtcctggcgatccagagctgctgacggtcaaagcagtacgacttctcgcgaacgcggatgtcgtgctacacgacgcactcgtttcccctgcgattctggcactcgtcaatccgaaagcgacggttttcgatatcgggaagcgttgcggcgccaagctgctgacgcaagcggagatcaacgcactactcattgcctacgtgcaaacgtcaggaactgttattcgccttaagggtggcgatccatccatcttcggccgctccggcgaagaactctcagcgctcaacgaagcgggcgtcgagttcgaaatcgtgcccggcatcactactgccattgccgctgcagcctcagctcagatttctctgaccgatcgccgctacgcctctgctatcacgctcatgacggctcaccgcgggcgcgacgaagacgccgtcgagtgggaccgcctcgtcacgtcaggagcaacgatcgtgatctacatgccgggcaaggactatcgcgacatcagtgtgcaactacagcgcgccggcctcgcttccgacacaccctgcgttgtggtttcccacgcatcgcagcaagatgagcaaaaactctacacatccctcgatgcgctatcccgcgcgaccgctttgcccgcgccatcgctgctcattgtgggccgttgcgccagcgccctggaacgcgtcgaaccgcaattcttatcccttgggacccatcgcatcaacggatttgaaaaggagattttctga

SEQ ID NO: 85274 - protein, 257 aa, Acidobacteria bacterium Ellin345
MGKVYLVGAGPGDPELLTVKAVRLLANADVVLHDALVSPAILALVNPKATVFDIGKRCGAKLLTQAEINALLIAYVQTSGTVIRLKGGDPSIFGRSGEELSALNEAGVEFEIVPGITTAIAAAASAQISLTDRRYASAITLMTAHRGRDEDAVEWDRLVTSGATIVIYMPGKDYRDISVQLQRAGLASDTPCVVVSHASQQDEQKLYTSLDALSRATALPAPSLLIVGRCASALERVEPQFLSLGTHRINGFEKEIF

SEQ ID NO: 85275 - DNA, 738 bp, Silicibacter sp. TM1040
  CDS (1)..(738): transl_table=11
atgagcgggtttgtcagttttgtgtcctccgggccgggcgatcccgagcttttgaccctcaaggcggtcaagcggctggaggcggctgacgcggtgctgtttgatgatctgtcgtccgggccgatcctttcccatgcgcgcgcggatgcggatatggttggcgtcggaaaacgcgccgggcgcccctcgcccaagcaagaccacgtcagccagctcttggtggaatacgcccagtccggcgcccatgtggtgcgtctgaaatcgggcgattcaggtgtgtttgggcgcctcgaagaagaaatggtggcgctgcgcgccgctggcatcaaatacgagatcattcccggtgtcaccgccgcctcggcagccgctgcggcggcgggtattccgctcacgcggcggctgacggcacggcgcctgcagtttatcacgggccatgacgtgaccggcggcctgcccgagcatatgaacctcaccgctcttgcagaccccgaggccacaaccgtggtctacatgggcaaacgcacctttgcgactttgcttgagctgcttcttgaggcaggcctgccagagaccacaccggcgctggtggcgcttggggtctcgacccccgcccaagagctgcaccgggtgacagtggctgccctgccggacctcctggaggccatcatctcccccgcgccagtgttgatcctttatggccccttggccgacgatgacgcgctcgtgtcgcaatga

SEQ ID NO: 85276 - protein, 245 aa, Silicibacter sp. TM1040
MSGFVSFVSSGPGDPELLTLKAVKRLEAADAVLFDDLSSGPILSHARADADMVGVGKRAGRPSPKQDHVSQLLVEYAQSGAHVVRLKSGDSGVFGRLEEEMVALRAAGIKYEIIPGVTAASAAAAAAGIPLTRRLTARRLQFITGHDVTGGLPEHMNLTALADPEATTVVYMGKRTFATLLELLLEAGLPETTPALVALGVSTPAQELHRVTVAALPDLLEAIISPAPVLILYGPLADDDALVSQ

SEQ ID NO: 85277 - DNA, 1542 bp, Rubrobacter xylanophilus DSM 9941
  CDS (1)..(1542): transl_table=11
gtgatctacctggtcggcagcgggccgggcgaccccgggctgatcaccgccaaggggctcaggctcctcgaggaggccgacgccgtggtctacgaccggctcgcgccgggggcgctgctgcggcgcgcccggccggacgccgagctcttctacgtcggcaagcggcccggcgacgaccaggcgatgaagcaggacgagatcaacgcgctgctcgtccggctcggcagggagggcaggcgggtggtgcggctcaagggcggcgacccctacgtcttcggccggggcggggaggaggcgctggcgctgctccgggccggcgtccccttcgaggtagtgcccggggtgaccagcgggatcgccgcccccgcctacgccgggatccccgtgacccaccgcgccctcgcctcgagcgtggccttcgtcaccggccacgaggacccctccaagggccggacggacgtggactgggagcgggtggcccgcggggcggacaccctggtgctgtacatgggggtggggcggctcggcgagatagcctcctcgctcgtcgccgccgggcgcgacccggccacccccgcggcggtgatccggtgggggacggtccccgagcagcggaccgtcacgggcaccctcgcggacatcgcgcagagggtggcggaggccgggatacggccgccggcggtgaccgtcgtcggggaggtggtccggctgcgggaggaggggctcgcctggtacgaggcgcggccgctgttcgggcggcgggtggtggtcacccgggcccgggcgcaggcgggggagctctcgcggcggctggaggagctgggcgccgccgtggtggagttcccgaccatcgagatacggccccccagggacttcgggccgctggacgaggcgatcaggggcctcgactccttcgactggctggtcttcaccagcgtgaacggggtcgaggcgtttctggagcggctggcctctcacgggctcgacgtgcgggcgatcccgcggggggccaggatcgccgccatcgggcccgccacggcgggccgggtgcgggaggcggggctgcgggtggacgtggtcccgagggagtaccgcgccgaggcgctgctggaggagatctcgggggagccgctgcgtggcaggcgcgtcctgatcccgcgggccgcccgggcgcgggaggtgctccccgagcggctgcgggaggccggcgcggaggtctccgtcccgccggcctacgagacggtcccctccgccgaggggcgggaggagctcgcgcgcgggctccaggccggggaggtggactgcgtgaccttcacggcgagctccaccgtcgagaacttcgtggcggctttcggcgcgcgggaggccgcccgcctcctggccgggacccgggtggcctgcatcggccccataaccgccgccgcggcccgggagcgcggcctccgggtagacgtcgaggccggggagtacactatagaggggttggtgagggcggtggccgggctcttcgccgcccgcgcgccgcaagagagggtagggtga

SEQ ID NO: 85278 - protein, 513 aa, Rubrobacter xylanophilus DSM 9941
MIYLVGSGPGDPGLITAKGLRLLEEADAVVYDRLAPGALLRRARPDAELFYVGKRPGDDQAMKQDEINALLVRLGREGRRVVRLKGGDPYVFGRGGEEALALLRAGVPFEVVPGVTSGIAAPAYAGIPVTHRALASSVAFVTGHEDPSKGRTDVDWERVARGADTLVLYMGVGRLGEIASSLVAAGRDPATPAAVIRWGTVPEQRTVTGTLADIAQRVAEAGIRPPAVTVVGEVVRLREEGLAWYEARPLFGRRVVVTRARAQAGELSRRLEELGAAVVEFPTIEIRPPRDFGPLDEAIRGLDSFDWLVFTSVNGVEAFLERLASHGLDVRAIPRGARIAAIGPATAGRVREAGLRVDVVPREYRAEALLEEISGEPLRGRRVLIPRAARAREVLPERLREAGAEVSVPPAYETVPSAEGREELARGLQAGEVDCVTFTASSTVENFVAAFGAREAARLLAGTRVACIGPITAAAARERGLRVDVEAGEYTIEGLVRAVAGLFAARAPQERVG

SEQ ID NO: 85279 - DNA, 1443 bp, Mesorhizobium sp. BNC1
  CDS (1)..(1443): transl_table=11
atggctggcgaaacggcaaagctgaacgcatttcccgttttcttacgggtggaaggacgacgcgtcgtcatcgtcggttccggcggcgaggctttggctaaggcgcggctgatggcgcagtcaagcgctgaaatcctgattgtcgccgaaaagccggagccagcgcttgcagcctgggctgcggagaacggcgcggctcttacccgctcctcatacaaccccgcccttctcgacggtgccgtccttgtcttcgccgccacgggcgatgaagaggccgatcgcgccgtggtggccgatgcgcgggaacggtccatcccggtcaatgccgtggatcggccggaactttgcgatttcttcaccccggccctggtcaaccgtgcgcctgtggctgtcgctatcggcacggaaggtgcaggcccggtgctggcgcagatgatccgcgcccgcatcgatcagatgctttcgccctcgctcgggcggcttgctcttcttgccgcttcctaccgcgcggcggttgagcaccgccttgccaagggcgtcgtgcgccgtcgcttctggaaagctttctttaccggcggtccggcatgcgccgtggaggcaggcaatgcggatcgcgccgcgtgggcagcagaaatgctgctggattcacagggcgttgagcccggccacgtggcgctggtgggtgccggcccaggcgcggaggatctgctcacgctgcgcgcccagcgccttttgatggaagccgatgtgatcgtgcatgacgcgctggtgcccgaggcggtcgtcgccatggggcggcgcgatgcggagcgcatcgcggcaggaaagcgcaagggttgccactccaagacccaggccgagatcaacgagctccttgtcgcgcttgggcgtaatggcaagcgtgtcgtgcggctgaaatcgggcgatccgctcatcttcggccgtgcgggtgaggagatagccgcgctgcgtgaggccggcatttcctatgaagtcgtaccgggcgttactgccgctttcgccgccgccgccgatttcgagctgccgctgacgctgcgtggcatagcctcgtcgctcgtcttcacaaccggccacgatctgaaagggcaggcgctgccggattgggccaagctcgccatcgatggcgcgacggtcgctgtctatatgggtcgctcgaccgctgccgaggtagcgcagcatctgcaggaagctggcctgtcgccggataccgcggtggctgtggttgagaacgccagcctcggaaaccggcgcctctttcacggcacgctttccgatttgccggcgcttggaaggcgcgctgatctttccggcccggtgctcacgatcataggtgatgccgtcgctggcgcgaatctggcgcgctcggaaccgctcgctgcttaccacgagcacggcgcacgcactccggcagaagaggaatga

SEQ ID NO: 85280 - protein, 480 aa, Mesorhizobium sp. BNC1
MAGETAKLNAFPVFLRVEGRRVVIVGSGGEALAKARLMAQSSAEILIVAEKPEPALAAWAAENGAALTRSSYNPALLDGAVLVFAATGDEEADRAVVADARERSIPVNAVDRPELCDFFTPALVNRAPVAVAIGTEGAGPVLAQMIRARIDQMLSPSLGRLALLAASYRAAVEHRLAKGVVRRRFWKAFFTGGPACAVEAGNADRAAWAAEMLLDSQGVEPGHVALVGAGPGAEDLLTLRAQRLLMEADVIVHDALVPEAVVAMGRRDAERIAAGKRKGCHSKTQAEINELLVALGRNGKRVVRLKSGDPLIFGRAGEEIAALREAGISYEVVPGVTAAFAAAADFELPLTLRGIASSLVFTTGHDLKGQALPDWAKLAIDGATVAVYMGRSTAAEVAQHLQEAGLSPDTAVAVVENASLGNRRLFHGTLSDLPALGRRADLSGPVLTIIGDAVAGANLARSEPLAAYHEHGARTPAEEE

SEQ ID NO: 85281 - DNA, 771 bp, Cytophaga hutchinsonii ATCC 33406
  CDS (1)..(771): transl_table=11
atgcatgaaccacgggtaacattggtaggtgccggtcccggcgatccggaattgattaccttaaaaggcatgcgtgcattatcgtctgctgatgtagttttgtacgatgcgttaatacacaaagagattctgagctttgcaccgatcacagccatacaggtttttgtcgggaagaaaaaaggtgtatgtcagtttccgcaggatgaaatcaatgcgttgttggtagagtatgcgttgaagcatgggcatgtcgtgcgtttaaaaggaggggatccgtttatcttcggaagaggccacgaagagctgctgtatgtagaatcatttaacattccaacagaagtaattcccggaatttccagcagcattgctgtgccggagctacagcgcatcccgcttacacgcagaggcgtgaatgatagtttttgggtattgaccggtactacccgcgatcaccagctttccgcagatatacagattgcagctaaatccaatgccactgttgttgtgttgatgggcatgaccaaacttgccgatattattcaactctttattgctgaaggaaaatcaaaacttcccgttgcaatcattcataacggtaccatgccagacgaaacgtatgtgctgggtacggttgaaacaattgttgatattgttgcacgatcgggtatttcatcaccggcagtcattgtaattggtgaagtagttcgtctgcatccagagtatgtgctggatgaagtacagaagattgtagggccggaaaaagaaagctga

SEQ ID NO: 85282 - protein, 256 aa, Cytophaga hutchinsonii ATCC 33406
MHEPRVTLVGAGPGDPELITLKGMRALSSADVVLYDALIHKEILSFAPITAIQVFVGKKKGVCQFPQDEINALLVEYALKHGHVVRLKGGDPFIFGRGHEELLYVESFNIPTEVIPGISSSIAVPELQRIPLTRRGVNDSFWVLTGTTRDHQLSADIQIAAKSNATVVVLMGMTKLADIIQLFIAEGKSKLPVAIIHNGTMPDETYVLGTVETIVDIVARSGISSPAVIVIGEVVRLHPEYVLDEVQKIVGPEKES

SEQ ID NO: 85283 - DNA, 1479 bp, Clostridium perfringens ATCC 13124
  CDS (1)..(1479): transl_table=11
atgagtaaaaaagcatatataataggggcaggtcctggagatgaagagttattaacacttaaagcaataaatgcattacaaaaatgcacagctgtcttatatgatagattagttgggaacaatatacttaattatttaaatgatgactgtgagatttactattgtggaaaagagccaggatgccattataaaacacaggaagagataaatgaaagtatagttgagcttgctaaaaaaggtcatgttgttggtagagtaaaaggaggagatccatatgtttttggaagaggtggagaagaagtattagccttagtagaagaaaacataccttttgaagttattccaggggttacttcacctatttctgttttgaattatgcaggaataccaataacacatagaggattagcacagagttttcatattgtaacaggaatgtcagcaagaactttaaatgtaaattggaaagctttatcaaaagaaaatggaaccttagtatttatgatgggactttcaaatttagagacaattgttgagaaacttttagaaaatggtaaagatatagaaactccttgtggagtagtaatgagaggaacaacttcaaagcaaagaaaggttattggaacattagaaaatatatgtaaaaaggttagagaagctaagttagagtcaccttgtataatagttgttggagatgttgtctcattaaatgaaaaactttcatggtatgaaaatttacctctatttggagctaatatttgcttaacaagatctaaggaacaatctaaagagattaagtggaaattaaaagagttaggtgcagaagtaacagaaataaactctataaaaataaaagaaactgcttataatttagatgaatatattaatactttagaaaaatatgatcatatagtatttacttcagtaaatgctgttaatgtattctttgattatttagtaaaaaatagagttgatataagaaaaataaaagcagattttgctgtactaggaaaagcaactaaaaaagctttaatagctagagggattgtgccaagcataatggctcattcatttacagcagaaggtttatttgaagttttaaaagataatattaaagaaggagaagaggtattaattccatgttcttctttaagcagagaatatttgtttgataatttagcttctttaggagcaaaatgtcatagagttaatatttatgatactatatgcggagatgttaaaaatccaagagctttcaaggaagttgatatggtattatacacaagtccttcaacggttaaaaacatgattgatatgattggacttgaagctcttaaagagaaagtaagcatagctataggacctataactttaaaagctttaaatgaaagtggaattgaaggaaaaatgtgcaaaacacattgtggagatggatttttaagtgaaattgagggtatatggcaagaggttaaaaaataa

SEQ ID NO: 85284 - protein, 492 aa, Clostridium perfringens ATCC 13124
MSKKAYIIGAGPGDEELLTLKAINALQKCTAVLYDRLVGNNILNYLNDDCEIYYCGKEPGCHYKTQEEINESIVELAKKGHVVGRVKGGDPYVFGRGGEEVLALVEENIPFEVIPGVTSPISVLNYAGIPITHRGLAQSFHIVTGMSARTLNVNWKALSKENGTLVFMMGLSNLETIVEKLLENGKDIETPCGVVMRGTTSKQRKVIGTLENICKKVREAKLESPCIIVVGDVVSLNEKLSWYENLPLFGANICLTRSKEQSKEIKWKLKELGAEVTEINSIKIKETAYNLDEYINTLEKYDHIVFTSVNAVNVFFDYLVKNRVDIRKIKADFAVLGKATKKALIARGIVPSIMAHSFTAEGLFEVLKDNIKEGEEVLIPCSSLSREYLFDNLASLGAKCHRVNIYDTICGDVKNPRAFKEVDMVLYTSPSTVKNMIDMIGLEALKEKVSIAIGPITLKALNESGIEGKMCKTHCGDGFLSEIEGIWQEVKK

SEQ ID NO: 85285 - DNA, 1227 bp, Rhodococcus sp. RHA1
  CDS (1)..(1227): transl_table=11
gtgactgctgccaccggagacgagaccaactacctggtcggactcaatttggccgatcgtcgtgtggtcgtggtcggtggcggaacagtggcacagcgcaggctcgggctcctgatcgcatcgggtgcgcgggtgcacctgatcagccgcgcggtcacgccggcggtcgagggaatggccaccgcgggacaaatcacactggaacttcgcgaataccgggacggcgatctggccgacgcctggtacgccatcgcgtgcacggacgaaccggacaccaacgcggcgatcgtcgccgaggccgagcggaatcgtgtcttctgcgtccgcgccgacaacgcccgctacggcaccgccgtcacaccggcgagcgcaagctacgacgggatgagcatcggcgtgctggcgggcggcgaccaccgccggtccgccgcagtgcgcaccgccctcgtcgagggcctgcaatccggtgcggtcgccgacaccgccgaccacccggcggccggtgtcgcactggtgggcggcggcccgggcgaccccgatctcatcaccgtgcgcggccggcgactgctcgcccgcgccgacgtggtggtcgccgaccgcctcgccccgccggaactgctcgccgaactcggctccgacgtcgaggtcatcgacgccgcgaagattccctacggccgtgcgatggcgcaggaggcgatcaacgccgccctcatcgacggtgcgaaggcaggcaagttcgtggtgaggctcaagggcggcgacccgtacgtgttcgggcgcggctacgaggaactcgaggcgtgcgccgcggcgggtgtgcccgtgacggtcgtccccggcatcaccagtgccatctcggtgccgtcggccgccggcatcccggtcactcatcgaggcgtcacccacgagttcgtcgtcgtcagcggtcacgtcgcccccgaccacccggattcgctcgtcgactggtcggcgctcgcccggttgaagggcacgatcgtgttgctgatggccgtcgagcgcatcgaggcgttcgcgacggtcctcatggagggagggcgtccggtggacaccccggtcacggtcatccaggaggggacgctgcgcacgcagcgcaccgtgcgggccgatctccagaccgttgccgcccgggtgaaggaagagcagatccggccgcccgccatcgtggtcatcgggccggtggccgggttttctgtggacgctgggtaa

SEQ ID NO: 85286 - protein, 408 aa, Rhodococcus sp. RHA1
MTAATGDETNYLVGLNLADRRVVVVGGGTVAQRRLGLLIASGARVHLISRAVTPAVEGMATAGQITLELREYRDGDLADAWYAIACTDEPDTNAAIVAEAERNRVFCVRADNARYGTAVTPASASYDGMSIGVLAGGDHRRSAAVRTALVEGLQSGAVADTADHPAAGVALVGGGPGDPDLITVRGRRLLARADVVVADRLAPPELLAELGSDVEVIDAAKIPYGRAMAQEAINAALIDGAKAGKFVVRLKGGDPYVFGRGYEELEACAAAGVPVTVVPGITSAISVPSAAGIPVTHRGVTHEFVVVSGHVAPDHPDSLVDWSALARLKGTIVLLMAVERIEAFATVLMEGGRPVDTPVTVIQEGTLRTQRTVRADLQTVAARVKEEQIRPPAIVVIGPVAGFSVDAG

SEQ ID NO: 85287 - DNA, 759 bp, Trichodesmium erythraeum IMS101
  CDS (1)..(759): transl_table=11
atgaatcagctaaaatttgtaggtaaggtgtatttagtaggagcaggaccgggagatcctggattaattacactaaaaggtaaagtgctattaaaacaagctgatgttgttatctatgatgctcttgtcagcgcttctatcttagaaatgattaacccaaatgctgaaaaatttaatgcaggtaaacgtcgagatcgccattctctagagcaaacacaaacaactcaactactaattgaaaaagcaaaaactcatgcagttgtggtacgtctaaaaggaggtgacccttttgtatttggtcgtggtggagaggagatggaagatttaatgcaagtaggaatagctgtggaagttattccgggggttacttccggtatcgctgcacctgcttatgctggtattcctttaactcacagaaactatagttcctcggttacttttgtcacaggtcacgaagcagcaggcaaatatcgaccagaggttaattgggaggcggtcgcccagggtgcagaaacgatagtaatttacatgggggttcataacttacaaaatattatcaaaaaactaatcgctgctggacgtgacccagaaacaccaattgctttaattcagtggggaacttatccaaaacaaaaagaattaattggaactcttaataatattgtgggacaaattgagtcaactggttttgaagcaccagctattactgttattggtaatgtagttaatttacatcaaatattaggaaatagggagtaa

SEQ ID NO: 85288 - protein, 252 aa, Trichodesmium erythraeum IMS101
MNQLKFVGKVYLVGAGPGDPGLITLKGKVLLKQADVVIYDALVSASILEMINPNAEKFNAGKRRDRHSLEQTQTTQLLIEKAKTHAVVVRLKGGDPFVFGRGGEEMEDLMQVGIAVEVIPGVTSGIAAPAYAGIPLTHRNYSSSVTFVTGHEAAGKYRPEVNWEAVAQGAETIVIYMGVHNLQNIIKKLIAAGRDPETPIALIQWGTYPKQKELIGTLNNIVGQIESTGFEAPAITVIGNVVNLHQILGNRE

SEQ ID NO: 85289 - DNA, 1539 bp, Trichodesmium erythraeum IMS101
  CDS (1)..(1539): transl_table=11
atgaaagtatatatcattggagccggacccggaaataaagaatatttaaccctcaaagcacatgccctaattactcaaggggaagtattaatttatgatgccttaattgatgactctattttagaactagcaccagaaaattgtttaaaaatagagatgggtaaacgtggcggtaaacccagtatatctcagtcagaaattaatagcttattaatagaaaaatataatttaggcaaacaagtaattagactaaaaggaggagacccctttatttttggtcgtgctactccagaaattcaagcattaattaaagcaggttgtgaatttgaaatagtaccaggaatttcctctacattagctgcacctttactagcaaatattcctttaacagatacagtaatgagtagagcttttgtcatcttaactgctcatgacataaaagtattagactgggaaacaatatctaaaattgaaactttagtaattttaatgggggcaaaaaatttaggtgaaattgtacatcagttattaaaacaccaaagaaaacctcaaactcctgtagctattatcaaaaattgtgcaactcctaaacaacaaatttggattagtaatttgagcaatattgctaaacaaacttatgctgaatatttatccccttgtgtgataatagtaggagaagtagtcagattaagagattatttacaatatccaaataacatggttagagaaaagtcagaagccaaaacagagatagcacctttagcaaataaaactattttagtaactcgttcagcaggtcagtcaagtaagtttagcgaacttctcaaaaaacaaggagcaaaagtaattgaaatgccagctttagttattactcccccttcaagttggcatgatttagacctaggtattactaatataaatagttttgattggttaattcttacttctacaaatggagtagactatttctttgaaagattagcagagaaaggtaaagatagtcgtgctttagctggagtaaaaatagcagtagttggtaaaaaaactgcagaaagtttgaagacttgtggtttagtaccagattttattccacctaactttgttgctgattctttagtagcgaattttcccgaaaaattgagtgggaaaaagattttatttcccagagtagaaactggtggtcgagaagtattagttaaggaattaaatagtcaaggtgcagaggtaatagaagtagctgcttatgagtctagttgcccagaaaatattttacccgaagctttgttagccctacagaattatcacatagatgttattacttttgctagttctaaaactgtcaaaaacttttgttatttaattggggaaaataaggataaattacccgaagatttattagaaaatatttgtattgcttctatcggacctcaaacttctcaaagttgtcatagtctattaggtagagtagatgtggaagctcaagaatatactttggatggattgactaaagctattattgagtgggtaagagtagcttaa

SEQ ID NO: 85290 - protein, 512 aa, Trichodesmium erythraeum IMS101
MKVYIIGAGPGNKEYLTLKAHALITQGEVLIYDALIDDSILELAPENCLKIEMGKRGGKPSISQSEINSLLIEKYNLGKQVIRLKGGDPFIFGRATPEIQALIKAGCEFEIVPGISSTLAAPLLANIPLTDTVMSRAFVILTAHDIKVLDWETISKIETLVILMGAKNLGEIVHQLLKHQRKPQTPVAIIKNCATPKQQIWISNLSNIAKQTYAEYLSPCVIIVGEVVRLRDYLQYPNNMVREKSEAKTEIAPLANKTILVTRSAGQSSKFSELLKKQGAKVIEMPALVITPPSSWHDLDLGITNINSFDWLILTSTNGVDYFFERLAEKGKDSRALAGVKIAVVGKKTAESLKTCGLVPDFIPPNFVADSLVANFPEKLSGKKILFPRVETGGREVLVKELNSQGAEVIEVAAYESSCPENILPEALLALQNYHIDVITFASSKTVKNFCYLIGENKDKLPEDLLENICIASIGPQTSQSCHSLLGRVDVEAQEYTLDGLTKAIIEWVRVA

SEQ ID NO: 85291 - DNA, 774 bp, Synechococcus sp. CC9311
  CDS (1)..(774): transl_table=11
atgacgggcactgtgtatctcgttggagctggaccaggcgatcctgatctgctcaccgtgaaagctcatcgcctactgcaatgttgtgatgccctcgtctacgactcattggttccaagtgaggttctcgaacttgttcccgagacctgtgagcgacactttgtcggcaagcgccgagggcaccattccgtgcctcagcccagtaccaactcagtgttggtggccttgggtcagcgctataaaacggttgtgcgcttaaaaggtggagatcccttcctgtttggccgtggtggagaggaagcagcccatctggtttcccatggcgttgcagtcgaggttgtgcctggcgtgacggccgggattgcggctcccgcttatgccggaataccggtgacgcaccgacgagcaggctcgtcggtcacctttgtgaccggtcatgaggagatcgataaacgtcgtccatcagtgaattggcgtgctttggcgaccgcaagtgatggcttagtgatttatatgggtttgcataatctcccgcgtattgctgaggaattaatcgctggcggccttgacggcgacacacctgttgctgtggttcagcagggcactgtggtgggtcaacgctgtctaaaggcacccctacgcgaggtggcagaggccactcgactagaacaatttgcttcaccttccatcgtggtggtgggagatgtggtgaaccaacaagtgagtgcctgtgctcctgagccagcggcggtcacgatgccgattccattttga

SEQ ID NO: 85292 - protein, 257 aa, Synechococcus sp. CC9311
MTGTVYLVGAGPGDPDLLTVKAHRLLQCCDALVYDSLVPSEVLELVPETCERHFVGKRRGHHSVPQPSTNSVLVALGQRYKTVVRLKGGDPFLFGRGGEEAAHLVSHGVAVEVVPGVTAGIAAPAYAGIPVTHRRAGSSVTFVTGHEEIDKRRPSVNWRALATASDGLVIYMGLHNLPRIAEELIAGGLDGDTPVAVVQQGTVVGQRCLKAPLREVAEATRLEQFASPSIVVVGDVVNQQVSACAPEPAAVTMPIPF

SEQ ID NO: 85293 - DNA, 831 bp, Shewanella sp. MR-7
  CDS (1)..(831): transl_table=11
atggaaattttatctttaccgggccaaagggcgaagggcaaggtctggcttgttggcgcaggccccggagacgttgaactcttaaccctcaaagcctggcgcattctcaagtccgccgacgctgtgctatacgatgcgcttgtcagccaagatatcctcgatctgatccctaaagatgcagagaagattgccgtcggcaaacgtgccggtaagcatagtgctgcgcaagatgaaattaatcagttacttgtgacgaaagcctatacccgtaaaaacgtggtacgcctcaagggcggcgatccgtttatctttggtcgcggtggtgaagagttacaaaccttagttgaagcgggcgtcgagtttgaagtggttcccggcattactgccgccagtggcacctcggcctatgcgggcattccattaactcacagggattatgcccaaggggtgacttttatcactggccattgtcagctcgaaagccgcccgatggactggcagggttacgctaatccaaacaataccttagttgtgtatatggggattctaaatgcgggcattattcgtcaaggattaatcgatgctggccgtagcccaaaaacccctgtggcgattgtctctaaggcgaccactcagtcgcagcagcgttttattggtcaattagattcactcgaacagcttgcggccgatccgcaattgcaaatgcccgccctgatgattattggtgaagtggttgcgctggcagacagcttaaattggttccaacctaagggtgaaggcgagtcagcgctcgacaccgcagatgccgccaagattgtggcaaaaatttag

SEQ ID NO: 85294 - protein, 276 aa, Shewanella sp. MR-7
MEILSLPGQRAKGKVWLVGAGPGDVELLTLKAWRILKSADAVLYDALVSQDILDLIPKDAEKIAVGKRAGKHSAAQDEINQLLVTKAYTRKNVVRLKGGDPFIFGRGGEELQTLVEAGVEFEVVPGITAASGTSAYAGIPLTHRDYAQGVTFITGHCQLESRPMDWQGYANPNNTLVVYMGILNAGIIRQGLIDAGRSPKTPVAIVSKATTQSQQRFIGQLDSLEQLAADPQLQMPALMIIGEVVALADSLNWFQPKGEGESALDTADAAKIVAKI

SEQ ID NO: 85295 - DNA, 855 bp, Alkalilimnicola ehrlichei MLHE-1
  CDS (1)..(855): transl_table=11
atgacagccgccctgccccgtcccggtgaagtcttcctggtgggcgccggccccggcgacccggacctgctgaccctgcgcgccgcgcggatcatgcagtcggtggacgtggtgctgtatgaccgactggtggcaccggagatcctcgccctcgtcagcccggacgccgaacgcatcccggtgggcaagtcggcgggccaccacagcctcagccagtccgccatctgcgcccgtctggtggaactggcctcggcaggccagcgggtcctccgactgaaggggggcgatcccttcatcttcggccgcggcggcgaggaagccgccgagctcgcagcggcgggcgtaccttttcaggtggtccccggcatcaccgcggcccagggctgcgccgcctacgcgggcattcccctgacccatcgggatctcgcccacagttgccgtttcctgaccgggcatccggccaccgatgcggacgaaaccgactgggcggacctggcccgacccggtcagaccctggtgttctatatggccttggggccgctggcagacgtgtgtgcccgccttcgccagcatgggctgccctcctctcatccggccgcagtggtggaacagggcaccacccgggcacagcgggtgatcaccggcagtctggagacgctcccccgccaggtggctgccgccgcggtacagtcaccggcgctgctcatcatcggtgagacggtgcggctccagagtgaactgaactggtttcggcccggggtgaacgccggggccccggtttttcgtgacttgcctgcaacgacggatgccggggccggcgtccggcctttgagaaaagcgggaggaaccgcatga

SEQ ID NO: 85296 - protein, 284 aa, Alkalilimnicola ehrlichei MLHE-1
MTAALPRPGEVFLVGAGPGDPDLLTLRAARIMQSVDVVLYDRLVAPEILALVSPDAERIPVGKSAGHHSLSQSAICARLVELASAGQRVLRLKGGDPFIFGRGGEEAAELAAAGVPFQVVPGITAAQGCAAYAGIPLTHRDLAHSCRFLTGHPATDADETDWADLARPGQTLVFYMALGPLADVCARLRQHGLPSSHPAAVVEQGTTRAQRVITGSLETLPRQVAAAAVQSPALLIIGETVRLQSELNWFRPGVNAGAPVFRDLPATTDAGAGVRPLRKAGGTA

SEQ ID NO: 85297 - DNA, 1446 bp, Alkalilimnicola ehrlichei MLHE-1
  CDS (1)..(1446): transl_table=11
atggaaacgctccccgtgttcatgaaactgcgcgaccgacgctgcctggttgtcggtggcggccgccgggccgaacgcaaggcccgcctcctgctggcggcaggggcggaactgacggtcctggccgaggcccccttgccgaccctggcggccctgacggaagcacacggctgccgcatggtgcgacgccccctcacggcccgcgatctggatggcgtttccctggtgatctccgccgcggatgaggccaccgaccgccgcgcgcacatgctggcgcgggcccgaaacatccccatcaacgtggtggaccggcccgatctgtgctccttcaccctgcctgccaccgtcgaccggggcccggtgcagatcgccgtctccaccggcggcacgtccccggtgctggcccggatgctgcgcaaccggctggaggccgacataccctccgcctacgggcggctggcccgtctggccgagcggtaccggcggccggtccgcgaggtcctgccggaggcgtggcagcgccagcggttctgggaagaggtcctcagtggtgaggtggcagagcgggtcttcgccggccaggacgacgccgcgcgtgagggcctggaagaggccatcggccgcgccacccgagagctccagacccggcggggggaggtctacctggtgggcgccgggccgggtgacccggatctgctcaccctgcgcgccctgcgcctgatgcaacaggccgatgccgtggtctacgaccggctggtcaatccggcgatcatggccaaggtcaaccaggatgccgagcggatcgacgtgggcaaacgctgtggccaccacccggtaccacaacacgccatcaacgacaagctggtcaccctggcccgccagggctaccgggtcctccggctgaaggggggtgaccccttcgtcttcggccgcggcggcgaggagctgcagaccctggtcgatgccggcgtgccctttcaggtggtcccgggcatcaccgcggccaccggctgtgcggcttacagcggcatccccctgacccaccgggattacgcccatagctgcgccttctacaccggccatctcaagaacgaccgcctggacctggactggtcacggatggtgcaacccgggcagaccctggtgttttacatgggcgtggccagcctgcccgagctcagtcgccagctctgctggcacggcctgccggccgagacccccgccgcgctggtggaaaagggcaccaccccggaacagcgcaccctcaccgccacgctggagaccctgccggggctggcgcgccagcaggggtttcagtcgcccgcgttggtcatcatcggcgaggtggtccggctgtacgagcagatcaactggtaccggccaccgggggacgagacccccaaggccgcggagccgggcgaactgaaccgccgccggcctgcctag

SEQ ID NO: 85298 - protein, 481 aa, Alkalilimnicola ehrlichei MLHE-1 [sequence omitted]

SEQ ID NO: 85299 - DNA, 894 bp, Alkalilimnicola ehrlichei MLHE-1
  CDS (1)..(894): transl_table=11
atgaaagaactgcccgtttatctcaatcggacaggccgagacgtgctggtggacggcggcgacgcgaccggcctcggcgaagtttatctcgtgggcgcaggtccgggcgacccggaactgctcactctccgtgctgttcggctgcttcagcaggcggatgtggtggtccacgaccgcctggtctcccgggccgtgctggatctggtgagcgaggacgtggaaaggatctttgtcggcaagcaaggctttcgcgatggccatcggcaaagacgcataaacgacataatgattgaaaaggcccgccaggggatgcgagtcgcacgcctgaagggcggcgaccccttcgtattcgggcgcggtggcgaggagttggaggccctggcgaatgccgggatccggttccaggtggtcccgggcgtgactgcggccacgggttgcgcggcctacgccggcatccccctcacccatcgcgagcacgcccagtccgttcgtttcatcaccgcccacacccgtaggggacggctagacttgggcaggcagcggctcgacgtggcgggcgagaccctggtcttgtatatggggctgacccatgtggaccaactctgtagtgagttacagcgcctgggacagccggaaacgcgtccggtcgccgtcgtggttcaagggaccactggccatcagcgggtgatcgaggggacactggccactcttccgagccgggtggcggagacgacggtcggctcgccgggattgctcatcgtgggcgaggtggtccgtctccgccgacgactggcctggtttgagggcactggcactggtaacgcccccttccccaccctggtacaagccttgacggggacaccggccgggaacaaaagggtagaggtggcatga

SEQ ID NO: 85300 - protein, 297 aa, Alkalilimnicola ehrlichei MLHE-1
MKELPVYLNRTGRDVLVDGGDATGLGEVYLVGAGPGDPELLTLRAVRLLQQADVVVHDRLVSRAVLDLVSEDVERIFVGKQGFRDGHRQRRINDIMIEKARQGMRVARLKGGDPFVFGRGGEELEALANAGIRFQVVPGVTAATGCAAYAGIPLTHREHAQSVRFITAHTRRGRLDLGRQRLDVAGETLVLYMGLTHVDQLCSELQRLGQPETRPVAVVVQGTTGHQRVIEGTLATLPSRVAETTVGSPGLLIVGEVVRLRRRLAWFEGTGTGNAPFPTLVQALTGTPAGNKRVEVA

SEQ ID NO: 85301 - DNA, 1452 bp, Hyphomonas neptunium ATCC 15444
  CDS (1)..(1452): transl_table=11
atgcgccagttcccggccttctttaacctcgaaggtgcccggatcgtcgtctttggcggcggtgaagaggccgcgcgaaagctgcgcctgtttaacgattccggcgcagatgccgtgcttgtgggcggctttgaggacgtggcgctcgccgcagaattcgcccgccgcgcagagaccgtggcacgggctgacatggcccgcgcgctggacggcgcccgcctcgtcattatcgccgaagaagatgcaggccaccgcgcccgcgccctcgccgccgtccgcgcccgcaacattcccgtcaatgtcgtcgatcagcccgaagactgcgatttcaccgtcccctccattcttgatcgcggcgagattgtcgccgccatcggctcgggcggggctgcgcctgtgctcgccaaatccatccgcgccaagctcgaagccctgctgccccagcgcgtcggcgatctcgccgcgctcgcccgctcgctgcgcggctttgtggccgaagcaattccagagaaaaccgcccgccgccgctattgggagcgcgcctttgccggccccgccgccgaggccgcctatgccggagaccttgagcgcgccgaagccctcctgcgccagcaggcccgcctcaccggccgcgcgcgcggcgtggtgcacattgtcggcgctggtcccggcgatccggagcttctgaccctcaaggccctccgcctcattcaggaagcggacgtcgtctattacgaccgcctcgtcagcccggagatcatctccctcatccgccgcgatgctacccgcgtgccggtcggcaaatcaaagggcgatcattccgtcccgcagaccgaaatccatgcccgccttgtcgcctcggcgcaggaaggcctgcgcgtcgtgcgcctcaagggcggcgacccgttcatcttcggccggggcggggaagagctggaagccgtccgcgctgaaggcatcgaagttcacgtcgtgcccggcatttcctcggcgctcggctgcgcggcctcggccggcgtcccgctcacccaccgcgaccatgcccagacgctcaccttcgtcaccggccatgccaaggaaggtggcgtaccagatcttgactggcccgccctcgcgcgcccggcccagacggtcgttgtcttcatgggcgttgataccgcgcctgtcatcgccgagaaacttgtcgctgcgggccgcgccccggaaacgcccgtcgccgtaatcgagaatggcacgcgcgccgatgaactgcgtgtcttcggcacgctcgccgaactgcccttcctcgtggaagaagaaggcatccgcggccccgcgctcctcatcatcggtgaggttgcgggcctccccgcagagcagggccgcatcgcctccatcgtcactgaagcgtcgggtttcgcctggtttggcgccgatgcccgccggccagatttcaaggagtccgccgcatga

SEQ ID NO: 85302 - protein, 483 aa, Hyphomonas neptunium ATCC 15444
MRQFPAFFNLEGARIVVFGGGEEAARKLRLFNDSGADAVLVGGFEDVALAAEFARRAETVARADMARALDGARLVIIAEEDAGHRARALAAVRARNIPVNVVDQPEDCDFTVPSILDRGEIVAAIGSGGAAPVLAKSIRAKLEALLPQRVGDLAALARSLRGFVAEAIPEKTARRRYWERAFAGPAAEAAYAGDLERAEALLRQQARLTGRARGVVHIVGAGPGDPELLTLKALRLIQEADVVYYDRLVSPEIISLIRRDATRVPVGKSKGDHSVPQTEIHARLVASAQEGLRVVRLKGGDPFIFGRGGEELEAVRAEGIEVHVVPGISSALGCAASAGVPLTHRDHAQTLTFVTGHAKEGGVPDLDWPALARPAQTVVVFMGVDTAPVIAEKLVAAGRAPETPVAVIENGTRADELRVFGTLAELPFLVEEEGIRGPALLIIGEVAGLPAEQGRIASIVTEASGFAWFGADARRPDFKESAA

SEQ ID NO: 85303 - DNA, 780 bp, Hyphomonas neptunium ATCC 15444
  CDS (1)..(780): transl_table=11
atgaccgtccgtatcaccctggttggggctggcccaggcgcggccgatctcctgacgcttcgcgccgtgcgggcgatcgaggcggccgaggtcgtcctgatcgatgcgctggtgagcgatgaggtcagatcgctcattcctcccggcgcccggatcattgaggttggcaagcgcgggcacaagccttcggccggacaggatttcatcaaccggactctggttcgatatgcgcagcaggggttcaatgtggtccggctgaagggcggcgatccttccatctttggacgggcggccgaggagcgggccgcgcttgaggctatgggaatcgaggttgccgtcgttcccggaataaccagcgcatcggcggccgctgcgcagtttcgaatctctcttaccgaacggggcacggcccggcgggtcctgttcgcaacggggcaccgggcagagggaccggaaaccgactgggagagcgccgcggatcctgccacgacggtatgcctctatatggccgcacatgattttgcggccatcgcggccgcgttgattgcggcgggccgtcgggcggacacaccggccatcgctgtctgcgatgtggagcgaccggccgcaaggatgctggcggcgacccttgcaacgctggctgcccggctcgcggccgacgcgtttgaagggcccgtcgtcatcctggtcggcgacgtgtgccgcagggccgttagctcaccctgcgcaccgcatttccgagagggtgagcgacgggtcagcctgcctggtttgctctaa

SEQ ID NO: 85304 - protein, 259 aa, Hyphomonas neptunium ATCC 15444
MTVRITLVGAGPGAADLLTLRAVRAIEAAEVVLIDALVSDEVRSLIPPGARIIEVGKRGHKPSAGQDFINRTLVRYAQQGFNVVRLKGGDPSIFGRAAEERAALEAMGIEVAVVPGITSASAAAAQFRISLTERGTARRVLFATGHRAEGPETDWESAADPATTVCLYMAAHDFAAIAAALIAAGRRADTPAIAVCDVERPAARMLAATLATLAARLAADAFEGPVVILVGDVCRRAVSSPCAPHFREGERRVSLPGLL

SEQ ID NO: 85305 - DNA, 1443 bp, Rhizobium leguminosarum bv. viciae 3841
  CDS (1)..(1443): transl_table=11
ttgatgatgcctcccaggactgaacagctttcggtatttcccgccttctttcgcgtggaaggcttgaagacggctgtcttcggcaatggcgacgaagctttcgccaaggtgcggctgctgctgaacacaaaggcgcggatcattgcctatgccgaccggccggaagccgattaccacgccttcctgatcgccaaccggatcgagaccgtgcgcgctgccttctccgccgaacaggtcgagggttcagcgctcgtcttcgccgcaaccggcaatgaaaccgatgaccgcagcatcgtcgatgccgcccgcgctaccagaattccggccaatgccgtcgatcagcctgattactgcgatttcttcacgccggcgctggtcaatcgcgcccccgtcgccgttgcgatcggcaccgaaggggcagggccggttctggcgcagatgatccgcgcgcagatcgaccagcttctttcgccctcgctcggccgtcttgccggtctggcgacgagctaccgcaaggccgtcgaacaactgattcccagaggcgtctcccgccgggtcttctggcgccgcttcttctccggcgccgtggccgatgcggtcgccaacggcaacctgccgcaggcccgccatgccgccgaccggctgctgcacgcgatggacaaggtcgccggccacgtctggctggtcggcgccggtccgggtgccgaagatctgctgacgctgcgtgcccagcgcgtgatgatggaagccgatgtcatcgtctatgacgcgctggtgccgcaggcgatcgttgacatgggccgccgcgatgccgagcggctttccgtcggcaagcgcaagggctgccactcgaagtcgcaggaagaaatcaacgacctgctggtcgatctcggccgccagggcaagcgtgtcgtccgtctgaaatccggcgatccgctggtctatggccgggcaggggaagaaatggcggcactgcgcgctgccgacgtcacctatgaggtcgtgcctggtatcacctcggctttcgccgccgcagccgatttcgagctgccgctgacactgcgcggcgtcgcctcctcgctggtcttcaccacaggccatgatctaaccggcgacgtgctgcccgattgggcaagccttgccgtttccggcgcgacgatcgccgtctatatgggccgcacggttgctgcctccgtcgccgagcggctgatgcaggcgggcattccgtctgagaccaccgtcgctgtcatcgaaaatgccagccgcgccgatcgccgcctgctgcatggcacgctcgccgatctgcccgatctgcagcgccgcgacgagttgaccgggcctgtcatggtcatcatcggcgatgcggtcgccggcgctaatttcgaactgtccgagcccttggtgcgcgcaaacgcccggctcgaggaacttgcaaggagctga

SEQ ID NO: 85306 - protein, 480 aa, Rhizobium leguminosarum bv. viciae 3841
MMMPPRTEQLSVFPAFFRVEGLKTAVFGNGDEAFAKVRLLLNTKARIIAYADRPEADYHAFLIANRIETVRAAFSAEQVEGSALVFAATGNETDDRSIVDAARATRIPANAVDQPDYCDFFTPALVNRAPVAVAIGTEGAGPVLAQMIRAQIDQLLSPSLGRLAGLATSYRKAVEQLIPRGVSRRVFWRRFFSGAVADAVANGNLPQARHAADRLLHAMDKVAGHVWLVGAGPGAEDLLTLRAQRVMMEADVIVYDALVPQAIVDMGRRDAERLSVGKRKGCHSKSQEEINDLLVDLGRQGKRVVRLKSGDPLVYGRAGEEMAALRAADVTYEVVPGITSAFAAAADFELPLTLRGVASSLVFTTGHDLTGDVLPDWASLAVSGATIAVYMGRTVAASVAERLMQAGIPSETTVAVIENASRADRRLLHGTLADLPDLQRRDELTGPVMVIIGDAVAGANFELSEPLVRANARLEELARS

SEQ ID NO: 85307 - DNA, 840 bp, Rhizobium leguminosarum bv. viciae 3841
  CDS (1)..(840): transl_table=11
atgatcgatgccgcattctcccatcttccggtgcttgagccgggcaacgtctggctcgtcggcgccggtcccggcgatcccgggcttttgacgctgctcgccgccaaggggcttttcgaggccgacgtcatcgtccacgatgcgctggtcaacgaggaatgcctggcgctggcgcggccggaaactctggtggaatatgccggcaagcgcggcggcaagccttcggcgaaacagcgcgacatttcgctgcggctggtggagctggcgcgcgccggcaagaaggtgctgcggctgaagggcggcgatcccttcgtgttcggccgcggcggtgaggaggcgttgacgctggtcgagcacaacattcccttccgcatcgtgcccggcatcaccgccggcatcggcgggctcgcctatgccggcattccggtgacgcatcgcgacatcaaccatgccgtgaccttcctcaccggccatgattcctcgggcatcgtgcccgacagaatcaactgggaggcgatcggccgaggctcgcccgtcatcgtcatgtacatggcgatgaagcatatcgccgagatcagcaccaatctcatcgccgccggccggctgccgaccgagcccgtcgccttcgtctgcaatgcagcgaccggccggcagcaggtgttggaaacaacgctcggagaggcgaccgaggccgtcgctgtctccggcctggagccgccggcggtggtcgttgtcggtgaagtggtgcggctccgagcctcgctcgactggcttggtgcgctggcggggcggcgcctgcaacccgatccattccgccggtccggcaaggtgcgggcatga

SEQ ID NO: 85308 - protein, 279 aa, Rhizobium leguminosarum bv. viciae 3841
MIDAAFSHLPVLEPGNVWLVGAGPGDPGLLTLLAAKGLFEADVIVHDALVNEECLALARPETLVEYAGKRGGKPSAKQRDISLRLVELARAGKKVLRLKGGDPFVFGRGGEEALTLVEHNIPFRIVPGITAGIGGLAYAGIPVTHRDINHAVTFLTGHDSSGIVPDRINWEAIGRGSPVIVMYMAMKHIAEISTNLIAAGRLPTEPVAFVCNAATGRQQVLETTLGEATEAVAVSGLEPPAVVVVGEVVRLRASLDWLGALAGRRLQPDPFRRSGKVRA

SEQ ID NO: 85309 - DNA, 840 bp, Pseudomonas aeruginosa UCBPP-PA14
  CDS (1)..(840): transl_table=11
atgaacactaccgtgattccgccgtccctcctcgatgtcgatttccctgccggcagcgtcgccctggtcggcgccggccccggcgatccgggcctgctcaccctgcgcgcctgggccctgctgcaacaggccgaggtggtggtctacgaccgcctggtcgcccgcgagctgatcgcccttctgccggaaagctgccagcgcatctacgtcggcaagcgctgcggccaccacagcctgccgcaggaagaaatcaacgagctgctggtgcgcctggcccggcagcaacgccgggtggtccgcctgaaaggcggcgacccgttcatcttcggtcgcggcgccgaggagctggagcgcctgctcgaggccggcgtcgactgccaggtggtccccggcgtcaccgccgcctccggttgcagtacctacgccggcatcccgctgacccaccgcgacctcgcccagtcctgcaccttcgtcaccggccacctgcagaacgacggccgcctcgacctcgactgggccggcctggcgcgcggcaagcagaccctggtgttctacatgggcctgggcaacctcgccgagatcgccgcgcgcctggtcgagcacggcctcgccagcgacaccccggcggcgctggtcagccagggcacccaggcgggccagcaggtgacccgcggcgccctttccgagctgccggcgctggcgcggcgctaccagttgaagccgccgacgctgatcgtcgtcggccaggtggtggcgctcttcgccgagcgcgcgatggcgcatccgtcatacctgggcgccggctcgccggtcagccgcgaggccgtcgcatgcgcctga

SEQ ID NO: 85310 - protein, 279 aa, Pseudomonas aeruginosa UCBPP-PA14
MNTTVIPPSLLDVDFPAGSVALVGAGPGDPGLLTLRAWALLQQAEVVVYDRLVARELIALLPESCQRIYVGKRCGHHSLPQEEINELLVRLARQQRRVVRLKGGDPFIFGRGAEELERLLEAGVDCQVVPGVTAASGCSTYAGIPLTHRDLAQSCTFVTGHLQNDGRLDLDWAGLARGKQTLVFYMGLGNLAEIAARLVEHGLASDTPAALVSQGTQAGQQVTRGALSELPALARRYQLKPPTLIVVGQVVALFAERAMAHPSYLGAGSPVSREAVACA

SEQ ID NO: 85311 - DNA, 1398 bp, Pseudomonas aeruginosa UCBPP-PA14
  CDS (1)..(1398): transl_table=11
atggatttcctgccgctgttccactccttgcaagggcgcctcgcgctggtggtcggcggcggcgaagtcgccctgcgcaaggcgcgcctgctggccgacgccggcgcgcgcctgcgcgtggtcgcaccgcagatccacatcgaactgcggcatctggtggagcagggcggcggcgagctgctcgaacgcgactaccaggacggcgaccagcccggctgcgccctgatcatcgccgccaccgacgacgaaccgctgaacgccgaggtgtcgcgagcggccaatgcgcgcgggataccggtcaacgtggtggacgcgccggccctgtgcagcgtgatcttcccggccatcgtcgaccgttcgccgctggtggtggcggtctccagcggcggcgatgcgcccgtgctggcgcggctgatccgggccaagctggaaacctggattccctcgacctacgggcaactggccggactcgccagccgcttccgccaccgggtcaaggaattgctacccgacctgcagcagcgccgggtgttctgggaaaacctgttccagggcgagatcgccgagcgtgtcctggccggccgtccggcggaagccgagcgtctcctggaggagcgcctggccggcggcctcgcgcacatagccacgggcgaggtatatctggtcggggccgggccgggggatccggacctgctgacgttccgtgccctgcgcctgatgcagcaggccgacgtggtgctctacgatcgcctggtggcgccgtcgatcctcgaattatgccgccgcgatgccgaacgcctgtacgtcggcaagcgccgcgccgaacatgcggtgccgcaggatcggatcaaccgcctgctggtggagctggccagccagggcaagcgcgtgctgcgcctgaagggtggcgacccgttcatcttcggccgcggcggtgaggaaatcgacgaactggctgcccgcggcatacctttccaggtcgtgccgggaatcaccgcggccagcggctgcgcggcctacgccgggattccactgactcatcgcgatcatgcgcaatcggttcgtttcgtcaccggtcatctgaaggacggcaccaccgacctgccgtggcaggacctggtagcgcctggccagaccctggtgttctacatgggcctggtgggattgccggtgatctgcgagcaactggtcgcccacggtcgctccgcacagaccccggcggcgctgatccagcaggggaccaccgcccagcagcgggtattcaccggaaccctggaaaacctgccgcaactggtggctgagcacgaagtgcatgcgccgaccctggtgatcgtcggcgaagtcgtgcaactgcgcgacaagctggcctggttcgaaggcgcccgcgaggacgcctga

SEQ ID NO: 85312 - protein, 465 aa, Pseudomonas aeruginosa UCBPP-PA14
MDFLPLFHSLQGRLALVVGGGEVALRKARLLADAGARLRVVAPQIHIELRHLVEQGGGELLERDYQDGDQPGCALIIAATDDEPLNAEVSRAANARGIPVNVVDAPALCSVIFPAIVDRSPLVVAVSSGGDAPVLARLIRAKLETWIPSTYGQLAGLASRFRHRVKELLPDLQQRRVFWENLFQGEIAERVLAGRPAEAERLLEERLAGGLAHIATGEVYLVGAGPGDPDLLTFRALRLMQQADVVLYDRLVAPSILELCRRDAERLYVGKRRAEHAVPQDRINRLLVELASQGKRVLRLKGGDPFIFGRGGEEIDELAARGIPFQVVPGITAASGCAAYAGIPLTHRDHAQSVRFVTGHLKDGTTDLPWQDLVAPGQTLVFYMGLVGLPVICEQLVAHGRSAQTPAALIQQGTTAQQRVFTGTLENLPQLVAEHEVHAPTLVIVGEVVQLRDKLAWFEGAREDA

SEQ ID NO: 85313 - DNA, 738 bp, Pseudomonas aeruginosa UCBPP-PA14
  CDS (1)..(738): transl_table=11
atgagcggtaaggtctggctggtgggtgcgggtcccggcgatccggaactgttgaccctgaaggcagttcgcgccctgcaggacgcggatgtggtgatggtcgacgatttggtcaacccgagcatactggagcactgtccgtccgcccgggtggtccgggtcggcaaacgcggcggctgccgctccacaccgcaggacttcatccagcgcctgatgctgcggcatgcccgccagggacgcagcgtggtgcgcctgaaaggcggcgatccatgcatcttcggccgcgccggcgaagaagccgaatggctggcccggcacgggatagacagcgagatagtgaacggcatcaccgccgggctggctggcgccactgcctgcggcataccgctgacctaccgcggcatcagccgcggcgtgaccctggtgaccgcgcatacccaggacgacagcccgctggcctgggaagccctggcacgcagcggtaccacgctggtggtctacatgggcgtcgcccgactcgcggagatccaggccgggctgctggctggaggcatggccgaggatacgccgctggcgatgatcgagaacgccaccttgggcaaccagcgcgaatgccgcagcaacctcggcgagctactgcgggacgccggacgtttcgccttgaaaagcccggcgatcctggtgatcggcgaagtaacccgcgacatcgtgtcgcaaccgatttccctgagcgcctga

SEQ ID NO: 85314 - protein, 245 aa, Pseudomonas aeruginosa UCBPP-PA14
MSGKVWLVGAGPGDPELLTLKAVRALQDADVVMVDDLVNPSILEHCPSARVVRVGKRGGCRSTPQDFIQRLMLRHARQGRSVVRLKGGDPCIFGRAGEEAEWLARHGIDSEIVNGITAGLAGATACGIPLTYRGISRGVTLVTAHTQDDSPLAWEALARSGTTLVVYMGVARLAEIQAGLLAGGMAEDTPLAMIENATLGNQRECRSNLGELLRDAGRFALKSPAILVIGEVTRDIVSQPISLSA

SEQ ID NO: 85315 - DNA, 750 bp, Solibacter usitatus Ellin6076
  CDS (1)..(750): transl_table=11
gtggcaagcatggcgaaagtgtatctggtcggcgccggtcccggcgaccccgatctcctcacccgtaaggcattgcgcctgttggaacaagccgacgtcatcctgcacgaccgtctggttagtgatggaatcctggcgctggcaagtccacgggcacgactgatcgatgttggcaagcagcaggggcagcaggaagagatccagtccgaaatctacacgtggatcctgcggctgggccgctccgcgcgcaccatcgtccgcctcaaaagcggcgaccccatggtcttcggtcgcggcggcgaagaactggagtttctcgcccggcacggcattgacgccgaagtggttcccgggctttcctccgcgctggccgctcccgcgctggccggaattccagtgacctaccggggtgtagccgcctccttctccgtgattgccggacaccgccagagtctcaccaccctcgattggtcggtgtaccagggagtggataccctcatcatcctcatgggcgtggagtaccgcgacataatcgcgcacacgctcatcgaacaaggccgcccggcaagccagcccgtggcattcctggagaacgcatctaccagccgcgagcgcgtcgtggaatccacgctcgaactcgtggcgcgccgccaggtggaggtgaaggccccggccgtaatggtgatcggcgaagtggtccgccaccggaccgcggtgcgtagagccatgctgcaggaggcggtcgcttga

SEQ ID NO: 85316 - protein, 249 aa, Solibacter usitatus Ellin6076
MASMAKVYLVGAGPGDPDLLTRKALRLLEQADVILHDRLVSDGILALASPRARLIDVGKQQGQQEEIQSEIYTWILRLGRSARTIVRLKSGDPMVFGRGGEELEFLARHGIDAEVVPGLSSALAAPALAGIPVTYRGVAASFSVIAGHRQSLTTLDWSVYQGVDTLIILMGVEYRDIIAHTLIEQGRPASQPVAFLENASTSRERVVESTLELVARRQVEVKAPAVMVIGEVVRHRTAVRRAMLQEAVA

SEQ ID NO: 85317 - DNA, 1485 bp, Solibacter usitatus Ellin6076
  CDS (1)..(1485): transl_table=11
atgaagggcaaggtgtatctggtgggggcggggccgggggatccggaactgattacggtgaaggggcgaagggtcctgcaaggggcggatgcggtgctgtacgatcacctggcggccgcggccctgctcgacctcgcccccgctcacgcagagcgggtctacgtcggcaagaagaagtcggcgcacgagttcacgcaggaagagatttgcgccatgctgatcgaacgcgggcggcgcgggctgacagtggtgcggctgaagggtggcgacccgtttattttcgggcgcggcggggaagaggcggaggcgctggcggatgcggggatcgcgttcgaagtggtgccgggggtgaccacgccgctgggcatcgcagcctacaccggcgtgccgctgacacatcgcgaacacacctcggcagtgacgttcgtgaccgggcacgcggtgcaggcgatcgattgggacaaagtgggacacgccgagacgctggtgatcttcatggggctgaccacgttcccagagatcgcgcgtgaattgatcgcgcggggccggccggcggagactccagcgatggcggtgcgttgggccacgcgggcagaccaggagacggtggtcggcacgctgggaacgctgaccggaatgctggccgggatgaagccgccggcaaccatcgtggtgggcgaggtggtgcggctgcgcgagaagctggattggtacggacggctgccgcttgcgggaaagcggatcgtggtgacgcgggcgcgggaacaggcggacgcgctgggcgccgcgttgagctcgctgggtgcgggcgtgatcgagctgccgacgatcgagatcggtccggcggcggatagcggcccgctggagcgcgcgatcgcggagttggaaacctacgactggctgatcttcacgagcgccaacggagtgcggtttttcgtggagcggctcgacgatctgcgcaagctgcgctcgaagatctgcgcgatcggcccggcgacgcgggcggcggtggaagcgctccacgtgaaggtggacctgatgggcaaggaatacgtcgcggaggggctgctcgaagccttcgcggcgcacgacctggcgggcaagcgggtgctgctgccgcgggcggcggtggcgcgcgacctggtgccggtggaactggcgaagcgcggcgcgcaggtggatgtggtggaagcgtaccggacggcggctccggcggggctgggggcgcgggtgcgggaagtcttcgcgcggcggccggattgcgtcacgttcacgagctcttccacggtccggaatttcgtggaggcggccggagcaggggcgctcgaaggcgtacgggtggcgtctatcgggccggtcacgtcggccacggcccgggaactcggagtggcggtaacggtggaagcgcggccatttacggtggatggacttgtcgatgcagtgctcgagttgtacactgaaatgactcccccgtcaactgaatga

SEQ ID NO: 85318 - protein, 494 aa, Solibacter usitatus Ellin6076
MKGKVYLVGAGPGDPELITVKGRRVLQGADAVLYDHLAAAALLDLAPAHAERVYVGKKKSAHEFTQEEICAMLIERGRRGLTVVRLKGGDPFIFGRGGEEAEALADAGIAFEVVPGVTTPLGIAAYTGVPLTHREHTSAVTFVTGHAVQAIDWDKVGHAETLVIFMGLTTFPEIARELIARGRPAETPAMAVRWATRADQETVVGTLGTLTGMLAGMKPPATIVVGEVVRLREKLDWYGRLPLAGKRIVVTRAREQADALGAALSSLGAGVIELPTIEIGPAADSGPLERAIAELETYDWLIFTSANGVRFFVERLDDLRKLRSKICAIGPATRAAVEALHVKVDLMGKEYVAEGLLEAFAAHDLAGKRVLLPRAAVARDLVPVELAKRGAQVDVVEAYRTAAPAGLGARVREVFARRPDCVTFTSSSTVRNFVEAAGAGALEGVRVASIGPVTSATARELGVAVTVEARPFTVDGLVDAVLELYTEMTPPSTE

SEQ ID NO: 85319 - DNA, 840 bp, Magnetococcus sp. MC-1
  CDS (1)..(840): transl_table=11
atgcacaccgttgatacctacacatccatggcccctggctcggtcattttagccggttcaggtccgggcgatcccaatttgctcacccttggggtctacaaggccctgcaagcctgcgatacgctggtttacgatgctttggtctcacccgagattatggcactggtgcctgcgtcggttgagcagcattttgtgggcaaacggggaggccacccttccattggtcaagaggccatcaatgccatactggtgcagctggcaaaggccggtaaaaaggtactacgcctaaaagggggcgacccctttgtgtttggtcgtggtggcgaagaggcctactgcctaagctgcgagggcattcccttctcgattattccgggtgtgacggctggggtggcgggtccggcttatgcgggcatacccattacccaccgtgacgtcaacgccaacgtggcctttttgacgggtcacgaatcccccaccaatgccgctggcgaaacggtaccaaccaccgtggattgggagtctgttggggcagcctttccggttattgtgctctatatgggggttaaaaacctacccaccattgccaaacggctgatcgcgggcggtcgctctggagaaaccccggtggcgctcatccgctgggccaccaccccgcgccaacaaaccatgattaccaccctaaaccgggcggcagatgatatttccgagtgtaaaatcaaaccaccctctattgtggtgattggcgaagtggtgaactatcgggatcatcttagctggtttgccgacgataccctaacccgcgacaactgcaaaaacaaactgcgtgatgatgaataa

SEQ ID NO: 85320 - protein, 279 aa, Magnetococcus sp. MC-1
MHTVDTYTSMAPGSVILAGSGPGDPNLLTLGVYKALQACDTLVYDALVSPEIMALVPASVEQHFVGKRGGHPSIGQEAINAILVQLAKAGKKVLRLKGGDPFVFGRGGEEAYCLSCEGIPFSIIPGVTAGVAGPAYAGIPITHRDVNANVAFLTGHESPTNAAGETVPTTVDWESVGAAFPVIVLYMGVKNLPTIAKRLIAGGRSGETPVALIRWATTPRQQTMITTLNRAADDISECKIKPPSIVVIGEVVNYRDHLSWFADDTLTRDNCKNKLRDDE

SEQ ID NO: 85321 - DNA, 831 bp, Shewanella sp. ANA-3
  CDS (1)..(831): transl_table=11
atggaaattttatctttaccgggccaaagggcgaagggcaaagtctggctggttggcgcaggccccggagacgttgaactcttaaccctcaaggcttggcgcattcttaagtcagccgacgctgtgctatacgatgcgctcgtcagccaagatatcctcgatttaatccctaaggatgcagagaagattgccgtcggcaaacgtgccggtaagcatagtgctgcgcaagatgaaattaatcagttactggtgactaaagcctatacccgtaaaaacgtggtacgcctcaagggcggcgatccctttatttttggccgcggtggtgaagagttacaaaccttagttgaagcaggcgtcgaatttgaagtggttcctggcattaccgccgccagtggcacttcggcctatgcgggcattcccttaacccacagggattatgcccaaggggtgacttttattactggccattgtcagcttgaaagccgtccgatggactggcaggggtatgctaattcaaacaataccttagttgtgtatatggggattttaaatgcgggcattattcgtcaaggactaatcgatgctggccgtagcccaaacacacctgtggcgattgtctctaaggcgaccactcagtcgcagcaacgttttattggtcaattagattcactcgagcagctcgcggccgatccgcaattgcaaatgcccgccctgatgattattggcgaagtggttgcgttagctgacagcttaaattggttccaacctaaaggtgaaggcgagtcatcactcgataccactgatgccgccaagattgtggcaaaaatttag

SEQ ID NO: 85322 - protein, 276 aa, Shewanella sp. ANA-3
MEILSLPGQRAKGKVWLVGAGPGDVELLTLKAWRILKSADAVLYDALVSQDILDLIPKDAEKIAVGKRAGKHSAAQDEINQLLVTKAYTRKNVVRLKGGDPFIFGRGGEELQTLVEAGVEFEVVPGITAASGTSAYAGIPLTHRDYAQGVTFITGHCQLESRPMDWQGYANSNNTLVVYMGILNAGIIRQGLIDAGRSPNTPVAIVSKATTQSQQRFIGQLDSLEQLAADPQLQMPALMIIGEVVALADSLNWFQPKGEGESSLDTTDAAKIVAKI

SEQ ID NO: 85323 - DNA, 1206 bp, Mycobacterium avium 104
  CDS (1)..(1206): transl_table=11
gtgaccgagagcgcctacctggtggggctgcggctgaccggcaagaaggtggtcgtggtcggcggcggcaccgtcgcccagcgccggctgccgttgctgatcgccagcggcgcggacgtccacgtcatctcccgcagcgccacccgatcggtcgaggcgatgaccggaatcaccctgcaattgcgcgaataccgcgacggcgacctcgacggcgcctggtacgcgatcgcggccaccgacgacccgcgggtcaacgaggccgtggttgccgaggccgaacgccgccgcatcttctgcgtccgggcggacgtcgccgtggcggggaccgcggtcaccccagcatctttcagctatgccgggttgtcggtgggcgtgctggccggcggcgagcaccgccgctcggcggcgatccgctcggccatccgggaggcgctgcagaccggggtcatcacgccggaaggcccggtgggctccgacgccgtcaagggcggggtggcgctgatcggcggcggccccggcgaccccgaactgatcacggtgcgcggccggcggctgctggcccaggccgacgtcgtggtggccgaccggctcgccccgcccgaactgctcgccgagctgcccccgcacgtggaggtgatcgacgccgccaagattccctacggccgggccatggcccaggacgccatcaacgacgtcatgatcgaacgcgcccgcgccggaagcttcgtggtgcgcctcaaaggcggggacccgttcgtcttcgcccgcggctacgaggaggtgctggcgtgcgccgacgccgggattccggtcaccgtcgtcccgggtgtgacgagtgccataggagtgcccgcattggcgggcgtcccggtcacccatcgggcggtaaatcacgaattcgtggtggtcagcgggcatctcccacccggtcatcccgaatcgttagtgaattgggatgcactggccgcattgaccggcacaattgttttgctgatggcggtcgaacgtatcgaacttttcgccgaggccctgctgaagggcggacgaccagcggatacgccggtgctggtggttcagcacgggacgacggcggcgcaacacactttgcgggccaccctggccgacacgcccgaaaagattcgtgccgaaggtatccgacctcccgcgatcatcgtgatcggcgcggtggcggctttcggggtttaa

SEQ ID NO: 85324 - protein, 401 aa, Mycobacterium avium 104
MTESAYLVGLRLTGKKVVVVGGGTVAQRRLPLLIASGADVHVISRSATRSVEAMTGITLQLREYRDGDLDGAWYAIAATDDPRVNEAVVAEAERRRIFCVRADVAVAGTAVTPASFSYAGLSVGVLAGGEHRRSAAIRSAIREALQTGVITPEGPVGSDAVKGGVALIGGGPGDPELITVRGRRLLAQADVVVADRLAPPELLAELPPHVEVIDAAKIPYGRAMAQDAINDVMIERARAGSFVVRLKGGDPFVFARGYEEVLACADAGIPVTVVPGVTSAIGVPALAGVPVTHRAVNHEFVVVSGHLPPGHPESLVNWDALAALTGTIVLLMAVERIELFAEALLKGGRPADTPVLVVQHGTTAAQHTLRATLADTPEKIRAEGIRPPAIIVIGAVAAFGV

SEQ ID NO: 85325 - DNA, 1209 bp, Mycobacterium smegmatis str. MC2 155
  CDS (1)..(1209): transl_table=11
gtgaccgaagatgcctacctcgtcggcctgcgcctgtcgggcaagaaggtcgtcgttgtcggcggcggaaccgtcgcgcagcgccggctgcccctgctgctcgccaacggcgccgacgtccacgtcatcacccgcgccgcgaccccggttgtggaagccctgcagaaggacgatccggggatcacgctggagctgcgcgacttccggcccggtgacctcgaaggcgcctggtatgtgatcgccgcaaccgacgatcccgtcgtcaacgccgcgatcgcggccgaggccgacgagcggcggatcttctgcgtgcgcgccgacatcgcgcgcgaaggctcggcggtgacccccgcgacgttcgagcacgacggactctccgttggcgtgctcgccggcggcgagcaccgccgctcggccgcgatccgctcggccatccacgaggcgctgcagcaaggcctcgtcaccgaggacatgcccggcgagctcacgagcggcgtggccctggtcggcggtgggccgggcgacccggagctcatcaccgtccgcggcaggcggttgctggcgcgcgccgacgtggtcgtggccgaccggctggcaccgcaggaactgctggccgaactcggcccgcacgtcgaggtgatcgacgccgcgaagatcccgtacggccgcgcgatggcgcaggaggccatcaacgcggtgctgatcgaacgggccagggcgggcaagttcgtcgtgcgcctcaagggcggcgatccgttcgtgttcgcgcgcggctacgaagaggtgctcgcgtgcagtgaggccgggattcccgtgacggtcgtgccgggtgtgacgagtgccatagcggttccggctctggcgggtgtcccggtgacgcatcggggtatgacgcacgagttcgtggtggtcagcggccatgttgcgccagggcaccccgaatcgttagtgaattgggatgcactcgcagcgatgcgcggcacgatcgtgttgctgatggccgtcgagcgcatcgagcagttcgccaaggtcctcctcgaaggcggacgacctgcggatacgccggttctggtggtgcagcacggaaccaccatggcgcagcgcactttgcatgcgacgctcgccgacgcgccagagcgcatccgttcggagggcatccgacctcccgcgatcatcgtgatcggccccgtggcgggctttgccggttaa

SEQ ID NO: 85326 - protein, 402 aa, Mycobacterium smegmatis str. MC2 155
MTEDAYLVGLRLSGKKVVVVGGGTVAQRRLPLLLANGADVHVITRAATPVVEALQKDDPGITLELRDFRPGDLEGAWYVIAATDDPVVNAAIAAEADERRIFCVRADIAREGSAVTPATFEHDGLSVGVLAGGEHRRSAAIRSAIHEALQQGLVTEDMPGELTSGVALVGGGPGDPELITVRGRRLLARADVVVADRLAPQELLAELGPHVEVIDAAKIPYGRAMAQEAINAVLIERARAGKFVVRLKGGDPFVFARGYEEVLACSEAGIPVTVVPGVTSAIAVPALAGVPVTHRGMTHEFVVVSGHVAPGHPESLVNWDALAAMRGTIVLLMAVERIEQFAKVLLEGGRPADTPVLVVQHGTTMAQRTLHATLADAPERIRSEGIRPPAIIVIGPVAGFAG

SEQ ID NO: 85327 - DNA, 1224 bp, Nocardioides sp. JS614
  CDS (1)..(1224): transl_table=11
atggacgagtactcgacgtacccctcggggctgcggctgtccggacgccgggtcgtggtggtcggcggggggcaggtggcccagcgccgcgtgccgcacctgatcgcagcgggcgccgacgtgcacgtggtcagcccgcaggtgacgccggcgatcgagggcatggtcggctcgggcgaggtgacctggcacgaacgcggctttgcagacaccgacctcgacgaggcgtggtacgtcgtcgccgcgaccgacgaccacgcggtgaacgagcaggtgtcggacgcggccgaggcgcggcgcgtgttctgcgtgcggtccgacgacgccagccgcgcgagcgcgtggacgccggcggtcgggcggcacgcgggcgtcacggtcgccgtgctcggccagcgcgagccgcgacggtcggcggcggtgcgcgacgagatcctcgagggcctgcgcgagggcacgatcgtcgcccggcaccagcgcgaccgcagcgccggcgtggtcctggtgggcgggggcccgggcgaccccgagctgatgaccgtggccggccgcaaggcactggtcgaggcggacgtcgtggtcgccgaccggctggcgccgcgcgagctgctcggcgagctgcccgccgacgtcgagctgatcgacgtcgcgaagctcccccggggccggtcggccctgcaggaggagatcaaccgcgtcatcatcgagcgggcccgggcgggcaagcgggtggtccgcttcaagggcggcgacaacttcgtcttcgggcgcgggttcgaggaggtcatcgcgtgccgcgaggccggcgtgccggtcacggtcgtgccggggctgaccagctcgatcgccgtacccgcggtcgccgggatcccggtgacccaccgcggggtggcgcacgagttcaccatcgtgtccgggcacctgccacccggacacccgcagtcgcaggtcaactggacagcgctcggcgcgctgcgcggcaccgtcgtgctgatgatggcggtcgagaacgcaccccggatcgcgaccgcactcgtcgcgggcggccgggcgggctcgacgccggtggccgtggtctgtgagggcacgatgccgggggagcggaccgtcctcgcgaccctcgacaccctggccacgcgtctggaggaggagtccgtgcggccgcccgcggtcatcgtggtgggcgaggtggtccgggtggcccatccgcgacactttgcgtga

SEQ ID NO: 85328 - protein, 407 aa, Nocardioides sp. JS614
MDEYSTYPSGLRLSGRRVVVVGGGQVAQRRVPHLIAAGADVHVVSPQVTPAIEGMVGSGEVTWHERGFADTDLDEAWYVVAATDDHAVNEQVSDAAEARRVFCVRSDDASRASAWTPAVGRHAGVTVAVLGQREPRRSAAVRDEILEGLREGTIVARHQRDRSAGVVLVGGGPGDPELMTVAGRKALVEADVVVADRLAPRELLGELPADVELIDVAKLPRGRSALQEEINRVIIERARAGKRVVRFKGGDNFVFGRGFEEVIACREAGVPVTVVPGLTSSIAVPAVAGIPVTHRGVAHEFTIVSGHLPPGHPQSQVNWTALGALRGTVVLMMAVENAPRIATALVAGGRAGSTPVAVVCEGTMPGERTVLATLDTLATRLEEESVRPPAVIVVGEVVRVAHPRHFA

SEQ ID NO: 85329 - DNA, 765 bp, Azoarcus sp. BH72
  CDS (1)..(765): transl_table=11
atggccaaggtaacgcttgtcggggcagggcccggcgcggctgatctgctgactgttcgtgcggtgcgcgccattggccaggccgatgtgctgcttgccgatgcgctggtgaccgaggaagtgctggcactcgccaagccgggtgcgcgcgtgctgcgcgtcggcaagcgcggcggcatgaagtccaccgcgcaggacttcatccaccgcgtgatggcgcgctacgcccgccgcggctgcgcggtggcgcgcgtcaagggcggcgaccccttcctgttcggccgcggcggtgaagaggccgaatacctcgaagcgctcggcatcgaggtcgaggtggtgccgggtctcacctccggcatcgcggtgccggcggcggtcggcattccggtcacccaccgcgcccatacccacggcgtcacgctggttaccggcaccgccggcgacggccgcgacgagccaaactgggcggcgctggccaagtgcggcaccacgctggtgatctacatggggctgggccggctgctcaacatcgttgcgcgcctgatcgccgccggcatgccgccggacaccccggccgcggcgatcgcctcgggcacgctgccgggccagcgccacgtcaagggcacgctggccgacctgccgctgcgcgtcactgccgaaggcctcagctcgccggccatcatcgtcgtcggcgaggtcgccgcgcttgcccgagtgcccggactggcgatggatgagtccgacgtgcgcgcgctcgccgcgtga

SEQ ID NO: 85330 - protein, 254 aa, Azoarcus sp. BH72
MAKVTLVGAGPGAADLLTVRAVRAIGQADVLLADALVTEEVLALAKPGARVLRVGKRGGMKSTAQDFIHRVMARYARRGCAVARVKGGDPFLFGRGGEEAEYLEALGIEVEVVPGLTSGIAVPAAVGIPVTHRAHTHGVTLVTGTAGDGRDEPNWAALAKCGTTLVIYMGLGRLLNIVARLIAAGMPPDTPAAAIASGTLPGQRHVKGTLADLPLRVTAEGLSSPAIIVVGEVAALARVPGLAMDESDVRALAA

SEQ ID NO: 85331 - DNA, 894 bp, Azoarcus sp. BH72
  CDS (1)..(894): transl_table=11
atgacgcattcccgcctgcgcaatccgcgccccggcccgttgccgggtcatgtctacctggtcggcgccggccccggcgatccggaactgctgacgctgcgcggtgcgcgcctggtcgagggcgccgacgtcgtggtttatgacaacctcgtcagcccggcgatcatcgacctcgcgccggcccgcgcggaacgcatctacgtgggcaagaaggcggccgaccacaccctgccgcaggacgagatcaaccagctgctggtgaagcttgccggcgagggcaagcgggtggtgcggctgaagggcggcgaccccttcatcttcggccgtggcggcgaggagatggaggtgctggtggccgctggcgtgaccgtggaggtggtgccgggcgtcaccgcggcggccggcatcgccgcctacgccggcataccgctgacgcaccgcgaacatgcgcagtccgtcgtgttcaccaccggcttcctgaaggacggtgcgctcgatctcgactggccgatgctggcgcggcgcgggcagacgctggtgatctacatgggcatttcgcggctggccgagatctgcgcgcaactcgtcgcccatggcctgccggccaccacgccggccggcgtcatcgagcgcggcaccaccgcggcgcagcgcgtggtgaccgcggacctgatgaccctgcccgcgcgcgtgaccgaggccggcatccgtccgcccgcgctgacgatcgtcggtgacgttgtcgggttgtacccgcgcctcgcgtggttttccgccgcgccgccggaaggcgaaccgcatctgccgcatgccggctgcagcgcggtgcatgccgggcaggtcgcggagggcctcgacggcgacgccgcggccgggcgcggggacgcgtgttga

SEQ ID NO: 85332 - protein, 297 aa, Azoarcus sp. BH72
MTHSRLRNPRPGPLPGHVYLVGAGPGDPELLTLRGARLVEGADVVVYDNLVSPAIIDLAPARAERIYVGKKAADHTLPQDEINQLLVKLAGEGKRVVRLKGGDPFIFGRGGEEMEVLVAAGVTVEVVPGVTAAAGIAAYAGIPLTHREHAQSVVFTTGFLKDGALDLDWPMLARRGQTLVIYMGISRLAEICAQLVAHGLPATTPAGVIERGTTAAQRVVTADLMTLPARVTEAGIRPPALTIVGDVVGLYPRLAWFSAAPPEGEPHLPHAGCSAVHAGQVAEGLDGDAAAGRGDAC

SEQ ID NO: 85333 - DNA, 1197 bp, Mycobacterium sp. KMS
  CDS (1)..(1197): transl_table=11
gtgaccgataacgcgtacctcgtcggcctccgtctcgcaggcaggaaggtcgtcatcgtcggtggcggcacggtcgcgcagcgccggctgccgctgctgatcgccaacggcgccgacgtccatgtcatcgcccgcgccgccacgcccgccgtcgaggctatgaccggaatcacactgacgctgcgcgacttccgcgtcggagacctcgacggcgcctggtacgtgatcgccgccaccgacgatcccgacgtcaacgcggccgtcgtcgccgaagccgaacgccgccacgtcttctgtgtgcgcgccgacgtcgcccgcgagggcaccgccgtcactcccgcatccttcgaatacgagggtctgtcggtcggggtcctcgccggcggtgagcaccgccgttcggcggccatccggtcggccatccacgaggcgctcgccagcgggctgatctccggcgacgaccccgacacggtgaccaccggtgtcgcgctggtcggcggaggccccggcgaccccgaactcatcacggtgcggggacgccggctgctcgcacaggccgacgtcgtcgtcgccgaccggttggccccgcaggaactgctcgccgaactcccgccgcacgtcgaggtgatcgacgccgccaagatcccgtacggccgggcgatggcgcaggacgccatcaaccaggtgctgatcgaccgcgcctcggcgggcaagttcgtcgtccgcctcaagggcggtgatccgttcgtcttcgcgcgcggttacgaagaggtgctcgcctgcgtcgacgccggtatcccggtcaccgtggtacccggtgtgaccagcgccataggcgttcccgcgctggccggcgtgccggtcacacatcggcacgtgacgcatgagttcgtggtggtcagcggacacgttgcgccggatcaccccgaatcgttagtcaattgggatgcactcgccgccctcaccggcacgatcgttttgctgatggcggtcgaacggatcgaactgttcaccaaggtgctgatcgaaggcggccgacctgcggaaacgccagtgctcgtcgtgcagcacggcaccacgaccgcgcaacgcactttgcgggcgacgctcgccgacgcgccggaacggatgagtgccgaagggatccgacctcccgcgatcatcgtgatcggccccgtcgcggccttcggcggataa

SEQ ID NO: 85334 - protein, 398 aa, Mycobacterium sp. KMS
MTDNAYLVGLRLAGRKVVIVGGGTVAQRRLPLLIANGADVHVIARAATPAVEAMTGITLTLRDFRVGDLDGAWYVIAATDDPDVNAAVVAEAERRHVFCVRADVAREGTAVTPASFEYEGLSVGVLAGGEHRRSAAIRSAIHEALASGLISGDDPDTVTTGVALVGGGPGDPELITVRGRRLLAQADVVVADRLAPQELLAELPPHVEVIDAAKIPYGRAMAQDAINQVLIDRASAGKFVVRLKGGDPFVFARGYEEVLACVDAGIPVTVVPGVTSAIGVPALAGVPVTHRHVTHEFVVVSGHVAPDHPESLVNWDALAALTGTIVLLMAVERIELFTKVLIEGGRPAETPVLVVQHGTTTAQRTLRATLADAPERMSAEGIRPPAIIVIGPVAAFGG

SEQ ID NO: 85335 - DNA, 1452 bp, Neisseria meningitidis FAM18
  CDS (1)..(1452): transl_table=11
gtgaattatttccctattttcgccaacctcgccggccgccccgtattggtcgtaggcggcggcgcggtcgccgcacgcaaaatcagcctgctgctgaaggcgggcgcagaggtcagggttgccgcaaaacacctgaatgccgaactctccgcgttggcggcggaaaacaaaatcctgtggcttgccgaagaatttcgtgccgaacacatccgcacggttttcctcatcattgcggcaagcagcgaccaagccctcaaccggcgcgttttccatcttgccgaaagctgccaaaagccggtcaacgtggtggacgaccgcgaccattgcagcttcatcttcccgtcggttatcgaccgcaacccggttcagattgccgtttccagctccggcagcgcgcccgtcctcgcccgactgctgcgtgaaaggctggaagccctgctgccgccgtctttgggcgatatggcggaaatttcaggaaggtggcgcgatgccgtcaagggcaaactgaaatccgttaccgaacgccgccgcttttgggaaaagcagtttaacggacgtttcgccgccctcgtcaaaaaccggcaaaacacccttgccgaacgggaattggcaaagcagttggaacaaaattatcaaggcggttttgtgtctttggtcggtgcgggtcccggcgatgcggggctgctgacgctcaaagggctgcaggaaatccagcaggcagacgtggtgctttacgacgcgctggtttcagacggcatactgtccctcgtccgccgcgatgcggaacggatttttgtcggcaagcgcgcccggggcggccgcaccccgcaagaggacaccaatgcgcttatggtcaggctggcccgcgaaggcaggcgcgtggtgcgtttaaaaggcggagaccctttcgtgttcggacgcggcggcgaagaattggaaaccttggcacgccatcagatcccgttttcggtcgtccccggcattaccgccgccgtcggcgcgaccgcctatgccggcatcccgctcacgcaccgcgattatgcccaaagtgcggttttcgtaaccggccaccgcaaggcggatgcgcccgacatcgaatggcagaccctcgcccgcagccgccagaccttggtgatttatatgggtgcgctcaaagccgccctgattgccgaacggctgcaacagcacggacgctcgcccgacacgccggcagccgttatcagccaaggcacgctgccggctcaaaaaaccgcaaccggcacgctcgccaacctttccgaactcgccgaaaccgcgccgaatccggcattgattgtcataggcgaagtggtggggctgcacgaaaaactggcttggttcggcgaaaacgccaaaaaagaaagcaatccggccgaacacgcgtattttgcattggacggactgggcaccggacaagaacaacaagccgcataa

SEQ ID NO: 85336 - protein, 483 aa, Neisseria meningitidis FAM18
MNYFPIFANLAGRPVLVVGGGAVAARKISLLLKAGAEVRVAAKHLNAELSALAAENKILWLAEEFRAEHIRTVFLIIAASSDQALNRRVFHLAESCQKPVNVVDDRDHCSFIFPSVIDRNPVQIAVSSSGSAPVLARLLRERLEALLPPSLGDMAEISGRWRDAVKGKLKSVTERRRFWEKQFNGRFAALVKNRQNTLAERELAKQLEQNYQGGFVSLVGAGPGDAGLLTLKGLQEIQQADVVLYDALVSDGILSLVRRDAERIFVGKRARGGRTPQEDTNALMVRLAREGRRVVRLKGGDPFVFGRGGEELETLARHQIPFSVVPGITAAVGATAYAGIPLTHRDYAQSAVFVTGHRKADAPDIEWQTLARSRQTLVIYMGALKAALIAERLQQHGRSPDTPAAVISQGTLPAQKTATGTLANLSELAETAPNPALIVIGEVVGLHEKLAWFGENAKKESNPAEHAYFALDGLGTGQEQQAA

SEQ ID NO: 85337 - DNA, 849 bp, Acidovorax sp. JS42
  CDS (1)..(849): transl_table=11
atgatccgcaaaggagaggcccatatgagcttcattgaagatgcgcgctggttcaccgtggcacccgcagcaggagagtccggacagcccccgaagcctggacacgtgacgctggtgggcgcaggcccgggcgaccctgagttgctcacgctgcgcgccgtcaaggccctgcgcggcgcgcgcctggtgctctacgaccacctggtcggcaaggaggtgctgcgctacgtggctgacgatgccgacctgatctacgtgggcaagcagtcctcgcaccacacgctgccgcaggaatcgatcatcgacctcatggtgcgcctggcgcgcagcgggcgtagcctggtgcgcctgaagggcggcgatggcttcatcttcggccgtggcggcgaagaggtgcaggcgctggccgaggccggtatcgcgttcgacgtggtgccgggcatcacggccgcgcagggtgcgggcgcctgcgccggcatcccgctcacgcaccgtgaccactccgcgaccctggtgtttgccaccggccacctgcgcggcgacaacgaagtggcgctggactgggaggcgctggcacgcccgcgccagaccgtggtgatctacatggggatgggcacgctgccgatcatctgccgcgaactggtgcgccacggcctgccggaccgcacccccgcagcgctggtggagcaagcctcgctgcccgggcagcgctgcatcaccggcacgctgcaggacctgcccgcgctggcgcagcagcaccgggtgcgtccccctgcgctcatcatcgtgggcgacgtggtggcgctgcagccgcaactcatgcagggcatgctggcgacgatggtgtga

SEQ ID NO: 85338 - protein, 282 aa, Acidovorax sp. JS42
MIRKGEAHMSFIEDARWFTVAPAAGESGQPPKPGHVTLVGAGPGDPELLTLRAVKALRGARLVLYDHLVGKEVLRYVADDADLIYVGKQSSHHTLPQESIIDLMVRLARSGRSLVRLKGGDGFIFGRGGEEVQALAEAGIAFDVVPGITAAQGAGACAGIPLTHRDHSATLVFATGHLRGDNEVALDWEALARPRQTVVIYMGMGTLPIICRELVRHGLPDRTPAALVEQASLPGQRCITGTLQDLPALAQQHRVRPPALIIVGDVVALQPQLMQGMLATMV

SEQ ID NO: 85339 - DNA, 810 bp, Acidovorax sp. JS42
  CDS (1)..(810): transl_table=11
atgaccacaccttctcttccagcccatgcaggcagctgcaccctggtgggcgccggccccggcgaccccgagctgctcaccctcaaggcggtgaaggccatccaggccgccaccgtgctgctggtggacgacctggtgagcgacgccatcgtcgccctggcccgccccggcgcccgcgtcgtgcatgtgggcaagcgcggcggctgcaagagcacgccccaggcgttcatcgaaaagctcatgctcaccgccgtgcaggagggcgagaccgtggtgcgcctgaagggcggcgacccgttcatctttgggcggggcggcgaagaggtggagcacctgcgcgcggcgggcgtgccggtgcaggtggtcaatggcatcaccgccggcctggcgggcatgacgcagctgggcgcgccgctcacccaccgcgaacatgcgcacggcgtggtcttcatcacgggccacaacaagcctgggaaccaaggcaccgactggcgccagctggccgccaccgcgcgcgatgcacgcctgaccctggtgatctacatgggcgtgaccggctgcgcccacatccaggaggaactgctcaccggcctgcctgcgcacacgccggcggtggtgatccagcatgtgagcctgccgcagcagcgccacgcggtgaccacgctgggccagttgcagtccaccatcacccgcgaggggctggccagcccctcggtgatcgtgatcggcgacgtggtgcgcggcatccaggccgtggcgcacggcgaagatgcagccccggtagcaggcacgcgcagccgggcggtgtga

SEQ ID NO: 85340 - protein, 269 aa, Acidovorax sp. JS42
MTTPSLPAHAGSCTLVGAGPGDPELLTLKAVKAIQAATVLLVDDLVSDAIVALARPGARVVHVGKRGGCKSTPQAFIEKLMLTAVQEGETVVRLKGGDPFIFGRGGEEVEHLRAAGVPVQVVNGITAGLAGMTQLGAPLTHREHAHGVVFITGHNKPGNQGTDWRQLAATARDARLTLVIYMGVTGCAHIQEELLTGLPAHTPAVVIQHVSLPQQRHAVTTLGQLQSTITREGLASPSVIVIGDVVRGIQAVAHGEDAAPVAGTRSRAV

SEQ ID NO: 85341 - DNA, 780 bp, Magnetospirillum magnetotacticum MS-1
  CDS (1)..(780): transl_table=11
atgctcgacctgcctattgaccttcccgaatttctccccggttccgtttggctggcgggtgccgggcccggtgatccggggctgctgaccctgctggcgctccatgccatcaagagcgccgaggtggtcattcacgacgccctggtggatgggcgcatcctggcgctgatccccgccgcggcagagatcgaatccatgggcaagcggggcggcgaggcttcggtccgccaagccgagatcacggcgcggatgatccatctggccaaggcgggcaagcgcgtgctgcgcctcaagggcggcgatcccttcgtctttggccgcgggccggaggaggccttggctttggcgggcgccggagtgcctttccgcatcgtgccggggatcacggcggggatcggcggcctggcctatgccggtattccggtgaccgccaaggaaaccaattcggcggtggccttcgtcaccggccatggtcccgatggcgagatgcccgacgcgttcgactgggacgccctggcgcgcggcgcgccggtcctggtgttctatatggggctgaagcatctggagcgcctgacgtcgcggctgatggcggcggggcggcgccccgatgaggcggcggccctggtctgcaacgcggcgacggaacgccaaagcgtgctggagaccaccctggccgaggcggcgggcgcggtggagcgggcgggcctcaaaccccccgccctgttcgtggtcgggcaggtggtggcgctgcggcggcaactggactggtggcggggatga

SEQ ID NO: 85342 - protein, 259 aa, Magnetospirillum magnetotacticum MS-1
MLDLPIDLPEFLPGSVWLAGAGPGDPGLLTLLALHAIKSAEVVIHDALVDGRILALIPAAAEIESMGKRGGEASVRQAEITARMIHLAKAGKRVLRLKGGDPFVFGRGPEEALALAGAGVPFRIVPGITAGIGGLAYAGIPVTAKETNSAVAFVTGHGPDGEMPDAFDWDALARGAPVLVFYMGLKHLERLTSRLMAAGRRPDEAAALVCNAATERQSVLETTLAEAAGAVERAGLKPPALFVVGQVVALRRQLDWWRG

SEQ ID NO: 85343 - DNA, 780 bp, Nostoc punctiforme PCC 73102
  CDS (1)..(780): transl_table=11
atgaaccgcacagaaaaacaggagaacgagtatttgggaaaggtttatttagtaggtgcggggccaggagatccaggattattaaccctgaaggcgaaaggtttgttggaatgtgcagatgtagttatctatgatgccttagtgagtccggcaattctggcaatgattaatccccaagctgaacaaattaatgctggtaagcgtagggggaaacattccctgttccaggaagaaacaactcaattgctgatagataaagcgcaggatcgtgcaattgtagtgcggttaaagggtggcgatccgtttatctttggtcgcggtggcgaagagatggaagaattagtcaacgctggtatatcaactgaagttgtgcccggtatcacatcgggtattgcagccgcagcttatgcaggtattccattgactcatcggctgtatagctcatcagtgacatttgtaactggtcatgaagctgcgggtaagtataaaccgaaagtgaattggaatgcgatcgcacacggttccgaaaccattgtaatctatatgggaattcacaatctgccttatattgtggaacagttaagtgcagctgggttggatgtagaaacgcctattgctttggtgcgctggggtacgcgcccagaacaagaagaattgattggaaccttaaagacaattgtagaacaggtagagcaaactggatttggtgcgcctgcgatcgcagtcattggacaagtagtaaatatgcacagtattttgtctagttgtcgtccagtttga

SEQ ID NO: 85344 - protein, 259 aa, Nostoc punctiforme PCC 73102
MNRTEKQENEYLGKVYLVGAGPGDPGLLTLKAKGLLECADVVIYDALVSPAILAMINPQAEQINAGKRRGKHSLFQEETTQLLIDKAQDRAIVVRLKGGDPFIFGRGGEEMEELVNAGISTEVVPGITSGIAAAAYAGIPLTHRLYSSSVTFVTGHEAAGKYKPKVNWNAIAHGSETIVIYMGIHNLPYIVEQLSAAGLDVETPIALVRWGTRPEQEELIGTLKTIVEQVEQTGFGAPAIAVIGQVVNMHSILSSCRPV

SEQ ID NO: 85345 - DNA, 1590 bp, Nostoc punctiforme PCC 73102
  CDS (1)..(1590): transl_table=11
atgactaagattgaagaaaggggcaaagtctaccttgtaggtgctgggcctggagatgtggcatatctgacggtaaaagcttacaatctcttagctgctgctcaggttttagtctacgatgccctggtagatgctcaattattgcagtgtgtaccacctaattgcttgaagttggatgttgggaaacgcggtggtaaacctagtacaacccaaactgagattaataagttactagtaaaatattgccagcaaggaaaacaagttgtaaggctcaaatcaggcgatccattgatttttgggcgttgcacttctgaaattgaagctttgaaagcatctggttgtgattttgaactgataccaggaatttcttctgcccttgcagcacccttgtttgcaggaattccccttacagatccggtgttgagtcgttgttttgcagtgcttacagctcatgaaccagaggttttagactgggaggcactctcacgcttggagacactagtaattttgatgggagggcaacatctgccagagattgtacatcaactggtgcaacacgggcgatcgcacttaacacccattgcaatcatccgttgggcaggaactcctcgtcaaaaaatttggacagcgcaactgggcaatattttggaacaaaccaccggattatcactttccccggcggtaattgttgttggcgaagttgttgggctacataagtacttacaacctgagaaaatagattgtcaggattcgactacagcccaaactccaatgttaaacaacctctccgcctctcccgaacccctcactggtaaaacaatcttggtgacacgttcagttggacagtcgagtacatttagcgatcgcctcaccacattaggtgcaacagtcatcgaaatgcctaccttagaaatcggcccgccctccagttgggaagctttggatgatgcgatcgctcatttatctcagttcgactggttaattctcacttctagcaatggcatagattacttttttgaaaggttaatcgcccaaggtaaagatacccgtgccttagcaggtgtaaaaattgccgtcgttggcgagaaaacagccaatagtctcaaacaatactctctccaaccagattttattccccccaactttgttgcagattctttaatagaaaatttcccagagaaactggatggtaaaaaagttttattccccagagttgaaagtggcggaagagaaattttggttaaggaattaactctcaagggagcaaaggtgatagaagttgccgcatatcaatcctgttgtcctagtagtattccatctggagcagagttagctctccaaaaccataatgtaaatgtaattacctttgccagttctaaaactgtgcaatttttctatcagcttactgaaaagatattctcccaaaattctgatgttagtcaactcttagagaacgtttgtattgcttctatcgggcctcaaacctctaaaacttgtcatgatttattcgggcgtgtagatgtggaagcccaagaatatactttagatggtttaacccaagcattaataatatgggcaacaaattattag

SEQ ID NO: 85346 - protein, 529 aa, Nostoc punctiforme PCC 73102
MTKIEERGKVYLVGAGPGDVAYLTVKAYNLLAAAQVLVYDALVDAQLLQCVPPNCLKLDVGKRGGKPSTTQTEINKLLVKYCQQGKQVVRLKSGDPLIFGRCTSEIEALKASGCDFELIPGISSALAAPLFAGIPLTDPVLSRCFAVLTAHEPEVLDWEALSRLETLVILMGGQHLPEIVHQLVQHGRSHLTPIAIIRWAGTPRQKIWTAQLGNILEQTTGLSLSPAVIVVGEVVGLHKYLQPEKIDCQDSTTAQTPMLNNLSASPEPLTGKTILVTRSVGQSSTFSDRLTTLGATVIEMPTLEIGPPSSWEALDDAIAHLSQFDWLILTSSNGIDYFFERLIAQGKDTRALAGVKIAVVGEKTANSLKQYSLQPDFIPPNFVADSLIENFPEKLDGKKVLFPRVESGGREILVKELTLKGAKVIEVAAYQSCCPSSIPSGAELALQNHNVNVITFASSKTVQFFYQLTEKIFSQNSDVSQLLENVCIASIGPQTSKTCHDLFGRVDVEAQEYTLDGLTQALIIWATNY

SEQ ID NO: 85347 - DNA, 1458 bp, Fusobacterium nucleatum subsp. vincentii ATCC 49256
  CDS (1)..(1458): transl_table=11
atgaaaaaaggaaaagcatatataattggagcaggacccagggattttgagctattaacattgaaagctaaaagaattattgagaatgcagattgtattgtatatgatagattaatcagtgaagatatattaagatttgcaaaaaaagatgcagagcttatatattttggaaaagaaaatacagagggaggtttaattcaagatgaaataaatcaaactcttgtaaaaaaatgtcttgaaggaaaaaatgttgccagagtaaaaggtggagatccttttgtctttggtagaggtggagaagaaattgaagctctatttaaaaataaaattgaatttgaagttattccaggaataacttcttctatatctgtaccagcctacgcaggaatacccataacacatagaggacttgcaaggtcttttcatatttttacaggacatactatggagaatggaaagtggcataattttgagaatattgcaaaattagaaggaactttaatttttttaatgggggttaaaaatttagatttaatagttaatgatttaattaaacatggtaaagatagtaaaactcctattgccattgtagagaaaggtgcaactaaaaatcaaagagtaacagttggaaacttagaaaacattttagagcttgttgaaaaaaataaaataactccacctgctataactgtaattggagaagtagttaatttaagagaaacttttaaatggtttgaaagtgagaatcttgctaaaaaaatattagtaacaagagataaaaaacaagcagttgaaatgtctgaaaatatttctaaaagaggaggaattcctgttgagttaccttttatagaaatagaaaacttaactattgatttaaaggatttagaaaaatataaggctattttatttaattcacctaatggagttaaagcattctttgaaaatataaaggatataagatgtttagcaaatataaaaattggaactgttggagttaaaactaaggaaatattagaaaaatataaaatagttccagattttgttcctaatgaatatttggtagataaattagcagaagaagtggtaaaatacacaaatgaaaatgataatattttaatagttacttctgatatttctccttgtgatacagataaatataattctttatataaaagaaattatcaaaaagttgtagcttacagcacaaaaaaattaaaagttgatagagagaaagtgcttgaaactttaaaagatgtagacattataacttttttaagttcatcaacagtggaagcattttatgaaaatttagatggaaatttcttcattttaggagataaaaaaattgcttctattggacctatgacaagtgaaactataagaagattaggaatgaaagttgattatgaagctgaaaaatatacagctgatggcttacttgatgtaatttttaaataa

SEQ ID NO: 85348 - protein, 485 aa, Fusobacterium nucleatum subsp. vincentii ATCC 49256
MKKGKAYIIGAGPRDFELLTLKAKRIIENADCIVYDRLISEDILRFAKKDAELIYFGKENTEGGLIQDEINQTLVKKCLEGKNVARVKGGDPFVFGRGGEEIEALFKNKIEFEVIPGITSSISVPAYAGIPITHRGLARSFHIFTGHTMENGKWHNFENIAKLEGTLIFLMGVKNLDLIVNDLIKHGKDSKTPIAIVEKGATKNQRVTVGNLENILELVEKNKITPPAITVIGEVVNLRETFKWFESENLAKKILVTRDKKQAVEMSENISKRGGIPVELPFIEIENLTIDLKDLEKYKAILFNSPNGVKAFFENIKDIRCLANIKIGTVGVKTKEILEKYKIVPDFVPNEYLVDKLAEEVVKYTNENDNILIVTSDISPCDTDKYNSLYKRNYQKVVAYSTKKLKVDREKVLETLKDVDIITFLSSSTVEAFYENLDGNFFILGDKKIASIGPMTSETIRRLGMKVDYEAEKYTADGLLDVIFK

SEQ ID NO: 85349 - DNA, 1482 bp, Listeria monocytogenes str. 4b H7858
  CDS (1)..(1482): transl_table=11
atgggaaaagtcatgttaattggtgcaggtcctggagatgcacagttgctaaccgtgaaaggcttagctgcactgcaaaaggcagatgttattgtatacgatcgcctcgttgaaccagcgatgctccaagaacgaaaagctagttgtaaactcatttatgtcggaaaagaaccacttcatcatccaattccccaagaggaaatcgagcaaattcttgttaaagaagctgcgacaaatgagctggttgttcgtctaaaagcaggagacccttatgtgtttggtcgcggcggggaagaaggagagacactctataaagcgggaattccatttgaagttattcctggaatcacatccgcaattggtgggcttgcctacgctggaatcccagtaacacatcgtaattttgcttcgagttttcacgtgattaccggacatttgaaaaaaggacgcgatccactagattgggaagcccttgctagactggaaggtacgctcgttttcctgatgggaatgactaatttgcctaatatttgtgcgaacttactagaaaatggtcgaaaagccgaaacgggtgttgcgattgtacaatgggcatctcgcggcaaacaattaacggttaccgggaacttacaaaacatcgaacaaaaagtagcggaatctggtatttcttcgccggcacttattgttgttggtgatgtggtgagcttacgaccgcagcttaacttctttgaggaaatgccacttttccatacaaaagtattacttccaagagcacgagctggaaaaagtatgctcgcggaacaaattcgcgatttaggcggagaagtaacaatgtatcccaatattcaagtagtagatgttgtgccaacgaaaacaaaagaagaactaagagaagtaagcggacttcttttcacatccaaagaagcggtagaacgattttttgattatttagcccagcttgatttagatattcgttctctaaaaaatacccatcttaccgctattggcaaacaaacaaaagaagcttttagtgaaaaaggaattattccagatagtttcattaaaaggcggagcacggaattaattttggagcatttaccacggttacagaaaaatgtgagcaacttaattatcggaagcatagttgatacggcagaagttaacgcaattttagcagaagtggaagcgatggaaatgatgccgttatatgatatgcgtcctgtgacagaacgaccatttgaccttgcaagctttgaacaagtttgtttctcaagttcgcgttccgttcaaaatttactcgacgtactaacaaccgaagaaaaagccattttacaaacgaaaacaattctttccattggaaggttcacgagcgcaacgttagcatcattcggtatcaacaattttatcgaagccgaaagcgccacaccagagagcttaattgaactaatccaaaaaacaaaattagaaggagtaccacaatga

SEQ ID NO: 85350 - protein, 493 aa, Listeria monocytogenes str. 4b H7858
MGKVMLIGAGPGDAQLLTVKGLAALQKADVIVYDRLVEPAMLQERKASCKLIYVGKEPLHHPIPQEEIEQILVKEAATNELVVRLKAGDPYVFGRGGEEGETLYKAGIPFEVIPGITSAIGGLAYAGIPVTHRNFASSFHVITGHLKKGRDPLDWEALARLEGTLVFLMGMTNLPNICANLLENGRKAETGVAIVQWASRGKQLTVTGNLQNIEQKVAESGISSPALIVVGDVVSLRPQLNFFEEMPLFHTKVLLPRARAGKSMLAEQIRDLGGEVTMYPNIQVVDVVPTKTKEELREVSGLLFTSKEAVERFFDYLAQLDLDIRSLKNTHLTAIGKQTKEAFSEKGIIPDSFIKRRSTELILEHLPRLQKNVSNLIIGSIVDTAEVNAILAEVEAMEMMPLYDMRPVTERPFDLASFEQVCFSSSRSVQNLLDVLTTEEKAILQTKTILSIGRFTSATLASFGINNFIEAESATPESLIELIQKTKLEGVPQ

SEQ ID NO: 85351 - DNA, 777 bp, Bacillus cereus G9241
  CDS (1)..(777): transl_table=11
atgggaaaagtatatatcgttggagcgggccctggtgatccagatttaattactgtgaaaggattgaaatgtattgagaaagcagacgttattttatacgaccgtctcgtaaataaagagttgctttcatacgcaaagcctgaagcggatttaatttattgcggaaaattgccaaattatcacacgatgaagcaagagacaattaacacatttcttattaaatacgcgaaaaaaggaaaagttgtaacgaggctaaagggcggggatccatttgtatttggtagagggggagaagaagctgaagcgttagtgaagcaaggtgtaccgtttgaaattattcctggtatttcagctggaatagctgcacctgcttatgctggtattccagtgacgcatcgtgatgcgagtgcaagttttgctattgtgacggggcataggaaagaagatgctgaagaggaagtgaagtgggaacatttagcgaaaggtgtagagacgttagctgtatatatgggggttagtaatttgccctacatatgtgaacaactggtgaaacatggaaaagatacaagtacgcctgctgctattattgagaggggaacgacttctatgcagcgcacagttgtcgggacgttagggacaattgtagatgttgcgaaaaaagaacaaattcaaaatccgagcatgattgtaattggagaagtggtccgttttagagaaaagatccattggtttgagaaacagactgaaagtacgtatcaagtaagcggagtgttataa

SEQ ID NO: 85352 - protein, 258 aa, Bacillus cereus G9241
MGKVYIVGAGPGDPDLITVKGLKCIEKADVILYDRLVNKELLSYAKPEADLIYCGKLPNYHTMKQETINTFLIKYAKKGKVVTRLKGGDPFVFGRGGEEAEALVKQGVPFEIIPGISAGIAAPAYAGIPVTHRDASASFAIVTGHRKEDAEEEVKWEHLAKGVETLAVYMGVSNLPYICEQLVKHGKDTSTPAAIIERGTTSMQRTVVGTLGTIVDVAKKEQIQNPSMIVIGEVVRFREKIHWFEKQTESTYQVSGVL

SEQ ID NO: 85353 - DNA, 1425 bp, Bacillus cereus G9241
  CDS (1)..(1425): transl_table=11
atgaacggatatgtatatttagttggtgcaggaccaggtgatgaagggcttattacaaagaaagcgatagattgtttaaagcgtgcagatatcgttttatatgatcgtttattaaaccctttctttcttagttatacaaaagaaacatgtgaacttatttattgcggaaaaatgccgaagaatcacattatgcgacaagaaatgattaacgcccacctccttcaatttgcgaaagaagggaaaatcgttgtccgcttaaagggcggagatccatctatctttggccgtgtcggtgaagaagcagaaactttagcagcagcgaacattccatatgaaattgtaccaggtattacatctagcatcgccgctagtagctatgcaggtatccccctcacccatcgtaactacagtaatagcgtcactttactaactgggcatgcgaaaagtcctttaaccgattatggaaaatttaattcatctcacaatagcgatacaattgcctactacatgggtataaaaaacttacctacaatttgtgaaaacttactacaagcaggaaagaaaaaagatacgccagtagccgtcattgaatggggtacaaccggaaagcagcgcgttgtcacaggaacactttcaaccattgtttctatcgtcaaaaatgaaaatatttctaatccatctatgacaattgttggtgatgtcgtttccttacgtaatcaaatcgcttggaaagaacgtaaaccattacatggtaaaaaagttttatttacatccgcaacaaataaaacaagtgtaataaagcaaaagttacaagaagctggtgcagaaatatatcaaattccaactttcaaaaaggtagaatacacattaacatttgaacaaatcaatgaaatttttaatattgatcgtcttgttttttgttcagctgaaagtgtagaaatattgatgcgatcatgtagtaaacaccaaaaagatattcgttccttacaggcagagctgcaacatatgaacgttgctactcaagaaaaaattatgcaatatgggctactaagtaaacaagcagagtactcttccgatactactgtttatttaggcagaaatattaaccgaattgcttttattcaagagaaaattggtgccggctcctatatgatgactcataagtatacaattgatcatcgtttcgatgaagtccattctcgtatgctttctgaattcttatgggatagcattgtatttgaaggacgcgcttctattgatacgtttctagcagaagtaaaacgtcttggctttatcgatattgttactctcccattctcgtataccgacgttccaactttacactatgcaaataaagtcgggtttcataacgtagatcatcaattacaagaaactcttatgaagaaagacatggtaagacaatga

SEQ ID NO: 85354 - protein, 474 aa, Bacillus cereus G9241
MNGYVYLVGAGPGDEGLITKKAIDCLKRADIVLYDRLLNPFFLSYTKETCELIYCGKMPKNHIMRQEMINAHLLQFAKEGKIVVRLKGGDPSIFGRVGEEAETLAAANIPYEIVPGITSSIAASSYAGIPLTHRNYSNSVTLLTGHAKSPLTDYGKFNSSHNSDTIAYYMGIKNLPTICENLLQAGKKKDTPVAVIEWGTTGKQRVVTGTLSTIVSIVKNENISNPSMTIVGDVVSLRNQIAWKERKPLHGKKVLFTSATNKTSVIKQKLQEAGAEIYQIPTFKKVEYTLTFEQINEIFNIDRLVFCSAESVEILMRSCSKHQKDIRSLQAELQHMNVATQEKIMQYGLLSKQAEYSSDTTVYLGRNINRIAFIQEKIGAGSYMMTHKYTIDHRFDEVHSRMLSEFLWDSIVFEGRASIDTFLAEVKRLGFIDIVTLPFSYTDVPTLHYANKVGFHNVDHQLQETLMKKDMVRQ

SEQ ID NO: 85355 - DNA, 783 bp, Crocosphaera watsonii WH 8501
  CDS (1)..(783): transl_table=11
atgacggaaaatattagcgaaatttgcttaggtaaggtctatttagttggggcaggacccggtgatcctgggttaatgaccataaaaggcaaaactttgcttgaacacgctgatgtcgtcgtttatgatgccctagtaagccctccgatactagatatgattggggaaaaagcgattaaaatcgatgcaggaaaacgtcggggtcgtcattctaagttacaagcagaaactacccaaattttaatcgaaaaagcgagacaatatcctgtcgtagttcgtcttaaaggtggtgatccctttgtatttggtcgcggaggagaagagatggcagacttagttaatgcaggtattcctgtggaactggttccaggaattacttctggtattgcagcccctgcttatgcaggtattcccgtcactcatcggggttatagttcttctgttacctttgttactggtcatgaagcagtaggaaaatatcgacctaagattaattgggaggcgatcgctcaaggttcagaaactattgttatttatatgggtgttcataacctccctaatattatcagaaaattacaaaaaggtggcttaactgctgcaactcctattgctttgattcgttggggaactcgaccagaacaagaacaattaatggggacgttagagactattattaaacaggtagaagagactaactttgaagcaccggcgatcgcaattattggtaaagtggtagatttatcagtgaacagttatcagttatcattcattgagttctcctaa

SEQ ID NO: 85356 - protein, 260 aa, Crocosphaera watsonii WH 8501
MTENISEICLGKVYLVGAGPGDPGLMTIKGKTLLEHADVVVYDALVSPPILDMIGEKAIKIDAGKRRGRHSKLQAETTQILIEKARQYPVVVRLKGGDPFVFGRGGEEMADLVNAGIPVELVPGITSGIAAPAYAGIPVTHRGYSSSVTFVTGHEAVGKYRPKINWEAIAQGSETIVIYMGVHNLPNIIRKLQKGGLTAATPIALIRWGTRPEQEQLMGTLETIIKQVEETNFEAPAIAIIGKVVDLSVNSYQLSFIEFS

SEQ ID NO: 85357 - DNA, 762 bp, Prosthecochloris aestuarii DSM 271
  CDS (1)..(762): transl_table=11
atgtctgaaacacacaacgggggacgggtggtgattgccggtgcaggcccgggagatccggagttgctgaccgtgaaggccgccagacggctgcagcaggccgatgccgtcctgtatgattccctggtgacaagggaaatcctcgatcttgccgcaaagggagccgatatggtgcctgtcggaaaacggtgcggggacgggcaggaccagacacaacggcagaatgccatcaatgagctcatgctcgattatgcccgcaggggagcgctctgtgtccggctcaaggcgggagatcccttcgtgttcggaagaggggtcgaagaggttcgttttctgaccgaacgccaggtcacggttgaggtcattcccggaatcagtgccggcatagcggctgcgaacctttttcacgttcctgtgaccgagcgttacagaacctcttcggtaatattgagtacagggcatacgtccacctgctcgatggaggagttcgatagtgtggtcgcgttgctgaaacagggtactccgcttgtgctgtacatgggaatgaaacatctcgagtgtatctgccagcggttgctggacgccggattttcgccggattttccgctctgcgcagcatcacgggtgtccatgcccgatcagcagctgatctgtgcaacgctggggacgatctgcttgcttctggtcaaaacaccgttgccgacacctgtcgtgtttttcgtgggggagcatgccgtccccatatcgcagcagaccgtataa

SEQ ID NO: 85358 - protein, 253 aa, Prosthecochloris aestuarii DSM 271
MSETHNGGRVVIAGAGPGDPELLTVKAARRLQQADAVLYDSLVTREILDLAAKGADMVPVGKRCGDGQDQTQRQNAINELMLDYARRGALCVRLKAGDPFVFGRGVEEVRFLTERQVTVEVIPGISAGIAAANLFHVPVTERYRTSSVILSTGHTSTCSMEEFDSVVALLKQGTPLVLYMGMKHLECICQRLLDAGFSPDFPLCAASRVSMPDQQLICATLGTICLLLVKTPLPTPVVFFVGEHAVPISQQTV

SEQ ID NO: 85359 - DNA, 1389 bp, Prosthecochloris aestuarii DSM 271
  CDS (1)..(1389): transl_table=11
atgaatcatacatcagatcagcatggcaacgaacctcttgatagagcaaaaggttatgtttacatcgtcggtgcgggtcccggcgatccggaactgattaccgtcaaggctcaaagagtgctctctgaagccgatgtcatcctctacgacgatcttgtcagccttgaactggtcgatcagttcaacgcgttgaagatctataccggcaaacgcaaggacagtcaccatttcgagcaggaggagatcaatcgtgagattgtccgtcatgccagtgaaggcaaaacagtcgttcgtcttaaagggggagacccgtttatttttggccggggtggagaggaaatcgatacattgcgcaacgtcgggattcattacgagatcattccgggcattacggctgcccacggtgcgagcgcctataccgagataccgctcaccatgcgcaggatatcctcttccgtcgctttctgtacaggccatccggtcaacaggattcaggtgcccgataccgatacgatcgtctactacatggttgcctccacggtccatgacgtgcttgatgcggttgcagccaaagggcgctccggggcgactatggtcgctgttgtgcagagcgctacgcagtacaatcagaaaacctacaccggaacgctcgacgagttcaggaggcgtgaaaaggctgtctactcgcctgctctgcttattataggcgacagcatcggtcagtttatagagcacaactggcattcgcgcaagaaaaaggtgctgatgaccggcggggattcaagccgttacagcagcacagattatattatggtccactttccctgtcgcaagatttcaggggcggatctcgatgcggtcaatcgagtgctcgatcatatcgcagactattcgctcctttttttccctaacaagttttcggtcaagtacttttttcgcttccttttcgagtcaggcagggatgtgcgaagtctggcccatatgaccatctgtaccgccggcagtgctgccgcagctgaacttcaggagtcgggccttgttgcggatcattaccttgaaccggacgggacggtcggttacgcggagcgtcttcgtgagttgtgcgttagcggtcagcagatcctgcttccgggatccagcattacggacgattcgctcgtcgccggtctcacgcaaatgggcaacagcgttacaccgcttggcgtatacgcccatgaggtgcgccaggatgaggtgatcgatctcgacttcatcgatgaaatctatttctcgtcacctgtctgtgtcagaaacttccagacgctgttcaagacgattcccggtcgcatcaccgtcacgactgctgaccgcagtacacagaacgagtacgactcgctcttcggtgactga

SEQ ID NO: 85360 - protein, 462 aa, Prosthecochloris aestuarii DSM 271
MNHTSDQHGNEPLDRAKGYVYIVGAGPGDPELITVKAQRVLSEADVILYDDLVSLELVDQFNALKIYTGKRKDSHHFEQEEINREIVRHASEGKTVVRLKGGDPFIFGRGGEEIDTLRNVGIHYEIIPGITAAHGASAYTEIPLTMRRISSSVAFCTGHPVNRIQVPDTDTIVYYMVASTVHDVLDAVAAKGRSGATMVAVVQSATQYNQKTYTGTLDEFRRREKAVYSPALLIIGDSIGQFIEHNWHSRKKKVLMTGGDSSRYSSTDYIMVHFPCRKISGADLDAVNRVLDHIADYSLLFFPNKFSVKYFFRFLFESGRDVRSLAHMTICTAGSAAAAELQESGLVADHYLEPDGTVGYAERLRELCVSGQQILLPGSSITDDSLVAGLTQMGNSVTPLGVYAHEVRQDEVIDLDFIDEIYFSSPVCVRNFQTLFKTIPGRITVTTADRSTQNEYDSLFGD

SEQ ID NO: 85361 - DNA, 1431 bp, Xylella fastidiosa Ann-1
  CDS (1)..(1431): transl_table=11
gtgactgccaacgttctgttccccttatttgccaacctacacgaccgcgccgtcctggtggtcggcggcggtaaggttgccgaacgcaagacagaagcattactcaaagtgggcgccttgccgattatcggcgccccctctctgaccgcatcgttacagcgctgggccgaaaccggtcgcatcacgtggcggcaagggacgtttgaagacagctggctgcaagaagatatttggttggtcatcgccgccaccgatcaacccgaagtgaaccacgccgcggcgcgcgcagcacatgcgcaacggttattcgtcaacgtggtcgacgacattgcactctccaacgtgcaggtcccggccgtggtcgaacgcgggccgttgcggatcgcgatttctagcggcggtggcgcaccgatggtggcacgctatctgcgacaacaactggaaagcctcattgacgatagttggggacgactgaccacactgtttgcgcaacgccgcgacactatccgcgcccgctatccaaacatagaagcacgccgccgcttctttgaaacccaactcgtcggcccactccaacgattgctacgcaaacaacgccacgcagaggccgaagcagtgctggaagcagcactcgccgagactccccccacggagtccggcagcgtcaccctggtgggcgctggcgccggcgacgcagggctactgaccttaaatgcactgcgcgccttgaatgaagccgacatcatcctctacgaccgcctggtcagcgacaccgtgttacagatggcacggcgcgatgcggagcagatcgaagtaggcaaatccgcaacgggccacagtgtgcgccaagaagacattcacaccctgatgctgcaacacgcccgtgctggtcagcgtgtcgtacggctgaaaggtggcgatccattcgtcttcggtcgtggtggcgaggaactggaattcttacgtacccacggcatcccctatgaggtcatccccggaatcaccgccgcccttgcctgtgccgcctatgccggtatccccttgacccaccgcgaccacacccaatcgctatgcctgatcaccgcccattgccaatcctccctagataccctgaactgggttgcactggcacaagaacgtcaaacgctggcgttctacatgggcgtggcgggactacccaccatccagcaacgcctgtgtgaggctggacgggccgaaacaacgccttttgcactgatcgaaaatggcgcacgcgcgcaacagcgggtgctcacaggaacgctgaaaacactcgcgcacaccgcacagacatacgccgtgcgtccccccgcactgctgatcctcggcgaagtcaccgcgctggccgaacacctgcattggttcggcaccacaccattatctgccccatgcccccacgcacgcatcctataa

SEQ ID NO: 85362 - protein, 476 aa, Xylella fastidiosa Ann-1
MTANVLFPLFANLHDRAVLVVGGGKVAERKTEALLKVGALPIIGAPSLTASLQRWAETGRITWRQGTFEDSWLQEDIWLVIAATDQPEVNHAAARAAHAQRLFVNVVDDIALSNVQVPAVVERGPLRIAISSGGGAPMVARYLRQQLESLIDDSWGRLTTLFAQRRDTIRARYPNIEARRRFFETQLVGPLQRLLRKQRHAEAEAVLEAALAETPPTESGSVTLVGAGAGDAGLLTLNALRALNEADIILYDRLVSDTVLQMARRDAEQIEVGKSATGHSVRQEDIHTLMLQHARAGQRVVRLKGGDPFVFGRGGEELEFLRTHGIPYEVIPGITAALACAAYAGIPLTHRDHTQSLCLITAHCQSSLDTLNWVALAQERQTLAFYMGVAGLPTIQQRLCEAGRAETTPFALIENGARAQQRVLTGTLKTLAHTAQTYAVRPPALLILGEVTALAEHLHWFGTTPLSAPCPHARIL

SEQ ID NO: 85363 - DNA, 717 bp, Sulfitobacter sp. EE-36
  CDS (1)..(717): transl_table=11
atgagcggtttcgtctctttcgtctcctccggtccgggtgatcccgagctgctgaccgtgaaggcggtaaagcggttgcaagaggccgaagtcgtgctgttcgacgatctgtcggcgggtccgatccttgaacatgtctcgcccgaggcggatttgatcggggtgggcaaacgcgccggacggctgtctccgaagcaggatcacgtgagccgtttgctggtcgaacacgcattgaccggcgcgcgggtggtgcggctcaaaagcggggacgcgggcgtgtttggccggcttgaagaagagctgaccgcgctgaaagcggcaggcgtcgccttcgagatcatccccggtgtgacggcagcgtcttcggcggcggcggcagcgatgatcccactgacacggcggctgaccgcgcggcgggtgcaattcatcaccggccacggcgaatcgggggccttgcccgaagatctgaacatggcggcgctggccgaccctacggcgaccacggtcgtctacatgggccgccgcacctttgcgggtttcgccgcgcggctgatcgcggcgggcttgccgccctcgacccctgccctgctggcagaggcggtatcgacccccgatcaaaagctgagccgccacacggttgaaagccttgcccatctgccactggatcccgcaacgtcagcgcctgcgctgatcctttacgggccgttgaccgaatag

SEQ ID NO: 85364 - protein, 238 aa, Sulfitobacter sp. EE-36
MSGFVSFVSSGPGDPELLTVKAVKRLQEAEVVLFDDLSAGPILEHVSPEADLIGVGKRAGRLSPKQDHVSRLLVEHALTGARVVRLKSGDAGVFGRLEEELTALKAAGVAFEIIPGVTAASSAAAAAMIPLTRRLTARRVQFITGHGESGALPEDLNMAALADPTATTVVYMGRRTFAGFAARLIAAGLPPSTPALLAEAVSTPDQKLSRHTVESLAHLPLDPATSAPALILYGPLTE

SEQ ID NO: 85365 - DNA, 1395 bp, Sulfitobacter sp. EE-36
  CDS (1)..(1395): transl_table=11
atggatcatttcccaatctacctgtccaccaagggccagcgcatcgtcttgtcaggcggtggcgaagcggctttggccaagctgcgcctgctgctcaagaccgaagccaagatcagcgtcttcgcctcgacccccgcgcccgagatcgcggcatgggccgatgcgggtcgtctgacgctgcacacccgcgccctgcggcacggcgatgtgctgtgtgcgaaactcttctacgctgccgatgaagacgaaaccgaagacgcccgcaccgccgcgattgcgcgtgccgaaggggccttggtcaatatcgtcgacaatctgcacgacagcgcctttatcacccccgccatcgtcgaccgtgaccccgtgaccatcgccatcggcaccgaaggcgcggcccccgtgctggcccgtgcgatcaaggccgatctggaagaacgcctgcccacaacgctgggaacgctggcgcggatcggtaagggtttccgcaagatggccgacgccctgccctttggccgcccgcgccgcgacttctggcgtgactattactttgccgccggcccccgcgccgtagcggatggcaaggccgccgtcgaaaacgcgctgaacacgctgctgttcgaccaccagtcccgcgccgcacgcgccggtcacatcgcttttgtcggcggcggccccggtgaccccgaactgctgaccctcaaggcgcgccgcgcattggacgaggccgatgtggtgatttacgaccggctgatcagccccgaaatcctcgaactcgcccgccgcgaggcgctgatgatcgacgtgggcaaggaaggcttcggcccctccaccgcgcaggaaaccatcaacgatctgctggtcgaacacgcacaagcgggggcccaggtggtccgtctgaaatccggcgacgccaccatctttggccgccttgacgaagagatcgacgccgtggatgcccatggcatcggctggcacatcgtgccggggatcacctccgcctctgccgccgtcgcgaccatcgggcaaagcctgacgaaacgcgggcgcaacgcctctgtccggttcctgaccggccatgacatgaaagggttcgccgatcatgattgggccgctttggcccgcccgggcgaggtcgccgcgatctatatgggcaagaaatccgcgcggttcatccaaggccgcctgctgatgcacggggccgatcgcagcacgcctgtcacgctggtcgaaaacgcctcgcgcgcggatcagcggattgttgagaccacgctggaccgtctacccaccgacctgaacgcggccaatctgaccggccccgccctgactttctatgggctggcaccccgtgccgccgcccgcgccaccaccgaattgtttcaagaggagatggcataa

SEQ ID NO: 85366 - protein, 464 aa, Sulfitobacter sp. EE-36
MDHFPIYLSTKGQRIVLSGGGEAALAKLRLLLKTEAKISVFASTPAPEIAAWADAGRLTLHTRALRHGDVLCAKLFYAADEDETEDARTAAIARAEGALVNIVDNLHDSAFITPAIVDRDPVTIAIGTEGAAPVLARAIKADLEERLPTTLGTLARIGKGFRKMADALPFGRPRRDFWRDYYFAAGPRAVADGKAAVENALNTLLFDHQSRAARAGHIAFVGGGPGDPELLTLKARRALDEADVVIYDRLISPEILELARREALMIDVGKEGFGPSTAQETINDLLVEHAQAGAQVVRLKSGDATIFGRLDEEIDAVDAHGIGWHIVPGITSASAAVATIGQSLTKRGRNASVRFLTGHDMKGFADHDWAALARPGEVAAIYMGKKSARFIQGRLLMHGADRSTPVTLVENASRADQRIVETTLDRLPTDLNAANLTGPALTFYGLAPRAAARATTELFQEEMA

SEQ ID NO: 85367 - DNA, 720 bp, Roseovarius nubinhibens ISM
  CDS (1)..(720): transl_table=11
atgagcggttttgtcagtttcgtgggcagcggccccggcgaccccgagcttttgaccctcaaggcggtggaccgtctcaaacgcgccgatgcggtgctgttcgacgatctttccgccgggccgattctcgatcatgccaatcccgatgccgatctcatcggtgtcggcaagcgggcagggcggctctcgccgcgtcaggaccatgtgagccgcctgctggtggattatgcgagcgagggcggccgtatcgtgcggctcaaatccggggacagcggcctctttggacggctcgaggaagagctcgtcgcgctgcgcgccgccgggatcgactatgagatcatccccggcgtgccctcggccatcgcggcggcggcggcggcgggcatcccgctcacccggcggctgacggcgcggcgggtgcagttcgtcaccggccatgacgcgggcggcaaactgcccgacgatctcaacatcaccgcgctggccgatccttcggcctgtaccgtggtattcatgggcaagcggacctttcccttgctggccgagacgctcaccgccgccggtctgcccggcacgacgcccgccattctcgccgaggcggtgggcacgcccgagcaacaggtcacccgcagcaccgtggccgatctcgccgcacagcttggcgcagagatcggcgaccgtccggcgctcatcctttatgggcctttggccgagatgtag

SEQ ID NO: 85368 - protein, 239 aa, Roseovarius nubinhibens ISM
MSGFVSFVGSGPGDPELLTLKAVDRLKRADAVLFDDLSAGPILDHANPDADLIGVGKRAGRLSPRQDHVSRLLVDYASEGGRIVRLKSGDSGLFGRLEEELVALRAAGIDYEIIPGVPSAIAAAAAAGIPLTRRLTARRVQFVTGHDAGGKLPDDLNITALADPSACTVVFMGKRTFPLLAETLTAAGLPGTTPAILAEAVGTPEQQVTRSTVADLAAQLGAEIGDRPALILYGPLAEM

SEQ ID NO: 85369 - DNA, 1392 bp, Roseovarius nubinhibens ISM
  CDS (1)..(1392): transl_table=11
atgaaacactttcccattttcgtagccctcgaaggccgccgcgtcgtgctctcgggcggtggcgatgcggcccttgcgaaactgcggctcctgctcaagaccgaggccgccatccatgtctatgccaagacccccgcgcccgagatcgtgacctgggccgacgaggcccggctgaccctgcaccggcgcacattggccgcaggcgactgcgaaggcgccacgctcttctatgccgccgatgaggacgccaccgaagacgcccgcaccgccgcccttgccaccgcagagggcgcgctagtcaatatcgtcgacaatctgagcgacagccagttcatcacccccgccatcgtcgaccgcgatccggtcaccgtggcgatcggcaccgaagcgcggccccggtcctcgcccgcgccattaagccgatctcgaggcgcggctgcccgcccatctcggccttctggcgcgcatcggcaggccttccgccatgccgtcgacgtgctgcccatgggccgccgccgccgcgactactgggccgattattatttccgccagggcccacgcgctctcgaacagggcgggccggacgcggtgcgccgcaccctcgccagcctgctcgacgactacaagacccgcgaagaccgcgccggtcacgtggcctttgtcggggctggcccgggcgatcccgagctgctgacgctcaaggcccgccgcgccctcgacgaggccgatgtggtgatccatgaccgtctggtgacgcctgagatcctcgaactggcccgccgcgaggcggtgctcgtcgacgcgggcaaagagggctttggcccctcgatgacccaggacgagatcaaccgcctcatcgtcgcacatgccgagagcggcgcccaggtggtgcggctcaagggcggcgatcccaccgtgttcggccgtctcgacgaagagatcgacgccgtgaccgaggcgggcatcacctatcacgtggtccccggcatcaccgccgcctcggcctctgtcgccgccatcggtcagagcctcaccagccgtggccgcaacagctcggtccgctttctcaccggccatgacacccggggctttgccgatcacgattgggcggcgctggcccggcccggcgaagtggcggcgatctacatgggcaagaaatccgcccgctttatccaaggcaggttgatcatgcatggcgccgaccgcgccaccccggtcaccgtgatcgaaaacgccacccgccccgatcaacgcgtgctctcgacgacgctcgacgcgctgcccgccgatctcacggccgccggtctcaccggccccgccctcaccttctatggccttgcgccgcgtgcggcccaggccgcgctgacccaaacgaaacaggagttcgcctga

SEQ ID NO: 85370 - protein, 463 aa, Roseovarius nubinhibens ISM
MKHFPIFVALEGRRVVLSGGGDAALAKLRLLLKTEAAIHVYAKTPAPEIVTWADEARLTLHRRTLAAGDCEGATLFYAADEDATEDARTAALATAEGALVNIVDNLSDSQFITPAIVDRDPVTVAIGTEARPRSSPAPLSRSRGAAARPSRPSGAHRQAFRHAVDVLPMGRRRRDYWADYYFRQGPRALEQGGPDAVRRTLASLLDDYKTREDRAGHVAFVGAGPGDPELLTLKARRALDEADVVIHDRLVTPEILELARREAVLVDAGKEGFGPSMTQDEINRLIVAHAESGAQVVRLKGGDPTVFGRLDEEIDAVTEAGITYHVVPGITAASASVAAIGQSLTSRGRNSSVRFLTGHDTRGFADHDWAALARPGEVAAIYMGKKSARFIQGRLIMHGADRATPVTVIENATRPDQRVLSTTLDALPADLTAAGLTGPALTFYGLAPRAAQAALTQTKQEFA

SEQ ID NO: 85371 - DNA, 828 bp, Oceanicola batsensis HTCC2597
  CDS (1)..(828): transl_table=11
atgggggcctggcccgcgctcgagccgggctgggtctggctgtgcggtgccggcccgggcgatccgggcctcctgacgctgcacgcggtcaacgcgctgcgccaggcggacgtggtggtctatgacgcgctggtgcaggccgagatcctcgactgggccccgcaggccgagcatgtctacgccggcaagcgcggcggcaagccctcggcgaagcagcgcgacatctcgctgcgcctcgtcgacctggcgcgggcgggcaagcgggtgctgcggctcaagggcggcgatcccttcgtcttcgggcgcggcggggaagaggcgcagacgctgatccagcacggggtgcccgtccgcatcatccccggcatcagcgcggggatcggcgggctggcctatgccggcatccccgtcacccatcgggacgtcaaccagtcggtcaccttcgtcaccggccacgaccagtcgggcgcgacgccgcaatcgctgaactggcgcgccatcgccgagggggcgcaggtgctcgtgatctacatgggcatgaagcatgtcgaccagatcgccgctgcgctgctcgaggccgggcgcccggccgacgaacccgtcgccgtggtctgttccgccaccacgccggaccagcgcgtgctggagaccacgctcgggcgcatggcggcggatatcggcgccgcggagatggagccgcccgcgatcctgtgcatcggccggtcggtgctgatgcggcaggttctggactggcaggcgctgatggcgggcgcggcgccgcgcaacctcgatccgctgaaccgcgggcggccggcggaagtgtcctga

SEQ ID NO: 85372 - protein, 275 aa, Oceanicola batsensis HTCC2597
MGAWPALEPGWVWLCGAGPGDPGLLTLHAVNALRQADVVVYDALVQAEILDWAPQAEHVYAGKRGGKPSAKQRDISLRLVDLARAGKRVLRLKGGDPFVFGRGGEEAQTLIQHGVPVRIIPGISAGIGGLAYAGIPVTHRDVNQSVTFVTGHDQSGATPQSLNWRAIAEGAQVLVIYMGMKHVDQIAAALLEAGRPADEPVAVVCSATTPDQRVLETTLGRMAADIGAAEMEPPAILCIGRSVLMRQVLDWQALMAGAAPRNLDPLNRGRPAEVS

SEQ ID NO: 85373 - DNA, 786 bp, Prochlorococcus marinus str. MIT 9211
  CDS (1)..(786): transl_table=11
atgaatgatgacaaacctggcactgtttatttagtaggcgcaggccctggtgatcctgacttactaactgtgaaggcaaggaggctccttagtcaatgcaatgcccttgtatatgacgctttaatacctgacgaggtgcttggctttgtgcgagataagtgtgaatgcatatttgttggtaaacgccgtggtcatcattcaacttctcaggtaaaaactaatttagttttattggaattggctaagcgtcatgaatgtgttgttcgtttgaagggtggagacccatttgtgtttggtagaggtggtgaagaagcaatttttttagagaaaaatggcatatctgttcaagtggtacctggagtaactgctggcattgctgttccttcttattttgggattcctttaactcatcgccttgcaggcagttcagtcacttttgtgacaggtcatgagggtattagtaagactcgtccttcagtcaattggcaggctcttgcacaatcaacaaataccttagtgatttatatgggtgtgcataaccttgcttatattgttaaagaattgttggcaggggggttggatctcaaaaccccttcagctgtaatacaacaaggcactgttgtgggccaacgcctcttaaagactactcttgaaaaccttgccaaagatgtaaaagatcagaattttatatctccttcaatagtcattattggggatgttgtggactttcaagttgaatcttgcgccccgttcccagcaaatgtaactatgccaatcatgctgtaa

SEQ ID NO: 85374 - protein, 261 aa, Prochlorococcus marinus str. MIT 9211
MNDDKPGTVYLVGAGPGDPDLLTVKARRLLSQCNALVYDALIPDEVLGFVRDKCECIFVGKRRGHHSTSQVKTNLVLLELAKRHECVVRLKGGDPFVFGRGGEEAIFLEKNGISVQVVPGVTAGIAVPSYFGIPLTHRLAGSSVTFVTGHEGISKTRPSVNWQALAQSTNTLVIYMGVHNLAYIVKELLAGGLDLKTPSAVIQQGTVVGQRLLKTTLENLAKDVKDQNFISPSIVIIGDVVDFQVESCAPFPANVTMPIML

SEQ ID NO: 85375 - DNA, 786 bp, Erythrobacter sp. NAP1
  CDS (1)..(786): transl_table=11
gtggacgcgccttcgcccatctcgcaaggcatggaaatcggaactatttatcttgttggcgcaggtccgggtgaccccgacctcctgaccctgcgcgctgcccggctgatcgagcgtgccgaagtaatcgtccatgacgggctggtcagtcgcgagatactcgcgatggcacggcccgatgcgctcctcatttcggtcgccaagcaacgctccaggcacaccctgccccaagaccagatcaacgccctcctcgtgcgtgaggccaaggcgggccgtgatgtggttcgcctcaagggcggcgacccgttgatcttcggccgcggcggtgaagaagccgaagatgcgcgcgcctccggtgtctcggtcgagatcgtacccggtatctccgctgccaacggcgcggcagcagccacacagatcgcgcttacccaccgcgacgcgtcgagcgtggtcagcttcgttgctggccagtgcaagggcctttccgatcaggactggaccggccttgctggcaagggccgcacgctggtgatctatatgggcgtcaagactgcaccccagatcgcggagaagctgatggcggacggacttgccccggacatgccgcttgctgtcatcgagaatgctgcacgccccgaaatgcgcgtcctgcgcggtccgcttgctgccctgcccgaccttgtcgttcgcgaggcggtgaagagccctgcccttatcgtcatcggcgacgtcaccgcgcgcgaagacgctgacatcgcgaagctcgccgtggaggcacatcaatga

SEQ ID NO: 85376 - protein, 261 aa, Erythrobacter sp. NAP1
MDAPSPISQGMEIGTIYLVGAGPGDPDLLTLRAARLIERAEVIVHDGLVSREILAMARPDALLISVAKQRSRHTLPQDQINALLVREAKAGRDVVRLKGGDPLIFGRGGEEAEDARASGVSVEIVPGISAANGAAAATQIALTHRDASSVVSFVAGQCKGLSDQDWTGLAGKGRTLVIYMGVKTAPQIAEKLMADGLAPDMPLAVIENAARPEMRVLRGPLAALPDLVVREAVKSPALIVIGDVTAREDADIAKLAVEAHQ

SEQ ID NO: 85377 - DNA, 816 bp, Synechococcus sp. RS9917
  CDS (1)..(816): transl_table=11
gtgactgaagcaactgtgaccgaatcacctgtgggcgatgtggaggtgggaaccgtttacctcgttggagcaggtccgggggaccccgatttgctcacggtgaaagcccatcggctgctctgctgctgtgatgcgctcgtttacgactcgctggtgccgcgggaggtgcttgatctggtcccggacgcctgcgaacgccatttcgtcggcaagcgccgcggccatcattccgttccccaacccagcaccaatgcggtgctggtggacctcgcatccaggcaccgttgcatcgtgcggctcaagggcggcgatccctttctgttcggtcgcggcggtgaggaggcggcccatctggtgcgccatggcgtgcctgtgaaggtggtgcctggcgtcacggccgggattgcggcgcccgcctacgccgggattcccgtcacccatcgtcgcgccggctcttcggtgaccttcgtgacgggccacgaagaaattgacaagcggcggcctgcggtgaactggcgttccctggctgccgccagtgatggccttgtgatctacatgggactgcacaatctgccgcgcattgccgaggaactgatcgccggtggtttgtcggcggccacaccggtggcggtgattcagcagggcacggtggcgggtcagcgttgcctgcgctccaggctggatgcagtggcgcaggaagcgcggcagcagcagttcgcgtcgccgtcgatcgtggtggtgggtgatgtggtggcggagcagatcgaggcttgtgcgccgcagccggcggcggtcacgatgccgattccgttctga

SEQ ID NO: 85378 - protein, 271 aa, Synechococcus sp. RS9917
MTEATVTESPVGDVEVGTVYLVGAGPGDPDLLTVKAHRLLCCCDALVYDSLVPREVLDLVPDACERHFVGKRRGHHSVPQPSTNAVLVDLASRHRCIVRLKGGDPFLFGRGGEEAAHLVRHGVPVKVVPGVTAGIAAPAYAGIPVTHRRAGSSVTFVTGHEEIDKRRPAVNWRSLAAASDGLVIYMGLHNLPRIAEELIAGGLSAATPVAVIQQGTVAGQRCLRSRLDAVAQEARQQQFASPSIVVVGDVVAEQIEACAPQPAAVTMPIPF

SEQ ID NO: 85379 - DNA, 789 bp, Synechococcus sp. WH 7805
  CDS (1)..(789): transl_table=11
gtgaccgctgctgaccgttctggaattgtctatctcgttggtgctggtccgggagaccccgagctgctcacgctgaaggcgcaccgtctactgcaatcctgtgatgcgttggtgtacgactcgctcgtgccacgggaggttctggatcttgtgccagaacactgtgaacgtcacttcgtggggaagcggaggggtcaccactccgtcccgcagccgagtacgaatgccgtgctggtggagctgtcggcacgtcacgcctgtgtggttcgcctcaaaggtggggaccctttcctcttcggtcggggtggcgaggaagcggcgcatctcgtcaaacatggcgtgcgggtggaggtcgtgcctggtgtgaccgctgggattgctgcaccggcctatgcgggtattcccgtcacccatcggcgcgcagggtcttcggtcacgttcgtgacgggccacgaagagattgacaagcgacgcccgtcggtgaactggcgttccctggcgtctgcgagtgatggtctcgtggtctacatggggcttcataacctgccgcgcatcgctgatgagctgatggctggtgggctcagtcccgacactcctgtcgccgtgattcaacagggaaccgtggccggacagcgttgtcttcaggccatgctgtcggagatcgcagagcgggtgcgccaggaacagttcgcgtccccgtccatcgtggtggtcggcgatgtggtgaaggagcagatcagcgcctgtgctcccgagcctgcggccgtcacgatgccaatccccttttaa

SEQ ID NO: 85380 - protein, 262 aa, Synechococcus sp. WH 7805
MTAADRSGIVYLVGAGPGDPELLTLKAHRLLQSCDALVYDSLVPREVLDLVPEHCERHFVGKRRGHHSVPQPSTNAVLVELSARHACVVRLKGGDPFLFGRGGEEAAHLVKHGVRVEVVPGVTAGIAAPAYAGIPVTHRRAGSSVTFVTGHEEIDKRRPSVNWRSLASASDGLVVYMGLHNLPRIADELMAGGLSPDTPVAVIQQGTVAGQRCLQAMLSEIAERVRQEQFASPSIVVVGDVVKEQISACAPEPAAVTMPIPF

SEQ ID NO: 85381 - DNA, 1422 bp, Pseudoalteromonas tunicata D2
  CDS (1)..(1422): transl_table=11
gtgcagtatttacccatttttaccaaattagataataaaccggtgctcgtcatcggtggtggtgaagttgcactgcgaaaatgtcgcgcacttttacaagcgcgaggcaaagtcactctagttgcaccagatttttgccaagagctcctcgaactggccgaacaaaatattgtcacactggtccacgattattttgcccctgcacagcttgatgggcaaatgctggttattgctgcgacagacattaacgccgtgaatgaagcggtgtttgatgcggccaatgaacgcaatatttttgttaatgtggttgatgatcaaccaaaatgcacctttatatttccatctattgttgatcgcaaccccattactattgcgatttcaagcgctggcaccgcccccgtactggcacgccgcttgcgcgaaaaactcgaaacgctcattccacagcatatcgggccattagctgagttagttggcagttttcgcactcaagtgaaacaacgctttaaacagttttctgaccgtcgccaattttgggaaaaagtatttgattccaatgtagtgagtaaagtgcaaaccggtgatattgccgcagcgaaacagcaacttcatatcatgctggacgatacagcagctccaaaaggtgaagtgtatgttataggtgcaggccccggtgatccagaattacttactcttaaagccctgcaactgatgcaacaagctgatgtagtggtatatgactacttggtttctgatgaaattatggagctagtgcgccgtgatgctgatttgatttgtgttggtaaacgcatgggcgaccatagtgttgagcaacacgataccaaccaaatgctggtgcgtttagctaaagaaggcaaaaaagtgtgccgaattaaaggcggtgacccatttatttatggccgtggtggtgaagaagtacaagttttagctgagtaccaagtggcttatcaaatagtaccagggatcacggcggcggcaggttgtgctgcgtatgctggcattccgcttactcatcgcgatcatgctcaagcaattcagtttgtaactggtcattgtaaaaaagacggccaagaccttgattggcgttcattagcgcagccacatcaaacgttagctgtgtacatgggcgtggtaaaatcgccgtatatacaagcaaagctaattgagcatggtagagcacacaatacacccgttgccattattgaaaatggtactcgtaaaaatcagcgtgttgtcacaggccacttaggtcagttgtcacaactgattgaccaacatgccattgtatcaccggcattattaattattggtgaagtagcccagctacattcgcagctcgcttggtttggtcaacaagcgcaaacgagcagttttgctcaaccactaacagatgtggtgtaa

SEQ ID NO: 85382 - protein, 473 aa, Pseudoalteromonas tunicata D2
MQYLPIFTKLDNKPVLVIGGGEVALRKCRALLQARGKVTLVAPDFCQELLELAEQNIVTLVHDYFAPAQLDGQMLVIAATDINAVNEAVFDAANERNIFVNVVDDQPKCTFIFPSIVDRNPITIAISSAGTAPVLARRLREKLETLIPQHIGPLAELVGSFRTQVKQRFKQFSDRRQFWEKVFDSNVVSKVQTGDIAAAKQQLHIMLDDTAAPKGEVYVIGAGPGDPELLTLKALQLMQQADVVVYDYLVSDEIMELVRRDADLICVGKRMGDHSVEQHDTNQMLVRLAKEGKKVCRIKGGDPFIYGRGGEEVQVLAEYQVAYQIVPGITAAAGCAAYAGIPLTHRDHAQAIQFVTGHCKKDGQDLDWRSLAQPHQTLAVYMGVVKSPYIQAKLIEHGRAHNTPVAIIENGTRKNQRVVTGHLGQLSQLIDQHAIVSPALLIIGEVAQLHSQLAWFGQQAQTSSFAQPLTDVV

SEQ ID NO: 85383 - DNA, 888 bp, Photobacterium sp. SKA34
  CDS (1)..(888): transl_table=11
atggatgatttttcaacaatcaaacgaaccgcaaaacaagtcttaaaaagtcgatttcagcctcatgatgatcaggggtacaaaaaggtactgaggccgctttcacctgcaagtcgtaagcctgatagcggatttgtaagtttagtgggagcaggccctagcgatcctgatttattaacgataaaagcattacgcgcacttgagcaggctgagattgtcgtttatgaccgtttagtcagccaagatattattgcgttagccaaccctgaagctatccatatttatgtaggtaagcgttgtggtaaaccgagtttatcgcaagaggaaattaatcagatcttgatatcagaagcacttaaagggcagtacgtggtgagaattaaaggaggtgatcctttgattttcggacgagggggagaagaagcgttagccttggtggatgcaaatattaattatgaattcattcctggtattactgctgcgattggctgcgcggcttctgctggtattcctcttactcaccgtgaagtttcgcgttccgttaccttagttacagggcatgtagcaacaggggcttttaatgcgtggtcgcaacttgtcgagaatgggcaaaccttagtgttttacatgggactagagaaagcacaacagatacaaaaccaattaattaaggccaagttaagtgaagagacgcctgttgccgtgatctgtcatggctgctctgttaatcaagccgtctatattgagcgacttaaaggactcgcgtcattagcagaggatcttaaaggcgaatcccccgccttgatcatcatcggtgatgtggtggcactacgtgagcaattacagcgcacagcaaggcaattaactgagcaagtgtgtttgctttaa

SEQ ID NO: 85384 - protein, 295 aa, Photobacterium sp. SKA34
MDDFSTIKRTAKQVLKSRFQPHDDQGYKKVLRPLSPASRKPDSGFVSLVGAGPSDPDLLTIKALRALEQAEIVVYDRLVSQDIIALANPEAIHIYVGKRCGKPSLSQEEINQILISEALKGQYVVRIKGGDPLIFGRGGEEALALVDANINYEFIPGITAAIGCAASAGIPLTHREVSRSVTLVTGHVATGAFNAWSQLVENGQTLVFYMGLEKAQQIQNQLIKAKLSEETPVAVICHGCSVNQAVYIERLKGLASLAEDLKGESPALIIIGDVVALREQLQRTARQLTEQVCLL

SEQ ID NO: 85385 - DNA, 1413 bp, Photobacterium sp. SKA34
  CDS (1)..(1413): transl_table=11
atggattacttgccaatttttgcagatttaaagcgtcgaccatgtctggttgtcggtggtggtgatagcgcgtggcgtaaaacccgtatgctattaaaagcaggtgcagatgttcgtgttattgcaccaagtttaaatgctgactttactgctgcattagcttctcaacagatcaaattggtcggtgaacatttttcaccatcagatcttgatggtattttcttagccattgccgcgacagagcgtaaagcgattaatgctctggtctatcaatcagccaatcaacgccaagtattagtcaatgttgttgatgatactcagcgctgcagttttattatcccctctattgttgatcgttcacccatcattgtcgcgatctcgtcatcaggtaaggctccggtactggcccgtttattacgtgaaaaacttgaagcgttattaccacaacatttaggacgtatggcgacgattgcgggcaacttccgtcagcgtttatcacaaaccgtttcttctttttctgctcgtcgttatttttgggagcaagccttcaacggacgttttggtgacttagtggcatcaggacgtgagcaagaggctgagcaagagctggtggcattgacccaacaagcaccaccgcaagggcaagtcgcattaattggcgcaggtccaggtgatgcagggttattgacccttcgtgcattacaactgatgcagcaagctgatgtcgtgctgtatgactacttggtgtctgatgaagtgatggacttagtccgccgtgatgccgaattagtatgcgtgggtaaaaaagctggttttcatagcgtccctcaagaagaaacgaatcgattaattgtgcactacgcccagcaaggtaaacgtgtggtgcgattaaaaggtggcgacccatttgtattcggtcgtgggggtgaagagcttgaagtgctgtttgatgctgatattccattccaagttgtaccgggtattacggcagctgcaggtgctacagcctatgctggcattccattaactcaccgtgattatgcccaaaccgccatgtttgtaacggggcatctaaagcctgatggcgatactttggattggttaacacttgcgcgtggaaaacaaaccttagtgatttatatggggttgatgaaatcgagtcatattcagcaacagttgttagagcacggtcgtggtgctgatacccctatcgccattattgaacgtggtactcagaaaaaccaaaaagttttaaaaggtcagctaagcgagctggctgaattagcaaaacatgctgcttctccatcgctgatagtagtaggagaggtagttaatctatcgacgaaattagattggttcacaaaacaggaacagtcgctacagcagcaagatgcggtagttaagctggcatag

SEQ ID NO: 85386 - protein, 470 aa, Photobacterium sp. SKA34
MDYLPIFADLKRRPCLVVGGGDSAWRKTRMLLKAGADVRVIAPSLNADFTAALASQQIKLVGEHFSPSDLDGIFLAIAATERKAINALVYQSANQRQVLVNVVDDTQRCSFIIPSIVDRSPIIVAISSSGKAPVLARLLREKLEALLPQHLGRMATIAGNFRQRLSQTVSSFSARRYFWEQAFNGRFGDLVASGREQEAEQELVALTQQAPPQGQVALIGAGPGDAGLLTLRALQLMQQADVVLYDYLVSDEVMDLVRRDAELVCVGKKAGFHSVPQEETNRLIVHYAQQGKRVVRLKGGDPFVFGRGGEELEVLFDADIPFQVVPGITAAAGATAYAGIPLTHRDYAQTAMFVTGHLKPDGDTLDWLTLARGKQTLVIYMGLMKSSHIQQQLLEHGRGADTPIAIIERGTQKNQKVLKGQLSELAELAKHAASPSLIVVGEVVNLSTKLDWFTKQEQSLQQQDAVVKLA

SEQ ID NO: 85387 - DNA, 1425 bp, Oceanospirillum sp. MED92
  CDS (1)..(1425): transl_table=11
gtggattatctacctctgtttttcaaattgaccggtcagaacgtgctactggttggtggcggtaatgttgcattacgtaaagcaagactgctgtgtcgttcgggtgcattggtcacggtcatctcacataaggtttgcgaggaactacaagacctcctcgatgaaaaccagggacagagtattattggtgagtaccactctgctcttttggaagggaaaatgctggttatcgcagcgacggatgataatccgctgaacgagcgagtccatttcgacgccgtagaacgcaacatcccagtcaatgtggttgatagccctaagttatgcacattcgtatttcctgctattgtcgatcgctcacccattgttattgggatctcttcaggtggtagtgcccccgttctcgctcgcttattacgtgcacggttagaaacctggatccctaagtcatatggcaagctggccagcatcgcgaatcatttccgtgatcgcgtcaaacagaccttcgatactgttaatcatcgccgtgtgttctgggaaaatgttcttcagggccagattgcggaaaaggtatttgccggtcgcgaacaagaagccatcgatctgattgaagacaagctaaccaatgaagaccctgatcattcagtaggcgaagtctatctggtaggcggtggccctggtgatcctgaattgctgacattcaaggcactacgtctcatgcagcaggccgatgtagttctgtatgacgcattagtatctgacgcggtactggatctctgtcgacgtgatgcagacctgatcttcgtaggtaaaaagcgtgataatcatgcggtcccacaggaaggtatcaatgagctgttggtaaaacatgccaaagcaggacaacgtgtcgtcagactaaaaggcggtgacccatttatcttcggtcggggtggcgaggagctgcaaacccttaaggcccatgatatcccatttcaggtggtcccagggatcacagctgccagcgcttgctcaacctatgcgggtattccacttacccatcgcaactatgcacaatcagtcaagtttgtgacagggcaattaaagaaccgcaccagtgatctgaactttgcagaattggttcacccaaaccagacggttgtgttctatatgggcctgcataccttaccaacactctgtgcaaaaatgatcgagcatggcaaaccggccaatacaccaaccgcaattgtctcacgtggaacctcggccgatcagaaagtgctaacaggcactctggagaacatagctgaacgtcaggctcaggctaaactgcctgcccctgcgttgatcatcgtcggtgaagttgttgagatgcatgataacttaagctggtttggtgacgaggtgctggctcaaaacctaacaccggtaaaggccgagccttaa

SEQ ID NO: 85388 - protein, 474 aa, Oceanospirillum sp. MED92
MDYLPLFFKLTGQNVLLVGGGNVALRKARLLCRSGALVTVISHKVCEELQDLLDENQGQSIIGEYHSALLEGKMLVIAATDDNPLNERVHFDAVERNIPVNVVDSPKLCTFVFPAIVDRSPIVIGISSGGSAPVLARLLRARLETWIPKSYGKLASIANHFRDRVKQTFDTVNHRRVFWENVLQGQIAEKVFAGREQEAIDLIEDKLTNEDPDHSVGEVYLVGGGPGDPELLTFKALRLMQQADVVLYDALVSDAVLDLCRRDADLIFVGKKRDNHAVPQEGINELLVKHAKAGQRVVRLKGGDPFIFGRGGEELQTLKAHDIPFQVVPGITAASACSTYAGIPLTHRNYAQSVKFVTGQLKNRTSDLNFAELVHPNQTVVFYMGLHTLPTLCAKMIEHGKPANTPTAIVSRGTSADQKVLTGTLENIAERQAQAKLPAPALIIVGEVVEMHDNLSWFGDEVLAQNLTPVKAEP

SEQ ID NO: 85389 - DNA, 855 bp, gamma proteobacterium HTCC2207
  CDS (1)..(855): transl_table=11
atgaccaatattgttaatttatttgcctcgccagaaagccctaaacaagagagccctaaagcccacagcatcggtgaagtattccttgttggtgccgggcccggcgatccagaactcatcacggtcaaagccatgagactgcttcaggaagccgatgctattgtctacgatcggctggccaatccattgttactagattacgcccgcaaacactgcgaccttatctatgtgggcaaaaagaaagatcagcacagcctgccacaggaccaaatctgcgcactattagcggctctagccggctgcggtaaaaaagttgtccgactcaaaggcggcgacccctttatctttggccgcggcggcgaagaagtggaccacctggccgagcagggcattgcctgcaccatagtcccaggtatcaccgccgccattggctgtgctgccaccacacggattcccttgacccatcgcgaccacgcccatgccgtgacctttattaccggtcaccgacagcatggcaaaatgtatatcaactgggatctggcgctgcaaaaagacagtaccgtggtgttctatatgggcctatctaatctaaaggaaattacctcagagctaatcgcccgaggctgcccagaggacaaaccctttgccgtagtggcacagggcactgctgaaactcagcaggtattggtgggaactgtaagcgatatagcggagaaactggccgcgcatcctctgccatccccagcgctgttaatgatgggggatgttatcaatgccaatggttatgctcagcatttggctgatctcaccagcgctgcacaaccattttcagaggagcgattggaggtgatctaa

SEQ ID NO: 85390 - protein, 284 aa, gamma proteobacterium HTCC2207
MTNIVNLFASPESPKQESPKAHSIGEVFLVGAGPGDPELITVKAMRLLQEADAIVYDRLANPLLLDYARKHCDLIYVGKKKDQHSLPQDQICALLAALAGCGKKVVRLKGGDPFIFGRGGEEVDHLAEQGIACTIVPGITAAIGCAATTRIPLTHRDHAHAVTFITGHRQHGKMYINWDLALQKDSTVVFYMGLSNLKEITSELIARGCPEDKPFAVVAQGTAETQQVLVGTVSDIAEKLAAHPLPSPALLMMGDVINANGYAQHLADLTSAAQPFSEERLEVI

SEQ ID NO: 85391 - DNA, 1422 bp, gamma proteobacterium HTCC2207
  CDS (1)..(1422): transl_table=11
atggattacctaccactctttcacaatctcaaaggccgcaatattctagtaatcggcggcggcgagattgctctgcgcaaagtacgcttagtgcaagaagccagcgccattatcaccatagtcgccaaagatttctgtccagacctattagagatgaacgcccgcgacaaagaacatggttgcaatggcttgaacctaattaccgccagttacgaacaccagcatatgctcgatctgccgaatatcgtcatggtgattgcagcgaccaacgatcgagatctgaaccggcttgtctcagagcatgctcaaaacgccaatattctctctaatgtggtggatgaccctaaattctcaaccgttattttcccgtcgattgtcgatcgttcgccaatccaaatagccatctccagtggcggtgatgcccctgtgctggtgcgtttgttgcgtacaagatttgaagccctgttacctgcaggtatgagcaagctgggttctctggccggcagctttcgcgagcgcgtcaaagccaagttctccaatggcgcggatcgcaaggcattctgggaagaagtcttttatgggccgattgccgagcaggcctatgccaacaatctcgacgaagctgaacgcctattggctcacaagcttgagtccaccgatgaatttaaaaccggtgaggtctatttagtcggtggcggccccggggatccggatctattgacctttaaggccctgcgactcatgcagcaggcagatattgtgctctatgatcgcttggtgtctccagaggtgcttaatctggtgcgccgagatgcaacgcggatctatgtaggcaaaaccgcgggagatcatcccgtaacccaagataatattaatcagaaactggtggattacgcccttgagggcaatcgtgtggtgcgccttaaaggtggcgatccatttatttttggccgcggcggtgaagagattgaaacgcttgccgagcacggcattccattccaagtggttcccggtattactgcagcttctggttgtgccagttatgccggtattcccttgacccatcgtgatcatgcccagtcagtgcgctttatcgctggccatttgcgctcaggcaagatggacttgaactggccagaactggtgcagcccaaccaaacattggtgttttacatgggtttgaatggcatggagacaatctgcgagcaactcaaacaacatggcttggatgcccagacaccggcagcgctgatcgagaagggcaccactgaccgtcagcaggtctttataggcgatctcaatagcctgcccgagattgtgcgcagcgctggtgccaaggcgccgactctaataattgttggtcatgtggtgagcctgcatgacaaactagcctggtttaatgtgacggagacgactcaatga

SEQ ID NO: 85392 - protein, 473 aa, gamma proteobacterium HTCC2207
MDYLPLFHNLKGRNILVIGGGEIALRKVRLVQEASAIITIVAKDFCPDLLEMNARDKEHGCNGLNLITASYEHQHMLDLPNIVMVIAATNDRDLNRLVSEHAQNANILSNVVDDPKFSTVIFPSIVDRSPIQIAISSGGDAPVLVRLLRTRFEALLPAGMSKLGSLAGSFRERVKAKFSNGADRKAFWEEVFYGPIAEQAYANNLDEAERLLAHKLESTDEFKTGEVYLVGGGPGDPDLLTFKALRLMQQADIVLYDRLVSPEVLNLVRRDATRIYVGKTAGDHPVTQDNINQKLVDYALEGNRVVRLKGGDPFIFGRGGEEIETLAEHGIPFQVVPGITAASGCASYAGIPLTHRDHAQSVRFIAGHLRSGKMDLNWPELVQPNQTLVFYMGLNGMETICEQLKQHGLDAQTPAALIEKGTTDRQQVFIGDLNSLPEIVRSAGAKAPTLIIVGHVVSLHDKLAWFNVTETTQ

SEQ ID NO: 85393 - DNA, 1542 bp, delta proteobacterium MLMS-1
  CDS (1)..(1542): transl_table=11
atgcgcaaaaaaggcggtaaagtatatctgatcggtgccggtcccggcgatcccgagttgatcacctgcaagggcaaacggttgctggggcaggccggggtcgtggtctacgattatctggccaatccccggctgctggagctggccccggcggatgccctgtttatctacgccggcaagaagggcggcagccagcatacccacagccagagcgagatcaaccagatgctggtggatcacgcccgggccggtaaaacggtggtccgcctcaaaggcggtgatccctttgtcttcggccggggcggcgaagagcttgaggagttggccgcccatgggatcgcctttgaagcggtgcccggggtgacctcggcttccgccgccgccacctatgccggggtgcccatcacccatcgcgcctttacctcgacggtggccttcgtcaccggccacgaggaccccaataagcaggagagccggattgcctgggataagctggccaccggggtgggcaccatcgttttctatatggggatcaagaacctgcccaatatcaccgccaacctgatccgccacggccgcgacccgcagaccccggtggccgtggtccgctgggcttcgaccccggaacagcgttcggtggtcggcaccctggacaacatcgtccatgtggtccgggaaaacggcatcaccccgccggctttggtggtggtgggcgaggtggtctccctgcgcgaggtgctcaactggtatgagaaaagaccgctgttcaacaagcggattctggtgacccgtagccgggagcaggccagcgaactggtggcgcaactggaggatatgggcgccgcctgcctggaaggggccaccatcgccatcgccgaaccggcggactggcagccactggatcgggccgtggcgcgacttggcagctatcactggctgcttttcaccagccccaacgcggtccgcttcttcttccgtcgcctggccgccctggggttggacagccgtgccctgcaggggccgcgcctggccgccgtggggactgccaccgccgaggccctggcggggcaggggatcaaggtagacctgctgcccgagcagttcaccgccgaaggcctgagcagcgccctgctggcccagggggtggcggggcagcggatactgctgccccgggccttgaaagcccgtgatattctgcccgataacctgcgcgccgccggggccggggtcgatatcgtcccggtataccaaaatatcacgccgccactgagcgacgagattcgccaggccctcaagcagcggcagatcgatctgatcaccttcaccagctcttcgacggtgcgtaattttattgacctgctgggacttgccaaggagcaactggccgagttgttaagtggggtcaaaatcgccgccatcggcccgatcaccgccgccaccgcccacgaagcggggctggtggtggatatccagcccacggaacacaccattgccgccctggtggaggccatcgtcgatgacagcggccagggggagggatga

SEQ ID NO: 85394 - protein, 513 aa, delta proteobacterium MLMS-1
MRKKGGKVYLIGAGPGDPELITCKGKRLLGQAGVVVYDYLANPRLLELAPADALFIYAGKKGGSQHTHSQSEINQMLVDHARAGKTVVRLKGGDPFVFGRGGEELEELAAHGIAFEAVPGVTSASAAATYAGVPITHRAFTSTVAFVTGHEDPNKQESRIAWDKLATGVGTIVFYMGIKNLPNITANLIRHGRDPQTPVAVVRWASTPEQRSVVGTLDNIVHVVRENGITPPALVVVGEVVSLREVLNWYEKRPLFNKRILVTRSREQASELVAQLEDMGAACLEGATIAIAEPADWQPLDRAVARLGSYHWLLFTSPNAVRFFFRRLAALGLDSRALQGPRLAAVGTATAEALAGQGIKVDLLPEQFTAEGLSSALLAQGVAGQRILLPRALKARDILPDNLRAAGAGVDIVPVYQNITPPLSDEIRQALKQRQIDLITFTSSSTVRNFIDLLGLAKEQLAELLSGVKIAAIGPITAATAHEAGLVVDIQPTEHTIAALVEAIVDDSGQGEG

SEQ ID NO: 85395 - DNA, 1392 bp, Oceanobacter sp. RED65
  CDS (1)..(1392): transl_table=11
atgaagtttttgcctctgtttgttgaattaaaagatcgctccgttttaattgttggtggcggggaagtcgctttgcgaaaagcgcgattattacagcaagccggggcgaaagtctctgtcattagtccggaagtagatcctcatctacgttcaattgcggaaaagagtggtggcgagtgtcgcttagaaacctatcaaatccaagatctgacgccttacgttatcgtcgtggcggcaaccaatcacgccgatgttaataaggctgttgctgagcatgctcatcaggttggtgtttcggttaatgtggtcgacaaaccagatttgggcaacttcatctttcctgccattgttgatcgttctcctgttattgcagcggttagctctggtggtgcgagtccggtactagcgaggctcttacgcactcgtcttgaatcattgattcctgctggatatggcaagcttgctgcactagcagaaaagtatcgctccaaggtaaaagcaaaattttcggatgtgaatcgtcgacgtgggttttgggagacggttttgcacggtaaggtcgcaaacttggtgtttgctggtcaagatactcaggcagagtcaacactgcaggctttgttagaagatgctgccgacgaagccaaagcccagggtgaggtctacctagtcggtgcagggccaggcgatccggatttgcttacatttaaagcgcttcgcttaatgcagcaagctgacgtggttttatatgatcgcttggttagcgagcctattctcaaactgtgtcgtcgtgacgccaaaatgattaacgttggtaaagctcgctccaatcacaccgtgcctcaagacggtattaatcaaatgttggttgattacgctaagaaaggccatcgtgtgctcagattgaaaggtggtgatccctttattttcggtcgtggtggcgaggaaatcgaacgcttatctgacaatggcgtagactttcaggtcgtgccaggtattaccgcggcttcgggttgttctagctatgctggcattcctttaacacatcgtgattacgctcagtctgtgcgctttgtcacaggtcatctcaaggataatagtgctaatttgccatggtctgagttagcttataaaaatcaaaccattgtcttttatatgggattaatgggcctgccgataatctgtgagcagcttattgcacatggaatgggcaatgaaacacccattgccttggtacagcagggcaccacgcttaatcaaaaggtcattattgccacgctcgataccatggtcgatgtgctttcaacacagcaaattaaggcgccaacactgattattgtcggtgatgtggtcaagctccacgatcagctcaaatggttcaatcctcaagcttaa

SEQ ID NO: 85396 - protein, 463 aa, Oceanobacter sp. RED65
MKFLPLFVELKDRSVLIVGGGEVALRKARLLQQAGAKVSVISPEVDPHLRSIAEKSGGECRLETYQIQDLTPYVIVVAATNHADVNKAVAEHAHQVGVSVNVVDKPDLGNFIFPAIVDRSPVIAAVSSGGASPVLARLLRTRLESLIPAGYGKLAALAEKYRSKVKAKFSDVNRRRGFWETVLHGKVANLVFAGQDTQAESTLQALLEDAADEAKAQGEVYLVGAGPGDPDLLTFKALRLMQQADVVLYDRLVSEPILKLCRRDAKMINVGKARSNHTVPQDGINQMLVDYAKKGHRVLRLKGGDPFIFGRGGEEIERLSDNGVDFQVVPGITAASGCSSYAGIPLTHRDYAQSVRFVTGHLKDNSANLPWSELAYKNQTIVFYMGLMGLPIICEQLIAHGMGNETPIALVQQGTTLNQKVIIATLDTMVDVLSTQQIKAPTLIIVGDVVKLHDQLKWFNPQA

SEQ ID NO: 85397 - DNA, 1515 bp, Desulfitobacterium hafniense DCB-2
  CDS (1)..(1515): transl_table=11
ttggacaaaggatatgtatatttggtcggtgccgggccaggggatccgaaactcattacagttaagggcgcggagtgcattgccaaggccgatgtgctgatctacgatcgcctggcttcacgccgtctcctgaccttagcccgtcccgattgtgaacttatttatgtagggaaatccccggaccggcacaccctgcgccaggaagagatcaacgctcttctggttcagaaaggcctggagggtaaaatagtgacgcgtttaaaggggggggacccttttgtttttggacgcggtggggaagaagcagaggatctgcttcaggcagggattccctttgatattgttcccggtgttacctcagcgatttccgtacctgcttatgcaggtatcccggtgactcatcgtgatttaacctcttcttttgctgtcataaccggtcatgaagaccccactaaaaacagctcggctttggcttgggaacatttagccacggctcacgggactttaatctttttgatgggcatggaaaatctgtccttgatcgccactaaacttatggaaaatggccgttcaccgtcaacccctgtgggaattatccaatgggggacccggccggaacaaagggtgctggtcggtgaacttcaaaatattgctcaattggtaaaggaagaaggctttaccaacccctcgatcatcatcgtgggagaggttgttcaactaagggagaaactgcaatggttcgaaaagagacctctcttcggtcagcggatcattgtgacccgggccaggcatcaagccagcgccttgtctcaaggcattgaagatctgggcggagaaccctgggagtttccggcgattgaaatcgtaccccccagggaccctcagcccctgattcaggccatcaagaacctgaagcggtttgaatggctgatctttaccagtgtcaacggcgtggaggaattctttaaagttctcatggagcagggcagggacgttcgtgatctggccggtatggatgtggtcgctatcggtccggccaccagagatgctttggagaagcgctgcctgaaggtctcttttgttcctgaagaatatcgtgctgaaaaaatcatcgaagggctggccagccgggttctgcccggtcaaagtgtgctcctggcccgggccgaagaagcccgggatattctgcccgaatccctgaaagctttaggggcggatgtctgggatgttcccacctatcgtacagttttggggaatgccaacaaggaggaattgatgaagttgctggaggagaaagctgtagcggctgttacctttaccagttcctccacagtacgcaatttcctgcaattaattgatggcaggcaaagccttttggatggagttaaactctattctatcggtcccattaccagcaaaacagctcaggaatttgggttgagcatttaccgggaagcaaagcagtatactattaaggggctgcttgagactctggcaagggggaacgaggaatga

SEQ ID NO: 85398 - protein, 504 aa, Desulfitobacterium hafniense DCB-2
MDKGYVYLVGAGPGDPKLITVKGAECIAKADVLIYDRLASRRLLTLARPDCELIYVGKSPDRHTLRQEEINALLVQKGLEGKIVTRLKGGDPFVFGRGGEEAEDLLQAGIPFDIVPGVTSAISVPAYAGIPVTHRDLTSSFAVITGHEDPTKNSSALAWEHLATAHGTLIFLMGMENLSLIATKLMENGRSPSTPVGIIQWGTRPEQRVLVGELQNIAQLVKEEGFTNPSIIIVGEVVQLREKLQWFEKRPLFGQRIIVTRARHQASALSQGIEDLGGEPWEFPAIEIVPPRDPQPLIQAIKNLKRFEWLIFTSVNGVEEFFKVLMEQGRDVRDLAGMDVVAIGPATRDALEKRCLKVSFVPEEYRAEKIIEGLASRVLPGQSVLLARAEEARDILPESLKALGADVWDVPTYRTVLGNANKEELMKLLEEKAVAAVTFTSSSTVRNFLQLIDGRQSLLDGVKLYSIGPITSKTAQEFGLSIYREAKQYTIKGLLETLARGNEE

SEQ ID NO: 85399 - DNA, 1515 bp, Desulfitobacterium hafniense DCB-2
  CDS (1)..(1515): transl_table=11
ttggccaaaggatacgtttacttagtcggagcaggtccgggggagcccaaacttttgaccgtcaaaggagcggaatgtatcgccagggcggatgtcttaatttacgaccgtctggcttcaccgcgcctgctcagtctggccgggccggactgcgaaatgatttatgtcggtaaatcacccgaccggcataccctgcggcaggatgaaatcaatcagctgctcgtgcaaaagagtttagcaggcaaggtcgtaacccgtcttaagggaggggatccctttgtttttggacggggaggggaggaagcggaagctttgctggccgtggggattccttttgaaatcgtgcctggaatcacttcggccattgctgtaccggcttatgcgggaatcccggtgacgcaccgggagatgacatcttccttcgccgtgattaccgggcatgaggatcccggaaaaaatgattcggccattgcctgggagcatctggtgccggcccacggcactctgatctttttgatgggtatggagaatttgtctctgattgcccaacgcttgatccagcatgggaagaatccggcgacgccggtggggatcatccaatgggggacgcgcccggagcagcggactctggtaggcaggctggacactattgcctccctggttcaggaacagggctttacgaatccggccacgataattgttggtgaagtggtttctttgcgggaaaagctgcaatggtttgagaaaaagcctttgttcggttcccggattgtggtcacccgagccagacaccaggccggtgttttagcgcaggccattgaagacttgggcggtgagccttgggaatttccggctattgagatcagggagccctccgatcccgaacttctcacccgggctatgcaagatctccggcgctttaagtggctggtttttaccagcgccaatggagtggagagatttctgagcggattgaaagattccgggaaagatattcgtgatttgagcgggatggaaatcgtggctgtcggacccgtcacccaggctgccctggagcagcgggggttgtgcgttacttgtatgccggaagaataccgggccgagggaatacttgcagaattgacaggcagaattctgccgggagagggtgttttactggcccgggcggaggaggcccgggatgtactgccccaatctttgcagactttaggcgcggaggtttgggatgtgcccgtttataagacggtgagcggatcggccaataagggcctgttaaaaagcatgttggaagataagcaaattcaggcggtgacctttaccagctcatccactgtccgcaatttctgccggctgattgacaatcaaaccgagctattggacggggtgaagcttttttcgattggcccgcttaccagtgcggcagcccgggaattgggtttgccgatccataaagaagccgccaggagcacgattgacggcttagtcgccgcgcttgtggagggtgcaaggggatga

SEQ ID NO: 85400 - protein, 504 aa, Desulfitobacterium hafniense DCB-2
MAKGYVYLVGAGPGEPKLLTVKGAECIARADVLIYDRLASPRLLSLAGPDCEMIYVGKSPDRHTLRQDEINQLLVQKSLAGKVVTRLKGGDPFVFGRGGEEAEALLAVGIPFEIVPGITSAIAVPAYAGIPVTHREMTSSFAVITGHEDPGKNDSAIAWEHLVPAHGTLIFLMGMENLSLIAQRLIQHGKNPATPVGIIQWGTRPEQRTLVGRLDTIASLVQEQGFTNPATIIVGEVVSLREKLQWFEKKPLFGSRIVVTRARHQAGVLAQAIEDLGGEPWEFPAIEIREPSDPELLTRAMQDLRRFKWLVFTSANGVERFLSGLKDSGKDIRDLSGMEIVAVGPVTQAALEQRGLCVTCMPEEYRAEGILAELTGRILPGEGVLLARAEEARDVLPQSLQTLGAEVWDVPVYKTVSGSANKGLLKSMLEDKQIQAVTFTSSSTVRNFCRLIDNQTELLDGVKLFSIGPLTSAAARELGLPIHKEAARSTIDGLVAALVEGARG

SEQ ID NO: 85401 - DNA, 816 bp, Synechococcus sp. RS9916
  CDS (1)..(816): transl_table=11
gtgactgattcctctgcggacctcgttgcatctgagggcactgttgcgggaaccgtgtatctggtcggtgcaggacccggagatcctgagttactcactcgcaaggcccatcggttgctgggatgctgcgatgccctggtctacgactcgctggtgccgaaagaggtgctcgatttggtgccagaaggctgtgagcgtcacttcgtgggcaaacgtcgcggtcatcattcggttccccagccgagcacgaatgctgtgctggtggagctcgctcagcgccatgcctgcgtggtacgcctcaagggaggggatccctttctgtttggtcgtggtggagaggaggctgcccacctcacggcgcggggcgttgccgtggaggtggtcccgggtgtgacctctggaattgcagcccctgcttatgccggtatccccgtcacccatcgccgggctggttcatccgtcacgtttgtgaccggccatgaggagatcgacaaacgtcgtccttcggtgaactggcgtgctttggcgactgcgagcgatggcctggtgatttacatgggcttgcacaatcttccgcgcattgctgacgagctgatggcgggtggattagcggcggagactcccgtggcgttgattcagcagggcactgtcgagggtcagcgttgcctcacctccaccctgacgtcggtcgcggaggaggcacgggcccaggcctttgcgtccccttccatcgtggtggtgggtgaggtggtgaatcagcgcatcacggcctgttccccgcaaccggctcccgtcacgatgccgatcccgttctag

SEQ ID NO: 85402 - protein, 271 aa, Synechococcus sp. RS9916
MTDSSADLVASEGTVAGTVYLVGAGPGDPELLTRKAHRLLGCCDALVYDSLVPKEVLDLVPEGCERHFVGKRRGHHSVPQPSTNAVLVELAQRHACVVRLKGGDPFLFGRGGEEAAHLTARGVAVEVVPGVTSGIAAPAYAGIPVTHRRAGSSVTFVTGHEEIDKRRPSVNWRALATASDGLVIYMGLHNLPRIADELMAGGLAAETPVALIQQGTVEGQRCLTSTLTSVAEEARAQAFASPSIVVVGEVVNQRITACSPQPAPVTMPIPF

SEQ ID NO: 85403 - DNA, 888 bp, Vibrio sp. Ex25
  CDS (1)..(888): transl_table=11
atgagcaagcacatggcaacgaacgattcagtcacttcttttcctaaaccaaagccccggttagtttctgacaacccagtagctggtgttactcgttttgcaaagcaatcgctacagcctggtgaagtcgccttagtaggtgcaggacctggtgatcctgaacttcttacggtgaaagcattgaactgcttgcagcaagctgatgtggttttgtacgactacttggtgtcagaagaaatcatggcattgattccaagcgatacgattttggtgtgcgttgggaagcgagctgggcatcacagtgtgccgcaggagaagacgaaccagctattggtggactttgccaaacagggctacaaagtcgtgcgcattaaaggtggtgatccatttgtattcggtcgtggcggtgaagagctggaagtgcttgctgatgcaggcgtccgttttcaggtcgtccctggcattaccgcggcagctggcgcaacggcctatgctgggattccactgactcatcgcgattacgcgcaatcggccatctttgtgactggccacttgaaagaagaaagcgatgagatggattggtccacgttggctcgtgggaatcagactttagtgatctacatggggctgatgaaatcacactatattcagaatcaactcattaagcatggtcgttctgcgtcgactccgattgccattattgagcgtggtacgcagattcaacaaaaagtatttacgggagagctctcccaactctctgatttatcgaaggaagcacaatcgccatctttgattgttgtcggagaggtagtgcgactgtctcaaaagttagactggtttttgtctagtactgaattcaacaaaagtgctattgctaactccatataa

SEQ ID NO: 85404 - protein, 295 aa, Vibrio sp. Ex25
MSKHMATNDSVTSFPKPKPRLVSDNPVAGVTRFAKQSLQPGEVALVGAGPGDPELLTVKALNCLQQADVVLYDYLVSEEIMALIPSDTILVCVGKRAGHHSVPQEKTNQLLVDFAKQGYKVVRIKGGDPFVFGRGGEELEVLADAGVRFQVVPGITAAAGATAYAGIPLTHRDYAQSAIFVTGHLKEESDEMDWSTLARGNQTLVIYMGLMKSHYIQNQLIKHGRSASTPIAIIERGTQIQQKVFTGELSQLSDLSKEAQSPSLIVVGEVVRLSQKLDWFLSSTEFNKSAIANSI

SEQ ID NO: 85405 - DNA, 906 bp, Vibrio sp. Ex25
  CDS (1)..(906): transl_table=11
atggaagcgccttatcaaaagtcttggtttaagaaaggacaagcggaccagagtcaagaacgctcgtctcgcttttctaagcatgaccaagcaagcaaactgaaccaacttttagaaaatcactccgaagatctagatgcgaaccacaaaggttttgtctcgattgtcggagcaggaccgcacgatccagacttgttaaccgtgaaggcagtgaaagcgattatatcggcagaggtattgctatacgaccgtttggttaataaagatattttggagttggcttcgccacaagccgattggatttacgtgggcaaacgatgcggacaacctagtattggtcaggaagaaatctgtaatttgttggtgtcgctcgctctacaaggaaagcgagttgtgcgcttaaaagggggagatccttttgtatttggtcgtggaggcgaagaagcattagcactcgtcaaacactctatcgcttacgaagtcatccccggtattactgctgcgattggatgttcagcaaacagcttgattccgctgactcatcgtggcgttgctcgcagcgttacctttgttacagggcaagtggtaacaggcgcatttgaagcgtggagccaactgatgcaaagcggacaaacattggtgttctacatgggattagaaaaatcggcagacatacaaatcggtttagtcggcgctggtttgaaccaagatttccctgttgcggtcatcactcatggttgcagccctcagcagcaagttcatgttacccaactcaatcagctcaatgagttatcgattacacttaaaggcatcagcccagcattgattgtgatgggagaagttgtcaaactgcgcgaacaactaatagaaaccgtacagtcagtgacggaatacgagggaatatga

SEQ ID NO: 85406 - protein, 301 aa, Vibrio sp. Ex25
MEAPYQKSWFKKGQADQSQERSSRFSKHDQASKLNQLLENHSEDLDANHKGFVSIVGAGPHDPDLLTVKAVKAIISAEVLLYDRLVNKDILELASPQADWIYVGKRCGQPSIGQEEICNLLVSLALQGKRVVRLKGGDPFVFGRGGEEALALVKHSIAYEVIPGITAAIGCSANSLIPLTHRGVARSVTFVTGQVVTGAFEAWSQLMQSGQTLVFYMGLEKSADIQIGLVGAGLNQDFPVAVITHGCSPQQQVHVTQLNQLNELSITLKGISPALIVMGEVVKLREQLIETVQSVTEYEGI

SEQ ID NO: 85407 - DNA, 759 bp, Vibrio sp. Ex25
  CDS (1)..(759): transl_table=11
atgactactgcgaactcatctttaaacagcggctttgtttctttagttggtgcaggtccgggcgatccagacttgctgacggtcaaaggtttgaaagccattcaagcggctgaagttgtggtgtatgaccgattggtgtcgaaagacattcttgaactggctcacgcatctgctgagatgatttatgtcgggaaaaagctcgattttcactgcgtaccacaagaccagatcaatcaaatcttggtacaaaaagcgcaagaaggtaaacgcgttgtgcgcctaaaaggtggtgattctttcatctttggacgcggcggtgaagagttagaagagcttgcagaatatggcatcaaatacgaagtggtgccggggatcaccgctgcagcgggtgcaacagcttatgctggtataccattaacgcaccgtgaccacgcgcaaagcgttcaatttattacaggtcacgtgcaaaaagacggtcgcgaaattgagtggcattcgttagcgcaatctaacaacacacttgtgttctacatgggtttgaagcaaagcggtcacatcatggataacctgatcactcatggattagatccagagatgtcatgcgccattattgaaaatggtacgcgtccagagcagcgcgtgttccaaggaaaactgaacgaactttctgaaatggctgagaaggcgatcagtccagcattgatcgtcgttggctgcgtgactcagttgcacaacaaactagactggtttagaaaataa

SEQ ID NO: 85408 - protein, 252 aa, Vibrio sp. Ex25
MTTANSSLNSGFVSLVGAGPGDPDLLTVKGLKAIQAAEVVVYDRLVSKDILELAHASAEMIYVGKKLDFHCVPQDQINQILVQKAQEGKRVVRLKGGDSFIFGRGGEELEELAEYGIKYEVVPGITAAAGATAYAGIPLTHRDHAQSVQFITGHVQKDGREIEWHSLAQSNNTLVFYMGLKQSGHIMDNLITHGLDPEMSCAIIENGTRPEQRVFQGKLNELSEMAEKAISPALIVVGCVTQLHNKLDWFRK

SEQ ID NO: 85409 - DNA, 1425 bp, Alteromonadales bacterium TW-7
  CDS (1)..(1425): transl_table=11
gtgcaatatttacctatctttaccaaactcgacaacaaacctgtattggttgttggcggtggagaggtcgcattacgcaagtgtcgcgcgtttttaaaagcccgtgctgcagtaaccttagtggcgccttggttttgtgacgaattgaaagaacacgcacaacacaacgaagtgaccctaatagacgcttactttgacgaatcacacctagacggaaaaatgctagttattgcagcaaccgatcgagacgaagttaacaacacggtgtttgagcttgccaatgctcgcaatgtgtttgtaaacgtggttgatgaccaacctaaatgtacgtttatatttccttctattgttgaccgtaatcctattacaattgctatttcgagtgcgggtacagcccctgtacttgctcgtcgtttacgtgaaaagttagagacattaataccacaacacattggcccacttgccacactggtgggtggctttagagataaagtaaaacagcgctttaagcacttttctgaccgccgccaattttgggaaggcgtgttcgactcatcagttgttagtaaagtacaaaccggcgacacccaaggtgctgagcaacaacttgaacaaatgctagacgctaaagccgagcccgagggcgaagtttatgtggtaggggcaggccctggcgacccagagcttttaacccttaaagcactgcaacttatgcaacaggctgatgtcgttgtttacgactttttagtgtctgacgaaattatggagcttgttcgtcgtgatgcagacctaatttgtgttggtaaacgcttaggcgaccatagtgttgttcaagaagacactaaccaaatgttggttgacctagctaagcaaggtaaaaaagtatgccgaattaaaggcggtgacccctttatttatggccgaggcggtgaagaagtacaagtattggctgccaacaaggtaaattaccaaatagtaccgggcatcacagctgccgcagggtgtagtgcgtatgcaggtattccgcttacgcatcgcgatcatgcccaagctattcagtttgtaacagggcattgtaaaaaagacggccaagaacttgattggcaatcactggctaaaccaaaccaaacacttgctatatacatgggcgtaattaagtcaccgcacattcaagcagaactattacagcatggccgtaaagctgacacgccagttgccgtgatcgaaaatggcacgcgcaaaaatcaacgtgtagtaacaggccaattaggtgagcttgccgatttaattgaacgcaacagcattgtatcgccagcattacttattattggtgaagtagctgccttacactcgcagcttgcgtggtttgggcaaaacaaccaaacaagtagctatgcgcaaccgttaaccgatatagcacattag

SEQ ID NO: 85410 - protein, 474 aa, Alteromonadales bacterium TW-7
MQYLPIFTKLDNKPVLVVGGGEVALRKCRAFLKARAAVTLVAPWFCDELKEHAQHNEVTLIDAYFDESHLDGKMLVIAATDRDEVNNTVFELANARNVFVNVVDDQPKCTFIFPSIVDRNPITIAISSAGTAPVLARRLREKLETLIPQHIGPLATLVGGFRDKVKQRFKHFSDRRQFWEGVFDSSVVSKVQTGDTQGAEQQLEQMLDAKAEPEGEVYVVGAGPGDPELLTLKALQLMQQADVVVYDFLVSDEIMELVRRDADLICVGKRLGDHSVVQEDTNQMLVDLAKQGKKVCRIKGGDPFIYGRGGEEVQVLAANKVNYQIVPGITAAAGCSAYAGIPLTHRDHAQAIQFVTGHCKKDGQELDWQSLAKPNQTLAIYMGVIKSPHIQAELLQHGRKADTPVAVIENGTRKNQRVVTGQLGELADLIERNSIVSPALLIIGEVAALHSQLAWFGQNNQTSSYAQPLTDIAH

SEQ ID NO: 85411 - DNA, 870 bp, Alteromonadales bacterium TW-7
  CDS (1)..(870): transl_table=11
atgactgtgctctcttatttttcgggtgttgaaaacacctggttaaacaaagtaattaacaagctaaccaatggggttaagtttaccgacaaaaaggctaaaaatggccatgtttatattattggtgcgggcccaggcgatgccgaactcattacggttaaggctcagcgattaattcaatctgccgatattattttgtatgactggctagtaagtgaagatttactaaacacattacctaaaaaagcacagcgagtattcgtaggtaaacgcgcaggtaaacactctatgtcgcaagcgaatatttgtgatcttttagttaagtatgctcaacaagggttaaatgtagtacgcttaaaaggcggcgacccgagcatttttgctcgtataaatgaagaagctgacgcgctaacacaaaataatattagttttgcaattgttcctggtgtgacaaccgcttgcgctgcatcggcatatacaggtattcccttaactgctcgtgatgtagctcgcagtgtaacttttttaaccgctcaatttgccgatcctaaaaagttacctaattggcaaaattacacatttatgcaaggtaaaaacaacccaacacttgttgtttacatggggctgagtaggcttaacgaattatgtaaaggcttaaaatcagtaggttggcccgacaacacttctattgccttaatagaaaatgcaacaacaactaaccaaaaaataatagcagggtctattaacgatatatcgaataatgaatcagtagctacgttaatggggccaacgctcattatcattggtgaagtagttaatcatacaatgaatattgacccagcgcttttagtgcaacatgttaacgcttaa

SEQ ID NO: 85412 - protein, 289 aa, Alteromonadales bacterium TW-7
MTVLSYFSGVENTWLNKVINKLTNGVKFTDKKAKNGHVYIIGAGPGDAELITVKAQRLIQSADIILYDWLVSEDLLNTLPKKAQRVFVGKRAGKHSMSQANICDLLVKYAQQGLNVVRLKGGDPSIFARINEEADALTQNNISFAIVPGVTTACAASAYTGIPLTARDVARSVTFLTAQFADPKKLPNWQNYTFMQGKNNPTLVVYMGLSRLNELCKGLKSVGWPDNTSIALIENATTTNQKIIAGSINDISNNESVATLMGPTLIIIGEVVNHTMNIDPALLVQHVNA

SEQ ID NO: 85413 - DNA, 1398 bp, marine gamma proteobacterium HTCC2143
  CDS (1)..(1398): transl_table=11
atggactacttgccgttattttttaagcttaccgataaagcctgtttagtcgtgggcggtggacacattgccactcggaaagcccggctgctagtaagcgccggtggcatacttcatgttgtagcgttagagataacggcggagcttaaaaccatggcgaggtcgtcagggggcagctgcagagagggccactttcataacgatgatatgaatggcaagagtctagtgattgccgcaagtaacgacagcgcaatgaatgcgcacatttccgagatagcccgtgaacgtcttatcccagttaatgttgtcgatagtccagagctttccagtgttattctaccctccataattgaccgttctccggtcatcgttgcggtttccagtggcggtaactctcccgttctagccaggatgttgaggacaaaaatcgaatcgattattccctctgcttatggaaaactggcacaactcgtgggcgattttcgagagagagtacaaaaacgtctgcctgatgttgacgcccgtaaacgattctgggaagaggttttacaagggcctatcgccgaaatggtctttaccggcaaatatcaaacggctgcagacatgcttgaactgcaggttaacacggcacagctggaaacaaatacgggggaagtctatctggtcggagcaggcccgggtgatcctgacttattaacgtttaaggcgctgcgattaatgcagagcgccgatgtcgtgctttatgatcggctggtcagtgacgagatcgtaaatttaaccaggcgggacgccgaacgagtttatgtgggcaaacaaagagccgatcatgctctgccgcagcaagacattaaccagctgctggtgactttagccaaagaaggcaaaagggtgctcagactcaaaggcggtgatccctttatatttggcagagggggagaagaaattgagatgctcgcagagcacaaaataccttttcaaattgtacccgggatcaccgctgcatcaggttgctcaacctatgcgggtatcccactcacccatcgagattatgcgcagtcagttcgctttgtaacgggacatctccagaatggcagcattgatctgccctggaatgagctcgtttatgataagcagaccctcgttttctacatgggattggtcgggttacccattatttgcgagcaactagttgctcatggtcgatcggctgcaacgcctattgctctggtccagcagggcactaccgctatgcaacgggtactaacgagcgacttagcgggaatgcctgctttggctagagcggagcaggtacgtgcgcccacaatactcatcgttggagatgttgttaaactgcggaaaaagctcgcatggttcgaaggtaatgagcgcagcgagtga

SEQ ID NO: 85414 - protein, 465 aa, marine gamma proteobacterium HTCC2143
MDYLPLFFKLTDKACLVVGGGHIATRKARLLVSAGGILHVVALEITAELKTMARSSGGSCREGHFHNDDMNGKSLVIAASNDSAMNAHISEIARERLIPVNVVDSPELSSVILPSIIDRSPVIVAVSSGGNSPVLARMLRTKIESIIPSAYGKLAQLVGDFRERVQKRLPDVDARKRFWEEVLQGPIAEMVFTGKYQTAADMLELQVNTAQLETNTGEVYLVGAGPGDPDLLTFKALRLMQSADVVLYDRLVSDEIVNLTRRDAERVYVGKQRADHALPQQDINQLLVTLAKEGKRVLRLKGGDPFIFGRGGEEIEMLAEHKIPFQIVPGITAASGCSTYAGIPLTHRDYAQSVRFVTGHLQNGSIDLPWNELVYDKQTLVFYMGLVGLPIICEQLVAHGRSAATPIALVQQGTTAMQRVLTSDLAGMPALARAEQVRAPTILIVGDVVKLRKKLAWFEGNERSE

SEQ ID NO: 85415 - DNA, 843 bp, marine gamma proteobacterium HTCC2143
  CDS (1)..(843): transl_table=11
atgaatgacaacgtattcagcctgatcaaaagccatacaaacaccgatacaaataacggtaagataaagtcggttggtcacgtatatttggtgggcgctggtccaggggatgaggaattaatcaccgtaaaggcgatgcgtctgttgcaggaggctgacgccattgtctacgatcggcttgccaatcccgctctgcttagttacgggaaaccgcactgtgatctaatttatgtgggcaaaaaaaaggatcaacatagccttccccaagaaaagatttgtgatctgctagctgcattggcgggctgtggtaaaaatgtggtgcgcttgaaaggcggcgactcatttatttttggccgcggtggcgaagagatcgactatctccgtcggcagggcattcaatgctcagtagtgccgggtatcaccgccgctagcggctgtgcggcggcaacccagattccccttactcaccgagactatgctcatgccgtggtttttatcaccggccatcgacagaacggaaaaatgactatcaactgggatctagccctgcaaaaagactgcacggtagtgttctatatgggtctttccaatctcgaagagatcactaagcagttaattgagcggggctgtccaaccgataaaccttttgcggtggtctcgcaggggacatctagcgagcagcaggtagtgctgggaacaatcagcgatatcgcccagcgtcttatgcataggcctttattatcgccggcgttattaatgatgggcgatgttattcatgccaatggttatgcgctaggcctggccaatcaaactgcggcggagtaccgtggcgtcaatcagtga

SEQ ID NO: 85416 - protein, 280 aa, marine gamma proteobacterium HTCC2143
MNDNVFSLIKSHTNTDTNNGKIKSVGHVYLVGAGPGDEELITVKAMRLLQEADAIVYDRLANPALLSYGKPHCDLIYVGKKKDQHSLPQEKICDLLAALAGCGKNVVRLKGGDSFIFGRGGEEIDYLRRQGIQCSVVPGITAASGCAAATQIPLTHRDYAHAVVFITGHRQNGKMTINWDLALQKDCTVVFYMGLSNLEEITKQLIERGCPTDKPFAVVSQGTSSEQQVVLGTISDIAQRLMHRPLLSPALLMMGDVIHANGYALGLANQTAAEYRGVNQ

SEQ ID NO: 85417 - DNA, 1407 bp, marine gamma proteobacterium HTCC2080
  CDS (1)..(1407): transl_table=11
atgaatgccccgctgcccttccaattgcagattacctcgcgaccagttttgctcataggcactggcgaggccgccgaagctaaagcacgcctgctgcaggaacgcgatgccgacatcactcactggcacacgactcccagcaaagatgaacgcactcacgtagaacggtgcaatcgagacccaaagactcgctatgttttggtcgtcatcgccgaggtcaacgcttggactgaggccttaatgccgtggcttgattcagaaagattactcgtcaatgttgtcgatgcaccgcagttgtcgcaaggttttatacccgccattgtgtctcggggccgtattcagatcggcattggcactggcgggagctcgcctgtcttggctaggtttgttcgaacccgactagaacaggccctgccacagggactagagcgcttggctgaatttgccgatcgatggcagctgcgcgtgcgccagatactcgacacagttagtactcgtagacaattctgggagcgtcatctcagtggacctgcaggtcaagccgccctcaataacgaacccgaccttgcagacagcatactcgccacggcgttagacgcagaccattcaccgcaagggcgcgtaacgttggtgggcgccggccctggggatgcatcgctattaacactgaaaggactgcagcgactgcaagaggccgatgttgtgctttacgacaaactggtcagtccagaagtcctaagcctagctcgtagagatgctcaaatggaggatgttgggaagcgccgaggccactgcccaacaccccaagacagtatcaatgcgcgcttggttgagctcggagaacaaggccttaccgtttgccgacttaaaggcggcgatccgtatttattcggccgtggcggtgaagaggcacttgccttggtgcaggctggtatccctgttgaggtcgtacccggcataacaacggccagtgccacagctgctgctacaggcatacccttaactcatcgccgtgtcgcgcggtccgtacgatacatcacgggccacctggcactgcaacaaaccgatactgactggcaggcactagcgcaagcgcaagaaacactggtgatttacatgggattcactcacctccagtcaatagcgcagcggctgcaagaagcgggactcaaagcaacgacgccctttgccctcattcaaaacgcaacgacgccgcgacagcaggtcgtgcacgggcagctaaatggtgttgacgaggccgcggctgagctttgtttagaagaaggtcccattctggtaatcattggtgaagtcactcgactcgcccaagagcttgcaccaaaggccgtggatgatgtgttgaaaagccagcacaccgatcctctgtactggctgcaaagcgcctag

SEQ ID NO: 85418 - protein, 468 aa, marine gamma proteobacterium HTCC2080
MNAPLPFQLQITSRPVLLIGTGEAAEAKARLLQERDADITHWHTTPSKDERTHVERCNRDPKTRYVLVVIAEVNAWTEALMPWLDSERLLVNVVDAPQLSQGFIPAIVSRGRIQIGIGTGGSSPVLARFVRTRLEQALPQGLERLAEFADRWQLRVRQILDTVSTRRQFWERHLSGPAGQAALNNEPDLADSILATALDADHSPQGRVTLVGAGPGDASLLTLKGLQRLQEADVVLYDKLVSPEVLSLARRDAQMEDVGKRRGHCPTPQDSINARLVELGEQGLTVCRLKGGDPYLFGRGGEEALALVQAGIPVEVVPGITTASATAAATGIPLTHRRVARSVRYITGHLALQQTDTDWQALAQAQETLVIYMGFTHLQSIAQRLQEAGLKATTPFALIQNATTPRQQVVHGQLNGVDEAAAELCLEEGPILVIIGEVTRLAQELAPKAVDDVLKSQHTDPLYWLQSA

SEQ ID NO: 85419 - DNA, 1539 bp, Candidatus Desulfococcus oleovorans Hxd3
  CDS (1)..(1539): transl_table=11
atggcgcatagcatgaaaggaaaagtttacctggtgggggcgggccccggtgatccggcactgataacccttcgcggactcgagtgcattcgcatggccgatgtggtggtctacgactacctggccgccgaccagctcctgcaccaccggtcggaaaacgccgaagtcatctacgtgggaaaaaaaggcggggaccataccctttcccagaacaagatcaacgatctgatagtggagaaggcggaacaggggctggtggtgacccggctcaagggcggggacccctttatattcggtcgcggcggtgaagaggcggaaatcctggccgcccgcaacattccctttgaaatcgtgcccggcgtgacctcggccatcgcggccccggcctatgccggtattcccctgacccaccgggagcataccacgtcggtttcctttatcaccggccatgaagatcccaccaaggaacagtccaccattcactggcaggccctggccgagaccggcggcaccctggtgttcctgatgggggtaaagaacctctcttttatcgtggaccggttgatggaacacggccggccgggaaccacacccgcggccctggtacgatggggcaccacgcccatgcagcagaccgtgaccggcacccttgacaccatcgtggacagggtaaaggccgccgggcttcaggccccgtgcatcattgtcatcggcggggtggtgaacctgagagagaccattgcctggtttgaagcctcccggccccttctgggaaagaccattgtggtgacccgagcccgggcccaggccagtgattttatcgcggcgctttcgcgcctgggcgcggcctgtattgagtgtcccaccattcgagtggccccgcccgacgataccgcacctctggacacggccatcgacaacctggccgcctatgactggctggtctttaccagcgtcaacggggtggaccgtttctttgcccggctgtttgaaaaaggtggagatgtgcgacgcctggggcatcttaaaaccgcggtcatcggaccggccacggaacagcggcttctggatttcggcgtaaaaagcgatatcgtgccggaaagctttcgggccgaatcggtggtggaggcatttacccggcaggacgtgaaaggcaaaagcgtactgctgcccagggccgccgaggcccggcccattcttcccgaagaactgacgaagatgggggcacgggtggacgaggtggcagcctatgtgacacggcaggacgattccgcggccaaaacccttacagaagctctggagagcggggccgtcgacatggtcacctttaccagctcctctacggttaaaaacttcaaggccctgctgccaaaggacaagtccacggcagaccggctgataaagaatgtggcggtggcttccatcggccccatcaccacggaaaccgcgaaagacgagggctttgcggttcatgtcaccgcggacgcttatacgatagaaggcctgacccgggccatcatcgactattttaaggcataa

SEQ ID NO: 85420 - protein, 512 aa, Candidatus Desulfococcus oleovorans Hxd3
MAHSMKGKVYLVGAGPGDPALITLRGLECIRMADVVVYDYLAADQLLHHRSENAEVIYVGKKGGDHTLSQNKINDLIVEKAEQGLVVTRLKGGDPFIFGRGGEEAEILAARNIPFEIVPGVTSAIAAPAYAGIPLTHREHTTSVSFITGHEDPTKEQSTIHWQALAETGGTLVFLMGVKNLSFIVDRLMEHGRPGTTPAALVRWGTTPMQQTVTGTLDTIVDRVKAAGLQAPCIIVIGGVVNLRETIAWFEASRPLLGKTIVVTRARAQASDFIAALSRLGAACIECPTIRVAPPDDTAPLDTAIDNLAAYDWLVFTSVNGVDRFFARLFEKGGDVRRLGHLKTAVIGPATEQRLLDFGVKSDIVPESFRAESVVEAFTRQDVKGKSVLLPRAAEARPILPEELTKMGARVDEVAAYVTRQDDSAAKTLTEALESGAVDMVTFTSSSTVKNFKALLPKDKSTADRLIKNVAVASIGPITTETAKDEGFAVHVTADAYTIEGLTRAIIDYFKA

SEQ ID NO: 85421 - DNA, 1356 bp, Escherichia coli B
  CDS (1)..(1356): transl_table=11
gtggatcatttgcctatattttgccaattacgcgatcgcgactgtctgattgtcggcggtggtgatgtcgcggaacgcaaagcaaggttgctgttagacgcaggcgctcgcttaacggtgaatgcattagcgtttattccacagttcaccgcatgggcagatgcaggcatgttaaccctcgtcgaagggccatttgatgaaagccttctcgacacctgctggctggcgattgcagcgacggatgatgacgcgcttaaccagcgcgtcagcgaagccgctgaagctcgtcgcatcttctgtaacgtagtcgatgcgccgaaagccgccagctttattatgccgtcgattattgaccgctcaccgctcatggtcgcggtctcctctggcggcacctctccggttctggcacgcctgttgcgcgaaaaactcgaatcactgctgccgttgcatctgggccaggtagcgaaatacgccgggcaattacgcgggcgagtgaaacaacagttcgccacgatgggtgagcgtcgccgtttctgggagaaattgttcgttaacgatcgcctggcgcagtcgctggcaaacaacgatcagaaagccattactgaaaccaccgaacagttaatcaacgaaccgcttgaccatcgcggtgaagtggtgctggttggtgcaggtccgggcgatgccgggctgctgacgctgaaaggactgcaacaaattcagcaggcagatgtggtggtctacgaccgtctggtttctgacgatattatgaatctggtacgccgcgatgctgatcgcgttttcgtcggcaaacgcgcgggataccactgtgtaccgcaggaagagattaaccagatcctgctgcgggaagcgcaaaaaggcaaacgcgtggtgcggctgaaaggtggcgatccgtttatttttggccgtggtggcgaagagctggaaacactgtgcaacgcgggtattccgttctcggtggttccgggtattaccgcagcttctggttgctctgcctattcgggtattccactcacgcatcgcgattatgcccagagcgtacgcttaattaccggacacttaaaaaccggtggcgagctggactgggaaaacctggcggcagaaaaacagacgctggtgttctatatggggttgaatcaggccgcgactattcagcaaaagctgattgaacacggtatgcctggcgaaatgccggtggcaattgtcgaaaacggaacggcagtcacgcagcgcgtgattgacggtacgctcacgcaactcggtgaacttgctcagcaaatgaacagtccatcgctaattattattggtcgggttgttggcctgcgcgcgataaactga

SEQ ID NO: 85422 - protein, 451 aa, Escherichia coli B
MDHLPIFCQLRDRDCLIVGGGDVAERKARLLLDAGARLTVNALAFIPQFTAWADAGMLTLVEGPFDESLLDTCWLAIAATDDDALNQRVSEAAEARRIFCNVVDAPKAASFIMPSIIDRSPLMVAVSSGGTSPVLARLLREKLESLLPLHLGQVAKYAGQLRGRVKQQFATMGERRRFWEKLFVNDRLAQSLANNDQKAITETTEQLINEPLDHRGEVVLVGAGPGDAGLLTLKGLQQIQQADVVVYDRLVSDDIMNLVRRDADRVFVGKRAGYHCVPQEEINQILLREAQKGKRVVRLKGGDPFIFGRGGEELETLCNAGIPFSVVPGITAASGCSAYSGIPLTHRDYAQSVRLITGHLKTGGELDWENLAAEKQTLVFYMGLNQAATIQQKLIEHGMPGEMPVAIVENGTAVTQRVIDGTLTQLGELAQQMNSPSLIIIGRVVGLRAIN

SEQ ID NO: 85423 - DNA, 753 bp, Pseudomonas putida GB-1
  CDS (1)..(753): transl_table=11
atgaccgtctacttcatcggcgccggccctggcgacccagaactgatcacggtcaagggccaacggctgattcgccaatgcccggtgatcatttatgccggctcactggtgcccgctgccgtgctcgaaggccatcaggccgaggccgtgatcaacagcgccgaactgcatctggagcagattatcgcggccatgcaaagcgcacacgaacgggggctggatgtagcccgcgtacatagcggcgaccccagcttgtacggcgccatcggcgagcagatccgccacctgcaagcactgggcatcgattaccagatcatcccgggagtgactgccacggcggccagcgctgccctgctcggctgcgaactgactttgcctcaagtggcacagaccgtgatcctcacccgctatggcgacagctcgcccatgccgcctggcgagcaactgggcgacctggcgcgccacggcagcacgctggcgattcacctgggggtcaaacacctttcgcgcattgtcgatgagctgctgccgcactacggcgcacactgcccggtagcggtggtgcatcgcgccacctggccagaccaggactgggtacgcggcaacctcggcgatatcgtcgaacgcgtggcaagcaagggctttcggcgcacggcgctgatcctggtaggccacgttctgggggatacgccattcgccgaatcggccttgtaccgtgccgggcacgcccacctgtatcgccctggcgactga

SEQ ID NO: 85424 - protein, 250 aa, Pseudomonas putida GB-1
MTVYFIGAGPGDPELITVKGQRLIRQCPVIIYAGSLVPAAVLEGHQAEAVINSAELHLEQIIAAMQSAHERGLDVARVHSGDPSLYGAIGEQIRHLQALGIDYQIIPGVTATAASAALLGCELTLPQVAQTVILTRYGDSSPMPPGEQLGDLARHGSTLAIHLGVKHLSRIVDELLPHYGAHCPVAVVHRATWPDQDWVRGNLGDIVERVASKGFRRTALILVGHVLGDTPFAESALYRAGHAHLYRPGD

SEQ ID NO: 85425 - DNA, 741 bp, Pseudomonas putida GB-1
  CDS (1)..(741): transl_table=11
atgaatgcaaaaatatggttggtgggtgccggccctggtgaccccgaactgctcaccctcaaggctgtgcgagctttgcagcaagccgccgtggtcctgatcgacgacctggtcaacccggcggtgctggcgcactgcccgcaagcacgggtgattgccgtgggcaagcgcggcggctgccgctctacaccgcaggcgttcatccagcgcctgatgctgcgccatgcgcgacagggccgctgcgtggtgaggctcaagggcggcgacccctgcatctttggccgtggcggtgaagaggcgctgtggttacgcgggcatggcatcgaggtagagctggtcaacggcattaccgccggcctggccggcgcaacgcagtgcgggatctccctgacttcgcgcggtgtcagccggggcgtcacgctggtgacggcgcatacccaggatgacagcgcactgaactgggcggcattggcccagggcggcacgacgctggtggtgtacatgggggtagcgcggctggagcaggtgcgccagggcttgctggatggcggtatggcgccagggatgccggtggcgatgatcgagaatgcttcattgctgcaacagcgagcgcacaggagtgacgtgcggagaatggtcgaggatgcgcacgggtttggcttgcgcagcccggcagtgctggtgattggagaggtggttggggagcagcagattctgcgactggacgcaatcgcgggctga

SEQ ID NO: 85426 - protein, 246 aa, Pseudomonas putida GB-1
MNAKIWLVGAGPGDPELLTLKAVRALQQAAVVLIDDLVNPAVLAHCPQARVIAVGKRGGCRSTPQAFIQRLMLRHARQGRCVVRLKGGDPCIFGRGGEEALWLRGHGIEVELVNGITAGLAGATQCGISLTSRGVSRGVTLVTAHTQDDSALNWAALAQGGTTLVVYMGVARLEQVRQGLLDGGMAPGMPVAMIENASLLQQRAHRSDVRRMVEDAHGFGLRSPAVLVIGEVVGEQQILRLDAIAG

SEQ ID NO: 85427 - DNA, 1392 bp, Pseudomonas putida GB-1
  CDS (1)..(1392): transl_table=11
atgaattacctgccgctgttccacaagctgcagggcggccgcgtgctggtcgtcggcggcggtgagatcgccttgcgcaaggcgcgcctgctggccgatgccggcggtgtgctgcgcgtggtggcgccggacgtcgacggccagttggccgcgttggcccgggaaggtggcggtgaggtgctggtgcgtggctatcaggcagccgaccttgtcggttgccggctggtgatcgcggctaccgacgaccctgggctcaatgcccaggtgtcggccgatgcgcaggccctcagcctgccggtcaacgtggtggatgcgccggccctgtgcacggtgatcttcccggcgatcgtcgaccgctcgccgctggtgattgcggtttccagcggtggtgatgccccagtgctggcgcgcttgattcgcgccaagctggaggcgtggatcccttcggcctacggcgagctggccgggctggcggcgcgtttccggcacaaggtcaaatccttgtacccagacgtcaaccagcgccgcggcttctgggaaaccgtgttccaggggccgatcgccgagcgccagctggccgggcagggcgctgaagccgagcgcctgttgcaggcgatggtagaaggcgcgccggtgcagcagggcggtgaggtgtacttggtaggtgctggcccgggcgatccggacttgctgactttccgagccttgcgcctgatgcagcaggccgatgtggtgctgtacgaccgcctggtggcgccagctattatcgagatgtgccggcgggatgccgagcgcatctacgtgggcaagcgccgcgctgagcatgccgtgccgcaggatcagatcaaccgcctgctggtcgatctggcccagcagggcaagcgggtgctgcgcctgaagggtggcgacccgttcatcttcggccggggaggcgaagagatcgaggagctggccgagcatggcatcccgttccaggtggtgccgggtatcacggcggccagtggctgttccgcttatggcggcattccgctgactcaccgcgactatgcccagtcggtgcgtttcgtcaccgggcacctgaaggatggcaccagcaacttgccatggaatgatctggtggcgccagcgcagaccttggtgttctacatggggttggtgggtttgccgaccatttgcgccgagttgattcgccatgggcgagcggccagcacaccggctgctttggttcagcaggggacgacgcgaaaccagcgggtgttcaccggtaccctggcagacctgccgggcctggtggcccagcatgaagtgcatgcgccaaccctggtgattgtcggggaagtggtgcagttgcgtgaaaagctggcctggttcgaaggttcgcagaacagctga

SEQ ID NO: 85428 - protein, 463 aa, Pseudomonas putida GB-1
MNYLPLFHKLQGGRVLVVGGGEIALRKARLLADAGGVLRVVAPDVDGQLAALAREGGGEVLVRGYQAADLVGCRLVIAATDDPGLNAQVSADAQALSLPVNVVDAPALCTVIFPAIVDRSPLVIAVSSGGDAPVLARLIRAKLEAWIPSAYGELAGLAARFRHKVKSLYPDVNQRRGFWETVFQGPIAERQLAGQGAEAERLLQAMVEGAPVQQGGEVYLVGAGPGDPDLLTFRALRLMQQADVVLYDRLVAPAIIEMCRRDAERIYVGKRRAEHAVPQDQINRLLVDLAQQGKRVLRLKGGDPFIFGRGGEEIEELAEHGIPFQVVPGITAASGCSAYGGIPLTHRDYAQSVRFVTGHLKDGTSNLPWNDLVAPAQTLVFYMGLVGLPTICAELIRHGRAASTPAALVQQGTTRNQRVFTGTLADLPGLVAQHEVHAPTLVIVGEVVQLREKLAWFEGSQNS

SEQ ID NO: 85429 - DNA, 1461 bp, Marinobacter sp. ELB17
  CDS (1)..(1461): transl_table=11
atggattttttaccactgtttttcaatttgaacgatcgccaggtgttactggtgggcggtggtgatatcgccctgcgcaaggctcgcctgctcaaacgcgcaggtgttggcctgactgtgatttcccacgccgtcgatgaggaacttcgggctctgctgaccgatgaccgagacgagatcattttgggggattatcacagcgacctgctagcagggaaaaccctggtggtcgccgccaccgacaacgccgagttgcaccgtcaggttcacgccgaggcgatagcgcgaaatatccccatcaatgtggtggatacgcccaagctgtgcagcttcatatttccagccatcgtcgaccgctcgcccattgtgattggcattacctccggcgggcagtcaccggtgctggcacggctgttgagggcccgcttggaaaccctgatacccaagggctacagcagcctgggtggtctggtcgggcgctttcgcgatcgggttaaggcgcgtttcaattcactgaatgaccgtcgtcaattctgggaaaacgtgctggaaggacaaattgccgaaaaggtgttttccggtcgccatgacgaagccgaatcgatgctggtgtcggccatcaaccggggcgacgccggccataaaaccggcgaggtgtatctggtcggtgctggcccgggtgatccggagctgctgacgtttaaggcgctgcgtctgatgcagcaggctgacgtggtgttttacgacaatctggtatcgccagaggtgctggatttgtgccggcgcgacgccgacctgatttacgtcggcaagcgccgcgatcatcacacggtgccccaagacgacattaatgccctgctggtgaaacacgccaaactggggcggcgggtggtgcggcttaaaggcggtgatccgtttattttcggacgcggcggtgaagaactggaagagctcaaagcccatggcataccgttccaggtggtaccgggcattaccgccgccagcgcttgctcgacctacgccggcattccgctgacccaccggggctatgcccagtcagtcaggtttgttaccggccagttaaaaaatcgacaacaagcccttgattacaaagagctgatacagcccaatcaaacggtcgtgttctatatgggactgcacacactgccgcaactcagtgccggcctgatggctcatggccgggcgacggatacaccggttgccattgtctcccgcggtaccgcagtcgaccagaaagtgctgattggcactttggccgatatcgctgccaaacaggaactggcgcaactgccggcgcccgcgttgattattgtgggtgacgtagtacgcctttacgaaaagctggcttggtttggcgaggctgcgcccagcgacaatatcacccacgccctgggcatggtgcgcagaaaggccaagttcactgaggcgaacgtggcctga

SEQ ID NO: 85430 - protein, 486 aa, Marinobacter sp. ELB17
MDFLPLFFNLNDRQVLLVGGGDIALRKARLLKRAGVGLTVISHAVDEELRALLTDDRDEIILGDYHSDLLAGKTLVVAATDNAELHRQVHAEAIARNIPINVVDTPKLCSFIFPAIVDRSPIVIGITSGGQSPVLARLLRARLETLIPKGYSSLGGLVGRFRDRVKARFNSLNDRRQFWENVLEGQIAEKVFSGRHDEAESMLVSAINRGDAGHKTGEVYLVGAGPGDPELLTFKALRLMQQADVVFYDNLVSPEVLDLCRRDADLIYVGKRRDHHTVPQDDINALLVKHAKLGRRVVRLKGGDPFIFGRGGEELEELKAHGIPFQVVPGITAASACSTYAGIPLTHRGYAQSVRFVTGQLKNRQQALDYKELIQPNQTVVFYMGLHTLPQLSAGLMAHGRATDTPVAIVSRGTAVDQKVLIGTLADIAAKQELAQLPAPALIIVGDVVRLYEKLAWFGEAAPSDNITHALGMVRRKAKFTEANVA

SEQ ID NO: 85431 - DNA, 1782 bp, Saccharomyces cerevisiae
  CDS (1)..(1776)
  misc_feature (1425)..(1425): k is g or t
atggtacgagacttagtgacattgccttcatcactgcccttgattactgctggttttgctactgatcaggttcatttgcttattggtacagggtccacggactcagtaagcgtttgtaagaatagaatccactccattttaaatgctggtggtaatcccatagtagtgaatccctcgtcaccaagccatactaaacaattacaattggaatttggtaagtttgcaaagttcgaaatagtagaaagggagtttaggttatccgatttaactactttggggagagttctggtatgcaaggtagtggatagagtattcgtagatctacccataacacaaagtcgcctatgcgaggagatcttttggcaatgccaaaaactgagaattcccataaatacattccacaaaccagagttttctaccttcaatatgattcctacgtgggtcgacccaaaaggaagtggtttacaaatctcagttactacgaatgggaatggatacatcttggcaaacaggataaaaagagatataatatcacacttacctccaaacatatctgaggtggtgataaacatggggtatttgaaagaccgtattataaacgaagaccataaggccttgttagaggaaaagtactaccagactgacatctcattacctggatttggctacggcttagatgaggacggttgggagagccataagttcaataagctaattcgtgaatttgaaatgactagtagagaacagagacttaagagaaccagatggttatctcagataatggagtattacccgatgaacaagctgagtgacatcaagttggaagatttcgagacatcatcttctccaaataaaaagacaaagcaggaaactgtcacagagggtgcagtacctcctaccgatgaaaatattgaaaacggtacaaaacaactacaattatcggaagtgaaaaaagaggagggacctaaaaaactgggaaagatttctttagtcggaagtggtccaggctcggtatctatgctaacgataggtgcattacaagaaataaagtctgcagatataatactggcagataaactggtaccgcaagccattttagatttaatacctccaaaaactgaaacctttatagccaaaaaatttcccggtaatgcagaacgagcacaacaggaattactagctaaaggtttagaatcgttggataatggattgaaagtagtccgtttgaagcaaggtgatccgtatatttttggccgtggtggcgaggaatttaatttcttcaaagatcacggatatattcctgtggttttaccgggcataagctcatccctagcttgtactgtattggctcagatacccgctactcaacgtgatatagcagaccaagtgctcatatgtactgggactgggagaaagggcgctctkcctataattcctgaatttgttgaaagcagaaccaccgtctttctaatggcactgcatcgcgccaacgttctgatcacggaattattgaagcatggctgggatggtgatgtccccgctgcaattgtcgagagaggatcgtgcccagaccagcgtgttactagaactcttcttaaatgggtaccagaagtcgtggaggagattggttcaaggccccccggtgtcttggttgtaggcaaggctgtgaatgcattggttgaaaaagatctgataaattttgacgaatcaagaaaatttgtcattgatgaaggttttagagaatttgaggttgatgtagatagtctatttaagtaatactaa

SEQ ID NO: 85432 - protein, 591 aa, Saccharomyces cerevisiae
MVRDLVTLPSSLPLITAGFATDQVHLLIGTGSTDSVSVCKNRIHSILNAGGNPIVVNPSSPSHTKQLQLEFGKFAKFEIVEREFRLSDLTTLGRVLVCKVVDRVFVDLPITQSRLCEEIFWQCQKLRIPINTFHKPEFSTFNMIPTWVDPKGSGLQISVTTNGNGYILANRIKRDIISHLPPNISEVVINMGYLKDRIINEDHKALLEEKYYQTDISLPGFGYGLDEDGWESHKFNKLIREFEMTSREQRLKRTRWLSQIMEYYPMNKLSDIKLEDFETSSSPNKKTKQETVTEGAVPPTDENIENGTKQLQLSEVKKEEGPKKLGKISLVGSGPGSVSMLTIGALQEIKSADIILADKLVPQAILDLIPPKTETFIAKKFPGNAERAQQELLAKGLESLDNGLKVVRLKQGDPYIFGRGGEEFNFFKDHGYIPVVLPGISSSLACTVLAQIPATQRDIADQVLICTGTGRKGALPIIPEFVESRTTVFLMALHRANVLITELLKHGWDGDVPAAIVERGSCPDQRVTRTLLKWVPEVVEEIGSRPPGVLVVGKAVNALVEKDLINFDESRKFVIDEGFREFEVDVDSLFK

SEQ ID NO: 85433 - DNA, 1437 bp, Rhizobium etli
  CDS (1)..(1437): transl_table=11
atgtctcccaagactgagcagctttcggtatttccagccttctttcgcgtggaaggccagaagacggctgtcttcggcaatggcgacgagctttcggccaaggtgcggctgctgctcaatacaagggcgcggatcgttgcctatgccgacaggccggaagccgattatcatgctttcctgatcgccaatcgcatcgaaaccgtgcgagccggctttgccgccgagcaggtcgaaggcgcagcactcgtcttcgccgccaccggcaatgaggccgacgaccgggatattgtcgatgccgcccgtgccgcaagaattccggccaacgccgtcgatcagcccgattactgtgatttcttcacgccggcgctggtcaatcgcgccccggtcgccgttgcgatcggcaccgaagggcgggggccggttctggcgcagatgatccgcgcccaggtcgatcagattctttccccttcgctcgggcgcctggccgcgctggcgacgagttttcgcaagtcagtcgaacagttcgttccccgcggagtttcccgccggttctggcgccgattcttctctggccccgttgccgatgctgtcgccaatggcaaccctgcgcaggcacgccacgctgccgaccgtctcttaggttcgatggacaaggtcgctggccatgtctggcttgtcggcgccggtccgggggctgaggatctgctgacgctgcgggcccagcgcgtgatgatggaagccgaagtcatcgtctatgatgcgctcgtgccgcaggcgatcgtcgatatgggccgccgtgatgccgagcggctttccgtcggcaaacgcaaagggtgccattcgaagtcgcaggaagagatcaacgagctgctggtcgagctcggccgccagggcaagcgcgtcgtccgcctcaagtccggcgatccgctggtctatggccgggcaggggaagagatggctgcattgcgcgccgccggcatcacctatgaggtcgtgcccggcattacctcggccttcgcgcccgccgccgatttcgaactgccgctgacgctgcggcgcgtcgcctcgtcgctggtcttcacgaccggccatgatctcaccggcgacgtgctgcccgattgggcaagccttgccgtctccggcgcgacgattgccgtttacatggggcgcacggttgccgcctcggttgccgagcggctgatgcaggccggcattcccgccgagaccacggtcgccgtcatcgagaatgccagccgcgctgaccgtcgtctgctgcatggcacgcttgccgatctgcccgacctgcagcaccgtgacgagttgactggtccggtgatggtgattatcggcgatgcggtcgccgggcgccaatttcgaactgtccgagccgctggtgcgcggcgaacgcccggctcgagggaatttgcaaggagctga

SEQ ID NO: 85434 - protein, 478 aa, Rhizobium etli
MSPKTEQLSVFPAFFRVEGQKTAVFGNGDELSAKVRLLLNTRARIVAYADRPEADYHAFLIANRIETVRAGFAAEQVEGAALVFAATGNEADDRDIVDAARAARIPANAVDQPDYCDFFTPALVNRAPVAVAIGTEGRGPVLAQMIRAQVDQILSPSLGRLAALATSFRKSVEQFVPRGVSRRFWRRFFSGPVADAVANGNPAQARHAADRLLGSMDKVAGHVWLVGAGPGAEDLLTLRAQRVMMEAEVIVYDALVPQAIVDMGRRDAERLSVGKRKGCHSKSQEEINELLVELGRQGKRVVRLKSGDPLVYGRAGEEMAALRAAGITYEVVPGITSAFAPAADFELPLTLRRVASSLVFTTGHDLTGDVLPDWASLAVSGATIAVYMGRTVAASVAERLMQAGIPAETTVAVIENASRADRRLLHGTLADLPDLQHRDELTGPVMVIIGDAVAGRQFRTVRAAGARRTPGSREFARS

SEQ ID NO: 85435 - DNA, 1536 bp, Paenibacillus macerans
  CDS (1)..(1536): transl_table=11
atggacatgacggggagagtatatttggtcggcgccggcccgggggatgcgcggttgattacgctaaaggggctggattgcatcgaaaagggagatgttatcgtatatgaccgcctggccaatccaagccttttgagaaaagcgaagccgggagccgagaaaatttacgttggcaagcggaccgaccggcatacgatgaaacaggaggatattagccggctgttggtcgatttggcgcttgcggggaaaaccgtggtgcgtttgaagggcggggaccctaccgttttcgggcgggggggcgaggaggccgaactgctgcgcaagcacgggattccttatgaaatcgtaccgggcatcaccgcggcgatatccgttccggcttatgccggcatcccggttacccaccgcgatttggcctcctccgtatcgatcatcgccggccatgaaagcccggataagctggacttgtccatcaactgggaaaaggtgacgaacgcgacgggcacgctcgtgtttatgatgggcgtggcgaatatcggctatatcagcaagcagctgatcgcccacggccggcccccggagacgccggtggcgctggtgcgctggggaacccgggcggagcaggagacgctgaccgggacgctggccgacatcgagcaaaaggtgcttgactccggctttaagcgccgcgtcactgtcgtcggcgaggtggtgaatcagcgcgagcagctcttgtgggcggaggccatgcctttgttcggcaagcggatattagtgacgcgctcccgctcccaggcgagcgatctcgtccgcggcatcgaggagttgggcggcgagccgtacgagttcccggtcatccagatttcgatgccgagcggcgcggcgctggaacggacggacgaggcgctaagccgcctggagacgtacgactgggcgtttttcaccagcgtcaacggcgtcgactatttcttcaagcacctggagagactgggaaaagacattcgcgcgctgtataaggccattgcggccgtaggcggccacgctggggcgctgcgcgagcgcggcatcgctgccgaggagttgccgggccggtttcaagccgaaccgtgttggaagcgtacggcccggagcttgtgcccggccaaagcgtactgctgccgcacggggatcttgcccgggcgtggctgccggagctgcgcgatcaagggctggccgtcaccgaggcggtcatgtatgagacgggttccggccggcgaaaaggatgaagagctcatcaagctgctggagaagggccggatccatgccgtgaccttcaccagctcctcgacggtgacccatcttttggccgcgctgtcgggcatgggcgtacgtccggtggcggcgctgcgggggcgggaaatcgcctgcatcgggccggtcaccgcgcgcacggcggaggaagcggggctgcgcgtgtcgatcctggccaaggaggcgacgatccccagcctgatcgaggccctttgcgattggaaagagcggggcgcctcggtctag

SEQ ID NO: 85436 - protein, 511 aa, Paenibacillus macerans
MDMTGRVYLVGAGPGDARLITLKGLDCIEKGDVIVYDRLANPSLLRKAKPGAEKIYVGKRTDRHTMKQEDISRLLVDLALAGKTVVRLKGGDPTVFGRGGEEAELLRKHGIPYEIVPGITAAISVPAYAGIPVTHRDLASSVSIIAGHESPDKLDLSINWEKVTNATGTLVFMMGVANIGYISKQLIAHGRPPETPVALVRWGTRAEQETLTGTLADIEQKVLDSGFKRRVTVVGEVVNQREQLLWAEAMPLFGKRILVTRSRSQASDLVRGIEELGGEPYEFPVIQISMPSGAALERTDEALSRLETYDWAFFTSVNGVDYFFKHLERLGKDIRALYKAIAAVGGHAGALRERGIAAEELPGRFQAEPCWKRTARSLCPAKAYCCRTGILPGRGCRSCAIKGWPSPRRSCMRRVPAGEKDEELIKLLEKGRIHAVTFTSSSTVTHLLAALSGMGVRPVAALRGREIACIGPVTARTAEEAGLRVSILAKEATIPSLIEALCDWKERGASV

SEQ ID NO: 85437 - DNA, 732 bp, Bacillus megaterium
  CDS (1)..(732): transl_table=11
gtgacagttggaaaagtatatttagtaggagccggaccaggagatccgaagctaataaccgtgtatggaatggagtgtattcaagaagcagacgtcattttatatgaccgcttagccaacgaacagttgttaaactatgcaaaaaaagacgcggagcttattttttgcggaaaattaccaggcaagcacggagtcatccaagatcgtattcacgaactgcttgttgaaaaagcacttcaaggaaaagtagtcacgcgtttaaaaggaggagatccttttgtatttggccgcggagcagaggaagctgaagtgcttgctaatcaaggaattccttacgaagtagtgccaggtatcacgtcaggaattgcagctccggcctatgcaggaattcctgttacccacagagactatgcaacttcttttgcgattgtaactgggcatggaagagaagaaaaaggaaaagattatttaaactggtcagcgctcgctcaaggaatagatacgattgctttttatatgggcgttggaaatctccctcacatatgcaaacaattgatggatcacggaagagataaacatacgccagtgggccttgttcaatggggaacgacaaagtatcagcgcaccgtaactggaactcttgccacaattgaagaaatagcaaaaaaagcagaaattgctcatcctgctatcgtacttgtaggagatgttgtgacaatcagagaaaaataa

SEQ ID NO: 85438 - protein, 243 aa, Bacillus megaterium
MTVGKVYLVGAGPGDPKLITVYGMECIQEADVILYDRLANEQLLNYAKKDAELIFCGKLPGKHGVIQDRIHELLVEKALQGKVVTRLKGGDPFVFGRGAEEAEVLANQGIPYEVVPGITSGIAAPAYAGIPVTHRDYATSFAIVTGHGREEKGKDYLNWSALAQGIDTIAFYMGVGNLPHICKQLMDHGRDKHTPVGLVQWGTTKYQRTVTGTLATIEEIAKKAEIAHPAIVLVGDVVTIREK

SEQ ID NO: 85439 - DNA, 1637 bp, Zea mays
  CDS (15)..(1286)
ccccgcgcatcgccatggctctcgccgtccgcacgcctcgcttccagcctcgaccggcctccatttctgcgcccacaacacccgcatcgacctccctcgccgccgggaacgcgaggccccgcccctgcgccggcgccgccgttcgcgcctcgcccttcaccgaggccacctcctcctcgcgctaccgccgcgacgcctggtcatacgccgccgatggctcctccaactccgcatccccgtcctccgctgccgctgctgccgcgggccgtcgggatgacgagatcgcgctgcagctgccggaactgcggaggctcctggacgtgctgagggcgtccagggggaggggcgccgaggagggcggcggacccggggaggtggcactggtgggcacagggcccggggaccccgagctgctcacgctcaaggcggtccgggccatcgaggcggcggacctggtgctctacgacaggctggtgtctaacgacgtgttggacttggtcggggagggcgccaggctgctctatgtcggcaagaccgcgggataccacagccgcacccaggaggagattcacgagctgctgctgagctttgcggaggccggtgccaatgttgtgcgcttgaaaggtggcgatcctctggtttttggaaggggtggagaagagatggatttcttacagcaacagggaattaaagttgaagttatcccaggaattacttctgcttcgggtattgcagcagagctaggcattccgttaacccatagaggtgttgctaccagtgtcagatttttaactggccactccagaaatggtgggacagatccactatatgtagctggaaatgcggctgatccagacactactttggttgtgtatatgggtttgtcaacacttccatcacttgctccaaagttaatgaagcacggcctgccaccagatacccctgctgttgcagtagagcgcgggactacaccccaacaacgaacggtgttcgcctcgttgaaggatcttgtggatgaagtcaagtcagccgatctagtttctccaactctaataattattgggaaagtggtatccttgtcacccttctgggttgagtcatctgaacatgatgcactgaaagttcagagctcgtatgcaaatgaggcagatgacaacagattttcttggtttttagtgactggacaatacttgagaaatgcaagatcccagatatgggagcacaggttcgacctggtgtacacagaaacatctcaggaagcatggatcctgaatggcggatggtagcttaagcttataacagacttggggcagaagcgcacttggactgatcatgcttgattctttggcctaatctacatgagattcacaatttttcgatttagttgagttcgacaatagttgtgtgcttctttgttactagtagccatgtacgtgcggcgcagcggtgtttacgattctatgccctagcatagtaaggctattccaacgctgccacgttatgattttatgataatgggagtttcgtagcaccatgataatgagaaatagtgctacgaagctcttattatatgacaagtgccataaatcgtagcacttatgattttatgatatggggagcttcgtagagctctttct

SEQ ID NO: 85440 - protein, 423 aa, Zea mays
MALAVRTPRFQPRPASISAPTTPASTSLAAGNARPRPCAGAAVRASPFTEATSSSRYRRDAWSYAADGSSNSASPSSAAAAAAGRRDDEIALQLPELRRLLDVLRASRGRGAEEGGGPGEVALVGTGPGDPELLTLKAVRAIEAADLVLYDRLVSNDVLDLVGEGARLLYVGKTAGYHSRTQEEIHELLLSFAEAGANVVRLKGGDPLVFGRGGEEMDFLQQQGIKVEVIPGITSASGIAAELGIPLTHRGVATSVRFLTGHSRNGGTDPLYVAGNAADPDTTLVVYMGLSTLPSLAPKLMKHGLPPDTPAVAVERGTTPQQRTVFASLKDLVDEVKSADLVSPTLIIIGKVVSLSPFWVESSEHDALKVQSSYANEADDNRFSWFLVTGQYLRNARSQIWEHRFDLVYTETSQEAWILNGGW

SEQ ID NO: 85441 - DNA, 837 bp, Pseudomonas stutzeri
  CDS (1)..(837): transl_table=11
atggaccagccactcacatttcccgccgcgctgagcgccgcgttcgcccccggcgaagtcgctctggtcggtgccggcccgggcgaccccggcctgctgaccatgcgggcctggagcctgctgcaacaggccgacgcggtggtctacgaccgcctggtcagcgacggactgatggcgctgctaccagccagctgcagccgccattacgtcggcaagaccagcggctaccacagcctgccgcagccggaaatcaatcaactgttggtcgatctggccctgcagaacaagcgcgtagtgcggctcaagggcggtgatccgttcatcttcggccgcggtgccgaagagctggaattcctgctgcaacgcggcatcgactgccaggtggtgccgggcatcaccgctgcggctggctgcagcgcctatgccggtattccactgacccatcgcgatctggcccattcctgccagttcatcaccggccacctgcagaccaacggcgagctgcacctgccatgggacgccctggctcaaggcggacaaacactggtgttttacatgggcctggccagcctcggcgagatctcgcgcaacctgatctccgccggattgccagtggacacccctgccgcgctgatcggcaacggcacccgtgagaatcagcaggtggtgcgctgcacactgcgtcagctgccaagcatggccgacgagcagcaccttaccccgcccaccctgaccgtcatcggccgggtggtcagcctgtttgcggatcgccaggtcgagcacccagcgcgcctgcatggtgatccagccccgaaagcggaggccttatgcaactga

SEQ ID NO: 85442 - protein, 278 aa, Pseudomonas stutzeri
MDQPLTFPAALSAAFAPGEVALVGAGPGDPGLLTMRAWSLLQQADAVVYDRLVSDGLMALLPASCSRHYVGKTSGYHSLPQPEINQLLVDLALQNKRVVRLKGGDPFIFGRGAEELEFLLQRGIDCQVVPGITAAAGCSAYAGIPLTHRDLAHSCQFITGHLQTNGELHLPWDALAQGGQTLVFYMGLASLGEISRNLISAGLPVDTPAALIGNGTRENQQVVRCTLRQLPSMADEQHLTPPTLTVIGRVVSLFADRQVEHPARLHGDPAPKAEALCN

SEQ ID NO: 85443 - DNA, 1395 bp, Lactobacillus reuteri
  CDS (1)..(1395): transl_table=11
atgagtggtagagtaacgctcctcggtgcaggtcctgggaatcctgaactattaacattaatcggtaaacggcggctgggagaggctgacgtagtattatatgatcggttaattgatccatcattattatcatttacaaatgatgatgccaccctagttgatgttggaaaaatgcctctgcaccataaagtgaagcagtcccaaatcaatgagatgttagttgattatgcaaacttagggaaaaaagtggttcggttaaaagctggcgacccatatgtctttggccgtggtggcgaagaggctcagatactacaacagcagggaattaactttgaaattattcctggaattactagtgccattgctgggttagcggctgcgggaattccgattacccatcgtgattttgcgtcgagcttccacgtgattacgggacatcataaaaaggatgggcagcaactcgattgggaaaacatcgctaaccaagaaggaacgcttgttttcttgatggggatggcgcaacttcctaatatatgtcatcaattgatagctcatggaaaagcggtggaaacccccgttgcaattattcaatgggcaactcaatggcgacaaaagatggtcagtggtgatctttcaaatattgtggaattggtaaataaaaacgggttatcatcaccagcattaatagtggtagggaatgttgttaagcttagtaagcagttgaatgttgctaagccgcttgcaggagtccatgtattagtaccatatagtaagaggcagcgattatttaactgcttggaagatttaggcgcaactgcggacttttatcagcgatcaatagtagaatccgccccagctaagttacccgttcttgattcatattcgtcaatcctatttgatgattatcttgcttataaagaatttattaaattgcttacagcaagcaaaaaagatattcgcgcattggtaggtaaaaagattcttgcaggtaatcaaagtgttgccaaccatcttgcaaaacaggggttgttggtagatgaagttgttgcaacgaacaaactttctgatgatgtacttgaagttggtggccaaaattcgtcttattcacataaagaatttcttagtctctaccaacgaaaagaacaaacacatgagttaccgtttgaccttgcagaatttaatgcagtgattttccctagcactgctagtctacgggattttaagagtacgttaaatgaagagcagtttaagcaattaaaggacctaacagcctttgtgatgggacaatccatttatgatcttgcaacgcagaatggttttaaaaaagtaatcaattgtcagccaaatattaaagcaacaattgagcaggtaaaggaggagttagcgagtgaataa

SEQ ID NO: 85444 - protein, 464 aa, Lactobacillus reuteri
MSGRVTLLGAGPGNPELLTLIGKRRLGEADVVLYDRLIDPSLLSFTNDDATLVDVGKMPLHHKVKQSQINEMLVDYANLGKKVVRLKAGDPYVFGRGGEEAQILQQQGINFEIIPGITSAIAGLAAAGIPITHRDFASSFHVITGHHKKDGQQLDWENIANQEGTLVFLMGMAQLPNICHQLIAHGKAVETPVAIIQWATQWRQKMVSGDLSNIVELVNKNGLSSPALIVVGNVVKLSKQLNVAKPLAGVHVLVPYSKRQRLFNCLEDLGATADFYQRSIVESAPAKLPVLDSYSSILFDDYLAYKEFIKLLTASKKDIRALVGKKILAGNQSVANHLAKQGLLVDEVVATNKLSDDVLEVGGQNSSYSHKEFLSLYQRKEQTHELPFDLAEFNAVIFPSTASLRDFKSTLNEEQFKQLKDLTAFVMGQSIYDLATQNGFKKVINCQPNIKATIEQVKEELASE

SEQ ID NO: 85445 - DNA, 846 bp, Medicago truncatula
  CDS (1)..(846)
atgggttcaataagagaggatgatatagctttacagcttccagagctgaaaaagcttgttaaggtattgaaagaaaagagggaaagtgaagggaagtgtagtgaaggggagtgtgtgaagggtgatgtgtttttggttggaacaggacctggtgatcctgagttgttgactgttaaggctgttagagttattaagagtgctgatttgttgttgtatgataggttggttagtaatgatgttttggatttggttggtgatcatgctaaacttttgtatgttgggaaaactgctggatatcatagtagaactcaggaagaaatacacgagcttcttttgagttttgcagaagctggggctactgttgtgagacttaaagggggtgatccattggtctttggaaggggtggtgaggaaatggactttttgcaacagcaaggtatccatgtcaaagttattccaggtataacagcagcctctggaatagcagcagagctagggattcctttaactcaccgcggtattgcaaatagtgtgagattcctcacggggcattcgaggaaaggaggaaccgatcctctatttgtatcagaaaatgctgcagatcctgattctaccttggttgtttacatgggcttgtcaactttcccttccctttcacaaaaattaatgcatcatggtttgtcgcctcagacaccagctgtgtttgcagaacttaaggaccttcctgagaaaattgcatctactggattggagtcaccaactctgctaataataggaaaagttgtcgagttatcaccattttggccaatgcctacgaaacaagaatcatctttaatgcaaacatga

SEQ ID NO: 85446 - protein, 281 aa, Medicago truncatula
MGSIREDDIALQLPELKKLVKVLKEKRESEGKCSEGECVKGDVFLVGTGPGDPELLTVKAVRVIKSADLLLYDRLVSNDVLDLVGDHAKLLYVGKTAGYHSRTQEEIHELLLSFAEAGATVVRLKGGDPLVFGRGGEEMDFLQQQGIHVKVIPGITAASGIAAELGIPLTHRGIANSVRFLTGHSRKGGTDPLFVSENAADPDSTLVVYMGLSTFPSLSQKLMHHGLSPQTPAVFAELKDLPEKIASTGLESPTLLIIGKVVELSPFWPMPTKQESSLMQT

SEQ ID NO: 85447 - DNA, 750 bp, Hydrogenobacter thermophilus
  CDS (1)..(750): transl_table=11
atgggtaaagtgtacatagtaggtgcgggacctggagatccggagcttttaaccctaaaagcttacagacttataaaatctgcggatgtggtgctttacgacagactggtaaatccagagatccttctactggctaaaccagaatgccaactcatctatgtgggaaaagaggagggaaagcacaccatagagcaggagaagattaacgagcttttgctccactatgctcacacaaaagaggttgtggtaaggctaaagggtggagacccctttgtctttggaaggggtagtgaggaggctctctttttggctcagcacggggtggaggtggaggttgtgccaggtataagctcagccacaggggtgcctgcgtatgcgggcatacccataacctttagaagattatcttcttccttcgcagtcatcacagggcacgaagacccaaagaagggaagctcaagcgtagactgggagagcctgaaaggtataaataccttagtctttctgatggcggtttccaacaggaaggagatagccaggaggctcatagaggtgggtagggacccaaaggagcctgtggcgtttatagagagaggcaccaccagggagcagagggtggtgataacagacctttatgagcttgccaacgacccacctgaggtaaaccctcctgctgttatggtggtaggtcaggtggtaagactttctccttattgcgggcaagtttctgcaacctggcaggctatttag

SEQ ID NO: 85448 - protein, 249 aa, Hydrogenobacter thermophilus
MGKVYIVGAGPGDPELLTLKAYRLIKSADVVLYDRLVNPEILLLAKPECQLIYVGKEEGKHTIEQEKINELLLHYAHTKEVVVRLKGGDPFVFGRGSEEALFLAQHGVEVEVVPGISSATGVPAYAGIPITFRRLSSSFAVITGHEDPKKGSSSVDWESLKGINTLVFLMAVSNRKEIARRLIEVGRDPKEPVAFIERGTTREQRVVITDLYELANDPPEVNPPAVMVVGQVVRLSPYCGQVSATWQAI

SEQ ID NO: 85449 - DNA, 771 bp, Bacillus stearothermophilus
  CDS (1)..(771): transl_table=11
atgaccatcggcaaagtgtatttagtcggcgccgggccgggcgatgaaaagctcatcacggtttacggccgcgaatgcctagagccggcggatgtcattatttacgaccggctcatcaaccggaagctgctgcgctacgcaaagccgggcgctgaggttctttactgcggcaaagagccgggaaaacatgacaccgttcaagaacaaattcacgagctgctcgtttggcatgcgcaacaaggcaaaacggtcgtccgcttaaaaggcggcgatccgtgtgtgtttggccgcgttggcgaagaagcggaagtgttggcgaaagccggcattccgtttgaaatcgttcccggggtgacatccggcatcgctgtgccggcgtacgccggcattccggtcacccaccgtgattacgccgcctcggtggcgatggtcagcgggcatcggagtgagcggatcgattgggaggcgctgactcgaggatgcgatacgatccttgtctacatgggagcggccaacttaccggatatttgcggccgtttgatggcggccggaaagccgtcggatacgccggcggccatcattgaatgggggacgaccgagcggcagcgcacggtggcggcgacactttcgacgctgtcagacgaggcggaacaggcgggcatttcccatccggccatcatcatcatcggcgatgtcgttcgtctgcgtgagacgctccaatggtttccggagcggcaagggggcgtggtcgatgccgacgcctcgtcgtag

SEQ ID NO: 85450 - protein, 256 aa, Bacillus stearothermophilus
MTIGKVYLVGAGPGDEKLITVYGRECLEPADVIIYDRLINRKLLRYAKPGAEVLYCGKEPGKHDTVQEQIHELLVWHAQQGKTVVRLKGGDPCVFGRVGEEAEVLAKAGIPFEIVPGVTSGIAVPAYAGIPVTHRDYAASVAMVSGHRSERIDWEALTRGCDTILVYMGAANLPDICGRLMAAGKPSDTPAAIIEWGTTERQRTVAATLSTLSDEAEQAGISHPAIIIIGDVVRLRETLQWFPERQGGVVDADASS

SEQ ID NO: 85451 - DNA, 774 bp, Propionibacterium freudenreichii subsp
  CDS (1)..(774): transl_table=11
atgaccaccacactgttgcccggcactgtcaccctcgtcggcgccgggcccggcgaccctgaactcgtcaccgtggccggcctgcgggccgtgcagcaggccgaggtgatcctctacgaccggctcgccccgcaggacctgctgtcggaggcgtccgacgacgccgaactcgtgccggtcggcaagatcccgcgcggccactatgtgccccaggaggagatcaaccaactgctcgtcgcgcacgcccgcgagggccgcaaggtggtgcgcctcaagggtggcgactcgttcgtcttcgggcgtggcggcgaggaatggcaggcctgcgccgaggccggcatcccggtgcgcgtgatcccgggagtctcctcggccaccgcgggcccggcgctggccggcatcccgctgacccatcgccacctggtgcaggggttcaccgtcgtgtcggggcatgtatcgcccagcgacgagcgctccgaggtgccatggcgccaactcgccaaggaccggctcacgctggtgatcctgatgggcgtggcccatatgcgcgacatcgcgccggaattgatggccggcgggctgcctgccgacacccccgtgcgcgtggtgagcaatgcgagcctggccagccaggaatcgtggcgcaccacgctgggcgatgccgtggccgacatggacgcgcaccacgtgcgtccgcccgcgctggtggtggtgggtaccctggccggcgtcgacctgtcgcatcccgaccatcgcgcgcccagcgaccactga

SEQ ID NO: 85452 - protein, 257 aa, Propionibacterium freudenreichii subsp
MTTTLLPGTVTLVGAGPGDPELVTVAGLRAVQQAEVILYDRLAPQDLLSEASDDAELVPVGKIPRGHYVPQEEINQLLVAHAREGRKVVRLKGGDSFVFGRGGEEWQACAEAGIPVRVIPGVSSATAGPALAGIPLTHRHLVQGFTVVSGHVSPSDERSEVPWRQLAKDRLTLVILMGVAHMRDIAPELMAGGLPADTPVRVVSNASLASQESWRTTLGDAVADMDAHHVRPPALVVVGTLAGVDLSHPDHRAPSDH

SEQ ID NO: 85453 - DNA, 1425 bp, Bacillus thuringiensis
  CDS (1)..(1425): transl_table=11
atgaacggatatgtatatttagttggtgcaggaccaggtgatgaaggacttattacaaaaaaagcgatagattgtttaaagcgtgcagatattgttttatatgaccgcttattaaaccctacctttcttagctatacaaaagaaacatgtgaacttatgtattgcggaaaaatgccaaagaatcatactatgcgacaagaaatgattaacgcacaccttcttcaatttgcgaaagagggaaaaattgttgtccgattaaaaggcggagatccatctatttttggccgtgttggtgaagaagcagaaactttagtagcagcaaatattccatatgaaattgtaccaggcattacatctagcatcgccgctagtagctatgcaggcatccccctgacccaccgtaactacagtaatagcgttactttactaaccggacatgcaaaaggtcctttaaccgatcatggaaaatataattcatctcacaatagcgatacgattgcctactacatgggtataaaaaacttacctacaatttgtgaaaacttacgacaagcaggaaaaaaagaagatacgccagtagcaatcattgaatggggtacaactggtaaacagcgcgttgttacagggacactatctaccattgtctctatcgtcaaaaacgagaatatttctaatccttctatgacaattgttggtgatgtcgtttcattacgagatcaaatcgcttggaaagaacgtaaaccattacatggtaaaaaagttttatttacatccgcaacaaataaaacaagtgtaatgaagcaaaggttacaagaagctggtgcagaaatatatcaaattccaactttcaaaaaggaagaatatacattaacacttgaacaaatcaatgaaattttcaacgttgatcgccttgttttttgttcagctgaaagtgtagaaattttgatgcaatcatgtagtaaataccagaaagatattcgttccttacaggcagagctgcaacacatgaacgttgccactcaagaaaaacttatgcaatatggcctactaagtaaagaagcaaagttctcttccgatacaactgtttatttaggcagaaatattaatcggattgcttttattcaagagaaaattggtgccggctcctatatgatgactcataagtatacaattgatcatcgtttcgatgaagtccattctcgtatgctttcagaattcttatgggatagcattgtatttgaaggacgcgcttctattgatacgtttctagcagaagtaaaacgtcttggctttatcgatattgttactctcccattctcgtataccgacgttccaactttacgctatgcaaataaagtcgggtttcataacattgatcatcaattacaagaaactcttatgcagaaagacatggtaagacaatga

SEQ ID NO: 85454 - protein, 474 aa, Bacillus thuringiensis
MNGYVYLVGAGPGDEGLITKKAIDCLKRADIVLYDRLLNPTFLSYTKETCELMYCGKMPKNHTMRQEMINAHLLQFAKEGKIVVRLKGGDPSIFGRVGEEAETLVAANIPYEIVPGITSSIAASSYAGIPLTHRNYSNSVTLLTGHAKGPLTDHGKYNSSHNSDTIAYYMGIKNLPTICENLRQAGKKEDTPVAIIEWGTTGKQRVVTGTLSTIVSIVKNENISNPSMTIVGDVVSLRDQIAWKERKPLHGKKVLFTSATNKTSVMKQRLQEAGAEIYQIPTFKKEEYTLTLEQINEIFNVDRLVFCSAESVEILMQSCSKYQKDIRSLQAELQHMNVATQEKLMQYGLLSKEAKFSSDTTVYLGRNINRIAFIQEKIGAGSYMMTHKYTIDHRFDEVHSRMLSEFLWDSIVFEGRASIDTFLAEVKRLGFIDIVTLPFSYTDVPTLRYANKVGFHNIDHQLQETLMQKDMVRQ

SEQ ID NO: 85455 - DNA, 780 bp, Bacillus stearothermophilus
  CDS (1)..(780): transl_table=11
atgacaaatggaaaagtatatatcgtcggtgccggtcccggcgatgaaaagctgattaccgtctatggattggaatgtattcaacaagctgatgtcattatttacgaccggttgattaataaaaatttactaaaatatgccaaaaaagatgcggaactcatttactgcggaaaagagccgggaaagcacgcgctcattcaagaatggattcatgagctgttagtcgaaaaagcacaacaaggaaaaattgtcactcgtctaaaaggaggcgatccttgcgtttttggacgggccggggaagaagcagaggtacttgcgcatcatggcattccatttgtaatcgttcctggcgtgacggcgggaattgcagctgccgcttatgccggcataccggttacacatcgggaatatgctgcttcgtttaccattgttactggccacggccgtcaagaaaagggagatgaccgtcttcattgggaaggattagcgaaaggaagcgacacgattgccttttatatgggtgtcggcaatttgtcgtatatttgccaaaagctgatcgaacatggaaaaccgtcgaatactcctgtggcggtgatcgaatggggaacgacggaacgacaacgcacggctgtcggtacgttgcagacgattgccgatgtcgtcaagaaagctggtctttcccatccagcgattattcttgtcggagaggtcgttcggctccgtgaaacgattcaatggtttgctgagatgaaccgaggtgagacggttgccaccacataa

SEQ ID NO: 85456 - protein, 259 aa, Bacillus stearothermophilus
MTNGKVYIVGAGPGDEKLITVYGLECIQQADVIIYDRLINKNLLKYAKKDAELIYCGKEPGKHALIQEWIHELLVEKAQQGKIVTRLKGGDPCVFGRAGEEAEVLAHHGIPFVIVPGVTAGIAAAAYAGIPVTHREYAASFTIVTGHGRQEKGDDRLHWEGLAKGSDTIAFYMGVGNLSYICQKLIEHGKPSNTPVAVIEWGTTERQRTAVGTLQTIADVVKKAGLSHPAIILVGEVVRLRETIQWFAEMNRGETVATT

SEQ ID NO: 85457 - DNA, 780 bp, Bacillus megaterium
  CDS (1)..(780): transl_table=11
atggggaaagtatatctagtcggtgcaggaccgggagatccagatttaattacattaaaagggttgaaagcaattcagcaagcagatgttatcttatatgatcgtttagtgaataaggacctgctggagtatgctaaaagtgatgcagatatcatttactgcggaaagcttccgaactaccataccctcaagcaagaaacaatcaacaactttttagtgaaattcgctaaaaaaggaaaaattgtaacgcgcttaaagggcggagatccatttgttttcggacgcggaggggaagaagcagaagctctcgtgcagcagggcatttcatttgaaattgttccaggaattacatcaggtatcgcagccgctgcttatgcaggaatccctgtcactcaccgggaatacagcgcaagctttgcttttgtagcaggccatcgtaaagatagcaagcatgatgcaatcaaatgggatagcctagccaaaggtgtagatactcttgcaatttatatgggagtgcggaacttaccgtacatttgccaacagttaatgaaacacggaaaaacttcagctacgccaattgcattgattcactggggaacatgtgcggaccagcgcactgtaactggaactcttggtacaattgttgatattgttaaagaagaacaaattgaaaatccaagtatgattatcgttggtgaagttgtaaattttcatgaccgattaaattggtttgagaagactggacagcattactattcgtatgcacaagaagcttactaa

SEQ ID NO: 85458 - protein, 259 aa, Bacillus megaterium
MGKVYLVGAGPGDPDLITLKGLKAIQQADVILYDRLVNKDLLEYAKSDADIIYCGKLPNYHTLKQETINNFLVKFAKKGKIVTRLKGGDPFVFGRGGEEAEALVQQGISFEIVPGITSGIAAAAYAGIPVTHREYSASFAFVAGHRKDSKHDAIKWDSLAKGVDTLAIYMGVRNLPYICQQLMKHGKTSATPIALIHWGTCADQRTVTGTLGTIVDIVKEEQIENPSMIIVGEVVNFHDRLNWFEKTGQHYYSYAQEAY

SEQ ID NO: 85459 - DNA, 774 bp, Sphingomonas elodea
  CDS (1)..(774): transl_table=11
atggttgaagatttttccgcaggcagcgtctggctggtcggcgccggacccggcgacccggagctgctcacccgcaaggcggagcggctgcttcgcgcggcgagcgtcgtcttctacgacgcgctggtcgggcagggggtgctcgacatgatccccgcggacgtgcggttggtgccggtgggcaagcgggccgggcggcattcgaaggaacagggctcgatcaacgacctgctcgtcgccgccgcgctggccggcgagcgggtggtccggctgaagggcggcgatccctcgatcttcggccgttcgatggaagagctgaccgcgctggcgggtgccgggatcgcggtgcggatctgcccggggatcaccgcggcgagtgctgcggcggcctcggcgggcgtgtcgctgtccctgcgcgggctggcccgccgcgtgcagttcgcgaccgcacacaggcgcggcgacgcgccgctggacctcgactgggcggcactggccgatcccggctgcaccaccgtcttctacatggggcgaagcgcggcggacgagatcagccgcaacctcctcgccgccggcctgtccggcgcgacgccggtgctggtggcgagcgacatcagcctcgggaccgagcgcctgctccgcacccggctggacctgctgccgctcgccgcgcgcgccattaccgaggaccagccgacgctgatcctggtcggcgatgcggtggccggcggcgcggacagaccggccgcggtccgagaatcggtcctcccctga

SEQ ID NO: 85460 - protein, 257 aa, Sphingomonas elodea
MVEDFSAGSVWLVGAGPGDPELLTRKAERLLRAASVVFYDALVGQGVLDMIPADVRLVPVGKRAGRHSKEQGSINDLLVAAALAGERVVRLKGGDPSIFGRSMEELTALAGAGIAVRICPGITAASAAAASAGVSLSLRGLARRVQFATAHRRGDAPLDLDWAALADPGCTTVFYMGRSAADEISRNLLAAGLSGATPVLVASDISLGTERLLRTRLDLLPLAARAITEDQPTLILVGDAVAGGADRPAAVRESVLP

SEQ ID NO: 85461 - DNA, 912 bp, Rhizobium fredii
  CDS (1)..(912): transl_table=11
atgctctgccgtcatttccttcaaaagagaatcagcgctgctgttttgccaggctgggagaaacgcgccgtgacggatacattttttgccggccttcccgaactcgatcccggttccgtctggctcgtcggcgccggccccggcgatccgggcctcttgacgctgcatgctgccaatgcgctccggcaggcggatgtaatcgttcatgatgcgctggtgaatgccgattgcctgaagctcgccaagccgggcgtcacgctcgaatttgccggcaaacgcggcggcaagccctcgccaaagcagcgcgacatctcgctccgcctcgtcgagctcgcacgcgccgggctcagggtattgcgcctcaagggcggcgacccctttgtcttcggccgcggcggcgaggaggccttgacgctcgtcgagcacggcatcccgttccgtatcgtgccgggcatcaccgcgggcatcggcgggcttgcctatgccggcatcccggtgacccaccgcgaggtcaatcatgccgtcaccttcctcaccggccacgattcctccggcgtcgtgccggaccggatcaactgggaaggcatcgccaaagggtcgcccgtgatcgtcatgtacatggcgatgaaacatatcggccagatttcggcaaacctcatcgctgccggccgttcggctgacgagccggttgccttcgtctgcaacgcagcgacgcctgagcaggtcgtgcttgagacgacgctttcccgtgccgaggccgatatttcggcttcgggactggagccgccggcaatcgtcgtcgtcggtgaagtcgttcggctgcgtccgtcgctcgactggctgggcgcgctcaatggccgcgcgcttgtcgccgatccgttcttaagccgcatacgccggaacccggcatga

SEQ ID NO: 85462 - protein, 303 aa, Rhizobium fredii
MLCRHFLQKRISAAVLPGWEKRAVTDTFFAGLPELDPGSVWLVGAGPGDPGLLTLHAANALRQADVIVHDALVNADCLKLAKPGVTLEFAGKRGGKPSPKQRDISLRLVELARAGLRVLRLKGGDPFVFGRGGEEALTLVEHGIPFRIVPGITAGIGGLAYAGIPVTHREVNHAVTFLTGHDSSGVVPDRINWEGIAKGSPVIVMYMAMKHIGQISANLIAAGRSADEPVAFVCNAATPEQVVLETTLSRAEADISASGLEPPAIVVVGEVVRLRPSLDWLGALNGRALVADPFLSRIRRNPA

SEQ ID NO: 85463 - DNA, 1518 bp, Selenomonas ruminantium subsp
  CDS (1)..(1518): transl_table=11
atgacatatatggcaggaatggtttatttagtaggtgcaggccccggagattaccggcttatcagcatgaaggcagtggattgcctaaaaatggccgatgtggtggtctatgaccgtctggccgatgaccgcatcttgcgctgggcgccggaagatgccgaattcatttatgtgggcaaggcatcgagcaaccataccatgaaacaggaagatatcaaccagctgttggtggacaaggccaaagaaggcaaatgcgtcgtgcgtctcaaaggcggcgacccctttgtatttggccggggcggtgaggaaggcctgctcttgcgcgaaaacaacctgcccttcgaaatcgtgccgggcatcacttcggcgatttccgtaccggcctatgcgggcattcccgtgacccatcgcgcggtagcaacttcctttgccgtggtgacaggccatgaagaccccaccaagggcaagagcaatatgcgttgggaacacctggctacgggcgtggatacgcttgtgttcctgatgggcgtagccaatctgccgcatatcacgggtaaattaatcgaaaatggccgcagtgccgatacgccggctgccgttatccgctggggcaccaagccagaacagcgcacgctgattaccaccgtggggaaggccgctgaagatgtggcgaaaaacggcatcaagccgcctgccatctttatcgtgggtgaagtcgtgaaactgcgggacagcctgcagtggttcgataacctttcccagcgtcctctgtttggcaagcggattctcgtaacgcgggcacgtagtcaggcatccaagctgacggcaaaactggaaaaactcggcgcggaagttctcgaagctccggcaatttccatggccgaccccgccgataattatgcggctctcgataaggccattgaccatgtggcggattatcactggttgattttcacgagtgctaatggtgtaggccgtttctttgcccgcctgttcaaagcaggcaaggatgcccgcgcattaggttatgccaagattgccgctatcggtttggcaacggcagagaaactcaagcagtatggccttgtggctgatgtaatcccgcaggaataccgcgctgaaggcgtgttggaagcgctgaagggaaaattgccgccgcatgccaaaatcctgattccgcgtgccgaagaagcacgggaagtcctgccggataccttgcgtgaaatgggcgcagaggttgaagtcgcacctgcatatcgtacaatctgcggtcaggtggacggcgaggctttggcggcagaactcaaagaaggcaacattgatttggtgaccttcaccagctcgtccacggttaaaaatctcgtcaacatcatcggctcggcagaggtactgaagggcgtaaagacggcctgcattggcccagttacggccgatactgccaaatccttaggcattgagccggatattatagccaaagaatataccattgatggtcttgtagaggccatctgcaaataa

SEQ ID NO: 85464 - protein, 505 aa, Selenomonas ruminantium subsp
MTYMAGMVYLVGAGPGDYRLISMKAVDCLKMADVVVYDRLADDRILRWAPEDAEFIYVGKASSNHTMKQEDINQLLVDKAKEGKCVVRLKGGDPFVFGRGGEEGLLLRENNLPFEIVPGITSAISVPAYAGIPVTHRAVATSFAVVTGHEDPTKGKSNMRWEHLATGVDTLVFLMGVANLPHITGKLIENGRSADTPAAVIRWGTKPEQRTLITTVGKAAEDVAKNGIKPPAIFIVGEVVKLRDSLQWFDNLSQRPLFGKRILVTRARSQASKLTAKLEKLGAEVLEAPAISMADPADNYAALDKAIDHVADYHWLIFTSANGVGRFFARLFKAGKDARALGYAKIAAIGLATAEKLKQYGLVADVIPQEYRAEGVLEALKGKLPPHAKILIPRAEEAREVLPDTLREMGAEVEVAPAYRTICGQVDGEALAAELKEGNIDLVTFTSSSTVKNLVNIIGSAEVLKGVKTACIGPVTADTAKSLGIEPDIIAKEYTIDGLVEAICK

SEQ ID NO: 85465 - DNA, 1374 bp, Klebsiella aerogenes
  CDS (1)..(1374): transl_table=11
gtggatcacttacccatattctgccagttgcgccagcgcgattgtttactggttggcggcggggatgtcgccgaacgcaaagcccgtctgctgctggatgctggcgctaacgtcacggtcaatgcgctcgacttcacgccccagtttcaggtgtgggctgattcacagatgctaactctggtgcagggggagtttatcccctcgctgctggataactgctggctggccatcgccgctactgatgatgagacggtcaaccagcaggttagcgaggcggccgaagcgcggcgtatcttctgtaacgtggtggatgccccgcgccaggccagctttatcatgccgtcgataatcgatcgctcgccgctgatggtcgccgtctcctcgggcgggacatcaccggttctggcgcgcctgctgcgcgagaaactggagtcaattctgcccctgcatctcggccagctggcccgctatgccggccatctgcgcgcgcgggttaagcagcagtttgccaccgtaggcgagcgtcgccgcttctgggagaagctgtttgttaacgaccgtctggcgcagtcgctggctaatgacgatcggcaggcagtcgcggataccactgagcagttgctgacggagccgttggagcatcgcggcgaggtggtgctggttggcgccggccccggtgacgccgggctgctcacgctcaaaggcctgcagcagatccagcaggctgacgtggtggtctatgatcggctggtctccgatgacatcatgaatctggtgcgccgcgatgccgatcgggtgttcgtcggcaagcgctcaggctaccactgcgtcccgcaggaggagatcaaccagatcctgctgcgcgaagcgcaaaaaggaagacgcgtggtccggctgaaaggcggcgatccctttatctttggccgcgggggggaagagctggagacgctttgcgaggcgggcatccccttctccgttgtgcctggcattaccgccgcctccggctgctccgcttattcggggatccccttgacccaccgcgatttcgcgcagggcgtccgcctggtcactggccacctgaaaaccggcggcgagctggactgggcgaacctggcggtggagaagcaaaccctggtgttctacatgggtctgaaccaggcgccggcgatccgcgagaagcttatcgctcacggcatggctgaagatatgcccgccgccatcgtcgagaacggcaccgctgtgacgcaaaaagtggtcagcggcaccttaggacaactggatattctggcgcagcagatggccagcccggcgctgatcatcgtcggccgcgtggtcggtctgcgggataaactgaactggttttcgaaccattaa

SEQ ID NO: 85466 - protein, 457 aa, Klebsiella aerogenes
MDHLPIFCQLRQRDCLLVGGGDVAERKARLLLDAGANVTVNALDFTPQFQVWADSQMLTLVQGEFIPSLLDNCWLAIAATDDETVNQQVSEAAEARRIFCNVVDAPRQASFIMPSIIDRSPLMVAVSSGGTSPVLARLLREKLESILPLHLGQLARYAGHLRARVKQQFATVGERRRFWEKLFVNDRLAQSLANDDRQAVADTTEQLLTEPLEHRGEVVLVGAGPGDAGLLTLKGLQQIQQADVVVYDRLVSDDIMNLVRRDADRVFVGKRSGYHCVPQEEINQILLREAQKGRRVVRLKGGDPFIFGRGGEELETLCEAGIPFSVVPGITAASGCSAYSGIPLTHRDFAQGVRLVTGHLKTGGELDWANLAVEKQTLVFYMGLNQAPAIREKLIAHGMAEDMPAAIVENGTAVTQKVVSGTLGQLDILAQQMASPALIIVGRVVGLRDKLNWFSNH

SEQ ID NO: 85467 - DNA, 1437 bp, Rhizobium leguminosarum bv
  CDS (1)..(1437): transl_table=11
atgcctcccaggactgaacagctttcggtatttcccgccttctttcgcgtggaaggcttgaagacggctgtcttcggcaatggcgacgaagctttcgccaaggtgcggctgctgctgaacacaaaggcgcggatcattgcctatgccgaccggccggaagccgattaccacgccttcctgatcgccaaccggatcgagaccgtgcgcgctgccttcgcagccgaacaggtcgagggttcggcactcgtctttgccgcaactggcaatgaagccgacgatcgcagcatcgtcgatgccgcccgcgctgccagaattccggccaatgccgtcgatcagcccgattactgcgatttcttcacgccggcgctggtcaaccgcgcgcccgtcgccgttgccatcggcaccgagggggcagggccggttctggcgcagatgatccgcgcgcagatcgaccaacttctttcgccctcactcggccgccttgccgggctggcgacgagctaccgcaaagccgtcgaacaactgattccgagaggcgtctcccgccgggtcttctggcgccatttcttttccggttccgttgccgatgcggtcgccaacggcaacctgccgcaggcccgccacgccgccgaccggctgctgcacgcgatggacaaggtcgccggccacgtctggctggttggcgccggtccgggtgcagaggatctgctgacgctgcgcgcccagcgcgtgatgatggaagccgatgtcatcgtctatgacgcgctggtgccgcaggcgatcgtcgatatgggccgccgcgatgccgagcggctttccgtcggcaagcgcaagggctgccactcgaagtcgcaggaagaaatcaacgacctgctggtcgatctcggccgccagggcaagcgcgtcgtccgtctgaaatccggcgatccgctggtctatggccgggcaggggaagagatggcggcactgcgcgctgccggcatcacctatgaggtcgtgcctggcatcacctgcgctttcgccgccgctgccgatttcgagctgccgctgacactgcgcggcgtcgcctcctcgctggtcttcacgacaggccacgatcttacaggcgacgtgctgcccgattgggcaagccttgccgtctccggcgcgacaatcgccgtctatatgggccgcacggttgctgcctccgtcgccgagcggctgatgcaggcgggcattccgtctgagaccaccgtcgccgtcatcgaaaatgccagccgcgctgagcgccgactgctgcatggcacgctcgccgatctgcccgatctgcaacaccgcgacgagttgaccggacctgtcatggtcatcatcggcgatgcggtcgccggcgccaatttcgaactgtccgagcccctggtgcgcgcaaacgcccggctcgaggaacttgcaaggagctga

SEQ ID NO: 85468 - protein, 478 aa, Rhizobium leguminosarum bv
MPPRTEQLSVFPAFFRVEGLKTAVFGNGDEAFAKVRLLLNTKARIIAYADRPEADYHAFLIANRIETVRAAFAAEQVEGSALVFAATGNEADDRSIVDAARAARIPANAVDQPDYCDFFTPALVNRAPVAVAIGTEGAGPVLAQMIRAQIDQLLSPSLGRLAGLATSYRKAVEQLIPRGVSRRVFWRHFFSGSVADAVANGNLPQARHAADRLLHAMDKVAGHVWLVGAGPGAEDLLTLRAQRVMMEADVIVYDALVPQAIVDMGRRDAERLSVGKRKGCHSKSQEEINDLLVDLGRQGKRVVRLKSGDPLVYGRAGEEMAALRAAGITYEVVPGITCAFAAAADFELPLTLRGVASSLVFTTGHDLTGDVLPDWASLAVSGATIAVYMGRTVAASVAERLMQAGIPSETTVAVIENASRAERRLLHGTLADLPDLQHRDELTGPVMVIIGDAVAGANFELSEPLVRANARLEELARS

SEQ ID NO: 85469 - DNA, 750 bp, Rhodococcus erythropolis
  CDS (1)..(750): transl_table=11
atgacggtgtacttcatcggagccggtcccggtgcggccgacctgatcacggttcgcgcgcagcggatcatcgcggctagcccggtctgtctgtacgcgggaagcctcgtcccgcaggaactcctggcggaatgccccgagggggcgcgggtgatcgacacggcgcgtctgagtctcgacgagatcgtcgccctgctgatcgaggccgacgcggccggtcaggacgtcgcgcgactgcattcgggtgacccgtcgatcttcagtgccgtcgccgaacaggtccgccggctcgaatccgccggggtcgcgtaccaggtggtgcccggagtgcccgcgttcaccgcggcggcggcgtcgctggggcgggaactgaccgttcccggtgtgtcgcagtcgatcgtgctgacccgcgtgtccaccctgtcgaccgcgatgccggagggtgaggacctgcgttccctcggccgcagcggcgccacgatggtggtgcacctgggggcgcaccggatcgatcagatcgccgaagaactcatcgaggactacggccgcgactgtccggccgctgtcgtcgcgttcgcgtcgcgtcccgacgagatcgtgctgcgcggcaccctggccaccatcgccgatcaggtgaaggcggcgggcgtcacgaagaccgccgtggtgatcgtcggtagagtgcttgctgccgaagggtttccggacagctacctgtattccgccactcgcgagcgcaccacccactga

SEQ ID NO: 85470 - protein, 249 aa, Rhodococcus erythropolis
MTVYFIGAGPGAADLITVRAQRIIAASPVCLYAGSLVPQELLAECPEGARVIDTARLSLDEIVALLIEADAAGQDVARLHSGDPSIFSAVAEQVRRLESAGVAYQVVPGVPAFTAAAASLGRELTVPGVSQSIVLTRVSTLSTAMPEGEDLRSLGRSGATMVVHLGAHRIDQIAEELIEDYGRDCPAAVVAFASRPDEIVLRGTLATIADQVKAAGVTKTAVVIVGRVLAAEGFPDSYLYSATRERTTH

SEQ ID NO: 85471 - DNA, 1374 bp, Escherichia coli O157
  CDS (1)..(1374): transl_table=11
gtggatcatttgcctatattttgccaattacgcgatcgcgactgtctgattgtcggcggtggtgatgtcgcggaacgcaaagcaaggttgctgttagacgcaggcgctcgcttaacggtgaatgcattagcgtttattccacagttcaccgcatgggcagatgcaggcatgttaaccctcgtcgaagggccatttgatgaaagccttctcgacacctgctggctggcgattgcagcgacggatgatgacgcgcttaaccagcgcgtcagcgaagccgctgaagctcgtcgcatcttctgtaacgtggtcgatgcgccgaaagctgccagcttcattatgccgtcgattattgaccgctcaccgctgatggtggcggtttcctctggcggtacttctccggttctggcgcgcctgttgcgcgaaaaactcgaatcactgctgccgctgcatctgggccaggtagcgaaatacgccgggcagttacgcggtcgggtaaaacaacagttcgccacgatgggtgaacgccgccgcttctgggaaaaactgttcgttaacgaccgtctggcgcagtcgctggcgaacaacgatcagaaagccattactgaaaccaccgaacagttaatcaacgaaccgctcgaccatcgcggtgaagtggtgctggttggtgcaggtccgggcgatgccgggctgctgacactgaaaggtctgcaacaaattcagcaggcagatgtggtggtctacgaccgtctggtttctgacgatattatgaatctggtacgccgcgatgcggatcgtgttttcgtcggcaaacgcgcgggataccactgcgtaccgcaggaggagattaaccagatcctgctgcgggaagcgcaaaaaggcaaacgcgtggtgcggctgaaaggcggcgatccgtttatttttggccgtggtggcgaagagctggaaacactgtgcaacgcgggtattccgttctcggtggttccgggtattaccgcagcttctggttgctcagcctattcgggtattccgctcacgcatcgcgattatgcccagagcgtgcgcttaattaccggacacttaaaaaccggtggcgagctggactgggaaaacctggcggcagaaaaacagacgctggtgttctatatggggctgaatcaggctgcgactattcagcaaaagctgattgaacacggtatgcctggcgaaatgccggtagcaattgtcgaaaacggaacagcagtcacgcagcgcgtgattgacggtacgctcacacaactgggcgaactggcgcagcaaatgaatagtccatcgctaattattattggtcgggttgttggcctgcgcgataaactgaactggttctccaaccattaa

SEQ ID NO: 85472 - protein, 457 aa, Escherichia coli O157
MDHLPIFCQLRDRDCLIVGGGDVAERKARLLLDAGARLTVNALAFIPQFTAWADAGMLTLVEGPFDESLLDTCWLAIAATDDDALNQRVSEAAEARRIFCNVVDAPKAASFIMPSIIDRSPLMVAVSSGGTSPVLARLLREKLESLLPLHLGQVAKYAGQLRGRVKQQFATMGERRRFWEKLFVNDRLAQSLANNDQKAITETTEQLINEPLDHRGEVVLVGAGPGDAGLLTLKGLQQIQQADVVVYDRLVSDDIMNLVRRDADRVFVGKRAGYHCVPQEEINQILLREAQKGKRVVRLKGGDPFIFGRGGEELETLCNAGIPFSVVPGITAASGCSAYSGIPLTHRDYAQSVRLITGHLKTGGELDWENLAAEKQTLVFYMGLNQAATIQQKLIEHGMPGEMPVAIVENGTAVTQRVIDGTLTQLGELAQQMNSPSLIIIGRVVGLRDKLNWFSNH

SEQ ID NO: 85473 - DNA, 1461 bp, Neisseria meningitidis serogroup A
  CDS (1)..(1461): transl_table=11
gtgaattatttccccattttcgccaacctcgccggccgccccgtattggtcgtaggcggcggcgcagtcgccgcacgcaaaatcagcctgctgctgaaggcgggcgcagaggtcagggttgccgcaaaacacctgaatgccgaactctccgcgttggcggcggaaaacaaaatcctgtggcttgccgaagaatttcgtgccgaacacatccgcacggttttcctcatcattgcggcaagcagcgaccaagccctcaaccggcgcgttttccatcttgccgaaagctgccaaaagccggtcaacgtggtggatgaccgcgaccattgcagcttcatcttcccatcggttatcgaccgcaacccggttcagattgccgtttccagctccggcagcgcgcccgtcctcgcccgactgctgcgtgaaaggctggaagccctgctgccgccgtctttgggcgatatggcggaaatttcaggaaggtggcgcgatgccgtcaagggcaaactgaaatccgttaccgaacgccgccgcttttgggaaaagcagtttaacggacgtttcgccgccctcgtcaaaaaccggcaaaacacccttgccgaacgggaattggcaggccaattggaacaaagtcgtcaaaatgatcaaggcggctccgtctcgctggtcggcgcgggtcccggcgatgcggggctgctgacgctcaaagggctgcaggaaatccagcaggcagacgtggtgctttacgacgcgctggtttcagacggcatactgtccctcgtccgccgcgatgcggaacggatttttgtcggcaagcgcgcccggggcggccgcaccccgcaagaggacaccaatgcgcttatggtcaggctggcccgcgaaggcaggcgcgtggtgcgtttgaaaggcggagaccctttcgtgttcggacgcggcggcgaagaattggaaaccttggcacgccatcagattccgttttcggtcgtccccggcattaccgccgccgtcggcgcgaccgcctatgccggcatcccgctcacgcaccgcgattatgcccaaagtgcggttttcgtaaccggccaccgcaaggcggatgcgcccgacatcgaatggcagacccttgcccgcagccgccagaccttggtgatttatatgggtgcgctcaaagccgccctgattgccgaacggctgcaacagcacggacgctcgcccgacacgccggcagccgtcatcagccaaggcacgctgccggctcaaaaaaccgcaaccggcacgctcgccaaccttgccgaactcgccgaaaccgcgccgaatccggcattgattgtcataggcgaagtggtggggctgcacgaaaaactggcttggttcggcgaaaacgccaaaaaagaaagcaatccggccgaacacgcgtattttgcattggacggactgggcaccggacaagaacaacaagccgcataa

SEQ ID NO: 85474 - protein, 486 aa, Neisseria meningitidis serogroup A
MNYFPIFANLAGRPVLVVGGGAVAARKISLLLKAGAEVRVAAKHLNAELSALAAENKILWLAEEFRAEHIRTVFLIIAASSDQALNRRVFHLAESCQKPVNVVDDRDHCSFIFPSVIDRNPVQIAVSSSGSAPVLARLLRERLEALLPPSLGDMAEISGRWRDAVKGKLKSVTERRRFWEKQFNGRFAALVKNRQNTLAERELAGQLEQSRQNDQGGSVSLVGAGPGDAGLLTLKGLQEIQQADVVLYDALVSDGILSLVRRDAERIFVGKRARGGRTPQEDTNALMVRLAREGRRVVRLKGGDPFVFGRGGEELETLARHQIPFSVVPGITAAVGATAYAGIPLTHRDYAQSAVFVTGHRKADAPDIEWQTLARSRQTLVIYMGALKAALIAERLQQHGRSPDTPAAVISQGTLPAQKTATGTLANLAELAETAPNPALIVIGEVVGLHEKLAWFGENAKKESNPAEHAYFALDGLGTGQEQQAA

SEQ ID NO: 85475 - DNA, 1452 bp, Bacillus subtilis
  CDS (1)..(1452): transl_table=11
atgatcatgaagaacggaatcgtatatttcgtgggagccggacccggcgacccaggcctgctcaccatcaaaggaaaacaggcgctcaaggaagcagatgtgattttatatgaccggctcgccaacccgaagctgctcgaatttgcatcaccggactgccagtttatttattgcggaaaactgccaaaccgccattttatgaaacaaaaagaaattaacgccctgctggttgaaaaagcattaaatgggttaaccgtcgttcgcttgaagggcggagatccgagcgtattcggcagagtcggcgaggaagcagatgctcttcatgagcacggcattcgctatgaaatggtgccgggaatcacctctggaattgcagcgccgctatatgcgggcatccccgtcacgcatcgggattttgcatcgtcttttgccatgattacagcgcatgataaatcattaaaaggcacgccgaaccttgactgggaagggctggcccgaagcgttcaaacccttgttttttacatgggtgtcaagaacttgtcttatatttgccagcagcttatttcatacgggaaatcgccttctgtccctgtcattgtcatccaatggggaacgtggggccgccagcggagtgtgaaaggaacacttgagaacattcagcaaaaagtgcaggaacaccagattacaaaccctgcgattatcgtcatcggagacatcgtcaactttcaaacacacagctggtttgaaagcaaaccgctcatcggacggcatttgatggttgtgactcatggcgaagatgaagacccgcttgcagacaagctgcgcgattccggcgccgatctcatcgagtggccgaaatggcggaccgaaaacatgcctgtcaatgaagaaattcttcgaaagattggcacctttgaagacgtttttttcacatcgcgccgggcggtttgtgaatttttcagagcactggcttctcagaaaatcgacatccgccagctgacagccaaactgagtgcagcatctgagcaagcaaagacagagcttgagaaacggggctttcttgtcaccgccattcagcctgattcagagaaacgtcttgttgtcgggagccgccatgcagtggaaaacatgcaaaagcatgaatcctgttcgttttatatcactcatgaaaacgtcatagatgaccggttcacccacatgattcagcgtaccatcagtgaatccccgctgcacatggtcatttgcccaaacaagctgtccgttcagcaattgatcaatggtggcgaacaaattggcattttgccggaaccgtcagcaagccgccctcctatcgtctgcataggcgatgactcagctgccggcatttatggattcacagccgtacaagaacaggatgaattgctagctttcatccacaatcaacatgcagagaaaaaactccttcacacctga

SEQ ID NO: 85476 - protein, 483 aa, Bacillus subtilis
MIMKNGIVYFVGAGPGDPGLLTIKGKQALKEADVILYDRLANPKLLEFASPDCQFIYCGKLPNRHFMKQKEINALLVEKALNGLTVVRLKGGDPSVFGRVGEEADALHEHGIRYEMVPGITSGIAAPLYAGIPVTHRDFASSFAMITAHDKSLKGTPNLDWEGLARSVQTLVFYMGVKNLSYICQQLISYGKSPSVPVIVIQWGTWGRQRSVKGTLENIQQKVQEHQITNPAIIVIGDIVNFQTHSWFESKPLIGRHLMVVTHGEDEDPLADKLRDSGADLIEWPKWRTENMPVNEEILRKIGTFEDVFFTSRRAVCEFFRALASQKIDIRQLTAKLSAASEQAKTELEKRGFLVTAIQPDSEKRLVVGSRHAVENMQKHESCSFYITHENVIDDRFTHMIQRTISESPLHMVICPNKLSVQQLINGGEQIGILPEPSASRPPIVCIGDDSAAGIYGFTAVQEQDELLAFIHNQHAEKKLLHT

SEQ ID NO: 85477 - DNA, 717 bp, Bacillus megaterium
  CDS (1)..(717): transl_table=11
atggggaaagtatatctagtcggtgcaggaccgggagatccagatttaattacattaaaagggttgaaagcaattcagcaagcagatgttatcttatatgatcgtttagtgaataaggacctgctggagtatgctaaaagtgatgcagatatcatttactgcggaaagcttccgaactaccataccctcaagcaagaaacaatcaacaactttttagtgaaattcgctaaaaaaggaaaaattgtaacgcgcttaaagggcggagatccatttgttttcggacgcggaggggaagaagcagaagctctcgtgcagcagggcatttcatttgaaattgttccaggaattacatcaggtatcgcagccgctgcttatgcaggaatccctgtcactcaccgggaatacagcgcaagctttgcttttgtagcaggccatcgtaaagatagcaagcatgatgcaatcaaatgggatagcctagccaaaggtgtagatactcttgcaatttatatgggagtgcggaacttaccgtacatttgccaacagttaatgaaacacggaaaaacttcagctacgccaattgcattgattcactggggaacatgtgcggaccagcgcactgtaactggaactcttggtacaattgttgatattgttaaagaagaacaaattgaaaatccaagtatgattatcgttggtgaagttgtaaatttttcatga

SEQ ID NO: 85478 - protein, 238 aa, Bacillus megaterium
MGKVYLVGAGPGDPDLITLKGLKAIQQADVILYDRLVNKDLLEYAKSDADIIYCGKLPNYHTLKQETINNFLVKFAKKGKIVTRLKGGDPFVFGRGGEEAEALVQQGISFEIVPGITSGIAAAAYAGIPVTHREYSASFAFVAGHRKDSKHDAIKWDSLAKGVDTLAIYMGVRNLPYICQQLMKHGKTSATPIALIHWGTCADQRTVTGTLGTIVDIVKEEQIENPSMIIVGEVVNFS

SEQ ID NO: 85479 - DNA, 696 bp, Methanobacterium ivanovii
  CDS (1)..(696): transl_table=11
atggtagtttatttagtaggtgcgggtccaggagatcccgaacttatcactctcaaagctgtaaacgtgttaaaaaaagcggatgttgtactgtacgacaaacctgcaaatgaagaaattttaaagtatgctgaaggtgcaaaactaatatatgtcggaaaacaagcaggacatcattacaaatctcaaaatgaaatcaatactcttcttgttgaagaagcaaaagaaaatgatttagtagtacgccttaaaggtggagacccctttgtatttggaagaggaggcgaggaaattctggcccttgtagaagaaggaattgattttgagttagttccaggggtaacttctgcaattggagttccaacaacaattgggcttccagttactcatagaggtgttgcaacatcgtttacagttgttacaggtcatgaagacccaacaaaatgcaagaaacaggtaggatgggactttaaagcagatactattgtaatacttatgggtattggaaatttagctgaaaatacagcagaaattatgaaacataaagatcctgaaactccagtttgtgtaattgaaaatggtacgatggaaggtcaaaggataataacgggcacactggaaaatatagctggaaaggatattaaacctcctgctttagtggtattggaaatgttgtcaatgtttttaaagaaatga

SEQ ID NO: 85480 - protein, 231 aa, Methanobacterium ivanovii
MVVYLVGAGPGDPELITLKAVNVLKKADVVLYDKPANEEILKYAEGAKLIYVGKQAGHHYKSQNEINTLLVEEAKENDLVVRLKGGDPFVFGRGGEEILALVEEGIDFELVPGVTSAIGVPTTIGLPVTHRGVATSFTVVTGHEDPTKCKKQVGWDFKADTIVILMGIGNLAENTAEIMKHKDPETPVCVIENGTMEGQRIITGTLENIAGKDIKPPALVVLEMLSMFLKK

SEQ ID NO: 85481 - DNA, 729 bp, Methanococcus jannaschii
  CDS (1)..(729): transl_table=11
atgacaggcaaagttatcttagtaggagcaggaccgggagacccagagttgataacaataaaaggtttaaaagctattaaagaggcagatgttgttgtttatgatgatttaatatcaaaagagctattaaattatgctaaaaaagatgccgagctaatttatgttggtaaaagaaagggaaaacattcatttaaacaagaagagattaataaaatattggttgagaaggcaaaggaaggaaagttagttgttagattaaaaggtggagacccatttgtttttggtagaggtggagaagagattttagagttaaagaagcataacataccttatgaggtaattccgggaataacgtcagctatagcagtcccagaggttgctgggattccagttactcatagaaaggtagctacctcctttacagtagttacagggcatgaggcagaggataagaaagagaaacaggtagatttaagcaagttaaatgctgatactattgtaattttaatgggaataactaatttggaaaatttggttaaagagttgttgcaaaacccaaaaagaagtaaagaaacaccagtagcaatcattatggagggaactacaaagaatcagagagttataaaagggactttgggagatattgttgaaaaggctaaaaaagaaaatgcaagacctccaggagttatagttgttggtgaggttgttaatgtgttagatagtcaataa

SEQ ID NO: 85482 - protein, 242 aa, Methanococcus jannaschii
MTGKVILVGAGPGDPELITIKGLKAIKEADVVVYDDLISKELLNYAKKDAELIYVGKRKGKHSFKQEEINKILVEKAKEGKLVVRLKGGDPFVFGRGGEEILELKKHNIPYEVIPGITSAIAVPEVAGIPVTHRKVATSFTVVTGHEAEDKKEKQVDLSKLNADTIVILMGITNLENLVKELLQNPKRSKETPVAIIMEGTTKNQRVIKGTLGDIVEKAKKENARPPGVIVVGEVVNVLDSQ

SEQ ID NO: 85483 - DNA, 738 bp, Pseudomonas aeruginosa
  CDS (1)..(738): transl_table=11
atgagcggtaaggtctggctggtgggtgcgggtcccggcgatccggaactgttgaccctgaaggcagttcgcgccctgcaggacgcggatgtggtgatggtcgacgatctggtcaacccgagcatactggagcactgtccgtccgcccggctggtccgggtcggcaaacgcggcggctgccgctccacaccgcaggacttcatccagcgcctgatgctgcggcatgcccgccagggacgcagcgtggtgcgcctgaaaggcggcgatccatgcatcttcggccgcgccggcgaagaagccgaatggctggcccggcacgggatagacagcgagatagtgaacggcatcaccgccgggctggctggcgccactgcctgcggcataccgctgacctaccgcggcatcagccgcggcgtgaccctggtgaccgcgcatacccaggacgacagcccgctggcctgggaagccctggcacgcagcggtaccacgctggtggtctacatgggcgtcgcccgtctcgcagagatccaggccgggctgctggctggaggtatggccgaggatacgccgctggcgatgatcgagaacgccaccctgggcaaccagcgcgaatgccgcagcaacctcggcgagctactgcgggacgccggacgtttcgccttgaaaagcccggcgatcctggtgatcggcgaagtaacccgcgacatcgtgtcgcaaccgatttccctgagcgcctga

SEQ ID NO: 85484 - protein, 245 aa, Pseudomonas aeruginosa
MSGKVWLVGAGPGDPELLTLKAVRALQDADVVMVDDLVNPSILEHCPSARLVRVGKRGGCRSTPQDFIQRLMLRHARQGRSVVRLKGGDPCIFGRAGEEAEWLARHGIDSEIVNGITAGLAGATACGIPLTYRGISRGVTLVTAHTQDDSPLAWEALARSGTTLVVYMGVARLAEIQAGLLAGGMAEDTPLAMIENATLGNQRECRSNLGELLRDAGRFALKSPAILVIGEVTRDIVSQPISLSA

SEQ ID NO: 85485 - DNA, 843 bp, Pseudomonas denitrificans
  CDS (1)..(843): transl_table=11
atgatcgacgacctctttgccggattgccggcgctcgaaaaaggttcggtctggctggtcggcgccggccccggcgatcccggcctgttgacgctgcatgcggccaatgcgctgcgccaggcggatgtgatcgtgcatgatgcgctggtcaacgaggattgcctgaagctcgcgcggccgggcgccgtgctggagtttgcgggcaagcgtggcggcaagccgtcgccgaagcagcgcgacatctcgcttcgcctcgtcgaactcgcgcgcgccggcaaccgggtgctgcgcctcaaaggcggcgatcccttcgtcttcggtcgcggtggcgaggaggcgctgacgctggtcgaacaccaggtgccgttccgaatcgtgcccggcatcaccgccggtatcggcgggcttgcctatgccggcattcccgtgacccatcgcgaggtcaaccacgcggtcactttcctgactggccatgattcctccggcctggtgccggatcgcatcaactggcagggcatcgccagcggctcgcctgtcatcgtcatgtacatggcgatgaaacatatcggcgcgatcaccgccaacctcattgccggcggccgctcgccggacgaaccggtcgccttcgtctgcaacgccgcgacgccgcagcaggcggtgctggaaacgacgcttgcgcgtgcagaggccgatgttgcggcggcagggctggagccgccggcgatcgtcgtcgtcggcgaggtggtgcggctgcgcgcagcgctcgactggatcggcgcgctggacgggcgcaagcttgccgccgacccgttcgccaatcgcattctcaggaacccggcatga

SEQ ID NO: 85486 - protein, 280 aa, Pseudomonas denitrificans
MIDDLFAGLPALEKGSVWLVGAGPGDPGLLTLHAANALRQADVIVHDALVNEDCLKLARPGAVLEFAGKRGGKPSPKQRDISLRLVELARAGNRVLRLKGGDPFVFGRGGEEALTLVEHQVPFRIVPGITAGIGGLAYAGIPVTHREVNHAVTFLTGHDSSGLVPDRINWQGIASGSPVIVMYMAMKHIGAITANLIAGGRSPDEPVAFVCNAATPQQAVLETTLARAEADVAAAGLEPPAIVVVGEVVRLRAALDWIGALDGRKLAADPFANRILRNPA

SEQ ID NO: 85487 - DNA, 744 bp, Pseudomonas fluorescens
  CDS (1)..(744): transl_table=11
atgagcgcaaaagtctggctggtaggcgcaggccccggtgatccggagttgttaaccctcaaggcggtacgcgccctgcacgcagccgatgtggtgctgatcgatgatttggtcaacccgagggtgctggagcactgcccggacgctcgggtgataaccgtgggcaagcgcggcggctgccgttcgacaccccaggattttatccaccgcctgatgctcgctatgcgcgccaaggcaaatgcgtggtgcgacttaagggcggcgaccccgtgtattttcggccggggcggcgaagaagcgctgtggttgcgtgaacgcggggttgaggtggaattggtcaacgggattaccgcgggcctggcaggtgcaacgaactgcgatattcccctgacgctgcgcggggtcagccgcggtgtgacgctggtcacggcgcatacccaggacgacagcagcctgaactggcgtgccttggccgagggcggtacgacattggtggtgtatatgggcgtggcgaagctggaggagattcgtcagcaattgctggagggcgcaatggcagcggatacgccggtggcgatgatcgagaacgcatcattgcctcagcaacgcgagtgccgcagcactctggcgcacatgcataccgatgcacaggtatttgctctgaaaagccctgcaatcctggtgatcggcagtgttgctggcgcagggcaagccgcctctattactgtgtcagccagcgcctga

SEQ ID NO: 85488 - protein, 247 aa, Pseudomonas fluorescens
MSAKVWLVGAGPGDPELLTLKAVRALHAADVVLIDDLVNPRVLEHCPDARVITVGKRGGCRSTPQDFIHRLMLAMRAKANAWCDLRAATPCIFGRGGEEALWLRERGVEVELVNGITAGLAGATNCDIPLTLRGVSRGVTLVTAHTQDDSSLNWRALAEGGTTLVVYMGVAKLEEIRQQLLEGAMAADTPVAMIENASLPQQRECRSTLAHMHTDAQVFALKSPAILVIGSVAGAGQAASITVSASA

SEQ ID NO: 85489 - DNA, 1491 bp, Schizosaccharomyces pombe
  CDS (1)..(1491)
atgattgtttcctggtccttgaaagacgccgttgttgtagtcgttggttcaggaaaaaatgcttaccgacgggtgaatttatgtttaagtgaaaattcttctaaaattttttggttttgtcgcagctccgctgatggtggatttgacgttggtcatcttcagcttgacgcaaaaaaatcggatgctattgaaattcttcccatttctgaatttgatcccgttcgttcattaacgacgctgggaaaggaggagacagattttttggtggatgctgttttcgtgtcagagtccaaccaccatgaaaaggaaattttacatcgtacgtgcaaaaggtaccgaatcccattaaacatcattgataatccttctttgtgctcctttactctaccagctacgtggtcagaaccacctcttcaaatttctttaagtacttcatcaaatggttgtcgtttagctcaaaggctgttgagacacgtggtgagtagccttccttccggtatgccagaagccattgagcgttttggccgagtgcgagcgatcactaaaactccagaaaaaaaacagtggatcaatcatgttagtgatttttggcccctcgagaagttggttcggatgacagaggacgatcttcttgccatagtttctgacaacttctctcttccactctcatcaagccaatcttcttcacttgccaactcctatgaaagtttatcaaccaccttggacaagccttcattgacgcttgaccctgaggcttttcctactcataagcgaggttcaatagctttaattggaagtggacctggctctcctgatttacttactgttgctgccagaaaggctataatgaaagccgattatgtactagccgacaagctggtaccagaagcggtattacagttaattccaaggcatactccactatttattgctagaaaatttcctggaaatgcggataaggcacaagatgaacttcaccaggttgcttttgatgctttatctagaggtgattatgttgtccgtttgaagcaaggtgatccttatatttatgggcgaggcggtgaagagtatctattctttacacaacacggttatgtaccaacggttattcctggcatcagtagtgctttgatggcccctatctctgctggtattcccgttacacatcgtggagtggccgatcaatttcttgtgtgtactggaactggtcaaaagggttcgatgcctaaaataccttcttttgtccctacacagaccacagttttcctaatggctttacaccgactagaaattcttgtgcaagcactaattgaaagcggttggcctagagtgttaccggtttgtatagctgagcgcgtctcttgccctgatcaaaggttcattttctctactttggaagacgttgtggaagaatacaacaagtacgagtctctcccccctggtttgctgattactggatacagttgtaatacccttcgcaacaccgcgtaa

SEQ ID NO: 85490 - protein, 496 aa, Schizosaccharomyces pombe
MIVSWSLKDAVVVVVGSGKNAYRRVNLCLSENSSKIFWFCRSSADGGFDVGHLQLDAKKSDAIEILPISEFDPVRSLTTLGKEETDFLVDAVFVSESNHHEKEILHRTCKRYRIPLNIIDNPSLCSFTLPATWSEPPLQISLSTSSNGCRLAQRLLRHVVSSLPSGMPEAIERFGRVRAITKTPEKKQWINHVSDFWPLEKLVRMTEDDLLAIVSDNFSLPLSSSQSSSLANSYESLSTTLDKPSLTLDPEAFPTHKRGSIALIGSGPGSPDLLTVAARKAIMKADYVLADKLVPEAVLQLIPRHTPLFIARKFPGNADKAQDELHQVAFDALSRGDYVVRLKQGDPYIYGRGGEEYLFFTQHGYVPTVIPGISSALMAPISAGIPVTHRGVADQFLVCTGTGQKGSMPKIPSFVPTQTTVFLMALHRLEILVQALIESGWPRVLPVCIAERVSCPDQRFIFSTLEDVVEEYNKYESLPPGLLITGYSCNTLRNTA

SEQ ID NO: 85491 - DNA, 732 bp, Synechococcus sp
  CDS (1)..(732): transl_table=11
atgacgggcaaagtctatctcgtcggcgctgggccgggcgaccctgaatatctgacgctgcaggcacagcaatgtttgcagtcagcagaggtgttgatctacgacgcgctgatcgacccccgaattctcgacttagtgccagctaattgcgatcgcattgccgtgggtaaacgcggtggcgcggagagtacgccgcaagccactatcaatcaactactggtcgagcactgccagcaagggcgcaaagtcatccgcctcaaaagtggcgatccctttgtctttggtcgcgctgccagtgaattggatgcgctggagcgatcgggctgtgattatgctgtcctgcccgggctttcgaccgctttagcggctccactgttggcgggcattccgattaccgatccggtgctgagccgtggctttgcggtttacaccgtccatgagccagacgcgttgaattgggaagcgctggcgcaactggaaacgctgattctgctgatgggtagtcgccacttgctgacgattggccacgagctgattcggcatgggcgatcgccggatagtcctgtggcgctgattcagtgggccggacatccacagcagaccgttttggaaagtagcctcagccgcatggcgcagcagtggggcgatcagccgttatcgccctgcgtaattgtgattggcgaggtggtacggttgcgaaagtactgggcgcactaccgttacgatggctga

SEQ ID NO: 85492 - protein, 243 aa, Synechococcus sp
MTGKVYLVGAGPGDPEYLTLQAQQCLQSAEVLIYDALIDPRILDLVPANCDRIAVGKRGGAESTPQATINQLLVEHCQQGRKVIRLKSGDPFVFGRAASELDALERSGCDYAVLPGLSTALAAPLLAGIPITDPVLSRGFAVYTVHEPDALNWEALAQLETLILLMGSRHLLTIGHELIRHGRSPDSPVALIQWAGHPQQTVLESSLSRMAQQWGDQPLSPCVIVIGEVVRLRKYWAHYRYDG

SEQ ID NO: 85493 - DNA, 1782 bp, Saccharomyces cerevisiae
  CDS (1)..(1782)
atggtacgagacttagtgacattgccttcatcactgcccttgattactgctggttttgctactgatcaggttcatttgcttattggtacagggtccacggactcagtaagcgtttgtaagaatagaatccactccattttgaatgctggtggtaatcccatagtagtgaatccctcgtcaccaagccatactaaacaattacaattggaatttggtaagtttgcaaagttcgaaatagtagaaagggagtttaggttatctgatttaactactttggggagagttctggtatgcaaggtagtggatagagtattcgtagatctacccataacacaaagtcgcctatgcgaggagatcttttggcaatgccaaaaactgagaattcccataaatacattccacaaaccagagttttctaccttcaatatgattcctacgtgggtcgacccaaaaggaagtggtttacaaatctcagttactacgaatgggaatggatacatcttggcaaacaggataaaaagagatataatatcacacttacctccaaacatatctgaggtggtgataaacatggggtatttgaaagaccgtattataaacgaagaccataaggccttgttagaggaaaagtactaccagactgacatgtcattacctggatttggctacggcttagatgaggacggttgggagagccataagtttaataagctaattcgtgaatttgaaatgaccagtagagaacagagacttaagagaaccagatggttatctcagataatggagtattacccgatgaacaagctgagtgacatcaagttggaagatttcgagacttcatcttctccaaataaaaagacaaagcaggaaactgtcacagagggtgtagtacctcctaccgatgaaaatattgaaaacggtacaaaacaactacaattatcggaagtgaaaaaagaggagggacctaaaaaactagggaagatttctttagtcggaagtggtccaggctcggtatctatgctaacgataggtgcattacaagaaataaagtctgcagatataatactggcagataaactggtaccgcaagccattttagatttaatacctccaaaaactgaaaccttcatagccaaaaaatttcccggtaatgcagaacgagcacaacaggaattactagctaaaggtttagaatcgttggataatggattgaaagtagtccgtttgaagcaaggtgatccgtatatttttggccgtggtggcgaggaatttaatttcttcaaagatcacggatatattcctgtggttttaccgggcataagctcatccctagcttgtactgtattggctcagatacccgctactcaacgtgatatagcagaccaagtgctcatatgtactgggactgggagaaagggcgctctgcctataattcctgaatttgttgaaagcagaaccaccgtctttctaatggcactgcatcgcgccaacgttctgatcacgggattattgaagcatggctgggatggtgatgtccccgctgcaattgtcgagagaggatcgtgccctgaccagcgtgttactagaactcttcttaaatgggtaccagaagtcgtggaggagattggttcaaggccccccggtgtcttggttgtaggcaaggctgtgaatgcattggttgaaaaagatctgataaattttgacgaatcaagaaaatttgtcattgatgaaggttttagagaatttgaggttgatgtagatagtctatttaagttatactaa

SEQ ID NO: 85494 - protein, 593 aa, Saccharomyces cerevisiae
MVRDLVTLPSSLPLITAGFATDQVHLLIGTGSTDSVSVCKNRIHSILNAGGNPIVVNPSSPSHTKQLQLEFGKFAKFEIVEREFRLSDLTTLGRVLVCKVVDRVFVDLPITQSRLCEEIFWQCQKLRIPINTFHKPEFSTFNMIPTWVDPKGSGLQISVTTNGNGYILANRIKRDIISHLPPNISEVVINMGYLKDRIINEDHKALLEEKYYQTDMSLPGFGYGLDEDGWESHKFNKLIREFEMTSREQRLKRTRWLSQIMEYYPMNKLSDIKLEDFETSSSPNKKTKQETVTEGVVPPTDENIENGTKQLQLSEVKKEEGPKKLGKISLVGSGPGSVSMLTIGALQEIKSADIILADKLVPQAILDLIPPKTETFIAKKFPGNAERAQQELLAKGLESLDNGLKVVRLKQGDPYIFGRGGEEFNFFKDHGYIPVVLPGISSSLACTVLAQIPATQRDIADQVLICTGTGRKGALPIIPEFVESRTTVFLMALHRANVLITGLLKHGWDGDVPAAIVERGSCPDQRVTRTLLKWVPEVVEEIGSRPPGVLVVGKAVNALVEKDLINFDESRKFVIDEGFREFEVDVDSLFKLY

SEQ ID NO: 85495 - DNA, 1140 bp, Zea mays
  CDS (1)..(1140)
atggctctcgccgtgcgcacgcctcgcttccagcctcgaccggcctccatttctgcgcccacaacacccgcatcgacctccctcgccgccgcgaacgcgaggccccgcccctgcgccggcgccgccgttcgcgcctcgcccttcaccgaggccacctcctcctcgcgctaccgccgcgacgcctggtcttacgccgccgatggctcctccaactccgcatccccgtcctccgctgccgctgctgccgcgggccgtcgggatgacgagatcgcgctgcagctgccggaactgcggaggctcctggacgcgctgagggcgtccagggggaggggcgccgaggagggcggcggacccgggagggtggcactggtgggcacagggcccggggaccccgagctgctcacgctcaaggcggtccgggccatcgaggcggcggacctggtgctctacgacaggctggtgtctaacgacgtgttggacttggtcggggagggcgccaggctgctctatgtcggcaagaccgcgggataccacagccgcacccaggaggagattcacgagctgctgctgagctttgcggaggccggtgccaatgttgtgcgcttgaaaggtggcgatcctctggtttttggaaggggtggagaagagatggatttcttacagcaacagggaattaaagttgaagttatcccaggaattacttctgcttcgggtattgcagcagagctaggcattccgttaacccatagaggtgttgctaccagtgtcagatttttaactggccactccagaaatggtgggacagatccactatatgtagctggaaatgcggctgatccagacactactttggttgtgtatatgggtttgtcaacacttccatcacttgctccaaagttaatgaagcacggcctgccgccagatacccctgccgttgcagtagagcgcgggactacacctcaacaacgaacggtgttcgcctcgttgaaggatcttgtggatgaagtcaagtcagccgatctagtttctccaactctaataattattgggaaagtggtatctttgtcacccttctgggttgagtcatctgaacatgatgcactgaaagttcagagctcgtatgcaaatgaggccagatga

SEQ ID NO: 85496 - protein, 379 aa, Zea mays
MALAVRTPRFQPRPASISAPTTPASTSLAAANARPRPCAGAAVRASPFTEATSSSRYRRDAWSYAADGSSNSASPSSAAAAAAGRRDDEIALQLPELRRLLDALRASRGRGAEEGGGPGRVALVGTGPGDPELLTLKAVRAIEAADLVLYDRLVSNDVLDLVGEGARLLYVGKTAGYHSRTQEEIHELLLSFAEAGANVVRLKGGDPLVFGRGGEEMDFLQQQGIKVEVIPGITSASGIAAELGIPLTHRGVATSVRFLTGHSRNGGTDPLYVAGNAADPDTTLVVYMGLSTLPSLAPKLMKHGLPPDTPAVAVERGTTPQQRTVFASLKDLVDEVKSADLVSPTLIIIGKVVSLSPFWVESSEHDALKVQSSYANEAR

SEQ ID NO: 85497 - DNA, 1116 bp, Brassica napus
  CDS (1)..(1116)
atggctcttgtccagcggattcccaatttctcatccaatattcgaaactggaagagcaccaattcgacaaaccataagcctgtttcttctctccattacaaaactcagatcactgcttcttcttcctcacccttcacggagaagcactctgttgagagataccaaagagatcaatggctgtacaaagcatccactccatctccatctccatcgccaccgtcgaatcagcaagatgaagtctttgttagggaaaacgacatcgcatcgcagctgcctgagctgaagaagctcttggaggttctgagagagaagagagagagtggatgcagaggcggtgattgcggaccaggagatgtgtacctggttgggacaggaccgggagatccagagcttttgactttgaaagctgtcagagtcattcaaagcgctgatcttctgctttacgacaggcttgtctctaatgatgttctggagttggttgctcctgatgctaggcttctctatgtcggcaaaactgctggctatcatagcagaactcaggaggagatacatgaactactccttagttttgctgaagctggtgctactgttgtgaggcttaaaggtggagatcctttggtttttggacgaggtggggaagagatggactttctgcaacaacaagggattcgagttaaagttatcccagggattacagcggcgtctgggatagcagcagagcttgggattcccttaacgcatcgaggtgttgcaactagtgtgaggttcctcactggtcattccaggaaaggagggaccgatcctctcttcgtcgcagagaatgcagctgatcctgacacgacacttgttgtttatatgggtttgggaactttaccttctcttgcgcagaagcttatggaccacggtctgccttgtgatacaccggctgttgcggttgaacgtggaaccactcctctacagcgtaatgtttttgctgagcttaaagactttgcgactgagattcaggcagctggattggtgtcaccaacgctcatcatcatagggaaagtcgtcgagctatctcctttatggcctcattgcacgaaggaatcctcttgccttgttgagtcccgttag

SEQ ID NO: 85498 - protein, 371 aa, Brassica napus
MALVQRIPNFSSNIRNWKSTNSTNHKPVSSLHYKTQITASSSSPFTEKHSVERYQRDQWLYKASTPSPSPSPPSNQQDEVFVRENDIASQLPELKKLLEVLREKRESGCRGGDCGPGDVYLVGTGPGDPELLTLKAVRVIQSADLLLYDRLVSNDVLELVAPDARLLYVGKTAGYHSRTQEEIHELLLSFAEAGATVVRLKGGDPLVFGRGGEEMDFLQQQGIRVKVIPGITAASGIAAELGIPLTHRGVATSVRFLTGHSRKGGTDPLFVAENAADPDTTLVVYMGLGTLPSLAQKLMDHGLPCDTPAVAVERGTTPLQRNVFAELKDFATEIQAAGLVSPTLIIIGKVVELSPLWPHCTKESSCLVESR

SEQ ID NO: 85499 - DNA, 1107 bp, Brassica napus
  CDS (1)..(1107)
atggctcttgtccagcggattcccagtttctcatccaatcttcgaaactggaagagcaccaattcgacaaaccataagcctgtttcttctctccattacaaaactcagatcactgcttcttcttcctcgcccttcacggagaagcactctgttgagagataccaaagagatcaatggctgtacaaagcatccactccatctccatctccatcgccgccgtcgaatcagcaagatgaagtctttgttagggaaaacgacatcgcatcgcagctgcctgagctgaagaagctcttggaggttctgagagagaagagagagagtggatgcagaggcggtgattgcggaccaggagatgtgtttctggtcgggacaggaccgggagatcctgagcttttgactttgaaagctgtcagagtcattcaaagcgctgatcttctgctttacgacaggcttgtctctaatgatgttctggagttggttgctcctgatgctaggcttctctatgtcggcaaaactgctggctatcatagcagaactcaggaggagatacatgaactactccttagttttgctgaagctggtgctactgttgtgaggcttaaaggtggagatcctttggtttttggacgaggtggggaagagatggactttctgcaacaacaagggattcgagttaaagttatcccagggattacagcggcgtctgggatagcagcagagcttgggattcccttaacgcatcgaggtgttgcaactagtgtgaggttcctcactggtcattccaggaaaggagggaccgatcctctcttcgtcgcagagaatgcagctgatcctgacacgacacttgttgtttatatgggtttgggaactttaccttctcttgcgcagaaactgatggaccacggtctaccttgtgacacaccagctgttgcggttgaacgtggaaccactcctcttcagcgtaatgtttttgctgagcttaaagactttgcgactgagattcaggcagctggattggtgtcaccaacgctcatcatcatagggaaagtcgtcgagctatctcctttatggcctcattgcacgaaggaatactttttgcttgtttaa

SEQ ID NO: 85500 - protein, 368 aa, Brassica napus
MALVQRIPSFSSNLRNWKSTNSTNHKPVSSLHYKTQITASSSSPFTEKHSVERYQRDQWLYKASTPSPSPSPPSNQQDEVFVRENDIASQLPELKKLLEVLREKRESGCRGGDCGPGDVFLVGTGPGDPELLTLKAVRVIQSADLLLYDRLVSNDVLELVAPDARLLYVGKTAGYHSRTQEEIHELLLSFAEAGATVVRLKGGDPLVFGRGGEEMDFLQQQGIRVKVIPGITAASGIAAELGIPLTHRGVATSVRFLTGHSRKGGTDPLFVAENAADPDTTLVVYMGLGTLPSLAQKLMDHGLPCDTPAVAVERGTTPLQRNVFAELKDFATEIQAAGLVSPTLIIIGKVVELSPLWPHCTKEYFLLV

SEQ ID NO: 85501 - DNA, 1140 bp, Zea mays
  CDS (1)..(1140)
atggctctcgccgtccgcacgcctcgcttccagcctcgaccggcctccatttctgcgcccacaacacccgcatcgacctccctcgccgccgcgaacgcgaggccccgcccctgcgccggcgccgccgttcgcgcctcgcccttcaccgaggccacctcctcctcgcgctaccgccgcgacgcctggtcatacgccgccgatggctcctccaactccgcatccccgtcctccgctgccgctgctgccgcgggccgtcgggatgacgagatcgcgctgcagctgccggaactgcggaggctcctggacgcgctgagggcgtccagggggaggggcgccgaggagggcggcggacccgggagggtggcactggtgggcacagggcccggggaccccgagctgctcacgctcaaggcggtccgggccatcgaggcggcggacctggtgctctacgacaggctggtgtctaacgacgtgttggacttggtcggggagggcgccaggctgctctatgtcggcaagaccgcgggataccacagccgcacccaggaggagattcacgagctgctgctgagctttgcggaggccggtgccaatgttgtgcgcttgaaaggtggcgatcctctggtttttggaaggggtggagaagagatggatttcttacagcaacagggaatcaaagttgaaattatcccaggaattacctctgcttcgggtattgcagcagagctaggcattccgttaacccatagaggtgttgctaccagtgtcagatttttaactggccactccagaaatggtgggacagatccactatatgtagctggaaatgcggctgatccagacactactttggttgtgtatatgggtttgtcaacacttccatcacttgctccaaagttaatgaagcacggcctgccaccagatacccctgccgttgcagtagagcgcgggactacaccccaacaacgaacggtgttcgcctcgttgaaggatcttgtggatgaagtcaagtcagccgatctagtttctccaactctaataattattgggaaagtggtatccttgtcacccttctgggttgagtcatctgaacatgatgcactgaaagttcagagctcgtatgcaaatgaggccagatga

SEQ ID NO: 85502 - protein, 379 aa, Zea mays
MALAVRTPRFQPRPASISAPTTPASTSLAAANARPRPCAGAAVRASPFTEATSSSRYRRDAWSYAADGSSNSASPSSAAAAAAGRRDDEIALQLPELRRLLDALRASRGRGAEEGGGPGRVALVGTGPGDPELLTLKAVRAIEAADLVLYDRLVSNDVLDLVGEGARLLYVGKTAGYHSRTQEEIHELLLSFAEAGANVVRLKGGDPLVFGRGGEEMDFLQQQGIKVEIIPGITSASGIAAELGIPLTHRGVATSVRFLTGHSRNGGTDPLYVAGNAADPDTTLVVYMGLSTLPSLAPKLMKHGLPPDTPAVAVERGTTPQQRTVFASLKDLVDEVKSADLVSPTLIIIGKVVSLSPFWVESSEHDALKVQSSYANEAR

SEQ ID NO: 85503 - DNA, 1140 bp, Zea mays
  CDS (1)..(1140)
atggctctcgccgtccgcacgcctcggttccagcctcgaccggcctccatttctgcgcccacaacacccgcatcgacctccctcgccgccgggaacgcgaggccccgcccctgcgccggcgccgccgttcgcgcctcgcccttcaccgaggccacctcctcctcgcgctaccgccgcgacgcctggtcatacgccgccgatggctcctccaactccgcatccccgtcctccgctgccgctgctgccgcgggccgtcgggatgacgagatcgcgctgcagctgccggaactgcggaggctcctggacgtgctgagggcgtccagggggaggggcgccgaggagggcggcggacccgggagggtggcactggtgggcacagggcccggggaccccgagctgctcacgctcaaggcggtccgggccatcgaggcggcggacctggtgctctacgacaggctggtgtctaacgacgtgttggacttggtcggggagggcgccaggctgctctatgtcggcaagaccgcgggataccacagccgcacccaggaggagattcacgagctgctgctgagctttgcggaggccggtgccaatgttgtgcgcttgaaaggtggcgatcctctggtttttggaaggggtggagaagagatggatttcttacagcaacagggaattaaagttgaagttatcccaggaattacttctgcttcgggtattgcagcagagctaggcattccgttaacccatagaggtgttgctaccagtgtcagatttttaactggccactccagaaatggtgggacagatccactatatgtagctggaaatgcggctgatccagacactactttggttgtgtatatgggtttgtcaacacttccatcacttgctccaaagttaatgaagcacggcctgccgccagatacccctgccgttgcagtagagcgcgggactacacctcaacaacgaacggtgttcgcctcgttgaaggatcttgtggatgaagtcaagtcagccgatctagtttctccaactctaataattattgggaaagtggtatctttgtcacccttctgggttgagtcatctgaacatgatgcactgaaagttcagagctcgtatgcaaatgaggccagatga

SEQ ID NO: 85504 - protein, 379 aa, Zea mays
MALAVRTPRFQPRPASISAPTTPASTSLAAGNARPRPCAGAAVRASPFTEATSSSRYRRDAWSYAADGSSNSASPSSAAAAAAGRRDDEIALQLPELRRLLDVLRASRGRGAEEGGGPGRVALVGTGPGDPELLTLKAVRAIEAADLVLYDRLVSNDVLDLVGEGARLLYVGKTAGYHSRTQEEIHELLLSFAEAGANVVRLKGGDPLVFGRGGEEMDFLQQQGIKVEVIPGITSASGIAAELGIPLTHRGVATSVRFLTGHSRNGGTDPLYVAGNAADPDTTLVVYMGLSTLPSLAPKLMKHGLPPDTPAVAVERGTTPQQRTVFASLKDLVDEVKSADLVSPTLIIIGKVVSLSPFWVESSEHDALKVQSSYANEAR

SEQ ID NO: 85505 - DNA, 21 bp, Artificial sequence
  primer
atggttgttaggttgcaaaac

SEQ ID NO: 85506 - DNA, 23 bp, Artificial sequence
  primer
ttaattgacaccgcccagtatag

SEQ ID NO: 85507 - protein, 266 aa, Artificial sequence
  consensus sequence
  Variant (2)..(2): Xaa in position 2 is any amino acid
  Variant (4)..(4): Xaa in position 4 is any amino acid
  Variant (13)..(14): Xaa in position 13 to 14 is any amino acid
  Variant (16)..(16): Xaa in position 16 is any amino acid
  Variant (18)..(26): Xaa in position 18 to 26 is any amino acid
  Variant (28)..(32): Xaa in position 28 to 32 is any amino acid
  Variant (34)..(34): Xaa in position 34 is any amino acid
  Variant (35)..(35): Xaa in position 35 is any or no amino acid
  Variant (37)..(52): Xaa in position 37 to 52 is any amino acid
  Variant (53)..(56): Xaa in position 53 to 56 is any or no amino acid
  Variant (59)..(59): Xaa in position 59 is any amino acid
  Variant (60)..(69): Xaa in position 60 to 69 is any or no amino acid
  Variant (71)..(72): Xaa in position 71 to 72 is any amino acid
  Variant (74)..(80): Xaa in position 74 to 80 is any amino acid
  Variant (82)..(83): Xaa in position 82 to 83 is any amino acid
  Variant (85)..(86): Xaa in position 85 to 86 is any amino acid
  Variant (87)..(88): Xaa in position 87 to 88 is any or no amino acid
  Variant (90)..(90): Xaa in position 90 is any amino acid
  Variant (98)..(99): Xaa in position 98 to 99 is any amino acid
  Variant (103)..(104): Xaa in position 103 to 104 is any amino acid
  Variant (107)..(109): Xaa in position 107 to 109 is any amino acid
  Variant (111)..(113): Xaa in position 111 to 113 is any amino acid
  Variant (115)..(120): Xaa in position 115 to 120 is any amino acid
  Variant (123)..(123): Xaa in position 123 is any amino acid
  Variant (125)..(129): Xaa in position 125 to 129 is any amino acid
  Variant (130)..(133): Xaa in position 130 to 133 is any or no amino acid
  Variant (137)..(137): Xaa in position 137 is any amino acid
  Variant (139)..(139): Xaa in position 139 is any amino acid
  Variant (141)..(147): Xaa in position 141 to 147 is any amino acid
  Variant (148)..(149): Xaa in position 148 to 149 is any or no amino acid
  Variant (151)..(151): Xaa in position 151 is any amino acid
  Variant (153)..(163): Xaa in position 153 to 163 is any amino acid
  Variant (164)..(177): Xaa in position 164 to 177 is any or no amino acid
  Variant (179)..(182): Xaa in position 179 to 182 is any amino acid
  Variant (185)..(194): Xaa in position 185 to 194 is any amino acid
  Variant (196)..(197): Xaa in position 196 to 197 is any amino acid
  Variant (198)..(198): Xaa in position 198 is any or no amino acid
  Variant (200)..(202): Xaa in position 200 to 202 is any amino acid
  Variant (203)..(205): Xaa in position 203 to 205 is any or no amino acid
  Variant (207)..(207): Xaa in position 207 is any amino acid
  Variant (209)..(217): Xaa in position 209 to 217 is any amino acid
  Variant (219)..(221): Xaa in position 219 to 221 is any amino acid
  Variant (222)..(224): Xaa in position 222 to 224 is any or no amino acid
  Variant (226)..(233): Xaa in position 226 to 233 is any amino acid
  Variant (234)..(259): Xaa in position 234 to 259 is any or no amino acid
  Variant (261)..(265): Xaa in position 261 to 265 is any amino acid
GXVXLVGAGPGDXXLXTXXXXXXXXXAXXXXXDXXLXXXXXXXXXXXXXXXXXXXXGKXXXXXXXXXXXQXXIXXXXXXXAXXGXXXXVXRLKGGDPXXFGRXXEEXXXLXXXGXXXXXXPGXTXXXXXXXXXGIPXTXRXXXXXXXXXTXHXXXXXXXXXXXXXXXXXXXXXXXXXTXXXXMGXXXXXXXXXXLXXXGXXXXXXPXAXXXXXXXXXQXXXXXXLXXXXXXXXXXXXXXXXXXXXXXXXXXXXXXXXXXPXXXXXG

SEQ ID NO: 85508 - protein, 38 aa, Artificial sequence
  protein pattern
  Variant (2)..(2): Xaa in position 2 is any or no amino acid
  Variant (6)..(6): Xaa in position 6 is any or no amino acid
  Variant (8)..(8): Xaa in position 8 is any or no amino acid
  Variant (10)..(10): Xaa in position 10 is Ala, Pro or Ser
  Variant (11)..(11): Xaa in position 11 is any amino acid
  Variant (12)..(12): Xaa in position 12 is Ile, Leu, Met or Val
  Variant (16)..(17): Xaa in position 16 to 17 is any amino acid
  Variant (20)..(33): Xaa in position 20 to 33 is any amino acid
  Variant (34)..(34): Xaa in position 34 is Asn or Pro
  Variant (36)..(36): Xaa in position 36 is Ile, Leu, Met or Val
  Variant (37)..(37): Xaa in position 37 is Pro, Ser or Thr
  Variant (38)..(38): Xaa in position 38 is Ala, Ser or Thr
VXRLKXGXDXXXFGRXXEEXXXXXXXXXXXXXXXGXXX

SEQ ID NO: 85509 - protein, 29 aa, Artificial sequence
  protein pattern
  Variant (2)..(2): Xaa in position 2 is any amino acid
  Variant (3)..(3): Xaa in position 3 is Phe, Ile or Leu
  Variant (4)..(4): Xaa in position 4 is Ile, Leu or Val
  Variant (5)..(5): Xaa in position 5 is Gly or Ser
  Variant (6)..(6): Xaa in position 6 is Ala, Gly, Ser or Thr
  Variant (10)..(11): Xaa in position 10 to 11 is any or no amino acid
  Variant (13)..(14): Xaa in position 13 to 14 is any or no amino acid
  Variant (16)..(16): Xaa in position 16 is Ile, Leu, Met or Val
  Variant (18)..(19): Xaa in position 18 to 19 is any amino acid
  Variant (20)..(20): Xaa in position 20 is Ala or Gly
  Variant (21)..(23): Xaa in position 21 to 23 is any amino acid
  Variant (24)..(24): Xaa in position 24 is Ile, Leu, Met or Val
  Variant (25)..(26): Xaa in position 25 to 26 is any amino acid
  Variant (27)..(27): Xaa in position 27 is Ala, Cys, Gly, Ser or Val
  Variant (28)..(28): Xaa in position 28 is any amino acid
  Variant (29)..(29): Xaa in position 29 is Ala, Ile, Leu or Val
VXXXXXGPGXXDXXLXTXXXXXXXXXXXX

SEQ ID NO: 85510 - DNA, 1068 bp, Synechocystis sp.
  CDS (1)..(1068): transl_table=11
atgggggccatgggcgtaaattttttggcaggggatatcggcggcactaaaacgattctggccctggtgacgataaacgagagtagcccagggttggcccggccggtgactctgtttgaacagacctacagcagtccagcttttcccgatctggtgcccatggtgcaacaattccgtcaagaagcagcctttgtgttgggtaacccaatctccgttgctaaggcctgtttcgccattgccggccctgtgatcgataacacctgtcgcctcactaatttagattggcatctcagcggcgatcgcctggcccaggaattggccattgcccaggttgacctcatcaatgattttgccgctgtgggttacggcattttagggctagggtcagaggatttaaccgtactccaggccgctcccgtggatccgtcaggggcgatcgccatattgggagcaggcaccggcttgggacaatgctacgtaattccccagggccaaggaagatatcgagtttttgcctccgaaggagcccacggtgactttgccccccgatcgcctttggaatggcagttattggagtatctcaaaaagaagtattccctagggcggatttccattgaacgggtggtatccggcatgggcatcgccatgatttacgaatttttgcggcaccaatacccagaacgggaatcagcccaattcagcaaactctaccaaacctggaatcgagaaaaggaccaagaaaccaaaaccgtcgatctggccgccgccgtatcccaagccgccctggaaggcacagatgtattggctgaccaagccatggaactttttctcggggcctatggagcagaggcaggaaatcttgctttgaagctactacccagaggtggtttgtacgttgccggtggtattgcccccaaaattatccctttactggaaaagggcagttttatgcaaggctttagcgacaaaggcaggatgcaaagcttaatggggacaattcccgtacaggtggtactcaacgccaaagttggcctaattggcgcggcggtttgtgcggcccagtcttaa

SEQ ID NO: 85511 - protein, 355 aa, Synechocystis sp.
MGAMGVNFLAGDIGGTKTILALVTINESSPGLARPVTLFEQTYSSPAFPDLVPMVQQFRQEAAFVLGNPISVAKACFAIAGPVIDNTCRLTNLDWHLSGDRLAQELAIAQVDLINDFAAVGYGILGLGSEDLTVLQAAPVDPSGAIAILGAGTGLGQCYVIPQGQGRYRVFASEGAHGDFAPRSPLEWQLLEYLKKKYSLGRISIERVVSGMGIAMIYEFLRHQYPERESAQFSKLYQTWNREKDQETKTVDLAAAVSQAALEGTDVLADQAMELFLGAYGAEAGNLALKLLPRGGLYVAGGIAPKIIPLLEKGSFMQGFSDKGRMQSLMGTIPVQVVLNAKVGLIGAAVCAAQS

SEQ ID NO: 85512 - DNA, 1020 bp, Xylella fastidiosa 9a5c
  CDS (1)..(1020): transl_table=11
ttgctagtgacctcaatgattccgaaccctacccgagatgcacccaatatcccgtcctttgttgccgccgatgtcggcggcactcacgtgcgcgtcagcgtggttgcagccgcgcccacgtgtgccagtccaccgcaactgttggatgtgcgcacttaccgctgcgctgactatcccagcctcagcacaattctgaacgacttcctcggtacaagatcagcagtacgtgattgcgtcatcgccagtgccggttttcagcgcagcgatggtactgttatcactaccaacctaccgtggccgctatcaccacaccggctacgcgcagatctcgatctggcagaggtctctctggtcaacgactttgaggcgctggcctacgccacagaggatatggaggctgcgcaattgctgcacctcactggtccagccaaagcgcaggatgggccacgcctgttgcttggtccgggaaccggcctgggtgcagcactctggattcccaataacggacgccccattgtcctccctacggaagccggtcaagcagcattgccgagtacaactgaacttgaaatgcaactggtacgacacatgctgaacaaccgcacacatgtgccgattgagcatgctttatctgggccaggaatactcaatgtgtaccgcgccttgtgtgcgctacagtccgtcctcccccagcacgcaagcccagatgcgatcagtcacgctgcggcagcaggaacagacatgctgtcatcacagactctagaggtattctgcgacttcctcggcagcatcgttggtgatttggtcatgatgtacggtgcacaggggggtgtctatctggccggaggaatcctgccacagctgcgtgagccgctgctacgcagtcactttgtcgaacgcttcctcaataaaggccccatgggcgaggcattacagcacgtcccggtgcggctgatcgaacatgggcaactcggcatcgtaggtgcggcacgctggtacttaaataaaaaagcaacttaa

SEQ ID NO: 85513 - protein, 339 aa, Xylella fastidiosa 9a5c
MLVTSMIPNPTRDAPNIPSFVAADVGGTHVRVSVVAAAPTCASPPQLLDVRTYRCADYPSLSTILNDFLGTRSAVRDCVIASAGFQRSDGTVITTNLPWPLSPHRLRADLDLAEVSLVNDFEALAYATEDMEAAQLLHLTGPAKAQDGPRLLLGPGTGLGAALWIPNNGRPIVLPTEAGQAALPSTTELEMQLVRHMLNNRTHVPIEHALSGPGILNVYRALCALQSVLPQHASPDAISHAAAAGTDMLSSQTLEVFCDFLGSIVGDLVMMYGAQGGVYLAGGILPQLREPLLRSHFVERFLNKGPMGEALQHVPVRLIEHGQLGIVGAARWYLNKKAT

SEQ ID NO: 85514 - DNA, 1035 bp, Agrobacterium tumefaciens str. C58
  CDS (1)..(1035): transl_table=11
atggaacaggcaatgccgaagacgtccgataccgaatatctgtcctttccgatccttcttggcgacatcggcggcaccaatgcccgcttttccatcctgatcgattcctttgctgaaccggtgcacctcaccacggtgaagacggcggaatatcctggtatcgatgacgcgatccagcaggcggttctggacaagacctctcttcagccggtctcgaccattcttgcaattgccggcccgatcgaaggcgacgagattccgttgaccaactgccactgggtcgtcaagccgaaggacatgctggccaagctcggcctgaaggacgtcatcgtcatcaacgactttgaggcgcaggctctggcgattgcggctcttgacgacgacaaccgggagcctatcggctccggtaaaaaggacatgctggcgtcgcgcgtcgttcttggaccgggcacggggcttggcgtcgccgggctggtctatgcccgccatatgtggtttccggtgcctggcgaaggcgggcatatcgatatcggcccgagaagcgcgcgcgactatgtggttttcccccatatcgaaaccatcgagggccgcgtcgccggcgaacagatcctgtgcggacgcgggctggtcaatctttatcgggccatctgcaaagccgacggcatcgagcctgtcttttccgatccggccgacatcacctcgcaggggctttcgggccagaacgcgcaggcaaaagaaacgctgtcgctgttcagcacctatctcggccgcgtggcgggcgaccttgcgctgatcttcatggccaagggcggcgtttatctggccggcggtatttcgcagaagatcatccctgcgctgaagagcccggaattccgggcggcgttcgaagacaaggcgccgcacagcgctctgatgcggaccattccgacattcgtcgtcacccatcctcaggcggccctttccggcctcgccacctatgcgagaacgcctgccgatttcggtcttgcgctggacgggcggcgctggagggcttga

SEQ ID NO: 85515 - protein, 344 aa, Agrobacterium tumefaciens str. C58
MEQAMPKTSDTEYLSFPILLGDIGGTNARFSILIDSFAEPVHLTTVKTAEYPGIDDAIQQAVLDKTSLQPVSTILAIAGPIEGDEIPLTNCHWVVKPKDMLAKLGLKDVIVINDFEAQALAIAALDDDNREPIGSGKKDMLASRVVLGPGTGLGVAGLVYARHMWFPVPGEGGHIDIGPRSARDYVVFPHIETIEGRVAGEQILCGRGLVNLYRAICKADGIEPVFSDPADITSQGLSGQNAQAKETLSLFSTYLGRVAGDLALIFMAKGGVYLAGGISQKIIPALKSPEFRAAFEDKAPHSALMRTIPTFVVTHPQAALSGLATYARTPADFGLALDGRRWRA

SEQ ID NO: 85516 - DNA, 1056 bp, Ralstonia solanacearum GMI1000
  CDS (1)..(1056): transl_table=11
atgtctattggtctgcatgaagtcggcgtgggcagcatggacgatgtgacggcctacccgcgcctggtcggggatgtcggcgggaccaacgcgcgcttcgcgctggagatggcgccgatgcggctggcccatatcggcgtgctggccggcgacgactacccgtcgctggaagcggccatgcgcgcctatctcgccgcgctgccgccggagatcgccgcggcgggcgtgcggcatgcggccatcggcatcgccaatccggtgctgggcgaccagatccgcatgaccaaccgcgactgggcgttttccaccgaggcgatgcgccagtcgctgggcttcgataccttcgtcgtgctcaacgatttcgccgcgctggcgcacgcgctgccctacctgggcgccgacgagctggaacaggtgggcggcagcacctgcgtggccgacgcgccgcgcgcgctgctggggccgggcacgggcctgggcgtggcgtcgctgctgccgacgcaggcagggcgcttcatcgccgtcgcgggcgaggggggccacgtcgcgtttgcgccgatgaacgacgaggaagtcgtcatctggcgcttcgcgcgcgagcgcttcggccatgtctcggccgagcggctgatctcgggcatggggctggagctgatctacgaggcgctcggcgcgtgcttcgacctgtggcagcagggccccgccgtgcgccgcgccgccgacatcaccgccatcgccctgggcgaaatggaagacaccgccggcgatcacgcccgctgccgctacgccgtcgatacgttctgcgccatgctcggcaccgtggcggccaacctggcggtcacgctgggcgcgcggggcggggtctatatcggcggcggcatcgtgccgcggctgggcgccgccttcgccaattcaccgttccggcggcggttcgaagacaagggccgcttctccggctatgtggcggcgatgccggtgtacgtcatccatgcgccgtacccggggctgatcggcctgtgcgcggcgatggatcacgccgtggccagcggccactga

SEQ ID NO: 85517 - protein, 351 aa, Ralstonia solanacearum GMI1000
MSIGLHEVGVGSMDDVTAYPRLVGDVGGTNARFALEMAPMRLAHIGVLAGDDYPSLEAAMRAYLAALPPEIAAAGVRHAAIGIANPVLGDQIRMTNRDWAFSTEAMRQSLGFDTFVVLNDFAALAHALPYLGADELEQVGGSTCVADAPRALLGPGTGLGVASLLPTQAGRFIAVAGEGGHVAFAPMNDEEVVIWRFARERFGHVSAERLISGMGLELIYEALGACFDLWQQGPAVRRAADITAIALGEMEDTAGDHARCRYAVDTFCAMLGTVAANLAVTLGARGGVYIGGGIVPRLGAAFANSPFRRRFEDKGRFSGYVAAMPVYVIHAPYPGLIGLCAAMDHAVASGH

SEQ ID NO: 85518 - DNA, 1047 bp, Brucella melitensis 16M
  CDS (1)..(1047): transl_table=11
atgacaggagaggacatgcaagcgattatcgacgccgaacagagtttcaagtttccggttctcgtcggcgatatcggcggcaccaatgcccgtttttctatcctcgtggattcaaacgcggagccgaaggagtttcccgtgctccagacggcggattatgccacaatagacgaagcgatccagcacgccattctggatcagacggccatccagccgcgctctgtcattctggccgtggcaggcccggtggacggcgacgagatcgacctcaccaattgcgactgggtcgtgcgtcctaaaaagatgatcgctgatctgggctttgaagacgtgaccgtcctcaatgatttcgaggcgcaggcccttgccgtggtttcgctggaaggccaccatatggaacagatcggcggcaaaccggaggaggctgttgccacccgcgtcgtgctcggccccggcacgggccttggcgtggcaggtctggtttgcacacgtcatgcatgggttccggttcccggtgaaggcggtcatatcgatatcggtccacgcaccgaacgcgactaccagattttcccgcatatcgaacgcatcgaagggcgtgtcaccggcgagcaaattcttagcgggcggggcctgcgcaacctctatctgggcatctgcgcggccgacaagatcacgcccacccttgagacgccagtagacattacatccgccggactggacggcagcaatccacaagccgcagaaacgcttgacctcttcgccacctatctggggcggcttgcgggcgaccttgcgctcattttcatggcgcatggcggcgtttatctttcgggtggcatcccggtgcgcatcctttccgccctcaaggccggttcgttccgcgcagccttcgaggacaaggccccgaacaaggccatcatgcgcgacataccggtccgcgttatcacatatcaactggcggccttaaccgggctttccgctttcgcccgcaccccctcgcgctttgaagtttcgaccgagggccgccgctggcgcatgcgccgctag

SEQ ID NO: 85519 - protein, 348 aa, Brucella melitensis 16M
MTGEDMQAIIDAEQSFKFPVLVGDIGGTNARFSILVDSNAEPKEFPVLQTADYATIDEAIQHAILDQTAIQPRSVILAVAGPVDGDEIDLTNCDWVVRPKKMIADLGFEDVTVLNDFEAQALAVVSLEGHHMEQIGGKPEEAVATRVVLGPGTGLGVAGLVCTRHAWVPVPGEGGHIDIGPRTERDYQIFPHIERIEGRVTGEQILSGRGLRNLYLGICAADKITPTLETPVDITSAGLDGSNPQAAETLDLFATYLGRLAGDLALIFMAHGGVYLSGGIPVRILSALKAGSFRAAFEDKAPNKAIMRDIPVRVITYQLAALTGLSAFARTPSRFEVSTEGRRWRMRR

SEQ ID NO: 85520 - DNA, 1017 bp, Xanthomonas campestris pv. campestris str. ATCC 33913
  CDS (1)..(1017): transl_table=11
gtgagcgcaagcagcccaatggaagcggtggcatttccgcgccccgaaaccttcgttgccgccgatgtcggaggaacgcatgtgcgcctggcgctggcctgcgagagcaacgatccgcgcaagccggtcaccgtgctggattaccgcaagtaccgctgcgctgattacccgggcctggccgagatcatggccgcgttctttgccgagctgtcctgcgcgccggtgcgccgtggcgtgatcgccagcgccgggtatgcactggaagatggccgtgtgatcaccgccaatctgccgtgggtgctggcgccggagcagatccgccagcagctcggcatgcaggccttgcacctggtcaacgatttcgaagcggtcgcctacgcggccaattacatgaccggcaatcaggtcatgcagctgtccggccccgcccagggcgctcctggcccggcattggtgctcggcccgggcactggcctgggcgcggcgctgtggattcccaatggggggaactcggtggtgctgccgaccgaggccggccacgccgcactggcggcagccagcgatctggaagtggccttgctgcaggagttgcgccgcacgcgcacccatgtggcgaccgaacactttctctccggcccgggcttgctcacgctgtataccgcgctggccacgctgcgcgacgcgccggcggtgcacgccaccccggctgcggtcactgccgcagcactggcgggtgacgacgtgctggcgcacgaggcgctgcagacgttctgcggtttcatgggcagcgtggtcggcgacatgatgctgttgtacggcgtgcgcagcggtgtgtatctggccggtggtttcctgccgcagattgccgacttcatcgcccgcagcgacttcgctgcccgcttgctcgacaagggcccgctgcgccctgcgctggagcaggtgccggtgcgcatcgtcgaacatggccagcttggcgtgatcggtgccgccagctggttcctgcagcacggccgctaa

SEQ ID NO: 85521 - protein, 338 aa, Xanthomonas campestris pv. campestris str. ATCC 33913
MSASSPMEAVAFPRPETFVAADVGGTHVRLALACESNDPRKPVTVLDYRKYRCADYPGLAEIMAAFFAELSCAPVRRGVIASAGYALEDGRVITANLPWVLAPEQIRQQLGMQALHLVNDFEAVAYAANYMTGNQVMQLSGPAQGAPGPALVLGPGTGLGAALWIPNGGNSVVLPTEAGHAALAAASDLEVALLQELRRTRTHVATEHFLSGPGLLTLYTALATLRDAPAVHATPAAVTAAALAGDDVLAHEALQTFCGFMGSVVGDMMLLYGVRSGVYLAGGFLPQIADFIARSDFAARLLDKGPLRPALEQVPVRIVEHGQLGVIGAASWFLQHGR

SEQ ID NO: 85522 - DNA, 1035 bp, Xanthomonas campestris pv. campestris str. ATCC 33913
  CDS (1)..(1035): transl_table=11
gtggctgcaacctcgcactctgcttgcgcttctgctctgcccgttgtccccgctcccaccacgtttctggctgccgatgtcggcggcacgcatgtgcgtgtcggccgggtctcgcatggcgcggatgcgccgatcgagctctcgcagtaccgcacctaccgctgcgccgaccatgccagcctggacgcgatcctggctgatttcctgcgcgatagccgcgccgtcgatgcagtggtgatcgccagcgcaggtgtcgcgctggacgacggccgcttcatcagcaacaacctgccctggaccatcgcgccgcgtcagttgcgcgacacgcttggcgtgcgtgcggtgcatctggtcaacgacttcgaagcggtggcgtatgccgcgccgcagatggaacagcgtgcggtggtgcaactaagcggccccacgccgcggcatgcgcagcccggtggcccgatcctggtggtcggcccgggcaccgggctaggcgctgcggtgtggatcaacggcccgcgccagccgaccgtgctcgccaccgaagccggccaggtcgcactggcaagcaatgaccccgacaccgcgcaggtgctgcgcatcctggcgcgcgacgcatcgtatctgccgatcgagcatgtgctctccggccccgggttgcgcaacctgtatctggcgctgtgcgaactgcacgcggccacgcccatccacccgttgcccgccgacatcacccacgccgcgctccacagcgacgatgcactggcgcggcggtgcctgcagctgttctgcgcgctgctcggcagcgcggtcggcgacatggcgctggcgtacggcgcctccggcggcgtgtatctggccggcggcatcctgccgagcatcggccagtttctggctgcgagtgatttccgcgaacgcttcctcgccaagggccgcatgcgcccggtgctggagcgcattccggtcaagttggtcgaacacgggcaactcggcgtgctcggcgcggccagctggtatctgcaacaccacaccgaggtgtcgtaa

SEQ ID NO: 85523 - protein, 344 aa, Xanthomonas campestris pv. campestris str. ATCC 33913
MAATSHSACASALPVVPAPTTFLAADVGGTHVRVGRVSHGADAPIELSQYRTYRCADHASLDAILADFLRDSRAVDAVVIASAGVALDDGRFISNNLPWTIAPRQLRDTLGVRAVHLVNDFEAVAYAAPQMEQRAVVQLSGPTPRHAQPGGPILVVGPGTGLGAAVWINGPRQPTVLATEAGQVALASNDPDTAQVLRILARDASYLPIEHVLSGPGLRNLYLALCELHAATPIHPLPADITHAALHSDDALARRCLQLFCALLGSAVGDMALAYGASGGVYLAGGILPSIGQFLAASDFRERFLAKGRMRPVLERIPVKLVEHGQLGVLGAASWYLQHHTEVS

SEQ ID NO: 85524 - DNA, 1017 bp, Xanthomonas axonopodis pv. citri str. 306
  CDS (1)..(1017): transl_table=11
gtgagcgcaagcagtccaatggaagcggtggcctttccgcgccccgaaaccttcgttgccgccgatgtgggcggcacgcacgtgcgcctggcgctggtatgcgagagcaatgacgcgggcaagccgatcacggtgctggactatcgcaagtaccgctgcgccgactatccgggccttgccgacatcatggccgcgttcttcgcggaactgggttgtgcaccagtacgccggggcgtgatcgccagcgccggctacgcgctggaagacggtagcgtgatcaccaccaatctgccctgggtactggcgccggagcagattcgccgccagctcggcatgcaggccctgcatctggtcaacgatttcgaagcggtcgcctatgcggccaattacatgagcggcaaccaggtcatgcagttgtctggcccggtgcagggtgccgcaggcccggcgttggtgcttggtccgggcacgggcctgggcgcggcgctgtggatccccaacgatggtcatccggtggtgctgcccaccgaagccggccacgcggcactggcgccggccagcgatctggaaatggcgttgctgcaggaactgcggcgcacgcgcacccacgtggggaccgaaacgctgttgtccggcccgggcctgttgaatctgtacaccgcgctggcggccttgcgtggggacaccgtggtgcacgccagcccggccgatatcaccgcggccgcaatggccggcaacgatggattggcgcacgacgccttgcaggcgttttgcggatttatgggcagcgtggtcggcgacctgatgctgctgtatggcgtgcgcagtggcgtttatctggctggcggtttcctgccgcaaatcgccacctttatcgccgatggcgacttcgtcgcgcgcctgctcgacaagggcgccttgcgtcccgcgctggagcaggtgccggtgagcatcgtcgagcacggccagcttggcgtcatcggtgctgccagctggttcctgcagcgcggccgctga

SEQ ID NO: 85525 - protein, 338 aa, Xanthomonas axonopodis pv. citri str. 306
MSASSPMEAVAFPRPETFVAADVGGTHVRLALVCESNDAGKPITVLDYRKYRCADYPGLADIMAAFFAELGCAPVRRGVIASAGYALEDGSVITTNLPWVLAPEQIRRQLGMQALHLVNDFEAVAYAANYMSGNQVMQLSGPVQGAAGPALVLGPGTGLGAALWIPNDGHPVVLPTEAGHAALAPASDLEMALLQELRRTRTHVGTETLLSGPGLLNLYTALAALRGDTVVHASPADITAAAMAGNDGLAHDALQAFCGFMGSVVGDLMLLYGVRSGVYLAGGFLPQIATFIADGDFVARLLDKGALRPALEQVPVSIVEHGQLGVIGAASWFLQRGR

SEQ ID NO: 85526 - DNA, 1035 bp, Xanthomonas axonopodis pv. citri str. 306
  CDS (1)..(1035): transl_table=11
gtggctgcgacttcgcgttccgcttacgcctctgcctcgcccgatgtccccgttgccatcagcttcatcgctgccgatgtcggcggcacgcatgtgcgtgtcgggcacatgctgcaggcgcgcgatgcagccatcgagctttcgcattaccgcacctatcgctgcgccgagtacgccagtctccaggccatcctcgaggatttcctgcaacagcggcgcggcgtcgatgcggtggtcatcgccagtgccggcgtggcgctggacgatggcagcttcatcagcaacaacctgccatggacgatttcacccagccgcatcggtgctgcactggcagtgcgcaacgtgcacctggtcaacgatttcgaggcggtggcctacgcagcgccgcagatggaacaacgcgccgtgctgcagctgagcgggccgacaccgcgccatgcgcgtgccaacgggccgattctggtggtcggccccgggaccggtctgggtgcagcactatggatcgatgccaagccacgcgcgatcgtgctggccaccgaagccggccaggtcgcgctggccagcacccatccgcgcgagtacgccgtgctgcaatgcctgttacgtgaccggcactatttgccgctcgagcacgtgctctccggcccgggattacggcatctctacgatgcggtgtgcgagctgcatggcgcaacgccgcgtcatcgtctgcccgccgccgtgacgcacgcagcgctgcacgaagacgatgcgcttgcgcgcgagtgcctggagattttttgcggcctgctggggagcgcggtcggcgacatggcgctggcctacggcgctgccgggggcatctatctggccgggggcttcctgccgacgatcggccagttcctggctggcagcgcctttgccgagcgcttcctggacaagggaaacatgcgcgctgtgctcgaacgcattccggtcaaattggtcgagcacgggcaactgggcgtgctcggcgcggccaactggtatctgcagcaccacaccgacctgtcgtaa

SEQ ID NO: 85527 - protein, 344 aa, Xanthomonas axonopodis pv. citri str. 306
MAATSRSAYASASPDVPVAISFIAADVGGTHVRVGHMLQARDAAIELSHYRTYRCAEYASLQAILEDFLQQRRGVDAVVIASAGVALDDGSFISNNLPWTISPSRIGAALAVRNVHLVNDFEAVAYAAPQMEQRAVLQLSGPTPRHARANGPILVVGPGTGLGAALWIDAKPRAIVLATEAGQVALASTHPREYAVLQCLLRDRHYLPLEHVLSGPGLRHLYDAVCELHGATPRHRLPAAVTHAALHEDDALARECLEIFCGLLGSAVGDMALAYGAAGGIYLAGGFLPTIGQFLAGSAFAERFLDKGNMRAVLERIPVKLVEHGQLGVLGAANWYLQHHTDLS

SEQ ID NO: 85528 - DNA, 975 bp, Yersinia pestis KIM
  CDS (1)..(975): transl_table=11
ttgatgacgacttatgccctggtgggtgacgttggcggtacgaatgcccggttggcgctttgcgctgttgcaacgggcgagatattgcaagcaaagacatattcagggttggaatatgaaagtttagaggatgtaatcaaacaatatctatcagagcatcaagccaaggtcaccgatgcttgtatcgcgattgcctgcccgattaccggggattgggtcgcaatgaccaatcatacttgggcattttctattgccgccatgcaacagaatctgggtctggaccatttggaagtgatcaatgacttcaccgcagtctccatggctatccccgtgttacctgcccaagatgttctgcaatttggtggcacacagccacagcctggcaaaccggtggcagtgtatggcgcaggtactgggctgggggtagcacatttagtgaatgttgatcgccgttggattagtttagcgggagagggcgggcatgttgatttcgcgcctaatagtgaagaagaagaccagattctggccgtattgcgccaggagttggggcatgtttccgctgagcgggtgctatctgggccgggcttagtcaatttatatcgggcaattgtgatttctgatgcgcgcctaccagagaaactggcaccgaaagatattaccgcacgggcgctggcggatagctgtaccgattgtcgccgggcattatcactattttgcgtaattatgggccgctttgggggcaatttagcccttaacctcagtacgtttggtggcgtttatattgcggggggcatcgtgccgcgctttatggagttctttaaagcctctggttttcgcgctgcgtttgaagataaaggccgttttaaagatttcttacaagatattccggtgtatatgattactcatccacaacccggtttactgggggctggtgcctatttacgccaaaaattggggtatgagttgtcaagctaa

SEQ ID NO: 85529 - protein, 324 aa, Yersinia pestis KIM
MMTTYALVGDVGGTNARLALCAVATGEILQAKTYSGLEYESLEDVIKQYLSEHQAKVTDACIAIACPITGDWVAMTNHTWAFSIAAMQQNLGLDHLEVINDFTAVSMAIPVLPAQDVLQFGGTQPQPGKPVAVYGAGTGLGVAHLVNVDRRWISLAGEGGHVDFAPNSEEEDQILAVLRQELGHVSAERVLSGPGLVNLYRAIVISDARLPEKLAPKDITARALADSCTDCRRALSLFCVIMGRFGGNLALNLSTFGGVYIAGGIVPRFMEFFKASGFRAAFEDKGRFKDFLQDIPVYMITHPQPGLLGAGAYLRQKLGYELSS

SEQ ID NO: 85530 - DNA, 990 bp, Thermosynechococcus elongatus BP-1
  CDS (1)..(990): transl_table=11
gtggcaatgacggttgtccttggcgccgatgtcggcggcacaaaaacccttgtggagttgtgggaggtggggggtcgtgattggcagttgctctaccgggcgaaataccctagccgcgatttccctaacttgacagcccttttgcaaatgttcctcaaggaaagtcctgcccatccacagcgggcatgtctggggattccaggcccagtcattgaccaagtcgctcaggtaaccaatttgggctggcgggtcagtgctgccgaattagagacggcattacagattcctggcgtgacgctgctgaatgattttgcggccgtggcctatggcgcattggtgctaccgccgacggattttgttgttcttcaggagcggccgcgccgtccccaagcgcctattgccctactgggagccggtactggcttgggggaagcactgctcatttggcagggcgatcgctaccaagtcatgccccttgagggtggtcacaccgattttcctccccgcaacgaagaggaagtgggtctactgcgctatctctggcaaacctacgaacgagtctctgtggagcgggtggtctctggcccagggctggtggccatttacgactatctcaagagtgtccacttcgctgccgagtcagcaggggtggcagcagcaatggcaaggggagaggatcccgccgccgtcgtgagtcagtacggcctcgcgggggatcccctgtgtgcagaagccttgcggatgtttgtcgaagcctacggcgcagaggcgggcaaccttgccctcaaaagtttacccctcggcggggtacttattgctggggggattgcccccaaaattttggcaaaaatggccgatggcacctttctccaagggtttgtgaataagggacggtttcgccccctgatggagcagttgtacgttgctgtgatcatcaatcctgaggtgggattacggggcgcggtacatttagctgctcagggggtctag

SEQ ID NO: 85531 - protein, 329 aa, Thermosynechococcus elongatus BP-1
MAMTVVLGADVGGTKTLVELWEVGGRDWQLLYRAKYPSRDFPNLTALLQMFLKESPAHPQRACLGIPGPVIDQVAQVTNLGWRVSAAELETALQIPGVTLLNDFAAVAYGALVLPPTDFVVLQERPRRPQAPIALLGAGTGLGEALLIWQGDRYQVMPLEGGHTDFPPRNEEEVGLLRYLWQTYERVSVERVVSGPGLVAIYDYLKSVHFAAESAGVAAAMARGEDPAAVVSQYGLAGDPLCAEALRMFVEAYGAEAGNLALKSLPLGGVLIAGGIAPKILAKMADGTFLQGFVNKGRFRPLMEQLYVAVIINPEVGLRGAVHLAAQGV

SEQ ID NO: 85532 - DNA, 960 bp, Pseudomonas putida KT2440
  CDS (1)..(960): transl_table=11
atgaagcacctgctggttggtgatattggcggcaccaatgcccgttttgcgttgtggcgtgacaaccagctgcatgaagtaaatgttttcgccaccgtggactacaccaacccggagcaggccatcgaggcctacctggaaagccaaggtatcgcccgcggtggcctggcggcggtgtgcctggcggtggccggcccggtcgatggcgatgaatttcgcttcaccaacaaccactggcgcctgagtcgcacggcattttgcaagaccttgcaggtcgagcggctgttgctgatcaatgatttcaccgcaatggcactgggcatgacgcgtctgcgcgaaggcgagttccgcgaggtgtgccccggccaggccgacccctcgaggccggcactggtgatcgggccaggtactggcctgggtgtgggctcgctgctgcgcctgggcgaacagctctggaaggccctgccgggtgaaggcgggcatgttgacctgccggtaggcaatgctcgcgaagcggcaatccaccagcagatccacagtcagatcggtcatgtcagcgccgaggccgtgctcagtgggggtggcctggtgcggctgtaccaggcgatctgtgcgctggacggcgacacgcccaggcacaagaccccggcgcatatcaccgatgccgcgctgggcggggagccacgggcgctggcggtggtcgagcagttctgtcgtttccttgggcgagtggcgggtaataatgtgctgacgctgggcgcgcgaggcggggtctatattgtgggcggtgtgattccgcgctttgccgagctgttcctgcgtagcgggtttgccgcgagttttgccgacaaggggtgtatgagtggctatttcaccggggtgccggtgtggctggtgacggcggagttttccgggttggagggagcaggggtagcgttgcagcaggcgttggatcactga

SEQ ID NO: 85533 - protein, 319 aa, Pseudomonas putida KT2440
MKHLLVGDIGGTNARFALWRDNQLHEVNVFATVDYTNPEQAIEAYLESQGIARGGLAAVCLAVAGPVDGDEFRFTNNHWRLSRTAFCKTLQVERLLLINDFTAMALGMTRLREGEFREVCPGQADPSRPALVIGPGTGLGVGSLLRLGEQLWKALPGEGGHVDLPVGNAREAAIHQQIHSQIGHVSAEAVLSGGGLVRLYQAICALDGDTPRHKTPAHITDAALGGEPRALAVVEQFCRFLGRVAGNNVLTLGARGGVYIVGGVIPRFAELFLRSGFAASFADKGCMSGYFTGVPVWLVTAEFSGLEGAGVALQQALDH

SEQ ID NO: 85534 - DNA, 987 bp, Bradyrhizobium japonicum USDA 110
  CDS (1)..(987): transl_table=11
atgagtatcggcaagacaggaaaaattcttctcgccgatatcggcggcaccaatgcgcgctttgcgctgagccaaagcgaaccgggcaacggcgaccagaccggatcgatcgactatgtgaaggtcgccgacttcccgaccgtccaggaagccattgtcgacgtgctggcgcgccgggccggcggcgaaccgccccaacgagccgtgctggccgtcgcaggccccgtcaccaacaaccgctgcgtcatgaccaacagcccctgggtcatcgacggcaacgagctccagccaacgctcggcttcgacagcgtccatgtgctcaacgatttcgaggtggtcgcctggtccctgcccgccttgcggtccgccgatctgatcccgctcggcggacaagatggcctccccggagaaccgttgctggtggtcgggcccggaaccggctttggcgtctcctgtctggttgagcgctatggggcgcggctggccgtcgtcaccgaggctggccacgcgacgttgccggcagagaacgagcgcgaggaacgcgtgatcgcgtccttgcgccgacgtttcggccatgtctccatcgagcgcggcgcgctgtcgggctccggcttgcaaagcctctacgaggcactcgcggagatcgacggcgtccaggtgccgcaccgcgacgcggccgccatcaccaaggcggccctggatggcagctgcccggtcagccgcgcgacgctggagatgttctgcgccaccctgggctcggtcgcgggcaacctcgcggtgaccttcggtgcccgcggcggcgtctatatcgccggcgggatcgtgccgcgcttcccggagttccttgcggcctccgcgttccgcgcgcgcttcgaagccaaggggcgcttccaggactatttgcgcaacatcccgacccggctcgtcacgaagcccgatgccagcttcgtcgggctgaagatgttcgccgaccacaatcctgattga

SEQ ID NO: 85535 - protein, 328 aa, Bradyrhizobium japonicum USDA 110
MSIGKTGKILLADIGGTNARFALSQSEPGNGDQTGSIDYVKVADFPTVQEAIVDVLARRAGGEPPQRAVLAVAGPVTNNRCVMTNSPWVIDGNELQPTLGFDSVHVLNDFEVVAWSLPALRSADLIPLGGQDGLPGEPLLVVGPGTGFGVSCLVERYGARLAVVTEAGHATLPAENEREERVIASLRRRFGHVSIERGALSGSGLQSLYEALAEIDGVQVPHRDAAAITKAALDGSCPVSRATLEMFCATLGSVAGNLAVTFGARGGVYIAGGIVPRFPEFLAASAFRARFEAKGRFQDYLRNIPTRLVTKPDASFVGLKMFADHNPD

SEQ ID NO: 85536 - DNA, 978 bp, Bradyrhizobium japonicum USDA 110
  CDS (1)..(978): transl_table=11
atgatcaaggcgacgctggaaggacgagccgcgttgcttgcagatgttggagggaccaacgcccgcttcgcactgctgactgacggcgagctcggcgcgatcacacatatggcggtcaaggactacgctacctttcaggaggccctcgctgcctatctcggcgcttcggccagggccgagaggcctgctcatgcaatcctcgccgcctctggcgcggttcagaatgcccgctgcgcactcacgaacaattcctggatcgtcgacgcagaggaattgcgcggggcctatgggttttcggccgtccgtttgatcaacgactttgaagcggtcgcatgggccctgccccggcttggccccgacagtttgctgcagctcggcgggcggcagcaggtgccgggggcaccccttgccgcgatcggccccggcaccggcctgggaatggcggtgagcataccacaccccggcggacagatcgttctcgccagcgagggaggccatgccacgctggcaggcggttcgttgcgcgaggatgcggtgattgagcatttgcggcaacgcttcggacatgtgtcggccgaacgcattctgtcgggcgcggggctcgagaacctgtatgacgctctcgcctgcatcgacggcgcgacgccgccaaagcgccgcgcgtccgacattacgcgggccggaattgagggaacgtgtccgatcagccgctccgccgttgacatgttctgcgcgatgctggggtccgtcgcgggcaacctcgcgctcgcgctgaccgcgagaggcgggatattcatcggcggcggcatcttgcgccacctgccggactatcttgccgcgtcccagtttcgccagcgcttcgaggagaaggggcggctccgaaaattcctcgagccgataccggcctatctgatcctggacgacgacgtcgcattcgtcggcctccgtaacctgatggaggtcgaaggcattggctga

SEQ ID NO: 85537 - protein, 325 aa, Bradyrhizobium japonicum USDA 110
MIKATLEGRAALLADVGGTNARFALLTDGELGAITHMAVKDYATFQEALAAYLGASARAERPAHAILAASGAVQNARCALTNNSWIVDAEELRGAYGFSAVRLINDFEAVAWALPRLGPDSLLQLGGRQQVPGAPLAAIGPGTGLGMAVSIPHPGGQIVLASEGGHATLAGGSLREDAVIEHLRQRFGHVSAERILSGAGLENLYDALACIDGATPPKRRASDITRAGIEGTCPISRSAVDMFCAMLGSVAGNLALALTARGGIFIGGGILRHLPDYLAASQFRQRFEEKGRLRKFLEPIPAYLILDDDVAFVGLRNLMEVEGIG

SEQ ID NO: 85538 - DNA, 966 bp, Pseudomonas syringae pv. tomato str. DC3000
  CDS (1)..(966): transl_table=11
gtgaagttggccctggtcggtgatataggcggtaccaatgcacgttttgccatttgggaagacgacacgctgcattctgtccgggtgttcccgaccattgactacgcaggccccgaaaaggccatcgaagtctatctgcaggaccttgaattgcagcgcggtgacattggctatgtgtgcctggcggtcgccgggccggtcgatggcgatctgtttcagttcaccaacagccactggcaactgagccgtgaggcgttctgcgccgacctgaaagtcgatcacctgctgctgatcaacgacttcaccgccatggcgctgggcatgacccggctcaaggacgatgaatacctgacggtctgtcatggcgtcggcaagccggatcgcccgcgcgtggtggtcgggccgggcactgggctgggcatcggcacgctgatcaaactggaagacagccgctggatggccttgccgggcgagggcgggcatgccgacctgccaatcggcacggcgcgcgaggccctgctgtggacgcggctgatggccgagcacgaacatgtcagcgccgaagtggtgctcagtggtgcgggcctgttgttgctgtatcaggtcagttgcgcgctggacggcatggacgcagagctcaagtcgcctgctgcgatcacgtcggctgcgctggcaggcgatccggtcgcggcggcggtgcttgaacagttctgcgtgttcctcggcagagtggtcggcaacaacgttctgaccctgggcagtctgggcggggtctacatcgtgggtggcgtggtgccacgtttcacagaattcttcatgaacagcggcttcaagcgcgccatgggcgagaagggcgtgatgagcggctacttcaagaacctgccggtctggctggtcaccgccgagtacccagggcttatgggttcaggcgttgcgctgcaacaggcgttcggttcgcaaatttga

SEQ ID NO: 85539 - protein, 321 aa, Pseudomonas syringae pv. tomato str. DC3000
MKLALVGDIGGTNARFAIWEDDTLHSVRVFPTIDYAGPEKAIEVYLQDLELQRGDIGYVCLAVAGPVDGDLFQFTNSHWQLSREAFCADLKVDHLLLINDFTAMALGMTRLKDDEYLTVCHGVGKPDRPRVVVGPGTGLGIGTLIKLEDSRWMALPGEGGHADLPIGTAREALLWTRLMAEHEHVSAEVVLSGAGLLLLYQVSCALDGMDAELKSPAAITSAALAGDPVAAAVLEQFCVFLGRVVGNNVLTLGSLGGVYIVGGVVPRFTEFFMNSGFKRAMGEKGVMSGYFKNLPVWLVTAEYPGLMGSGVALQQAFGSQI

SEQ ID NO: 85540 - DNA, 1008 bp, Nitrosomonas europaea ATCC 19718
  CDS (1)..(1008): transl_table=11
atggatcagtacctgttgtctggcgacatcggtggaaccaagactctgttacgttctgccgtggtaagaggtgaagaggttgaattccatcatgagcatctctatgacagtcaccagtacgatgattttgacgccattctggcagattttctggagcgatccggctgccagccggttgctgcttgcctggcagtagccgggccgatcgttgaacaacaggttcatctgaccaatctgccctggatgatcagtgcagccggcattgcagaaaaattttcgattcccgccgtgaaaattatcaatgatttcgagggaacagcagcttccatagaaatattgccgcaggatgatctgattacattgcaggccggtaaaccttcttcttcggcaatgcgtgtcgtgctgggagcagggaccggtatgggcgttgcctggctggcctggcgcggccagtactatgagccccttgcgactgaggcgggacatatcgattttgcaccgaccagtgccattcagatcgaactgctccggtatctgatggtcaggtatcaccgtgtttcgatcgagcggctgctttccggccaggggttgacccacattttcaattttctgcaaacccgcgccactgaagggactcatctcaaaagtatcgaactgaacgtcgacgatggagccaccgtgactcgtctggcattcgaacatcactacccgattgccttgcaggcgctggatctgttcgtggaaatttacggtacttatgcgggcaacctggcgctggcggggttgtgccgcggtggtgtctatattgcgggagggatcgcaccacgtatcatccggattttgcagcaatccggtttcatcgaggcgttttgcaacaagggacgatacagtgcgctggtgcgtgatattcctgtgtatgtggtaatgaatccgaaggccggtctgctgggtgccggactgcttgcgcagcgcatgctgcagcatcagactgtatcatcccggcagtaa

SEQ ID NO: 85541 - protein, 335 aa, Nitrosomonas europaea ATCC 19718
MDQYLLSGDIGGTKTLLRSAVVRGEEVEFHHEHLYDSHQYDDFDAILADFLERSGCQPVAACLAVAGPIVEQQVHLTNLPWMISAAGIAEKFSIPAVKIINDFEGTAASIEILPQDDLITLQAGKPSSSAMRVVLGAGTGMGVAWLAWRGQYYEPLATEAGHIDFAPTSAIQIELLRYLMVRYHRVSIERLLSGQGLTHIFNFLQTRATEGTHLKSIELNVDDGATVTRLAFEHHYPIALQALDLFVEIYGTYAGNLALAGLCRGGVYIAGGIAPRIIRILQQSGFIEAFCNKGRYSALVRDIPVYVVMNPKAGLLGAGLLAQRMLQHQTVSSRQ

SEQ ID NO: 85542 - DNA, 1047 bp, Prochlorococcus marinus subsp. marinus str. CCMP1375
  CDS (1)..(1047): transl_table=11
atgaatttattagcagctgatataggaggaacaaaaacgttacttggggtttttagatatgagggacaaataaaacaattgtataaagcaaaatattcatctgaagattgggataattttgatttaatgctaaaagattttatagccaatcttccttcaaacataactacaccaaaatatgcatgtattggtgttgcgggtgcaattaataataaaattgttaaattaactaatttaaattggcaaataagtcaagaatccctttgcaagacacttaatactgatgaagttatcttgttaaatgatttttcttgcttggtatatgcaataccttatctgcaacaaaaacaatataagtacattcaatccttaaaaacaaatttagattatcaaaaggaaggttccatttttgcaattcttggagctggtacaggtcttggtatggcaagaggcataataactaaatcaggtcttaaagcaatccctagtgaaggcggacatagagaattctcccctcgaaataataaggaatgggaactatgccaatggcttaaaaaagatctaaaactaaccagattgtccatagaaagagtagtaagtggaactggtcttgcaaatattgctcgttggagattaagccaagaggatactaagtctcatccaatattaagcattatagaagccaacaattctcataatttcaacaacaagttactccctgaaagagtatcaatcgcagccaaaggaggcgatccaattatgcgagaagttctagaaatgtggcttagtgcttacggatctgcagctggagaccttgcattacaagaactatctacagaagggctttggattggaggtggaacggcgataaagcatttagatggcctttcatcagaaatatttctaaactccttgaaaaacaaaggtcgtttttcagaatatcttgagaaactaccaataatggtcttaatagacccagaggctgggctatttggagctgcatgtaaagctcatctaatgaccaagtctaatgtcaaaataaactga

SEQ ID NO: 85543 - protein, 348 aa, Prochlorococcus marinus subsp. marinus str. CCMP1375
MNLLAADIGGTKTLLGVFRYEGQIKQLYKAKYSSEDWDNFDLMLKDFIANLPSNITTPKYACIGVAGAINNKIVKLTNLNWQISQESLCKTLNTDEVILLNDFSCLVYAIPYLQQKQYKYIQSLKTNLDYQKEGSIFAILGAGTGLGMARGIITKSGLKAIPSEGGHREFSPRNNKEWELCQWLKKDLKLTRLSIERVVSGTGLANIARWRLSQEDTKSHPILSIIEANNSHNFNNKLLPERVSIAAKGGDPIMREVLEMWLSAYGSAAGDLALQELSTEGLWIGGGTAIKHLDGLSSEIFLNSLKNKGRFSEYLEKLPIMVLIDPEAGLFGAACKAHLMTKSNVKIN

SEQ ID NO: 85544 - DNA, 1038 bp, Prochlorococcus marinus subsp. pastoris str. CCMP1986
  CDS (1)..(1038): transl_table=11
atgaattttcttgcttgtgatctaggaggtacaaaagttcttttaggaattttcaaaaaggaagttaatacttgtactccaattttaattttaaaaaaaaaatatttatcttctgaatgggattcaattgacacaattttagaagatttcttaaaaaatgaatgcaaaaacattaatcatcctttttctgcttgtttcgcggtagcaggtcccatatctaataataatgcggaaataattaatttatcgtggaatatttctggcgatgaattaaaaaagaaatttaaatttaaaaattgcgagctagtaaacgattttgcagtgcaaatttatggaataccttttttgaaaaaaagtcaatattctgctattcaaaatggagaccggtcagtaggcgtcaataaagatttacatgcaatcgttggagcaggaactggtctaggcattgcaaaaggcataatatctggaaataaagtaaaagttttagctagcgaaggtggtcatgttgaatactcgccaaagtcagatttagaatgggaattaaagaattggctcaaatattctttaaaagttgaaagaatatcttgtgaaagaatcataagtgggactgggttatcaagaatagctgagtggagacttagcaaacctgatgccaaaaaccatcctctacaaaaatacttaaaagaattaaaaacttctgataatttaagaaaagaacttcctcaagaaatttgtaatctttctaatctaggggataagatgatgattgaagtggaaagaatatggttagatgcttacgcctcattattgggtgacgttgctcttcaagaattatgttatggagggttatggatttctggaggaaccgctccaaaacatttcataaactttaaatcaggtttatttatgaaacaattttcagataaaggaagattaaaagatattcttaaaaatatacctgtgaatgtaatcttagatgaagagtttggattatttagcgcagcctgcagagcaaaaatgctttcacaaaaagaataa

SEQ ID NO: 85545 - protein, 345 aa, Prochlorococcus marinus subsp. pastoris str. CCMP1986
MNFLACDLGGTKVLLGIFKKEVNTCTPILILKKKYLSSEWDSIDTILEDFLKNECKNINHPFSACFAVAGPISNNNAEIINLSWNISGDELKKKFKFKNCELVNDFAVQIYGIPFLKKSQYSAIQNGDRSVGVNKDLHAIVGAGTGLGIAKGIISGNKVKVLASEGGHVEYSPKSDLEWELKNWLKYSLKVERISCERIISGTGLSRIAEWRLSKPDAKNHPLQKYLKELKTSDNLRKELPQEICNLSNLGDKMMIEVERIWLDAYASLLGDVALQELCYGGLWISGGTAPKHFINFKSGLFMKQFSDKGRLKDILKNIPVNVILDEEFGLFSAACRAKMLSQKE

SEQ ID NO: 85546 - DNA, 1062 bp, Prochlorococcus marinus str. MIT 9313
  CDS (1)..(1062): transl_table=11
atgccgtccccgagaacctttctggcaggtgatttggggggcaccaaaaccttgcttgcgctctatagctgggacgaaaagcaactcaagcaacagcaccggcggaggtatttatccaatcagtggacttcgcttgaacccatgctgagccacttcatcgcccatttgccaggggagatggagcaacccaataacggctgcatcgctgttgcaggatcggttcgccatggtgaggcacgtatcaccaatctgccctggagcctgaaggagaaggacctttgctcagccacgggactgaagcatttggaactgattaatgactttggcgtattgatctacggcctaccctttctcaacgacgcgcagcaggtggagcttcagcgtccacagcagcatttgtctgcacaaggacccattgcagttctgggggcaggtactggacttggaatggcccgtggcctgcccacaaaagatgggatggtggcgctgcccagtgaaggcggacaccgtgaatttgctcctcgcagtgaatgcgagtggcaactttgtgagtggctcaaggccgatttgcagctcgaacgcctttcattggaacgtgttgtcagtggaacgggcctgggacacgtggcgcgctggcgcctacagcacagtgacgcagatggtcatcctctgcgaggtctggccgatgcttggcgccatggtgctaatgatcattgcgaccatttggatctgcctgctcttgctagtcaagccgcaagcgaaggcgattcaattcttcaagaagccttacagctctggctcgctgcttacggctctgctgcgggagatttagctctgcaggaactctgtgtcggaggcctctgggtgggtgggggtaccgctgcgaagcagcttcaaggtcttcgctcaagcacctttcttgaagccttccgcaacaaggggcgcttccgtccgtttctagagcaattgccagtgatggcagtgatcgatcccgaggtgggcctgttcagtgcagcctgcagagcacacatgcttgctgagcaaggtgggacactgacctaa

SEQ ID NO: 85547 - protein, 353 aa, Prochlorococcus marinus str. MIT 9313
MPSPRTFLAGDLGGTKTLLALYSWDEKQLKQQHRRRYLSNQWTSLEPMLSHFIAHLPGEMEQPNNGCIAVAGSVRHGEARITNLPWSLKEKDLCSATGLKHLELINDFGVLIYGLPFLNDAQQVELQRPQQHLSAQGPIAVLGAGTGLGMARGLPTKDGMVALPSEGGHREFAPRSECEWQLCEWLKADLQLERLSLERVVSGTGLGHVARWRLQHSDADGHPLRGLADAWRHGANDHCDHLDLPALASQAASEGDSILQEALQLWLAAYGSAAGDLALQELCVGGLWVGGGTAAKQLQGLRSSTFLEAFRNKGRFRPFLEQLPVMAVIDPEVGLFSAACRAHMLAEQGGTLT

SEQ ID NO: 85548 - DNA, 1035 bp, Synechococcus sp. WH 8102
  CDS (1)..(1035): transl_table=11
atgccccgtcccactcttctcgctggcgacatgggggggaccaagacccttcttgcgctctacgacctcgagggtgaaacgctgatcaaacgtcaccagcaacggtttgtctcagctgattggtcatcgctggagccgatgcttcaggcgtttgttgaggaacggcccaaggacgtccaggcgccaacccatggctgcatcgccgtggcaggccctgttcgcaatcggcaggcccggatcaccaacctcccctggcagctcaaggaagaggatctggctgccgccgcagggatgcagcaactggagctggtgaacgatttcggtgtgctgatctacggcctgcctcacttcggcgcggatcagcaggtggtgctgcaggaggggagtcaggacgacgggcccctggccatccttggagctgggaccggcctcggcatggctcgaggcgttcgcaccagcaacgggctgatggctctctccagcgagggtggacatcgcgaattcgcaccgcgcagcgatgaggaatggcaactggcctgctggctcaaacaggacctgggagtcgaccgcctgtcgatcgagcgggtggtgagcggcacagggcttggccacatcgcccattggctgctgcagcagccaggcgcacaatcccacccccttcgtcctgtggctgaggcctggcggcgaaatatggccagtgaccttccagctcaggtgtctctcgcggccgaagagggggaccctctgatgcgacatgcccttgacctgtggctgtcggcctacggctcagccacaggtgacctggccctgcaggaactctgcagcggtggtctctgggtgggaggcggcacggcctcaaaacaacgcaacggactgcaatccccgctgttccttgaggcaatgcgcgacaaaggtcggttcaaggacttcatcagcggtctgaaggtcaccgctgtgatcgatccggaggctggtctgttcagctctgcctgccgagcacggatgttggcggagtcgggtgggacactggcctga

SEQ ID NO: 85549 - protein, 344 aa, Synechococcus sp. WH 8102
MPRPTLLAGDMGGTKTLLALYDLEGETLIKRHQQRFVSADWSSLEPMLQAFVEERPKDVQAPTHGCIAVAGPVRNRQARITNLPWQLKEEDLAAAAGMQQLELVNDFGVLIYGLPHFGADQQVVLQEGSQDDGPLAILGAGTGLGMARGVRTSNGLMALSSEGGHREFAPRSDEEWQLACWLKQDLGVDRLSIERVVSGTGLGHIAHWLLQQPGAQSHPLRPVAEAWRRNMASDLPAQVSLAAEEGDPLMRHALDLWLSAYGSATGDLALQELCSGGLWVGGGTASKQRNGLQSPLFLEAMRDKGRFKDFISGLKVTAVIDPEAGLFSSACRARMLAESGGTLA

SEQ ID NO: 85550 - DNA, 1014 bp, Chromobacterium violaceum ATCC 12472
  CDS (1)..(1014): transl_table=11
ctgctcggcgacgtcggcggcagcaacgcgcgcttcgcgctggaaaccgcgcccggggtgattgaagacatcctgacgctgtccaatgagcgctacccgacgctggaggacgcgctgcgcgactacctggcccaggtcggcgcgcgccgcgtcgcccacgccgccatcggcatcgccaatccgctgaacggcgacctggtgcggatgaccaattgccattggtcgttttccatcgaagcgacgcgccgcgcgctgggcctctccacgctgctgctgctcaacgacttcaccgcgctggcgctggccctgcccaggctgccgcgccgggagctggcccaggtgggcggcggcgcgccgcggccggacgcgccgctggcgctgatcggccccggcaccgggctgggcgtgtcggcgctggtgccgcacgccggcggctggcgcgcgctggccggcgagggcggccacacctcgttcgcgccggccaacgaacgcgaaatcggcatctggcgctacgcgtccgcccgcttcggccacgtgtcgcacgagcggctgctgtccggctccggcctcagcctgctgcaccgggcgctgtgcgcgctggacggggcggaagaggccggcctggcgccggccgaagtcagcgcccgcggcctgtccggcgccgacgcgcgctgccgcgaagcactggaaatcttctgcgcgctgctgggttcggcggccgggaatctggccttgaccctcggtgcccgtggcggggtgtacataggtggtggtattgtgccgcgtttgagcggtttttttgaacaatccccatttcgccgccgtttcgaggacaaggggcggatgtcggcctatctggccgacatcccggtttacctgatcaccagcgcctacccggccctgccgggcgtggccgcccatctggcggaccacctggcgccgcgcagcgacccggccccggtggcagcgcccacccatcctcgcggcggcacagcaggagacatgcatgcttga

SEQ ID NO: 85551 - protein, 337 aa, Chromobacterium violaceum ATCC 12472
MLGDVGGSNARFALETAPGVIEDILTLSNERYPTLEDALRDYLAQVGARRVAHAAIGIANPLNGDLVRMTNCHWSFSIEATRRALGLSTLLLLNDFTALALALPRLPRRELAQVGGGAPRPDAPLALIGPGTGLGVSALVPHAGGWRALAGEGGHTSFAPANEREIGIWRYASARFGHVSHERLLSGSGLSLLHRALCALDGAEEAGLAPAEVSARGLSGADARCREALEIFCALLGSAAGNLALTLGARGGVYIGGGIVPRLSGFFEQSPFRRRFEDKGRMSAYLADIPVYLITSAYPALPGVAAHLADHLAPRSDPAPVAAPTHPRGGTAGDMHA

SEQ ID NO: 85552 - DNA, 984 bp, Gloeobacter violaceus PCC 7421
  CDS (1)..(984): transl_table=11
atgattcttgcgggtgatgtgggcggaaccaacacgcggctggccggcttcgagccggtcgcgggcaacttgatgccgatcgtctccgagacctatgccagccgggattactccagtctcgaccaaatcgtctatctttttatttctgagtaccatctgcgggtcgccgccgcctgcttcggggtggcggggccggtcaggcggggccgggccgagacgaccaacctgccctggtcgatcgacgcctccaccctggctgccgggctcaagctgccgacggtgggactgattaacgatctggaggccaacgcccacggcattgcgctgctgggaccggcggattttgccgtactcaacccgggcgcggcggatgcgatgggcaaccaggcggtgatcgccgccggaacggggcttggggaggcgggtttgttttgggatggcaggcggcatcggccctttgccaccgagggcggccacaccgattttgcgcccggcgacgcgctgcagatcgagttgctgcaccatctgcgggtgcgctttgcccatgtgagctgggagcgggtgctctccggtccgggactggtgaatatctatcaatttctgcgggacacccggcgcggggaggaacccaactggctcaccgaggagcttcgcaaccatcccaacccggcggcggtcatctcgcaggtggcgctcgcgggcaagtcctggttgtgcgaacaggccctcgatttgctgattgtcctgtacggtgcagaggcgggcaatctcgccctgaaggtcgccgccctaggcggggtgtttttggggggcggcatcgcccccaaactggtggagcggctcaaaggaccggcatttttggaggcgtttcttgccaaggggcgtctgcgcccgcttttagaggcgatgccggtgcgcgtcatcctcaacgatcgggccgccctgcttggagcggcccactgcgccatgcaaactttgatctag

SEQ ID NO: 85553 - protein, 327 aa, Gloeobacter violaceus PCC 7421
MILAGDVGGTNTRLAGFEPVAGNLMPIVSETYASRDYSSLDQIVYLFISEYHLRVAAACFGVAGPVRRGRAETTNLPWSIDASTLAAGLKLPTVGLINDLEANAHGIALLGPADFAVLNPGAADAMGNQAVIAAGTGLGEAGLFWDGRRHRPFATEGGHTDFAPGDALQIELLHHLRVRFAHVSWERVLSGPGLVNIYQFLRDTRRGEEPNWLTEELRNHPNPAAVISQVALAGKSWLCEQALDLLIVLYGAEAGNLALKVAALGGVFLGGGIAPKLVERLKGPAFLEAFLAKGRLRPLLEAMPVRVILNDRAALLGAAHCAMQTLI

SEQ ID NO: 85554 - DNA, 1035 bp, Prochlorococcus marinus str. AS9601
  CDS (1)..(1035): transl_table=11
atgaattttctcgcttgtgatttaggaggtacaaaggttctattaggaattttcaaaaaaggaacaaataataattcgcctaagttaatatttaaaaagaaatatatatcgtctgattgggattcttttgaactaatcctagaagattttatcaaaaaagaatgtaagaatattactcatccttcttctgcatgtttcgctgtagctggtcctttatctaaaaacaacgcaaaaatcgttaacttgtcatggaatatttctggaaatgatttacagaacaaatttaattttaaaaactgcgagctaataaatgatttcgctgtacaaatttatggaataccttttttaaaaaaaaatcaatattctactatccaaaatggatccaattctgaaaatactaataatgatttgcatgccattgttggagcggggactggcttggggattgcaagaggaataatatcaggggaaaaggtaaaagttttagctagtgaaggtggtcatgtagagtactccccaaagtcaaaattagaatgggatttgaaaatttggcttaagaattacctaaaagttgaaaggatatcttgtgaaaggattattagcggcactggtttatcaagaattgccgaatggagactaagcaaacctgatgcccaaaaccatcctttacaaaaatatttaaaaaaaattaaaatttttgatgcagcgagaaaagaactacctgaaaaaatttgtaatctttctaaagaaggtgatcaggtaatgattgaagttgagaggatttggttaggtgcttatgcctctttattgggagatgttgctcttcaagaattgtgctttggtggattatggatttctggaggaacagcgtcaaaacatttcaaaaactttaaatcagacttatttttaaaacaatttttcgacaagggaagattaaaagatattcttaaaacaatacctataaaagtaattttagatgaagagtttggactttttagtgcagcctgcagagcaaaaatgcttttaaaaacttaa

SEQ ID NO: 85555 - protein, 344 aa, Prochlorococcus marinus str. AS9601
MNFLACDLGGTKVLLGIFKKGTNNNSPKLIFKKKYISSDWDSFELILEDFIKKECKNITHPSSACFAVAGPLSKNNAKIVNLSWNISGNDLQNKFNFKNCELINDFAVQIYGIPFLKKNQYSTIQNGSNSENTNNDLHAIVGAGTGLGIARGIISGEKVKVLASEGGHVEYSPKSKLEWDLKIWLKNYLKVERISCERIISGTGLSRIAEWRLSKPDAQNHPLQKYLKKIKIFDAARKELPEKICNLSKEGDQVMIEVERIWLGAYASLLGDVALQELCFGGLWISGGTASKHFKNFKSDLFLKQFFDKGRLKDILKTIPIKVILDEEFGLFSAACRAKMLLKT

SEQ ID NO: 85556 - DNA, 1038 bp, Prochlorococcus marinus str. MIT 9515
  CDS (1)..(1038): transl_table=11
atgaattttcttgcttgtgatcttgggggtacgaaagttcttgtaggtatttatgaaaaagatcttgaatctgatactcctaaattaatctttaaaaaaaaatatttatctacagaatgggattcttttgattcaataattgaaaactttctagagaaagagtgtaaaaacattacttggcctcttcatgcatgttttgctattgcgggtcctgtcagaaataatgctgcaaaaataattaatttgtcttggaatatttcaggtaatgatctgaaaatgaaattcaaatttgaaagtgttgaactaataaatgactttggagtattaatttatggaattccattcttacaaaaaaatcaatttgcaacaattcaaaatggagagtttcatgttagttccagcaaaaattttcacgcaatagttggagcaggtacaggtctaggtattgcgaggggctttattaatggaaataatatagaggtcctagcaagcgaaggaggtcatgtggagttctccccaaggtcaaaagaagaatgggaattaaagatatggctaaaaaatcatttaaaagtggaaagaatttcttgcgaaagaattgttagtggtgaaggtctctcaagaatagctgagtggagattaagcaaacctgatgctaaaaatcatccttttcaaaaaactattaaagaattagaaatttctgaggaatcaagaaaaaagatacctagtcaaatttgtaaactttcaaatgaaggggatattttaatgatggaaattgaaaggatatggttagaagcttatgcctctttattaggagatatcgctgttcatgaactatgctttgggggattatggattgcaggaggtacggctacaaaacatttcaaaaactttaaatcagattcatttttgaaacaaatttcaaataaaggaagattaatagatattgttaaatctattcctattaaaataattttagatgaagagtttggactttatagtgcagcctgcagagcaaaaatgctattaaaaacaacataa

SEQ ID NO: 85557 - protein, 345 aa, Prochlorococcus marinus str. MIT 9515
MNFLACDLGGTKVLVGIYEKDLESDTPKLIFKKKYLSTEWDSFDSIIENFLEKECKNITWPLHACFAIAGPVRNNAAKIINLSWNISGNDLKMKFKFESVELINDFGVLIYGIPFLQKNQFATIQNGEFHVSSSKNFHAIVGAGTGLGIARGFINGNNIEVLASEGGHVEFSPRSKEEWELKIWLKNHLKVERISCERIVSGEGLSRIAEWRLSKPDAKNHPFQKTIKELEISEESRKKIPSQICKLSNEGDILMMEIERIWLEAYASLLGDIAVHELCFGGLWIAGGTATKHFKNFKSDSFLKQISNKGRLIDIVKSIPIKIILDEEFGLYSAACRAKMLLKTT

SEQ ID NO: 85558 - DNA, 1044 bp, Prochlorococcus marinus str. NATL1A
  CDS (1)..(1044): transl_table=11
atgaatttacttgctggagaccttgggggaactaaaacaatattagctatttattcaaacgagaactatccaaaaaaaatatttgagaggtactatatttcatcagaatggaaatctttttactcattatttgaagattttattaaacatttaccagatcatatatcactgcctcaatatggttctattggtgtagccgggccaatacagaatcaggaggttaagattacaaatcttggctgggatattgaatcaaaaaagttatctctactttcaaaaataaataatattgaattaataaatgatttttcagttttaatctatggaataccattcttcaacagaaaccaatatgaagtaatacaagggacattaaattctgattacaaaaacgatcaaaaattaattgcaattattggagctggtactggcttaggaatgtccagaggcttgataacccctaaaagcatttctatatttccaagtgaaggagggcatcgagaattttccccaagaacagaaaacgaatgggcattagtcaaatggctaaaaaagaagttaaatattcaaagaatatccattgaaagaattgttagtggtactggccttggcatgattgccagatggaaattggatgatccaataaatgaaagccatccacttcaggtaattttaaaaaatatggatagtgacaaatcagattccacagatttacccgcacttgtttgggaaaaagcaaaaaacggagacaaattaatgactgaagcattgcaactatggctaaatgcttatgggtctgcagctggagaccttgctttacaagaactttgctcttcagggttatggatttcaggtggaacagccgcaaaaaacctcgatggaataaactcttctaacttcctaaatgcatttagtaataagggtcgctttcaatcttatttaaaggaaatcccattgattgttcttaaagatccagaagcgacattattcagttcagcttgcagagcacgcttaagtgccgaatcaaatgggagacttagctaa

SEQ ID NO: 85559 - protein, 347 aa, Prochlorococcus marinus str. NATL1A
MNLLAGDLGGTKTILAIYSNENYPKKIFERYYISSEWKSFYSLFEDFIKHLPDHISLPQYGSIGVAGPIQNQEVKITNLGWDIESKKLSLLSKINNIELINDFSVLIYGIPFFNRNQYEVIQGTLNSDYKNDQKLIAIIGAGTGLGMSRGLITPKSISIFPSEGGHREFSPRTENEWALVKWLKKKLNIQRISIERIVSGTGLGMIARWKLDDPINESHPLQVILKNMDSDKSDSTDLPALVWEKAKNGDKLMTEALQLWLNAYGSAAGDLALQELCSSGLWISGGTAAKNLDGINSSNFLNAFSNKGRFQSYLKEIPLIVLKDPEATLFSSACRARLSAESNGRLS

SEQ ID NO: 85560 - DNA, 1062 bp, Prochlorococcus marinus str. MIT 9303
  CDS (1)..(1062): transl_table=11
atgccgtccctgagaacctttctggcaggtgatttggggggcaccaaaaccttgcttgcgctctatagctgggacgaaaagcaactcaagcagcagcaccggcggaggtatctatccaatcagtggacttcgcttgaacccatgctgagcgacttcatcgcccatttaccaggggagatggagcaacccaataacggctgcatcgctgttgcaggaccggttcgtcatggtgaggcacgtatcaccaacctgccctggagcctgaaggagaaggacctttgcgcagccacgggactgaagcatttggaactgattaatgactttggcgtgctgatttacggcctaccctttctcaacgactcgcagcaggtggagcttcagcttccacagcagcatttgtctgggcaaggaccaattgcagttctgggggcaggtactggacttggaatggcccgtggcctgcccacaaaagatgggatggtggcgctgcccagtgaaggcggacaccgtgaatttgctcctcgcagtgaatgtgagtggcaactttgtgagtggctcaaggccgacttgcaactcgaacgcctttcattggaacgtgttgtcagtggcaccggcctgggtcatgtggcgcgctggcggctacagcacagtgacgcagatggtcatcctctgcgagatctggccgatgcttggcgccatggtgctgatgatcattccgaccacttggatctgcctgctcttgctagtcaagccgcaagcgaaggcgattcaattcttcaagaagccttacagctctggctagctgcttacggttctgctgcgggagatttagctctgcaggaactctgtgtcggaggcctctgggtgggtgggggtaccgctgcgaagcagcttcaaggtcttcgctcaagcacctttcttgaagccttccgcaacaagggtcgcttccgtccgtttctagagcaattgccagtgatggcagtgatcgatcccgaggtgggcctgttcagtgcagcctgcagagcacacatgcttgctgagcaaggtgggacactgacctaa

SEQ ID NO: 85561 - protein, 353 aa, Prochlorococcus marinus str. MIT 9303
MPSLRTFLAGDLGGTKTLLALYSWDEKQLKQQHRRRYLSNQWTSLEPMLSDFIAHLPGEMEQPNNGCIAVAGPVRHGEARITNLPWSLKEKDLCAATGLKHLELINDFGVLIYGLPFLNDSQQVELQLPQQHLSGQGPIAVLGAGTGLGMARGLPTKDGMVALPSEGGHREFAPRSECEWQLCEWLKADLQLERLSLERVVSGTGLGHVARWRLQHSDADGHPLRDLADAWRHGADDHSDHLDLPALASQAASEGDSILQEALQLWLAAYGSAAGDLALQELCVGGLWVGGGTAAKQLQGLRSSTFLEAFRNKGRFRPFLEQLPVMAVIDPEVGLFSAACRAHMLAEQGGTLT

SEQ ID NO: 85562 - DNA, 1035 bp, Prochlorococcus marinus str. MIT 9301
  CDS (1)..(1035): transl_table=11
atgaattttcttgcttgtgatttaggaggtacaaaggttctattaggaattttcaaaaaagaaataaataataatccgcctaagttaatatttaaaaagaaatatatatcgtctgattggggttcttttgaattaatcctagaagactttatcaaaaaagaatgcaagaatattactcatccttcttctgcatgtttcgctgtagctggtcctttatctaaaaacaacgcaaaaatcgttaacttgtcatggaatatttctggaaatgatttacagaacaaatttaatttaaaaaactgcgagctaataaatgatttcgctgtacaaatttatggaataccttttttaaaaaaaaatcaatattctactatccaaaatggatccaattctgaagatactaataatgatttgcatgtcattgttggagcggggactggcttagggattgcaagaggaataatatcaggggaaaaggtaaaagttttagctagtgaaggtggtcatgtagagtactccccaaagtcaaaattagaatgggatttgaaaatttggcttaagaattacctaaaagttgaaaggatatcttgtgaaagaattgttagcggcactggtttatcaagaattgccgaatggaggctaagcaaacctgatgcccaaaaccatcctttacaaaaatatttaaaaaaaattaaaatttttgatgctgcgagaaaagaactacctgaaaaaatttgtaatctttctaaagaaggtgatcagctaatgattgaagttgagaggatttggttaggcgcttatgcctcattattgggagatgttgctcttcaagaattgtgctttggtggattatggatttctggaggaactgcgtcaaaacatttcaaaaactttaaatcagacttatttttaaaacaatttttcgacaagggaagattaaaagatattcttaaaacaatacctataaaagtaattttagatgaagagtttggactttttagtgcagcctgcagagcaaaaatgcttttaaaaacttaa

SEQ ID NO: 85563 - protein, 344 aa, Prochlorococcus marinus str. MIT 9301
MNFLACDLGGTKVLLGIFKKEINNNPPKLIFKKKYISSDWGSFELILEDFIKKECKNITHPSSACFAVAGPLSKNNAKIVNLSWNISGNDLQNKFNLKNCELINDFAVQIYGIPFLKKNQYSTIQNGSNSEDTNNDLHVIVGAGTGLGIARGIISGEKVKVLASEGGHVEYSPKSKLEWDLKIWLKNYLKVERISCERIVSGTGLSRIAEWRLSKPDAQNHPLQKYLKKIKIFDAARKELPEKICNLSKEGDQLMIEVERIWLGAYASLLGDVALQELCFGGLWISGGTASKHFKNFKSDLFLKQFFDKGRLKDILKTIPIKVILDEEFGLFSAACRAKMLLKT

SEQ ID NO: 85564 - DNA, 981 bp, Bradyrhizobium sp. ORS278
  CDS (1)..(981): transl_table=11
atgagcgagcgcgttcttctgggggacatcggcggcaccaatgcgcggttcgcgctgctcgacgacggaacgatcggccaggtcgcccatctgaaggtcgcggatttcccgaccatcgccgatgccatcaccgacttcctggcgcgacacgctgccggcggaccgccggcctccgccgtgctggacatcgcaggtcccatcgagcgcaaccgcggcatgctgaccaactctacctgggtcatcgacggcgccgagctggccgcgcacttcaatctgcgctcggcgaagctgttgaacgatttcgaagcggtcggctggtcgctgccggcgctgcatcccgacgatctgtttgcgctcggcggccatgcggcggtcgagggcgcgccgatgctggtgatcggcccgggcaccggattcggcgcggcctgctatctcccgaatgatggccgtccgaccgtcgcggtcaccgaggcgggccacgcgaccctgccggcgaccacgatgcgcgaggccaccgtgctcgccaagatgcgcgagcgcttcggccatgtctcgatcgagcgcgcgctgtccggcatgggcctcgagaacgtctatcaggcgatcgcagcggtcgacggcgtcgacgtgcccaagcgtgacgcagcggcgatcacccacgccgcgctcgatggcagctgcgccaccagccgcgccacgctcgacatgttctgcgcctggctcggcgccgtcgccggcaatctggcgctgaccttctgcgcccgcggcggcgtctacatcgccggcggcatcccgccgcgcttcccggactacttcgcgaagtcggcgttccgccggcagttcgagagcaagggacgctacgacagctatctgcggtccattcccgtacatcttgtcaccaagcccgacatcagctttctcggcctcaagtccttccacgagtccagcgtcccctcgagcggcggatctcccgcaacctga

SEQ ID NO: 85565 - protein, 326 aa, Bradyrhizobium sp. ORS278
MSERVLLGDIGGTNARFALLDDGTIGQVAHLKVADFPTIADAITDFLARHAAGGPPASAVLDIAGPIERNRGMLTNSTWVIDGAELAAHFNLRSAKLLNDFEAVGWSLPALHPDDLFALGGHAAVEGAPMLVIGPGTGFGAACYLPNDGRPTVAVTEAGHATLPATTMREATVLAKMRERFGHVSIERALSGMGLENVYQAIAAVDGVDVPKRDAAAITHAALDGSCATSRATLDMFCAWLGAVAGNLALTFCARGGVYIAGGIPPRFPDYFAKSAFRRQFESKGRYDSYLRSIPVHLVTKPDISFLGLKSFHESSVPSSGGSPAT

SEQ ID NO: 85566 - DNA, 1077 bp, Synechococcus sp. WH 7803
  CDS (1)..(1077): transl_table=11
atggcagccaaaacatttttggccggtgatctcggaggcaccaagacccttctggccctttacagcgaatccgaggaggggctgaacaagattcactcccatcgctacgtctcggcggagtggagcgacctggagtcgatgcttggcgatttcctcaagacgttgcctcaaggtctctccaaaccggaaaccagctgcatcgccgtggccggaccggtgcagaacggcacggcaaagctcacgaacctcccctggagcatgagtgaggcctcgctgtgcaaagccacagggctgcaacgcctggagctggtcaacgactttgctgtgctcatccatggcctgccccacttcagtgcgtcacagcaggtggtgctgcagaccggaagcggccgagacgcgccagcagcagccggccaagacggcggggccgtcgccattctcggtgcaggcactggcctgggaatggcccgcggccttccggcagccagaggctggcaggccttgcccagcgagggaggtcaccgcgaattcgcagcgcgaaccgaagacgaatggcacctggcccagtggatgcgcagcactctcgatctcgatcggctgtccatcgaacgggtggtcagcggcacgggacttggccacgtgatgtgttggctgctctccgcgcaggagcacagcgatcaccccttgcaaggcaaggcgaaagcctggacgacgctgccagcagagcacccggatcatgaagacctgccagcccacaccagtcgggccgccgcatcaggggatcctctggcccaggccgcgatgacgctatggctgggagcgtatggctctgccgcaggggatctggcccttcaggagctctgcactggtggactctggatcggcggtggcacagcggagaaggtcatcgatggcctgcgctcctcgcagtttctcgagcctctgcgccgcaaaggacgcttcaggcctctgatcgagagtctcaccatccgggcggtgactgatcaggaagcgggattgttcagtgcggcctgcagagcgcgtgatctggcggagtcgggtgggacactggcctga

SEQ ID NO: 85567 - protein, 358 aa, Synechococcus sp. WH 7803
MAAKTFLAGDLGGTKTLLALYSESEEGLNKIHSHRYVSAEWSDLESMLGDFLKTLPQGLSKPETSCIAVAGPVQNGTAKLTNLPWSMSEASLCKATGLQRLELVNDFAVLIHGLPHFSASQQVVLQTGSGRDAPAAAGQDGGAVAILGAGTGLGMARGLPAARGWQALPSEGGHREFAARTEDEWHLAQWMRSTLDLDRLSIERVVSGTGLGHVMCWLLSAQEHSDHPLQGKAKAWTTLPAEHPDHEDLPAHTSRAAASGDPLAQAAMTLWLGAYGSAAGDLALQELCTGGLWIGGGTAEKVIDGLRSSQFLEPLRRKGRFRPLIESLTIRAVTDQEAGLFSAACRARDLAESGGTLA

SEQ ID NO: 85568 - DNA, 1020 bp, Desulfovibrio vulgaris subsp. vulgaris str. Hildenborough
  CDS (1)..(1020): transl_table=11
atggagaagggctgccgtatccttgccgcagacatcggcgggacacgcagccgctttgcctacttcgactatgccggaggggagcttggcatgggcgatgtcgtccgcatccccacggcggaggctaccgggttcgacgacctgcttggcagggtgcgcgcagccgcgcccggtgcatgggcgcgactgacgcgacagactgacaccgggaatgatgctccggatacgcccgatgcaagcgtcaccgccttcgccgcctttgccgtggcagggcctgtcgaggagggggcgcgttgtctgcctcccaacatcggttggcatatcgacctcgccaccacgcgtggtttgccgtgtgcagcgtcgctgctcaacgatttcgaggcgcagggatgggcctgtctgctgcccggggcgcaacagtgccttcagctactgcccggaaagccggacgcgacggcacctgtggctgtcgtcggggcaggcacggggcttggcaaatgccttctgcttccgggcacgccgcacagggtgctgccctcggagggagggcacgccacgttcgccttcgaggggcgtgccgaggccgaatacgccgcctttgctgccgaccgccttggcgtgggacgactgattggcgatgacgtgctttccgggcccgggctgtctctgttgtacgcctatcatcacggcgagacgctacccccgcacgaggtggcggcacgtctcaccggaagtgacgtcgtcgtcgagtggttcgcgcgtttctacgggcgcacctgccgtgactgggcgttgcatacccttgccagaggcggtgtgcgcatcgcggggggagtggcggctgccaaccccatgctggtgcagcatggggccttcgccgaggcgttcttcgattgccccacgcacacgcacctcttgcgcaccatccccgtctcactggtcaccaatgccgacgccggcctatggggggcggccatctttgccctgcttcatgccgggacaaggagaacgccacgatga

SEQ ID NO: 85569 - protein, 339 aa, Desulfovibrio vulgaris subsp. vulgaris str. Hildenborough
MEKGCRILAADIGGTRSRFAYFDYAGGELGMGDVVRIPTAEATGFDDLLGRVRAAAPGAWARLTRQTDTGNDAPDTPDASVTAFAAFAVAGPVEEGARCLPPNIGWHIDLATTRGLPCAASLLNDFEAQGWACLLPGAQQCLQLLPGKPDATAPVAVVGAGTGLGKCLLLPGTPHRVLPSEGGHATFAFEGRAEAEYAAFAADRLGVGRLIGDDVLSGPGLSLLYAYHHGETLPPHEVAARLTGSDVVVEWFARFYGRTCRDWALHTLARGGVRIAGGVAAANPMLVQHGAFAEAFFDCPTHTHLLRTIPVSLVTNADAGLWGAAIFALLHAGTRRTPR

SEQ ID NO: 85570 - DNA, 999 bp, Desulfotalea psychrophila LSv54
  CDS (1)..(999): transl_table=11
atgatacttgccggtgatatcggtggtacaaaaacaaatctagcgctttacacctgttcatgtccggcgggtaatggctcattgatcgatagctcagcaaagacctatttgaatgcagatttcgccagcggcgaagagttggtgtgtggctatctggcaggcatcgacactacaattaaaagggcggtattcgctgtggccgggccgatacgggatgggcaggtaaaaatcaccaatctgccttggctgataagtgtagaacagttaagcgttgcgacgggtatcgcgacaattcacctgatgaacgatttggaggcgaccgcgtacgctgtgccttttctttcgcgggacgagttgtacaccctcaatcaggggatatcggtagagaggggaaatattgctcttattgccccggggacaggactgggggagtccttcctgacatgggaagggacgcgttatagtgcccatgccacagaggggagtcatgtcgatttcgcccccaccaatgcgcttcagataaaactgctggattatctgctcaggggctatgagcatgtgagctatgaacggatctgttcgggaataggaattcccaatatctatggctttttgaaacacagccagaacattgaggagccggaatggctacgcgagcaactctcacaggagaaagaccacaccgctgtgatagtcaatgccgctctcgatgctcaacggccatgccccatctgcaggatgacagttgaaatttttctctcagttctcggtgcggaggcggggaatatcgctctgaaagttatggcggctggcggtgtgtatgtgggaggaggtattgttccccgcattctgtctttgttaggaaacggcctcttcatggaaacctttaacagtaaggggcgaatgtccgaactcctggtcgacgttccggtacatataattctcaatcctaaagttgcggtttttggcgctgcgcgttacgggatggaaatttgttga

SEQ ID NO: 85571 - protein, 332 aa, Desulfotalea psychrophila LSv54
MILAGDIGGTKTNLALYTCSCPAGNGSLIDSSAKTYLNADFASGEELVCGYLAGIDTTIKRAVFAVAGPIRDGQVKITNLPWLISVEQLSVATGIATIHLMNDLEATAYAVPFLSRDELYTLNQGISVERGNIALIAPGTGLGESFLTWEGTRYSAHATEGSHVDFAPTNALQIKLLDYLLRGYEHVSYERICSGIGIPNIYGFLKHSQNIEEPEWLREQLSQEKDHTAVIVNAALDAQRPCPICRMTVEIFLSVLGAEAGNIALKVMAAGGVYVGGGIVPRILSLLGNGLFMETFNSKGRMSELLVDVPVHIILNPKVAVFGAARYGMEIC

SEQ ID NO: 85572 - DNA, 993 bp, Methylococcus capsulatus str. Bath
  CDS (1)..(993): transl_table=11
gtgctgctggcgggggacgtcggcgctaccaagacggtcctcgggctgttcgactgctggggcgacaggctggtcagtctgagcgaggcgattttcgccagcacggactatgcctcgctggagacggtggtggcggcgttcctggatgggcaggaggaacggaggcccgaagtcgcctgtttcggggtgccgggaccggtgagcgaaggccgctgcgaaatcaccaacctgccgtgggttctgtccgagcgggaacttgcggcggcgacgggggtgagtgcagtgcgcctgctgaacgacgtccaggccatggccctgggcatggcttaccggttgggcgaggacgattgggtggagctgaaccccggcgccggccgtccgcgatccggaaacgtcgcggtgatcgccgcggggacgggattgggcgaggccatcctgtattgggatggcgagcgctaccatgcgctgccgaccgaaggcggacacagcgatttcgcccccaacggaccgctggaagaagggttgctcgccttcctgcgggatcgcttctgcgggcatgtcagctacgagcggatactgtctggttcggggctggccaatctctacgactatctgcgtcacgccggcgtggcgccggaaagcgaggcactgcacgccgccctggccagcgctcccgaccgtgccccgatcatcgccgagtgggcactggaacggcgtgacgccctttgcaccgcggtgctcgatctcttcgcggcaatctacggggcggaagccgggaatctggccctcaagtcgctcgcgctcggtggcgtgatcctgggcgggggtatcgcgccgaaaatccttccggtcctgcaggcggggaggttcatggccgctttcacggcaaagggaaggctgtcccccctcctggggcggcttcccgtgcgggtcgccatccatccccagccggccctgctgggggcggcgcatgccgcctcggccatgctttga

SEQ ID NO: 85573 - protein, 330 aa, Methylococcus capsulatus str. Bath
MLLAGDVGATKTVLGLFDCWGDRLVSLSEAIFASTDYASLETVVAAFLDGQEERRPEVACFGVPGPVSEGRCEITNLPWVLSERELAAATGVSAVRLLNDVQAMALGMAYRLGEDDWVELNPGAGRPRSGNVAVIAAGTGLGEAILYWDGERYHALPTEGGHSDFAPNGPLEEGLLAFLRDRFCGHVSYERILSGSGLANLYDYLRHAGVAPESEALHAALASAPDRAPIIAEWALERRDALCTAVLDLFAAIYGAEAGNLALKSLALGGVILGGGIAPKILPVLQAGRFMAAFTAKGRLSPLLGRLPVRVAIHPQPALLGAAHAASAML

SEQ ID NO: 85574 - DNA, 924 bp, Silicibacter pomeroyi DSS-3
  CDS (1)..(924): transl_table=11
atgaccgtcctggtggcagatgtggggggcaccaatacccgcgtcgcgctggccagcgccgggcagctggtgcatctggcccggttcgccaacgatgcctatggctctttcgccgaggtgctgacggcctatgcgcggggcagggacctgccgggtctgcgcggcgtctgtgtcgcggtggcgggcccggtggcgaatgggcgcgccgagctgaccaaccggaactggcatttcgatacggcagagctggccgcgccgctgccagggcagggcgatgttgcggcgcggctgatcaacgatctggtggcgctgggccatgccttgccggggctgacggcagcgcagcttgacgtgatccgcgcgggcgccgtacagccttcgaacgatcaggcgctggtggccgggctgggcaccggtttcaacacctgcctgctcaagggtggcgcggtggtcgaggcggaactgggccatgccagcctgccgctggccatcgccgaggaactgcgcgcgcagcttggcgacgcggcgggcgggtttcgcaccaacgaatgcctgttctcgggccggggcctgtcgcggctgcatgccatcctgtccggtcaggaccggcgcggacaggacatcctggcggattatgcaattggcgaggacccgcaggccgccgccacggtgactctgaccgcgcggctcttgggtctgttcgcccgcgaactggtgtttcagtacctgccgtttcgcggcatccactttgccggcggggccgcgcgcggcatcctcggctcggcggcgcgcgccgaattcctgtcggccttcgaggccgatgggcggtttgccgaccatctggaccgggtaccggtgcggctgatcgccgacgatgccgcagcgctcagcggcgcagcgcgactgatggaggaatgcgcatga

SEQ ID NO: 85575 - protein, 307 aa, Silicibacter pomeroyi DSS-3
MTVLVADVGGTNTRVALASAGQLVHLARFANDAYGSFAEVLTAYARGRDLPGLRGVCVAVAGPVANGRAELTNRNWHFDTAELAAPLPGQGDVAARLINDLVALGHALPGLTAAQLDVIRAGAVQPSNDQALVAGLGTGFNTCLLKGGAVVEAELGHASLPLAIAEELRAQLGDAAGGFRTNECLFSGRGLSRLHAILSGQDRRGQDILADYAIGEDPQAAATVTLTARLLGLFARELVFQYLPFRGIHFAGGAARGILGSAARAEFLSAFEADGRFADHLDRVPVRLIADDAAALSGAARLMEECA

SEQ ID NO: 85576 - DNA, 966 bp, Pseudomonas syringae pv. syringae B728a
  CDS (1)..(966): transl_table=11
gtgaagttggccctggtcggtgatataggcggtaccaatgcacgttttgccatttgggaaaacagcacgctgcattctgtccgggtattcccgaccattgactacgcgggtccggagaaggccatcgaagtctatctgcaagacctggagctgcagcgcggcgatatcggtcatgtatgcctggcggtcgccggaccggtcgacggtgatttttttcagttcaccaacagccactggcaattgagccgcgaggcgttctgcgccgacctgcaggtcgatgaactgctgttgatcaacgacttcaccgccatggcgctgggcatgacccggctcaaggacgatgaatacctgacggtctgccacggtgtcggcaagcctgaccgcccgcgcgtggtggtggggccggggaccgggctgggcgtcggtacgctgatcaaactcgaaggcagtcgctggatggcgttgccgggcgagggcgggcatgccgatctgcccatcgggactgcgcgcgaggcgctgctgtggacacggctgatggccgagcacgagcatgtcagcgccgaggtcgttctcagcggtgccggcttgctgttgctgtatcaggtcagttgcgcgctggacgatatcgaaccggtgctcaaatcgcctgcggcgatcaccaccgccgcgctctcgggcgacccggtagccgcggcagtcctggagcaattctgcgtgtttctcggcagagtggtcggcaaccatgtgctggccctgggcagcctcggcggggtttatatcgtcggtggcgtggtgcctcgttttactgagttcttcatcaacagcgggttcaagcgcgccatggccgagaagggcgtcatgagcgactatttcaaaggtctgccggtgtggctggtaacggccgaataccctggcctcatggggtcgggcgtggccctgcaacaggcgtttggtgcgcagatctga

SEQ ID NO: 85577 - protein, 321 aa, Pseudomonas syringae pv. syringae B728a
MKLALVGDIGGTNARFAIWENSTLHSVRVFPTIDYAGPEKAIEVYLQDLELQRGDIGHVCLAVAGPVDGDFFQFTNSHWQLSREAFCADLQVDELLLINDFTAMALGMTRLKDDEYLTVCHGVGKPDRPRVVVGPGTGLGVGTLIKLEGSRWMALPGEGGHADLPIGTAREALLWTRLMAEHEHVSAEVVLSGAGLLLLYQVSCALDDIEPVLKSPAAITTAALSGDPVAAAVLEQFCVFLGRVVGNHVLALGSLGGVYIVGGVVPRFTEFFINSGFKRAMAEKGVMSDYFKGLPVWLVTAEYPGLMGSGVALQQAFGAQI

SEQ ID NO: 85578 - DNA, 966 bp, Colwellia psychrerythraea 34H
  CDS (1)..(966): transl_table=11
ttgaaccttgttgccgatattggtggcacaaatatcaggctcggcgtaagtgacagcagtaacattattattgacattgaaacttaccaatgtcgagatttcacttgtttactcgacgtaattcaatattatttaactgaaaagaaaatagcacaaggcaatattaatgcttgcttagctatcgcatgcccagtagatactgacattatttccatgacgaatttaccttggcagttctcccaaacagaactcaaaaaagcactgaaattaaataaactagtacttatcaatgactatactgcgatagccatggcgattccgatgttaacggatgaacaaaaagttaaaattggtggcggaaccgcactatcagataaagctattgctgtttgtggaccaggcactggtttaggcgttgctaatttaataccgattgttaacaaatggtattgtttaggaggtgaaggtgggcacgtcgattatgcgccaatagatgataaagaaatccaagttttacgctacatacaaggttttaaaaaacgtgtttcttatgagcaattactttctggttacggtttagagcagatatatcaagcattacttattattgagcagggtgatagttcacctcaacaaccaactaaattaacggctcaagaaattagcactcaagcgttaattgagacttgcacactcagccaacaagcattggacttattttgtaaggtattaggaagttttgcaggtaacctcgctttaacaatgaatactcaaggcggggtatatattgcaggaggtattgtcccttgttttattgattaccttagaaatagtgattttagactacgttttgaagctaaaggacgcatgtcacctttgaataaagaaatcgccacttatgtaatcacagagaaacaacctggtttattaggtgcttcagtgtatttaaatcaagttatggcgtga

SEQ ID NO: 85579 - protein, 321 aa, Colwellia psychrerythraea 34H
MNLVADIGGTNIRLGVSDSSNIIIDIETYQCRDFTCLLDVIQYYLTEKKIAQGNINACLAIACPVDTDIISMTNLPWQFSQTELKKALKLNKLVLINDYTAIAMAIPMLTDEQKVKIGGGTALSDKAIAVCGPGTGLGVANLIPIVNKWYCLGGEGGHVDYAPIDDKEIQVLRYIQGFKKRVSYEQLLSGYGLEQIYQALLIIEQGDSSPQQPTKLTAQEISTQALIETCTLSQQALDLFCKVLGSFAGNLALTMNTQGGVYIAGGIVPCFIDYLRNSDFRLRFEAKGRMSPLNKEIATYVITEKQPGLLGASVYLNQVMA

SEQ ID NO: 85580 - DNA, 1020 bp, Colwellia psychrerythraea 34H
  CDS (1)..(1020): transl_table=11
atgaatattgaaaaagaaagcactctggtcagcctaattgcggatattggcggtaccaatattcgcttggctcaagcaacagcaaagctcggcacgaatacgcgtgacattgctattaatgatattgagacctatcaatgcaaagagttttctagcttagctgatgtggttgcacattatattgatgttaaagaactgaataacttggccattaacgcttgtttcgctatcgcttgccctgtagataatgacttgattagcatgactaatttaccttggcagttctctcaaaacgaactcaaacagtcattaaatttacattcattacgctttattaatgactacaccgcaatagccatggccattcctctgctatcagaacaacagaagattaaaataggtggcggcgaaagtattgcgggtaaacccatttcagtctgtggaccaggtacagggttaggtgttgcaaacttagtaccactgtctctgtcaggcaatgagcaatggcattgcattagtggtgaaggtggtcatattgattttgctccggttaatgaaatcgagcaacaggtgatgaactttatccaaggcatcaaaaagcgagtttcatacgaacagttattgtcaggttatggcttagagcaaatctatcaagcactgttatttattaatcatggcaaagaaattaccacggttgaagacaaacttaccgctaaagatattacggcgaatgcgcttaacgccacttgtactgtttgtgagcaaacactgacactcttttgtgatgtgctgggtagctttgccggtaaccttgccttaataatgaatagccaaggcggtgtttatattgctggcggcatagtgccgcgttttgttgactatttaaaactgagtgactttagagcgcgctttgaaacaaagggacgactctcctctatcacagagcaagctcctacctacgtgataactgaagagcaaccaggattacttggcgccgcggcttttgttttacaaagctaa

SEQ ID NO: 85581 - protein, 339 aa, Colwellia psychrerythraea 34H
MNIEKESTLVSLIADIGGTNIRLAQATAKLGTNTRDIAINDIETYQCKEFSSLADVVAHYIDVKELNNLAINACFAIACPVDNDLISMTNLPWQFSQNELKQSLNLHSLRFINDYTAIAMAIPLLSEQQKIKIGGGESIAGKPISVCGPGTGLGVANLVPLSLSGNEQWHCISGEGGHIDFAPVNEIEQQVMNFIQGIKKRVSYEQLLSGYGLEQIYQALLFINHGKEITTVEDKLTAKDITANALNATCTVCEQTLTLFCDVLGSFAGNLALIMNSQGGVYIAGGIVPRFVDYLKLSDFRARFETKGRLSSITEQAPTYVITEEQPGLLGAAAFVLQS

SEQ ID NO: 85582 - DNA, 1026 bp, Colwellia psychrerythraea 34H
  CDS (1)..(1026): transl_table=11
atgaatacaaatttagctcacaccaaagaacagaccactatcaatctaattgcagatattggcggtaccaatattcgcttggctcaagcaacagcaaagctcggcacgaatacgcgtgacattgctattaatgatattgagacctatcaatgcaaagagttttctagcttagctgatgtggttgcacattatattgatgttaaagaactgaataacttggccattaacgcttgtttcgctatcgcttgccctgtagataatgacttgattagcatgactaatttaccttggcagttctctcaaaacgaactcaaacagtcattaaatttacattcattacgctttattaatgactacaccgcaatagccatggccattcctctgctatcagaacaacagaagattaaaataggtggcggcgaaagtattgcgggtaaacccatttcagtctgtggaccaggtacagggttaggtgttgcaaacttagtaccactgtctctgtcaggcaatgagcaatggcattgcattagtggtgaaggtggtcatattgattttgctccggttaatgaaatcgagcaacaggtgatgaactttatccaaggcatcaaaaagcgagtttcatacgaacagttattgtcaggttatggcttagagcaaatctatcaagcactgttatttattaatcatggcaaagaaattaccacggttgaagacaaacttaccgctaaagatattacggcgaatgcgcttaacgccacttgtactgtttgtgagcaaacactgacactcttttgtgatgtgctgggtagttttgccggcaaccttgctttaataatgaatagccaaggcggtgtttatattgctggtggcatagtgccgcgttttgttgactatttaaaactgagtgactttagagcgcgctttgaaacaaagggacgactttcctctatcacagagcaagctcctacctacgtaataactgaagagcaaccaggattacttggcgccgcagcttgtttgttataa

SEQ ID NO: 85583 - protein, 341 aa, Colwellia psychrerythraea 34H
MNTNLAHTKEQTTINLIADIGGTNIRLAQATAKLGTNTRDIAINDIETYQCKEFSSLADVVAHYIDVKELNNLAINACFAIACPVDNDLISMTNLPWQFSQNELKQSLNLHSLRFINDYTAIAMAIPLLSEQQKIKIGGGESIAGKPISVCGPGTGLGVANLVPLSLSGNEQWHCISGEGGHIDFAPVNEIEQQVMNFIQGIKKRVSYEQLLSGYGLEQIYQALLFINHGKEITTVEDKLTAKDITANALNATCTVCEQTLTLFCDVLGSFAGNLALIMNSQGGVYIAGGIVPRFVDYLKLSDFRARFETKGRLSSITEQAPTYVITEEQPGLLGAAACLL

SEQ ID NO: 85584 - DNA, 957 bp, Colwellia psychrerythraea 34H
  CDS (1)..(957): transl_table=11
ttggttgctgatatcgggggcacaaacattcgattagccattgcttcaccttcggatgtcattacggatatagctacttatcaatgtgcgaagtttgctaatttaattgatgtcatccggctgtatataatggaaaagcaacttgagggtaaaactatcaatgcttgtttagccattgcctgtccggtagatgatgattacatttccatgaccaatttaccttggcagttctctcaaaaagatttaaaagaacaattaaaattaaataccttaaccttgataaacgattacaccgccattgctctggctattccttatcttagcgattctcaaaaagtgaaaataggggctggtgaggcggttagtaataaagctatctctgtatgcggtcctggaactggcttaggtgtagctactttagtgccattagataataaatggcactgtattagtggtgaaggaggacatgtcgattttgcccctgttgatgagttggaagtaaaagttttttcttatatttatgcttataaaaaacgggtttcttatgaacaattattatctggttatggcttagaacagatatatcaagcgcttgttaagataactaatgaaggcaaaagtaataattttgtggccggtgacctttcggctgaaattataagtactaatgcgattaatggtgactgtattttatgcaaacaagcattagaatttttttgtaaagtattaggaagttttgctggtaatttagcactaacggctaatagtttaggtggcgtatatattgctggtggtattgtgcctaggtttatcgactttattgaaaagagtggctttagagaacgttttgaaacaaaagggcggttatcctcattaacccaacaaacgccgacttatgtgataactgaaactcaacctggccttttaggagccgcagcatatttgaaccaactttag

SEQ ID NO: 85585 - protein, 318 aa, Colwellia psychrerythraea 34H
MVADIGGTNIRLAIASPSDVITDIATYQCAKFANLIDVIRLYIMEKQLEGKTINACLAIACPVDDDYISMTNLPWQFSQKDLKEQLKLNTLTLINDYTAIALAIPYLSDSQKVKIGAGEAVSNKAISVCGPGTGLGVATLVPLDNKWHCISGEGGHVDFAPVDELEVKVFSYIYAYKKRVSYEQLLSGYGLEQIYQALVKITNEGKSNNFVAGDLSAEIISTNAINGDCILCKQALEFFCKVLGSFAGNLALTANSLGGVYIAGGIVPRFIDFIEKSGFRERFETKGRLSSLTQQTPTYVITETQPGLLGAAAYLNQL

SEQ ID NO: 85586 - DNA, 966 bp, Pseudomonas syringae pv. phaseolicola 1448A
  CDS (1)..(966): transl_table=11
gtgaagttggccctggtcggtgatataggcggtaccaatgcacgttttgccatttgggaagacgacacgctgcattctgtccgggtattcccgaccattgactacgccggcccggaaaaggccatcgaagtctatctgcaggaccttgaattgcagcgcggtgatatcagccacgtatgcctggccgttgccggaccggtggatggcgattttttccagttcaccaatagtcactggcggttgagccgtgaggcattttgcgctgacctgaaagtcgatcacctgctgctgatcaacgacttcaccgccatggcgctgggcatcacccggctcaaggaagatgaatacctgacggtttgccctggcgctggcaagcctgatcggccgcgtgtggtggtcgggccgggtaccgggctgggcatcggtacgctgatcaagcttgacggcagtcgctggctggcgctgccgggcgagggcgggcatgctgacctgccaatcggcacggcacgcgaggccctgttatggacacgcctgatggctgagcatgagcatgtcagcgctgaagtggtactcagtggcgcgggcttgctgttgctctatcaggtcagttgcgccctggacgatatcgagccagtgctcaagtcgcctgcggctgtcacctcggcagcgctggcgggcgacccggtagccgcagccgtgctggagcagttctgtgtgtttctaggcagggtggtgggcaacaatgtgctgaccctgggcagcctgggcggcgtgtacattgtcggcggcgtggtgccgcgcttcactgaatttttcatcaacagcggtttcaagcgcgccatggccgagaagggcgtgatgagcgactatttcaagaacctgccggtctggctggtgaccgccgagtaccctggcctgatgggctcaggcgtcgctctgcaacaggccttcggttcgcagatctga

SEQ ID NO: 85587 - protein, 321 aa, Pseudomonas syringae pv. phaseolicola 1448A
MKLALVGDIGGTNARFAIWEDDTLHSVRVFPTIDYAGPEKAIEVYLQDLELQRGDISHVCLAVAGPVDGDFFQFTNSHWRLSREAFCADLKVDHLLLINDFTAMALGITRLKEDEYLTVCPGAGKPDRPRVVVGPGTGLGIGTLIKLDGSRWLALPGEGGHADLPIGTAREALLWTRLMAEHEHVSAEVVLSGAGLLLLYQVSCALDDIEPVLKSPAAVTSAALAGDPVAAAVLEQFCVFLGRVVGNNVLTLGSLGGVYIVGGVVPRFTEFFINSGFKRAMAEKGVMSDYFKNLPVWLVTAEYPGLMGSGVALQQAFGSQI

SEQ ID NO: 85588 - DNA, 930 bp, Dechloromonas aromatica RCB
  CDS (1)..(930): transl_table=11
atgctgctcggcggcgatctcggcggcaccaagacgctgctggcactggccgaagtgattgatggccgcatcgagattgtccgccagcaacgctacgccagcctggattacgccagcttcgacgacctgctggctgaatttatcgccgggcacccggccatcaataccgcctgcttcggcgtcgccggcccaaccgatgggcgccatgccaagctgacctacctgccctggcaactgaccgccagcgagctggagcaaaagttcgccatcggccgcgtctcactgatcaacgattttgccgctgctgcgaacggcctacccttggtcgacgaccaggacatcctgaccctgcacaccggccagcccgaagaacacgccccgcgtgtcattctcggcgccggcactggcctcggcgtggccgggctgatctgggaaagcgaccgttatcgcgtcatccccggcgaaggcggtcacttcggcttctcgccgcaaaccgcacagcaaggcgaactctgggcctggctactggctcaaaacggccgggttactgtcgaagacatcgtttccggccctggcctgtcacggatttttgctttcctttccggtcaaacgcgtgcaccggaggaaatcggacgagccgccctcgccggtatcgatccgtcagccaatgcggcgttacagctctggcttgaatgctatggcgccttcgccggcgacctcgccatgcactggctggcccgaggcggcgtctatctggccggcggcatcgccgccaaactattgcctcacatcgatgccagctccttcacggcagccttcctggccaaacgcgagcacagcgaactggtcaagagcatgcccatccggctgctgaccgtggaagacctcggcctgcgcggcacattggcgcgagccgcccaacaagactga

SEQ ID NO: 85589 - protein, 309 aa, Dechloromonas aromatica RCB
MLLGGDLGGTKTLLALAEVIDGRIEIVRQQRYASLDYASFDDLLAEFIAGHPAINTACFGVAGPTDGRHAKLTYLPWQLTASELEQKFAIGRVSLINDFAAAANGLPLVDDQDILTLHTGQPEEHAPRVILGAGTGLGVAGLIWESDRYRVIPGEGGHFGFSPQTAQQGELWAWLLAQNGRVTVEDIVSGPGLSRIFAFLSGQTRAPEEIGRAALAGIDPSANAALQLWLECYGAFAGDLAMHWLARGGVYLAGGIAAKLLPHIDASSFTAAFLAKREHSELVKSMPIRLLTVEDLGLRGTLARAAQQD

SEQ ID NO: 85590 - DNA, 1026 bp, Prochlorococcus marinus str. NATL2A
  CDS (1)..(1026): transl_table=11
atgaatttacttgctggagaccttgggggaactaaaacaatattagctatttattcaaacgagaaatatccaaaaaaattatttgagaagtactatatttcatcagaatggaaatctttttactcattatttgaagattttattaaacatttaccagatcatatatcactgcctcaaaatggttctattggtgtagccgggccaatacaaaatcaggaggttaagattacaaatcttggctgggatatcgaatcaaaaaagttatctctactttcaaaaataaataatattgaattaataaatgatttttcagttttaatctatggaataccatttttcaatagaaaccaatatgaagtaatacaagggacattaaattctgattacaaaaacaatcaaaaattaattgcaattatcggagctggtactggcttaggaatgtccagaggcttgataacccctaaaagcatctctatatttccaagtgaaggagggcatcgagaattttccccaagaacagaaaacgaatgggcattagtcaaatggctaaaaaagaagttaaatattcaaagaatatccattgaaagaattgttagtggtactggccttggcatgattgccagatggaaattggatgatccaataaatgaaagccatccacttcaggtaattttaaaaaatatggatagtgacaaatcagattccacagatttacccgcacttgtttgggaaaaagcaaaaaacggagacaaattaatgactgaagccttgcaactatggctaaatgcttatgggtctgcagctggagaccttgctttacaagaactttgctcttcaggcttatggatagcaggtggaacagcagcaaaaaacctcgatggaataaactcttctaacttccttagtgcatttagtaataagggtcgctttcaatcttatttaaaggaaattccattggttgttcttaaagataaagaagcgacattattcagctcagcttgcagagcacgcttaattgccgaataa

SEQ ID NO: 85591 - protein, 341 aa, Prochlorococcus marinus str. NATL2A
MNLLAGDLGGTKTILAIYSNEKYPKKLFEKYYISSEWKSFYSLFEDFIKHLPDHISLPQNGSIGVAGPIQNQEVKITNLGWDIESKKLSLLSKINNIELINDFSVLIYGIPFFNRNQYEVIQGTLNSDYKNNQKLIAIIGAGTGLGMSRGLITPKSISIFPSEGGHREFSPRTENEWALVKWLKKKLNIQRISIERIVSGTGLGMIARWKLDDPINESHPLQVILKNMDSDKSDSTDLPALVWEKAKNGDKLMTEALQLWLNAYGSAAGDLALQELCSSGLWIAGGTAAKNLDGINSSNFLSAFSNKGRFQSYLKEIPLVVLKDKEATLFSSACRARLIAE

SEQ ID NO: 85592 - DNA, 999 bp, Thiobacillus denitrificans ATCC 25259
  CDS (1)..(999): transl_table=11
atggagtggatcgcaggcgacatcggaggaacgaagagctggctcgtgtggatcgggccgcctggcgacggcctgcacccgcgcttcgagcgcgtctacccgagcgccgacttcgtctcggccgaagccctgctgcggcagtttctcgccgactcggggatacagggacggcccgacggcctgatcctggccgtcgccggcccgtcgcaggccgagcacgtcaagctcaccaacctcgactggtggatcgacgcggccgagctccagctcgcgctcggcattccccaggtccacatcgtcaacgatttcgaggctgccgccgcgggactcgcgaccctggtgccggccgactacgtcgagatcaacccggggcagcccgacccgctcggcgtgcgcgcgatcacgggcgccgggaccgggctcggcctggccttcctcgtccatgacccggcagggcgggaaacgagctacccgaccgaaggcggccacgtcgactttgcgcccgccaacgccatgcaggatcggctgctgaagcgactgcgcaagcaatacggtcacgtctcctgggagcgcgtcgtctccgggtcggcgatgtccgagctctatgcattctgctgcgtcgaacttggcaccacgccgtgctcggcgtcgtgcgacggcgcctgcctcgtcgctgcggcggcggcggacgacatcgcggccgaggctgcgctcgatctctttgtcgacctctacggcgcctgggtcggcaacgtcgccttgctctaccgtccgcgcggcgggctctacatcgccggcggcgtcagcgcgcacctgcagaagcgcatcgcggcgccgcgcttcatggccgcggcgctcgacaaggggcgcatgcgtcgcgtcgtcgaaagcacaccgatatttctgatcacgagcccgcggctcggcgtgcagggcgcgctggccctgcgcgaagccgcggcgcacagccggcgcgaccgccggacccatgaacgataa

SEQ ID NO: 85593 - protein, 332 aa, Thiobacillus denitrificans ATCC 25259
MEWIAGDIGGTKSWLVWIGPPGDGLHPRFERVYPSADFVSAEALLRQFLADSGIQGRPDGLILAVAGPSQAEHVKLTNLDWWIDAAELQLALGIPQVHIVNDFEAAAAGLATLVPADYVEINPGQPDPLGVRAITGAGTGLGLAFLVHDPAGRETSYPTEGGHVDFAPANAMQDRLLKRLRKQYGHVSWERVVSGSAMSELYAFCCVELGTTPCSASCDGACLVAAAAADDIAAEAALDLFVDLYGAWVGNVALLYRPRGGLYIAGGVSAHLQKRIAAPRFMAAALDKGRMRRVVESTPIFLITSPRLGVQGALALREAAAHSRRDRRTHER

SEQ ID NO: 85594 - DNA, 957 bp, Pseudomonas fluorescens PfO-1
  CDS (1)..(957): transl_table=11
ttgaaactggctttggtcggtgacatcggaggcaccaacgcgcggttcgcgttgtggaaagatcagcagctcgaatcggttcaggtgctggccacggccgaccatgccagcccggaagaggcgatcagcctctatctgagcaagctcggtctggcgccgggcgccatcggttcggtgtgcctgtcggtggcggggccggtgagcggcgatgaattcaagttcaccaacaaccactggcgcctgagccgcaaggcgttctgccagaccttgcaggtcgagcagctgttgctggtcaacgacttctcggcgatggcgctgggcatgacccgtttgcagcccggcgaattccgcgtggtctgcgaaggcacgccggagccattgcgcccggcggtggtgatcggcccgggcactggcctgggcgtcggcaccttgcttgatctcggcgaagggcggtttgccgcgttgccgggcgagggcggtcacgtcgatctgccgctgagcagtccgcgtgaaacccagctctggcagcacatccacaacgagatcggccacgtcagcgcggaaaccgcgttgagcggcggcggcttgccgcgggtctaccgggcgatctgtgcggtggatggtcatgaaccgaaactcgatacaccggaagccatcactgcggcgggacttgcaggcgacccgattgccctggaagtgctggagcagttctgctgctggctcggtcgcgtggccggcaacaacgtgctgaccacgggcggccgtggcggggtgtacatcgtgggcggcgtgattccacgttttgccgatttcttcctcgaaagcggtttcgcccgcagctttgccgacaagggctgcatgagcgattacttcaaggggattccggtgtggctggtgacggcgccgtactcggggctcgtcggtgcaggagtggcgctcgaacaatccggtcaatga

SEQ ID NO: 85595 - protein, 318 aa, Pseudomonas fluorescens PfO-1
MKLALVGDIGGTNARFALWKDQQLESVQVLATADHASPEEAISLYLSKLGLAPGAIGSVCLSVAGPVSGDEFKFTNNHWRLSRKAFCQTLQVEQLLLVNDFSAMALGMTRLQPGEFRVVCEGTPEPLRPAVVIGPGTGLGVGTLLDLGEGRFAALPGEGGHVDLPLSSPRETQLWQHIHNEIGHVSAETALSGGGLPRVYRAICAVDGHEPKLDTPEAITAAGLAGDPIALEVLEQFCCWLGRVAGNNVLTTGGRGGVYIVGGVIPRFADFFLESGFARSFADKGCMSDYFKGIPVWLVTAPYSGLVGAGVALEQSGQ

SEQ ID NO: 85596 - DNA, 954 bp, Rhodobacter sphaeroides 2.4.1
  CDS (1)..(954): transl_table=11
atggccgacgcgcccctttgcctcgtcgccgacatcggtggcacgaacacccgcgtggcgctggcggagggatcccggctgcggcccgaaacgacgcgccgcttccggaatgccgattatcctgctctggcgccggtcctgcgcgacttcctctccgtcgccggcagccccgagatcgacggcacctgcgtggccgccgcgggcccggtccgggacggggtggcccttctcacgaacctcgcctggaccgtcgacggcgccgaactgcagcgcgcgaccggcgcgccgcgcgtggcggtgctgaacgatcttcaggcgcagggccatgcgctgggccatctggatccggccaatctgcgcgtcctgatcccggggcctactccccgccgcgggggcccgatgctcgtcgtgggcgtcggcaccggcttcaacgcggcgcccgtccacgatgtcgcgggcctgcgcctggtggcggcctccgagtgcggccatgccgggatgcccgtccgcaccgcgcgcgacctccggctcgcggaattcgtccagacggcccacggtttcgccggcgtcgaggatgtgctgtcgggccgcggtctcgagcggctctatgccttcaccgccgctgaggccggcctcgaggaccgcaagtcggcggccgagatcatggcggccatcgccgaacccggcccggcgcgcgccgcggccgagctcttcgcccggctcctcggcgccgaggcgggcaatctcgccctgatccacctgcccttcggcggcctctatctctgcggcggcgtggcccgggccttcgccgcccatctgggcccgatgggctttgccgagaacttccgcgacaagggccgcttctcggccttcatggacgatttcccggtctgcatcgtcgaggacgattacgcggccctcaccggctgcgcagcctacctcgccaccctctga

SEQ ID NO: 85597 - protein, 317 aa, Rhodobacter sphaeroides 2.4.1
MADAPLCLVADIGGTNTRVALAEGSRLRPETTRRFRNADYPALAPVLRDFLSVAGSPEIDGTCVAAAGPVRDGVALLTNLAWTVDGAELQRATGAPRVAVLNDLQAQGHALGHLDPANLRVLIPGPTPRRGGPMLVVGVGTGFNAAPVHDVAGLRLVAASECGHAGMPVRTARDLRLAEFVQTAHGFAGVEDVLSGRGLERLYAFTAAEAGLEDRKSAAEIMAAIAEPGPARAAAELFARLLGAEAGNLALIHLPFGGLYLCGGVARAFAAHLGPMGFAENFRDKGRFSAFMDDFPVCIVEDDYAALTGCAAYLATL

SEQ ID NO: 85598 - DNA, 1035 bp, Synechococcus sp. CC9605
  CDS (1)..(1035): transl_table=11
atggccaccaccacactcctggctggggacatgggaggcaccaagactctgctcgctctctacgggagtgaggccggtcagctgcgcctgctgcatcaagaacgcttccgctcaggggaatggtcatcccttgagccgatgctcgaggccttcctcaacaaccgtcccgctgatctccccgccccaacgcaagcctgcatcgccgttgccggtccggtgcgtcagagcgaggcccggatcaccaaccttccctggcgactgcgggaggccgacctggcgaaggctgcgggcacggaacggctcgaactggtgaatgatttcggcgtgctgatttacgggctgccccacttcgacggcaatcagcaggtgatccttcagaagggccacaaggacaagggccccgtggcaattcttggtgccggcactggtctcggcatggcacggggactgcagagtgaacggggcctggtggccctggcgagcgaaggagggcaccgcgaatttgccccgcgcaatgaatcggaatgggagctggcctgctggctcaaacaagacctcggcatcagccggctgtcgatcgaacgcatcgttagtggcaccgggctggggcatgtggcccactggctgcttcagaaacccgacgccgccgtgcaccccctgcgcagcgtggcggaggcttggcggcgcaacagctccaacgatcttcccgctgaggtgagcgtcgctgctgaagggggtgatcccttgatgcaacgcgctctacagctctggctggaggcctatggggcagcggcaggcgatcttgccctccaggaactctgcacaggaggtctctgggttggtgggggcaccgcatcaaaacaactgaagggcctgcaatccgccagctttctcaatgcgatgcgcgataagggtcgcttccgcgagctgatcgaagggatgcaggtcacggcggtgatcgatcccgatgccggactgttcagtgcagcctgtcgcgcccggatgctggcggagtcaggtgggacactggcctga

SEQ ID NO: 85599 - protein, 344 aa, Synechococcus sp. CC9605
MATTTLLAGDMGGTKTLLALYGSEAGQLRLLHQERFRSGEWSSLEPMLEAFLNNRPADLPAPTQACIAVAGPVRQSEARITNLPWRLREADLAKAAGTERLELVNDFGVLIYGLPHFDGNQQVILQKGHKDKGPVAILGAGTGLGMARGLQSERGLVALASEGGHREFAPRNESEWELACWLKQDLGISRLSIERIVSGTGLGHVAHWLLQKPDAAVHPLRSVAEAWRRNSSNDLPAEVSVAAEGGDPLMQRALQLWLEAYGAAAGDLALQELCTGGLWVGGGTASKQLKGLQSASFLNAMRDKGRFRELIEGMQVTAVIDPDAGLFSAACRARMLAESGGTLA

SEQ ID NO: 85600 - DNA, 990 bp, Desulfovibrio desulfuricans G20
  CDS (1)..(990): transl_table=11
atggaacgcattctcgcagtggacatagggggaaccaacagccggtttgcggcctttgtgctgcaggctgacggtacgctgaaatttgaagacagcttatggctttccactcagggcgcgcagtcttttccggcgttgctggcagagctggaaaaccgcgggttttcgctgctgccgcgtgatgcggacgtcatggtgctggctgtggcaggtgctgtcgaaaaaaaagggcgctattgcaaaatatccaatgcatcgtgggcggttgatctggatgaagtggcacagacgttcggtatcgcccgcggtcgtctgatcaatgattttgaagcgcaggcttacgcctgcctgtccgaagccgtgcatgacgctgttacggtgcagcacggtgttgcagaggacggcgcccccatagccgtggtgggggggggaaccggactgggcaagtgtctgctggtgtgtgacggggtggggcgttatatcaccgtgccgtcagagggcgggcattcagtctttccttttgtaggcagagaagaactggaatttgcggaatttatactgcgtgagacaggaagaccgcaggttatcggcgatctggtggtcacaggaacaggcctgcggctgctccaccagtttcataccggcgaacggctgtcatcgcgtgaagtaagccgcaagctggaaggcgactccgttgttcttgagtggtttgcccgtttttacggcagagcctgtcacgattatgtgctggaaaccatggcactgggggggctgtatatcgccggcgggcttgcttcgggtaatccgggacttgtcacccaccacgcgtttgtacaggagtttgtgcagagcgatgtgcacgggcatcttttgcgcaaagtgcctgtgcgtctgaaccgcaatgaagaatcgggcctgtggggcgcggccgtgtgcggcgtgcagatgctgagaaccggccgccttgtacgctccgccggcggagcctga

SEQ ID NO: 85601 - protein, 329 aa, Desulfovibrio desulfuricans G20
MERILAVDIGGTNSRFAAFVLQADGTLKFEDSLWLSTQGAQSFPALLAELENRGFSLLPRDADVMVLAVAGAVEKKGRYCKISNASWAVDLDEVAQTFGIARGRLINDFEAQAYACLSEAVHDAVTVQHGVAEDGAPIAVVGGGTGLGKCLLVCDGVGRYITVPSEGGHSVFPFVGREELEFAEFILRETGRPQVIGDLVVTGTGLRLLHQFHTGERLSSREVSRKLEGDSVVLEWFARFYGRACHDYVLETMALGGLYIAGGLASGNPGLVTHHAFVQEFVQSDVHGHLLRKVPVRLNRNEESGLWGAAVCGVQMLRTGRLVRSAGGA

SEQ ID NO: 85602 - DNA, 1038 bp, Prochlorococcus marinus str. MIT 9312
  CDS (1)..(1038): transl_table=11
atgaattttctggcttgtgatttaggaggtaccaaggttcttttgggaatatttaaaaaagatataaatgatgattcacctaagttaatattcaaaaagaaatatatatcttctgattggaactcttttgaattaatcctagaagattttctcaaaaatgaatgcaaaaatattgctcatccttattctgcatgcttcgcagtagctggtcctttatctaataacaacgcaaaaattattaacttgtcgtggaatatatctggaaatgcattacagaagaaatttaattttaaaagctgcgagctaataaatgatttcgcagtgcaaatttacggaataccttatttaaaagaaaatcaatattcaacaatccagaatggggacttttttgcaggtactaataatgatttgcatgccatagttggagctgggacaggtttaggcattgcaagaggaataatatcagaaaataatgtgaaagttttagctagcgaaggtggtcatgttgaatactcgccaaagtcaaaattagaatgggaattaaagatttggcttaagaattatctaaaagttgagaggatatcttgtgaaagaattgttagtggtattggtttatcgagaattgccgaatggagactgagcaaacctgatgctaaaaaccatcctttacaaaaatattttaaagaaattaaaatttctgacgctttgagaaaagaaatcccagaaaaaatttgtacgttttcgaataagggggatcagttaatgattgaagtagagaggatatggttaggtgcttatgcctctttattaggagatgtcgctcttcaagaattatgctttggagggttatggatttcaggaggaacggcaccaaaacatttcaaaaactttaaatcaaatatatttatgaaacaattttttgataaaggaagattaaaagatattcttaaaacaatacctctgaaagtgattttagatgaagagtttgggctttttagtgcagcctgcagagcaaaaatgcttttaaaaactgagtaa

SEQ ID NO: 85603 - protein, 345 aa, Prochlorococcus marinus str. MIT 9312
MNFLACDLGGTKVLLGIFKKDINDDSPKLIFKKKYISSDWNSFELILEDFLKNECKNIAHPYSACFAVAGPLSNNNAKIINLSWNISGNALQKKFNFKSCELINDFAVQIYGIPYLKENQYSTIQNGDFFAGTNNDLHAIVGAGTGLGIARGIISENNVKVLASEGGHVEYSPKSKLEWELKIWLKNYLKVERISCERIVSGIGLSRIAEWRLSKPDAKNHPLQKYFKEIKISDALRKEIPEKICTFSNKGDQLMIEVERIWLGAYASLLGDVALQELCFGGLWISGGTAPKHFKNFKSNIFMKQFFDKGRLKDILKTIPLKVILDEEFGLFSAACRAKMLLKTE

SEQ ID NO: 85604 - DNA, 1038 bp, Synechococcus elongatus PCC 7942
  CDS (1)..(1038): transl_table=11
atgaccttgctattggccggggatatcggcggaaccaaaacgaatttaatgttggcgatcgcctctgattgcgatcgtttagaaccgctccatcaggccagttttgccagtgcggcctaccctgatttagtgccgatggtgcaggagtttttggctgccgcaccctccgccgaggtgcgatcgccagttgtggcttgttttggcattgccggccccgttgtccatggaaccgcgaagctgacgaacctgccttggcagctctctgaagcgcggctggcgaaggaattgggcattgcgcaggtggcgttgatcaatgattttgctgcgatcgcctacggcctacccggcttgaccgccgaagatcaagtcgttgtgcaagtcggtgaagccgatccggcggctccgatcgccattctgggggcaggaactggcttgggcgaaggcttcatcattcccacagcccaaggccgccaagtgtttggcagcgaaggttctcacgctgactttgcgccgcaaaccgaactggagtccgagttactgcattttctacgcaatttttacgcaatcgagcatatctcggtcgagcgagtggtctccggccaagggattgcagccatctacgccttcctgcgcgatcgccatcccgaccaagaaaatccagcccttggggcgattgcctcggcttggcaaacgggcggcgaccaagcccctgatctggcagcagccgtatcccaagcagccttgagcgatcgcgatccgctggccctacaagccatgcagatatttgtcagtgcttacggggcggaagccggcaacctcgcgttgaaattgctctcctacggcggggtctacgtcgccggcgggattgcgggcaaaatcctgccgctcttgactgatggcacttttctgcaagccttccaagccaagggacgggtgaaggggctgctgacgcggatgcctatcacgatcgtcacgaaccacgaagtcgggctgatcggggctggactgcgggcggctgcgatcgctactcaaccatga

SEQ ID NO: 85605 - protein, 345 aa, Synechococcus elongatus PCC 7942
MTLLLAGDIGGTKTNLMLAIASDCDRLEPLHQASFASAAYPDLVPMVQEFLAAAPSAEVRSPVVACFGIAGPVVHGTAKLTNLPWQLSEARLAKELGIAQVALINDFAAIAYGLPGLTAEDQVVVQVGEADPAAPIAILGAGTGLGEGFIIPTAQGRQVFGSEGSHADFAPQTELESELLHFLRNFYAIEHISVERVVSGQGIAAIYAFLRDRHPDQENPALGAIASAWQTGGDQAPDLAAAVSQAALSDRDPLALQAMQIFVSAYGAEAGNLALKLLSYGGVYVAGGIAGKILPLLTDGTFLQAFQAKGRVKGLLTRMPITIVTNHEVGLIGAGLRAAAIATQP

SEQ ID NO: 85606 - DNA, 975 bp, Rhodospirillum rubrum ATCC 11170
  CDS (1)..(975): transl_table=11
atggctgagccgttcattcccggattgatcgccgatatcggcggcaccaacgcccgcttcgccctgaccacccccgagggcggctggcgcgacgaacgggtttaccgctgcgccgcctttcccggcccggccgaggcggcggcccattatctggccgaggtgctgaccgcctttgaaccgcgccccgatcgcggggcgatctgcgtcgcctgtccggtcaacggcgatcatctggctttgaccaaccatggggcgtggtcgttctcgatcagcgcggtcgccgaccgcttgggtttggcgcctttccatgcggtcaatgacttcatcgccaacgccctggccatcccccgccttggcccctccgggctgatcgagatcggcggcggcgccggacttaccggggcgccgatcgccgcaatcggcccgggcaccggtctgggggtggcgatcctcatccccggtcgcggcggcaaccgcaccagccccctggccaccgagggcggccatgtcaccctgcccgccgtgaccgaccgcgaggcggtgatcatcagcgccctgcgcgccattcacggccacgcctcggccgagcgggcgatttccggccccggtctggtttggctgagcgaggcgatccgcgccgccgatggcttggagccggttgccgaaaccccgccctcggtgatggaaaagggcttggcgcgcagctgcccggtttgcgccgaagccgtcgacaccttttacgcgctgctgggcacggtggcgggcaatctggtgctgagcaccggcgcccagggcggcgtttacctgatgggaggtatcctgccccgacacccagaggccttgcgaacctcggccttcctggcgcgcttccacgaaaagggccgcttccgcgattaccttgatgtcgtccccattcgcttggtcacccacccctatccggccttcatcggtctggccgggctggtcagcgattag

SEQ ID NO: 85607 - protein, 324 aa, Rhodospirillum rubrum ATCC 11170
MAEPFIPGLIADIGGTNARFALTTPEGGWRDERVYRCAAFPGPAEAAAHYLAEVLTAFEPRPDRGAICVACPVNGDHLALTNHGAWSFSISAVADRLGLAPFHAVNDFIANALAIPRLGPSGLIEIGGGAGLTGAPIAAIGPGTGLGVAILIPGRGGNRTSPLATEGGHVTLPAVTDREAVIISALRAIHGHASAERAISGPGLVWLSEAIRAADGLEPVAETPPSVMEKGLARSCPVCAEAVDTFYALLGTVAGNLVLSTGAQGGVYLMGGILPRHPEALRTSAFLARFHEKGRFRDYLDVVPIRLVTHPYPAFIGLAGLVSD

SEQ ID NO: 85608 - DNA, 1014 bp, Syntrophus aciditrophicus SB
  CDS (1)..(1014): transl_table=11
atgcttgaggggggagatcacatgctggtcctggcaggagatatcgggggcacatccacgcggcttgcttatttcagcacagagggcgaaaatttgaccttgctggtggacgaacgctatccgagccgaaaggcaggaagtttgaaggagattgtcagccattttacaggaaaacacagactgacggcggagacggcctgtttcggaatcgccggtcctgccaggagcggcacggtcaggacacccaacctcccctggagcgtgaatgcagaggagctggcccaggccctgggaattcccaaagttcaactgatcaacgacatggaggcacatctctatggcatcgatcttttaggtccggaaaatttcgaggtccttaacagaggagtccccaatccaaacggcgccatcgccctggtctcggcagggacgggactgggagaggccatcgcttatcgggatggcacagcccgtcgaccctgccccggcgaaggaggacacgccgacttcgctccccgtaacgaaatcgaaacggaactgctcctctacctccgcgataagtacggccgggtcagtaacgaacgggttttatccggccccggactgcacaacatctatcttttcctgagagacgtgcggcatctgcccgaatcccccgaggttgcagaggagctgctggtgaatgatcccccggcggtcatcaccaaggcggctctggccggcaggtgccccctctgtggacaggttctcgatctctttgtctctctttacggagccgaggcgggcaatgccgcgctgcgatacctcgccacaggaggaatctatctgggaggaggaatcgccccgaagatcatcgaacggctgaaggggcccggcttcatgcttgcctttacctccaagggacgaatgagccctcttctggaaacgatcccggtgatggtcatcctcaacgaacagagcgccctgctgggcgcgggccggtgtgccgcgcgaagaaaagaaaaagaatcatag

SEQ ID NO: 85609 - protein, 337 aa, Syntrophus aciditrophicus SB
MLEGGDHMLVLAGDIGGTSTRLAYFSTEGENLTLLVDERYPSRKAGSLKEIVSHFTGKHRLTAETACFGIAGPARSGTVRTPNLPWSVNAEELAQALGIPKVQLINDMEAHLYGIDLLGPENFEVLNRGVPNPNGAIALVSAGTGLGEAIAYRDGTARRPCPGEGGHADFAPRNEIETELLLYLRDKYGRVSNERVLSGPGLHNIYLFLRDVRHLPESPEVAEELLVNDPPAVITKAALAGRCPLCGQVLDLFVSLYGAEAGNAALRYLATGGIYLGGGIAPKIIERLKGPGFMLAFTSKGRMSPLLETIPVMVILNEQSALLGAGRCAARRKEKES

SEQ ID NO: 85610 - DNA, 969 bp, Novosphingobium aromaticivorans DSM 12444
  CDS (1)..(969): transl_table=11
atgcaggtagttgccgtcgatattggcggaacccacgcccgcttcgcgattgccgaagtcgcggaaggccgcgtggtctcgcttggcgaggccgttacgctcaagacggcggagcatggctcgttccagcttgcctgggaggatttcgagcgcgttcgtggagagccattgcccaaggccgcggctattgccgtcgccgggcctgtcggcggcgagatcatcaagttcacgaacaatccgtggatcatccgcccggcgttgatcccggagaagctgggggcggagcaatatgtcgtcgtcaacgacttcgccgccgtggcccatgctgtcgcgcaggcggaccagagccactttctacacctgagcggcccggacgaaccgctgcccgccagcggcgtgaccagcgtggtcggaccagggacagggctcggcgtggcgcagttgtggcgtgacgggaacaactaccgggtccagcccaccgaaggcgggcacatcgacttcgcgccgctagattcgatcgaggacgcgatccttgccggtctgcgcaagcgccaccgccgcgtttcggcggaacgcgtcgtggccgggccgggcatcgtcgatatctacgaggcgcttgctctgatcgaaggacgaccgtttacaccccggtctgaccgcgagttgtgggaactcgggacttccggagcggacagccttgccgccgctgcagtagacaggttctgcctctcgctcggcagcgtggcaggcgatcttgccctggctcacggcgccaacggcgtcgtcatggccggcgggcttggcctgcggatcaaggacacgctggttcggtctggcttctcggacaggttcagggcaaaagggcggttcgaggccctcatggcggccattccggtcaagctgatcacgcatccgcagcccggcctgttcggtgcggcagcggcctttgcgcaagcgcatacgtcgtga

SEQ ID NO: 85611 - protein, 322 aa, Novosphingobium aromaticivorans DSM 12444
MQVVAVDIGGTHARFAIAEVAEGRVVSLGEAVTLKTAEHGSFQLAWEDFERVRGEPLPKAAAIAVAGPVGGEIIKFTNNPWIIRPALIPEKLGAEQYVVVNDFAAVAHAVAQADQSHFLHLSGPDEPLPASGVTSVVGPGTGLGVAQLWRDGNNYRVQPTEGGHIDFAPLDSIEDAILAGLRKRHRRVSAERVVAGPGIVDIYEALALIEGRPFTPRSDRELWELGTSGADSLAAAAVDRFCLSLGSVAGDLALAHGANGVVMAGGLGLRIKDTLVRSGFSDRFRAKGRFEALMAAIPVKLITHPQPGLFGAAAAFAQAHTS

SEQ ID NO: 85612 - DNA, 1017 bp, Francisella tularensis subsp. holarctica
  CDS (1)..(1017): transl_table=11
atgtatatattatcaggagatattggtggcactaacactagattagaggtttctcttttagagaatggtgcgacacaaagtatagctataagaaagtataaaggtgcgaatttcaattgtttatctgatatcattgataagtttttatctgaggtggacttagtaggtcaaatagattctgtttgtcttgcagtagctggatttgtctctaatggtgaagttgaagtgactaatctgccatggatggtttctgagcaatatatctcagaaggacttggtatagacaaaactaaggttaaagtgattaatgactttgaagcaattggttatggtatagaatctctagatagagaaaaagatataatcacaatccaagaaggtaaaaaagatgatgataacttatgtgctgtagttggtgctggtacaggtttgggaatgtgtttagttagctatgataaagacgataagccaagagtttataaaacagaaggaggtcatgtggatttctcacctgttgatgacgaacaagttgagttatttaagtttatgcgtaagactttccatcgtatctctcctgagagattctgtagcggctacggcatttacaatatttataagtatgtggtgcgtcatcctttatatgatcaacctgaatgtatggagttacgtagagcgttatttagtgtttcagactctgataaggcagcagtaattgttaagtatgctattgagcatagagaaccatcagcattaaggacgatagatatattcttaagtatatatggctcagttgctggtaatttagcacttacaagtttaccttttagaggtctttatattgctggaggtattgcacctaggctcatcaagcaaataaaggagagtaaattcttagagaagtttagagataaaggtagaatgtcaaacgtgatgaaagattttccagtgcatataattatgaacacagatgtcggtttaataggcgcgcgtacgtatgctgctgggctagtaaagtaa

SEQ ID NO: 85613 - protein, 338 aa, Francisella tularensis subsp. holarctica
MYILSGDIGGTNTRLEVSLLENGATQSIAIRKYKGANFNCLSDIIDKFLSEVDLVGQIDSVCLAVAGFVSNGEVEVTNLPWMVSEQYISEGLGIDKTKVKVINDFEAIGYGIESLDREKDIITIQEGKKDDDNLCAVVGAGTGLGMCLVSYDKDDKPRVYKTEGGHVDFSPVDDEQVELFKFMRKTFHRISPERFCSGYGIYNIYKYVVRHPLYDQPECMELRRALFSVSDSDKAAVIVKYAIEHREPSALRTIDIFLSIYGSVAGNLALTSLPFRGLYIAGGIAPRLIKQIKESKFLEKFRDKGRMSNVMKDFPVHIIMNTDVGLIGARTYAAGLVK

SEQ ID NO: 85614 - DNA, 1089 bp, Desulfitobacterium hafniense Y51
  CDS (1)..(1089): transl_table=11
gtgatggatttgccttatgcgggcattaaaaaaggccaactatacttggctggagacattggcggaaccaaaactctcctaggactttattccctggaaggtactgagcttgtcttagtcagggaaaggaatttccccagtaaagactggcaagacttaacagcccttatacaaggatttttagatgaaatatccctaacgcctgaaggaataaccggaggctgcctcagcctggccgggcccatcactcaagataagtgtttcctcaccaacttgaatcgggttattcattgtcctgacttgcgctcctccctgccattgcgaaggcctctgcttttggttaacgaccttgaggctatggggcagggcctcatggatttaaggggggaagatttaatttgtctcaacccttccgcagagagtccttccccttcccttgcctcgcctcctgccctttccctcgccaggccctcacttaaccgggcactgatcgcccccggtacaggcttgggtcaggccatgatcctggctgacggacgggtttgcgccacggaaggcgcccatggggactatgccccccgcaccgagcaggaaatacggttgtggcgctttctggctcaacgatacggtcatgtcagctatgagagagtcctctccggtcccgggctggcagatctctatcgttttctgtactgggaggctctttccccctctctccctagcccggcctctgactctatccctacccctgattctagccttactcctgccgagatcacaaaaaaagccctcgacggaatctgtccactctgtacagaaacattggagctctttgtgaaaattctgggcgcggaagcaggcaatctcgctttaaggactttggcctatggaggaatctatctgggcgggggcatcccccctaaaatcctgcccaagcttcaggaagatggcttcatggaggcctttctcgctaaaggccgtttgagagagcttttatcccagatccctatctatgtgatccttaatgaaaggactcccttgctgggggccgcccgtttggcggcggcagccgggtgtcctcctgcatga

SEQ ID NO: 85615 - protein, 362 aa, Desulfitobacterium hafniense Y51
MMDLPYAGIKKGQLYLAGDIGGTKTLLGLYSLEGTELVLVRERNFPSKDWQDLTALIQGFLDEISLTPEGITGGCLSLAGPITQDKCFLTNLNRVIHCPDLRSSLPLRRPLLLVNDLEAMGQGLMDLRGEDLICLNPSAESPSPSLASPPALSLARPSLNRALIAPGTGLGQAMILADGRVCATEGAHGDYAPRTEQEIRLWRFLAQRYGHVSYERVLSGPGLADLYRFLYWEALSPSLPSPASDSIPTPDSSLTPAEITKKALDGICPLCTETLELFVKILGAEAGNLALRTLAYGGIYLGGGIPPKILPKLQEDGFMEAFLAKGRLRELLSQIPIYVILNERTPLLGAARLAAAAGCPPA

SEQ ID NO: 85616 - DNA, 1056 bp, Trichodesmium erythraeum IMS101
  CDS (1)..(1056): transl_table=11
atgacattgttagttgcaggtgacattggtggtacgaaaactatactacaattggtagaggtaaaccgagaagaatcaaaagcttccgtggaactacgtaaactttatgaaaatcgttacttgagtaacgattttcccgatttagtacctatagtaaaaaagttccttgaagaagctagtgaaaaattaggagaaaaacaaaaacctgaaaaagcttgttttgccattgccggtccagttgtcaacaacatagttaaattgactaatttgccttggataatagatgccaaacttatggaaaatgagttaggtatatctcaaattagtttgattaatgattttgaagcagtaggatatggaattttaggtttaaatactaaggatcttgaaactttacaaccaggtgaacctaaaagtgatactccaatagctgtaattggtgctggtacaggattaggacaatgttttttgattcgagcagcaggggttattaaagtatatcctacagaaggaggtcatacagattttaaggcacgctcacagttagaatttgacctattaaaatatttgaagaaattacataatataaagcgagtctctgtagaaagagtagtttcgggaatgggaattgtcgcaatttatcaatttttacgcgatagcctatttgctacagaatctccagaaataggagatcaaattagacagtgggaaaaagaagtaggttcaaatcaaattactgtagacccaggagcagtgatcggtaaagctgctttagaaaaaagtgaccccttgtgcgagcaaaccttgaagatgtttatagaagcttatggggcagaagcgggaaatttggcactgaaacttttaccctatagtggtttatacatagcagggggtattgctgctaaaattatcccacttataaattcaggtagttttatggaagcttttaaggataaagggcgaatgaaacccttattagaaaaaatacctgttcatgttattttaaatcctcacgtgggattaattggtgcagcaattcgtgcttctaatttatag

SEQ ID NO: 85617 - protein, 351 aa, Trichodesmium erythraeum IMS101
MTLLVAGDIGGTKTILQLVEVNREESKASVELRKLYENRYLSNDFPDLVPIVKKFLEEASEKLGEKQKPEKACFAIAGPVVNNIVKLTNLPWIIDAKLMENELGISQISLINDFEAVGYGILGLNTKDLETLQPGEPKSDTPIAVIGAGTGLGQCFLIRAAGVIKVYPTEGGHTDFKARSQLEFDLLKYLKKLHNIKRVSVERVVSGMGIVAIYQFLRDSLFATESPEIGDQIRQWEKEVGSNQITVDPGAVIGKAALEKSDPLCEQTLKMFIEAYGAEAGNLALKLLPYSGLYIAGGIAAKIIPLINSGSFMEAFKDKGRMKPLLEKIPVHVILNPHVGLIGAAIRASNL

SEQ ID NO: 85618 - DNA, 1074 bp, Synechococcus sp. CC9311
  CDS (1)..(1074): transl_table=11
atgcagccaacgacttacctggccggggatctcggtggcaccaaaacgctcctagccatctacagcgatcaaaatggcgagctgaaacaagagcatgtccagcgttacgtgtcggcggaatggacgtctctggactccatgctcaatcacttcctgcaagcacgcccagacaccaactccactcctcaaaccagctgcttcgccgtcgctggcccggttaagaaccgtgctgctgaacttactaatttgggatggacgattagccaagagtcgctgaaacaatcggctggtttagagcaggtggaactcgttaacgattttgctgttctgatctacggccttccccatttcagcgatagccagcagatcacgcttcaagctggatctacaaagaattctgaaaacacccaatccgagccaggccccgtcgccattcttggagcgggaacgggcttgggaatggctcgggggcttccgagcaataagggatggattgccttacccagcgaggggggacatcgagagttcgcgccccgatccgacgacgaatggggccttgttcaatggctcaagcgcgatttgtctctagagaggatttctgtggagagggttgtgagcggaaccggattgggccatgtcatgcactggatgctgcagcagtcgaaagatgcaaagcacccgcttcaagagaaggccaaagcatggagatggaacaaaccagatcaccctgattatcacgatctccctgcttcaacatgccaatacgccaaagcaggcgaccagctcgcgaacgctgcaatgacgctttggcttagtgcttacggcgcagccgcaggagatcttgccctacaggaactgtgcacgggtgggctctggattggtgggggcacggccgaaaaaaaccaggatggattgaagtcgattcattttttaaacgccatgcgtcaaaaggggcgctttcagccgtttttggaaggtttgacggtgcgcgctgtgatcgatccggaagctggtctgtttagtgctgcttgcagagcacgagaactggctgagtcgagtgggacactggcctga

SEQ ID NO: 85619 - protein, 357 aa, Synechococcus sp. CC9311
MQPTTYLAGDLGGTKTLLAIYSDQNGELKQEHVQRYVSAEWTSLDSMLNHFLQARPDTNSTPQTSCFAVAGPVKNRAAELTNLGWTISQESLKQSAGLEQVELVNDFAVLIYGLPHFSDSQQITLQAGSTKNSENTQSEPGPVAILGAGTGLGMARGLPSNKGWIALPSEGGHREFAPRSDDEWGLVQWLKRDLSLERISVERVVSGTGLGHVMHWMLQQSKDAKHPLQEKAKAWRWNKPDHPDYHDLPASTCQYAKAGDQLANAAMTLWLSAYGAAAGDLALQELCTGGLWIGGGTAEKNQDGLKSIHFLNAMRQKGRFQPFLEGLTVRAVIDPEAGLFSAACRARELAESSGTLA

SEQ ID NO: 85620 - DNA, 942 bp, Alkalilimnicola ehrlichei MLHE-1
  CDS (1)..(942): transl_table=11
atgagctcttacctcctggccgacatcggcggcacccatacccgtatcgccctcgcgacgccgggcggggaaccgcagcaaaggcaccgctaccgtaacagcgagcttggcgatcccctttccggtctgcagcattttctcgctcaggtcgcaccagcccgccccacgaccctggcgatcgccgtggccggcccggtccagggcgggcgtgttcagttgacgaaccgaagctggatgctgcacgacggcagcctggcccgcgccctcgggctcgatgccgtgcacctctacaatgactttcaggcgctcgcccgtgccctccccctgctctgcgcttcctcggtgcggccgttggcgccgggtgttgccgagccgggggcgccgcgggcggttctgggtcccggtaccggcttgggggtggctgccgccgtgccctgcccggcgggttggtcggcgctcgcctgtgaaggggggcatgtcaccctggcaccgggcgatgtggcggagagcaccctgatcgatcgcctgcggcagcagttggatcacgtgtcggcggaggcggtactgtgcggtgccgggctctgccggctgcacgccgtgctgcatggggcgccctgtgacgatccgaaggcgatcaccgaggcggggcgcgccggcgatccccgggcgactgagaccatccagcggttcttcagcctgcttggcgggtttgccggcaacctggcgttgaccctcggcgcccgcggcggtctctaccttgccggagggatgctgccagcgctgtggcaaccgatgcaggagtccgccttcctcgagcgcttccgggccaagggacggtttcgcgattacctcacggccattccggtcctgctcatccgcgacccggagggtgccaccctcctcggcctgcgcgccctgctcgatgacgccgggggcggttga

SEQ ID NO: 85621 - protein, 313 aa, Alkalilimnicola ehrlichei MLHE-1
MSSYLLADIGGTHTRIALATPGGEPQQRHRYRNSELGDPLSGLQHFLAQVAPARPTTLAIAVAGPVQGGRVQLTNRSWMLHDGSLARALGLDAVHLYNDFQALARALPLLCASSVRPLAPGVAEPGAPRAVLGPGTGLGVAAAVPCPAGWSALACEGGHVTLAPGDVAESTLIDRLRQQLDHVSAEAVLCGAGLCRLHAVLHGAPCDDPKAITEAGRAGDPRATETIQRFFSLLGGFAGNLALTLGARGGLYLAGGMLPALWQPMQESAFLERFRAKGRFRDYLTAIPVLLIRDPEGATLLGLRALLDDAGGG

SEQ ID NO: 85622 - DNA, 969 bp, Hyphomonas neptunium ATCC 15444
  CDS (1)..(969): transl_table=11
atggaaggttccgtcctggtcggagatgtcggcggcacaaatgtgcgctttgccctcgcggcgcgccggaacggcgctctgagtatcgagcattttcagaagtttcagggagatgatttcgagtcgtttgaggatgctctgaagcagtatctggacaagacaggcgtgagggcaactgtagcctgctttgcgatggctggccctgtaagggatcagaaagtcacgctgacaaaccgggcaaaatggcaagtttcatcgacgggattggaggcgcgattcggctttgaggccgtgcgcctcatcaatgatttccaggcaatggcccgctcggtgccagaattctccgtctcgtcatttgaggaaatccttccgggaacgtcccagacaggcgcgccgatgctggtggcggggccgggcacaggattcggcgtggcaacgctgctggcaggcgcgaacggtcagtggagcgtcgtatcgggcgaaggtggccatatggcctacgcgccgcgcacagacatcgagcatgatctggcgcggctgttggcgcgcgatcatggctatgtgtcgaatgagttggtcgcctccggcagcggtcttgaagaggttcatcgggcattttgtgagatatttgatcgcgattgtctcaatttgtctccggaaacgatgcgtcaacgggcggatgacggcgatgagatgttccaaacgctcattgaagtgcgggcactcgctgtcatgggcgcggcaggtgatctcgtgctggcaaatggcgccctgggcggggtcgtgctggcgggcggggtcagtgagcgtatttctgagttcctgaaaacgcccctcgcgcggcaacgcttcacctctcgtggccccatgagtgactaccttgagacttgcccggtgtggctgatgcgcgatgcatccgcgcccctgattggcgccgcagcctactttgaacagccttcccgaatctag

SEQ ID NO: 85623 - protein, 322 aa, Hyphomonas neptunium ATCC 15444
MEGSVLVGDVGGTNVRFALAARRNGALSIEHFQKFQGDDFESFEDALKQYLDKTGVRATVACFAMAGPVRDQKVTLTNRAKWQVSSTGLEARFGFEAVRLINDFQAMARSVPEFSVSSFEEILPGTSQTGAPMLVAGPGTGFGVATLLAGANGQWSVVSGEGGHMAYAPRTDIEHDLARLLARDHGYVSNELVASGSGLEEVHRAFCEIFDRDCLNLSPETMRQRADDGDEMFQTLIEVRALAVMGAAGDLVLANGALGGVVLAGGVSERISEFLKTPLARQRFTSRGPMSDYLETCPVWLMRDASAPLIGAAAYFEQPSRI

SEQ ID NO: 85624 - DNA, 972 bp, Azoarcus sp. BH72
  CDS (1)..(972): transl_table=11
atgatcctgtgcggagacatcggcgccaccaagagcctgctcggcctcgccgaggcacgcggcggcgcgatccacatcaagctggtacgacgttacgaaaaccgcgagtggccgggcttcggcgaactggtcgacgacttcctggccgaagcggcggccgcgcgcggcgaagcggtggagctcaccgtcgccgggttcggcatcgccggcccggtggggccggacggcgtgcatatgaccaatctcgactggtacatcggcccgggcccgctgcgcagcgtgctgggcggcgcaccggtgcggctgctcaacgacttcgaggcgagcgcgctcggcatcggcgacctcggcggcgacggttgcctgccgctgcagcccgcgcccgcactttccacggcgccacagctggtgataggcgccggctcggggctgggcgtggcgctgcgggtaccgacggcgaacggcgtggtggtggtgccgggcgaaggcggccacgtcggctacgcgccgcgcaacgaggagcagctcgcgctgtggcgccagctgcgcgccggaagcggccggctgagcgtggagcacgtggtttccggccccggcctcgggcgcatctacgagtggctggccgagacccgcgcaagtaccggcccctgcggcgaactcgtatgggagcgggcggtggaaggcaacctgcacgcgcgccacgcgatcgacctgttcctcgacagctatggcgcggtggcgggcgacttcgccctcgcgacgctggcgcgcggcggggtgtatctgaccggcggcatcggcccgcggctgctcaccgcgccagccgcggcggcacgctttctcgctgccttccgcgacaaggcgccgcacggcgcgctgatgacgcagatgccggtgcacctggtggtggacgacaagctgccgctgctcggcgcagcgcgcgcggccacggatctgctgccgaccgcctga

SEQ ID NO: 85625 - protein, 323 aa, Azoarcus sp. BH72
MILCGDIGATKSLLGLAEARGGAIHIKLVRRYENREWPGFGELVDDFLAEAAAARGEAVELTVAGFGIAGPVGPDGVHMTNLDWYIGPGPLRSVLGGAPVRLLNDFEASALGIGDLGGDGCLPLQPAPALSTAPQLVIGAGSGLGVALRVPTANGVVVVPGEGGHVGYAPRNEEQLALWRQLRAGSGRLSVEHVVSGPGLGRIYEWLAETRASTGPCGELVWERAVEGNLHARHAIDLFLDSYGAVAGDFALATLARGGVYLTGGIGPRLLTAPAAAARFLAAFRDKAPHGALMTQMPVHLVVDDKLPLLGAARAATDLLPTA

SEQ ID NO: 85626 - DNA, 954 bp, Azoarcus sp. BH72
  CDS (1)..(954): transl_table=11
atgcggatacttgcggcagatatcggcggctcgcagtcgcgcctgctgctcgcagaactggagggcgaggcgtggcgcacgctgcgccgccacaccttccccagcccggatttcgcctcggtggaggcgctgctggacggctttctggcgggcggtgagaccgtggccgcggcctgcctcgcggtcgccgggccggtggccagccagcgcgtcgcgctcaccaacctgccgtggatcgtcgacgcggcagcccttgcgacccgtttcgggctgcgccaggtgcgcatcgtcaacgacttcgccgcccaggcccacggcctgcccgcgctcgatgcggatggaatctgcacgctgcaagccggcgccccggtggcggatggcttgcgcgccttgatgggggccggcaccggcctgggcgttgcgctgcttgccggaccggacgcccacccgcgcgcgctgccgagcgaaggcggccatgccgatttcgccccgcgcaatgccgaagaaatggcgctggtgcaggacctgctgccgcgtcatggccgcatcagcctggaaaccctgttgtgcggacgcgggctggagcgcctgtaccgccgcgcggccgggctggcggacgacgcaccggcgagcgcgcgcgcgatcggcgaagcggcgctggccggcgagcccgccgcacgcgatgcggtggcgctgttcggccgcctgctcggcgccgcagcgggcaatctggcgcttaccagcctcgcgctcggcggcgtctatctcagcggcggcatcacacccaagctgctgccgctgttgcgcgacggcggcctgcgcgaagccttttgcgacaagccgccgatgcgtgcgctgatggagcggattccgcttcatgtcgtcaccgacgaactgctcgggctgaagggcgcggcccaactggcggcgcgcctggcgcgcgggctggactga

SEQ ID NO: 85627 - protein, 317 aa, Azoarcus sp. BH72
MRILAADIGGSQSRLLLAELEGEAWRTLRRHTFPSPDFASVEALLDGFLAGGETVAAACLAVAGPVASQRVALTNLPWIVDAAALATRFGLRQVRIVNDFAAQAHGLPALDADGICTLQAGAPVADGLRALMGAGTGLGVALLAGPDAHPRALPSEGGHADFAPRNAEEMALVQDLLPRHGRISLETLLCGRGLERLYRRAAGLADDAPASARAIGEAALAGEPAARDAVALFGRLLGAAAGNLALTSLALGGVYLSGGITPKLLPLLRDGGLREAFCDKPPMRALMERIPLHVVTDELLGLKGAAQLAARLARGLD

SEQ ID NO: 85628 - DNA, 990 bp, Magnetospirillum magnetotacticum MS-1
  CDS (1)..(990): transl_table=11
atgagcgggagtgcatcaggatttgtcctggtcgccgatatcggtggcacacatgcccgcttcgccctggtgggcgaggacggggaggcggtcaatcctgtcgtgttgcgctgcgccgattacgacggcccggctccggccatcaaggcctatctttccgatcagggcgcgggcgccgcacccagacgcggtgctttcgccgtggcctcggtcattgacggcgatcgtatcgaactgaccaattcgccttggcgcttttccatctccgagacccaaagggccgtggggctggagcggctggaggtggtcaacgacttcaccgccgtggccctgtcggtacgccatctgaagcctgaacatctgttgaccatcggcggcggcgcggcgcaagcgggtctgcccattgccgtgctggggccgggaacggggctgggggtgtcggccttgattcctggcgaatccggtcggtggacagccctggccaccgagggcggacacgtcaccatggccgccgccagcgagcgcgaggcccgcatcctcgaccgcttgcgcacccagttcgaccatgtttccgccgagcgggtcctgtcgggccaggggctggtcaacctctatcaggcggtcgccgccctgtcggggcatcaggcggtgttctccacccccgacgtcatcaccaagcgcgggctggacggatcgtgtcccatcagccgcgaggcggtggagacattcttcgccatgatggggactgtggccggaaatctggctctgtctctgggggccaagggcggcgtgttcatcgcgggcggcatcctgccgcgcatggccgatgccttccgcgcctcctccttcaggacccgcttcgaggcccatgggcgtttccagccctatctggccgccatccccacctggctgatcacccatccgctgcccgcctttgttggacttgcggggttgatccggccaaaggccgaccatcggactttggcctag

SEQ ID NO: 85629 - protein, 329 aa, Magnetospirillum magnetotacticum MS-1
MSGSASGFVLVADIGGTHARFALVGEDGEAVNPVVLRCADYDGPAPAIKAYLSDQGAGAAPRRGAFAVASVIDGDRIELTNSPWRFSISETQRAVGLERLEVVNDFTAVALSVRHLKPEHLLTIGGGAAQAGLPIAVLGPGTGLGVSALIPGESGRWTALATEGGHVTMAAASEREARILDRLRTQFDHVSAERVLSGQGLVNLYQAVAALSGHQAVFSTPDVITKRGLDGSCPISREAVETFFAMMGTVAGNLALSLGAKGGVFIAGGILPRMADAFRASSFRTRFEAHGRFQPYLAAIPTWLITHPLPAFVGLAGLIRPKADHRTLA

SEQ ID NO: 85630 - DNA, 1026 bp, Nostoc punctiforme PCC 73102
  CDS (1)..(1026): transl_table=11
atgactttattactagcaggagacatcggcggtacgaaaactattttgcaattggttgaaacatcagattcacaaggtttacatactatttatcaggaaagttaccacagtgctgattttcccgatttagtacctatagtgcagcagtttttaatcaaagctaatacaccaataccagaaaaggcttgttttgcgatcgcagggcccattgtcaaaaatactgccaaactgaccaatttagcctggttcctagataccgaacgtctacaacaagaattgggtatcccacatatttatttgattaacgacttcgccgccgttggctatggcatttcaggtttacaaaaacaagacttgcacccgttgcaagttgggaaacctcaacccgaaaccccgattggaattattggtgctggtactggcttagggcaaggatttttaattaagcagggaaacaactatcaagtttttccttcagaaggtggacacgctgacttcgcgcctcggaacgagatagagtttcaattgttgaaatacctgctggataaacatgatatccagcgcatttctgtagaacgggtagtttctggaatgggaattgtggcgatttaccaatttttgcgcgatcgcaaatttgccgccgaatcaccagatatcgcccaaatcgtcagaacttgggaacaagaagccggacaggaagagaaaagtgtcgatcccggtgctgctattggtacagctgcactagaaaaacgcgatcgcctttccgaacaaaccttgcaattatttatagaagcttatggtgcagaagccggcaatctcgcccttaaactcctaccttatggtggcttatacattgctggtggaattgcgcctaaaattctccccttaatccaaaatagcggtttcttattaaacttcacccaaaaaggcaggatgcgccccctcctggaagagatacctgtgtatattatcctcaacccacaagtggggctaataggtgctgctttatgtgctgctaggttataa

SEQ ID NO: 85631 - protein, 341 aa, Nostoc punctiforme PCC 73102
MTLLLAGDIGGTKTILQLVETSDSQGLHTIYQESYHSADFPDLVPIVQQFLIKANTPIPEKACFAIAGPIVKNTAKLTNLAWFLDTERLQQELGIPHIYLINDFAAVGYGISGLQKQDLHPLQVGKPQPETPIGIIGAGTGLGQGFLIKQGNNYQVFPSEGGHADFAPRNEIEFQLLKYLLDKHDIQRISVERVVSGMGIVAIYQFLRDRKFAAESPDIAQIVRTWEQEAGQEEKSVDPGAAIGTAALEKRDRLSEQTLQLFIEAYGAEAGNLALKLLPYGGLYIAGGIAPKILPLIQNSGFLLNFTQKGRMRPLLEEIPVYIILNPQVGLIGAALCAARL

SEQ ID NO: 85632 - DNA, 1047 bp, Crocosphaera watsonii WH 8501
  CDS (1)..(1047): transl_table=11
atgtctatattactcgctggcgatattggcggaactaaaactattttacgtttagttagttccgagaattctaaaaatagtgaaagtttacctcaacaaaccaccttatatgaaaactcctatcccagtcaagactacgatgatctcgttcccattgttcaagaattttatcaagaagctaagcaggaattaaaagaagaaatttctgtaaaaaatgcttgttttggtatcgctggtcccgtagttaataatacctcaaaattaacaaatttaaactggccagaattgacaggcgatcgcctagagaaaaaactatctctagaaagagttaatctaatcaatgattttgctgctattggttacggtattctagggttaaaaccagatgatttacataccttacaaggagcagaagcaaaacccaatactcctataggtgtgttgggtgcagggactggtttaggggaatgctttttaactccttcagaaagtggtaattatagtgtcttctctactgagggatcccatggagactttgccccacgaagcgaattagaatttgaattattaacctatattcgagataaatatagtttatccagagtttccatagaaaggatcgtgtctggaatgggaattagtgcaatttatcaatttttacgccataagtatcctgaaaaagaatccgataaattaaagaaaatttttcaaatttgggaaaatgaaaaaaatattgatctctctgctgaagtatctaaagcagctttagaaaatagggatagtttatgtcaacaaacaatggaaatatttatttcagcttacggcgcagaagcaggtaatttagctttaaaattgttaccttataatggtttatacatagcaggaggaattgcagctaaaatactaccattaatgcaaacaggaacctttatggaatcttttcaagctaaaggacgtatgagttcactattaactgaaatccccgttaatattatcttaaatcctaaagttggtttaattggggctgctttaagggctgcaaaataa

SEQ ID NO: 85633 - protein, 348 aa, Crocosphaera watsonii WH 8501
MSILLAGDIGGTKTILRLVSSENSKNSESLPQQTTLYENSYPSQDYDDLVPIVQEFYQEAKQELKEEISVKNACFGIAGPVVNNTSKLTNLNWPELTGDRLEKKLSLERVNLINDFAAIGYGILGLKPDDLHTLQGAEAKPNTPIGVLGAGTGLGECFLTPSESGNYSVFSTEGSHGDFAPRSELEFELLTYIRDKYSLSRVSIERIVSGMGISAIYQFLRHKYPEKESDKLKKIFQIWENEKNIDLSAEVSKAALENRDSLCQQTMEIFISAYGAEAGNLALKLLPYNGLYIAGGIAAKILPLMQTGTFMESFQAKGRMSSLLTEIPVNIILNPKVGLIGAALRAAK

SEQ ID NO: 85634 - DNA, 1005 bp, Xylella fastidiosa Dixon
  CDS (1)..(1005): transl_table=11
atgattccgacccctacccgagatgcacccaatatcccgtcctttcttgccgccgatgtcggcggcactcacgtgcgcgtcagcgtggttgcagccgcgcccacgtgtgctagtccaccgcaactgtttgatgtgcgcacttaccgctgcgctgactatcccagcctcagcacaattctgaacgacttcctcggtacaagatcagcagtacgtgattgcgtcatcgccagtgccggttttcagcgcagcgatggtactgttatcactaccaacctaccgtggccgctatcaccacaccggctacgcgcagatctcaatctggcagaggtctctctggtcaacgactttgaggcgctggcctacgccacggaggatatggaggctgcgcaattgctgcacctcactggtccagccaaagcgcaggatgggccacgcctgttgctcggtccgggaaccggcctgggtgcagcactctggattcccaataacggacgccccattgtcctccccacggaagccggtcaagcagcattgccgagtacaactgaacttgaaatgcaactggtacgacacatgctgaacaaccgcacacatgtgccgattgagcatgccttatctgggccaggaatactcaatgtgtaccgcgccttgtgtgcgctacagtccgtcctcccccagcacgcgagcccagatgcgatcagtcacgctgcggcagcaggaacagacatgctgtcatcacagactctagaggtgttctgcgacttcctcggcagcatcgttggtgatttggtcatgatgtacggtgcacaggggggtgtctatctggccggaggaatcctgccacagctgcgtgagccgctgctacgcagtcactttgtcgaacgcttcctcaataaaggccccatgggtgaggcattacagcacgtcccggtgcggctgatcgaacatggacaactcggtatcgtaggtgcggcacgctggtacttaaataagaaagcaacttaa

SEQ ID NO: 85635 - protein, 334 aa, Xylella fastidiosa Dixon
MIPTPTRDAPNIPSFLAADVGGTHVRVSVVAAAPTCASPPQLFDVRTYRCADYPSLSTILNDFLGTRSAVRDCVIASAGFQRSDGTVITTNLPWPLSPHRLRADLNLAEVSLVNDFEALAYATEDMEAAQLLHLTGPAKAQDGPRLLLGPGTGLGAALWIPNNGRPIVLPTEAGQAALPSTTELEMQLVRHMLNNRTHVPIEHALSGPGILNVYRALCALQSVLPQHASPDAISHAAAAGTDMLSSQTLEVFCDFLGSIVGDLVMMYGAQGGVYLAGGILPQLREPLLRSHFVERFLNKGPMGEALQHVPVRLIEHGQLGIVGAARWYLNKKAT

SEQ ID NO: 85636 - DNA, 1014 bp, Xylella fastidiosa Dixon
  CDS (1)..(1014): transl_table=11
atgaacgcaccacaggctcccgtactggtcgcagacattggagggactaacgcccgctttgcgctcgccaaccccaccctaacctcagcaccactgctgaacgacagcatgcgcgaattcgccgtcatcgaattcccctcactgggcgaagctgcacagcactacctgcatcacataggcatacataccaccaaaggcgtctttgcgatcgccggacacgtagacggcgatgaagcacgtattaccaatcatccctgggtcatcacacgcacgcgcactgcaacaatgctcggcttcgacaccctgcacctcatcaacgattttgttgcccaagcgatggccatcagcgtgttaggccctcaagatgtcatccaaatcggcagtgccaaatgggagcaattcccgctatcagcagccacccgcaactacggcatcattggccccggcaccggcctaggcgtcggcggcctggtgattcgcaacggccgctgctatccgctagaaaccgagggcggccatgtcagcttcccgccaagcaccccagaagaaatccggatcctggaaattctgtcacaacaattcggacgtgtctccaacgaacggctgatctccggtccagggatagtcaacattcaccgcgcactgagcgaaatcgacggaatcgacccaggcccactgcgccctcaagacatcaccatgcgcgccgctgacggcgacatacgcgccacacgcaccatcaatctgttctgcaacatcttcggcgccatcaccggcgacctggtactcatccaaggggcttgggatggcgtctttctgacaggcggcctcgttcccaaactattgaactcaatacaacattccggtttccgccaaagatttgaacataagggtcgattttcggccatcatggcccgtatcccctctttggcagtgatccatccacaccctggcctactcggcgcagccgtatacgcacgagacaccgagcaagtcccgcaggaaatcaaggcatga

SEQ ID NO: 85637 - protein, 337 aa, Xylella fastidiosa Dixon
MNAPQAPVLVADIGGTNARFALANPTLTSAPLLNDSMREFAVIEFPSLGEAAQHYLHHIGIHTTKGVFAIAGHVDGDEARITNHPWVITRTRTATMLGFDTLHLINDFVAQAMAISVLGPQDVIQIGSAKWEQFPLSAATRNYGIIGPGTGLGVGGLVIRNGRCYPLETEGGHVSFPPSTPEEIRILEILSQQFGRVSNERLISGPGIVNIHRALSEIDGIDPGPLRPQDITMRAADGDIRATRTINLFCNIFGAITGDLVLIQGAWDGVFLTGGLVPKLLNSIQHSGFRQRFEHKGRFSAIMARIPSLAVIHPHPGLLGAAVYARDTEQVPQEIKA

SEQ ID NO: 85638 - DNA, 1014 bp, Xylella fastidiosa Ann-1
  CDS (1)..(1014): transl_table=11
atgaacgcaccacaggctcccgtactggtcgcagacattggagggactaacgcccgctttgcgctcgccaaccccaccctaacctcagcaccactgctgaacgacagcatgcgcgaattcgccgtcatcgaattcccctcactgggcgaagctgcacagcactacctgcatcacatcggcatacataccaccaaaggcgtctttgcgatcgccggacacgtagacggcgatgaagcacgtattaccaatcatccctgggtcatcacacgcacgcgcactgcaacaatgctcggcttcgacaccctgcacctcatcaacgattttgttgcccaagcgatggccatcagcgtgctaggccctcaagatgtcatccaaatcggcagtgccaaatgggagcaattcccgctatcagcagccacccgcaactacagcatcattggccccggcaccggcctaggcgtcggcggcctgatgattcgcaacggccgctgctatccgctagaaaccgagggcggccatgtcagcttcccgccaagcaccccagaagaaatccggatcctggaaatcctgtcacaacaattcggacgtgtctccaacgaacggctgatctccggtccagggatagtcaacattcaccgcgcactgagcgaaatcgacggaatcgacccgggcccattgcgccctcaagacatcaccatgcgcgccgctgacggcgacatacgcgccacacgcaccatcaatctgttctgcaacatcttcggcgccatcaccggcgacctggtactcatccaaggggcttgggatggcgtctttctgacaggcggcctcgttcccaaactattgaactcaatacagcattccggtttccgccaaagatttgaacataagggtcgattttcggccatcatggcccgtatcccctctttggcagtgatccatccacaccctggcctactcggcgcagccgcatacgcacgagacaccgagcaagtcccgcaggaaatcaaggcatga

SEQ ID NO: 85639 - protein, 337 aa, Xylella fastidiosa Ann-1
MNAPQAPVLVADIGGTNARFALANPTLTSAPLLNDSMREFAVIEFPSLGEAAQHYLHHIGIHTTKGVFAIAGHVDGDEARITNHPWVITRTRTATMLGFDTLHLINDFVAQAMAISVLGPQDVIQIGSAKWEQFPLSAATRNYSIIGPGTGLGVGGLMIRNGRCYPLETEGGHVSFPPSTPEEIRILEILSQQFGRVSNERLISGPGIVNIHRALSEIDGIDPGPLRPQDITMRAADGDIRATRTINLFCNIFGAITGDLVLIQGAWDGVFLTGGLVPKLLNSIQHSGFRQRFEHKGRFSAIMARIPSLAVIHPHPGLLGAAAYARDTEQVPQEIKA

SEQ ID NO: 85640 - DNA, 915 bp, Roseovarius nubinhibens ISM
  CDS (1)..(915): transl_table=11
atgactgagacatggctcgtggccgatgtgggcggcaccaacagccgcctcggcctcgccacgcatgacgggctcttggcgggcagcagcgccagctttgccaatgacgcctacccggaattcgaccggctcgtcgccgaatatctggccgggcaaggggccgagatcaccgcgctctgcgccggggtcgcaggcccggtgcgcgcgggccgcgcccagctcaccaaccgcgactggcagatcgacgcggaccgcctggcccaaaccaccggcgccacccgcgtcaccctgatcaacgacctgcaggcccagggctacgcgctcgacgatctcgacgcggcccggctcacgccaatctggcaggccaccccgccaccgccccgcgccacccgcatggtgctggggctcggcaccggctgcaacatcgccgtcacccatgatctgggctcccgcctcttcgtcccccccgccgaggccggccattcccgcctgccgcatctagaagaccttgcccccgccatggcccggctcgagatggatcacctgccggtcgaggccttcctctccggcccgggcctctcccgcctccacaaggcgctgcatgaccaagacgccagtcccgcagagatcctcaccggccacagccccgcccagcgcgacacgcgcgccgccgccaccacgctcctcggtcaggtcttgggaaatttcgccacgatccacctgccgatgggcgggatcttcctcatcggcggtctcgcccgcgcgctgctgccgcgtctcgacaccaccgcgcttcgcgccaatttcacccaaaaaggcccctaccgcgccatcctcgaggacatcccgctctggctcatcaccgatgacgacgccgccctgcgcggctgcgcccggctcctgcgtcagggctag

SEQ ID NO: 85641 - protein, 304 aa, Roseovarius nubinhibens ISM
MTETWLVADVGGTNSRLGLATHDGLLAGSSASFANDAYPEFDRLVAEYLAGQGAEITALCAGVAGPVRAGRAQLTNRDWQIDADRLAQTTGATRVTLINDLQAQGYALDDLDAARLTPIWQATPPPPRATRMVLGLGTGCNIAVTHDLGSRLFVPPAEAGHSRLPHLEDLAPAMARLEMDHLPVEAFLSGPGLSRLHKALHDQDASPAEILTGHSPAQRDTRAAATTLLGQVLGNFATIHLPMGGIFLIGGLARALLPRLDTTALRANFTQKGPYRAILEDIPLWLITDDDAALRGCARLLRQG

SEQ ID NO: 85642 - DNA, 1041 bp, Prochlorococcus marinus str. MIT 9211
  CDS (1)..(1041): transl_table=11
atgaatcttttagcaggtgatataggtggtacaaagacacttctaggtgtttataaaaatgatggagctgtctgtaaattatttcacaaacattattattccaatcattgggaaagtttcgaacaaatacttaaagattttatagctaatattccagaacgaattgagaagccaaagtatggatgcatagctgttgcaggtcaggaaatagatgggtcaatcagaatgaccaacctgccatggaaattaaataatgaaaatttatgcaaaattgctttacttaagcaattgtccttaattaatgatttctctgttttagtttatggaataccattcttaaaagagactcaatatataaaactccaattacccaggacaaagcaaaattgtttttcgaagaaaaactttgcagttataggagcaggaactggtcttggcatcgcaagaggtattacaacatcgacaggtgtcatatcacttccaagtgaaggaggtcataaagaatttgcaccgcgaactcaaaatgaatgggaactaaccaattggctaaaagaagacctaaaaataaatagagtttctatagaaagaatagttagcggaactggactaggaaatatagctcgatggagacttatgaaacaagactcaaaatcgcaccctttaaggataaaagcagagaattacccaattgaaggagataatgatcttccagaagaagtagctaaatatgccaaaaatagtgatcccataatgaatgaagtattaaatatttggcttagcgcctatggatcagtaattggggatctagctttacaagaactatgctatggaggcttatggattggtggaggaactgcttcaaagcatctggatggattctcttcggatacatttaaatctgcgataagaaacaaagggaggttttcaagatttattgatgaacttccgataatggcattaacagataaagaggttggcctattttgcgcagcatgcaaagctcatttaatagccgaatcgaatgtcaaactaggtacataa

SEQ ID NO: 85643 - protein, 346 aa, Prochlorococcus marinus str. MIT 9211
MNLLAGDIGGTKTLLGVYKNDGAVCKLFHKHYYSNHWESFEQILKDFIANIPERIEKPKYGCIAVAGQEIDGSIRMTNLPWKLNNENLCKIALLKQLSLINDFSVLVYGIPFLKETQYIKLQLPRTKQNCFSKKNFAVIGAGTGLGIARGITTSTGVISLPSEGGHKEFAPRTQNEWELTNWLKEDLKINRVSIERIVSGTGLGNIARWRLMKQDSKSHPLRIKAENYPIEGDNDLPEEVAKYAKNSDPIMNEVLNIWLSAYGSVIGDLALQELCYGGLWIGGGTASKHLDGFSSDTFKSAIRNKGRFSRFIDELPIMALTDKEVGLFCAACKAHLIAESNVKLGT

SEQ ID NO: 85644 - DNA, 996 bp, Erythrobacter sp. NAP1
  CDS (1)..(996): transl_table=11
ttggctggaagcacggatatcgtcaccgtcgatgtcggcggcacgcatgcccgctttgcgatcgcgaccattcataccgatggcgcgatcgcgctaggcgaaccggtcacgatccacaccgaaacccatgcgagctttcagaccgcgtgggaggatttcgcgagccagatgggcggcaccatccccgaccagcttgcgatggcggtggcaggaccgatcaagcccgacatcatccgctttaccaacaatccgtggatcatccgcccgccgctgatcgagagcaagctgggctgtacaaaccacgtcatcgtcaacgatttcgaggccgtcgctcacgccgccgcgcgcgcgcctgacgaggaattcctgcacctcgctggaccggacgagcctttccccgaacccggcacgatcagcgtgcttggaccgggcaccgggcttggcgttgcatacttctaccgacgccccgacggctcgtaccgcgtgcaggcgaccgagggcgggcatggcgattttgcaccactcgactcgatcgaagacgcaatccttgctcgcctgcgcaaacgacacacgcgcgtttcagacgagcgcgtcgtctcaggtcctgccatagtcgatatcttccacgcgcttgccgctatcgaagggcgagccgtgcgcgaattaagcgacgttgaaatctggaccgccgggactgacggatcggacagcctcgctgccgccgccgtcgaccgcttctgcctcgcgctgggatcggttgctggcgatatcgcgctggttcagggcgccaagggcgtcgtgattgcggggggccttggctaccgcattcgcgagacgatccgcgcatcgggcttcgcctcgcgcttcaccgccaaggggcgctttgctggcctgatggcgacgctccccgtcaagctcatcacccacccgcaacccggcctgctcggtgcagccgccgcatttgcccagacccatcttgaggagccgcagccatga

SEQ ID NO: 85645 - protein, 331 aa, Erythrobacter sp. NAP1
MAGSTDIVTVDVGGTHARFAIATIHTDGAIALGEPVTIHTETHASFQTAWEDFASQMGGTIPDQLAMAVAGPIKPDIIRFTNNPWIIRPPLIESKLGCTNHVIVNDFEAVAHAAARAPDEEFLHLAGPDEPFPEPGTISVLGPGTGLGVAYFYRRPDGSYRVQATEGGHGDFAPLDSIEDAILARLRKRHTRVSDERVVSGPAIVDIFHALAAIEGRAVRELSDVEIWTAGTDGSDSLAAAAVDRFCLALGSVAGDIALVQGAKGVVIAGGLGYRIRETIRASGFASRFTAKGRFAGLMATLPVKLITHPQPGLLGAAAAFAQTHLEEPQP

SEQ ID NO: 85646 - DNA, 1035 bp, Synechococcus sp. RS9917
  CDS (1)..(1035): transl_table=11
atggcacccacgaccttcctggccggtgatctagggggaaccaaaaccctgctgtccctcttcagcacggtggagggccagctccaggccttgcatggacaccgctacgcctcagcggaatggccctccctggacgcgatgctggtgcactttctggaggagatgccagcggatctggcccgacccgccaccagctgcatcgccgtggccggccccgtgcaacagggtcaggccaagctcaccaacctgccctggctggtgcaggaaacctcactctgcgccgccaccggcctggagcgactggagctggtgaacgatttcgccgtgctcatccacgggctgccccacttcagtgccaaccagcaggtgatgctccaggaggggcaggccagccagggtccggtggcgattctcggggcgggaaccggcctggggatggcccgcggtctacccggcccggagggttggatcgccctgccgagcgaaggcggccaccgggagttcgctccccgcaccgaggcggagtgggagctcagccgctggctgatggccgacctggagctggatcgcctctcggtggaacggatcgtgagcggcaccggcctcggccatgtgatgcactggctcctgcagcgccagggcaacgaggaccatccccttcaggcccaggcgcgagcctggcgaacgatcggggccgaccagcccggccacgaggaccttcccgcccacacgggccgggcggcagctgcaggggatccgctggcccaggacgcgctcacactctggctgggggcctacggctccgcggccggggatctggccttgcaggagctctgccgcggcgggctctgggtggggggtggcaccgctgagaaaaacctggaagggctccgctccgaacgctttctggaaccgctgcgccgcaagggacgcttccgttcattcctggaaagcctgccgatccgggcggtaatcgatccgaatgccggcctgttcagtgccgcctgccgcgcccgggatctgcagggggactga

SEQ ID NO: 85647 - protein, 344 aa, Synechococcus sp. RS9917
MAPTTFLAGDLGGTKTLLSLFSTVEGQLQALHGHRYASAEWPSLDAMLVHFLEEMPADLARPATSCIAVAGPVQQGQAKLTNLPWLVQETSLCAATGLERLELVNDFAVLIHGLPHFSANQQVMLQEGQASQGPVAILGAGTGLGMARGLPGPEGWIALPSEGGHREFAPRTEAEWELSRWLMADLELDRLSVERIVSGTGLGHVMHWLLQRQGNEDHPLQAQARAWRTIGADQPGHEDLPAHTGRAAAAGDPLAQDALTLWLGAYGSAAGDLALQELCRGGLWVGGGTAEKNLEGLRSERFLEPLRRKGRFRSFLESLPIRAVIDPNAGLFSAACRARDLQGD

SEQ ID NO: 85648 - DNA, 1032 bp, Synechococcus sp. WH 5701
  CDS (1)..(1032): transl_table=11
atgaccattctgctggccggcgacatcggtggcaccaagaccctgctggccacctaccggctcgaggcggacgggttggtgcagcttcgctgtgagcgcttcgcttcagccgcctgggacgacttctccgccctggtacgccagttcctcgccgggggcaaagccggatctgaggcgcccagccatggctgtctggcgattgccgggccggtgcaggacgggcgtgtacggctgaccaacctgccctgggagctcgacgagctggagctggcttcctcctgcgggctcgagcgcctggagttggtcaacgacttcgccgtgctgatctacgggttgccgcacctggggcagtcccagcaggcgctcgtgcgggagggactgcctcagcctggccccttggcgatcctcggggctggcaccggtcttggtgtggccatcggggtgccgggcccccagggcctgatcgccctggccagtgaggccgcccacggcgaattcgcgccgcgcctggagcgggagtggcggctgaagcagtggctgcagcaggatctgtccctggagcgggtctcgatcgagcggatcgtcagcggcaccggccttggccatgtctttcgctggttccttcacgacgccggggccggcgcgccccatggcctggcggaggcggcggaagcctgggccctggccgagctcagcggcgcggcggaacgccccgatctgccggccctggtggccgctgccgccgccgccgctgatcccacggcctcagccgccctcgatctctggctgggtgcctacggctccgtggcgggggatctggccctgcagagcctttgccgcggtgggctctggctggggggtggcaccgccgccaagctgctgccccagttgcgttcccaggcctttctggccccctttgccgccaagggccggctgacgccggtgctggagcagatccccctgcgggccctgatcgacccggaggccggtctgttcagcgccgcctgccgggcgcggatgctgctgggctga

SEQ ID NO: 85649 - protein, 343 aa, Synechococcus sp. WH 5701
MTILLAGDIGGTKTLLATYRLEADGLVQLRCERFASAAWDDFSALVRQFLAGGKAGSEAPSHGCLAIAGPVQDGRVRLTNLPWELDELELASSCGLERLELVNDFAVLIYGLPHLGQSQQALVREGLPQPGPLAILGAGTGLGVAIGVPGPQGLIALASEAAHGEFAPRLEREWRLKQWLQQDLSLERVSIERIVSGTGLGHVFRWFLHDAGAGAPHGLAEAAEAWALAELSGAAERPDLPALVAAAAAAADPTASAALDLWLGAYGSVAGDLALQSLCRGGLWLGGGTAAKLLPQLRSQAFLAPFAAKGRLTPVLEQIPLRALIDPEAGLFSAACRARMLLG

SEQ ID NO: 85650 - DNA, 1131 bp, Synechococcus sp. WH 7805
  CDS (1)..(1131): transl_table=11
ttgccgtttaacggcaccatcttcacccttgggatcgatgccagacaccaccccatggcagccaaaacatttttggccggtgatctcggaggcaccaagaccctgctggccatctacagcgaaaccgatcgggggctgaacaagaagcattcccatcgctatgcgtcggctgagtggaacgatcttgagtcgatgctgggtgattttctcaagaccctgcctccaggtgtgtccaaacctgaaaccagctgtatcgccgtggccggaccagtccagaacggcacggcaaagctcaccaatctcccctggagcatgagcgaatcctcgctctgcgatgccacaggactgcaacgacttgagctggtcaacgactttgctgtgctcatccatggcctgccccacctcaacgcatcgcaacaggtggtgctgcagaccggaagcggccgagacactccgacagaatcaggacacgacggcggagccgtggccattcttggtgcaggcacgggcctgggaatggctcgcggccttccggcggccaggggctggctggccttgcccagcgagggcggtcaccgggaattcgccccgcgaactgaagatgaatggcatttggcccagtggatgcgacgtgaccttgatctcgatcgactgtcgatcgaacgcgttgtcagcggcacggggcttgggtatgtgatgtgctggatgctctccacgcatgacaacgccgatcaccccctgcaggccaaggcaaaagcctggaggacgctgccggcagaccacccggagcatgaagacttgccagcccacaccagccaggcagcggtttcaggtgatcctttagcccaggccgcgatgacgctgtggctcggagcttatggatccgctgcaggggatctggcccttcaggaactttgcatcggtggactctggatcggcggtggtacagcggaaaaggtcatcgacggcctgcgctcgccgcagtttttggagcctcttcgccggaaaggacgcttcaggcccctgatcgaaagcatcaccattcgggccgtgaccgatccggaggccggattgttcagttcagcctgcagggcacgcgatctggcggagtcgggtgggacactggcctga

SEQ ID NO: 85651 - protein, 376 aa, Synechococcus sp. WH 7805
MPFNGTIFTLGIDARHHPMAAKTFLAGDLGGTKTLLAIYSETDRGLNKKHSHRYASAEWNDLESMLGDFLKTLPPGVSKPETSCIAVAGPVQNGTAKLTNLPWSMSESSLCDATGLQRLELVNDFAVLIHGLPHLNASQQVVLQTGSGRDTPTESGHDGGAVAILGAGTGLGMARGLPAARGWLALPSEGGHREFAPRTEDEWHLAQWMRRDLDLDRLSIERVVSGTGLGYVMCWMLSTHDNADHPLQAKAKAWRTLPADHPEHEDLPAHTSQAAVSGDPLAQAAMTLWLGAYGSAAGDLALQELCIGGLWIGGGTAEKVIDGLRSPQFLEPLRRKGRFRPLIESITIRAVTDPEAGLFSSACRARDLAESGGTLA

SEQ ID NO: 85652 - DNA, 984 bp, Pseudoalteromonas tunicata D2
  CDS (1)..(984): transl_table=11
atgagtggtatcactaaatttgagcctatcattgtcgcggatatcggtggaaccaacgcccgatttgctgtggtcactgattttgatgcaacaagttcacagtttgttattgcacaccaccagacctttgtcagtgcgcaatttgattcaatgcaatctttattagctgcatatatccaagcgctaccttttgcacaacctcaacgtgcagcactggctgtcgcaggtccaatgaaaggccaaacggtaaacttaaccaatttaggttggtgtttcacgcttacagaattacaaagccaatttcaattgagtcaacttaaagtcattaatgattttgccgcttttgcttatgccgcaccgtatttacaagctgaacaaaatttgctggtaaaagcaggtacaccagaacaaaatgcgaatatcgctgttatggggccgggaacgggttttggcgccgctgcattagtctttaatggtgagtctcgtaccgttcttagctgtgaagctgggcatattagcttggcggcggttaccgatttacagcgtcaattgttggttgaaattaataaagaagtaagccatgtttcggtagaaaatgtcttttcaggtgccggacttgagcgtttatatcgtgccatggccaaggtcaataatttacctgttgaaccctatacagcagcagatattagtcagcttgctttatcagggcaaagtgatatttgccataaaaccttagtgcaattttgtgagtggattggcagtgtcgcaggggatttagccttgacgtttggcgcacgaggcggcgtatttattggtggtggcatattaccacgcatgcaagaggtattattgcattgtgattttagtcagcgttttgtgcaaaaagggattatgacgcattacgtacaagacattccggtgacgctggtaacacaggacaatattccatttattggagcagcagcgagtttgttggtgcactaa

SEQ ID NO: 85653 - protein, 327 aa, Pseudoalteromonas tunicata D2
MSGITKFEPIIVADIGGTNARFAVVTDFDATSSQFVIAHHQTFVSAQFDSMQSLLAAYIQALPFAQPQRAALAVAGPMKGQTVNLTNLGWCFTLTELQSQFQLSQLKVINDFAAFAYAAPYLQAEQNLLVKAGTPEQNANIAVMGPGTGFGAAALVFNGESRTVLSCEAGHISLAAVTDLQRQLLVEINKEVSHVSVENVFSGAGLERLYRAMAKVNNLPVEPYTAADISQLALSGQSDICHKTLVQFCEWIGSVAGDLALTFGARGGVFIGGGILPRMQEVLLHCDFSQRFVQKGIMTHYVQDIPVTLVTQDNIPFIGAAASLLVH

SEQ ID NO: 85654 - DNA, 969 bp, Xanthobacter autotrophicus Py2
  CDS (1)..(969): transl_table=11
gtggagatcgtcgctgtcgatatcgggggcacccatgcccgcttcgcccatgcggaggtcgcggacggacgggtggtgtccctcggcgagccggtgatcaagcatgccgcagaccatgccagcttccagctcgcctggcaggcgttcgccgagaccgtgggcacgcccctgccccgggcggcggccatcgccatcgcctgcccggtggaaggcgacgtgctgaagctcaccaataatccctgggtcatccacaagcacctgatcccggaaaagctcagcgtggacacctggacgctggtgaatgatttcggcgccatcggccatgcggtggcgcagatcggcgaggaggggtttgcgcacttcgccgggtctgaccggccgctgcccgagactggggtcatcagcatcatcgggcccggcacggggctcggcgttgcccatgtgctgcgtcaggatggccgctacaacgtcatcgaatgcgagggcgggcatatcgattttgccccgctggattccctggaggaggcgatcctgcaccgcctgcgccagcgctatccgcgcgtgtcggtggagcggatcgtctccggcccgggcctcgtcaacatctatgaggcgctggccgcaatcgaggggtgtcagatcgaccagctggaggacaaggccctgtgggcgcttgccaccgagggcaaggatgggctcgccgccgccgccctcgaccgcttctgcctgagcttcggcgcggtggccggcgacatcgccctggtgcagggcgccaaggctgtagtgatcgccggcggcatcgccccgcgcatcgcccacctcatcccgcagtccggcttcgccagccgcttctcagccaagggccggttcgcgcagcggatggaggacatcccggtccgcctcattacccatccccagcccggcctctatggcgcggccgccgccttcgccgagcagcatacgcggtga

SEQ ID NO: 85655 - protein, 322 aa, Xanthobacter autotrophicus Py2
MEIVAVDIGGTHARFAHAEVADGRVVSLGEPVIKHAADHASFQLAWQAFAETVGTPLPRAAAIAIACPVEGDVLKLTNNPWVIHKHLIPEKLSVDTWTLVNDFGAIGHAVAQIGEEGFAHFAGSDRPLPETGVISIIGPGTGLGVAHVLRQDGRYNVIECEGGHIDFAPLDSLEEAILHRLRQRYPRVSVERIVSGPGLVNIYEALAAIEGCQIDQLEDKALWALATEGKDGLAAAALDRFCLSFGAVAGDIALVQGAKAVVIAGGIAPRIAHLIPQSGFASRFSAKGRFAQRMEDIPVRLITHPQPGLYGAAAAFAEQHTR

SEQ ID NO: 85656 - DNA, 975 bp, marine gamma proteobacterium HTCC2207
  CDS (1)..(975): transl_table=11
gtgacagagcaacgttggaatttagttgccgatataggtggcaccaatgcgcgctttgcggcgttgcatgagggccaactggaaagcgaatttgagttctatcactcggtggaagagtacccccagtttagtgatttgatcattaagctgagagacgaaattgctctggcaaccggttttgttggcgcgccacacagcgtctgtctcgccgtggcctgccccgcggatgtagagcatgtttcctttaccaatagccactgggagtttactaaaactcacttgttggaatggtttgattgccaggagttggtggtaatcaatgattttgaagccgtggcgcacggtattactgagctgggtgcagatgactgcatcaagatcggtggcggtgaaccccaggcccacaaacccataggtattttgggtgcgggtactggtctaggtatggcggcactgatttcgcacagcgatggctaccatgtattggatactgagggcggtcatgctgattttgcccctgtaggccagcgtcagatggatgtattgacctgcctgcgtcagaattttaagcgagtatctctagagcgcgtgctgtccggcaaaggcatagtcaatatttacaacgccatctgccagatggaagggactgatccgacattaacgacacctccggatgtagtaacggcggcactggctaatagcaacccccaagcgctgacggcactggatactttctgtgagtccatgggtgccgcggcaggcaatttggccctgaccctaggtgccagagggggtatttatattgctggtggtgtggtgccgagattcagtgagttctttgtcaatagtggattccgcgaaaagtttgaagataagggccgctttgcctcttatctacagcccataccggtctatttggtgacgcgcaataatcttggtttgttgggtgcggcgaaaaaattacagaacacttag

SEQ ID NO: 85657 - protein, 324 aa, marine gamma proteobacterium HTCC2207
MTEQRWNLVADIGGTNARFAALHEGQLESEFEFYHSVEEYPQFSDLIIKLRDEIALATGFVGAPHSVCLAVACPADVEHVSFTNSHWEFTKTHLLEWFDCQELVVINDFEAVAHGITELGADDCIKIGGGEPQAHKPIGILGAGTGLGMAALISHSDGYHVLDTEGGHADFAPVGQRQMDVLTCLRQNFKRVSLERVLSGKGIVNIYNAICQMEGTDPTLTTPPDVVTAALANSNPQALTALDTFCESMGAAAGNLALTLGARGGIYIAGGVVPRFSEFFVNSGFREKFEDKGRFASYLQPIPVYLVTRNNLGLLGAAKKLQNT

SEQ ID NO: 85658 - DNA, 1086 bp, Desulfitobacterium hafniense DCB-2
  CDS (1)..(1086): transl_table=11
ttgccttatgcaggcattgaaaaaggccaactatacttggctggagacattggcggaaccaaaactctcctaggactttattccctggaaggcactgagcttgtcttagtcagggaaaggaatttccccagtaaagactggcaggacttaacagcgcttatacaaggatttttagatgaaatagccctaacgcctgaagacataaccggaggctgcctcagcctggccgggcccatcactcaagacaaatgttttctcaccaatttgaatcgggtgattgattgccctgacttgcggtcctccctgccattgcgcaggcccctgcttttggtcaacgaccttgaggctatggggcagggccttatggatttaagaggggaagatttaatttgtctcaacccttccgcagagagtccttcctcttcccttgcctcgtctcctgccctttccctcgccaggccctcacttaaccgggcactgatcgcccccggtacaggcttgggtcaggccatgatcctggctgacgggcgggtttgcgccacagaaggcgcccatggggactatgccccccgcaccgagcaggaagtacggttgtggcgctttctggcccaacgatacggtcatgtcagctatgagagagtcctctccggtcccgggctggcagatctctatcgttttctgtactgggaggctctttccccctctctccctggcccggcctctgactctatccctgctcctgattctagccttactcctgccgagatcacaaaaaaagccctcgacggaatctgtacactctgtacagaaacattggagctctttgtgaaaattctgggggcggaagcaggcaatctcgctttaaggactttggcctatggaggaatctatctgggcgggggcatcccccctaaaatcctgcccaagcttcaggaagatggcttcatggaggcctttctcgctaaaggccgtttgagagagcttttatcccagatccctatctatgtgatccttaatgaaaggactcctttgctgggagccgcccgtttggcggtggcagccgggtatccttttacatgctcttaa

SEQ ID NO: 85659 - protein, 361 aa, Desulfitobacterium hafniense DCB-2
MPYAGIEKGQLYLAGDIGGTKTLLGLYSLEGTELVLVRERNFPSKDWQDLTALIQGFLDEIALTPEDITGGCLSLAGPITQDKCFLTNLNRVIDCPDLRSSLPLRRPLLLVNDLEAMGQGLMDLRGEDLICLNPSAESPSSSLASSPALSLARPSLNRALIAPGTGLGQAMILADGRVCATEGAHGDYAPRTEQEVRLWRFLAQRYGHVSYERVLSGPGLADLYRFLYWEALSPSLPGPASDSIPAPDSSLTPAEITKKALDGICTLCTETLELFVKILGAEAGNLALRTLAYGGIYLGGGIPPKILPKLQEDGFMEAFLAKGRLRELLSQIPIYVILNERTPLLGAARLAVAAGYPFTCS

SEQ ID NO: 85660 - DNA, 1068 bp, Synechococcus sp. RS9916
  CDS (1)..(1068): transl_table=11
atggctgagaacacctatctggctggggacttgggcggcaccaagaccctgctctcggtctacggcgcagagaacggccagctccagcctctcttcagccagcgttacctctcaggcgagtggcaatgcctggaagacatgctccagcagttcctcaaggacgtgcccaccgagcatccgcagcctgtcaccagctgcattgccgtcgctggccccgtgagcgatggcagcgccaagctcaccaacttgccctggatgctgagcgaaacagctctcgtggccgccacggggctggctcgactcgaactggtcaacgatttcgccgtgctgatccatgggctgccccatttcgatcaagagcagcaagtcacgctgcaagcagccaaaacaaacaaccccggtcctgaaggcagcaggggacccgtggcgattcttggtgccggcacaggccttggcatggcgcgcgggatctccgatgccaatggctggatcgctcttgccagcgaaggaggccatcgcgaatttgcaccacgcaccgacgacgagtggcatctcgccagctggctcaaagccgacctcgacctggatcgcctgtcgattgaacggattgtcagcggcacaggcctcgggcatgtgatgcgctggcggctgcagcgaagtgacggtgctgggcaccccttgctgcgcgcggcggaagcctggcggacccgcgcggtcgatgacgacgactatcaggatctgccggctctcgtcggacaagcagcccagcgaggggatgccctggcccgcagcgcccttgacctctggctcggtgcctacggctcaacggccggagatctggcgctccaggagctctgcacgggggggctttggattggcggcggcacggccgccaaacaactcaagggcctgcaatcagcctcattcctggagccgatgcgacgcaaaggccgcttccgccccctgattgaaagcatcactgtgcaggcggtgattgatcccaatgccggattattcagcgcggcctgccgcgcccgtgacctggcagccgggatgacggcgacctga

SEQ ID NO: 85661 - protein, 355 aa, Synechococcus sp. RS9916
MAENTYLAGDLGGTKTLLSVYGAENGQLQPLFSQRYLSGEWQCLEDMLQQFLKDVPTEHPQPVTSCIAVAGPVSDGSAKLTNLPWMLSETALVAATGLARLELVNDFAVLIHGLPHFDQEQQVTLQAAKTNNPGPEGSRGPVAILGAGTGLGMARGISDANGWIALASEGGHREFAPRTDDEWHLASWLKADLDLDRLSIERIVSGTGLGHVMRWRLQRSDGAGHPLLRAAEAWRTRAVDDDDYQDLPALVGQAAQRGDALARSALDLWLGAYGSTAGDLALQELCTGGLWIGGGTAAKQLKGLQSASFLEPMRRKGRFRPLIESITVQAVIDPNAGLFSAACRARDLAAGMTAT

SEQ ID NO: 85662 - DNA, 993 bp, Alteromonadales bacterium TW-7
  CDS (1)..(993): transl_table=11
atgagcctaaactcttctacccaatttgatcctattttagttgccgatgttggtggcactaatgctcgttttgctttaattacatcgtttgatgacacaacaaatcaatttgcaattgagcataataatacgtttcctagtgctaattttggctcacttgaaaaagcactcgagcattacttatcaaccgtaccacatattgtaccaaaacgcgcatgtttggcggttgctggccctataaaagcagggcaagtgcatttaacaaatttaggatggcactttagtgttaacgattttaaggcttattttgagttaaatgagcttgatgttattaatgattttgctgcttttgcttacgctgcaccttacttaagcccatctcaaaatgttgttataaaagcaggtcaagctgatgacaatgcaaatattggtgtaatggggcccggaactggctttggggcggcttgtttagtccgaacatctcactctacttctgttttaagttcggaaggtgggcacatatcgcttgcagcggtaacagagcttgacgccttgttaattcaagaactaaaaaaagagcatcaacacgtgtctgtcgaaaccgttttttcaggccctggtattacccacttatataaagcaatggctgcagttaaagggcaatcgcctaaaaatcttgatgctgcacaaattagcagcttagcaaatagtggcgaatgtgatgtgtgcgatgcaaccctgaatcaattttgtgattggattggcagcgtagcaggcgatttatcactagcttatggcgcattgggtggcctatttataggtggcggaatattaccgcgtatgcaagctcgtttactggaaagccgttttgttgaacgcttttcgcaaaaagggattatgtcgcaatacacagggcaaatacctgttacattagtgacacaagacaacatacctttaattggcgcagcggcgtgtttgcacaacgccaattag

SEQ ID NO: 85663 - protein, 330 aa, Alteromonadales bacterium TW-7
MSLNSSTQFDPILVADVGGTNARFALITSFDDTTNQFAIEHNNTFPSANFGSLEKALEHYLSTVPHIVPKRACLAVAGPIKAGQVHLTNLGWHFSVNDFKAYFELNELDVINDFAAFAYAAPYLSPSQNVVIKAGQADDNANIGVMGPGTGFGAACLVRTSHSTSVLSSEGGHISLAAVTELDALLIQELKKEHQHVSVETVFSGPGITHLYKAMAAVKGQSPKNLDAAQISSLANSGECDVCDATLNQFCDWIGSVAGDLSLAYGALGGLFIGGGILPRMQARLLESRFVERFSQKGIMSQYTGQIPVTLVTQDNIPLIGAAACLHNAN

SEQ ID NO: 85664 - DNA, 966 bp, marine gamma proteobacterium HTCC2143
  CDS (1)..(966): transl_table=11
atgaataagccggtacatatcgttgcagacattggcggcactaacgctcgatttgcttatgtccaagctgatagcaatgagttattgggtatcgaaattttcccctgcgccgagtttccctttttgagagatgccattcgcgcctacatggagcgggggcacgttgatctcattgatgaaatttgcctagccgttgcgggtccagttgaatcggactggattgacctgcctaataatcattgggcttttagtcgcgctgaattgcagcaatctctggatgcttccgtgtctatcattaacgactttagtgcccaagtgcttagcattgatacgctgtctggagcagatttaaaatggattggtacaccgcgccccgctgatattcagcagcacgtcgtcgctgtattaggtccaggaaccggtctcggtgtatcggcgatgttatcaacaggggaaatattaccctcggaggcagggcatgtcgcctttgctcctacggacgagcatgagtgcgatttactaaaagtgttatggcagcgctaccagcgagtgtccgtagaacggattttgtccggcatgggacttgccaatctgtactgggcgaattgtcgcttggccggctttgagcgcgagctaactgcagctgacataagcgctggagctcacgctggtgacaaatattgtctgcgcgcggtcaatgacttttgtgcaatcttgggttctgtggctggcgaagtagcgttaatgatgggggctactgatggtgtttatgtgtccggtggtattattccccggcttattgaccttttggatgaggacctattccggcggcgtttcgatgagaaaggacgtttccgcgagatttgtgctgagatccccctggctatcatgctggccaaacaccccgggttacaaggctgtgtcaaagcgattaatgttaataagtatcgaaatatgcgttcctaa

SEQ ID NO: 85665 - protein, 321 aa, marine gamma proteobacterium HTCC2143
MNKPVHIVADIGGTNARFAYVQADSNELLGIEIFPCAEFPFLRDAIRAYMERGHVDLIDEICLAVAGPVESDWIDLPNNHWAFSRAELQQSLDASVSIINDFSAQVLSIDTLSGADLKWIGTPRPADIQQHVVAVLGPGTGLGVSAMLSTGEILPSEAGHVAFAPTDEHECDLLKVLWQRYQRVSVERILSGMGLANLYWANCRLAGFERELTAADISAGAHAGDKYCLRAVNDFCAILGSVAGEVALMMGATDGVYVSGGIIPRLIDLLDEDLFRRRFDEKGRFREICAEIPLAIMLAKHPGLQGCVKAINVNKYRNMRS

SEQ ID NO: 85666 - DNA, 969 bp, marine gamma proteobacterium HTCC2080
  CDS (1)..(969): transl_table=11
ttgctaggtgatattggcggcaccaatgcgcgctttggtatctgtgacgatcaaaaagaaccctaccaacttatcggctcttacgaagtagcggcttttccgacctttagcaatgtcttggagcagcttcaaagcgacctcattaaagcggggctatccatggccgacgctggagaatcttgcctcgcagtggcaggacgacccgatgtacaacccgtcagctttaccaatagtgcgtggcgttttgatcgagagctcgtcatgagcacactggggctgcagtccgtaagtattattaacgactttgccgcggctgctagggccctaccactgctatcagaaaaccatctggaaaaagtgggtggcggccgcgctgaaccaggttccccttgtgttgctttaggcccgggcacgggacttggtgtagcgactcttgctactacccattcaggagagccgttagtcatcagcggagagggtggacatgtcgactttgctcctgtcaccaacgtagaagcggcggtactcgatttcttaagggcccgcttcggtcgcgtctcgatagaaaggctttgctgtggcgaaggtatcaataacatttatcaagctttggccgactaccgcaacctgaaaatcaagtacagcagcgccgctgaaattggggccgcggctctaagtgccgatgacgcgctatcaaaagaaactatggcgatgttttttgcagtacttggcgcagctgcgggtaatttcgccctaacacttggagctaaaggtggtatctacatcgcaggcggtattgtcccgcgatacctagaccttctgcggcgcagtgatttcagggcccgctttctcgccaagggtcgttttgctgactatctttcagacattcccacatttgtggtcacccatagccaactcggcttattgggggcctccgcgtcactcaatgatccccatattagaggttaa

SEQ ID NO: 85667 - protein, 322 aa, marine gamma proteobacterium HTCC2080
MLGDIGGTNARFGICDDQKEPYQLIGSYEVAAFPTFSNVLEQLQSDLIKAGLSMADAGESCLAVAGRPDVQPVSFTNSAWRFDRELVMSTLGLQSVSIINDFAAAARALPLLSENHLEKVGGGRAEPGSPCVALGPGTGLGVATLATTHSGEPLVISGEGGHVDFAPVTNVEAAVLDFLRARFGRVSIERLCCGEGINNIYQALADYRNLKIKYSSAAEIGAAALSADDALSKETMAMFFAVLGAAAGNFALTLGAKGGIYIAGGIVPRYLDLLRRSDFRARFLAKGRFADYLSDIPTFVVTHSQLGLLGASASLNDPHIRG

SEQ ID NO: 85668 - DNA, 963 bp, Pseudomonas putida GB-1
  CDS (1)..(963): transl_table=11
atgaaagacctgctggttggcgacatcggcggcaccaatgcccgttttgcgttgtggcgtgacaaccagctgcatgatgtgaaggttttcgccactgcagactacaccagcccggagcaggccattgaggcttacctcgaaggccagggcatcgcccgcggtggattggcggcggtatgcctggcggtagctgggccggtcgatggcgacgaattccgcttcaccaacaaccattggcgtctgagccgcaccgccttctgcaagaccttgcaggtcgatcagctgttgctgatcaacgatttcactgccatggcgctgggcatgactcgcctgcgcgaaggggagttccgcgaagtgtgccccggccaggccgacccttcgcggccggcgctggtgatcgggccagggacaggcctgggggtgggctcgctgctgcgccttggtgagcagcactggcaagccctgccaggtgaaggcgggcatgttgacctgccggtgggcaatgcccgcgaagcggcgatccaccaacacatccatgggcagattggccatgtcagcgccgagaccgtgctcagtgggggtggcctggtgcggttgtaccaggcgatctgcgcactggacggcgacacccccaggcacaagaccccggcgcaggtcaccgatgccgcactgggcggcgagcctcgagcgctggcggtggtcgagcagttctgccggtttcttgggcgcgtggcgggtaacaatgtgctgacgctgggcgcgcgaggtggggtctatatcgtcggcggcgtgattccgcgcttcgccgagttgttcctgcgtagcgggtttgccgccagttttgccgacaagggttgtatgagtggttattttgctggcgtgccggtgtggctggtgacggccgagttttccgggttgctgggagccggggtggccttgcagcaggctttggatcatagctag

SEQ ID NO: 85669 - protein, 320 aa, Pseudomonas putida GB-1
MKDLLVGDIGGTNARFALWRDNQLHDVKVFATADYTSPEQAIEAYLEGQGIARGGLAAVCLAVAGPVDGDEFRFTNNHWRLSRTAFCKTLQVDQLLLINDFTAMALGMTRLREGEFREVCPGQADPSRPALVIGPGTGLGVGSLLRLGEQHWQALPGEGGHVDLPVGNAREAAIHQHIHGQIGHVSAETVLSGGGLVRLYQAICALDGDTPRHKTPAQVTDAALGGEPRALAVVEQFCRFLGRVAGNNVLTLGARGGVYIVGGVIPRFAELFLRSGFAASFADKGCMSGYFAGVPVWLVTAEFSGLLGAGVALQQALDHS

SEQ ID NO: 85670 - DNA, 1035 bp, Agrobacterium tumefaciens; identical to SEQ ID NO: 85514
  CDS (13)..(1035): transl_table=11

SEQ ID NO: 85671 - protein, 340 aa, Agrobacterium tumefaciens
MPKTSDTEYLSFPILLGDIGGTNARFSILIDSFAEPVHLTTVKTAEYPGIDDAIQQAVLDKTSLQPVSTILAIAGPIEGDEIPLTNCHWVVKPKDMLAKLGLKDVIVINDFEAQALAIAALDDDNREPIGSGKKDMLASRVVLGPGTGLGVAGLVYARHMWFPVPGEGGHIDIGPRSARDYVVFPHIETIEGRVAGEQILCGRGLVNLYRAICKADGIEPVFSDPADITSQGLSGQNAQAKETLSLFSTYLGRVAGDLALIFMAKGGVYLAGGISQKIIPALKSPEFRAAFEDKAPHSALMRTIPTFVVTHPQAALSGLATYARTPADFGLALDGRRWRA

SEQ ID NO: 85672 - DNA, 1029 bp, Anabaena variabilis
  CDS (1)..(1029): transl_table=11
atgaccttattgttagcaggagatatcggcgggacgaaaactattttgcgattggtagaagtatcaaattcgtcggaactgcacaatatttatgaggaaagttaccagagtggggattttcccgatttagtgccgatggtgcagcaatttttagtcaaggctaatatacctagtcatcccgaaaaggcttgctttgcgatcgccggcccagtggtgaataatactgccaagctgaccaacttagtctggtttttggatactgaacggctagcacaagaattaagtatccccttcatttccctcattaatgattttgctgctgttggctatgggatttttgggttaagtaaacaagatttgttcaccttacaagctggtaaacatcaaactgaagcgcctattgctattattggtgctggtactggattaggacaaggatttttaattaaacagggaaaccagtatcaagttttcccatcggaaggtggacacgctgactttgccccccgcaacgagttagagtttcagttattgaaatatctgctggataaacatgatatccagcgtgtttctgtggaacgggtggtttctggacagggggttgtcgccatttatcaatttttacgcgaccgcaaattagcgatagaatccccagaaattgcccaagttgtccgcacttgggaacaacaagcaggacaggctgaaaaaaccgttgatcctggtgcagctattggtaaagccgcagtccaaggaagcgatcgcctttccgaacaaaccctacaattatttattgatgcctatggcgcagaagcgggaaatcttgccctcaaactcctaccatacggcggtttgtacattgcgggtgggattgcgcctaaagtcttgccattgattgaaaatagcaatttcttgcttaatttcagccaaaaaggcagaatgcgtcctctgctagaagaaatacccgtgcatatcattcttaacccacaagtgggactcataggtgctgctttgtgtgctgctaggttataa

SEQ ID NO: 85673 - protein, 342 aa, Anabaena variabilis
MTLLLAGDIGGTKTILRLVEVSNSSELHNIYEESYQSGDFPDLVPMVQQFLVKANIPSHPEKACFAIAGPVVNNTAKLTNLVWFLDTERLAQELSIPFISLINDFAAVGYGIFGLSKQDLFTLQAGKHQTEAPIAIIGAGTGLGQGFLIKQGNQYQVFPSEGGHADFAPRNELEFQLLKYLLDKHDIQRVSVERVVSGQGVVAIYQFLRDRKLAIESPEIAQVVRTWEQQAGQAEKTVDPGAAIGKAAVQGSDRLSEQTLQLFIDAYGAEAGNLALKLLPYGGLYIAGGIAPKVLPLIENSNFLLNFSQKGRMRPLLEEIPVHIILNPQVGLIGAALCAARL

SEQ ID NO: 85674 - DNA, 996 bp, Azoarcus sp
  CDS (1)..(996): transl_table=11
atgcccactggctgctccgacacctacccccggctgatcggcgacatcggcggcacgcacgcccgctttgccgtcatcgactcgccgggcagcccgccgacgcgctttcgcacgctgtgctgtgacgatcacgccggactcctggaggccgtccaggcttacctgctgctggaacggggacttgccgggccgcgtgtcgccgcgttcggcatcgcgaatcccgtcgagggcgatcgggtacggatgacgaatcacgactggtcgttttcgatcgagcagctgcgcatcgagctcgggctcgcgcggctcgtggtcctcaacgacttcaccgcgctcgcgctgtcgctgccccgactgcaggccggtgaacggcgtcagatcggcggcggcaacgagtgcgccgggcggccggtcgcgctgatcggaccgggcaccggtctcggcgtgtcggggctggtgcgctgcggcaacggctacgcgccgctcgaaggcgaaggcggccacgtcacgctggcggcgtccacgccacgcgaagcggagctcatcgcagtgctcgccgcgcgcttcgaccacgtgtcggccgagcgggcgctgtcgggaccggggctgatcgccctgcacgacgcgatccggcagctcgcgggcgccccgccgctggccctcgaagcggacgagatcagcgcccgggcgatggccgcgagctgtccatggtgcgccgaggcgctgcaggtcttctgcgggatgctcggcagcgtcgccggcgacctcgcgctgacgctgggcgcattcggcggcgtgtatatcggggggggaatcgtgccgaagctcggcgacttcttcgatcgatcggatttccgccggcgcttcgaacagaaaggacggttttccgaatacctcgcgcgcatcccctgttacgtcatcctcgccgaatatcctgcgctgctcggcgccgcgacggcgctcgacaacgcgctcgccggcgaaacgggcacctga

SEQ ID NO: 85675 - protein, 331 aa, Azoarcus sp
MPTGCSDTYPRLIGDIGGTHARFAVIDSPGSPPTRFRTLCCDDHAGLLEAVQAYLLLERGLAGPRVAAFGIANPVEGDRVRMTNHDWSFSIEQLRIELGLARLVVLNDFTALALSLPRLQAGERRQIGGGNECAGRPVALIGPGTGLGVSGLVRCGNGYAPLEGEGGHVTLAASTPREAELIAVLAARFDHVSAERALSGPGLIALHDAIRQLAGAPPLALEADEISARAMAASCPWCAEALQVFCGMLGSVAGDLALTLGAFGGVYIGGGIVPKLGDFFDRSDFRRRFEQKGRFSEYLARIPCYVILAEYPALLGAATALDNALAGETGT

SEQ ID NO: 85676 - DNA, 1047 bp, Brucella melitensis; identical to SEQ ID NO: 85518
  CDS (16)..(1047): transl_table=11

SEQ ID NO: 85677 - protein, 343 aa, Brucella melitensis
MQAIIDAEQSFKFPVLVGDIGGTNARFSILVDSNAEPKEFPVLQTADYATIDEAIQHAILDQTAIQPRSVILAVAGPVDGDEIDLTNCDWVVRPKKMIADLGFEDVTVLNDFEAQALAVVSLEGHHMEQIGGKPEEAVATRVVLGPGTGLGVAGLVCTRHAWVPVPGEGGHIDIGPRTERDYQIFPHIERIEGRVTGEQILSGRGLRNLYLGICAADKITPTLETPVDITSAGLDGSNPQAAETLDLFATYLGRLAGDLALIFMAHGGVYLSGGIPVRILSALKAGSFRAAFEDKAPNKAIMRDIPVRVITYQLAALTGLSAFARTPSRFEVSTEGRRWRMRR

SEQ ID NO: 85678 - DNA, 1032 bp, Brucella suis
  CDS (1)..(1032): transl_table=11
atgcaagcgattatcgacgccgaacagagtttcaagtttccggttctcgtcggcgatatcggcggcaccaatgcccgtttttctatcctcgtggattcaaacgcagagccgaaggagtttcccgtgctccagacggcggattatgccacaatagacgaagcgatccagcacgccattctggatcagacggccatccagccgcgctctgtcattctggccgtggcaggcccggtggacggcgacgagatcgacctcaccaattgcgactgggtcgtgcgtcctaaaaagatgatcgctgatctgggctttgaagacgtgaccgtcctcaatgatttcgaggcgcaggcccttgccgtggtttcgctggaaggccaccatatggaacagatcggcggcaaaccggaggaggctgttgccacccgcgtcgtgctcggccccggcacgggccttggcgtggcaggtctggttcgcacacgtcatgcatgggttccggttcccggtgaaggcggtcatatcgatatcggtccacgcaccgaacgcgactaccagattttcccgcatatcgaacgcatcgaagggcgtgtcaccggcgagcaaattcttagcgggcggggcctgcgcaacctctatctgggcatctgcgccgccgacaagatcacgcccacccttgagacgccagtagacattacatccgccggactggacggcagcaatccacaagccgcagaaacgcttgacctcttcgccacctatctggggcggcttgcgggcgaccttgcgctcattttcatggcgcatggcggcgtttatctttcgggtggcatcccggtgcgcatcctttccgccctcaaggccggttcgttccgcgcagccttcgaggacaaggccccgcacaaggccatcatgcgcgacataccggtccgcgttatcacatatcaactggcggccttaaccgggctttccgctttcgcccgcaccccctcgcgctttgaagtttcgaccgagggccgccgctggcgcatgcgccgctag

SEQ ID NO: 85679 - protein, 343 aa, Brucella suis
MQAIIDAEQSFKFPVLVGDIGGTNARFSILVDSNAEPKEFPVLQTADYATIDEAIQHAILDQTAIQPRSVILAVAGPVDGDEIDLTNCDWVVRPKKMIADLGFEDVTVLNDFEAQALAVVSLEGHHMEQIGGKPEEAVATRVVLGPGTGLGVAGLVRTRHAWVPVPGEGGHIDIGPRTERDYQIFPHIERIEGRVTGEQILSGRGLRNLYLGICAADKITPTLETPVDITSAGLDGSNPQAAETLDLFATYLGRLAGDLALIFMAHGGVYLSGGIPVRILSALKAGSFRAAFEDKAPHKAIMRDIPVRVITYQLAALTGLSAFARTPSRFEVSTEGRRWRMRR

SEQ ID NO: 85680 - DNA, 996 bp, Caulobacter crescentus
  CDS (1)..(996): transl_table=11
atggacggcaatcacagcggcgggctcggcctcgtcggcgacatcggcggtacgaacgcccgcttcgccctggtcgagttcgacggtcaggacccgcgcctgatcgagccgacggcctataggggcgaggactacggcacggccgaggacgccatcgaggagtatctccgcaaggtcggtgtcaagcatcctgaccaggcggtggtcgctgtggccgggccgatcgaccacggtcaggtccacatgaccaatctggactggcggatctccgaggacggcctgcgccgcgcaggcggttttcggaacgccaagctgatcaacgacttcaccgcccaggcgctggccgcgccgcgcgttggccctaaggacctgcgccagatcggcgaattgccgacgtcgggggagggcgatctggcgatcctgggtccaggcaccggcttcggcgtcgcaggccttgtccgtcgccatggccaggagatcccgctggccaccgagggtggtcacgtcgccttcgcgccggtcgatgacgtcgagatcgaggtgctccgcgccctgacccggcgcctggacggcggtcgggtgtcggtcgagcggatcctgtcgggtcccggcatggaggacctccatgtggatctggcggccgctgaagggcgcggtgtcgaggcgctgaccgccaagcagatcaccgagcgggccgtagagggctgcgccgacagcctggcgacggtgaaccgtttctgcgccatcctgggctcaacggcgggcgacatcgctctgaccttgggcgcacgcggcggtgttttcatcgccggcggcatcgcaccacgcatcatcgacattctggagaagagcccgttccgcgagcgcttcgacagcaaggggcgtctgtccggcttcacccgttcgatcccgacgcacgtgatcctgcatccgcacaccgccctgatcggtgcggcggtggcgctcacgccggagggccgtgcggcggtgtcgtag

SEQ ID NO: 85681 - protein, 331 aa, Caulobacter crescentus
MDGNHSGGLGLVGDIGGTNARFALVEFDGQDPRLIEPTAYRGEDYGTAEDAIEEYLRKVGVKHPDQAVVAVAGPIDHGQVHMTNLDWRISEDGLRRAGGFRNAKLINDFTAQALAAPRVGPKDLRQIGELPTSGEGDLAILGPGTGFGVAGLVRRHGQEIPLATEGGHVAFAPVDDVEIEVLRALTRRLDGGRVSVERILSGPGMEDLHVDLAAAEGRGVEALTAKQITERAVEGCADSLATVNRFCAILGSTAGDIALTLGARGGVFIAGGIAPRIIDILEKSPFRERFDSKGRLSGFTRSIPTHVILHPHTALIGAAVALTPEGRAAVS

SEQ ID NO: 85682 - DNA, 1047 bp, Chromobacterium violaceum
  CDS (1)..(1047): transl_table=11
atgtctactggtctgcctgaagcctggccgcggctgctcggcgacgtcggcggcagcaacgcgcgcttcgcgctggaaaccgcgcccggggtgattgaagacatcctgacgctgtccaatgagcgctacccgacgctggaggacgcgctgcgcgactacctggcccaggtcggcgcgcgccgcgtcgcccacgccgccatcggcatcgccaatccgctgaacggcgacctggtgcggatgaccaattgccattggtcgttttccatcgaagcgacgcgccgcgcgctgggcctctccacgctgctgctgctcaacgacttcaccgcgctggcgctggccctgcccaggctgccgcgccgggagctggcccaggtgggcggcggcgcgccgcggccggacgcgccgctggcgctgatcggccccggcaccgggctgggcgtgtcggcgctggtgccgcacgccggcggctggcgcgcgctggccggcgagggcggccacacctcgttcgcgccggccaacgaacgcgaaatcggcatctggcgctacgcgtccgcccgcttcggccacgtgtcgcacgagcggctgctgtccggctccggcctcagcctgctgcaccgggcgctgtgcgcgctggacggggcggaagaggccggcctggcgccggccgaagtcagcgcccgcggcctgtccggcgccgacgcgcgctgccgcgaagcactggaaatcttctgcgcgctgctgggttcggcggccgggaatctggccttgaccctcggtgcccgtggcggggtgtacataggtggtggtattgtgccgcgtttgagcggtttttttgaacaatccccatttcgccgccgtttcgaggacaaggggcggatgtcggcctatctggccgacatcccggtttacctgatcaccagcgcctacccggccctgccgggcgtggccgcccatctggcggaccacctggcgccgcgcagcgacccggccccggtggcagcgcccacccatcctcgcggcggcacagcaggagacatgcatgcttga

SEQ ID NO: 85683 - protein, 348 aa, Chromobacterium violaceum
MSTGLPEAWPRLLGDVGGSNARFALETAPGVIEDILTLSNERYPTLEDALRDYLAQVGARRVAHAAIGIANPLNGDLVRMTNCHWSFSIEATRRALGLSTLLLLNDFTALALALPRLPRRELAQVGGGAPRPDAPLALIGPGTGLGVSALVPHAGGWRALAGEGGHTSFAPANEREIGIWRYASARFGHVSHERLLSGSGLSLLHRALCALDGAEEAGLAPAEVSARGLSGADARCREALEIFCALLGSAAGNLALTLGARGGVYIGGGIVPRLSGFFEQSPFRRRFEDKGRMSAYLADIPVYLITSAYPALPGVAAHLADHLAPRSDPAPVAAPTHPRGGTAGDMHA

SEQ ID NO: 85684 - DNA, 993 bp, Colwellia psychrerythraea
  CDS (1)..(993): transl_table=11
atgaaaaattcacaagatactcaagtaattaatttagtggctgatattggtggtaccaatatcagactagcaatcactgataaagacaataatatcaacgaaattaagacttatcaatgcaaggactttccacatttaagtaatgtgatttatcattatttaaaggaaaatggcttacttaactcccaagttaatgcttgtttagctatagcttgtcctgttgatacagactcaatctcaatgacaaacttgccctggaagttttcacaaaaacagcttaaggaagagcttaaattacatagtttaacgctaataaatgattatactgctattgcaatggctattccgttattgagtgataagcaaaaagtaaaaattggccacggcgaagccgaaaataaacagcctattgcggtatgtggcccaggaactggtctcggtgttgctaatttagtaaacattaacaatcactggtactgtttaggtggcgaagggggacataccgattttgcaccggtagatgaacttgatgtaaaaatatttcaacaattaaaaacaactaaaaaacgactctcttatgaacagttactttctggctatggattagaacaaatataccaagcattagtaataatcaataatcaagaagcgacaaacgctgagcaaagtaagttatccgctaaagaaattagtactcaagcaatagctggaacttgtcctatatgccaacaagcgttgtcacaattttgcaaaattttaggaagcttttcgggtaacttagcattaaccacgggctcttttggtggcgtgtacatagcgggtggcatagtgcctaggtttatcgattatctgaaaaacagtgagtttagagcaaggtttgaaactaaaggacgtatgtctcatttaaacgagcagatacctacttacatcattaccgaaagccaaccaggattactcggtgcggctgcttaccttaatcaagttttcccatag

SEQ ID NO: 85685 - protein, 330 aa, Colwellia psychrerythraea
MKNSQDTQVINLVADIGGTNIRLAITDKDNNINEIKTYQCKDFPHLSNVIYHYLKENGLLNSQVNACLAIACPVDTDSISMTNLPWKFSQKQLKEELKLHSLTLINDYTAIAMAIPLLSDKQKVKIGHGEAENKQPIAVCGPGTGLGVANLVNINNHWYCLGGEGGHTDFAPVDELDVKIFQQLKTTKKRLSYEQLLSGYGLEQIYQALVIINNQEATNAEQSKLSAKEISTQAIAGTCPICQQALSQFCKILGSFSGNLALTTGSFGGVYIAGGIVPRFIDYLKNSEFRARFETKGRMSHLNEQIPTYIITESQPGLLGAAAYLNQVFP

SEQ ID NO: 85686 - DNA, 966 bp, Escherichia coli O157
  CDS (1)..(966): transl_table=11
atgacaaagtatgcattagtcggtgatgtgggcggcaccaacgcacgtcttgctctgtgtgatattgccagtggtgaaatctcgcaggctaagacctattcagggcttgattaccccagcctcgaagcggtcattcgcgtttatcttgaagaacataaggtcgaggtgaaagacggctgtattgccatcgcttgcccgattaccggagactgggtggcaatgaccaaccatacctgggcgttctcaattgccgaaatgaaaaagaatctcggttttagccatctggaaattattaacgattttaccgctgtatcgatggcgatcccgatgctgaaaaaagagcatctgattcagtttggtggcgcagaaccggtagaaggtaagcctattgcggtttacggtgccggaacggggcttggggttgcgcatctggtccatgtcgataagcgttgggtaagcttgccgggcgaaggcggtcacgttgattttgcgccgaatagtgaagaagaggccattatcctcgaaatattgcgtgcggaaattggtcatgtttcggcggaacgcgtgctttctggcccaggactggtgaatttgtatcgcgcaattgttaaagccgacaaccgcctgccagaaaatctcaagccaaaagatattaccgaacgcgcgctggctgacagctgcaccgattgccgccgtgcgttgtcgctgttttgcgtcattatgggccgttttggcggcaatctggcgctcaatctcgggacatttggcggcgtgtttattgcgggcggtatcgtgccgcgcttccttgagttcttcaaagcctctggtttccgtgccgcatttgaagataaagggcgctttaaagaatatgtccatgatattccggtgtatctcatcgtccatgacaatccgggtcttctcggttccggtgcacatttacgccagaccttaggtcacattctgtaa

SEQ ID NO: 85687 - protein, 321 aa, Escherichia coli O157
MTKYALVGDVGGTNARLALCDIASGEISQAKTYSGLDYPSLEAVIRVYLEEHKVEVKDGCIAIACPITGDWVAMTNHTWAFSIAEMKKNLGFSHLEIINDFTAVSMAIPMLKKEHLIQFGGAEPVEGKPIAVYGAGTGLGVAHLVHVDKRWVSLPGEGGHVDFAPNSEEEAIILEILRAEIGHVSAERVLSGPGLVNLYRAIVKADNRLPENLKPKDITERALADSCTDCRRALSLFCVIMGRFGGNLALNLGTFGGVFIAGGIVPRFLEFFKASGFRAAFEDKGRFKEYVHDIPVYLIVHDNPGLLGSGAHLRQTLGHIL

SEQ ID NO: 85688 - DNA, 966 bp, Erwinia carotovora subsp
  CDS (1)..(966): transl_table=11
atgacgcactttgttttagtgggcgatgtcggcggcaccaatacgcgtttggcgctgtgtgacgccatgacgggcgaattgtcgcaaattgagacgtattccgggctggatttcccttctctggaaggggcgatccgcgattatctcgattcgcggcaggtcacggtgcaggatgcctgtatcgcgattgcctgcccgattaccggtgactgggtagcgatgacgaaccacacctgggcattttccatcgctgaaatgaaagcgagtctgggtttacgccactttgaggttatcaacgattttaccgcagtttccatggcggttccggtgatggggcgtgagagtttgctccagttcggtggtggggaacctgtgccgggtaagcccgttgccgtgtatggcgcaggcacggggctcggtgtcgctcatctggttcatgttgccaaccaatgggtcagcctgccgggtgaaggtgggcatgtggatttcgcggccaatagcgatgaagaagacaacattctgactattttgcgccaatcgttggggcatgtttccgcggagcgcttgctgtctggtcaggggctggtgaatatttaccgcgccatcgtgctatctgacgatcgtacaccggaggcgctggagccgaaggatattaccgaacgtgccgtcaacaatactgacgtggattgtcgtcgcgcgctgtcgctattctgcgtcatcatggggcgcttcggtggtaatttggcgctgaatttaggcacgtttggcggcgtttatattgctggcggcatcgtaccgcgctttctggaattttttaaagcctctggctttcgtgcggcttttgaagataaagggcgatttaaaggctatatgcaggatatccccgtgtatctgattacgcatgaacagccgggattaatgggggcaggggcttatctgcgacaggtgctgggcagcgcgctgtaa

SEQ ID NO: 85689 - protein, 321 aa, Erwinia carotovora subsp
MTHFVLVGDVGGTNTRLALCDAMTGELSQIETYSGLDFPSLEGAIRDYLDSRQVTVQDACIAIACPITGDWVAMTNHTWAFSIAEMKASLGLRHFEVINDFTAVSMAVPVMGRESLLQFGGGEPVPGKPVAVYGAGTGLGVAHLVHVANQWVSLPGEGGHVDFAANSDEEDNILTILRQSLGHVSAERLLSGQGLVNIYRAIVLSDDRTPEALEPKDITERAVNNTDVDCRRALSLFCVIMGRFGGNLALNLGTFGGVYIAGGIVPRFLEFFKASGFRAAFEDKGRFKGYMQDIPVYLITHEQPGLMGAGAYLRQVLGSAL

SEQ ID NO: 85690 - DNA, 1029 bp, Mesorhizobium sp
  CDS (1)..(1029): transl_table=11
atggcgtattccaccgaccatgacgtggtgctcgatttcccgattttgatcggtgacatcggcggcaccaatgcgcgcttcgccattgtcgtggactcctatgccgagccgcgggaatttcccgtcgtacagacggccgatttcgcaacgatagaggacgccatccagacggcgatccttgaccagacgcatctcattccgcgctccgccgtcctggcggttgcgggacccgtgaacggagacgaaatcgatctcaccaattcaaattgggtggtccggccgcgcgagatgatggcccatctgggtttcagcgatatcgtcgtactcaacgatttcgaggcgcaggcgctggctgtcgtggcgcttggggaagagcatctggaaaagattggcggcaacgtcgccgaaaccgtcgggagccgcgtcgtcctggggccggggaccggcctcggcgtggctggcctggtgcacgcgcgccgaacctggatccccgttccgggcgagggcggccatatggatcttggaccaaggacagcgcgcgacgagcagatcttcccgcatctggagcggatcgaggggagggtttccggcgaacaggtgctttgcgggcgcggtctcgtcaacctctaccgtgcgatcgcaaaggcggatgccaaggaggctgctttctcctcgcccgctgagattacgacggccgggctggcgcaggccgatgagatcgcggttgagaccctgaacctcttcgtgacctatctcggcagggtcgcgggtgatctcggtcttgtgttcatgagccggggcggagtgttcctgacaggaggcatcgcccagaagatcgtgccggcgctgaagaacagcctgttccgcgccgcctttgaagacaaggcgccgcacaatgaactgatggcgtccatgccggtttatgtcatcacccatccgctggccgcgctgcacgggcttgcggcctatgcccgaacgccagcgcgcttcggcgtcgaaacggcgggccggcgctggcgcttgcgctga

SEQ ID NO: 85691 - protein, 342 aa, Mesorhizobium sp
MAYSTDHDVVLDFPILIGDIGGTNARFAIVVDSYAEPREFPVVQTADFATIEDAIQTAILDQTHLIPRSAVLAVAGPVNGDEIDLTNSNWVVRPREMMAHLGFSDIVVLNDFEAQALAVVALGEEHLEKIGGNVAETVGSRVVLGPGTGLGVAGLVHARRTWIPVPGEGGHMDLGPRTARDEQIFPHLERIEGRVSGEQVLCGRGLVNLYRAIAKADAKEAAFSSPAEITTAGLAQADEIAVETLNLFVTYLGRVAGDLGLVFMSRGGVFLTGGIAQKIVPALKNSLFRAAFEDKAPHNELMASMPVYVITHPLAALHGLAAYARTPARFGVETAGRRWRLR

SEQ ID NO: 85692 - DNA, 987 bp, Neisseria meningitidis serogroup A
  CDS (1)..(987): transl_table=11
atgtcttctacgccgaataaacaagccggatatccccgactggtcgccgatatcggcgggacgaatgcacgctttgcgctggaaaccgcgccgcgcgtcattgaaaaagccgccgtgcttccgtgtaaagactacgatacggttaccgatgcggtgcgtgcctatctgaatcaaagcggtgcaacagccgtacggcacgcggcatttgccatcgccaacccgattttgggcgactgggtgcagatgaccaaccaccattgggcgttttccatcgaaaccacccgtcagactttggggctggacaccctcatccttttgaacgactttaccgcgcaggcattggcggtaacgcagacttcaagcaaagacctgatgcaggtaggcgggcaaaagcctgtcgaatttgcccccaaagccgttatcggccccggtaccggcctgggcgtgagcggattggtgcacagccacgcaggctgggtggctttggcaggcgagggcgggcataccagtttcccgccgtttgacgatatggaagtgctgatttggcagtacgccaaaaacaaatacggccatgtttccgccgaacgctttttgagcggcgcgggcttgagcttggtttacgaggctttggctgcaaaacagaaagccaaacccgccaaactgatgccgtctgaaatcacggaaaaggctttgagcggcgcgtcgcctttgtgccgtcagactttggacatcttctgcgccatgctcggcacggttgcttccaacctcgccctgacgctgggtgcgcgcggcggcgtgtacctgtgtggcggcattattccccgcgtgttggaatatttcaaaacttccccgttccgcagccgtttcgagaacaagggcaggtttgaagcatatcttgccgcgattcccgtgtatgtcgtcttgagcgagtttcccggaatttccggtgcggctgcggctctcgacaaccatttgagaaacgtttaa

SEQ ID NO: 85693 - protein, 328 aa, Neisseria meningitidis serogroup A
MSSTPNKQAGYPRLVADIGGTNARFALETAPRVIEKAAVLPCKDYDTVTDAVRAYLNQSGATAVRHAAFAIANPILGDWVQMTNHHWAFSIETTRQTLGLDTLILLNDFTAQALAVTQTSSKDLMQVGGQKPVEFAPKAVIGPGTGLGVSGLVHSHAGWVALAGEGGHTSFPPFDDMEVLIWQYAKNKYGHVSAERFLSGAGLSLVYEALAAKQKAKPAKLMPSEITEKALSGASPLCRQTLDIFCAMLGTVASNLALTLGARGGVYLCGGIIPRVLEYFKTSPFRSRFENKGRFEAYLAAIPVYVVLSEFPGISGAAAALDNHLRNV

SEQ ID NO: 85694 - DNA, 1032 bp, Ralstonia eutropha
  CDS (1)..(1032): transl_table=11
atgagcaacgccatggctgcttccgccgtgcccgatgacaccgcctatccgcgtttgctggccgacgtgggcgggaccaatgtgcgcttcgcactggaaacggcgccgatgcagatcggcgccgtgaccgcgctgaaggtggccgaccatccgtcgctggaagcggccatgcgccactaccgcgatgcgctgtctgcctcgggtgccaagttgccgcgccatgctgccatcggtctcgcgaatccggtcacgggcgaccacgttcgcctgaccaaccacgactgggccttctcgatcgaagccacgcggcaagcgctcgggctgcagacgctcgtggccatcaacgatttcacgtcgctggcgctgggcttgccttaccttggcgcgaacgatctcgtgcagatccgctccggccaagccgtggccactgcgccgcgtgcgctgatcgggcctggcaccgggttgggcgtgtcggggctggtgcccgcgccgggcggtggcgccgtggcgctggcgggggagggcggccatatcgaactcatgcccgtgaccgacgacgagtggatcgcctggcgcgccacgcacgcgagccttgggcgggtgtcggcggagcggttgttgtcaggcatggggctgtcgcagatccatgccgcgctgtccgcagaaacgggtacgcgcgtggacgtgccgctgacgcccgagcaggtcacgacgggtgccttcgcacggcacgatccgctctgcgagcgcaccatggcggtgttttttggcctgctcggatctgtcgcagcggacatcgcgctggtaatgggcgcgcttggcggcgtgtatctcggtggcggcatcctgccgcgcttcgtgccagcgctgcaggcgtcggccttcaatgcgcgcttcgtcgccaagggccgcatgcgcggctatctcgacaagctgcctgtctacgtgattaccgcgagctatcccgcgctgccgggcctggcgcgcgcgctggccgatacgctcagtcacggccgcccacatatcggataa

SEQ ID NO: 85695 - protein, 343 aa, Ralstonia eutropha
MSNAMAASAVPDDTAYPRLLADVGGTNVRFALETAPMQIGAVTALKVADHPSLEAAMRHYRDALSASGAKLPRHAAIGLANPVTGDHVRLTNHDWAFSIEATRQALGLQTLVAINDFTSLALGLPYLGANDLVQIRSGQAVATAPRALIGPGTGLGVSGLVPAPGGGAVALAGEGGHIELMPVTDDEWIAWRATHASLGRVSAERLLSGMGLSQIHAALSAETGTRVDVPLTPEQVTTGAFARHDPLCERTMAVFFGLLGSVAADIALVMGALGGVYLGGGILPRFVPALQASAFNARFVAKGRMRGYLDKLPVYVITASYPALPGLARALADTLSHGRPHIG

SEQ ID NO: 85696 - DNA, 1026 bp, Rhizobium leguminosarum bv
  CDS (1)..(1026): transl_table=11
atgtcaaaaccgaacaacagcaccgctccgctgcctttcccgatcctgatcggcgatatcggcggcacgaatgcccgcttctccatcctgaccgatgcctatgctgaaccgaagcagtttccgaacgtgcgcacggcggatttcgcgacgatcgacgaagcgatccagcaaggcgtgctcgacaagaccgccgtgcagccgcgctcggcgatcctcgccgtcgccggcccgatcaacgacgacgagatcccgctgaccaattgcgactgggtggtgcggccgaagacgatgatcgagggcctcggcatggaggatgtgctcgtcgtcaacgatttcgaggcgcaggcgctggcaatcgccgcgctttcggatgaaaatcgcgaacggatcggcgacgctacccgcgacatgatcgcctcccgcgtcgtactcggaccgggcaccggcctcggcgtcggcgggctcgtgcatgcccagcacagctggatcccggttcccggcgaaggcggccatgtcgatctcgggccgcgcagcaagcgcgattatgacatcttcccgcatatcgagacgatcgaaggccgcgtttcggccgagcagatcctctgcgggcgcggcctcgtcaacctctatcatgccatctgcgtggtcgatggcatcgagccgacgatgaaggatcccgccgacatcacctcgcacgcacttgccggcagcgacaaggcagccgtagagaccgtctcgctgtttgccacctatctcggccgcgtggcgggcgacttggcgatggtgttcatggcgcggggcggcgtctatctttccggcggcatctcgcagaagatcatcccggcgctgaagaagccggaattccgcatcgccttcgaggacaaggcgccgcatacggcgctgcttcggaccatcccgacctatgtggtgacacatccgctggcagcgcttgccgggctttcctcctatgcgcgcatgccggcgaatttcggcgtctcgacggaaggccgccgctggcgccgctaa

SEQ ID NO: 85697 - protein, 341 aa, Rhizobium leguminosarum bv
MSKPNNSTAPLPFPILIGDIGGTNARFSILTDAYAEPKQFPNVRTADFATIDEAIQQGVLDKTAVQPRSAILAVAGPINDDEIPLTNCDWVVRPKTMIEGLGMEDVLVVNDFEAQALAIAALSDENRERIGDATRDMIASRVVLGPGTGLGVGGLVHAQHSWIPVPGEGGHVDLGPRSKRDYDIFPHIETIEGRVSAEQILCGRGLVNLYHAICVVDGIEPTMKDPADITSHALAGSDKAAVETVSLFATYLGRVAGDLAMVFMARGGVYLSGGISQKIIPALKKPEFRIAFEDKAPHTALLRTIPTYVVTHPLAALAGLSSYARMPANFGVSTEGRRWRR

SEQ ID NO: 85698 - DNA, 1026 bp, Rhizobium loti
  CDS (1)..(1026): transl_table=11
atgccaagcgtaagcgataccgacacgtcgttgcggtttccgatcctgatcggcgacattggcggcaccaatgcgcgcttttcgatcgtgctcgacgccaattccgagccgaccgagccgcagatcgtccagaccgccaatttcaacacgatcgacgaggcgatccaggcggcggtgctcgaccgctcgtcggtccgtcccaattcggcggtgctggcggtggccggtccggtcgacggcgacgagatcgaactcaccaattgcccgtgggtcgtcaagcccaggcagatgtttgccaatctcggcttgagcgacattgtcgtgctcaacgatttcgaggcgcaggcgctggccgtcgtggcgcttggcgaagagcatatggaaaagatcggcggcggcacgccggagcccaatgcaggccgcgtcgtgctcggccccggaaccgggctcggcgtcgccgggctggtctatgccttgcgccactggataccggtgcccggcgaaggcggccatatggacatcggtccgcgcacgccgcgcgatttcgaggtgtttccgcatatcgagaagctcgagggccgcatttccggcgaacagatcctgtgcgggcgcggcctcgtcaacgtctaccgggctgtcgccaaggcggacggcaagccggcgcctttcaccacgccggccgagatcaccggcgcggcgctggccaagaccgatccggtggctgaggaagcgctggagactttcgtcacctgcctcgggcgcaccgccggcgatcttgccctggtgttcatgagccgtggcggcgtcttcttgaccggcgggatcgcccaaaaaatcgtgccggcgctgaaggagggcaatttccgcgccgccttcgaggacaaggcgccgcacagcgcgctgatgcgcaccatgcccgtctatgtcatcacccatccgctggcggcccttctcggccttgccgcctatgccaggaacccgtcgctgttcggcgtccagacggccggccggcgctggcaggcctga

SEQ ID NO: 85699 - protein, 341 aa, Rhizobium loti
MPSVSDTDTSLRFPILIGDIGGTNARFSIVLDANSEPTEPQIVQTANFNTIDEAIQAAVLDRSSVRPNSAVLAVAGPVDGDEIELTNCPWVVKPRQMFANLGLSDIVVLNDFEAQALAVVALGEEHMEKIGGGTPEPNAGRVVLGPGTGLGVAGLVYALRHWIPVPGEGGHMDIGPRTPRDFEVFPHIEKLEGRISGEQILCGRGLVNVYRAVAKADGKPAPFTTPAEITGAALAKTDPVAEEALETFVTCLGRTAGDLALVFMSRGGVFLTGGIAQKIVPALKEGNFRAAFEDKAPHSALMRTMPVYVITHPLAALLGLAAYARNPSLFGVQTAGRRWQA

SEQ ID NO: 85700 - DNA, 1020 bp, Rhizobium meliloti
  CDS (1)..(1020): transl_table=11
atgcccaatgcgagtgaacacagctttccctttccgatcctgatcggcgacatcggcggcaccaatgcccgcttcgcactgctcaccgacgcctacggcgaaccgaagcagttggccccgatcagaacgggcgatttcgccacgatcgaggaggcgatgcagaaaggcatcctcgacaagacctccgtccagccgcgctcggcgatcctcgccgtggccgggccgatcaagggcgacgagataccgctgacgaatgccggctgggtgattcgtccgaaggacatgctggcgggcctcgggctggaggatgtgctggtcatcaacgacttcgaggcccaggcgctcgccatcgccgcgccggccgatcaggatgtcgttcagatcggcggcggagccgtccggcccttccattcgcgcgtcgtgctcggcccgggaaccggtctgggcgtcgccggactggtctatgcgcagcatacctggatacccgtgcccggcgagggcggtcatgtcgatataggtccccggacggagcgcgacttccggatctggcccttcctcgaaccgatcgagggacgcatggccggcgagcagatcctgtgcggccgcggcatcatgaatctctatcgcgctgtctgcgccgccaatggcgaggaagcggttcttgcggatcaggcggcagtgacgacgagcgcgctctccggcgccgatgcggcggcggtcgaaaccgtgtcgctctttgcgacctatctcgggcgcgttgccggcgacatggcgctgatcttcatggcgcgcggcggcgtattccttgccggcggcatttcgcagaagatactgccggcactgacgaagcccgaatttcgcgcggccttcgaggacaaggcgcctcattcggcattgatgcggacgattccgaccttcgccgtcattcaccccatggcggcgctctccggcctcgcggcctttgcccgcacgccgagggacttcggtgttgcaatggagggacgccgttggagaaggtga

SEQ ID NO: 85701 - protein, 339 aa, Rhizobium meliloti
MPNASEHSFPFPILIGDIGGTNARFALLTDAYGEPKQLAPIRTGDFATIEEAMQKGILDKTSVQPRSAILAVAGPIKGDEIPLTNAGWVIRPKDMLAGLGLEDVLVINDFEAQALAIAAPADQDVVQIGGGAVRPFHSRVVLGPGTGLGVAGLVYAQHTWIPVPGEGGHVDIGPRTERDFRIWPFLEPIEGRMAGEQILCGRGIMNLYRAVCAANGEEAVLADQAAVTTSALSGADAAAVETVSLFATYLGRVAGDMALIFMARGGVFLAGGISQKILPALTKPEFRAAFEDKAPHSALMRTIPTFAVIHPMAALSGLAAFARTPRDFGVAMEGRRWRR

SEQ ID NO: 85702 - DNA, 966 bp, Saccharophagus degradans
  CDS (1)..(966): transl_table=11
atgttcatgtatccctatatcgttgcagacattggcggcactaacgcgcgttttgctttagtaacaggcaaaaaaggtaatgcgtttaatttagagcagattcaaatattaaacggcagtgaattcccgcgtttgcaggatgcaatgcagcattacattgatacccttggtggtgaaaaaccaaaggctgcttgtgtggctattgccggccccattgatggcgataatgcgcgcatgaccaatttaaattgggagtttagccaagcggcggtgaaggcagagtttgggtttgataaatacgatacccttaacgactttggcgcattggctgtggcaaccagcagcttgcaagccgataacttaatagaaattaaagccggcacaatggacccaaaaggcaacaaggccattttgggccctggcactggtttaggagtggcaggtttggcgtgtgcaggcgatagttggttgcctattcctagtgaaggtggccacgtaaatgttgcgccagcaacgcagttagagtgcgaagttattcgcgcagctatggccgaacacgggcatgtatctgcagaaacgtttatatccggcccaggccttgtgcgtttgtatcgtgcattggctaccgttcgcggtgaaacgccaaaaaactacgagccaaaagatattaccgcaggtgcgctagatggcactgacgacttgtgcaaagaaacgttggatttattttgcagctttatcggttcgctatcaggtaatttggcactaacttacggcgcaaaaggcggggtgtatttagcgggtggtgtgttgccgcgcttcattgattattttaaatctagtgattttgttaagcgcttttctgaaaagggtgtaatgagccactatgtggaaaatattcccgttaatttaattagctacgagtacaccgcatttgttggtgcggctgcctggttggatcaactttaa

SEQ ID NO: 85703 - protein, 321 aa, Saccharophagus degradans
MFMYPYIVADIGGTNARFALVTGKKGNAFNLEQIQILNGSEFPRLQDAMQHYIDTLGGEKPKAACVAIAGPIDGDNARMTNLNWEFSQAAVKAEFGFDKYDTLNDFGALAVATSSLQADNLIEIKAGTMDPKGNKAILGPGTGLGVAGLACAGDSWLPIPSEGGHVNVAPATQLECEVIRAAMAEHGHVSAETFISGPGLVRLYRALATVRGETPKNYEPKDITAGALDGTDDLCKETLDLFCSFIGSLSGNLALTYGAKGGVYLAGGVLPRFIDYFKSSDFVKRFSEKGVMSHYVENIPVNLISYEYTAFVGAAAWLDQL

SEQ ID NO: 85704 - DNA, 966 bp, Salmonella paratyphi
  CDS (1)..(966): transl_table=11
atgacaaagtatgctttagtaggagatgtaggcggcacgaatgcgcgtcttgccctgtgtgatatcgccagtggagaaatctcgcaggccaaaacgtattccggcctggattaccccagtcttgaggccgtggtgcgcgtttatctcgatgagcatagcgtcagcgtggaagatggttgtatcgccatagcctgcccgattactggcgactgggtggcgatgactaaccatacctgggctttttctattgcggaaatgaaaaaaaatctcggctttagccatctggaaatcatcaacgatttcaccgccgtgtcgatggcgatcccgatgctgaaaaaagagcatttaattcagttcggcggcggcgaaccggtagacggcaaacctattgcggtgtatggcgcgggaaccggcttgggcgtggcgcatctggtgcatgtggataagcgttggattagccttccgggcgaaggcgggcatgtcgattttgcgcctaatagcgaagaagaagctatgattctggaaatattgcgcgccgaaattggccacgtttccgccgagcgcgtgctgtctggcccggggctggtgaatctttaccgggcgattgttaagtccgacaaccgtctgccggaaaatctgcgcccgaaagatattaccgaacgcgccctggcggatagctgtatcgattgtcgccgcgcgttgtcgctcttttgcgtcatcatggggcgatttggcggcgatctggcgttaaccatggggacatttggcggcgtttatatcgctggcggtattgtcccgcgcttcctggaattttttaaagcgtctggcttccgtggtggctttgaagataaaggccgctttaaagattatgtacacggaattccggtttatctgattgtccatgataatcccggcttgttaggctccggcgcgcatctgcgccagacattaggccatattctataa

SEQ ID NO: 85705 - protein, 321 aa, Salmonella paratyphi
MTKYALVGDVGGTNARLALCDIASGEISQAKTYSGLDYPSLEAVVRVYLDEHSVSVEDGCIAIACPITGDWVAMTNHTWAFSIAEMKKNLGFSHLEIINDFTAVSMAIPMLKKEHLIQFGGGEPVDGKPIAVYGAGTGLGVAHLVHVDKRWISLPGEGGHVDFAPNSEEEAMILEILRAEIGHVSAERVLSGPGLVNLYRAIVKSDNRLPENLRPKDITERALADSCIDCRRALSLFCVIMGRFGGDLALTMGTFGGVYIAGGIVPRFLEFFKASGFRGGFEDKGRFKDYVHGIPVYLIVHDNPGLLGSGAHLRQTLGHIL

SEQ ID NO: 85706 - DNA, 966 bp, Salmonella typhi
  CDS (1)..(966): transl_table=11
atgacaaagtatgctttagtaggagatgtaggcggcacgaatgcgcgtcttgccctgtgtgatatcgccagtggagaaatctcgcaggccaaaacgtattccggcctggattaccccagtcttgaggccgtggtgcgcgtttatctcgatgagcatggcgtcagcgtggaagatggttgtatcgccatagcctgcccgattaccggcgactgggtggcgatgactaaccatacctgggctttttctattgcggaaatgaaaaaaaatctcggctttagtcatctggaaatcatcaacgatttcaccgccgtgtcgatggcgatcccgatgctgaaaaaagagcatttaattcagttcggcggcggcgaaccggtagacggcaaacctattgcggtgtacggcgcgggaaccggcttgggcgtggcgcatctggtgcatgtggataagcgttggattagccttccgggcgaaggcgggcatgtcgattttgcgcctaatagcgaagaagaagctatgattctggaaatattgcgcgccgaaattggccacgtttccgccgagcgcgtgctgtctggcccggggctggtgaatctttaccgggcgattgttaagtccgacaaccgtctgccggaaaatctgcgcccgaaagatattaccgaacgcgccctggcggatagctgtatcgattgtcgccgcgcgttgtcgctcttttgcgtcatcatggggcgatttggcggcgatctggcgttaaccatggggacatttggcggcgtttatatcgctggcggcattgtcccgcgcttcctggaattctttaaagcgtctggcttccgtgggggctttgaagataaaggccgctttaaagattatgtacacggtattccggtctatctgattgtccatgataatcccggcttgttaggctccggcgcgcatctgcgccagacattaggccatattctataa

SEQ ID NO: 85707 - protein, 321 aa, Salmonella typhi
MTKYALVGDVGGTNARLALCDIASGEISQAKTYSGLDYPSLEAVVRVYLDEHGVSVEDGCIAIACPITGDWVAMTNHTWAFSIAEMKKNLGFSHLEIINDFTAVSMAIPMLKKEHLIQFGGGEPVDGKPIAVYGAGTGLGVAHLVHVDKRWISLPGEGGHVDFAPNSEEEAMILEILRAEIGHVSAERVLSGPGLVNLYRAIVKSDNRLPENLRPKDITERALADSCIDCRRALSLFCVIMGRFGGDLALTMGTFGGVYIAGGIVPRFLEFFKASGFRGGFEDKGRFKDYVHGIPVYLIVHDNPGLLGSGAHLRQTLGHIL

SEQ ID NO: 85708 - DNA, 966 bp, Shigella flexneri
  CDS (1)..(966): transl_table=11
atgacaaagtatgcattagtcggtgatgtgggcggcaccaacgcacgtcttgctctgtgtgatattgccagtggtgaaatctcgcaggctaagacctattcagggcttgattaccccagcctcgaagcggtcattcgcgtttatcttgaagaacataaggtcgaggtgaaagacggctgtattgccatcgcttgcccaattaccggtgactgggtggcaatgaccaaccatacctgggcgttctcaattgccgaaatgaaaaagaatctcggttttagccatctggaaattattaacgattttaccgctgtatcgatggcgatcccgatgctgaaaaaagagcatttgattcagtttggtggcgcagaaccggtcgaaggtaagcctattgcggtttacggtgccggaacggggcttggggttgcgcatctggtccatgtcgataagcgttgggtaagcttgccgggcgaaggcggtcacgttgattttgcgccgaatagtgaagaagaggccattatcctcgaaatattgcgtgcggaaattggtcatgtttcggcggagcgcgtgctttctggccctgggctggtgaatttgtatcgcgcaattgtgaaagctgacaaccgcctgccagaaaatctcaagccaaaagatattaccgaacgcgcgctggctgacagctgcaccgattgccgccgcgcattgtcgctgttttgcgtcattatgggccgttttggcggcaatctggcgctcaatctcgggacatttggcggcgtgtttattgcgggcggtatcgtgccgcgcttccttgagttcttcaaagcctccggtttccgtgccgcatttgaagataaagggcgctttaaagaatatgtccatgatattccggtgtatctcatcgtccatgactatccgggtcttctcggttccggtgcacatttacgccagaccttaggtcacattctgtaa

SEQ ID NO: 85709 - protein, 321 aa, Shigella flexneri
MTKYALVGDVGGTNARLALCDIASGEISQAKTYSGLDYPSLEAVIRVYLEEHKVEVKDGCIAIACPITGDWVAMTNHTWAFSIAEMKKNLGFSHLEIINDFTAVSMAIPMLKKEHLIQFGGAEPVEGKPIAVYGAGTGLGVAHLVHVDKRWVSLPGEGGHVDFAPNSEEEAIILEILRAEIGHVSAERVLSGPGLVNLYRAIVKADNRLPENLKPKDITERALADSCTDCRRALSLFCVIMGRFGGNLALNLGTFGGVFIAGGIVPRFLEFFKASGFRAAFEDKGRFKEYVHDIPVYLIVHDYPGLLGSGAHLRQTLGHIL

SEQ ID NO: 85710 - DNA, 1008 bp, Xanthomonas axonopodis pv
  CDS (1)..(1008): transl_table=11
atgaccgctccttccaagccggtgctggttgccgatatcggcggtaccaatgcgcgcttcgcgctggccgatgtcgacgcctcggtgccgttgctggatgacacctcgcgcgaatttgcggtggtggatttcggttcgctgggcgaagcggcgcgctattacctggaccagatcggcgtgcaggccacccagggcgtgttcgccgtggcgggccgcgtggacggcgacgaggcacgcatcaccaaccatccctgggtgatctcgcgctcgcgcaccgccaccatgctgggtttcagtaccttgcatctgatcaacgactttgccgcgcaggcgatggcgatcagcctgctgcgtccacaggacgtggtgcaggtaggcggcgccagctggcgtccggcaccgatcgatcaagcgcgcaactatggcgtgatcggcccgggcaccggcctgggcgtgggcggcctgatcatccgcaacgggcgctgctttccgctggaaaccgaaggcggccatgtcagcttcccgcccggcacgccggaagaaatccgcatcctggaaatcctgtccgagcagttcggccgggtctccaacgagcggctgatctgcggtccgggcctggtcaatatccatcgcgcgttgagcgagatcgcgggggtcgatccgggcccgctgcaacccaaggacatcaccgcacgcgcggctgcgggcgacccgcggtcctcgcgcaccatcgatctgttctgcgccatcttcggtgcgatcgccggcgacatggtgctgatgcagggcgcctgggacggcgtgttcctcaccggcgggctggtgcccaaggtgctggattcgctgcagcattccggctttcgccagcgcttcgaacacaagggccgtttctccgcgatcatgtcgaaggtgccatcgctggcggtcatgcacccgcatgccggcctgctgggcgccgccgcctacgcggtggatgcacaacgtcagcaccccggggagcagcgatga

SEQ ID NO: 85711 - protein, 335 aa, Xanthomonas axonopodis pv
MTAPSKPVLVADIGGTNARFALADVDASVPLLDDTSREFAVVDFGSLGEAARYYLDQIGVQATQGVFAVAGRVDGDEARITNHPWVISRSRTATMLGFSTLHLINDFAAQAMAISLLRPQDVVQVGGASWRPAPIDQARNYGVIGPGTGLGVGGLIIRNGRCFPLETEGGHVSFPPGTPEEIRILEILSEQFGRVSNERLICGPGLVNIHRALSEIAGVDPGPLQPKDITARAAAGDPRSSRTIDLFCAIFGAIAGDMVLMQGAWDGVFLTGGLVPKVLDSLQHSGFRQRFEHKGRFSAIMSKVPSLAVMHPHAGLLGAAAYAVDAQRQHPGEQR

SEQ ID NO: 85712 - DNA, 1014 bp, Xylella fastidiosa
  CDS (1)..(1014): transl_table=11
atgaacgcaccacaggctcccgtactggtcgcagacattggagggactaacgcccgctttgcgctggccaaccccaccctaacctcagcaccactgctgaacgacagcctgcgcgaattcgccgtcatcgaattcccctcactgagcgaagctgcacagcactacctgcatcacatcggcatacataccaccaaaggcgtctttgcgatcgccggacacgtagacggcgatgaagcacgtattaccaatcatccctgggtcatcacacgcacgcgcactgcaacaatgctcggcttcgacaccctgcacctcatcaacgattttgttgcccaagcgatggccatcagcgtgttaggccctcaagatgtcatccaaatcggcagtgccaaatgggagcaagtcccgctatcagcagccacccgcaactacggcatcattggccccggcaccggcctaggcgtcggcggcctggtgattcgcaacggccgctgttatccgctagaaaccgagggcggccatgtcagcttcccgccaagcaccccagaagaaatccggatcctggaaatcctgtcacaacaattcggacgtgtctccaacgaacggctgatctccggtccagggctagtcaacattcaccgcgcactgagcgaaatcgacggaatcgacccaggcccactgcgccctcaagacatcaccatgcgcgccgctgacggcgacatacgcgccacacgcaccatcaatctgttctgcaacatcttcggcgccatcaccggcgacctggtactcatccaaggggcttgggatggcgtctttctgacaggcggcctcgttcccaaactattgaactcaatacagcattccggtttccgccaaaaatttgaacataagggtcgattttcggccatcatggcccgtatcccctctttagcagtgatccatccacaccctggcctactcggcgcagccgcatacgcacgagacaccgagccagtcccgcaggacatcaaggcatga

SEQ ID NO: 85713 - protein, 337 aa, Xylella fastidiosa
MNAPQAPVLVADIGGTNARFALANPTLTSAPLLNDSLREFAVIEFPSLSEAAQHYLHHIGIHTTKGVFAIAGHVDGDEARITNHPWVITRTRTATMLGFDTLHLINDFVAQAMAISVLGPQDVIQIGSAKWEQVPLSAATRNYGIIGPGTGLGVGGLVIRNGRCYPLETEGGHVSFPPSTPEEIRILEILSQQFGRVSNERLISGPGLVNIHRALSEIDGIDPGPLRPQDITMRAADGDIRATRTINLFCNIFGAITGDLVLIQGAWDGVFLTGGLVPKLLNSIQHSGFRQKFEHKGRFSAIMARIPSLAVIHPHPGLLGAAAYARDTEPVPQDIKA

SEQ ID NO: 85714 - DNA, 975 bp, Zymomonas mobilis
  CDS (1)..(975): transl_table=11
atggaaattgttgcgattgacatcggtggaacgcatgcgcgtttctctattgcggaagtaagcaatggtcgggttctttctcttggagaagaaacgacttttaaaacggcagaacatgctagcttacagttagcttgggaacgtttcggtgaaaaactgggtcgtcctctgccacgtgccgcagctattgcatgggctggcccggttcatggtgaagttttaaaacttaccaataacccttgggtattaagaccagctactctgaatgaaaagctggacatcgatacgcatgttctgatcaatgacttcggtgcggttgcccacgcggttgcgcatatggattcttcttatctggatcatatttgtggtcctgatgaagcgcttcctagcgatggtgttatcactattcttggtccgggaacgggcttgggtgttgcccatctgttgcggactgaaggccgttatttcgtcatcgaaactgaaggcggtcatatcgactttgctccgcttgacagacttgaagacaaaattctggcacgtttacgtgaacgtttccgccgcgtttctatcgaacgcattatttctggcccgggtcttggtaatatctacgaagcactggctgccattgaaggcgttccgttcagcttgctggatgatattaaattatggcagatggctttggaaggtaaagacaaccttgctgaagccgctttggatcgcttctgcttgagccttggcgctatcgctggtgatcttgctttggcacagggtgcaaccagtgttgttattggcggtggtgtcggtcttcgtatcgcttcccatttgccggaatctggcttccgtcagcgctttgtttcaaaaggacgctttgaacgcgtcatgtccaagattccggttaagttgattacttatccgcagcctggactgctgggtgcggcagctgcctatgccaacaaatattctgaagttgaataa

SEQ ID NO: 85715 - protein, 324 aa, Zymomonas mobilis
MEIVAIDIGGTHARFSIAEVSNGRVLSLGEETTFKTAEHASLQLAWERFGEKLGRPLPRAAAIAWAGPVHGEVLKLTNNPWVLRPATLNEKLDIDTHVLINDFGAVAHAVAHMDSSYLDHICGPDEALPSDGVITILGPGTGLGVAHLLRTEGRYFVIETEGGHIDFAPLDRLEDKILARLRERFRRVSIERIISGPGLGNIYEALAAIEGVPFSLLDDIKLWQMALEGKDNLAEAALDRFCLSLGAIAGDLALAQGATSVVIGGGVGLRIASHLPESGFRQRFVSKGRFERVMSKIPVKLITYPQPGLLGAAAAYANKYSEVE

SEQ ID NO: 85716 - DNA, 1020 bp, Xylella fastidiosa; identical to SEQ ID NO: 85512
  CDS (16)..(1020): transl_table=11

SEQ ID NO: 85717 - protein, 334 aa, Xylella fastidiosa
MIPNPTRDAPNIPSFVAADVGGTHVRVSVVAAAPTCASPPQLLDVRTYRCADYPSLSTILNDFLGTRSAVRDCVIASAGFQRSDGTVITTNLPWPLSPHRLRADLDLAEVSLVNDFEALAYATEDMEAAQLLHLTGPAKAQDGPRLLLGPGTGLGAALWIPNNGRPIVLPTEAGQAALPSTTELEMQLVRHMLNNRTHVPIEHALSGPGILNVYRALCALQSVLPQHASPDAISHAAAAGTDMLSSQTLEVFCDFLGSIVGDLVMMYGAQGGVYLAGGILPQLREPLLRSHFVERFLNKGPMGEALQHVPVRLIEHGQLGIVGAARWYLNKKAT

SEQ ID NO: 85718 - DNA, 27 bp, Artificial sequence
  primer
atgggggccatgggcgtaaattttttg

SEQ ID NO: 85719 - DNA, 21 bp, Artificial sequence
  primer
ttaagactgggccgcacaaac

SEQ ID NO: 85720 - protein, 376 aa, Artificial sequence
  consensus sequence
  Variant (2)..(3): Xaa in position 2 to 3 is any amino acid
  Variant (5)..(5): Xaa in position 5 is any amino acid
  Variant (9)..(57): Xaa in position 9 to 57 is any amino acid
  Variant (58)..(82): Xaa in position 58 to 82 is any or no amino acid
  Variant (84)..(84): Xaa in position 84 is any amino acid
  Variant (86)..(91): Xaa in position 86 to 91 is any amino acid
  Variant (92)..(93): Xaa in position 92 to 93 is any or no amino acid
  Variant (96)..(97): Xaa in position 96 to 97 is any amino acid
  Variant (98)..(99): Xaa in position 98 to 99 is any or no amino acid
  Variant (101)..(117): Xaa in position 101 to 117 is any amino acid
  Variant (118)..(122): Xaa in position 118 to 122 is any or no amino acid
  Variant (126)..(156): Xaa in position 126 to 156 is any amino acid
  Variant (157)..(172): Xaa in position 157 to 172 is any or no amino acid
  Variant (174)..(174): Xaa in position 174 is any amino acid
  Variant (180)..(191): Xaa in position 180 to 191 is any amino acid
  Variant (192)..(199): Xaa in position 192 to 199 is any or no amino acid
  Variant (204)..(224): Xaa in position 204 to 224 is any amino acid
  Variant (225)..(229): Xaa in position 225 to 229 is any or no amino acid
  Variant (231)..(231): Xaa in position 231 is any amino acid
  Variant (233)..(235): Xaa in position 233 to 235 is any amino acid
  Variant (236)..(236): Xaa in position 236 is any or no amino acid
  Variant (239)..(239): Xaa in position 239 is any amino acid
  Variant (241)..(276): Xaa in position 241 to 276 is any amino acid
  Variant (277)..(307): Xaa in position 277 to 307 is any or no amino acid
  Variant (309)..(311): Xaa in position 309 to 311 is any amino acid
  Variant (313)..(315): Xaa in position 313 to 315 is any amino acid
  Variant (317)..(321): Xaa in position 317 to 321 is any amino acid
  Variant (324)..(327): Xaa in position 324 to 327 is any amino acid
  Variant (330)..(342): Xaa in position 330 to 342 is any amino acid
  Variant (343)..(343): Xaa in position 343 is any or no amino acid
  Variant (345)..(347): Xaa in position 345 to 347 is any amino acid
  Variant (349)..(350): Xaa in position 349 to 350 is any amino acid
  Variant (353)..(361): Xaa in position 353 to 361 is any amino acid
  Variant (363)..(372): Xaa in position 363 to 372 is any amino acid
  Variant (373)..(373): Xaa in position 373 is any or no amino acid
  Variant (375)..(375): Xaa in position 375 is any amino acid
LXXDXGGTXXXXXXXXXXXXXXXXXXXXXXXXXXXXXXXXXXXXXXXXXXXXXXXXXXXXXXXXXXXXXXXXXXXXXXXXXXAXPXXXXXXXXTNXXXXWXXXXXXXXXXXXXXXXXXXXXXNDFXXXXXXXXXXXXXXXXXXXXXXXXXXXXXXXXXXXXXXXXXXXXXXXGXGTGLGXXXXXXXXXXXXXXXXXXXXEGGHXXXXXXXXXXXXXXXXXXXXXXXXXXSXEXXXXSGXGXXXXXXXXXXXXXXXXXXXXXXXXXXXXXXXXXXXXXXXXXXXXXXXXXXXXXXXXXXXXXXXXXXXGXXXGXXXLXXXXXGGXXXXGGXXXXXXXXXXXXXXFXXXFXXKGXXXXXXXXXPXXXXXXXXXXXLXG

SEQ ID NO: 85721 - protein, 12 aa, Artificial sequence
  protein pattern
  Variant (2)..(2): Xaa in position 2 is any amino acid
  Variant (3)..(3): Xaa in position 3 is Ala, Cys or Gly
  Variant (5)..(5): Xaa in position 5 is Ile, Leu, Met or Val
  Variant (8)..(8): Xaa in position 8 is Ser or Thr
  Variant (9)..(11): Xaa in position 9 to 11 is any amino acid
  Variant (12)..(12): Xaa in position 12 is Phe, Ile, Leu or Val
LXXDXGGXXXXX

SEQ ID NO: 85722 - protein, 9 aa, Artificial sequence
  protein pattern
  Variant (2)..(2): Xaa in position 2 is Ala or Pro
  Variant (8)..(8): Xaa in position 8 is any amino acid
  Variant (9)..(9): Xaa in position 9 is Ala, Cys, Gly or Ser
GXGTGLGXX

SEQ ID NO: 85723 - DNA, 726 bp, Synechocystis sp.
  CDS (1)..(726): transl_table=11
atgcagttaccgcccgttcacagtgttagtctttctgaatattttgtgagtggtaacgtgatcattcacgaaacagcggtcattgctccgggggttattttagaagcggctccggattgtcaaattaccattgaagccggagtctgcattggtttaggcagtgtgattagcgcccatgccggtgacgtgaaaattcaggagcagacggcgatcgcccctggctgtctagtaatcgggccagtgaccattggggcaacagcttgtctcggttcccggagtaccgtttttcagcaggatattgatgcccaggtcctaattcctcccggctccttattaatgaatcgggttgccgatgtccagacggtaggggctagttctccaacaactgacagcgttactgaaaaaaaatccccttcaaccgcaaaccccattgcccctattccttccccctgggacaacgagccccctgcaaaggggacagattccccgtcagatcaagcaaaagaatccattgccaggcaatcaaggccatcaaccgccgaggccgcagaacagatttcctcaaatcgatcccctggggaatcgacgccaactgctccgacggtggtcaccactgcgccattagtttcagaagaagtacaagaaaagcctcccgtagtgggtcaggtttacattaatcagttactcttaaccctatttccggaacgacgatattttagttcttaa

SEQ ID NO: 85724 - protein, 241 aa, Synechocystis sp.
MQLPPVHSVSLSEYFVSGNVIIHETAVIAPGVILEAAPDCQITIEAGVCIGLGSVISAHAGDVKIQEQTAIAPGCLVIGPVTIGATACLGSRSTVFQQDIDAQVLIPPGSLLMNRVADVQTVGASSPTTDSVTEKKSPSTANPIAPIPSPWDNEPPAKGTDSPSDQAKESIARQSRPSTAEAAEQISSNRSPGESTPTAPTVVTTAPLVSEEVQEKPPVVGQVYINQLLLTLFPERRYFSS

SEQ ID NO: 85725 - DNA, 747 bp, Nostoc sp. PCC 7120
  CDS (1)..(747): transl_table=11
atgtctgtgccgccactacgcctccacaacaactttgattcatacattagtggcgaggtgacaattcatccgagtgcagtaattgcaccaggggtgatactccaagcggctgcaaacagcaaaatcatcatcggggcaggggtctgtattggcatggggtctattctccaagtggatgagggaaccatagaagtagaagcaggagccagcttaggagcaggttttttgatggttggtcaaggcaaaattggcatcaatgcttgcatcggtgcagccacaacattatttaactcttctattcctccagccttagtagtgccaccaggttcgattttaggtgataccacgcggcaagttgctgctacccaatcaccatcaacatctaagaatcaggttggtgagactacccaaaagcctaaagaaaatgaaagtaaggtgattacctcaactaccctttcagcatcagcttttgtggaatttaaacagcattcggtttctgtaacagaacccccgccatcatcagagaatcagtctgctaccgtagaagaaaatactactaatgggactgaccctaatgtgacagaacttagcccagaagattcagcatcggatcaacctgccactgaatcccctaatagtttcgggactcaaatttatgggcaagggagcatccaaagacttttggtaacattgtttcctcatagacaagccctaaataaccctgtctctgacgatagctctgagtaa

SEQ ID NO: 85726 - protein, 248 aa, Nostoc sp. PCC 7120
MSVPPLRLHNNFDSYISGEVTIHPSAVIAPGVILQAAANSKIIIGAGVCIGMGSILQVDEGTIEVEAGASLGAGFLMVGQGKIGINACIGAATTLFNSSIPPALVVPPGSILGDTTRQVAATQSPSTSKNQVGETTQKPKENESKVITSTTLSASAFVEFKQHSVSVTEPPPSSENQSATVEENTTNGTDPNVTELSPEDSASDQPATESPNSFGTQIYGQGSIQRLLVTLFPHRQALNNPVSDDSSE

SEQ ID NO: 85727 - DNA, 663 bp, Thermosynechococcus elongatus BP-1
  CDS (1)..(663): transl_table=11
atgcccctgccgcccttagccctgcccccttcacctgcggttcgcattgttggtgatgtggtggtagatccccaagccgttttggcaccgggggtgttgctttgggcagaagcaggggctgccattcggattgcctcaggtgtctgcattggcatgggttgcatcattcacgcccacggcggcaccatcgcaattggcgaaggggtcaacattggtgcgggagtgctgctaattggggcggtgacggttgaaccccatgcctgtattggtgccagtaccacggtgatgcaaacaacgattcccgctggggcggtggtggccgccggttctcttgtgggggatcggagtcgtcgttggccccctgccgcagaaacgagtcatccccaacagaggactgtctttcctgaagatccttggcaagagccagcaacaactgcccatacttcagagaattccccacaacaggagcaggaggctaccgactctccccctaaccatcaggaaagtccagccgccgcaccaccagagacaagcactgccacaaggcctaaggcaagcgtggtctatggtcaagcctacgttagtaagatgtttgctaagatgtttcgcgtagcgcccatcccacccacgggggataattctgccctaggaagtagtcagtaa

SEQ ID NO: 85728 - protein, 220 aa, Thermosynechococcus elongatus BP-1
MPLPPLALPPSPAVRIVGDVVVDPQAVLAPGVLLWAEAGAAIRIASGVCIGMGCIIHAHGGTIAIGEGVNIGAGVLLIGAVTVEPHACIGASTTVMQTTIPAGAVVAAGSLVGDRSRRWPPAAETSHPQQRTVFPEDPWQEPATTAHTSENSPQQEQEATDSPPNHQESPAAAPPETSTATRPKASVVYGQAYVSKMFAKMFRVAPIPPTGDNSALGSSQ

SEQ ID NO: 85729 - DNA, 747 bp, Anabaena variabilis ATCC 29413
  CDS (1)..(747): transl_table=11
atgtctgtgccgccactacgcctccacaacaactttgattcctacattagtggcgaggtgacaattcatccgagtgcagtaattgcaccaggggtgatactccaagcggctgcaaacagcaaaatcatcatcggggcaggagtctgtattggcatggggtctattctccaagtggatgagggaaccatagaagtagaagcaggagccagcttaggagcaggttttttgatggttggtcaaggcaaaattggcactaatgcttgcataggtgcagccacaacattatttaactcttctattcctccagccttagtagtgccaccaggttcgattttaggtgatacaactcggcaacttgccgccactgaatcaccagcaacatctacgaatcaggttgacgaggctacccaaaagcctaaagaaaatgaaagtaaggtgattacctcaactaccctttcagcatcagcttttgtggaatttaaacagcattcagtttctgtaacagaacccccaccatcaccagagaatcagtctgctaccgtagaagaaaatactactaatgggactgaccctaatgtgacagaacttagcccagaagattcagcatcggatcaatctgccactgaatcccctaatagcttcgggactcaaatttatgggcaagggagcatccaaagacttttggtgacattgtttcctcatagacaagccctaaataaccctgtctctgacgatagttctgagtaa

SEQ ID NO: 85730 - protein, 248 aa, Anabaena variabilis ATCC 29413
MSVPPLRLHNNFDSYISGEVTIHPSAVIAPGVILQAAANSKIIIGAGVCIGMGSILQVDEGTIEVEAGASLGAGFLMVGQGKIGTNACIGAATTLFNSSIPPALVVPPGSILGDTTRQLAATESPATSTNQVDEATQKPKENESKVITSTTLSASAFVEFKQHSVSVTEPPPSPENQSATVEENTTNGTDPNVTELSPEDSASDQSATESPNSFGTQIYGQGSIQRLLVTLFPHRQALNNPVSDDSSE

SEQ ID NO: 85731 - DNA, 915 bp, Trichodesmium erythraeum IMS101
  CDS (1)..(915): transl_table=11
atgcagttgccaccactacaaccttttgcaaatattgagccttttgttagtggtgatgtaaaaattgacccaagtgcggcgatcgctcctggtgttattcttcaagctgctagtaactgtcagattattattggagcgggggtttgtattggtatgggagttattattcatgcttacagtggtaatattgaaattgaatcgggagctactattggttcaggagttttattagttggtaaaagtaagattggagctaatgtttgtattggttctttggcaactattctggaacagaatttagaatcagagaaagttgtattacctgcttctattattggtaactcagggcgacagttctcagacaattctactatatctttacctgatcaagattcaaatcaaagctatctattctcaaatgaaactcaagaaagtagttatagtttaaatttagctaatactgcttcatctactgaggaaacttcaacagaaactgaaaaggctaacactcaattaccattggctaatacttctttacctgctgaagaaactccaacagaaactgaaaaggctaacactcaattaccattggctaatacttctttacctgctgaagaaactccaacagaaactgaaaaggctaacactcaattaccattagctaatacttctttacctgttgaagaaactccaacagaaactgaaaaggctaacactcaattaccattagctaatacttctttacctgttgaagaaactccaacagaaactgaaaaggctaacacccaactacaagaagagtcacctccaaacattgatgctcaaatttatggtaaagaatatgtaaacaaaataatgcagactttatttccttataaaaattctttgagttctcatcctgatgatgaagactga

SEQ ID NO: 85732 - protein, 304 aa, Trichodesmium erythraeum IMS101
MQLPPLQPFANIEPFVSGDVKIDPSAAIAPGVILQAASNCQIIIGAGVCIGMGVIIHAYSGNIEIESGATIGSGVLLVGKSKIGANVCIGSLATILEQNLESEKVVLPASIIGNSGRQFSDNSTISLPDQDSNQSYLFSNETQESSYSLNLANTASSTEETSTETEKANTQLPLANTSLPAEETPTETEKANTQLPLANTSLPAEETPTETEKANTQLPLANTSLPVEETPTETEKANTQLPLANTSLPVEETPTETEKANTQLQEESPPNIDAQIYGKEYVNKIMQTLFPYKNSLSSHPDDED

SEQ ID NO: 85733 - DNA, 774 bp, Nostoc punctiforme PCC 73102
  CDS (1)..(774): transl_table=11
atgtctgtgctgtcactgcgcctcagcaataactttgattcttacattagtggtgaggtgactattcatccaagcgcagtacttgcacctggcgtgatccttcaagcagctgaaaacagcaagatcgtaattgggccaggggtctgtattggcatgggagccattctccaagtccatgaaggaaccctagaggtagaagcgggggcaaacctgggagccggttttttgatggttggcaagggcaaaattggagcaaatgcttgtattggttcagcaacaacagtttttaactattcagttgaacctggacaagtagttccacctggatcgattttaggagacaccagtcggcaaattgctcaaacaacgcagccggaaccatctacaaataactccacggctacaagtgtgccaccgcagaaggaagaagaaaatggctcaggaggagttaaggaaaaggtaagttcctcaactaacttctcagctgcggcttttgtggatttcaaacaaaataagtcgatttcttattttaaatctccagccactcctgaaagccagcctcctcccttagaggaacccgcgaaggatgctgaatcccccttgcaagaagccgttcaagagcctacaaaatctgactcagaccccaatcagctacctacagaatcccctaacggtttcggaactcagatttatggacaagggagcataagcagactgttgaccacattgtttcctcatagacaatctttgagtgacccaaactctgacgattag

SEQ ID NO: 85734 - protein, 257 aa, Nostoc punctiforme PCC 73102
MSVLSLRLSNNFDSYISGEVTIHPSAVLAPGVILQAAENSKIVIGPGVCIGMGAILQVHEGTLEVEAGANLGAGFLMVGKGKIGANACIGSATTVFNYSVEPGQVVPPGSILGDTSRQIAQTTQPEPSTNNSTATSVPPQKEEENGSGGVKEKVSSSTNFSAAAFVDFKQNKSISYFKSPATPESQPPPLEEPAKDAESPLQEAVQEPTKSDSDPNQLPTESPNGFGTQIYGQGSISRLLTTLFPHRQSLSDPNSDD

SEQ ID NO: 85735 - DNA, 723 bp, Crocosphaera watsonii WH 8501
  CDS (1)..(723): transl_table=11
atgcctttaccacttattcaaccaccaagtcgttcagaagtttcggttattggtgaggttattattcatcagggtgcggttgtcgcaccaggaacaattttacaagctgcccctaattgtcgtattgtcatccattcgggggcttgcattggcatgggaaccttaattaatgcctatcaaggagacattgaaattgaatccggtgctatgttaggggcaggggttttaatcgttggtcaaagtaaaattagtcaaaatgtttgtcttggttcttgtactacggtaattaatagttctattgagtcgggaaccaccatcgaagctggaacattaattggtgatacttctcgtcagttttcagaagaagaaaccaaagctcccaaacaaattaaagcagagaataatggttcttcagaaaatggtcatttaattgccgataataatcaaaaagataatctacctcagcaaagtgaagagaaaaagccggaatttgtggaagaaatagaggatttatgggcagatactccacccaaagtcgaagaagtaacagaaattcctgaaattcccacaaaacctgatactcctacagagactaaaaatgcccctgtggtgggtcaagtttatattaatcaactattatgtactttgtttcccgatcgccaagcttttaatcagtctcaaaataattctgcttcaaaagatccgccgggtaaaaataagtaa

SEQ ID NO: 85736 - protein, 240 aa, Crocosphaera watsonii WH 8501
MPLPLIQPPSRSEVSVIGEVIIHQGAVVAPGTILQAAPNCRIVIHSGACIGMGTLINAYQGDIEIESGAMLGAGVLIVGQSKISQNVCLGSCTTVINSSIESGTTIEAGTLIGDTSRQFSEEETKAPKQIKAENNGSSENGHLIADNNQKDNLPQQSEEKKPEFVEEIEDLWADTPPKVEEVTEIPEIPTKPDTPTETKNAPVVGQVYINQLLCTLFPDRQAFNQSQNNSASKDPPGKNK

SEQ ID NO: 85737 - DNA, 21 bp, Artificial sequence
  primer
atgcagttaccgcccgttcac

SEQ ID NO: 85738 - DNA, 20 bp, Artificial sequence
  primer
ttaagaactaaaatatcgtc

SEQ ID NO: 85739 - protein, 291 aa, Artificial sequence
  consensus sequence
  Variant (2)..(3): Xaa in position 2 to 3 is any amino acid
  Variant (5)..(17): Xaa in position 5 to 17 is any amino acid
  Variant (19)..(19): Xaa in position 19 is any amino acid
  Variant (21)..(21): Xaa in position 21 is any amino acid
  Variant (23)..(25): Xaa in position 23 to 25 is any amino acid
  Variant (28)..(28): Xaa in position 28 is any amino acid
  Variant (35)..(35): Xaa in position 35 is any amino acid
  Variant (38)..(41): Xaa in position 38 to 41 is any amino acid
  Variant (43)..(43): Xaa in position 43 is any amino acid
  Variant (45)..(46): Xaa in position 45 to 46 is any amino acid
  Variant (54)..(60): Xaa in position 54 to 60 is any amino acid
  Variant (62)..(67): Xaa in position 62 to 67 is any amino acid
  Variant (69)..(71): Xaa in position 69 to 71 is any amino acid
  Variant (73)..(73): Xaa in position 73 is any amino acid
  Variant (75)..(75): Xaa in position 75 is any amino acid
  Variant (77)..(78): Xaa in position 77 to 78 is any amino acid
  Variant (80)..(82): Xaa in position 80 to 82 is any amino acid
  Variant (84)..(87): Xaa in position 84 to 87 is any amino acid
  Variant (89)..(89): Xaa in position 89 is any amino acid
  Variant (91)..(93): Xaa in position 91 to 93 is any amino acid
  Variant (95)..(108): Xaa in position 95 to 108 is any amino acid
  Variant (111)..(112): Xaa in position 111 to 112 is any amino acid
  Variant (114)..(116): Xaa in position 114 to 116 is any amino acid
  Variant (118)..(161): Xaa in position 118 to 161 is any amino acid
  Variant (162)..(207): Xaa in position 162 to 207 is any or no amino acid
  Variant (209)..(211): Xaa in position 209 to 211 is any amino acid
  Variant (213)..(214): Xaa in position 213 to 214 is any amino acid
  Variant (215)..(227): Xaa in position 215 to 227 is any or no amino acid
  Variant (229)..(250): Xaa in position 229 to 250 is any amino acid
  Variant (251)..(277): Xaa in position 251 to 277 is any or no amino acid
  Variant (280)..(287): Xaa in position 280 to 287 is any amino acid
MXXPXXXXXXXXXXXXXGXVXIXXXAVXAPGVILXAAXXXXIXIXXGVCIGMGXXXXXXXGXXXXXXGXXXGXGXLXXGXXXIXXXXCXGXXXTXXXXXXXXXXXXXXGSXXGXXXRXXXXXXXXXXXXXXXXXXXXXXXXXXXXXXXXXXXXXXXXXXXXXXXXXXXXXXXXXXXXXXXXXXXXXXXXXXXXXXXXXXXXXXXXXXPXXXEXXXXXXXXXXXXXXXEXXXXXXXXXXXXXXXXXXXXXXXXXXXXXXXXXXXXXXXXXXXXXXXXXGQXXXXXXXXTLFP

SEQ ID NO: 85740 - protein, 60 aa, Artificial sequence
  protein pattern
  Variant (5)..(5): Xaa in position 5 is Ile or Leu
  Variant (7)..(7): Xaa in position 7 is any amino acid
  Variant (9)..(9): Xaa in position 9 is Ala or Glu
  Variant (10)..(10): Xaa in position 10 is any amino acid
  Variant (11)..(11): Xaa in position 11 is Asp, Gly or Asn
  Variant (12)..(12): Xaa in position 12 is Ala, Cys or Ser
  Variant (13)..(13): Xaa in position 13 is any amino acid
  Variant (15)..(15): Xaa in position 15 is any amino acid
  Variant (17)..(17): Xaa in position 17 is Ala, Glu or Gly
  Variant (18)..(18): Xaa in position 18 is Ala, Pro or Ser
  Variant (24)..(24): Xaa in position 24 is Leu or Met
  Variant (26)..(26): Xaa in position 26 is Ala, Cys, Ser or Val
  Variant (27)..(27): Xaa in position 27 is Ile or Val
  Variant (28)..(28): Xaa in position 28 is Ile or Leu
  Variant (29)..(29): Xaa in position 29 is any amino acid
  Variant (30)..(30): Xaa in position 30 is Ala or Val
  Variant (31)..(31): Xaa in position 31 is any amino acid
  Variant (32)..(32): Xaa in position 32 is Ala, Glu, Gly or Ser
  Variant (34)..(34): Xaa in position 34 is Asp, Asn or Thr
  Variant (35)..(35): Xaa in position 35 is Ile, Leu or Val
  Variant (36)..(36): Xaa in position 36 is any amino acid
  Variant (37)..(37): Xaa in position 37 is Ile or Val
  Variant (38)..(38): Xaa in position 38 is Glu, Gly or Gln
  Variant (39)..(39): Xaa in position 39 is Ala, Glu or Ser
  Variant (40)..(40): Xaa in position 40 is Gly or Gln
  Variant (41)..(41): Xaa in position 41 is Ala, Thr or Val
  Variant (42)..(42): Xaa in position 42 is Ala, Asn, Ser or Thr
  Variant (43)..(43): Xaa in position 43 is Ile or Leu
  Variant (44)..(44): Xaa in position 44 is Ala or Gly
  Variant (45)..(45): Xaa in position 45 is Ala, Pro or Ser
  Variant (47)..(47): Xaa in position 47 is any amino acid
  Variant (49)..(49): Xaa in position 49 is Leu, Met or Val
  Variant (50)..(50): Xaa in position 50 is Ile or Val
  Variant (52)..(52): Xaa in position 52 is any amino acid
  Variant (53)..(53): Xaa in position 53 is Gly, Ser or Val
  Variant (54)..(54): Xaa in position 54 is any amino acid
  Variant (55)..(55): Xaa in position 55 is Ile or Val
  Variant (56)..(56): Xaa in position 56 is Glu or Gly
  Variant (57)..(58): Xaa in position 57 to 58 is any amino acid
  Variant (59)..(59): Xaa in position 59 is Ala or Val
APGVXLXAXXXXXIXIXXGVCIGXGXXXXXXXGXXXXXXXXXXXXGXLXXGXXXXXXXXC

SEQ ID NO: 85741 - protein, 20 aa, Artificial sequence
  protein pattern
  Variant (2)..(4): Xaa in position 2 to 4 is any amino acid
  Variant (5)..(5): Xaa in position 5 is Ile or Val
  Variant (6)..(6): Xaa in position 6 is Asn, Gln or Ser
  Variant (7)..(7): Xaa in position 7 is any amino acid
  Variant (8)..(8): Xaa in position 8 is Ile or Leu
  Variant (9)..(9): Xaa in position 9 is Leu or Met
  Variant (10)..(10): Xaa in position 10 is any amino acid
  Variant (15)..(15): Xaa in position 15 is any amino acid
  Variant (16)..(16): Xaa in position 16 is Lys or Arg
  Variant (17)..(17): Xaa in position 17 is Asn, Gln or Arg
  Variant (18)..(18): Xaa in position 18 is any amino acid
  Variant (19)..(19): Xaa in position 19 is Phe or Leu
  Variant (20)..(20): Xaa in position 20 is Asn or Ser
GXXXXXXXXXTLFPXXXXXX

SEQ ID NO: 85742 - protein, 13 aa, Artificial sequence
  protein pattern
  Variant (2)..(3): Xaa in position 2 to 3 is any or no amino acid
  Variant (5)..(5): Xaa in position 5 is Asp, Glu or Asn
  Variant (7)..(7): Xaa in position 7 is any amino acid
  Variant (9)..(9): Xaa in position 9 is Asp or His
  Variant (10)..(10): Xaa in position 10 is Glu, Pro or Gln
  Variant (11)..(11): Xaa in position 11 is Gly, Ser or Thr
  Variant (13)..(13): Xaa in position 13 is Ala or Val
SXXGXVXIXXXAX

SEQ ID NO: 85743 - DNA, 993 bp, Synechocystis sp.
  CDS (1)..(993): transl_table=11
atggcaacatcatttgcttcccggggaggactgctggcgtctggtttggcgatcgccttttggctgaccggttgtggcacggcggaagtcacgacatccaatgctcccagcgaagaagtgacagccgtaaccacagaagtccagggggaaacagaggagaaaaagaaggttttaaccaccttcaccgtattggccgacatggtccagaatgttgccggagacaagttagtggtggaatccatcactcgcattggtgcagagatccacggttatgagccgactcccagtgacattgtcaaggctcaggacgcagacttaatcctttacaacggcatgaacctagagcgttggttcgagcaatttttgggcaacgtgaaggatgtgccctctgtggtgctaacggaaggcatcgaaccgattccgatcgccgacggcccctataccgataagcccaatccccacgcctggatgtcgccccgtaatgccctggtctatgtggaaaatatccgccaagccttcgtcgaacttgacccggacaatgccaaatattacaacgccaatgcagcagtctacagcgagcagttaaaggcgatcgatcgccaactgggagcggatttggaacaagtgcccgccaaccagcggtttttggtgagttgcgaaggagcgttttcctatttggccagagattacggtatggaggagatttacatgtggccaattaatgccgaacagcagtttacccccaagcaagtgcaaaccgtgattgaggaggtgaaaaccaataatgtaccaacaatcttttgtgaaagtaccgtcagcgataaggggcaaaaacaggtagcccaggccaccggcgctcgctttggcggcaatctctatgttgactccctttccacagaggaaggccctgtgcccacctttttagatttgctggaatatgatgcccgggtgattaccaacggtcttttggccggtaccaatgcccagcaataa

SEQ ID NO: 85744 - protein, 330 aa, Synechocystis sp.
MATSFASRGGLLASGLAIAFWLTGCGTAEVTTSNAPSEEVTAVTTEVQGETEEKKKVLTTFTVLADMVQNVAGDKLVVESITRIGAEIHGYEPTPSDIVKAQDADLILYNGMNLERWFEQFLGNVKDVPSVVLTEGIEPIPIADGPYTDKPNPHAWMSPRNALVYVENIRQAFVELDPDNAKYYNANAAVYSEQLKAIDRQLGADLEQVPANQRFLVSCEGAFSYLARDYGMEEIYMWPINAEQQFTPKQVQTVIEEVKTNNVPTIFCESTVSDKGQKQVAQATGARFGGNLYVDSLSTEEGPVPTFLDLLEYDARVITNGLLAGTNAQQ

SEQ ID NO: 85745 - DNA, 903 bp, Dichelobacter nodosus VCS1703A
  CDS (1)..(903): transl_table=11
atgaaaaaatcatttcttaactcaatgatggtactcattttgacgtttttttgctcggcagcgatggcgcaaaaattcactgttgtaagcacattcaccgtcattgctgatattgctcaaaatattgctggtgaacacgctgatgttttttctattactaaagctggcgctgaaatccacgattacgaacctacgcctcatgatttggttaccgcccaaaaagcgcaacttttattacataatggattgcaactagaacgttggtttgagcgttttcatcaatcattaaaaaatgtgccagcagtaacagtcagtgcgggggtagtacccattcctattgaaggtgattctggcattcctaatccacatgcatggatgtcgatcgataatgctttgatttatgttgataatatcactcaagcactgcaaaaatatgatcctgaacacgccaatgattacgctgaaaatgcacggcgttacaaagaaaaaattcaagcgcttgatacgcatcttcagcaagcttttgccaaaattccggaacaacaacgttggttagtaaccacagaaggcgctttttcctatttagcacgcgattatcaccttcgtgaagcctatgtgtggccggttaactctgagcaagaaggcactccacaacaaattgccgatttaatagcaactgtacgaaaacatcaaattcctgtcgtatttagcgaaagtaccctgtcagataaacatgcaaaagttgttgctaaggaaactggtgctcaatatggcggcgttttatacgttgattcactttctactgctgatggcgcggtacctacttatttagatttattgaaagtaactaccgatacaataatcagcggttttgaatctgcactcaataaaaacgctaagtaa

SEQ ID NO: 85746 - protein, 300 aa, Dichelobacter nodosus VCS1703A
MKKSFLNSMMVLILTFFCSAAMAQKFTVVSTFTVIADIAQNIAGEHADVFSITKAGAEIHDYEPTPHDLVTAQKAQLLLHNGLQLERWFERFHQSLKNVPAVTVSAGVVPIPIEGDSGIPNPHAWMSIDNALIYVDNITQALQKYDPEHANDYAENARRYKEKIQALDTHLQQAFAKIPEQQRWLVTTEGAFSYLARDYHLREAYVWPVNSEQEGTPQQIADLIATVRKHQIPVVFSESTLSDKHAKVVAKETGAQYGGVLYVDSLSTADGAVPTYLDLLKVTTDTIISGFESALNKNAK

SEQ ID NO: 85747 - DNA, 882 bp, Pasteurella multocida subsp. multocida str. Pm70
  CDS (1)..(882): transl_table=11
atgcgtcgcttaactgttattttaagtgcaattatgttaggtatttttacatcgcctgcgtttgcaaaattcaaagttgtcactacgtttactgtgattcaagatattgctcaaaatgttgctggtgatgcagccattgttgagtcaattaccaaaccgggtgcggaaattcatgattatgaaccgacaccaaaagatatcgtcaaagcacaacatgccgatctcgtcttatggaatggcttaaatcttgagcgttggtttgaaaaattcttcgaaaacgtgaaagataaaccggctgtcgtcgtgacagaaggaatcacgccaatttcaatttatgaaggtccttacaaagatgcaccaaatccacatgcttggatgtcaacatcaaatgccttaatttatattgaaaatattaaaaatgcattggtgaaatatgatccgaaaaatgctgacatctatgtcaagaatgcagaaaattatgcaaataaaatcaaacaattagaccaaccattacgtgaaaaacttgccaaaattcctgaaggtcaacgttggttagtgaccagtgaaggcgctttcagctacttagcaaaagattatggcttacaagaagcgtatttatggccaattaatgcggaagaacaaggcacaccacaacaagtgcgtcatgtaattgaaacagtacgcaaaaacaatattcctgtggtgttcagtgaaagtaccatttcggataaacctgcaaaacaagttgccaaagaaacgggagcaaaatacggtggtgtactttatgtagattccttatctactgctaaaggaccagtaccaacctatatcgatttattaaacaccactgtttccactattgttaaaggatttgaaaaataa

SEQ ID NO: 85748 - protein, 293 aa, Pasteurella multocida subsp. multocida str. Pm70
MRRLTVILSAIMLGIFTSPAFAKFKVVTTFTVIQDIAQNVAGDAAIVESITKPGAEIHDYEPTPKDIVKAQHADLVLWNGLNLERWFEKFFENVKDKPAVVVTEGITPISIYEGPYKDAPNPHAWMSTSNALIYIENIKNALVKYDPKNADIYVKNAENYANKIKQLDQPLREKLAKIPEGQRWLVTSEGAFSYLAKDYGLQEAYLWPINAEEQGTPQQVRHVIETVRKNNIPVVFSESTISDKPAKQVAKETGAKYGGVLYVDSLSTAKGPVPTYIDLLNTTVSTIVKGFEK

SEQ ID NO: 85749 - DNA, 906 bp, Sinorhizobium meliloti 1021
  CDS (1)..(906): transl_table=11
atgatccatccaacgaggcgcatgatcgtggcggcagcagcggcgatggctgctctatcgctcatgccggcggcggcccgggcggcggaaaagctcaaggccgtcaccaccttcacggtcatcgccgatatggcgcagaacgtcgcgggcgatgccgcggtggtcgaatcgatcaccaagccgggcgccgagatccacaattaccagccgacgccccgcgatatcctcaaggcgcatgatgccgacctcattctgtggaacgggctgaacctcgagctctggttcgaaaggttcttccagaacttcgacggcgttcccggcgtcgtcgtctccgaaggcgtcgagccgatgggcatcgccgaggggccctataccggcaaacccaacccgcatgcctggatgtcgccttcggccgcgctgatctatgtcgacaatatccgcgacgccttcgtgcaacacgatcccccgaatgccgaggtctacaaggcaaatgccgaggcctacaagaagaagatcgaggcggcggtcgcacccatccgcaccgagctcgaaaggataccggcggaaaggcgatggctcgtttcgagcgagggcgcattcagctatctcgcccgcgatttcggcatgaaggagctttatctttggccgatcaatgccgaccagcaaggcacgccgcagcaggtgcgcaaggtgatcgacgtggttcgggccaatcggatacccgtagtcttttccgaaagcaccatttcgcccgaccccgccgagcaggtcgcgcgggagacgggtgcaaaatacgggggcgtgctctatgtcgactccttgagcgaggccgacggccccgttccgacctatatcgatctgctgcgcgttacatcggaaacgatcgcgaaaggcttgtcgcaatga

SEQ ID NO: 85750 - protein, 301 aa, Sinorhizobium meliloti 1021
MIHPTRRMIVAAAAAMAALSLMPAAARAAEKLKAVTTFTVIADMAQNVAGDAAVVESITKPGAEIHNYQPTPRDILKAHDADLILWNGLNLELWFERFFQNFDGVPGVVVSEGVEPMGIAEGPYTGKPNPHAWMSPSAALIYVDNIRDAFVQHDPPNAEVYKANAEAYKKKIEAAVAPIRTELERIPAERRWLVSSEGAFSYLARDFGMKELYLWPINADQQGTPQQVRKVIDVVRANRIPVVFSESTISPDPAEQVARETGAKYGGVLYVDSLSEADGPVPTYIDLLRVTSETIAKGLSQ

SEQ ID NO: 85751 - DNA, 900 bp, Agrobacterium tumefaciens str. C58
  CDS (1)..(900): transl_table=11
gtgacagacgtgaatctccataaaatccgccatgccctatttgctttttcgcttttcctgccgggtgttgccgtcgcgcaggaaaagccgaaggtggtcaccaccttcaccatcatcgccgatatggcgcgcaacgtggcgggtgatgcggcggatgtggagagcatcaccaagccgggtgcggaaattcacaattaccagccgacaccgcgtgatattctcaaagcccgcaaggccgatctggtgctgcgcaatggcctcaatctggaattgtggttcgagaaattcctggccaatctttccggcgtgcctgatgtgacggtgagcgatggtgtgcaacccatggcgatcagcggcggcgcctatcaggggaaacccaatccgcatgcctggatgtcgcccgataacgccttgatctatgtggaaaatatccgcaagggccttgcggaaatcgaccctgcccatgccgatgtctataccgccaatgccaaggcctattcggacaagatcaaggccacggtgcagccgatccgcgatgcgctttccgttctgcctgacaacaagcgctggttggtaacgagcgaaggcgccttttcttatctcgcccgtgatttcggcctgaaggaactgttcctgtggccggtcaatgccgatagccagggcacgccgcaacaggttcgcggcgtgatcgacgccatgcgcgaacacaatatccaggtcatcttcagcgaaagcacggtttccgccgatcccgcaaagcaggtggccaaggaaaccggtgcgtcctatggcggcatactctatgtggattcgctgagcgaggcggacggcccagttccgacctatctggacctgctgtgcgtgaccagcgaaaccatcgccaagggactgtcttcatga

SEQ ID NO: 85752 - protein, 299 aa, Agrobacterium tumefaciens str. C58
MTDVNLHKIRHALFAFSLFLPGVAVAQEKPKVVTTFTIIADMARNVAGDAADVESITKPGAEIHNYQPTPRDILKARKADLVLRNGLNLELWFEKFLANLSGVPDVTVSDGVQPMAISGGAYQGKPNPHAWMSPDNALIYVENIRKGLAEIDPAHADVYTANAKAYSDKIKATVQPIRDALSVLPDNKRWLVTSEGAFSYLARDFGLKELFLWPVNADSQGTPQQVRGVIDAMREHNIQVIFSESTVSADPAKQVAKETGASYGGILYVDSLSEADGPVPTYLDLLCVTSETIAKGLSS

SEQ ID NO: 85753 - DNA, 891 bp, Shigella flexneri 2a str. 301
  CDS (1)..(891): transl_table=11
atgctcttggggtgcctcgccctcacctgctcgatcgcatttcaggcaagtgcaactgaaaaattcaaggtcattacaacatttaccatcatcgcggatatggccaaaaacgtggctggagatgctgcagaagtctcatccataaccaagcctggtgcagaaattcatgagtatcagcctacccctggcgatattaaacgtgcgcagggggcacaactgattctcgccaatggtatgaatctggaattgtggttccaacgcttttaccagcatctcaatggggttccagaagtaattgtctcttcgggtgtgacgccagtagggatcaccgaaggaccctatgagggcaaacctaatccccatgcatggatgtcgccagataatgctctgatttacgtcgataatattcgtgatgcgttgataaaatacgatccggcaaatgcacaaacctaccaacgtaatgccgatacttataaagccaagattacccaaacccttgcccccctgcgtaagcagattacggaactccctgagaatcagcgatggatggtcaccagtgaaggggctttttcttatctcgcacgcgatttggggctaaaagagctttatctgtggccgattaatgccgatcaacaaggaacaccgcagcaggtacgtaaggttgttgatatagttaagaaaaatcatatcccggcagtctttagcgagagtacgatttccgataaaccagcgcgtcaggttgcgcgtgaaaccggcgcacactacggcggtgtgctctatgtcgattccctgagcacagaaaacggcccggtacctacgtatatcgaccttcttaaggttactaccagtacgctggtacagggaattaaagccgggaaaagggagaaataa

SEQ ID NO: 85754 - protein, 296 aa, Shigella flexneri 2a str. 301
MLLGCLALTCSIAFQASATEKFKVITTFTIIADMAKNVAGDAAEVSSITKPGAEIHEYQPTPGDIKRAQGAQLILANGMNLELWFQRFYQHLNGVPEVIVSSGVTPVGITEGPYEGKPNPHAWMSPDNALIYVDNIRDALIKYDPANAQTYQRNADTYKAKITQTLAPLRKQITELPENQRWMVTSEGAFSYLARDLGLKELYLWPINADQQGTPQQVRKVVDIVKKNHIPAVFSESTISDKPARQVARETGAHYGGVLYVDSLSTENGPVPTYIDLLKVTTSTLVQGIKAGKREK

SEQ ID NO: 85755 - DNA, 969 bp, Tropheryma whipplei TW08/27
  CDS (1)..(969): transl_table=11
ttgtcaaacgaaggcgcctcttcatccggaagtctggtccggcgatcggttttacggcgtctggtcttttgggctgctgcattcgtgtctgtgtctctgtttactactgcctgtcttgccaaaagcgaggataaaacagttaagccagtcgtgtacacctcgttcggggtattggaaagcataaccaagagtattgccggcgataaactgacggtgcgcagcatagtgccacagggcgggtctgtgcacgaatatgagccaaagccaagtgatgtaaaagatcttgcaaacgcaaagatgttaatcgtaaatggccttcatctggaggatgagtggctcgataaggtcctggttgacttcaagggcgtaaaggtcactgcctcgaagggtattgcgccaattctaatcgccgaagacagatcttccggtacccccaatccgcatgcatgggtctctccaaaggatggtgcgatatacgcaaaaaacataacagagttcctgagtgagcttgacccgaagaataaggcctattaccaagaacatggcggggcgttggaaaagaggttgcagagtctgtcagaagaatttgagaaatccattgcaaagattcctgccgcgtacagggctctagtcacctgcgagggggcttttagttacgtggcgcaggcgggaggtctggaggaaaggtatctatggcccgtcaatggcgaaaatgccgagacatccaaaaaagttggcgagcttgttgactttgtgaaggggcgcaagcttccgtatgtgttctgcgaatacggagtaaatacgaaatttatcgagcaggtaattcatgattctggcggcatcgcaaaattgggtggcctgttttacgtagacgggttggttgacaaagatggtcacgccattacgtacgagcaagccatagagcagaatataaaggtgatttctgaaacccttgggtcaagcagatag

SEQ ID NO: 85756 - protein, 322 aa, Tropheryma whipplei TW08/27
MSNEGASSSGSLVRRSVLRRLVFWAAAFVSVSLFTTACLAKSEDKTVKPVVYTSFGVLESITKSIAGDKLTVRSIVPQGGSVHEYEPKPSDVKDLANAKMLIVNGLHLEDEWLDKVLVDFKGVKVTASKGIAPILIAEDRSSGTPNPHAWVSPKDGAIYAKNITEFLSELDPKNKAYYQEHGGALEKRLQSLSEEFEKSIAKIPAAYRALVTCEGAFSYVAQAGGLEERYLWPVNGENAETSKKVGELVDFVKGRKLPYVFCEYGVNTKFIEQVIHDSGGIAKLGGLFYVDGLVDKDGHAITYEQAIEQNIKVISETLGSSR

SEQ ID NO: 85757 - DNA, 906 bp, Haemophilus ducreyi 35000HP
  CDS (1)..(906): transl_table=11
atgaatctttcctttctaaaaaagaccctaattattgcatgcgcaatgggaacaactgttgcaatagcagcccccttcaaggtcgtcaccacatttacagtgattcaagatattgcccaaaatgtagccggtgataaagcaattgtagaatctattactaaaccaggtgctgaaatccacgactatcaacctacgcccaaagatattgtcaaagcacaaaaagcggatttaattctacaaaatggcatgaaccttgaacgttggtttgaacgattctttgaaaacgttaaaaatacaccggctgtcgtcgtaactgaaggcattcagccgattgctattttagaaggtgaatataaaaacttgcctaatccgcatgcatggatgtcttccgccaatgcgttgcaatatattgagaatattcgagctgccttggtcaaatacgatcccgaaaatgcggttagctataatcaaaatgcaaaagcctatgccgaaaaaataaaagcaatctctgagccacttcgccaacgcttatccgttattcctgaaaaacaacgttggttagtaaccagtgaaggggcatttagctaccttgcacaagattatggcttacaagaattatatttatggcccattaatgctgaagaacaaggttcaccacaacaagtgagaaaagtaattgatggagttaaagctaatcatattccagtcgtatttagcgagagcactgtatcagataagcctgcaaaacaagttgctaaagaaacaggcgcgttatatggcggggtattatacgttgattcactctccaccaaagaaggacctgtacccacttatttagatttattaaaagtgacaatttctactatagtagatggttttgaagcgagcaaaaaagagcctaaatga

SEQ ID NO: 85758 - protein, 301 aa, Haemophilus ducreyi 35000HP
MNLSFLKKTLIIACAMGTTVAIAAPFKVVTTFTVIQDIAQNVAGDKAIVESITKPGAEIHDYQPTPKDIVKAQKADLILQNGMNLERWFERFFENVKNTPAVVVTEGIQPIAILEGEYKNLPNPHAWMSSANALQYIENIRAALVKYDPENAVSYNQNAKAYAEKIKAISEPLRQRLSVIPEKQRWLVTSEGAFSYLAQDYGLQELYLWPINAEEQGSPQQVRKVIDGVKANHIPVVFSESTVSDKPAKQVAKETGALYGGVLYVDSLSTKEGPVPTYLDLLKVTISTIVDGFEASKKEPK

SEQ ID NO: 85759 - DNA, 1002 bp, Prochlorococcus marinus str. MIT 9313
  CDS (1)..(1002): transl_table=11
atgaaataccccctgagagtcctttggtgcgaacggacctatcacgtgtctcaattgatctctgggcgtcaagccgtccgttttgtactttccttctgctgccttgcacttctaggtgcctgcacaccaccaaccaggatggcgagccagtcccaggcccaagactcaggcaaacctcttgtgctcaccaccttcacggtgctggcagacatggcacgcaatgttgccggcgaccgtttacaggtgcgctccatcgtcaagcagggcgctgaaattcatggttatcagcccacgccaagtgacctggcccaagctgttggtgcagatttgattgtcgaaaatggctttgggctggaactctgggcgcgcaagttcactgccgctgctggcaaggtctcaacgctgactcttagtgaggggatggagccactgttaattgagggggatgcctacgcaggcaagcccaatcctcatgcctggatgtctccgcaacgggcgatgcaatacgtcgatcaactggtgaaagcctttagcaggattgatccagaaggtgccaagacctttgccattaatggtcgtcgctacaaagaccagctccaaaaacttgatgatgaactaaggacatctctggcaacgattccagccaaacgtcgtttactggtcacctgtgagggagccttcacctacttggcaaaggattacggcatggaggaggcttacctttggcctgtcaatgcagagagtgaggtcacacctcaacgtatggccaaactcatcgagaccgtcaagctgcgtgaagtgccagcgatcttctgcgaaagcactgtcagcgacaaggctcagcgtgaggtcgcacgggctagcggcgctcgctttggcggtacattctttgttgattctctttcgcaagccgatgggccggcctcgaccttgctcgatcttcaacgacataacgtcgatctgattctggatgaattggtaccagtcaatcgcgaaaaataa

SEQ ID NO: 85760 - protein, 333 aa, Prochlorococcus marinus str. MIT 9313
MKYPLRVLWCERTYHVSQLISGRQAVRFVLSFCCLALLGACTPPTRMASQSQAQDSGKPLVLTTFTVLADMARNVAGDRLQVRSIVKQGAEIHGYQPTPSDLAQAVGADLIVENGFGLELWARKFTAAAGKVSTLTLSEGMEPLLIEGDAYAGKPNPHAWMSPQRAMQYVDQLVKAFSRIDPEGAKTFAINGRRYKDQLQKLDDELRTSLATIPAKRRLLVTCEGAFTYLAKDYGMEEAYLWPVNAESEVTPQRMAKLIETVKLREVPAIFCESTVSDKAQREVARASGARFGGTFFVDSLSQADGPASTLLDLQRHNVDLILDELVPVNREK

SEQ ID NO: 85761 - DNA, 921 bp, Photorhabdus luminescens subsp. laumondii TTO1
  CDS (1)..(921): transl_table=11
atgaagaaaaaactttctctgctgttactttcgcctcctgttctgggaattatgttgattctcttatctgtcattctatttagtcatccggtatccgccgccaaacaatttaaagttgtcacgacctttactatcattcaagatatcgcacaaaatgtagcgggtgatgcagcaattgttgaatcaattactaaacctggtgccgaaatccatgattaccaacccactcccaaagatattataaaatctcaacatgctgatttgatcctttggaatgggctaaatctagaacgctggtttgaacgcttctttgaaaaccttaaagatgtacctgccgttgttattactgacggcattgaaccactccctatccgtgaagggccttacaacgggaaccctaatccccacgcctggatgtcacccacaaatgctttaatctatattgagaatattcgccaagcatttgtgaaatacgatcctaaaaatacagaaacttataataagaatgccaaagcctatgctgaaaaaatcgcacaactggattctccactgagagaacgtctttcccgtattccacaggatcagcgttggctagtcactagtgaaggggcttttagctatttagctaaagattaccaattcaaggaagtttatctatggccaattaatgcggaagaacaaggttcaccacaacaagttcgtcatgtcattgatactgtaagagcaaacaaaatccccgttgtatttagcgaaagtacaatttcagataaaccggctaaacaagtcagtaaagaaacagatgcccgttatggtggcgttctttatgtagattcactctccggcagtagtggcccagtaccaacttatattgatttactgaacaaaactgtagatacaatcgcaaaaggatttaatcaatga

SEQ ID NO: 85762 - protein, 306 aa, Photorhabdus luminescens subsp. laumondii TTO1
MKKKLSLLLLSPPVLGIMLILLSVILFSHPVSAAKQFKVVTTFTIIQDIAQNVAGDAAIVESITKPGAEIHDYQPTPKDIIKSQHADLILWNGLNLERWFERFFENLKDVPAVVITDGIEPLPIREGPYNGNPNPHAWMSPTNALIYIENIRQAFVKYDPKNTETYNKNAKAYAEKIAQLDSPLRERLSRIPQDQRWLVTSEGAFSYLAKDYQFKEVYLWPINAEEQGSPQQVRHVIDTVRANKIPVVFSESTISDKPAKQVSKETDARYGGVLYVDSLSGSSGPVPTYIDLLNKTVDTIAKGFNQ

SEQ ID NO: 85763 - DNA, 909 bp, Bartonella quintana str. Toulouse
  CDS (1)..(909): transl_table=11
atgaacgtaaaaacgttttttatcataatttgggggagtgttatttttttgacacccaatctcgctttgtgtgctagcaaatttaaagctgttacgactttcactattattgctgatatggcgcggaatgtagcaggtgatgctgctactgttgaatcaatcacgaaaccaggtgctgaaattcatgaataccaacccacacctcgcgatcttatgcgcgcgcaaggagccaatcttatcttgtggaatgggttagagttggagctttggtttgagaagttttttcaaaatatcaaggatgttccaagtgttgttgtttcaaaaggcattgtaccgattaaaattggtgaggggccttttagtggtaaacccaatcctcatgcatggatgtcacagacttctgctttgatttacgttgataatattcgcgatgcttttgtaaagtacgatcctgagcatgctgctatttataaagaaaatgccgaaatttataagcaaaagattcgcgcaacaattgatccaattagagctgaattggaagcagtaccgcaagacaagcgttggcttgtgaccagtgaaggtgcattcagctatttagcgcgtgattttgatctgaaggaactctacctatggccaattaatgctgatcagcaagggacaccgcagcaggttaagcatgttattgatatggttcgcaaatacaatattcaagtagttttttctgaaagcactatttcccctgcgcctgctaagcaggttgcgagagaaaccggggctaaatacggtggtgttctttatgttgattctctgagtgagaaaaatggtgaggtgccaacctatattgatttattacgtgttacaagcgggcgtattagcaatgccttattagatggagtaaaaggccaatga

SEQ ID NO: 85764 - protein, 302 aa, Bartonella quintana str. Toulouse
MNVKTFFIIIWGSVIFLTPNLALCASKFKAVTTFTIIADMARNVAGDAATVESITKPGAEIHEYQPTPRDLMRAQGANLILWNGLELELWFEKFFQNIKDVPSVVVSKGIVPIKIGEGPFSGKPNPHAWMSQTSALIYVDNIRDAFVKYDPEHAAIYKENAEIYKQKIRATIDPIRAELEAVPQDKRWLVTSEGAFSYLARDFDLKELYLWPINADQQGTPQQVKHVIDMVRKYNIQVVFSESTISPAPAKQVARETGAKYGGVLYVDSLSEKNGEVPTYIDLLRVTSGRISNALLDGVKGQ

SEQ ID NO: 85765 - DNA, 915 bp, Erwinia carotovora subsp. atroseptica SCRI1043
  CDS (1)..(915): transl_table=11
atgattggctttcacatccctttgcctgccctatttcgccgtgtcgcgctgccgtgcgcattgctgcttttagccaacacatccgctcaggcggctgaaaagcttaaagtcatcaccacctttaccatcattcaggatatcgcacagaatattgcaggtgatgcagcaaccgttgaatccatcaccaaacctggggcagagattcacgattatcaaccgacaccacgtgatatcgtgaagacacagtctgcacagctggtgctgtggaacggtatgaatctcgaacgctggtttacgcgctttttcgagaacgtgaaaaatgtacccgctgctgtggtaacggaaggcatcacaccgcttcctattcgtgaaggtgcctataatggcaacccgaacccgcatgcctggatgtctccctccaatgcattaatttatattgaaaatattcgcaaaggtctggttcaagccgatcctgccaatgcagagacatacaaccgtaacgcgaaagcctatgctgaaaagattaaggctctcgacgcaccgttgcgtgaacgtctcgcccgcatcccagaacagcagcgttggttagtcaccagtgaaggcgcatttagctatctggcgaaggattatcagttcaatgaagtttacctctggccaatcaatgccgatgagcaaggttcgccgcagcaggtgcgccgagtgattgacaccgtgcgtgaaaaggctatccctgtggtattcagcgagagcactatttccgataaaccagcgaaacaggtcagcaaagaaacgggggcgaaatatggcggcgtgctgtatgttgattcgctgtctacagaaaaaggcccggtgccgacctatatcgacctgttacaagtgacggtggaaaccatcgctaaaggatttaatcaatga

SEQ ID NO: 85766 - protein, 304 aa, Erwinia carotovora subsp. atroseptica SCRI1043
MIGFHIPLPALFRRVALPCALLLLANTSAQAAEKLKVITTFTIIQDIAQNIAGDAATVESITKPGAEIHDYQPTPRDIVKTQSAQLVLWNGMNLERWFTRFFENVKNVPAAVVTEGITPLPIREGAYNGNPNPHAWMSPSNALIYIENIRKGLVQADPANAETYNRNAKAYAEKIKALDAPLRERLARIPEQQRWLVTSEGAFSYLAKDYQFNEVYLWPINADEQGSPQQVRRVIDTVREKAIPVVFSESTISDKPAKQVSKETGAKYGGVLYVDSLSTEKGPVPTYIDLLQVTVETIAKGFNQ

SEQ ID NO: 85767 - DNA, 969 bp, Yersinia pseudotuberculosis IP 32953
  CDS (1)..(969): transl_table=11
atgttaattaagaaaaaaagtccttatctcaaaatgatagaacgactaaactccccttttctacgggctgcagccttgtttacaattgtcgcattctcatcgctgatcagtaccgctgctttagcagaaaataatcccagcgatacagccaaaaaattcaaagttgtgactacattcacaatcattcaggatattgcacaaaatatcgccggtgatgttgccgtggtggagtcaataaccaagccaggcgcagagattcatgactatcaacctaccccacgagatattgtaaaagcacagtcagcagaccttatcttatggaatggcatgaatctggagcgttggtttgagaagttcttcgaaagtattaaagatgtcccgtctgccgtcgtgaccgcaggtattacacccctgcctatccgtgaaggcccctatagcggcattgccaacccacatgcctggatgtcgccatcaaatgcgctaatatatattgagaatatccgcaaagcgttagttgaacacgatcccgctcatgcagaaacctataaccgtaacgcgcaagcctatgctgaaaaaattaaggcgctagatgctccactgcgtgagcgtttatctcgtattcctgcggaacagcgttggttagtaaccagtgaaggggcatttagttatcttgccaaagactatggttttaaagaggtttacttatggccaatcaatgcagagcaacaaggtattccgcaacaagttagacacgtgattgatattattcgcgaaaataaaattccggtggtgtttagtgagagtactatttccgacaaacccgccaaacaagtgagtaaagaaaccggtgcacaatatggcggcgtgctatatgttgattctctgtcgggcgaaaaaggcccggtccccacttacatcagtttaattaacatgactgtagatactatcgctaaaggattcggtcaatga

SEQ ID NO: 85768 - protein, 322 aa, Yersinia pseudotuberculosis IP 32953
MLIKKKSPYLKMIERLNSPFLRAAALFTIVAFSSLISTAALAENNPSDTAKKFKVVTTFTIIQDIAQNIAGDVAVVESITKPGAEIHDYQPTPRDIVKAQSADLILWNGMNLERWFEKFFESIKDVPSAVVTAGITPLPIREGPYSGIANPHAWMSPSNALIYIENIRKALVEHDPAHAETYNRNAQAYAEKIKALDAPLRERLSRIPAEQRWLVTSEGAFSYLAKDYGFKEVYLWPINAEQQGIPQQVRHVIDIIRENKIPVVFSESTISDKPAKQVSKETGAQYGGVLYVDSLSGEKGPVPTYISLINMTVDTIAKGFGQ

SEQ ID NO: 85769 - DNA, 936 bp, Thermobifida fusca YX
  CDS (1)..(936): transl_table=11
gtggcgaactttaaagattgtcgtaccttaaaaaccggtgtgctcggtattgtcctcgcagcacttgctgcgtgcggcacctcaccagccacacagctcgacgacgaccggcctgtcgtgctcaccaccttcaccgtcctcgctgacatggcgcgcaacgtcgccggggagcacgcccgcgtggaatccatcacccgggtcggtgcggagatccacgaatatgagcccacccccagcgacctggtccgtgcccaggccgctgacctcctcctcgccaacggcatgaacctggaactgtggtttgagcagttcaccgacccgctcgacgtccccacccgcgtggtcaccgagggagtcgagaccatccctgtcgcctccggggactatgcgggccaccccaacccgcacgcgtggatgtccccggacgaagccctcgtctacgtcgacaacatccgggatgcgctcagcgaactcgacccggaccatgccgccgactatgcggccaacgccgaggcctaccaggctgagatcaccgagatcggcgagttcctccgtgctgaactcgccacagtgcccgaagaacagcgggtcctggtcacctgcgagggcgcattctcctacctggcacgcgacacagggctaaccgagaagtacctgtggccgatgaacgctgaaggggaaggcaccccccagcagatcgcctccgtggtggagttcgtccgtgagcacaacgtccccgcggtcttctgtgaaagtaccgtcaacgacagcgcccagcgccaggtcgcccgcgagaccggtgccgtcctcggcgaacccttgtacgtggattcgctctccgacgcaaacggcccagtccccacctacctggacctgctgcgccacgacgcggaagccatcgtcgccggactcaccggacagggaggccgctcgtga

SEQ ID NO: 85770 - protein, 311 aa, Thermobifida fusca YX
MANFKDCRTLKTGVLGIVLAALAACGTSPATQLDDDRPVVLTTFTVLADMARNVAGEHARVESITRVGAEIHEYEPTPSDLVRAQAADLLLANGMNLELWFEQFTDPLDVPTRVVTEGVETIPVASGDYAGHPNPHAWMSPDEALVYVDNIRDALSELDPDHAADYAANAEAYQAEITEIGEFLRAELATVPEEQRVLVTCEGAFSYLARDTGLTEKYLWPMNAEGEGTPQQIASVVEFVREHNVPAVFCESTVNDSAQRQVARETGAVLGEPLYVDSLSDANGPVPTYLDLLRHDAEAIVAGLTGQGGRS

SEQ ID NO: 85771 - DNA, 894 bp, Rhodobacter sphaeroides 2.4.1
  CDS (1)..(894): transl_table=11
atgaacatgcgacggatcggatgggccgcctcgatggcgacgctcctcatggcagggccggcgctcgccgaccggctgaaggtcgccacgaccttcacggtcatcgccgacatggcgcagaacgtggcgggcgacgcggccgaggtggtgtcgatcacccgccccggcgccgagatccacggctacgagcccacgccgcgcgatatcgtgcgcgcctgggacgcggacctgatcctctggaacgggctcaatctcgagctctggttcgagcagttcctctccaacctgaaggatgtgccgtcggtgacggtgagcgacgggatcgagccgctggcggtcgcgggcggcgaatatcgcggcaggcccaatccgcacgcctggatgggcctcgacaatgccatgatctacatcgacaacatcgcccgcgcgctggccgaggccgatccggcccatgccgagacctatcgggccaatgcggcaggctacaaggagcggctccgggcgaccatcgggcccctgcgcgaccggatcgcggccctgcccgaggagcggcgctggctcgtgacctgcgagggcgccttttcctatctcgcccgcgacttcgggctgaaggagctctatctctggccgatgaacaccgatcaggtcggcacgccgcagcaggtgcgcacggtgatcgacggggtgaaggcccacgcgatcccggcggtcttctgcgagagcacggtgaacaacgcccccgcccggcaggtcgcgcgcgagacgggggcggcctacggcggcatgctctatgtggacagcctgagcccgcgcgacgggccggtgccgacctatctcgacctcctgcgggtgacggccgagaccatcgcgaacgggctggagggcacgagatga

SEQ ID NO: 85772 - protein, 297 aa, Rhodobacter sphaeroides 2.4.1
MNMRRIGWAASMATLLMAGPALADRLKVATTFTVIADMAQNVAGDAAEVVSITRPGAEIHGYEPTPRDIVRAWDADLILWNGLNLELWFEQFLSNLKDVPSVTVSDGIEPLAVAGGEYRGRPNPHAWMGLDNAMIYIDNIARALAEADPAHAETYRANAAGYKERLRATIGPLRDRIAALPEERRWLVTCEGAFSYLARDFGLKELYLWPMNTDQVGTPQQVRTVIDGVKAHAIPAVFCESTVNNAPARQVARETGAAYGGMLYVDSLSPRDGPVPTYLDLLRVTAETIANGLEGTR

SEQ ID NO: 85773 - DNA, 933 bp, Rhodospirillum rubrum ATCC 11170
  CDS (1)..(933): transl_table=11
atgacgacgggcaaaggcaataacggcggggcgtggacacggcgcgcggtcctggggacggcggccggcgtggtcgccgccctcggcttgggcgcgggtcgggcgcgggccgcccggcggctgaaggtggtgaccaccttcaccatcatcgccgatatggcgcgcaatgtggccggggaagccgccgatgtggtgtcgatcaccaagcccggcgccgaaatccacacctatcagccgaccccgggcgaccttatgcgggcgcgcggcgctgatctggtgctgtggaacggcctgaatctggaattgtggttcgaacagttctttgaaaacctgggggacgtccccggtgtcgtggtgtcgcaaaaggtggtcccgatcggcatcggcgagggcccctatgagggcaaacccaacccccatgcctggatgtcgccgacggccgccctgctctatgtcgataccatcgccgaggccctggcgacccacgacccgcaaaacgccgcgctctatcgcgacaatgccgcaagctacaagcggcgcatcgaggagacggtggcgcccttgcggatcgcccttgccgccctgcccgaggagcggcgctggctggtgaccagcgagggggccttcagctacctcgcccgggatttttcgttgcgcgagctttatctgtggccgatcaacgccgaccagcagggccgcccccagcaggtgcgcaaggtggtcgacgccatgcgcgcccaggccattcccgccatcttttccgaaagcaccatttcttcggccccggccgaacaggtggcccgggaaaccggggcgcgctatggcggcgtcttgtatgtcgattccctgagcgggcccgaggggccggttcccagctatcttgatctgctgcgcgtcaccatcgaaaccatccttcacgggctggccccgtaa

SEQ ID NO: 85774 - protein, 310 aa, Rhodospirillum rubrum ATCC 11170
MTTGKGNNGGAWTRRAVLGTAAGVVAALGLGAGRARAARRLKVVTTFTIIADMARNVAGEAADVVSITKPGAEIHTYQPTPGDLMRARGADLVLWNGLNLELWFEQFFENLGDVPGVVVSQKVVPIGIGEGPYEGKPNPHAWMSPTAALLYVDTIAEALATHDPQNAALYRDNAASYKRRIEETVAPLRIALAALPEERRWLVTSEGAFSYLARDFSLRELYLWPINADQQGRPQQVRKVVDAMRAQAIPAIFSESTISSAPAEQVARETGARYGGVLYVDSLSGPEGPVPSYLDLLRVTIETILHGLAP

SEQ ID NO: 85775 - DNA, 912 bp, Rhodococcus sp. RHA1
  CDS (1)..(912): transl_table=11
gtgcgacgacggccggccgcggtgctgacagcgcttgccacggcgctgatgttgtcggggtgcggcacgggtgacgggccggaaaacgacaaaccggtggtgttgaccacgttcaccgttctcgccgatatcgccgccaacgtcggaggcgagcacgtgaccgtcgagtcgatcaccaaggccggcgcggaaatccacggatacgagcccaccccgggcgatatcaagaaggcagccgaggccgacctgatcctcgacaacgggatgaacctggaggcgtggttcgcccagttcgtcgacggcttggacgtcgagcacgtggtcgtgagcgacggcgtcgagccgatcgccatcggcgaggatgcctacgcgggcaaaccgaatccgcacgcctggatgtcaccgctgaacgtgcagatctacgtcgacaacatggtcgccgtgttcagcgaactcgattcggcccatgcggccgactatcgcatcaacggcgacgcgtacaaggcgcagttgcagaaggtgcaggacgagttggtcgccgagctgggagcgctgccggtcaacgaacgggcgctggtcacgtgcgagggagcgttctcgtatctggcccgggatgccgggctgaccgagaagtacatctggccggtcaatgccgaacagcaggccacgccccagcagatcgcgtcgacgatcgagttcgtcaaggacaaccgggttccggcggtgttctgcgaatccacggtgtcggatgcgccgatgcaacgcgtcgtcgaagccacgggcgccgcgttcggcggcaccctctacgtcgactccctgtccgaggcggacgggcccgtgccgacgtacctcgatctgatccggcacgacgccgacaccctcacctccgcactgaacgggcagcaatcatga

SEQ ID NO: 85776 - protein, 303 aa, Rhodococcus sp. RHA1
MRRRPAAVLTALATALMLSGCGTGDGPENDKPVVLTTFTVLADIAANVGGEHVTVESITKAGAEIHGYEPTPGDIKKAAEADLILDNGMNLEAWFAQFVDGLDVEHVVVSDGVEPIAIGEDAYAGKPNPHAWMSPLNVQIYVDNMVAVFSELDSAHAADYRINGDAYKAQLQKVQDELVAELGALPVNERALVTCEGAFSYLARDAGLTEKYIWPVNAEQQATPQQIASTIEFVKDNRVPAVFCESTVSDAPMQRVVEATGAAFGGTLYVDSLSEADGPVPTYLDLIRHDADTLTSALNGQQS

SEQ ID NO: 85777 - DNA, 861 bp, Haemophilus somnus 129PT
  CDS (1)..(861): transl_table=11
atgggtgtaatcttaggttctgtattcagtttaccaagttacgcaaaatttaaagtagttactacttttactgttattcaagatatcgctcagaatgttgctggtgatgctgctgttgttgagtcgatcactgagccgggtgcagaaattcatgattatgaaccaactccacaagacatcgtaaaagcacaatctgctgatttggtgctttggaatggaatgaatttagagcgttggttcgagcgtttctttacccaagtgaaggataaaccagctgttgttgtaactaaagggattgatccaatttctatctacgaaggtccatacaaaggtatgccgaatccacatgcttggatgtcaaccaaaaatgctttggtatacatcgaaaacattcgtgaagctttagtgaaatacgatcctaaaaatgcagacacttacaatgctaatgcaaaagcctatgcagataaaatcgttgctttagacgcaccattacgtgctgagttagaaaaagtaccagcttcacaacgttggttagtaaccagtgaaggtgcattcagctacttagctcacgactacggtttcaaagagctttacttatggcctatcaatgctgaagaacaaggcacaccaaaacaaatcaaaaatgtaatcaaaaaagtacgtgaacacaaaatccctgttgtgttcagcgaaagcaccatttctgataagccagcaaaacaagtggctaaagaaaccaatgcaaaatacggtggtgtactttatgtagattcactttctacaaaagatggtaaagtaccaacttacatcgacttattaaatgtaactgtttcgaccattgtgaatggtttcaaaaaataa

SEQ ID NO: 85778 - protein, 286 aa, Haemophilus somnus 129PT
MGVILGSVFSLPSYAKFKVVTTFTVIQDIAQNVAGDAAVVESITEPGAEIHDYEPTPQDIVKAQSADLVLWNGMNLERWFERFFTQVKDKPAVVVTKGIDPISIYEGPYKGMPNPHAWMSTKNALVYIENIREALVKYDPKNADTYNANAKAYADKIVALDAPLRAELEKVPASQRWLVTSEGAFSYLAHDYGFKELYLWPINAEEQGTPKQIKNVIKKVREHKIPVVFSESTISDKPAKQVAKETNAKYGGVLYVDSLSTKDGKVPTYIDLLNVTVSTIVNGFKK

SEQ ID NO: 85779 - DNA, 933 bp, Rhizobium leguminosarum bv. viciae 3841
  CDS (1)..(933): transl_table=11
atgctctatggggaaagacggtcggttttggccggaatgataggggtggcattcgcagccgtgctggttgcctttcccgccgctgcccaacagacaaccaattcgaagttcaaggtggtgacgaccttcacggtaattgccgacatggcaaaaaacgtggccggtgatgccgcgatcgtggaatcgatcaccaagccgggcgcggagatccacaactatgcgccgacgccgggtgacatccagcgggcccaaggtgcacagctcattctctggaacgggctcaatctggagcgctggttcgaaaagttcttccagaacctgcacgacgtccccggtgccgttgtctccgatggcatcgaaccaatgggcatctcggaaggcccctacgaaggcaagcccaatccccacgcctggatgtcaccgaagaacgccctgatttacgtcgacaatatccgtgatgctttcgcaaagtatgatccggcgaatgcggagacctacaaggctaacgccgaggcctacaagcagaagatcgaagcgacgatcactccgatccgcgccaccctcgaaaaaatccccgaggacaagcgctggctggtttcaagcgagggcgccttttcctatctcgcacgcgatttcgggctgaaggaactctatctctggccaatcaacgccgaccagcagggcacgccccagcaggtccgcaaggtgatcgatgcggtgaaggaaaaccagatcccaaccgtcttcagcgaaagcaccgtttccgataaaccggcccggcaggtggcgcgcgaaaccggcgcccactatggaggcgtgctttatgtcgactcgctgagcgaagccgacggcccggtgccaacctatatcgatcttctgcgcgtgacctccgatacggtcgcgaagggtcttgccgatgggttgtcgcaatga

SEQ ID NO: 85780 - protein, 310 aa, Rhizobium leguminosarum bv. viciae 3841
MLYGERRSVLAGMIGVAFAAVLVAFPAAAQQTTNSKFKVVTTFTVIADMAKNVAGDAAIVESITKPGAEIHNYAPTPGDIQRAQGAQLILWNGLNLERWFEKFFQNLHDVPGAVVSDGIEPMGISEGPYEGKPNPHAWMSPKNALIYVDNIRDAFAKYDPANAETYKANAEAYKQKIEATITPIRATLEKIPEDKRWLVSSEGAFSYLARDFGLKELYLWPINADQQGTPQQVRKVIDAVKENQIPTVFSESTVSDKPARQVARETGAHYGGVLYVDSLSEADGPVPTYIDLLRVTSDTVAKGLADGLSQ

SEQ ID NO: 85781 - DNA, 861 bp, Haemophilus influenzae R2866
  CDS (1)..(861): transl_table=11
atgaccgcacttgcacttggtttatttgcaatgcaagctaatgcaaaattcaaagttgttaccaccttcaccgtgattcaagatattgcgcaaaatgtggcaggcaatgcggcaacagtggaatctattaccaaaccaggtgctgaaattcacgaatatgaaccaacgccaaaagacattgtaaaagcacaatctgctgatttaattttatggaacggcttaaatttagaacgttggtttgagcgtttcttccaaaatgttaaagataaacctgctgtggtagtaacagaaggtattcaaccattatctatttatgaaggcccgtataaagatgcgcctaatccacacgcttggatgtcgccatctaatgctttaatttatattgaaaatattaagaatgcgttagtgaaatacgatccacaaaatgcagctgtgtatgaaaaaaatgccgctgactatgctcaaaaaattaaacaacttgatgaaccgcttcgtgcaaaattagcacaaattccagaagcgcaacgctggcttgtaacaagtgaaggtgctttcagttatttggcgaaagattacaacttaaaagaaggttatttatggccaatcaatgctgaacaacaaggcacaccacaacaagtgcgtaaagtgattgatttagttcgtaaaaacaatattccagttgtgtttagtgaaagtacaatttcagccaaacctgcacaacaagtagctaaagaaagtggtgcaaaatacggtggcgtattgtacgttgattcactttctgcgaaaaacggccctgtgccaacttatattgatttgcttaacgtcactgtatcaactattgttaaaggattcggaaaataa

SEQ ID NO: 85782 - protein, 286 aa, Haemophilus influenzae R2866
MTALALGLFAMQANAKFKVVTTFTVIQDIAQNVAGNAATVESITKPGAEIHEYEPTPKDIVKAQSADLILWNGLNLERWFERFFQNVKDKPAVVVTEGIQPLSIYEGPYKDAPNPHAWMSPSNALIYIENIKNALVKYDPQNAAVYEKNAADYAQKIKQLDEPLRAKLAQIPEAQRWLVTSEGAFSYLAKDYNLKEGYLWPINAEQQGTPQQVRKVIDLVRKNNIPVVFSESTISAKPAQQVAKESGAKYGGVLYVDSLSAKNGPVPTYIDLLNVTVSTIVKGFGK

SEQ ID NO: 85783 - DNA, 975 bp, Crocosphaera watsonii WH 8501
  CDS (1)..(975): transl_table=11
atgttctattcacggagcattgtcctcacgcttagtttaatgctaggtatagggttaatcgcttgtacttcaggtgaagtcgccgatccttctaaccaaacaaacaacagccaaaccacagagttagccgccgataatcaaggaaaaaagaaagtattaaccactttcacggttctagcagacatcgctcaaaacgtagcaggggataagttagacgtacaatcaattactcgtattggtgcagaaattcacggttatgagccaacccctagcgatattaccaaagcccaagacgctgacctcatcttatataatggcatgaatttggagcgttggtttgagcagtttttgggcaatgtaaaagaggtcccttccgtgttgttaacagaaggtattgaacccattcccattgcagaaggtccctacacagacaaacccaacccccatgcttggatgtctcccaaaaatgctttagtttatgtagagaatattcgtcaagcatttgtagaactcgatcccgataatgcagagacttacaacgccaatgctgcggcatatagtgaaaagcttaaagccattgacgaagaattacaaagtgatctgcaacaagttcccaaaaatcagcgatatttagtcagttgcgagggtgcattctcctatttagcccgtgactataatttaaaagaaatttatatgtggcccatcaatgccgaacaacagttcacccctaaacaggtaaaaaccgttattgataaggtaaaaaccaatcaagttcctactattttttgtgaaagtaccgtcagcgacgaaggacaaaaacaagtagccaaaaccactggtgcaaggtttgggggcaacctttacgtagactccctttccaccgaagagggtcccgttcccactttcttagacttactagaatacgatgcgcgggttatctccaacgggttactcgctggtagtaaagcgcaataa

SEQ ID NO: 85784 - protein, 324 aa, Crocosphaera watsonii WH 8501
MFYSRSIVLTLSLMLGIGLIACTSGEVADPSNQTNNSQTTELAADNQGKKKVLTTFTVLADIAQNVAGDKLDVQSITRIGAEIHGYEPTPSDITKAQDADLILYNGMNLERWFEQFLGNVKEVPSVLLTEGIEPIPIAEGPYTDKPNPHAWMSPKNALVYVENIRQAFVELDPDNAETYNANAAAYSEKLKAIDEELQSDLQQVPKNQRYLVSCEGAFSYLARDYNLKEIYMWPINAEQQFTPKQVKTVIDKVKTNQVPTIFCESTVSDEGQKQVAKTTGARFGGNLYVDSLSTEEGPVPTFLDLLEYDARVISNGLLAGSKAQ

SEQ ID NO: 85785 - DNA, 852 bp, Sulfitobacter sp. EE-36
  CDS (1)..(852): transl_table=11
atggcgggcgtgcctgcggttgccgctgatttcaaagtcgtcacgacctttacggttcttgccgatatggcgcagcaggtgggcggcgatgcggcagaggtggtatcgatcactaagccgggtgcggaaatccacggctatgagcccaccccgcgcgatatcgtgggcgcggtggatgccgatctgatcctgtggaacggcatgaacctagagctgtggttcgagcagttcatctcgaacctcggggatattccgtcggcgacgctgaccgacggggtggagccgatttcgatcggggagggggagtatgagggcaagccgaacccccacgcctggatggggctggataacgcgctgatctacgtcgacaacatcgcggcagcttttgccgaacacgaccctgacaatgcggcgacctatgccgccaatgcagaaagctacaaacaggaaatccgcgatacgatcacgcccctgcgggaccgcattgcgcagatccccgaagaccagcgttggctggtgacctgtgaaggggcgttcagctacctcgcgcgggatttcgggatgaaagagctctacctctggccgatgaacgccgatcagaccggcacaccgcagcaggtgcgcaaagtcatcgattccgtgcgcgacaatgatattccggtcgttttctgtgaaagcacggtgaatacctcgcctgcaaagcaggtcgcgcgggaaaccggcgcggcctatggtggtgtgctttatgtcgatagcctcagcaccgccgaggggcccgtgccaagctatctggacttgctgcgcgtcacctcgcagactgtcgcggacgggctggatgcaggcctgaagtaa

SEQ ID NO: 85786 - protein, 283 aa, Sulfitobacter sp. EE-36
MAGVPAVAADFKVVTTFTVLADMAQQVGGDAAEVVSITKPGAEIHGYEPTPRDIVGAVDADLILWNGMNLELWFEQFISNLGDIPSATLTDGVEPISIGEGEYEGKPNPHAWMGLDNALIYVDNIAAAFAEHDPDNAATYAANAESYKQEIRDTITPLRDRIAQIPEDQRWLVTCEGAFSYLARDFGMKELYLWPMNADQTGTPQQVRKVIDSVRDNDIPVVFCESTVNTSPAKQVARETGAAYGGVLYVDSLSTAEGPVPSYLDLLRVTSQTVADGLDAGLK

SEQ ID NO: 85787 - DNA, 912 bp, Photobacterium sp. SKA34
  CDS (1)..(912): transl_table=11
atgatctttgatcaaaagcgacgattacgatacgtgacaaatactgttctgttatctgttgggctattaataagtacagtcagccatgctgatgataagtttaaagtaataacaacatttacaatcattgctgacatggcaaaaaatgtcgctggggacgctgctattgttgaatctattactaagcccaatgcggaaattcataattatcaagtaacacctggcgatcttaaacgagcgcaaggtgctgatttaattctttataacggtctaaacttagagctttggtttaataaattttttcaaaacctccacgatattccttctgtgacggtaactgaaaatatcacgccattaagtattactcagggtccttataacggtaaacctaatcctcatgcttggatgtcacctgaaaacggtattatttatgttgaaaatattcgccgagcactcgttaagtatgatcctaaaaatgcagatatttataataaaaacgctcaaaaatatacccaggaaattcaacgaacaattacacctattcgcaatcagattaataccatacctgtagataaacgttggcttgttacgagtgaaggcgcttttagttatcttgctcgtgattttggactaaaagaactgtatttatggccaattaatgctgatgcccaagggacacctcaacaagttcgtcaactgatagatgctgttcgccaacatcaaattcatgcggttttcagtgaaagtaccgtttcagcaaaacctgctcaacaagtcgcacgagaaacaggggctaactatgctggcgtgctttatgttgattctttgagtgctaaaaacggtcctgttcctacctatctagagctaattgaagtgacttcccgaacaatcgctaaagggctgagtttataa

SEQ ID NO: 85788 - protein, 303 aa, Photobacterium sp. SKA34
MIFDQKRRLRYVTNTVLLSVGLLISTVSHADDKFKVITTFTIIADMAKNVAGDAAIVESITKPNAEIHNYQVTPGDLKRAQGADLILYNGLNLELWFNKFFQNLHDIPSVTVTENITPLSITQGPYNGKPNPHAWMSPENGIIYVENIRRALVKYDPKNADIYNKNAQKYTQEIQRTITPIRNQINTIPVDKRWLVTSEGAFSYLARDFGLKELYLWPINADAQGTPQQVRQLIDAVRQHQIHAVFSESTVSAKPAQQVARETGANYAGVLYVDSLSAKNGPVPTYLELIEVTSRTIAKGLSL

SEQ ID NO: 85789 - DNA, 975 bp, Xanthobacter autotrophicus Py2
  CDS (1)..(975): transl_table=11
atgcgctgccgtagctgtttgacggccggttctacggccccttctttggtgcgttcctgggctggccgcgtcttttcggcggccggcgccgtgcttctcgcggcgctggtggcaacctcgtccactgccccggcccgggcagccgacaagctgaaggtggtcaccaccttcaccatcatcgccgacatggcgaagaacgtggccggcgatgccgcgcaggtggacagcatcaccaagcccggcgccgagatccacaattaccagcccacccccggcgacctcatcaaggctcagggcgccaacctcatcctgtggaacggcctgaacctcgaactgtggttcgagaagttcttcagccgcctgaagggcgtgccgagcgtggtggtgtccgacggcgtcgagcccatgggcatcacggagggcccctacagcggcaagcccaatccccacgcctggatgtcgcccaccgccgccctcgtctacgtggacaacatccgcgacgcgctggtgaaatacgatcccgccaacgccaccacctacaaggccaatgccgaggcctacaaggccaagatcaccgccaccatcgcccccatccgcgccgagctggacaaggtgccggcagaccagcgctggctggtcaccagcgagggcgccttcagctacctggcgcgggatttcggcctgaagccgctctatctgtggcccatcaacgccgaccagcagggcacgccccagcaggtgcgccgggtggtggaccgcatgcgagcggacaagatccccgccatcttctccgagagcaccatttccgccgagcccgccaagcaggtggcgcgggagaccggcgcccgctacggcggcgtgctctatgtggattcgctgagcgacgccgcaggcccggtgcccacctatctcgacctgctgcgggtgacctccaccaccatcgccgaaggcctcaccggaggcaccgcccgatga

SEQ ID NO: 85790 - protein, 324 aa, Xanthobacter autotrophicus Py2
MRCRSCLTAGSTAPSLVRSWAGRVFSAAGAVLLAALVATSSTAPARAADKLKVVTTFTIIADMAKNVAGDAAQVDSITKPGAEIHNYQPTPGDLIKAQGANLILWNGLNLELWFEKFFSRLKGVPSVVVSDGVEPMGITEGPYSGKPNPHAWMSPTAALVYVDNIRDALVKYDPANATTYKANAEAYKAKITATIAPIRAELDKVPADQRWLVTSEGAFSYLARDFGLKPLYLWPINADQQGTPQQVRRVVDRMRADKIPAIFSESTISAEPAKQVARETGARYGGVLYVDSLSDAAGPVPTYLDLLRVTSTTIAEGLTGGTAR

SEQ ID NO: 85791 - DNA, 882 bp, Actinobacillus actinomycetemcomitans
  CDS (1)..(882): transl_table=11
atgcgtttattagccacattagtcagcatacttgcgttaagcttaagcagtagtcttgcttatgcgaaatttaaagttgtcactacgttcactattattcaagatatggcacaaaatgtcgccggtgatgcggcaaccgtagaatccatcaccaagcccggagcagaaatccatgattacgagccaaccccgaaagatattgtcaaggcacaatctgccgatttagtgttatggaacggtttgaaccttgagcgttggtttgaaaaattcttccaaaacgtcaaagataaaccggcggtcgttgtaaccgaaggcattgaaccgatgtcaattcatgaaggcccgtacaccggcaacccgaacccgcatgcctggatgtcgccttccaatgctttaatctatgttgaaaatattaaaaatgcgttgattaaatacgatccacaaaataaagaaacatacgaaaaaaataccgcactttatatccaaaaaatcaaagaacttgatcaaccgttgcgtgaaaaattagcacaagtgccggaagcacagcgttggttggtgaccagcgaaggcgcattcagttatttagcacgtgattacggttttaaagaggcttatttgtggccgattaacgctgagcaacaaggcacgccgcaacaagtgcgtaaagtaattgaaaccgtcaaagccaacaatattccggtcgtattcagtgaaagcaccatctccccgaaaccggcaaaacaagtagcaaaagaaaccggtgcaaaatacggtggcgtgctttatgttgactctctttccggtgccaagggtcctgtgccgacttatattgatttgttaaaagtgactgtttctaccattgctaaaggatttgaaaaataa

SEQ ID NO: 85792 - protein, 293 aa, Actinobacillus actinomycetemcomitans
MRLLATLVSILALSLSSSLAYAKFKVVTTFTIIQDMAQNVAGDAATVESITKPGAEIHDYEPTPKDIVKAQSADLVLWNGLNLERWFEKFFQNVKDKPAVVVTEGIEPMSIHEGPYTGNPNPHAWMSPSNALIYVENIKNALIKYDPQNKETYEKNTALYIQKIKELDQPLREKLAQVPEAQRWLVTSEGAFSYLARDYGFKEAYLWPINAEQQGTPQQVRKVIETVKANNIPVVFSESTISPKPAKQVAKETGAKYGGVLYVDSLSGAKGPVPTYIDLLKVTVSTIAKGFEK

SEQ ID NO: 85793 - DNA, 939 bp, Synechococcus vulcanus
  CDS (1)..(939): transl_table=11
atgcgcggtttgagtttcgtactggtggcaatacttgtagtcggtgggtgtgcagtctctgtccctaaaccaccgacggacagcggcccaactcaaacccatcgcgatcagcgtcctctggtgctcaccacatttacggttctcgccgatatggcgcagcaggtagcgggcgatcgcctgcgggtagaatcgctgattaaaccgggggcggaagtccacagctacgaatttaccccccgtgatttggtgcggggacaagaggcagccctcatcttagaaaatggccttggtctcgaaccgtggggcgatcgcttctacaacagcctaccgaatgtgccccgtgtcacgctcacaaagggaattagccccattcccattcaaaaggatgcctaccgaggacaacccaacccccatgcctggatgtccccccagaatgccctgatttatgttgaaaacattcgcaaggctctcacagacctcgatccggccggcgccgagatctatgccgccaatgccaaagcctataaagcccaaattcgcgcccttgatcaagagctacgtcaagcccttgcccctctcccggccaacaaacgctacatcgtcacctgtgaaggtgccttttcctatctggcgcgggactacaacctccaagaggtgtatttatgggccatcaatactgaacaacagggaactcctcaacaaatgagaggggtaattgacattgtggagcgccaacgaatcccggctgttttctgtgaaagcacggtcaatgccaacccgcaaaaacaggtggcgcgagaatcaggcgctatatttgccggcattttctatgtggattccctatcggcccctgaggggaatgccccgacttaccttgacctactcaagtacaacatcaacacccttatccggggtctcagcgggaggacagccccatga

SEQ ID NO: 85794 - protein, 312 aa, Synechococcus vulcanus
MRGLSFVLVAILVVGGCAVSVPKPPTDSGPTQTHRDQRPLVLTTFTVLADMAQQVAGDRLRVESLIKPGAEVHSYEFTPRDLVRGQEAALILENGLGLEPWGDRFYNSLPNVPRVTLTKGISPIPIQKDAYRGQPNPHAWMSPQNALIYVENIRKALTDLDPAGAEIYAANAKAYKAQIRALDQELRQALAPLPANKRYIVTCEGAFSYLARDYNLQEVYLWAINTEQQGTPQQMRGVIDIVERQRIPAVFCESTVNANPQKQVARESGAIFAGIFYVDSLSAPEGNAPTYLDLLKYNINTLIRGLSGRTAP

SEQ ID NO: 85795 - DNA, 915 bp, Escherichia coli
  CDS (1)..(915): transl_table=11
atgctctcaataaaaaaagtaaccatgctcttggggtgcctagtcctcacctgctcgatagcatttcaggcgagtgcagctgaaaaattcaaggtcattacaacttttaccatcatcgcagatatggccaaaaacgtggctggagatgctgcagaagtctcatccataaccaagcctggtgcagaaattcatgagtatcagcctacccctggcgatattaaacgtgcgcagggggcacaactgattctcgccaatggtatgaatctggaattgtggttccaacgcttttaccagcatctcaatggggttccagaagtaattgtctcttcgggtgtgacgccagtagggatcaccgaagggccctatgagggcaaacctaacccccatgcctggatgtcgccagataatgctctgatttacgtcgataatattcgtgatgcgtttataaaatacgatccggcaaatgcacaaacctaccaacgtaatgccgatacttataaagccaagattacccaaacccttgcccccctgcgtaagcagattgcggaactccctgagaatcagcgatggatggtcaccagtgaaggggctttttcttatctcgcacgcgatttggggctaaaagagctttatctgtggccgattaatgccgatcaacaaggaacaccgcagcaggtacgtaaggttgttgatatagttaagaaaaatcatatcccggcagtctttagcgagagtacgatttccgataaaccagcgcgtcaggttgcgcgtgaaaccggcgcgcactacggtggtgtgctctatgtcgattccctgagcacagaaaacggcccggtacctacgtatatcgaccttctgaaggttactaccagtacgctggtacagggaattaaagccggaaaaagggagaaataa

SEQ ID NO: 85796 - protein, 304 aa, Escherichia coli
MLSIKKVTMLLGCLVLTCSIAFQASAAEKFKVITTFTIIADMAKNVAGDAAEVSSITKPGAEIHEYQPTPGDIKRAQGAQLILANGMNLELWFQRFYQHLNGVPEVIVSSGVTPVGITEGPYEGKPNPHAWMSPDNALIYVDNIRDAFIKYDPANAQTYQRNADTYKAKITQTLAPLRKQIAELPENQRWMVTSEGAFSYLARDLGLKELYLWPINADQQGTPQQVRKVVDIVKKNHIPAVFSESTISDKPARQVARETGAHYGGVLYVDSLSTENGPVPTYIDLLKVTTSTLVQGIKAGKREK

SEQ ID NO: 85797 - DNA, 1232 bp, Salmonella typhimurium
  CDS (275)..(1210): transl_table=11
ctgcaccgttgacgcctgtgggcactggctttcatacagcgcgatcatttttttgatcgtcagtttttcacgagcgatacgtttaccaggcatcgtgctctctccgaacattaaggtgtatttattttacaccttatccctctttagcactatcactgcatattgtcgccatttcgcaaataagaattattttcatttatccataccttgtgctatataacatagcaaaggctatattcgatgattaattaaccacattgttgcgagggatactatgacgaatctacatcgtctgaaaacactcctgattgccggtattgtggatactcgcgtatcgccagcctatgcaaaagagaaatttaaagttatcaccacgtttaccgttattgccgacatggctgaaaaacgtggcggcgacgcagcggaagtcagctcgattaccaaacccggcgctgaaatccatgagtatcagccaacgcccggcgatattaaacgagcgcagggggcacagcttatcctcgcgaatggtctgaacctggagcgatggttcgcccgcttttatcagcacctttccggcgtgccggaagtcgtcgtctccaccggcgtcaaaccgatgggcattaccgaaggcccgtataacggtaaaccgaacccgcacgcctggatgtcggcagaaaacgcgctgatttatgtcgataacattcgcgacgccctggtgaagtacgatccggataatgcgcagatctataagcaaaatgccgaacgctataaagcgaaaattcgccagatggccgatccgttgcgtgccgaactggaaaaaattcccgccgatcagcgctggttggtcaccagtgaaggcgcgttctcttacctggcgcgcgataacgacatgaaagagctttatctctggccaattaaacgccgatcacaggggacgccaaaacaggtgcgtaaagtgattgataccattaaaaagcaccatattcccgccatctttagcgagagtacggtttccgataaaccggcccgtcaggtcgcgcgtgaatccggcgcgcattatggcggcgtgctgtatgtcgattctctgagcgccgctgacggccctgtgccaacctatctggatctgctgcgcgtcacgaccgaaaccatcgtcaacggcattaacgacggactaggagtcaacaatgagtcaatctgcgattaccgttgatcagtcacggtgacgtatcgca

SEQ ID NO: 85798 - protein, 311 aa, Salmonella typhimurium
MTNLHRLKTLLIAGIVDTRVSPAYAKEKFKVITTFTVIADMAEKRGGDAAEVSSITKPGAEIHEYQPTPGDIKRAQGAQLILANGLNLERWFARFYQHLSGVPEVVVSTGVKPMGITEGPYNGKPNPHAWMSAENALIYVDNIRDALVKYDPDNAQIYKQNAERYKAKIRQMADPLRAELEKIPADQRWLVTSEGAFSYLARDNDMKELYLWPIKRRSQGTPKQVRKVIDTIKKHHIPAIFSESTVSDKPARQVARESGAHYGGVLYVDSLSAADGPVPTYLDLLRVTTETIVNGINDGLGVNNESICDYR

SEQ ID NO: 85799 - DNA, 903 bp, Bacillus halodurans
  CDS (1)..(903): transl_table=11
atgaaaaaggtttgttttagttttgtcatcatggtcattgcgctaatcgctgctggatgcggagcagaagatacgggtactagtgaggatggggaaggcttaaagattgtcacaagcttttctattttgggagatgtccttgagaatattgcgggggaacggtcttccgtcacatacattgttccaattggagaggagccccacgagtatgaaccagtcccaagtgattttcaagccgtttctgatgctgacgtattttatgtcaacggcctcggtttagaggaatggttacagcgacttgtggaaaacacatcagatgtggatgtcgtagaagtgagtccaacgatagatgctttgccacttgaagaatcggacggactggatccacatgcttggttagatgttaaaaatgttatgaaatacgtagaagtgattcgagatgatttagtcgaaagggatccagacggagctgagatttacgtggcgaatgccgaggcttatttacaagatttgcaggaattagaggagtggattcatgatcaagtgacgaccattccagaggaacaacgcacaattgtgatcagcgaaaatgcctatcgctattttggagaagcgtacggctttgatacagtaggaatttgggaactgaattctcatgaagaagggacgcctggtcaaatttcgcgggttgtagacattgtaaaggaacttgaccttccagccgtgtttgtggaaacaacggtaaacaaaagcttcatgacgacagtttccaatgattctggtgtagatattgctggtgaagtgtataccgatgctgtcggtttagaaggatcaggtgcggaaacttatatcgatatgatgaagcacaatgttgatactttcgtgagtggattgtctcagtaa

SEQ ID NO: 85800 - protein, 300 aa, Bacillus halodurans
MKKVCFSFVIMVIALIAAGCGAEDTGTSEDGEGLKIVTSFSILGDVLENIAGERSSVTYIVPIGEEPHEYEPVPSDFQAVSDADVFYVNGLGLEEWLQRLVENTSDVDVVEVSPTIDALPLEESDGLDPHAWLDVKNVMKYVEVIRDDLVERDPDGAEIYVANAEAYLQDLQELEEWIHDQVTTIPEEQRTIVISENAYRYFGEAYGFDTVGIWELNSHEEGTPGQISRVVDIVKELDLPAVFVETTVNKSFMTTVSNDSGVDIAGEVYTDAVGLEGSGAETYIDMMKHNVDTFVSGLSQ

SEQ ID NO: 85801 - DNA, 936 bp, Yersinia pestis
  CDS (1)..(936): transl_table=11
atgatagaacgactaaactccccttttctacgggctgcagccttgtttacaattgtcgcattctcatcgctgatcagtaccgctgctttagcagaaaataatcccagcgatacagccaaaaaattcaaagttgtgactacattcacaatcattcaggatattgcacaaaatatcgccggtgatgttgccgtggtggagtcaataaccaagccaggcgcagagattcatgactatcaacctaccccacgagatattgtaaaagcacagtcagcagaccttatcttatggaatggcatgaatctggagcgttggtttgagaagttcttcgaaagtattaaagatgtcccgtctgccgtcgtgaccgcaggtattacacccctgcctatccgagaaggcccctatagcggcattgccaacccacatgcctggatgtcgccatcaaatgcgctaatatatattgagaatatccgcaaagcgttagttgaacacgatcccgctcatgcagaaacctataaccgtaacgcgcaagcctatgctgaaaaaattaaggcgctagatgctccactgcgtgagcgtttatctcgtattcctgcggaacagcgttggttagtaaccagtgaaggggcatttagttatcttgccaaagactatggttttaaagaggtttacttatggccaatcaatgcagagcaacaaggtattccgcaacaagttagacacgtgattgatattattcgcgaaaataaaattccggtggtgtttagtgagagtactatttccgacaaacccgccaaacaagtgagtaaagaaaccggtgcacaatatggcggcgtgctatatgttgattctctgtcgggcgaaaaaggcccggtccccacttacatcagtttaattaacatgactgtagatactatcgctaaaggattcggtcaatga

SEQ ID NO: 85802 - protein, 311 aa, Yersinia pestis
MIERLNSPFLRAAALFTIVAFSSLISTAALAENNPSDTAKKFKVVTTFTIIQDIAQNIAGDVAVVESITKPGAEIHDYQPTPRDIVKAQSADLILWNGMNLERWFEKFFESIKDVPSAVVTAGITPLPIREGPYSGIANPHAWMSPSNALIYIENIRKALVEHDPAHAETYNRNAQAYAEKIKALDAPLRERLSRIPAEQRWLVTSEGAFSYLAKDYGFKEVYLWPINAEQQGIPQQVRHVIDIIRENKIPVVFSESTISDKPAKQVSKETGAQYGGVLYVDSLSGEKGPVPTYISLINMTVDTIAKGFGQ

SEQ ID NO: 85803 - DNA, 20 bp, Artificial sequence
  primer
atggcaacatcatttgcttc

SEQ ID NO: 85804 - DNA, 20 bp, Artificial sequence
  primer
ttattgctgggcattggtac

SEQ ID NO: 85805 - protein, 268 aa, Artificial sequence
  consensus sequence
  Variant (3)..(3): Xaa in position 3 is any amino acid
  Variant (8)..(10): Xaa in position 8 to 10 is any amino acid
  Variant (12)..(12): Xaa in position 12 is any amino acid
  Variant (14)..(14): Xaa in position 14 is any amino acid
  Variant (16)..(16): Xaa in position 16 is any amino acid
  Variant (20)..(22): Xaa in position 20 to 22 is any amino acid
  Variant (24)..(24): Xaa in position 24 is any amino acid
  Variant (28)..(29): Xaa in position 28 to 29 is any amino acid
  Variant (35)..(35): Xaa in position 35 is any amino acid
  Variant (37)..(37): Xaa in position 37 is any amino acid
  Variant (41)..(41): Xaa in position 41 is any amino acid
  Variant (43)..(45): Xaa in position 43 to 45 is any amino acid
  Variant (47)..(48): Xaa in position 47 to 48 is any amino acid
  Variant (50)..(50): Xaa in position 50 is any amino acid
  Variant (52)..(52): Xaa in position 52 is any amino acid
  Variant (54)..(54): Xaa in position 54 is any amino acid
  Variant (57)..(57): Xaa in position 57 is any amino acid
  Variant (61)..(61): Xaa in position 61 is any amino acid
  Variant (64)..(65): Xaa in position 64 to 65 is any amino acid
  Variant (67)..(72): Xaa in position 67 to 72 is any amino acid
  Variant (73)..(73): Xaa in position 73 is any or no amino acid
  Variant (75)..(80): Xaa in position 75 to 80 is any amino acid
  Variant (82)..(83): Xaa in position 82 to 83 is any amino acid
  Variant (85)..(86): Xaa in position 85 to 86 is any amino acid
  Variant (88)..(89): Xaa in position 88 to 89 is any amino acid
  Variant (91)..(91): Xaa in position 91 is any amino acid
  Variant (93)..(93): Xaa in position 93 is any amino acid
  Variant (95)..(95): Xaa in position 95 is any amino acid
  Variant (104)..(106): Xaa in position 104 to 106 is any amino acid
  Variant (109)..(109): Xaa in position 109 is any amino acid
  Variant (111)..(112): Xaa in position 111 to 112 is any amino acid
  Variant (115)..(116): Xaa in position 115 to 116 is any amino acid
  Variant (118)..(121): Xaa in position 118 to 121 is any amino acid
  Variant (124)..(125): Xaa in position 124 to 125 is any amino acid
  Variant (127)..(128): Xaa in position 127 to 128 is any amino acid
  Variant (130)..(131): Xaa in position 130 to 131 is any amino acid
  Variant (134)..(135): Xaa in position 134 to 135 is any amino acid
  Variant (137)..(147): Xaa in position 137 to 147 is any amino acid
  Variant (149)..(154): Xaa in position 149 to 154 is any amino acid
  Variant (156)..(158): Xaa in position 156 to 158 is any amino acid
  Variant (160)..(160): Xaa in position 160 is any amino acid
  Variant (164)..(164): Xaa in position 164 is any amino acid
  Variant (173)..(173): Xaa in position 173 is any amino acid
  Variant (175)..(178): Xaa in position 175 to 178 is any amino acid
  Variant (180)..(180): Xaa in position 180 is any amino acid
  Variant (185)..(185): Xaa in position 185 is any amino acid
  Variant (188)..(190): Xaa in position 188 to 190 is any amino acid
  Variant (196)..(198): Xaa in position 196 to 198 is any amino acid
  Variant (200)..(202): Xaa in position 200 to 202 is any amino acid
  Variant (204)..(208): Xaa in position 204 to 208 is any amino acid
  Variant (210)..(211): Xaa in position 210 to 211 is any amino acid
  Variant (213)..(213): Xaa in position 213 is any amino acid
  Variant (217)..(217): Xaa in position 217 is any amino acid
  Variant (219)..(223): Xaa in position 219 to 223 is any amino acid
  Variant (226)..(227): Xaa in position 226 to 227 is any amino acid
  Variant (231)..(232): Xaa in position 231 to 232 is any amino acid
  Variant (234)..(235): Xaa in position 234 to 235 is any amino acid
  Variant (238)..(238): Xaa in position 238 is any amino acid
  Variant (246)..(248): Xaa in position 246 to 248 is any amino acid
  Variant (255)..(255): Xaa in position 255 is any amino acid
  Variant (258)..(263): Xaa in position 258 to 263 is any amino acid
  Variant (265)..(267): Xaa in position 265 to 267 is any amino acid
KVXTTFTXXXDXAXNXAGDXXXVXSITXXGAEIHXYXPTPXDXXXAXXAXLXLXNGXNLEXWFXXFXXXXXXXPXXXXXXGXXPXXIXXGXYXGXPNPHAWMSXXXALXYXXNIXXAXXXXDPXXAXXYXXNAXXYXXXXXXXXXXXRXXXXXXPXXXRXLVTXEGAFSYLAXDXXXXEXYLWPXNAXXXGTPQQXXXVXXXVXXXXXPXXFXESTXSXXXXXQVXXETGXXAXXGGXLYVDSLSXXXGPVPTYXDLXXXXXXTXXXG

SEQ ID NO: 85806 - protein, 60 aa, Artificial sequence
  protein pattern
  Variant (2)..(2): Xaa in position 2 is any amino acid
  Variant (5)..(5): Xaa in position 5 is Ser or Thr
  Variant (6)..(6): Xaa in position 6 is Cys, Ser or Thr
  Variant (15)..(15): Xaa in position 15 is any amino acid
  Variant (17)..(18): Xaa in position 17 to 18 is any amino acid
  Variant (19)..(19): Xaa in position 19 is Phe, Leu or Met
  Variant (20)..(20): Xaa in position 20 is any amino acid
  Variant (21)..(21): Xaa in position 21 is Glu or Pro
  Variant (22)..(22): Xaa in position 22 is any amino acid
  Variant (23)..(23): Xaa in position 23 is Phe or Tyr
  Variant (24)..(24): Xaa in position 24 is Ile, Leu, Met or Val
  Variant (27)..(27): Xaa in position 27 is Ile, Met or Val
  Variant (28)..(29): Xaa in position 28 to 29 is any amino acid
  Variant (30)..(30): Xaa in position 30 is Asp, Glu or Arg
  Variant (31)..(31): Xaa in position 31 is Ala, Glu, Gly, Gln or Ser
  Variant (32)..(34): Xaa in position 32 to 34 is any amino acid
  Variant (36)..(36): Xaa in position 36 is any or no amino acid
  Variant (38)..(38): Xaa in position 38 is Ile or Val
  Variant (39)..(41): Xaa in position 39 to 41 is any amino acid
  Variant (42)..(42): Xaa in position 42 is Ile or Val
  Variant (43)..(44): Xaa in position 43 to 44 is any amino acid
  Variant (45)..(45): Xaa in position 45 is Ile, Met or Val
  Variant (46)..(46): Xaa in position 46 is Lys or Arg
  Variant (47)..(49): Xaa in position 47 to 49 is any amino acid
  Variant (50)..(50): Xaa in position 50 is Ile or Val
  Variant (51)..(51): Xaa in position 51 is any amino acid
  Variant (52)..(52): Xaa in position 52 is Ala, Thr or Val
  Variant (53)..(53): Xaa in position 53 is Ile or Val
  Variant (55)..(55): Xaa in position 55 is Cys or Ser
  Variant (59)..(59): Xaa in position 59 is Ile, Leu or Val
  Variant (60)..(60): Xaa in position 60 is Asn or Ser
RXLVXXEGAFSYLAXDXXXXXXXXWPXXXXXXXXPXQXXXXXXXXXXXXXXXXFXESTXX

SEQ ID NO: 85807 - protein, 46 aa, Artificial sequence
  protein pattern
  Variant (2)..(3): Xaa in position 2 to 3 is any or no amino acid
  Variant (10)..(12): Xaa in position 10 to 12 is any amino acid
  Variant (14)..(14): Xaa in position 14 is Leu or Met
  Variant (15)..(15): Xaa in position 15 is any amino acid
  Variant (17)..(17): Xaa in position 17 is Ile or Val
  Variant (18)..(18): Xaa in position 18 is Asp or Glu
  Variant (19)..(19): Xaa in position 19 is Asn, Gln or Thr
  Variant (20)..(20): Xaa in position 20 is Ile or Leu
  Variant (21)..(22): Xaa in position 21 to 22 is any amino acid
  Variant (23)..(23): Xaa in position 23 is Ala or Gly
  Variant (24)..(24): Xaa in position 24 is Phe or Leu
  Variant (25)..(27): Xaa in position 25 to 27 is any amino acid
  Variant (30)..(34): Xaa in position 30 to 34 is any amino acid
  Variant (35)..(35): Xaa in position 35 is Phe or Tyr
  Variant (36)..(37): Xaa in position 36 to 37 is any amino acid
  Variant (39)..(39): Xaa in position 39 is Ala, Gly or Thr
  Variant (40)..(41): Xaa in position 40 to 41 is any amino acid
  Variant (43)..(45): Xaa in position 43 to 45 is any amino acid
  Variant (46)..(46): Xaa in position 46 is Ile or Leu
NXXPHAWMSXXXAXXYXXXXXXXXXXXDPXXXXXXXXNXXXYXXXX

SEQ ID NO: 85808 - DNA, 564 bp, Synechocystis sp.
  CDS (1)..(564): transl_table=11
atggctatggctaaaggtttaatttttctgggggcccccggctctggtaaaggtacccaggcggtgggattggcggagaccttgggcattccccatatttccactggagatatgctacgtcaggcgatcgccgatggcacggagttgggtaaccaggccaaaggttacatggacaagggagaattggtgcccgatcagttaattcttgggttaattgaagagcgcttgggccataaagatgctaaggctggctggattctagatggctttccccgtaacgtcaaccaagcaatttttctcgatgagttgttggttaatattggtcaccgtacccattgggtcattaacttaaaagttcccgacgaagtaattgtagaacgcctgttggcccgggggcgggcggacgataacgaaaccaccattcgcaatcggctgttggtttacacagagcaaactgctcccctcatggcctattaccaagaacagggcaaactttactcccttgacggtaaccagccggtagaagccattgccaccaacctggaaaaattggttaaaccttaa

SEQ ID NO: 85809 - protein, 187 aa, Synechocystis sp.
MAMAKGLIFLGAPGSGKGTQAVGLAETLGIPHISTGDMLRQAIADGTELGNQAKGYMDKGELVPDQLILGLIEERLGHKDAKAGWILDGFPRNVNQAIFLDELLVNIGHRTHWVINLKVPDEVIVERLLARGRADDNETTIRNRLLVYTEQTAPLMAYYQEQGKLYSLDGNQPVEAIATNLEKLVKP

SEQ ID NO: 85810 - DNA, 1023 bp, Arabidopsis thaliana
  CDS (130)..(819)
acttcaaaaagagaacacaactccaccggaccaaatctaattctcttgtaagagacgacgacgacgacgaacatggcaacgagcagtgcggcttctgttgatatggaagatattcagaccgttgatctcatgtctgagcttcttcgccgtatgaaatgtgcctctaaacctgacaaacgtctcgttttcatcggtccacctggttcagggaaaggtacacagtctccggtcataaaggatgagttttgtttgtgtcatttgtctactggtgacatgcttagagctgctgttgctgctaagactcctcttggtgtgaaggcaaaggaagcaatggataagggagagcttgtttctgatgacttggttgttggtatcatggatgaagcaatgaacagacccaaatgtcagaaaggtttcattcttgatgggttcccgcggactgtgactcaagcagagaagcttgatgagatgcttaatagaaggggagctcagatagataaggtgcttaattttgcgatcgatgattcggttctcgaagaaagaattactggaaggtggattcacccttcaagtggaagaagctatcatactaaattcgcacctcctaaagttccaggagtcgatgatctgactggagagccattgattcaacgtaaagatgacaatgcggatgttcttagatcaaggctagatgcattccacaagcagacgcaaccggtaattgactattatgcgaagaaggggaatctggtgaacataccggcagagaaggccccggaagaggttacaaaagtggtgaagaaggttgtgtctacatgaaactgaaaaacgaaatggcatcagtttaagatgtatctttttttgcttatcttaaataactctcctgagtttttttatttgtttcccccggaatgtcttttgtcttgagagcaacatttgctgcagttttgtgcagtgtgtttcactaaggcttattgtttgcgactggaaatgtcaggtgaataaaggaaaaacaaaatcgtt

SEQ ID NO: 85811 - protein, 229 aa, Arabidopsis thaliana
MSELLRRMKCASKPDKRLVFIGPPGSGKGTQSPVIKDEFCLCHLSTGDMLRAAVAAKTPLGVKAKEAMDKGELVSDDLVVGIMDEAMNRPKCQKGFILDGFPRTVTQAEKLDEMLNRRGAQIDKVLNFAIDDSVLEERITGRWIHPSSGRSYHTKFAPPKVPGVDDLTGEPLIQRKDDNADVLRSRLDAFHKQTQPVIDYYAKKGNLVNIPAEKAPEEVTKVVKKVVST

SEQ ID NO: 85812 - DNA, 904 bp, Arabidopsis thaliana
  CDS (102)..(788)
ctttttttcgagaaaaacgaagttttctgagctaaactagatcagctatggcgaccggtggtgctgcggcggatttggaagatgttcagacggtggatctcatgtcggagctcctccgccgcctcaagtgttctcagaagcccgacaaacgcctcatcttcattggacctccagggtcagggaaaggtactcaatctccagtagtgaaggatgagtattgcttgtgtcacttatccactggagacatgttaagagctgctgttgcttctaagacccctcttggtgtcaaggctaaagaagctatggaaaaaggagagctcgtctctgatgatttggttgttggtataattgatgaagccatgaacaagccaaaatgtcaaaaaggatttatccttgatgggttccccaggactgttactcaggcagagaagctcgatgagatgcttaagaggcgaggaactgaaattgacaaagttctcaactttgctattgatgacgcaatcttggaggaaagaataaccgggcgatggatccacccatcgagtggcaggagttaccacaccaaatttgctcctcccaaaacccctggagttgatgatattactggagagcctctgatccaacgtaaagatgataacgctgatgttctaaagtcgaggcttgcagctttccacagtcaaactcaaccggtgattgattactacgcaaagaaggccgttctcacaaacatccaggccgagaaggctccccaagaagttacatcagaggttaaaaaagcattgtcatgatcaaagactcctcaagcaaatcatctcctctggttagaatccattcttttccttactacaagagagagacacatctatataatccactcatctgcggaatgacagttttttctttt

SEQ ID NO: 85813 - protein, 228 aa, Arabidopsis thaliana
MSELLRRLKCSQKPDKRLIFIGPPGSGKGTQSPVVKDEYCLCHLSTGDMLRAAVASKTPLGVKAKEAMEKGELVSDDLVVGIIDEAMNKPKCQKGFILDGFPRTVTQAEKLDEMLKRRGTEIDKVLNFAIDDAILEERITGRWIHPSSGRSYHTKFAPPKTPGVDDITGEPLIQRKDDNADVLKSRLAAFHSQTQPVIDYYAKKAVLTNIQAEKAPQEVTSEVKKALS

SEQ ID NO: 85814 - DNA, 1017 bp, Arabidopsis thaliana
  CDS (98)..(814)
ttcaaaaagagaacacaactccaccggaccaaatctaattctcttgtaagagacgacgacgacgaacatggcaacgagcagtgcggcttctgttgatatggaagatattcagactgttgatctcatgtctgagcttcttcgccgtatgaaatgtgcctctaaacctgacaaacgtctcgttttcatcggtccacctggttcagggaaaggtacacagtctccggtcataaaggatgagttttgtttgtgtcatttgtctactggtgacatgcttagagctgctgttgctgctaagactcctcttggtgtgaaggcaaaggaagcaatggataagggagagcttgtttctgatgacttggttgttggtatcatggatgaagcaatgaacagacccaaatgtcagaaaggtttcattcttgatgggttcccgcggactgtgactcaagcagagaagcttgatgagatgcttaatagaaggggagctcagatagataaggtgcttaattttgcgatcgatgattcggttctcgaagaaagaattactggaaggtggattcacccttcaagtggaagaagctatcatactaaattcgcacctcctaaagttccaggagtcgatgatctgactggagagccattgattcaacgtaaagatgacaatgcggatgttcttagatcaaggctagatgcattccacaagcagacgcaaccggtaattgactattatgcgaagaaggagaatctggtgaacataccggcagagaaggccccggaagaggttacaaaagtggtgaagaaggttgtgtctacatgaaactgaaaaacgaaatggcatcagtttaagatgtatctttttttgcttatcttaaataactctcctgagtttttttatttgtttcccccggaatgtcttttgtcttgagagcaacatttgctgcagttttgtgcagtgtgtttcactaaggcttattgtttgcgactggaaatgtcaggtgaataaaggaaaaacaaaatcgt

SEQ ID NO: 85815 - protein, 238 aa, Arabidopsis thaliana
MEDIQTVDLMSELLRRMKCASKPDKRLVFIGPPGSGKGTQSPVIKDEFCLCHLSTGDMLRAAVAAKTPLGVKAKEAMDKGELVSDDLVVGIMDEAMNRPKCQKGFILDGFPRTVTQAEKLDEMLNRRGAQIDKVLNFAIDDSVLEERITGRWIHPSSGRSYHTKFAPPKVPGVDDLTGEPLIQRKDDNADVLRSRLDAFHKQTQPVIDYYAKKENLVNIPAEKAPEEVTKVVKKVVST

SEQ ID NO: 85816 - DNA, 1017 bp, Arabidopsis thaliana; identical to SEQ ID NO: 85814
  CDS (125)..(814)

SEQ ID NO: 85817 - protein, 229 aa, Arabidopsis thaliana
MSELLRRMKCASKPDKRLVFIGPPGSGKGTQSPVIKDEFCLCHLSTGDMLRAAVAAKTPLGVKAKEAMDKGELVSDDLVVGIMDEAMNRPKCQKGFILDGFPRTVTQAEKLDEMLNRRGAQIDKVLNFAIDDSVLEERITGRWIHPSSGRSYHTKFAPPKVPGVDDLTGEPLIQRKDDNADVLRSRLDAFHKQTQPVIDYYAKKENLVNIPAEKAPEEVTKVVKKVVST

SEQ ID NO: 85818 - DNA, 1120 bp, Oryza sativa
  CDS (88)..(819)
ggaaggaaaaacttgggaggaggcgaggaagaaccgaagaagcagcagagcagagatcacctgcgattgcgaggggaggaggcagcgatgtggcggcggcaagtgggtgcccttcttctccggcaccgatccacgccttcctccaccctccgccaccatctccccctccccgtccccgaccagagcccacctctcgcttccaatcttctgctccgcctcttcacttctcaatctggagaggggggtgatggtgccaccaagcccttcattgctttcgtcttagggggtcccgggagtgggaaaggtacgcaatgtgtccggatcgcttctgattttgggtttgctcatttgagtgctggtgaccttctacggagtgaaatttcaactggcagtgagaaaggggagttgatcttaaatataataaaagaagggaagattgttccatcagagattactgttgaactgattagaaaagctatggaatcgagcgatgctaaaagggttcttattgatggtttcccaaggtgtgaggaaaacaggatcgcctttgaaagaataactggaacagaaccagaccttgtgattttctttgactgccctgaggatgagatggttaaacgtttactaggccgtaaccagggacgagtggatgataacattgaagcaatcaagaagcgcctaaaggtgtttgagagtctaaatattcctgttgttgactactacacttcaagaggaaaggttcacaagataaatgcaaccggaactgaagaagaaatctttggagcagtccacaagctgttttcctccttaaggttttgagacttttgtcttccacataagcaggggcctttggctggaaggacatcttgtaggaagacccactttgtctagcatccaaaagttctctctatttctctcgtgttcttttggaagcctcacgtctttattaaaaccattgtatatatgtttcactattatgaatgccacctggtaatggctggtgctgaccttcacgttatccttgtcatgccacagcatgaagaagcatgaacaatagtatgctattgttgcacagtgctgtaacgcattttggtcacaataatcctacaaaccttttgct

SEQ ID NO: 85819 - protein, 243 aa, Oryza sativa
MWRRQVGALLLRHRSTPSSTLRHHLPLPVPDQSPPLASNLLLRLFTSQSGEGGDGATKPFIAFVLGGPGSGKGTQCVRIASDFGFAHLSAGDLLRSEISTGSEKGELILNIIKEGKIVPSEITVELIRKAMESSDAKRVLIDGFPRCEENRIAFERITGTEPDLVIFFDCPEDEMVKRLLGRNQGRVDDNIEAIKKRLKVFESLNIPVVDYYTSRGKVHKINATGTEEEIFGAVHKLFSSLRF

SEQ ID NO: 85820 - DNA, 696 bp, Glycine max
  CDS (1)..(696)
atgtggagtcgtgcaacccttttccttcgcgtcctggaacctcctatacacatcaacgcttcgctttcccaaacatttaccactggattccccttccacttccaggaaaaggatggcatttgccccaaaccgcttataacttttgttttaggaggccctggtagtggaaaaggtacacagtgtggaaaaattgttgaaacctttggatttaagcatctgagtgctggagatcttttgagaagggagatggtttctgatagtgaatatggctcaatgattatgaatacaattggagaaggaagaattgttccatcagaagtgactgtcaaattgattctaagagagatggaatctagtgacaatcataagtttcttatcgatggcttccctagaagccaggagaaccgtatagcttttgaacaaattattggagctgaaccgcatatggtacttttctttgattgtcctgaagaagaaatggtgaaacgtgtgctgagtcgtaatcagggtcgaattgatgacaacataaatacaatcaagaaccgtcttcaagtatttgagtcattaaatcttcccgtgattgactattatgctaagaaagggaaactttacaggatcaatgcagtgggaacagtagatgaaatttttgagcatgttcgaccagtttttgaggcatgtgagcacgaggctagatga

SEQ ID NO: 85821 - protein, 231 aa, Glycine max
MWSRATLFLRVLEPPIHINASLSQTFTTGFPFHFQEKDGICPKPLITFVLGGPGSGKGTQCGKIVETFGFKHLSAGDLLRREMVSDSEYGSMIMNTIGEGRIVPSEVTVKLILREMESSDNHKFLIDGFPRSQENRIAFEQIIGAEPHMVLFFDCPEEEMVKRVLSRNQGRIDDNINTIKNRLQVFESLNLPVIDYYAKKGKLYRINAVGTVDEIFEHVRPVFEACEHEAR

SEQ ID NO: 85822 - DNA, 1157 bp, Zea mays
  CDS (126)..(863)
  misc_feature (1157)..(1157): n is a, g, c or t
ctcgaggccggccggggggaaagaagagaacaaaaataaagcaagaggcgagaggagagagcaacgacgccatcggagggaggaaagagaagaagacgatccgctagcgtgtgcgtggcgacgagatgtggcggaggcgagtgggcgccctccttctccgatctccacgaacttcttcctcggcctcctcggcctgccagagccgccgccaccatcttctccccagcgaggaacctcttgctctcaaccgtcttgccaggctcttcacgtcccaggctggaagtgatggtggcgatacccagaagccctttattgcttttgtcttaggtggtcctgggagtggcaaaggaacacagtgcactaagattgcttcggattttggatttgcccatctgagcgctggtgatattctccgacatgaaatagcatctggcagtgagaaaggggagttgatcctagaaatcataaaggaagggaggattgttccgtctgagataactgtggaactcatcagaaaagcgatggaaatgaacaatgctaaaagggttcttattgatggcttcccaaggtgtgaggaaaacagaatcgccttcgaaaggattgttggaacagaaccagacattgtgattttctttgactgtcctgaggatgagatggttaaacgccttctaggccgtaaccaggggagagttgatgataacattgagacaatcaagaagcgtctaaaagtgtttgaaagtttgaacattcctgtcgttgactactactcttcaaggggaaaagttcacaagataaatgccacgggtactgcagatgaaatatttgaagcagtccgtaggctgttttcttccttaaggttatgacgaggctagggtcttccagggaaccttgggatttgtctcttccacgcgcatggattttcggaaaagctactacgcatttcgatcagcatccacggagtttattatgtatggatgtatgtgttccctcagcacattgacatcttgtatatatgcccaaaaatgaatgtgaaccatgtggagtgtttctgaaaaaaaaggagctgaaccctggttggttgttgtagcagagacaacaagagcaaaaaaaaaaaaaaaaaaaaaaaaaaaaaaaaaaggaaaaaaaaaaaaaaaaan

SEQ ID NO: 85823 - protein, 245 aa, Zea mays
MWRRRVGALLLRSPRTSSSASSACQSRRHHLLPSEEPLALNRLARLFTSQAGSDGGDTQKPFIAFVLGGPGSGKGTQCTKIASDFGFAHLSAGDILRHEIASGSEKGELILEIIKEGRIVPSEITVELIRKAMEMNNAKRVLIDGFPRCEENRIAFERIVGTEPDIVIFFDCPEDEMVKRLLGRNQGRVDDNIETIKKRLKVFESLNIPVVDYYSSRGKVHKINATGTADEIFEAVRRLFSSLRL

SEQ ID NO: 85824 - DNA, 1259 bp, Triticum aestivum
  CDS (194)..(922)
  misc_feature (1217)..(1217): r is g or a
  misc_feature (1227)..(1227): r is g or a
aacgagctctccccgtcccggccccgctccccgccacgccaagtcgacggccgctcgccgccgcccctccctccgcctcgccgtcgccgacctcggccgttcggcccctcccgcgggtgggtgagcggcgagcctcccttgcttctctgtcctgccctgcacggcaagcaagacgagagcgatcggcgtcgggatgctgaggcggcggctgagctcccttctcctccgatccccgtgctcctccgccgtcgcctcctcaatccagcagcagcaccacctcatcctccccacccacgccgagaaaccgccggccctgaatctgctcaggctcttcacatccctagctggaaccgatggtgacaggccgttcatcgcttttgtcttagggggacctgggagtgggaaaggaacgcaatgtagtaggatcgcttcggattttggattttctcatgtgagtgctggtgaccttctgcggaatgaaatatctgctggcactgatcaaggggagtggatcctggagataataagggaagggaggattgttccatcagagataaccgttgaactggtcagaaaagcaattgaatcaagcactgctaaacgggttcttatcgatggttttccaaggtgtgaggaaaacagaatcgcctttgaaaaaataactggaactgaaccagaccttgtgcttttttttgactgtcctgaggatgagatggttaaacgtctcctaagccgtaaccagggacgagttgatgataacattgagacaatcaagaagcgtctaaaagtgttcgagagtttgaatcttcctgttgttgagtactactcttcaaggggaaaggcacacaagataaacgcaacgggaactgaagatgaaatctttgaagcagttcgcaagttgttttcctccttaaggctatgaggaggctgtcgtcgtcttccgcaggagcctgagggaattagaattgcgcctggcggaaatactcttttctttccttttacttttacatctcttagcacaataattgtacatattctgatacacggtctatgcctgtgaaaacagagggccactggtgaaacgcccagcctgctatgataaacccttaccctcacgctctcgtcgtgcgccacggtataacccatgacacgctggtatggcagcagcaaaactgctacgacgatatttttcttaccagaatatgatataattgtaraaaaaaaaaraaaaaagctctatcgataccgtcgacctcgag

SEQ ID NO: 85825 - protein, 242 aa, Triticum aestivum
MLRRRLSSLLLRSPCSSAVASSIQQQHHLILPTHAEKPPALNLLRLFTSLAGTDGDRPFIAFVLGGPGSGKGTQCSRIASDFGFSHVSAGDLLRNEISAGTDQGEWILEIIREGRIVPSEITVELVRKAIESSTAKRVLIDGFPRCEENRIAFEKITGTEPDLVLFFDCPEDEMVKRLLSRNQGRVDDNIETIKKRLKVFESLNLPVVEYYSSRGKAHKINATGTEDEIFEAVRKLFSSLRL

SEQ ID NO: 85826 - DNA, 645 bp, Vibrio cholerae
  CDS (1)..(645): transl_table=11
atgcgcatcattcttctcggtgctccgggtgcaggtaaaggcacacaagctcaattcatcatggaaaaatttggtattccacaaatttctactggtgacatgctgcgtgcagccattaaggcgggcactgagctcggtaagcaagcgaaagcggtaatcgatgcaggacaattggtatcggatgacatcattttaggccttatcaaagagcgtattgctcaggctgactgtgagaaaggtttcctgctagatggtttccctcgcacgattccacaagccgatggcctaaaagagatgggtatcaatgttgactatgtgattgaatttgacgtagcggatgatgtgattgttgagcgtatggcgggtcgtcgtgctcatctaccttcaggccgtacgtaccacgtagtgtacaatccacctaaagttgaaggtaaagatgacgtaacgggtgaagaccttgtgatccgtgaagatgacaaagaagaaaccgtacgtgcgcgtctgaatgtttaccacacccaaactgcgccacttattgaatactacggtaaagaagcagctgcaggtaaaactcaatacctgaagtttgacggcactaagcaagtgagcgaagtgagtgctgacattgctaaagcgttggcttaa

SEQ ID NO: 85827 - protein, 214 aa, Vibrio cholerae
MRIILLGAPGAGKGTQAQFIMEKFGIPQISTGDMLRAAIKAGTELGKQAKAVIDAGQLVSDDIILGLIKERIAQADCEKGFLLDGFPRTIPQADGLKEMGINVDYVIEFDVADDVIVERMAGRRAHLPSGRTYHVVYNPPKVEGKDDVTGEDLVIREDDKEETVRARLNVYHTQTAPLIEYYGKEAAAGKTQYLKFDGTKQVSEVSADIAKALA

SEQ ID NO: 85828 - DNA, 552 bp, Synechococcus sp. WH 7803
  CDS (1)..(552): transl_table=11
atgaaacaacgtctgctcttcatcggccccccaggagccggcaaaggaacccaggcatcacgcctctgcgagacccacggcctgcgccatctctccaccggcgacctgctgcgctcagaggtctcagcgggcagcgcccttggccaggaggccgaagcggtcatgaatcgcggtgaactcgtcagcgacgacctggtcctcgccatcgtccgctctcagctcaccgctctcaacggtcaaggctggctgctcgacggctttccccgcaacgtggcgcaggcggaggcactggagcccctgctcggggaattgcaacaaagcatcgaaacagtggtcctcctggaactggacgacgaggtcctcgtcgaacgactgctggctcggggacgggccgacgacaacgagtcggtgatccgcaatcgcctcgaggtgtatcgccagcagaccgcacctctgatcgactattaccaggccaggggactattgatctcagtggatgcccagggcagcgtggaagccatcacgacaagacttgaagcaagtctggcttga

SEQ ID NO: 85829 - protein, 183 aa, Synechococcus sp. WH 7803
MKQRLLFIGPPGAGKGTQASRLCETHGLRHLSTGDLLRSEVSAGSALGQEAEAVMNRGELVSDDLVLAIVRSQLTALNGQGWLLDGFPRNVAQAEALEPLLGELQQSIETVVLLELDDEVLVERLLARGRADDNESVIRNRLEVYRQQTAPLIDYYQARGLLISVDAQGSVEAITTRLEASLA

SEQ ID NO: 85830 - DNA, 1743 bp, Arabidopsis thaliana
  CDS (1)..(1743)
atggcgtctctttctctcagttctgctcatttctcttcaacttcttcttcatctcgctcctctatatccacttcatcgctttctccgtcgtcaacttctctccctctcttacaatcaccgatccgccgccgttaccgctccctccgccgccgtctctccttctccgtcattccccgtcggacttctcgctccttctccacttccaattctcagattaggtgttcgataaatgagccgttgaaggtgatgatttcgggtgcaccggcttcaggaaaaggcactcaatgtgagctcattgttcacaagtttggtttggtgcacatatcaacaggggatctattgagagcagaggtgtcatctgggacagatattggaaagagagcaaaagagttcatgaactcgggtagtttggttcctgatgagattgttatagcgatggtggctggaagattatcacgtgaagatgctaaagagcatggatggcttcttgatggatttccacggagttttgcccaggcacaaagtctggacaaactgaacgtgaaacctgacatttttatcttactagatgttcctgatgaaattctgatcgatagatgtgttggtcgaaggttggatccagtgactggaaaaatttatcatatcaaaaattaccctcctgaatcagatgaaattaaagcaagactggttacacgcccggatgatacagaggagaaggtaaaagcacggctgcaaatatacaaacaaaattctgaagcgattatttcagcatactcagatgttatggtcaagattgatgcaaacaggccaaaagaagtggttttcgaggagacccagactctactgtctcagatacagttaaagagaatgataaagactgataaagcatctcctgttcaggataaatggagaggaataccgacgagattgaataacattccacattcgagggatatcagggcttatttttatgaagatgtgctgcaagccacaattagatctatcaaggatggtaacacccgtcttcgggtggacattaatatccctgagctaaatccggaaatggatgtttaccggataggaaccttgatggaacttgttcaagctttagctttatcattcgctgacgatggaaaaagagtgaaggtttgtgttcagggatcaatgggggaaggtgcacttgctgggatgccattgcagttggcaggcactcgaaagattttagaatatatggactggggtgatgatgaaactttgggaactttcgtcaagcttggtgcaattggtggtaaagaagttgatgaagaagatgacatgttcatcttagtggctccacaaaatgccgttggaaactgtattatagatgatctacaagcgatgactactgctgctgggaaaaggccagttgtacttatcaatcctcgcctcaaggacttgcccgcttcgagtggcataatgcaaacaatgggcagggagcaaaggctggaatatgctttgacgtttgacaactgctatgtattccggcttctctattatttgggaacacaatacccgattatgggcgctctaaggatgtcttatccataccggtatgagctttataagagagtgaacgaggaaaatggaaaggagaaatatgtcttgctagcaacgtacgctgaaagaccaacccctgaacaaatcgacgatgccttctctggaaaatcgcgggatcaaagcaagaaggcgtcaggaatctggtaa

SEQ ID NO: 85831 - protein, 580 aa, Arabidopsis thaliana
MASLSLSSAHFSSTSSSSRSSISTSSLSPSSTSLPLLQSPIRRRYRSLRRRLSFSVIPRRTSRSFSTSNSQIRCSINEPLKVMISGAPASGKGTQCELIVHKFGLVHISTGDLLRAEVSSGTDIGKRAKEFMNSGSLVPDEIVIAMVAGRLSREDAKEHGWLLDGFPRSFAQAQSLDKLNVKPDIFILLDVPDEILIDRCVGRRLDPVTGKIYHIKNYPPESDEIKARLVTRPDDTEEKVKARLQIYKQNSEAIISAYSDVMVKIDANRPKEVVFEETQTLLSQIQLKRMIKTDKASPVQDKWRGIPTRLNNIPHSRDIRAYFYEDVLQATIRSIKDGNTRLRVDINIPELNPEMDVYRIGTLMELVQALALSFADDGKRVKVCVQGSMGEGALAGMPLQLAGTRKILEYMDWGDDETLGTFVKLGAIGGKEVDEEDDMFILVAPQNAVGNCIIDDLQAMTTAAGKRPVVLINPRLKDLPASSGIMQTMGREQRLEYALTFDNCYVFRLLYYLGTQYPIMGALRMSYPYRYELYKRVNEENGKEKYVLLATYAERPTPEQIDDAFSGKSRDQSKKASGIW

SEQ ID NO: 85832 - DNA, 645 bp, Oryza sativa (japonica cultivar-group)
  CDS (1)..(645)
atgggttcggttgtggatgctccaacagttgtggctggacaggaggaggtcactgacaacatgttgggtgacaagaaagttacagttgtatttgttctaggtggtcctgggagtggaaagggcacacagtgtgccaacattgttgaacactttggattcattcatcttagtgctggagaccttttgcgtgcagagatcaaatctggctctgagaacggaactatgatcgagaacatgataaaggagggaaagattgttccatctgaggtaactataaaactcttgcaggaagccatgattaaaagtggaaatgataagttccttattgatggatttccaaggaacgaagagaatcgtgctgcatttgagaacgttacaaaaataactcctgcgtttgtgctattcttcgattgttctgaggaagagatggaaagacgtcttttgggacgcaatcagggaagagttgacgataacattgagactatcaggaaaaggttcaaagtttttgttgaatccagtttgcctgtcattgagtactataatgcaaaggacaaggttaaaaagattgatgctgcaaaaccaattcctgaggtgtttgaagatgtcaaagccattttcgctccatatgcgccaaatgccgcttag

SEQ ID NO: 85833 - protein, 214 aa, Oryza sativa (japonica cultivar-group)
MGSVVDAPTVVAGQEEVTDNMLGDKKVTVVFVLGGPGSGKGTQCANIVEHFGFIHLSAGDLLRAEIKSGSENGTMIENMIKEGKIVPSEVTIKLLQEAMIKSGNDKFLIDGFPRNEENRAAFENVTKITPAFVLFFDCSEEEMERRLLGRNQGRVDDNIETIRKRFKVFVESSLPVIEYYNAKDKVKKIDAAKPIPEVFEDVKAIFAPYAPNAA

SEQ ID NO: 85834 - DNA, 882 bp, Oryza sativa (japonica cultivar-group)
  CDS (1)..(882)
atggcggccgtgcagcgactcctgcgggcgtccgcctccggtggcgcggcggcggcggcggcggcggcgaggaggcgcatgtccacggcggtggcgccggagcagacgcctgcggccgcggcgttcccgttcgcggcggcggcggggagggcgaggcagcgggtggcggaggagaggaacgtgcagtgggtgttcctcgggtgccccggcgtgggcaaggggacttatgccagccgcctctcccgcctcctcggcgtgccccacatcgccaccggggatctcgtccgcgacgagctcgcttcctccggccccctatctgtgcagcttgctgaaattgttaatcaggggaaattagtttctgatgaaattatcatcaatctgttatctaaacgtcttaagaaaggagaagagcagggggaatcgggatttattctggatggttttccacgtactgtaaaacaagcggaaattcttgatggagttactgacattgatatggtggtcaatctaaagttgagagaggatgtcctagttgagaagtgccttggcagacgtatttgtggccaatgtggaaagaacttcaatttggcctgcattgatgtgaagggtgaaaatgggctgccaccaatctacatggcaccactattgcccccaaataactgtatgtcaaagcttatcaccagagctgatgataccgaagaggtcgtgagaaatcgtcttcagatatataatgacatgagccaacctgttgagggtttctaccggcaacaggggaagcttttagaatttgatttgcctggaggaatccctgagtcttggccaaagctgctccatgttctaaatctcgaggaccaagaagagatgaagctggccactgcgtaa

SEQ ID NO: 85835 - protein, 293 aa, Oryza sativa (japonica cultivar-group)
MAAVQRLLRASASGGAAAAAAAARRRMSTAVAPEQTPAAAAFPFAAAAGRARQRVAEERNVQWVFLGCPGVGKGTYASRLSRLLGVPHIATGDLVRDELASSGPLSVQLAEIVNQGKLVSDEIIINLLSKRLKKGEEQGESGFILDGFPRTVKQAEILDGVTDIDMVVNLKLREDVLVEKCLGRRICGQCGKNFNLACIDVKGENGLPPIYMAPLLPPNNCMSKLITRADDTEEVVRNRLQIYNDMSQPVEGFYRQQGKLLEFDLPGGIPESWPKLLHVLNLEDQEEMKLATA

SEQ ID NO: 85836 - DNA, 858 bp, Oryza sativa (japonica cultivar-group)
  CDS (1)..(858)
atggcggcgatctcgcgcgcgatccgggcgtgcgccgccgcggggtcccggcggagcatggcgtcgtcggcgaaggaggtggcggcggccggggcgcgggcggcggcggcggtggcgcggcgcgggcgggagcgggagcgggaggaggacgggaggcgcgtgcagtgggtgttcctgggctgccccggggtggggaagggcacctacgccagccgcctctcgcagatgctccgcgtgccccacatcgccaccggcgatctcgtccgcgacgccctcgcctccccgggccccttctccgagcagcttgcggagattgtgaataatggaaagctagtgtcggatgagatcataataaatcttctgtcaaagcggcttgaagagggagcagaaaagggtgagctgggcttcatccttgatggttttccaagaaccataagacaagcggagatacttgaaggagtcacggatattgatttggtcatcaacctcaaactccgagaagaggctctgcttgcaaaatgccttggtagaaggatgtgcagccagtgtggtggaaattttaatgtagcgtccattgatatggagggcgaaaatggtggtcctcgaatgtacatgcctccactactgcctcctccacagtgtgaatcaaagttgataactaggcctgatgatactgaagaggtggtaaaggagcgattgcgtgtttatcatgatttgtgtgagccagtggaggacttctacagagcacgtggtaaactattggagttcaatctaccaggaggaattccagaatcatggccgaagttactgcaagcattgaatttagaccctggcaatgaaagatctgcagcagcatga

SEQ ID NO: 85837 - protein, 285 aa, Oryza sativa (japonica cultivar-group)
MAAISRAIRACAAAGSRRSMASSAKEVAAAGARAAAAVARRGREREREEDGRRVQWVFLGCPGVGKGTYASRLSQMLRVPHIATGDLVRDALASPGPFSEQLAEIVNNGKLVSDEIIINLLSKRLEEGAEKGELGFILDGFPRTIRQAEILEGVTDIDLVINLKLREEALLAKCLGRRMCSQCGGNFNVASIDMEGENGGPRMYMPPLLPPPQCESKLITRPDDTEEVVKERLRVYHDLCEPVEDFYRARGKLLEFNLPGGIPESWPKLLQALNLDPGNERSAAA

SEQ ID NO: 85838 - DNA, 732 bp, Oryza sativa (japonica cultivar-group)
  CDS (1)..(732)
atggcacacgcaaacaagaatcacattgagtcatttccacctcctgggaaaaagataacaatcgtgttcgtcataggtggccctggcagtggcaaaggcactcaatgtgccaaaattgttaagcagtttggctttacacatctgagtgctggtgatctccttcgtgaagaagcaaaatatgatactgaacaaggtacaatgatcaagaatctcatgaatgaagggaagcttgtgtcatctgatctcatcgttaagctactatttaaggccatgcgagaaagtgggaatgataagttccttgttgatggatttccacgaaatgaagaaaatcgacatgcgtatgaaaatattatccacattgagccagagttcctgctgttcattgactgctcaaaggaagagatggagcggcgcattttgaaccgaaaccagggaagagatgatgacaacatcgacactattaggagacgctttgatgtttttcagcagcaaactcttccagttattcagtactatgagaaaagggggaaactcagaaaggttgatggtaaccgacaggtagatgaagttttcgaagacgttaaggccatttttgctcagttgaacaatcagaaaattcatggtggccagcaagctagtggtttgagcagagcacaaatgaatccattgaaacgttggttctttgactttttctgcggttgctttgggactaaagaagaagcaagaaactga

SEQ ID NO: 85839 - protein, 243 aa, Oryza sativa (japonica cultivar-group)
MAHANKNHIESFPPPGKKITIVFVIGGPGSGKGTQCAKIVKQFGFTHLSAGDLLREEAKYDTEQGTMIKNLMNEGKLVSSDLIVKLLFKAMRESGNDKFLVDGFPRNEENRHAYENIIHIEPEFLLFIDCSKEEMERRILNRNQGRDDDNIDTIRRRFDVFQQQTLPVIQYYEKRGKLRKVDGNRQVDEVFEDVKAIFAQLNNQKIHGGQQASGLSRAQMNPLKRWFFDFFCGCFGTKEEARN

SEQ ID NO: 85840 - DNA, 633 bp, Oryza sativa (japonica cultivar-group)
  CDS (1)..(633)
atgggttcagttgtggatgctccagtggttgtggagggggttgctgagaacatgttgggtgataagaaagttacagttgtatttgttctaggtggtcctggaagtggaaaaggcacacagtgtgccaacattgtggaacactttggattcacccacttaagtgctggagaccttttgcgtgcagagataaaatctggttctgagaatggaactatgattgagaacatgataaaggaggggaagattgttccgtcagaggttactataaagctcttgcaagatgccatgattaaaaatgagaatgataagtttctaatcgatgggttcccaaggaatgaagagaatcgtgctgccttcgagaatgttacaaaaatttcccctgcatttgtgctattttttgactgttctgaagaagagatggaaagacgtcttttgggacgcaatcagggtagagttgatgacaacattgagaccattaggaaaagattcaaagtttttgttgaatcaagtttgcctgtaattgagcactacaatgcgaagaacaaagttaaaaagattgatgctgcaaaaccaatttctgaagtgtttgaagatgtcaaagccatttttgccccatatgctaaggttgaatag

SEQ ID NO: 85841 - protein, 210 aa, Oryza sativa (japonica cultivar-group)
MGSVVDAPVVVEGVAENMLGDKKVTVVFVLGGPGSGKGTQCANIVEHFGFTHLSAGDLLRAEIKSGSENGTMIENMIKEGKIVPSEVTIKLLQDAMIKNENDKFLIDGFPRNEENRAAFENVTKISPAFVLFFDCSEEEMERRLLGRNQGRVDDNIETIRKRFKVFVESSLPVIEHYNAKNKVKKIDAAKPISEVFEDVKAIFAPYAKVE

SEQ ID NO: 85842 - DNA, 873 bp, Oryza sativa (japonica cultivar-group)
  CDS (1)..(873)
atggcctcttccatggccgccaccgccaccctctcgccgccggttttatccgccgagaggccgactgtccgcggcggcctcttcttgcccccttcgccggcgacctcccgctctctccgcctccaatccgcccgccgctgcggcatctcgccggcgaccaggaagccacgctccttgcctcgagcagccaaggttgttgtggctgtgaaggctgatcctttgaaggtcatgatagcaggggctccagcatctggaaagggaacgcagtgtgagctcatcaagagcaaatatggtctggtgcacatttctgctggagatttgctaagggcagaaattgctgcaggcagtgagaatgggaagcgagctaaggaatttatggagaagggtcagctggttcctgatgagattgttgttaatatggtgaaggaacgccttctgcaaccagatgctcaggaaaagggttggttgttggatgggtacccaagaagctattcgcaagcgatggcgctggaaactcttaatatccgacctgacattttcattcttttggatgttccagatgaacttcttgttgaaagggtagttgggagacggcttgatcctgtaactgggaaaatataccatctaaagtattccccaccggagaatgaagaaatcgcttcaaggcttacacagagatttgatgatacagaagaaaaggttaagctgaggttacagactcattatcaaaatgtagaatccttgctatcaatttacgaagatgtgatagttgaggtaaaaggggatgctttggtggatgatgtgtttgctgagatcgacaagcagctgacttctagccttgataagaaaacagaaatggtggctagcgcatga

SEQ ID NO: 85843 - protein, 290 aa, Oryza sativa (japonica cultivar-group)
MASSMAATATLSPPVLSAERPTVRGGLFLPPSPATSRSLRLQSARRCGISPATRKPRSLPRAAKVVVAVKADPLKVMIAGAPASGKGTQCELIKSKYGLVHISAGDLLRAEIAAGSENGKRAKEFMEKGQLVPDEIVVNMVKERLLQPDAQEKGWLLDGYPRSYSQAMALETLNIRPDIFILLDVPDELLVERVVGRRLDPVTGKIYHLKYSPPENEEIASRLTQRFDDTEEKVKLRLQTHYQNVESLLSIYEDVIVEVKGDALVDDVFAEIDKQLTSSLDKKTEMVASA

SEQ ID NO: 85844 - DNA, 585 bp, Agrobacterium rhizogenes
  CDS (1)..(585): transl_table=11
atgagactgatactgatgggcccgcccgggtccggcaaggggacccaggcaaagcgcatttgcgaaaagctcggcatcccgcatctgtcgaccggcgatatcctccgggccgaggtcaaggcgggaacgcccctcggtttggcggtcgcggccacaatggcagccggcgggctcgtttccgacgataccgtctcggcgatcgttgccagcaggattgccggtccggaagctcaacgcggctttgtgctcgacgggttcccgcgcacgatctcgcaggctgccgcgttggatcaatcactcggtgagcattccctgacggctgtcatcgagctcgtcgtcccggaggaagaactctacgaccgcatctgcagaagagcggcagagtccgccggcgcacagcgcgccgatgacaatgccgcaacattggaactgcgcctcaaggcatatcgggccgagaccctctctgtcagcgagttctacaagggtcggtcgccgtactttcaaatcgatggtcttgccgctcccgaggaagtgaccgcccggattctggagctcctggagtcggccgcggccgaatattcctga

SEQ ID NO: 85845 - protein, 194 aa, Agrobacterium rhizogenes
MRLILMGPPGSGKGTQAKRICEKLGIPHLSTGDILRAEVKAGTPLGLAVAATMAAGGLVSDDTVSAIVASRIAGPEAQRGFVLDGFPRTISQAAALDQSLGEHSLTAVIELVVPEEELYDRICRRAAESAGAQRADDNAATLELRLKAYRAETLSVSEFYKGRSPYFQIDGLAAPEEVTARILELLESAAAEYS

SEQ ID NO: 85846 - DNA, 750 bp, Arabidopsis thaliana
  CDS (1)..(750)
atgatttcatcatcatcgcgatcccttaagctcagccaggcagcttctgggctcaaagttggggaatcttttgcaacagacataattagtcaggaagaacgagtttcaccgccgaaagagaaagctccatttattacatttgtactagggggacctggaagtggaaaaggtacacaatgcgaaaagattgttgagacttttggattacaacatctaagtgctggagatttgctcaggagagagatcgcaatgcacacggaaaatggggctatgattctgaacttgattaaagatgggaagattgttccttcagaagttacagtaaaattaatacagaaagagctggaatcgagtgacaatcgcaagtttctcattgatggttttccacgaactgaggagaaccgtgttgcatttgagcgcataataagagcagaccctgatgtagtactgttcttcgattgccctgaagaagagatggtgaaacgcgtcttgaatcgtaatcagggccgaattgatgataatataactacaatgaaaaagcgtctgaaaatcttcaatgccttaaatcgtcctgttattgactactacaaaaataaaggaaaactctacaccattaatgcagtaggaacagtagacgacatattccaacatgtcctacctattttcaattcatttgagcaattgaaggagagtagtcatgtaaatccacagtcccatctcggttcgagtttggtagaaaattcatcttga

SEQ ID NO: 85847 - protein, 249 aa, Arabidopsis thaliana
MISSSSRSLKLSQAASGLKVGESFATDIISQEERVSPPKEKAPFITFVLGGPGSGKGTQCEKIVETFGLQHLSAGDLLRREIAMHTENGAMILNLIKDGKIVPSEVTVKLIQKELESSDNRKFLIDGFPRTEENRVAFERIIRADPDVVLFFDCPEEEMVKRVLNRNQGRIDDNITTMKKRLKIFNALNRPVIDYYKNKGKLYTINAVGTVDDIFQHVLPIFNSFEQLKESSHVNPQSHLGSSLVENSS

SEQ ID NO: 85848 - DNA, 597 bp, Xylella fastidiosa 9a5c
  CDS (1)..(597): transl_table=11
ttgccgttgtttttttctatatggagtgaattaatgcgattggttctattgggaccacctggttcaggtaaaggcactcaggcggcgcaaatgaaggaaacattacagattccgcatatttccactggtgacctgttgcgcagtgaagtggttgctgggactcctcttggcctacaggccaagcaagtcatggcacaaggtgatttggtttccgatgcgattctgatcggcatgcttgagtcacgtttgagccatacggatgtagtaaaaggcttcatccttgatggctatccgcgcaatctgtctcaggccgctgcgctggatgggttgttagccaagctcgggcatcctttaaatgctgtggtgcagcttgaggtacccaccgatgtgttggtggaacgtattgctggccgtgctcaggctgaaggccgtgaggatgacactcctgatgcggtgcgtaagcgtttgcaggtctataacgattcaaccgcgccggtcatcggtttctatcagcagcgcggcatcttgttgcgcgtggatggtgtggggcgtttggatgaggtttcccagcgtattgtggttgcactgggttgctga

SEQ ID NO: 85849 - protein, 198 aa, Xylella fastidiosa 9a5c
MPLFFSIWSELMRLVLLGPPGSGKGTQAAQMKETLQIPHISTGDLLRSEVVAGTPLGLQAKQVMAQGDLVSDAILIGMLESRLSHTDVVKGFILDGYPRNLSQAAALDGLLAKLGHPLNAVVQLEVPTDVLVERIAGRAQAEGREDDTPDAVRKRLQVYNDSTAPVIGFYQQRGILLRVDGVGRLDEVSQRIVVALGC

SEQ ID NO: 85850 - DNA, 723 bp, Drosophila melanogaster
  CDS (1)..(723)
atggcgccgaatgcagcagtaccagtggagcgatatgagcctgagaacatcgggatcaacgccattctcctggggccgccgggttccggcaaaggaacgcaggctcccctgctgaaggagaagttctgcgtgtgccacctgtcgaccggcgacatgctgcgggcggagatttcatccggttcgaagctgggagccgagttgaagaaggtcatggatgccggcaaactggtctccgacgacctggtcgtggacatgatcgactccaacctggacaagcccgagtgcaagaatggattcctcctggacggattccccaggactgtcgttcaagctgagaagctcgacacattgctggacaagaggaaaaccaacttggatgctgtcatcgagtttgccatcgacgacagtctgttggtgaggcgcatcactggccgcttgatccaccaggccagcgggcgttcgtatcacgaagagtttgcccctccaaagaagccaatgacggacgatgtcactggagagcccctaatccgtcgcagcgatgacaacgccgaggctctgaagaagcgactggaagcatatcacaagcagacaaagccgctggtcgactactacggcctgaggggtctgcacttcaaggtggacgccgccaagaagtccagcgacgtcttctccaccatcgactctatattccaacgcaagcgtcctgcccagatccagttatga

SEQ ID NO: 85851 - protein, 240 aa, Drosophila melanogaster
MAPNAAVPVERYEPENIGINAILLGPPGSGKGTQAPLLKEKFCVCHLSTGDMLRAEISSGSKLGAELKKVMDAGKLVSDDLVVDMIDSNLDKPECKNGFLLDGFPRTVVQAEKLDTLLDKRKTNLDAVIEFAIDDSLLVRRITGRLIHQASGRSYHEEFAPPKKPMTDDVTGEPLIRRSDDNAEALKKRLEAYHKQTKPLVDYYGLRGLHFKVDAAKKSSDVFSTIDSIFQRKRPAQIQL

SEQ ID NO: 85852 - DNA, 606 bp, Drosophila melanogaster
  CDS (1)..(606)
atggctgatatacccatcatctggatcttgggtggacccgggtgcggcaagggcactcagtgcgccaaaatcgtggaaaaatacggattcacacatctgagcagcggcgatttgctgcgcaatgaggtggcttctggatcggacaagggtcgtcagctgcaggctgtgatggccagcggtggcctggtgtccaacgacgaggtgctgtccctgctgaacgacgccatcacgcgggccaagggtagctcgaagggattcctcatcgatggatatccgcgtcagaagaaccagggcattgagttcgaggcgcgcattgcacccgccgatctggcgctgtactttgagtgctccgaggacacgatggtgcagcgcatcatggcacgtgccgctgcctcggcggtgaaacgggacgatgacaacgagaagaccattagggcacgcctcctgaccttcaagcagaacaccaatgcaattttggaactttatgagcccaaaacccttacgatcaatgccgagcgtgacgtggacgacatctttctggaagtcgtccaggccattgactgtgtgctgaagaagaagcagcagaatgccgccgcccagtgctag

SEQ ID NO: 85853 - protein, 201 aa, Drosophila melanogaster
MADIPIIWILGGPGCGKGTQCAKIVEKYGFTHLSSGDLLRNEVASGSDKGRQLQAVMASGGLVSNDEVLSLLNDAITRAKGSSKGFLIDGYPRQKNQGIEFEARIAPADLALYFECSEDTMVQRIMARAAASAVKRDDDNEKTIRARLLTFKQNTNAILELYEPKTLTINAERDVDDIFLEVVQAIDCVLKKKQQNAAAQC

SEQ ID NO: 85854 - DNA, 615 bp, Arabidopsis thaliana
  CDS (1)..(615)
atggaaactcctatcgatgctccgaataaggacgaacatgaatgccctaggtggaagaaatcaactgtagtttttgtgttgggtggtcctggaagtggaaaaggtactcagtgtgctaatgttgtgaagcactttagctatacccattttagtgctggtgatcttctcagagcagaaattaagtccggttctgaatttggagccatgatccaaagtatgattgcagaggggagaatagtgccgtctgagatcacagtgaaacttttgtgtaaagctatggaggaaagtggtaatgataagttccttattgatggcttccctcgcaatgaagaaaatcgaaacgtattcgaaaatgttgctagaatcgagcctgcttttgttctattctttgattgtccagaagaagaactagaaagacgcattatgagcaggaaccagggaagagaagacgataatatagagaccataaagaagcgatttaaagtgtttgttgaatctaccctcccaattattagctactacgaatcgaaagggaaacttcgaaagatcaatgctgcaaaatccagcgaagaggttttcgaggctgtcagagttctatttgcatctgaaacttga

SEQ ID NO: 85855 - protein, 204 aa, Arabidopsis thaliana
METPIDAPNKDEHECPRWKKSTVVFVLGGPGSGKGTQCANVVKHFSYTHFSAGDLLRAEIKSGSEFGAMIQSMIAEGRIVPSEITVKLLCKAMEESGNDKFLIDGFPRNEENRNVFENVARIEPAFVLFFDCPEEELERRIMSRNQGREDDNIETIKKRFKVFVESTLPIISYYESKGKLRKINAAKSSEEVFEAVRVLFASET

SEQ ID NO: 85856 - DNA, 645 bp, Shigella flexneri 2a str. 301
  CDS (1)..(645): transl_table=11
atgcgtatcattctgcttggcgctccgggcgcggggaaagggactcaggctcagttcatcatggagaaatatggtattccgcaaatctccactggcgatatgctgcgtgctgcggtcaaatctggctccgagctgggtaaacaagcaaaagacattatggatgctggcaaactggtcaccgacgaactggtgatcgcgctggttaaagagcgcattgctcaggaagactgccgtaatggtttcctgttggacggcttcccgcgtaccattccgcaggcagacgcgatgaaagaagcgggcatcaatgttgattacgttctggaattcgacgtaccggacgaactgattgttgatcgtatcgtaggccgccgcgttcatgcgccgtctggtcgtgtttatcacgttaaattcaatccgccgaaagtagaaggcaaagacgacgttaccggtgaagaactgactacccgtaaagacgatcaggaagaaaccgtgcgtaaacgtctggttgaataccatcagatgactgcaccgctgatcggctactactccaaagaagcggaagcgggtaacaccaaatacgcgaaagttgacggtaccaagcaggttgctgaagttcgcgctgatctggaaaaaatcctcggctaa

SEQ ID NO: 85857 - protein, 214 aa, Shigella flexneri 2a str. 301
MRIILLGAPGAGKGTQAQFIMEKYGIPQISTGDMLRAAVKSGSELGKQAKDIMDAGKLVTDELVIALVKERIAQEDCRNGFLLDGFPRTIPQADAMKEAGINVDYVLEFDVPDELIVDRIVGRRVHAPSGRVYHVKFNPPKVEGKDDVTGEELTTRKDDQEETVRKRLVEYHQMTAPLIGYYSKEAEAGNTKYAKVDGTKQVAEVRADLEKILG

SEQ ID NO: 85858 - DNA, 690 bp, Drosophila melanogaster
  CDS (1)..(690)
atgttatttatgtgtcaccaaagggttatgaagaaggaggccgaggagaagctcaaagccgaggagctccgtagggcacgtgccgccgctgatatacccatcatctggatcttgggtggacccgggtgcggcaagggcactcagtgcgccaaaatcgtggaaaaatacggattcacacatctgagcagcggcgatttgctgcgcaatgaggtggcttctggatcggacaagggtcgtcagctgcaggctgtgatggccagcggtggcctggtgtccaacgacgaggtgctgtccctgctgaacgacgccatcacgcgggccaagggtagctcgaagggattcctcatcgatggatatccgcgtcagaagaaccagggcattgagttcgaggcgcgcattgcacccgccgatctggcgctgtactttgagtgctccgaggacacgatggtgcagcgcatcatggcacgtgccgctgcctcggcggtgaaacgggacgatgacaacgagaagaccattagggcacgcctcctgaccttcaagcagaacaccaatgcaattttggaactttatgagcccaaaacccttacgatcaatgccgagcgtgacgtggacgacatctttctggaagtcgtccaggccattgactgtgtgctgaagaagaagcagcagaatgccgccgcccagtgctag

SEQ ID NO: 85859 - protein, 229 aa, Drosophila melanogaster
MLFMCHQRVMKKEAEEKLKAEELRRARAAADIPIIWILGGPGCGKGTQCAKIVEKYGFTHLSSGDLLRNEVASGSDKGRQLQAVMASGGLVSNDEVLSLLNDAITRAKGSSKGFLIDGYPRQKNQGIEFEARIAPADLALYFECSEDTMVQRIMARAAASAVKRDDDNEKTIRARLLTFKQNTNAILELYEPKTLTINAERDVDDIFLEVVQAIDCVLKKKQQNAAAQC

SEQ ID NO: 85860 - DNA, 651 bp, Drosophila melanogaster
  CDS (1)..(651)
atgtttacgaaaatctttcgcgctgtgataatcggagcccccggctcgggcaaaggaactatttcggaattgatctgcaagaaccatggatgtgtgcacatctccacgggggacattctgcgccagaacatcataaaaaacacagaacttggaaaaaaggccaagcagtacattgctgaaggtaaactggtgcccgacgcgattgtgaccaagacgatgctggcccggataaccgaggtaggcaacaggtcgtacatcctagacggattcccgcgcaatatagcccaggccgaggcactggctgcacgcgagcaaatcgatgccgtgatcacgctggacgttccacatagtgtgattatcgaccgggtcaagaatcgctggatccatgcgccctccggcagggtgtacaatattggcttcaagaatcccaaagtgcctggcaaagatgatgtgacgggggagccgctgatgcaacgcgaagatgataaaccccatgtggtggccaagcgactggagctctacgatgaggtgatgagcccggtaatagcctggtacgaaaagaagggtctggttgccactttcaagggaaaacagacaaaggagatctggccgatgatggagcttttcctcaacgaccgcataaatgcgtaa

SEQ ID NO: 85861 - protein, 216 aa, Drosophila melanogaster
MFTKIFRAVIIGAPGSGKGTISELICKNHGCVHISTGDILRQNIIKNTELGKKAKQYIAEGKLVPDAIVTKTMLARITEVGNRSYILDGFPRNIAQAEALAAREQIDAVITLDVPHSVIIDRVKNRWIHAPSGRVYNIGFKNPKVPGKDDVTGEPLMQREDDKPHVVAKRLELYDEVMSPVIAWYEKKGLVATFKGKQTKEIWPMMELFLNDRINA

SEQ ID NO: 85862 - DNA, 705 bp, Escherichia coli CFT073
  CDS (1)..(705): transl_table=11
ttggtggtatcgtttatcgctttttcaaaaaattcgacacattttaaggggattttcgcaatgcgtatcattctgcttggcgctccgggcgcggggaaagggactcaggctcagttcatcatggagaaatatggtattccgcaaatctccactggcgatatgctgcgtgctgcggtcaaatctggctccgagctgggtaaacaagcaaaagacattatggatgctggcaaactggtcaccgacgaactggtgatcgcgctggttaaagagcgcattgctcaggaagactgccgcaacggtttcctgttggacggcttcccgcgtaccattccgcaggcagacgcgatgaaagaagcgggcatcaatgttgattacgttctggaattcgacgtaccggacgaactgattgttgaccgtatcgtaggccgccgcgttcacgcgccgtctggtcgtgtttatcacgttaaattcaatccgccgaaagtagaaggcaaagacgacgttaccggtgaagaactgactacccgtaaagacgatcaggaagagaccgtacgtaaacgtctggttgaataccatcagatgactgcaccgctgatcggctactactccaaagaagctgaagcgggtaacaccaaatacgcgaaagttgacggcaccaagccggtggctgaagttcgcgcagctctggaaaaaattctcggctaa

SEQ ID NO: 85863 - protein, 234 aa, Escherichia coli CFT073
MVVSFIAFSKNSTHFKGIFAMRIILLGAPGAGKGTQAQFIMEKYGIPQISTGDMLRAAVKSGSELGKQAKDIMDAGKLVTDELVIALVKERIAQEDCRNGFLLDGFPRTIPQADAMKEAGINVDYVLEFDVPDELIVDRIVGRRVHAPSGRVYHVKFNPPKVEGKDDVTGEELTTRKDDQEETVRKRLVEYHQMTAPLIGYYSKEAEAGNTKYAKVDGTKPVAEVRAALEKILG

SEQ ID NO: 85864 - DNA, 771 bp, Nitrosomonas europaea ATCC 19718
  CDS (1)..(771): transl_table=11
gtgccgatctgcctgacccggctgcttgcaacggcttttcacaggctatccgcggcacacaccactgcgggatgttcaccatccccgacaatactcaaggaggccaacattcgtatcatcttactgggcgcgccaggagcgggcaaaggcacgcaggcaagttttatccgtgaatgtttttccataccccagatttctaccggcgatattctccgtaatgctgtaaaagcagggacagagctgggcatgatggcaaaaaaaatcatggaatccggcggtctggtgccagatgaaatcatcatcgatctggtacgcaagcgaattgaagaaccggattgtgccaatggctttctattcgatggtttcccccgcaccattcctcaggctgatgcactcaggacggccaacgtacacatagatcatgtcatcgaaattgatgtgcccgatgccgaaatcataaagcgtttgtccgggcgtcgtgtacatccgccatcaggccggatttatcatatcgagttcaatccgccggcagtcgccgaccgggatgatgttaccggcgaggcactggttctacgtgaggatgaccgggaagaaaccgtgcgtaagcgcctgcaggtctatcatgaacaaacccggccattggttggatactacttcgaatgggcgaacagcggtgatcccaatgcgccaggttacatcaaaattgccggaaccggcaatgtagaagccatacaggaaaatattatcgcagcactcaaacagaccaaatga

SEQ ID NO: 85865 - protein, 256 aa, Nitrosomonas europaea ATCC 19718
MPICLTRLLATAFHRLSAAHTTAGCSPSPTILKEANIRIILLGAPGAGKGTQASFIRECFSIPQISTGDILRNAVKAGTELGMMAKKIMESGGLVPDEIIIDLVRKRIEEPDCANGFLFDGFPRTIPQADALRTANVHIDHVIEIDVPDAEIIKRLSGRRVHPPSGRIYHIEFNPPAVADRDDVTGEALVLREDDREETVRKRLQVYHEQTRPLVGYYFEWANSGDPNAPGYIKIAGTGNVEAIQENIIAALKQTK

SEQ ID NO: 85866 - DNA, 888 bp, Arabidopsis thaliana
  CDS (1)..(888)
atggcggtttctcaccgtctcctcaggccggcgacgacgacgataaagaatactttttcttctctctttattaggtctctctcttcttcttcgtctgggtcctcgctagaccccaaaatcgatctggaggaggctgcggctcagctcgggaagtcttcgtctacgtcaacgtctccatacaaaggcagaaatttccactgggtgtttcttggatgtcctggtgttggtaaaggaacctatgcctctcgtctctcttctctcctcggcgttcctcatattgccactggtgatctcgttcgtgaagagctctcctcctctggcctcctctcctctcagctcaaggagcttgttaaccatggaaaactagttcctgatgaattcataataagtttgttatcaaagcgtctccaagctggcaaagacaagggtgaatctggatacattcttgatggttttccacgcaccgtgactcaagcggaaatactggagggagtaactaatatcgatctggtgattaacctgaagctacgagaagaggcattgcttgcgaaatgtttaggaagaagaatttgcagcgagtgtggtggaaactataacgttgcctgcattgatatcaaaggtgatgatgatactcccagaatgtatatgcctcctcttcttcctccgccaaactgtgaatcgaagcttataagccgagctgatgacactgaagaagttgtcaaggaaagactcaggatttacaacaaaatgactcaaccagtggaggaattctacaagaaacgcgggaagctgttggaatttgaattgcccggtggaatcccagagtcatgggcaaggctccttagggcattacaccttgaagacgataaacagtctgcaatagcctaa

SEQ ID NO: 85867 - protein, 295 aa, Arabidopsis thaliana
MAVSHRLLRPATTTIKNTFSSLFIRSLSSSSSGSSLDPKIDLEEAAAQLGKSSSTSTSPYKGRNFHWVFLGCPGVGKGTYASRLSSLLGVPHIATGDLVREELSSSGLLSSQLKELVNHGKLVPDEFIISLLSKRLQAGKDKGESGYILDGFPRTVTQAEILEGVTNIDLVINLKLREEALLAKCLGRRICSECGGNYNVACIDIKGDDDTPRMYMPPLLPPPNCESKLISRADDTEEVVKERLRIYNKMTQPVEEFYKKRGKLLEFELPGGIPESWARLLRALHLEDDKQSAIA

SEQ ID NO: 85868 - DNA, 627 bp, Arabidopsis thaliana
  CDS (1)..(627)
atgggatctgttgatgctgctaatggaagtgggaagaaacctacagttatatttgttcttggtggtccaggaagtggaaaaggtacccagtgtgcttatattgttgaacattatggttacacacatctgagtgctggagatcttcttagagctgagattaaatcaggttctgaaaatggaactatgatccagaatatgattaaagaggggaagattgtaccttctgaggttactatcaagcttctacagaaagctattcaggaaaacgggaatgacaagttcctcattgatggtttccctcgtaatgaggaaaaccgagcagcatttgaaaaagttactgagattgaaccaaagtttgtcttattcttcgattgtcctgaggaagagatggagaagcgcctgttgggccgaaaccaggggagagaggatgacaatattgagactataaggaagcgctttaaggtgtttcttgaatctagcttaccagtgattcattactacgaagctaaggggaaagttaggaagattaatgctgcaaagcccattgaagctgtcttcgaggaggtgaaggcaattttttctcctgaagctgagaaggtaaaactcaatagttgtgctattctctaa

SEQ ID NO: 85869 - protein, 208 aa, Arabidopsis thaliana
MGSVDAANGSGKKPTVIFVLGGPGSGKGTQCAYIVEHYGYTHLSAGDLLRAEIKSGSENGTMIQNMIKEGKIVPSEVTIKLLQKAIQENGNDKFLIDGFPRNEENRAAFEKVTEIEPKFVLFFDCPEEEMEKRLLGRNQGREDDNIETIRKRFKVFLESSLPVIHYYEAKGKVRKINAAKPIEAVFEEVKAIFSPEAEKVKLNSCAIL

SEQ ID NO: 85870 - DNA, 663 bp, Mycoplasma gallisepticum R
  CDS (1)..(663): transl_table=4
attagaggtgagccaactgtgataagattaatttttctaggtgcacctggaacaggtaaagggacgatctcttcttatttaaaagaacagcacggttttttccacatttcaagcggagatctatttcgcttttatgctaaagaagaaaaaaccgctttagctgaagagatcaaaagttatattaataacggactttatgtcccagatgagttaactaaccgtacggtagctgatttttaccataaaaatcaatcccaagataagattatctttgatgggtatccaagaacacttaatcaatgtgaatacattgatgagatcatcaaatttactcacgtcatcttattacaaccaaccgattgagatatgatcatcaatcgactaagtttacgtcgatcatgtccacaatgtaaacgaatttacaatattaattcggttgattttaaacctaaagtggctaatctttgtgatctttgtaaagttgaattaatccatcgaaaagatgatgatcctagtgtggtaagcactagaatcaacgtttataacgaacaaactaaaccagtaatcgaatactacaagaagaaaaacttattacacgtagttgatgctaataagagttttgaagagttatacaagcttgttttagagatcgttaacaaataa

SEQ ID NO: 85871 - protein, 220 aa, Mycoplasma gallisepticum R
MRGEPTVIRLIFLGAPGTGKGTISSYLKEQHGFFHISSGDLFRFYAKEEKTALAEEIKSYINNGLYVPDELTNRTVADFYHKNQSQDKIIFDGYPRTLNQCEYIDEIIKFTHVILLQPTDWDMIINRLSLRRSCPQCKRIYNINSVDFKPKVANLCDLCKVELIHRKDDDPSVVSTRINVYNEQTKPVIEYYKKKNLLHVVDANKSFEELYKLVLEIVNK

SEQ ID NO: 85872 - DNA, 624 bp, Rhodopirellula baltica SH 1
  CDS (1)..(624): transl_table=11
gtgccggcggcggcacttcacccgtcgtttgatcctggcagttttgtgcgaattgtctttatcggcccgcctggcgcgggcaagggcactcagtgtgaactgctaagcaaagctctcaaggtgcctcacattggcaccggcggaatgctgagagctttggagccagaaagtggcgagcagattcatcttcgaatcgatcgcggccactttgcaccggatgatttcgtgctgcagatggttgcggaacgactctctcaaccggacagccgcaccggttatctgttggacggttttccgcgaacgcaggtccaagccagtgcattcgacaagcaactcgtcgcggcttcgctgaaactggatcacgtgttgcaccttcaagtttcggcggacgttctgatcgaacgtctccgcaagaggggtgaaaccgaaaaccgtgccgacgattccgaagagttcatccgagagcgttttcgcatctacgaagatcgcactgcaccgttgctggatcactatcggtgtcaggggttggttcgggacatcgacgcttccgattcagagtcgctggtgcacgcatcgatttgcgaatgcctgaatttcacactcgcctcgccagctgagtcctaa

SEQ ID NO: 85873 - protein, 207 aa, Rhodopirellula baltica SH 1
MPAAALHPSFDPGSFVRIVFIGPPGAGKGTQCELLSKALKVPHIGTGGMLRALEPESGEQIHLRIDRGHFAPDDFVLQMVAERLSQPDSRTGYLLDGFPRTQVQASAFDKQLVAASLKLDHVLHLQVSADVLIERLRKRGETENRADDSEEFIRERFRIYEDRTAPLLDHYRCQGLVRDIDASDSESLVHASICECLNFTLASPAES

SEQ ID NO: 85874 - DNA, 750 bp, Strongylocentrotus purpuratus
  CDS (1)..(750)
atggctgccgcaatcaagagtcaggatccagttatgcatgagccagaggaagagggagtacctcaagggatctgtggagtactccttggcccaccaggagctggaaaaggagtccaggcacccaagcttgcagagaagtactgcgtatgtcacctggcaacgggtgacatgctgagggcggtcatcgcctcaggctcggacctcggtaagaagctgaaggtggtgttggacagcggtaagctggtcagcgatgagctggtggtggagatgattgataacaagctgggtgcacccgagtgcaggaatggcttccttctagatggcttcccaaggaccgttgtccaggctgagaagctggacgaacttctcacaaagaggaagactgccctggactcagtagtcgagttcggcattgacgattcactgcttgtgaaacgaatcaccggacggctgatccacaagcccagtgggaggtcttatcacacagaatttagccctccaaagaagcctatgactgatgatgtaactggtgagccactgatcaagcgatcagacgacaacgaggtaacgttgaaaacacgccttgaagcctaccacaagcagactgcacctctcgttgattattactccaaacgagggatccatcaacgtgtcgatgctgctagagcacctgacgccgtcttcgcaagcatccagacaatttttgctaaagcgcagactggaagaaaagataaagttgtattcatttga

SEQ ID NO: 85875 - protein, 249 aa, Strongylocentrotus purpuratus
MAAAIKSQDPVMHEPEEEGVPQGICGVLLGPPGAGKGVQAPKLAEKYCVCHLATGDMLRAVIASGSDLGKKLKVVLDSGKLVSDELVVEMIDNKLGAPECRNGFLLDGFPRTVVQAEKLDELLTKRKTALDSVVEFGIDDSLLVKRITGRLIHKPSGRSYHTEFSPPKKPMTDDVTGEPLIKRSDDNEVTLKTRLEAYHKQTAPLVDYYSKRGIHQRVDAARAPDAVFASIQTIFAKAQTGRKDKVVFI

SEQ ID NO: 85876 - DNA, 732 bp, Strongylocentrotus purpuratus
  CDS (1)..(732)
atgccgcctgtagctcaacccaagccccaatttgacgatcttccagatggaatcaaggccatcttgttagggccaccaggagcaggcaagggaacccaggcacccaagcttgcagagaagtactgcgtatgtcacctggcaacgggtgacatgctgagggcggtcatcgcctcaggctcggacctcggtaagaagctgaaggtggtgttggacagcggtaagctggtcagcgatgagctggtggtggagatgattgataacaagctgggtgcacccgagtgcaggaatggcttccttctagatggcttcccaaggaccgttgtccaggctgagaagctggacgaacttctcacaaagaggaagactgccctggactcagtagtcgagttcggcattgacgattcactgcttgtgaaacgaatcaccggacggctgatccacaagcccagtgggaggtcttatcacacagaatttagccctccaaagaagcctatgactgatgatgtaactggtgagccactgatcaagcgatcagacgacaacgaggtaacgttgaaaacacgccttgaagcctaccacaagcagactgcacctctcgttgattattactccaaacgagggatccatcaacgtgtcgatgctgctagagcacctgacgccgtcttcgcaagcatccagacaatttttgctaaagcgcagactggaagaaaagataaagttgtattcatttga

SEQ ID NO: 85877 - protein, 243 aa, Strongylocentrotus purpuratus
MPPVAQPKPQFDDLPDGIKAILLGPPGAGKGTQAPKLAEKYCVCHLATGDMLRAVIASGSDLGKKLKVVLDSGKLVSDELVVEMIDNKLGAPECRNGFLLDGFPRTVVQAEKLDELLTKRKTALDSVVEFGIDDSLLVKRITGRLIHKPSGRSYHTEFSPPKKPMTDDVTGEPLIKRSDDNEVTLKTRLEAYHKQTAPLVDYYSKRGIHQRVDAARAPDAVFASIQTIFAKAQTGRKDKVVFI

SEQ ID NO: 85878 - DNA, 732 bp, Strongylocentrotus purpuratus
  CDS (1)..(732)
atgccgcctgtagctcaacccaagccccaatttgacgatcttccagatggaatcaaggccatcttgttagggccaccaggagcaggcaagggaacccaggcacccaagcttgcagagaagtactgcgtatgtcaccttgcaacgggtgacatgctgagggcggtcatcgcctcaggctcggacctcggtaagaagctgaaggtggtgttggacagcggtaagctggtcagcgatgagctggtggtggagatgattgataacaagctgggtgcacctgagtgcaagaatggcttccttctagatggcttcccaaggaccgttgtccaggctgagaagctggacgaacttctcacaaagaggaagactgccctggactcagtagtcgagttcggcattgacgattcacttcttgtgaaacgaatcaccggacggctgatccacaagcccagtgggaggtcttatcacacagaattcagccctccaaagaagcctatgactgatgatgtaactggtgagccactgatcaaacgatcagacgacaacgaggtaacgttgaaaacacgccttgaagcctaccacaagcagactgcacctctcgttgattattactccaaacgagggatccatcaacgggtagatgctgctagagcacccgacgcagtcttcgcaagcatccagtccatttttgctaaagcacagactggaagaaaagataaagttgtattcatttga

SEQ ID NO: 85879 - protein, 243 aa, Strongylocentrotus purpuratus
MPPVAQPKPQFDDLPDGIKAILLGPPGAGKGTQAPKLAEKYCVCHLATGDMLRAVIASGSDLGKKLKVVLDSGKLVSDELVVEMIDNKLGAPECKNGFLLDGFPRTVVQAEKLDELLTKRKTALDSVVEFGIDDSLLVKRITGRLIHKPSGRSYHTEFSPPKKPMTDDVTGEPLIKRSDDNEVTLKTRLEAYHKQTAPLVDYYSKRGIHQRVDAARAPDAVFASIQSIFAKAQTGRKDKVVFI

SEQ ID NO: 85880 - DNA, 663 bp, Strongylocentrotus purpuratus
  CDS (1)..(663)
atgtctcgtctgataagagctatgatcatgggaccacccggatcagggaagggcacgatgtcatctcggatagccaaagaattcaagctgaaccatctttcaagtggagatcttcttcggagtcagattcaacagcagacagctgttggactcctagccaagcagtttattgataaaggaagtctcgttccagatgatgtcatggttaagctcatcacacatgagctgaatggactaccaccaaattggttattagatggtttcccacgaactgtggcacaagcagaggctttgtcaaagaatcagcaaattgatactgttatgaacctagatgtgccctttgatgtcatagttcagaggttagaatggcggtggatacacccagggagtgatcgtgtctacaacttggactggaatcctcccaaagtaccttttaaggatgataaaacaggagaggatttggttcagagagaggatgacaaaccagagacagtaagagcaagacttgatctttatcaacaactcacaaaaccagtcctagaattctacagatccaaaggggttttaaccgagttccacggtacagagaccaatcagatctggcctcatgtccaagacttcttatcaggtcttctccagcatcctaccaagcaaagtgaatga

SEQ ID NO: 85881 - protein, 220 aa, Strongylocentrotus purpuratus
MSRLIRAMIMGPPGSGKGTMSSRIAKEFKLNHLSSGDLLRSQIQQQTAVGLLAKQFIDKGSLVPDDVMVKLITHELNGLPPNWLLDGFPRTVAQAEALSKNQQIDTVMNLDVPFDVIVQRLEWRWIHPGSDRVYNLDWNPPKVPFKDDKTGEDLVQREDDKPETVRARLDLYQQLTKPVLEFYRSKGVLTEFHGTETNQIWPHVQDFLSGLLQHPTKQSE

SEQ ID NO: 85882 - DNA, 918 bp, Nasonia vitripennis
  CDS (1)..(918)
atgcgcccgtcatatattattaacaattgggaaatgataaaaaatatgacgctgaacatacgtgcgatcgggatagtcgcatcacttgtcattgcatggtgcttaaaacactattggtgcactgattgcatttcgctggacagagatagtatttttcaatcatgccaatcggacggtaaacaggcggatctcggtcgtcagcaagaggatcaggacacagggtcaacgaccaaaacagctatggttggtgtaagctactctaggatggcagcccaggcggcctttcgggcggttatcttgggcgctccgggttccggcaagggcaccatatctgcccgcatcgtcaaacagtttgacgtcaagcacatatccagcggtgacaagcttaggtaccacatcgccaatcagaccgacctcggcaagaaagtgaagaaatacttggattccggaatgcttgtgccggacgaaacgatgatagcgcttatcagcgaagagatcaaaactttggaaggtcgaaattggcttttggacggattccccagaacacgtgcgcaagccgaggctttgcaaaaaatttacccgctctcgctcgtgatcaacgttgatgtacctgattctgtaattgtagagcgacttaagaatcgctgggttcacttgcccagcggtcgagtttacaatattggattcaacgatccgaaagtgccgggtagagacgacgtgacgggggaacttctggtccagcgacccgacgaccagccggaagtcgtccaggagaggcttcacgtttacgcgacgaaaaccaaaccgctcatcgactactacaagcagctgaacgtgctcaagtcgtttgctggcaatacgactgacagcatgtggccagcgatcaaggaaaccatcggacaataccttggacgatag

SEQ ID NO: 85883 - protein, 305 aa, Nasonia vitripennis
MRPSYIINNWEMIKNMTLNIRAIGIVASLVIAWCLKHYWCTDCISLDRDSIFQSCQSDGKQADLGRQQEDQDTGSTTKTAMVGVSYSRMAAQAAFRAVILGAPGSGKGTISARIVKQFDVKHISSGDKLRYHIANQTDLGKKVKKYLDSGMLVPDETMIALISEEIKTLEGRNWLLDGFPRTRAQAEALQKIYPLSLVINVDVPDSVIVERLKNRWVHLPSGRVYNIGFNDPKVPGRDDVTGELLVQRPDDQPEVVQERLHVYATKTKPLIDYYKQLNVLKSFAGNTTDSMWPAIKETIGQYLGR

SEQ ID NO: 85884 - DNA, 750 bp, Nasonia vitripennis
  CDS (1)..(750)
atggcacccaaaactgaatcattgccaaaggaaaatgttgaagaaccgtcgcgaggaatcaatgccgtgttgttgggaccacccggtagtggaaaaggcactcaggcacctatgttgaaagaacgctactgtgtttgccacctttccactggagacatgttgagagcggaaattcaatcgggttctgctcttggagctgaactaaaaaaagttatggatgccggaaaactcgtcagcgatgatttggttgtcaatatgattgataaaaatcttgaaaagcccgagtgccagcgtggattcctcttggatggtttcccacgaactgttccacaagcagagaagttagatgagatgctggaaaaaaagaaaacaaagcttgatgctgtcattgagtttggcattgatgataacttgttggttaagagaataactggtcgcttgattcatccggctagtgggagatcctatcacgaagaattcgcgccaccaaaagttgctatgaaagatgacataactggtgagccactgattaaaagatctgatgacaatgctgaagctcttaaaaaacgtcttgcttcatatcactctcaaactcagccacttgttgactactatgctcttcgtggcatccataattatgtgaatgctgccaagtctagtgaacaagtattcaaagatatagacactatctttcttactgctattactgcggaccaaaagaagggtttcttcagcagactcttttcttaa

SEQ ID NO: 85885 - protein, 249 aa, Nasonia vitripennis
MAPKTESLPKENVEEPSRGINAVLLGPPGSGKGTQAPMLKERYCVCHLSTGDMLRAEIQSGSALGAELKKVMDAGKLVSDDLVVNMIDKNLEKPECQRGFLLDGFPRTVPQAEKLDEMLEKKKTKLDAVIEFGIDDNLLVKRITGRLIHPASGRSYHEEFAPPKVAMKDDITGEPLIKRSDDNAEALKKRLASYHSQTQPLVDYYALRGIHNYVNAAKSSEQVFKDIDTIFLTAITADQKKGFFSRLFS

SEQ ID NO: 85886 - DNA, 579 bp, Nasonia vitripennis
  CDS (1)..(579)
atgaagacagtctggataatcggtgggccaggttgcggcaaaggtacccagtgcgacaggatcatcaagaattatggattcgtgcatctcagcagcggtgatcttctgcgagatgaggtggccagcggcagtcctcgtggcgccgagcttcaggagctcatgtcgaagggactgttcgtgccgacggacgtcgtgctgtcgctgatcaaggagaggatcgagaaagccaaggctgagaatccggataccaagggtgtgctcatcgacggttatcccagggagctcgagcagggattgcagttcgagaaggatgtatgcccagtggatctgataattttcttcgacgtcaagaacgagacgttgatcagccggctactgggacgtgctgccgcagcagcagtcaaacgcgccgacgacaacgaggagaccatcaagaagaggatcgagattttcaacgagaaaaacggcaagatcgtcgagcactacaaggacaagtgtctcaggatcaacgccgaaggcgccgtagacgcgatattcgaccaggtcagccaggccctcgacaagcttctggcctcgtag

SEQ ID NO: 85887 - protein, 192 aa, Nasonia vitripennis
MKTVWIIGGPGCGKGTQCDRIIKNYGFVHLSSGDLLRDEVASGSPRGAELQELMSKGLFVPTDVVLSLIKERIEKAKAENPDTKGVLIDGYPRELEQGLQFEKDVCPVDLIIFFDVKNETLISRLLGRAAAAAVKRADDNEETIKKRIEIFNEKNGKIVEHYKDKCLRINAEGAVDAIFDQVSQALDKLLAS

SEQ ID NO: 85888 - DNA, 723 bp, Anopheles gambiae str. PEST
  CDS (1)..(723)
atggcaccgaatgcagcagagctgaaagtgaaacccgcatcggattcgaccggcattaatgccatactgctgggacctcccggttccggaaaaggaacacaggcgccactattaaaggaaaaatattgtgtatgtcacctttcgaccggggatatgcttcgagcagaaatagcgtccggttcgaagctgggcgcgcagctcaaaaaggtgatggatgagggcaagttggtatccgatgagctagtggtggatatgatcgattccaacctggacaagccggaatgtcgcaatggttttctgttggacggtttcccacgtacggtagtacaggcggagaaattggataatctgcttgaaaaacgcaacaccggcctggacgcagtaattgagttcggcatcgatgatagtctgctggtgcgtcgtattaccggacgcctgatccatcaggcaagcggacggtcttaccatgaggaatttgcgccacccaaggtgcctatgcgcgacgacgaaacgggagagcctttgatgcgccgcagtgatgacaacgcgcaggcactggtgaaacgtcttgaatcgtatcaccgacaaaccaagcctctggccgattactatgcgttgcgaggattgcatttccgcgtggatgccgcaaaaagtgcatcggacgtgtttgctaatatcgacagcatctttaccaaacagcgtgctcatcgattaggattctaa

SEQ ID NO: 85889 - protein, 240 aa, Anopheles gambiae str. PEST
MAPNAAELKVKPASDSTGINAILLGPPGSGKGTQAPLLKEKYCVCHLSTGDMLRAEIASGSKLGAQLKKVMDEGKLVSDELVVDMIDSNLDKPECRNGFLLDGFPRTVVQAEKLDNLLEKRNTGLDAVIEFGIDDSLLVRRITGRLIHQASGRSYHEEFAPPKVPMRDDETGEPLMRRSDDNAQALVKRLESYHRQTKPLADYYALRGLHFRVDAAKSASDVFANIDSIFTKQRAHRLGF

SEQ ID NO: 85890 - DNA, 594 bp, Anopheles gambiae str. PEST
  CDS (1)..(594)
atgcgtgaagccaacgtaccgatcatctgggtcctgggtggcccgggctgtggcaagggtacgcagtgtgcgaagatcgtcgccaagtacaacttctcgcacttcagcaccggcgatctgctgcgcgatgaggtcgcgtccggctcggacaagggcaaggagctgcaggacatgatgcggcagggcattctggtgccgaacgagacggtgctgaagctgctggaggctgccatggtgaaggcgctgaacggtaccgtcggctatctgatcgatggctatccacgtgaacctgcccagggaccggagtttgagaagtttatcgcgccggtcgacatcatcctgtactttgagtgctcgaatgaaacgctggtggcacgtatcatgaagcgagcggctgagtcgtcaacggttcgtgcggacgataacgaggaaacactgaagactcgtatcgccaccttccgggagaacacggaaaaaattctggtccagtatcccacccagctgaggaggatcaacgccgagcgtgcgccggaagaaatctttgccgatgtggagaagtcgatcgatgagctgcttgcagcgaagaagaagtaa

SEQ ID NO: 85891 - protein, 197 aa, Anopheles gambiae str. PEST
MREANVPIIWVLGGPGCGKGTQCAKIVAKYNFSHFSTGDLLRDEVASGSDKGKELQDMMRQGILVPNETVLKLLEAAMVKALNGTVGYLIDGYPREPAQGPEFEKFIAPVDIILYFECSNETLVARIMKRAAESSTVRADDNEETLKTRIATFRENTEKILVQYPTQLRRINAERAPEEIFADVEKSIDELLAAKKK

SEQ ID NO: 85892 - DNA, 651 bp, Anopheles gambiae str. PEST
  CDS (1)..(651)
atggccagtggaaagttgtttcgtgccataattatgggagcccccggatcgggcaaggggaccgtttctggccgcatcgtgaaagcgttcagcctgaaacacatcagcagtggcgatttgcttcgagcgaacatcgaaaagcgcacggaactgggcctgatcgcggacaagtacatccgggaaggcaaactggtgccggacatttacataacgaagtgcatcctgagcgagctcgaacaaatacgctcccactcgtggctgttggacggtttcccccgtacgcgcgaacaggcggacgatctgtggaatcaggagcgcatcgattcggtaatcaatttggacgtgccgtttgaggtgatcatcgaacgtatccagagccgctgggtgcatctgcctagcggccgggtgtacaatgtcgggtttaacgatccgaagacaccgggccgggacgatgttaccggcgagccgctaagccaacggccggacgatactccggtggcggtgcggaagcggctcgaggtgtacgatgcgtgcacgcggcccatcaacgagtacttcgacaagaagggcgtgctggtgacgtttaagggtagcacaacggacgaaatttggccacatgtgaggaaatatcttgaggcaaagatacagtga

SEQ ID NO: 85893 - protein, 216 aa, Anopheles gambiae str. PEST
MASGKLFRAIIMGAPGSGKGTVSGRIVKAFSLKHISSGDLLRANIEKRTELGLIADKYIREGKLVPDIYITKCILSELEQIRSHSWLLDGFPRTREQADDLWNQERIDSVINLDVPFEVIIERIQSRWVHLPSGRVYNVGFNDPKTPGRDDVTGEPLSQRPDDTPVAVRKRLEVYDACTRPINEYFDKKGVLVTFKGSTTDEIWPHVRKYLEAKIQ

SEQ ID NO: 85894 - DNA, 831 bp, Magnaporthe grisea 70-15
  CDS (1)..(831)
atgggtgccatggaagatcaattgcagcgcctcggcagcgtcctcgactctctcgatgctcgcgttaagaagctcgagcaacatcctaccctgggcggcggctccagcacggcgcaagagattcgcatgatcctgataggtcctcctggtgccggcaagggcacccaggctcccaagatcaaggaaaagttcagctgctgtcatctggccaccggtgacatgctccgctctcaagtcgccaagaagactcccctcggccgcgaggccaagaagatcatggaccaaggtggtctggttagcgacgacatcgttattggcatgatcaaggaagagctggacaccaacgtcgagtgcaagggaggattcatcctcgatggcttccccaggaccgtgccacaagcccagtccctcgacgccatgttgcaggcgcgcaaccagaagctccagcatgctgtcgagctgcagatcgacgacgccctgcttgtcgcccgcattactggccgccttgtgcacccggcctcgggccgctcttaccataccaccttcaaccctcccaagaaggccatgactgacgacgtgactggcgagccgctgatccagcgctccgacgacaacgccgatgcgctcaagaagcgcctcgcaacctaccactcccagactgcccccgtcgtcgactactaccgcaagactggcatctggaagcccatcgatgcctcccaggagcccggtaccgtctggaaaagcctgctcaacatctttgacggcgacgccaagaaggccagctccgcaggcggtggcatccttgacaaacttgccgcctcgggccgttaa

SEQ ID NO: 85895 - protein, 276 aa, Magnaporthe grisea 70-15
MGAMEDQLQRLGSVLDSLDARVKKLEQHPTLGGGSSTAQEIRMILIGPPGAGKGTQAPKIKEKFSCCHLATGDMLRSQVAKKTPLGREAKKIMDQGGLVSDDIVIGMIKEELDTNVECKGGFILDGFPRTVPQAQSLDAMLQARNQKLQHAVELQIDDALLVARITGRLVHPASGRSYHTTFNPPKKAMTDDVTGEPLIQRSDDNADALKKRLATYHSQTAPVVDYYRKTGIWKPIDASQEPGTVWKSLLNIFDGDAKKASSAGGGILDKLAASGR

SEQ ID NO: 85896 - DNA, 777 bp, Gibberella zeae PH-1
  CDS (1)..(777)
atgggtttcatcgaggacgagctcaagcagcttaaggatgtcatcagcaccatcgacacgcgcattaagaagctcgaggcgcgagccaccggcggtcctgtctctaccgacgagatccgaatgattctcatcggtcctcctggtgctggcaagggtactcaggcccccaaaatcaaggagcgcttctcgtgctgccatctggctactggtgacatgctgcgatctcaggtcactaagaagacccctctcggtgttgaggccaagaagatcatggatgcgggcggtctggtcagcgacgagatcatgattggcatgatcaaggaggagctcaacaacaacaaggagtgccagggcggcttcattctcgacggtttcccccgaactgtcccccaggccgagggtctcgatgccatgctcgcagagcgcaagcagaagctccagcacgccgtcgagctccagatcgacgactctctgcttgttgcccgtattactggccgattagtccaccccgcttccggccgctcataccacaccacctttaaccctcccaaggagtacatgaaggatgacattactggcgagcctcttatccagcgaagtgacgacaatgccgatgctctcaagaagcgccttgttacctaccacaagcagaccaagcctgttgtgggctattaccaaaagaccggtatctggagcggcctcgacgccagccaagaacctggtcaagtgtggaagaacatgctcaaggttcttaacgagaagcgaggacagaactag

SEQ ID NO: 85897 - protein, 258 aa, Gibberella zeae PH-1
MGFIEDELKQLKDVISTIDTRIKKLEARATGGPVSTDEIRMILIGPPGAGKGTQAPKIKERFSCCHLATGDMLRSQVTKKTPLGVEAKKIMDAGGLVSDEIMIGMIKEELNNNKECQGGFILDGFPRTVPQAEGLDAMLAERKQKLQHAVELQIDDSLLVARITGRLVHPASGRSYHTTFNPPKEYMKDDITGEPLIQRSDDNADALKKRLVTYHKQTKPVVGYYQKTGIWSGLDASQEPGQVWKNMLKVLNEKRGQN

SEQ ID NO: 85898 - DNA, 669 bp, Candida glabrata CBS 138
  CDS (1)..(669)
atgtctagctccgactctatcagaatggtcttgattggcccaccaggtgccggtaaaggtacccaagccccaaacttggttgaaagattccatgctgctcacttggccactggtgacatgttgagatcccaaatctccaagggtaccgagctgggtctacaagccaagaagattatggaccaaggtggtttggtctccgacgacatcatggttaacatgatcaaggatgagttgaccaacaaccctgcctgcaagaacggtttcatcctagacggtttcccaagaaccatcccacaagccgaaaagctagataacatgttgaaggaaagaggtactccactagagaaggccgtcgaattgaagatcgacgacgagctattggtcgccagaatcaccggtagattgatccacccagcctccggtagatcttaccacaagttgttcaaccctccaaaggaagacatgaaggacgacgtcaccggtgaaccactggtccaaagatccgacgataacgaagatgctttgaagaagagactaggtgcctaccacgaccaaactgaaccaattgtcgatttctacaagaagaccggtatctgggccgacgtcgacgcttctcaaccaccagagaccgtctggtctgctatcctaaaggctctaggtaagaactag

SEQ ID NO: 85899 - protein, 222 aa, Candida glabrata CBS 138
MSSSDSIRMVLIGPPGAGKGTQAPNLVERFHAAHLATGDMLRSQISKGTELGLQAKKIMDQGGLVSDDIMVNMIKDELTNNPACKNGFILDGFPRTIPQAEKLDNMLKERGTPLEKAVELKIDDELLVARITGRLIHPASGRSYHKLFNPPKEDMKDDVTGEPLVQRSDDNEDALKKRLGAYHDQTEPIVDFYKKTGIWADVDASQPPETVWSAILKALGKN

SEQ ID NO: 85900 - DNA, 756 bp, Candida glabrata CBS 138
  CDS (1)..(756)
atgagtttgcgactagccaggcctttgcggttattgttactgggggcacctgggtctgggaaaggaacacagacctctaagcttctgaaggtgttacctgagcttaagagtgtttcttcgggggatatcctgagacatgagttgaagtcaggcaccgagcttggtgtgttggcggccaagtacattgcgcaggggaagttgattccggacaaggtcatcacacaggtgctcatagcgcacttgtctaaggagaagtggctgaacccgcagtcatcgtggcttctggacgggtttccaagaactgagagacaggctttctctttagatagtacattgggggaaaacaacgcaaagctaaatttggttgtagagctagatgtccccgaggaggttatcctagagagaatcgataacagatatatccatgtgggtagtggaagggtctacaacttgcagtacaacccacctaaagttgccggtaaggatgatgttactggcgagccactggtgaaaagatcagatgataacgtccaggtattcaagaagaggatgaaagagtacaagaaaactctcggcccgatcaaggaacattacgccaagcagggtatactggcaaccatatctggggatacttcagacatcattttcccaaagctgtgtgccctgatcaaccagcattttggtgctaaggaacaacaactgcatcacgaagcctttgaatcaaagaaggaacagaaaatccagccaagattatga

SEQ ID NO: 85901 - protein, 251 aa, Candida glabrata CBS 138
MSLRLARPLRLLLLGAPGSGKGTQTSKLLKVLPELKSVSSGDILRHELKSGTELGVLAAKYIAQGKLIPDKVITQVLIAHLSKEKWLNPQSSWLLDGFPRTERQAFSLDSTLGENNAKLNLVVELDVPEEVILERIDNRYIHVGSGRVYNLQYNPPKVAGKDDVTGEPLVKRSDDNVQVFKKRMKEYKKTLGPIKEHYAKQGILATISGDTSDIIFPKLCALINQHFGAKEQQLHHEAFESKKEQKIQPRL

SEQ ID NO: 85902 - DNA, 684 bp, Kluyveromyces lactis NRRL Y-1140
  CDS (1)..(684)
atgtcagttctcagaccattaagattgttactactgggtgcacccggttctggtaaaggtactcagacctcgaaactgttgaaagaattcggatccatcaaggctatctcatctggagatttgctacgtaaacagattgaacatggcacaccgttaggtttaagtgcctcctcgtatattgagaaaggccagttgttacccgatgatttgatcaccggagttgtgtgtgacgaattgaagtcacgtggctggttaaatccaaatgctacttggttactagatgggttcccacgtaccgtgggtcaagctgaagtgttagacaagtcattgttggaacacgatgcctcattaaaccttgtcgtggagctagacgtgcctcatgaagtgatcttggagagaatcgaaaaccgttacgttcacgttccaagtggaagagtttataatttgcaatataaccctcccaaagtcgacggaaaggacgatatcaccggtgaacctttgaccaagagacccgacgatactgcagaggtgtttggcaagaggctagaacagtacaacaagacagtgaccccattgaaggaacattacttgaagcaaggtattctgtcaaccatttccggtaacactagtgacattatatacccgaaactagtatcgctaatcctacaaaaattcgcaaactaa

SEQ ID NO: 85903 - protein, 227 aa, Kluyveromyces lactis NRRL Y-1140
MSVLRPLRLLLLGAPGSGKGTQTSKLLKEFGSIKAISSGDLLRKQIEHGTPLGLSASSYIEKGQLLPDDLITGVVCDELKSRGWLNPNATWLLDGFPRTVGQAEVLDKSLLEHDASLNLVVELDVPHEVILERIENRYVHVPSGRVYNLQYNPPKVDGKDDITGEPLTKRPDDTAEVFGKRLEQYNKTVTPLKEHYLKQGILSTISGNTSDIIYPKLVSLILQKFAN

SEQ ID NO: 85904 - DNA, 684 bp, Kluyveromyces lactis NRRL Y-1140
  CDS (1)..(684)
atgtcccaagatttgtcccatgttccagaatccatcagaatggtcttgattggcccaccaggtgctggtaagggtacccaggctcctaacttgaccgaaagattctgtgcttgtcatttggctaccggtgacatgttaagatctcaagtcgccaagcaaactccattgggtattgaagccaagaagattatggacgatggtaagttggtctctgacgaaatcatgattaacatgattaaggatgagttgactaacaaccaagactgtaagaagggtttcatcttggacgggttcccaagaaccatcccacaagctgagaaattggatgaaatgttggctcaacaaggtagaccattggaaaaagccgttgaattgaagatcgatgatgaattgttggttagcagaattactggtagattggttcatccagcttctggtagatcttaccacaaggtcttcaaccctccaaagactgaaatgaaggacgatatcaccggtgaagatttggtccaaagatctgatgacaacgtcgaagcattgaagaagagattgacttcttaccacaagcaaaccgaaccaattgtcgatttctacaagaaaactggtatctgggctggtgtcgacgcttcccaacctccaaagaccgtctggtctgatatcttgaagtgtttgggtaagaactaa

SEQ ID NO: 85905 - protein, 227 aa, Kluyveromyces lactis NRRL Y-1140
MSQDLSHVPESIRMVLIGPPGAGKGTQAPNLTERFCACHLATGDMLRSQVAKQTPLGIEAKKIMDDGKLVSDEIMINMIKDELTNNQDCKKGFILDGFPRTIPQAEKLDEMLAQQGRPLEKAVELKIDDELLVSRITGRLVHPASGRSYHKVFNPPKTEMKDDITGEDLVQRSDDNVEALKKRLTSYHKQTEPIVDFYKKTGIWAGVDASQPPKTVWSDILKCLGKN

SEQ ID NO: 85906 - DNA, 750 bp, Debaryomyces hansenii CBS767
  CDS (1)..(750)
atgtctgtcgaagatttaaaagctactgtcactaagttacaagatagaatttcatatttggaacaaaaagccggcgttgtgccaaatgtgccaaaatcagtcagaatggtcttaattggacctccaggagctggtaagggtacccaagctccaaacttgaaggaaaagtactgtgcttgtcacttagctactggtgatatgttgagagcacaagttgctgctaagtcggcattgggtgttgaagctaagaagattatggatcaaggtggattagtttctgacgaaatcatggttaacatgatcaagtctgaattagaaaacaacaaggaatgttctaacggtttcattttggatggattcccaagaactatcccacaagccgaaaaattggactctatgttggaaaccagaaagactccattagaaaacgctgttgaattaaagatcgatgatgaattattggttgctagaatcactggtagattagtccacccagcatcaggtagatcataccacaagttattcaacccaccaaagaaagacatgatcgacgatgtttctggtgacgcgttagttcaaagatccgacgataacgaagatgctttgaagaagagattagttacctaccataagcaaaccgaaccaattgtcgattactacagaaagaccggtatttggtctggtgtcgatgcttcccaaaaaccaggtaaggtttgggatgacatcttaaaatgcttaggtcaaaaataa

SEQ ID NO: 85907 - protein, 249 aa, Debaryomyces hansenii CBS767
MSVEDLKATVTKLQDRISYLEQKAGVVPNVPKSVRMVLIGPPGAGKGTQAPNLKEKYCACHLATGDMLRAQVAAKSALGVEAKKIMDQGGLVSDEIMVNMIKSELENNKECSNGFILDGFPRTIPQAEKLDSMLETRKTPLENAVELKIDDELLVARITGRLVHPASGRSYHKLFNPPKKDMIDDVSGDALVQRSDDNEDALKKRLVTYHKQTEPIVDYYRKTGIWSGVDASQKPGKVWDDILKCLGQK

SEQ ID NO: 85908 - DNA, 684 bp, Debaryomyces hansenii CBS767
  CDS (1)..(684)
atgcctctcgttaaaccgcctagattgttattgttaggagcaccaggatccgggaaaggtactcaaacaactaagttattgctccagtttccaaaaataaactcattatcatctggagatattttgagaaatcagataaactcgggcactagtattggcctcgaggcatctaagtatatcaaaaatggtaaattagttccagatacaacgatggtgagattaattaccaaacagttacacgagatggattggttagacaaaaaagctgcttggttattagatggatttccccgtacgtcaaaccaggctgttgcattagacaacacgttgcatacaaataattccaatataaacatggttgttgaattggatgtggatcaaaaggtcattttggaaagaatagaggctaggtgggtgcatgttcccagtggtagagtttataatttagactacaatccaccaagggtgcctttcaaagatgatatcacaggtgagccattatcaaaacgtgaagatgacacagcagaagtgtttcaaaaaagattagatcaatataataaggagattggttcattgaaggatttctacaataataaagatgtcttgtacaaagttagcggttctacatctgatgtcatattccctaagttgtctaatttgatattgcaaaactttggggtctaa

SEQ ID NO: 85909 - protein, 227 aa, Debaryomyces hansenii CBS767
MPLVKPPRLLLLGAPGSGKGTQTTKLLLQFPKINSLSSGDILRNQINSGTSIGLEASKYIKNGKLVPDTTMVRLITKQLHEMDWLDKKAAWLLDGFPRTSNQAVALDNTLHTNNSNINMVVELDVDQKVILERIEARWVHVPSGRVYNLDYNPPRVPFKDDITGEPLSKREDDTAEVFQKRLDQYNKEIGSLKDFYNNKDVLYKVSGSTSDVIFPKLSNLILQNFGV

SEQ ID NO: 85910 - DNA, 687 bp, Yarrowia lipolytica CLIB122
  CDS (1)..(687)
atgaccactgcactgacccgatccgcacgactgctgcttgtgggcgctcccggcgctggcaagggcacactcactgaccgtctgctcaccaacttctctggtttggaagcaatctctaccggtgatttgctgcgacgagagatcaagaacgagagcaagattggcgttgctgctcgatccatcattaaggccggagggctggtccccgacaacacaatcagccagctgctgcagaccgagctggagaccaagggctggctcaatgctgacagctcatggatcctcgacggcttccctcggaaccgagcccaggccgaggtgctggacgagatgctgctgccccacaaggccaacctgtcccatgtcgtgcagctggacgtgcccgaggaagtgattctggaccgaatcgagaaccgatgggtgcatcttgcctctggccgaatctacaacctcaccttcaaccctcccaaggtggctggcaaggacgacgtgactggagaacccctgtctaagcgagaggacgacaagcccgaggtgttcaagaagcgacttgtggcatacaaacaagagactgagccattgttcgagttctacgagaagcgaggcgtcctggtgactctcaagggagagacctccaacattatttggcccaagctcgagcagctcatcaagactgagtactgttaa

SEQ ID NO: 85911 - protein, 228 aa, Yarrowia lipolytica CLIB122
MTTALTRSARLLLVGAPGAGKGTLTDRLLTNFSGLEAISTGDLLRREIKNESKIGVAARSIIKAGGLVPDNTISQLLQTELETKGWLNADSSWILDGFPRNRAQAEVLDEMLLPHKANLSHVVQLDVPEEVILDRIENRWVHLASGRIYNLTFNPPKVAGKDDVTGEPLSKREDDKPEVFKKRLVAYKQETEPLFEFYEKRGVLVTLKGETSNIIWPKLEQLIKTEYC

SEQ ID NO: 85912 - DNA, 759 bp, Apis mellifera
  CDS (1)..(759)
atggctccgcgtgtagaaacaatatcaaaagaaattttagaatttccaaaagatataccgaaaaatggaattaatgcagttttattaggaccacctggtagtggtaagggtacacaggcaccattattgaaagaacgttattgtgtatgtcatctatctacaggcgatatgcttagagcagaaattaattctggatctgctcttggagcagaaattaaaaaaataattgatgagggtaaattagtcagtgatgatcttgtagttaatatgattgatcataatttaaacaaacctgaatgtaaacgtggttttttgttggatggttttcctagaagtgttccgcaagctgaaaaacttgatcaaatgttaaaaaagagacaaactaaattagatgctgtgatagagtttggaattgatgataatttgttaataaaaagaatcacaggtcgtttaattcatcctacaagtggtagatcataccatgaagaatttgctcctcctaaagaatatatgaaagatgatattactggagaaccattaattagaagatctgatgataatgtagaagcattgaagaaacgattatgcacatatcatacagaaactgaacctttgattgattattatgctttacaagggattcactattacgttaatgcagctcgatctagtaaagatgtttttaaagatattgattgcattttcctaaaagcaactaaacaacaggaaaaaaaaggtttctttagtcggttcttttaa

SEQ ID NO: 85913 - protein, 252 aa, Apis mellifera
MAPRVETISKEILEFPKDIPKNGINAVLLGPPGSGKGTQAPLLKERYCVCHLSTGDMLRAEINSGSALGAEIKKIIDEGKLVSDDLVVNMIDHNLNKPECKRGFLLDGFPRSVPQAEKLDQMLKKRQTKLDAVIEFGIDDNLLIKRITGRLIHPTSGRSYHEEFAPPKEYMKDDITGEPLIRRSDDNVEALKKRLCTYHTETEPLIDYYALQGIHYYVNAARSSKDVFKDIDCIFLKATKQQEKKGFFSRFF

SEQ ID NO: 85914 - DNA, 675 bp, Apis mellifera
  CDS (1)..(675)
atggtagcactatccacgtggtgtgccaaggctgcggctttcagggccgtgatattaggtgcccctgcttctggtaagggcaccatgtcagctagaattgttgaacaatttaaattaactcatatatcaagtggcgataagttaagacttcatatgaataataaaactgaattgggcaaagcagtctcgaattatgtactttccggtaaattcgttcctgatgatataatgatttcaatgataaacgaagaaatcaaagcggttgggaaacaaaattggttattagacggatttccaagaacgttaacgcaagcggaaaagctacaaaaaatacatccaattaatttggttctttatctggatgttcccttcgaagtgatattgaatcgtgtgaaaaacagatgggttcatttgcccagtggaagggtatataatattggattcaacagtcccaaagtaccgggtaaagatgatgtgactggcgaacctttaagcaaaagggacgatgataaaatcgaaattgtagaaaaaagactacaagaatattcaaatgcgactaaaccaattttaacattttatagtaatttaggattgttaaatacttttcaaggtaatactaccgatgaaatatggccgaatattaagaaagtcgtcgcaaaatttttgttacaatag

SEQ ID NO: 85915 - protein, 224 aa, Apis mellifera
MVALSTWCAKAAAFRAVILGAPASGKGTMSARIVEQFKLTHISSGDKLRLHMNNKTELGKAVSNYVLSGKFVPDDIMISMINEEIKAVGKQNWLLDGFPRTLTQAEKLQKIHPINLVLYLDVPFEVILNRVKNRWVHLPSGRVYNIGFNSPKVPGKDDVTGEPLSKRDDDKIEIVEKRLQEYSNATKPILTFYSNLGLLNTFQGNTTDEIWPNIKKVVAKFLLQ

SEQ ID NO: 85916 - DNA, 711 bp, Aspergillus nidulans FGSC A4
  CDS (1)..(711)
atgaccctcacaaccaggcagctcaagaaagctgcacggatcatcctcatcggcgctccgggggtggggaagggaacgcaaacggagaggctcctgtccaaatttcctgaacttgcttctataagctcaggcgacctcttgcgagagaatgtccggaggaggacagcactcgggcgggaagcagaagccacaattcaagcaggaaacctcgttcccgactccatgattctcaacctcatctcttccgaatttaactccagaggctggctctccaaatcacaatcatcaggctcgtctgtttccccctcagcgtccttcatcttagacgggtttcctcgcaccgcctcccaggccgcgagcttggactccctggtccccatcaactttgtcgtccacttagtcactccaccctctattattctctcccggatagcgtcgcgctgggtccacgagccgtctggaagggtgtacaataccgatttcaatgctccaaaggtccccggaaaggacgacgtaacaggagaaccattgactcagagggaagacgattcaatagagacatggaaacaacgactacataaattcgaagaaacaagcaaagctctacttcaacactatcaacaaaagggctgtctttggcgcgtggaaggcaactccagtgacgagatcactccgaagcttctagcggagtttgagcggaaattctgctag

SEQ ID NO: 85917 - protein, 236 aa, Aspergillus nidulans FGSC A4
MTLTTRQLKKAARIILIGAPGVGKGTQTERLLSKFPELASISSGDLLRENVRRRTALGREAEATIQAGNLVPDSMILNLISSEFNSRGWLSKSQSSGSSVSPSASFILDGFPRTASQAASLDSLVPINFVVHLVTPPSIILSRIASRWVHEPSGRVYNTDFNAPKVPGKDDVTGEPLTQREDDSIETWKQRLHKFEETSKALLQHYQQKGCLWRVEGNSSDEITPKLLAEFERKFC

SEQ ID NO: 85918 - DNA, 780 bp, Aspergillus nidulans FGSC A4
  CDS (1)..(780)
atggctcccatcacagatgacgtggtcgctggactcaagtccacgatcggtaagctcgaagctcgcattgaggacttggaaagccgcctcggcggtgaacccaagcccaagtctatcgcggagcacatgcgaatcattcttatgggacctcctggtgccggcaagggtacgcaggcacctaagatcaaggagaagtactgcgtgtgccacctggctactggtgacatgctgcgatcccaggtcgcgaagaagaccgacctcggaagggaggctaagaagatcatggatcagggtggtctggtcagcgatgagatcatggttaacatgatcaagagtgaattggagaacaacgcagagtgcaagaacggtttcattctggacggtttccctcgcactgtcgcccaggctgagcgcctcgacgagatgctggttgctcgcaaccagaagcttcagcatgccatcgagcttaagattgacgatgccctcctggttgcccgtatcaccggtcgtctcgtccacccggcttccggccgttcataccacaagatctttaaccctcccaaggaggccatgaaggatgacatcaccggcgagccccttgtccagcgctccgatgacaatgctgaggctctcaagaagcgtctggtcacatatcacgcccagactgcccctgtttgcgattattacaagaagactggtatctggaggggtatcgacgccagccaagagcctggtcaggtctggaagagccttctcggtgtcttcaacaataagaactaa

SEQ ID NO: 85919 - protein, 259 aa, Aspergillus nidulans FGSC A4
MAPITDDVVAGLKSTIGKLEARIEDLESRLGGEPKPKSIAEHMRIILMGPPGAGKGTQAPKIKEKYCVCHLATGDMLRSQVAKKTDLGREAKKIMDQGGLVSDEIMVNMIKSELENNAECKNGFILDGFPRTVAQAERLDEMLVARNQKLQHAIELKIDDALLVARITGRLVHPASGRSYHKIFNPPKEAMKDDITGEPLVQRSDDNAEALKKRLVTYHAQTAPVCDYYKKTGIWRGIDASQEPGQVWKSLLGVFNNKN

SEQ ID NO: 85920 - DNA, 750 bp, Candida albicans SC5314
  CDS (1)..(750): transl_table=12
atgtcaattgaagatttaaaaaacaccgttaccaaattacaagaaagaatccaagaattggaaaaaaaagctggtattattcctgatgttccaaaatcagttcgtatggttttgatcggtcctccaggtgccgggaaaggtactcaagccccaaatttgaaggaaaaattctgtgcttgtcatttagccactggtgatatgttaagagcacaagttgctgctaaaaccgctttaggtgttgaagcaaagaaaatcatggaccaaggtggtttagtgtctgatgaaattatggtcaacatgatcaaatcagaattggaaaacaaccaagaatgttccaaaggtttcattttggatgggttcccaagaactattcctcaagctgaaaaattggactctatgttggaaagcagaaagactccattggaaaaagctgttgaattgaagatcgatgatgaattattggttgctagaatcaccggtagattggttcacccagcttctggtagatcttaccataaacttttcaacccaccaaagaaagatatgacagatgatgtcactggtgaaccattagttcaaagatccgatgacaacgaagatgccttgaaaaagagattggtcacctaccacaaacaaactgagccaattgttgcatactaccaaaagactggtatctggagtggtgttgatgcttctcaaaaaccaactaaagtttggtctgacattttgaaatgtttaggtcaaaactaa

SEQ ID NO: 85921 - protein, 249 aa, Candida albicans SC5314
MSIEDLKNTVTKLQERIQELEKKAGIIPDVPKSVRMVLIGPPGAGKGTQAPNLKEKFCACHLATGDMLRAQVAAKTALGVEAKKIMDQGGLVSDEIMVNMIKSELENNQECSKGFILDGFPRTIPQAEKLDSMLESRKTPLEKAVELKIDDELLVARITGRLVHPASGRSYHKLFNPPKKDMTDDVTGEPLVQRSDDNEDALKKRLVTYHKQTEPIVAYYQKTGIWSGVDASQKPTKVWSDILKCLGQN

SEQ ID NO: 85922 - DNA, 750 bp, Candida albicans SC5314
  CDS (1)..(750): transl_table=12
atgtcaattgaagatttaaaaaacaccgttaccaaattacaagaaagaatccaagaattggaaaaaaaagctggtattattcctgatgttccaaaatcagttcgtatggttttgatcggtcctccaggttccgggaaaggtactcaagccccaaatttgaaggaaaaattctgtgcttgtcatttagccactggtgatatgttaagagcacaagttgctgctaaaaccgctttaggtgttgaagcaaagaaaatcatggaccaaggtggtttagtgtctgatgaaatcatggtcaacatgatcaaatcagaattggaaaacaaccaagaatgttccaaaggtttcattttggatgggttcccaagaactattcctcaagctgaaaaattggactctatgttggaaagcagaaagaccccattggaaaaagctgttgaattgaagatcgatgatgaattattggttgctagaattaccggtagattggttcacccagcttctggtagatcttaccataaacttttcaacccaccaaagaaagatatgacagatgatgtcactggtgaaccattagttcaaagatccgatgacaacgaagatgccttgaaaaagagattggtcacctaccacaaacaaactgagccaattgttgcatactaccaaaagactggtatctggagtggtgttgatgcttctcaaaaaccaactaaagtttggtctgacattttgaaatgtttaggtcaaaactaa

SEQ ID NO: 85923 - protein, 249 aa, Candida albicans SC5314
MSIEDLKNTVTKLQERIQELEKKAGIIPDVPKSVRMVLIGPPGSGKGTQAPNLKEKFCACHLATGDMLRAQVAAKTALGVEAKKIMDQGGLVSDEIMVNMIKSELENNQECSKGFILDGFPRTIPQAEKLDSMLESRKTPLEKAVELKIDDELLVARITGRLVHPASGRSYHKLFNPPKKDMTDDVTGEPLVQRSDDNEDALKKRLVTYHKQTEPIVAYYQKTGIWSGVDASQKPTKVWSDILKCLGQN

SEQ ID NO: 85924 - DNA, 750 bp, Strongylocentrotus purpuratus
  CDS (1)..(750)
atggctgccgcaatcaagagtcaggatccagttatgcaggagccagaggaagagggagtaccgcaagggatctgtggagtactccttggtccaccaggagctggaaaaggagtccaggcacccaagcttgcagagaagtactgcgtatgtcaccttgcaacgggtgacatgctgagggcggtcatcgcctcaggctcggacctcggtaagaagctgaaggtggtgttggacagcggtaagctggtcagcgatgagctggtggtggagatgattgataacaagctgggtgcacctgagtgcaagaatggcttccttctagatggcttcccaaggaccgttgtccaggctgagaagctggacgaacttctcacaaagaggaagactgccctggactcagtagtcgagttcggcattgacgattcacttcttgtgaaacgaatcaccggacggctgatccacaagcccagtgggaggtcttatcacacagaattcagccctccaaagaagcctatgactgatgatgtaactggtgagccactgatcaaacgatcagacgacaacgaggtaacgttgaaaacacgccttgaagcctaccacaagcagactgcacctctcgttgattattactccaaacgagggatccatcaacgggtagatgctgctagagcacccgacgcagtcttcgcaagcatccagtccatttttgctaaagcacagactggaagaaaagataaagttgtattcatttga

SEQ ID NO: 85925 - protein, 249 aa, Strongylocentrotus purpuratus
MAAAIKSQDPVMQEPEEEGVPQGICGVLLGPPGAGKGVQAPKLAEKYCVCHLATGDMLRAVIASGSDLGKKLKVVLDSGKLVSDELVVEMIDNKLGAPECKNGFLLDGFPRTVVQAEKLDELLTKRKTALDSVVEFGIDDSLLVKRITGRLIHKPSGRSYHTEFSPPKKPMTDDVTGEPLIKRSDDNEVTLKTRLEAYHKQTAPLVDYYSKRGIHQRVDAARAPDAVFASIQSIFAKAQTGRKDKVVFI

SEQ ID NO: 85926 - DNA, 669 bp, Candida albicans SC5314
  CDS (1)..(669): transl_table=12
atgaacccgcttcgaattctactcttgggtgcaccaggctcaggcaagggcacacagacgtcgaggttgttaaagcggtttacccaattacaatcgttgtcttctggtgatatcttgcgaaaccaaatacgtctggggtcagcaattggcggggaagcacagacgtatataaaaaatgggtcgttggtccctgacaatataatggttggtcttattactgcagagttggaaaagaaaaagtggttaacccaaagttctagctggttattggatgggtttcctaggactgtcaaccaagcaagggagttggatcgtgtgattcacgatcgtgctaattttaatttggtggttgagttggatgttgaccagaaagttattttacagcgaattgaggccagatggatccatgaggctagtgggagagtgtacaatttagactataacccgccaaaagtgccattcaaagatgacgttacgggcgaggcattgaccaaacgccaagacgatactgcacaagtgtttcaaaaacggttggaccagtataatgaggagattgagcctctcaaagtgttttacaagcagcaagggttgttgtatacagttagtggcgacacttctgatataatctaccccaagttggagaatttaatagtagataaaattatgtag

SEQ ID NO: 85927 - protein, 222 aa, Candida albicans SC5314
MNPLRILLLGAPGSGKGTQTSRLLKRFTQLQSLSSGDILRNQIRSGSAIGGEAQTYIKNGSLVPDNIMVGLITAELEKKKWLTQSSSWLLDGFPRTVNQARELDRVIHDRANFNLVVELDVDQKVILQRIEARWIHEASGRVYNLDYNPPKVPFKDDVTGEALTKRQDDTAQVFQKRLDQYNEEIEPLKVFYKQQGLLYTVSGDTSDIIYPKLENLIVDKIM

SEQ ID NO: 85928 - DNA, 639 bp, Tribolium castaneum
  CDS (1)..(639)
atggtaagcagtttgctccgagctggtagaagtctcctgaacatggctaaacccaaagtgatttttgttttgggggctccaggtgcgggaaaggggacgcagtgccagaaaattgtcgataattttgggtacgtccatttatcagcgggcgatttgttacgggaggagagggcgaagcccgactccaagtatggagagctcattgagacctatattcgggagggtaaaatagttccggtggagatcacgtgtagtctcctcgaaaatgcgatgaaaaagtctgggaaagagaagttcctgattgatggatttccccgaaaccaaaataatctagacggttggaataaaaccctcgccgataatgtgaaattgttgtttgttttattcttcgattgtccgaaggaggtttgtgttgacaggtgtttgggacgtggcgctgcgggcagtggccgctctgatgataatatgcaaagtttagaaaaacggtttaatacttttactcaagaaactcaacctattgttaaatattacgaggagagaggattggttagaaacatcgacgctactaaggcccctgaggacgttttcgggcgggttaaggaggtgttcactgaagtcgaagcaggcggcgacttttaa

SEQ ID NO: 85929 - protein, 212 aa, Tribolium castaneum
MVSSLLRAGRSLLNMAKPKVIFVLGAPGAGKGTQCQKIVDNFGYVHLSAGDLLREERAKPDSKYGELIETYIREGKIVPVEITCSLLENAMKKSGKEKFLIDGFPRNQNNLDGWNKTLADNVKLLFVLFFDCPKEVCVDRCLGRGAAGSGRSDDNMQSLEKRFNTFTQETQPIVKYYEERGLVRNIDATKAPEDVFGRVKEVFTEVEAGGDF

SEQ ID NO: 85930 - DNA, 678 bp, Tribolium castaneum
  CDS (1)..(678)
atggcaacaaaactgttcaaatctgtgattttgggcgccccagcgtccggcaaaggcacaatatcctcccgtatcgtgaaaaacttcaacctggagcacatctcaagcggggacaagctaagactgaacatacaaaaccaaacacccgtggggaaagaagtcgcaaagtatctccaatcaggccaattggtacccgacgatttaatgatcaaatttataacaggggagatccaagcagttgggaataaaccgtggctgcttgacggcttcccgaggacagtcacccaagccggtgctctgtggtcggtccagaccctggacgttgtcctgaacctggtggtgcccttcgacgtgatcattgaacgggtcaaagggcgatgggtgcatttgcccagtgggagggtgtacaacacggatttcaacgcgcctaaagtgccaggaaaggatgacgtcacgggagaggatttggtgcaacgggaggacgataagcccgaagttgtgaggaagcggctggagcactacgagaaattaacgaggcctgtggttgactattacagggataagggcgttctacaggagtttcaagggaacacgtctgatgagatctggcccaaggtgctagactgtctcgccacgtacataccgctcaacatcacggcgcagaaatcgaagatttaa

SEQ ID NO: 85931 - protein, 225 aa, Tribolium castaneum
MATKLFKSVILGAPASGKGTISSRIVKNFNLEHISSGDKLRLNIQNQTPVGKEVAKYLQSGQLVPDDLMIKFITGEIQAVGNKPWLLDGFPRTVTQAGALWSVQTLDVVLNLVVPFDVIIERVKGRWVHLPSGRVYNTDFNAPKVPGKDDVTGEDLVQREDDKPEVVRKRLEHYEKLTRPVVDYYRDKGVLQEFQGNTSDEIWPKVLDCLATYIPLNITAQKSKI

SEQ ID NO: 85932 - DNA, 720 bp, Tribolium castaneum
  CDS (1)..(720)
atgccttcagttgccgtgccaaaaatttcccgggaagagggcccaattggcattaatgccatactattggggcccccaggctcgggtaagggaactcaagcccccaaactgaaagaaaagtattgtgtgtgccacctttcaaccggagacatgctgcgtgctgaaatccagtctggctcagttctcggagccaaactgaagaaaatcatggacgaagggaagctcgtaagcgacgatcttgttgttaacatgatcgatagcaaccttgacaaacccgaatgcaagaacggattcttgctggatgggttcccgcgaaccgtggtgcaggctgaaaagcttgacgatttgctggagaagagggacacgagtttagacgctgtgatagaatttggaatagacgacagtttacttgtgcgccgcattacgggccgattaatccatccaaagagtggccgttcatatcacgaggagttccatccgcccaggaaacccatgacagacgacgttaccggtgagccccttgtgagacgctccgatgacacggcagaggctctgaagaagcgtctccaagcgtatcacacacaaactaggcctcttgtcgattattaccaaattcgggggatccaccaccgcatcgatgcgtccaaagccgccaacgaggtgttcagtaaaatcgacagcattttcatgcgggcacgcaagtcgagaattggattttaa

SEQ ID NO: 85933 - protein, 239 aa, Tribolium castaneum
MPSVAVPKISREEGPIGINAILLGPPGSGKGTQAPKLKEKYCVCHLSTGDMLRAEIQSGSVLGAKLKKIMDEGKLVSDDLVVNMIDSNLDKPECKNGFLLDGFPRTVVQAEKLDDLLEKRDTSLDAVIEFGIDDSLLVRRITGRLIHPKSGRSYHEEFHPPRKPMTDDVTGEPLVRRSDDTAEALKKRLQAYHTQTRPLVDYYQIRGIHHRIDASKAANEVFSKIDSIFMRARKSRIGF

SEQ ID NO: 85934 - DNA, 582 bp, Tribolium castaneum
  CDS (1)..(582)
atggggcacaagaaagttgtgtttgttttggggccgccgggggttggtaaagggacacaatgtcgtaaaatagccagttattacggttttgtacacatttcggccggtgagttgctgaggcgtgagcgacaagtccgcaattcggttcacggcgaactgattgattcttgtataaaagacgggaagatagttccggcagaaatcacttgcaagttgctggaacggcacatggaggagtcgcaacaagaccgttttctcattgacggattcccgcggaatttggaaaatcgcgaaggttggagcaggacaattggggataaagttgaagttatgttcgttttatttattgattgtcctgtggaggtttgtattgagaggtgcctcaatagaggggctgcggctggaagtgggcgttttgacgacacgattgaagttattgaaaaacgggtggccacacaccttaaggagactcaaccaacggttgattattacagagaattgaatttgttgagagtcgtcgatggaaacaagtcagaggatgcggtttttgaggacattaaactaatatttaacgattattaa

SEQ ID NO: 85935 - protein, 193 aa, Tribolium castaneum
MGHKKVVFVLGPPGVGKGTQCRKIASYYGFVHISAGELLRRERQVRNSVHGELIDSCIKDGKIVPAEITCKLLERHMEESQQDRFLIDGFPRNLENREGWSRTIGDKVEVMFVLFIDCPVEVCIERCLNRGAAAGSGRFDDTIEVIEKRVATHLKETQPTVDYYRELNLLRVVDGNKSEDAVFEDIKLIFNDY

SEQ ID NO: 85936 - DNA, 585 bp, Tribolium castaneum
  CDS (1)..(585)
atggcccccacaccggaaatcaaagtccccatcatctgggtgttaggcggtccaggctcgggcaaaggcacccagtgcgagaaaatcgtcgcgaaatatggcttcactcacttatcgtccggcgatttgctgcgaaatgaagtggccagcggctcgccaagaggcaaagaactgacggcgattatggagcgtggagagctggtgccgatggaagtggttctcgatttgctgaaagaggcgattttgaagtgtttgcccagctctaaggggtttctcatcgatgggtatccgagggaaaaggaacaagggatcatgtttgagcagaaaattgcgccggtcaacatcgtcctgttctttgacgcctcggagcaaacgctagtcgataggttgctgggaagagccaaaacttcggggagagtggacgacaatgaggagaccatcaagaagaggttgcacacttttaacacgcataacgaccaagtcgtgcaacagtacacggccaagctcaaaaaaatcaacgctgagcgaggcgcggacgagatcttcaccgaagtacaaacctatctggaccctctggtcaaatag

SEQ ID NO: 85937 - protein, 194 aa, Tribolium castaneum
MAPTPEIKVPIIWVLGGPGSGKGTQCEKIVAKYGFTHLSSGDLLRNEVASGSPRGKELTAIMERGELVPMEVVLDLLKEAILKCLPSSKGFLIDGYPREKEQGIMFEQKIAPVNIVLFFDASEQTLVDRLLGRAKTSGRVDDNEETIKKRLHTFNTHNDQVVQQYTAKLKKINAERGADEIFTEVQTYLDPLVK

SEQ ID NO: 85938 - DNA, 549 bp, Prochlorococcus marinus str. MIT 9515
  CDS (1)..(549): transl_table=11
atgaaaaaacatttactcttcttaggacctcctggagcaggtaaaggcactcaggctgcatacttgagtgaagctaattcttatttgcatttatcaactggagaattattaagaaaagaaattgatctggatacttatttggggaaacaagtaaaagatattatgaacaagggcgaacttgtaagcgaccaattagttttagaaattgtcaataaaaatctgtctaaggataataaaggttggattttagatggctatcctagaaatttgtcacaagttaattctttaaatgaggttttgatgaatataaatcaacctttagagatagtcttttatttagatgtaccagacgaagttttaataaagcgtttacttctgagaggtagaaaagatgataatgaagaaactataaaaacaagattaaaaatatataaggaaactactgaaccattaattgaatattataaaaatctctctttactagaatatataaatgcagatggggatttaaaaacaatttctaatgatataaaacaaaaaatggcttga

SEQ ID NO: 85939 - protein, 182 aa, Prochlorococcus marinus str. MIT 9515
MKKHLLFLGPPGAGKGTQAAYLSEANSYLHLSTGELLRKEIDLDTYLGKQVKDIMNKGELVSDQLVLEIVNKNLSKDNKGWILDGYPRNLSQVNSLNEVLMNINQPLEIVFYLDVPDEVLIKRLLLRGRKDDNEETIKTRLKIYKETTEPLIEYYKNLSLLEYINADGDLKTISNDIKQKMA

SEQ ID NO: 85940 - DNA, 549 bp, Prochlorococcus marinus str. MIT 9303
  CDS (1)..(549): transl_table=11
atgaagcaacgtctcctcttcctaggaccccccggagcaggcaaagggacccaggctgaacgtctctgcgcagcccatgaattaatgcacctatcgacgggcgatctactgcgtgctgaggtcggcgccaaaacaccccttggtcaggaggctgctgctgttatgaaccgaggcgagctggtcagcgatgagttggtgctcgccatcgtcgaaaaccaactcaagaaccaaagtggtggttggctcttggatggttttccacgcaccttgatccaagccacagcactcgaacccttacttgaagaactcaagcaaccaattgaggctgttgtactactggaactcaacgatgcagtgttaattgaacggttaatttcccgaggccgcagtgatgacaacgaaagcgtgattcgtaatcgccttgaggtctaccgcgaaaaaacagccccccttatcgaccattaccgccaacaaggactgctacaaacggtggaagcacagggcagtatcgaatcaatcgctatcagcatcgaaaaatccttatgttga

SEQ ID NO: 85941 - protein, 182 aa, Prochlorococcus marinus str. MIT 9303
MKQRLLFLGPPGAGKGTQAERLCAAHELMHLSTGDLLRAEVGAKTPLGQEAAAVMNRGELVSDELVLAIVENQLKNQSGGWLLDGFPRTLIQATALEPLLEELKQPIEAVVLLELNDAVLIERLISRGRSDDNESVIRNRLEVYREKTAPLIDHYRQQGLLQTVEAQGSIESIAISIEKSLC

SEQ ID NO: 85942 - DNA, 651 bp, Clostridium difficile 630
  CDS (1)..(651): transl_table=11
atgagaataatattacttggacctccaggtgctggtaaaggtactcaggcggtaggaatagtagaaaaatacaatatacctcatatatcaacaggagatatattcagaaagaatataaaagagggaacagaacttggaaaaaaagctaaagaatacatggaccaaggtttattagtaccagatgagttaactgtaggtttagttactgatagaatatctcaagaagattgtaaaaatggatttatgttagatggatttccaagaaatgtagcacaaggagaacatttagatatcttcttaaaaaatgctggtatatcactagataaagttgtcaatattgaagttgataagagtatattagtgtctagagcagttggtagaagaatatgtaagtcttgtggagctacttaccatgttgagtttaatcctcctaaagtagaaggtgtatgtgatgtatgccaaggagaattatatcaaagagctgatgataatgaagaaactgtatctaagagaatacaagtttatctagatgaaactaagcctttagtagattattatagcaaacaaggtataatagcagatataaaaggtgatcaagcaatagataaagtatttgaagatattgtcgcagccttaggaagtggaaaataa

SEQ ID NO: 85943 - protein, 216 aa, Clostridium difficile 630
MRIILLGPPGAGKGTQAVGIVEKYNIPHISTGDIFRKNIKEGTELGKKAKEYMDQGLLVPDELTVGLVTDRISQEDCKNGFMLDGFPRNVAQGEHLDIFLKNAGISLDKVVNIEVDKSILVSRAVGRRICKSCGATYHVEFNPPKVEGVCDVCQGELYQRADDNEETVSKRIQVYLDETKPLVDYYSKQGIIADIKGDQAIDKVFEDIVAALGSGK

SEQ ID NO: 85944 - DNA, 657 bp, Herminiimonas arsenicoxydans
  CDS (1)..(657): transl_table=11
atgcgcctcatccttttaggagcgcctggtgccggtaagggcacgcaagctggtttcatcaaagacaaatacaatatcccgcaaatttccactggcgacatgttgcgcgctgcggtcaaggcaggtacgccattgggcatcgctgccaaaaaaatcatggacgagggtggtctggtatcggacgacatcatcatcggtctggtcaaggacaggttgaaggatggagattgtgcaaacggctatctgttcgatggctttccgcgcaccattccgcaagccgatgcaatgaaagatgccggtgtcgccatcgattacgtgctggaaatcgatgtgcctgacgaagcgattgtcgaacgcatgagcggtcgtcgtgtacatcctgcatccggtcgcacgtatcatgtcaaattcaatccgccgaaagtggcgggccgcgatgatgtgaccggcgaagagctgatccagcgcgacgacgacaaggaagaaacggtcaaaaagcgtttgtccgtctatcacgatcagaccgaagtgctggtcggctattacaacaagtgggcggaatccggccagccgggtgcgcccaagtatcgcaagattgccggtgtcggtccggtcgatcaaattcgggacaacgcttttaaagcgttggaaggctaa

SEQ ID NO: 85945 - protein, 218 aa, Herminiimonas arsenicoxydans
MRLILLGAPGAGKGTQAGFIKDKYNIPQISTGDMLRAAVKAGTPLGIAAKKIMDEGGLVSDDIIIGLVKDRLKDGDCANGYLFDGFPRTIPQADAMKDAGVAIDYVLEIDVPDEAIVERMSGRRVHPASGRTYHVKFNPPKVAGRDDVTGEELIQRDDDKEETVKKRLSVYHDQTEVLVGYYNKWAESGQPGAPKYRKIAGVGPVDQIRDNAFKALEG

SEQ ID NO: 85946 - DNA, 663 bp, Burkholderia vietnamiensis G4
  CDS (1)..(663): transl_table=11
atgcgtttgatcctgttgggcgcgcccggcgcgggaaagggcacccaggcaaacttcatcaaggaaaaattcggcatcccgcaaatctcgacgggtgacatgctgcgtgcggccgtcaaggccggctcgccgctcggcgtcgaggcgaagggctacatggatgccggcaagctcgtccccgacgcgctgatcatcggcctcgtgaaggaacgcctgaaggaatccgattgcgcgaacggctacctgttcgacggcttcccgcgcacgatcgcgcaggccgacgcgatgaaggaagccggcgtcgcgatcgactacgtgctcgaaatcgacgtgccgttctcggaaatcgtcgagcgcatgagcggtcgtcgcacgcacgcggcatcgggccgcacctaccacgtgaagttcaatccgccgaaggtcgaaggccaggacgacgtgacgggcgagccgctgatccagcgcgacgacgacaaggaagaaaccgtcaagaagcgcctcgaagtgtacgaagcgcagaccaagccgctgatcacgtattacggcgactgggcgcagcgcggcgaggaaaacggcctgaaggcgccgcagtatcggaagatctcgggcctcggcagcgtcgaggaaatccgcgagcgtgcgttcgaagcgctgaagtaa

SEQ ID NO: 85947 - protein, 220 aa, Burkholderia vietnamiensis G4
MRLILLGAPGAGKGTQANFIKEKFGIPQISTGDMLRAAVKAGSPLGVEAKGYMDAGKLVPDALIIGLVKERLKESDCANGYLFDGFPRTIAQADAMKEAGVAIDYVLEIDVPFSEIVERMSGRRTHAASGRTYHVKFNPPKVEGQDDVTGEPLIQRDDDKEETVKKRLEVYEAQTKPLITYYGDWAQRGEENGLKAPQYRKISGLGSVEEIRERAFEALK

SEQ ID NO: 85948 - DNA, 639 bp, Streptococcus pyogenes str. Manfredo
  CDS (1)..(639): transl_table=11
atgaatcttttaatcatgggtttgccgggagctggtaaagggacccaagcagctaagattgttgaagaatttggtgttgctcacatctcaacaggggatatgttccgcgccgcaatggctaatcagaccgaaatgggacgtttagctaaaagttatattgataaaggtgaattggttcctgatgaagtcacaaacgggattgtaaaagagcgcttagctgaggatgatatcgcagaaaaaggttttttgcttgatgggtatccacgtactattgaacaagcacacgccttagatgcaacacttgaagaactaggactccgcttagatggtgttattaatattaaagtggatccatcatgtcttgtagagcgtttgagtggtcgtattatcaatcgtaaaactggtgaaacgttccataaagtgttcaacccaccagtagattataaagaagaagattactatcaacgtgaagatgataagcctgaaactgttaaacgtcgtttggacgtcaatatggctcaaggagaacctattcttgaacactatcgtaagcttgatcttgttacagatattgaaggtaatcaagaaataacagacgtttttgcagatgttgaaaaagcgttgctagaactcaaataa

SEQ ID NO: 85949 - protein, 212 aa, Streptococcus pyogenes str. Manfredo
MNLLIMGLPGAGKGTQAAKIVEEFGVAHISTGDMFRAAMANQTEMGRLAKSYIDKGELVPDEVTNGIVKERLAEDDIAEKGFLLDGYPRTIEQAHALDATLEELGLRLDGVINIKVDPSCLVERLSGRIINRKTGETFHKVFNPPVDYKEEDYYQREDDKPETVKRRLDVNMAQGEPILEHYRKLDLVTDIEGNQEITDVFADVEKALLELK

SEQ ID NO: 85950 - DNA, 537 bp, Dichelobacter nodosus VCS1703A
  CDS (1)..(537): transl_table=11
atgaacattattattttgggtgcacccggttctggaaaaggaacacaatctactgaattaattaaaaaatataatctacaacacttatcaaccggtgatatgttacgcgcagaaattaacgcgcaatcagaattaggtttagcagcaaaaaaaattatggacgccggcgaacttgtctctgacgatatcgtcatcaatatgatcaaacaacgcttaagtgaccgcggcgcattatttgatggttttccgcggacaatcgcgcaagccgaatctttagacaaattattggctgaacggcaacaaaaaattgattacgtcattatgttagacgtcaacacggaagaaatcgtaaaaagaatgctggcgcgtggacgcgcggacgataacgaaaccacgattcgcaatcgtttatccgtttttgaacaacaaaccaaaccgcttatcgattattaccgcgctcaaggtaaattgcacacagttttaggcagcggcagcattaccgaaatcagccaacgcattcatcacgtcattaaataa

SEQ ID NO: 85951 - protein, 178 aa, Dichelobacter nodosus VCS1703A
MNIIILGAPGSGKGTQSTELIKKYNLQHLSTGDMLRAEINAQSELGLAAKKIMDAGELVSDDIVINMIKQRLSDRGALFDGFPRTIAQAESLDKLLAERQQKIDYVIMLDVNTEEIVKRMLARGRADDNETTIRNRLSVFEQQTKPLIDYYRAQGKLHTVLGSGSITEISQRIHHVIK

SEQ ID NO: 85952 - DNA, 696 bp, Candidatus Protochlamydia amoebophila UWE25
  CDS (1)..(696): transl_table=11
atgattatgataaaaagcacaaaacctctagtcagtactcaagcagccgttgctttaattttacttggccctccaggctcgggaaaaggaactcaagcaaaaagacttgcgcatgaatatcaaattcctcacatctctagcggcgatctttttagagagcatatgtcaaaagaaacgattatcggtttgaaggcaaaagaatttattcaagcaggaaaattagtgcccgacgaatttgtaatggatatgctgtttgatcgacttgcccatccagattgtgctagaggatatttactagatggttttcctcgtactgtcgcacaagcagaagctttagctggtaaacgggatataaaaatccctctgattgttttatatttagaagttcccgatgcagtgattgttaagcgagcagaaggtcggcttgtttgtaagaattgcggaatggtttataatctttattcttcttctcctcgtcttcctggagtttgtgataaatgtgggggagagatttatcgtcgtccagatgatgatgccaacatagttttaaaaagattagaagtttatcatgagttgacaagccctcttattcaatattatactgatcaaggaattctgttaaaatttgatggaaatcaaaattctgatacggtttattaccagttgaaaaaatctattaatgaaaagtacttataa

SEQ ID NO: 85953 - protein, 231 aa, Candidatus Protochlamydia amoebophila UWE25
MIMIKSTKPLVSTQAAVALILLGPPGSGKGTQAKRLAHEYQIPHISSGDLFREHMSKETIIGLKAKEFIQAGKLVPDEFVMDMLFDRLAHPDCARGYLLDGFPRTVAQAEALAGKRDIKIPLIVLYLEVPDAVIVKRAEGRLVCKNCGMVYNLYSSSPRLPGVCDKCGGEIYRRPDDDANIVLKRLEVYHELTSPLIQYYTDQGILLKFDGNQNSDTVYYQLKKSINEKYL

SEQ ID NO: 85954 - DNA, 711 bp, Legionella pneumophila subsp. pneumophila str. Philadelphia 1
  CDS (1)..(711): transl_table=11
atgttactatatttgaaagtatataatgattacgaattatttaaggagttttggatgcgattaatgcttttaggtggaccgggagccggcaaaggaacccaagcttcacttttaattaaccgttataaaattcctcaaatttctaccggtgacatgctgcgtgctgccatagcaaaaggtacgcccttaggattaagtgcccaaaaaatcatggaatcaggtgggttggtgtccgatgatattattatcgggttagtgaaggaaagactaaaaaaccctgattgtgatagaggattcctgtttgatggttttccaagaacattggtccaggccgaagctttaaaagatgcagaaatccatttggatcatgtgatagaaatagccgtcgatgacgaagaaataattgaacgcatcagcgggcgacgcattcaccagccttctggtagggtttatcacgttgtgaatcaaccgccgaaaaatccgggtgtagatgacatcacaggtgagcctctgattcaacgtgatgatgataaagaagaaaccatacgtaagcgcttacaggtttaccatagccaaacagcgccattggtgcaatattataaggaatgggctgaatctggctctaaagaagctccaaaatttcacactattagtggtacaggtacagtagagcaaatatttgacaacatcgtaacgatactcgaaacttag

SEQ ID NO: 85955 - protein, 236 aa, Legionella pneumophila subsp. pneumophila str. Philadelphia 1
MLLYLKVYNDYELFKEFWMRLMLLGGPGAGKGTQASLLINRYKIPQISTGDMLRAAIAKGTPLGLSAQKIMESGGLVSDDIIIGLVKERLKNPDCDRGFLFDGFPRTLVQAEALKDAEIHLDHVIEIAVDDEEIIERISGRRIHQPSGRVYHVVNQPPKNPGVDDITGEPLIQRDDDKEETIRKRLQVYHSQTAPLVQYYKEWAESGSKEAPKFHTISGTGTVEQIFDNIVTILET

SEQ ID NO: 85956 - DNA, 651 bp, Anaplasma marginale str. St. Maries
  CDS (1)..(651): transl_table=11
atggaaaaaagtaaagtaaacctgctcattttaggggctcctggctccggcaagggaacacaggcgcgcttgttggctgggcatttggacggcctgcaagtggtatccatgggtgacctactgcgcaacgagatttgcgagcgcactgagacaggtaaggagatagaagacgtaatgcgttccggtatcctagtcgacgacgcgcttgtgtgtgagattctgtttagcaagctcaggaaagtcaggcagggatttctgctggatgggtttccgagaaatcggcatcaggccgagtttttgacggtcgtgctgcgattaataaattgcgggattgatgcggtgatcaagttggaggtagatgcggaagtcgtaaaatgcaggctacgcggacgcttgatatgtaaaggttgtggcaaggtgtcaaacgtaagcttcggcacaacagtgtgcgatgagtgtggttgtcgtgattatatcagtaggaatgatgatgtagcagagacaataaagcacaggatttcggaatatgagtccgttataggagagttggagcaatattacggaaagctggtaacgagagtagacagcaatggatctgtagacgaagtatttcaggccataagagatatagttgatgtcctaaataactag

SEQ ID NO: 85957 - protein, 216 aa, Anaplasma marginale str. St. Maries
MEKSKVNLLILGAPGSGKGTQARLLAGHLDGLQVVSMGDLLRNEICERTETGKEIEDVMRSGILVDDALVCEILFSKLRKVRQGFLLDGFPRNRHQAEFLTVVLRLINCGIDAVIKLEVDAEVVKCRLRGRLICKGCGKVSNVSFGTTVCDECGCRDYISRNDDVAETIKHRISEYESVIGELEQYYGKLVTRVDSNGSVDEVFQAIRDIVDVLNN

SEQ ID NO: 85958 - DNA, 669 bp, Silicibacter pomeroyi DSS-3
  CDS (1)..(669): transl_table=11
atgaccacccccgccgttctgatccttctcggccctccgggtgccgggaagggcacccaggcccgcatgctggaagaaaagttcgggctggtgcagctatcgaccggcgatctgctgcgcgccgccgtggccgccggaacccccgccggcaaacaggccaaggcggtgatggaggcgggtgatctggtttccgacgagatcgtcatcgccatcctgcgcgaccggctggctgaacctgactgtgccaagggcgtgatcctcgacggctttccccgcaccaccgtgcaggccgaggcgctggacacgctgctgtccgagagcggtcagcgcatcaacgccgccatcagcctcgaggtcgaggacggagagatggtgacccgcatttcgggccgctacacctgtggcggctgcggcgagggctatcacgacacgttcaagcagccggccgaggcaggcaaatgcgacaagtgcggcggcaccgagatgaagcggcgcgccgatgacaatgccgaaaccgtggccagccggctcgaggcctatcacgcgcagaccgcgccgctgatcgcctattacgacggccacggcgtgctgcaacggatcgacgccatgggagagatcgacgagatcgcccagggcctcgccaccatcgtcaagggggcgatggcctag

SEQ ID NO: 85959 - protein, 222 aa, Silicibacter pomeroyi DSS-3
MTTPAVLILLGPPGAGKGTQARMLEEKFGLVQLSTGDLLRAAVAAGTPAGKQAKAVMEAGDLVSDEIVIAILRDRLAEPDCAKGVILDGFPRTTVQAEALDTLLSESGQRINAAISLEVEDGEMVTRISGRYTCGGCGEGYHDTFKQPAEAGKCDKCGGTEMKRRADDNAETVASRLEAYHAQTAPLIAYYDGHGVLQRIDAMGEIDEIAQGLATIVKGAMA

SEQ ID NO: 85960 - DNA, 579 bp, Campylobacter jejuni RM1221
  CDS (1)..(579): transl_table=11
atgaaagaattgtttttaatcataggtgcaccaggtagtggaaaaactaccgatgctagtttaatcgcacaagcagatgcgacaaatattacacactattcaacaggagatcttttaagagctgaagtagcaagtgggagcgagcttggaaaaactatagatagttttatctccaaaggcaatcttgttcctttagatgttgttataaatactatagtttgtgctctaaaagctgctccaactaaaactatcatcatcgatggctatccaagaagcgtagagcaaatgatggaatttgataaggttttaagtgagcaaaatgaaatttgtcttaaaggcgtcatagaagtaagagtaagcgaagaagttgccaaagaaagagttttaggcagaaatcgcggcacagatgataatgaagaagtgttttacaatagaatgaaagtttatacagaacctttaaatgaaattttagatttttatcaaaagaaaaaacttcattttattatcgatggagagcgcgctatcgaacctatcgttgcagacatgaaagaactgattaaaaaaattcaaagtatataa

SEQ ID NO: 85961 - protein, 192 aa, Campylobacter jejuni RM1221
MKELFLIIGAPGSGKTTDASLIAQADATNITHYSTGDLLRAEVASGSELGKTIDSFISKGNLVPLDVVINTIVCALKAAPTKTIIIDGYPRSVEQMMEFDKVLSEQNEICLKGVIEVRVSEEVAKERVLGRNRGTDDNEEVFYNRMKVYTEPLNEILDFYQKKKLHFIIDGERAIEPIVADMKELIKKIQSI

SEQ ID NO: 85962 - DNA, 651 bp, Dehalococcoides ethenogenes 195
  CDS (1)..(651): transl_table=11
gtgtataatgttattttccttggcgccccgggttcgggtaaaggcacacaaggtgaagtagtcgctaaagagcttaggctggcgcatatggccaccggtgatttatttcgtaaggctatagagcgcggtgatgagctgggtgatacggttaagtcctatatggaacggggcgagctggtgccggatgagattaccattagtgtagtccttaagcaccttgctggcttgaaagatgttagcgggattattctggacggattcccccggagcctgcgtcaggccgaggcgctggatgaggcgctggtaaagcagggagagggaatcggcagagtaatatatataaatgtgccggaagatgagctggtccggcgcttaagcggacgctgggtttgccggagctgtcagtcaccttatcagtgtggctgtgctgaggtagccgaggggaagtgcagccgctgtcagggtgagctgtatcagcgccctgatgacacacccgaaaccgtaaaggaaaggctcaaggtgtattttagcaaaacggcaccgcttattgagtactatcgctcaaagggcaagctgagtgagattgatggtatggctgagataacagaggtgaccaagcggattgtatcagctataaagtgcggtaaataa

SEQ ID NO: 85963 - protein, 216 aa, Dehalococcoides ethenogenes 195
MYNVIFLGAPGSGKGTQGEVVAKELRLAHMATGDLFRKAIERGDELGDTVKSYMERGELVPDEITISVVLKHLAGLKDVSGIILDGFPRSLRQAEALDEALVKQGEGIGRVIYINVPEDELVRRLSGRWVCRSCQSPYQCGCAEVAEGKCSRCQGELYQRPDDTPETVKERLKVYFSKTAPLIEYYRSKGKLSEIDGMAEITEVTKRIVSAIKCGK

SEQ ID NO: 85964 - DNA, 663 bp, Ehrlichia ruminantium str. Welgevonden
  CDS (1)..(663): transl_table=11
atggaaaataaaataaatatgttgatatttggtccacctgggtctggtaagggtactcagtgtcgtattttgtcagagatttatcctagtatttctgttatttcaactggggatttgttgagggatcaggcaaagcttgatactgatgatggacgtaagattaggcatattatggaatctggtgatttagtggatgatgatttagtatgcaggatgttttcagtatctattaatagtatcagtaatgggtttttattagatggtttcccaagaaatttaagtcaagcgaagtttctaactaaaattttggaagagcgtaataataagattaatatagtgatacaattacaattagatttagacactataaaaagtaggctttgtggacgtattgtatgtaaggattgtggacaggtttctaatttacatttttttgatcaagcaatagatgaaatcacttgtaagttttgtaaaggtcggttagattatagatatgatgataagattgaagtgatagtcaaaagagttaatcaatactatgaggagatgaaagatttagaattgtattaccatgataagatcatacaaattgatgcaggtaaatcaattgataaggttactcaggatataaaggaacgcatagaatatttaattattgattga

SEQ ID NO: 85965 - protein, 220 aa, Ehrlichia ruminantium str. Welgevonden
MENKINMLIFGPPGSGKGTQCRILSEIYPSISVISTGDLLRDQAKLDTDDGRKIRHIMESGDLVDDDLVCRMFSVSINSISNGFLLDGFPRNLSQAKFLTKILEERNNKINIVIQLQLDLDTIKSRLCGRIVCKDCGQVSNLHFFDQAIDEITCKFCKGRLDYRYDDKIEVIVKRVNQYYEEMKDLELYYHDKIIQIDAGKSIDKVTQDIKERIEYLIID

SEQ ID NO: 85966 - DNA, 657 bp, Psychrobacter arcticus 273-4
  CDS (1)..(657): transl_table=11
atgatgcgtattattttgctaggtccaccaggcgccggtaaaggtacccaggctcagtttatttctaaagaatatgatatgccgcagatttcaactggtgatatgctgcgtgcagcaatcaaagaaggcagtgagcttggcaaacaagccaaagacgtgatgaacgctggtggtttggtttctgatgatcttatcattaacctagtgcaagaacgcatcgctaagcctgattgtgtcaatggctgtattttagatggttttccgcgtactattccacaagcgcaagcgcttgcagatgccaatgttacgattgaccatgtgatcgaaatcagcgtacctgatgatgaaatcgtcaagcgtttatcaggtcgtcgccaacatgccggctcaggtcgtgtgtatcacattgatcacaatccaccccagcaagaaggcattgatgatgtcacgggcgaagcgcttatccagcgtgaagacgataaagagtcaaccattcgcgaccgtttagccatttatcatgagcagacttctaccttagttggcttttatcaagacaaggctaaagaaggcggcgatgcccctaagtatgacaaattcgatggcacgcaaggtattgatgatgtaaaacaacaaatattctctgccctaaaaagctaa

SEQ ID NO: 85967 - protein, 218 aa, Psychrobacter arcticus 273-4
MMRIILLGPPGAGKGTQAQFISKEYDMPQISTGDMLRAAIKEGSELGKQAKDVMNAGGLVSDDLIINLVQERIAKPDCVNGCILDGFPRTIPQAQALADANVTIDHVIEISVPDDEIVKRLSGRRQHAGSGRVYHIDHNPPQQEGIDDVTGEALIQREDDKESTIRDRLAIYHEQTSTLVGFYQDKAKEGGDAPKYDKFDGTQGIDDVKQQIFSALKS

SEQ ID NO: 85968 - DNA, 645 bp, Colwellia psychrerythraea 34H
  CDS (1)..(645): transl_table=11
atgcgcattgttttattgggtgctccaggcgctggtaaaggcacacaagcacagttcttaatggctaaatttggtattccacagatctcaacaggcgatatgctacgtgctgctattaaagcaggatcggagctaggtaacaaagccaaagccgtaatggatgctggtcaattagtttctgacgatttaatcatcggattagttaaagagcgagtagctcaagaagattgtaaagctggttttttacttgatggctttcctcgcacaataccacaagcagatgcaatgaaagaaagtggtattgttgttgaccatgttcttgaatttgatgtaccagatgaagtcattgttgaacgtatggctggccgtcgtgtacattctggctcaggtcgtgtttatcaccttgtttataacccaccaaaggttgaaggcaaagatgatgtaagtggtgacgatttatccattcgtccagatgatgaagaagcgacagtgcgtaagcgtttagctatttaccacgagcaaactaagccattggtagatttctatcaagcagaagctaaatcaggtagctgtagttatttaactattgatggcacacaagccgttgaaaaagttaaccaattattatcagctcaactggcttaa

SEQ ID NO: 85969 - protein, 214 aa, Colwellia psychrerythraea 34H
MRIVLLGAPGAGKGTQAQFLMAKFGIPQISTGDMLRAAIKAGSELGNKAKAVMDAGQLVSDDLIIGLVKERVAQEDCKAGFLLDGFPRTIPQADAMKESGIVVDHVLEFDVPDEVIVERMAGRRVHSGSGRVYHLVYNPPKVEGKDDVSGDDLSIRPDDEEATVRKRLAIYHEQTKPLVDFYQAEAKSGSCSYLTIDGTQAVEKVNQLLSAQLA

SEQ ID NO: 85970 - DNA, 654 bp, Dechloromonas aromatica RCB
  CDS (1)..(654): transl_table=11
atgaaattgattctgttgggcgcacctggcgccggcaagggaacgcaagccactttcatttccaagcagtttggcattccgcagatttccaccggcgacatgttgcgtgcccaggtcaaggctggcaccgcgctgggtctcgaagccaagaagcacatggatgcaggcggcctggtgccggatgccgtgatcatcggtatggtcaaggatcgcctgacccaggacgattgcaagaacggttacctgttcgacggcttcccgcgcaccattccccaggctcaggcgatgaaggatgctggtgtgccgatcgagttcgtcctcgaaatcgacgtgccggacagcgacatcgtcgagcgcatggctggtcgccgtgcccacctggcttcggggcgcacctatcacgtcaagttcaacccgccgaaggttgaaggcatcgacgacgtgaccggcgaaccgctcgtgcaacgtgacgacgataaggaagaaaccgtcaaaaaacgtctggaaatctaccattcgcaaaccaagccgctggtcgatttctacggcaagtgggcggccgaaggcgatgccaaggcccccaaggtgcgcaaggtggccggcgtcggtagcgtcgacaacatcaccaagagcgtttttgaagcgctgaaataa

SEQ ID NO: 85971 - protein, 217 aa, Dechloromonas aromatica RCB
MKLILLGAPGAGKGTQATFISKQFGIPQISTGDMLRAQVKAGTALGLEAKKHMDAGGLVPDAVIIGMVKDRLTQDDCKNGYLFDGFPRTIPQAQAMKDAGVPIEFVLEIDVPDSDIVERMAGRRAHLASGRTYHVKFNPPKVEGIDDVTGEPLVQRDDDKEETVKKRLEIYHSQTKPLVDFYGKWAAEGDAKAPKVRKVAGVGSVDNITKSVFEALK

SEQ ID NO: 85972 - DNA, 570 bp, Thermobifida fusca YX
  CDS (1)..(570): transl_table=11
atgcgcgttgtactggtgggacctccaggggccggaaaaggcacccaggcccagatcttggcgtccaaactgtcgattccgaaggtgtccaccggagacatcttccgtgccaacgtcagcggtggcaccgagttgggtaagaaggcccaggcctatatggaccgtggcgacctcgtccctgacgagatcaccaacgccatggtgcgcgataggctggccgaggacgacgctcgtgcaggcttcctcttggacggctttccgcgcaatctcgcgcaggcggaaacgctggacgagatgcttgccgatctgggtgtcaagctcgacgttgtcctcgagctcgtcgttgacgaggaggaagtgatccggcggcttgcggagcgggcccggatcgacaaccgcagcgacgacaacgaggagacgatccggcaccgtttggtcgtctaccgggagcaaactgctccgctggtctccttctacgagaagcgcggactgctggagaagatcgacgcagtcgggccgatcgaggaggtcacccagcgggccatgacagcgctgaaaagcagagcctga

SEQ ID NO: 85973 - protein, 189 aa, Thermobifida fusca YX
MRVVLVGPPGAGKGTQAQILASKLSIPKVSTGDIFRANVSGGTELGKKAQAYMDRGDLVPDEITNAMVRDRLAEDDARAGFLLDGFPRNLAQAETLDEMLADLGVKLDVVLELVVDEEEVIRRLAERARIDNRSDDNEETIRHRLVVYREQTAPLVSFYEKRGLLEKIDAVGPIEEVTQRAMTALKSRA

SEQ ID NO: 85974 - DNA, 549 bp, Prochlorococcus marinus str. NATL2A
  CDS (1)..(549): transl_table=11
atgaaaaaaaaattactatttcttggcccccctggcgcggggaaagggactcaagcaaatcttttttgcaaaaaatacggactaattcatctttcaactggagatttacttagagatgaggtctcctcaggatctgttttaggtatcaaagctgctgagattatgaataaaggagaattagtgagtgatgaattagttctctcaattgttgaagggaggttggcaaatattaatgagggttggttgttggatgggttccctagaaatgtcaatcaagctaattctctaaaaaatcttttagaaaaaattaatcaacctctagagggggtcatcttaataaaagttgctgacgattatttaattaaaaggcttgtagagagaggaagacaggatgacaatgagcaagtaataactaacagactaaaaatatacagagaaaaaacctctccactaattgatttgtataagaagcaaggtattcttgaagagatagaaggtaatgctgacattgatgttgttttttcatgcattgagaaatctttaggctga

SEQ ID NO: 85975 - protein, 182 aa, Prochlorococcus marinus str. NATL2A
MKKKLLFLGPPGAGKGTQANLFCKKYGLIHLSTGDLLRDEVSSGSVLGIKAAEIMNKGELVSDELVLSIVEGRLANINEGWLLDGFPRNVNQANSLKNLLEKINQPLEGVILIKVADDYLIKRLVERGRQDDNEQVITNRLKIYREKTSPLIDLYKKQGILEEIEGNADIDVVFSCIEKSLG

SEQ ID NO: 85976 - DNA, 666 bp, Ehrlichia canis str. Jake
  CDS (1)..(666): transl_table=11
atggaaaataaaataaatatattaatttttggtcctcctggatctggtaagggtacacagtgccatattttatcagaaacctatagtagtatttctataatttcaacaggtgatttattaaggaatgaagcaaagcttgatactgatgatggtaagagaattaaaaaaattatagaatctggtgatttagtagatgatgacttagtgtgtaaaatgtttgctaaatctattagtaaaataaagaatggatttttattagatggttttccaagaaatttaagtcaggcagagtttttaacaaaaattttggcagaatatgacagtcagattgatatagtaatacagttgcaattagatttagaagttattaaaagtagattatctagccgtattttgtgtaagaattgtggtcaggtttcaaatttaagtttttttggtaaaaaaattgatgaaattacttgtagtttttgtaacagcaataagttagattgtcgttatgatgataaactggaagttattgtgaaaagagtagataaatataatgaagagattaaaaaattagaagattattattgtgataagattgtgtgcattgatgcaggaaagtcaatagagggagttgcttgtgatataaaagaaaaaatagcgcctttaattattggttga

SEQ ID NO: 85977 - protein, 221 aa, Ehrlichia canis str. Jake
MENKINILIFGPPGSGKGTQCHILSETYSSISIISTGDLLRNEAKLDTDDGKRIKKIIESGDLVDDDLVCKMFAKSISKIKNGFLLDGFPRNLSQAEFLTKILAEYDSQIDIVIQLQLDLEVIKSRLSSRILCKNCGQVSNLSFFGKKIDEITCSFCNSNKLDCRYDDKLEVIVKRVDKYNEEIKKLEDYYCDKIVCIDAGKSIEGVACDIKEKIAPLIIG

SEQ ID NO: 85978 - DNA, 648 bp, Methanosarcina barkeri str. Fusaro
  CDS (1)..(648): transl_table=11
atgaatataatactcttcgggcccccaggtgccggaaaaggtacccaggccaaaaaaatggttgacaactatggaatcccgcagatctccacaggtgatatcctgcgggcaaatgtcagggaaggaaccgagcttgggcttgcagccaaggaatatatggacaaaggagaacttgttcctgatgaggtacttatagggattatcaagaaccgtcttaaagaacaggactgtgaaaagggtttcatccttgacgggtatccaagaacaatacctcaggctgatgctcttgcagtcatacttgatgagatcaataagcccatagatgttgttctcaatctcgaagtgcctgatgaagaactgattgaaagaataagcggtcgccttatgtgcaactgcggtgcgagctaccacaggacttttaacccgccgaaaaaagatgatgtctgtgacatttgcgggggtaaggttttccagcgtgctgatgacaaagaagaggctgtcaagaaccgtcttaatgtctataaaaagcagacagaacctcttattgactattacacaaagcagggacttctggtaactctagacggcacaaaagatatcgacgaggtatttgaagaaataaaggcagttcttaaaaaatttgcctga

SEQ ID NO: 85979 - protein, 215 aa, Methanosarcina barkeri str. Fusaro
MNIILFGPPGAGKGTQAKKMVDNYGIPQISTGDILRANVREGTELGLAAKEYMDKGELVPDEVLIGIIKNRLKEQDCEKGFILDGYPRTIPQADALAVILDEINKPIDVVLNLEVPDEELIERISGRLMCNCGASYHRTFNPPKKDDVCDICGGKVFQRADDKEEAVKNRLNVYKKQTEPLIDYYTKQGLLVTLDGTKDIDEVFEEIKAVLKKFA

SEQ ID NO: 85980 - DNA, 555 bp, Anabaena variabilis ATCC 29413
  CDS (1)..(555): transl_table=11
gtgacgcgactaatcttcttggggccgccgggggcaggtaaaggaacacaagctcaaattttggctgaacatttacatattccgcatatttctactggggatatattgcggcaagccatgaaagagcaaactcccttgggaatcaaagctcaaagctatgtggatagtggcgagttggttcctgaccagttagtgcaagacttagtcgaggaacgtcttgagcaagcagatgctaaatctggctggatattagatggttttcctcgtaaagttacacaggcggcttttctggaagaattgctgcaaaaaactggtcaaggtggtgaaagagtagtcaatttagatgccccagatgatgttgtcgtcacacggttgttatccagaggcagaaaagacgacaccgaagaggtaatccgtcgccgcctggaaatctaccgcaacgacactgcacccttgattgattattacagcgatcgccaaaaacttttgaccatcaatggcgaccagtcccaagaagaagtcactcacgaattgaaagaaactttaggttcgtaa

SEQ ID NO: 85981 - protein, 184 aa, Anabaena variabilis ATCC 29413
MTRLIFLGPPGAGKGTQAQILAEHLHIPHISTGDILRQAMKEQTPLGIKAQSYVDSGELVPDQLVQDLVEERLEQADAKSGWILDGFPRKVTQAAFLEELLQKTGQGGERVVNLDAPDDVVVTRLLSRGRKDDTEEVIRRRLEIYRNDTAPLIDYYSDRQKLLTINGDQSQEEVTHELKETLGS

SEQ ID NO: 85982 - DNA, 654 bp, Rhodobacter sphaeroides 2.4.1
  CDS (1)..(654): transl_table=11
gtgctgatcctgctcgggcctccgggcgcgggcaagggcacccaggcccggatgctcgaggagcgcttcggcctcgtccagctttcgacgggcgatctgctgcgcgcggcggtggccgcgggcacgcccgcaggcatggccgcgaaggcggtgatggaggcggggggcctcgtgtccgacgagatcgtgctggcgatcctcgccgaccggatggcgcagcccgatgtcgcgcgcggcatcatcctcgacggctttccccgcaccgcggggcaggccgcggccctcgacgggctcctcgagcgggcgggccagcgggtcacggcggcgatcagcctcgaggtcgatgacggggcgatggtcgagcgggtgtcgggccgcagcacctgcgccgcctgcggtgagggataccacgacagcttcaagcagcccgcgcgcgcggggacctgcgacaagtgcggcgggacggagttcaagcgccgtcccgacgacaatgccgacaccgtgggagcgcggctcgccgcctaccatgcgcagacggccccgctgatcgcctactacgacggctgcggcgtgctcgaacggatcgatgcgatgggagccatcgacgagatcgcgagcgcgctgggccgtatcgtgggccgcgtgtcggcgtaa

SEQ ID NO: 85983 - protein, 217 aa, Rhodobacter sphaeroides 2.4.1
MLILLGPPGAGKGTQARMLEERFGLVQLSTGDLLRAAVAAGTPAGMAAKAVMEAGGLVSDEIVLAILADRMAQPDVARGIILDGFPRTAGQAAALDGLLERAGQRVTAAISLEVDDGAMVERVSGRSTCAACGEGYHDSFKQPARAGTCDKCGGTEFKRRPDDNADTVGARLAAYHAQTAPLIAYYDGCGVLERIDAMGAIDEIASALGRIVGRVSA

SEQ ID NO: 85984 - DNA, 645 bp, Carboxydothermus hydrogenoformans Z-2901
  CDS (1)..(645): transl_table=11
gtgaaacttttaatcatgggccctccgggggctggaaaaggaacccaggcggaaaaaattgttaaagagtttggtattacccatatttccaccggcgatatgttccgggctgctttaaaaaatcaaacgcccctgggattaaaagcaaaagaatatatggataaaggtgagctggtacccgatgaaatcgtaattgctatggtggaagaaagaatatcggcaccggactgcgcaaaaggctttcttttggacggttttccccggaccataccacaggcggaagctctggataaaaagcttgccgaaatgggaataaccttagatggtgtgatcaatattgaagttccgcgggaagaattaattgaaaggttaactgggagaagggtctgtcgccagtgcggagcaacctaccatgtgaaattcaatccgccaaaagttgaaggagtttgcgatgcttgtggcggagaattataccaaagaagcgatgattctttagaaacagtaagcaaccgtttggatgtctatgaagcgcagaccgcacctttaaaagattattatgccaaaaccggtttgttgaaaaatattgatggtacaaaatctattgaagaagtattcgcttcaattaaaaatgctctccaaaagtaa

SEQ ID NO: 85985 - protein, 214 aa, Carboxydothermus hydrogenoformans Z-2901
MKLLIMGPPGAGKGTQAEKIVKEFGITHISTGDMFRAALKNQTPLGLKAKEYMDKGELVPDEIVIAMVEERISAPDCAKGFLLDGFPRTIPQAEALDKKLAEMGITLDGVINIEVPREELIERLTGRRVCRQCGATYHVKFNPPKVEGVCDACGGELYQRSDDSLETVSNRLDVYEAQTAPLKDYYAKTGLLKNIDGTKSIEEVFASIKNALQK

SEQ ID NO: 85986 - DNA, 552 bp, Synechococcus sp. CC9605
  CDS (1)..(552): transl_table=11
atgaaaaatcgcttgctctttcttggtcctcccggagccggcaaaggcacacaggctgctcggctgtgcgatgccaacagcatgaagcatctatccacaggcgatctgctgcgctctgaagtggcagccggcagcgatctgggcaaagaagctgaagcggtgatgaaccgcggcgagctggtgagcgacgccctcgtgctggcgattgtggaaagccagatgaaggcactcaccacagatggctggctgctggatgggttcccccgcacggtgccccaggctgaagccctcgaacccctgctggccgaattgcagcaacccatccaggccgtggttctgctggagctggatgacgccgttttgattgaacggctgctggcccgctgtcgcgccgacgacaacgaagcggtgatccgcaatcgcctggaggtttaccgcgagaaaacctcacccctgattcgcttttacagcgataagggtctcctggtttccgtccccgcccagggcacagtcgaggagatcaccaagcggatcgattccattcttggttga

SEQ ID NO: 85987 - protein, 183 aa, Synechococcus sp. CC9605
MKNRLLFLGPPGAGKGTQAARLCDANSMKHLSTGDLLRSEVAAGSDLGKEAEAVMNRGELVSDALVLAIVESQMKALTTDGWLLDGFPRTVPQAEALEPLLAELQQPIQAVVLLELDDAVLIERLLARCRADDNEAVIRNRLEVYREKTSPLIRFYSDKGLLVSVPAQGTVEEITKRIDSILG

SEQ ID NO: 85988 - DNA, 669 bp, Geobacter metallireducens GS-15
  CDS (1)..(669): transl_table=11
gtgtctggaaatgaaaatgcgatgaatttgattttccttggtcctcctggcgcaggcaaggggacgcaagctaaccttcttgtcggtacgtatggcattccgcagatttctaccggtgatatcctgcggtcagccgttgcgaatcagacttcgctggggatcacggctaagtcctatatggatgccggttcgcttgttcctgatgaagttgtcgtgggtattgttaatgagcgacttgcggctgacgattgtgccgctggttttattcttgacggattcccgcggactgtggcccaggctgatgcgctgggtggcatgttgcagggggctgggcggtcgattgcccatgttatatcgttcgaagtggactatgcggtgttggttgatcgtctgacgggacggcgcatgtgtagggcatgtggtcgtggtttccatgttctgtatgatcggccatccgtggaagggcgctgtgatagttgtggcggggagctttatcagagagatgatgataaagtggagacaatccgtcgtcgtcttgatgtttatgacgagcagactgttccccttaagttgtattatgagcgtgcatcactgctgaggaaggttgatgctcttggctcaatagaatccgtttctcaatcaattcagaacatagtggcgagtaggtag

SEQ ID NO: 85989 - protein, 222 aa, Geobacter metallireducens GS-15
MSGNENAMNLIFLGPPGAGKGTQANLLVGTYGIPQISTGDILRSAVANQTSLGITAKSYMDAGSLVPDEVVVGIVNERLAADDCAAGFILDGFPRTVAQADALGGMLQGAGRSIAHVISFEVDYAVLVDRLTGRRMCRACGRGFHVLYDRPSVEGRCDSCGGELYQRDDDKVETIRRRLDVYDEQTVPLKLYYERASLLRKVDALGSIESVSQSIQNIVASR

SEQ ID NO: 85990 - DNA, 549 bp, Prochlorococcus marinus str. MIT 9312
  CDS (1)..(549): transl_table=11
atgaaaaaacatttactatttttaggagcccctggcgcagggaaagggactcaggcggaattattaagtaaaaccaattcttacttgcacctttccacaggtgaattgttaagaaaagaaattgaaacgaatactaaccttggtagacaggtaaaggatattattaaccggggagaacttgtgagtgacgaacttgtattaaaaatagtaaggcaaaatttagatcaggataataaaggttggattctagatggttacccaagaaatttatctcaagcaaattcattgaatgaggttttaattgagatcaatcaacctttagaagtagttttttacttagatattccagaagaagttctaataaagcgtttgcttttaagagggagaaaagatgatactgaagagactattagaacaagagttgacatttataaaaaaactacagaaccattgattaaatattttaaagatctttcattactagaatatattgatgctgatagagatttaaaaaccatttcctctgatatcaaacaaaaaatggcttga

SEQ ID NO: 85991 - protein, 182 aa, Prochlorococcus marinus str. MIT 9312
MKKHLLFLGAPGAGKGTQAELLSKTNSYLHLSTGELLRKEIETNTNLGRQVKDIINRGELVSDELVLKIVRQNLDQDNKGWILDGYPRNLSQANSLNEVLIEINQPLEVVFYLDIPEEVLIKRLLLRGRKDDTEETIRTRVDIYKKTTEPLIKYFKDLSLLEYIDADRDLKTISSDIKQKMA

SEQ ID NO: 85992 - DNA, 654 bp, Moorella thermoacetica ATCC 39073
  CDS (1)..(654): transl_table=11
atgcgcttggtattacttggaccacccggcgccgggaaagggacccaggccagggagattaaccagcgcctggccataccccatatttctaccggcgatatgttccgcgaggcgatcaaaagggggacgcccctgggacgccaggcggaagtatatatcaagggcgggcgcctggttcctgatgaggtaactattgggttggtgcaggaacgcctggttcaacctgattgccggaatggcttcctcctggacggctttccccggacagtagcccaggcggaagccctggattcctggctgtcgagccggggggagaggttggatgccgttattgacatcgaggtgccccgggatgctttgctggagcgcctgacagggcgccgggtttgccgccagtgcggggccacctatcatgtgcgctataacccgcctgcagtaccggggaagtgtgatgcctgcggtcaggatctggtccagcgggccgacgatacagaagccacggtgaacaagcgcctggatgtttataacgagcagacggctcccctcgttaactactaccggcagcgcggtcttttaaaggaaattgacggcagccaggccatcccggcggtaatcctggctataggcagggccctgggaagagactggcaatga

SEQ ID NO: 85993 - protein, 217 aa, Moorella thermoacetica ATCC 39073
MRLVLLGPPGAGKGTQAREINQRLAIPHISTGDMFREAIKRGTPLGRQAEVYIKGGRLVPDEVTIGLVQERLVQPDCRNGFLLDGFPRTVAQAEALDSWLSSRGERLDAVIDIEVPRDALLERLTGRRVCRQCGATYHVRYNPPAVPGKCDACGQDLVQRADDTEATVNKRLDVYNEQTAPLVNYYRQRGLLKEIDGSQAIPAVILAIGRALGRDWQ

SEQ ID NO: 85994 - DNA, 726 bp, Syntrophus aciditrophicus SB
  CDS (1)..(726): transl_table=11
ttgacccggtgccggattttgcctatagtcccaaaactgcaaacgaaattgaaagttaaggaggttatcaggaatatgaagattattcttttgggagcgccgggcgccgggaagggcacagtggccaaactgctgacggagtatgatggttccgtacagatttccacgggagacattctgcgggcggccgtcaaggaaggaacagagcttggacgggaggccaaaggctacatggatcggggtgatctggttcccgatgcgctgatcatgcggatgatggaaacccgccttcaacagccggattgtgcaaacggattcatcctggacggttttcccagaacgattccccaggccgaggccttgaagaagctcctggaaaaactgaatattcgactgaattttgtcgtcaatctggaagttccgcgggatgtgatcctggatcggctgaccactcggagaacctgctccaatccggattgtcaggaaatatacaatatcaaaagcaatcctcccctgcccgatggccgctgcaagaaatgcggcagtccgacgattcagcgggatgatgagaccgaagaagccattctgaaccgtctggaaacctacaatgagaaaaccgcgcctctgattggcttttatgaaagggaagggctgctcaagacattttcctcagtcagcagcgccgaaaccgtggaagccgttaaaaaggccttgaaggaatgctga

SEQ ID NO: 85995 - protein, 241 aa, Syntrophus aciditrophicus SB
MTRCRILPIVPKLQTKLKVKEVIRNMKIILLGAPGAGKGTVAKLLTEYDGSVQISTGDILRAAVKEGTELGREAKGYMDRGDLVPDALIMRMMETRLQQPDCANGFILDGFPRTIPQAEALKKLLEKLNIRLNFVVNLEVPRDVILDRLTTRRTCSNPDCQEIYNIKSNPPLPDGRCKKCGSPTIQRDDETEEAILNRLETYNEKTAPLIGFYEREGLLKTFSSVSSAETVEAVKKALKEC

SEQ ID NO: 85996 - DNA, 654 bp, Frankia sp. CcI3
  CDS (1)..(654): transl_table=11
gtgcgcctcgtactggtcgggccgcccggtgccggaaagggcacccaggccgcgttcattgcccaggcgcggtcgatccctaagatctccaccggggacatcttccgggcgaacgtgcgacagggaaccgaactgggcgtcaaggccaagaccttcatggatgccggtgatctcgtaccggacgagatcaccatcggtatggtccgcaaccgcttggccgaggacgacgcggtcaagggattcctgctcgatggttttcctcgtaacgtcccgcaggccgaggtgctcgggcagatgctcgatggcatggggacccgtctggacgtggtgctcgagctcgtcgtcgacgacgacgaggtggtgcgccggctgtccggtcggcgcacctgtcggaactgcggtcacatctggcacatcgacttcgacccgccgtcggtcgaaggcgtctgtgaccggtgtggtggcgagctgttccagcgcgacgacgatcggtcggagacggtccgccatcggctcgaggtctacgcggaccagacggcgccgctggtggcctactacgccgaaaagggcatcctgatcggtatcgacgccaccggaccggtggataacgtcaccgaccgcgcgctcgacgccctgcggcactacggcgactga

SEQ ID NO: 85997 - protein, 217 aa, Frankia sp. CcI3
MRLVLVGPPGAGKGTQAAFIAQARSIPKISTGDIFRANVRQGTELGVKAKTFMDAGDLVPDEITIGMVRNRLAEDDAVKGFLLDGFPRNVPQAEVLGQMLDGMGTRLDVVLELVVDDDEVVRRLSGRRTCRNCGHIWHIDFDPPSVEGVCDRCGGELFQRDDDRSETVRHRLEVYADQTAPLVAYYAEKGILIGIDATGPVDNVTDRALDALRHYGD

SEQ ID NO: 85998 - DNA, 615 bp, Frankia sp. CcI3
  CDS (1)..(615): transl_table=11
atgaggctcgtgctgctcggtccacctggctccggcaagggaacccagggcgctcgcatcagcgcccggcacggcatcccctcgatctcgaccggccggctgttcgaccggcagattgccgcgggtacgccgctgggccgtcgcgcggagcgctacgtccgcgcgggcgagctggtccccgacgagatcgtgctcgacatcgtcgccgaccggctcgagagcggcgtcgactgtgcggtggggttcctgttcgacgggttcccccggacctacccccaggccgaggcgttggaccggatgctcgtggcgacccgcggcccgctcgacgcggtcgtcgacctcgacgtcgacgtcgacgaggtgctcgaccgcatccggcgccggtcccgcaccgaggaccgggttgacgacgcggaggacaccgcccgtcgccggttgaaggtcttcgagcaggagaccgcaccactgcgccgctactaccagcggggtggcctactgcgcacggtggacggttccggcagcccggacgaggttgcggcccgcatcgaggagatgctggcggacgtcgcccatccgggtctgcgggcccatccgggtctgcctgtctgtcggtag

SEQ ID NO: 85999 - protein, 204 aa, Frankia sp. CcI3
MRLVLLGPPGSGKGTQGARISARHGIPSISTGRLFDRQIAAGTPLGRRAERYVRAGELVPDEIVLDIVADRLESGVDCAVGFLFDGFPRTYPQAEALDRMLVATRGPLDAVVDLDVDVDEVLDRIRRRSRTEDRVDDAEDTARRRLKVFEQETAPLRRYYQRGGLLRTVDGSGSPDEVAARIEEMLADVAHPGLRAHPGLPVCR

SEQ ID NO: 86000 - DNA, 687 bp, Frankia sp. CcI3
  CDS (1)..(687): transl_table=11
gtgcgcaagttcgtcatcatgggcgtgcagggcagcggcaagggaacccaggcgacgatgatggcccgggacttcgacctggtccacatcagcgtcggcgacgtcttccgctggaacgtgcagaaccacaccaaactcggtgcccaggtcaaacgcatcgtggcggccggtcacctggtcggggacgacctcgtcgagtcggtggtgcgctcccggctggccgagcacgactggaactacgggttcatcatcgacgggttcccgcgcaacgcccggcaggccgagttcttcctggagagctacgacatcgacggggtcatctacctcgacctccccgacgacgaggtctatcggcgggtgctcgcccgccggttctgctcacggtgcggcctggactacaacctgatcgccagtaggccgcaggtgccggacacctgcgacgtgtgcggagcgccgctgctgacccgggccgacgacaacccgcaggcacttgccgtccgcctgcgggagtaccacgagaagacccgaccggtcatggagatcttccagcgtaaggagttcgtggccgtcgtggacgcccggcacccgccgcgcgaggtgcaggcggagatccgtcggcatttcgatcttccacagctcgatcgctcgcagcttgattttccgcaacggccggtcgtgcccgggtga

SEQ ID NO: 86001 - protein, 228 aa, Frankia sp. CcI3
MRKFVIMGVQGSGKGTQATMMARDFDLVHISVGDVFRWNVQNHTKLGAQVKRIVAAGHLVGDDLVESVVRSRLAEHDWNYGFIIDGFPRNARQAEFFLESYDIDGVIYLDLPDDEVYRRVLARRFCSRCGLDYNLIASRPQVPDTCDVCGAPLLTRADDNPQALAVRLREYHEKTRPVMEIFQRKEFVAVVDARHPPREVQAEIRRHFDLPQLDRSQLDFPQRPVVPG

SEQ ID NO: 86002 - DNA, 651 bp, Novosphingobium aromaticivorans DSM 12444
  CDS (1)..(651): transl_table=11
gtgaacatcatcctgttgggccctccgggcgcgggcaagggcacccaggcacagcgtctggtcgagcggcatggcatgaagcagctctcgacgggcgacatgctgcgcgccgccgtcaaggcggagacgccggtcggcctcaaggccaaggcagtgatggaggcggggcagctcgtctcggacgagatcgtctcggcgctgatcggcgacgagctcgacgcgatgccggcaggccagggcgcgatcttcgacggttatccgcgcactgcaccccaggcagagtcgcttgatgccatcctcgagagccgcgggcgcaagcttgaccacgtgatcgagctcgacgtcaacgaggacgcgctcgtcgaacgcatcaccggccgctacacctgcgccacctgcgggaagggctatcacgacaagttcgagaagcctgcggtcgagggcacctgcgacaagtgcggcggtcatgaattcaagcgccgtcccgacgacaacgaggaaaccgtgcgcacgcgcatggcggagtatcgcgccaagaccgcgccgatcctgccgatctacgagagccgcggcatcgtgtcgcgcgtcgacggcatggccgacatggacgacgtcacggcggccattgaggcgatcctcgcggcgcgctaa

SEQ ID NO: 86003 - protein, 216 aa, Novosphingobium aromaticivorans DSM 12444
MNIILLGPPGAGKGTQAQRLVERHGMKQLSTGDMLRAAVKAETPVGLKAKAVMEAGQLVSDEIVSALIGDELDAMPAGQGAIFDGYPRTAPQAESLDAILESRGRKLDHVIELDVNEDALVERITGRYTCATCGKGYHDKFEKPAVEGTCDKCGGHEFKRRPDDNEETVRTRMAEYRAKTAPILPIYESRGIVSRVDGMADMDDVTAAIEAILAAR

SEQ ID NO: 86004 - DNA, 651 bp, Anaplasma phagocytophilum HZ
  CDS (1)..(651): transl_table=11
atggaaaaagaacaggtaaatttacttatttttggtgctcctggttctggaaaggggacgcaagcgcgtttgctgggtgaatatctgaaggggcttgaagttatctccatgggagatttgttgagggctgaagttgcttctaagactgtgataggggcagaagtagaagcgataatgcaagagggaaggcttgtaggagatcctttagtttgcgagatgatatttaggaaattaagggggttttctgcaggtttcttattggatggttttccaaggaatttacctcaagcggaatttctcactgcagtgatgcagttattgaatcgcaagatagatgcggttttaaagttagaggtagatgctgcagttgttgagaataggctgcaaggtcgcctggtatgtaagggatgtggtgctgtatccaatgctgtgtttaatcatggtgcgtgtcaagcgtgcggctgtgaggagtatgttcgcaggaatgacgattcgttgaatgttattaggcgaaggctcatggattatgatagggaagttacggtgttggaaggatactatcaggacaaggtgattaggataaatggagacagaactgtggaagaaattcacggggatgtgaagcatgtgctagatcgtctaaataactag

SEQ ID NO: 86005 - protein, 216 aa, Anaplasma phagocytophilum HZ
MEKEQVNLLIFGAPGSGKGTQARLLGEYLKGLEVISMGDLLRAEVASKTVIGAEVEAIMQEGRLVGDPLVCEMIFRKLRGFSAGFLLDGFPRNLPQAEFLTAVMQLLNRKIDAVLKLEVDAAVVENRLQGRLVCKGCGAVSNAVFNHGACQACGCEEYVRRNDDSLNVIRRRLMDYDREVTVLEGYYQDKVIRINGDRTVEEIHGDVKHVLDRLNN

SEQ ID NO: 86006 - DNA, 630 bp, Neorickettsia sennetsu str. Miyayama
  CDS (1)..(630): transl_table=11
atgaatttagtaatgtttggtccacctggctctggtaagggtacgcagtcctcacggatttgttcttatgtttcggcctccgtggttgactgtggtaagcttttgagggtagccgctcttactatgaggcagtctgaggatcttaaagctggaaaactccttccagatgagttggtaataggtgttgtaagagagaaattgagagagctgataaaagtcggggataattttattcttgatggttttccacgaagtgtggttcagtgtcatgcgctatttgaaatgtcttctgaactagagttcgagatttcgtgtcttgtaaaatttgaagtttctgaaagggaaatttttgcgaggcttttggataggcttgtttgtagtgcgtgtggtgctctccatgatgttgttttgggtaggtgtgtttcctgtggtagcgttgaatgtgaaagacgtagtgatgatctcaaagttgagataataaaaaagaggttgatgctatatggtgctgttgagcgggatattgtaaacttgttcaggtctagatctataaaggtgttgagcatagatgcaggccgttcagtagatgaggttgcagctgatcttagaacgcaacttttgatgtttatatga

SEQ ID NO: 86007 - protein, 209 aa, Neorickettsia sennetsu str. Miyayama
MNLVMFGPPGSGKGTQSSRICSYVSASVVDCGKLLRVAALTMRQSEDLKAGKLLPDELVIGVVREKLRELIKVGDNFILDGFPRSVVQCHALFEMSSELEFEISCLVKFEVSEREIFARLLDRLVCSACGALHDVVLGRCVSCGSVECERRSDDLKVEIIKKRLMLYGAVERDIVNLFRSRSIKVLSIDAGRSVDEVAADLRTQLLMFI

SEQ ID NO: 86008 - DNA, 666 bp, Ehrlichia chaffeensis str. Arkansas
  CDS (1)..(666): transl_table=11
atggaaaataaaataaatatgttaatttttggtcctcctgggtctggtaaaggtacgcaatgtcatattttgtcaaaaatttatagtactatttctgtaatttcaacaggtgatttgttaaggagtgaagcaaaacttgatactgatgatggtagaaaaattaggcaggttattgaatctggtgatttagtaagtgatgatatagtgtgtaagatgtttgctaagtctattagtagagtaaagagtggatttttattggatggatttccaagaaatttaagtcaagcagaatttttaacggaaattctagaggaatataatagccgtattgatatagtgatacagttgcaattagatttagagacgataaagaataggttatatggacgtattgtgtgtaaaaattgtggacaagtttctaatttaaatttttttgatagagcaatagatgaaattgtttgtaagttttgtaaaagtagtcagttagattatcgttatgatgataaagtagaagttatcataaaaagggttaatcagtatgatagagagattaaaaaattagaaaattattatcgtgataagattgtgtgcattgatgcaggtaagccaatagaagaggttacttgtgatataaaagacaaaatagcccatttaattattggttga

SEQ ID NO: 86009 - protein, 221 aa, Ehrlichia chaffeensis str. Arkansas
MENKINMLIFGPPGSGKGTQCHILSKIYSTISVISTGDLLRSEAKLDTDDGRKIRQVIESGDLVSDDIVCKMFAKSISRVKSGFLLDGFPRNLSQAEFLTEILEEYNSRIDIVIQLQLDLETIKNRLYGRIVCKNCGQVSNLNFFDRAIDEIVCKFCKSSQLDYRYDDKVEVIIKRVNQYDREIKKLENYYRDKIVCIDAGKPIEEVTCDIKDKIAHLIIG

SEQ ID NO: 86010 - DNA, 657 bp, Francisella tularensis subsp. holarctica
  CDS (1)..(657): transl_table=11
atgcgtataatacttttaggagcacctggagccggtaaaggaactcaagcaaagataattgaacaaaaatataatatcgctcatatttctactggagatatgataagagaaactataaaatcaggttcggtacttggtcaagaattaaaaaaagttcttgatgctggagagttagtttcagatgagtttattatcaaaattgtcaaagatagaatttcaaaaaatgattgtaacaatggctttttattagatggtgtccctagaactattccacaagcacaagaattagacaagttaggtgtaaatattgactatatagttgaggtagatgtggctgataaccttcttatagagagaattacaggtaggagaatacatccagcatctggtagaacttatcacactaaatttaacccacctaaagtagccgacaaagatgatgtaaccggtgaaccactaataactcgtacagatgacaatgaagacacagttaaacaaagactatctgtataccatgctcaaaccgccaagttaatcgatttttacagaaatttctcatcaacgaacactaaaataccaaaatatattaagataaacggcgatcaagctgttgagaaagtgtctcaggatatttttgatcagcttaataaaagataa

SEQ ID NO: 86011 - protein, 218 aa, Francisella tularensis subsp. holarctica
MRIILLGAPGAGKGTQAKIIEQKYNIAHISTGDMIRETIKSGSVLGQELKKVLDAGELVSDEFIIKIVKDRISKNDCNNGFLLDGVPRTIPQAQELDKLGVNIDYIVEVDVADNLLIERITGRRIHPASGRTYHTKFNPPKVADKDDVTGEPLITRTDDNEDTVKQRLSVYHAQTAKLIDFYRNFSSTNTKIPKYIKINGDQAVEKVSQDIFDQLNKR

SEQ ID NO: 86012 - DNA, 654 bp, Desulfitobacterium hafniense Y51
  CDS (1)..(654): transl_table=11
atgagagcaatcctcatggggccccctggggcaggtaaaggaacacaagctgccgatttaattacacggtatcaaatccctcatatttctaccggggatatgttccgggctgcgattaaagcaggaactgccctgggaatgaaagctaaggaatatatggatgccggttctctcgtccctgacgaggtaaccatcgggatcgttgctgagcgattggcagaacccgattgcagcaaaggattcttgttggatggttttccacggacagttgctcaagcggacgctttagacaagattctcacccagctcaagatgaatcttgacggcgtgatcaatatcgaagttcctgaagcaaaactccttgagcgcctgacaggccgccggatttgccggcagtgtggagggacttaccatatggttttcaatccacccgcagcagaagcggtttgcgataaatgcggtggagagctttatcaacgcagcgatgacactttggaaaccgccaagaaccggttgcaggtctataatgatcaaactcagcccctcatcgattactatcgagaaaagggcctgctgaaggagatcaacggggaccaggatattgcccaagtgctgcaggatattgtggacgctatggagcatgggcatgattga

SEQ ID NO: 86013 - protein, 217 aa, Desulfitobacterium hafniense Y51
MRAILMGPPGAGKGTQAADLITRYQIPHISTGDMFRAAIKAGTALGMKAKEYMDAGSLVPDEVTIGIVAERLAEPDCSKGFLLDGFPRTVAQADALDKILTQLKMNLDGVINIEVPEAKLLERLTGRRICRQCGGTYHMVFNPPAAEAVCDKCGGELYQRSDDTLETAKNRLQVYNDQTQPLIDYYREKGLLKEINGDQDIAQVLQDIVDAMEHGHD

SEQ ID NO: 86014 - DNA, 657 bp, Saccharophagus degradans 2-40
  CDS (1)..(657): transl_table=11
atgcgattaatcttattgggtgcgccaggcgcaggaaagggcactcaggcgaaatttattatggaggcctatggcgttccgcaaatttcaactggtgacatgctgcgtgctgcggtaaaagcgggctccccccttggtctaaaagttaaagatatcatgacttctggcgggctagtatctgacgacataatcattgatttggtaaaagaacgtattgccgaaccagattgccaaaaagggtttttgtttgatggcttcccgcgcactatcccacaagctgaagcactagtggctgcaggggtaaatatcgatcacgtgcttgaaatctttgttgaagatgaagaaattgtatctcgtttaagcggtcgtcgtgttcacgaagcctctggtcgtgtttatcacgttaaacacaacgcgcctaaaaccgaaggtgtagatgacgaaaccggtgagccgttggtgcaacgcgatgatgataaagaagagactgttcgcaaaaggttggctgtatatcatgagcaaactgagccgctagtcgatttttataaaaaactatccgcagaaagcagcgatagcctgccagtgtactctcgggtagatggtattggctctcttgatgatattcaggcgcgtgtttttgaagccctgaaaaagtag

SEQ ID NO: 86015 - protein, 218 aa, Saccharophagus degradans 2-40
MRLILLGAPGAGKGTQAKFIMEAYGVPQISTGDMLRAAVKAGSPLGLKVKDIMTSGGLVSDDIIIDLVKERIAEPDCQKGFLFDGFPRTIPQAEALVAAGVNIDHVLEIFVEDEEIVSRLSGRRVHEASGRVYHVKHNAPKTEGVDDETGEPLVQRDDDKEETVRKRLAVYHEQTEPLVDFYKKLSAESSDSLPVYSRVDGIGSLDDIQARVFEALKK

SEQ ID NO: 86016 - DNA, 657 bp, Methylobacillus flagellatus KT
  CDS (1)..(657): transl_table=11
atgagagtcatactattaggcgcaccgggggctggtaaaggcacccaggccaccttcatcaaggaagcattcgacatcccgcagatttccaccggtgacatgctgcgtgccgcagtgaaggcgggcacccagctgggcctggaagccaagcgttatatggactccggcggcctggtcccggatgatgtcatcatcggcctcgtcaaggaacgcatcaaggatgccgactgccagcaaggcttcctgttcgacggcttcccccgcaccatcccccaggcggaagcgatgaagcaggctggggtcgatatcgactatgtggttgaaatcgatgtgcccgatgaggaaatcatcaagcgcatgagcggccgccgcacgcatttgccatccggccgaacctatcatgtcgtattcaatccgcccaaagtcgcggggaaggacgatgtcaccggcgaggatctggtacagcgcgacgacgacaaggaagaaaccgtcgccaagcgcctggaggtgtaccatcgccagaccaagccgctggtggactattattccaactgggcagcaaacggcgccgccaatgcccccaaatatgtgcgtatttccggcctgggtgaagtcagtgaaatccgcaggcaagtcttgcaggcgcttggcaagtag

SEQ ID NO: 86017 - protein, 218 aa, Methylobacillus flagellatus KT
MRVILLGAPGAGKGTQATFIKEAFDIPQISTGDMLRAAVKAGTQLGLEAKRYMDSGGLVPDDVIIGLVKERIKDADCQQGFLFDGFPRTIPQAEAMKQAGVDIDYVVEIDVPDEEIIKRMSGRRTHLPSGRTYHVVFNPPKVAGKDDVTGEDLVQRDDDKEETVAKRLEVYHRQTKPLVDYYSNWAANGAANAPKYVRISGLGEVSEIRRQVLQALGK

SEQ ID NO: 86018 - DNA, 648 bp, Methanococcoides burtonii DSM 6242
  CDS (1)..(648): transl_table=11
atgaatgttgtattgtttggtccaccgggtgcaggaaaaggcacccaggccaaagaacttgataagcattatcagatccctcacatatctaccggtgatatcctgagggctaatgtgcgcgatggtactaaacttggtaaagaagcaaagggctatatggataaaggcgaactggttcctgatgaggtgcttattggtgtcataaagaaccgtctggctgaatctgattgtaagcctggctatcttcttgatgggtatccaaggacaactcctcaggcagatgctttatcttcgattcttgtggagatcggcatgcctttagaggtcgtactgaatatagatgttgctgatgaggaacttgtcacccgcctttgtggcaggtacgtgtgtacgtgtggtgaaagctatcatatgaagttcaaccctcctaaaaaggagaatgtttgtgatgcatgtggtgcggatctttaccagcgtgacgatgacaaggaagatgttatcaggcagaggcttgattcatacaaggaaaagacacaacctctcataagctattatggtgagaaaggtcttcttgtggacatcgatggtactggtgcaatagatcggatattttcggatatctgtaaaacccttgatcagtacaaataa

SEQ ID NO: 86019 - protein, 215 aa, Methanococcoides burtonii DSM 6242
MNVVLFGPPGAGKGTQAKELDKHYQIPHISTGDILRANVRDGTKLGKEAKGYMDKGELVPDEVLIGVIKNRLAESDCKPGYLLDGYPRTTPQADALSSILVEIGMPLEVVLNIDVADEELVTRLCGRYVCTCGESYHMKFNPPKKENVCDACGADLYQRDDDKEDVIRQRLDSYKEKTQPLISYYGEKGLLVDIDGTGAIDRIFSDICKTLDQYK

SEQ ID NO: 86020 - DNA, 666 bp, Ralstonia metallidurans CH34
  CDS (1)..(666): transl_table=11
atgcgtttgatcctgttgggcgcacctggcgccggcaaaggcacgcaagccaagttcatctgcgagaagttcggcattccgcaaatctccacgggcgacatgctgcgcgccgcggtgaaggcgggcacgccgctgggcatcgaagccaagaaggtgatggacgcgggcggactggtgtcggatgacatcattatcggcctggtgaaagaccgtcttaagcagcctgattgcgaaaagggctacctgttcgatggtttcccgcgcacgattccgcaggccgaggcaatgaaggaagccggcgtggcgatcgactacgtgctggaaatcgacgtgccgttcgacgccatcatcgagcgcatgagcggccgccgcgtgcatgtggcgtcgggccggacataccacgtcaagttcaacccgccgaaggccgacatggtcgacgacgaaacgggcgaagcactgatccagcgcgacgacgacaaggaagagacggtgcgcaagcgcctggacgtgtactcgcagcaaacccgtccgctggtcgactactactcgaactgggccgccaacggcgatgcctcggcgaaggtatcgccgccgaagtaccgcaagatcgcgggtcttggcgaagtcgacaagatcacggcaagcgtgttcgacgcgctgaagtaa

SEQ ID NO: 86021 - protein, 221 aa, Ralstonia metallidurans CH34
MRLILLGAPGAGKGTQAKFICEKFGIPQISTGDMLRAAVKAGTPLGIEAKKVMDAGGLVSDDIIIGLVKDRLKQPDCEKGYLFDGFPRTIPQAEAMKEAGVAIDYVLEIDVPFDAIIERMSGRRVHVASGRTYHVKFNPPKADMVDDETGEALIQRDDDKEETVRKRLDVYSQQTRPLVDYYSNWAANGDASAKVSPPKYRKIAGLGEVDKITASVFDALK

SEQ ID NO: 86022 - DNA, 711 bp, Acidobacteria bacterium Ellin345
  CDS (1)..(711): transl_table=11
gtgcagagtgatacgcgtaaagtcggtccggtgattttgttcggaccgcccggagcagggaaaggcacccaatccaagcgcctggtgcaggcgctgggggtcccgcagatctccacgggcgacatcctcagggagaacgtcgcgcaggaaacagggtggggaaaacaggccaaggccgccatggaaagtggccaactggtgtcagactttatcgtctgcgccatggttgccgaaaggcttggcaagccggacaccagccgagggtgtatcctcgacgggtttccgagaaccgtcgcccaggccgaatggctggataagttgttgacgggaaagctctttgaaagtactcgggtcagcttagcaagtaaccttccaccggttgtgatttcgatcaaggtggactataatcaattgctgcaacggcttaccggacgtcgttcgtgtccctcctgcggaacgatctacaacgtttactcgaagcctcccaaggtcgagggaatttgcgaccttgagggctcgaagcttgtaatgcggcaggatgaccgcgaagaagtcatcgccggacgtctgaaggcatacgagcagcagactcttcctcttgagaagtattaccgggctcaaggtcgtctgtttgaaatcaatggcgacgccccggttgagaagatcacagaggagatgttgagtctcatcgagcatggcaatcatttgtaa

SEQ ID NO: 86023 - protein, 236 aa, Acidobacteria bacterium Ellin345
MQSDTRKVGPVILFGPPGAGKGTQSKRLVQALGVPQISTGDILRENVAQETGWGKQAKAAMESGQLVSDFIVCAMVAERLGKPDTSRGCILDGFPRTVAQAEWLDKLLTGKLFESTRVSLASNLPPVVISIKVDYNQLLQRLTGRRSCPSCGTIYNVYSKPPKVEGICDLEGSKLVMRQDDREEVIAGRLKAYEQQTLPLEKYYRAQGRLFEINGDAPVEKITEEMLSLIEHGNHL

SEQ ID NO: 86024 - DNA, 684 bp, Silicibacter sp. TM1040
  CDS (1)..(684): transl_table=11
atgaccacagatgttatgacccgccccgcggtactgatcctgctgggccctccgggggctggcaaaggcacgcaggcgcggatgcttcaggaaaaatacggccttgtgcagctttccaccggggatcttctgcgtgcggccgtggctgcgggcaccgatgcgggcaaacaggccaaggcggtgatggatgcgggcggtctggtctctgacgagatcgtcatcgccatcctcaaggaccggatgaacgacgcagattgccgcaacggggtcatcctcgacggcttcccgcgcacaaccgtgcaggccaaagcgctggatgggctgctggcctcgaccggacagcggatcaacgcagcaatcagcctcgaagtgaatgacagcgcgatggtgacacggatctccgggcgctccacctgcgcggattgcggagaaggctatcacgacaccttcaagccgcctatgccgggtgaagtctgcgccaaatgcggcggtgaaaccctcacgcggcgcgctgatgatcgggcagagacagtggccagccggcttgaggcctatcatgcgcagaccgcaccgctgatcgcctattaccaagaggccggcgtgctgaaatccgtggatgcaatggcggaaatcagcagcgttgcgacgcagatatcctctgtggtggaaacgatcctgcactaa

SEQ ID NO: 86025 - protein, 227 aa, Silicibacter sp. TM1040
MTTDVMTRPAVLILLGPPGAGKGTQARMLQEKYGLVQLSTGDLLRAAVAAGTDAGKQAKAVMDAGGLVSDEIVIAILKDRMNDADCRNGVILDGFPRTTVQAKALDGLLASTGQRINAAISLEVNDSAMVTRISGRSTCADCGEGYHDTFKPPMPGEVCAKCGGETLTRRADDRAETVASRLEAYHAQTAPLIAYYQEAGVLKSVDAMAEISSVATQISSVVETILH

SEQ ID NO: 86026 - DNA, 627 bp, Rubrobacter xylanophilus DSM 9941
  CDS (1)..(627): transl_table=11
atgaggatcatccttctgggcccccagggggcgggcaaggggacgcaggcggcccggctctcggagaggacgggggccaggcacatctcgaccggggatctggtgcgggccgagatcaaggccggcacggagctgggcaggaaggtccaggagtacaacgaccgcggcgagctggtgcccgacgagatcatcgtggagatggccaagccgcacctgcgggaggcgggctcctggatcctggacggcttcccgcgcaccgaggcgcaggcgcgggcgctggacgaggccctggaggagctgggggtgggcctcgacagggtggtggcgctggaggcccccgacgaggtgctcgtccggcgcctctccgggcggcgccagagcgaggcgaccggccggatctaccacctcgagcacgacccgccgcccccggacgacccgggccccttcgtccagcgcaaggacgacaccgaggaggccatccggcgccggctcaggctctaccacgagcagacggagcccctgaagggctactacgccgagcgggggctgctggccaccgtggacgccacccgcagcatagaggaggtaaccgaggagctgctgcgggtgctgggggtgggcgcttga

SEQ ID NO: 86027 - protein, 208 aa, Rubrobacter xylanophilus DSM 9941
MRIILLGPQGAGKGTQAARLSERTGARHISTGDLVRAEIKAGTELGRKVQEYNDRGELVPDEIIVEMAKPHLREAGSWILDGFPRTEAQARALDEALEELGVGLDRVVALEAPDEVLVRRLSGRRQSEATGRIYHLEHDPPPPDDPGPFVQRKDDTEEAIRRRLRLYHEQTEPLKGYYAERGLLATVDATRSIEEVTEELLRVLGVGA

SEQ ID NO: 86028 - DNA, 585 bp, Mesorhizobium sp. BNC1
  CDS (1)..(585): transl_table=11
atgaggcttatacttctcgggccgccgggggcgggcaagggaacccaagcgcagatcctggttgaaaagctgcacattccgcaactctccacgggagatatgctgcgcgctgcggtgaaggccgagaccgagatcggcaagaaggccaaggcggtgatggatgcgggcgagctcgtgtccgacgccatcgtcaacgccatcgtggcggaacggattgatcagcccgactgcgcgaatggtttcattctagacggctatccacgtacgctggcgcaggccgatgcggtcgaagcgatgctcggcgagcgcggcctgaagcttgacgcggtcatcgaactcgtggtcgacgataaggcgttggttggccggatcatgaagcgggcggaagacgcacaagccgcgggccagccggtgcgccgtgatgacaatccggaggtcttcgaggagcgcctgcgcgaatattacaaaaagacggcgccgctggtcgggtattattatgcaaagggcctgctgaagggcgtcgacggcatggcctcgatcgatgaggtgacgcggcagatcgaagggatcctggcaaaggcgtaa

SEQ ID NO: 86029 - protein, 194 aa, Mesorhizobium sp. BNC1
MRLILLGPPGAGKGTQAQILVEKLHIPQLSTGDMLRAAVKAETEIGKKAKAVMDAGELVSDAIVNAIVAERIDQPDCANGFILDGYPRTLAQADAVEAMLGERGLKLDAVIELVVDDKALVGRIMKRAEDAQAAGQPVRRDDNPEVFEERLREYYKKTAPLVGYYYAKGLLKGVDGMASIDEVTRQIEGILAKA

SEQ ID NO: 86030 - DNA, 603 bp, Cytophaga hutchinsonii ATCC 33406
  CDS (1)..(603): transl_table=11
ttgttccttcaaataaaattaagtccccttatgttgaatattgtcttatttggccctcccggagcaggtaaaggaacacaaagtgaaaaattaattgctaaatataaattagcacatttatctacaggagatatttttcgcgatcacatttcccgtaaaacagaacttggcgtaaaagttaaggaatacatagacaatggtttgctggtgccggatgaagtaacggtaggcatcttaaaagcggctattgaatctaatgcaggtgcaacaggttttatctttgatggttttccaagaacggtgcatcaggcagaagtattggataatatgcttgcaacactgcaaacaaaaatccatgctgttgttgcgctggatgtgaatgaagaagaactgaaaaaacgtattgagatccgcaagcagacttcgggtcgtgcagatgatgatgcagaaaaagtattaaagcgcatcgacgaatatttcaataaaaccgttcacgtacttccgtattatgaagcgcaaggtaaagcagtgaaagtgcagggtatcggagagattgaaacaatcttcactgaaatctgcaacgctgtagatgcagcaaaataa

SEQ ID NO: 86031 - protein, 200 aa, Cytophaga hutchinsonii ATCC 33406
MFLQIKLSPLMLNIVLFGPPGAGKGTQSEKLIAKYKLAHLSTGDIFRDHISRKTELGVKVKEYIDNGLLVPDEVTVGILKAAIESNAGATGFIFDGFPRTVHQAEVLDNMLATLQTKIHAVVALDVNEEELKKRIEIRKQTSGRADDDAEKVLKRIDEYFNKTVHVLPYYEAQGKAVKVQGIGEIETIFTEICNAVDAAK

SEQ ID NO: 86032 - DNA, 570 bp, Rhodococcus sp. RHA1
  CDS (1)..(570): transl_table=11
atgcgcatcatcctgacagggccgccgggagccggtaaaggcactcaggcgcagttgctttcgtcggcgctgcagctcccccacatctcgactggtgacctgttccgctcccatatcgcgcagggcacggaactcgggcagacggcgaaatcgttcctcgacgccggcgaactggtcccggacgaggtcaccatcgggatggtggcggagcgcctcgccggcgccgacacggccacgggattcattctggacggcttcccccgcaccgtggctcaggcgaccgcgctcgatgagctcctcggccggcaactgagccagatcgatgccgtcctggatttctcgatagcggacgatgcagtcgtcgaacggatgctggcccgtggccgcgccgacgacaccgaggacgtcattcgtcgacgtctgcgggtctatcacgacgagacccgaccgctgctcgactactactcgccgtttcttctgtccgtcgatgcggaaggtgaggtcgacgaggtctacgcccacgcgaacggcgcgctgtccgagcgcggaagcgtcgctccgtccacctga

SEQ ID NO: 86033 - protein, 189 aa, Rhodococcus sp. RHA1
MRIILTGPPGAGKGTQAQLLSSALQLPHISTGDLFRSHIAQGTELGQTAKSFLDAGELVPDEVTIGMVAERLAGADTATGFILDGFPRTVAQATALDELLGRQLSQIDAVLDFSIADDAVVERMLARGRADDTEDVIRRRLRVYHDETRPLLDYYSPFLLSVDAEGEVDEVYAHANGALSERGSVAPST

SEQ ID NO: 86034 - DNA, 645 bp, Haemophilus somnus 129PT
  CDS (1)..(645): transl_table=11
atgaaaatcattcttttgggggcacctggtgcaggcaaaggtactcaagcacaatttattacaaataagtttggcattcctcaaatttctactggtgatatgctacgtgctgcaattaaagctggaagtgaattgggacaaaaggctaaaatcttaatggatatgggacaattggtacctgatgatttgattatttctttggtgaaagaacgtgtagcacaagaagattgcgagaaaggttttttactggacggtttcccacgtacaattccacaagcagacgctttaaaatccgttggtatcagtattgattatgtattggaatttgatgtgccggatgaagttattgttgagcgtatgagtggtcgtcgtgttcaccctgcttctggacggacttatcacattgtttacaacccgccaaaagtggaagataaagatgatataaccggtgaagatttaattcttcgtgcagatgataaacctgaaactgttctagatcgtttaaaaatttatcataataccactaaacttttggttgattattatcaagctgaagctgcacaaggtaacacgaaatactttcgattagatggtacacaaaaagttgaagaagtgagtcaagaactggacaagatcttgagctaa

SEQ ID NO: 86035 - protein, 214 aa, Haemophilus somnus 129PT
MKIILLGAPGAGKGTQAQFITNKFGIPQISTGDMLRAAIKAGSELGQKAKILMDMGQLVPDDLIISLVKERVAQEDCEKGFLLDGFPRTIPQADALKSVGISIDYVLEFDVPDEVIVERMSGRRVHPASGRTYHIVYNPPKVEDKDDITGEDLILRADDKPETVLDRLKIYHNTTKLLVDYYQAEAAQGNTKYFRLDGTQKVEEVSQELDKILS

SEQ ID NO: 86036 - DNA, 576 bp, Trichodesmium erythraeum IMS101
  CDS (1)..(576): transl_table=11
gtggtaaaactggtatttttaggtccaccaggagcggggaaaggaacacaagcatctctcatagcagatttttataaagttccccatatttctactggtgatattctgcgcagtaacgtagcagaaagatctcctttgggtattaaagccaaagactatatggataagggagatttagtccctgaccaactcattcttgatatggttaaggaaagactggaaaaccctaatgctcaaaatggttggattctagatggctttccccggactgtaactcaggcagaagagtttttcaaaaaatatgagagtgaaggagaagaagctaagagtagtagttcttttcacgtaattaatttacaagtaccggatgatgttttagtagctcgtttgttatcaagaaaacgtgaagatgatcaggaagaaactattagaaatcgtttacaagtttattatcaacaaacgcaacctttgattgagttttatcaagcacgtgaacagttaattattatagatggaaataatcctattgaaactgtgactaatgctataaaacaagaggttgataaaattacctga

SEQ ID NO: 86037 - protein, 191 aa, Trichodesmium erythraeum IMS101
MVKLVFLGPPGAGKGTQASLIADFYKVPHISTGDILRSNVAERSPLGIKAKDYMDKGDLVPDQLILDMVKERLENPNAQNGWILDGFPRTVTQAEEFFKKYESEGEEAKSSSSFHVINLQVPDDVLVARLLSRKREDDQEETIRNRLQVYYQQTQPLIEFYQAREQLIIIDGNNPIETVTNAIKQEVDKIT

SEQ ID NO: 86038 - DNA, 660 bp, Alkalilimnicola ehrlichei MLHE-1
  CDS (1)..(660): transl_table=11
atgaaagtcattcttctcggccccccgggcgccggtaagggcacccaggccgcgggcatctgcgagcgtttcgatatcccccagatctccaccggcgacatgctgcgcgctgcggtaaaggccggcaccccgctcggccagcaggccaagaaggtcatggatgccggggaactggtgtcggacgacatcatcatggggctggtcaaggagcggatcgccgaaccggattgcgccaacggtttcctgttcgacggcttcccgcgcaccatcgcccaggccgaggggctgaaggccgaggggatcaacgtggatgcggtggtggagatccaggtcccggatgaggacatcgtccagcgtatggctggccgccgggtgcacccgggctctggccgggtctaccacgtggagcacaatccgcccaaggaggagggcaaggacgacgtcaccggcgagccgctggtgcagcgcgacgacgatcaggaagagacggtgcgcaagcgcctcggtgtctatcacgagcagactcagccgttggtggagtactactccgactgggcggccaagggcggtgatggggccccgcgctacatcgtcatcaagggggtgggtagcgtcgacgatatccgcaaccgcatcctctccgagctggagcgcgcctga

SEQ ID NO: 86039 - protein, 219 aa, Alkalilimnicola ehrlichei MLHE-1
MKVILLGPPGAGKGTQAAGICERFDIPQISTGDMLRAAVKAGTPLGQQAKKVMDAGELVSDDIIMGLVKERIAEPDCANGFLFDGFPRTIAQAEGLKAEGINVDAVVEIQVPDEDIVQRMAGRRVHPGSGRVYHVEHNPPKEEGKDDVTGEPLVQRDDDQEETVRKRLGVYHEQTQPLVEYYSDWAAKGGDGAPRYIVIKGVGSVDDIRNRILSELERA

SEQ ID NO: 86040 - DNA, 570 bp, Hyphomonas neptunium ATCC 15444
  CDS (1)..(570): transl_table=11
gtgaacctgatactgtttggtccgccggctgcgggcaagggcacgcaggccaagcgactcgttgagcagcgtggctttgtgcaactttccaccggcgacatgctccgcgccgccagggcgtccgggtccgaactcggccagcgggtggcgaagatcatggatgagggcggtctggtctccgatgagatcgtgattgcgctgatcgaggaacaattgacggttcaggctggtgcgccggggttcatctttgatggcttcccccgcaccatcggccaggccgaggcgctcgacagcctgctggaatcgcgggaatcgaaggtcgatctggtcatccgcatgattgtggacgacacacgcctgcttgagcgggttaccaagcgctttgaggagcagggaagggcggatgacaatccggccaccttctcgcgccgtctggagcgttactacgaagataccgcgcccctcgtacctatgtacgcggagcggggtgtgctggtcgagatcgacggaatgggctcaattgaggccgtctccgcagaaatcgatgcggccctgaaacaatccgcgtga

SEQ ID NO: 86041 - protein, 189 aa, Hyphomonas neptunium ATCC 15444
MNLILFGPPAAGKGTQAKRLVEQRGFVQLSTGDMLRAARASGSELGQRVAKIMDEGGLVSDEIVIALIEEQLTVQAGAPGFIFDGFPRTIGQAEALDSLLESRESKVDLVIRMIVDDTRLLERVTKRFEEQGRADDNPATFSRRLERYYEDTAPLVPMYAERGVLVEIDGMGSIEAVSAEIDAALKQSA

SEQ ID NO: 86042 - DNA, 615 bp, Rhizobium leguminosarum bv. viciae 3841
  CDS (1)..(615): transl_table=11
atgagattgatcatccttggaccgccgggggcgggcaagggaacacaggcagcgcgcctcgccgagcggctgggcgtgccacaactgtcgacgggagatatgctgcgcgccgcggtcaccaagggctcgccggttggccttgctgcgcgcgacctcatagcgcggggcgaattggttggcgacgacatcgtcgtcaattgcgtcctggaacgcatcgccgagccgggcgctgcgtccggcttcatcctcgacggctttccccgcacgctgggacaggcgcgggccctcgacgaagcgctcgaaaaggcacacctcggtctggatgcggtgctcgaactgaaggtcgacgaatccgtgctgctagaccgcatcatctatcgggcgcgcgaggccaaggccgcaggcctgccggtgcgcgccgacgacaatccggaagcgctgaaagtcaggctcgagtcctaccggacgcagacgcagccgctcgcggatcactaccgcaccgccgggctcctacgcaccgttaatgggctgaggcccgtcgatgaggttacgtccagcctttttgcggaattgcggctccaaccgagaacggccgacccgggctctcttgggtga

SEQ ID NO: 86043 - protein, 204 aa, Rhizobium leguminosarum bv. viciae 3841
MRLIILGPPGAGKGTQAARLAERLGVPQLSTGDMLRAAVTKGSPVGLAARDLIARGELVGDDIVVNCVLERIAEPGAASGFILDGFPRTLGQARALDEALEKAHLGLDAVLELKVDESVLLDRIIYRAREAKAAGLPVRADDNPEALKVRLESYRTQTQPLADHYRTAGLLRTVNGLRPVDEVTSSLFAELRLQPRTADPGSLG

SEQ ID NO: 86044 - DNA, 660 bp, Pediococcus pentosaceus ATCC 25745
  CDS (1)..(660): transl_table=11
atgagtaaattaaacctcgttttgatgggtcttccaggtgctggtaaaggtacacaggctcagagaattattgaggatttcaaaattccacatatttcaactggtgacattttccgtgaagctatgaaaaatgaaaccgaaatgggtgtggaagcaaagaagttcattgataagggtgaacttgttcccgatagtgtaactaacgggatcgtcgaagatcgtcttgcaatggacgatgtcaacgatggttttatgcttgatggttttcctagaaatatcgatcaagctaaggcgctagatgaaatgacatctcgtttaaacaaaccacttacagcagtgattaacattcatgttgatcctgaagttttggttgaaagactatctggcagatttatttgtaaaaattgtggagctacttatcataagctttacaatccaccaaaggttgaaggaacttgtgatgtttgcggacatcacgaattcttccaacgtgaggacgacaagccagaaactgtaaaaaatcgcattgctgttaatactaaacttaacactccgttgatttcttactatgaagaaaagcatctcctttacaacattaatggcgatcaggatatcaacgatgtttattctgaagtcaaaaaagtattagaggctctctaa

SEQ ID NO: 86045 - protein, 219 aa, Pediococcus pentosaceus ATCC 25745
MSKLNLVLMGLPGAGKGTQAQRIIEDFKIPHISTGDIFREAMKNETEMGVEAKKFIDKGELVPDSVTNGIVEDRLAMDDVNDGFMLDGFPRNIDQAKALDEMTSRLNKPLTAVINIHVDPEVLVERLSGRFICKNCGATYHKLYNPPKVEGTCDVCGHHEFFQREDDKPETVKNRIAVNTKLNTPLISYYEEKHLLYNINGDQDINDVYSEVKKVLEAL

SEQ ID NO: 86046 - DNA, 567 bp, Oenococcus oeni PSU-1
  CDS (1)..(567): transl_table=11
atgtctaaaaatattgttatgttgggtcttcctggagttggcaaaggtacaaacgctgatattatggttgaggattttaaactgcctcacatatctactggagatatttttcgttcggcgatggccaatcatactgaattaggtgataaggctaaatctttcatggatgccgggaatcttgttcctgatgaaatcacaaatggaattgtgaacgaacgtttgaatgaggctgatgttaaggatgccggtggttttattctcgatggctatccgagaaatacttctcaagcagattcactggaatcttttttgagaagtattcaacagaagcttaatgcggttatctatttagatgcttcggaaaaaaccgtaactaatagaatgcttggacgtggtagggaagacgatacaccggaagttgtcgctcacagaattgatgttgcaaaaaaagaaaccatgcccttggttgaatattatcgtaataaaggaagtctttacacgattgatgcaaatggagaagtttcagttgtttatccaaagattaaaaaacttgtttcaaatttataa

SEQ ID NO: 86047 - protein, 188 aa, Oenococcus oeni PSU-1
MSKNIVMLGLPGVGKGTNADIMVEDFKLPHISTGDIFRSAMANHTELGDKAKSFMDAGNLVPDEITNGIVNERLNEADVKDAGGFILDGYPRNTSQADSLESFLRSIQQKLNAVIYLDASEKTVTNRMLGRGREDDTPEVVAHRIDVAKKETMPLVEYYRNKGSLYTIDANGEVSVVYPKIKKLVSNL

SEQ ID NO: 86048 - DNA, 564 bp, Leuconostoc mesenteroides subsp. mesenteroides ATCC 8293
  CDS (1)..(564): transl_table=11
atggctaaaaatttgattttgttgggtttgccaggtgctggtaaaggcacacaagcagactttattgtgaaggattattctattgttcatattagtactggagatattttccgtgctaatttggcagagaatactgaattaggacaaaaggcgcgtcaattcatggatgcgggcgacttagttcctgacgaaatcacaaatgctatggttgctgatcgtttaaaccaacaagacgttgaaactggttttatgcttgatgggtaccctcgtaatgaagcacaagcagtattcctagataagtatttatcagataacggtaaatctgtgtcagcaacattatattttgaagttgctgatacattgttgcgcgaacgtcttttgggacgtggtcgagcagatgatacacccgaagttattgacaaccgtttggcagttaataaagcggctaacttgcctttggtagattactatcaaaaagcaggtgtgttgcacacaatcgatggcggtcgtgaacttgctgatgtgtatcatgatgttaaggaagttttggacaatttaaattaa

SEQ ID NO: 86049 - protein, 187 aa, Leuconostoc mesenteroides subsp. mesenteroides ATCC 8293
MAKNLILLGLPGAGKGTQADFIVKDYSIVHISTGDIFRANLAENTELGQKARQFMDAGDLVPDEITNAMVADRLNQQDVETGFMLDGYPRNEAQAVFLDKYLSDNGKSVSATLYFEVADTLLRERLLGRGRADDTPEVIDNRLAVNKAANLPLVDYYQKAGVLHTIDGGRELADVYHDVKEVLDNLN

SEQ ID NO: 86050 - DNA, 654 bp, Solibacter usitatus Ellin6076
  CDS (1)..(654): transl_table=11
gtgaaagccatcgtactgttcggctcaccaggctccggaaaaggtacccaggctaagatgttgacgcaatgcctggcgatcccccatatctcgacgggggacatgctcagggaccggattcgatccggtaccgagtgtgggaccgcgatggaagccacgatgcaatctggcgcgctggtatccgatgcgctggtgaacgagatggtgaaagagcggctcagcgagccggacgcctcggctggctttattttggatggatatccgcggaccctggatcaggcgaggcacttggcagcctggttgctagggcggggaatccacgagttggtgatccacctcgcagtagattacaatattattattgcccgtttgacaggacgccgtcagtgccccctctgcggcacgctgtacaacgtagcttcccaaccacccaaagtggatgaactgtgcgacctggacggggagaagttggtcatccgggatgatgacagcgagacggtgattcgcgggcggttggacgcgtatgatcgccagacaaagccggtgttggagtttttccagacgtccggccaccgggtgatccgggtggatgccgatagcgatccgccggagaaggtgttcgagaggatctgccgggccatggagtcagcttga

SEQ ID NO: 86051 - protein, 217 aa, Solibacter usitatus Ellin6076
MKAIVLFGSPGSGKGTQAKMLTQCLAIPHISTGDMLRDRIRSGTECGTAMEATMQSGALVSDALVNEMVKERLSEPDASAGFILDGYPRTLDQARHLAAWLLGRGIHELVIHLAVDYNIIIARLTGRRQCPLCGTLYNVASQPPKVDELCDLDGEKLVIRDDDSETVIRGRLDAYDRQTKPVLEFFQTSGHRVIRVDADSDPPEKVFERICRAMESA

SEQ ID NO: 86052 - DNA, 642 bp, Magnetococcus sp. MC-1
  CDS (1)..(642): transl_table=11
atgaaggttgttttaatgggccctcctggggcgggtaaaggcactcaggcgcgcaagatctcagaaaagtatggcattccccagctttctacgggtgacatgctgcgcgcggcggtggctgcgggtagtgaagttggcctcagggctaaagcagccatggagagcggctctctggtaacagatgagattgtattgggtattattcaggatcgtaccgacgaggccgattgtgatcaggggtatttattggacggttttccccgtacactggcccaggcggaggggttggatgcgatgctggctaagcgcaaccagtcgattgatgtggtgatcgacatcaaggtcgaagatgagccgctggtagcccgtattacaggccgcagcagctgtgaaaagtgcggggaggggtatcacgatagttttaaaccctcggcacaacccaacgtatgcgataaatgctccggtaccctcaaacggcgtgccgacgataatgccgatacggttcgtaaccgcttggaagtttaccataaacagaccgctccgctgattggctattatgacgccaaagggctgcttaaagaggtagatggcatgcaggagatgggtaaggtgttggaggatctgtgtgccatattaggctag

SEQ ID NO: 86053 - protein, 213 aa, Magnetococcus sp. MC-1
MKVVLMGPPGAGKGTQARKISEKYGIPQLSTGDMLRAAVAAGSEVGLRAKAAMESGSLVTDEIVLGIIQDRTDEADCDQGYLLDGFPRTLAQAEGLDAMLAKRNQSIDVVIDIKVEDEPLVARITGRSSCEKCGEGYHDSFKPSAQPNVCDKCSGTLKRRADDNADTVRNRLEVYHKQTAPLIGYYDAKGLLKEVDGMQEMGKVLEDLCAILG

SEQ ID NO: 86054 - DNA, 645 bp, Shewanella sp. ANA-3
  CDS (1)..(645): transl_table=11
atgcgcattatcctattgggcgccccaggtgccggtaaaggtacccaggcccagttcattatggaacagtatggtatcccacaaatttctactggcgacatgttacgtgctgccgttaaagccggtactccgctgggtttagaagcgaagaaagtgatggatgcaggccaactggtttctgatgatctgatcattggactggttaaagagcgtatcgcacaggacgactgtgttaaaggtttcctgttagacggtttcccacgcactatcccacaagcggatgcgatggcggcaaacggtatcagcattgatcacgtgatcgaaatcgatgtgccagacgaagaaatcgttaagcgcatgagcggtcgtcgcgttcacccaggttctggccgtgtttaccacgtggtattcaatccacctaaagtggaaggcaaggacgatgtaacaggcgaagacttagcgattcgtccagatgacgaagaagccacagtgcgtaagcgtttaggcatttaccacgagcaaactaagccattggttgaatactatggcaaagtggctgcggcgggtaacactcaataccacaagttcgatggtactcagtcggtagcggctgtgagtgcacagttagccagcgtgctgaaataa

SEQ ID NO: 86055 - protein, 214 aa, Shewanella sp. ANA-3
MRIILLGAPGAGKGTQAQFIMEQYGIPQISTGDMLRAAVKAGTPLGLEAKKVMDAGQLVSDDLIIGLVKERIAQDDCVKGFLLDGFPRTIPQADAMAANGISIDHVIEIDVPDEEIVKRMSGRRVHPGSGRVYHVVFNPPKVEGKDDVTGEDLAIRPDDEEATVRKRLGIYHEQTKPLVEYYGKVAAAGNTQYHKFDGTQSVAAVSAQLASVLK

SEQ ID NO: 86056 - DNA, 534 bp, Mycobacterium avium 104
  CDS (1)..(534): transl_table=11
ttgctggggccgccgggagcgggcaaggggacgcaggcccagaagctctccgagaagctcgggatcccgcagatctccaccggtgagctgttccgcagcaacatcgagaacgggaccaagctggggctggaggccaagcgctacctggacgccggcgacctggtgcccgcggagctgaccaaccagctcgtcgacgaccggctcagcgagccggacgccgccaacggtttcatcctggacgggtttccccgatcgttgcagcaggccaaggcgctgcacgagatgctggaacgccgcggcaccgacatcgacgcggtgctggagttccgggtgtcccaggacgagctgctggcgcggctcaaggcgcgcggccgggccgacgacaccgacgaggtgatcctgaaccggatgaaggtgtaccgcgacgagacggcgccgctgctggactactaccgcgaccagctcaagacggtcgacgccgtcggcaccctggacgaggtgttcgcccgggcgctgcgcgcgctgggcaagtag

SEQ ID NO: 86057 - protein, 177 aa, Mycobacterium avium 104
MLGPPGAGKGTQAQKLSEKLGIPQISTGELFRSNIENGTKLGLEAKRYLDAGDLVPAELTNQLVDDRLSEPDAANGFILDGFPRSLQQAKALHEMLERRGTDIDAVLEFRVSQDELLARLKARGRADDTDEVILNRMKVYRDETAPLLDYYRDQLKTVDAVGTLDEVFARALRALGK

SEQ ID NO: 86058 - DNA, 576 bp, Nocardioides sp. JS614
  CDS (1)..(576): transl_table=11
atgcgcctgatcatcatgggccccccgggggccggcaagggaacccaagcgaagtacatcgccgagcacttcaagatccccgcgatctcgaccggtgacatcttccgcgccaacgtcaccgagggcacgccgctcggtgtcgaggcgaagcgctacatggacgccggcgagtacgtccccgacgaggtcaccaaccggatggtccgcaaccggatcgacgagcccgacgccgtcggcgggttcctgctcgacggctacccgcgcacggtcgcccaggtcgaggagctcgacgggatgatccggttcaccgggcaccggctcgacgcggtcgtgtgcctcaccgtcgaccaggacgagatcgtcggccggctgctccagcgggcccaggtcgagggtcgtgcggacgacaccgaggacgtgatccggcgccgtcaggacctctacctcgagcagaccgcgccgctcatcgagatctacaagcagcgcgacctcgtgcacgaggtcgacggcatcggcgaggtcgacgaggtcaccgcccggatcttccaggcgctggacgtcatccctgagtcgtga

SEQ ID NO: 86059 - protein, 191 aa, Nocardioides sp. JS614
MRLIIMGPPGAGKGTQAKYIAEHFKIPAISTGDIFRANVTEGTPLGVEAKRYMDAGEYVPDEVTNRMVRNRIDEPDAVGGFLLDGYPRTVAQVEELDGMIRFTGHRLDAVVCLTVDQDEIVGRLLQRAQVEGRADDTEDVIRRRQDLYLEQTAPLIEIYKQRDLVHEVDGIGEVDEVTARIFQALDVIPES

SEQ ID NO: 86060 - DNA, 654 bp, Azoarcus sp. BH72
  CDS (1)..(654): transl_table=11
atgcgactgattctgttgggaccgccgggcgccggcaagggcacgcaagcgaacttcatcaaggagaagttcggcattccgcagatctccaccggcgacatgctgcgcgccgcggtcaaggccggcaccccgctgggcatcgaggccaagaaggtgatggacgccggtggcctggtgtccgacgagatcatcatcggcctggtgaaggaccgcctgcagcaggacgattgcaaggccggctacatgttcgacggcttcccgcgcaccatccctcaggccgacgcgatgaaggacgccggcgtgccgatcgacttcgtgctcgagatcgacgtgcccgacagcgagatcgtggaacgcatgagcggccgccgcgcccacctggcctccggccgcacctaccacgtcaagtacaacccgcccaaggtcgagggcaaggatgacgtcaccggcgaagacctggtgcagcgcgacgacgacaaggaagagaccgtcaagaagcgcctggacgtctaccacgcccagaccaagccgctggtcgagtactacagcagctgggccgcctccggcgacgccaaggcgcccaaggtgcgcaagatctccggcctcggtgccgtggatgagattaccgcccgcgccttcgacgcgctgaagtaa

SEQ ID NO: 86061 - protein, 217 aa, Azoarcus sp. BH72
MRLILLGPPGAGKGTQANFIKEKFGIPQISTGDMLRAAVKAGTPLGIEAKKVMDAGGLVSDEIIIGLVKDRLQQDDCKAGYMFDGFPRTIPQADAMKDAGVPIDFVLEIDVPDSEIVERMSGRRAHLASGRTYHVKYNPPKVEGKDDVTGEDLVQRDDDKEETVKKRLDVYHAQTKPLVEYYSSWAASGDAKAPKVRKISGLGAVDEITARAFDALK

SEQ ID NO: 86062 - DNA, 546 bp, Mycobacterium sp. KMS
  CDS (1)..(546): transl_table=11
ttgagaatcgttctactcggaccgccgggtgcgggcaagggcacgcaggcggcgaagctggccgacaagctgggcgtcccgcacatctccaccggcgatctgttccgcgacaacatcaccaacgagaccgaactcggggtggaggccaagcgctacctcgacgccggtgacctcgtcccgagctccctcaccaacgcgctggtcgaggaccgcatcgaccaggacgacgcgaagaacggcttcatcctcgacggctacccccgctcggtcgaacaggccgaggcgctcggcgacatgctcgcggcccgcaacctgtcgctcgacgcggtgatcgaattccgcgtctccgaggacgagctgctctcccggctcaagggccgcggtcgcgccgacgacaccgaagaggtcatcctcaaccggatgaaggtctaccgcgacgagacggcgccgctgctcgaccactaccgcgccgaactcaagacggtcgacgccgtcgggtctctggacgaggtgttcgcccgggcgctgcaggcgctgggtcggtga

SEQ ID NO: 86063 - protein, 181 aa, Mycobacterium sp. KMS
MRIVLLGPPGAGKGTQAAKLADKLGVPHISTGDLFRDNITNETELGVEAKRYLDAGDLVPSSLTNALVEDRIDQDDAKNGFILDGYPRSVEQAEALGDMLAARNLSLDAVIEFRVSEDELLSRLKGRGRADDTEEVILNRMKVYRDETAPLLDHYRAELKTVDAVGSLDEVFARALQALGR

SEQ ID NO: 86064 - DNA, 603 bp, Magnetospirillum magnetotacticum MS-1
  CDS (1)..(603): transl_table=11
atgcggatcattctgctcggaccgccgggagcggggaagggcacgcagtccgagcgaatcgtggagcgctaccgcgtaccgcagctctccaccggcgacatgctgcgcgccgccgtcgccgccgagacgccggtgggcctcgaagcgaagtcgatcatggagagcggcggcctggtgccggacgcggtggtggtcgggatcgtcgccgaccgcatcgaggaggccgatgccaagaatggcttcatcctcgacggtttcccccgcacggtggagcaagccaaggccctcgacgcgatgctggcggagaagggcatcgccctcgacgccgtcgtcgaattcgtcgtggacgagaatgccctcgtcggccgcatcgccaagcgggccgaggagacggcggcccggggccagccggtgcgcaaggacgacacgccggaggtcttcaagacccgcctcgatgcttacaagaagcagacggcgccgctgtcggactactatgccggcaccggtctgttgcggaaggtcgatggcatgaagccgatcgatgaggtcacgggcgatttgacggggcttctcgacggtttccgcgagaaggcggcctcctga

SEQ ID NO: 86065 - protein, 200 aa, Magnetospirillum magnetotacticum MS-1
MRIILLGPPGAGKGTQSERIVERYRVPQLSTGDMLRAAVAAETPVGLEAKSIMESGGLVPDAVVVGIVADRIEEADAKNGFILDGFPRTVEQAKALDAMLAEKGIALDAVVEFVVDENALVGRIAKRAEETAARGQPVRKDDTPEVFKTRLDAYKKQTAPLSDYYAGTGLLRKVDGMKPIDEVTGDLTGLLDGFREKAAS

SEQ ID NO: 86066 - DNA, 654 bp, Magnetospirillum magnetotacticum MS-1
  CDS (1)..(654): transl_table=11
atgaatctcgttctgttgggcccgcccggtggcggcaagggaacccaggccaagcgtcttcaagagaagtatggcctggtacagctctccaccggcgacatgctgcgcgccgccgtggccgccggttcggacgttggcaagaaggccaaggccgtgatggatgccggtcagctggtgtccgacgagatcgtcatcgccatcatcgatgagcgcctggaccagcccgatgtggccaagggcgccatcttcgatggttttccccggaccgttgcccaggccgaggcgctggacgccatgatggcccgtaagggaaagaagctggaattcgccatcgagatccaggttcccgacgcctatatcgtcgagcgcattaccggccgctatacctgcgccaagtgcggcgctggctatcacgacaagtttcagctgcccaaggtcgcaggcaagtgcgattcctgtggcggcaccgagttcgcgcgccgtcccgacgacaatgtcgagaccgtgaccaagcggctcgacgcctatcacgcccagaccgctccgctgctgccctattacgacaagaagggcgcgctgaagctggtcgacggcaccatggacattgccgacgtgaccaaggccctggaagggattttggacgcggcgaagtaa

SEQ ID NO: 86067 - protein, 217 aa, Magnetospirillum magnetotacticum MS-1
MNLVLLGPPGGGKGTQAKRLQEKYGLVQLSTGDMLRAAVAAGSDVGKKAKAVMDAGQLVSDEIVIAIIDERLDQPDVAKGAIFDGFPRTVAQAEALDAMMARKGKKLEFAIEIQVPDAYIVERITGRYTCAKCGAGYHDKFQLPKVAGKCDSCGGTEFARRPDDNVETVTKRLDAYHAQTAPLLPYYDKKGALKLVDGTMDIADVTKALEGILDAAK

SEQ ID NO: 86068 - DNA, 639 bp, Rickettsia sibirica 246
  CDS (1)..(639): transl_table=11
gtgatagtaatttttttaggtcctccaggagcgggaaagggcacacaaggaaaaaagatagctaaaaaaattgatttactacatatagcaatcggtgatatatttagaacaattattaaaacatcaactagtgaagcagagttaattaataattatgttaagcaaggggagcttatccctaatgaaatagttaatcaagtaatcaaaaattttttattatcctctgaatataaaaacggctacatattagatggatatccgcgtaatttagagcaagcgaaattttttgaatcatttattaaagaaaaaattaaaataatatattttgatgtttcagatgaattattaattaaaagaattttaggaagatatagttgtaaaaattgcggtaaaatatataatagatacttcttgcagcctaaaactgataatgtatgtgatgtttgcggttcaagtacatttgattatagaaaagacgataatgaagaagtaataaaaaaaagaattgaagtatataaaacagaaacatatccgttaatagattattataaaaatagtggtaatttttatatagttaatggaagtaaaaatgaacaagaaatagaaattgatatacagaaaatactaaaaataaattga

SEQ ID NO: 86069 - protein, 212 aa, Rickettsia sibirica 246
MIVIFLGPPGAGKGTQGKKIAKKIDLLHIAIGDIFRTIIKTSTSEAELINNYVKQGELIPNEIVNQVIKNFLLSSEYKNGYILDGYPRNLEQAKFFESFIKEKIKIIYFDVSDELLIKRILGRYSCKNCGKIYNRYFLQPKTDNVCDVCGSSTFDYRKDDNEEVIKKRIEVYKTETYPLIDYYKNSGNFYIVNGSKNEQEIEIDIQKILKIN

SEQ ID NO: 86070 - DNA, 636 bp, Fusobacterium nucleatum subsp. vincentii ATCC 49256
  CDS (1)..(636): transl_table=11
atgattaatttgaatttagtattatttggagcacctggagcaggaaaaggaacacaagcaaaatttattgtcgataaatatggaatacctcaaatttcaacaggggatatattgagagtagccgtagctaataaaacaaaattaggtttagaagctaaaaaatttatggatgctggacaattagttcctgatgaagttgttaatggtttagttgctgaaagattagcagaaaaagattgtgaaaaaggttttataatggatggttttccaagaactgttgttcaagcaaaagccttagatgaaatattgacaaaattaggaaaacaaatagaaaaagttatagctttaaatgtaccagataaagatataatagaaagaattacaggaagaagaacatcaaaagtaactggaaaaatttatcatattaagtttaacccaccagttgatgaaaagccagaagatttagttcaaagagcagatgacacagaagaagttgttgtaaaaagattagaaacttatcataatcaaactgcaccagttttagattattacaaggcacaaaataaggtaactgaaattgatggaactaaaaaattagaagatattacaaaagatatatttaaaattttaggatag

SEQ ID NO: 86071 - protein, 211 aa, Fusobacterium nucleatum subsp. vincentii ATCC 49256
MINLNLVLFGAPGAGKGTQAKFIVDKYGIPQISTGDILRVAVANKTKLGLEAKKFMDAGQLVPDEVVNGLVAERLAEKDCEKGFIMDGFPRTVVQAKALDEILTKLGKQIEKVIALNVPDKDIIERITGRRTSKVTGKIYHIKFNPPVDEKPEDLVQRADDTEEVVVKRLETYHNQTAPVLDYYKAQNKVTEIDGTKKLEDITKDIFKILG

SEQ ID NO: 86072 - DNA, 573 bp, Crocosphaera watsonii WH 8501
  CDS (1)..(573): transl_table=11
atgagtacagggaagggattgatttttttgggtccccctggttcgggaaaaggaacccaagcccaagaattatccaaagaacttaatattccccacatttctaccggagaaatgttacgagcagcgatcgctaaacaaacctctttaggacaaaaagcccaagtttatatggataagggggaattagttcctgatgaattattattgggtttaatcgaagaacggttaaaagagaaagatgctgaaaacggctggattctagacggttttcctcgtaacgttgctcaagctgaatttttagacaagttactccataaattagccaagttttccgaacaagcgattaatttagacgttccagacccagtgattatcgatcgcttgttattacgagggcaaaaagaagggcgaaaagacgataacgaagagaccattcgccgtcgtttagaagtttaccgagaaaaaacccaaccagtccttgactattatcgtcaacaggacagactatcttccgtagatggtaaccgtgaactgcaagaagttaccaaaacacttaaagcagtggtgacttga

SEQ ID NO: 86073 - protein, 190 aa, Crocosphaera watsonii WH 8501
MSTGKGLIFLGPPGSGKGTQAQELSKELNIPHISTGEMLRAAIAKQTSLGQKAQVYMDKGELVPDELLLGLIEERLKEKDAENGWILDGFPRNVAQAEFLDKLLHKLAKFSEQAINLDVPDPVIIDRLLLRGQKEGRKDDNEETIRRRLEVYREKTQPVLDYYRQQDRLSSVDGNRELQEVTKTLKAVVT

SEQ ID NO: 86074 - DNA, 648 bp, Exiguobacterium sibiricum 255-15
  CDS (1)..(648): transl_table=11
atgaatcttgtattgatgggcttgccgggtgctggaaaaggaacgcaggctgcgaaaattatcgaagactacgccattccacacatctcgacaggcgacatgttccgtgcggcgatcaaagatcaaacaccgctcgggcaggaagcgaaatcgtacatggataaaggggaactcgttccggacgaggtcacaatcggcatcgtacgtgagcgtctcgccaaagaagactgtgccaatggttttcttcttgacggtttcccacgcacagtgaaacaagcggatgctcttgaagtattgcttgcggatctaaataaacaaatcgatcacgtcgttcacatcggtgtgaacccggagaaacttgtccctcgtttgacaggccgccggatttgcccgacatgtggagcaacgtatcatgtcatctataacccaccaaaagtggagggtgtctgtgatatcgacggatcagcacttgttcaacgtgaagatgatcaagaagaaacggttcgccgtcgtcttgaagtcaacgtcgctcaagcgcaacctttgattgacttttacgctgaaaaagggtatcttcgtaatttggacggtgatcgtccgattaatgaagtttattccgatgttcaagcacttcttggtggtcagtaa

SEQ ID NO: 86075 - protein, 215 aa, Exiguobacterium sibiricum 255-15
MNLVLMGLPGAGKGTQAAKIIEDYAIPHISTGDMFRAAIKDQTPLGQEAKSYMDKGELVPDEVTIGIVRERLAKEDCANGFLLDGFPRTVKQADALEVLLADLNKQIDHVVHIGVNPEKLVPRLTGRRICPTCGATYHVIYNPPKVEGVCDIDGSALVQREDDQEETVRRRLEVNVAQAQPLIDFYAEKGYLRNLDGDRPINEVYSDVQALLGGQ

SEQ ID NO: 86076 - DNA, 657 bp, Prosthecochloris aestuarii DSM 271
  CDS (1)..(657): transl_table=11
atgaggattatcttactgggggcacccggcgcaggcaaaggaactcaggctcaattcatttcgacagctttcaatatcccgcagatttcaaccggagatatgctgcgggcagcgattcaagcccaaacccctttaggacttgaagccaaaaaggtcatggatgacggaaaacttgtatcggatgagatcattctgaaactggtcaaggaacgaatcaatgagccggactgccagcagggttgcctcttcgatggttttccccgtacactggctcaggctgaggctctcaggcaggaaaatatcactatcaatcacgtcatagaaatagatgtcgataacgaagaaattatccaaagaatgagtggccgaagagtccatcttgcctctggcagaacctatcatgtcattttcaatcctcccaagaaagaaggagttgacgacataacaggagagccgctgatccaacgcgaagacgataccgaagagaccgtacgcaaacgccttgaaatatatcacaatcaaacagctccgcttattgattactaccgggagtgggaagagaaagatttgctgcaagctcccaaattcagctcaatcaaaggaagcgggagcgttgaagagatccgcgaaaaaatttttactgagctcaatgcatga

SEQ ID NO: 86077 - protein, 218 aa, Prosthecochloris aestuarii DSM 271
MRIILLGAPGAGKGTQAQFISTAFNIPQISTGDMLRAAIQAQTPLGLEAKKVMDDGKLVSDEIILKLVKERINEPDCQQGCLFDGFPRTLAQAEALRQENITINHVIEIDVDNEEIIQRMSGRRVHLASGRTYHVIFNPPKKEGVDDITGEPLIQREDDTEETVRKRLEIYHNQTAPLIDYYREWEEKDLLQAPKFSSIKGSGSVEEIREKIFTELNA

SEQ ID NO: 86078 - DNA, 576 bp, Kineococcus radiotolerans SRS30216
  CDS (1)..(576): transl_table=11
atgactcgtctcgtcctcctcggtccgcccggtgcgggcaagggcacccaggccaagctcctgtccgaccgcctgggcgtgcccgccatctccaccggcgacatcttccgggccaacgtcgcggagggcaccgaactgggccggaccgtccaggagtacctcaacgcgggcaagtacgtccccgacgcggtgaccaaccagatggtccgcgagcgcctcgcccagcccgacgccgccgagggcttcatcctcgacggctacccgcgcaccaccgaccaggtccgcgagctggacgacatgctggccgacgtcggggccaagctcgagcacgtgctcgagatcgccgccgacaccgacgagctggtccggcgcctcgccaagcgggccgtggagcaggggcgcagcgacgacaccgaagaggtgatccgcacgcgccagcaggtctacgccgagcagaccgccccgctggtcgaggtctactccgaccgcggcctgctgcgcagcgtggacggcctcggcgacatccccgaggtcacctcgcggctggtgtcggccctcggcctccagaccgcctga

SEQ ID NO: 86079 - protein, 191 aa, Kineococcus radiotolerans SRS30216
MTRLVLLGPPGAGKGTQAKLLSDRLGVPAISTGDIFRANVAEGTELGRTVQEYLNAGKYVPDAVTNQMVRERLAQPDAAEGFILDGYPRTTDQVRELDDMLADVGAKLEHVLEIAADTDELVRRLAKRAVEQGRSDDTEEVIRTRQQVYAEQTAPLVEVYSDRGLLRSVDGLGDIPEVTSRLVSALGLQTA

SEQ ID NO: 86080 - DNA, 1104 bp, Croceibacter atlanticus HTCC2559
  CDS (1)..(1104): transl_table=11
atggtaaaattacacgacaaacagtttgagaaatttataggcaatgatgctattaatcacgctatcaatggcattgctgtaaaattaaatgatgagctaaaggataaacgacctgtatttttaacagtattaaatggcgcatttttgttttctgcagaaataataaaacgctttaattatgagtgtgaattaagctttataaaggtagcgtcttatgaaggaatgcaacagggcgaaatcacaacagtaatgggtgcagagccttctcttaaaggacgtacagttgtagtagttgaggatattgtagattctggtaatacgattgaagctattatgcagattcttgataatgaaggtgcagaaattataaaaatagcaactctttgttataaaccatctgcatacggtaagcattacaaattagattatgtaggcttagaaatagataatacatttattgtaggatacggtttagattataaaggtctaggcagaaacctaaaagatatatataaacataaaccaacaaaaatgactaacatcgttctatttggccctccaggcgcaggaaaaggaactcaagcagaagtattaaaggaaaaatataaccttgtacacatatctacaggagatgtatttcgctataatattaaaaatgctacagaattaggaacacttgctaaatcttatatggataaaggacacctagttccagatgaagttactattaaaatgcttaatgccgaagtagataaaaatgcagacgcaaacggttttatttttgatggttttccaagaacagaagcacaggcagaagctctttctaaattaatggatgaaaaagactcgcaaatagatgctatgattgctttagaggtagaagatgaagttttagtacagcgcctattagaacgcggtaaaacttcaggcagaaaagatgatgccaatgaggatgttatacgaaaccgaattaaagtgtattataatgaaactgcaattttaaaagattactaccaaaagaaagataaataccatggtataaatggtgtaggtagtattaatgaaattacagaaagactaagtaaagctatagataagctttaa

SEQ ID NO: 86081 - protein, 367 aa, Croceibacter atlanticus HTCC2559
MVKLHDKQFEKFIGNDAINHAINGIAVKLNDELKDKRPVFLTVLNGAFLFSAEIIKRFNYECELSFIKVASYEGMQQGEITTVMGAEPSLKGRTVVVVEDIVDSGNTIEAIMQILDNEGAEIIKIATLCYKPSAYGKHYKLDYVGLEIDNTFIVGYGLDYKGLGRNLKDIYKHKPTKMTNIVLFGPPGAGKGTQAEVLKEKYNLVHISTGDVFRYNIKNATELGTLAKSYMDKGHLVPDEVTIKMLNAEVDKNADANGFIFDGFPRTEAQAEALSKLMDEKDSQIDAMIALEVEDEVLVQRLLERGKTSGRKDDANEDVIRNRIKVYYNETAILKDYYQKKDKYHGINGVGSINEITERLSKAIDKL

SEQ ID NO: 86082 - DNA, 576 bp, Roseovarius nubinhibens ISM
  CDS (1)..(576): transl_table=11
atgaatattatccttctcggaccgccgggtgccggcaaaggcactcaagcgcaactcctcgtgcaagagcgcgacatgattcagctgtcgaccggcgacatgctgcgcgaggccaaggacagcggcaccgagatgggtaagatcgtcgccgatgtgatggcgcggggcgagctcgtcaccgacgagatcgtcatcggcctgatccgcgaaaagctcgatggggaccgcaagggcgggttcatcttcgacgggttcccgcgcactctggcccaggccgatgcgctggcgggcctgctggccgagaagggcgagagcctcgatgcggtgatcgagatgcaggtggatgacgagacgctggtcaagcggatcgtcaaccgcgctgaagaggcccgcgccgccggcaagccggtgcgcgccgatgacaacgccgacagcgtacgcatccggctcatggaatattacaagaagaccgcgccgctcattggctattaccatgccaaggggcagctcaaatcggtggacggtctgggcgccatcgacgaggtgcgcggcgcgatcggctcgctgctgggctaa

SEQ ID NO: 86083 - protein, 191 aa, Roseovarius nubinhibens ISM
MNIILLGPPGAGKGTQAQLLVQERDMIQLSTGDMLREAKDSGTEMGKIVADVMARGELVTDEIVIGLIREKLDGDRKGGFIFDGFPRTLAQADALAGLLAEKGESLDAVIEMQVDDETLVKRIVNRAEEARAAGKPVRADDNADSVRIRLMEYYKKTAPLIGYYHAKGQLKSVDGLGAIDEVRGAIGSLLG

SEQ ID NO: 86084 - DNA, 645 bp, Oceanicola batsensis HTCC2597
  CDS (1)..(645): transl_table=11
atgaacatcattcttcttggaccgccgggtgccggcaagggcacccaggcccggaagcttgtcgacgaccgcgacatgatccagctgtcgaccggcgacatgctgcgcgaggcgcggacctcgggcacggagatgggcaagatcgtcgcggacgtgatggacagcggcaagctggtcaccgacgacatcgtaatcggcctgatccgcgagaagctggaaggcgagaagaagggcggtttcatcttcgacggcttcccccggactctcgcccaggccgacgcgctggagcagctgctcggcgattgcggcgagtcgctggacgcggtcatcgagctgcgggtcgaggaagaggcgctggtctcgcggatcacgggccggtcgacctgcgcgaactgcggcgaggtctaccatgacgagaccaagccgatcccggcggacggcaaatgctctgtctgcggcggaaccgagttcaagcgccgggcggatgacaacgaggaaagcctcaagacgcgcctgatggaatactacaagcagacctcgccgctgatcgggtactattatgcgaagggcaagctgcacggtgttgatggccttgcggaaatggacgaggtcgagacctcgatcaagggtatcctcgacgcctga

SEQ ID NO: 86085 - protein, 214 aa, Oceanicola batsensis HTCC2597
MNIILLGPPGAGKGTQARKLVDDRDMIQLSTGDMLREARTSGTEMGKIVADVMDSGKLVTDDIVIGLIREKLEGEKKGGFIFDGFPRTLAQADALEQLLGDCGESLDAVIELRVEEEALVSRITGRSTCANCGEVYHDETKPIPADGKCSVCGGTEFKRRADDNEESLKTRLMEYYKQTSPLIGYYYAKGKLHGVDGLAEMDEVETSIKGILDA

SEQ ID NO: 86086 - DNA, 645 bp, Erythrobacter sp. NAP1
  CDS (1)..(645): transl_table=11
gtgaacatcattcttcttggccctccgggcgcgggcaagggcacgcaaagcgctggcttggtagagcgccacggcatgaagcagctttcaaccggcgacatgctccgcgctgcggtcaaggcaggcactccggtcgggcttcaggcaaaagcggtcatggatcgcggcgagctggtttcggacgagatcgtctcgaacctgatcgacgagaaccttgccgccatgcccgctgaccagggcgcgatcttcgacggctatccgcgcaccgcagcgcaagcaggcgaccttgaccgtatccttgcgaaaaatggccgcagtctcgatcgcgtgatcgagcttgaagtgaatgtcgatgctctggttgaacgcatcacggggcgcttttcctgcgcaaattgcggcgcgctttatcacgataccgcgaacccgcccgcgaaagagggcgtgtgcgacgtgtgccactcgaccgagttcaagcgccgccctgacgacaacgaggaaaccgtgcgcacccgcatggaggaataccgcgccaagaccgcgccgatccttccgggctatgaagagcgcggcatcgtctcgcgcgtcgacggcatggcggaaatcgctgaagtggctagcgccatcgacgcaattcttgcctga

SEQ ID NO: 86087 - protein, 214 aa, Erythrobacter sp. NAP1
MNIILLGPPGAGKGTQSAGLVERHGMKQLSTGDMLRAAVKAGTPVGLQAKAVMDRGELVSDEIVSNLIDENLAAMPADQGAIFDGYPRTAAQAGDLDRILAKNGRSLDRVIELEVNVDALVERITGRFSCANCGALYHDTANPPAKEGVCDVCHSTEFKRRPDDNEETVRTRMEEYRAKTAPILPGYEERGIVSRVDGMAEIAEVASAIDAILA

SEQ ID NO: 86088 - DNA, 558 bp, Synechococcus sp. RS9917
  CDS (1)..(558): transl_table=11
atgaagcaacggctcctcttcctcggccctcccggcgccggcaagggcacccaggcggcccgactgtgtgccgcccatggcatgcagcatctctccaccggcgatctgctgcgctcggaggtggccgccggaaccgccctaggacaggaagctgaagcggtgatgaaccgcggcgaactggtgagtgatgcgctggttttggcgatcgtgaaaggccagctcggccgcctcagcacaggcggttggctgctcgacggatttcctcgcacggtggcccaggcggaagccctcaccccgctgctggcggaactccaacaacccctcgaagcggtgctactcctcgagctcgatgatgccgtgctgatcgagcgcatgctggcgcgcggccgggccgatgacaccgaagccgtgatccgccatcggctggaggtctaccgggagaaaacagcacccctgatcgacttctaccgtcaacagggtctgctctgctcggtggaagcgcagggcagcatcgaggcgattaccaagcggattgaagccacccttcaaggggcttga

SEQ ID NO: 86089 - protein, 185 aa, Synechococcus sp. RS9917
MKQRLLFLGPPGAGKGTQAARLCAAHGMQHLSTGDLLRSEVAAGTALGQEAEAVMNRGELVSDALVLAIVKGQLGRLSTGGWLLDGFPRTVAQAEALTPLLAELQQPLEAVLLLELDDAVLIERMLARGRADDTEAVIRHRLEVYREKTAPLIDFYRQQGLLCSVEAQGSIEAITKRIEATLQGA

SEQ ID NO: 86090 - DNA, 552 bp, Synechococcus sp. WH 7805
  CDS (1)..(552): transl_table=11
atgaagcaacgtctgctgttcatcggccccccaggggcaggcaagggaacccaggcttcacgcctctgcgacacccacggacttcgccatctctccacaggcgacctgctgcgctctgaggtttcagcaggcagcgccctgggcaaggaagccgaagcggtcatgaaccgcggcgagctcgtcagcgatgacctggttctcgccatcgtccgttctcagctcacagcgctgaagggccagggctggcttctcgatggctttcctcgcaatgttgcgcaagccgaagcactggagcccctgctcggagaactgcaacaaagcatcgagacggtcgttcttctggaactcgacgacgaggtccttgtcgagcgactgcttgccaggggtcgagcggacgacaacgaatcggtcattcgcaatcgtctcgaggtgtatcgcaagcagaccgccccgctgatcgactactaccgagccaagggactgttgatctccatcgacgcccagggcagcgtggaagacatcaccacaagacttgaagcaaatctggcttga

SEQ ID NO: 86091 - protein, 183 aa, Synechococcus sp. WH 7805
MKQRLLFIGPPGAGKGTQASRLCDTHGLRHLSTGDLLRSEVSAGSALGKEAEAVMNRGELVSDDLVLAIVRSQLTALKGQGWLLDGFPRNVAQAEALEPLLGELQQSIETVVLLELDDEVLVERLLARGRADDNESVIRNRLEVYRKQTAPLIDYYRAKGLLISIDAQGSVEDITTRLEANLA

SEQ ID NO: 86092 - DNA, 645 bp, Pseudoalteromonas tunicata D2
  CDS (1)..(645): transl_table=11
atgcgcattattcttttgggcgcaccaggtgcgggtaaaggtactcaagctcaatttctgatggaaaaattttcgattccacagatttctacgggcgatatgttacgtgctgcaattaaagaaggcacaccacttggtttagaagccaaaaaagtgatggatgcaggtcaattgatttctgatgatatcatcattggtcttgttaaagagcgtattgctaaagctgattgtgaaaaaggctttttgttagacggtttcccacgcactattccacaagcagatgcaatgaaagaaaatggcgttgttgttgatcacgttattgaatttgatgttgctgatgaagtgattgttgagcgtatggctggacgtcgtgttcacccaggttcaggccgtgtttatcatgttgtttataatccttcaaaagttgaaggtaaagatgatgtaaccggtgaagacttgatcattcgtgatgatgatgttgaagaaacagtgcgtaaacgtttaggtatttaccatgaccaaactaagccacttgtcagctattatcaggcagaagctgatgcgggcaatactcagtaccataaattagatggtacacaagctgttgatgcggtaagcgcccaattagctgagttattagggtaa

SEQ ID NO: 86093 - protein, 214 aa, Pseudoalteromonas tunicata D2
MRIILLGAPGAGKGTQAQFLMEKFSIPQISTGDMLRAAIKEGTPLGLEAKKVMDAGQLISDDIIIGLVKERIAKADCEKGFLLDGFPRTIPQADAMKENGVVVDHVIEFDVADEVIVERMAGRRVHPGSGRVYHVVYNPSKVEGKDDVTGEDLIIRDDDVEETVRKRLGIYHDQTKPLVSYYQAEADAGNTQYHKLDGTQAVDAVSAQLAELLG

SEQ ID NO: 86094 - DNA, 645 bp, Photobacterium sp. SKA34
  CDS (1)..(645): transl_table=11
atgcgcatcattcttctgggcgctccaggtgcaggtaaaggtactcaagctcaattcattatggaaaagtttggtattcctcaaatttcaactggtgacatgctacgtgctgcaatcaaagcaggtactgagctaggcaaacaagcgaaatcagtgatcgatgcaggtcaattggtatctgacgatatcattcttggtcttgtaaaagagcgtattgcggcagatgattgtgcaaaaggcttcctactagatggtttcccacgcacaattcctcaagctgatggcctaaaagaaaacggcgttaacgttgattacgttatcgagtttgatgtggctgacgatgtgatcgttcagcgtatggcgggtcgtcgtgctcaccttgcttctggtcgtacttaccacgctgtttataacccaccaaaggttgaaggtaaagatgacgtaacaggcgaagagcttgttatccgtgaagatgacaaagaagaaacagttcgtgcacgtctaaacgtatatcacacgcaaactgcaccacttatcgagtactacggtaaagaagcagaagcaggcaacactaagtaccttaagttcgacggtacactccctgttgctgaagttagcgctgcgctagaaaaagcattagcttaa

SEQ ID NO: 86095 - protein, 214 aa, Photobacterium sp. SKA34
MRIILLGAPGAGKGTQAQFIMEKFGIPQISTGDMLRAAIKAGTELGKQAKSVIDAGQLVSDDIILGLVKERIAADDCAKGFLLDGFPRTIPQADGLKENGVNVDYVIEFDVADDVIVQRMAGRRAHLASGRTYHAVYNPPKVEGKDDVTGEELVIREDDKEETVRARLNVYHTQTAPLIEYYGKEAEAGNTKYLKFDGTLPVAEVSAALEKALA

SEQ ID NO: 86096 - DNA, 660 bp, Oceanospirillum sp. MED92
  CDS (1)..(660): transl_table=11
atgcgtattatccttctgggcgcaccaggcgcaggtaaaggtactcaggcacagtacatttgtgaaaagtacaacattccacagatctctactggcgatatgctgcgtgccgcggtaaaagcgggtaccccgctgggcgtaaaagcaaaagaagttatggatgcgggccagttggtttccgatgacattatcatcggtctggtaaaagagcgtattgctgaagcagattgtgcaaatggtttcctgtttgatggtttcccacgtacgattcctcaggcagatgcgctgaaagatgcaggtgtaaagatcgatgcggttgctgagatcgatgtagcggatgaagagattgttaagcgtatggcaggccgccgtgtgcacccaggttctggccgtacttaccacgttgtattcaatccgcctaaagttgaaggtaaggatgatgtgacgggtgaagatctggttcagcgcgctgatgatgctgaagataccgtacgtgaccgtctgaaagtttaccatgaccagacagctcctctgattacttactacaagggctgggctgaagaagatgcagctgctgcaccttcttacgtttatgtacctggcgtaggttctgtcgaagatattcgcgatgcggtatttgcaggtctggaaaacgcttaa

SEQ ID NO: 86097 - protein, 219 aa, Oceanospirillum sp. MED92
MRIILLGAPGAGKGTQAQYICEKYNIPQISTGDMLRAAVKAGTPLGVKAKEVMDAGQLVSDDIIIGLVKERIAEADCANGFLFDGFPRTIPQADALKDAGVKIDAVAEIDVADEEIVKRMAGRRVHPGSGRTYHVVFNPPKVEGKDDVTGEDLVQRADDAEDTVRDRLKVYHDQTAPLITYYKGWAEEDAAAAPSYVYVPGVGSVEDIRDAVFAGLENA

SEQ ID NO: 86098 - DNA, 588 bp, Xanthobacter autotrophicus Py2
  CDS (1)..(588): transl_table=11
atgaggctggtgctgctcgggccgcccggggcgggtaagggaacccaggcacaacggctggtcgcccgtcatgggatcgtccagctctccaccggcgacatgctgcgcgccgccgtggccgccggtacaccggtgggcctgaaggcgaaggcggtcatggatgccggcggcctcgtctccgacgagatcgtgatcggcatcatcgccgagcgcctcgattcgccggatgcgaagaacggcttcatcctggatggcttcccgcgcacggtggcgcaggccgaggccctcgaccagctccttgccagcaagggcctcaagctcgatgcggtgatcgagctggtggtggatcaggagaagctggtgaaccgcatcctcaaccgcgccgccgaggcccaggccaagggcgaagcggtgcgcaaggatgacgatccggtggtcttcaagacccgcctggaggcctacaaccgcgatacggcggtggtggcgccctattacaaggcgcgcggccagctgaagcagatcgacggcatggcgcccatcgatcaggtcaccgccgccatcgacggggtgctcgctgaagcggcgtga

SEQ ID NO: 86099 - protein, 195 aa, Xanthobacter autotrophicus Py2
MRLVLLGPPGAGKGTQAQRLVARHGIVQLSTGDMLRAAVAAGTPVGLKAKAVMDAGGLVSDEIVIGIIAERLDSPDAKNGFILDGFPRTVAQAEALDQLLASKGLKLDAVIELVVDQEKLVNRILNRAAEAQAKGEAVRKDDDPVVFKTRLEAYNRDTAVVAPYYKARGQLKQIDGMAPIDQVTAAIDGVLAEAA

SEQ ID NO: 86100 - DNA, 651 bp, gamma proteobacterium HTCC2207
  CDS (1)..(651): transl_table=11
atgagagttattttgttagggcctccaggcgcaggtaaaggtactcaggcacagtttattactgataaatattcagtacctcaaatttccactggcgatatgctgcgaagtgcagtcaaagcaggtaccgaactgggtcttaaagtgaaagacattatgacttctggtggcttggtgtccgatgaaattattattgcactagttaaagagcgtatagcgcaaccagactgcaatggcggtttcttatttgacggctttccgcgcacgattcctcaggcgcaggctctagtagatgccaatgtaccgattgaatatgttgttgaaattgctgtcgacgatgaacagattgtctcgcgtctcagtggccgtcgagtgcatgaagattccggtcgtgtttatcatattgaacacaatccgccaaacactgccgggcttgatgatgtgacccaagagacattaattcagcgtccagacgataaagaagaaacgattcgcaatcgtctgagtatttatcacagtcaaaccaaaccattagttgaattttatcaaggcctgtcagccaaagacgctgatgcgccgaaattctcaactgtagatggtcttggtagtctcaatgatgtgcaggctagattggtttccgcattagcttaa

SEQ ID NO: 86101 - protein, 216 aa, gamma proteobacterium HTCC2207
MRVILLGPPGAGKGTQAQFITDKYSVPQISTGDMLRSAVKAGTELGLKVKDIMTSGGLVSDEIIIALVKERIAQPDCNGGFLFDGFPRTIPQAQALVDANVPIEYVVEIAVDDEQIVSRLSGRRVHEDSGRVYHIEHNPPNTAGLDDVTQETLIQRPDDKEETIRNRLSIYHSQTKPLVEFYQGLSAKDADAPKFSTVDGLGSLNDVQARLVSALA

SEQ ID NO: 86102 - DNA, 648 bp, delta proteobacterium MLMS-1
  CDS (1)..(648): transl_table=11
atgaaattgattcttttgggcgcccccggcgccggtaaaggtacggtggccaagatgctcaccgccatcgacggctcggtccagatttccaccggcgacatcctgcggggtgaggtgcaggccggcagcgaactgggcaaacaggcccaggaatacatgaaccggggtgacctggtgcccgattccctgatcatggggatcatggaaaaacggctccagcagcccgattgcgccaaagggtttctgctcgacggctttccccgcaccattccccaggccgaggccctgcaggaactgctggcccggcttaacattaagctcgacatggtggtcaacatcgacgtgccccgggaagtgctgctggaccggctcaccacccgccgcacctgcaccaactccgactgccaggcgatatacaacgtcaagagcatgccgcccaaacaggaaggggtttgtgaccactgcggcagcccggtgatccaacgcgacgacgagacggaaaaagcgatcagccaccgcctggagacctaccaggaaatgaccgcgcccctggtcggtttctacgaaaaggaagggttactcaacaacatcgtcggcacttccagcgacgaggtggtggcggcgatcaaagccgaactggccaagtag

SEQ ID NO: 86103 - protein, 215 aa, delta proteobacterium MLMS-1
MKLILLGAPGAGKGTVAKMLTAIDGSVQISTGDILRGEVQAGSELGKQAQEYMNRGDLVPDSLIMGIMEKRLQQPDCAKGFLLDGFPRTIPQAEALQELLARLNIKLDMVVNIDVPREVLLDRLTTRRTCTNSDCQAIYNVKSMPPKQEGVCDHCGSPVIQRDDETEKAISHRLETYQEMTAPLVGFYEKEGLLNNIVGTSSDEVVAAIKAELAK

SEQ ID NO: 86104 - DNA, 558 bp, Synechococcus sp. RS9916
  CDS (1)..(558): transl_table=11
atgaaaaaacgccttcttttccttggccctcccggtgcaggcaaaggcactcaggccgcacgcctgtgcgaacagcacggcatgaagcacctctccaccggcgacctactcagagccgaagtagccgccggcaccgacctgggcaaagaagccaaagccgtgatgaatcgcggcgaactggtgagcgacgctttagtactggcaatcgtcaaagggcagctcggcgcccttggcgatggaggctggctgcttgacggcttcccccgcaacgtggcccaggccgaagcgctcgagccgctgctgacggagattggtcaacccctggaagccgtggtgcttctcgagctggacgacgccgtgttgatggagcggatgctcagccgcggacgcgaagacgacaacgaagacgtgatccgccaccgccttgaggtttaccgcgacaagacagctccgctgatcgatcactatcgtcagaagggccaattgatctcggtggaagcccagggcaacatcgaggccatcaccgaccgcatccaacaagccttgacagggtcttga

SEQ ID NO: 86105 - protein, 185 aa, Synechococcus sp. RS9916
MKKRLLFLGPPGAGKGTQAARLCEQHGMKHLSTGDLLRAEVAAGTDLGKEAKAVMNRGELVSDALVLAIVKGQLGALGDGGWLLDGFPRNVAQAEALEPLLTEIGQPLEAVVLLELDDAVLMERMLSRGREDDNEDVIRHRLEVYRDKTAPLIDHYRQKGQLISVEAQGNIEAITDRIQQALTGS

SEQ ID NO: 86106 - DNA, 645 bp, Vibrio sp. Ex25
  CDS (1)..(645): transl_table=11
atgcgcatcattcttctaggtgctccaggtgcaggtaaaggcacacaagcaaacttcatcatggaaaaatacggtattccacaaatctctactggtgatatgcttcgtgctgctatcaaagcaggtacagagcttggtaaacaagctaaagctgttatcgacgctggtcagctagtttctgatgaaatcatccttggccttatcaaagagcgtatcgctcaagaagactgtgcgaacggtttcctactggatggtttcccacgtactattcctcaagctgacggcctaaaagaaatgggcgttgatgtagactacgttatcgaatttgacgttgcagatgatgtgattgttgagcgtatggcaggtcgtcgtgctcaccttccttctggtcgtacttaccacgttgtttacaacccacctaaagtggaaggtaaagatgacgtaactggtgaagatcttgttgttcgtgatgacgacaaagaagaaacagtacgtgcacgtctaggtgtttaccacgagcaaactgcaccactaatcaactactacggtaaagaagctgaagcaggcaacactaagtaccttaagtttgatggtactaagcaagtagctgaagttagtgcagatatcgagaaagcactctcttaa

SEQ ID NO: 86107 - protein, 214 aa, Vibrio sp. Ex25
MRIILLGAPGAGKGTQANFIMEKYGIPQISTGDMLRAAIKAGTELGKQAKAVIDAGQLVSDEIILGLIKERIAQEDCANGFLLDGFPRTIPQADGLKEMGVDVDYVIEFDVADDVIVERMAGRRAHLPSGRTYHVVYNPPKVEGKDDVTGEDLVVRDDDKEETVRARLGVYHEQTAPLINYYGKEAEAGNTKYLKFDGTKQVAEVSADIEKALS

SEQ ID NO: 86108 - DNA, 645 bp, Alteromonadales bacterium TW-7
  CDS (1)..(645): transl_table=11
atgcgcattattcttttgggcgcgccgggtgcaggtaaaggtactcaagctcagtttttaatggacaagtacggtattccacaaatttcaactggcgatatgctacgtgctgcaattaaagaaggcactccacttggcttagaagcaaaaaaagtaatggacgcaggtcagctaatttctgacgatatcattattggtttagttaaagagcgtattgctaaagctgattgcgaaaaaggttttttactagatggctttccacgtaccattccacaagcagatgcaatgaaagaaaatggcgtagtagttgatcacgttattgaatttgatgttgctgatgaagtaattgtagagcgtatgggcggacgtcgtgttcatcctggctcgggccgtgtttatcatgttgtttacaatccaccaaaagtggaaggtaaagatgatgaaacaggtgaagagttaattgtgcgcgctgacgacacagaagagactgtgcgtaaacgtctaggtatttaccatgagcaaactatgccgttggttgattactaccaagctgaagccgctgcaggcaacacgcagtaccataaacttgacggtacacaagccgtagaagttgtaagtgctcagttaggtgagcttttgggttaa

SEQ ID NO: 86109 - protein, 214 aa, Alteromonadales bacterium TW-7
MRIILLGAPGAGKGTQAQFLMDKYGIPQISTGDMLRAAIKEGTPLGLEAKKVMDAGQLISDDIIIGLVKERIAKADCEKGFLLDGFPRTIPQADAMKENGVVVDHVIEFDVADEVIVERMGGRRVHPGSGRVYHVVYNPPKVEGKDDETGEELIVRADDTEETVRKRLGIYHEQTMPLVDYYQAEAAAGNTQYHKLDGTQAVEVVSAQLGELLG

SEQ ID NO: 86110 - DNA, 645 bp, marine gamma proteobacterium HTCC2143
  CDS (1)..(645): transl_table=11
atgcgtgcaattttgttagggccgccaggtgcaggtaaaggtacccaagcccagtttatttcagaaaactatggtattccccaaatttccactggtgatatgcttcgcgctgcggtcaaagcagaaacggagatgggcttgaaggtaaaagcggtcatggatgctggtgacctagtgtccgatgacatcatcattggaattgtaaaggagcgtatcaccgagccagattgcgcaagtggatttttatttgatggattcccgcgcacgatcccgcaagccgaggcacttcaggctgccggtgttgaaatcgatatggtgcttgaaatttcggtagatgatgaagaaattgtcacgcgaatgagcgggcgccgaattcatgaagcttcgggacgggtttatcatgttgtttttaacccgccaaaaaaatctggtgtggatgatgaaaccggggatcaattgctgcagcgggaagacgataaagaggatactgtgcgcacacggttaaaagtttaccatgaccaaactaagccgttggtggctttttaccaaacattagcagaaagtgacggtccacaatatcgcatggtagaaggtgttggatccgttcaggacattcgtgacaaagtagttgctgcgctgagttaa

SEQ ID NO: 86111 - protein, 214 aa, marine gamma proteobacterium HTCC2143
MRAILLGPPGAGKGTQAQFISENYGIPQISTGDMLRAAVKAETEMGLKVKAVMDAGDLVSDDIIIGIVKERITEPDCASGFLFDGFPRTIPQAEALQAAGVEIDMVLEISVDDEEIVTRMSGRRIHEASGRVYHVVFNPPKKSGVDDETGDQLLQREDDKEDTVRTRLKVYHDQTKPLVAFYQTLAESDGPQYRMVEGVGSVQDIRDKVVAALS

SEQ ID NO: 86112 - DNA, 639 bp, marine gamma proteobacterium HTCC2080
  CDS (1)..(639): transl_table=11
atgcgaattattctcctaggcgcacctggcgctggaaagggcactcaagcgaagttcctgtgtgagcaatttgatattcctcaaatctctacgggtgatatgttgcgtgctgctgttgcggcaggtaccgagttagggttacaggcgaaaagtattatggatgctggcgggttagtttctgacgagctaatcataggtctggttaaagaccgactgcagcaacctgattgcgtaacaggctgccttttcgatggcttccccagaacgattcctcaagcacaggcaatggtagatgccgacattagtgtcgatcatgtcatagagattgcagtcgacaatgaggagatcgtagggcgtctaagtgggcgacgcgttcatcctgcaagtggtcgcatttatcatcttgtgcacaatccgcccgaggtcgatggcgttgatgatgcaacaggtgaaatgctgatacagcgcgatgacgacaaagaggcaacggttcgaaagcgtcttgatgtttatcagcagcagacgagaccgctggttgatttttatcagaagcttgacggacccgcgtatcataagattcatggtgtcggtaacgtcgaaaatatttccgcagagataaaaaaactattgcagaactga

SEQ ID NO: 86113 - protein, 212 aa, marine gamma proteobacterium HTCC2080
MRIILLGAPGAGKGTQAKFLCEQFDIPQISTGDMLRAAVAAGTELGLQAKSIMDAGGLVSDELIIGLVKDRLQQPDCVTGCLFDGFPRTIPQAQAMVDADISVDHVIEIAVDNEEIVGRLSGRRVHPASGRIYHLVHNPPEVDGVDDATGEMLIQRDDDKEATVRKRLDVYQQQTRPLVDFYQKLDGPAYHKIHGVGNVENISAEIKKLLQN

SEQ ID NO: 86114 - DNA, 651 bp, Pseudomonas putida GB-1
  CDS (1)..(651): transl_table=11
atgcgcgtaattctgctgggagctcccggggccggtaaaggtactcaggcaaagttcatcaccgaaaagttcggtatccctcagatctccaccggtgacatgctgcgtgccgccgtcaaggccggcaccccgctgggcctggaactgaagaaagtcatggatgccggccagctggtttccgacgagttgatcatcagcctggtcaaggagcgcatcgcccagcctgattgcgccaacggctgcctgttcgatggcttcccacgcaccatcccgcaagccgaagccatggtggctgctggtgtcgacatcgacgccgtggtcgaaattgccgtggatgacgaagaaatcgtcggccgcatggctggccgccgtgtgcacctggcctcgggccgcacctaccacattcagtacaacccgccgaaagtggaaggcaaggacgacgtcactggcgaagacctgatccagcgcgacgacgacaaggaagaaaccgttcgccatcgcctgtcggtctaccacacccagaccaagccgctggtggacttctaccagaagctgtcggccgccaatgctggcaagccgaagtacagccacatcgaaggtgtcggttcggtcgacgccatcactgccaaggtcctggcagccctgagctga

SEQ ID NO: 86115 - protein, 216 aa, Pseudomonas putida GB-1
MRVILLGAPGAGKGTQAKFITEKFGIPQISTGDMLRAAVKAGTPLGLELKKVMDAGQLVSDELIISLVKERIAQPDCANGCLFDGFPRTIPQAEAMVAAGVDIDAVVEIAVDDEEIVGRMAGRRVHLASGRTYHIQYNPPKVEGKDDVTGEDLIQRDDDKEETVRHRLSVYHTQTKPLVDFYQKLSAANAGKPKYSHIEGVGSVDAITAKVLAALS

SEQ ID NO: 86116 - DNA, 654 bp, Marinobacter sp. ELB17
  CDS (1)..(654): transl_table=11
atgcgcatcatcatgttgggcgccccgggcgccgggaagggtacacaggctcagttcatgacagagcggttcgatattcctcagatctccaccggcgacatgttgcgcgccgcggtcaaggccgagtcggatctgggaagtaaggtcaaggaagtgatggcctcgggtggtttggtgtcagacgacattatcatcgctttgattgacgagcgcatccagaaagcggattgcaaaaacggctttctgctcgacggctttccgcgcaccattcctcaggctgaagagctgaaaaaccagggcatcgctatcgattacgtggttgagatcaccgtcgccgatgaagaaattgtcagccgcctgtcaggccggcgcgtgcacgaaagcagtggccgcatctaccacgtcaaatacgatccaccaaaagtggaagacaaagacaacgaaactggcgaagcgttgattcagcgtgaagacgatagtgaagaaaccgtgcgtaaacgcctgggtatttatcaccagcaaaccgctccacttataggttactacaaggattgggttgccaaagatgcggacagcgcgccacgttatgttcaagttgaaggcattggcagtctggacgatattcgcgcccagatcagcgccaagctgaggtaa

SEQ ID NO: 86117 - protein, 217 aa, Marinobacter sp. ELB17
MRIIMLGAPGAGKGTQAQFMTERFDIPQISTGDMLRAAVKAESDLGSKVKEVMASGGLVSDDIIIALIDERIQKADCKNGFLLDGFPRTIPQAEELKNQGIAIDYVVEITVADEEIVSRLSGRRVHESSGRIYHVKYDPPKVEDKDNETGEALIQREDDSEETVRKRLGIYHQQTAPLIGYYKDWVAKDADSAPRYVQVEGIGSLDDIRAQISAKLR

SEQ ID NO: 86118 - DNA, 633 bp, Borrelia turicatae
  CDS (1)..(633): transl_table=11
atgaaacttgtttttttaggacctccgggttctggaaaaggcacaattgccaagatcttatcaggcaaactaaattactatcatatttcaacaggagatctatttagagcaaacatatcaaatgctacacctcttggtaaggaaatcaaacaaatagttgaaaatggacaattagtacccgactcaattacaatcaaaattgttgaagataaaatcaatacccttgcaaataaggataattttattcttgacggatttcctagaaacatcaatcaagctaaagctctagatacgttcttgcaaaatattcaaataataaactttttacttgatgaagcgatactaataaaaaggctttctggaagaagaatatgccaatcctgcggcggaatatttaacatatatacacttcctacaaaagaaaagggtatttgtgatctttgcaaaggaagcctttaccaacgaaaagatgacgtagaagagtctttaaaaatcagacttcaagaatatcatttacagacaaaacctctaatagatttttactcaaaaaacaacaggcttaataacataaatgcatcaaaggatattgatggagtagaaaaaagcttaatagaaataatatcaaagtattaa

SEQ ID NO: 86119 - protein, 210 aa, Borrelia turicatae
MKLVFLGPPGSGKGTIAKILSGKLNYYHISTGDLFRANISNATPLGKEIKQIVENGQLVPDSITIKIVEDKINTLANKDNFILDGFPRNINQAKALDTFLQNIQIINFLLDEAILIKRLSGRRICQSCGGIFNIYTLPTKEKGICDLCKGSLYQRKDDVEESLKIRLQEYHLQTKPLIDFYSKNNRLNNINASKDIDGVEKSLIEIISKY

SEQ ID NO: 86120 - DNA, 657 bp, Herbaspirillum seropedicae
  CDS (1)..(657): transl_table=11
atgcgcctcatccttttaggagcgcctggtgccggtaaaggcacgcaagccacttttatcaaggaaaaattcaacattccgcaaatctccaccggcgacatgctgcgcgcggccgtggcggcgggtactgaactgggcgtcgcggccaagaaggtgatggacgcgggcggtctggtttctgacgacatcatcatcggcctggtcaaggatcgcctcaagcaggccgattgcgccaacggctacctgttcgacggcttcccgcgcaccacgcgccaggccgacgcgatgaaggaagccggcgtggccatcgactacgtgctggaaatcgacgtgcccgacagcgccatcgtcgagcgcatgagcggtcgccgcgtgcatccgggttcgggtcgcagctaccacgtcaagttcaacccgcccaaggtcgagggcaaggatgacgtcaccggcgagccgctggtgcagcgcgatgacgacaaggaagaaaccgtcctgaagcgcctggccgtctaccacgaccagaccaaggtgctgctgggttactacagcaactgggcagcctcgggccagccgggtgcgccgaagtatcgcaagatcgccggcgtgggtccggtggaagaaatcagggatcgtgcatttgccgccctggcggagtaa

SEQ ID NO: 86121 - protein, 218 aa, Herbaspirillum seropedicae
MRLILLGAPGAGKGTQATFIKEKFNIPQISTGDMLRAAVAAGTELGVAAKKVMDAGGLVSDDIIIGLVKDRLKQADCANGYLFDGFPRTTRQADAMKEAGVAIDYVLEIDVPDSAIVERMSGRRVHPGSGRSYHVKFNPPKVEGKDDVTGEPLVQRDDDKEETVLKRLAVYHDQTKVLLGYYSNWAASGQPGAPKYRKIAGVGPVEEIRDRAFAALAE

SEQ ID NO: 86122 - DNA, 654 bp, Magnetospirillum gryphiswaldense
  CDS (1)..(654): transl_table=11
atgaatctggttctgttggggccgccgggcggcggcaagggtacccaggccaagcgcctgatggacaagtacggtctggtgcaattgtccaccggcgacatgctgcgcgccgccgtcgcctcgggctcggacatcggcaagaaggccaaggcggtgatggatgccggccagctggtgtccgacgacatcgtcatcggcatcatcgatgatcgcctggaccaacccgacaccaagaacggagtcatcttcgacggcttcccccggaccgtcgcccaggccgaagccctggatgccatgatggccaagaagggcaagcagctggatttcgccatcgaaatccgcgtgcccgacgcccccatcgtcgaacgcatcaccgggcgctacacctgcgccaagtgcggcgccggctatcacgacaagttccagcagccgaaagtcgccggaacctgtgattcctgcggcggcaccgagttcactcggcgcgccgatgacaatgccgaaaccgtgaacaagcgccttgccgcctatcacgatcagacggcccccctgctgccctattatcaggccaaggggaattatcatctggtggatggtacccaggatatcgccgtggtcaccacggacctggaagtcatcctcggaaaggccgggtga

SEQ ID NO: 86123 - protein, 217 aa, Magnetospirillum gryphiswaldense
MNLVLLGPPGGGKGTQAKRLMDKYGLVQLSTGDMLRAAVASGSDIGKKAKAVMDAGQLVSDDIVIGIIDDRLDQPDTKNGVIFDGFPRTVAQAEALDAMMAKKGKQLDFAIEIRVPDAPIVERITGRYTCAKCGAGYHDKFQQPKVAGTCDSCGGTEFTRRADDNAETVNKRLAAYHDQTAPLLPYYQAKGNYHLVDGTQDIAVVTTDLEVILGKAG

SEQ ID NO: 86124 - DNA, 837 bp, Ostreococcus tauri
  CDS (1)..(837)
atgcagagccgcgtgagattgaccaaacctctcgcgcgatgcgcgcgcgcgttcagcgctcagccgtcgcccttcgacgccaccggcgacgccgtggacgcgctgagaaacgaactcaccaaaacctgcgacgaggttgtggcggccggcaaaaaattaaactgggtcttcttaggcgcccccggcgtgggaaaagggacgtacgcgtcgagagtggcgaaacaaatgaagatcccgcacgtgtccatgggtgatttagtccgcgcggagatcaagggggagacggcgatcggaaaggagatgcgcgcgctcgcggcggcgggcgcgctcgtcccggatgagacggtgttggaaattttgaggttgcgaatcgaaaaggggaagaaagacggcgaaagagggttcttgctcgatgggttcccgcgaacggtgccgcaggcggaacggttgaacgacatggtggaggtgacgtcggcgctgaacctgacgcttcgcgaggacatcttggtcgaaaaatgttgcggacgacgcgagtgcggggagtgcggcaaggcgtttaacatcgcggtaattcgaagcgaaaaagaaggtgagcccacgatcgtgatgccgcccctgaacccgcccgaggcgtgtcttggaaagatgacgcaacgtgcggacgatacggaggacgtcgtccgcgcgcgcctggacgtgtacaagaaagcgacgatcccagtcgaggagtactaccgaaataaaggtcttctgagcgaattcccaatcatgggggggattcccgagacgacgccgatgcttcttaagcacatcatcgacatccttcgtcgacggtga

SEQ ID NO: 86125 - protein, 278 aa, Ostreococcus tauri
MQSRVRLTKPLARCARAFSAQPSPFDATGDAVDALRNELTKTCDEVVAAGKKLNWVFLGAPGVGKGTYASRVAKQMKIPHVSMGDLVRAEIKGETAIGKEMRALAAAGALVPDETVLEILRLRIEKGKKDGERGFLLDGFPRTVPQAERLNDMVEVTSALNLTLREDILVEKCCGRRECGECGKAFNIAVIRSEKEGEPTIVMPPLNPPEACLGKMTQRADDTEDVVRARLDVYKKATIPVEEYYRNKGLLSEFPIMGGIPETTPMLLKHIIDILRRR

SEQ ID NO: 86126 - DNA, 732 bp, Medicago truncatula
  CDS (1)..(732)
atggcgagctctaacttggaagatgttccttctgttgatctcatgtccgagttacttcgtcgtttcaaatgttcttccaaacctgacaaacgtcttattctcgttggcccacctggatctggaaaaggcacccagtcgccgatcataaaggacgagtactgcttatgccatttggctactggtgatatgttgagagcagctgtagcagctaaaacccctcttggtattaaggcgaaagaagctatggaaaagggagaacttgtttctgatgacttggttgttggcatcattgatgaagcaatgaagaaaccatcatgtcagaaaggtttcattcttgatggttttccaagaactgtggtccaagcacagaagcttgatgagatgctgcagaaacagggtgctaaaattgacaaagtgctcaattttgcaattgatgacgcaatccttgaggagcgaattactggacgctggatacacccatccagtggcagaacctaccatacaaagtttgctcctcccaaggtttctggggttgatgatgttactggtgagcctcttatccagcgcaaggatgacactgcagctgttcttaagtcaagactcgagtcgtttcacaggcaaactgaaccggttattgattactattcgaaaaagggcattgttgctagtctccatgctgaaaaacctcccaaagaggtgacatctgaggtcgagaaagtgctgtctcaatag

SEQ ID NO: 86127 - protein, 243 aa, Medicago truncatula
MASSNLEDVPSVDLMSELLRRFKCSSKPDKRLILVGPPGSGKGTQSPIIKDEYCLCHLATGDMLRAAVAAKTPLGIKAKEAMEKGELVSDDLVVGIIDEAMKKPSCQKGFILDGFPRTVVQAQKLDEMLQKQGAKIDKVLNFAIDDAILEERITGRWIHPSSGRTYHTKFAPPKVSGVDDVTGEPLIQRKDDTAAVLKSRLESFHRQTEPVIDYYSKKGIVASLHAEKPPKEVTSEVEKVLSQ

SEQ ID NO: 86128 - DNA, 657 bp, Medicago truncatula
  CDS (1)..(657)
atgtggaaatgcgcaacctcttctttcaaatcattactttctcttcacatcacacaggaaaaggacgtggtttctcccaaacatatggattcggttataacttttgttttaggggggcctggtagtggaaaaggtacacaatgtgcaagaattgttgaaacatttggatttaagcatctgagtgctggagatcttttgaggaaggcaatggtttctgacagtgaatatggcgcgatgattctggaaacaataagagaaggaagaatcgttccatcagcggtgactgtcagattgattctaagagagatgcagtatggtgacaatcgtaagtttcttattgatggtttccctagaagtgaggagaaccgcatagcttttgaacatattactggaacagaaccagattttgttctttactttgattgccctgaagaagagatggtgaaacgggtgctgagccgtaatcagggtcgaattgatgacaatatagatacaatcaagaaacgtcttaaagtatttgaggcattaaatcttcctgtgatcgatcattatgcaagaagagggagacttcataggatcaatgctgtgggaacagaggatgaaatatttgagcaagttcggccagtttttgcggcatgtgagcaaacggctgcatga

SEQ ID NO: 86129 - protein, 218 aa, Medicago truncatula
MWKCATSSFKSLLSLHITQEKDVVSPKHMDSVITFVLGGPGSGKGTQCARIVETFGFKHLSAGDLLRKAMVSDSEYGAMILETIREGRIVPSAVTVRLILREMQYGDNRKFLIDGFPRSEENRIAFEHITGTEPDFVLYFDCPEEEMVKRVLSRNQGRIDDNIDTIKKRLKVFEALNLPVIDHYARRGRLHRINAVGTEDEIFEQVRPVFAACEQTAA

SEQ ID NO: 86130 - DNA, 651 bp, Aspergillus oryzae
  CDS (1)..(651)
atgcgcatggttctgatgggacctcctggtgcaggcaagggcacccaggcacctgcacttaaggacaaatactgtgtgtgccacttggctaccggagatatgttgcggtctcaggtcgccaagaagactgagctgggcaaagaggccaagaagatcatggatcagggtggcctggttagtgatgagatcatggtcaacatgattaagagcgagttggacaacaacagtgaatgcaagaacggtttcatccttgatggctttcctcgtaccgttgctcaggccgagcgcttggatgatatgcttgctgcccgtcaacagaaactccagcatgccgtcgaactgcagatcgatgatgccttgctggtagcaagaatcaccggacgtttagttcaccctgcttctggacgctcctaccataaggtgttcaatcctcctaaacaggagatgaaggatgatattaccggcgagcctctcattcagcggtctgatgacaatgctgagacccttaagaagcgtctcggaacataccatgcccaaaccgcccctgtcgtggattattataagaagactggtatctggcggggaattgatgctagccaggaaccgggtcaagtgtggaagagcctcctcggcgttttccagcagaactaa

SEQ ID NO: 86131 - protein, 216 aa, Aspergillus oryzae
MRMVLMGPPGAGKGTQAPALKDKYCVCHLATGDMLRSQVAKKTELGKEAKKIMDQGGLVSDEIMVNMIKSELDNNSECKNGFILDGFPRTVAQAERLDDMLAARQQKLQHAVELQIDDALLVARITGRLVHPASGRSYHKVFNPPKQEMKDDITGEPLIQRSDDNAETLKKRLGTYHAQTAPVVDYYKKTGIWRGIDASQEPGQVWKSLLGVFQQN

SEQ ID NO: 86132 - DNA, 648 bp, Aspergillus oryzae
  CDS (1)..(648)
atggccgacactcaacatcccacccctcgtttctcgccctccgaagtcacagttgttttccttcttggtggtcccggaagtggcaagggtactcaatctgccaatctcgtccgcgactacggctttgtccatctgtcggcgggtgatctactgcgcgccgagcagatccgcgagggaagccagtatggtgaactgatcaagacttatatccgggagggcaagatcgttccgatggagattacggtggcactgttgtcgaatgccatggcagatgccttaaagaatggtgctagtgccggggagggcaagaaggcccggttcctggtcgatgggttcccgcgcaagttggatcaggctattttcttcgaggatacagtctgtccttcggagctgacactgttcttggactgcccagaggaggttatggagaagcgcctattgaagcgcggagagacctccggccgtgatgatgacaatgctgaatccattcggaagcgtttccgcacttttattgacaccagtatgcctgttgtcgacgcttttaaaaaacagaataaggttgtgtctgtgccggccacggggtctgttgaggaggtgtatgctcttatccaagagggtttcaaggctcgtggggtgcatcagcagtga

SEQ ID NO: 86133 - protein, 215 aa, Aspergillus oryzae
MADTQHPTPRFSPSEVTVVFLLGGPGSGKGTQSANLVRDYGFVHLSAGDLLRAEQIREGSQYGELIKTYIREGKIVPMEITVALLSNAMADALKNGASAGEGKKARFLVDGFPRKLDQAIFFEDTVCPSELTLFLDCPEEVMEKRLLKRGETSGRDDDNAESIRKRFRTFIDTSMPVVDAFKKQNKVVSVPATGSVEEVYALIQEGFKARGVHQQ

SEQ ID NO: 86134 - DNA, 705 bp, Aspergillus oryzae
  CDS (1)..(705)
atgacactcgcaactaggcagctcagtaaggctgctcgtatcatcctcatcggcgcccctggtgttggaaagggcacccaaacagaaagacttcttgccaagtttccacaactggcttcgataagttccggagacctcttacgagaaaatgtgcgcaagaagacaccattggggcttaaagcagagaccgcaatgcaagcaggaaacctcgtccccgattcattaatcctcgagcttatatcttccgaattccaatcaaagggctggctttccgcatcgtcgaactcgtctatttcctccaacgcctcattcatccttgacggtttccctcgcaccgctactcaggcttccagcttagagacacttgttcctatcaatttcgttgtccagctcgttacacccccatccatcattctctcccggatagcgtctcgctgggtccacgagtcgtccggaagagtgtataacaccgatttcaacgctcccaaggttcccggaaaggacgatatcactggggaacctctgactcagagagaggatgactcgattgacacatggaagcaacgactgcgcaaattcgaggaaaccagcgagcccttgctccagcattacgagcgcaagggctgcttatggcgtgttgagggcaacaccagtgatgagattagcccacagcttttcgcggaggtagagaagaggttttgctaa

SEQ ID NO: 86135 - protein, 234 aa, Aspergillus oryzae
MTLATRQLSKAARIILIGAPGVGKGTQTERLLAKFPQLASISSGDLLRENVRKKTPLGLKAETAMQAGNLVPDSLILELISSEFQSKGWLSASSNSSISSNASFILDGFPRTATQASSLETLVPINFVVQLVTPPSIILSRIASRWVHESSGRVYNTDFNAPKVPGKDDITGEPLTQREDDSIDTWKQRLRKFEETSEPLLQHYERKGCLWRVEGNTSDEISPQLFAEVEKRFC

SEQ ID NO: 86136 - DNA, 705 bp, Saccharomyces cerevisiae
  CDS (1)..(705)
atgaaagcagacgcgaaacaaataacacatctactcaaacctcttcgacttttattattgggggctccagggtcaggtaaagggacacagacttcgagattactaaagcaaattccacaattatcttcaatttcgtcaggcgacattttacgtcaggaaataaaatctgaatctaccctaggccgagaggctactacctacattgctcaaggcaagttattaccggatgatctcataacgcgtctgataacttttcgtctttcggcattgggttggttaaaaccatctgccatgtggttgctcgatggatttcctcgaactactgcgcaagcttctgccttagacgagctgctgaaacagcatgacgccagcttgaatctagtggtagagctagatgtacccgaatccaccatattagaaaggatcgagaacagatatgttcacgttcctagtgggagagtgtataacttacaatataatcctcccaaagtgccaggattagacgatatcaccggagaaccattgaccaagaggcttgatgacacagcggaagtgtttaaaaaaaggctagaagagtacaagaaaacaaatgagcctttaaaagattattacaaaaaaagtgggatttttggtaccgtctctggggaaacatcagatattatcttcccgaaattattgaaccttataaccagcaaattcggctaa

SEQ ID NO: 86137 - protein, 234 aa, Saccharomyces cerevisiae
MKADAKQITHLLKPLRLLLLGAPGSGKGTQTSRLLKQIPQLSSISSGDILRQEIKSESTLGREATTYIAQGKLLPDDLITRLITFRLSALGWLKPSAMWLLDGFPRTTAQASALDELLKQHDASLNLVVELDVPESTILERIENRYVHVPSGRVYNLQYNPPKVPGLDDITGEPLTKRLDDTAEVFKKRLEEYKKTNEPLKDYYKKSGIFGTVSGETSDIIFPKLLNLITSKFG

SEQ ID NO: 86138 - DNA, 642 bp, Bacillus stearothermophilus
  CDS (1)..(642): transl_table=11
atgaatttagtactaatgggtttgcctggtgccggaaaaggtactcaagcggaaaaaattgttgaaacatacggaattccgcatatttccactggtgatatgttccgtgcggccattaaagaggggacaccattaggattgcaagcaaaagaatatatggatcgcggcgatcttgttccggatgaagtaaccatcggcatcgttcgcgaacgtttaagcaaagacgattgtcaaaaagggtttttgctagacggattcccacggacggttgcccaagcggaagcgttagaaaacattcttgccgaattaaaccgctcgattgattatgtcattcatattcatgtagataaagatattttaatggaacggctgacaggaagaagaatttgcaaaaattgtggcgcaacgtaccatctagtatttaatccgccggcaaagccaggcgtttgcgataaatgcggcggcgaactataccaacgcgccgatgataacgaagagacggtagccaaccggctcgaagtaaacgtcaaacaaacgcagccgctgctggatttttacgagaaaaaaggatacctacgccacatcaacggacagcaagatattgaaaaagtattcgccgatattcgtgagcttctcggatag

SEQ ID NO: 86139 - protein, 213 aa, Bacillus stearothermophilus
MNLVLMGLPGAGKGTQAEKIVETYGIPHISTGDMFRAAIKEGTPLGLQAKEYMDRGDLVPDEVTIGIVRERLSKDDCQKGFLLDGFPRTVAQAEALENILAELNRSIDYVIHIHVDKDILMERLTGRRICKNCGATYHLVFNPPAKPGVCDKCGGELYQRADDNEETVANRLEVNVKQTQPLLDFYEKKGYLRHINGQQDIEKVFADIRELLG

SEQ ID NO: 86140 - DNA, 669 bp, Saccharomyces cerevisiae
  CDS (1)..(669)
atgtctagctcagaatccattagaatggtcctaattggcccacctggtgccggtaaaggtactcaagctccaaatttgcaagagcgtttccatgccgctcacttggccactggtgacatgttgagatctcaaatcgcaaagggcactcaattaggtttggaagcaaagaaaattatggaccaaggtggtttagtctctgatgacattatggttaacatgatcaaggatgaattgaccaacaatccagcttgtaagaatgggttcatcttggacggtttcccaaaaaccattcctcaggctgaaaaattggaccaaatgttgaaagaacaaggaactcctttggaaaaagccatcgaattgaaggttgatgatgaattgttggttgccagaattaccggtagattaattcacccagcctctggcagatcctaccacaagatctttaacccaccaaaggaagacatgaaggatgacgtcaccggtgaagctttagttcaaagatctgatgacaatgcagacgccttgaagaagagattagctgcttaccatgctcaaaccgaaccaattgttgacttttacaaaaagaccggtatctgggctggtgttgatgcttcccaacctcctgctactgtttgggctgacatcttgaacaagctaggtaaggattaa

SEQ ID NO: 86141 - protein, 222 aa, Saccharomyces cerevisiae
MSSSESIRMVLIGPPGAGKGTQAPNLQERFHAAHLATGDMLRSQIAKGTQLGLEAKKIMDQGGLVSDDIMVNMIKDELTNNPACKNGFILDGFPKTIPQAEKLDQMLKEQGTPLEKAIELKVDDELLVARITGRLIHPASGRSYHKIFNPPKEDMKDDVTGEALVQRSDDNADALKKRLAAYHAQTEPIVDFYKKTGIWAGVDASQPPATVWADILNKLGKD

SEQ ID NO: 86142 - DNA, 639 bp, Spiroplasma kunkelii
  CDS (1)..(639): transl_table=4
atgcgaaattttattttgttaggagctcctggtagtggaaaaggaacccaatcagaccatttagttaaaaagtttggttttacgcatatttcaaccggtaatattattcgtgataatactaagcaaaatacatcattaggtattttgtgccaacagtatgctgaccagggaaaattagttcctgatgatattatgattcaaatggttgaaaatcatttacaaacagtaactggtgatttaatttgagatggttttccgcgcacaattgcgcaagcaaaaaaattagatcaattattgcaaaaactaaatagtaaggttgatcatacattatattttgaaattgatgaagcaaagttaatcgaacgaattacggaacgtttaacttgttcaacttgtggacgaacatatcataaaacagcattgcccccaaaagtgtcatgagtttgtgatgatgatcaaacgccattagtacaacgtaaagatgataatgaagaaaaaattaaaattagattagcggcatatcatgctgatactgcaccgctaattgaatattatttaaatcagcaagtattaaccgttattgatgctgatatggaaggaaatgctgtctgagaccaaattatggcagttttaaaataa

SEQ ID NO: 86143 - protein, 212 aa, Spiroplasma kunkelii
MRNFILLGAPGSGKGTQSDHLVKKFGFTHISTGNIIRDNTKQNTSLGILCQQYADQGKLVPDDIMIQMVENHLQTVTGDLIWDGFPRTIAQAKKLDQLLQKLNSKVDHTLYFEIDEAKLIERITERLTCSTCGRTYHKTALPPKVSWVCDDDQTPLVQRKDDNEEKIKIRLAAYHADTAPLIEYYLNQQVLTVIDADMEGNAVWDQIMAVLK

SEQ ID NO: 86144 - DNA, 654 bp, Arabidopsis thaliana
  CDS (1)..(654)
atgatttcgggtgcaccggcttcaggaaaaggcactcaatgtgagctcattgttcacaagtttggtttggtgcacatatcaacaggggatctattgagagcagaggtgtcatctgggacagatattggaaagagagcaaaagagttcatgaactcgggtagtttggttcctgatgagattgttatagcgatggtggctggaagattatcacgtgaagatgctaaagagcatggatggcttcttgatggatttccacggagttttgcccaggcacaaagtctggacaaactgaacgtgaaacctgacatttttatcttactagatgttcctgatgaaattctgatcgatagatgtgttggtcgaaggttggatccagtgactggaaaaatttatcatatcaaaaattaccctcctgaatcagatgaaattaaagcaagactggttacacgcccggatgatacagaggagaaggtaaaagcacggctgcaaatatacaaacaaaattctgaagcgattatttcagcatactcagatgttatggtcaaggtactaggcaatttttttttggtttcccttaacctttggttcttaaagtattgcaatgccatctttgatatttgtggtttggtatcatctcattcgaacacagattga

SEQ ID NO: 86145 - protein, 217 aa, Arabidopsis thaliana
MISGAPASGKGTQCELIVHKFGLVHISTGDLLRAEVSSGTDIGKRAKEFMNSGSLVPDEIVIAMVAGRLSREDAKEHGWLLDGFPRSFAQAQSLDKLNVKPDIFILLDVPDEILIDRCVGRRLDPVTGKIYHIKNYPPESDEIKARLVTRPDDTEEKVKARLQIYKQNSEAIISAYSDVMVKVLGNFFLVSLNLWFLKYCNAIFDICGLVSSHSNTD

SEQ ID NO: 86146 - DNA, 633 bp, Oryza sativa
  CDS (1)..(633)
atgggttcagttgtggatgctccagtggttgtggagggggttgctgagaacatgttgggtgataagaaagttacagttgtatttgttctaggtggtcctggaagtggaaaaggcacacagtgtgccaacattgtggaacactttggattcacccacttaagtgctggagaccttttgcgtgcagagataaaatctggttctgagaatggaactatgattgagaacatgataaaggaggggaagattgttccgtcagaggttactataaagctcttgcaagatgccatgattaaaaatgagaatgataagtttctaatcgatgggttcccaaggaatgaagagaatcgtgctgccttcgagaatgttacaaaaatttcccctgcatttgtgctattttttgactgttctgaagaagagatggaaagacgtcttttgggacgcaatcagggtagagttgatgacaacattgagaccattaggaaaagattcaaagtttttgttgaatcaagtttgcctgtaattgagcactacaatgcgaagaacaaagttaaaaagattgatgctgcaaaatcaatttctgaagtgtttgaagatgtcaaagccatttttgccccatatgctaaggttgaatag

SEQ ID NO: 86147 - protein, 210 aa, Oryza sativa
MGSVVDAPVVVEGVAENMLGDKKVTVVFVLGGPGSGKGTQCANIVEHFGFTHLSAGDLLRAEIKSGSENGTMIENMIKEGKIVPSEVTIKLLQDAMIKNENDKFLIDGFPRNEENRAAFENVTKISPAFVLFFDCSEEEMERRLLGRNQGRVDDNIETIRKRFKVFVESSLPVIEHYNAKNKVKKIDAAKSISEVFEDVKAIFAPYAKVE

SEQ ID NO: 86148 - DNA, 741 bp, Arabidopsis thaliana
  CDS (1)..(741)
atggcgaccggtggtgctgcggcggatttggaagatgttcagacggtggatctcatgtcggagctcctccgccgcctcaagtgttctcagaagcccgacaaacgcctcatcttcattggacctccagggtcagggaaaggtactcaatctccagtagtgaaggatgagtattgcttgtgtcacttatccactggagacatgttaagagctgctgttgcttctaagacccctcttggtgtcaaggctaaagaagctatggaaaaaggagagctcgtctctgatgatttggttgttggtataattgatgaagccatgaacaagccaaaatgtcaaaaaggatttatccttgatgggttccccaggactgttactcaggcagagaagctcgatgagatgcttaagaggcgaggaactgaaattgacaaagttctcaactttgctattgatgacgcaatcttggaggaaagaataaccgggcgatggatccacccatcgagtggcaggagttaccacaccaaatttgctcctcccaaaacccctggagttgatgatattactggagagcctctgatccaacgtaaagatgataacgctgatgttctaaagtcgaggcttgcagctttccacagtcaaactcaaccggtgattgattactacgcaaagaaggccgttctcacaaacatccaggccgagaaggctccccaagaagttacatcagaggttaaaaaagcattgtcatga

SEQ ID NO: 86149 - protein, 246 aa, Arabidopsis thaliana
MATGGAAADLEDVQTVDLMSELLRRLKCSQKPDKRLIFIGPPGSGKGTQSPVVKDEYCLCHLSTGDMLRAAVASKTPLGVKAKEAMEKGELVSDDLVVGIIDEAMNKPKCQKGFILDGFPRTVTQAEKLDEMLKRRGTEIDKVLNFAIDDAILEERITGRWIHPSSGRSYHTKFAPPKTPGVDDITGEPLIQRKDDNADVLKSRLAAFHSQTQPVIDYYAKKAVLTNIQAEKAPQEVTSEVKKALS

SEQ ID NO: 86150 - DNA, 663 bp, Schizosaccharomyces pombe
  CDS (1)..(663)
atggctggcatgagacttattttagttggacctccaggtgctggaaaaggcactcaggcccccaacattcagaagaaatatggcatcgcccatcttgctactggtgacatgttgcgctctcaagtagctcgtcaaactgagctcggtaaagaagctaagaagatcatggatcagggtggtcttgtcagcgatgacattgtcactggtatgatcaaggatgagatcctcaacaatcctgagtgcaagaacggcttcatcctggacggtttcccccgtactgtcgtccaagctgaaaagcttaccgctcttcttgatgaactcaaacttgacttgaatactgtccttgagttacaagttgatgatgaacttttggtcagacgtatcactggtcgtctcgtccatcccggatctggccgtagctaccacttggaatttaatcctcctaaagttcctatgaaagacgatgttactggcgagcctcttatccaacgttccgatgataacgccgatgctttgcgcaagcgtttggtcacttatcacgaacaaactactcctgtcgttgagttttacaaaaagaagggtaaatgggctgctgttgatgctgctcaaaaacctgagcaagtttgggagcagatcgttgctattcttgagaaggctgagtaa

SEQ ID NO: 86151 - protein, 220 aa, Schizosaccharomyces pombe
MAGMRLILVGPPGAGKGTQAPNIQKKYGIAHLATGDMLRSQVARQTELGKEAKKIMDQGGLVSDDIVTGMIKDEILNNPECKNGFILDGFPRTVVQAEKLTALLDELKLDLNTVLELQVDDELLVRRITGRLVHPGSGRSYHLEFNPPKVPMKDDVTGEPLIQRSDDNADALRKRLVTYHEQTTPVVEFYKKKGKWAAVDAAQKPEQVWEQIVAILEKAE

SEQ ID NO: 86152 - DNA, 1109 bp, Saccharomyces cerevisiae
  CDS (163)..(831)
tcgactttttcactctggctagttttattacgcatatttgtatatatatatacgcataaatttctgaaatggattacctggtttatcagaaacgagagctttaataaagaaacattaacgtttctctggtaaagtcaccacacagcatcaaatataacagtaatgtctagctcagaatccattagaatggtcctaattggcccacctggtgccggtaaaggtactcaagctccaaatttgcaagagcgtttccatgccgctcacttggccactggtgacatgttgagatctcaaatcgcaaagggcactcaattaggtttggaagcaaagaaaattatggaccaaggtggtttagtctctgatgacattatggttaacatgatcaaggatgaattgaccaacaatccagcttgtaagaatgggttcatcttggacggtttcccaagaaccattcctcaggctgaaaaattggaccaaatgttgaaagaacaaggaactcctttggaaaaagccatcgaattgaaggttgatgatgaattgttggttgccagaattaccggtagattaattcacccagcctctggcagatcctaccacaagatctttaacccaccaaaggaagacatgaaggatgacgtcaccggtgaagctttagttcaaagatctgatgacaatgcagacgccttgaagaagagattagctgcttaccatgctcaaaccgaaccaattgttgacttttacaaaaagaccggtatctgggctggtgttgatgcttcccaacctcctgctactgtttgggctgacatcttgaacaagctaggtaaggattaatgaccttgcgcaatgtcttctaaatatcttttcttttttttaaattaatgaaaatataataaatttttgtatgtgagtacatatatccgcagtatactataaatgaaataataacataagtgtttgtaactggctataacgtccttaaacatgtgcactgccattaagtacttagtcaatatttttatcgttgagaacgaacgcaaatcatattactaaatagatgaacaaaagcgcatcacataaacaaaaacggtataacagtaatagtgaagctt

SEQ ID NO: 86153 - protein, 222 aa, Saccharomyces cerevisiae
MSSSESIRMVLIGPPGAGKGTQAPNLQERFHAAHLATGDMLRSQIAKGTQLGLEAKKIMDQGGLVSDDIMVNMIKDELTNNPACKNGFILDGFPRTIPQAEKLDQMLKEQGTPLEKAIELKVDDELLVARITGRLIHPASGRSYHKIFNPPKEDMKDDVTGEALVQRSDDNADALKKRLAAYHAQTEPIVDFYKKTGIWAGVDASQPPATVWADILNKLGKD

SEQ ID NO: 86154 - DNA, 555 bp, Anabaena sp
  CDS (1)..(555): transl_table=11
gtgagattagtgattctgggaggttcagggtcgggaaaaagcactcaagcacaaaggctttgcagtcatttagaaattactcagatttctacgggcgagattttacgggaagctatttcccatcttagtgaattaggtcgtcatgcccaaccttacatgattaaaggggaactagtccctgacgaaatgatcattgaactaatccgattgcgtctgaaaaagtctgatgtaattgatggctgggttttggaaggttatccgcgtactgccttccaagctgaagagttggactttttgcttgatgagttggggcagaaattagattgggcaatttatttacaagtaccggaagcagtgatggtgagtcgttctttggggcgttctctaccagatgaccaacctgaaattgtgcagcgtcgagtagagattttttacgatcgcactgttcctattttagagtattacgaccgtcgccgccgcctgttgacaattaacggtgatcagtccccggaattagtattgcaaagtatcctcaaactacttttagtaacttag

SEQ ID NO: 86155 - protein, 184 aa, Anabaena sp [sequence omitted]

SEQ ID NO: 86156 - DNA, 747 bp, Arabidopsis thaliana
  CDS (1)..(747)
atggcaacgagcagtgcggcttctgttgatatggaagatattcagactgttgatctcatgtctgagcttcttcgccgtatgaaatgtgcctctaaacctgacaaacgtctcgttttcatcggtccacctggttcagggaaaggtacacagtctccggtcataaaggatgagttttgtttgtgtcatttgtctactggtgacatgcttagagctgctgttgctgctaagactcctcttggtgtgaaggcaaaggaagcaatggataagggagagcttgtttctgatgacttggttgttggtatcatggatgaagcaatgaacagacccaaatgtcagaaaggtttcattcttgatgggttcccgcggactgtgactcaagcagagaagcttgatgagatgcttaatagaaggggagctcagatagataaggtgcttaattttgcgatcgatgattcggttctcgaagaaagaattactggaaggtggattcacccttcaagtggaagaagctatcatactaaattcgcacctcctaaagttccaggagtcgatgatctgactggagagccattgattcaacgtaaagatgacaatgcggatgttcttagatcaaggctagatgcattccacaagcagacgcaaccggtaattgactattatgcgaagaaggagaatctggtgaacataccggcagagaaggccccggaagaggttacaaaagtggtgaagaaggttgtgtctacatga

SEQ ID NO: 86157 - protein, 248 aa, Arabidopsis thaliana
MATSSAASVDMEDIQTVDLMSELLRRMKCASKPDKRLVFIGPPGSGKGTQSPVIKDEFCLCHLSTGDMLRAAVAAKTPLGVKAKEAMDKGELVSDDLVVGIMDEAMNRPKCQKGFILDGFPRTVTQAEKLDEMLNRRGAQIDKVLNFAIDDSVLEERITGRWIHPSSGRSYHTKFAPPKVPGVDDLTGEPLIQRKDDNADVLRSRLDAFHKQTQPVIDYYAKKENLVNIPAEKAPEEVTKVVKKVVST

SEQ ID NO: 86158 - DNA, 546 bp, Synechocystis sp
  CDS (1)..(546): transl_table=11
atgcgattagttatgctcggtggcccggggtcagggaaaagcacccagtcccataacctcagccaagaacttaagttgccagtgatttccatggggggtattctgcgggaagccattgccaacgccactcccctgggaatcaaggctaaaccctatgtggaaagaggggatctgttgccagatccgatgatgatcgaatttattcaacagaggttggtgcaggaagatgggggtcagggttggattttggaaggttatcctcgcaccgctttccaagcagaagaactggactttttactcgaagatctggggcagcccctggattgggccctgtacctgaaaattgatgaagccacgatggtggaacgttccctcaaccgttctttgtttgacgatcatcctgaagccatcaccactcgcattggcaagtttcatgagtacaccgttcccctattggaatactacgctgcgaagcaaaacctactcacagtgaatgcataccccgaagttgatcaagttacaaagctaattttggctcggctttag

SEQ ID NO: 86159 - protein, 181 aa, Synechocystis sp [sequence omitted]

SEQ ID NO: 86160 - DNA, 678 bp, Saccharomyces cerevisiae
  CDS (1)..(678)
atgaaagcagacgcgaaacaaataacacatctactcaaacctcttcgacttttattattgggggctccagggtcaggtaaagggacacagacttcgagattactaaagcaaattccacaattatcttcaatttcgtcaggcgacattttacgtcaggaaataaaatctgaatctaccctaggccgagaggctactacctacattgctcaaggcaagttattaccggatgatctcataacgcgtctgataacttttcgtctttcggcattgggttggttaaaaccatctgccatgtggttgctcgatggatttcctcgaactactgcgcaagcttctgccttagacgagctgctgaaacagcatgacgccagcttgaatctagtggtagagctagatgtacccgaatccaccatattagaaaggatcgagaacagatatgttcacgttcctagtgggagagtgtataacttacaatataatcctcccaaagtgccaggattagacgatatcaccggagaaccattgaccaagaggcttgatgacacagcggaagtgtttaaaaaaaggctagaagagtacaagaaaacaaatgagcctttaaaagattattacaaaaaaagtgggatttttggtaccgtctctggggaaacatcagatattatcttccgaaattattga

SEQ ID NO: 86161 - protein, 225 aa, Saccharomyces cerevisiae
MKADAKQITHLLKPLRLLLLGAPGSGKGTQTSRLLKQIPQLSSISSGDILRQEIKSESTLGREATTYIAQGKLLPDDLITRLITFRLSALGWLKPSAMWLLDGFPRTTAQASALDELLKQHDASLNLVVELDVPESTILERIENRYVHVPSGRVYNLQYNPPKVPGLDDITGEPLTKRLDDTAEVFKKRLEEYKKTNEPLKDYYKKSGIFGTVSGETSDIIFRNY

SEQ ID NO: 86162 - DNA, 855 bp, Arabidopsis thaliana
  CDS (1)..(855)
atggcgagattagtgcgtgtggctagatcctcctccctctttggctttggtaaccgtttctactctacttcagccgaagctagccacgcgtcgtcgccttcgccgtttcttcacggcggcggagctagcagggttgctccgaaagatagaaatgttcagtgggtgtttttgggatgtcctggtgttggaaaaggaacttacgctagtagactatcaacccttctcggcgttcctcacatcgccaccggcgatctcgtccgtgaagagcttgcatcttctggacctctctctcaaaagctatcggagattgtaaatcagggaaaattggtttctgatgagatcattgtagacttattgtccaaaagacttgaggctggtgaagctagaggtgaatcagggtttatccttgatggctttcctcgtaccatgagacaagctgaaatactgggagatgtaactgacatcgatttggtggtgaatttgaagcttcctgaggaagttttggttgacaaatgccttggaaggagaacatgtagtcaatgtggcaagggttttaatgtagctcacatcaacttaaagggtgagaatggaagacctggaattagtatggatccacttctccctccacatcaatgtatgtcaaagcttgtcactcgagctgatgatactgaagaggtggtgaaagcaaggcttcgtatatacaatgaaacgagccagcctcttgaagaatactaccgtaccaagggaaagcttatggagtttgacttacctggaggcatcccagagtcatggccaaggctattggaagctttaaggcttgacgattacgaggagaaacagtctgtcgcagcataa

SEQ ID NO: 86163 - protein, 284 aa, Arabidopsis thaliana
MARLVRVARSSSLFGFGNRFYSTSAEASHASSPSPFLHGGGASRVAPKDRNVQWVFLGCPGVGKGTYASRLSTLLGVPHIATGDLVREELASSGPLSQKLSEIVNQGKLVSDEIIVDLLSKRLEAGEARGESGFILDGFPRTMRQAEILGDVTDIDLVVNLKLPEEVLVDKCLGRRTCSQCGKGFNVAHINLKGENGRPGISMDPLLPPHQCMSKLVTRADDTEEVVKARLRIYNETSQPLEEYYRTKGKLMEFDLPGGIPESWPRLLEALRLDDYEEKQSVAA

SEQ ID NO: 86164 - DNA, 852 bp, Arabidopsis thaliana
  CDS (1)..(852)
atgacgggctgtgtgaattctatttctccgccgccggtgactttataccggcatcgtgcctctccgtcacggtcgtccttctcattatccggcgatgccttacactctctttaccggcaccgacgtgtatcaagatctccgtcgattatcgctcccaaatttcagattgtggcggctgaaaaatcggagcctctgaaaattatgatatcaggagctcctgcttctggtaaaggtacacaatgcgagctgattactcacaaatatggtttggtgcatatctctgctggagatttgctgagggctgaaatcgcttctggaagtgaaaatggaagacgtgctaaagaacatatggagaaaggacaattggtccctgatgaaatagttgtaatgatggtaaaagatcgtttatcacagacagattcagagcaaaaaggatggcttttggatggatatccaaggagtgcatcacaggcaacagctctcaagggatttggattccagcctgatctattcattgtcctcgaagttcctgaagaaattctaattgaaagagttgttgggcgtcgattggatcctgtcacaggaaagatctaccacttgaagtattcgcctccagagacagaagagattgctgttagactcacccaacgttttgatgataccgaagagaaggcaaaactgcggctgaagactcataaccaaaatgtgagtgatgtgctttctatgtacgacgatataacaattaagatcgagggaaaccgctcaaaagaggaagtgtttgcccagatcgattcttctctgtccgaattgcttcaagagaggaacactgctccaagttcacttttaagttga

SEQ ID NO: 86165 - protein, 283 aa, Arabidopsis thaliana
MTGCVNSISPPPVTLYRHRASPSRSSFSLSGDALHSLYRHRRVSRSPSIIAPKFQIVAAEKSEPLKIMISGAPASGKGTQCELITHKYGLVHISAGDLLRAEIASGSENGRRAKEHMEKGQLVPDEIVVMMVKDRLSQTDSEQKGWLLDGYPRSASQATALKGFGFQPDLFIVLEVPEEILIERVVGRRLDPVTGKIYHLKYSPPETEEIAVRLTQRFDDTEEKAKLRLKTHNQNVSDVLSMYDDITIKIEGNRSKEEVFAQIDSSLSELLQERNTAPSSLLS

SEQ ID NO: 86166 - DNA, 888 bp, Solanum tuberosum
  CDS (22)..(888)
ctccgggagaattttccggcaatggcggccatgatccgcctgttcagatcttcatcatcttcctcatccaattcaatttcccttatcagtagatctttatctacagcagctgcatctgagacagtgaaatcccaatcttaccctcataatccccattctacaagtgttgatcccaaggctaaaactgtccaatgggtctttttgggttgtcccggtgtcggaaaaggtacatatgctagccgtctttcaacccttttaggcgttcctcatattgctaccggagatcttgttcgtgatgagttgaaatcttcaggtcctttgtcgaaacaacttgcagagattgtcaaccaaggaaaattggtttcagatgagattatactgaatttactatctaaaaggctcgagagtggggaagctaagggtgaagctggattcatacttgatggattccctagaactgtgagacaagcagaaatactgactgaggttacagacatagatttggtggttaatctcaagcttccagagcgggtattggttgagaaatgccttggccgaaggatctgcagtgaatgtggaaagaatttcaacgtggcatctatagatgtcgctggtgaaaatggggctcctaggatcagcatggctcggcttaacccccccttcacagtgtgtttcaagttaatcactcgagcagatgatacagaagctattgttaaggaaaggctcagtatatactgggataagagtcagcctgttgaggacttctaccgtagccaaggaaagttactggaatttgatttaccgggaggcattcctgaatcatggcctaagttgctggaagttctcaaccttgatgaacaggaatataaactgtctcctgcagcttag

SEQ ID NO: 86167 - protein, 288 aa, Solanum tuberosum
MAAMIRLFRSSSSSSSNSISLISRSLSTAAASETVKSQSYPHNPHSTSVDPKAKTVQWVFLGCPGVGKGTYASRLSTLLGVPHIATGDLVRDELKSSGPLSKQLAEIVNQGKLVSDEIILNLLSKRLESGEAKGEAGFILDGFPRTVRQAEILTEVTDIDLVVNLKLPERVLVEKCLGRRICSECGKNFNVASIDVAGENGAPRISMARLNPPFTVCFKLITRADDTEAIVKERLSIYWDKSQPVEDFYRSQGKLLEFDLPGGIPESWPKLLEVLNLDEQEYKLSPAA

SEQ ID NO: 86168 - DNA, 591 bp, Agrobacterium tumefaciens
  CDS (1)..(591): transl_table=11
atgagactgatatttttgggtccgccgggtgcgggcaagggaacccaggccaagcggctgactgacaagtacgggatcccgcagctttccaccggtgacatgcttcgcgctgcggtcagcgcgggcaccgaaatcggcaagcgcgccaaagccgtcatggacgccggcgggctcgtttccgacgatatcgtcaatcagatcgtttccgaacgcatcgaagcaccggactgtgccaagggctttattctcgacggctatccgcgcaccgttccgcaggccaaggcgcttgcggacaatatgcgcaagaagaatcaggtcctggatgccgtcatcgaactgaaggtggatgaagaggcgttgattcgccgaatcgaaaaccgcgtagctgaaaccattgccgctggcggcacggttcgctcggatgacaatccggaagctttccgcaagcgtctgacagaatatcgcgaaaagaccgcgccgctgtctgcctattacagcgaacagggcgagctggtgacgcttgatggcatggctgatgtcgatgccgtcactgaggccattgagcgcgttctcgagaaagcctctgcctga

SEQ ID NO: 86169 - protein, 196 aa, Agrobacterium tumefaciens [sequence omitted]

SEQ ID NO: 86170 - DNA, 621 bp, Aquifex aeolicus
  CDS (1)..(621): transl_table=11
atgatactggttttcctaggacctcccggtgcaggaaagggaactcaggctaagagactcgcaaaagagaagggctttgtccacatatccacaggagatatcttaagggaagccgttcagaagggaacacccctcggtaaaaaagccaaagaatacatggaaaggggggaactcgttcccgatgacttaataatagctttaatagaggaagtatttccgaagcacggaaacgtcatatttgacggctttcccagaaccgtaaaacaggcagaggcccttgacgagatgcttgaaaagaaaggacttaaagttgaccatgttctcctctttgaagttcccgacgaggtggtaatagaaaggctttcaggaagaaggataaatcccgaaacgggagaggtttaccacgtgaagtacaacccaccgcctcccggtgtgaaggttattcaaagggaagacgacaaacccgaagtcattaaaaagagactcgaggtttacagagagcaaaccgctcccctcattgaatattacaagaagaaaggtatattaagaataatagacgcaagtaaacctgttgaggaggtttacaggcaagttttagaggttataggagatggcaattga

SEQ ID NO: 86171 - protein, 206 aa, Aquifex aeolicus
MILVFLGPPGAGKGTQAKRLAKEKGFVHISTGDILREAVQKGTPLGKKAKEYMERGELVPDDLIIALIEEVFPKHGNVIFDGFPRTVKQAEALDEMLEKKGLKVDHVLLFEVPDEVVIERLSGRRINPETGEVYHVKYNPPPPGVKVIQREDDKPEVIKKRLEVYREQTAPLIEYYKKKGILRIIDASKPVEEVYRQVLEVIGDGN

SEQ ID NO: 86172 - DNA, 654 bp, Archaeoglobus fulgidus
  CDS (1)..(654): transl_table=11
atgaacctgatttttctcggcccacccggagcgggtaagggtacgcaggcaaagagagtttccgaaaagtatggcattccgcagatttcaaccggtgatatgctgagggaggctgttgctaaggggacggagctgggaaaaaaggccaaggagtacatggacaagggggagcttgtgcctgacgaggttgttattggcatagtcaaggagaggctgcagcagcctgactgtgagaagggctttatcctcgacggatttccgagaactctcgctcaagcagaggctctcgacgagatgctcaaagagctgaacaagaaaatcgatgccgtcatcaacgttgttgttcctgaggaggaagtcgtaaagagaatcacgtacagaagaacgtgcagaaactgcggagccgtctatcatctgatttacgctccacccaaggaggataacaagtgtgacaagtgcggtggagagctataccagagagacgacgataaggaggaaactgtgagggagaggtacagggtttacaagcaaaatacggagccgcttatcgattactacagaaagaagggcatactctacgacgtggacggaaccaaagatatagagggcgtctggaaagagatagaggccatattggaaaagatcaaatcctga

SEQ ID NO: 86173 - protein, 217 aa, Archaeoglobus fulgidus
MNLIFLGPPGAGKGTQAKRVSEKYGIPQISTGDMLREAVAKGTELGKKAKEYMDKGELVPDEVVIGIVKERLQQPDCEKGFILDGFPRTLAQAEALDEMLKELNKKIDAVINVVVPEEEVVKRITYRRTCRNCGAVYHLIYAPPKEDNKCDKCGGELYQRDDDKEETVRERYRVYKQNTEPLIDYYRKKGILYDVDGTKDIEGVWKEIEAILEKIKS

SEQ ID NO: 86174 - DNA, 651 bp, Bacillus anthracis
  CDS (1)..(651): transl_table=11
atgaacttaattttaatggggcttcctggtgctggtaaaggtacacaagccgaacagattgttgccaagtataacatccctcacatctcaacaggagatatgttccgtgcagctatgaaggctgaaactgaaatgggtttacaagcaaaatcttttattgataaaggtgcacttgttccagatgaagttacaatcggaattgttcgtgaacgtttaagccaagaagactgtgtaagaggcttcttattagatggtttcccacgaactgttgcacaagcatcagctcttgaagagattatgaaagatcttggcaaaaaaatcgactatgttttaaacattaatgtggattcagggttgttattaaaacgccttacaggccgtcgcatttgtaaagagtgcggtgcgacttaccacttagaattcaatgcgccagcaaaagctgacgtgtgcgataaatgtggtggcgaattatatcaacgctctgatgacaatgaagaaactgtagcaaatcgcttagatgtaaatattaagcaaactaaacctttgcttgatttctacgaggagcttggttacctacaaagcattaatggtgagcaagatatcaataaagtatttgctgatatcgatgttctcatcggaggcttagcgtaa

SEQ ID NO: 86175 - protein, 216 aa, Bacillus anthracis
MNLILMGLPGAGKGTQAEQIVAKYNIPHISTGDMFRAAMKAETEMGLQAKSFIDKGALVPDEVTIGIVRERLSQEDCVRGFLLDGFPRTVAQASALEEIMKDLGKKIDYVLNINVDSGLLLKRLTGRRICKECGATYHLEFNAPAKADVCDKCGGELYQRSDDNEETVANRLDVNIKQTKPLLDFYEELGYLQSINGEQDINKVFADIDVLIGGLA

SEQ ID NO: 86176 - DNA, 651 bp, Bacillus cereus
  CDS (1)..(651): transl_table=11
atgaacttaattttaatggggcttcctggtgctggtaaaggtacacaagccgaacagattgttgccaagtataacatccctcacatctcaacaggagatatgttccgtgcagctatgaaggctgaaactgaaatgggtttacaagcaaaatcttttattgataaaggtgcacttgttccagatgaagttacaatcggaatcgttcgtgaacgtttaagccaagaagactgcgtaagaggcttcttattagatggtttcccacgaactgttgcacaagcatcagctcttgaagagattatgaaagatcttggcaaaaaaatcgactatgttttaaacattaatgtggattcagggttgttattaaagcgccttacaggccgtcgcatttgtaaagagtgcggtgcgacttaccacttagaattcaatccgccagcaaaagctgacgtgtgcgataaatgtggtggcgaattatatcaacgctctgatgacaatgaagaaactgtagcaaatcgcttagatgtaaatattaagcaaactaaacctttgcttgatttctacgaggagcttggttacttacaaagcattaatggtgagcaagatatcaataaagtatttgctgatatcgatgttctcatcggaggcttagcgtaa

SEQ ID NO: 86177 - protein, 216 aa, Bacillus cereus
MNLILMGLPGAGKGTQAEQIVAKYNIPHISTGDMFRAAMKAETEMGLQAKSFIDKGALVPDEVTIGIVRERLSQEDCVRGFLLDGFPRTVAQASALEEIMKDLGKKIDYVLNINVDSGLLLKRLTGRRICKECGATYHLEFNPPAKADVCDKCGGELYQRSDDNEETVANRLDVNIKQTKPLLDFYEELGYLQSINGEQDINKVFADIDVLIGGLA

SEQ ID NO: 86178 - DNA, 570 bp, Bacteroides fragilis
  CDS (1)..(570): transl_table=11
atgctgaacattgtaattttcggtgctcccggttcaggaaagggaacacaaagcgaacgtattgttgagaaatacggaattaatcacatttcaacaggagatgtattgcgtgcagaaattaaaaacggcacagaactgggtaaaacagctaaaggctacattgatcagggacagttgattccggatgaattgatggtagacattctggcaagtgtgtttgatagtttcaaagatagcaaaggggttatttttgacggtttcccaagaactattccacaggctgaggcgttgaaagtgatgttgaaagaacgtggtcaggacatctctgtgatgttggatctggatgttccggaagaagaactgatgactcgtctgattaaacgtggtaaggaatcgggccgtgcagatgataatgaagagaccatcaaaaaacgtttggttgtatataatacacagacttcaccgttgaaagaatattataaaggcgaaggcaaataccagcatatcaatggtcttggaaccatggaaggtatcttcgaagatatttgtaaagcggtagatacattataa

SEQ ID NO: 86179 - protein, 189 aa, Bacteroides fragilis
MLNIVIFGAPGSGKGTQSERIVEKYGINHISTGDVLRAEIKNGTELGKTAKGYIDQGQLIPDELMVDILASVFDSFKDSKGVIFDGFPRTIPQAEALKVMLKERGQDISVMLDLDVPEEELMTRLIKRGKESGRADDNEETIKKRLVVYNTQTSPLKEYYKGEGKYQHINGLGTMEGIFEDICKAVDTL

SEQ ID NO: 86180 - DNA, 654 bp, Bacillus licheniformis
  CDS (1)..(654): transl_table=11
atgaacttagtcttaatgggactgcctggagccggtaaagggacacaggctgaacggattgttgaagattttgggatacctcatatctcaacaggagacatgttccgcgctgcgatgaaagaagaaacggatctgggactcgaagccaaatcatacattgataaaggtgagcttgttccggatgaagtgacaattggtattgtcagggagagacttggcaagaatgattgtgacggaggttttcttctggacggatttccgagaacagtcgctcaagctgaagcacttgaggaaattcttaaaggacttggcaagtcgattgaccatgtcatcaacattcaagtcgataaagatgcattgatggaacgtctgacaggacgcagaatctgcaaaaactgcggtgcaacttatcatttagtctttaatccgcctgcaaaagaaaatgtatgcgacaagtgtggaggagagctttatcagcgtgaagacgataatgaagctaccgtatccacgcggttagaggtcaacatgaagcaaacccagcctttactcgatttctatgaagataaaggatatctcgtaaacattgacgggcagaagcacatcaatgaagtttacgctgatataaaggagcttctcggaggccgggacaaatga

SEQ ID NO: 86181 - protein, 217 aa, Bacillus licheniformis
MNLVLMGLPGAGKGTQAERIVEDFGIPHISTGDMFRAAMKEETDLGLEAKSYIDKGELVPDEVTIGIVRERLGKNDCDGGFLLDGFPRTVAQAEALEEILKGLGKSIDHVINIQVDKDALMERLTGRRICKNCGATYHLVFNPPAKENVCDKCGGELYQREDDNEATVSTRLEVNMKQTQPLLDFYEDKGYLVNIDGQKHINEVYADIKELLGGRDK

SEQ ID NO: 86182 - DNA, 654 bp, Bacillus subtilis
  CDS (1)..(654): transl_table=11
atgaacttagtcttaatggggcttcctggtgccggtaaaggcacacagggcgaacgaattgttgaggattatgggattcctcatatctcaacaggagatatgttccgtgctgctatgaaagaagaaacaccactcggactcgaagcaaaatcttatattgataagggagagctcgtacctgacgaagtcacaatcggaattgtaaaagagagacttggcaaagatgattgtgaaagaggttttcttctggacggatttccgcgaacagtcgctcaagccgaagctcttgaagaaattcttgaggaatacggcaagccgattgattatgtcattaacattgaagtcgacaaagatgttctgatggaacgtctgactggacgcagaatttgcagtgtttgcggcacaacctatcatttagtctttaatccgccgaaaacgccgggtatttgtgataaagacggaggcgaactctatcaacgggcagatgataatgaggaaacagtctctaaacggcttgaggtaaacatgaagcaaactcagcctttactcgatttctattcagagaaaggttatcttgcaaacgtgaatggccagcaggacattcaagacgtttatgcagatgtgaaggatcttcttggaggattaaaaaaatga

SEQ ID NO: 86183 - protein, 217 aa, Bacillus subtilis
MNLVLMGLPGAGKGTQGERIVEDYGIPHISTGDMFRAAMKEETPLGLEAKSYIDKGELVPDEVTIGIVKERLGKDDCERGFLLDGFPRTVAQAEALEEILEEYGKPIDYVINIEVDKDVLMERLTGRRICSVCGTTYHLVFNPPKTPGICDKDGGELYQRADDNEETVSKRLEVNMKQTQPLLDFYSEKGYLANVNGQQDIQDVYADVKDLLGGLKK

SEQ ID NO: 86184 - DNA, 570 bp, Bacteroides thetaiotaomicron
  CDS (1)..(570): transl_table=11
atgttgaacattgtaattttcggtgctccgggttcaggaaaaggaacgcagagcgaacgtattgtagaaaagtatggaatcaaccacatctcgacaggagatgtattgcgtgcagaaatcaagaacggcacggagctgggcaaaactgctaaaggttacatcgaccagggtcagttgattccggatgaattaatgattgatattctggcaagcgtattcgatagcttcaaagacagcaaaggtgtaattttcgacggtttcccaagaacaattgcacaggcggaagcattaaagaaaatgttggcggaaagaggacaggatgtttctgtaatgttggatctcgaagttccggaagatgaactgatggtgcgtctgatcaaacgtggcaaagactccggtcgtgctgatgacaacgaagaaacaatcaaaaaacgtctgcatgtatatcattcacagacatctccgctgatcgactggtacaagaacgaaaagaaataccagcacatcaacggtctgggtactatggatggtatcttcgctgatatctgcgaagcggtagacaaattataa

SEQ ID NO: 86185 - protein, 189 aa, Bacteroides thetaiotaomicron
MLNIVIFGAPGSGKGTQSERIVEKYGINHISTGDVLRAEIKNGTELGKTAKGYIDQGQLIPDELMIDILASVFDSFKDSKGVIFDGFPRTIAQAEALKKMLAERGQDVSVMLDLEVPEDELMVRLIKRGKDSGRADDNEETIKKRLHVYHSQTSPLIDWYKNEKKYQHINGLGTMDGIFADICEAVDKL

SEQ ID NO: 86186 - DNA, 579 bp, Bartonella henselae
  CDS (1)..(579): transl_table=11
atgaggattgttcttttaggtcctcctggagctggaaaaggtacacaagctaagatgttgtgtgaggaatatcacatccctcagttatcaacaggcgatatgttgcgtgaagttattcgcagagaaacggaaattggcaagaaagctaaagctatgatcaatgctggtactttggtctctgatagtattgttaatcaaattgtatccgatcgcattgacgaatctgattgtataaacggttttgttttggatggatatccgcgcactgtaggacaggcagaagttttgcaacaggttttacagtcaaaaaatatgcagcttgatgccgttattgagttaattgttgatgaagatgcattgcttgaacgaatgaagaagcgtgttcaggaaacaataattgccggtggacaggtccgttcggatgataatcctgttgcttttgcaaaacgattagtggaatatcgtgagaagacagctcctttgtcggaattttatttgcaaaggagattattgaagctagttgatggaatgattggtgttactgaggtatcacgcaaaattagagaggttcttaaatag

SEQ ID NO: 86187 - protein, 192 aa, Bartonella henselae
MRIVLLGPPGAGKGTQAKMLCEEYHIPQLSTGDMLREVIRRETEIGKKAKAMINAGTLVSDSIVNQIVSDRIDESDCINGFVLDGYPRTVGQAEVLQQVLQSKNMQLDAVIELIVDEDALLERMKKRVQETIIAGGQVRSDDNPVAFAKRLVEYREKTAPLSEFYLQRRLLKLVDGMIGVTEVSRKIREVLK

SEQ ID NO: 86188 - DNA, 579 bp, Bartonella quintana
  CDS (1)..(579): transl_table=11
atgagagttgtttttttagggcctcctggatctgggaaaggtacacaagctaggatgttgactgaggaatatcgtatccctcagttatcaacaggcgatatgttgcgtgaagttattagcagagaaacggaagttggcagaaaagctaaagctattataaatgcaggtgctttggtctctgatagcattgttaatcaaattgtatcgaatcggattaatgaaagcgattgtataaacggttttgtcttggatgggtatccacgcactgtagggcaggcagaggttttgcaacagattttacagtcaaaaaatatgcagcttgatgctgttattgagctgattgttgatgaaaatgcgttgattgagcgaatgaagaaacgtgttcaggaaacaatagctgtgggtgggcaggtccgctctgatgataatcatgttgcttttgcaaaacgattagtggaatatcgtgagaaaacagcacccctatcgaaattttattcagagaggggattgttaaaggttgttgatggcatgatggctgttactgaggtatcacgggtgattagagggttttttaaataa

SEQ ID NO: 86189 - protein, 192 aa, Bartonella quintana
MRVVFLGPPGSGKGTQARMLTEEYRIPQLSTGDMLREVISRETEVGRKAKAIINAGALVSDSIVNQIVSNRINESDCINGFVLDGYPRTVGQAEVLQQILQSKNMQLDAVIELIVDENALIERMKKRVQETIAVGGQVRSDDNHVAFAKRLVEYREKTAPLSKFYSERGLLKVVDGMMAVTEVSRVIRGFFK

SEQ ID NO: 86190 - DNA, 636 bp, Bdellovibrio bacteriovorus
  CDS (1)..(636): transl_table=11
atgaacttgatcctgtttggagccccgggggccggtaaaggtacgcagtctgagcttttgattaaacgccagggaatgacacagatcagcactggcgatctattcagagcagccattaaagggcagacggaccttggtaaaaaggcccaggaatttatggataagggtcaacttgtgccggatagcatcgttatcggcatggttgaagaagtccttcaaaaaggcgtccaaaactttattttagatggtttccctagaactgtggctcaggctcaggctctagatgaattacttgtaaaaatgaatctatccatcgggaaggctatcttccttgaggttccaatgagaatcttgatggataggctgactggcagacgcgtttgtaaaaattgcggcgctgtctatcatatagtcagtaagccctccaaagtagagggcaaatgtgatttgtgcggtggtgaggtcattcaacggaatgatgacaaggcagaggttattgagacccgcctgaagacttatgaagagttcacaagccccctaaaagagttttataaaaaatcaggcaaatatactgaagtggacggaaatagggacaccgaagaagtctataaagagatcgaaaaaataataaaatag

SEQ ID NO: 86191 - protein, 211 aa, Bdellovibrio bacteriovorus
MNLILFGAPGAGKGTQSELLIKRQGMTQISTGDLFRAAIKGQTDLGKKAQEFMDKGQLVPDSIVIGMVEEVLQKGVQNFILDGFPRTVAQAQALDELLVKMNLSIGKAIFLEVPMRILMDRLTGRRVCKNCGAVYHIVSKPSKVEGKCDLCGGEVIQRNDDKAEVIETRLKTYEEFTSPLKEFYKKSGKYTEVDGNRDTEEVYKEIEKIIK

SEQ ID NO: 86192 - DNA, 561 bp, Bifidobacterium longum
  CDS (1)..(561): transl_table=11
atgcgtctgctcatcatgggcccccagggcgtgggcaagggcacccaggctgctctgctcgccgaacacttcaacatccccaccatctccaccggcgacatcttccgctacaacatcaagaacaagaccgaactcggccttgaggcgatgagctacaccgacaagggcgagctggttccggactccctgaccaacaagatcgtcaaggatcgtctggccaaggaagactgcaagaacggctggatcctcgacggctacccgcgtaacgccgcccaggtcaccgctctcgacgagatgctcgccgacctcgacactccgctcgaccacgtggtggccctcgaagccgcccgcgacgtgctgctggagcgtatgaagaagcgcgccgccgagcagggccgcgctgacgacactccggaggccatcgccaagcgcctggagacctatgagaaggaaaccgctccgctgctcgacatctacgaggcccgtggcctgctcgtcgtggtcaacggcgtcggcgacatcgacgagatcagcggccgtatcatcagccacctcgagtag

SEQ ID NO: 86193 - protein, 186 aa, Bifidobacterium longum [sequence omitted]

SEQ ID NO: 86194 - DNA, 681 bp, Blochmannia floridanus
  CDS (1)..(681): transl_table=11
atgtacaatattatctttttaggtcctccaggttctggaaaaggaactcaggcacatttaatttctactaaatatggaatatctaatatttctgcaggagagatattaaaacatgcattatctgtgacaaaatttcattttaattttaatactgataatatgttaaatcagataaattctggaaatttagtagatgatgaattaatcattccattaattattaaacgtattagacaagatgattgtaaaaagggttttatattagatgggtttcctagaacaataggacaagcaatagctattgaacaaaataaaattgctattgattttgtaatagaatttaatatttcagattctgcaattattaaccgaatagtagggaggcaagttcacataaaatctgggagaacatatcatattaaatttaatcctcctaaattagatgggatagatgatattactggagaaaaattagttattcgtgctgatgataatgcacaggtaatactgcaaagattaaatcagtaccgaaaatataccatatttctttcagattattatcaaaaacaatctcaacaaggaaatatgcgctattttattattaatgggaatcaagaaattactaaaatttataaagaattaattaatatttttaattttcatatatttaaaatgaattga

SEQ ID NO: 86195 - protein, 226 aa, Blochmannia floridanus
MYNIIFLGPPGSGKGTQAHLISTKYGISNISAGEILKHALSVTKFHFNFNTDNMLNQINSGNLVDDELIIPLIIKRIRQDDCKKGFILDGFPRTIGQAIAIEQNKIAIDFVIEFNISDSAIINRIVGRQVHIKSGRTYHIKFNPPKLDGIDDITGEKLVIRADDNAQVILQRLNQYRKYTIFLSDYYQKQSQQGNMRYFIINGNQEITKIYKELINIFNFHIFKMN

SEQ ID NO: 86196 - DNA, 657 bp, Bordetella bronchiseptica
  CDS (1)..(657): transl_table=11
atgcgtctcattctgctcggaccgcccggagccggcaaaggcacccaagccgcctttctcacccaacactacggcatcccgcagatatccaccggtgacatgctgcgcgccgccgtcaaggccggcacgccgctgggcctggaagccaagaaggtcatggacgcgggcggcctggtctcggacgacctgatcatcggcctggtgcgcgatcgcctgacccagcccgattgcgccaacggctacctgttcgacggtttcccgcgcaccatcccgcaggccgacgcgctcaagagcgccggcatcgcgctggattacgtggtcgagatcgaagtgccggaaagcgacatcatcgaacgcatgagcggacgccgcgtgcacccggccagcggccgcagctaccacgtacgcttcaatccgcccaaggccgaaggcgtggacgacgtcacgggcgaaccgctggtgcagcgcgacgacgaccgcgaggaaaccgtgcgccatcgtctcaacgtctaccagaaccagacccgcccgctggtcgactactactcgtcctgggcccagtccgatgccgccgcggcgcccaagtaccgcaagatctccggcgtcggctcggtcgacgaaatcaagagccgcctgtcccaggctctgcagagctaa

SEQ ID NO: 86197 - protein, 218 aa, Bordetella bronchiseptica
MRLILLGPPGAGKGTQAAFLTQHYGIPQISTGDMLRAAVKAGTPLGLEAKKVMDAGGLVSDDLIIGLVRDRLTQPDCANGYLFDGFPRTIPQADALKSAGIALDYVVEIEVPESDIIERMSGRRVHPASGRSYHVRFNPPKAEGVDDVTGEPLVQRDDDREETVRHRLNVYQNQTRPLVDYYSSWAQSDAAAAPKYRKISGVGSVDEIKSRLSQALQS

SEQ ID NO: 86198 - DNA, 585 bp, Brucella melitensis
  CDS (1)..(585): transl_table=11
atgagactgatacttcttgggccgcccggagcaggtaaggggacgcaggctggacttcttaccaagaagcatggaatacctcagctctcgaccggcgatatgctgcgcgcggcagtcgctcagcagagcgagatcgggaagcgcgccaaggccgtgatggatgccgggcaactggtttccgacgagatcgtgaaccagatcgtttcggaacggatcgatgcgccggactgtgcgaatggtttcattctcgacggctatccgcgcactgtgccgcaggctcaggccttgagccagatgctgtcgggcaaggggcttaagctggatgccgtcatcgagctgaaggtcgatgagaatgctctggtcaagcggatggaaagccgtgtggccgaaacgattgccaagggcgctcaggtccgttcggacgacaacccggaagccttccgcaagcgtcttgtggaataccgcgaaaagactgcgccgctttcaagctattatgccggaaccggcgaactgcgcatcatcaatggcatggcgccggttgaagaagtcaccgccgaaatcgagagaattcttgttccggcctga

SEQ ID NO: 86199 - protein, 194 aa, Brucella melitensis [sequence omitted]

SEQ ID NO: 86200 - DNA, 579 bp, Campylobacter jejuni
  CDS (1)..(579): transl_table=11
atgaaagaattgtttttaatcataggtgcaccaggtagtggaaaaactaccgatgctagtttaatcgcacaagcagatgcgacaaatatcacacactattcaacaggggatcttttaagagctgaagtagcaagcgggagtgagcttggaaaaactatagatagttttatctccaaaggcaatcttgttcctttagatgttgttataaatactatagtttatgctctaaaagctgctccaactaaaactatcatcatcgatggctatccaagaagcgtagaacaaatgatggaatttgacaaggttttaagtgagcaaaatgaaatttgtcttaaaggtgtcatagaagtaagagtaagcgaagaagttgccaaagaaagagttttaggcagaaatcgtggtgcagatgataatgaagaagtgttttataatagaatgaaagtttatacagaacctttaaatgaaattttagatttttatcaaaagaaaaaacttcattttattatcgatggggaacgcactatcgaacctatcgttgcagacatgaaagaactgattaaaaaaattcaaagtatataa

SEQ ID NO: 86201 - protein, 192 aa, Campylobacter jejuni [sequence omitted]

SEQ ID NO: 86202 - DNA, 576 bp, Caulobacter crescentus
  CDS (1)..(576): transl_table=11
atgaatctgatcctgttcggcccgccggcggcggggaaggggacccaggccaagcgactggtcacggagcggggcatggtccagctctcgaccggcgacatgctgcgcgcggccatcgcctcaggctcggagctcggccagcgcgtcaagggcgtgctggaccgtggcgagctggtgaccgacgagatcgtcatcgccctgatcgaagaccgcctgcccgaagccgaagccgccggcggcgcgatcttcgacggtttcccgcggacggtcgcccaggccgaggctctggataaaatgctcgccgcgcgcggtcagaagatcgacgtcgttctccgactcaaggtagacgagcccgccctgatcgagcggatcaagaagcggttcgaagagcagggacggcccgacgacaatccggaagtcttcgtgactcgcctggccgcgtacaacgctcagaccgcgccgctgctgccctactatgaagggcagggcaagttgacggaactggatggcatggggaccgtcgaagcggtcgccgcgtcgatcgacagcgcactggagcccgtcgctgcaggatga

SEQ ID NO: 86203 - protein, 191 aa, Caulobacter crescentus [sequence omitted]

SEQ ID NO: 86204 - DNA, 657 bp, Chromobacterium violaceum
  CDS (1)..(657): transl_table=11
atgcgattgatcctgttgggcgcgcccggcgccggcaaaggcacccaggccaactacatccgcgagaagttcggcatcccgcagatctccaccggcgacatgctgcgcgccgcggtcaaggccggcaccccgctgggcctggaagccaaggccatcatggatgccggcggcctggtccgcgacgacatcatcatcggcctggtcaaggagcgaatcgcccaggacgactgcgccaacggcttcctgttcgacggcttcccgcgcaccattccgcaggcggaagcgatgatcgccgccggcgtcgacatcgactacgtggtggagatcgacgtgccggacgccgccatcgtcgagcgcatggccggccgccgcgtgcacctggcttcgggccgcacctaccatgtcaccttcaacccgcccaaagcggccggcaaggacgacgtgaccggcgaggacctggtccagcgcgacgacgacaaggaagaaaccgtgaagaagcgcctggctgtctaccacgagcagaccgccgtgctggtgggcttctacggcaagctggccgagagcggcagcgccaaggcgccgaagtacgtgaagatcgacggcacccgcgcggtggaaaccgtgcgcgacgacgtgctgaaggcgctgggcgcctga

SEQ ID NO: 86205 - protein, 218 aa, Chromobacterium violaceum
MRLILLGAPGAGKGTQANYIREKFGIPQISTGDMLRAAVKAGTPLGLEAKAIMDAGGLVRDDIIIGLVKERIAQDDCANGFLFDGFPRTIPQAEAMIAAGVDIDYVVEIDVPDAAIVERMAGRRVHLASGRTYHVTFNPPKAAGKDDVTGEDLVQRDDDKEETVKKRLAVYHEQTAVLVGFYGKLAESGSAKAPKYVKIDGTRAVETVRDDVLKALGA

SEQ ID NO: 86206 - DNA, 546 bp, Corynebacterium diphtheriae
  CDS (1)..(546): transl_table=11
atgcgactcgtacttcttggacctcccggtgctggcaaaggcacccaagcggctatcctctccgaaaagctgcgcattcctcacatctctaccggtgacctattccgtgccaacattggcgaaggcaccccactgggtaaggaagcaaaatcttatattgatgccggcaagcttgtgcctaccgacgtcaccgcgcgcatggtgaaggctcgcctccaaaaagacgacgcagaggttggattccttcttgacggcttcccacgcactgttgagcaggctgagatcctcaaggaaatgctgaaaggattcggcgttgagctcaacggtgttattaactacgaagtcgctgaagatgtagtagttgagcgcatgcttgctcgtggccgtgcggacgacaacgaagacaccatccgcacccgtctgcaggtttaccgcgacgaaaccgcaccacttatccgccactatggtgacgacatcatcaccatcaaggcagaaggtagcatcgaggacatcaatgctcgcaccctcggagcactgggcaagtaa

SEQ ID NO: 86207 - protein, 181 aa, Corynebacterium diphtheriae
MRLVLLGPPGAGKGTQAAILSEKLRIPHISTGDLFRANIGEGTPLGKEAKSYIDAGKLVPTDVTARMVKARLQKDDAEVGFLLDGFPRTVEQAEILKEMLKGFGVELNGVINYEVAEDVVVERMLARGRADDNEDTIRTRLQVYRDETAPLIRHYGDDIITIKAEGSIEDINARTLGALGK

SEQ ID NO: 86208 - DNA, 546 bp, Corynebacterium efficiens
  CDS (1)..(546): transl_table=11
atgcgactcgttctccttggtccccccggtgccggcaagggcacccaggcagccatcctctctgagaagctcggtatcccccacatctccaccggagacctgttccgcgccaatatcggcgagggcaccccgcttggcatcgaggccaagcagtacatcgatgccggcaagctggtgcccaccgatgtcaccgcccgcatggtgcagtcccgtctggccgaggccgacgccgccgagggtttcctcctggacggcttcccccgcaccgttgagcaggccgatatcctggctgatctcctcgacaaggccggtaacccacttgacggtgtcattaactaccaggtctccgaggatgtcgttgtcgagcgcatgctctcccgtggtcgcgccgacgacaatgaggagaccatccgcacccgtctcggtgtctaccgcgatgaaaccgccccgctgatcagccactacggtgacaagatcatcaacatcgaggctgaggggtccgttgaggacatcaacgcccgcaccctcgaggcactgggtaagtag

SEQ ID NO: 86209 - protein, 181 aa, Corynebacterium efficiens [sequence omitted]

SEQ ID NO: 86210 - DNA, 546 bp, Corynebacterium glutamicum
  CDS (1)..(546): transl_table=11
atgcgactcgtactcctcggacctcccggtgctggtaagggcacccaggctgcaattctctctgagaagcttggcattcctcacatttctactggcgatcttttccgcgccaacattggcgaaggtacccctctgggtatcgaggccaagcagtacatcgacgctggcaagctggttccaaccgacgtgactgcacgtatggttgcttcccgccttgctgagtccgatgctgcagaaggcttccttttggatggtttcccacgcaccgttgagcaggctgacatcttggctaacctgctttccgaagctggccagaccctcgatggtgttgttaactaccaggtttctgaagacgtcgtcgtggagcgcatgctgtcccgtggtcgcgctgatgacaacgaagagaccatccgcacccgtctcggtgtctaccgcgacgagactgctcctctgatcgatcactacggtgacaagatcatcaacattgaggctgaaggcgaagtcgaagagatcaacgctcgtaccctcaaggcactgggcaaataa

SEQ ID NO: 86211 - protein, 181 aa, Corynebacterium glutamicum
MRLVLLGPPGAGKGTQAAILSEKLGIPHISTGDLFRANIGEGTPLGIEAKQYIDAGKLVPTDVTARMVASRLAESDAAEGFLLDGFPRTVEQADILANLLSEAGQTLDGVVNYQVSEDVVVERMLSRGRADDNEETIRTRLGVYRDETAPLIDHYGDKIINIEAEGEVEEINARTLKALGK

SEQ ID NO: 86212 - DNA, 594 bp, Deinococcus radiodurans
  CDS (1)..(594): transl_table=11
atgacacagtccaagaacaaggtcgtgatttttctcggccctcccggcgccggcaaaggcacccaggcggcgcggctggcgcaggaacatcagctcgtgcagctgagcactggcgacattttgcgtgaccacgtggcgcgtggcaccgccctcggccagcaggcggggccactgatggaagccgggcaactcgtgcccgacgagctgctgatcgccctgattcgtgaccggctggccgacatggagccggtgcgcgtcattttcgacggctttccacgcacccaggcccaggccgaagcgctcgacctgctgctcgaagaactcggggcgccggtcagcgccgtcccgctgctcgaagtgccggatcaagtgctcattgaccgcatcgtggatcgcggacggcaggcggtggccgagggccgcgctccccgcgccgacgacaacgaggaaacggcccgcaagcgccagcaggtctaccgcgagcagacccagccgctcatcgactactatgcccggcgcggccacctctacacggtggacggcctcggcacgcctgacgaggtgtacgagcggattctgagcggaatgcactga

SEQ ID NO: 86213 - protein, 197 aa, Deinococcus radiodurans [sequence omitted]

SEQ ID NO: 86214 - DNA, 681 bp, Desulfotalea psychrophila
  CDS (1)..(681): transl_table=11
atgggaaaaaacattctgttttttggaccaaatggtagtggcaagggcacccagggtgctattgtgcagaagaagtatgacattcctcacatcgagtccggtgcaattttcagagaacatattggtggcggtacagaacttggtcttaaggccaaggagtatatcgaaagaggtgatctcgttcccgatgagattactattcccatgatggtctctcggctgcaaaaggatgactgcaagaagggttggattcttgatggttttccccgctctaaggtacaggcaataacccttgctgaaaccctggcgaaagagggcatggcccttgattatgtcatcgagatcgttcttgatcgtgacattgctaaggagcgtatcatgggtcgtcgtctctgtgtaaatgataataaccatccaaatcatattgcctttgaggctatcaagcccgtggagaaagatggcaagcttgtctgtcgcgtttgtggtggcgatttgaaaacccgtcccgatgatcaggacgtcaatgcaatcaataagcgccatggcatttattatgatgaagagaccggcaccatggcggcggtaaattatttcaagaacgccaatggccctaaggtaattagtattgatggttctgcctccattggtgaggtaacagagctgatcatgaaagagctatag

SEQ ID NO: 86215 - protein, 226 aa, Desulfotalea psychrophila
MGKNILFFGPNGSGKGTQGAIVQKKYDIPHIESGAIFREHIGGGTELGLKAKEYIERGDLVPDEITIPMMVSRLQKDDCKKGWILDGFPRSKVQAITLAETLAKEGMALDYVIEIVLDRDIAKERIMGRRLCVNDNNHPNHIAFEAIKPVEKDGKLVCRVCGGDLKTRPDDQDVNAINKRHGIYYDEETGTMAAVNYFKNANGPKVISIDGSASIGEVTELIMKEL

SEQ ID NO: 86216 - DNA, 672 bp, Desulfovibrio vulgaris
  CDS (1)..(672): transl_table=11
gtgaacatactcatcttcggacccaacggcagcggtaagggcacgcagggcgcgctcgtgaagaagaagtacgacctcgcccacatcgagtccggcgccatcttccgcgaacacatcggcggcggcaccgaactcggcaagcaggccaaggccttcatcgaacgtggcgacctggtgcctgacgacatcaccatccccatggtgctcgagaccctgaagagcaagggtgccaacggctggctgctcgacggtttcccgcgcaacatggttcaggcccagaagctgtgggacgcccttcaggccgaaggcatgaagctcgactacgtcatcgagatcctccttccccgtgaagtcgccaagaaccgcatcatgggtcgtcgtctctgcaagaacgacaacaaccaccccaacaacatcttcatcgacgccatcaagcccaatggcgacgtgtgccgcgtgtgtggcggcgagctttccgcccgttctgacgaccaggacgaaggcgccatcggcaagcgccacgacatctactacaacaccgtcgacggcaccctcgctgccgcctacttctacaaggacctggctgccaagggcatgaccaagtacatcgaactcgacggcgaaggcgccatcgatgccatcaaggacaagctcctcgcacagctttcctag

SEQ ID NO: 86217 - protein, 223 aa, Desulfovibrio vulgaris
MNILIFGPNGSGKGTQGALVKKKYDLAHIESGAIFREHIGGGTELGKQAKAFIERGDLVPDDITIPMVLETLKSKGANGWLLDGFPRNMVQAQKLWDALQAEGMKLDYVIEILLPREVAKNRIMGRRLCKNDNNHPNNIFIDAIKPNGDVCRVCGGELSARSDDQDEGAIGKRHDIYYNTVDGTLAAAYFYKDLAAKGMTKYIELDGEGAIDAIKDKLLAQLS

SEQ ID NO: 86218 - DNA, 645 bp, Escherichia coli O157
  CDS (1)..(645): transl_table=11
atgcgtatcattctgcttggcgctccgggcgcggggaaagggactcaggctcagttcatcatggagaaatatggtattccgcaaatctccactggcgatatgctgcgtgctgcggtcaaatctggctccgagctgggtaaacaagcaaaagacattatggatgctggcaaactggtcaccgacgaactggtgatcgcgctggttaaagagcgcattgctcaggaagactgccgtaatggtttcctgttggacggcttcccgcgtaccattccgcaggcagacgcgatgaaagaagcgggcatcaatgttgattacgttctggaattcgacgtaccggacgaactgatcgttgaccgtatcgtcggtcgccgcgttcacgcgccgtctggtcgtgtttatcacgttaaattcaatccgccgaaagtagaaggtaaagacgacgttaccggtgaagaactgactacccgtaaagacgatcaggaagaaaccgtacgtaaacgtctggttgaataccatcagatgacagcaccgctgatcggctactactccaaagaagcggaagcgggtaacaccaaatacgcgaaagttgacggcaccaagccggttgctgaagttcgcgctgatctggaaaaaatcctcggctaa

SEQ ID NO: 86219 - protein, 214 aa, Escherichia coli O157
MRIILLGAPGAGKGTQAQFIMEKYGIPQISTGDMLRAAVKSGSELGKQAKDIMDAGKLVTDELVIALVKERIAQEDCRNGFLLDGFPRTIPQADAMKEAGINVDYVLEFDVPDELIVDRIVGRRVHAPSGRVYHVKFNPPKVEGKDDVTGEELTTRKDDQEETVRKRLVEYHQMTAPLIGYYSKEAEAGNTKYAKVDGTKPVAEVRADLEKILG

SEQ ID NO: 86220 - DNA, 705 bp, Escherichia coli O6; identical to SEQ ID NO: 85862
  CDS (61)..(705): transl_table=11

SEQ ID NO: 86221 - protein, 214 aa, Escherichia coli O6
MRIILLGAPGAGKGTQAQFIMEKYGIPQISTGDMLRAAVKSGSELGKQAKDIMDAGKLVTDELVIALVKERIAQEDCRNGFLLDGFPRTIPQADAMKEAGINVDYVLEFDVPDELIVDRIVGRRVHAPSGRVYHVKFNPPKVEGKDDVTGEELTTRKDDQEETVRKRLVEYHQMTAPLIGYYSKEAEAGNTKYAKVDGTKPVAEVRAALEKILG

SEQ ID NO: 86222 - DNA, 651 bp, Enterococcus faecalis
  CDS (1)..(651): transl_table=11
atgaacctcattttaatgggattacctggagcaggtaaaggcacccaagcagaaaaaatcattgatacgtatggcattccacatatttctactggagatatgttccgtgcagcaatgaaaaatgaaactgccttgggcctagaagcgaaatcttatatcgataaaggtgaactggttcctgacgaagtaacaaacggaattgttaaagaacgccttgctgaaccagatacagacaaaggattcctattagatggtttcccacgtacactggatcaagcaaaagcattagatacaatgcttaaagaattaaacaaaaaaattgatgctgtcattgacatccatgtagaagaagatgtattaatcgagcgtttagctggacgattcatctgtcgcacatgtggcgcaacgtatcataaattattcaacccgccaaaagttgaaggcacttgtgatcgctgtggcggacatgaattctaccaaagagaagatgataagcccgaaacggttaaaaatcgtttggcagtcaacattgaaagtagcgcaccaatcttagctttctataaagaacaaggcttgatgcatacaatcgatggcaatcgcgaaatcgatactgttttttctgatgtgaaaaaaatcattgacgaaaactaa

SEQ ID NO: 86223 - protein, 216 aa, Enterococcus faecalis
MNLILMGLPGAGKGTQAEKIIDTYGIPHISTGDMFRAAMKNETALGLEAKSYIDKGELVPDEVTNGIVKERLAEPDTDKGFLLDGFPRTLDQAKALDTMLKELNKKIDAVIDIHVEEDVLIERLAGRFICRTCGATYHKLFNPPKVEGTCDRCGGHEFYQREDDKPETVKNRLAVNIESSAPILAFYKEQGLMHTIDGNREIDTVFSDVKKIIDEN

SEQ ID NO: 86224 - DNA, 648 bp, Haemophilus ducreyi
  CDS (1)..(648): transl_table=11
atgaaagttatcctattaggtgcacccggcgcaggtaaaggcacacaagcacaattcattatgcataaatttggtatcccacaaatttcaacgggtgatatgttccgtgcagcaattaaagaaggaacagaattaggtaaacaagcaaaagcattaatggatcaaggaaaattagtgcctgatgatttaacggttgcattagtaaaagatcgtatcgctcaaccagattgcgcccatggctttttattagatggtttcccacgtactattccacaagccgatgcattaaaagatgccggtgtaaaaattgatttagttctagaatttgatgttgctgacgaagttattgtagaacggatgagtggccgccgtgttcatcaaccatcagggcgaacataccatatcatatacaatccacctaaagtagcaggtcaagatgatattactggcgaagaattaatcacccgtgctgatgataaagccgaaacggtattagaacgtttagccgtatatcatcaacaaacgaaaccgcttatcgcttactatattgctgaagccgaaaaaggcaatacgcgctatgagcgtttagatggcactaaaccggttgagcaagtcagcgctgaattagctaatattttcaaccaataa

SEQ ID NO: 86225 - protein, 215 aa, Haemophilus ducreyi
MKVILLGAPGAGKGTQAQFIMHKFGIPQISTGDMFRAAIKEGTELGKQAKALMDQGKLVPDDLTVALVKDRIAQPDCAHGFLLDGFPRTIPQADALKDAGVKIDLVLEFDVADEVIVERMSGRRVHQPSGRTYHIIYNPPKVAGQDDITGEELITRADDKAETVLERLAVYHQQTKPLIAYYIAEAEKGNTRYERLDGTKPVEQVSAELANIFNQ

SEQ ID NO: 86226 - DNA, 573 bp, Helicobacter hepaticus
  CDS (1)..(573): transl_table=11
atgaaaaagttgtttttaattattggtgcgcccggttcgggaaagacgacagatgcacaaatcattgcaagagataatgcggattctatcgtgcattattccacgggagatttattacgcgaagaagttgcaagtggtagtgaatatgggaaaaccattgatagttttattagtaagggcaatcttgtcccacttgatattgtagttggcacaattattaatgccatagcaaatgcgcccaaagatgttatcattattgatggctatcctcgtagcatagagcaaatggaagcccttgatgaaaaacttaaagcacaaaatcaagtgcaattagtgagcgtaatagaagttgaagtaagtgaatctgtcgcaagagagagagtgttaggacgggcaagaggtgcagatgataatgtagaagtatttaataatcgtatgcaagtgtatctcacgccacttaaagatattgagacattttatagtaagcaaaaagtgcttcataaaattaatggtgagcgtatgattgaggaaatcgtaagtgaaatggaaagttttattaaagggaaaatgtaa

SEQ ID NO: 86227 - protein, 190 aa, Helicobacter hepaticus
MKKLFLIIGAPGSGKTTDAQIIARDNADSIVHYSTGDLLREEVASGSEYGKTIDSFISKGNLVPLDIVVGTIINAIANAPKDVIIIDGYPRSIEQMEALDEKLKAQNQVQLVSVIEVEVSESVARERVLGRARGADDNVEVFNNRMQVYLTPLKDIETFYSKQKVLHKINGERMIEEIVSEMESFIKGKM

SEQ ID NO: 86228 - DNA, 576 bp, Helicobacter pylori J99
  CDS (1)..(576): transl_table=11
atgaaacaactatttttgattattggagccccagggagtggtaaaaccactgacgcagagcttatcgctaagaataacagcgaaacaatcgctcatttttctactggggatttactcagggctgagagcgctaaaaagactgagcgaggcttattgattgagaaattcacttctcaaggcgaattagtgcctttagaaattgtggtagaaacgatcctttcagcgattaaaagctctagtaaagggatcattttaattgatggctatcccaggagcgtggagcaaatgcaagctttggataaggaattgaacgctcaaaatgaagtgatcttaaaaagcgtgattgaagtagaagtgagcgaaaacaccgctaaagaaagggttttagggcgctctaggggggctgatgataatgaaagggtgtttcataaccgcatgcgggtgtttttagatccgttggttgaaatccaaaacttctacaaggccaagcatttgcataaaattatcaatggtgaaagaagcattgaagaaatcgtgaatgaaatgcaaaaatatattttgtcttttgcaaattaa

SEQ ID NO: 86229 - protein, 191 aa, Helicobacter pylori J99 [sequence omitted]

SEQ ID NO: 86230 - DNA, 576 bp, Helicobacter pylori
  CDS (1)..(576): transl_table=11
atgaaacaactatttttgatcattggagccccagggagtggtaaaaccactgatgcagagcttatcgctaaaaataacagcgaaacaatcgctcatttttctaccggggatttactcagggctgagagcgctaaaaagaccgagcgaggcttattgattgaaaaattcacttctcaaggcgaattagtgcctttagaaattgtggtagaaacgatcctttcagcgattaaaagctctggtaaagggatcattttaattgatggttatcctaggagcgtggaacaaatgcaggctttggataaggaattgaacgctcaaaacgaagtgatcttaaaaagcgtgattgaagtagaagtgagtgaaaacactgctaaagaaagggttttagggcgctctaggggggctgatgataatgaaaaggtgtttcataaccgcatgcgggtgtttttggatccgttgggcgagatccaaaatttttacaagaataagaaggtgtataaagcgatcgatggggagaggagcattgaagagattgtgggcgaaatgcaagagtatatcttgtctttcggtaattaa

SEQ ID NO: 86231 - protein, 191 aa, Helicobacter pylori
MKQLFLIIGAPGSGKTTDAELIAKNNSETIAHFSTGDLLRAESAKKTERGLLIEKFTSQGELVPLEIVVETILSAIKSSGKGIILIDGYPRSVEQMQALDKELNAQNEVILKSVIEVEVSENTAKERVLGRSRGADDNEKVFHNRMRVFLDPLGEIQNFYKNKKVYKAIDGERSIEEIVGEMQEYILSFGN

SEQ ID NO: 86232 - DNA, 648 bp, Lactococcus lactis subsp
  CDS (1)..(648): transl_table=11
atgaatttattaatcatgggacttccaggagctggtaaaggaactcaagctgagttcatcgttaaaaattatggagtaaatcacatttcaacaggtgacatgttccgtgccgcaatgaaaaacgaaactgaaatgggtaaacttgctaaatctttcatcgataaaggtgaactcgtacctgatgaagtaacgaacggaattgttaaagaacgtttagcacaagatgatatcaaagcttcaggcttcttgcttgatggatatccacgtacgattgaccaagctcatgcacttgatacaatgcttgaagaactcggaattaaacttgatgccgttgtaaatatcgttgttaacccagatattttggttgaccgtttaagtggccgttacatctgccgtaactgtggagcaacttatcataaaatcttcaatccaactaaagttgaaggcgtttgtgacgtttgtggtagtcatgacctttatcaacgtgcggatgatgttccagaaacagttaaaaatcgtttggatgtcaatattaaagaatcagctccaattattgaacactacactgaacttggacttgttaaaaacattgaaggtgaacaagaaattagccaagtaacagaagatattaaaaaagttttaggataa

SEQ ID NO: 86233 - protein, 215 aa, Lactococcus lactis subsp
MNLLIMGLPGAGKGTQAEFIVKNYGVNHISTGDMFRAAMKNETEMGKLAKSFIDKGELVPDEVTNGIVKERLAQDDIKASGFLLDGYPRTIDQAHALDTMLEELGIKLDAVVNIVVNPDILVDRLSGRYICRNCGATYHKIFNPTKVEGVCDVCGSHDLYQRADDVPETVKNRLDVNIKESAPIIEHYTELGLVKNIEGEQEISQVTEDIKKVLG

SEQ ID NO: 86234 - DNA, 648 bp, Listeria monocytogenes serotype 4b
  CDS (1)..(648): transl_table=11
ttgaaattagtattaatgggactgcccggcgccggaaaaggcacacaagcggaacagattgttgagaaatacaacattcctcatatttccactggagatatgttccgagcagctatgaaaaataatacggaattaggaaagaaagctaaatcctttatggataatggcgaccttgttcctgatgaagtaacaaatggtatcgttcgtgaacgtttggccgaagatgatgctaagaatggtttcttgcttgatggttttccgcgcactgtggaacaagcagaagagctagaaaatattctaaatgatttagggacagaacttgatgctgtcattaacattgaagttgataaagatgttttaatgaaacgtcttacaggtcgttggatttgtcggacttgcggtaagacttaccatgaaatttacaacccaccgaaagttcctgggaaatgtgatttagatggcggagaactttaccaacgcgatgacgacaagaaagaaacggttgaaaaacgactaaatgtaaatatgaaacagaccaagccgcttctagatttttattctgaaaagggtaaacttcataacataaacggcgagcaagacattaaagacgtttttgtagatgtggaaaaaattcttgcttctttttga

SEQ ID NO: 86235 - protein, 215 aa, Listeria monocytogenes serotype 4b
MKLVLMGLPGAGKGTQAEQIVEKYNIPHISTGDMFRAAMKNNTELGKKAKSFMDNGDLVPDEVTNGIVRERLAEDDAKNGFLLDGFPRTVEQAEELENILNDLGTELDAVINIEVDKDVLMKRLTGRWICRTCGKTYHEIYNPPKVPGKCDLDGGELYQRDDDKKETVEKRLNVNMKQTKPLLDFYSEKGKLHNINGEQDIKDVFVDVEKILASF

SEQ ID NO: 86236 - DNA, 657 bp, Mannheimia succiniciproducens
  CDS (1)..(657): transl_table=11
atggagatttctatgaaaattattcttttaggcgcaccgggcgcaggcaaaggaacacaagctcaatttatcatgaacaaattcggtatcccgcaaatctcaacgggggatatgttccgcgccgcaatcaaagcgggcaccgaattaggtaaacaagctaaagcattaatggatgaaggcaaattagtgcctgacgaattaaccgtcgccctggttaaagaccgtattgcccaaccggattgtgccaacggtttcttattagacggtttcccgcgcaccattccgcaagcggatgcgttaaaagactcgggcgtgaacattgattacgtattagaattcgacgtgccggacgaagtgattgtagagcgcatgagcggtcgccgcgtgcaccaggcctccggtcgttcatatcatatcgtttataacccgccgaaggtggaaggcaaagacgatgtgaccggcgaagatttaattatccgcgccgacgacaaaccggaaaccgttttggatcgtttagcggtttatcacaaacaaacccagcctttggttgactactatcaagcggaagctaatgcaggcaacaccaaatacttccgtttagacggcaccaaaaaagtagaagaagtgagtgccgaattaaattccattttaggttaa

SEQ ID NO: 86237 - protein, 218 aa, Mannheimia succiniciproducens
MEISMKIILLGAPGAGKGTQAQFIMNKFGIPQISTGDMFRAAIKAGTELGKQAKALMDEGKLVPDELTVALVKDRIAQPDCANGFLLDGFPRTIPQADALKDSGVNIDYVLEFDVPDEVIVERMSGRRVHQASGRSYHIVYNPPKVEGKDDVTGEDLIIRADDKPETVLDRLAVYHKQTQPLVDYYQAEANAGNTKYFRLDGTKKVEEVSAELNSILG

SEQ ID NO: 86238 - DNA, 648 bp, Methanosarcina acetivorans
  CDS (1)..(648): transl_table=11
atgaatataatactcttcgggcccccgggtgccggcaaaggtacccaggccaaaaaactggttgatttctacggaattccgcagatttccacaggggatatcctgcgggcaaatgttagagaaggaacagaactgggccttgcagccaaggcatatatggacaaaggagaacttgtccctgaccaggtgcttatcggcataattaaaaaccgtctgaatgaggcagactgcgaaaaaggtttcattctcgacggatacccgaggactgtccctcaggctgatgccctggaagcaatcctcgatgaaatcgaaaaacccatcgatgtcgtcctcaaccttgaggtgcctgacgaagtgcttgtaggaagaataagtgggcgtcttatgtgcaaatgcggggcaagttatcacattatttccaatcccccaaagaaggataacgtctgtgacatatgtggcggtgaggtcttccagcgtgctgacgataccgcagaagccgtccagaaccgcctggatgtctacaaaaagcagacccagccgctgatcaactactataaagagaaaggcatccttgtcacccttgacgggacaaaggagatagatgtggtctttgaggacctgaaggcaattctggcaaagtttgcctga

SEQ ID NO: 86239 - protein, 215 aa, Methanosarcina acetivorans
MNIILFGPPGAGKGTQAKKLVDFYGIPQISTGDILRANVREGTELGLAAKAYMDKGELVPDQVLIGIIKNRLNEADCEKGFILDGYPRTVPQADALEAILDEIEKPIDVVLNLEVPDEVLVGRISGRLMCKCGASYHIISNPPKKDNVCDICGGEVFQRADDTAEAVQNRLDVYKKQTQPLINYYKEKGILVTLDGTKEIDVVFEDLKAILAKFA

SEQ ID NO: 86240 - DNA, 645 bp, Methylococcus capsulatus
  CDS (1)..(645): transl_table=11
atgcgcatcatgttgctgggaagccctgggtctggtaagggtacgcaggccaagtacctcacggagcgtttcggcatcccccagatttccaccggcgacatgctgcgtgccgcggtgcgcgagggtacgcctctgggcatggaggcgaagaagatcatggatgccgggcagctggtgtcggattcgatcatcctcggcttgatcaaggagcgtattgccgcgccggactgcgcgaacggctttctgttggatggctttcctcgaacgatcgtccaggccgacgctttggccgagttgggcgtgacgctcgaccacgtggtggagatcgcggtggatgacgaggagattgtccggcgtttgagcggccggcgggtgcatccggcttccgggcgtacctaccacgtggtgttcaatcccccaaaggtggaaggcagggacgacgagaccggcgagccgctggtccaacgcgaggatgacaaggaggagaccatccgcaggcgcttggagatctaccatgtccagaccaagccattggtcgattactaccggagcaaagcggcacagggcggggtgaagttccacaccgtgccgggggtgggcagcgtcgaggcgatccgtgacgcggtgctggccagcctggcctga

SEQ ID NO: 86241 - protein, 214 aa, Methylococcus capsulatus
MRIMLLGSPGSGKGTQAKYLTERFGIPQISTGDMLRAAVREGTPLGMEAKKIMDAGQLVSDSIILGLIKERIAAPDCANGFLLDGFPRTIVQADALAELGVTLDHVVEIAVDDEEIVRRLSGRRVHPASGRTYHVVFNPPKVEGRDDETGEPLVQREDDKEETIRRRLEIYHVQTKPLVDYYRSKAAQGGVKFHTVPGVGSVEAIRDAVLASLA

SEQ ID NO: 86242 - DNA, 648 bp, Methanosarcina mazei
  CDS (1)..(648): transl_table=11
atgaatataatactcttcgggcccccgggtgccggcaaaggtacccaggccaaaaaactggttgacttctacggaattccgcagatttccacaggagatatcctgcgggcaaatgttagagaaggaacggaactgggacttgcagccaaggcatacatggacaaaggagaacttgtccctgataacgtacttataggcattatcaaaaaccgccttaatgaggaagactgcaaaaaaggcttcattcttgacggatacccgagaactgtccctcaggctgatgccctggaaacaatcctcgatgaaattgacaagcccatcgacgtcgtcctcaaccttgaggttcctgatgaagtgcttgtggaaaggataagcgggcgccttatgtgcaaatgtggggcaagctatcacacaattgccaacccaccaaagaaggacaatatctgcgatatctgcggcggcgaagtctaccagagggacgacgacaaagcagaggctgtccagaaccgtctggacgtttacaagaagcagacccagcctcttatcaattattatgaagaaaagggcattcttgtcacacttgacggcacaaaggacataaatgtggtctttgaggatataaaagcagttctggcaaaatttgcctga

SEQ ID NO: 86243 - protein, 215 aa, Methanosarcina mazei
MNIILFGPPGAGKGTQAKKLVDFYGIPQISTGDILRANVREGTELGLAAKAYMDKGELVPDNVLIGIIKNRLNEEDCKKGFILDGYPRTVPQADALETILDEIDKPIDVVLNLEVPDEVLVERISGRLMCKCGASYHTIANPPKKDNICDICGGEVYQRDDDKAEAVQNRLDVYKKQTQPLINYYEEKGILVTLDGTKDINVVFEDIKAVLAKFA

SEQ ID NO: 86244 - DNA, 618 bp, Micrococcus luteus
  CDS (1)..(618): transl_table=11
atgacccgcatgctgctcatgggccctcccggttccggcaagggcacccaggccacccggatcgccgacaagctggggatcgtcccgatctccaccggtgacatcttccgccacaacgtgaagtcgatgacgccgctcggcgtcgaggccaagaggtacatcgacaacggcgacttcgtccccgatgaggtcacgaaccgcatggtcgccgaccgcatcgcccaggccgacgcggagcacggcttcctgctggacggctacccgcgcacgaagggccaggtcgaggcgctggacgccatgctcgccgaggccggccagtcgctgtccgccgtcgtcgagctggaggtgcccgacgaggagctcgtggagcgcctgctcaagcgtgccgagatcgagggccgcgcggacgacacccaggaggtcatcgagcaccgcctggacctgtaccaccgcgagaccgagtccgtcatccaggagtacgtggagcgcggcatcgtcgcccgcgtggacggcaccggccagatcgacgacgtcaccgagcgcctgctgcaggccgtgtactccgtgcgctccgccacgggctccctgcccgtgatccagccgggcgcggagtcctga

SEQ ID NO: 86245 - protein, 205 aa, Micrococcus luteus [sequence omitted]

SEQ ID NO: 86246 - DNA, 645 bp, Mycoplasma genitalium
  CDS (1)..(645): transl_table=4
atggtagcacagtttaataagttcattatcttaggacccccaggggcaggaaaaggtacagtttgtaaactgcttagcaaaacaactaagttagtccatattgctagtggtgatctgtttagagaagccattaaaaaccagagtgttattggtagaaagattgcagcaattatcagtcagggtggttatgttgatgatgccactactaaccagcttgtttatgaatatatcactaccaatccattaccaaatggttttatcttagatggttatccaagaacagagaaccagcttgattttctaaatattaaactaaccattgacatggtctttgaactagttgttagtgatctgaataaactgattacacggattgataacagggttatttgtaacaactgtaacagtgtttataacttgctttttcaaaaaccactagttgaaaatagttgtgatcagtgttcagctaaactagtgaaaaggagtgatgataacaaagcagtggtcaaagcaagaatggagttatatcaacaaacaattcaaccaatccacacttactttttcaacaaacaacttttagtacaaattgattgctttttaccactagaagaacaactcaagacaatcaaacaatttattagataa

SEQ ID NO: 86247 - protein, 214 aa, Mycoplasma genitalium
MVAQFNKFIILGPPGAGKGTVCKLLSKTTKLVHIASGDLFREAIKNQSVIGRKIAAIISQGGYVDDATTNQLVYEYITTNPLPNGFILDGYPRTENQLDFLNIKLTIDMVFELVVSDLNKLITRIDNRVICNNCNSVYNLLFQKPLVENSCDQCSAKLVKRSDDNKAVVKARMELYQQTIQPIHTYFFNKQLLVQIDCFLPLEEQLKTIKQFIR

SEQ ID NO: 86248 - DNA, 642 bp, Mycoplasma mycoides subsp
  CDS (1)..(642): transl_table=4
atgaatattatgctattaggagcacctggttgtggaaaaggaacacaagcagaacaacttgtaaataaattaaattttattcaagtatcaactggtgatttaatgagaaaagaaatttcattaaacactagattaggtttaaagtgtcaagaatatatgaatgctggtaaatatgttccagatcaaattgttaatcaaatcgttagtcagtttttaaaaaatactaatgataaattaatatttgatggatatccaagaactttagaacaagctaaatcattagaacaaatgttagatttatataataaaaaaattgattatgttttttatattgatgtaaatgatcaaattttaattaaaagaattacaaacagattagtttgtccattatgtaaagctagttttaatttagaaactagaaaaccaaaacaagaaggtctttgtgattttgataatactaaattagttaaaagaagcgatgatagtttagataaagttcaaataagactacaaacttataaagaacaaactttacctttaattgattattttaaaactaattctaaatttattgaaattaaagcagatgatttatcagctgaacaagtttttaatcaaatcaaaggagaattaaaaatttaa

SEQ ID NO: 86249 - protein, 213 aa, Mycoplasma mycoides subsp
MNIMLLGAPGCGKGTQAEQLVNKLNFIQVSTGDLMRKEISLNTRLGLKCQEYMNAGKYVPDQIVNQIVSQFLKNTNDKLIFDGYPRTLEQAKSLEQMLDLYNKKIDYVFYIDVNDQILIKRITNRLVCPLCKASFNLETRKPKQEGLCDFDNTKLVKRSDDSLDKVQIRLQTYKEQTLPLIDYFKTNSKFIEIKADDLSAEQVFNQIKGELKI

SEQ ID NO: 86250 - DNA, 546 bp, Mycobacterium paratuberculosis
  CDS (1)..(546): transl_table=11
gtgagagtcgttttgctggggccgccgggagcgggcaaggggacgcaggcccagaagctctccgagaagctcgggatcccgcagatctccaccggtgagctgttccgcagcaacatcgagaacgggaccaagctggggctggaggccaagcgctacctggacgccggcgacctggtgcccgcggagctgaccaaccagctcgtcgacgaccggctcagcgagccggacgccgccaacggtttcatcctggacgggtttccccgatcgttgcagcaggccaaggcgctgcacgagatgctggaacgccgcggcaccgacatcgacgcggtgctggagttccgggtgtcccaggacgagctgctggcgcggctcaaggcgcgcggccgggccgacgacaccgacgaggtgatcctgaaccggatgaaggtgtaccgcgacgagacggcgccgctgctggactactaccgcgaccagctcaagacggtcgacgccgtcggcaccctggacgaggtgttcgcccgggcgctgtgcgcgctgggcaagtag

SEQ ID NO: 86251 - protein, 181 aa, Mycobacterium paratuberculosis
MRVVLLGPPGAGKGTQAQKLSEKLGIPQISTGELFRSNIENGTKLGLEAKRYLDAGDLVPAELTNQLVDDRLSEPDAANGFILDGFPRSLQQAKALHEMLERRGTDIDAVLEFRVSQDELLARLKARGRADDTDEVILNRMKVYRDETAPLLDYYRDQLKTVDAVGTLDEVFARALCALGK

SEQ ID NO: 86252 - DNA, 648 bp, Mycoplasma penetrans
  CDS (1)..(648): transl_table=4
atgaaattagttttattaggtgcaccaggttgtggaaagggaacaatctctgattaccttgttaaaaattatggattagtacatttatcaactggtgatatttttagacaaacaattgatcaaaaaggtccttattgagaagaacttaaaagttacatctctaaggggttgttagttccggatgaattaacaaataaaattttaaaaaatgcattagataaaaacatggataagtcttttatcttggatggatgtattagaacaattgcacaagctgattttttatcaactatcttagacattgatcttgcattatatttagaagttccttttgatgtattagaaaaaagattaactggaagaagaatttgtagtaaatgtaaaagaatttataacattcattattctgctccaaaaaaggaagacatctgtgatgatgatggtgaattcttaattcaaagaaaagatgaccaaaaagaaatcattgatgaaagaatgaaagtttatagaacaaattcagaacctttaattaagtactatgaaaaacttaataaattagttgctattaattctgaaaacttagatgatttagaaaagaatattgatgacttatttattaacaaatttaatttaagaaagattgcttaa

SEQ ID NO: 86253 - protein, 215 aa, Mycoplasma penetrans
MKLVLLGAPGCGKGTISDYLVKNYGLVHLSTGDIFRQTIDQKGPYWEELKSYISKGLLVPDELTNKILKNALDKNMDKSFILDGCIRTIAQADFLSTILDIDLALYLEVPFDVLEKRLTGRRICSKCKRIYNIHYSAPKKEDICDDDGEFLIQRKDDQKEIIDERMKVYRTNSEPLIKYYEKLNKLVAINSENLDDLEKNIDDLFINKFNLRKIA

SEQ ID NO: 86254 - DNA, 648 bp, Mycoplasma pneumoniae
  CDS (1)..(648): transl_table=4
atggtaatggaaaataagttcttgtttttaggcgctccgggtgtgggtaagggtacactagctaagcaagtagccaacaccaccggattgtttcacctttccactggtgacatctttcgcagtgtgatgcaagagcagggtgcgttgagtcaaacgctagcgcactatatgaaccagggtttgtatgtccctgatgaattgactaaccaaaccttttggcactttgtcactacccaccaaaatgaactccacaagggctttatcctagatgggtatccccgtaccttaaaccaactcgagtttttgcaaagcaagttgcaattagaccaggtgtttcaccttaagctaagtgatccccaagtgctagtagcgcggatcttaaaccgtttggtttgtcctagttgtggtagtgtatacaacaagcagagcaaaccaccattgaaggccaatcagtgtgatcgttgccatgctacgttacaagcgcgcaatgatgacacggaagcggtaatcttaaagcgtttaacgctttacgaagacaccgttaaacccttaattgaggccttcaccaagcagggcattctcaccgtcattgaagcccaattaccgctcgaacaacaggtcaatttggttcaacagttagtgcattaa

SEQ ID NO: 86255 - protein, 215 aa, Mycoplasma pneumoniae
MVMENKFLFLGAPGVGKGTLAKQVANTTGLFHLSTGDIFRSVMQEQGALSQTLAHYMNQGLYVPDELTNQTFWHFVTTHQNELHKGFILDGYPRTLNQLEFLQSKLQLDQVFHLKLSDPQVLVARILNRLVCPSCGSVYNKQSKPPLKANQCDRCHATLQARNDDTEAVILKRLTLYEDTVKPLIEAFTKQGILTVIEAQLPLEQQVNLVQQLVH

SEQ ID NO: 86256 - DNA, 648 bp, Neisseria gonorrhoeae
  CDS (1)..(648): transl_table=11
atgaaagcattacttttaggcgcaccgggcgcgggcaaaggcactcaggcgcaattcatcaccgccgcgttcggcattccgcaaatctctaccggcgacatgctccgtgccgcgattaaggcaggcacgcccttgggtttggaagcgaaaaaaatcatcgatgaaggcggtttggtgcgcgacgacatcattatcggcatggtcaaagaacgcatcgcgcaagacgactgcaaaaacggtttcctgttcgacggtttcccgcgtacattggcgcaagccgaagcgatggtggaagcaggcgtgggtttggacgcggtcgttgaaatcgacgtatccgacagcgtgattgtcgaccgcatgagcggccgccgcgtgcatttggcttccggccgtacttaccacgttacctacaatccgcctaaaaccgaaggcaaagacgacgtaaccggcgaagatttgattcagcgcgacgacgacaaagaagaaaccgtgaaaaaacgtcttgccgtttaccacgagcaaaccgaagttttggttgatttttacagcaagctggaaggcgaacacgcgccgaaatacatcaaagtcgacggtacccaagcagtagaagctgtgaaagccgaagtattgggcgcattgggcaaataa

SEQ ID NO: 86257 - protein, 215 aa, Neisseria gonorrhoeae
MKALLLGAPGAGKGTQAQFITAAFGIPQISTGDMLRAAIKAGTPLGLEAKKIIDEGGLVRDDIIIGMVKERIAQDDCKNGFLFDGFPRTLAQAEAMVEAGVGLDAVVEIDVSDSVIVDRMSGRRVHLASGRTYHVTYNPPKTEGKDDVTGEDLIQRDDDKEETVKKRLAVYHEQTEVLVDFYSKLEGEHAPKYIKVDGTQAVEAVKAEVLGALGK

SEQ ID NO: 86258 - DNA, 648 bp, Neisseria meningitidis serogroup A
  CDS (1)..(648): transl_table=11
atgaaagcattacttttaggcgcaccgggcgcgggcaaaggcactcaggcgcaattcatcaccgcagcgttcggcattccgcaaatctctaccggcgacatgctccgtgccgcgattaaggcaggcacgcccttgggtttggaagcgaaaaaaatcattgacgaaggcggcttggtgcgcgacgacatcattatcggcatggtcaaagaacgcatcgcgcaagacgactgcaaaaacggtttcctgtttgacggtttcccgcgcacattggcacaagccgaagcgatggttgaagcaggcgtggatttggatgcagtcgttgaaatcgatgtgcctgacagcgtgattgtcgaccgcatgagcggccgccgcgtgcatttggcttccggccgtacttaccacgttacctacaacccgcccaaagttgaaggcaaagacgacgtaaccggcgaagatttgattcagcgcgacgacgacaaagaagaaaccgtgaaaaaacgccttgccgtttaccacgagcaaaccgaagttttggtcgatttttacagcaaactggaaggcgaacacgcgcctaaatacatcaaagttgacggcactcagccggtagaagccgtgaaagccgaagtattgggcgcattgggcaaataa

SEQ ID NO: 86259 - protein, 215 aa, Neisseria meningitidis serogroup A
MKALLLGAPGAGKGTQAQFITAAFGIPQISTGDMLRAAIKAGTPLGLEAKKIIDEGGLVRDDIIIGMVKERIAQDDCKNGFLFDGFPRTLAQAEAMVEAGVDLDAVVEIDVPDSVIVDRMSGRRVHLASGRTYHVTYNPPKVEGKDDVTGEDLIQRDDDKEETVKKRLAVYHEQTEVLVDFYSKLEGEHAPKYIKVDGTQPVEAVKAEVLGALGK

SEQ ID NO: 86260 - DNA, 648 bp, Neisseria meningitidis serogroup B
  CDS (1)..(648): transl_table=11
atgaaagcattacttttaggcgcgccgggcgcgggcaaaggcactcaggcgcaattcatcaccgcagcgttcggcattccgcaaatctctaccggcgacatgctccgtgccgcgattaaggcaggcacgcccttgggtttggaagcgaaaaaaatcattgacgaaggcggcttggtgcgcgacgacatcattatcggcatggtcaaagaacgcatcgcgcaagacgactgcaaaaacggtttcttgtttgacggtttcccgcgcacattggcacaagccgaagcgatggttgaagcaggcgtggatttggatgcagtcgttgaaatcgatgtgcctgacagcgtgattgtcgaccgcatgagcggccgccgcgtgcatttggcttccggccgtacttaccacgttacctacaacccgcccaaagttgaaggcaaagacgacgtaaccggcgaagatttgattcagcgcgacgacgacaaagaagaaaccgtgaaaaaacgccttgccgtttaccacgagcaaaccgaagttttggtcgatttttacagcaaactggaaggcgaacacgcgcctaaatacatcaaagttgacggcacccaagcagtagaagccgtgaaagccgaagtattgggcgcattgggcaaataa

SEQ ID NO: 86261 - protein, 215 aa, Neisseria meningitidis serogroup B
MKALLLGAPGAGKGTQAQFITAAFGIPQISTGDMLRAAIKAGTPLGLEAKKIIDEGGLVRDDIIIGMVKERIAQDDCKNGFLFDGFPRTLAQAEAMVEAGVDLDAVVEIDVPDSVIVDRMSGRRVHLASGRTYHVTYNPPKVEGKDDVTGEDLIQRDDDKEETVKKRLAVYHEQTEVLVDFYSKLEGEHAPKYIKVDGTQAVEAVKAEVLGALGK

SEQ ID NO: 86262 - DNA, 648 bp, Neisseria mucosa
  CDS (1)..(648): transl_table=11
atgaaagtattattgttaggcgcgccgggcgcgggcaaaggcactcaggcacaattcatcaccgctgcgttcggcattccgcaaatttctaccggcgatatgctccgcgctgcgattaaagcaggcgcgccgctgggtttggaagcgaaaaaaatcattgacgaaggcggcttggtgcgcgacgacatcatcatcggcatggtcaaagaacgcatcgcgcaagacgactgcaaaaacggtttcctgttcgacggcttcccgcgcacgctggcacaagccgaagcgatggttgaagcgggtgtggatttggacgcggtcgttgaaatcgacgtacccgacagcgtgattgtcgaccgcatgagcggccgccgcgtccacttggcttccggccgtactcaccacgttacctacaatccgcccaaagtcgaaggtaaagacgacgtaaccggcgaagatttgattcagcgcgacgacgacaaagaagaaaccgtcaaaaaacgccttgccgtgtaccacgagcaaaccgaagtgctggtcgatttttacagcaagctggaaggcgaacacgcgccgaaatacatcaaggttgacggcactcagccggtagaagccgtgaaagccgaaatattgggcgcattgggcaaataa

SEQ ID NO: 86263 - protein, 215 aa, Neisseria mucosa
MKVLLLGAPGAGKGTQAQFITAAFGIPQISTGDMLRAAIKAGAPLGLEAKKIIDEGGLVRDDIIIGMVKERIAQDDCKNGFLFDGFPRTLAQAEAMVEAGVDLDAVVEIDVPDSVIVDRMSGRRVHLASGRTHHVTYNPPKVEGKDDVTGEDLIQRDDDKEETVKKRLAVYHEQTEVLVDFYSKLEGEHAPKYIKVDGTQPVEAVKAEILGALGK

SEQ ID NO: 86264 - DNA, 837 bp, Neurospora crassa
  CDS (127)..(837)
atgggcttcatcgacgacgaagttaagcgcctcggcgatgtcattgcctccctcgaggatcgcgtcaggtccctcgagacccgcgacttcagcggcaagcccgtcaccaccgccgagcagctccgcatggtcctcatgggccctcccggtgccggcaagggcacccaggcccccaagatcaaggagaagttcaactgctgccaccttgccaccggtgacatgctccgcgcccaggtcgccaagggcaccgctctcggcaagcaggccaagaagatcatgaacgagggcggtctcgtcagcgacgacattgtcattggcatgatcaaggacgagttggagaacaacaaggagtgccagggcggcttcatcctcgacggcttcccccgcaccgttccccaggccgagggtctcgacgccatgctccgcgagcgcaacctgcccctgcagcacgcggtcgagctcaagatcgacgactcccttctcgtcgcgcgcatcacgggtcgtctcgtccaccctgcttccggccgttcctaccaccgcatcttcaacccgcccaaggacgacatgaaggacgacatcacgggcgagccgctggtgcagcgcagtgacgacaacgccgaggcgctgcgcaagcgtcttgagacttaccacaagcagacggcgcccgtcgtcggctactaccagaacacgggcatctggaaggccattgacgccagccaggagcccgcccaggtctggaagtccctgctcgccatctttgagggtgacaaggccaaggctagcagcgctggcagcggtatcatgagcaagattgcttctgctgccaagagctcgtaa

SEQ ID NO: 86265 - protein, 236 aa, Neurospora crassa
MVLMGPPGAGKGTQAPKIKEKFNCCHLATGDMLRAQVAKGTALGKQAKKIMNEGGLVSDDIVIGMIKDELENNKECQGGFILDGFPRTVPQAEGLDAMLRERNLPLQHAVELKIDDSLLVARITGRLVHPASGRSYHRIFNPPKDDMKDDITGEPLVQRSDDNAEALRKRLETYHKQTAPVVGYYQNTGIWKAIDASQEPAQVWKSLLAIFEGDKAKASSAGSGIMSKIASAAKSS

SEQ ID NO: 86266 - DNA, 654 bp, Onion yellows phytoplasma
  CDS (1)..(654): transl_table=11
atgatactaatattattaggaccgcccggaattggtaaagggactcaagcttctgttttatcagatattttaaaaattaaccacattgcaacaggcgatatttttcgtaaaaattttaaagaaaatactgaattaggcattttaattaaaaaaattattgctcaaggacttttagttcctgacgacattactaaccaaatgatagctgattacttgtctaaggacatcgctactaaagattttttattagacggttttccccgcaatgttttgcaagctcgttttttggatgattttttcaaaaactctcatttatttttaactaaagtcatctattttaacgctggcacccaagatttaatgaaaagaattgtaggacgcagaatttgtcccgaatgtggtaaggtttatcacatcgaaaacattcctcccaaaactccaggtatttgtgacaaagaccaaaaaaccttaattcaaagagaagatgacaaaccagaaaccttccttaagcgcctcaaagtgtttaatcaagaaacattgccattagtgcaatattatcgcgaacaaaatcaactttttgaagtagatggtatgcaaaacatcgaccaagttactaaaatgattttagaagttttagaaacagaccgcaaatga

SEQ ID NO: 86267 - protein, 217 aa, Onion yellows phytoplasma
MILILLGPPGIGKGTQASVLSDILKINHIATGDIFRKNFKENTELGILIKKIIAQGLLVPDDITNQMIADYLSKDIATKDFLLDGFPRNVLQARFLDDFFKNSHLFLTKVIYFNAGTQDLMKRIVGRRICPECGKVYHIENIPPKTPGICDKDQKTLIQREDDKPETFLKRLKVFNQETLPLVQYYREQNQLFEVDGMQNIDQVTKMILEVLETDRK

SEQ ID NO: 86268 - DNA, 645 bp, Pasteurella multocida
  CDS (1)..(645): transl_table=11
atgaaaattatcctattaggtgcaccgggtgcggggaaagggacacaagcgcaatttattatgaataaatttggcattccacaaatttcaacgggtgatatgttgcgtggtgcaatcaaagcagggacagacttaggtaaacaagcaaaaaccttaatggatgcgggtcaattagtgccagatgatttaatcatttcattagtgaaagaacgtgttgcacaagccgattgtgccaaaggtttcttattagacggcttcccacgcaccattccacaagcggatgcattaaaaacagtcggtatccaaattgactacgttttagagtttgatgtgcctgatgaagtgatcgtagaacgtatgagtggtcgccgtgtacaccaagcctcaggtcgtacttatcacgtcgtttacaacccaccaaaagtagaagggaaagatgacgtgactggcgaagacttaatcatccgtgccgatgataaacctgaaactgtattagatcgcttaaaagtgtatcactccaccacgaaaccattagtggactactaccaagcagaagcgaaagcgggtaacaccaagtacttccgcttagacgggacgaaaaaagtggaagaagtgagtcaagaattagatactattttagcgtaa

SEQ ID NO: 86269 - protein, 214 aa, Pasteurella multocida
MKIILLGAPGAGKGTQAQFIMNKFGIPQISTGDMLRGAIKAGTDLGKQAKTLMDAGQLVPDDLIISLVKERVAQADCAKGFLLDGFPRTIPQADALKTVGIQIDYVLEFDVPDEVIVERMSGRRVHQASGRTYHVVYNPPKVEGKDDVTGEDLIIRADDKPETVLDRLKVYHSTTKPLVDYYQAEAKAGNTKYFRLDGTKKVEEVSQELDTILA

SEQ ID NO: 86270 - DNA, 645 bp, Photobacterium profundum
  CDS (1)..(645): transl_table=11
atgcgcatcattcttctgggcgctccaggtgcaggtaaaggtacacaggcacaattcatcatggcgaagtttggtattccacaaatttctactggtgacatgttacgcgcagcgatcaaagcgggtactgagctaggtaaacaagcgaagtcagttattgacgctggtcagttggtgtctgatgatatcattcttggtctggttaaagagcgtattgcccaagacgattgtgcaaaaggtttcttacttgatggcttccctcgtacaattcctcaggctgatggcttgaaagaagtgggcgttgtggttgattacgtcatcgaattcgacgttgctgacagtgtaattgttgagcgtatggcgggtcgtcgtgcccatcttgcatcaggtcgtacttaccataatgtttacaacccaccaaaggttgaaggcaaagatgacgtaactggcgaagatcttgttatccgtgaagatgacaaagaagaaacagtgcttgctcgtttaggtgtataccacaaccaaacggcaccattgattgcttactacggtaaagaagcagaagctggcaacacgcagtacctgaagtttgacggtactaaagcggttgcagaagttagcgctgagttagaaaaagcactagcataa

SEQ ID NO: 86271 - protein, 214 aa, Photobacterium profundum
MRIILLGAPGAGKGTQAQFIMAKFGIPQISTGDMLRAAIKAGTELGKQAKSVIDAGQLVSDDIILGLVKERIAQDDCAKGFLLDGFPRTIPQADGLKEVGVVVDYVIEFDVADSVIVERMAGRRAHLASGRTYHNVYNPPKVEGKDDVTGEDLVIREDDKEETVLARLGVYHNQTAPLIAYYGKEAEAGNTQYLKFDGTKAVAEVSAELEKALA

SEQ ID NO: 86272 - DNA, 585 bp, Porphyromonas gingivalis
  CDS (1)..(585): transl_table=11
atgcttaacgtactaatcttcggtgctcccggttccgggaagggcacccaaagcgaagaactgatccgtcgatatggattccggcatatttcaaccggagagttgcttcgtgccgaaatcaaagctcagaccgaactgggccaagcagcagccggctacatcaacgagggacacctcgtacctgacagcctgatcgtggacatgatggaaaagctcatcagcactttggtcgataccgaggggattatcttcgacggatttccacgtaccattccccaagcagaagccatggagacgatgctcgcacatcatggatggaaggtggacatagtgctgaatctgcaagtacccgaggaaatgctcatcgaacgcctcctgaacagaggaaaggtcagtggtcgatcggatgacaacatcgagaccattcgcaagcgtctggatgtatatgccaacgagactgcaccattagtggatttcttcacccgaaagaatgtgctgcacaacgtggtaggtacggggacgatagaagagatcgctttgcgtatcgctcccattgtggacaagttccgcaaagtctctaactaa

SEQ ID NO: 86273 - protein, 194 aa, Porphyromonas gingivalis
MLNVLIFGAPGSGKGTQSEELIRRYGFRHISTGELLRAEIKAQTELGQAAAGYINEGHLVPDSLIVDMMEKLISTLVDTEGIIFDGFPRTIPQAEAMETMLAHHGWKVDIVLNLQVPEEMLIERLLNRGKVSGRSDDNIETIRKRLDVYANETAPLVDFFTRKNVLHNVVGTGTIEEIALRIAPIVDKFRKVSN

SEQ ID NO: 86274 - DNA, 570 bp, Propionibacterium acnes
  CDS (1)..(570): transl_table=11
atgagattgctgatcatgggcgccccgggagcaggcaaggggactcaggccaccgccatcgccgagcattacagcgtgcccgcgatttctaccggcgatatgttccgtaccaatatcaagaacggcaccgagctgggcaagaaggtcaaggccatcatggacgccggggacctcgtccccgacgagctaaccgacgcgatcgttgttgatcgcctcaatcaggacgatgctgccaacggtttcctgctcgacgggtacccccgcaatatgcaccaggtcgaggcccttgacgcctacctcaaggagcatggccagcggcttgacgccgtcatcagccttgacgtcgatcctgagctgctcactcagcgtctgttgaagcgtgctgagattgagggacgtactgacgacaacgaggaaactatccgtaaccggatgaaggtctactcctcccagactgagccgctgctggagcactaccgttcggccggcatccttgtcccggtggacggagtcggcgagatcgacgaggtgcgtcagcgcattttcgccgcactcgattccaagaactga

SEQ ID NO: 86275 - protein, 189 aa, Propionibacterium acnes
MRLLIMGAPGAGKGTQATAIAEHYSVPAISTGDMFRTNIKNGTELGKKVKAIMDAGDLVPDELTDAIVVDRLNQDDAANGFLLDGYPRNMHQVEALDAYLKEHGQRLDAVISLDVDPELLTQRLLKRAEIEGRTDDNEETIRNRMKVYSSQTEPLLEHYRSAGILVPVDGVGEIDEVRQRIFAALDSKN

SEQ ID NO: 86276 - DNA, 696 bp, Prunus armeniaca
  CDS (1)..(696)
atgtggaggcgcgtaacttcagtttctcatctgttttctcattcgaaatcaaccaaatttaaccagggagcaagcacattcaagatttgggaaacatttacctcagaatcagagataccaactccgtcgaaaggttctccgttcgtaacttttgttttaggtggccctggcagtggaaaaggtactcagtgtgcaaagattgttgaggcatttgggttcactcatgtaagtgcaggagatttgttgaggagggaaatagcttccggtagcgcatatggctctgtgattcttagtacaattagagaaggaaaaatagtaccctctcaagtgacagtcgaactcattcaaaaggagatggaatcaagtgacaattataagtttctgattgacgggttccctcgaagtgaggagaaccgcaaggcatttgaacaaactattggcgcagaaccagatgttgtgcttttctttgactgtcctgaacaagagatggtgaagcgagtactaaatcgtaatcagggccgagttgatgataatattgacacaatcaagaaacgccttgaaatattcgatgaattaaattggcctgttatcaattactactcacagaggggtaaacttcacaagatcaatgcagtgggaacagtcgatgaaatatttgaaaaagttcgaccaatttttgctccattgagcaaatga

SEQ ID NO: 86277 - protein, 231 aa, Prunus armeniaca [sequence omitted]

SEQ ID NO: 86278 - DNA, 648 bp, Pseudomonas aeruginosa
  CDS (1)..(648): transl_table=11
atgcgtgtgattctgctcggggcacccggtgccggcaaaggcacccaggcacggttcatcaccgagaagttcggcattccgcagatctccaccggcgacatgctgcgcgccgcagtcaaggccggcagcccgctcggccagcaggtgaaaggcgtgatggacagcggcggcctggtatccgacgacatcatcatcgccctgatcaaggaacgcatcaccgaggccgattgcgccaagggcttcctgttcgacggcttcccgcggaccatcccgcaggccgaagcgctgaaggacgccggcgtgaccatcgaccatgtggtcgagatcgccgtcgacgacgaggagatcgtgtcgcgtatcgccggtcgtcgcgtgcatccggcctccggccgcgtgtaccacaccgagcacaacccgccgaaggtcgccggcaaggacgacgttaccggcgaagagctgatccagcgcgaggacgacaaggaagagaccgtgcgtcaccgcctgtcggtctaccattcgcagaccaagccgctggtcgacttctaccagaagctgtcggccgccgaaggcaccccgaaataccacagcatcgccggcgtcggctcggtcgagcagatcaccgcgaaagtgctttcggccctgagctga

SEQ ID NO: 86279 - protein, 215 aa, Pseudomonas aeruginosa
MRVILLGAPGAGKGTQARFITEKFGIPQISTGDMLRAAVKAGSPLGQQVKGVMDSGGLVSDDIIIALIKERITEADCAKGFLFDGFPRTIPQAEALKDAGVTIDHVVEIAVDDEEIVSRIAGRRVHPASGRVYHTEHNPPKVAGKDDVTGEELIQREDDKEETVRHRLSVYHSQTKPLVDFYQKLSAAEGTPKYHSIAGVGSVEQITAKVLSALS

SEQ ID NO: 86280 - DNA, 651 bp, Pseudomonas putida
  CDS (1)..(651): transl_table=11
atgcgcgtaattctgctgggagctcccggggccggtaaaggtactcaggcaaagttcatcaccgaaaagttcggtattccacagatctccaccggtgacatgctgcgtgccgccgtcaaggctggcaccccgctgggcctggagctgaagaaagtcatggatgccggccagctggtctccgacgagttgatcatcagcctggtgaaggagcgcatcgctcagcctgattgcgccaacggctgcctgttcgacggcttcccacgcaccatcccacaggccgaagccatggtcgctgccggtgtcgacatcgatgccgtggtcgaaattgccgtggacgacgaggaaatcgtcggccgcatggctggccgccgcgtgcacctggcctcgggccgtacctaccacattcagtacaacccgccgaaagtggaaggcaaggacgacgagaccggtgaagacctgatccagcgtgacgacgacaaggaagaaaccgttcgccatcgtctgtcggtctaccacagccagaccaagccgctggtggatttctaccagaagctgtcggctgccaatggcggcaagccgaagtacagccacatcgaaggtgtcggctcggttgaagccatcaccgccaaggtcctggcagccctgagctga

SEQ ID NO: 86281 - protein, 216 aa, Pseudomonas putida
MRVILLGAPGAGKGTQAKFITEKFGIPQISTGDMLRAAVKAGTPLGLELKKVMDAGQLVSDELIISLVKERIAQPDCANGCLFDGFPRTIPQAEAMVAAGVDIDAVVEIAVDDEEIVGRMAGRRVHLASGRTYHIQYNPPKVEGKDDETGEDLIQRDDDKEETVRHRLSVYHSQTKPLVDFYQKLSAANGGKPKYSHIEGVGSVEAITAKVLAALS

SEQ ID NO: 86282 - DNA, 663 bp, Pyrococcus horikoshii
  CDS (1)..(663): transl_table=11
atgaatatcctaatctttggccctccaggcagtgggaagtcaacccaagcaaggaggattactgaaagatatggtttgacgtatatttcctccggggatattataagagcagaaataagctcaagaacgccacttggattagaaatggagaagtatttatcaagaggtgacttaatacctgacacgatagttaacacgttgataatttcgaagctaagaagggttagggagaatttcattatggatggttatccaagaacgccagaacaggtaatagcccttgagaattacctctatgaccatggtattaaaattgatgtagccatagatatcttcataactaaggaagaaagcgtgaggagaatttctggaagaaggatatgctccaagtgtggagcagtatatcacattgaatttaaccctccaaagatcccaggaaagtgtgatatctgtggaggagatctaattcaaaggcctgacgataggcctgagatagtggagaagaggtacgacatatatatgaggaatatggaaccgataataaaattctaccagaagcagggaatttacgttaagatagatggtcatggatcgattaatgaagtttgggaaaggataaggcctctactggattacatttataatactaggagtaggcgatga

SEQ ID NO: 86283 - protein, 220 aa, Pyrococcus horikoshii
MNILIFGPPGSGKSTQARRITERYGLTYISSGDIIRAEISSRTPLGLEMEKYLSRGDLIPDTIVNTLIISKLRRVRENFIMDGYPRTPEQVIALENYLYDHGIKIDVAIDIFITKEESVRRISGRRICSKCGAVYHIEFNPPKIPGKCDICGGDLIQRPDDRPEIVEKRYDIYMRNMEPIIKFYQKQGIYVKIDGHGSINEVWERIRPLLDYIYNTRSRR

SEQ ID NO: 86284 - DNA, 675 bp, Pyrococcus kodakaraensis
  CDS (1)..(675): transl_table=11
gtgaacatacttatcttcggcccgcctggaagcgggaagagtacgcactcaagaacaataatggaaaagtacggcctcgtctatatttcgtcgggagacctcatcaggagagaaatcgaaaggaagtcttctctcggcagggagatggaggcctaccttagcaggggagacctcattccagataccatcgttaacaccctgataatctcaaagctccgccgccagagggagaactttatccttgacggctacccaaggacgccagaacaggtcatatcccttgagaactacctctttgaccatggtattaagctagacttggccctagaaatcttcatcgatgaggacacgagcgttgagaggatttccgggagaaggatatgccccaactgcggagcagtctatcacgtaaagtacaatccacccaaggtgccaggaatctgtgatgtctgcggctccgagctcatccagagggcagacgacagggaagaggtcgtcaggaagaggtacaggatatactcaaagaacatggagccgataatcaagttctaccgtgccaaggggatatacgttagggttgacggcgacgggccgataagtgaagtatggaagaggatacagcctttactggattacattcactcacgcgaggagaagaggaaggaacatgagtaa

SEQ ID NO: 86285 - protein, 224 aa, Pyrococcus kodakaraensis
MNILIFGPPGSGKSTHSRTIMEKYGLVYISSGDLIRREIERKSSLGREMEAYLSRGDLIPDTIVNTLIISKLRRQRENFILDGYPRTPEQVISLENYLFDHGIKLDLALEIFIDEDTSVERISGRRICPNCGAVYHVKYNPPKVPGICDVCGSELIQRADDREEVVRKRYRIYSKNMEPIIKFYRAKGIYVRVDGDGPISEVWKRIQPLLDYIHSREEKRKEHE

SEQ ID NO: 86286 - DNA, 669 bp, Ralstonia solanacearum
  CDS (1)..(669): transl_table=11
atgcggttgattctgttgggcgcacccggcgccggcaaaggtacgcaagccaaattcatctgcgaacgcttcggcattccgcagatctccaccggcgacatgctgcgcgccgccgtcaaggccggcaccccgctgggcatcgaagccaagaaggtgatggacgccggcggcctggtgtccgacgacatcatcatcggcctggtgaaggaccgcctgcagcagtccgactgcaagaacggctacctgttcgacggcttcccgcgcaccatcccccaggccgaagccatgaaggatgccggcgtgccgatcgactacgtgctggaaatcgacgtgccgttcgacgccatcatcgagcgcatgagcggccgccgcgtgcacgtggcctcgggccggacctatcacgtcaagtacaacccgcccaagaacgagggccaggacgacgaaaccggcgatccgctgatccagcgcgacgacgacaaggaagaaaccgtccgcaagcgcctgtccgtgtacgagaaccagacccgcccgctggtggactactactccggctgggccgagaacggcaacggtgccgccaaggtggcgccgcccaagtaccgcaagatcagcgggatcggcaacgtggaagacatcaccggccgcgtgttcggcgcactggaagcctga

SEQ ID NO: 86287 - protein, 222 aa, Ralstonia solanacearum
MRLILLGAPGAGKGTQAKFICERFGIPQISTGDMLRAAVKAGTPLGIEAKKVMDAGGLVSDDIIIGLVKDRLQQSDCKNGYLFDGFPRTIPQAEAMKDAGVPIDYVLEIDVPFDAIIERMSGRRVHVASGRTYHVKYNPPKNEGQDDETGDPLIQRDDDKEETVRKRLSVYENQTRPLVDYYSGWAENGNGAAKVAPPKYRKISGIGNVEDITGRVFGALEA

SEQ ID NO: 86288 - DNA, 597 bp, Rhizobium loti
  CDS (1)..(597): transl_table=11
atgaggttgattttgcttgggccgccaggggcgggcaaggggacacaagcacaaagactggtagaaaaacacggcataccccagctctcgacgggagacatgctgcgtgccgccgttcaggccggttccgaagtcggcaagcgtgccaaggcggtgatggatgccggcgaattggtgtcggacgccatcgtcaacgccatcgtcgccgagcgaatcgaccaggccgattgcgccaagggattcatcctcgacggctacccgcgcacgctggtgcaggcagatgcggttgaatcgatgctttccgagcgtggcatcggcctcgacacggtcatcgaactggttgtcgatgacagggccctggtcggccgcattgtcaaacgcgccgaggatgccaaggccgccggccagccggtacgcaaggacgacaatcccgcagtgttcgaagagcgcctgcgcgagtactacaagaagaccgctccgctgaccggctactattacgccaagggcaagctcaagacggtcgacggcttggccagcatcgacgcggtgaccaacgagatcgaagccgtgcttacggcggccgccgaggcgcggtaa

SEQ ID NO: 86289 - protein, 198 aa, Rhizobium loti [sequence omitted]

SEQ ID NO: 86290 - DNA, 579 bp, Rhizobium meliloti
  CDS (1)..(579): transl_table=11
atgaggctaatttttttgggaccgccgggcgctggcaagggtactcaggccaagcttctgacggagagatacggcattccgcagctttccacgggggatatgcttcggacggcggtagctcaggcgaccgaggtcggcaagcgcgcgaaagccgtgatggatgccggccagctcgtctccgacgaaatcgtcaacgagatcgtctccgaccgcatcgattctgcggattgcgcaaggggcttcattctcgacggctatccgcgcacggttccgcaggccgtagcgctcgaccggatgcttgaggaaaaaggcctgaaactcgatgcggtgatcgagctgaaggtcgatgaggcagcccttgtgcggcgcatggagaatcgcgtaaccgaaaccgtcgcggccggcggcaccgtacgctccgacgacaatccggaagcattccggcgtcgtctgcaggaatatcgggaaaagaccgctccgctttcggaacactacgcccgaaccggtcggttgaagaccgtggacggcatggcggatgtgcatacggttaccgccgagatcgagaagattctggcatag

SEQ ID NO: 86291 - protein, 192 aa, Rhizobium meliloti [sequence omitted]

SEQ ID NO: 86292 - DNA, 639 bp, Rickettsia conorii
  CDS (1)..(639): transl_table=11
gtgatggtaatttttttaggtcctccaggagcgggaaagggcacacaaggaaaaaagatagctaaaaaaattgatttaccacatatagcaatcggtgatatatttagaacaattattaaaacatcaactagcgaagcagagttaattaataattatgttaagcaaggggagcttatccctaatgaaatagttaatcaagtaatcaaaaattttttattatcctctgaatataaaaacggctacatattagatggatatccgcgtaatttagagcaagcgaaattttttgaatcatttattaaagaaaaaattaaaataatatattttgatgtttcagatgaattattaattaaaagaattttaggaagatatagttgtaaaaattgcggtaaaatatataataggtacttcgtgcagcctaaaactgataatgtatgtgatgtttgcggttcaagtacatttgattatagaaaagacgataatgaagaagtaataaaaaaaagaattgaagtatataaaacagaaacatatccattaatagattattataagaatagtggtaatttttatatagttaatggaagtaaaaatgaacaagaaatagaaattgatatacagaaaatactaaaaataaattga

SEQ ID NO: 86293 - protein, 212 aa, Rickettsia conorii
MMVIFLGPPGAGKGTQGKKIAKKIDLPHIAIGDIFRTIIKTSTSEAELINNYVKQGELIPNEIVNQVIKNFLLSSEYKNGYILDGYPRNLEQAKFFESFIKEKIKIIYFDVSDELLIKRILGRYSCKNCGKIYNRYFVQPKTDNVCDVCGSSTFDYRKDDNEEVIKKRIEVYKTETYPLIDYYKNSGNFYIVNGSKNEQEIEIDIQKILKIN

SEQ ID NO: 86294 - DNA, 648 bp, Staphylococcus epidermidis
  CDS (1)..(648): transl_table=11
atgaatatcattttaatgggcttacctggtgcaggtaaagggactcaggcgagtgaaattgttaagaaattcccaataccacatatttctactggtgacatgttcagaaaagcgattaaagatgaaacagatttaggaaaagaagctaaatcatatatggatcgtggagaattagttcctgatgaagttactgtaggtatcgttaaagaaagaatttctgaagacgatgcaaaaaaaggattcttgttagatggattcccaagaactatagatcaagctgagtcattaagtcaaattatgtctgagcttgatagagaaattgatgctgtcattaatatcgaagttcctgaggaagaattaatgaatcgtcttacaggtcgtcgtatctgtgagaaatgtggtacaacatatcatcttgtatttaatcctccaaaggttgatggtatatgtgatatcgatggtggaaagttatatcaacgtgaagatgacaatccagaaacagtatctaatcgtttgagcgttaatgttaaacaatctaagcctattttagaatattacaacaacaaaggtgtcttgaaaaacattgatggttcaaaagatattgacgaagtaaccaacgatgtcattgatatcttagatcatttataa

SEQ ID NO: 86295 - protein, 215 aa, Staphylococcus epidermidis
MNIILMGLPGAGKGTQASEIVKKFPIPHISTGDMFRKAIKDETDLGKEAKSYMDRGELVPDEVTVGIVKERISEDDAKKGFLLDGFPRTIDQAESLSQIMSELDREIDAVINIEVPEEELMNRLTGRRICEKCGTTYHLVFNPPKVDGICDIDGGKLYQREDDNPETVSNRLSVNVKQSKPILEYYNNKGVLKNIDGSKDIDEVTNDVIDILDHL

SEQ ID NO: 86296 - DNA, 663 bp, Streptomyces avermitilis
  CDS (1)..(663): transl_table=11
atgcgaatcgtcctcgtcgggccgccgggtgcagggaagggaacgcaggccgcgttcctcgccaagaacctgggaatcccgcacatctccacgggcgacctcttccgggccaacatcagccagcagaccgagctcggcaagctggccaagtcctacatggacgagggcaacctggtgccggacgaggtcaccatcgcgatggccaaggaccgcatggagcagcccgacgcggtgaacggcttcctcctcgacggcttcccgcgcaacgtcaagcaggccgaggcgctggacgagatgctgaagtccgagggcatgaagctggacgccgtgctggacctggaggtccccgaggacgaggtggtcaagcgcatcgccggccgccgcatctgccgcaacgactcggcgcacgtcttccacgtctcgtacaagccgccgaagcaggaaggcgtctgcgacgtctgtggcggcgagctgtaccagcgtgacgacgactccgaggagaccgtccgccggcggctggaggtctaccacacgcagaccgagccgatcatcgactactaccgggcgcagggcctggtcgtgacgatctcggcgctcggtccggtggaagaggtcacccagcgcgcgatggacgcactcaagcgcgaggacgccagcaagtag

SEQ ID NO: 86297 - protein, 220 aa, Streptomyces avermitilis
MRIVLVGPPGAGKGTQAAFLAKNLGIPHISTGDLFRANISQQTELGKLAKSYMDEGNLVPDEVTIAMAKDRMEQPDAVNGFLLDGFPRNVKQAEALDEMLKSEGMKLDAVLDLEVPEDEVVKRIAGRRICRNDSAHVFHVSYKPPKQEGVCDVCGGELYQRDDDSEETVRRRLEVYHTQTEPIIDYYRAQGLVVTISALGPVEEVTQRAMDALKREDASK

SEQ ID NO: 86298 - DNA, 654 bp, Streptomyces coelicolor
  CDS (1)..(654): transl_table=11
atgcgaatcgtcctcgtcgggcctccgggtgccggaaagggaacgcaggccacccgccttgccgagacgctgcacattccgcacatctccacgggcgacctgttccgcgcgaacatcagccagcagaccgaactgggcaagctcgcgaagtcctacatgaacgcgggcaacctcgtgccggacgaggtcaccatcgccatggcgaaggaccgcatggagcagcccgacgccgagggcggcttcctgctggacggcttcccgcgcaacgtctcccaggccgaggcgctggacgagctgctcgagaccgagggcatgaagctcgacgcggtgctggacctggaggcccccgaggacgaggtcgtcaagcggatcgccggccggcgcgtctgccgcaatgagccgaagcacgtcttccacgtgacgtacacgccgccgaagaaggaaggcgtctgcgacgtctgcggcggcgagctgtaccagcgggacgacgactccgaggagacggtccgcaagcggctggaggtctaccacacgcagaccgagccgatcatcgactactacaagtcgcagggcctggtcgccaccatcgccgcgacgggccccgtggacgaggtcacccgccgcgcgctggaggcgctcaagcgcgaccagtag

SEQ ID NO: 86299 - protein, 217 aa, Streptomyces coelicolor
MRIVLVGPPGAGKGTQATRLAETLHIPHISTGDLFRANISQQTELGKLAKSYMNAGNLVPDEVTIAMAKDRMEQPDAEGGFLLDGFPRNVSQAEALDELLETEGMKLDAVLDLEAPEDEVVKRIAGRRVCRNEPKHVFHVTYTPPKKEGVCDVCGGELYQRDDDSEETVRKRLEVYHTQTEPIIDYYKSQGLVATIAATGPVDEVTRRALEALKRDQ

SEQ ID NO: 86300 - DNA, 639 bp, Streptococcus pneumoniae
  CDS (1)..(639): transl_table=11
atgaatcttttgattatgggcttacctggtgcaggtaagggaactcaagcagcaaaaatcgtagaacaattccatgttgcacatatctcaacaggtgatatgttccgcgctgcaatggcaaatcaaactgaaatgggtgttcttgctaagtcatatattgacaagggtgaattggttcctgacgaagttacaaatggaatcgtaaaagaacgcctttcacaagatgatattaaagaaacaggattcttattggatggttacccacgtacaattgaacaagctcatgccttggacaaaacattggctgaacttggcattgaactagaaggtattatcaatattgaagtgaaccctgacagcctcttggaacgtttgagtggccgtatcatccaccgcgtaactggagaaactttccacaaggtctttaacccaccagttgactataaagaagaagattactaccaacgtgaagatgataagcctgagacagtaaaacgtcgtttggatgttaatattgctcaaggagaaccaatcattgctcactaccgtgccaaaggtttggttcatgacatcgaaggtaatcaagatatcaatgatgtcttctcagatattgaaaaagtattgacaaatttgaaataa

SEQ ID NO: 86301 - protein, 212 aa, Streptococcus pneumoniae
MNLLIMGLPGAGKGTQAAKIVEQFHVAHISTGDMFRAAMANQTEMGVLAKSYIDKGELVPDEVTNGIVKERLSQDDIKETGFLLDGYPRTIEQAHALDKTLAELGIELEGIINIEVNPDSLLERLSGRIIHRVTGETFHKVFNPPVDYKEEDYYQREDDKPETVKRRLDVNIAQGEPIIAHYRAKGLVHDIEGNQDINDVFSDIEKVLTNLK

SEQ ID NO: 86302 - DNA, 651 bp, Symbiobacterium thermophilum
  CDS (1)..(651): transl_table=11
atgcacatcattctgatgggcccgccgggagcaggcaagggaacccaggccgtgctgctggccgggcaggaaggcattccacacatctccaccggggacatcttccgtgcccacatgagccagggcactcccctgggcaagctggccaaggagtacgtggatgctggcaagtatgtaccggatgacgtgaccaacgccatggtcagggaccggcttgcacagcccgactgcaagaaggggttcgtcctggacggatacccgcggacgccggagcaggcccgggcgctggacgagatgctggctgagctgggcctcgcgttggacgccgtcatcaacatcgacgtgccggacgaactgctggtcgagcgtgcggtgggccgccgggtgtgccgctcctgtggggccacctatcacgtccggttcaacccgccccgcgaggccggccgctgtgaccggtgcggcggcgagctgtaccagcgcagcgacgaccaggaagagaaggttgcggtgcgcctcaacctgtaccattcccagacggcgccgcttctccagttctataaggaacgcgggctggttcgcaccgtccgcggagaccagcccatggaccaggtcacggccgacatcaaggaggccgtgcgggcttcccgctga

SEQ ID NO: 86303 - protein, 216 aa, Symbiobacterium thermophilum
MHIILMGPPGAGKGTQAVLLAGQEGIPHISTGDIFRAHMSQGTPLGKLAKEYVDAGKYVPDDVTNAMVRDRLAQPDCKKGFVLDGYPRTPEQARALDEMLAELGLALDAVINIDVPDELLVERAVGRRVCRSCGATYHVRFNPPREAGRCDRCGGELYQRSDDQEEKVAVRLNLYHSQTAPLLQFYKERGLVRTVRGDQPMDQVTADIKEAVRASR

SEQ ID NO: 86304 - DNA, 588 bp, Synechococcus elongatus
  CDS (1)..(588): transl_table=11
atgcgcttaattttgtttggtggccccggttcgggcaaagggacacaggcggcaattctcaccacgctcttgggcattccccatatttctacaggggatattctgcgagcagagcgagctgccggcaccctcctcggtcaacaggctcaaagctacatggatcgcggtgaactggtacccgatcaggtgattgtggatatggtggccaatcgcttgcaacagccagatacggctgcgggttggcttttggacgggtttccccgcaatggggcacaagcagcggtctttgaggagatgctcaaaagcattcaccaagactatgattacttgctttttttagatgtgcccgctgcgattctccaagaacgcgctctaaatcgcgccaagcaagctgtcaacggtcagcagcgctccgatgatacaccggaaactatccttaagcggctacaggtctatgagcgggaaaccctaccgatgattcaacagtacatgagtcatcccaagtttgtgcccattgatggaacgcgtacgatcgaagaggtaactgctgccattcaagcacgtattggggaggtgaaccgtgtctaa

SEQ ID NO: 86305 - protein, 195 aa, Synechococcus elongatus [sequence omitted]

SEQ ID NO: 86306 - DNA, 552 bp, Synechococcus sp
  CDS (1)..(552): transl_table=11
atgaaatcccgtctcctcttccttggcccccctggagcaggaaagggcacccaggcagcgcgcctgtgcaacgccaacggcatgagccacctctccaccggtgatttgttgcgatctgaagtcgcagccggcacagccctgggccaggaggccgaagcagtgatgaaccgtggggaactggtcagcgatgccctggtgctggcgatcgtggaaagccagttgaagggattgtccagcggaggttggctcctggacgggtttccccgcaccgtcccccaggctgacgcccttgaaccgctgctcgacgaactcaagcaaccgatcgaagccgttgtgttgctagagctggacgatgccgtgctgatcgagcgtctgctcgcccgtggccgcgacgacgacaatgaagcggtcatccgcaatcgtctggaggtctaccgggagaagacctcacccctgatcagcttctatcgtgacaaaggcctgctggtgtcggtggaagcgaacggctccgtggaggagatcactcagcggattaccaaggtcctgagttga

SEQ ID NO: 86307 - protein, 183 aa, Synechococcus sp
MKSRLLFLGPPGAGKGTQAARLCNANGMSHLSTGDLLRSEVAAGTALGQEAEAVMNRGELVSDALVLAIVESQLKGLSSGGWLLDGFPRTVPQADALEPLLDELKQPIEAVVLLELDDAVLIERLLARGRDDDNEAVIRNRLEVYREKTSPLISFYRDKGLLVSVEANGSVEEITQRITKVLS

SEQ ID NO: 86308 - DNA, 663 bp, Thermotoga maritima
  CDS (1)..(663): transl_table=11
atgatggcgtaccttgtctttctaggacctccaggtgcaggaaaaggaacctacgcaaagagattgcaggaaataacggggattcctcatatatccaccggtgacattttcagggacattgtaaaaaaagagaacgacgagcttgggaaaaagataaaagagatcatggaaaggggagaactcgttccggacgaactcgtgaacgaggttgtgaaaagaagactctcagaaaaagattgtgaaagaggattcatactggacggctatccaagaaccgttgctcaggcggaattcctcgacggctttttgaaaactcaaaacaaagagctcacggctgctgtactctttgaagttcctgaggaagtggtcgttcagaggctcacggccagaaggatctgcccgaaatgtggaagaatttacaatttgatttcgctccctccaaaagaagacgaactgtgcgatgattgtaaagtgaagctcgttcagagagaagacgacaaagaagaaacagtgagacacagatacaaggtttatctcgaaaagacacagccagtgattgattactacgataaaaagggcattctcaaacgagtggatggtaccataggaatagacaacgtgatcgctgaagtgttaaagataatagggtggagtgataaatga

SEQ ID NO: 86309 - protein, 220 aa, Thermotoga maritima
MMAYLVFLGPPGAGKGTYAKRLQEITGIPHISTGDIFRDIVKKENDELGKKIKEIMERGELVPDELVNEVVKRRLSEKDCERGFILDGYPRTVAQAEFLDGFLKTQNKELTAAVLFEVPEEVVVQRLTARRICPKCGRIYNLISLPPKEDELCDDCKVKLVQREDDKEETVRHRYKVYLEKTQPVIDYYDKKGILKRVDGTIGIDNVIAEVLKIIGWSDK

SEQ ID NO: 86310 - DNA, 666 bp, Thermoanaerobacter tengcongensis
  CDS (1)..(666): transl_table=11
atgcgggtggtgcttctgggcccccctggtgccggaaaagggacccaagcgcttaaaattgctaaggagtttgacattcctcacatatctacaggcgatatttttaggcaaaatctgagagacaatacagagttaggtaaactggcaaaggagtatatggacaaaggacttttggtccccgatgaagtgactaacaggatagtagaagacaggctggaaaaagaggactgcaaaaaggggtttttgctggacggatatccgcggaatatacctcaggcggaggaactggataaatttttggaggagagagggcattctcttactgctgttataaatattcaggttgagagagaggctttgatagacaggataacaggcagaagggtatgtcctgtgtgcggtgctacttatcacataaaaacttctcctccgaaagtagataatgtgtgcgataagtgtggcagtgagcttatacaaaggtcagatgataaattggagtctgtggtaaaaaggttggaagtgtacgagaaagagacaaagccattaattgattattatacaaaaaaaggtattttggtaaacatcgatggaaataaatcaattgatgaggtatttgaagacataaaaaaggctttgttaggagataggagagatgatatacattaa

SEQ ID NO: 86311 - protein, 221 aa, Thermoanaerobacter tengcongensis
MRVVLLGPPGAGKGTQALKIAKEFDIPHISTGDIFRQNLRDNTELGKLAKEYMDKGLLVPDEVTNRIVEDRLEKEDCKKGFLLDGYPRNIPQAEELDKFLEERGHSLTAVINIQVEREALIDRITGRRVCPVCGATYHIKTSPPKVDNVCDKCGSELIQRSDDKLESVVKRLEVYEKETKPLIDYYTKKGILVNIDGNKSIDEVFEDIKKALLGDRRDDIH

SEQ ID NO: 86312 - DNA, 636 bp, Treponema pallidum
  CDS (1)..(636): transl_table=11
atgaggtttgtttttcttggtcctcctggtgccggtaagggtacgcttgcaggtgaaatttctgggcgttgtggcgttgtgcacatctccacagggggtattcttcgggcagcaattcagaaacagacggcattaggtaaaaaagttcaaaaagtagttgaagtgggcggcttggtagatgaccagaccgttacggagctagtgcgggagcgtgtcagtcacgaagatgtggttagcggttttattctagatgggtttcctcgcactgtcacgcaggctaggtgcttagaggacattgtgccgatagactacgcggtgagtattgtagtaccggacgatgtccttgttgcgcgtcttactggccgcagggtgtgttcggcctgtgggagcagttatcatgtgctctttgcgcagcctaagagagagggtgtgtgcgatcggtgtagaggagtactggtcgtgcgggaggatgacaagatgtcggcaattcttcagaggcttaccgcctatcgagcgcaggcggagcccattgtccacttttacagtgagcgggggaaattagtttctcttaatggtgctccgccgatatcggatgtagtgttggagtttcaagagcgttttgcacaatcacggtga

SEQ ID NO: 86313 - protein, 211 aa, Treponema pallidum
MRFVFLGPPGAGKGTLAGEISGRCGVVHISTGGILRAAIQKQTALGKKVQKVVEVGGLVDDQTVTELVRERVSHEDVVSGFILDGFPRTVTQARCLEDIVPIDYAVSIVVPDDVLVARLTGRRVCSACGSSYHVLFAQPKREGVCDRCRGVLVVREDDKMSAILQRLTAYRAQAEPIVHFYSERGKLVSLNGAPPISDVVLEFQERFAQSR

SEQ ID NO: 86314 - DNA, 561 bp, Tropheryma whipplei
  CDS (1)..(561): transl_table=11
atgcgggctataatggtcggccctccggggtctggaaaaggtacccagtgtggtcttattcagagcagacttggtatatctgtcatcgcaaccggtgatgtgtttcgtgaacgcatgaaaactgatatggcactaagggacattgtgtcatcaggtggttatgtttctgattcgacgaccaatcgcattgtagaggactgccttgacaaggaggatgtgtcctccgggtttgtccttgatgggtatccacgaaccctgcaacagctggactttctagagggctttttaaaacgacgtgcccttacgctggatgccgtctttagcttggaggttgcgacagatctcctaattgagaggctgcgtgcccgatcaaaggagtctggccgtactgacgacagagattctgtgattgctcgtagattggaaatctataccgaaatgaccttgccgattatcgatgcctgcgaagaaaagggactgcttcacaggatagatgcttccaagggtatagaggaagtttttcagtccatcaaagatgtatttgacagggtgacaatttaa

SEQ ID NO: 86315 - protein, 186 aa, Tropheryma whipplei
MRAIMVGPPGSGKGTQCGLIQSRLGISVIATGDVFRERMKTDMALRDIVSSGGYVSDSTTNRIVEDCLDKEDVSSGFVLDGYPRTLQQLDFLEGFLKRRALTLDAVFSLEVATDLLIERLRARSKESGRTDDRDSVIARRLEIYTEMTLPIIDACEEKGLLHRIDASKGIEEVFQSIKDVFDRVTI

SEQ ID NO: 86316 - DNA, 645 bp, Vibrio parahaemolyticus
  CDS (1)..(645): transl_table=11
atgcgcatcattcttctaggtgctccaggtgcaggtaaaggcacacaagcaaacttcatcatggataaatacggtattccacaaatctctactggtgatatgcttcgtgctgctatcaaagcaggtacagaacttggcaaacaagctaaagctgttatcgacgctggtcagctagtttctgatgaaatcatccttggtcttatcaaagagcgtatcgctcaagacgattgtgagaaaggtttcctactagatggtttcccacgcactattcctcaggctgatggcctaaaagaaatgggcgttgaagtagattacgttatcgaattcgacgtagctgacgatgtgatcgttgagcgtatggctggtcgtcgtgctcaccttccttcaggtcgtacttaccacgttgtttacaacccacctaaagtggaaggtaaagacgacgtaacgggtgaagatcttgttgttcgcgatgacgacaaagaagaaacagtacgtgcacgtctaggtgtttaccacgagcaaactgcaccacttatcgattactacggtaaagaagctgcagcaggcaaaactaagtacctaaaatttgacggtactaagcaagttgctgaagtaagtgctgatatcgagaaggcattagcataa

SEQ ID NO: 86317 - protein, 214 aa, Vibrio parahaemolyticus
MRIILLGAPGAGKGTQANFIMDKYGIPQISTGDMLRAAIKAGTELGKQAKAVIDAGQLVSDEIILGLIKERIAQDDCEKGFLLDGFPRTIPQADGLKEMGVEVDYVIEFDVADDVIVERMAGRRAHLPSGRTYHVVYNPPKVEGKDDVTGEDLVVRDDDKEETVRARLGVYHEQTAPLIDYYGKEAAAGKTKYLKFDGTKQVAEVSADIEKALA

SEQ ID NO: 86318 - DNA, 642 bp, Wolbachia pipientis wMel
  CDS (1)..(642): transl_table=11
atgatcattacgatttttggtcctccaggttctggtaaaggtactcagtcaagcttgttaatagcaaaatataatttaaaattaatttcagtaggggatttattaaggaatattatatctagcagtagtgagttaggtaaaaaaataaagggtaccgtggaatctggtaatttaattcaagatgaaattatatgtggattattacgtgaccagcttgcattagtggatgataattgcttattagatggttttccgagaaatttaaaccaggctcattttttgactcaagttttgcaagaaaaatataatagggatgttgacattgtagttgagctgcagcttgacgataatattgcaatcgataggttaaaaaatcgtctcgcgtgtttggactgtaaaaacatatatagtgtatcttcttttaagagtactacttgtgctaaatgtaaaagtacgaggttagagaaaagaattgatgatgctgatatgtctgcaattaataagagaataagtgaatatcaccttcaaatgaaaggtttacgcgagtattataaaggcaaattattaacaattgacgctaatttgagtgttgatgaggtaacgcaagagattgaaagtaaaatttcttgtaatttggtttga

SEQ ID NO: 86319 - protein, 213 aa, Wolbachia pipientis wMel
MIITIFGPPGSGKGTQSSLLIAKYNLKLISVGDLLRNIISSSSELGKKIKGTVESGNLIQDEIICGLLRDQLALVDDNCLLDGFPRNLNQAHFLTQVLQEKYNRDVDIVVELQLDDNIAIDRLKNRLACLDCKNIYSVSSFKSTTCAKCKSTRLEKRIDDADMSAINKRISEYHLQMKGLREYYKGKLLTIDANLSVDEVTQEIESKISCNLV

SEQ ID NO: 86320 - DNA, 573 bp, Wolinella succinogenes
  CDS (1)..(573): transl_table=11
atgaaaaaactcttcctcatcatcggcgcccctggtagcggaaagaccacagacgcagaaatcatcgccaaaaacaatcccgattctatcaatcactactccacgggcgaacttctccgcgccgaagtagccagcggtagcgaacgcggcaagatcatcgaaggcttcaccagcaaaggcaatcttgttcccctagagatcgtggtcgaaaccatcgtgagcgccatcaaaaacgctcccaaaaatgtcgtccttattgatggctacccccgaagcaccgagcagatggaggcactcgataagattctaaaagaggagagcgatgttgagctcaccaatgtgatcgaggtcgaggtgagcgagcaagtcgcctgcgatcgcgtgctagggagagccagaggagccgatgacaacgccgaagtcttcaggaatcgcatgagcgtctatctcgcccccctcaagcctatccaagcgttctacacagccaaaggcatcttgcacaagatcaatggcgaacgaactatcgaggagatcgtgagcgaaatggaaggattcatcaagagccgactatga

SEQ ID NO: 86321 - protein, 190 aa, Wolinella succinogenes
MKKLFLIIGAPGSGKTTDAEIIAKNNPDSINHYSTGELLRAEVASGSERGKIIEGFTSKGNLVPLEIVVETIVSAIKNAPKNVVLIDGYPRSTEQMEALDKILKEESDVELTNVIEVEVSEQVACDRVLGRARGADDNAEVFRNRMSVYLAPLKPIQAFYTAKGILHKINGERTIEEIVSEMEGFIKSRL

SEQ ID NO: 86322 - DNA, 564 bp, Xylella fastidiosa
  CDS (1)..(564): transl_table=11
atgcgattggttctattgggaccacctggttcaggtaaaggcactcaggcggcgcaaatgcaggaaacattacagattccgcatatttccactggtgacctgttgcgcagtgaagtggttgctgggactcctcttggcctacaggccaagcaagtcatggcacaaggtgatttggtttccgatgcgattttgcttggcatgcttgagtcacgtttgagccatacggatgtagtaaaaggcttcatccttgatggctatccgcgcaatctgtctcaggctgctgcgctggatgggttgttagccaagttcgggcatcctttaaatgctgtggtgcagcttgaggtacccaccgatgtgttggtggaacgtattgctggccgtgctcaggcggaaggccgtgaggatgacactcctgatgcggtgcgtaagcgtttgcaggtctataacgattcaaccgcgccggtcatcggtttctatcagcagcgcggcatcttgttgcgcgtggatggtgtgggacgtttggatgaggtttcccagcgtattgcggttgcgctgggttgctga

SEQ ID NO: 86323 - protein, 187 aa, Xylella fastidiosa
MRLVLLGPPGSGKGTQAAQMQETLQIPHISTGDLLRSEVVAGTPLGLQAKQVMAQGDLVSDAILLGMLESRLSHTDVVKGFILDGYPRNLSQAAALDGLLAKFGHPLNAVVQLEVPTDVLVERIAGRAQAEGREDDTPDAVRKRLQVYNDSTAPVIGFYQQRGILLRVDGVGRLDEVSQRIAVALGC

SEQ ID NO: 86324 - DNA, 1088 bp, Yersinia pestis
  CDS (310)..(954): transl_table=11
caggcgctgctcgcggagaggggaacattggaagaccctaaccagtttattcgtcgaatgaatcagttactcacggcttaatcgataaaaaaacacccttgttcaacgtattgccaagggtgttttttattgtaccttctctgatttaaattctatattttattatttcatttcctcaaatatcttgccaaccacctcacgccgccttgagccaacccccctgaaaatggtatggttgcttgttttccacaatttctatttatttaagtaaaaacacatagaaaaactacaagcaaggggatttacgcaatgcgtatcattctgctgggcgctccgggcgcaggtaaaggtactcaggctcaattcatcatggagaaatacggcattccgcaaatctctactggtgacatgttgcgcgccgctgtaaaagcaggttctgagttaggtctgaaagcaaaagaaattatggatgcgggcaagttggtgactgatgagttagttatcgcattagtcaaagaacgtatcacacaggaagattgccgcgatggttttctgttagacgggttcccgcgtaccattcctcaggcagatgccatgaaagaagccggtatcaaagttgattatgtgctggagtttgatgttccagacgagctgattgttgagcgcattgtcggccgtcgggtacatgctgcttcaggccgtgtttatcacgttaaattcaacccacctaaagttgaagataaagatgatgttaccggtgaagagctgactatccgtaaagatgatcaggaagcgactgtccgtaagcgtcttatcgaatatcatcaacaaactgcaccattggtttcttactatcataaagaagcggatgcaggtaatacgcaatattttaaactggacggaacccgtaatgtagcagaagtcagtgctgaactggcgactatactcggttaattctggatggccttatagctaaggcggtttaaggccgccttagctatttcaagtaataagggcgtagtacctacaaaaggagatttggcatgatgcaaagcaaacccggcgtattaatggttaatttggggaca

SEQ ID NO: 86325 - protein, 214 aa, Yersinia pestis
MRIILLGAPGAGKGTQAQFIMEKYGIPQISTGDMLRAAVKAGSELGLKAKEIMDAGKLVTDELVIALVKERITQEDCRDGFLLDGFPRTIPQADAMKEAGIKVDYVLEFDVPDELIVERIVGRRVHAASGRVYHVKFNPPKVEDKDDVTGEELTIRKDDQEATVRKRLIEYHQQTAPLVSYYHKEADAGNTQYFKLDGTRNVAEVSAELATILG

SEQ ID NO: 86326 - DNA, 576 bp, Schizosaccharomyces pombe
  CDS (1)..(576)
atgtataacgtgatttttgttttaggcggtcctggtgctggaaagggtacacaatgcgatcgtttggccgagaaatttgacaaattcgtacatattagcgctggagattgtctacgcgaagagcaaaatcgtcctggcagcaaatacggaaaccttattaaagaatatatcaaagatggtaaaattgtgcccatggaaataactatatcccttttagagactaaaatgaaggaatgccatgataaaggaattgacaagttcttgattgacggtttcccccgtgagatggatcaatgcgaaggttttgaaaagtcggtctgccccgctaagtttgctctttatttccgttgtggtcaggaaaccatgttgaagcgtcttattcatcgtggtaagactagtggccgttctgatgacaacattgagtcgatcaagaaacgctttgttacatatactaaagccagcatgcctgtcgtcgaatatctgaaatcacaaaatcgtctgataaccatcgatgccgagcaagatcccgatgcggtttttgaagataccgtaaaggcacttcaaccttacctgtag

SEQ ID NO: 86327 - protein, 191 aa, Schizosaccharomyces pombe [sequence omitted]

SEQ ID NO: 86328 - DNA, 615 bp, Saccharomyces cerevisiae
  CDS (1)..(615)
atgacagctgccactacatcacagccagctttctcgcctgaccaagtttccgtgatcttcgttctaggaggacccggtgcaggcaagggtactcagtgtgaaaaactagttaaggactattcatttgtccatttgtcagccggagaccttctacgtgctgagcagggcagagcaggttcccaatatggggaattgatcaagaactgcatcaaagagggccagattgtccctcaagagattactttggcgcttttacgcaacgctatttccgataacgtcaaggcgaacaagcataagttcttaattgacggatttcctaggaagatggatcaagccatttcctttgaaagagacatcgttgaaagcaaattcatcctgttctttgactgccctgaagatatcatgttagagagactattggagcgtggcaagaccagtggtagaagcgatgacaacattgagtccattaagaagagatttaacactttcaaggagactagtatgcccgtcatcgagtactttgaaaccaaatcgaaagtcgtccgtgttcgttgcgacagatccgtcgaagatgtgtacaaagacgtccaagacgctatccgtgatagcttatag

SEQ ID NO: 86329 - protein, 204 aa, Saccharomyces cerevisiae
MTAATTSQPAFSPDQVSVIFVLGGPGAGKGTQCEKLVKDYSFVHLSAGDLLRAEQGRAGSQYGELIKNCIKEGQIVPQEITLALLRNAISDNVKANKHKFLIDGFPRKMDQAISFERDIVESKFILFFDCPEDIMLERLLERGKTSGRSDDNIESIKKRFNTFKETSMPVIEYFETKSKVVRVRCDRSVEDVYKDVQDAIRDSL

SEQ ID NO: 86330 - DNA, 669 bp, Oryza sativa
  CDS (1)..(669)
atgggttcggttgtggatgctccaacagttgtggctggacaggaggaggtcactgacaacatgttgggtgacaagaaagttacagttgtatttgttctaggtggtcctgggagtggaaagggcacacagtgtgccaacattgttgaacactttggattcattcatcttagtgctggagaccttttgcgtgcagagatcaaatctggctctgagaacggaactatgatcgagaacatgataaaggagggaaagattgttccatctgaggtaactataaaactcttgcaggaagccatgattaaaagtggaaatgataagttccttattgatggatttccaaggaacgaagagaatcgtgctgcatttgagaacgttacaaaaataactcctgcgtttgtgctattcttcgattgttctgaggaagagatggaaagacgtcttttgggacgcaatcagggaagagttgacgataacattgagactatcaggaaaaggttcaaagtttttgttgaatccagtttgcctgtcattgagtactataatgcaaaggacaaggttaaaaagattgatgctgcaaaaccaattcctgaggtgtttgaagatgtcaaagccattttcgctccatatgcgccaaatgctttgctctcaggtgtgactacaaatctgtga

SEQ ID NO: 86331 - protein, 222 aa, Oryza sativa
MGSVVDAPTVVAGQEEVTDNMLGDKKVTVVFVLGGPGSGKGTQCANIVEHFGFIHLSAGDLLRAEIKSGSENGTMIENMIKEGKIVPSEVTIKLLQEAMIKSGNDKFLIDGFPRNEENRAAFENVTKITPAFVLFFDCSEEEMERRLLGRNQGRVDDNIETIRKRFKVFVESSLPVIEYYNAKDKVKKIDAAKPIPEVFEDVKAIFAPYAPNALLSGVTTNL

SEQ ID NO: 86332 - DNA, 687 bp, Oryza sativa
  CDS (1)..(687)
atgtggcggcggcaagtgggtgcccttcttctccggcaccgatccacgccttcctccaccctccgccaccatctccccctccccgtccccgaccagggagaggggggtgatggtgccaccaagcccttcattgctttcgtcttagggggtcccgggagtgggaaaggtacgcaatgtgtccggatcgcttctgattttgggtttgctcatttgagtgctggtgaccttctacggagtgaaatttcaactgggcgggagttgatcttaaatataataaaagaagggaagattgttccatcagagattactgttgaactgattagaaaagctatggaatcgagcgatgctaaaagggttcttattgatggtttcccaaggtgtgaggaaaacaggatcgcctttgaaagaataactggaacagaaccagaccttgtgattttctttgactgccctgaggatgagatggttaaacgtttactaggccgtaaccagggacgagtggatgataacattgaaacaatcaagaagcgcctaaaggtgtttgagagtctaaatattcctgttgttgactactacacttcaagaggaaaggttcacaagataaatgcaaccggaactgaagaagaaatctttggagcagtccacaagctgttttcctccttaagctgcagcccggcgatagattaa

SEQ ID NO: 86333 - protein, 228 aa, Oryza sativa
MWRRQVGALLLRHRSTPSSTLRHHLPLPVPDQGEGGDGATKPFIAFVLGGPGSGKGTQCVRIASDFGFAHLSAGDLLRSEISTGRELILNIIKEGKIVPSEITVELIRKAMESSDAKRVLIDGFPRCEENRIAFERITGTEPDLVIFFDCPEDEMVKRLLGRNQGRVDDNIETIKKRLKVFESLNIPVVDYYTSRGKVHKINATGTEEEIFGAVHKLFSSLSCSPAID

SEQ ID NO: 86334 - DNA, 636 bp, Oryza sativa
  CDS (1)..(636)
atgggttcagttgtggatgctccagtggttgtggagggggttgctgagaacatgttgggtgataagaaagttacagttgtatttgttctaggtggtcctggaagtggaaaaggcacacagtgtgccaacattgtggaacactttggattcacccacttaagtgctggagaccttttgcgtgcagagataaaatctggttctgagaatggaactatgattgagaacatgataaaggaggggaagattgttccgtcagaggttactataaagctcttgcaagatgccatgattaaaaatgagaatgataagtttctaatcgatgggttcccaaggaatgaagagaatcgtgctgccttcgagaatgttacaaaaatttcccctgcatttgtgctattttttgactgttctgaagaagagatggaaagacgtcttttgggacgcaatcagggtagagttgatgacaacattgagaccattaggaaaagattcaaagtttttgttgaatcaagtttgcctgtaattgagcactacaatgcgaagaacaaagttaaaaagattgatgctgcaaaaccaatttctgaagtgtttgaagatgtcaaagccatttttgccccatatgctaaggtaatctactga

SEQ ID NO: 86335 - protein, 211 aa, Oryza sativa
MGSVVDAPVVVEGVAENMLGDKKVTVVFVLGGPGSGKGTQCANIVEHFGFTHLSAGDLLRAEIKSGSENGTMIENMIKEGKIVPSEVTIKLLQDAMIKNENDKFLIDGFPRNEENRAAFENVTKISPAFVLFFDCSEEEMERRLLGRNQGRVDDNIETIRKRFKVFVESSLPVIEHYNAKNKVKKIDAAKPISEVFEDVKAIFAPYAKVIY

SEQ ID NO: 86336 - DNA, 900 bp, Oryza sativa
  CDS (1)..(900)
atggccggcgtcctgcggctcgccggcgccgcgcggtccccactggcccgcgcgctggcccccgccgcacggaggatgggggcgtcggcggcggcggctatggaggacgaggcgtactggaccgagtgggaggaggaggaggagaaggcgagggcgcgggagtccgcgcccgtcgcggagatgtgccccaccggcggcggcggcggtggcccgcagtgggtggtgatggggaggcccgggccgcagaagcacgcccacgccgcccgcctcgccgaggtgctcgccgtgccgtacatctccatggggacgctcgtcaggcaggagctcagcccggcgtcctctctctacaagaagattgcaaattcggtgaatgaagggaaacttgtgcccgaggacattatatttggattgctgacgaagcgtcttgaggagggatacaataagggtgaaactggattcatccttgatgggatcccacgcactcatatgcaggcggagattctcgatgagattgtggatatcgacttggttctgaacttcaaatgtgctgataactgttttatgaagaggcggtttggtggtgacatctgcccccactgtggacagctttttgattttagcaaaactgcgtcttcagaccgtaatccgagccttgggagctgtacatggccttctcaggtgcaacatgctgcagttttaggtctggaggactcgagaatggagaagatgcgtgcttatgctgaacagaccaagctactggaagactactacaggaaacagagaaaacttatggaattgaagacatcagctcgccctggagaaacatggcagggacttgtcgctgccctacatctccagcatctggatgcatccccgacgccgcacaaactcactatgtaa

SEQ ID NO: 86337 - protein, 299 aa, Oryza sativa
MAGVLRLAGAARSPLARALAPAARRMGASAAAAMEDEAYWTEWEEEEEKARARESAPVAEMCPTGGGGGGPQWVVMGRPGPQKHAHAARLAEVLAVPYISMGTLVRQELSPASSLYKKIANSVNEGKLVPEDIIFGLLTKRLEEGYNKGETGFILDGIPRTHMQAEILDEIVDIDLVLNFKCADNCFMKRRFGGDICPHCGQLFDFSKTASSDRNPSLGSCTWPSQVQHAAVLGLEDSRMEKMRAYAEQTKLLEDYYRKQRKLMELKTSARPGETWQGLVAALHLQHLDASPTPHKLTM

SEQ ID NO: 86338 - DNA, 1620 bp, Oryza sativa
  CDS (1)..(1620)
atgggtcttcgttgccgggcatcggagggagcggcggcggcggcgcggaaggaggccccgctcaaggtgatgatctcgggtgcacccgcgtctgggaagggaacgcaatgccgcatgatcgtcgagaagtatggtttggttcacatatcaactggggatcttctgcgggccgaagtatcttctggcaccgaaataggcaagaaagcaaaagaatatatggacaatggtatgctagtcccggatcaagttgtgacagatatggtggtatcacgactatcacaacctgatgttagagaaagaggatggcttctcgatggttacccgagaagttatgcccaggcacaaagtctcgaaagtatgaaaatacgaccagatatattcattgtgctggaagttcctgatgatattctaatcgacagatgtgttggaagaaggttggatcctgagactggcaaaatttaccacataaagaacttccctccggagaatgatgaagtttctgctcgtcttgttacacgctctgatgatacatttgagaaggttaaatcacgtcttgatacttacaaacaaaattctgaagctgttatcccaacatactcagatttgctcaaccagattgatggaaatcgacaagtggaagtcgtttttaatgaaatagattcactgttacagaagatctgtgagaatgcttcatttaacatgttggccaaaacaaatggaaaaccacaagattctaaggatacaacagcctcaaaaaatgagtttcgtgggattccaacaagattaaataacattccacattccagggaaatcaggaaatacttttacaatgatgtactagtagccaccagacatgctgttgaagacaaaaaaactcggttgcagatagatatcaacattcctgaacttaaccctgaaatggatgtttatcgcataggaaccctcatggaacttgtgcgagagctttctctttcctttgctgatgatggaaagcgtgtgaaggtttgcgttcaaggctccatgggacaaggtgcatttgctggtattccacttcagcttgctggaaccagaaaaattttggaaatcatggactggggtgaatatggggccaagggtaccttcattaattttggagcagtaggtgctagtgaggttgataaagaagatgacatgttcatcctcattgctccccaaaatgctgttggaaactgtataattgatgacatgaaagcaatgactgatgctgctggtgacagacctgtgattcttgtaaatcctcgcttaaaggatatgcctggatcaagtggtgtaatgcaaacaatgggaagagacatgaggctaaaatatgctgcatcttttgagacttgttattccttccggcttctcttctatgctggctcattttatcctattatgggagctctaaggatggcttatcctaataaatatgagatttatcgaagggttgatgaacccaatggacaagaacgatatgttctcttagaggaatttgtggagaagccaactcctgatgaaatcaccaatgcattcagaccacgtaaaaacgaaaatgaaaagtcagcgtctggattctggggttttttgagtggtatattatga

SEQ ID NO: 86339 - protein, 539 aa, Oryza sativa
MGLRCRASEGAAAAARKEAPLKVMISGAPASGKGTQCRMIVEKYGLVHISTGDLLRAEVSSGTEIGKKAKEYMDNGMLVPDQVVTDMVVSRLSQPDVRERGWLLDGYPRSYAQAQSLESMKIRPDIFIVLEVPDDILIDRCVGRRLDPETGKIYHIKNFPPENDEVSARLVTRSDDTFEKVKSRLDTYKQNSEAVIPTYSDLLNQIDGNRQVEVVFNEIDSLLQKICENASFNMLAKTNGKPQDSKDTTASKNEFRGIPTRLNNIPHSREIRKYFYNDVLVATRHAVEDKKTRLQIDINIPELNPEMDVYRIGTLMELVRELSLSFADDGKRVKVCVQGSMGQGAFAGIPLQLAGTRKILEIMDWGEYGAKGTFINFGAVGASEVDKEDDMFILIAPQNAVGNCIIDDMKAMTDAAGDRPVILVNPRLKDMPGSSGVMQTMGRDMRLKYAASFETCYSFRLLFYAGSFYPIMGALRMAYPNKYEIYRRVDEPNGQERYVLLEEFVEKPTPDEITNAFRPRKNENEKSASGFWGFLSGIL

SEQ ID NO: 86340 - DNA, 732 bp, Oryza sativa
  CDS (1)..(732)
atgtggcggcggcaagtgggtgcccttcttctccggcaccgatccacgccttcctccaccctccgccaccatctccccctccccgtccccgaccagagcccacctctcgcttccaatcttctgctccgcctcttcacttctcaatctggagaggggggtgatggtgccaccaagcccttcattgctttcgtcttagggggtcccgggagtgggaaaggtacgcaatgtgtccggatcgcttctgattttgggtttgctcatttgagtgctggtgaccttctacggagtgaaatttcaactggcagtgagaaaggggagttgatcttaaatataataaaagaagggaagattgttccatcagagattactgttgaactgattagaaaagctatggaatcgagcgatgctaaaagggttcttattgatggtttcccaaggtgtgaggaaaacaggatcgcctttgaaagaataactggaacagaaccagaccttgtgattttctttgactgccctgaggatgagatggttaaacgtttactaggccgtaaccagggacgagtggatgataacattgaaacaatcaagaagcgcctaaaggtgtttgagagtctaaatattcctgttgttgactactacacttcaagaggaaaggttcacaagataaatgcaaccggaactgaagaagaaatctttggagcagtccacaagctgttttcctccttaaggttttga

SEQ ID NO: 86341 - protein, 243 aa, Oryza sativa
MWRRQVGALLLRHRSTPSSTLRHHLPLPVPDQSPPLASNLLLRLFTSQSGEGGDGATKPFIAFVLGGPGSGKGTQCVRIASDFGFAHLSAGDLLRSEISTGSEKGELILNIIKEGKIVPSEITVELIRKAMESSDAKRVLIDGFPRCEENRIAFERITGTEPDLVIFFDCPEDEMVKRLLGRNQGRVDDNIETIKKRLKVFESLNIPVVDYYTSRGKVHKINATGTEEEIFGAVHKLFSSLRF

SEQ ID NO: 86342 - DNA, 909 bp, Brassica napus
  CDS (1)..(909)
atggcggttgttcaccgtctcttcaggctgttctcgccgtttacgccggcaaagaataatctttcttctttcttgatcaggtctctgtcttcttcttctccccatgggccatcgctggaccctgagatcgatctcaaagaagctgcggcggagctggaaaagtcctcctctccttcttcttctccgtctccgtccaaaggaagaaactttcactgggtgtttcttggatgtcccggtgttggtaaaggcacctacgcctctcgtctctccaccctcctcggcgttcctcatatcgctaccggtgatctcgtacgcgaagagctttcctcctctggtctcctctcctctcagctaaaggagcttgttaaccatggcaaattggttcctgatgaattcattataagcttgttatcaaagcgtcttgaagctggcaaggagaagggcgaatctggatacattcttgatgggtttccaagaaccgtgacacaagcagaaatactggagggagtaattaatgttgatctggtgatcaacctgaagctaaaggaagaggcgttactagcgaaatgtttagggagaaggatatgcagcgagtgtggtgcaaactataacgttgcatgcattgatatcaaaggtggtgatggtgatggtgatgatagaatgtatatgcctccgcttcttcctccacctaagtgtgaatcaaagcttattacccgagctgatgacactgaagaagttgtcaaggaaagactccgggtttacaacaaaatgactcaaccagtggaggagttctacaggaagcgtgggaagctgttggagtttgaattaccaggtggaatcccacagtcatggccgaaactacttagagcgttacaccttgaggatgataaacagtctgcaatagcctag

SEQ ID NO: 86343 - protein, 302 aa, Brassica napus
MAVVHRLFRLFSPFTPAKNNLSSFLIRSLSSSSPHGPSLDPEIDLKEAAAELEKSSSPSSSPSPSKGRNFHWVFLGCPGVGKGTYASRLSTLLGVPHIATGDLVREELSSSGLLSSQLKELVNHGKLVPDEFIISLLSKRLEAGKEKGESGYILDGFPRTVTQAEILEGVINVDLVINLKLKEEALLAKCLGRRICSECGANYNVACIDIKGGDGDGDDRMYMPPLLPPPKCESKLITRADDTEEVVKERLRVYNKMTQPVEEFYRKRGKLLEFELPGGIPQSWPKLLRALHLEDDKQSAIA

SEQ ID NO: 86344 - DNA, 630 bp, Brassica napus
  CDS (1)..(630)
atgggatctgttgttgatgctgcaaacaaggaggtaaatggaacctcaagtgcaaagaaaccaactgttatttttgtcctgggtggtccaggcagtgggaaaggtacacagtgtgcctatatcgttgagcattttggttacacacatctcagtgctggagaccttctcagggctgagattaaatcaggttctgaaaacggaacaatgatccagaacatgattaaagaagggaagattgtgccttctgaggtgacaatcaagcttctccagaaagcaattcaggagaacgggaatgacaagttcctcattgatggtttccctcggaatgaggagaaccgagcagcatttgaaaaagttactgagattgaaccaaagtttgtcttgttctttgattgtcctgaggaagagatggagagacgcttattaggacgtaaccaggggagagaggatgacaatattgagactataaggaagcgtttcaaggtgtttcttgagtctagcttaccagtgattcagtactatgaagctaaggggaaagttaggaagattcatgccgcaaagcccattgatgatgtatttcaggaggtgaaggcagtgttttctcctgaagctgagaaggttgcagcttag

SEQ ID NO: 86345 - protein, 209 aa, Brassica napus
MGSVVDAANKEVNGTSSAKKPTVIFVLGGPGSGKGTQCAYIVEHFGYTHLSAGDLLRAEIKSGSENGTMIQNMIKEGKIVPSEVTIKLLQKAIQENGNDKFLIDGFPRNEENRAAFEKVTEIEPKFVLFFDCPEEEMERRLLGRNQGREDDNIETIRKRFKVFLESSLPVIQYYEAKGKVRKIHAAKPIDDVFQEVKAVFSPEAEKVAA

SEQ ID NO: 86346 - DNA, 723 bp, Brassica napus
  CDS (1)..(723)
atggcggatttggaagatgttcagaccgtggatctcatgtccgagctcctccgccgtctcaaatgttcacaaaagcccgacaaacgcctcatcttcataggacctccagggtcagggaaaggtacacagtctccaatagtgaaggatgagttttgcttgtgtcatttatccactggggacatgttaagagctgctgttgcttccaagacccctcttggtctcaaggccaaagaagctatggacaagggagcgcttgttactgatgaactggttgttggtataattgatgaagccatgaacaagccaaaatgtcagaaaggttttatccttgatgggtttcccaggactgttgctcaggcagagaagctagacgagatgcttaagaagcgaggaactggaatcgacaaagttctcaactttgctattgatgactcagtcctggaggaaagaataaccggtagatggatccacccgtcgagtggcaggagttaccacaccaaattcgcgcctcccaaaactcctggcgttgatgatattaccggagagcctctgatccaacgcaaagatgataacgctgaggttctaaggtcaagacttgctgctttccacactcaaactgaaccggtgattgactactacgcgaagaaggctgttcttacaaacatccatgctgagaaggctccacaagaagttacgtcagaggttcagaaagcattgtcctga

SEQ ID NO: 86347 - protein, 240 aa, Brassica napus
MADLEDVQTVDLMSELLRRLKCSQKPDKRLIFIGPPGSGKGTQSPIVKDEFCLCHLSTGDMLRAAVASKTPLGLKAKEAMDKGALVTDELVVGIIDEAMNKPKCQKGFILDGFPRTVAQAEKLDEMLKKRGTGIDKVLNFAIDDSVLEERITGRWIHPSSGRSYHTKFAPPKTPGVDDITGEPLIQRKDDNAEVLRSRLAAFHTQTEPVIDYYAKKAVLTNIHAEKAPQEVTSEVQKALS

SEQ ID NO: 86348 - DNA, 807 bp, Brassica napus
  CDS (1)..(807)
atggcatggctgagccgcgtttcgccgctttcaaggctcgttgcgacgcgacgatctttcggatcatcggccgcacttgcgtttgactacgactccgacgaggagtacctgtacggtggcgatcggcgtttggcggaggagccgaggctcggtttggagaggtccgggagggagaggggagtgcagtgggtggtgatgggcgcgccgggagcctggaggcacgtcttcgcagagaggctctcaagccttcttgaagttgctcacatttccatgggatcgctcgtccgtcaagagctcagccctacatcttctctctacaagcagattgctagtgctgtaaatgaaggaaagcatgttcccaagggtcttgtgtttgctttgctatcaaagcgccttgaagaaggctatgcacggggagaatctggtttcattcttgatggcattccccgcactcttattcaagccgaaactcttgatcaaatcgctcagattgacctcgtcctgaatcttaaatgctctgaggagcaccgatctgctcttagtgaaacacctctacctccccaggagttcctcggctcttctatcttacactctgctgttgcaatcaaatcccggaggagggagagcctgagtgtctacgcagaggaggaggtgaagcccctggaagattactacaggaagcagaggaaacttctggactttcatgtcggtggtgccacatcagcagaaacatggcagggcctattgtcagccttgcatctgaagcaagcgaagaatttggcgacttcacagaagctgactctgtga

SEQ ID NO: 86349 - protein, 268 aa, Brassica napus
MAWLSRVSPLSRLVATRRSFGSSAALAFDYDSDEEYLYGGDRRLAEEPRLGLERSGRERGVQWVVMGAPGAWRHVFAERLSSLLEVAHISMGSLVRQELSPTSSLYKQIASAVNEGKHVPKGLVFALLSKRLEEGYARGESGFILDGIPRTLIQAETLDQIAQIDLVLNLKCSEEHRSALSETPLPPQEFLGSSILHSAVAIKSRRRESLSVYAEEEVKPLEDYYRKQRKLLDFHVGGATSAETWQGLLSALHLKQAKNLATSQKLTL

SEQ ID NO: 86350 - DNA, 630 bp, Brassica napus
  CDS (1)..(630)
atgggatccattgctgatgctgcaaacaaggaggttaatggaaccgcaagtgagaagagacccgctgttatttttgtccttggtggtccaggaagtgggaaaggtacacagtgtgcctatattgttgaccattttggttacacacatctgagtgctggagaccttctcagggctgaaattaaatcaggttctgaaaatgggactatgatccagaatatgattaaagaagggaagattgtaccttctgaggttacaatcaagcttcttcagaaagcaattcaggagaacgggaacgacaagttcctcattgatggcttccctcgcaatgaggagaaccgaacagcctttgaaaaagttactgggattgaacctaagtttgtcttgttctttgattgtcctgaggaagagatggagaggcgcctcttgggaagaaaccaggggagagaggatgacaatatagagactataaggaagcgtttcaaggtgtttcttgaatctagcttgccagtgattcagtactacgaagctaagggcaaagttcgcaagattcatgccgcaaagcctattgaagatgtgtttcaggaggtgaaggcagtcttttctcctgaagctgagaaggttgaagcctag

SEQ ID NO: 86351 - protein, 209 aa, Brassica napus
MGSIADAANKEVNGTASEKRPAVIFVLGGPGSGKGTQCAYIVDHFGYTHLSAGDLLRAEIKSGSENGTMIQNMIKEGKIVPSEVTIKLLQKAIQENGNDKFLIDGFPRNEENRTAFEKVTGIEPKFVLFFDCPEEEMERRLLGRNQGREDDNIETIRKRFKVFLESSLPVIQYYEAKGKVRKIHAAKPIEDVFQEVKAVFSPEAEKVEA

SEQ ID NO: 86352 - DNA, 846 bp, Brassica napus
  CDS (1)..(846)
atggcgagagtactgcgtgtggcgagatcctcctcctccctcttcagcttcggaagcagatcttattcagccgaagctagccacgtgtcctctccccctcctccgtttcttggagctcgcagagacgttaccaaggagagaaacgtgcagtgggtgttccccggttgtcccggtgtcgggaaggggacttacgccagcagactctcgagtctcctcggtgttcctcacatcgccaccggagatctcgtccgtgatgcgctagcttcttccggacctctctcccgacagctatcagagattgtaaaccaggggaagcttgtttctgatgagatcatagtgaacttattatcaaagagacttgaagctggtgaagccaagggcgaatcaggtttcattcttgatggctttcctcgtaccatgagacaagctgaaatattaggagatgtcactgacatcgatctagtggtgaacttaaagctacctgaggaggttttggttgacaaatgcttagggaggagaacgtgtaatcaatgcggtaaaggtttcaatatagctcacatcaacttaaagggtgagaatgggaaaccaggaatcagcatggatccacttctccctccacctcagtgtatgtcaaagctcatcactcgtgctgatgatactgaggaggttgtgaaagctaggctccgtatttacaatgaaaccagccagcctcttgaagagtactaccgtatcaagggaaagctgatggagtttgacttacctggaggcatccctgagtcttggccaaggctgttagaagctttaaggcttgatgattacgaggagaagcaatctgccgcggcgtag

SEQ ID NO: 86353 - protein, 281 aa, Brassica napus
MARVLRVARSSSSLFSFGSRSYSAEASHVSSPPPPFLGARRDVTKERNVQWVFPGCPGVGKGTYASRLSSLLGVPHIATGDLVRDALASSGPLSRQLSEIVNQGKLVSDEIIVNLLSKRLEAGEAKGESGFILDGFPRTMRQAEILGDVTDIDLVVNLKLPEEVLVDKCLGRRTCNQCGKGFNIAHINLKGENGKPGISMDPLLPPPQCMSKLITRADDTEEVVKARLRIYNETSQPLEEYYRIKGKLMEFDLPGGIPESWPRLLEALRLDDYEEKQSAAA

SEQ ID NO: 86354 - DNA, 624 bp, Glycine max
  CDS (1)..(624)
atgggaactgttgaagctgcaaacaaggatgcaaatggaagcctcctagagaaaaatcctacagttgtttttgtgttaggtggcccaggcagtggaaagggtacccagtgtgcaaatattgtcgaaaattttgggtatactcacctcagtgctggtgatcttctgcgagcagaaatcaaatctggttctgaaaatggcacaatgattcagaatatgattaaagaaggaaaaattgttccctctgaggtaacaattaagctcttacaaaaagcaatgcaggaaagtggcaatgacaaatttcttattgatggttttccccgcaatgaggaaaaccgtgcagcatttgaaaaagtgacaggaatagaaccagcatttgtcctattttttgagtgccctgaggaagagatggagaggcgactacttagtaggaaccagggtagagaagatgacaatattgagacaataaggaagcgatttaaggttttcttggagtctagtcttcccgtgattaattattatgatgcaaagggaaaagttcgcaagattgatgctgcaaggcctatcgaagaggtatttgagacagtcaaaggaatttttggtccaaagaatgagaaggctgattga

SEQ ID NO: 86355 - protein, 207 aa, Glycine max
MGTVEAANKDANGSLLEKNPTVVFVLGGPGSGKGTQCANIVENFGYTHLSAGDLLRAEIKSGSENGTMIQNMIKEGKIVPSEVTIKLLQKAMQESGNDKFLIDGFPRNEENRAAFEKVTGIEPAFVLFFECPEEEMERRLLSRNQGREDDNIETIRKRFKVFLESSLPVINYYDAKGKVRKIDAARPIEEVFETVKGIFGPKNEKAD

SEQ ID NO: 86356 - DNA, 726 bp, Triticum aestivum
  CDS (1)..(726)
atggcggcgaacctagaggacgtgccgtcggtggatctcatcaccgaggtgctccgccgcgccaagtgcagctccaagcccgacaagcgcatcatcctcatcggtccacctggctctggaaagggtacgcagtcgccccttattaaggatgaatattgcttgtgccatttagccactggtgatatgctgagggctgctgttgctgctaagactcctctggggatcaaggctaaagaagctatgaacaagggagagcttgtttcagatgacttggttgttgggattatcgatgaagccatgaagaaaccctcttgccagaaaggttttatccttgatggcttccctagaactgttgttcaagcacaaaagctcgatgacatgctggcaaagcaaggtgctaaagttgacaaggttttaaacttcgcaattgatgatgcaatattggaagaacgaattactggccgctggatacacccatcgagtggcagatcttaccatacaaagtttgctcctccgaagactcctggagttgatgatgttaccggagagcccttgattcaaaggaaagatgacacagctgcggttttaaagtcaaggcttgaggctttccatatgcagaccgaacctgtgattgactactactccaagaatggcttggtggcaaatcttcatgcagagaaaccaccaaaggaagtgaccgttgaggtgcagaaagcccttcaatga

SEQ ID NO: 86357 - protein, 241 aa, Triticum aestivum
MAANLEDVPSVDLITEVLRRAKCSSKPDKRIILIGPPGSGKGTQSPLIKDEYCLCHLATGDMLRAAVAAKTPLGIKAKEAMNKGELVSDDLVVGIIDEAMKKPSCQKGFILDGFPRTVVQAQKLDDMLAKQGAKVDKVLNFAIDDAILEERITGRWIHPSSGRSYHTKFAPPKTPGVDDVTGEPLIQRKDDTAAVLKSRLEAFHMQTEPVIDYYSKNGLVANLHAEKPPKEVTVEVQKALQ

SEQ ID NO: 86358 - DNA, 858 bp, Triticum aestivum
  CDS (1)..(858)
atggcttcctccacggccgctgcagccgcagtcacatctctcttaccgccgcccgtgggtgccgagaggccggttccccagggccgcctcctcttccgcgcctcccgcgcccgctccagccccctacggctcaaccccgtccgacaccacgggctctcgccggcgcctagagcggccaaggctgtggaggcagcgaaggctgaccctctaaatgtcatgatagcgggagctccggcgtctgggaagggcacgcagtgcgagctaatcaaggccaaatatggtctggtgcacatttcagctggagatttgttaagggcagaaatcgccacaggcaccgacaatgggaagcaggccaaggagtttatggagaagggacagctggttcctgatgagatcgttgttaatatggtgaaggggcgtcttctgcaaccagatgctcaggaaaagggttggcttttggatggttacccgagaagttattcacaggcaatggcactggaaactcttggaatccggcctgacattttcattctattagatgttcccgatgaacttcttgttgaaagggtagttggcagacggctggatcctgaaactgggaaaatataccatctaaagtattctccacctgagaatgaagaaattgcatccaggcttacacaaagatttgatgatacagaagaaaaggttaagctgaggttgcagactcattatcaaaatatcgagtccttggtttcgatatatgaagatgttatagtcaaggtaaatggaaataccacggtggaagatgtattcggtgagatcgagaagctgctcacttccagccttgataagaaaacagaaatggtggctagctaa

SEQ ID NO: 86359 - protein, 285 aa, Triticum aestivum
MASSTAAAAAVTSLLPPPVGAERPVPQGRLLFRASRARSSPLRLNPVRHHGLSPAPRAAKAVEAAKADPLNVMIAGAPASGKGTQCELIKAKYGLVHISAGDLLRAEIATGTDNGKQAKEFMEKGQLVPDEIVVNMVKGRLLQPDAQEKGWLLDGYPRSYSQAMALETLGIRPDIFILLDVPDELLVERVVGRRLDPETGKIYHLKYSPPENEEIASRLTQRFDDTEEKVKLRLQTHYQNIESLVSIYEDVIVKVNGNTTVEDVFGEIEKLLTSSLDKKTEMVAS

SEQ ID NO: 86360 - DNA, 873 bp, Zea mays
  CDS (1)..(873)
atggcggctgtgcagcgcctcctccgggcagtcgcccccggtggctcggcagcggcggcggtcaggaggcgcatgacgtcgcttgcgccggagcaggcgccgtctgcagccgccgggttcccattcgcggcggagcagagggcaaggcggccggtggcggcggagaggaacgtgcagtgggtgttcctgggctgccccggcgtgggcaagggcacctacgcgagccgcctgtcgcgcctcctcggcgtgccgcacatcgcgacgggggatcttgttcgcgacgagctcacctccaccgggccacttgctacgcagcttgctgaaattgttaatcaggggaaattagtttctgatgaaattatcatcaatcttttgtccaaaaggcttaagaaaggagaagaccagggagaatcaggatttattcttgatggttttccccgtacagtaaaacaagcggaaattcttgatggtgttacagacattgatatggtggttaatctgaaactaagagaagatgttatagtagagaagtgccttggcagaaggatttgcggccaatgtggaaagaacttcaatttggcctgcattgatgttaagggtgaaaatggactcccaccaatctacatggcaccactgttgcccccaaacaactgcatgtcgaagcttattacccgagctgatgataccgaagaggtggtcagaaatcggcttcagatatataatgacatgagtcaacctgtggaaggtttctaccgagagcaggggaagctcttggaatttgacttgcctggtgggatccctgaatcttggccaaagctgctccaggttctaaacctcgaggaccaagaggagttgaggttggctgcagcgtag

SEQ ID NO: 86361 - protein, 290 aa, Zea mays
MAAVQRLLRAVAPGGSAAAAVRRRMTSLAPEQAPSAAAGFPFAAEQRARRPVAAERNVQWVFLGCPGVGKGTYASRLSRLLGVPHIATGDLVRDELTSTGPLATQLAEIVNQGKLVSDEIIINLLSKRLKKGEDQGESGFILDGFPRTVKQAEILDGVTDIDMVVNLKLREDVIVEKCLGRRICGQCGKNFNLACIDVKGENGLPPIYMAPLLPPNNCMSKLITRADDTEEVVRNRLQIYNDMSQPVEGFYREQGKLLEFDLPGGIPESWPKLLQVLNLEDQEELRLAAA

SEQ ID NO: 86362 - DNA, 639 bp, Zea mays
  CDS (1)..(639)
atgggcacagttgtggatgctccagcagttgtggctgaagaggtcactgagaacatgttgggtggtaagaaagttacagctgtatttgttctaggtggtcctggaagtggaaaaggcacacagtgtgccaacattgtggaacactttggattcacccatcttagtgctggagatcttttgcgtgcagagattaaatctggctctgagaatggaaccatgattgaaaacatgataaaggagggaaagattgttccatcagaggtgactataaagctgttgcaggaggcaatgataaaaaatgaaaatgacaaattcctgatcgacggatttccaaggaatgaggagaatcgtgcagcatttgagaatgttaccaaaatttctcctgcatttgtgctattctttgactgttctgagaaagagatggagaaacgtctcttggggcgcaatcagggaagagttgatgataacattgaaactatcaaaaaaaggttcaaaacctttgttgagtcaagtttgcctgtcattgagcattacaactcaagggacaaggttaaaaagattgatgctgcaaaaccaattcctgaggtgtttgaagacgtcaaaaccatttttgccccatatgctccaaaggctgaatag

SEQ ID NO: 86363 - protein, 212 aa, Zea mays
MGTVVDAPAVVAEEVTENMLGGKKVTAVFVLGGPGSGKGTQCANIVEHFGFTHLSAGDLLRAEIKSGSENGTMIENMIKEGKIVPSEVTIKLLQEAMIKNENDKFLIDGFPRNEENRAAFENVTKISPAFVLFFDCSEKEMEKRLLGRNQGRVDDNIETIKKRFKTFVESSLPVIEHYNSRDKVKKIDAAKPIPEVFEDVKTIFAPYAPKAE

SEQ ID NO: 86364 - DNA, 867 bp, Zea mays
  CDS (1)..(867)
atggcggggatgtctcgcgcgatccgcaacttcgccgccgcgtcccggcgaaccctgaccgctgcttcggggccggcgctgccgaaggaggcggcggcggcgggggcgcgggtgagggcggcggcgcccgggcgcatggggcgggatcaggaggacgggaggcgcgtgcagtgggtgttcctcgggtgccccggggtggggaagggcacctacgccagccgcctctcgcagctgctcggcgtcccgcacatcgccaccggcgacctcgtccgcgacgccctggccacccctggccccttctccaacaagcttgctgagattgtcaatcatggaaaactggtgtctgatgagatcatcataaatctgctgtcaagacgtctggaagagggagaggaaaagggtgaattggggttcatccttgatggctttcctcgaaccataggacaagcggagatacttgaaggagtcacagacattgatttggtgatcaatctcaaactccgagaagaagctctgcttgcgaaatgccttggcaggaggatgtgcagccagtgtggagggaacttcaatgtggcctccattgatattgagggtgaagatggtgggcctcgaatgtacatgcccccactgttgcctcctccacagtgtgaatcgaagctgattgctagagcagacgatactgaagaagtggtaaaagagcggctgcgtgtgtaccatgatttgactgaaccagtggaggagttctacagagcacgtgggaaactgctggagttcaatctgcctggtgggatacccgaatcatggccgaagttactgcaggccctgaacatagaagaccccgacaataagcgatctgcagcagcatga

SEQ ID NO: 86365 - protein, 288 aa, Zea mays
MAGMSRAIRNFAAASRRTLTAASGPALPKEAAAAGARVRAAAPGRMGRDQEDGRRVQWVFLGCPGVGKGTYASRLSQLLGVPHIATGDLVRDALATPGPFSNKLAEIVNHGKLVSDEIIINLLSRRLEEGEEKGELGFILDGFPRTIGQAEILEGVTDIDLVINLKLREEALLAKCLGRRMCSQCGGNFNVASIDIEGEDGGPRMYMPPLLPPPQCESKLIARADDTEEVVKERLRVYHDLTEPVEEFYRARGKLLEFNLPGGIPESWPKLLQALNIEDPDNKRSAAA

SEQ ID NO: 86366 - DNA, 741 bp, Linum usitatissimum
  CDS (1)..(741)
atggcgagcccttcggcggcgactttggaagatgttcccatcgttgatctcatgaccgagctcctccgccgcatgaagtgtgccaccaaacctgacaagcgcctcattcttatcggtcctcctggatcaggaaaaggtactcaatcaccgatcattaaggatgagttctgcttgtgtcacttggctacaggggatatgttgagagctgctgttgcaggcaaaactcctcttggaatcaaggctaaggaggcaatggaaaagggacaacttgtttctgatgatttggtagttggaattattgatgaagcaatcaagaagccctcttgtcaaaaaggcttcattcttgatgggtttccacggactgtggtccaggcgcagaagcttgatgagatgcttgagaagcaaggagtcaaagttgataaggtgctgaattttgccattgatgattctattttggaagagagaattactggtcgctggatccacccttcaagtggtagaacctatcacaccaaatttggacctcccaagaaccctggtgttgatgatgtaactggagaaccgttgatccagcggaaggatgacacagctgcagtcctaaagattaggctggaggcattccataagcagactgaacccgtgattaactattacaagcaaaagggtgctgttgcggatctccacgcagagaaagctcccaaagaggtcacagctgaggttgagaaagcgctttcctcctga

SEQ ID NO: 86367 - protein, 246 aa, Linum usitatissimum
MASPSAATLEDVPIVDLMTELLRRMKCATKPDKRLILIGPPGSGKGTQSPIIKDEFCLCHLATGDMLRAAVAGKTPLGIKAKEAMEKGQLVSDDLVVGIIDEAIKKPSCQKGFILDGFPRTVVQAQKLDEMLEKQGVKVDKVLNFAIDDSILEERITGRWIHPSSGRTYHTKFGPPKNPGVDDVTGEPLIQRKDDTAAVLKIRLEAFHKQTEPVINYYKQKGAVADLHAEKAPKEVTAEVEKALSS

SEQ ID NO: 86368 - DNA, 900 bp, Linum usitatissimum
  CDS (1)..(900)
atggctgcccttctcaaaatctccaaatccgcatcggcgccattgacatcagcctccagagctttcgcttccttcacctctcgtagtttctccgctctcaatacagagcccgaccttgccagatctcctcctccctcatccttcttatctcacaacaacaattccttgcctctccgtcaggaccccaaggatagaaacgtccagtgggtgttcctcggctgccccggcgtcgggaaaggaacttacgcctcccgcttgtccactctcctcggcgtccctcatatcgccaccggggatctcgtccgcgaagagctcaattcctccggtcccctcgcctcccagctcaaggagattgtgaatcaagggaaactggtttcagatgaaatcataataaacttgttatctaaacgtctggaaacaggggaagctaagggggaatctggattcattcttgatggctttcctcgtacaattaggcaagcggaaatattggaaggagtgacggaaatggatttggtggtgaacctaaagctgagggaagaagcgctgcttgcgaaatgtcttggtcgtaggatatgcagccagtgtggtggaaactacaatattgcctgcatagacatcaagggggagaatggagagcctagtatctacatggatcctcttcctcctccttcgcaatgtgccagcaaacttatccaacgccctgacgacactgaagaagtcgttaaggcgcggttaagaatttataacgagacgagtcggccggtggaggaattctaccgcagccgtgggaagttgttggagttcagtcttccaggtgggatcccggagtcgtggccgaagctgcttgaagcattgaatctcgatgatcaggaagtgaaacgctccgcagcagcttga

SEQ ID NO: 86369 - protein, 299 aa, Linum usitatissimum
MAALLKISKSASAPLTSASRAFASFTSRSFSALNTEPDLARSPPPSSFLSHNNNSLPLRQDPKDRNVQWVFLGCPGVGKGTYASRLSTLLGVPHIATGDLVREELNSSGPLASQLKEIVNQGKLVSDEIIINLLSKRLETGEAKGESGFILDGFPRTIRQAEILEGVTEMDLVVNLKLREEALLAKCLGRRICSQCGGNYNIACIDIKGENGEPSIYMDPLPPPSQCASKLIQRPDDTEEVVKARLRIYNETSRPVEEFYRSRGKLLEFSLPGGIPESWPKLLEALNLDDQEVKRSAAA

SEQ ID NO: 86370 - DNA, 867 bp, Linum usitatissimum
  CDS (1)..(867)
atggcagcaggagctacagcttgtgctagcagctcctacggcgcgaaattgagagcaaatttcagcaattgcggcggcagctccacggaaacggtgtcgtctctctgtttcaagccgttccggaagtccgatttctcgctccggatggcgaattcgagaaatagagctcaggttgttttagcttccggtaaggccgacccacctcttagaatcatgatttccggtgctccggcgtctggtaaaggtactcaatgtgagctgattactaaaaagtatgacttggtgcacattgctgctggagacttgctgcgagaagagattgcttcagggagcgagaatgggaagcgagccaaggaatacatggagaaagggcagttggttcctaatgaaatagttgtgatgatggttaaagaccggctgatgcagcccgactcgcaagaaaaaggatggctattagatggataccctcggagcatgtctcaagcaactgctctcaaagaatacggctttcagcctgatattttcatcgtcttggaagtcccagaagatatccttgttgaaagagttgttgggcgtagactggaccccgtaactggcaagatctaccacttgacttactccccgcccgagactgaagagatcgctgccaggctcactcaacgtttcgacgatactgaagagaaggtgaagttgcggttgaatacccataaccagaacgtggaggcagtgctttcgatgtacgaggatattactttgaagatcaaagggaatgtctccaaagaagaggtatttgcccaaatcgacagcaccctgtcaaaattgctcgagagtcaaaaggcagcaactcctgaatctcaagctgcttga

SEQ ID NO: 86371 - protein, 288 aa, Linum usitatissimum
MAAGATACASSSYGAKLRANFSNCGGSSTETVSSLCFKPFRKSDFSLRMANSRNRAQVVLASGKADPPLRIMISGAPASGKGTQCELITKKYDLVHIAAGDLLREEIASGSENGKRAKEYMEKGQLVPNEIVVMMVKDRLMQPDSQEKGWLLDGYPRSMSQATALKEYGFQPDIFIVLEVPEDILVERVVGRRLDPVTGKIYHLTYSPPETEEIAARLTQRFDDTEEKVKLRLNTHNQNVEAVLSMYEDITLKIKGNVSKEEVFAQIDSTLSKLLESQKAATPESQAA

SEQ ID NO: 86372 - DNA, 882 bp, Linum usitatissimum
  CDS (1)..(882)
atggctgctcttttcagaatctcagaatcttcatcggcgcctttgaaaactatctccagagctttcgcctcccggaatttctctgccttcaatcacgagcctgacctcacaaattccccgtcctctttatttcctcagaatccttctttgcctctgtgccaaaaccccaaggataagagcgtccagtgggtgttcctaggctgcccaggcgtcgggaaaggaacttatgcctctcgcttgtccactctcatcggcgttcctcacatcgccaccggcgatctcgtccgtgaagagctcaattcatacggtcctcttgcctcccagctgaaggagattgtcaatcaagggaaactggtttcagatgaaatcataattaacttactatccaagcgtcttgaagctggtgaagctaagggagaatccggtttcattcttgatggcttcccccgtacaattaggcaagcggaaatattggaaggagtcacagacattgatttggttgtgaacctgaagcttagggaagaagctctccttgcaaaatgccttggtcgtaggatttgcagccagtgtggtgggaactacaatgttgcctgcattgacatcaagggggacaatggtcaacctggaatctatatggctgctcttcctccacctccacaatgcgccgaaaaacttatccaacgagctgatgatactgaagaagtcgtcaaggcacggttacgcatttacaatgagatgagtaaacccttggaggggtattaccgcagtcgcgggaagctgttggagttcagtcttccaggggggataccagaatcatggccgaagctgcttgaagcattgaatcttgaagatcatgaagtggaacgctctgcggcagcttga

SEQ ID NO: 86373 - protein, 293 aa, Linum usitatissimum
MAALFRISESSSAPLKTISRAFASRNFSAFNHEPDLTNSPSSLFPQNPSLPLCQNPKDKSVQWVFLGCPGVGKGTYASRLSTLIGVPHIATGDLVREELNSYGPLASQLKEIVNQGKLVSDEIIINLLSKRLEAGEAKGESGFILDGFPRTIRQAEILEGVTDIDLVVNLKLREEALLAKCLGRRICSQCGGNYNVACIDIKGDNGQPGIYMAALPPPPQCAEKLIQRADDTEEVVKARLRIYNEMSKPLEGYYRSRGKLLEFSLPGGIPESWPKLLEALNLEDHEVERSAAA

SEQ ID NO: 86374 - DNA, 735 bp, Zea mays
  CDS (1)..(735)
atgtggcggaggcgagtgggcgccctcctccgatctccacgaacttcttcctcggcctcctcggcctgccagagccgccgccaccatcttctccccagcgaggaacctcttgctctcaaccgtcttgccaggctcttcacgtcccaggctggaagtgatggtggcgatacccagaagccctttattgcttttgtcttaggtggtcctgggagtggcaaaggaacacagtgcactaagattgcttcggattttggatttgcccatctgagcgctggtgatattctccgacatgaaatagcatctggcagtgagaaaggggagttgatcctagaaatcataaaggaagggaggattgttccgtctgagataactgtggaactcatcagaaaagcgatggaaatgaacaatgctaaaagggttcttattgatggcttcccaaggtgtgaggaaaacagaatcgccttcgaaaggattgttggaacagaaccagacattgtgattttctttgactgtcctgaggatgagatggttaaacgccttctaggccgtaaccaggggagagttgatgataacattgagacaatcaagaagcgtctaaaagtgtttgaaagtttgaacattcctgtcgttgactactactcttcaaggggaaaagttcacaagataaatgccacgggcactgcagatgaaatatttgaagcagtccgtaggctgttttcttccttaaggttatga

SEQ ID NO: 86375 - protein, 244 aa, Zea mays
MWRRRVGALLRSPRTSSSASSACQSRRHHLLPSEEPLALNRLARLFTSQAGSDGGDTQKPFIAFVLGGPGSGKGTQCTKIASDFGFAHLSAGDILRHEIASGSEKGELILEIIKEGRIVPSEITVELIRKAMEMNNAKRVLIDGFPRCEENRIAFERIVGTEPDIVIFFDCPEDEMVKRLLGRNQGRVDDNIETIKKRLKVFESLNIPVVDYYSSRGKVHKINATGTADEIFEAVRRLFSSLRL

SEQ ID NO: 86376 - DNA, 726 bp, Zea mays
  CDS (1)..(726)
atggcggcgaatctggaggacgtgccgtcactggatctgatgcacgagctgctccgccgcatgaagtgcagctccaagcccgacaagcgcctcatcctcatcggtccacctggctctggaaagggaactcagtctcctattatcaaggatgactattgcttgtgccatttagccactggtgatatgctgagggctgctgtggcggccaagacacctctaggtatcaaagctaaagaagctatgaataagggagagcttgtttcagatgatttggttgtgggcattattgatgaagctatgaagaaaccctcatgccagaaaggtttcattcttgatggctttcctagaactgtcactcaagcacagaagcttgatgagatgttggcaaagcaaggtgccaatgttgacaaagtcctgatctttgcaattgatgatgctgtattggaagaacggattactggtcgttggatccactcagccagtggtaggacttaccactcaaaatttgcacctccaaagtctccaggagttgatgatgtaactggagagccattgattcaaaggagagatgacaccgctgaggtcttgaagtcaaggcttgaagctttccacagacaaaccgaacctgtgattgattattactccaagaagggcttagtggtgaacctgcctgcagagaaaccaccgaaggaagtgactgctgaggtgcagaaagccctctcgtga

SEQ ID NO: 86377 - protein, 241 aa, Zea mays
MAANLEDVPSLDLMHELLRRMKCSSKPDKRLILIGPPGSGKGTQSPIIKDDYCLCHLATGDMLRAAVAAKTPLGIKAKEAMNKGELVSDDLVVGIIDEAMKKPSCQKGFILDGFPRTVTQAQKLDEMLAKQGANVDKVLIFAIDDAVLEERITGRWIHSASGRTYHSKFAPPKSPGVDDVTGEPLIQRRDDTAEVLKSRLEAFHRQTEPVIDYYSKKGLVVNLPAEKPPKEVTAEVQKALS

SEQ ID NO: 86378 - DNA, 630 bp, Linum usitatissimum
  CDS (1)..(630)
atgggatccgccgttgaagctggaaacacgataaaatatgcaagtttagctgagaagaagccgactgttgttttcgtgctgggtggcccgggtagtggaaagggtacacagtgcacaaacattgtggagcacttcggttatacccatctaagtgctggtgatcttcttcgagcagagatcaagtctggatctgacaatggaaccatgatccagaacatgattaaggagggaaagattgtgccctccgaggtgacaataaagctgctcgagaaggcaatactggataatggaaatgacaaattccttattgatggttttccccgtaatgaggaaaacagagctgcatttgaagctgttaccaaaatcgagccggaattcgtcctctttttcgattgtccagatgaagagatggaaaggaggattctgagtaggaaccagggaagagaagatgataacattgagacaataaggaagcgttttaaggtctttcttgagtctagccttccagtgattgagtactatgcttccaagggtaaagttaagaaggttgatgctgccaaatctgtcgaagaggttttcgaggcagtgaaggtcatttttaccccgaaagaggataaggctcatgtctaa

SEQ ID NO: 86379 - protein, 209 aa, Linum usitatissimum
MGSAVEAGNTIKYASLAEKKPTVVFVLGGPGSGKGTQCTNIVEHFGYTHLSAGDLLRAEIKSGSDNGTMIQNMIKEGKIVPSEVTIKLLEKAILDNGNDKFLIDGFPRNEENRAAFEAVTKIEPEFVLFFDCPDEEMERRILSRNQGREDDNIETIRKRFKVFLESSLPVIEYYASKGKVKKVDAAKSVEEVFEAVKVIFTPKEDKAHV

SEQ ID NO: 86380 - DNA, 726 bp, Hordeum vulgare
  CDS (1)..(726)
atggcggcgaacctcgaggacgtgccgtcggtggatctcatcaccgaggtgctccgccgcgccaagtgcagctccaagcccgacaagcgcatcatcctcgtcggtccacctggctctggaaagggtacacagtcaccccttattaaagatgaatattgcttgtgccatttagccactggtgatatgctgagggctgctgtcgctgctaagactcctctggggatcaaggctaaagaagcaatgaacaagggagagcttgtttcagatgacttggttgttgggattattgatgaagccatgaagaaaccttcatgccagaaaggttttatccttgatggcttccctagaactgttgttcaagcacaaaagctcgatgacatgctggcaaggcaaggcgctaaagttgacaaggttttgaactttgcaattgatgatgcaattttggaagaacgaattactggccgttggatacacccatcgagtggtagatcttaccatacgaagtttgctcctccgaagactcctggagttgatgatgttaccggagagcccttgattcaaaggaaagatgacacagctgcggtcttaaagtcaaggcttgaggctttccatatgcaaactgaacctgtgattgactactactccaagaatgggttggtggtaaatcttcatgcggagaaaccaccaaaggaagtgaccgttgaggtgcagaaagccctttcatga

SEQ ID NO: 86381 - protein, 241 aa, Hordeum vulgare
MAANLEDVPSVDLITEVLRRAKCSSKPDKRIILVGPPGSGKGTQSPLIKDEYCLCHLATGDMLRAAVAAKTPLGIKAKEAMNKGELVSDDLVVGIIDEAMKKPSCQKGFILDGFPRTVVQAQKLDDMLARQGAKVDKVLNFAIDDAILEERITGRWIHPSSGRSYHTKFAPPKTPGVDDVTGEPLIQRKDDTAAVLKSRLEAFHMQTEPVIDYYSKNGLVVNLHAEKPPKEVTVEVQKALS

SEQ ID NO: 86382 - DNA, 645 bp, Hordeum vulgare
  CDS (1)..(645)
atgagcacagccgtggatgcttcattacctgtcgccgagcaggaggatggtactgcgaatatgttgggtgggaagaaagttgcagttgtatttgttctaggtggtcctggaagtggaaaaggtacacaatgtagcaatattgtggagcatttcggatttacacatcttagtgctggagagctgttgcgctcagaaatcaagtctggttctgagaatggaaccatgattgacagcattataaaggaagggaaaattgttccatctgagataaccgtaaagctcttgcaagaagctatgataaaaagtgaaaataacaaattcctcattgatggatttccaaggaatcaagaaaaccgtctgtcatttgagaatgttataaaaatagctcctgagtttgtgctattctttgactgttctgaggaagagatggtaagacgtcttctgggtcgaaatcagggacgagctgacgataacattgagactatcagaaaaagattcagagtttttgaagaatcaagtttgcctgtagttcagtactatgactctaagggcaaggttaagaagattaatgctgcaaaaccaatccctgaggtgtttgaagatgtgaaaaccatttttcagccttatggctcaaaggccgcatag

SEQ ID NO: 86383 - protein, 214 aa, Hordeum vulgare
MSTAVDASLPVAEQEDGTANMLGGKKVAVVFVLGGPGSGKGTQCSNIVEHFGFTHLSAGELLRSEIKSGSENGTMIDSIIKEGKIVPSEITVKLLQEAMIKSENNKFLIDGFPRNQENRLSFENVIKIAPEFVLFFDCSEEEMVRRLLGRNQGRADDNIETIRKRFRVFEESSLPVVQYYDSKGKVKKINAAKPIPEVFEDVKTIFQPYGSKAA

SEQ ID NO: 86384 - DNA, 630 bp, Helianthus annuus
  CDS (1)..(630)
atggggaccgttgaagctgcaaccaagcaagcaattgaaagtactcttgctcaaaagaagcccaaggttgtatttgtcctaggaggcccaggcagtggaaagggtacacaatgtgcaaacatcgtcgagcattttggatatactcatcttagtgccggagatcttcttcgtgcagaaataaaatccggctctgaaaacgggaccatgattcagaacatgatcaaggagggaaagattgtaccatcggaagtaacaatcaagcttcttgaaaaagcaatcttggaaaatgaaaatgacaaatttttaattgatggattcccacgtaatgaggaaaaccgtgcagcatttgaggctgtcactggaatttcacccgagtttgttctcttctttgattgccctgaggaagagatggagaagcgacttttgggtcgcaatcagggtagagaagacgataatatcgacaccatcaggaagcgctttaaagtttttctggaatcaagtcttccagttatcgaatattacaactctaaggggaaggtccgaaagattgacgctgccaaacctgttggagaagtttttgaagcagtcaaggctctgttcactccagtggatgagaaggctgcagcttag

SEQ ID NO: 86385 - protein, 209 aa, Helianthus annuus
MGTVEAATKQAIESTLAQKKPKVVFVLGGPGSGKGTQCANIVEHFGYTHLSAGDLLRAEIKSGSENGTMIQNMIKEGKIVPSEVTIKLLEKAILENENDKFLIDGFPRNEENRAAFEAVTGISPEFVLFFDCPEEEMEKRLLGRNQGREDDNIDTIRKRFKVFLESSLPVIEYYNSKGKVRKIDAAKPVGEVFEAVKALFTPVDEKAAA

SEQ ID NO: 86386 - DNA, 633 bp, Helianthus annuus
  CDS (1)..(633)
atggggactagcgttgatgctgcacatacggaaggaaccgaaagcgctcttagtgtaaagaagcccaaagttgtgtttgttctaggaggcccgggcagtggcaagggtacacaatgtgcaaatatcgtagaacactttgggtatacgcatctcagtgccggagatcttctccgggccgaaataagttccggatctgaaaacgggaccatgatccagaacatgatttctgaaggagtaatcgttccgccagaagtaaccattaagcttcttgaaaaagcaattatggaaagtgagaacgacaagttcctgatcgacgggtttccccgtaatgaggaaaaccgtgcaatgtttgagtcagtcaccggaattgtacccgagtttgttcttttctttgattgttctgaggaagagatggagaggcgcctcttaagccgcaaccagggaagagtagatgataacattgacacaataaggaagcggtttaaggttttcgttgaatctagtctctttgttatcaactattacaactcaaaggggagggtcagaaagatcgatgccgctaagccggttgccgaagtttttgaagcagttaaggctgttttcacccctgttgatgacaaggctgctgcctag

SEQ ID NO: 86387 - protein, 210 aa, Helianthus annuus
MGTSVDAAHTEGTESALSVKKPKVVFVLGGPGSGKGTQCANIVEHFGYTHLSAGDLLRAEISSGSENGTMIQNMISEGVIVPPEVTIKLLEKAIMESENDKFLIDGFPRNEENRAMFESVTGIVPEFVLFFDCSEEEMERRLLSRNQGRVDDNIDTIRKRFKVFVESSLFVINYYNSKGRVRKIDAAKPVAEVFEAVKAVFTPVDDKAAA

SEQ ID NO: 86388 - DNA, 630 bp, Brassica napus
  CDS (1)..(630)
atgggatccattgctgatgctgcaaacaaggaggttaatggaaccgcaagtgagaagagacccgctgttatttttgtccttggtggtccaggaagtgggaaaggtacacagtgtgcctatattgttgaccattttggttacacacatctgagtgctggagaccttctcagggctgaaattaaatcaggttctgaaaatgggactatgatccagaatatgattaaagaagggaagattgtaccttctgaggttacaatcaagcttcttcagaaagcaattcaggagaacgggaacgacaagttcctcattgatggcttccctcgcaatgaggagaaccgagcagcctttgaaaaagttactgggattgaacctaagtttgtcttgttctttgattgtcctgaggaagagatggagaggcgcctcttgggaagaaaccaggggagagaggatgacaatatagagactataaggaagcgtttcaaggtgtttcttgaatctagcttgccagtgattcagtactacgaagctaagggcaaagttcgcaagattcatgccgcaaagcctattgaagatgtgtttcaggaggtgaaggcagtcttttctcctgaagctgagaaggttgaagcctaa

SEQ ID NO: 86389 - protein, 209 aa, Brassica napus
MGSIADAANKEVNGTASEKRPAVIFVLGGPGSGKGTQCAYIVDHFGYTHLSAGDLLRAEIKSGSENGTMIQNMIKEGKIVPSEVTIKLLQKAIQENGNDKFLIDGFPRNEENRAAFEKVTGIEPKFVLFFDCPEEEMERRLLGRNQGREDDNIETIRKRFKVFLESSLPVIQYYEAKGKVRKIHAAKPIEDVFQEVKAVFSPEAEKVEA

SEQ ID NO: 86390 - DNA, 738 bp, Brassica napus
  CDS (1)..(738)
atggcgaaaagcagtgtagacatggaagacattcagacagtcgatctcatgtcagagctcctccgtcgcatgaagtgtgcctctaaacctgacaaacgtctcgttttcatcggcccacctggttcaggaaaaggtacgcagtctccggtcataaaggatgagttctgcttgtgccatttgtctaccggtgacatgcttagagctgctgttgctgctaagtcccctcttggtgtcaaggcgaaggaagctatggacaagggagagcttgtttctgatgacttggttgttggaatcatggatgaagcaatgaacagacccaaatgtcagaaaggtttcattcttgatgggtttcctaggaccgtcacacaagctgagaagcttgatgagatgcttaatagaagaggagctcagattgacaaagtgcttaattttgcaatcgacgattcggttcttgaagaaagaattactggaaggtggattcacccttcaagtggaaggagctatcataccaaattcgcacctcctaaagttcctggagtcgatgatgtgactggagagccattgattcaacgtaaagatgacaatgcggatgttcttaggtcaaggctggatgcattccacaagcagacgcaaccggttattgactactacgcgaagaaggggaatctggtgaacataccagcagagaaggctccggaagaggttaccaaagtggtgaagaaggttgtgtctgcatga

SEQ ID NO: 86391 - protein, 245 aa, Brassica napus
MAKSSVDMEDIQTVDLMSELLRRMKCASKPDKRLVFIGPPGSGKGTQSPVIKDEFCLCHLSTGDMLRAAVAAKSPLGVKAKEAMDKGELVSDDLVVGIMDEAMNRPKCQKGFILDGFPRTVTQAEKLDEMLNRRGAQIDKVLNFAIDDSVLEERITGRWIHPSSGRSYHTKFAPPKVPGVDDVTGEPLIQRKDDNADVLRSRLDAFHKQTQPVIDYYAKKGNLVNIPAEKAPEEVTKVVKKVVSA

SEQ ID NO: 86392 - DNA, 846 bp, Brassica napus
  CDS (1)..(846)
atggcgagagtactgcgtgtggcgagatcctcctcctccctcttcagcttcggaagcagatcttattcagccgaagctagccacgtgtcctctccccctcctccgtttcttggagctcgcagagacgttaccaaggagagaaacgtgcagtgggtgttcctcggttgtcccggtgtcgggaaaggcacttacgccagcagactctcgagtctcctcggtgttcctcacatcgccaccggagatctcgtccgtgatgcgctagcttcctccggacctctctcccgacagctatcagagattgtaaaccaggggaagcttgtttctgatgagatcatagtgaacctattatcaaagagacttgaagctggtgaagccaaaggtgaatcaggtttcattcttgatggctttcctcgtaccatgagacaagctgaaatactaggagacgtcactgacatcgatctagtggtgaacttgaagctacctgaggaggttttggttgacaaatgcctagggaggagaacgtgtaatcaatgcggcaaaggtttcaatgtagctcacatcaacttaaagggtgagaatgggaaacctacaatcagcatggatccgcttctccctccgcctcggtgtatgtcaaagctcatcactcgagctgacgatactgaagaggttgtgaaagcaaggctccgtatttacaatgaaaccagccagcctcttgaagagtactaccgtagcaaaggaaagctgatggagtttgacttacctggaggcatccctgagtcatggccaaggctattagaagccttaaggcttgatgattacgaggagaaacaatctgccgcggcatag

SEQ ID NO: 86393 - protein, 281 aa, Brassica napus
MARVLRVARSSSSLFSFGSRSYSAEASHVSSPPPPFLGARRDVTKERNVQWVFLGCPGVGKGTYASRLSSLLGVPHIATGDLVRDALASSGPLSRQLSEIVNQGKLVSDEIIVNLLSKRLEAGEAKGESGFILDGFPRTMRQAEILGDVTDIDLVVNLKLPEEVLVDKCLGRRTCNQCGKGFNVAHINLKGENGKPTISMDPLLPPPRCMSKLITRADDTEEVVKARLRIYNETSQPLEEYYRSKGKLMEFDLPGGIPESWPRLLEALRLDDYEEKQSAAA

SEQ ID NO: 86394 - DNA, 630 bp, Brassica napus
  CDS (1)..(630)
atgggatccattgctgatgctgcaaacaaggaggttaatggaaccgcaagtgagaagagacccgctgttatttttgtccttggtggtccaggaagtgggaaaggtacacagtgtgcctatattgttgaccattttggttacacacatctgagtgctggagaccttctcagggctgaaattaaatcaggttctgaaaatgggactatgatccagaatatgattaaagaagggaagattgtaccttctgaggttacaatcaagcttcttcagaaagcaattcaggagaacgggaacgacaagttcctcattgatggcttccctcgcaatgaggagaaccgagcagcctttgaaaaagttactgggattgaacctaagtttgtcttgttctttgattgtcctgaggaagagatggagagacgcttattaggacgtaaccaggggagagaggatgacaatattgagactataaggaagcgtttcaaggtgtttcttgagtctagcttaccagtgattcagtactatgaagctaaggggaaagttaggaagattcatgccgcaaagcccattgatgatgtatttcaggaggtgaaggcagtgttttctcctgaagctgagaaggttgcagcttag

SEQ ID NO: 86395 - protein, 209 aa, Brassica napus
MGSIADAANKEVNGTASEKRPAVIFVLGGPGSGKGTQCAYIVDHFGYTHLSAGDLLRAEIKSGSENGTMIQNMIKEGKIVPSEVTIKLLQKAIQENGNDKFLIDGFPRNEENRAAFEKVTGIEPKFVLFFDCPEEEMERRLLGRNQGREDDNIETIRKRFKVFLESSLPVIQYYEAKGKVRKIHAAKPIDDVFQEVKAVFSPEAEKVAA

SEQ ID NO: 86396 - DNA, 846 bp, Brassica napus
  CDS (1)..(846)
atggcgagagtactgcgtgtggcgagatcctcctcctccctcttcagcttcggaagcagatcttattcagccgaagctagccacgtgtcctctccccctcctccgtttcttggagctcgcagagacgttaccaaggagagaaacgtgcagtgggtgttcctcggttgtcccggtgtcgggaaggggacttacgccagcagactctcgagtctcctcggtgttcctcacatcgccaccggagatctcgtccgtgatgcgctagcttcttccggacctctctcccgacagctatcagagattgtaaaccaggggaagcttgtttctgatgagatcatagtgaacctattatcaaagagacttgaagctggtgaagccaaaggtgaatcaggtttcattcttgatggctttcctcgtaccatgagacaagctgaaatactaggagacgtcactgacatcgacctagtggtgaacttgaagctacctgaggaggttttggttgacaaatgcctagggaggagaacgtgtaatcagtgcggtaaaggtttcaatatagctcacatcaacttaaaaggcgagaatgggaaacctggaatcagcatggatccgcttctccctccgcctcagtgtatgtcaaagctcgtcactcgtgctgatgatactgaggaggttgtgaaagctaggctccgtatttacaatgaaaccagccagcctcttgaagagtactaccgtagcaagggaaagcttatggagtttgacttacctggaggcatcccagagtcttggccaaggctgttagaagccttgaggcttgatgattacgaggagaagcaatctgctgcggcttag

SEQ ID NO: 86397 - protein, 281 aa, Brassica napus
MARVLRVARSSSSLFSFGSRSYSAEASHVSSPPPPFLGARRDVTKERNVQWVFLGCPGVGKGTYASRLSSLLGVPHIATGDLVRDALASSGPLSRQLSEIVNQGKLVSDEIIVNLLSKRLEAGEAKGESGFILDGFPRTMRQAEILGDVTDIDLVVNLKLPEEVLVDKCLGRRTCNQCGKGFNIAHINLKGENGKPGISMDPLLPPPQCMSKLVTRADDTEEVVKARLRIYNETSQPLEEYYRSKGKLMEFDLPGGIPESWPRLLEALRLDDYEEKQSAAA

SEQ ID NO: 86398 - DNA, 624 bp, Glycine max
  CDS (1)..(624)
atgggaactgttgaagctgcaaacaaggatgcaaatggaagcctcctagagaaaaatcctacagttgtttttgtgttaggtggcccaggcagtggaaagggtacccagtgtgcaaatattgtcgaaaattttgggtatactcacctcagtgctggtgatcttctgcgagcagaaatcaaatctggttctgaaaatggcacaatgattcagaatatgattaaagaaggaaaaattgttccctctgaggtaacaattaagctcttacaaaaagcaatgcaggaaagtggcaatgacaaatttcttattgatggttttccccgcaatgaggaaaaccgtgcagcatttgaaaaagtgacaggaatagaaccagcatttgtcctattttttgagtgccctgaggaagagatggagaggcgactacttagtaggaaccagggtagagaagatgacaatattgaaacaataaggaagcggtttaaggttttcttggagtctagtcttcccgtgattaattattatgatgcaaagggaaaagttcgcaagattgatgctgcaagacctatcgaagaggtatttgagacagtcaaagcaatttttggtccaaagaatgacaaggctgattga

SEQ ID NO: 86399 - protein, 207 aa, Glycine max
MGTVEAANKDANGSLLEKNPTVVFVLGGPGSGKGTQCANIVENFGYTHLSAGDLLRAEIKSGSENGTMIQNMIKEGKIVPSEVTIKLLQKAMQESGNDKFLIDGFPRNEENRAAFEKVTGIEPAFVLFFECPEEEMERRLLSRNQGREDDNIETIRKRFKVFLESSLPVINYYDAKGKVRKIDAARPIEEVFETVKAIFGPKNDKAD

SEQ ID NO: 86400 - DNA, 858 bp, Glycine max
  CDS (1)..(858)
atggcggccataacccgcctcgcgaagcgcgcgtcagccttctcacccctgacgaggaggtgcctgagctcctccgaagtcaaatcccacgcgccgccgcacgacgccgcgtccttccgcccgtttccgcggcgcgaagatccgagcaagcggtgcgtgcagtgggcgttcctcggctgccccggcgtcggaaaaggaacgtacgctagtcgcctctcgaacctcctcggcgtccctcacatcgccaccggcgatctcgttcgcgacgaactcgcctcctctgaccccctttcttcccagctatcagaaattgtaaaacaaggtcaattggtgtcagatgaaattattataagtttattgtcaaagagacttgttgccggggaagctaaaggcgatctgggatttattcttgatggttttcctcgaacaattaagcaagcagaaatattggaaggggtaactgacattgacttggtaatcaatctgaagcttcgagaagatgttctgcttgagaaatgccttggtaggagaatttgcaatcagtgtgggggtaattttaatgttgcttctattaacatcaaggccgagaatgggagccctgaaattattatggctccacttcttcctcctgagaattgtatgtcaaagctcattactcgatcagatgatactgaatcagtggtcaaagaaaggcttcgaatatacaatgaaatgactcagcctgtggaggaattttaccgttcgagaggaaaattattggagtttaacctgcctggaggaatcccggaatcttggcctaagttgctacatgctcttaatcttgatgattacgaggacaaacgatctgctgcagcataa

SEQ ID NO: 86401 - protein, 285 aa, Glycine max
MAAITRLAKRASAFSPLTRRCLSSSEVKSHAPPHDAASFRPFPRREDPSKRCVQWAFLGCPGVGKGTYASRLSNLLGVPHIATGDLVRDELASSDPLSSQLSEIVKQGQLVSDEIIISLLSKRLVAGEAKGDLGFILDGFPRTIKQAEILEGVTDIDLVINLKLREDVLLEKCLGRRICNQCGGNFNVASINIKAENGSPEIIMAPLLPPENCMSKLITRSDDTESVVKERLRIYNEMTQPVEEFYRSRGKLLEFNLPGGIPESWPKLLHALNLDDYEDKRSAAA

SEQ ID NO: 86402 - DNA, 804 bp, Glycine max
  CDS (1)..(804)
atggcggccataacccgcctcctaaatcgcacctcttccctctcttccgtggcgcgtggattctcatctcacgcatcgccgccgcgcaaggaggagaggaatgtccagtgggtgttcctgggttgccccggcgtcggaaaaggcacctacgccagtcgcctctgcaacctcctcggcgtccctcacatcgccaccggcgatctcgtccgccacgagctcgcctccaacggccccctttcttcccagctatcagaaattgttaatcaaggaaaattggtgtcagatgaaatcatcataagtttattgtcaaagaggctggctgatggggaagctaaaggagaatcgggatttattcttgatggttttccacgaacaataaagcaagcggaaatattggaaggggtaactgacattgacctggtggtcaatctgaagctccaagaagaagcactgcttgcaaaatgccttggtagaagaatttgcaatcaatgtggaggaaattttaatattgcctccattagcgtcaagggtgagaatgggcgtcctggaatggtcatggctccacttcttcctcctgcacactgtatgtcaaagctcattgctcggtcagatgatactgaatcagtagtcaaagaaaggcttcgtatatacaatgaaaagagtcagcctgtggagggattttaccgtagtagagggaaactgttggagtttgaactgccaggaggtatcccagaatcttggcctaagttgctgcaagctcttaatcttgatgattatgaggagaagcaatctgctgcagcataa

SEQ ID NO: 86403 - protein, 267 aa, Glycine max
MAAITRLLNRTSSLSSVARGFSSHASPPRKEERNVQWVFLGCPGVGKGTYASRLCNLLGVPHIATGDLVRHELASNGPLSSQLSEIVNQGKLVSDEIIISLLSKRLADGEAKGESGFILDGFPRTIKQAEILEGVTDIDLVVNLKLQEEALLAKCLGRRICNQCGGNFNIASISVKGENGRPGMVMAPLLPPAHCMSKLIARSDDTESVVKERLRIYNEKSQPVEGFYRSRGKLLEFELPGGIPESWPKLLQALNLDDYEEKQSAAA

SEQ ID NO: 86404 - DNA, 624 bp, Glycine max
  CDS (1)..(624)
atgggaactgttgaagctgcaaacaaggatgcaaatggaagtctcctagagaaaaatccttcagttgtttttgtgttaggtggcccaggaagtggaaagggtacccaatgtgcaaatattgtccaaaattttgggtatactcatctcagcgctggtgatcttctgcgagcagaaatcaaatctggttctgaaaatggtacaatgattcagaatatgattaaagaaggaaaaattgttccctctgaggtaacaattaagctcttacaaaaagcaatgcaggaaagtggcaatgacaaatttcttattgatggttttccccgcaatgaggaaaaccgggcagcatttgagaaagtgacaggaatagagccagcatttgtcttattttttgattgccctgaggaagagatggagaggcgacttcttagtaggaaccagggtagagaagatgacaatattgaaacaataaggaagcggtttaaggttttcttggagtctagtcttcccgtgattaattattatgatgcaaagggaaaagttcgcaagattgatgctgcaagacctatcgaagaggtatttgagacagtcaaaggaatttttggtccaaagaatgagaaggctgattga

SEQ ID NO: 86405 - protein, 207 aa, Glycine max
MGTVEAANKDANGSLLEKNPSVVFVLGGPGSGKGTQCANIVQNFGYTHLSAGDLLRAEIKSGSENGTMIQNMIKEGKIVPSEVTIKLLQKAMQESGNDKFLIDGFPRNEENRAAFEKVTGIEPAFVLFFDCPEEEMERRLLSRNQGREDDNIETIRKRFKVFLESSLPVINYYDAKGKVRKIDAARPIEEVFETVKGIFGPKNEKAD

SEQ ID NO: 86406 - DNA, 858 bp, Glycine max
  CDS (1)..(858)
atggtggccgtaacccgcctcgcgaagcgcgcgtcaaccttctcaccccagatgaggaggtgcctgagctcctccgaagtcaaatcccacgcgccgccgcacgacgccgcgtccttccgcccgtttccgcggcgcgaagatctgagcaagcggtgcgtgcagtgggcgttcctcggctgccccggcgtcggaaaaggaacgtacgctagtcgcctctcgaacctcctcggcgtccctcacatcgccaccggcgatctcgttcgcgacgaactcgcctcctctggccccctttcttcccagctatcagaaattgtaaaacaaggtcaattggtgtcagatgaaattattataagtttattgtcaaagagacttgttgccggggaagctaaaggcgatttgggatttattcttgatggttttcctcgaacaattaagcaagcagaaatattggaaggggtaactgacattgacttggtaatcaatctgaagcttcgagaagatgttctgcttgagaaatgccttggtaggagaatttgcaatcagtgtgggggaaattttaatgttgcttccatcaacatcaaggctgagaatgggagccctgaaattattatggctccacttcttcctcctgagaattgtatatcaaagctcattactcgatcagatgatactgaatcagtggtcaaagaaaggcttcgaatatacaatgaaatgactcagcctgtggaggaattttaccgttcaagaggaaaattattggagtttaacctgcctggaggaatcccggaatcttggcctaagttgctacatgctcttaatcttgatgattacgaggacaaacgatctgctgcagcataa

SEQ ID NO: 86407 - protein, 285 aa, Glycine max
MVAVTRLAKRASTFSPQMRRCLSSSEVKSHAPPHDAASFRPFPRREDLSKRCVQWAFLGCPGVGKGTYASRLSNLLGVPHIATGDLVRDELASSGPLSSQLSEIVKQGQLVSDEIIISLLSKRLVAGEAKGDLGFILDGFPRTIKQAEILEGVTDIDLVINLKLREDVLLEKCLGRRICNQCGGNFNVASINIKAENGSPEIIMAPLLPPENCISKLITRSDDTESVVKERLRIYNEMTQPVEEFYRSRGKLLEFNLPGGIPESWPKLLHALNLDDYEDKRSAAA

SEQ ID NO: 86408 - DNA, 729 bp, Glycine max
  CDS (1)..(729)
atggccaacactaacttggaagatgttccctctctggatctcatgactgagctccttcgtcgtctcaagtgctcttccaaacctgacaagcgtcttattctcattggcccacctggatctggaaaaggcacccagtcaccaatcataaaagatgagtactgcttatgccacttagctactggtgatatgttaagagcagctgtagcagctaagacccctcttggtgtcaaggctaaagaagctatggataagggagaacttgtttctgatgacttggttgttggcattatagatgaagcaatgaagaaaccatcatgtcagaaaggtttcattcttgatggttttccaagaactgtggtccaagcacagaagcttgatgagatgctgcaaaaacaaggagttaaagttgataaggtgctcaattttgcaattgatgatgcaatccttgaggagcgaattactggtcgctggatacacccatccagtggcagaacttaccatacaaaattttcccctccaaaggttcttggtgttgatgatgttactggtgaaccacttatccagcgcaaggatgacactgcggctgttcttaagtcaagactggaggcatttcacaagcaaaccgaaccggttattgattactattcaaagaagggccttgttgctaatcttcatgctgagaaaccacccaaagaggtgacagttgaagtggagaaagtgctgtcttaa

SEQ ID NO: 86409 - protein, 242 aa, Glycine max
MANTNLEDVPSLDLMTELLRRLKCSSKPDKRLILIGPPGSGKGTQSPIIKDEYCLCHLATGDMLRAAVAAKTPLGVKAKEAMDKGELVSDDLVVGIIDEAMKKPSCQKGFILDGFPRTVVQAQKLDEMLQKQGVKVDKVLNFAIDDAILEERITGRWIHPSSGRTYHTKFSPPKVLGVDDVTGEPLIQRKDDTAAVLKSRLEAFHKQTEPVIDYYSKKGLVANLHAEKPPKEVTVEVEKVLS

SEQ ID NO: 86410 - DNA, 624 bp, Glycine max
  CDS (1)..(624)
atgggaactgttgaagctgcaaacaaggatgcaaatggaagtctcctagagaaaaatccttcagttgtttttgtgttaggtggcccaggaagtggaaagggtacccaatgtgcaaatattgtccaaaattttgggtatactcatctcagcgctggtgatcttctgcgagcagaaatcaaatctggttctgaaaatggtacaatgattcagaatatgattaaagaaggaaaaattgttccctctgaggtaacaattaagctcttacaaaaagcaatgcaggaaagtggcaatgacaaatttcttattgatggttttccccgcaatgaggaaaaccgtgcagcatttgagaaagtgacaggaatagagccagcatttgtcttattttttgattgccctgaggaagagatggagaggcgacttcttagtaggaaccagggtagagaagatgacaatattgaaacaataaggaagcggtttaaggttttcttggagtctagtcttcccgtgattaattattatgatgcaaagggaaaagttcgcaagattgatgctgcaagacctatcgaagaggtatttgagacagtcaaaggaatttttggtccaaagaatgacaaggctgattga

SEQ ID NO: 86411 - protein, 207 aa, Glycine max
MGTVEAANKDANGSLLEKNPSVVFVLGGPGSGKGTQCANIVQNFGYTHLSAGDLLRAEIKSGSENGTMIQNMIKEGKIVPSEVTIKLLQKAMQESGNDKFLIDGFPRNEENRAAFEKVTGIEPAFVLFFDCPEEEMERRLLSRNQGREDDNIETIRKRFKVFLESSLPVINYYDAKGKVRKIDAARPIEEVFETVKGIFGPKNDKAD

SEQ ID NO: 86412 - DNA, 858 bp, Brassica napus
  CDS (1)..(858)
atggcgtgctgtgtgaactatatctctccgccacgtgcctctctatctccaccaccttcacgctcctccttctccggcgatgccttgcactctctcctccgtgaaccaaccttactcctccgacgtcattcgagatctccgtcgatcgtcgctcccagattccaggttgtggcggccgagaaagcagagccgcctctgaagattatgatatcaggagctcccgcttcgggtaaaggcacacagtgcgagctcatcactcagaaatatggtttggtgcatatctctgctggagacttgctcagagctgagatcgcttctgggagtgaaaacggaaagctggcaaaagaatacatggagaaaggacagctggtccctgatgagatagttgtaatgatggtaaaagatcgtttatcacaaactgattcacagcagaaaggttggcttttagatggttatccgagaagctcatcgcaggcaacagctcttaaagggtttggattccagcctgatctgttcattgtcctcgaagttcctgaagatattctaatcgaaagagttgtggggcgtagattagatcctgttacgggaaagatctaccacttgaagtattctcctccagagacagaagagatctctgctaggctcacccaacgttttgatgataccgaagagaaggcaaagctgcggctgaagacacataaccaaaatgtgagcgatgtgctttccatgtacgatgatatcactattaagattaagggaaaccgttcaaaggaggaagtgtttgctcaaattgatactgctctatcccaaatgctccaacagaggaacaacacctctccaagttcactttcaagttga

SEQ ID NO: 86413 - protein, 285 aa, Brassica napus
MACCVNYISPPRASLSPPPSRSSFSGDALHSLLREPTLLLRRHSRSPSIVAPRFQVVAAEKAEPPLKIMISGAPASGKGTQCELITQKYGLVHISAGDLLRAEIASGSENGKLAKEYMEKGQLVPDEIVVMMVKDRLSQTDSQQKGWLLDGYPRSSSQATALKGFGFQPDLFIVLEVPEDILIERVVGRRLDPVTGKIYHLKYSPPETEEISARLTQRFDDTEEKAKLRLKTHNQNVSDVLSMYDDITIKIKGNRSKEEVFAQIDTALSQMLQQRNNTSPSSLSS

SEQ ID NO: 86414 - DNA, 867 bp, Zea mays
  CDS (1)..(867)
atggcggggatgtctcgcgcgatccgcaacttcgccgccgcgtcccggcgaaccctgaccgctgcttcggggccggcgctgccgaaggaggcggcggcggcgggggcgcgggtgagggcggcggcgcccgggcgcagggggcgggatcaggaggacgggaggcgcgtgcagtgggtgttcctcgggtgccccggggtggggaagggcacctacgccagccgcctctcgcagctgctcggcgtcccgcacatcgccaccggcgacctcgtccgcgacgccctggccacccctggccccttctccaacaagcttgctgagattgtcaatcatggaaaactggtgtctgatgagatcatcataaatctgctgtcaagacgtctggaagagggagaggaaaagggtgaattggggttcatccttgatggctttcctcgaaccataggacaagcggagatacttgaaggagtcacagacattgatttggtgatcaatctcaaactccgagaagaagctctgcttgcgaaatgccttggcaggaggatgtgcagccagtgtggagggaacttcaatgtggcctccattgatattgagggtgaagacggcgggcctcgaatgtacatgcccccactgttgcctcctccacagtgtgaatcgaagctgattgctagagcagacgatactgaagaagtggtaaaagagcggctgcgtgtgtaccatgatttgactgaaccagtggaggagttctacagagcacgtgggaaactgctggagttcaatctgcctggtgggatacccgaatcatggccgaagttactgcaggccctgaacatagaagaccccgacaataagcgatctgcagcagcatga

SEQ ID NO: 86415 - protein, 288 aa, Zea mays
MAGMSRAIRNFAAASRRTLTAASGPALPKEAAAAGARVRAAAPGRRGRDQEDGRRVQWVFLGCPGVGKGTYASRLSQLLGVPHIATGDLVRDALATPGPFSNKLAEIVNHGKLVSDEIIINLLSRRLEEGEEKGELGFILDGFPRTIGQAEILEGVTDIDLVINLKLREEALLAKCLGRRMCSQCGGNFNVASIDIEGEDGGPRMYMPPLLPPPQCESKLIARADDTEEVVKERLRVYHDLTEPVEEFYRARGKLLEFNLPGGIPESWPKLLQALNIEDPDNKRSAAA

SEQ ID NO: 86416 - DNA, 861 bp, Zea mays
  CDS (1)..(861)
atggcatcctccatggccgccgccgccaccgccctcccgctgccgtccgggacgacgcagaggccgtctgcccagggccgcctcctcttcaccgccgcacccgcccgctcccgctgccgctccctccgcctccgccccgccggccgccggtcggcccgctcctcgcctcgggccaccaaggctgtggtggcagcgttggctgatcctctcaaggtcatgatatcaggagctccggcgtccggcaagggcacacagtgcgagctcatcaagaccaaatatcaactggcgcacatctccgctggagatttgttgcgggcggagatcgctgctggctctgagaatgggaagcgggccaaggaattcatggagaagggccagctcgtgcctgatgagattgtcgttaatatggtgaaggaacgccttcggcaaccagacgctcaagaaaatggttggcttttggacgggtacccaagaagctattcacaggccatggccttggaaactcttgaaatccggcctgatactttcattctgttagatgttccagatgaactccttgttgaaagggtggttggaaggcggcttgatcctgtaacagggaaaatatatcatttgaagtattctccgccagagaatgaagaaatcgcttcaaggcttacacaaagatttgacgatacagaagaaaaggttaagttgaggctggagacttattaccaaaatatcgagtccttgctatcaacatatgagaacattattgtcaaagtgcaaggagatgccacagtggatgctgtctttgctaagatcgacgagctgctgggttctatcctggagaagaaaaatgaaatggtgtccagcacatga

SEQ ID NO: 86417 - protein, 286 aa, Zea mays
MASSMAAAATALPLPSGTTQRPSAQGRLLFTAAPARSRCRSLRLRPAGRRSARSSPRATKAVVAALADPLKVMISGAPASGKGTQCELIKTKYQLAHISAGDLLRAEIAAGSENGKRAKEFMEKGQLVPDEIVVNMVKERLRQPDAQENGWLLDGYPRSYSQAMALETLEIRPDTFILLDVPDELLVERVVGRRLDPVTGKIYHLKYSPPENEEIASRLTQRFDDTEEKVKLRLETYYQNIESLLSTYENIIVKVQGDATVDAVFAKIDELLGSILEKKNEMVSST

SEQ ID NO: 86418 - DNA, 639 bp, Zea mays
  CDS (1)..(639)
atgggcacagttgtggatgctccagcagttgtggctgaagaggtcactgaaaacatgttgggtggtaagaaagttacagttgtatttgttctaggtggtcctggaagtggaaaaggcacacagtgtgccaacattgtggaacactttggattcacccatcttagtgctggagatcttttgcgtgcagagattaaatctggctctgagaatggaaccatgattgaaaacatgataaaggagggaaagattgttccatcagaggtgactataaagctgttgcaggaggcaatgataaaaaatgaaaatgacaaattcctgatcgacggatttccaaggaatgaggagaatcgtgcagcatttgagaatgttaccaaaatttctcctgcatttgtgctattctttgactgttctgagaaagagatggagaaacgtctcttgggacgcaatcagggaagagttgatgataacattgaaactatcaaaaaaaggttcaaaacctttgttgagtcaagtttgcctgtcattgagcattacaactcaagggacaaggttaaaaagattgatgctgcaaaaccaattcctgaggtgtttgaagacgtcaaaaccatttttgccccatatgctccaaaggctgaatag

SEQ ID NO: 86419 - protein, 212 aa, Zea mays
MGTVVDAPAVVAEEVTENMLGGKKVTVVFVLGGPGSGKGTQCANIVEHFGFTHLSAGDLLRAEIKSGSENGTMIENMIKEGKIVPSEVTIKLLQEAMIKNENDKFLIDGFPRNEENRAAFENVTKISPAFVLFFDCSEKEMEKRLLGRNQGRVDDNIETIKKRFKTFVESSLPVIEHYNSRDKVKKIDAAKPIPEVFEDVKTIFAPYAPKAE

SEQ ID NO: 86420 - DNA, 726 bp, Zea mays
  CDS (1)..(726)
atggcggcgaatctagaggacgtgccgtctctggatctgatgcacgaactgctccgtcggatgaagtgcagctccaagcccgacaagcacctcatcctcatcggcccacctggctctggaaagggtactcagtctccccttattaaggatgaatattgcctgtgccatttagccactggtgatatgttgagggctgctgtggcagccaagacaactctaggtatcaaagctaaagaagctatggataagggagagcttgtttcagataacttggttgtggggattattgatgaagctatgaagaaaccgtcatgccagaaaggtttcattcttgatggcttccctagaactgtcactcaagcacagaagcttgatgagatgttggcaaagcaaggtgctaatgttgacaaggtcctaaactttgcaattgatgatgctatattggaagaacggattactggccgttggatccacccacccagtggtaggacttaccatacaaaatttgcacctccaaagtctccaggagttgatgatgtaactggagagccattgattcaaaggagggatgacactgccgaggttttgaagtcaaggcttgaagccttccacaaacaaactgagcctgtgattgattattactctaagaagggcttggtggtaaatctgcctgcggagaaaccaccaaaggaagtgactgctgaggtgctgaaagccctctcatga

SEQ ID NO: 86421 - protein, 241 aa, Zea mays
MAANLEDVPSLDLMHELLRRMKCSSKPDKHLILIGPPGSGKGTQSPLIKDEYCLCHLATGDMLRAAVAAKTTLGIKAKEAMDKGELVSDNLVVGIIDEAMKKPSCQKGFILDGFPRTVTQAQKLDEMLAKQGANVDKVLNFAIDDAILEERITGRWIHPPSGRTYHTKFAPPKSPGVDDVTGEPLIQRRDDTAEVLKSRLEAFHKQTEPVIDYYSKKGLVVNLPAEKPPKEVTAEVLKALS

SEQ ID NO: 86422 - DNA, 726 bp, Zea mays
  CDS (1)..(726)
atggcggcgaatctggaggacgtgccgtcgctggatctgatgcacgagttgctccgccgcatgaagtgcagctccaagcccgacaagcgcctcatcgtcatcggcccacctggctctggaaagggaacccagtctcccattattaaggatgaatattgcttgtgccatttagccactggtgatatgctgagggctgctgtggcggccaagacacctctaggtatcaaggcaaaagaagctatggataagggagagcttgtttcagatgacatggttgtggggattattgatgaagctatgaagaaaccttcatgccagaaaggtttcattcttgatggctttcctagaactgtcactcaagcacagaagctcgatgaaatgttggcaaagcaaggtgctaatgttgacaaggtcctaaacttcgcaattgatgatgctatattggaagaacggattactggtcgttggatccacccacccagtggtaggacttaccatacaaaatttgcacctccaaagtctccaggagttgataatgtaactggagagccattgattcaaaggagggatgacactgccgaggttttgaagtcaaggcttaaacccttccacaaacaaaatgagcctgggattgattattactctaagaagggcttggtggtaaatcggcctgcggagaaaccaccaaaggaagtgactgctaaggtgttgaaagccctttcatga

SEQ ID NO: 86423 - protein, 241 aa, Zea mays
MAANLEDVPSLDLMHELLRRMKCSSKPDKRLIVIGPPGSGKGTQSPIIKDEYCLCHLATGDMLRAAVAAKTPLGIKAKEAMDKGELVSDDMVVGIIDEAMKKPSCQKGFILDGFPRTVTQAQKLDEMLAKQGANVDKVLNFAIDDAILEERITGRWIHPPSGRTYHTKFAPPKSPGVDNVTGEPLIQRRDDTAEVLKSRLKPFHKQNEPGIDYYSKKGLVVNRPAEKPPKEVTAKVLKALS

SEQ ID NO: 86424 - DNA, 867 bp, Zea mays
  CDS (1)..(867)
atggcatcctccatggccgccgccgccaccgccaccgccctcccgctgccgtccgggacgacgcagaggccgtctgcccagggccgcctcctcttcaccgccgcacccgcccgctcccgctgccgctccctccgcctccgccccgccggccgccggtcggcccgctcctcgcctcgggccaccaaggctgtggtggcagcgttggctgatcctctcaaggtcatgatatcaggagctccggcgtccggcaagggcacacagtgcgagctcatcaagaccaaatatcaactggcgcacatctccgccggagatttgttgcgggcggaaatcgctgctggctctgagaatgggaagcgggccaaggaattcatggagaagggccagctcgtgcctgatgagattgtcgttaatatggtgaaggaacgccttcggcaaccagacgctcaagaaaatggttggcttttggacgggtacccaagaagctattcacaggccatggccttggaaactcttgaaatccggcctgatactttcattctgttagatgttccagatgaactccttgttgaaagggtggttggaaggcggcttgatcctgtaacagggaaaatatatcatttgaagtattctccgccagagaatgaagaaatcgcttcaaggcttacacaaagatttgacgatacagaagaaaaggttaagttgaggctggagacttattaccaaaatatcgagtccttgctatcaacatatgagaacattattgtcaaagtgcaaggagatgccacagtcgatgctgtctttgctaagatcgacgagctgctgggttctatcctggagaagaaaaatgaaatggtgtccagcacatga

SEQ ID NO: 86425 - protein, 288 aa, Zea mays
MASSMAAAATATALPLPSGTTQRPSAQGRLLFTAAPARSRCRSLRLRPAGRRSARSSPRATKAVVAALADPLKVMISGAPASGKGTQCELIKTKYQLAHISAGDLLRAEIAAGSENGKRAKEFMEKGQLVPDEIVVNMVKERLRQPDAQENGWLLDGYPRSYSQAMALETLEIRPDTFILLDVPDELLVERVVGRRLDPVTGKIYHLKYSPPENEEIASRLTQRFDDTEEKVKLRLETYYQNIESLLSTYENIIVKVQGDATVDAVFAKIDELLGSILEKKNEMVSST

SEQ ID NO: 86426 - DNA, 882 bp, Zea mays
  CDS (1)..(882)
atggctgccctcctgcggctcgccgccgcgcgatccgccctccccaggcgcgccctcgccccacaccggaggctctcggcggccgtcgcgatggaggagtggtggtccgactgggagcaggacggcgaggaggaggcgcgcgcctcggcgccggccgccggccttgaccccgccggcgggggccccgggggcgtgcagtgggtcgtcatgggccgccctggcccgcagaagcacgcccacgccgcgcgcctcgccgaggtgctcgccgtgccctacatctccatgggcgcgctcctcaggcaggagctcaacccctcctcgcaactctacaggaagattgcaaactctgtgaatgaagggaggcttgtgccggaggacatcatatttgggttgctgacgaagcggcttgaggacggatacaacaagggtgaaaatgggttcattcttgatgggattccacgcacccgtatgcaagctgagattcttgacgagattgtggatgttgatttggttcttaatttcaagtgtgctgatggctgtttcatgaagaagcaatcgagaggcaacatctgcgcccactgtggacagctctttgacgtcagcaattcagcatctacgaactgtagccccagcctcgggagctatacatggcattctcaggcagaacctgctggtgttttaggcctcgaagcctcaaggatggagaggatgcgcacatatgctgagcagaccaagcagctggaagattactacaagaagcagaggaaaattgtggaactgaagacatctgctcgccctgtggagacatggcaggggcttgtagccgccctgcacctccagcatctggactcgcccccgacaccgcacaaactcaccgcgtaa

SEQ ID NO: 86427 - protein, 293 aa, Zea mays
MAALLRLAAARSALPRRALAPHRRLSAAVAMEEWWSDWEQDGEEEARASAPAAGLDPAGGGPGGVQWVVMGRPGPQKHAHAARLAEVLAVPYISMGALLRQELNPSSQLYRKIANSVNEGRLVPEDIIFGLLTKRLEDGYNKGENGFILDGIPRTRMQAEILDEIVDVDLVLNFKCADGCFMKKQSRGNICAHCGQLFDVSNSASTNCSPSLGSYTWHSQAEPAGVLGLEASRMERMRTYAEQTKQLEDYYKKQRKIVELKTSARPVETWQGLVAALHLQHLDSPPTPHKLTA

SEQ ID NO: 86428 - DNA, 1800 bp, Zea mays
  CDS (1)..(1800)
atgtcggtctcctccccggccatggcctcgccccctctcgccgcgcccggcactcaccgcggcccctgcttctcgaccctctgccgcttaccgtcgccttcctgctacccgcctctttcggcttcctcctcaccggctatctccaccgtctccgcattcgctgtcctcaaacacaagcccagaggtctgggactaaggtgccaggccgcggaggaggcaccaccgccggcgcggggtaagacttcgctcaaggtgatgatttcgggagctcccgcctcgggaaaaggaacgcaatgccgcatgatcgtcgagaagtatggtttagttcacatatcaactggtgatcttctgcgagctgaagtatcttctggcacagaaattggcaagaaagcaaaagaatacatggacaatggaaagcttgtgccggaccaagttgtgacagatatggtggtatcacgactgtcacaaccggatatacaagaaagagggtggcttcttgatggttacccaaggagcttcagtcaagcacaacaccttgaaaatttgaaaataagaccgaatatattcattgtgctagaagttcctgatgatgttctaatcgacagatgtgttggaagacggctggatcctgtgactggcaagatttaccatttaaaaaactaccccccggagaatgaggagatttctgcccgacttattacacgttctgatgacacatttgagaaggttaaatcacgtcttgatacgtacaagcaaaattctgaagctattcttcctacatactctgatttgcttaataagattgatggaaactgcccagccgaagttgtttttcaggcgatagatttcctgttacagaagatctgtgagaacacttcagcgagcaagttgaccaaaacaaatggaaaaccaccagattctgcggatacaggttcaaaaaatgagtggcgtggaattccaacgaggttgaataacattccacattctagggaaattagggaatacttctacaacgacgtgttaaaagctacaaaacttgctattgaagataaaaagactcggttgcagatagatatcaatattcctgaacttaaccctgaaatggatgtttaccgcataggaaccctcatggaacttgtaagagaactttctctatcctttgcagatgatgggaaacgtgtcaaggtctgtgttcaaggctccatggggcaaggtgcatttgctggcatcccacttcaactggcaggaaccagaaaaattttggaattcatggactggggtgactatggggcgaagggcaccttcattaatattggagcagtaggtgctagagatgttgacaaagaagatgatatgtttgtcctcattgctccacaaaatgctgttggaaactgcataattgatgatatgagagctatgactgatgctgctggtgatagacctgtgattcttgtaaatcctcgcctaaaggatatgcctgcatcaagtggtgttatgcaaacaatgggaagggatattaggctgaagtatgctgcatcatttgagacatgctattcattccgtcttctctactacgctggttcattctatcctattatgggagctttaaggatggcttatccaaataaatatgagatttatcgaagggttgacactctcaatggaaaagagaactatattcttatagctgaattcacgaacaagccaactcctgatgagatcaccagtgctttcaaaggacaaaaaagggaagaaaaggcatcttctggattctggggtttcttaagtggtttattttaa

SEQ ID NO: 86429 - protein, 599 aa, Zea mays
MSVSSPAMASPPLAAPGTHRGPCFSTLCRLPSPSCYPPLSASSSPAISTVSAFAVLKHKPRGLGLRCQAAEEAPPPARGKTSLKVMISGAPASGKGTQCRMIVEKYGLVHISTGDLLRAEVSSGTEIGKKAKEYMDNGKLVPDQVVTDMVVSRLSQPDIQERGWLLDGYPRSFSQAQHLENLKIRPNIFIVLEVPDDVLIDRCVGRRLDPVTGKIYHLKNYPPENEEISARLITRSDDTFEKVKSRLDTYKQNSEAILPTYSDLLNKIDGNCPAEVVFQAIDFLLQKICENTSASKLTKTNGKPPDSADTGSKNEWRGIPTRLNNIPHSREIREYFYNDVLKATKLAIEDKKTRLQIDINIPELNPEMDVYRIGTLMELVRELSLSFADDGKRVKVCVQGSMGQGAFAGIPLQLAGTRKILEFMDWGDYGAKGTFINIGAVGARDVDKEDDMFVLIAPQNAVGNCIIDDMRAMTDAAGDRPVILVNPRLKDMPASSGVMQTMGRDIRLKYAASFETCYSFRLLYYAGSFYPIMGALRMAYPNKYEIYRRVDTLNGKENYILIAEFTNKPTPDEITSAFKGQKREEKASSGFWGFLSGLF

SEQ ID NO: 86430 - DNA, 726 bp, Zea mays
  CDS (1)..(726)
atggcggcgaatctagaggacgtgccgtctctggatctgatgcacgaactgctccgtcggatgaagtgcagctccaagcccgacaagcacctcatcctcatcggcccacctggctctggaaagggtactcagtctccccttattaaggatgaatattgcctgtgccatttagccactggtgatatgttgagggctgctgtggcagccaagacaactctaggtatcaaagctaaagaagctatggataagggagagcttgtttcagataacttggttgtggggattattgatgaagctatgaagaaaccgtcatgccagaaaggtttcattcttgatggcttccctagaactgtcactcaagcacagaagcttgatgagatgttggtaaagcaaggtgctaatgttgacaaggtcctaaactttgcaattgatgatgctatattggaagaacggattactggccgttggatccacccacccagtggtaggacttaccatacaaaatttgcacctccaaagtctccaggagttgatgatgtaactggagagccattgattcaaaggagggatgacactgccgaggttttgaagtcaaggcttgaagccttccacaaacaaactgagcctgtgattgattattactctaagaagggcttggtggtaaatctgcctgcggagaaaccaccaaaggaagtgactgctgaggtgctgaaagccctctcatga

SEQ ID NO: 86431 - protein, 241 aa, Zea mays
MAANLEDVPSLDLMHELLRRMKCSSKPDKHLILIGPPGSGKGTQSPLIKDEYCLCHLATGDMLRAAVAAKTTLGIKAKEAMDKGELVSDNLVVGIIDEAMKKPSCQKGFILDGFPRTVTQAQKLDEMLVKQGANVDKVLNFAIDDAILEERITGRWIHPPSGRTYHTKFAPPKSPGVDDVTGEPLIQRRDDTAEVLKSRLEAFHKQTEPVIDYYSKKGLVVNLPAEKPPKEVTAEVLKALS

SEQ ID NO: 86432 - DNA, 726 bp, Zea mays
  CDS (1)..(726)
atggcggcgaatctggaggacgtgccgtcgctggatctgatgcacgagttgctccgccgcatgaagtgcagctccaagcccgacaagcgcctcatcgtcatcggcccacctggctctggaaagggaacccagtctcccattattaaggatgaatattgcttgtgccatttagccactggtgatatgctgagggctgctgtggcggccaagacacctctaggtatcaaggcaaaagaagctatggataagggagagcttgtttcagatgacatggttgtggggattattgatgaagctatgaagaaaccttcatgccagaaaggtttcattcttgatggctttcctagaactgtcactcaagcacagaagctcgatgaaatgttggcaaagcaaggtgctaatgttgacaaggtcctgaacttcgcaattgatgatgctatattggaagaacggattactggtcgttggatccattcggccagtggtaggacttaccattcaaaatttgcacctccaaagtctccgggagttgatgatgtaactggagagccattgattcaacgaagagatgacacagctgagatcttgaagtcaaggcttgaagccttccacagacaaactgaacctgtgattgagtattactccaagagaggcttagtggtgaacctgcccgcagagaaaccaccaaaggaagtgactgctgaggttttgaaagccctctcttga

SEQ ID NO: 86433 - protein, 241 aa, Zea mays
MAANLEDVPSLDLMHELLRRMKCSSKPDKRLIVIGPPGSGKGTQSPIIKDEYCLCHLATGDMLRAAVAAKTPLGIKAKEAMDKGELVSDDMVVGIIDEAMKKPSCQKGFILDGFPRTVTQAQKLDEMLAKQGANVDKVLNFAIDDAILEERITGRWIHSASGRTYHSKFAPPKSPGVDDVTGEPLIQRRDDTAEILKSRLEAFHRQTEPVIEYYSKRGLVVNLPAEKPPKEVTAEVLKALS

SEQ ID NO: 86434 - DNA, 873 bp, Zea mays
  CDS (1)..(873)
atggcggctgtgcagcgcctcctccgggcagtcgcccccggtggctcggcagcggcggcggtcaggaggcgcatgacgtcgcttgcgccggagcaggcgccgtctgcagccgccgggttcccattcgcggcggagcagagagcaaggcggccggtggcggcggagaggaacgtgcagtgggtgttcctgggctgccccggcgtgggcaagggcacctacgcgagccgcctgtcgcgcctcctcggcgtgccgcacatcgcgacgggggatcttgttcgcgacgagctcgcctccaccgggccacttgctacgcagcttgctgaaattgttaatcaggggaaattagtttctgatgaaattatcatcaatcttttgtccaaaaggcttaagaaaggagaagaccagggagaatcaggatttattcttgatggttttccccgtacagtaaaacaagcggaaattcttgatggcgttacagacattgatatggtggttaatctgaaactaagagaagatgttatagtagagaagtgccttggcagaaggatttgcggccaatgtggaaagaacttcaatttggcctgcattgatgttaagggtgaaaatggactcccaccaatctacatggcaccactgttgcccccaaacaactgcatgtcgaagcttattacccgagctgatgataccgaagaggtggtcagaaatcggcttcagatatataatgacatgagtcaacctgtggaaggtttctaccgagagcaggggaagctcttggaatttgacttgcctggtgggatccctgaatcttggccaaagctgctccaggttctaaacctcgaggaccaagaggagttgaggttggctgcagcgtag

SEQ ID NO: 86435 - protein, 290 aa, Zea mays
MAAVQRLLRAVAPGGSAAAAVRRRMTSLAPEQAPSAAAGFPFAAEQRARRPVAAERNVQWVFLGCPGVGKGTYASRLSRLLGVPHIATGDLVRDELASTGPLATQLAEIVNQGKLVSDEIIINLLSKRLKKGEDQGESGFILDGFPRTVKQAEILDGVTDIDMVVNLKLREDVIVEKCLGRRICGQCGKNFNLACIDVKGENGLPPIYMAPLLPPNNCMSKLITRADDTEEVVRNRLQIYNDMSQPVEGFYREQGKLLEFDLPGGIPESWPKLLQVLNLEDQEELRLAAA

SEQ ID NO: 86436 - DNA, 639 bp, Zea mays
  CDS (1)..(639)
atgggcacagttgtggatgccgctccagcagttgtggctgaggtcactgagaacatgttgggtggcaagaaagttacagttgtatttgtcctaggtggtcctggaagtggaaaaggcacacagtgtgccaacatcgtggagcactttggattcacccatcttagtgctggagatcttctgcgtgcagagattaaatctggctctgagaacggaaccatgattgagaacatgataaaggagggaaagattgttccatcggaggtgactataaagcttttgcaggaggcaatgataaaaagtgaaaatgacaaattcctgatcgatggatttccaaggaatgaggagaatcgtgcagcctttgagaatgttaccaaaatttctcctgcatttgtgctattctttgactgttctgaagaagatatggagaaacgactcctggggcgcaatcagggaagggttgatgataacattgaaactatcaaaaaaaggttcaaaacctttgttgactcaactctgcctgtcattgagcattacaactcaaaggacaaggttaaaaagattgatgctgcaaaaccaatccccgaggtgtttgaagacgtcaaagccatttttgccccatattctctaaaggctgaatag

SEQ ID NO: 86437 - protein, 212 aa, Zea mays
MGTVVDAAPAVVAEVTENMLGGKKVTVVFVLGGPGSGKGTQCANIVEHFGFTHLSAGDLLRAEIKSGSENGTMIENMIKEGKIVPSEVTIKLLQEAMIKSENDKFLIDGFPRNEENRAAFENVTKISPAFVLFFDCSEEDMEKRLLGRNQGRVDDNIETIKKRFKTFVDSTLPVIEHYNSKDKVKKIDAAKPIPEVFEDVKAIFAPYSLKAE

SEQ ID NO: 86438 - DNA, 726 bp, Zea mays
  CDS (1)..(726)
atggcggcgaatctggaggacgtgccgtcactggatctgatgcacgagctgctccgccgcatgaagtgcagctccaagcccgacaagcgcctcatcctcatcggtccacctggctctggaaagggaactcagtctcctattatcaaggatgaatattgcttgtgccatttagccactggtgacatgctgagggctgctgtggcggccaagacacctctaggtatcaaagctaaagaagctatgaataagggagagcttgtttcagatgatttggttgtgggcattattgatgaagctatgaagaaaccctcatgccagaaaggtttcattcttgatggctttcctagaactgtgactcaagcacagaagcttgatgagatgttggcaaagcaaggtgccaatgttgacaaagtcctgaactttgcaattgatgatgctgtattggaagaacggattactggtcgttggatccactcagccagtggtaggacttaccactcaaaatttgcacctccaaagtctccaggagttgatgatgtaactggagagccattgattcaaaggagagatgacaccgctgaggtcttgaagtcaaggcttgaagctttccacagacaaaccgaacctgtgattgattattactccaagaagggcttagtggtgaacctgcctgcagagaaaccaccgaaggaagtgactgctgaggtgcagaaagccctctcgtga

SEQ ID NO: 86439 - protein, 241 aa, Zea mays
MAANLEDVPSLDLMHELLRRMKCSSKPDKRLILIGPPGSGKGTQSPIIKDEYCLCHLATGDMLRAAVAAKTPLGIKAKEAMNKGELVSDDLVVGIIDEAMKKPSCQKGFILDGFPRTVTQAQKLDEMLAKQGANVDKVLNFAIDDAVLEERITGRWIHSASGRTYHSKFAPPKSPGVDDVTGEPLIQRRDDTAEVLKSRLEAFHRQTEPVIDYYSKKGLVVNLPAEKPPKEVTAEVQKALS

SEQ ID NO: 86440 - DNA, 1800 bp, Zea mays
  CDS (1)..(1800)
atgtcggtctcctccccggccatggcctcgccccctctcgccgcgcccggcactcaccgcggcccctgcttctcgaccctctgccgcttaccgtcgccttcctgctacccgcctctttcggcttcctcctcaccggctatctccaccgtctccgcattcgctgtcctcaaacacaagcccagaggtctgggactaaggtgccaggccgcggaggaggcaccaccgccggcgcggggtaagacttcgctcaaggtgatgatttcgggagctcccgcctcgggaaaaggaacgcaatgccgcatgatcgtcgagaagtatggtttagttcacatatcaactggtgatcttctgcgagctgaagtatcttctggcacagaaattggcaagaaagcaaaagaatacatggacaatggaaagcttgtgccggaccaagttgtgacagatatggtggtatcacgactgtcacaaccggatatacaagaaagagggtggcttcttgatggttacccaaggagcttcagtcaagcacaacaccttgaaaatttgaaaataagaccgaatatattcattgtgctagaagttcctgatgatgttctaatcgacagatgtgttggaagacggctggatcctgtgactggcaagatttaccatttaaaaaactaccccccggagaatgaggagatttctgcccgacttattacacgttctgatgacacatttgagaaggttaaatcacgtcttgatacgtacaagcaaaattctgaagctattcttcctacatactctgatttgcttaataagattgatggaaactgcccagccgaagttgtttttcaggcgatagatttcctgttacagaagatctgtgagaacacttcagcgagcaagttgaccaaaacaaatggaaaacgaccagattctgcggatacaggttcaaaaaatgagtggcgtggaattccaacgaggttgaataacattccacattctagggaaattagggaatacttctacaacgacgtgttaaaagctacaaaacttgctattgaagataaaaagactcggttgcagatagatatcaatattcctgaacttaaccctgaaatggatgtttaccgcataggaaccctcatggaacttgtaagagaactttctctatcctttgcagatgatgggaaacgtgtcaaggtctgtgttcaaggctccatggggcaaggtgcatttgctggcatcccacttcaactggcaggaaccagaaaaattttggaattcatggactggggtgactatggggcgaagggcaccttcattaatattggagcagtaggtgctagagatgttgacaaagaagatgatatgtttgtcctcattgctccacaaaatgctgttggaaactgcataattgatgatatgagagctatgactgatgctgctggtgatagacctgtgattcttgtaaatcctcgcctaaaggatatgcctgcatcaagtggtgttatgcaaacaatgggaagggatattaggctgaagtatgctgcatcatttgagacatgctattcattccgtcttctctactacgctggttcattctatcctattatgggagctttaaggatggcttatccaaataaatatgagatttatcgaagggttgacactctcaatggaaaagagaactatattcttatagctgaattcacgaacaagccaactcctgatgagatcaccagtgctttcaaaggacaaaaaagggaagaaaaggcatcttctggattctggggtttcttaagtggtttattttaa

SEQ ID NO: 86441 - protein, 599 aa, Zea mays
MSVSSPAMASPPLAAPGTHRGPCFSTLCRLPSPSCYPPLSASSSPAISTVSAFAVLKHKPRGLGLRCQAAEEAPPPARGKTSLKVMISGAPASGKGTQCRMIVEKYGLVHISTGDLLRAEVSSGTEIGKKAKEYMDNGKLVPDQVVTDMVVSRLSQPDIQERGWLLDGYPRSFSQAQHLENLKIRPNIFIVLEVPDDVLIDRCVGRRLDPVTGKIYHLKNYPPENEEISARLITRSDDTFEKVKSRLDTYKQNSEAILPTYSDLLNKIDGNCPAEVVFQAIDFLLQKICENTSASKLTKTNGKRPDSADTGSKNEWRGIPTRLNNIPHSREIREYFYNDVLKATKLAIEDKKTRLQIDINIPELNPEMDVYRIGTLMELVRELSLSFADDGKRVKVCVQGSMGQGAFAGIPLQLAGTRKILEFMDWGDYGAKGTFINIGAVGARDVDKEDDMFVLIAPQNAVGNCIIDDMRAMTDAAGDRPVILVNPRLKDMPASSGVMQTMGRDIRLKYAASFETCYSFRLLYYAGSFYPIMGALRMAYPNKYEIYRRVDTLNGKENYILIAEFTNKPTPDEITSAFKGQKREEKASSGFWGFLSGLF

SEQ ID NO: 86442 - DNA, 28 bp, Artificial sequence
  primer
atggctatggctaaaggtttaatttttc

SEQ ID NO: 86443 - DNA, 21 bp, Artificial sequence
  primer
ttaaggtttaaccaatttttc

SEQ ID NO: 86444 - protein, 223 aa, Artificial sequence
  consensus sequence
  Variant (2)..(2): Xaa in position 2 is any amino acid
  Variant (5)..(5): Xaa in position 5 is any amino acid
  Variant (11)..(23): Xaa in position 11 to 23 is any amino acid
  Variant (24)..(25): Xaa in position 24 to 25 is any or no amino acid
  Variant (27)..(27): Xaa in position 27 is any amino acid
  Variant (30)..(31): Xaa in position 30 to 31 is any amino acid
  Variant (33)..(38): Xaa in position 33 to 38 is any amino acid
  Variant (39)..(42): Xaa in position 39 to 42 is any or no amino acid
  Variant (44)..(47): Xaa in position 44 to 47 is any amino acid
  Variant (48)..(55): Xaa in position 48 to 55 is any or no amino acid
  Variant (57)..(57): Xaa in position 57 is any amino acid
  Variant (60)..(60): Xaa in position 60 is any amino acid
  Variant (62)..(79): Xaa in position 62 to 79 is any amino acid
  Variant (80)..(96): Xaa in position 80 to 96 is any or no amino acid
  Variant (99)..(99): Xaa in position 99 is any amino acid
  Variant (102)..(104): Xaa in position 102 to 104 is any amino acid
  Variant (107)..(125): Xaa in position 107 to 125 is any amino acid
  Variant (126)..(145): Xaa in position 126 to 145 is any or no amino acid
  Variant (147)..(148): Xaa in position 147 to 148 is any amino acid
  Variant (149)..(149): Xaa in position 149 is any or no amino acid
  Variant (151)..(151): Xaa in position 151 is any amino acid
  Variant (152)..(194): Xaa in position 152 to 194 is any or no amino acid
  Variant (196)..(196): Xaa in position 196 is any amino acid
  Variant (199)..(204): Xaa in position 199 to 204 is any amino acid
  Variant (205)..(206): Xaa in position 205 to 206 is any or no amino acid
  Variant (208)..(216): Xaa in position 208 to 216 is any amino acid
  Variant (217)..(217): Xaa in position 217 is any or no amino acid
  Variant (219)..(222): Xaa in position 219 to 222 is any amino acid
GXPGXGKGTQXXXXXXXXXXXXXXXSXGDXXRXXXXXXXXXXGXXXXXXXXXXXXGXLVXDXXXXXXXXXXXXXXXXXXXXXXXXXXXXXXXXXXXDGXPRXXXQAXXXXXXXXXXXXXXXXXXXXXXXXXXXXXXXXXXXXXXXRXXXRXXXXXXXXXXXXXXXXXXXXXXXXXXXXXXXXXXXXXXXXXXXXRXDDXXXXXXXXRXXXXXXXXXXPXXXXY

SEQ ID NO: 86445 - protein, 12 aa, Artificial sequence
  protein pattern
  Variant (3)..(3): Xaa in position 3 is Phe or Tyr
  Variant (6)..(6): Xaa in position 6 is Asn, Ser or Thr
  Variant (7)..(8): Xaa in position 7 to 8 is any amino acid
  Variant (10)..(11): Xaa in position 10 to 11 is any or no amino acid
DGXPRXXXQXXA

SEQ ID NO: 86446 - protein, 14 aa, Artificial sequence
  protein pattern
  Variant (2)..(2): Xaa in position 2 is any or no amino acid
  Variant (5)..(5): Xaa in position 5 is Ala, Ser or Val
  Variant (10)..(10): Xaa in position 10 is any amino acid
  Variant (11)..(11): Xaa in position 11 is Ala, Cys or Ser
  Variant (12)..(13): Xaa in position 12 to 13 is any amino acid
  Variant (14)..(14): Xaa in position 14 is Ile, Leu, Met or Val
GXPGXGKGTXXXXX

SEQ ID NO: 86447 - DNA, 678 bp, Synechocystis sp.
  CDS (1)..(678): transl_table=11
atggattccgagattaatcatcgtggtggtttgagtgctccccgcccaagggaaacgtcacttaatttagctctctaccggggcttgaaatggggggtggtgcggccactgctccatggattgttccaggcccaggtatatggtcaggaattggtgccaacccgggggccggccttggtggtgagcaaccatgccagttattttgaccccccatttttgtcctgtgccatggcccggccggtggcctttatggccaaggaagagttatttaatgtgcccctgctgggtccagccattcgcctctatggggcctatccagtcaaacggggcagtggcgatcggggagcattgcgggccgccttgacggcgctgggggatggttggttagtgggggtctttctggagggaaccagaacaaaggatggccgcattcaccagccaaaattgggggctgccatgattgcagctaaagcccaagtgcccattattcccgtcagcctagggggagtagagcaaatttttcagcccggttccccctggccccatcctgtgcctttaactattcgcattggtaaggcgatcgcccctccagtaaagaataggaaacccgaattggaagcggttactaaagcttgccaagcccaaattcacgagatgctggatttaggcagggattaa

SEQ ID NO: 86448 - protein, 225 aa, Synechocystis sp.
MDSEINHRGGLSAPRPRETSLNLALYRGLKWGVVRPLLHGLFQAQVYGQELVPTRGPALVVSNHASYFDPPFLSCAMARPVAFMAKEELFNVPLLGPAIRLYGAYPVKRGSGDRGALRAALTALGDGWLVGVFLEGTRTKDGRIHQPKLGAAMIAAKAQVPIIPVSLGGVEQIFQPGSPWPHPVPLTIRIGKAIAPPVKNRKPELEAVTKACQAQIHEMLDLGRD

SEQ ID NO: 86449 - DNA, 639 bp, Nostoc sp. PCC 7120
  CDS (1)..(639): transl_table=11
atgtcccgaacccgcgaaccattgattagtctggcactgtaccatgcctttaagtggtcagttgtcagcccgatgttgcacacttactttcggggtcggatttatggtgtggaaaatgtcccccaatcaggccctgtagtagttgtaagtaatcatgctagttactttgacccgcccattgtctctaattgtgtgcgtcgtccagtggcatacatggcaaagcaagaattatttgaaattcctgttttagcacaggcgattaaattatatggtgcttacccagttagtagaggaagtgccgatcgcaatgccattcgtgcagctctagaatatctggaaaatggctgggctgtaggtgtgttcatggaaggtactcgcaccccagatggtcgcattagtgaccccaaaagaggcgcagccctactagcagctaaagcgaaagcgccgatattacctgtatgtttgtggggttcggagaatattttacaaaaaggttcctctgtgcctcgtgctgtgcctctaacagtgagaattgggaatttaattgatactcccagttctactaataaagacgagttagagtcaataacccaaaagtgtgccgccgccattaatcaaatgcacgatttagggcgctga

SEQ ID NO: 86450 - protein, 212 aa, Nostoc sp. PCC 7120
MSRTREPLISLALYHAFKWSVVSPMLHTYFRGRIYGVENVPQSGPVVVVSNHASYFDPPIVSNCVRRPVAYMAKQELFEIPVLAQAIKLYGAYPVSRGSADRNAIRAALEYLENGWAVGVFMEGTRTPDGRISDPKRGAALLAAKAKAPILPVCLWGSENILQKGSSVPRAVPLTVRIGNLIDTPSSTNKDELESITQKCAAAINQMHDLGR

SEQ ID NO: 86451 - DNA, 723 bp, Streptomyces coelicolor A3(2)
  CDS (1)..(723): transl_table=11
gtgttctactacgtgctcaagtacgtactgctgggcccgctgctgagggtcgtcttccgcccccggatcgaggggctcgaccatgtgccgggatcgggggcggccatcgtcgcgggcaaccacctctccttctcggaccacttcctcatgcccgcggtgctcaggcgccgcatcaccttcctggccaaggcggagtacttcaccgggccgggcctcaagggcagactgaccgcgttcttcttccgcagcgcggggcagatcccggtggaccgctcgggcaaggaggcggggcaggccgcgatccgcgaggggctcggcgtgctgggccggggcgagttgctcggcatctatccggagggcacccgctcgcacgacggccggctatacaagggcaaggtcggcgtggcggtgatggcgctcagggccggggtgccggtcgtgccctgcgcgatgatcggcaccttcgaggcgcagccgccgggccggaagatcccgaagctgcacccggtggtcatccgcttcggcgaacccctcgacttctcccgctatgcgggcatggagggcgagaaggccgtactgcgcgccgtcaccgacgagatcgtctacgcgatcctctccctctccggtcaggagtacgtcgaccggtacgcggcggacgtgaaggccgaggaggccgagcgggcggcgcagggccgcaggttcccccggctgccgcaccgctag

SEQ ID NO: 86452 - protein, 240 aa, Streptomyces coelicolor A3(2)
MFYYVLKYVLLGPLLRVVFRPRIEGLDHVPGSGAAIVAGNHLSFSDHFLMPAVLRRRITFLAKAEYFTGPGLKGRLTAFFFRSAGQIPVDRSGKEAGQAAIREGLGVLGRGELLGIYPEGTRSHDGRLYKGKVGVAVMALRAGVPVVPCAMIGTFEAQPPGRKIPKLHPVVIRFGEPLDFSRYAGMEGEKAVLRAVTDEIVYAILSLSGQEYVDRYAADVKAEEAERAAQGRRFPRLPHR

SEQ ID NO: 86453 - DNA, 663 bp, Streptomyces coelicolor A3(2)
  CDS (1)..(663): transl_table=11
gtgaccgcatcctccgccgcgcccgccccctccgagaagggcgccgaggtcggccggcgcatcggcgtcggcctgatgtacgggctgtggaagccgcgcgtgctcggcgcctggcgggtgcccgccaccggtccggtgatctacgccgtcaaccacgcgcacaacatcgacggcccgatggtcatgggcgtcgcgccccggccgacgcacttcctgatcaagaaggaggcgttcgtcggcccgctcggacgcttcctgaccggcatcggccagctgaaggtggaccgccactccgccgaccgcgcggccatagggcaggcgctcggcgtgctggccgacggcggcgtcctgggcatcttcccggagggcacccggggcgagggcgacttcgcctcgctgcgcgccgggctggcctacttcgcggtgcgcagcggcgcgccgatcgtcccggtggcggtgctgggaagcacggaccgtcccggacggttgataaaggcgctgcccccgctgcgctcccgcgtggacgtcgtcttcggcgaccccttcgacgcgggcgacggcagtgggcggcgcacccgcaaggccctggacgaggccaccgaacgcatccagaagcagctcaccgcgcacctggaaaacgccaggcgcctcaccgggcgctga

SEQ ID NO: 86454 - protein, 220 aa, Streptomyces coelicolor A3(2)
MTASSAAPAPSEKGAEVGRRIGVGLMYGLWKPRVLGAWRVPATGPVIYAVNHAHNIDGPMVMGVAPRPTHFLIKKEAFVGPLGRFLTGIGQLKVDRHSADRAAIGQALGVLADGGVLGIFPEGTRGEGDFASLRAGLAYFAVRSGAPIVPVAVLGSTDRPGRLIKALPPLRSRVDVVFGDPFDAGDGSGRRTRKALDEATERIQKQLTAHLENARRLTGR

SEQ ID NO: 86455 - DNA, 636 bp, Thermosynechococcus elongatus BP-1
  CDS (1)..(636): transl_table=11
gtgagtcgcgatcgcgagccgctgatcagcctgctcctctaccatctcttcaaatggtcagtggtgagtccactcctgcacacctattttcgggggcgcatctatggtgcccatcaggtaccgctgcgcggaccactggtggtggtcgccaatcatgccagctactttgatccgccccttatctccaactgtgtgcgccgaccggtggcctggatggctaaggaggaattgttccacattcccatttttcgcaccttgattcgctggtatggcgcctatcctgtgaagcgaggcgcgggcgatcgccgggcgttgcaggctgccctcaaagccctacaacagggttgggcggtgggggtcttcttggagggtacccgcaccaaggatggccggattgatgacccgaaactgggggccgcgttgattgcagccaaagcgcaagcacccctgttgcctgtttgtctttggggcactcaggagattctcaagaatggcacctttccccgaccggtcccagttacggtgcgcattggtgcaccgattccaccgccggcttcgggggatcgcgctgccctagaagcggtcactcagcattgctgcgacgtcatccaccgcctccatgacttgggtcgctag

SEQ ID NO: 86456 - protein, 211 aa, Thermosynechococcus elongatus BP-1
MSRDREPLISLLLYHLFKWSVVSPLLHTYFRGRIYGAHQVPLRGPLVVVANHASYFDPPLISNCVRRPVAWMAKEELFHIPIFRTLIRWYGAYPVKRGAGDRRALQAALKALQQGWAVGVFLEGTRTKDGRIDDPKLGAALIAAKAQAPLLPVCLWGTQEILKNGTFPRPVPVTVRIGAPIPPPASGDRAALEAVTQHCCDVIHRLHDLGR

SEQ ID NO: 86457 - DNA, 726 bp, Streptomyces avermitilis MA-4680
  CDS (1)..(726): transl_table=11
gtgttttattacgtgctcaaatacgtgattctcggaccgctgttgaagctggtgttccggcctcggatcgagggtctcgaacacgtaccgtcgtcgggcccggccatcgtggcgggcaaccatctgtcgttctcggaccacttcctgatgcccgcgatcctcaaacggcgcatcaccttcctggcgaaggccgagtacttcacgggccccggcatcaagggccggctcacggccgcgttcttccgcagcgccggacagatcccggtggaccgctccggcaaggacgcgggccaggccgcgatccgcgaaggcctcggcgtgctgcgcaaggacgagctgctcggcatctacccggagggcacgcgctcgcacgacggccgcctctacaagggcaaggtgggcgtcgcggtgatggccctgcgggccggggtcccggtgattccctgcgcgatgatcggcaccttcgaggcccagccgccgggcaaggtcatcccgaacatccaccccgtcgtgatccgcttcggcaagcccctggagttctcccgctacgccggtatggagaacgagaaggcggtcctgcgcgccatcaccgacgagatcatgtacgccatcctcacgctctccgaacaggagtacgtcgaccggtacgcggcggtcgtcaaggccgaggaggccgccgagaaggcggcgaaggcccgcaagtttccccggatcccgctgagttga

SEQ ID NO: 86458 - protein, 241 aa, Streptomyces avermitilis MA-4680
MFYYVLKYVILGPLLKLVFRPRIEGLEHVPSSGPAIVAGNHLSFSDHFLMPAILKRRITFLAKAEYFTGPGIKGRLTAAFFRSAGQIPVDRSGKDAGQAAIREGLGVLRKDELLGIYPEGTRSHDGRLYKGKVGVAVMALRAGVPVIPCAMIGTFEAQPPGKVIPNIHPVVIRFGKPLEFSRYAGMENEKAVLRAITDEIMYAILTLSEQEYVDRYAAVVKAEEAAEKAAKARKFPRIPLS

SEQ ID NO: 86459 - DNA, 591 bp, Prochlorococcus marinus subsp. marinus str. CCMP1375
  CDS (1)..(591): transl_table=11
ttggtatttcctatttttagaattttatttcgagggcgcactttaggtaatgagaatgttcctaaacatggaccgttggttgtggttgcaaaccatggctcacatcttgacccaccttttttaggccatgcattaggcagacctgttgcatttatggcaaaagccgaactcttttatatacctttcctttcgtttgttattcgagcatgtggagcatatccagttagtagaggagcaagtgatcgagaggctattaggacagcaacggctaaattgagggcaggatgggcaacgggagtatttttagatggtacccgtcaagaagatgggagagtaaataaacctatggctggggctgctttattgtccgctcgaacaggcgcggcaattattccagttgcggtaattaatagtcatagagctcttaggaagggtttgtttttacctagattggttgccatacatttacgtataggcaagccaataatgcctccacaaagtcgtaagagaattgatttagataagacaacttttaagcttcaagaagcaatcaattcaatgcttgatgaaggactgatgtcagacaaatga

SEQ ID NO: 86460 - protein, 196 aa, Prochlorococcus marinus subsp. marinus str. CCMP1375
MVFPIFRILFRGRTLGNENVPKHGPLVVVANHGSHLDPPFLGHALGRPVAFMAKAELFYIPFLSFVIRACGAYPVSRGASDREAIRTATAKLRAGWATGVFLDGTRQEDGRVNKPMAGAALLSARTGAAIIPVAVINSHRALRKGLFLPRLVAIHLRIGKPIMPPQSRKRIDLDKTTFKLQEAINSMLDEGLMSDK

SEQ ID NO: 86461 - DNA, 705 bp, Prochlorococcus marinus str. MIT 9313
  CDS (1)..(705): transl_table=11
ttgacccaaaccaaaccccgcctgagctcaagcatgccggtgctaatgacaccgcagccaagtctcacctatcgactcgtgagctatctactggtgtttcccatcttccgggttctatttaggggatgcacctttggcaacgaaaatgttccgcgtcaaggtgctgttgtggtcgtcgccaaccacggctctcaccttgacccgcccctccttggccatgctcttgggcggcctgtggccttcatggccaaagcagaactgttccggatccccttcttaggagcaatcatccgtgcctgtggtgcttacccggtgaaacgcggcgccagtgacagggaagccattcgcatggccactgcccgcctgaacgaaggctgggccataggggtcttccttgatggcactcgccaagccaacggccgcgtcaatgcccccatgcctggggccgcactgctagcggctcgcagcgatgcgcccctacttccagtagcgatcatcaatagccaccgtgcccttggtaaacgtggacaattaccccgactcataccaatacaacttcgaatcggcaaaccgatccccccaccttccagccgtcgtaaacacgacttggaagccaccagcgcagaacttcaaaaaagaatcaatgcgctgctggatcaaggacttttgagttcggcagaagagcgtctccgccgccagcgctga

SEQ ID NO: 86462 - protein, 234 aa, Prochlorococcus marinus str. MIT 9313
MTQTKPRLSSSMPVLMTPQPSLTYRLVSYLLVFPIFRVLFRGCTFGNENVPRQGAVVVVANHGSHLDPPLLGHALGRPVAFMAKAELFRIPFLGAIIRACGAYPVKRGASDREAIRMATARLNEGWAIGVFLDGTRQANGRVNAPMPGAALLAARSDAPLLPVAIINSHRALGKRGQLPRLIPIQLRIGKPIPPPSSRRKHDLEATSAELQKRINALLDQGLLSSAEERLRRQR

SEQ ID NO: 86463 - DNA, 654 bp, Synechococcus sp. WH 8102
  CDS (1)..(654): transl_table=11
gtgagcagcgccccactggcccaggcacctaagcccagccttgcctaccggctagtgagtgagctgctggtgtttccactcttccgggggctgttccgtggctccacccgcggcctgcaccatgtgccgaagcagggagcggtggtggtggtgtccaaccatggctcccatttcgacccacccctgctaggtcatgccctggggcggccggtggccttcatggccaaggcggaactgttttcaatcccgttgctgggggccgtgattcgcgcctgtggcgcctatccggtgcggcgagggggcagtgaccgcgaggccatccgcacggccaccgcgcgactgatggagggatgggcgacaggtgtcttcctcgatggcacccgccagcctgacggtcgagtgaatgcaccacagcctggcgctgcgctcctagccgcccgcagcggtgctccgctgctccccgtggcgatcgtcaacagccatcgagccctgggaacgggccaagttgtaccgcggctggtgccgctgcagctgcgggtgggggagcccgtgccagcgccggcgagtcgccgccgtgctgatctcgacgccacgacagccattcttcagcaacggatcaacgcactgctggagctggatccgctgcatccctga

SEQ ID NO: 86464 - protein, 217 aa, Synechococcus sp. WH 8102
MSSAPLAQAPKPSLAYRLVSELLVFPLFRGLFRGSTRGLHHVPKQGAVVVVSNHGSHFDPPLLGHALGRPVAFMAKAELFSIPLLGAVIRACGAYPVRRGGSDREAIRTATARLMEGWATGVFLDGTRQPDGRVNAPQPGAALLAARSGAPLLPVAIVNSHRALGTGQVVPRLVPLQLRVGEPVPAPASRRRADLDATTAILQQRINALLELDPLHP

SEQ ID NO: 86465 - DNA, 693 bp, Gloeobacter violaceus PCC 7421
  CDS (1)..(693): transl_table=11
gtgtcgacccccgcgcctggggctacagcggaaagtaaacccgtgcaacagaccctgcgccccgagcaaaccctgctgccctatcacctgctgaagtggctggtggtcagtcccctgctgcacaccgccctgcgcatgcgcatcaccggcgccgaacacgtcccgcccagcgggccggtcatcctcgcctccagccacgccagccacctcgaccccgtgatcctcgccaactgcgcccggcggccggtggccttcatggccaaagaagaactctttcgcgtgcccgtgctcaaatcgctgatccgtgtctacggcgccttcccggtccggcgcggcaccggcgatcgcggcgccatccgcaccgccctcgaagcgctcgaagccggttgggcagtaggcatcttcgtgggcggcacccgcaccgccgatggccgcgttgccaccccccagctgggcgcggcgatgatcgccgccaaggcccaggtaccgatcgtccccgtcgccgtcggcggcaccggccggatcctccccaaaggcagcgtcctgccccgcctgcacagcgtcgcagtcgccttcggaccgcccctcgacccgcccgccgacacccgccgcgccgcgctcgaggcggtgacggcgctctgcacagaacaaatacaccatttgctggaagccggagccgccaccgccgactga

SEQ ID NO: 86466 - protein, 230 aa, Gloeobacter violaceus PCC 7421
MSTPAPGATAESKPVQQTLRPEQTLLPYHLLKWLVVSPLLHTALRMRITGAEHVPPSGPVILASSHASHLDPVILANCARRPVAFMAKEELFRVPVLKSLIRVYGAFPVRRGTGDRGAIRTALEALEAGWAVGIFVGGTRTADGRVATPQLGAAMIAAKAQVPIVPVAVGGTGRILPKGSVLPRLHSVAVAFGPPLDPPADTRRAALEAVTALCTEQIHHLLEAGAATAD

SEQ ID NO: 86467 - DNA, 681 bp, Strongylocentrotus purpuratus
  CDS (1)..(681)
atgtcatcagcccctgagttctggcgagacagagcagcggtgacatgggcctcgatgctgctctccaacacaaatggtctgtttggaatacgtgctgaagttcgagggctccaccaccttgactacaataagccagccattgtcgttgccaatcaccaatcttccattgatttgatgagcatgttctcgtttggcgtttggcccaagcgatgtgttgtcttggggaagaaggagcttctgttctttggaccgtttggtgtgagtctgtacctgtgtgggacagtctttgtagatcgccttaatccggaaaaggccagaagtacaatggagaagacagcccaacacatcaaggataaaaatatcaaagtttggatattccctgagggaaccaggaatagggagacaggtctgctacctttcaagaaaggagctttccatcttgccgtccaagctcaggtacctgtcattccaatcgtgttttcatcatattctgatttctacagccacagggaaaagcgattcggaactggaaagtttaccatcacagtgctaccccctgtctccaccgaaggaaagaccagtgaggacgtgaacgagctcacagagacagtcaggaaacagatgctcaccacttacaacgagacctctatgcaaaggatggagagtaatggtctcaattga

SEQ ID NO: 86468 - protein, 226 aa, Strongylocentrotus purpuratus
MSSAPEFWRDRAAVTWASMLLSNTNGLFGIRAEVRGLHHLDYNKPAIVVANHQSSIDLMSMFSFGVWPKRCVVLGKKELLFFGPFGVSLYLCGTVFVDRLNPEKARSTMEKTAQHIKDKNIKVWIFPEGTRNRETGLLPFKKGAFHLAVQAQVPVIPIVFSSYSDFYSHREKRFGTGKFTITVLPPVSTEGKTSEDVNELTETVRKQMLTTYNETSMQRMESNGLN

SEQ ID NO: 86469 - DNA, 891 bp, Strongylocentrotus purpuratus
  CDS (1)..(891)
atggaggaacaaattgtgtatgaaactacgacccactcgtcgcccgggtcgacgttgaaattgactgtgtttcttgtcgcggcgttgggtatggtgtatttgatttcaaggagcagatgtggggccttctacgcaaggtatatcaccctcatcgcatcgtatatcgtgtttggtttgctgttcgtaccaatcctcatgctcaaccccggcagccctaagaatgcttggtggttaacaaaatacgggaacattttccagctacccctgtgtcgcctcaccatcaaacggaaagggtgtgcatacccagagggaccgttcgtcgttgtttgcaaccatcaaagctctcttgacagcccagttataatgcacgacgatatttggcctggaaactgcgtggtgattatgaagaaggccatgaaatacacgggtccctttggattgtgtctgatactcagtggtaccctattcgtcgacaggaaaagctccgccagtgcgaaggacatgttacgtcacgccgtggatgcaatacaaaaggataagcgtcgtgtttgggtgtttccagagggaactcgaagactgatgacggaaaaacaatcggaagaaccactgctacctttcaagaaaggtgctttcaatttagctgtacttgctcaggttcctatagtgccagttgtattgtcatcacaagcaaaactctttagctccaaagaatatttattcgaaccaggtgaggtaacgtcaacggtattgcctcctgttcctacaactggcttgacgttagatgatgttacgacactctcggaagaagttcgagcaaaaatgatagacgtgtttgtaaatcagcatgaaaatggacacgttgtaacaggaggtgacgaatccaaaaattga

SEQ ID NO: 86470 - protein, 296 aa, Strongylocentrotus purpuratus
MEEQIVYETTTHSSPGSTLKLTVFLVAALGMVYLISRSRCGAFYARYITLIASYIVFGLLFVPILMLNPGSPKNAWWLTKYGNIFQLPLCRLTIKRKGCAYPEGPFVVVCNHQSSLDSPVIMHDDIWPGNCVVIMKKAMKYTGPFGLCLILSGTLFVDRKSSASAKDMLRHAVDAIQKDKRRVWVFPEGTRRLMTEKQSEEPLLPFKKGAFNLAVLAQVPIVPVVLSSQAKLFSSKEYLFEPGEVTSTVLPPVPTTGLTLDDVTTLSEEVRAKMIDVFVNQHENGHVVTGGDESKN

SEQ ID NO: 86471 - DNA, 705 bp, Prochlorococcus marinus str. MIT 9303
  CDS (1)..(705): transl_table=11
ttgacccaagccaatcccctattgagctcaagcatgccggtgctaatgacaccgcagccaagtctcacctatcgactcgtgagctatctactggtgtttcccatcttccggggtctatttaggggatgcacctttggcaacgaaaatgttccgcgtcaaggtgctgttgtggtcgtcgccaaccacggttctcaccttgacccgcccctccttggtcatgctcttgggcggcctgtggccttcatggccaaagcagaactgttccgaatccccctcttaggagcaatcatccgtgcctgtggtgcttacccagtgaaacgcggcgccagtgacagggaagccatccgcatggcaactgcccgtttgggcgaaggctgggccataggggtcttccttgatggcactcgccaagccaacggccgcgtcaatgcccccaggcctggagccgcactgctagcggctcgcagcgatgcgcccctacttccagtagcaattatcaatagccaccgtgcccttggtaaaagtggacaattaccccgactcataccaatacaactgcggatcggcaaactgatacccccaccttccagccgtcgtaaacacgacttggaagccaccagcgcagaactccaaaaaagaatcaatgcgctgctggatcaaggacttttgagttcggcagaagagcgtctccgccgccagcgctga

SEQ ID NO: 86472 - protein, 234 aa, Prochlorococcus marinus str. MIT 9303
MTQANPLLSSSMPVLMTPQPSLTYRLVSYLLVFPIFRGLFRGCTFGNENVPRQGAVVVVANHGSHLDPPLLGHALGRPVAFMAKAELFRIPLLGAIIRACGAYPVKRGASDREAIRMATARLGEGWAIGVFLDGTRQANGRVNAPRPGAALLAARSDAPLLPVAIINSHRALGKSGQLPRLIPIQLRIGKLIPPPSSRRKHDLEATSAELQKRINALLDQGLLSSAEERLRRQR

SEQ ID NO: 86473 - DNA, 666 bp, Synechococcus sp. WH 7803
  CDS (1)..(666): transl_table=11
gtgagcaatcttgagttgcaggatcaagcgccagggccgctggttctgacgccacgcccgagtctcgcctaccggcttgtgagcgcagcgttggtgtttccgctctaccggctgctgttccgggggaagacccatgggaacgagcgagtccccttgcaggggcctttggtggtggtggccaatcatggctcccatctcgatccacccttgttggggcacgccctggggcgcccggtggcgttcatggcgaaggcggaactcttccggattccccttctgggccccctgatccgggcctgcggggcctacccagtgaaccgtggagccagtgaccgtgaggccattcgcaccgccacagcccgcctgcaggaaggatgggccattggcgtgttcctcgatggaacgcgccagcccgatggccgcgtcaaccaacccatgcccggagcggccctgctctccgctcgctcaggagcaccgctactgcccgtggccatcgtgaacagtcatcgggccctgggcacggggcgaagctggccccggctggtgcccctgcaaatgcgcatcggcgaaccgatccctgcccctgccagtcgccgcaaacccgacctggaggccgccaccctcgaactgcaacgcaggatcaacgccctgctcgatcagggctga

SEQ ID NO: 86474 - protein, 221 aa, Synechococcus sp. WH 7803
MSNLELQDQAPGPLVLTPRPSLAYRLVSAALVFPLYRLLFRGKTHGNERVPLQGPLVVVANHGSHLDPPLLGHALGRPVAFMAKAELFRIPLLGPLIRACGAYPVNRGASDREAIRTATARLQEGWAIGVFLDGTRQPDGRVNQPMPGAALLSARSGAPLLPVAIVNSHRALGTGRSWPRLVPLQMRIGEPIPAPASRRKPDLEAATLELQRRINALLDQG

SEQ ID NO: 86475 - DNA, 642 bp, Thermus thermophilus HB27
  CDS (1)..(642): transl_table=11
gtgagcgcagcccagcccaaccccgtctaccgggcctcctggcacctggcccgcttcctcctccgccttctcttccactaccgggtggaaggcgcggagaaggtcccggccgaaggccccgtgatcctggcggcgaaccacctctccatcctggaccccatcgtcgtcggggcggggatccggcgccccgtgagcttcatggcccgggcggacgtcttccgcctgcccttcctctcctggctcctcccccggctctacgccatccccgtggagcggggaagcggggacttaagcgccgtgaagggcgccatccgcgccctggagcggggcatggccttcggcatcttcccggaaggcacccggagccgcaccggaaagctccagcccttcaagaccggggtggcggccatcgccctgcgcacgggaagccccgtggtccccgtggccgtggtgggcacggaggaagcctggcccgtggggaagaagctcttccgcccctgccgccccgtgcgggtgatctacggggaccccataccggttcccaggaagtccaaggtttcccaccgggagctggaagcgctcacccgggagattgaggcccgggtacgggatcttctgcccccccggtactgggggagctaa

SEQ ID NO: 86476 - protein, 213 aa, Thermus thermophilus HB27
MSAAQPNPVYRASWHLARFLLRLLFHYRVEGAEKVPAEGPVILAANHLSILDPIVVGAGIRRPVSFMARADVFRLPFLSWLLPRLYAIPVERGSGDLSAVKGAIRALERGMAFGIFPEGTRSRTGKLQPFKTGVAAIALRTGSPVVPVAVVGTEEAWPVGKKLFRPCRPVRVIYGDPIPVPRKSKVSHRELEALTREIEARVRDLLPPRYWGS

SEQ ID NO: 86477 - DNA, 645 bp, Symbiobacterium thermophilum IAM 14863
  CDS (1)..(645): transl_table=11
atgtggctgtacggttttgcaaggatcgtcgtgggactgggctaccgcctggcctaccgcgtccaagcggagggccgggagcacatcccgcccaccggcggcgtcatcctctgcggcaatcacatcaacgcacaggatcccatcgtgatcggcctggcttgcccccgaccgatctgcttcatggcgaaagaggaactgttccgttcgcagctgcttggcttcatcatcaaggggctgggcgcatttcccgtgaagcggggaagcgcggacagggccgccctgaagcacgccctggcgctcctggaagccggctgctgctttggcatattccccgagggcacccgctcccggaccggggagttgcagaagcccgagcccgggacggcgtacatcgccctgaaatccggcgtgccggtgattcccgttggcatcagcggcagttaccggctgttcagcccgatccgcgtccgcttcgggccgcccgtggacctcgaccgcttccgcggcgagaagctcaacggggagaccctggaagcggccagccaggccattgcggacgcgatcgccgccctgctggacccgccgtccggcctttccaacgccggcgcaggaccgccggccggacgtgcgctttcgtctctgtaa

SEQ ID NO: 86478 - protein, 214 aa, Symbiobacterium thermophilum IAM 14863
MWLYGFARIVVGLGYRLAYRVQAEGREHIPPTGGVILCGNHINAQDPIVIGLACPRPICFMAKEELFRSQLLGFIIKGLGAFPVKRGSADRAALKHALALLEAGCCFGIFPEGTRSRTGELQKPEPGTAYIALKSGVPVIPVGISGSYRLFSPIRVRFGPPVDLDRFRGEKLNGETLEAASQAIADAIAALLDPPSGLSNAGAGPPAGRALSSL

SEQ ID NO: 86479 - DNA, 633 bp, Prochlorococcus marinus str. NATL2A
  CDS (1)..(633): transl_table=11
atgcctcgacaaagttttgtttatgcttgcgtaagttatctctttgtttttccgatttttcgttttttgtttagaggtcaaacgaaagggatttcgaatttacctaatacaggtggggttgtcattgtatctaatcacggttctcacctggaccctccgattttgggccatgctttgggcagaccagtagcttttatggcaaaatctgaacttttcaatgtgcctcttttgtcattcataatttctgcttgtggtgcctatccagttaagaggggtgctggagatagagaagcactaagaaatgcttctaatcgattagttgaaggttgggctacaggtgtatttttggatggaaccagacaagaaaatggaagagttaatgatcctaaagcaggcgctgctctattggctgcgaggacaggttctcctattcttcctgtggcaatagttaatagtcacagagcttttccaaaaggatcccttcttccccgatttgtatctattcatttaagagttggtgaattaatccaacctcctaaaacacgtaaaagagaagatttaacatcaacaactaaagaaattcaaatatctataaattcaatgttggatcaaggccttataaagaatatttga

SEQ ID NO: 86480 - protein, 210 aa, Prochlorococcus marinus str. NATL2A
MPRQSFVYACVSYLFVFPIFRFLFRGQTKGISNLPNTGGVVIVSNHGSHLDPPILGHALGRPVAFMAKSELFNVPLLSFIISACGAYPVKRGAGDREALRNASNRLVEGWATGVFLDGTRQENGRVNDPKAGAALLAARTGSPILPVAIVNSHRAFPKGSLLPRFVSIHLRVGELIQPPKTRKREDLTSTTKEIQISINSMLDQGLIKNI

SEQ ID NO: 86481 - DNA, 807 bp, Anabaena variabilis ATCC 29413
  CDS (1)..(807): transl_table=11
atgcccctgttcggacttccctgcgggacgctacgctttggcgcaacctctatgagggaagcctgccccaattcccaattcaaggcaaaagtaaaaaggcaaaagaaaaaatcttttacctttttactttttactttttacttttttatccccactccccaagttcttatgtcccgaacccgcgaaccattgattagtctggcactttaccatgccttcaagtggtcagttgttagtccgatgttacacgcttactttcggggtcggatttatggtgtggaaaatgtcccccaatcaggccctgtagtagttgtgagtaatcatgctagttattttgatccgcccatcgtctctaattgtgtgcgtcgtccagtggcatacatggcgaagcaagaattatttgaaatccctgttttagcccaggcgattaaattatatggtgcttacccagttagtaggggaagtgccgatcgcaatgccattcgtgcagctctagaatatctggaaaatggctgggctgttggtgtattcctggaaggtactcgcacccctgatggtcgtattagtgaccccaaaagaggcgcagcgctactagcagctaaagcaaaagcgccgatattacctgtatgtttgtggggttcggagaatattttacaaaaaggttcctcggtacctcgtgcagtgcctctaacagtgagaattggtaatttaattgatactcccagttctactaataaagacgagttagagtcaataacacaaaagtgtgccgcagccattaatcaaatgcacgatttagggcgctaa

SEQ ID NO: 86482 - protein, 268 aa, Anabaena variabilis ATCC 29413
MPLFGLPCGTLRFGATSMREACPNSQFKAKVKRQKKKSFTFLLFTFYFFIPTPQVLMSRTREPLISLALYHAFKWSVVSPMLHAYFRGRIYGVENVPQSGPVVVVSNHASYFDPPIVSNCVRRPVAYMAKQELFEIPVLAQAIKLYGAYPVSRGSADRNAIRAALEYLENGWAVGVFLEGTRTPDGRISDPKRGAALLAAKAKAPILPVCLWGSENILQKGSSVPRAVPLTVRIGNLIDTPSSTNKDELESITQKCAAAINQMHDLGR

SEQ ID NO: 86483 - DNA, 654 bp, Synechococcus sp. CC9605
  CDS (1)..(654): transl_table=11
gtgagtcactccagcctcgtccgcacccccaagccaagcctcacctaccggctggtcagcagcctgctggtgttcccagtcttccgcttgctgttccgcggatcgaccgccggcaacaatcgagtgcccaggcaagggcccctcgtggtggtggccaaccatggctcgcacctggacccgcccctgctaggtcatgctctggggcgccccgtggccttcatggccaaggcggaactgttcagcatcccgctgctgggacgcgtgatccaagcctgtggtgcttaccccgtgcggcggggtgccagcgatcgcgaagcgatccgcacagccacggctcgcctcgaagaaggctgggccactggggtgtttctggacggcacccgacagaacgatggccggatcaacaacccactccccggagcggccctgctggcggcgcgcacgggagccccgctgctgccggtggccatctgcaacagccaccgcgccttgggcagcgggcgcagctggccgcgcttggtgccgattcagctgcgcatcggcgaccccatcccagccccggccagtcgccgcaggcctgatctggatgccaccaccgctctgctgcaggaacgcatcaacgccctgctggatcagggtccgcagcatccctga

SEQ ID NO: 86484 - protein, 217 aa, Synechococcus sp. CC9605
MSHSSLVRTPKPSLTYRLVSSLLVFPVFRLLFRGSTAGNNRVPRQGPLVVVANHGSHLDPPLLGHALGRPVAFMAKAELFSIPLLGRVIQACGAYPVRRGASDREAIRTATARLEEGWATGVFLDGTRQNDGRINNPLPGAALLAARTGAPLLPVAICNSHRALGSGRSWPRLVPIQLRIGDPIPAPASRRRPDLDATTALLQERINALLDQGPQHP

SEQ ID NO: 86485 - DNA, 678 bp, Synechococcus elongatus PCC 7942
  CDS (1)..(678): transl_table=11
atgttggaacagcagcagacctcacggtctaatcttctggctcgccgcgatcgcgaacccttcaactcgctgctgctctaccacctgttcaagtggtcggtggtcagccccatgctgcacctctacttccggggacggatttacggggcgggtaatgtcccgcgatcggggccgctgattgtggtcagtaaccatgccagcgatttcgacccgccgattgtctccaactgtgtgcggcgacccgtcgctttcatggcaaaagaggagctgtttcgcgttcctgtcttagcgcaggcgatccgtctctacggtgcctatccagtccggcggggcagcagcgatcgcaaggccctacaagcggcgatcgcggcagtggaatccggctgggcaaccggtgtctttctggaagggacacgcactcgcgatgctcgcattcaccagcccaagctgggggcagcgctggtagcgctcaaaacgggggcaccgctcttgccggtcagtctctggggaaccgagcgcattctccaacgaggctcctttttaccgcgccccgtgccgctgacgattcgcattggcgagccgatcgcaccgccccaatcaggcgatcgcgcggaactggagcgggttaccttgagctgtgccgccgcgattaaccatttacacagtctgggtcgctag

SEQ ID NO: 86486 - protein, 225 aa, Synechococcus elongatus PCC 7942
MLEQQQTSRSNLLARRDREPFNSLLLYHLFKWSVVSPMLHLYFRGRIYGAGNVPRSGPLIVVSNHASDFDPPIVSNCVRRPVAFMAKEELFRVPVLAQAIRLYGAYPVRRGSSDRKALQAAIAAVESGWATGVFLEGTRTRDARIHQPKLGAALVALKTGAPLLPVSLWGTERILQRGSFLPRPVPLTIRIGEPIAPPQSGDRAELERVTLSCAAAINHLHSLGR

SEQ ID NO: 86487 - DNA, 636 bp, Trichodesmium erythraeum IMS101
  CDS (1)..(636): transl_table=11
gtgactagaaaccgtgaaccacttaagaatttgcttctttatcgcttattaaaatggtcagtaatagttcctatactgcatttttattttcgcaataatatttatggtgctgaaaatgttccacaacaaggacctttactcatagttagtaaccatgctagcgatctagaccccccaattttatctgtttgtgtcagaagacctgttgcttatatggcaaaagaggaattatttaatatacctattttgaaggaggtaattactttatatggtgcttatcctgtaaaaaggggagcggcagatagaagtgctattcgtgctgctatgaatagtttagcagagggatgggctgcgggtatctttctacagggaactagaactcctgatggtaaaataacagaaccaaagttgggcgctgctttaattgctgcaaaggcaaaagtaccattgttaccagtttgtgtttggggtactcatgcagtgaaacgtcaaggtctaatagctaatgctgtaccagtaactgtcaggatagcagaggtgatacctcctcctgagtcaactaaaaaagaagaattagaacgggttagtctcaagtgtgcggatataattaacaaaatgcatgatttgggacgttaa

SEQ ID NO: 86488 - protein, 211 aa, Trichodesmium erythraeum IMS101
MTRNREPLKNLLLYRLLKWSVIVPILHFYFRNNIYGAENVPQQGPLLIVSNHASDLDPPILSVCVRRPVAYMAKEELFNIPILKEVITLYGAYPVKRGAADRSAIRAAMNSLAEGWAAGIFLQGTRTPDGKITEPKLGAALIAAKAKVPLLPVCVWGTHAVKRQGLIANAVPVTVRIAEVIPPPESTKKEELERVSLKCADIINKMHDLGR

SEQ ID NO: 86489 - DNA, 684 bp, Synechococcus sp. CC9311
  CDS (1)..(684): transl_table=11
atgtcccctcttgtgcccagcccgagcgacggctctgctgtagtgacatccgtcacgccaaaaccgagcctgatgtaccagctcgtgagctacttgctggtgtttcctgtctttcggggactcttaagagggcggaccagtggcaacgccttggtgccacttcaaggccccttggtggtagtcgcaaatcatggatcccatctcgacccacccttacttggccacgccctgggacgtcctgtggcgttcatggccaaagccgagctgttccggattccaatcttggggggcattattagcgcctgcggtgcttacccggtgaaacggggagcaagtgatcgagaagcaatccgtacagcaacagctcgacttgacgagggctgggcgatcggtgtctttcttgatggcacccgtcaaactgacggccgcgtcaatcaaccaagacctggtgcagccttacttgctgcacgcagcggagccccccttctccctgtggcaatcatcaacagccatcgcgccctcggcgcagggagtggctggccaaggcttgttcccgttgctcttcgcatcggagaaccaatccctgcgccaaccagtcggaaaaagcctgagctggaggccaccacccgtgagcttcagcggcgaattaatgccttgatcgatcaaggcgtgggaaatccctga

SEQ ID NO: 86490 - protein, 227 aa, Synechococcus sp. CC9311
MSPLVPSPSDGSAVVTSVTPKPSLMYQLVSYLLVFPVFRGLLRGRTSGNALVPLQGPLVVVANHGSHLDPPLLGHALGRPVAFMAKAELFRIPILGGIISACGAYPVKRGASDREAIRTATARLDEGWAIGVFLDGTRQTDGRVNQPRPGAALLAARSGAPLLPVAIINSHRALGAGSGWPRLVPVALRIGEPIPAPTSRKKPELEATTRELQRRINALIDQGVGNP

SEQ ID NO: 86491 - DNA, 678 bp, Nostoc punctiforme PCC 73102
  CDS (1)..(678): transl_table=11
atgcgtatgctaaattcagttttatttgcattatcttctgtggacaaaaaccgcgaaccgttcattagtctggcgctttaccacgcctttaaatggtcagtcgttagccccatacttcacacttactttcggggccagatttatggtgcggaaaatgtcccccaatcagggccgctactagtagtaagtaatcacgctagttactttgacccgccgattgtctctaattgtgtgcgtcgtccagtggcgtacatggctaaggaagagttatttaatatcccagttttggcgcaagcgattaaattgtatggtgcttacccggtgagtcgaggaagtgccgatcgcaatgccatccgttctgctttagattatctcaataaaggttgggctgtcggtgttttcttggaaggtactcgcaccccagatggtcgaattacagaccccaaaagaggcgcactgctgctagcggcgaaagcaaaagccccaatattaccagtaagtgtctgtggtactgagaagattttgcaaaaaggctcgtccctacctcacgcagttcccatcactgtgagaattggtaacttgattgatgctcccacttccactaataaagaggaattggaggcgttgacacaaaagtgtgccacggtaattaacaaaatgcatgatttaggacgataa

SEQ ID NO: 86492 - protein, 225 aa, Nostoc punctiforme PCC 73102
MRMLNSVLFALSSVDKNREPFISLALYHAFKWSVVSPILHTYFRGQIYGAENVPQSGPLLVVSNHASYFDPPIVSNCVRRPVAYMAKEELFNIPVLAQAIKLYGAYPVSRGSADRNAIRSALDYLNKGWAVGVFLEGTRTPDGRITDPKRGALLLAAKAKAPILPVSVCGTEKILQKGSSLPHAVPITVRIGNLIDAPTSTNKEELEALTQKCATVINKMHDLGR

SEQ ID NO: 86493 - DNA, 651 bp, Crocosphaera watsonii WH 8501
  CDS (1)..(651): transl_table=11
atggaaaatagggaattcaaagaaagagaacccctctctagtctaatcttatactatctcttcaaagggtctattattgtccccatgtgctacggttattttcggggacgggtttatggtcaggaaaatgtacctaaaaagtatcctttagtggtagtaagtaatcatgccagttattttgatccacccttattagcatcttgtatcggtcgtcccgtggcttttatggccaaagaagagttatttaaagtacctttgctcaaagaaggcatacgcttatatggagcttatcccgtcaaacgaggagccggcgatcgcagcgccattcgttccgctttaactgctttgaaagatggttggttagtgggcatttttttacaaggaacccgtaccattgatggtgggatagatgatcccaaactaggggcggcaatgatcgcagctaaggcacaagttcccctcttacccgtgtctttatggggaacagaaaaaatactcaaaaaaggttcacccattccccgtcccgtccccttaactattcgtattggggaagtcattcagccccctgagtccaataaacgtcaagctctagaaactgttacccaaaaatgcgctacagttattaatgaacttcatgagttaggacgatag

SEQ ID NO: 86494 - protein, 216 aa, Crocosphaera watsonii WH 8501
MENREFKEREPLSSLILYYLFKGSIIVPMCYGYFRGRVYGQENVPKKYPLVVVSNHASYFDPPLLASCIGRPVAFMAKEELFKVPLLKEGIRLYGAYPVKRGAGDRSAIRSALTALKDGWLVGIFLQGTRTIDGGIDDPKLGAAMIAAKAQVPLLPVSLWGTEKILKKGSPIPRPVPLTIRIGEVIQPPESNKRQALETVTQKCATVINELHELGR

SEQ ID NO: 86495 - DNA, 678 bp, Prochlorococcus marinus str. MIT 9211
  CDS (1)..(678): transl_table=11
ttgattaaagaattaaacaataattctagggctcatctactgcctccaaggcaaagtttggtttatgcatttattagttattgcatagtatttcctatctttcgaatattttttcgaggacgtatttcaggaattcaaaatgtgccattacaaggttctttagttattgttgccaatcacgcttcacatttggatccccctttattgggccatgctttggggcgtccaattgcttttatggctaagcaagagctttttcgtattcccattcttggttggattattcgtgcttgtggagcttatccagttagtagaggagctagtgatcgcgaagcgattcgtgtagcttcagaacgacttcatcaaggttgggcaacaggggtttttttggacgggaccagacaagagaatgggcgagtgaataaccctatggctggagctgctttgctggctgctagaactaattcccaaatacttcctgttgcaataatcaatagccatcgagcactaggcaaaggtatggcattggcaagatttgttccaattcatttgagaatagggaatgtgatatcaccaccagtaactcgtaaaaaaattgacttattagaaacaacaaagcaggtccaaatttcgattaatactatgattgaacagggtttaatagtgccaaagagttga

SEQ ID NO: 86496 - protein, 225 aa, Prochlorococcus marinus str. MIT 9211
MIKELNNNSRAHLLPPRQSLVYAFISYCIVFPIFRIFFRGRISGIQNVPLQGSLVIVANHASHLDPPLLGHALGRPIAFMAKQELFRIPILGWIIRACGAYPVSRGASDREAIRVASERLHQGWATGVFLDGTRQENGRVNNPMAGAALLAARTNSQILPVAIINSHRALGKGMALARFVPIHLRIGNVISPPVTRKKIDLLETTKQVQISINTMIEQGLIVPKS

SEQ ID NO: 86497 - DNA, 678 bp, Synechococcus sp. RS9917
  CDS (1)..(678): transl_table=11
gtgctgctcacgccgcggccgagcctcacctatcgcctggtgagctccctgctcgtctttcccgtgttccgcggtctgttcagaggccgcaccgtggggaacgagaatgtgccgatgcagggtcctgttgtggtggtggccaaccatggctcccatctggatccgccgctgctgggccatgccctcgggcgcccggtcgccttcatggccaaagcggaactgttcgacgttccggtgctggggccgatcatccgcgcctgcggcgcctaccccgtgcggcgcggagccagtgatcgcgaagcgatccgcacagccacggcccgccttgagcagggatgggccaccggcgtgtttctggacggcagccgccaagcgaacggccgggtcaatgagccgatgccaggcgctgccctgctcgccgcccgcagcggcgcccccctccttcccgtggcgatcgtgaacagccacagagcctggggccctggccagaggcgcctgcgcaccgtgccgatcctgctccgaatcggcacaccgatcccagctccggccagtcgccgcaaaccggatctggaagccaccacccgggagctccagcaacggatcaacggcctgctcgatcagggcctgctcgatcatgggcttctgggccagggtctgccgggccagtccccccactga

SEQ ID NO: 86498 - protein, 225 aa, Synechococcus sp. RS9917
MLLTPRPSLTYRLVSSLLVFPVFRGLFRGRTVGNENVPMQGPVVVVANHGSHLDPPLLGHALGRPVAFMAKAELFDVPVLGPIIRACGAYPVRRGASDREAIRTATARLEQGWATGVFLDGSRQANGRVNEPMPGAALLAARSGAPLLPVAIVNSHRAWGPGQRRLRTVPILLRIGTPIPAPASRRKPDLEATTRELQQRINGLLDQGLLDHGLLGQGLPGQSPH

SEQ ID NO: 86499 - DNA, 780 bp, Synechococcus sp. WH 5701
  CDS (1)..(780): transl_table=11
gtgagcgacaccggggagggcctcccggccagcgggccgatcacaccccgccgccgcggcctgcgccgccgcagaagcagggctgagcccccagccctgctcacgcccaggccgagcctcacctaccgcctgatcagctacctgctggtgtttccggtgttccggctgctgttcaggggccgcaccagcggcaatgaccgggtgcccttggatggggccctggtggtggtcgcgaaccatggctcccatctcgacccgcccctgctggggcacgccctggggcgtccggtggccttcatggccaaggccgaactgttccgggtgcccctgctggggcccatcatccgggcctgcggggcctatcccgtctcccgtggcgccagcgaccgggaggccatccgcatcgccaccgaccgcctgctcgagggctgggccaccggcgtgttcatcgacggcacccgccagccggatgggcgcgtgaatcagccgcagccaggggccgccctgctggcggcccggtcgggggcttccctgctgcccgtggcgatcatcaacagccaccgggcccttggcacggggcagagcaccccaagactggtgccgatccacatccgtatcggccagatcatccccccacccgcctcccgtcgccgcgtcgacctgctggccaccactgccgcctgtcaggagcagatcaacgcgctccttgatcagggtctgctggccccagcgcgggccccagccgccctgccgcccacgagcgaagatcccgaccggtga

SEQ ID NO: 86500 - protein, 259 aa, Synechococcus sp. WH 5701
MSDTGEGLPASGPITPRRRGLRRRRSRAEPPALLTPRPSLTYRLISYLLVFPVFRLLFRGRTSGNDRVPLDGALVVVANHGSHLDPPLLGHALGRPVAFMAKAELFRVPLLGPIIRACGAYPVSRGASDREAIRIATDRLLEGWATGVFIDGTRQPDGRVNQPQPGAALLAARSGASLLPVAIINSHRALGTGQSTPRLVPIHIRIGQIIPPPASRRRVDLLATTAACQEQINALLDQGLLAPARAPAALPPTSEDPDR

SEQ ID NO: 86501 - DNA, 22 bp, Artificial sequence
  primer
atggattccgagattaatcatc

SEQ ID NO: 86502 - DNA, 21 bp, Artificial sequence
  primer
ttaatccctgcctaaatccag

SEQ ID NO: 86503 - protein, 244 aa, Artificial sequence
  consensus sequence
  Variant (2)..(8): Xaa in position 2 to 8 is any amino acid
  Variant (9)..(25): Xaa in position 9 to 25 is any or no amino acid
  Variant (27)..(32): Xaa in position 27 to 32 is any amino acid
  Variant (33)..(47): Xaa in position 33 to 47 is any or no amino acid
  Variant (49)..(52): Xaa in position 49 to 52 is any amino acid
  Variant (54)..(56): Xaa in position 54 to 56 is any amino acid
  Variant (59)..(60): Xaa in position 59 to 60 is any amino acid
  Variant (62)..(67): Xaa in position 62 to 67 is any amino acid
  Variant (70)..(70): Xaa in position 70 is any amino acid
  Variant (72)..(73): Xaa in position 72 to 73 is any amino acid
  Variant (76)..(83): Xaa in position 76 to 83 is any amino acid
  Variant (86)..(88): Xaa in position 86 to 88 is any amino acid
  Variant (90)..(91): Xaa in position 90 to 91 is any amino acid
  Variant (95)..(95): Xaa in position 95 is any amino acid
  Variant (99)..(100): Xaa in position 99 to 100 is any amino acid
  Variant (102)..(102): Xaa in position 102 is any amino acid
  Variant (103)..(107): Xaa in position 103 to 107 is any or no amino acid
  Variant (109)..(115): Xaa in position 109 to 115 is any amino acid
  Variant (118)..(118): Xaa in position 118 is any amino acid
  Variant (121)..(121): Xaa in position 121 is any amino acid
  Variant (124)..(125): Xaa in position 124 to 125 is any amino acid
  Variant (126)..(127): Xaa in position 126 to 127 is any or no amino acid
  Variant (130)..(130): Xaa in position 130 is any amino acid
  Variant (132)..(134): Xaa in position 132 to 134 is any amino acid
  Variant (136)..(138): Xaa in position 136 to 138 is any amino acid
  Variant (140)..(141): Xaa in position 140 to 141 is any amino acid
  Variant (142)..(142): Xaa in position 142 is any or no amino acid
  Variant (144)..(146): Xaa in position 144 to 146 is any amino acid
  Variant (148)..(148): Xaa in position 148 is any amino acid
  Variant (150)..(151): Xaa in position 150 to 151 is any amino acid
  Variant (155)..(156): Xaa in position 155 to 156 is any amino acid
  Variant (157)..(163): Xaa in position 157 to 163 is any or no amino acid
  Variant (165)..(171): Xaa in position 165 to 171 is any amino acid
  Variant (175)..(176): Xaa in position 175 to 176 is any amino acid
  Variant (178)..(182): Xaa in position 178 to 182 is any amino acid
  Variant (184)..(185): Xaa in position 184 to 185 is any amino acid
  Variant (188)..(201): Xaa in position 188 to 201 is any amino acid
  Variant (202)..(212): Xaa in position 202 to 212 is any or no amino acid
  Variant (214)..(214): Xaa in position 214 is any amino acid
  Variant (216)..(227): Xaa in position 216 to 227 is any amino acid
  Variant (228)..(232): Xaa in position 228 to 232 is any or no amino acid
  Variant (234)..(236): Xaa in position 234 to 236 is any amino acid
  Variant (238)..(243): Xaa in position 238 to 243 is any amino acid
YXXXXXXXXXXXXXXXXXXXXXXXXPXXXXXXXXXXXXXXXXXXXXXRXXXXGXXXVPXXGXXXXXXNHXSXXDPXXXXXXXXRPXXXVXXMAKXELFXXPXXXXXXLXXXXXXXGAXPVXRGXXXXDRXAXXXAXXXLXXXGXXXGXFXXGTRXXXXXXXXXGXXXXXXXGAAXXAXXXXXPXXPVXXXXXXXXXXXXXXXXXXXXXXXXXRXGXXXXXXXXXXXXXXXXXLXXXTXXXXXXI

SEQ ID NO: 86504 - protein, 18 aa, Artificial sequence
  protein pattern
  Variant (3)..(4): Xaa in position 3 to 4 is any amino acid
  Variant (6)..(6): Xaa in position 6 is Ala, Pro or Ser
  Variant (7)..(7): Xaa in position 7 is Ala, Leu or Val
  Variant (8)..(8): Xaa in position 8 is Ile, Leu or Val
  Variant (9)..(9): Xaa in position 9 is any amino acid
  Variant (10)..(10): Xaa in position 10 is Ala or Val
  Variant (11)..(11): Xaa in position 11 is Ala, Gly, Ser or Val
  Variant (12)..(12): Xaa in position 12 is Asn or Ser
  Variant (14)..(14): Xaa in position 14 is Ala, Gly or Leu
  Variant (15)..(17): Xaa in position 15 to 17 is any amino acid
VPXXGXXXXXXXHXXXXD

SEQ ID NO: 86505 - protein, 15 aa, Artificial sequence
  protein pattern
  Variant (3)..(3): Xaa in position 3 is Ile or Val
  Variant (4)..(4): Xaa in position 4 is Ala, Cys or Ser
  Variant (5)..(5): Xaa in position 5 is Phe, Trp or Tyr
  Variant (8)..(8): Xaa in position 8 is Lys or Arg
  Variant (9)..(9): Xaa in position 9 is Ala, Glu, Gln or Ser
  Variant (10)..(10): Xaa in position 10 is Asp or Glu
  Variant (11)..(11): Xaa in position 11 is Leu or Val
  Variant (13)..(14): Xaa in position 13 to 14 is any amino acid
  Variant (15)..(15): Xaa in position 15 is Pro or Gln
RPXXXMAXXXXFXXX

SEQ ID NO: 86506 - protein, 19 aa, Artificial sequence
  protein pattern
  Variant (2)..(2): Xaa in position 2 is any amino acid
  Variant (3)..(3): Xaa in position 3 is Phe, Ile, Leu or Val
  Variant (4)..(4): Xaa in position 4 is Ala or Ser
  Variant (5)..(5): Xaa in position 5 is Ala, Leu or Val
  Variant (6)..(6): Xaa in position 6 is Lys or Arg
  Variant (7)..(7): Xaa in position 7 is Ala, Ser or Thr
  Variant (8)..(8): Xaa in position 8 is any amino acid
  Variant (9)..(9): Xaa in position 9 is Ala, Ser or Val
  Variant (10)..(10): Xaa in position 10 is any amino acid
  Variant (11)..(12): Xaa in position 11 to 12 is Ile, Leu or Val
  Variant (15)..(15): Xaa in position 15 is Ala, Cys, Gly or Ser
  Variant (16)..(16): Xaa in position 16 is Ile, Leu or Val
  Variant (17)..(17): Xaa in position 17 is any amino acid
  Variant (18)..(18): Xaa in position 18 is Gly or Asn
  Variant (19)..(19): Xaa in position 19 is Ser, Thr or Val
AXXXXXXXXXXXPVXXXXX

SEQ ID NO: 86507 - protein, 14 aa, Artificial sequence
  protein pattern
  Variant (2)..(2): Xaa in position 2 is any amino acid
  Variant (5)..(5): Xaa in position 5 is any amino acid
  Variant (8)..(8): Xaa in position 8 is Ala, Gly, Ser or Thr
  Variant (9)..(9): Xaa in position 9 is Ala, Gly or Ser
  Variant (11)..(12): Xaa in position 11 to 12 is any amino acid
  Variant (14)..(14): Xaa in position 14 is Ile, Leu or Val
AXPVXRGXXDXXAX

SEQ ID NO: 86508 - DNA, 1332 bp, Synechocystis sp.
  CDS (1)..(1332): transl_table=11
atgatgggcagttaccatctgctgggcatcagtgaatttagctcccgtttaccgttggccctggggtcagccctggcggtgccgttgttatatctgctaggtaaggaaattttttcttcccctagagcggccctgtggagtagttcgatattgttaaccctgcttcccactgcccgtttgggtcgtttaaccatgttggacggggtaatcaacgcctgtttgctttggtcattactttgcttactgcgggggcggaaaaatccccattggttggggggcataggtataggtttggggttaattgccttggctaagggtttactggtgctggccctggcactgttgttgggcattgtaattttctggctgggggaagggcgaatttttcaacgctggcaattctggttggggctattgatcggttttgccccagtgctgtggtggtaccaactccaatttgccgagtacggggaaaccttttggcaaattcattttgagtttcatagttttgagcgggttacccaggaattagagggcaatacggggcccccttggtattacctgttggagattgttaaatacactgccccctggctatttttcctcattcccgctgcggtaatgactgttcaacaatggcgacaggactgggctaaggttgccattacctttggcttcggcttcttgctgattatttccgccatgggcactaagttaccctggtatgtactcccctgttatccctttttcgctctgatggggggatattatttagcagatttggaaggtcgcccacgttatccccggctaattggttacctccttgctctcaccgctgtggtgggcctggtggggggattgtacgctggtttcatcgagcaaaaaccggtgattatcatcatggggctagtgctatttgttggtgtaggttggagtgccaaacaatatttgcactcttcccctaaatttgccaaaaccctggtgatggggctgtatgtaaccttgctatttcttttttccagtcccctctggaattgggaagtgaatgaagcctttgccgttaagcccgtggggcggttaattaaacaaagcaccccagttaataccctaatttacacttcctttgcctacagtcgtcccagtttggatttctatggtgatcgccaggtgattgcggtggatgatgaccagttacgaactaaggcgaaggaaggaaattatttattgctcgaccaaaatgcccaaggcagactagctttagccaatttacaaaagcggggacagacgagagaattcaccctattttttagccctaccgttggtaaaccttaa

SEQ ID NO: 86509 - protein, 443 aa, Synechocystis sp.
MMGSYHLLGISEFSSRLPLALGSALAVPLLYLLGKEIFSSPRAALWSSSILLTLLPTARLGRLTMLDGVINACLLWSLLCLLRGRKNPHWLGGIGIGLGLIALAKGLLVLALALLLGIVIFWLGEGRIFQRWQFWLGLLIGFAPVLWWYQLQFAEYGETFWQIHFEFHSFERVTQELEGNTGPPWYYLLEIVKYTAPWLFFLIPAAVMTVQQWRQDWAKVAITFGFGFLLIISAMGTKLPWYVLPCYPFFALMGGYYLADLEGRPRYPRLIGYLLALTAVVGLVGGLYAGFIEQKPVIIIMGLVLFVGVGWSAKQYLHSSPKFAKTLVMGLYVTLLFLFSSPLWNWEVNEAFAVKPVGRLIKQSTPVNTLIYTSFAYSRPSLDFYGDRQVIAVDDDQLRTKAKEGNYLLLDQNAQGRLALANLQKRGQTREFTLFFSPTVGKP

SEQ ID NO: 86510 - DNA, 1620 bp, Nostoc sp. PCC 7120
  CDS (1)..(1620): transl_table=11
atgcaggaaggaagctttatttggggtcatctggaaagacagcaccgcgcagttgataaatggattgatcgcttatggctagtagtgttgttaattgcagcattactattatttagcgttaacttgggaggattacccctgcaagattgggatgagggaactatagcccaaatcgctagggaaataacacaagaatcggccaattccctacgttggctatatcccaccctaagagggcaaccttatcacgatacaccgcctctcatgcacatactgattgcaggggcttactatttaggaggtgtgaatgaatggacaacacgtttaccaggagcaattttaaccgccttatcagtaccattactatactgtcttggtagagagatattccgtcaacgctgggcagcgatttatagtgccttaatctacttaaccatgctgcctgtagtccgttatgggcgcttggcgatgttagaaggggcggtggtgagtttcttgttggtgatgatgctgtgtgtattgcgatcgcgtcgagatttacgctactgtctcggcataggtttaagtttaggattaatttgtctgactcaaggactgtcaggttttttattaggtgcagtcgtcttagtatttttgttttgggatacaccaaggctacttaccagttattatctatggatagcgatcgccattgggattttgcctgtagctgcttggtatggcgctcaaatagtacaatatggcaatgattttgtccagaatggcttgcttcttcaatccctacaacaaacgggtatagttaatcacaagaatgctcaaccatcttggttttacatggttgaactccttaaatggacttggccttggttaatcttcttaccacaaacgacaaagttactttgggaaaatcgcaatcttagctgggcaagactcatacttgtatggagcatagtttatttactactcatttctctcatgagtgtgaagcttgcttggtatatattccccatttaccccagcctagccttagcttttggcgcacagttagcagaaatagaaaacttacctttactctcatcctatccccgcacttgggtcgctggtttgtcaatcttagccgtagtagcttcagctgctagcattcactttagttggggtatcgctgccaaaactgacctacagctaatttttgccgcagtcgctttgacaatgattatgggagctattttagcagaacgaggcgacggacaatttctcaaaatattgttttggggtagttatatttccctgctgctgttgatgaaatctaactactgggtttgggaattatggcaagcttaccctgtaaaacctgtagcggccatgatagagaaagcaaatccagctgcaaagaagatttatacatcttttccttatcatcgcccatcattggatttttatagcgatcgccatattattcccgcctctgtcgaagaactaaaacatcattggcactacgacagacaaccgtatctactcatcagttcatcagattcccaacgtctgcaattagactctgttcagctactagacaaaactgaaggttggcaactagtaaccaaagaaactaatcggttgtaa

SEQ ID NO: 86511 - protein, 539 aa, Nostoc sp. PCC 7120
MQEGSFIWGHLERQHRAVDKWIDRLWLVVLLIAALLLFSVNLGGLPLQDWDEGTIAQIAREITQESANSLRWLYPTLRGQPYHDTPPLMHILIAGAYYLGGVNEWTTRLPGAILTALSVPLLYCLGREIFRQRWAAIYSALIYLTMLPVVRYGRLAMLEGAVVSFLLVMMLCVLRSRRDLRYCLGIGLSLGLICLTQGLSGFLLGAVVLVFLFWDTPRLLTSYYLWIAIAIGILPVAAWYGAQIVQYGNDFVQNGLLLQSLQQTGIVNHKNAQPSWFYMVELLKWTWPWLIFLPQTTKLLWENRNLSWARLILVWSIVYLLLISLMSVKLAWYIFPIYPSLALAFGAQLAEIENLPLLSSYPRTWVAGLSILAVVASAASIHFSWGIAAKTDLQLIFAAVALTMIMGAILAERGDGQFLKILFWGSYISLLLLMKSNYWVWELWQAYPVKPVAAMIEKANPAAKKIYTSFPYHRPSLDFYSDRHIIPASVEELKHHWHYDRQPYLLISSSDSQRLQLDSVQLLDKTEGWQLVTKETNRL

SEQ ID NO: 86512 - DNA, 1548 bp, Nostoc sp. PCC 7120
  CDS (1)..(1548): transl_table=11
atgcgcccaatcacacaaagaaaattactattagttttgttggttgctgctttggctttgtggctcacatttttaggtaacttacctttaagagattgggacgagggtactatagcacaggtcgctcgtgacatttggcaggctccagttggttctatgcgttggctttatcccaccttggcgggggaggcttatcataacaaaccccctctaatgcacgtattaattgcttgggcttactctattggaggtgtcaatgaatggacaacacgttttcctggcgcatttatcactgccttgggagtacctttattgtacttgttagggcgatcgctttttaaccgcagtttaccagctttgtttgcggcattagtttatttaactatgttgcctgtggtacgccacggaagactagcaatgttggatggtacgcttattacctttttcttattcgttttgttttgtctagtaaaagcccgccaaaatcaaaaatatgccttaggtgtgggtatcggtttagggctaattgctctaactaaagggatgatggttttgctattaggcggaattgctggtttgtttcttttagcagatagacaattaattttattaactagcccctatttatggtcaggtctatttttaggaagtgcgccagcgatcgcctggtatattgctcaatggcaacattatggaggtagttttttagaaaccaatttgcaatcacaaacctttaatcggctttttcaacctgtagaaggacatagcggcccaccttggtactacgtactggaaatactcaaatatggttttccttggctattgtttttaccaggaggactttatttagctgcaaaaaagcgtgatacttcttggggttgtttaattcttgtcgggacaattgtctatttggtaagtatttctgtgatgagaactaaactaccttggtacgttatgccaatatatccatttttggctttggctattggtgctaaattagctgatgtttggcagtaccatcatgttaaatcaacaacttgggtagtattatttgtcatactggcgatcgcaggtttaggcggctgcatttactttgtggctactgaacctcagcctgtcctaattgccatgagtcttgtcttagccgtgagtatgtctacggtagcatggctgattaatcaaggcgatcgcaactttattccagttttatttgcagggatgtatttagttttaactatgttcgtaagttcccagtcatggatttgggaattaaacgaagcatttccagtcaaaccagttgccgcattaatccgccaatacgtttcaccaggcaccaagatttatacttcttttgcctataatcgccctagtctagatttttactgtgattgtcaagttctgactaagccatccatttcccagcaaatcggaagcaataatcattatttgcttttggataatacaattttagaaaagatcaacttatctagaaacgaaattttaggaactgttgaaaactttactttgattgctcccgctaaaaattaa

SEQ ID NO: 86513 - protein, 515 aa, Nostoc sp. PCC 7120
MRPITQRKLLLVLLVAALALWLTFLGNLPLRDWDEGTIAQVARDIWQAPVGSMRWLYPTLAGEAYHNKPPLMHVLIAWAYSIGGVNEWTTRFPGAFITALGVPLLYLLGRSLFNRSLPALFAALVYLTMLPVVRHGRLAMLDGTLITFFLFVLFCLVKARQNQKYALGVGIGLGLIALTKGMMVLLLGGIAGLFLLADRQLILLTSPYLWSGLFLGSAPAIAWYIAQWQHYGGSFLETNLQSQTFNRLFQPVEGHSGPPWYYVLEILKYGFPWLLFLPGGLYLAAKKRDTSWGCLILVGTIVYLVSISVMRTKLPWYVMPIYPFLALAIGAKLADVWQYHHVKSTTWVVLFVILAIAGLGGCIYFVATEPQPVLIAMSLVLAVSMSTVAWLINQGDRNFIPVLFAGMYLVLTMFVSSQSWIWELNEAFPVKPVAALIRQYVSPGTKIYTSFAYNRPSLDFYCDCQVLTKPSISQQIGSNNHYLLLDNTILEKINLSRNEILGTVENFTLIAPAKN

SEQ ID NO: 86514 - DNA, 1641 bp, Prochlorococcus marinus str. MIT 9303
  CDS (1)..(1641): transl_table=11
ttgctcttgccatcagcagatcacaggccatccattcgcagagcacctctgctgggtttgctcttgctttggctggtggcatgcgtgcttgcaatcgtggggctaggagatctacccctacgcgattttgatgaaggcatcgttgccagagtggcctttgagttaagccaaaaacagggccccgaggctctactgcccaccctgtgggattcgccctacctcaacaaaccaccaggcctgcattggctgattgctgccgccgtccaactcaacaacaacggcgaagcctctttaactcggctcccctcaaacactctggtgaggctggcgccggcattgctatccacgctgattgttccgttaggggggctcgtgcaatggcatctaagaccaaatgatcgaacgagctgccttgctacagctgcaattttgctaacgctgatgccagtggtacgacatggtcggctagccatgctcgatggtccacaactcagtgccatggccttgttgtggttactcgttttaagcctcgaccgcagcccaatggaccgctggcgaacgctgggggcaggactcatcagcagtggcatgcttttgctcaaagcccctctgctgcttccagcagcagcagcagcattgattcctatgctttggggtggcgaattcaggcgatggtggcgatggccactagcaggctggtttggagtagggctgatccctggcctcgcctggcacctctggcatggcttacaaaggggcactggggcgctgtggctctggggaggcgatggtgcaggccgcgtactttttgatgctggagaaggcagtgacctcggctggaaagtcccagtaattgagatgctcgagggtggttggccctggctgttgctatggccattcgcaatggcctgtgcctggcgtcaacgacacagccgttggggcaaatgggcactgggcacacaagccatactagctattgcaatcttgccactgaagacccaactcccctggtatagccaccctctatggctcccatttgcactgctctgtggagcagcactggcctggctcattcacaggaaggatctaaaaaatcctcctggtgcaggagttttaaaacatgttccgtacctctggctggccctaggagtcacccttgttctattcgggctcatcggcgcatcagggcaatttataacgttgcagccctatagcggcattgcactcgctgctggggttggctggagtatcggcggctggctgatgctgcgcccaacccatgccaaacgcaaattgggcgccatcagcatggttgctggaagcgtcgcagctctatacctattaatgagctcctcactctggctctgggaactcaatgagaactggcccgttgaacctgtcgcccagctcgccgcacaagcaaagggagcgaaggtggtgctcgaggggaatgatgaaaggcccagcctcaactggtatgcaggccagcgcatcagctccttagatgctgttccagacgctgaatggatcttgacgagaaatccccagcgaatcagcagcatggctcaggagcggcagtgcaagcttgcgcaaagcaaggaagactgggccctacttttttgtggcccgcaaacccaataa

SEQ ID NO: 86515 - protein, 546 aa, Prochlorococcus marinus str. MIT 9303
MLLPSADHRPSIRRAPLLGLLLLWLVACVLAIVGLGDLPLRDFDEGIVARVAFELSQKQGPEALLPTLWDSPYLNKPPGLHWLIAAAVQLNNNGEASLTRLPSNTLVRLAPALLSTLIVPLGGLVQWHLRPNDRTSCLATAAILLTLMPVVRHGRLAMLDGPQLSAMALLWLLVLSLDRSPMDRWRTLGAGLISSGMLLLKAPLLLPAAAAALIPMLWGGEFRRWWRWPLAGWFGVGLIPGLAWHLWHGLQRGTGALWLWGGDGAGRVLFDAGEGSDLGWKVPVIEMLEGGWPWLLLWPFAMACAWRQRHSRWGKWALGTQAILAIAILPLKTQLPWYSHPLWLPFALLCGAALAWLIHRKDLKNPPGAGVLKHVPYLWLALGVTLVLFGLIGASGQFITLQPYSGIALAAGVGWSIGGWLMLRPTHAKRKLGAISMVAGSVAALYLLMSSSLWLWELNENWPVEPVAQLAAQAKGAKVVLEGNDERPSLNWYAGQRISSLDAVPDAEWILTRNPQRISSMAQERQCKLAQSKEDWALLFCGPQTQ

SEQ ID NO: 86516 - DNA, 1548 bp, Anabaena variabilis ATCC 29413
  CDS (1)..(1548): transl_table=11
atgcgcccaatcacacaaaaaaaattactattagttttgttggttgctgctttggctttgtggctcacatttttaggtaacttacctttaagagattgggatgagggtaccatagcacaggttgctcgtgacatttggcaggctccagttggttctatgcgttggctttatcccaccttggcgggggaggcctatcataataagccccctctcatgcacttattaattgcctgggcttactcgattggtggtatcaatgaatggacaacacgttttcctggcgcatttatcactgcgctgggagtacctttgttgtacttgttagggcgatcgctttttaaccgcagtctaccagccttgtttgcggcattagtgtatttaactatgttgcctgtggtacgtcacggaagactagcaatgttagatggtacactcatcaccttttttttattcgttttgttttgtctactaaaagcccgccaaaatcaaaaatatgctttaggtgtgggtatcggtttagggctaattgctctaactaaagggatgatggttttgctattaggtggaattgcaggtttgtttcttttagcagatagacaattaactttattaaccagcccttatttatggacagggctgtttttaggaagcgcgccagcgatcgcctggtatcttgctcaatggcaacattacggaggtagttttttacaaataaacttgcaatcacaaacttttaaccgagttttccaacctgtagaaggacatagcggcccaccttggtactatgtattggaaatactcaaatatggttttccgtggctattgttcttgccaggaggactttatttagctgcaaaaaagcgtgacacttcctgggggtgtttaattcttgtcgggacaattgtttatttggcaagtatttccgtgatgagaacgaaactaccttggtatgttatgccaatatatccatttttagctctggccattggtgctaaattagctgatgtttggcagtaccatcatgttaaatcaacaactttggtagtattctttgtcatactggcgatcgcaggtttaggtggttgtgtctactttgcgaccactgaaacccagcctgttctaattgctatgagtcttgtgttagccgtgagtatggctacggtagcatggctggttaatcaaggcgatcgcaactttattccagttttgtttacaggaatgtatttagttttaattatgtttgtgagttcccagtcatggatttgggagttaaacgaagcatttccagttaaaccagtcgccgcattaatccgccaacacgttttaccaggcaccaagatttatacttctttcgcctataatcgccctagtctagacttttactgtgattgtcaagttctgactgagccatcaatttcacagcaaatggcaaaaagaaatgattatttgcttttagataatacaactttagaaaagataaacttatctggaaacgaaattctaggaacggtggaaaactttactttgattgctccatccaaaaattaa

SEQ ID NO: 86517 - protein, 515 aa, Anabaena variabilis ATCC 29413
MRPITQKKLLLVLLVAALALWLTFLGNLPLRDWDEGTIAQVARDIWQAPVGSMRWLYPTLAGEAYHNKPPLMHLLIAWAYSIGGINEWTTRFPGAFITALGVPLLYLLGRSLFNRSLPALFAALVYLTMLPVVRHGRLAMLDGTLITFFLFVLFCLLKARQNQKYALGVGIGLGLIALTKGMMVLLLGGIAGLFLLADRQLTLLTSPYLWTGLFLGSAPAIAWYLAQWQHYGGSFLQINLQSQTFNRVFQPVEGHSGPPWYYVLEILKYGFPWLLFLPGGLYLAAKKRDTSWGCLILVGTIVYLASISVMRTKLPWYVMPIYPFLALAIGAKLADVWQYHHVKSTTLVVFFVILAIAGLGGCVYFATTETQPVLIAMSLVLAVSMATVAWLVNQGDRNFIPVLFTGMYLVLIMFVSSQSWIWELNEAFPVKPVAALIRQHVLPGTKIYTSFAYNRPSLDFYCDCQVLTEPSISQQMAKRNDYLLLDNTTLEKINLSGNEILGTVENFTLIAPSKN

SEQ ID NO: 86518 - DNA, 1620 bp, Anabaena variabilis ATCC 29413
  CDS (1)..(1620): transl_table=11
atgcaggaaggaagctttatttggggtcatctggaaagacagcaccgtgcagttgataaatggattgatcgcttatggctggtagtgttgttaattgcagcattactattattcagcgttaacttaggaggattacccctgcaagattgggacgagggaactatagcccaaattgctagggaaataacacaagaatcggccaattccatacgttggctatatcccaccctcagagggcaaccttatcacgatacaccgcctctcatgcacatagtgattgcaggggcttaccatttaggaggtgtgaatgaatggacgacacgcttacctggggcaattttaactgccttatcagtaccattactatattgtcttggtagagagatatttcgtcaacgctgggcagcgatttatagtgccttaatctacttaacaatgttgccagtagtccgttatgggcgcttggcaatgttagaaggggctgtggtgagtttcttgttggtgatgatgctgtgtgtgttgcgatcgcgtcgagatttacgttactgtctcggcataggtttaagtttaggattaatttgtctcacccaaggactatccggctttttattaggtgcagtcgtccttgtgtttttgttttgggatacaccaagactacttaccagttattatctatggatagcgatcgccattggaattttgcctgtagctggttggtatagcgctcaactactacactatggcaatgattttgtccagaatggcttacttcttcaatccctacaacaagcgggtatagttaaccacaagaatgctcaaccatcttggttttacatagttgaactcctcaagtggacttggccttggttaatcttcttaccacaaacaaccaagttactttgggaaaatcgcaatcttagctgggcaagactcatacttgtatggagcatagtttatttgctactcatttctctcatgagcgtgaaacttgcttggtacatattccccatttacccaagcctagccttagcttttggcgcacagttagcagaaatagaaaacttacctttattatcatcctatccccgcgcttgggtcgctggtttgtcaatcttagccgtggtagcttcagctgctagcattcactttagttggggaatagctgccaaaactgacttacagctaatttttgccgcagtcgctttgacgatgattatgggagcgattttagcagaacgaggcgacggacaatttctcaaaatattgttttggggtagttatatttccctgctgctgttgatgaaatctaactactgggtttgggaattatggcaagcttacccagtaaaacctgtagcggcaatgatagagaaagtaaatccagctgcaaaaaagatttatacatcttttccctatcatcgcccatcattggatttttatagcgatcgccatattattcccgcctctgccgaagaactaaaacatcattggcactacgacagacaaccatatctactcatcagttcatcagatttccaacgcctgcaattagactccgttcagatactcgataaaactgaaggctggcaattaattaccaaagaaaccaatcgattgtaa

SEQ ID NO: 86519 - protein, 539 aa, Anabaena variabilis ATCC 29413
MQEGSFIWGHLERQHRAVDKWIDRLWLVVLLIAALLLFSVNLGGLPLQDWDEGTIAQIAREITQESANSIRWLYPTLRGQPYHDTPPLMHIVIAGAYHLGGVNEWTTRLPGAILTALSVPLLYCLGREIFRQRWAAIYSALIYLTMLPVVRYGRLAMLEGAVVSFLLVMMLCVLRSRRDLRYCLGIGLSLGLICLTQGLSGFLLGAVVLVFLFWDTPRLLTSYYLWIAIAIGILPVAGWYSAQLLHYGNDFVQNGLLLQSLQQAGIVNHKNAQPSWFYIVELLKWTWPWLIFLPQTTKLLWENRNLSWARLILVWSIVYLLLISLMSVKLAWYIFPIYPSLALAFGAQLAEIENLPLLSSYPRAWVAGLSILAVVASAASIHFSWGIAAKTDLQLIFAAVALTMIMGAILAERGDGQFLKILFWGSYISLLLLMKSNYWVWELWQAYPVKPVAAMIEKVNPAAKKIYTSFPYHRPSLDFYSDRHIIPASAEELKHHWHYDRQPYLLISSSDFQRLQLDSVQILDKTEGWQLITKETNRL

SEQ ID NO: 86520 - DNA, 1596 bp, Synechococcus sp. CC9605
  CDS (1)..(1596): transl_table=11
atgcgctccggctcagctcctgaaccagccccctgggtcgcatgggcagggctgggcttggccgctgctgtgctggccctggtcggcctcgacggtctccccctgcgggacttcgatgaagccaccgtggcccgggtggccctcgaactgcgccacgggctcggggaagccccgttgctgcccaccctctgggataagccctacctcaacaaggcgccaggtctgcacagcctgatcgccctcgtgatcagagcaacaacgcagtccgatcagctcccctcggagtggagcatccgcctggcaccggccatgctttcgtgcctggtggtgccgcttggtggctggctccaatggctgctgcgaccaggggatcgctccagtgccctctccaccagcgtaatcctgctgacgctgttgccggtggcccggcacggacgtctggccatgttggatggcacccagctgacggccacggctctgctttggctggccctgctgcagctgaaccgcagccgctgcagctcactctggggagccgtcgccggcctgatggccagcgccatgctgctgcttaaagccccactgctggtgcccgcggcggtggccgccggtttggcgctggcatggggccgggaatggagaagctggaacaaccgccctgcagcctggctcgggatgatgctgggcctagcaccgggagtcggctggcatctctggcatgcccacatccgggggagcgaagcgctctggctctggggcggagatggcgccgggcgggtgcttctggatgctggcgaaggcagtgatctgggatggcgggtcccgctaatcgaagtactggaggggggctggccctggctgccgctgctgcccttcgcacttgtctgggcctggcgacggcgtcagagccgctgggcccgatggtccttggccagcctgctcaccctggccggggccattcttccgctgcgcacccagctcccctggtacagccatccgctctggctgcccatcgctcttctctgcgctccgctgctggcctggctggtggagcgacccttgtcttcaacgcgtgcaccggaaagccccaatcccccttggcgctggttgctgatgcagcttccttcgttctggtgcgggctcggactgctgctcctgctgctggggctgggcagcttcagcagcatcggcgcaagccttgtgccctatcgcggcctggcggccgtgctgggcctcggctggtgtagcggcggatggtggctgcgctctgcagcaccacagcgacgacgccttggggtgatcagcctcagctgcggcaatctggcagcgctggccctgctgtttcactcccccctctggttgtgggagctcaacgaaacctggcacgtgcaaccggtggcagccctggccagagccaatactggaagcgagatcaagctgaagggttacgacgagcgtcccagtctcaactggtacgccgaacaacgcattgagcgtttcaaaggtggcccaggccgccgtctcagcgacaaaccgcagaagggctgcatcaccgaaggccaagcggggcgatggaccctggccaactgtcggtag

SEQ ID NO: 86521 - protein, 531 aa, Synechococcus sp. CC9605
MRSGSAPEPAPWVAWAGLGLAAAVLALVGLDGLPLRDFDEATVARVALELRHGLGEAPLLPTLWDKPYLNKAPGLHSLIALVIRATTQSDQLPSEWSIRLAPAMLSCLVVPLGGWLQWLLRPGDRSSALSTSVILLTLLPVARHGRLAMLDGTQLTATALLWLALLQLNRSRCSSLWGAVAGLMASAMLLLKAPLLVPAAVAAGLALAWGREWRSWNNRPAAWLGMMLGLAPGVGWHLWHAHIRGSEALWLWGGDGAGRVLLDAGEGSDLGWRVPLIEVLEGGWPWLPLLPFALVWAWRRRQSRWARWSLASLLTLAGAILPLRTQLPWYSHPLWLPIALLCAPLLAWLVERPLSSTRAPESPNPPWRWLLMQLPSFWCGLGLLLLLLGLGSFSSIGASLVPYRGLAAVLGLGWCSGGWWLRSAAPQRRRLGVISLSCGNLAALALLFHSPLWLWELNETWHVQPVAALARANTGSEIKLKGYDERPSLNWYAEQRIERFKGGPGRRLSDKPQKGCITEGQAGRWTLANCR

SEQ ID NO: 86522 - DNA, 1695 bp, Trichodesmium erythraeum IMS101
  CDS (1)..(1695): transl_table=11
atgcttaacaaaatattaacaaagaaaaacttacattctcatatagatttactgctaacgctaggcttattgctagcagcagtagtacttttttctactaatttaggaacattgcctttacgagactgggatgaaggaatagttgcccaagtagccagagaaatcagccgagacaagtggaattggctttatcctactatcaataatactccttattttaataaaccaccattgatacattggttgatcgcttttatctatagtattgcaggagtcaatgaattcaatgcccgtttatttcccgctttgttaacagcattttctgtacctttaatctatggtattagtcgagaattatttcacccacgcactccggcaatttttaccgctttggtttacttaactttactccctgtagtgcgacatgggcgtttagcaatgttagatggtgcagtagtttgtttttttttattaatgatttggtgcgtattgcgctcacggcaaaacctccgctattctctccctattggtattagttttgctttagtttccctcagcaaaggaattattttaggattacttttaggagcgatcgcttttttgtttctctggtgggatactccccgactattaagcaataaatatttttggagtggtatcctattaggtatgttaccagtttttctatggtacacagctcaattttttcattacggcgttgaatttttctatgccaactttttccatcaatctttaaaacgtatttggcaacaagtaggtaatcatgatggacctatttggtattatttattagaaattattaagtatagttttccatggcagctattctggttaccaggattatatttgagttggaaaaatcgtagtctgagttggggtaaattagttttgatttggactggagtttatctgtttgctatttcattaatgaatacaaaacttccttggtatgtgttacctatttatccagcttttgccttagcagtaggtagttatataacagaaatctgggatcaatttccattagacttaggatgcttttggttttcaggtgataaatatcttccaactcacggagatcataaaaaacatctctggagtcttcccactatttaccatcgtttagtagtagctttatttgcactactagcaataatagcttgggctgcttctgtttactttagtgggatttttgatctaggggagcaaaatttagcaaaacctaacttacagttacagttagttgctgtggctcttgcattgacaatgacaatggtaactctactgttaaataaacaacagcatcaatttttattaattttgatttggggaacatatctttcactgctaatgtttgttagctctccttattggatatgggaattggaagaaaattatccagtcaaaccagtcgcagaaatgattcagaaagatacccccccgggtcaggttatttattcttttgacactaaagaccgtccctctttaaatttttatagcgatcgcctcattaagcgtgttggcccaaaaaaaattcaacagcaatggcaaaaaacaactcaaccctatttattagttgaagcattaactctaaataatctccccctagaaaattttcaggttttgaatactgtcaaaggatggtccttagttacaagagaaggtaaaagataa

SEQ ID NO: 86523 - protein, 564 aa, Trichodesmium erythraeum IMS101
MLNKILTKKNLHSHIDLLLTLGLLLAAVVLFSTNLGTLPLRDWDEGIVAQVAREISRDKWNWLYPTINNTPYFNKPPLIHWLIAFIYSIAGVNEFNARLFPALLTAFSVPLIYGISRELFHPRTPAIFTALVYLTLLPVVRHGRLAMLDGAVVCFFLLMIWCVLRSRQNLRYSLPIGISFALVSLSKGIILGLLLGAIAFLFLWWDTPRLLSNKYFWSGILLGMLPVFLWYTAQFFHYGVEFFYANFFHQSLKRIWQQVGNHDGPIWYYLLEIIKYSFPWQLFWLPGLYLSWKNRSLSWGKLVLIWTGVYLFAISLMNTKLPWYVLPIYPAFALAVGSYITEIWDQFPLDLGCFWFSGDKYLPTHGDHKKHLWSLPTIYHRLVVALFALLAIIAWAASVYFSGIFDLGEQNLAKPNLQLQLVAVALALTMTMVTLLLNKQQHQFLLILIWGTYLSLLMFVSSPYWIWELEENYPVKPVAEMIQKDTPPGQVIYSFDTKDRPSLNFYSDRLIKRVGPKKIQQQWQKTTQPYLLVEALTLNNLPLENFQVLNTVKGWSLVTREGKR

SEQ ID NO: 86524 - DNA, 1620 bp, Nostoc punctiforme PCC 73102
  CDS (1)..(1620): transl_table=11
atgcaagaaggaagctttatttggagtcatctagaaaaacagcatcgcacggttggcagatggattgattgggtatggctaatagtattgctgttggcagcagtattactgtttagcatcaatctgggaggattgcccctgcgagattgggatgaagggactgtggcacaggttgctcgtgaaatttggcacgctccagcaggttcaatgcgttggcttttcccaacgctaggaggcgaaccatatcataacaagccgcctttgatacatttgctaattgcctgggcttattctctaggaggcgaaaatgagttcacaactcgtctacctggagcaattttaacagcgacatctgtacctttactgtattgcattgctcgagagatatttcgccaacgttgggctgctatttatagcgccttaatttatctaacaatgctacctgtggtgcgtcatgggcggctggcaatgttggatggggcgatggtaagttttttgatggtaatgatgttgtgcgtgttgcgatcgcgccgggatttacgttattgccttggtgttggtgtcagttttgggttaatttgcctaactcaaggactgctaggtgtattgctaggtgcgatcgcgatcgtatttctgttttgggatacgccacggctgctcacctgctactatctgtggatagcaatcttcattggtattgtgcctgtagctggttggtatagcgcccaactaattcattatggttacactttcgcccaagttgggcttgtaaacccatcactaggtcgaattggctcatttgtagagggtaattctgaaccaccttggtactatgtggttgaacttctcaagtacacatggccgtggttattatttttaccgcaaactgtccgcttaacctgggaaaatcgcaaccttagctgggcaaagctagtaatggcgtggagtggtgtttatctattggtaatttctttcatgattaccaaagtcccctggtatttattcccgatttaccccagtttagctttagcttttggtatccagttatcagagacagaaaattcgcctttactttcatcctatccccgcgcttgggttgctggtttggcgatacttgctgtagttgcttctgctggtagcctttatttcagttggggtacaacatcacaaacagatttacaactgatttttgccgcagtcgctttaactatgaccttagcagctattttggcagaacgaggcgacgggcaatttctgaagattttgttttggggaagttatctttcgctgctgctgttaatgaaatctaactactgggtttgggaattatctgaagcctatccagttaaaccagtcgcagccatgattgtgcgggcaaatccggctacgaggaagatttacacatcttttgcttaccatcgcccctcgttggattattatagcgatcgcaccatcattcccgcttctgttggcgaactggaatattattggcactacaacgggcaaccctacttcctgcttcatgcatctgctttgaacaatctccaactagattcgatgaagttaattgaccaagctgaaggctggaagttagttacaaaagaaattaatcgtctgtaa

SEQ ID NO: 86525 - protein, 539 aa, Nostoc punctiforme PCC 73102
MQEGSFIWSHLEKQHRTVGRWIDWVWLIVLLLAAVLLFSINLGGLPLRDWDEGTVAQVAREIWHAPAGSMRWLFPTLGGEPYHNKPPLIHLLIAWAYSLGGENEFTTRLPGAILTATSVPLLYCIAREIFRQRWAAIYSALIYLTMLPVVRHGRLAMLDGAMVSFLMVMMLCVLRSRRDLRYCLGVGVSFGLICLTQGLLGVLLGAIAIVFLFWDTPRLLTCYYLWIAIFIGIVPVAGWYSAQLIHYGYTFAQVGLVNPSLGRIGSFVEGNSEPPWYYVVELLKYTWPWLLFLPQTVRLTWENRNLSWAKLVMAWSGVYLLVISFMITKVPWYLFPIYPSLALAFGIQLSETENSPLLSSYPRAWVAGLAILAVVASAGSLYFSWGTTSQTDLQLIFAAVALTMTLAAILAERGDGQFLKILFWGSYLSLLLLMKSNYWVWELSEAYPVKPVAAMIVRANPATRKIYTSFAYHRPSLDYYSDRTIIPASVGELEYYWHYNGQPYFLLHASALNNLQLDSMKLIDQAEGWKLVTKEINRL

SEQ ID NO: 86526 - DNA, 1458 bp, Nostoc punctiforme PCC 73102
  CDS (1)..(1458): transl_table=11
ttgggaaattcccctttacgagactgggatgaagggacttacgctctagtcgccagagaaatttaccggactggtaactggctttatcccacccttcagggagaaccatttttattaaaaccgcctttgatgcaatggttaattgctttgtgctaccaactaggaggagtgcaagagtttaccacacgcttacctggtgcggttttaactgccttaggtgtgcctttgctttatttagtggggcgtttggcttttaagcaaaatttacctgctctatttgctgctttagtttacttgacaatgttgcctgtggtgcgtcatggaagactggcgatgttagatgggatgactatttcttttttcttgctgttgttattttgtcttttgaaggcacgtcagaaccgaaaatatgctctaggcgtgggattttgtctggggttaattattcttactaagggaacgatagttttactattgggggcgatcgcctgtttatttttgcttgcagatcggcaattagctttgttgaaaagtccctatttatgggtaggaattttattaggaaatgctcctgcgatcgcttggtatattgctcaatggcaacattatggtaatacttttttagaggtgcattttcaagcacaagcttttgaccgccttacacaaactgttgaaggtaatagtgggcctgtttggtactatttattagaattactcaaatatggttttccctggctgttatttttacctggagggctttatctagcttggaaaaaacgttatgaaacttggggttctctagttcttttgaccacaattatttacttgggaactatttcttttatgagaactaagcttccgtggtatgtcatgcctgtatatccatttttagccttggcgattggtgctaatttgagtgaagtttggcagaatgggcatttccgagtgcgaagctggacaatatttctagctattatttctattgctggtttaggaggttgtgtttacttttttattaagaaagagcctattttgatagtcatgagcattgttttggtaataagtatgggcatcgcagcatggctagttaaacagcgcgatcgcaactttattccagtgttatttacagggatgtatttagtgttaaccctgttggtaagttcgcaatcttggatttgggaattaaaggaagcttttccagttaaaccagtagcagcattaattcgggcaaatgtttcaccaggaacacaaatttatacttcttttgcttatggccgtcccagtttagatttttatagcgattgcaaggtaactgctacaactgtgccacttctacaaaaaatgctatcgaataaatcttatttgctattagataatgaggctttacagcaaatgaatttaactagtagtaaaattataggagcaactaacggatttacactaattaccaaaaattaa

SEQ ID NO: 86527 - protein, 485 aa, Nostoc punctiforme PCC 73102
MGNSPLRDWDEGTYALVAREIYRTGNWLYPTLQGEPFLLKPPLMQWLIALCYQLGGVQEFTTRLPGAVLTALGVPLLYLVGRLAFKQNLPALFAALVYLTMLPVVRHGRLAMLDGMTISFFLLLLFCLLKARQNRKYALGVGFCLGLIILTKGTIVLLLGAIACLFLLADRQLALLKSPYLWVGILLGNAPAIAWYIAQWQHYGNTFLEVHFQAQAFDRLTQTVEGNSGPVWYYLLELLKYGFPWLLFLPGGLYLAWKKRYETWGSLVLLTTIIYLGTISFMRTKLPWYVMPVYPFLALAIGANLSEVWQNGHFRVRSWTIFLAIISIAGLGGCVYFFIKKEPILIVMSIVLVISMGIAAWLVKQRDRNFIPVLFTGMYLVLTLLVSSQSWIWELKEAFPVKPVAALIRANVSPGTQIYTSFAYGRPSLDFYSDCKVTATTVPLLQKMLSNKSYLLLDNEALQQMNLTSSKIIGATNGFTLITKN

SEQ ID NO: 86528 - DNA, 1644 bp, Crocosphaera watsonii WH 8501
  CDS (1)..(1644): transl_table=11
atgaagataacaaacataaaaagtgatagtttctggttcgtatttctattaatattagccctactgttatggcttttgaatttaggtaatcttcctttaagagactgggatgaaggatactatgctactgtagcgcaagatatgtttcaatcaggaaactggctttatttaacatactcagatcagccttttttattaaaacctcctttgattatttggttgataaatataagttataatttagcaggtatcaatgaatttactacccgttttctctgtgctttaatcacttcttttggagttcctttattatatttagtcggaagaaatttatttttaaagcaagagccagcaatttttagtagtttagtttacctaactttattacctatggtacgtcatggccgcttagccatgatagatggtattataaacacattttttatctttgctatcttatctttactcaagtcaaaaaaacaaccattatgggccatagggtttggttttgggataggattaattgctttaagtaaaggaattttagctttagctttaggaggtattttaggggtttatatactttgggatagggaacaagaggcttttaaaattctcttgacaaagataacacaactactcggattaaaagctatatttaaacctattttaattgctttaaaaaatagtgacaaaagtttgcttaataattacttcctatggataggtttgttgttaggatttttacctgtaataatctggtattatctacaaataaagtattatggtgaacagtttatacaagttcattttttacaacaaaattttgaccgtttatctactgctgttgagggaaatagtggttccccttggtattatattgtagaattaattaaatatagtttaccttggttactatttttacccaatggcttatttttagcatggaaaaaacggcagaaaagttggggtaaattagtcttagtcgggttttttctatttttaggaattatcactattatgggtactaaacttccttggtatattatgcctatctatcctttttttgctttagctgttggctattatttaagttatttatatggaggagacaaacaatatcctaaactatatacattctgtttcttctctctaagtattatgattgtagctggtggcatttatttatggaaagatacacaagaaataatacttgttattatggcctgtcttctttttattacctttttcttaaccagtcaaaaactaaaacagaattctcctaattttattaatattcttgtgattggtttatacagtagcctaatattattgataacatccagtgtttgggtatgggagctaaacgaagcatttgccgttaaacctgttgccaacctcattaaagaaaatactcctccaaaaactattatttatacctcatttgagtatagtcgtcctagtttagatttttatagccatcgccagatactagctgagaataacgcaacattagaaaaacttgcttcaactggatcttatttgttattggatcaggaaacttttgacaatttaaagttaaccgatgttaaaatactaggagaggtcaaggaatttattttgatttctacaaataatcagtag

SEQ ID NO: 86529 - protein, 547 aa, Crocosphaera watsonii WH 8501
MKITNIKSDSFWFVFLLILALLLWLLNLGNLPLRDWDEGYYATVAQDMFQSGNWLYLTYSDQPFLLKPPLIIWLINISYNLAGINEFTTRFLCALITSFGVPLLYLVGRNLFLKQEPAIFSSLVYLTLLPMVRHGRLAMIDGIINTFFIFAILSLLKSKKQPLWAIGFGFGIGLIALSKGILALALGGILGVYILWDREQEAFKILLTKITQLLGLKAIFKPILIALKNSDKSLLNNYFLWIGLLLGFLPVIIWYYLQIKYYGEQFIQVHFLQQNFDRLSTAVEGNSGSPWYYIVELIKYSLPWLLFLPNGLFLAWKKRQKSWGKLVLVGFFLFLGIITIMGTKLPWYIMPIYPFFALAVGYYLSYLYGGDKQYPKLYTFCFFSLSIMIVAGGIYLWKDTQEIILVIMACLLFITFFLTSQKLKQNSPNFINILVIGLYSSLILLITSSVWVWELNEAFAVKPVANLIKENTPPKTIIYTSFEYSRPSLDFYSHRQILAENNATLEKLASTGSYLLLDQETFDNLKLTDVKILGEVKEFILISTNNQ

SEQ ID NO: 86530 - DNA, 1653 bp, Synechococcus sp. WH 5701
  CDS (1)..(1653): transl_table=11
atgagggtgagccgcctgctgctcgggctctgggccgtggccctggtgctggcactggccggcctgggcaatctgcccctgcgcgattgggacgagggcatcgtggcgcgtgtggccctggagaccagccaggctccctggccagacaccctgctgccgacgttctggggatccacctatctgaacaagcctccagggctgcactggctgatcgcgggggtgatccagctctggcgcgacctcagcggcgaggccaccgccctgcccccagagtgggtgatccggctggcgccggccctggtttcgagtctgctggtgccgctgatcggcgccatccagctgcggctgcggcccagccagccccaggccgccgtgggggcggcggccattgccctcaccctgatgcccctggtccgccacggccggctggccatgctcgatggggcccagctcaccgcgatggccctgctctggctgggcctgctgctggctgggccccggcctcgggcggccctctcgggggggctgatcgctggggccgggggcagtgccctgctgctgctgaaggctccggtggtggtgccggtgctggccacggggctgctgctgcgctggctcgatcgtgatctggatcggcgcgcctggctgcgcctgggcctgggcctgggcctcgggctgtcactcggcctggcctggcacggctggcatgggctgcaacggggcccggaggccctgctgatgtggggcggccaggggctgctgcgtttcaccaccacagtggaggagcaccacggcggtccgctcgagccgctgctggaggtgctggagggggggtggccctggcttcccctctggccgatcggtctggggctggcctggcgggaacggcggcaaccggcggggcgctggagcctgggcctgagcctggccgccaccctcaccgtgctgccgatgaagacccagctgccctggtacagcctgctgctctggccacccttctgcctgatctgcggaccggtcctggcccggctggtggaggcaccccgcccccggcgcctgctgaggccgctgccctggttctgggccgctttgggggggctgctgctggtggcgtccctgctggcgccatcgacgctgcgctggctgcccctgccggcggggctggggctgctgctcggggggatcaacctgagccggccggcccagggccgacgacggctggggttggcactgctgctgctgggctggagcacatcgctgctgctgtttgtgctgagcccgttctggaactgggagctcaacgaaacctggtcggtgctgcccgccgctgagctggcccgaagcgccggggatggcggctcctcggccgagctgccgatccacatgcccggcaaccaggggcagcgccccagcctgcgctggtatgccgagcgggagctcttcaacctgcccgacagcccccgcgaccactggccgaagcgtttcagggtgctgctgcgcccatccgacggcatcggcaggctcgaggccggcaaccccaggcgcctgcggcttcaggatgccagctgtgacctggaggcccgcggtggcgacagctggcaacgctggatctgcacaggaggagacacggaccctgccgccgaagccccctga

SEQ ID NO: 86531 - protein, 550 aa, Synechococcus sp. WH 5701
MRVSRLLLGLWAVALVLALAGLGNLPLRDWDEGIVARVALETSQAPWPDTLLPTFWGSTYLNKPPGLHWLIAGVIQLWRDLSGEATALPPEWVIRLAPALVSSLLVPLIGAIQLRLRPSQPQAAVGAAAIALTLMPLVRHGRLAMLDGAQLTAMALLWLGLLLAGPRPRAALSGGLIAGAGGSALLLLKAPVVVPVLATGLLLRWLDRDLDRRAWLRLGLGLGLGLSLGLAWHGWHGLQRGPEALLMWGGQGLLRFTTTVEEHHGGPLEPLLEVLEGGWPWLPLWPIGLGLAWRERRQPAGRWSLGLSLAATLTVLPMKTQLPWYSLLLWPPFCLICGPVLARLVEAPRPRRLLRPLPWFWAALGGLLLVASLLAPSTLRWLPLPAGLGLLLGGINLSRPAQGRRRLGLALLLLGWSTSLLLFVLSPFWNWELNETWSVLPAAELARSAGDGGSSAELPIHMPGNQGQRPSLRWYAERELFNLPDSPRDHWPKRFRVLLRPSDGIGRLEAGNPRRLRLQDASCDLEARGGDSWQRWICTGGDTDPAAEAP

SEQ ID NO: 86532 - DNA, 21 bp, Artificial sequence
  primer
atgatgggcagttaccatctg

SEQ ID NO: 86533 - DNA, 20 bp, Artificial sequence
  primer
ttaaggtttaccaacggtag

SEQ ID NO: 86534 - protein, 595 aa, Artificial sequence
  consensus sequence
  Variant (2)..(4): Xaa in position 2 to 4 is any amino acid
  Variant (6)..(7): Xaa in position 6 to 7 is any amino acid
  Variant (9)..(12): Xaa in position 9 to 12 is any amino acid
  Variant (15)..(15): Xaa in position 15 is any amino acid
  Variant (19)..(19): Xaa in position 19 is any amino acid
  Variant (21)..(21): Xaa in position 21 is any amino acid
  Variant (25)..(26): Xaa in position 25 to 26 is any amino acid
  Variant (28)..(29): Xaa in position 28 to 29 is any amino acid
  Variant (31)..(33): Xaa in position 31 to 33 is any amino acid
  Variant (34)..(43): Xaa in position 34 to 43 is any or no amino acid
  Variant (45)..(45): Xaa in position 45 is any amino acid
  Variant (48)..(56): Xaa in position 48 to 56 is any amino acid
  Variant (59)..(62): Xaa in position 59 to 62 is any amino acid
  Variant (66)..(73): Xaa in position 66 to 73 is any amino acid
  Variant (74)..(83): Xaa in position 74 to 83 is any or no amino acid
  Variant (85)..(87): Xaa in position 85 to 87 is any amino acid
  Variant (89)..(91): Xaa in position 89 to 91 is any amino acid
  Variant (93)..(98): Xaa in position 93 to 98 is any amino acid
  Variant (102)..(115): Xaa in position 102 to 115 is any amino acid
  Variant (116)..(116): Xaa in position 116 is any or no amino acid
  Variant (118)..(124): Xaa in position 118 to 124 is any amino acid
  Variant (127)..(127): Xaa in position 127 is any amino acid
  Variant (130)..(130): Xaa in position 130 is any amino acid
  Variant (133)..(133): Xaa in position 133 is any amino acid
  Variant (142)..(154): Xaa in position 142 to 154 is any amino acid
  Variant (156)..(166): Xaa in position 156 to 166 is any amino acid
  Variant (167)..(167): Xaa in position 167 is any or no amino acid
  Variant (169)..(171): Xaa in position 169 to 171 is any amino acid
  Variant (174)..(184): Xaa in position 174 to 184 is any amino acid
  Variant (185)..(185): Xaa in position 185 is any or no amino acid
  Variant (187)..(207): Xaa in position 187 to 207 is any amino acid
  Variant (208)..(240): Xaa in position 208 to 240 is any or no amino acid
  Variant (242)..(244): Xaa in position 242 to 244 is any amino acid
  Variant (245)..(246): Xaa in position 245 to 246 is any or no amino acid
  Variant (248)..(249): Xaa in position 248 to 249 is any amino acid
  Variant (251)..(253): Xaa in position 251 to 253 is any amino acid
  Variant (255)..(262): Xaa in position 255 to 262 is any amino acid
  Variant (264)..(294): Xaa in position 264 to 294 is any amino acid
  Variant (295)..(295): Xaa in position 295 is any or no amino acid
  Variant (297)..(302): Xaa in position 297 to 302 is any amino acid
  Variant (306)..(308): Xaa in position 306 to 308 is any amino acid
  Variant (310)..(318): Xaa in position 310 to 318 is any amino acid
  Variant (320)..(322): Xaa in position 320 to 322 is any amino acid
  Variant (324)..(327): Xaa in position 324 to 327 is any amino acid
  Variant (329)..(337): Xaa in position 329 to 337 is any amino acid
  Variant (339)..(340): Xaa in position 339 to 340 is any amino acid
  Variant (342)..(342): Xaa in position 342 is any amino acid
  Variant (344)..(344): Xaa in position 344 is any amino acid
  Variant (349)..(350): Xaa in position 349 to 350 is any amino acid
  Variant (352)..(353): Xaa in position 352 to 353 is any amino acid
  Variant (355)..(356): Xaa in position 355 to 356 is any amino acid
  Variant (359)..(360): Xaa in position 359 to 360 is any amino acid
  Variant (362)..(363): Xaa in position 362 to 363 is any amino acid
  Variant (365)..(383): Xaa in position 365 to 383 is any amino acid
  Variant (384)..(413): Xaa in position 384 to 413 is any or no amino acid
  Variant (415)..(457): Xaa in position 415 to 457 is any amino acid
  Variant (458)..(471): Xaa in position 458 to 471 is any or no amino acid
  Variant (473)..(474): Xaa in position 473 to 474 is any amino acid
  Variant (476)..(479): Xaa in position 476 to 479 is any amino acid
  Variant (481)..(485): Xaa in position 481 to 485 is any amino acid
  Variant (487)..(488): Xaa in position 487 to 488 is any amino acid
  Variant (490)..(490): Xaa in position 490 is any amino acid
  Variant (494)..(494): Xaa in position 494 is any amino acid
  Variant (496)..(498): Xaa in position 496 to 498 is any amino acid
  Variant (500)..(500): Xaa in position 500 is any amino acid
  Variant (504)..(521): Xaa in position 504 to 521 is any amino acid
  Variant (522)..(528): Xaa in position 522 to 528 is any or no amino acid
  Variant (533)..(534): Xaa in position 533 to 534 is any amino acid
  Variant (536)..(550): Xaa in position 536 to 550 is any amino acid
  Variant (551)..(560): Xaa in position 551 to 560 is any or no amino acid
  Variant (562)..(579): Xaa in position 562 to 579 is any amino acid
  Variant (580)..(594): Xaa in position 580 to 594 is any or no amino acid
LXXXAXXLXXXXLGXLPLXDXDEGXXAXXAXXXXXXXXXXXXXLXPTXXXXXXXXXPPXXXXLIAXXXXXXXXXXXXXXXXXXEXXXRXXXAXXXXXXVPLXXXXXXXXXXXXXXXAXXXXXXXLTXLPXVRXGRLAMLDGXXXXXXXXXXXXXLXXXXXXXXXXXXGXXXGLXXXXXXXXXXXXLXXXXXXXXXXXXXXXXXXXXXXXXXXXXXXXXXXXXXXXXXXXXXXXXXXXXXXWXXXXXGXXPXXXWXXXXXXXXGXXXXXXXXXXXXXXXXXXXXXXXXXXXXXXXXEXXXXXXPWLXXXPXXXXXXXXXRXXXWXXXXLXXXXXXXXXIXXMXTXLPWYXXPXXPXXALXXGXXLXXXXXXXXXXXXXXXXXXXXXXXXXXXXXXXXXXXXXXXXXXXXXXXXXLXXXXXXXXXXXXXXXXXXXXXXXXXXXXXXXXXXXXXXXXXXXXXXXXXXXXXXXXXLXXGXXXXLXXXXXSXXWXWELXEXXXVXPVAXXXXXXXXXXXXXXXXXXXXXXXXXRPSLXXYXXXXXXXXXXXXXXXXXXXXXXXXXLXXXXXXXXXXXXXXXXXXXXXXXXXXXXXXXXXL

SEQ ID NO: 86535 - protein, 25 aa, Artificial sequence
  protein pattern
  Variant (2)..(2): Xaa in position 2 is Ile or Leu
  Variant (3)..(3): Xaa in position 3 is any amino acid
  Variant (4)..(4): Xaa in position 4 is Ala, Ser or Thr
  Variant (5)..(5): Xaa in position 5 is Ala or Ser
  Variant (6)..(6): Xaa in position 6 is any amino acid
  Variant (7)..(7): Xaa in position 7 is Ile or Val
  Variant (8)..(8): Xaa in position 8 is any amino acid
  Variant (11)..(11): Xaa in position 11 is Leu or Met
  Variant (14)..(14): Xaa in position 14 is any amino acid
  Variant (15)..(15): Xaa in position 15 is Ala or Val
  Variant (17)..(17): Xaa in position 17 is any amino acid
  Variant (21)..(21): Xaa in position 21 is Ala or Thr
  Variant (23)..(23): Xaa in position 23 is Ile or Leu
  Variant (24)..(24): Xaa in position 24 is Asp or Glu
AXXXXXXXLTXLPXXRXGRLXMXXG

SEQ ID NO: 86536 - protein, 24 aa, Artificial sequence
  protein pattern
  Variant (2)..(3): Xaa in position 2 to 3 is any or no amino acid
  Variant (5)..(5): Xaa in position 5 is Ala or Pro
  Variant (8)..(9): Xaa in position 8 to 9 is any amino acid
  Variant (10)..(10): Xaa in position 10 is Leu or Pro
  Variant (11)..(11): Xaa in position 11 is any amino acid
  Variant (12)..(12): Xaa in position 12 is Trp or Tyr
  Variant (13)..(13): Xaa in position 13 is Leu or Pro
  Variant (14)..(14): Xaa in position 14 is any amino acid
  Variant (15)..(15): Xaa in position 15 is Phe or Leu
  Variant (16)..(16): Xaa in position 16 is Ala or Cys
  Variant (18)..(19): Xaa in position 18 to 19 is any amino acid
  Variant (21)..(22): Xaa in position 21 to 22 is any amino acid
  Variant (23)..(23): Xaa in position 23 is Ile or Leu
  Variant (24)..(24): Xaa in position 24 is Ala, Ser or Thr
KXXLXWYXXXXXXXXXLXXGXXXX

SEQ ID NO: 86537 - protein, 26 aa, Artificial sequence
  protein pattern
  Variant (2)..(3): Xaa in position 2 to 3 is Ile, Leu or Val
  Variant (4)..(4): Xaa in position 4 is Glu or Lys
  Variant (5)..(5): Xaa in position 5 is any amino acid
  Variant (6)..(6): Xaa in position 6 is Gly, Ser or Thr
  Variant (7)..(7): Xaa in position 7 is any amino acid
  Variant (11)..(12): Xaa in position 11 to 12 is any or no amino acid
  Variant (14)..(15): Xaa in position 14 to 15 is any or no amino acid
  Variant (17)..(17): Xaa in position 17 is any amino acid
  Variant (18)..(18): Xaa in position 18 is Ala, Gly or Thr
  Variant (19)..(25): Xaa in position 19 to 25 is any amino acid
EXXXXXXPWLXXLXXPXXXXXXXXXR

SEQ ID NO: 86538 - protein, 27 aa, Artificial sequence
  protein pattern
  Variant (2)..(2): Xaa in position 2 is Phe or Trp
  Variant (3)..(3): Xaa in position 3 is Asn, Ser, Thr or Val
  Variant (4)..(4): Xaa in position 4 is any amino acid
  Variant (6)..(6): Xaa in position 6 is any amino acid
  Variant (7)..(7): Xaa in position 7 is any or no amino acid
  Variant (9)..(9): Xaa in position 9 is any or no amino acid
  Variant (11)..(11): Xaa in position 11 is Phe, Ile, Leu, Met or Val
  Variant (12)..(12): Xaa in position 12 is Gly, Ile, Leu or Val
  Variant (13)..(13): Xaa in position 13 is Ser or Thr
  Variant (14)..(14): Xaa in position 14 is Ala, Cys or Ser
  Variant (15)..(16): Xaa in position 15 to 16 is any amino acid
  Variant (20)..(20): Xaa in position 20 is Gly, Ile or Leu
  Variant (21)..(22): Xaa in position 21 to 22 is any amino acid
  Variant (23)..(23): Xaa in position 23 is Ile, Leu or Val
  Variant (24)..(24): Xaa in position 24 is Ala, Gly, Gln or Ser
  Variant (25)..(26): Xaa in position 25 to 26 is any amino acid
  Variant (27)..(27): Xaa in position 27 is Ala, Ile or Leu
EXXXRXXPXAXXXXXXVPLXXXXXXXX

SEQ ID NO: 86539 - protein, 15 aa, Artificial sequence
  protein pattern
  Variant (2)..(2): Xaa in position 2 is any amino acid
  Variant (3)..(3): Xaa in position 3 is Ala or Gly
  Variant (4)..(4): Xaa in position 4 is Ile, Leu or Met
  Variant (5)..(5): Xaa in position 5 is any amino acid
  Variant (6)..(6): Xaa in position 6 is Ile or Leu
  Variant (8)..(8): Xaa in position 8 is any amino acid
  Variant (9)..(9): Xaa in position 9 is Ala, Leu or Val
  Variant (11)..(11): Xaa in position 11 is Ala, Gly or Val
  Variant (12)..(13): Xaa in position 12 to 13 is any amino acid
  Variant (15)..(15): Xaa in position 15 is His or Tyr
WXXXXXGXXPXXXWX

SEQ ID NO: 86540 - DNA, 795 bp, Synechocystis sp.
  CDS (1)..(795): transl_table=11
atggattcacaaaactcttctttttctccagcggtttattttgttggggcgggccccggtgatccggatttattgaccattaaggggcaaaagcttttgcaggcggcggatttagtcctctatgccgattccttggtgcccaaacaaattttggcggacgtcagaccccaggcggaatgtgttgccaccgggaataaaaccttggaaaccattgtgcctttgatgatcacagcggtgcgccaaggcaagattgtggtgcgactccattccggcgatctaaccctctacagcgccatccacgaacaaatgcaagccctgggagaagcggatattccctttgtctgtgtgccgggtattagcgcctttcaagcggcggcggcgatcttaaactgtgaacttacggtgcctgatctcgtgcaaaccattgtgctaacccgcattagtggtgcggcttcggcggtgccagaacgggaagagttagcaggtttagcgtaccaccaagctagtttggggttatacctggcggcgcgccatgtggaaaaagctcagaaccaattgttagagcattatcccggcgacactcccgtagcggtttgttttcgggtgggttggcccgatgaaaagatttggttagtgcccttggcagaaatggcagccttaagtttgcgggaaaatttaatccgcaccaccctttacctgattagcccagctttaaagactgatttaccccggcgatcgcgcctttatcatcccgaccatagccatttattccgtccagtccgtcccctattgtaa

SEQ ID NO: 86541 - protein, 264 aa, Synechocystis sp.
MDSQNSSFSPAVYFVGAGPGDPDLLTIKGQKLLQAADLVLYADSLVPKQILADVRPQAECVATGNKTLETIVPLMITAVRQGKIVVRLHSGDLTLYSAIHEQMQALGEADIPFVCVPGISAFQAAAAILNCELTVPDLVQTIVLTRISGAASAVPEREELAGLAYHQASLGLYLAARHVEKAQNQLLEHYPGDTPVAVCFRVGWPDEKIWLVPLAEMAALSLRENLIRTTLYLISPALKTDLPRRSRLYHPDHSHLFRPVRPLL

SEQ ID NO: 86542 - DNA, 705 bp, Archaeoglobus fulgidus DSM 4304
  CDS (1)..(705): transl_table=11
atgaaggtttacttcgtgggcttcggaccgggaaatccagagcttttaaccttaaaggcctacaaactgcttaaggaggcggatttggtagtttaccccggctcgattgttcctgagaagttttttgaggagtttaagggggagaaggtgaacagccacggcaaaaccctcgaagagattgttgatttgattgaaagatacgtgaaaaggggaaagagggttgttagggtgcagagtggagatccatcaattttcggggctgtctgggagcaaataagggagctgaggaggagagggattgactgcgaggttgttccgggtgtgagcagcgtttttgcttcagccgcatcacttggaattgagctgacctccccctcaacggagggagttgctatagtcaggccagcagggaaaactcttgagaaagaccatcttgaggagcttgcaaggctgcccctcactctcgtaattctccttggcgttgacaaaattggtgagatagcggaaaaaattgcaagagtgagggggtgggatgagccctgcgccgttgtcttccacgcctcaagggaggatgagataaggattaagggcacactcaaagatattgcggagaaggtgagggagaaggggataagaaggactgcaaccattattgtgggaaaggtcgttgagggatacgatgagaggtcgcacctctactcttaa

SEQ ID NO: 86543 - protein, 234 aa, Archaeoglobus fulgidus DSM 4304
MKVYFVGFGPGNPELLTLKAYKLLKEADLVVYPGSIVPEKFFEEFKGEKVNSHGKTLEEIVDLIERYVKRGKRVVRVQSGDPSIFGAVWEQIRELRRRGIDCEVVPGVSSVFASAASLGIELTSPSTEGVAIVRPAGKTLEKDHLEELARLPLTLVILLGVDKIGEIAEKIARVRGWDEPCAVVFHASREDEIRIKGTLKDIAEKVREKGIRRTATIIVGKVVEGYDERSHLYS

SEQ ID NO: 86544 - DNA, 765 bp, Mesorhizobium loti MAFF303099
  CDS (1)..(765): transl_table=11
atgaccgttcatttcatcggcgccggtccgggtgccgccgacctcatcacgctgcgcggcgccaggctgctggcaagctgcccggtctgtctgcatgccggctcaatcgtcgcgcctgaattgctgcagcattgcgcgccggggacgaaactgatcgacaccgcgccgatgtcgctcgacgagatcgaggcggcctatgtcgacgctcacaaatcaggccatgatgtcgcccgcctgcattccggcgacctgtcggtgtggagcgccgttgccgaacagatccgccggctggaaaagcacgacataccctacacgctgacgccaggcgtcccttccttcgccgccgccgccgcagcacttcgcctcgagctgaccattcccgaagtcgcgcaaagcctggtgctgacccgcgtttccggacgtgcttcaaaaatgccgcccggcgaaacgctggccggcttcggccgcaccggcgccacgctcgccatccatcttgccatccacgcaatcgaccgcgtcgtcgccgaattgacgccgcattatggcggcgattgtccggtggcgatcgtcttccgcgcctcctggccggacgagcgggtgctgaccggtacgctggaaacgatcgaggcgcagctggccgccgatccgatggagcgcaccgcgattatcttcgtcggccgctcgctggcggcggaaggttttggcgaaagttcattgtacgacgcccactatcagcggcgttttcgcggacgggacggattgtga

SEQ ID NO: 86545 - protein, 254 aa, Mesorhizobium loti MAFF303099
MTVHFIGAGPGAADLITLRGARLLASCPVCLHAGSIVAPELLQHCAPGTKLIDTAPMSLDEIEAAYVDAHKSGHDVARLHSGDLSVWSAVAEQIRRLEKHDIPYTLTPGVPSFAAAAAALRLELTIPEVAQSLVLTRVSGRASKMPPGETLAGFGRTGATLAIHLAIHAIDRVVAELTPHYGGDCPVAIVFRASWPDERVLTGTLETIEAQLAADPMERTAIIFVGRSLAAEGFGESSLYDAHYQRRFRGRDGL

SEQ ID NO: 86546 - DNA, 756 bp, Thermoplasma volcanium GSS1
  CDS (1)..(756): transl_table=11
gtgtatatagttggggcagggccgggagatcctgaacttttgacgctaaaagcatataatatccttcgaaaggcaggcgtagtaatatacgctggatcccttgttaatcctgagatattaaaatacgcaaatccgagtgcagagatatacaacagcgccgaaatggacataaacaaaataatggatatatcgataattctaatagcagaggggaaggatgtagtaaggctccattctggagacccgcacttgtacggtgcacttatggagcaactctcacttctgagggaaaagggcatagatttcgaggttattcccggtgtcagtgtgcttacgtctgcggcggcctcactaggaatagagcttaccatggacaacatatctcagtctgttataatagccagaggatcgctgaggataccagtaccagaaaagcagtctatattagcattgtcaagccatcaaagtaccatggttatcttcacagctatacacataatcgagaaggtagttgaagatctcctgaaaggaggatacccgaaagatactccagtgggtgtagtttaccactctacctggaaggacgaaaaggtaatacgcgggacactcgaagatatagttcagaaggtgaaggacaacaggatatatcgaacagcaataattgttgtaggtaaagttgtcaatcctgagagggtttacagcacgaaactttacgatccaagctatacgcattcttttaggaggggctcatcttga

SEQ ID NO: 86547 - protein, 251 aa, Thermoplasma volcanium GSS1
MYIVGAGPGDPELLTLKAYNILRKAGVVIYAGSLVNPEILKYANPSAEIYNSAEMDINKIMDISIILIAEGKDVVRLHSGDPHLYGALMEQLSLLREKGIDFEVIPGVSVLTSAAASLGIELTMDNISQSVIIARGSLRIPVPEKQSILALSSHQSTMVIFTAIHIIEKVVEDLLKGGYPKDTPVGVVYHSTWKDEKVIRGTLEDIVQKVKDNRIYRTAIIVVGKVVNPERVYSTKLYDPSYTHSFRRGSS

SEQ ID NO: 86548 - DNA, 1110 bp, Arabidopsis thaliana; identical to SEQ ID NO: 84879
  CDS (1)..(1110)

SEQ ID NO: 86549 - protein, 369 aa, Arabidopsis thaliana; identical to SEQ ID NO: 84880

SEQ ID NO: 86550 - DNA, 735 bp, Methanothermobacter thermautotrophicus str. Delta H
  CDS (1)..(735): transl_table=11
atgggggcagggccaggagaccctgaactcataacactgaaagctgtgcgcgccctcagaggggctgatgttgtaatatacgcaggttcacttgtaaacagggatatacttgaatatgcgcctgaagatgcggaggtccacaacagcgcacacatgaacctggaggagataacagatataatggtggaggcctgcagggcaggtaagaccgttgcaagggttcacaccggtgacccctcaatctacggagccataaaggaacagataagggttctcgagaaaaacagcataccctacaccatcataccgggtgtgagttctgtctttgcagctgcagccacactgaacactgagctgaccctccctgaggtctcccagactgtcataataacaaggcccgctggaaggacaccggtacctccaggtgaggatcttgaggagcttgcagtccacgggtcaaccatgtgcatcttcctgggtgttcatatgatagaggatgttgcagaaaaactcatgacccactacccgccggatacccctgtggccgttgttaagagggcatcctggccggatgaagaggttgtgaggggcacactgtcggatatagctgaaagggtgagggctgccggtataagtaagacagccatgatcattgtggggagtgtgcttgaaccaggagacttcaaaccatcgaaactctatgacgccggattcagccatgaataccggccctga

SEQ ID NO: 86551 - protein, 244 aa, Methanothermobacter thermautotrophicus str. Delta H
MGAGPGDPELITLKAVRALRGADVVIYAGSLVNRDILEYAPEDAEVHNSAHMNLEEITDIMVEACRAGKTVARVHTGDPSIYGAIKEQIRVLEKNSIPYTIIPGVSSVFAAAATLNTELTLPEVSQTVIITRPAGRTPVPPGEDLEELAVHGSTMCIFLGVHMIEDVAEKLMTHYPPDTPVAVVKRASWPDEEVVRGTLSDIAERVRAAGISKTAMIIVGSVLEPGDFKPSKLYDAGFSHEYRP

SEQ ID NO: 86552 - DNA, 801 bp, Mycobacterium tuberculosis CDC1551
  CDS (1)..(801): transl_table=11
ttggcgcccacagctgccggtcacccagtggtcggtgaccaagcgatgacggtctatttcatcggagcgggccccggcgccgccgacctaatcaccgtccgcggccaacggctcctgcaacgatgcccggtgtgcctgtatgcgggttcgatcatgcccgacgacctgttggcgcagtgtccgcccggcgcgacgattgtcgacaccggtccgctgaccctcgaacaaatcgtgcgcaaacttgccgacgccgacgccgacggccgcgacgttgcccggctgcattccggcgacccgtcgctgtacagcgcgctggccgaacagtgccgcgaactcgacgcgctgggcatcggctacgaaatcgtgccgggcgtaccggcttttgccgcagccgcggcggcgctaaagcgcgaactcaccgtgccgggcgtggcgcagacggtgacgctcacccgggtggcgacgctgtccacacccataccgcccggtgaggacctggccgcgctcgcccgatcccgcgccactctggtcttgcacctggccgcagcccagatcgacgccatcgttccgcgactgctagacggtggttaccgacccgaaacgccggttgcggtggtggctttcgcgagttggccgcaacagcggacgctacgcggcacgttggccgatatcgccgcgcggatgcacgatgccaagatcaccaggaccgccgtgatcgttgttggcgacgtgctgaccgctgagggctttaccgacagctacctatattcggtggcacggcacggtcggtatgcacagtga

SEQ ID NO: 86553 - protein, 266 aa, Mycobacterium tuberculosis CDC1551
MAPTAAGHPVVGDQAMTVYFIGAGPGAADLITVRGQRLLQRCPVCLYAGSIMPDDLLAQCPPGATIVDTGPLTLEQIVRKLADADADGRDVARLHSGDPSLYSALAEQCRELDALGIGYEIVPGVPAFAAAAAALKRELTVPGVAQTVTLTRVATLSTPIPPGEDLAALARSRATLVLHLAAAQIDAIVPRLLDGGYRPETPVAVVAFASWPQQRTLRGTLADIAARMHDAKITRTAVIVVGDVLTAEGFTDSYLYSVARHGRYAQ

SEQ ID NO: 86554 - DNA, 789 bp, Sulfolobus solfataricus P2
  CDS (1)..(789): transl_table=11
atgataggaaaagtggttttcatagggtctggtccaggagatccagagctaattacgataaaagcgaagaagtatatagaaacagctgacgtaatagtctatgcgggttcccttgtaaatccagaaatattaaagtggtctcgtaaggacgctgaagtatacaatagttcatcacttactttaaatgagatagtggaaataatggtgaagaaggcaagtgaaggaaaactggttgctaggctcaaatctggagattcatcaatatacggagcattatttgaagagatgtgggcattggaggctgcggggattccatttgaagttataccgggtatcactgcagctattgccgcagcttctgtaataccgattgagttaacagtccctaagctttcccaaactgtcattataacaagggcttcactaagagtcccaatgcaaggttccataaaggatttcgccaaaatggtaaagattggagctactatggtaatatatactggaatacatatcattgacagagttgttaatgatctaaaggagggaggattgactgacgatactccagtaatagtggtctatcgtgctacttggccggagcaaaagataatcaaaggaactttggctgatatcgtaagtaaggttagagaagctaagatatatagggattcagtaataatagtaggactttcagcagatccccaacagatcaagaatatggtaagatctagtgtatacgatcccaaacataatcactcgtataggccttggaaagtggaggaagactaa

SEQ ID NO: 86555 - protein, 262 aa, Sulfolobus solfataricus P2
MIGKVVFIGSGPGDPELITIKAKKYIETADVIVYAGSLVNPEILKWSRKDAEVYNSSSLTLNEIVEIMVKKASEGKLVARLKSGDSSIYGALFEEMWALEAAGIPFEVIPGITAAIAAASVIPIELTVPKLSQTVIITRASLRVPMQGSIKDFAKMVKIGATMVIYTGIHIIDRVVNDLKEGGLTDDTPVIVVYRATWPEQKIIKGTLADIVSKVREAKIYRDSVIIVGLSADPQQIKNMVRSSVYDPKHNHSYRPWKVEED

SEQ ID NO: 86556 - DNA, 756 bp, Clostridium acetobutylicum ATCC 824
  CDS (1)..(756): transl_table=11
atggtttattttattggagcaggaccaggcgatgtggatttaatcacagtaaagggaagaaaaatagtagaaaaagcagatattgttatatacgcaggctctcttgtaagtaaggagcacatggatttttgcaaaaaagaggttaagatttataattcagctcacatgacactagaggaagttatttcagttattgtaaaagcagaagtggaaaataaaataacagttagacttcatacaggagatccttctatatacggagctataaaagaacagatggatgaactaggtaaaagaaacatagcttatgaggttgtaccaggagttagttcctttacagcagcagcttcagccataaaaagagagtttacccttccgggagttagtcaaacagttattttaactagaattgaaggaagaaccccagtaccagagaacgaagatatagaaaaattagcgtctattggagcatcaatggcaatatttttatccgtgggaatgatagaaaaggtagtagaaaagttaaaaaagggttacaaaagaaacgttccaattgcaataattgaaagagcttcttgggaggatgaaagaagtataataggaacactagaggatataacagataaagttaaaaaagcgggaataacaaagtgtgctcaaatacttgttggagattttatagattctaactattctaaaagccttctttatgacaaaaattttactcacatgtatagggaaggtaagaagaaatga

SEQ ID NO: 86557 - protein, 251 aa, Clostridium acetobutylicum ATCC 824
MVYFIGAGPGDVDLITVKGRKIVEKADIVIYAGSLVSKEHMDFCKKEVKIYNSAHMTLEEVISVIVKAEVENKITVRLHTGDPSIYGAIKEQMDELGKRNIAYEVVPGVSSFTAAASAIKREFTLPGVSQTVILTRIEGRTPVPENEDIEKLASIGASMAIFLSVGMIEKVVEKLKKGYKRNVPIAIIERASWEDERSIIGTLEDITDKVKKAGITKCAQILVGDFIDSNYSKSLLYDKNFTHMYREGKKK

SEQ ID NO: 86558 - DNA, 774 bp, Agrobacterium tumefaciens str. C58
  CDS (1)..(774): transl_table=11
atgacggttcatttcatcggcgccggtccgggcgccgccgatctcatcacggtgcgcgggcgcgatcttatcgcggcctgcccagtctgcctttacgccggttcgctggttccgaaggccttgatcgattattgcccgccgggtgcacgcattgtcgatacggcagcactttcgcttgacgagatcgaggcggagttcgtggcggccgccaaggccggtaaggatgtcgcgcggttgcattccggcgatctttcgatctggagcgccatgggcgagcagatccgccgcctggagcgcctgggtctcgattataccgtcacccccggtgtgccctccttcgctgccgctgctgccaccctgcagcgggagctgacggtgccggaaatggcgcagagcctagtgctgacccgtatttccggccgcgcttcaaaaatgcctgagggtgagacgctgaaggcttttggcgcgacaggtgcgacactcgccattcatctcgccatccatgccatcggcaaggtggtggaggaactgacaccgctttatggctccgattgcccggtcgccattgtcgtgcgtgcctcctggccggatgaacggatcattcgtggcacgctttttgatatcgagggcaagcttgtggccgagccggtggaacgtacggcgctgatcttcgtcgggcatggtctggcctcaacggatttccgcgaaagtgcgctttatagcgccgactatgtacgccggttccggtccccgaaggaggatggtgcgggctga

SEQ ID NO: 86559 - protein, 257 aa, Agrobacterium tumefaciens str. C58
MTVHFIGAGPGAADLITVRGRDLIAACPVCLYAGSLVPKALIDYCPPGARIVDTAALSLDEIEAEFVAAAKAGKDVARLHSGDLSIWSAMGEQIRRLERLGLDYTVTPGVPSFAAAAATLQRELTVPEMAQSLVLTRISGRASKMPEGETLKAFGATGATLAIHLAIHAIGKVVEELTPLYGSDCPVAIVVRASWPDERIIRGTLFDIEGKLVAEPVERTALIFVGHGLASTDFRESALYSADYVRRFRSPKEDGAG

SEQ ID NO: 86560 - DNA, 759 bp, Sinorhizobium meliloti 1021
  CDS (1)..(759): transl_table=11
atgacggttcatttcatcggcgcaggcccgggcgcggcagacctcatcacggtcaggggcagggacctgattggccgctgccccgtctgcctctacgccggttcgatcgtatcgcccgagctcttgcaatattgcccgccgggcgcccgcattatcgatacggcgccgatgtcgctcgacgagatcgaggcggaatatgtccgcgccgccgaagccggcgaggatgtcgcccggctgcattccggcgatctctccgtctggagcgcggtggcagaacagatccgccggctggagaagaatgggatcgcctacacgatgacgccgggcgtccccgccttcgctgccgctgccgcgacgctcggccgcgagctgacgatcccggcggtcgcgcagagcctggtgctgacccgagtctccggtcgtgcctcgccgatgccgaacagcgagacgctcgccgccttcggagccaccggttcgacgcttgcgatccatcttgcgattcacgcgcttggtcaggtggtcgaggagctgacgccgctttacggcgccgactgcccggtcgcgatcgtggtcaaggcttcctggccggacgagcgcgtcgtccgcggcacgctcggcgacatcgcagccagggttgcggcggaaccgatcgaacgcactgcgctgatcttcgtcggaccgggcctggaagcatcggatttccgcgagagctcgctctacgacccgacctatcagcgccggttccgcgggcgcgattga

SEQ ID NO: 86561 - protein, 252 aa, Sinorhizobium meliloti 1021
MTVHFIGAGPGAADLITVRGRDLIGRCPVCLYAGSIVSPELLQYCPPGARIIDTAPMSLDEIEAEYVRAAEAGEDVARLHSGDLSVWSAVAEQIRRLEKNGIAYTMTPGVPAFAAAAATLGRELTIPAVAQSLVLTRVSGRASPMPNSETLAAFGATGSTLAIHLAIHALGQVVEELTPLYGADCPVAIVVKASWPDERVVRGTLGDIAARVAAEPIERTALIFVGPGLEASDFRESSLYDPTYQRRFRGRD

SEQ ID NO: 86562 - DNA, 768 bp, Thermoplasma acidophilum DSM 1728
  CDS (1)..(768): transl_table=11
gtgtacataataggtgcagggccaggggatccagatctcctgacggttaaggccagacgcttgatagagtcgtgtgatgtcataatatatgccggttcgctggtaaacccggagatattgaagctggccaggccaggatcggagatccacaacagcgcagagctgaacataaaccagataatggacataataaaggatgcctatgaaagggggctggatgttgccagaatacattcaggcgatccgcacatatacggtgcactgaaggatcagacctcataccttgaggcccttggcataccctatgaagtcgtgccaggggtcagcgtactgacatctgctgcagcctcgctgggtattgagcttactatggatggaatatcgcaggccgtaatcatagcccggggttcgctccgcatacccgtgccggatcgggagcagataagaaaactggcagagcatggcagcacgatggtcattttcacaggcatacacataatagacagcatagtgaaggatctgatcgatggaggctatagcccggatacacctgtcggagtggtgtacagatcaacatggccggatgagatcgtcataaagggcaggctttcaaatatcgcaacgctcgtccacgagaggagaatataccggactgcgctaataatagtgggcgatgttgtggatccaaagtttgtgaagcacagcaagctctatgacccagaatacgtgcactcttttcgcggtgttaaaaatggccatgatcgatga

SEQ ID NO: 86563 - protein, 255 aa, Thermoplasma acidophilum DSM 1728
MYIIGAGPGDPDLLTVKARRLIESCDVIIYAGSLVNPEILKLARPGSEIHNSAELNINQIMDIIKDAYERGLDVARIHSGDPHIYGALKDQTSYLEALGIPYEVVPGVSVLTSAAASLGIELTMDGISQAVIIARGSLRIPVPDREQIRKLAEHGSTMVIFTGIHIIDSIVKDLIDGGYSPDTPVGVVYRSTWPDEIVIKGRLSNIATLVHERRIYRTALIIVGDVVDPKFVKHSKLYDPEYVHSFRGVKNGHDR

SEQ ID NO: 86564 - DNA, 750 bp, Listeria innocua Clip11262
  CDS (1)..(750): transl_table=11
atggcagaagtacatttcgtcggagcaggaccaggagataaagaattaatcacactaaaaggataccaattattaaaaaacgccgatgttgttatatacgctggctcacttgtaaatccggaattgctagaatactgtaaaccggactgcgaaatccataatagtgccagtatgaatttaatagaaattattgactgtatggaagcgggagtaacagctggaaaagaagttgttcgtctgcaaacaggagacttctctatttacggctcgatccgtgaacaagtggaggaaatgaaaaaacgttcgattccatttacatgtacgccaggtgtaagttcatttcttggcgcggctagcagttttggtgttgaatatacggttcccgaagttagccagagtgtgattattactcgaatggctggaagaacgccggtaccgtcacgtgagtcactcagatcttacgcagcgcaccaaacgtccatggttattttcttatctgttcaaggtatcagaaaagtagtctcagaacttatcaaaggtggctataaaccagaaaccccagcagctgttatttataaagcaacttgggcagaagagaaaaaagtaactggtacgcttcaagacatcgctgaaaaagtgacagaagcaggaattactaaaacggccctaataatggttggtgattttctcggcgaagaattttattattctaaactatatgataaggatttcaaacatgaatacagataa

SEQ ID NO: 86565 - protein, 249 aa, Listeria innocua Clip11262
MAEVHFVGAGPGDKELITLKGYQLLKNADVVIYAGSLVNPELLEYCKPDCEIHNSASMNLIEIIDCMEAGVTAGKEVVRLQTGDFSIYGSIREQVEEMKKRSIPFTCTPGVSSFLGAASSFGVEYTVPEVSQSVIITRMAGRTPVPSRESLRSYAAHQTSMVIFLSVQGIRKVVSELIKGGYKPETPAAVIYKATWAEEKKVTGTLQDIAEKVTEAGITKTALIMVGDFLGEEFYYSKLYDKDFKHEYR

SEQ ID NO: 86566 - DNA, 786 bp, Nostoc sp. PCC 7120
  CDS (1)..(786): transl_table=11
atgcaaaatcatgtaaattccctagcttccgccgtgtatattgtaggcgcagggcctggagacccagatttactgacaattaaagcccaaaaattactgtcagtagcagatgtaattttattcgcagattcgttaataccagaagagcttttgcagttttgccgcaaagatgcagaaattattcagactgcgaacaaaactttggaggagattatacctttgatgatcgcaagggtgcgatcgcaaaaatctgtagtacgtctccactcaggtgatcccagtctctacagcgcaattaatgagcaaatgcagctcctggcggcagctaatattccttttgaagttattcctggtattagtgttttccaagccgcagccgccaaactgaaggtagaattgactgttcctggtttagtccagacaatcattctgacgcgcattagtggacgaacacaagtcccacatacagaagaattagccagcctcgcagcacatcaagctagtttatgcttatatctgagtgcgcgccatgtagaaaatgctcaagctaaactactagaacactatcccccagatacacctgtagctatttgctttcgcataggatggccagatgaaaaaattcgtgtagttcctctccaggagatggcagactgtactcagcgagaaaatctgattcgcaccacgttatatgtgattagtcctgcattatcacacaccaccgggcgatcgcgcttatatcatcctgagcatagtcatctgttccgcacggctggagatagctga

SEQ ID NO: 86567 - protein, 261 aa, Nostoc sp. PCC 7120
MQNHVNSLASAVYIVGAGPGDPDLLTIKAQKLLSVADVILFADSLIPEELLQFCRKDAEIIQTANKTLEEIIPLMIARVRSQKSVVRLHSGDPSLYSAINEQMQLLAAANIPFEVIPGISVFQAAAAKLKVELTVPGLVQTIILTRISGRTQVPHTEELASLAAHQASLCLYLSARHVENAQAKLLEHYPPDTPVAICFRIGWPDEKIRVVPLQEMADCTQRENLIRTTLYVISPALSHTTGRSRLYHPEHSHLFRTAGDS

SEQ ID NO: 86568 - DNA, 816 bp, Ralstonia solanacearum GMI1000
  CDS (1)..(816): transl_table=11
atgaaggtgtatttcatcggtgccgggcccggcgccgccgacctcatcacgctgcgcggcgcgcgcatcctgggcagcgtgccgatggtgctgtacgcgggctcgctggtgccgcccgagatgctgcagcactgccgccccgacgccgaactgcacgacaccgccaccctgtcgctcgacgagcaggaagcctgctaccgccgcgcgcaggccgagggcaaggacgtggcgcgcctgcactcgggcgacccggccatctacggcgccaccgccgagcagatgcgccggctggaggcgctcggcatcgactacgagatcgtgcccggcgtatcgtcgttcaccgccgccgccgccgtgctgggtgccgagctgacgcggccggcggtgtcgcaatcgatcgtcctgacgcgggtgtcggggcgggcctctgcggtgcccgagctcgaatccgtcgcgcgcttcgccgagcaccaggccacgatgtgcatcttcctgtccggccagcgcctgaagcagaccgtggccgacctgctgctgcactacccggccgacacgccggtggcgctggtgcgccgcgccacctggcccgaccaggccatccaccgctgcacgctgggcacgctgctgttggaggtcagccagaaagactggctgctgaccaccttgttgctggtcgggcgcgcgctgtcgcgcgagggcggcgtggagtccagcctgtacgcggccggcttcacgcacatcttccgcgacggcaccgaccgcaaagccccgcgccgccgcccgcgcaaagcgcccgccggcaaggagaccgcatga

SEQ ID NO: 86569 - protein, 271 aa, Ralstonia solanacearum GMI1000
MKVYFIGAGPGAADLITLRGARILGSVPMVLYAGSLVPPEMLQHCRPDAELHDTATLSLDEQEACYRRAQAEGKDVARLHSGDPAIYGATAEQMRRLEALGIDYEIVPGVSSFTAAAAVLGAELTRPAVSQSIVLTRVSGRASAVPELESVARFAEHQATMCIFLSGQRLKQTVADLLLHYPADTPVALVRRATWPDQAIHRCTLGTLLLEVSQKDWLLTTLLLVGRALSREGGVESSLYAAGFTHIFRDGTDRKAPRRRPRKAPAGKETA

SEQ ID NO: 86570 - DNA, 1464 bp, Agrobacterium tumefaciens str. C58; identical to SEQ ID NO: 84941
  CDS (1)..(1464): transl_table=11

SEQ ID NO: 86571 - protein, 487 aa, Agrobacterium tumefaciens str. C58; identical to SEQ ID NO: 84942

SEQ ID NO: 86572 - DNA, 789 bp, Agrobacterium tumefaciens str. C58; identical to SEQ ID NO: 84943
  CDS (1)..(789): transl_table=11

SEQ ID NO: 86573 - protein, 262 aa, Agrobacterium tumefaciens str. C58; identical to SEQ ID NO: 84944

SEQ ID NO: 86574 - DNA, 1428 bp, Agrobacterium tumefaciens str. C58; identical to SEQ ID NO: 84945
  CDS (1)..(1428): transl_table=11

SEQ ID NO: 86575 - protein, 475 aa, Agrobacterium tumefaciens str. C58; identical to SEQ ID NO: 84946

SEQ ID NO: 86576 - DNA, 945 bp, Brucella melitensis 16M
  CDS (1)..(945): transl_table=11
gtgccatggcgtggcggaggcggctgcgctggctgccgcaggcccgaacggccatctggtggttgggaaaatcgcatcggcccggtccaccgccgccctggcgatggttccaacgtttccgttataatcggaaccgctctatcaaggcggggtctgtcagcatccgcgcttcaggaagggaaaatcgtgactgttcatttcattggcgccggtccgggcgcagccgatcttatcacggtgcggggtttgcggctgatcgaaaactgccctgtctgcatctatgcgggctcgcttgtgccgaaggaggttgttgccggggcgccgaagaatgcgcgtctgatcgacagttcttcgctgacgctcgatgagattattgccgaaatggaagtggcacatgcccagggtctcgacgttgcgcgggtgcattctggcgactcgtcgatttatggcgcgatggcagaacagatgcgccggctggatgcgcttggtattgcctatgacgtgacgccgggtgtgcctgcctttgcggcggcggctgccgcgatgaagcaggaactgactattccggaactcaaccagaccattatcctcacgcgcacgtccatgaaatcatcggccatgccggaaggcgaggatcttgcagcgcttggcaaatccggtgcgacgctggtgattcatctttccattcgcaatctggcaaaaatcgaaagcgacctgacacccctttacggtgctgactgcccggtggtggtcgcttaccgggtcggctggccggacgagcagattttgcgcggaacgctttgcgacattgccgggaaaattgaagcgtccggcctcaggcgcacggcgatgatctttgtcgggcgtgggctcgatcccaaaaactttcgcgattcggccctctatcatgaagcgcatagccacgcggcgcgctcaaaagtttaa

SEQ ID NO: 86577 - protein, 314 aa, Brucella melitensis 16M
MPWRGGGGCAGCRRPERPSGGWENRIGPVHRRPGDGSNVSVIIGTALSRRGLSASALQEGKIVTVHFIGAGPGAADLITVRGLRLIENCPVCIYAGSLVPKEVVAGAPKNARLIDSSSLTLDEIIAEMEVAHAQGLDVARVHSGDSSIYGAMAEQMRRLDALGIAYDVTPGVPAFAAAAAAMKQELTIPELNQTIILTRTSMKSSAMPEGEDLAALGKSGATLVIHLSIRNLAKIESDLTPLYGADCPVVVAYRVGWPDEQILRGTLCDIAGKIEASGLRRTAMIFVGRGLDPKNFRDSALYHEAHSHAARSKV

SEQ ID NO: 86578 - DNA, 789 bp, Pyrobaculum aerophilum str. IM2
  CDS (1)..(789): transl_table=11
atggcgggcaaggtagttttcatcggcgcggggccgggggacccggagctgttgacggtgaaagccgtgaaatacttatcccaggctgaggtggtggtatacgccggctccttggtaaacgcggaggtgttgaaatacgccaggcaagacgccgaggtttacaacagcgcgtctatggtgacagaggaaatagttaagctcatgattcaaaaggccagggagggcaaactcgtggctaggctaaagtcaggtgatccctcaatttacggcgcgttgtgggaggagataatcccccttcaactcgccgggattgagtacgagatagtgcccggggtgacggccgcgttggccgcagccgcccagctgaggatagagctcacagtgcccaaaagggtccagcacgtggtgatcactagggcgtcacacagagtgccgatgagggggagcctcaaagacgtagccgattttatcctcaagacgggcgccgttgccgtgatatacacaggggtgcacgttatcgacaaagtcgtgaaggagcttgaagaggggggcctaagccccggcactcccgtggcagtggtgtataaggccacgtggccagatcagaaaattatccaaggcactttaagggatatagccgaaaaggtcaaggcggagagaatagtaagagacgccgttattatagtcggcgagtcagtacagccgccggagataccccgcagcgctgtgtacaaccccgaccatgcccacagctacaggcccagaagggagttgagagaagacgcctaa

SEQ ID NO: 86579 - protein, 262 aa, Pyrobaculum aerophilum str. IM2
MAGKVVFIGAGPGDPELLTVKAVKYLSQAEVVVYAGSLVNAEVLKYARQDAEVYNSASMVTEEIVKLMIQKAREGKLVARLKSGDPSIYGALWEEIIPLQLAGIEYEIVPGVTAALAAAAQLRIELTVPKRVQHVVITRASHRVPMRGSLKDVADFILKTGAVAVIYTGVHVIDKVVKELEEGGLSPGTPVAVVYKATWPDQKIIQGTLRDIAEKVKAERIVRDAVIIVGESVQPPEIPRSAVYNPDHAHSYRPRRELREDA

SEQ ID NO: 86580 - DNA, 774 bp, Fusobacterium nucleatum subsp. nucleatum ATCC 25586
  CDS (1)..(774): transl_table=11
atggaaaaatataaagaaaaagtctactttataggagcaggaccaggtaatccagagttaataactataaaagggcaaagaatagttaaagaagctgatgtcattatttatgcaggttcattagttccaaaagaagttatagattgtcacaaagaaagagcagaagtttataactcagcatctatgtctttagatgaagttatagatgttactgtaaaagcaataaaagatggtaaaaaagtagcaagagttcatacaggagaccctgcaatctatggagcacatagagaacaaatggatatgttagatgaatatggaatagaatatgaagttattccaggggtaagctcatttttagcttctgctgctgccttaaaaaaagaatttacactacctaatgtttcacaaactgtaatttgtactagaatagaaggaagaacagctgttcctgaaaaagaaagtttagaaagtttagcaaaacatagagcttctatggcaatatttttatcagttcatatgatagataaagtcgttgaagcattagctacttcttatcctatgacaacacctgtggcagttgttcaaagagcaagttggtcagatcaaaagatagttttaggaactcttgaaactattgaagaaaaagtaaaggaagctggaataaataaaactgcacaaatattggttggagattttttaggtaatgaatatgaaaaatcaaaattatatgataaatattttactcatgaatatagaaaaggtataaaaaaataa

SEQ ID NO: 86581 - protein, 257 aa, Fusobacterium nucleatum subsp. nucleatum ATCC 25586
MEKYKEKVYFIGAGPGNPELITIKGQRIVKEADVIIYAGSLVPKEVIDCHKERAEVYNSASMSLDEVIDVTVKAIKDGKKVARVHTGDPAIYGAHREQMDMLDEYGIEYEVIPGVSSFLASAAALKKEFTLPNVSQTVICTRIEGRTAVPEKESLESLAKHRASMAIFLSVHMIDKVVEALATSYPMTTPVAVVQRASWSDQKIVLGTLETIEEKVKEAGINKTAQILVGDFLGNEYEKSKLYDKYFTHEYRKGIKK

SEQ ID NO: 86582 - DNA, 759 bp, Methanopyrus kandleri AV19
  CDS (1)..(759): transl_table=11
atgtccgtgacgaaggtctacttcgtcggcgccggtccgggcgaccccgagctgatgacgttgaagggtgtacgggtgcttcgacgggctgacctcgtgatataccccggttcgctgattcctcgtgagtctgtggaggaatgggccccgaacgccgagctcatcgacagtcacggcaagacactggaggagctggtggagaccatggtcgaagccgtggaggacagccgtaccgtggtacgactagtttcgggagatcccttcgtctacagctcactgtacgaacaagtccgcgaactcagacgacggggagtggattacgaggtgatccccggcgtaagctccgtcaacgccgccgcagcggcactaggtgaggagctgacgaaacccgggatcagtcagacggtgatactcacccgcccggccgggaggaccgggaagcccgaaggtgagtcgctttccgagctcgcggagcacggttgcacgatggtgatcttcctgggggccgcttacctggagcgcatcgtgaagtcactgctcggaggcgcgtacgacgaggataccccggccgccgtcgtgtacaaggcgtccacacccgaggagaaggtgatcctgggtacgctaggagacatcgctgagaaggcgcgtgaggagggtatcgataggaccgccctgatcatcgtgggtgacgtcttgaaggaggaggggaagaggtctcacttatactcggaggagtacgcgaggagggtgcggagatga

SEQ ID NO: 86583 - protein, 252 aa, Methanopyrus kandleri AV19
MSVTKVYFVGAGPGDPELMTLKGVRVLRRADLVIYPGSLIPRESVEEWAPNAELIDSHGKTLEELVETMVEAVEDSRTVVRLVSGDPFVYSSLYEQVRELRRRGVDYEVIPGVSSVNAAAAALGEELTKPGISQTVILTRPAGRTGKPEGESLSELAEHGCTMVIFLGAAYLERIVKSLLGGAYDEDTPAAVVYKASTPEEKVILGTLGDIAEKAREEGIDRTALIIVGDVLKEEGKRSHLYSEEYARRVRR

SEQ ID NO: 86584 - DNA, 846 bp, Streptomyces coelicolor A3(2)
  CDS (1)..(846): transl_table=11
atgcgcaggatgcacaggagaggaccgaaaacgatggattccgaggccaaggtgaccttcgtcggtgccggtcccggcgccgccgacctgctgacgttccgtgcggcgcgggcgatcgccgaggcggacgtggtgatctgggcggcgagcctcgtccaggcggaggtgctccagcacgcgcgcgagggcgccgaggtgctggactcggcgacgatgtcgctggaggacgtcgtcgccgtgtaccggcgggcccgggcggaggggctgcgggtggctcgcatccactccggcgacccggcgctgtggggcggcacgcaggagcagctcgaccggtgcgcggagatcggtgtcgcgaccgaggtggtgcccggcgtctccgcgttctcggccgtggccgcgctcgcgcagcgcgagctgaccatcccggaggtcgcgcagtccgtggtcctcacccggctcggcgggggcaagacgccgatgccgcccggggaggaggtccgcgagttcgccaagcacggcacgacgatggcggtcttcctgtcggcggcccgcagcggccagctggtgcgggagctgctggagggcggctacccgaccgagaccccggtgatcgtcgcctaccaggcgacctggccggaggagctggtcgtgcggtgcacgatcgggaccctggaggagacggtcaaggagcacaggctctggaagcacaccctgttcctggtcggcccggccctcgacgcgcacggcacccgctcgcacctctaccacccggggcacttccacggctatcgcaaggccgatcccgaggcgcgccgggaactgcgctcgcggggtgcgagcacgtga

SEQ ID NO: 86585 - protein, 281 aa, Streptomyces coelicolor A3(2)
MRRMHRRGPKTMDSEAKVTFVGAGPGAADLLTFRAARAIAEADVVIWAASLVQAEVLQHAREGAEVLDSATMSLEDVVAVYRRARAEGLRVARIHSGDPALWGGTQEQLDRCAEIGVATEVVPGVSAFSAVAALAQRELTIPEVAQSVVLTRLGGGKTPMPPGEEVREFAKHGTTMAVFLSAARSGQLVRELLEGGYPTETPVIVAYQATWPEELVVRCTIGTLEETVKEHRLWKHTLFLVGPALDAHGTRSHLYHPGHFHGYRKADPEARRELRSRGAST

SEQ ID NO: 86586 - DNA, 729 bp, Methanosarcina mazei Go1
  CDS (1)..(729): transl_table=11
atggaaagaaaagtatattttgtaggggcagggcctggaaaccccaaactgattaccgttctgggacgtgaaatgctcgaaaaagcagaccttgttatgtatgcgggctccctggtaaaccctgaagtccttaattacactaaaggggaaactgtggacagctacgggcttacccttgacgaaaccacgaaaataatcgccgatgcggtggatgcagggaagtttgtggtgaggctccatagcggagacccctctctttacgggtctgtcatagaacagatggaagagctgagaaaatacgatattgaggtagaaagggttgcaggtgtctcctcggtttttgcaagtgcagcagctctcggaacccagcttactcttaacggcgtttccgatacccttatcattacccgccctgctggaaagactctggaaaaagaccttatccccgagctttctgcttataacaccacaatggcaattttcctaggcacccagaagatcagggaaataatggacaaagtccgctgcccaaaagatactcccgttgcagttgttttccacgcatcctgggaagacgaagaagttattgcagggactgtggaagatatcgcagataaggtcaaagatgcaggaattacacgctcggcaatgattataatcggcggagttgtcgaccctaaaaactacaggaggtcctatctatacggagtggcccaggaaccgctgtaa

SEQ ID NO: 86587 - protein, 242 aa, Methanosarcina mazei Go1
MERKVYFVGAGPGNPKLITVLGREMLEKADLVMYAGSLVNPEVLNYTKGETVDSYGLTLDETTKIIADAVDAGKFVVRLHSGDPSLYGSVIEQMEELRKYDIEVERVAGVSSVFASAAALGTQLTLNGVSDTLIITRPAGKTLEKDLIPELSAYNTTMAIFLGTQKIREIMDKVRCPKDTPVAVVFHASWEDEEVIAGTVEDIADKVKDAGITRSAMIIIGGVVDPKNYRRSYLYGVAQEPL

SEQ ID NO: 86588 - DNA, 1875 bp, Chlorobium tepidum TLS
  CDS (1)..(1875): transl_table=11
atgcacgaacgaattgccattatcgccatcaccgaaaccggaatcgcgctcgcccgctcactgaaaagcctgctcgtggccgacgggtttgccgggtgcgggctgttctcgtcccgcgtcgccgagggtgtcgaacccatcgaaagcgttccggcgtttgtccggcactcgttcggcagcttcgacgcttttctttttataggctcgctcggcatctgcgtgcgctcgattgcgccggtgttgcagggcaagctgcgcgacccggcggtcatcaactgcgacgagtccgggcgcttcgtgcagagcgtgttgtcgggccatgcgggcggggcgaacgcgctggccgggcgggtcgcgcggctgctgggggcacaggcggtgctgagcacgtcgagcgacgtgcaggggttgtggccgctcgacattctggggcgtgaagaggggtggggcgtcgagttcgcctcgccggtcgcgggtgaatcgatgactacggcgatggcggccttcgtgaaccacgagccgaccacgctgctacttgatgttcgcgactcgctgaccgatgagttggagcgaaccgcaccgccgttcgtgacgattgcctatcgctacgaagaggtcgatttcagcacgtgcagtcttctgctcgccgtgacgccgcggatcatcgaagcatctgtccagacggtgttctatcgaccgaaggtgctctgcgttggcgttgggtcggagcgaggcatcgaccccgaacggttcgtcagctcgatttccgaacaatttgcaagcaacggtttctccatgcgctcgatccgcagcgtcggttcggttgatttcaagctaaacgaagaggccttcattgcctttgccgaagcgtgcggcacgacgctgacgggtttcacgccggagcagctcgaaagtgtcgggccggtacccaatccgtctgatgtcgtcttccgcaaaactggcgtgcacagcgtttccgaggcttcggcggcgctgctctccggcgagaaccgctggctgatcgagaaacagaagatctcgctcgacggtattccggagggagagccgcgccactacaccttcgccgtcagccttttgcgcggagctgaacggcgcgggcgcatcgccatcgtcggggcggggccgggcgatccggagctggtgacggtcaagggcaaacgctacctcgaacaggccgacctgattctctacgcgggcagcctcgtgccggagaagctgacccactatgccaaaccgggcgcgctggtgcggagttcggcttcgctttcgctcgaagagcagttcgcgttgatggagcggttctatcgacagggcaaattcgtggtgcgactgcacaccggcgatccgtcgatttacggagcgattcaggagcagatggcctttttcgacgctgaggggttcgagtacgaaatcgtgccgggcgtgtcgtcgttccaggcagcggcagcggtgttgcagtcgcagtttaccgtgccggagaaggtgcagaccatcatcctgacgcgcggcagcgggcggacgccggtgccagacaaggagcggctctcggagctggcgcgtgcgagggcgaccatgtgcatctacctcagcgccgagtggagcgaccaggtgcagtccgagctgctcgaacactacgcgcccgatacccccgtggcggtctgctaccggctcacctgggacgaccagcaggtgtggcgcgggcggctcgacgggctggcctcgctggtgcgcgaaagcggcaaaacccgcacggtgctgctggtggtcggtgaggcgatcggtgcgcgcggcgggcgctcgaagctctacgacccatccttcacgcatggcttccgcgaagggcatggcgcgtga

SEQ ID NO: 86589 - protein, 624 aa, Chlorobium tepidum TLS
MHERIAIIAITETGIALARSLKSLLVADGFAGCGLFSSRVAEGVEPIESVPAFVRHSFGSFDAFLFIGSLGICVRSIAPVLQGKLRDPAVINCDESGRFVQSVLSGHAGGANALAGRVARLLGAQAVLSTSSDVQGLWPLDILGREEGWGVEFASPVAGESMTTAMAAFVNHEPTTLLLDVRDSLTDELERTAPPFVTIAYRYEEVDFSTCSLLLAVTPRIIEASVQTVFYRPKVLCVGVGSERGIDPERFVSSISEQFASNGFSMRSIRSVGSVDFKLNEEAFIAFAEACGTTLTGFTPEQLESVGPVPNPSDVVFRKTGVHSVSEASAALLSGENRWLIEKQKISLDGIPEGEPRHYTFAVSLLRGAERRGRIAIVGAGPGDPELVTVKGKRYLEQADLILYAGSLVPEKLTHYAKPGALVRSSASLSLEEQFALMERFYRQGKFVVRLHTGDPSIYGAIQEQMAFFDAEGFEYEIVPGVSSFQAAAAVLQSQFTVPEKVQTIILTRGSGRTPVPDKERLSELARARATMCIYLSAEWSDQVQSELLEHYAPDTPVAVCYRLTWDDQQVWRGRLDGLASLVRESGKTRTVLLVVGEAIGARGGRSKLYDPSFTHGFREGHGA

SEQ ID NO: 86590 - DNA, 786 bp, Thermosynechococcus elongatus BP-1
  CDS (1)..(786): transl_table=11
gtgatcagtaggaatacggctgctggggtttactttgtgggtgctggccccggtgatccagaattgcttaccctcaaggggcaacggctcctgcaagaggccgatgtgattctctatgccgattccttggtgccgactgggattttgcagtttgcaccgccgagtactctctgtattcccacagctgcactgaccttggaagaaatcattccactgatggttgaggctgtgcaggcggggaagaaagtggtgcggttgcaatcgggcgatcccagcctctacagtgccattcatgagcagatctgccgcctagcggaagcaggcattgccgttgaagttgtccccggcattagtgcctatcaattggctgctgctcgcctcaaggtcgaactcaccctgcctgaattggtacagacaattatcctcacccgtgccagtggccgtacgcgagttccgccaacagaagaattagccagtctagccgctcacaaagccagcttgtgtctttatctgagtgccaattgtatccagcgcgcccagcgagatctgctccagcactatcccccagagactctggttgcggtcggctaccgcttgggatggcccgatgagcagttgtggctggttcccctgagggacatagcagcgtttagtcagcaacagcgattgacccgcacgaccctctacctgatcagtccagccttggcggtgcaacagcagggcagtgatgcctggcgctcctgtctctatagtccagaacaccatcacctgtttcgccctcattaa

SEQ ID NO: 86591 - protein, 261 aa, Thermosynechococcus elongatus BP-1
MISRNTAAGVYFVGAGPGDPELLTLKGQRLLQEADVILYADSLVPTGILQFAPPSTLCIPTAALTLEEIIPLMVEAVQAGKKVVRLQSGDPSLYSAIHEQICRLAEAGIAVEVVPGISAYQLAAARLKVELTLPELVQTIILTRASGRTRVPPTEELASLAAHKASLCLYLSANCIQRAQRDLLQHYPPETLVAVGYRLGWPDEQLWLVPLRDIAAFSQQQRLTRTTLYLISPALAVQQQGSDAWRSCLYSPEHHHLFRPH

SEQ ID NO: 86592 - DNA, 759 bp, Brucella suis 1330
  CDS (1)..(759): transl_table=11
gtgactgttcatttcattggcgccggtccgggcgcagccgatcttatcacggtgcggggtttgcggctgatcgaaaactgccctgtctgcatctatgcgggctcgcttgtgccgaaggaggttgttgccggggcgccgaagaatgcgcgtctgatcgacagttcttcgctgacgctcgatgagattattgccgaaatggaagtggcacatgcccagggtctcgacgttgcgcgggtgcattctggcgacccgtcgatttatggcgcgatggcagaacagatgcgccggctggatgcgcttggtattgcctatgacgtgacgccgggtgtgcctgcctttgcggcggcggctgccgcgatgaagcaggaactgactattccggaactcaaccagaccattatcctcacgcgcacgtccatgaaatcatcggccatgtcggaaggcgaggatcttgcaacgcttggcaaatccggtgcgacgctggtgattcatctttccattcgcaatctggcaaaaatcgaaagcgacctgacacccctttacggtgctgactgcccggtggtggtcgcttaccgggtcggctggccggacgagcagattttgcgcggaacgctttgcgacattgccgggaaaattgaagcgtccggcctcaggcgcacggcgatgatctttgtcgggcgtgggctcgatcccaaaaactttcgcgattcggccctctatcatgaagcgcatagccacgcggcgcgctcaaaagtttaa

SEQ ID NO: 86593 - protein, 252 aa, Brucella suis 1330
MTVHFIGAGPGAADLITVRGLRLIENCPVCIYAGSLVPKEVVAGAPKNARLIDSSSLTLDEIIAEMEVAHAQGLDVARVHSGDPSIYGAMAEQMRRLDALGIAYDVTPGVPAFAAAAAAMKQELTIPELNQTIILTRTSMKSSAMSEGEDLATLGKSGATLVIHLSIRNLAKIESDLTPLYGADCPVVVAYRVGWPDEQILRGTLCDIAGKIEASGLRRTAMIFVGRGLDPKNFRDSALYHEAHSHAARSKV

SEQ ID NO: 86594 - DNA, 753 bp, Pseudomonas putida KT2440; identical to SEQ ID NO: 84993
  CDS (1)..(753): transl_table=11

SEQ ID NO: 86595 - protein, 250 aa, Pseudomonas putida KT2440; identical to SEQ ID NO: 84994

SEQ ID NO: 86596 - DNA, 783 bp, Bradyrhizobium japonicum USDA 110
  CDS (1)..(783): transl_table=11
atgacggtgcatttcatcggcgccgggccgggtgctcccgatctgctgacgttgcgcggacgcgacctgatcgccgcctgtccggtctgcctctatgccggctcgctggtgcctgagggcgtgctggcgcattgcccgccgggcgcgcacatcgtcaacaccgcgccgttgtcgcttgacgagatcatcgcggagatcgccgccgcgcatgcggacggcaaggacatcgcgcggctgcattccggcgatctctcgatctggtcggcgatgggcgagcagctccgccgtctccgtacgcttgacattcccttcaccgtgacgcccggcgttccgtctttctcggccgccgccgcggcactcgaggtggagctgactttgccggggctcgctcagaccgtggtgctgacgcgcacgccgggccgcgccagtgcgatgcccgaaggggagaagctcgccgccttcgctgcgaccggtgcgacactcgccatccatctgtcgatccatctgctcgaccaggtgattgcggagctgctgcctcactacggcgcggattgcccggtcgccatcgtctggcgcgcgagctggccggaccagtgcatcgtccgcgccacgcttgcgacgctcgatgccgccgtcggcgccgagatggaacgcaccgcgctcattctcgtcggcaagacgcttggcgccgcggatttcgacgagagccgcctctatgccgccgactacgaccgccgctatcggccggtcggcgccgagccgcgctttccggaggcctcctga

SEQ ID NO: 86597 - protein, 260 aa, Bradyrhizobium japonicum USDA 110
MTVHFIGAGPGAPDLLTLRGRDLIAACPVCLYAGSLVPEGVLAHCPPGAHIVNTAPLSLDEIIAEIAAAHADGKDIARLHSGDLSIWSAMGEQLRRLRTLDIPFTVTPGVPSFSAAAAALEVELTLPGLAQTVVLTRTPGRASAMPEGEKLAAFAATGATLAIHLSIHLLDQVIAELLPHYGADCPVAIVWRASWPDQCIVRATLATLDAAVGAEMERTALILVGKTLGAADFDESRLYAADYDRRYRPVGAEPRFPEAS

SEQ ID NO: 86598 - DNA, 771 bp, Clostridium tetani E88
  CDS (1)..(771): transl_table=11
atgagtaaaattgcttcaaaagtatatttcataggtgcaggacctggagatgtggatttaattacagtaaaaggaagagatatattatctgtagcagatgtagttatatatgcaggttccctagtaagtaaagaacatttagatttttgtaaagaagatgtagaaaaacataattcagcttccatgactttagaagatgttatagaagttatgaaaaaggctaaggatgaaggtaaatcagtagttagacttcatacaggagatccatctatgtatggagcaataaaagaacaaatggatgaactagataagtttaatatagaatatgaagttgttccaggagttagttcttgttttgcagcagcagcagctataaaaagagaatttacgttacccaatgtaactcaaacgctaatacttacaagagttgaaggaagaactccagtaccagagggagaagatttagaaaaactagcatccgttggagcatctatggcaatttttctatccattagcatgatagagaaagtagtagagaaattaagaaaaggttatggaaaaaatgtacctattgctgtaatagaaagagctacttgggaagatcaaagagttattataggtactttagacgatatagcagggaaagtaaaagaagctaatataactaaatgtgcacaaatattagttggagattttatagattgtgaatatgataaaagtcttctatatgataaaagcttttcacatatgtttagaaaggcagaaaaataa

SEQ ID NO: 86599 - protein, 256 aa, Clostridium tetani E88
MSKIASKVYFIGAGPGDVDLITVKGRDILSVADVVIYAGSLVSKEHLDFCKEDVEKHNSASMTLEDVIEVMKKAKDEGKSVVRLHTGDPSMYGAIKEQMDELDKFNIEYEVVPGVSSCFAAAAAIKREFTLPNVTQTLILTRVEGRTPVPEGEDLEKLASVGASMAIFLSISMIEKVVEKLRKGYGKNVPIAVIERATWEDQRVIIGTLDDIAGKVKEANITKCAQILVGDFIDCEYDKSLLYDKSFSHMFRKAEK

SEQ ID NO: 86600 - DNA, 750 bp, Pseudomonas syringae pv. tomato str. DC3000
  CDS (1)..(750): transl_table=11
ttgactgtctatttcatcggcgcaggccctggcgatcccgagttgatcaccgtcaaggggcaacgcctgatccgcacctgtccggtcattatctatgcaggttcgctggtgccgctcgccgtgctggaaggccaccaggcggtgcaggtgaccaacagcgcggaactgcatctggagcaaatcattgatcggatcaagaccgctcatgcgcaaggccaggatgttgctcgtgtacattccggcgaccctagcctgtacggtgccattggcgagcagatccgccatttgcgtgaactgaatatcccctttgaaatcattccgggagtaactgcgacggccgcctgcgctgcgttactgggcgtggagctgacgctgccggatatttcgcaaagcgtgattctgacccgctacgccgacaagacctcaatgccgagcggcgaagaactcgccagcctggcaagccacagggcgaccatggcgattcatctgggcgtaaataacctgcacagaatcgtcgaagagctgaccccgcattacggcaccgactgcccgattgccgtggtacaccgcgccagttggccggatcaggaatgggcaataggtacgctggcagacatagaggaaaaagtgcgagccaaaggctttcgccgcaccgcactgatcctcgtcggccgcgtactggccgccgacacatttggcgaatcctcgctgtaccgggccgggcatgcgcacctgttcaggcccaagtaa

SEQ ID NO: 86601 - protein, 249 aa, Pseudomonas syringae pv. tomato str. DC3000
MTVYFIGAGPGDPELITVKGQRLIRTCPVIIYAGSLVPLAVLEGHQAVQVTNSAELHLEQIIDRIKTAHAQGQDVARVHSGDPSLYGAIGEQIRHLRELNIPFEIIPGVTATAACAALLGVELTLPDISQSVILTRYADKTSMPSGEELASLASHRATMAIHLGVNNLHRIVEELTPHYGTDCPIAVVHRASWPDQEWAIGTLADIEEKVRAKGFRRTALILVGRVLAADTFGESSLYRAGHAHLFRPK

SEQ ID NO: 86602 - DNA, 825 bp, Streptomyces avermitilis MA-4680
  CDS (1)..(825): transl_table=11
atggccgatgcccccaccggcaaggtgaccttcgtcggggccggccccggcgccgccgacctgctgacgttccgtgccgcgcgcgccatcgccgaggccgacgtcgtgatctgggcggccagcctggtccaggccgaggtgctcgaccacgcgcgcgcgggcgcggacatcctggattccgcgacgatgtccctggaggacgtcgtcgccgtgtaccggcgggcgcacgcggagggcctgaaggtggcccgcatccactccggcgacccggccctgtggggcggtacgcaggaacaggccgaccggtgtgcggagatcggcatcgagaccgagatcgtgcccggcgtctcctccttctccgcggtcgcggcgctcgccgggcgcgagctgaccatccccgaggtcgcgcagtccgtgatcctcacccggctcggcggcggcaagacgccgatgccgcccggggaggaggtccgcgagttcgcccgccacggtacgacgatggccctgttcctgtcggccgcccgcagcggtcagctggtacgggagctgctggagggcggctacccgacgtccacgccggtcgtggtcgcgtaccaggcgacctggccggaggagctgatcgtgacgtgcacgatcgagacgctggaggagacggtcaaggagcacaagctctggaagcacacgctcttcctggtcggcccggccctcggcgcgcacggcacccgctcgcacctctaccacccgggccacttccacgggttccgcaaggccgacccgcaggcgcgggcggagctgcgggcggcccgcaagggaagtccgtcgtga

SEQ ID NO: 86603 - protein, 274 aa, Streptomyces avermitilis MA-4680
MADAPTGKVTFVGAGPGAADLLTFRAARAIAEADVVIWAASLVQAEVLDHARAGADILDSATMSLEDVVAVYRRAHAEGLKVARIHSGDPALWGGTQEQADRCAEIGIETEIVPGVSSFSAVAALAGRELTIPEVAQSVILTRLGGGKTPMPPGEEVREFARHGTTMALFLSAARSGQLVRELLEGGYPTSTPVVVAYQATWPEELIVTCTIETLEETVKEHKLWKHTLFLVGPALGAHGTRSHLYHPGHFHGFRKADPQARAELRAARKGSPS

SEQ ID NO: 86604 - DNA, 756 bp, Mycobacterium bovis AF2122/97
  CDS (1)..(756): transl_table=11
atgacggtctatttcatcggagcgggccccggcgccgccgacctaatcaccgtccgcggccaacggctcctgcaacgatgcccggtgtgcctgtatgcgggttcgatcatgcccgacgacctgttggcgcagtgtccgcccggcgcgacgattgtcgacaccggtccgctgaccctcgaacaaatcgtgcgcaaacttgccgacgccgacgccgacggccgcgacgttgcccggctgcattccggcgacccgtcgctgtacagcgcgctggccgaacagtgccgcgaactcgacgcgctgggcatcggctacgaaatcgtgccgggcgtaccggcttttgccgcagccgcagcggcgctaaagcgcgaactcaccgtgccgggtgtggcgcagacggtgacgctcacccgggtggcgacgctgtccacacccatgccgcccggtgaggacctggccgcgctcgcccgatcccgcgccactctggtcttgcacctggccgcagcccagatcgacgccatcgttccgcgactgctagacggtggttaccgacccgaaacgccggttgcggtggtggctttcgcgagttggccgcaacagcggacgctacgcggcacgttggccgatatcgccgcgcggatgcacgatgccaagatcaccaggaccgccgtgatcgttgttggcgacgtgctgaccgctgagggctttaccgacagctacctatattcggtggcacggcacggtcggtatgcacagtga

SEQ ID NO: 86605 - protein, 251 aa, Mycobacterium bovis AF2122/97
MTVYFIGAGPGAADLITVRGQRLLQRCPVCLYAGSIMPDDLLAQCPPGATIVDTGPLTLEQIVRKLADADADGRDVARLHSGDPSLYSALAEQCRELDALGIGYEIVPGVPAFAAAAAALKRELTVPGVAQTVTLTRVATLSTPMPPGEDLAALARSRATLVLHLAAAQIDAIVPRLLDGGYRPETPVAVVAFASWPQQRTLRGTLADIAARMHDAKITRTAVIVVGDVLTAEGFTDSYLYSVARHGRYAQ

SEQ ID NO: 86606 - DNA, 753 bp, Prochlorococcus marinus subsp. marinus str. CCMP1375
  CDS (1)..(753): transl_table=11
atgaacaaaattgcaatagttggagcaggtccaggctctgcagatttattaactctaagagcattaaatagattacaaaatgcagaggttttgatatggacagattcattaatttctcctgaaattgctgagttaacatcaaaaacttgtgagaaatttgctaccagttcattaactcttgaagaaattcttgctctacttataagtaaagcccagcaaggcaagagagtagttcgattacatgatggtgatccttgcttatatggagcaatttcagaacaaatctatgctctggcagaagaaggcattgatgttgaaattattccaggtattagcgcatatcaagcaactgcatcagaattaaaaaaagagctgacaattccaggaatagttcaaactattgtccttagcagatcgggagggaggactggtatccctgaagcagaaaaattagaaaacctggccaaaataggtgcttctttatgcttatatctaagcgcaaggcatgtagaagatgtccaaaaaacattattgacttattacccgaaagacaccccagtagcaattggctatagagtcacatggaaagatcaatggttaaaaatagttcctttgaatcaaatggcagcagcatcaagagacaaaggactttttaggactaccctctacatcattagccctgcattaaaatcacatgacaaacgctcaaagctttattctgatgaacacaagcatttatttagaaaaaaataa

SEQ ID NO: 86607 - protein, 250 aa, Prochlorococcus marinus subsp. marinus str. CCMP1375
MNKIAIVGAGPGSADLLTLRALNRLQNAEVLIWTDSLISPEIAELTSKTCEKFATSSLTLEEILALLISKAQQGKRVVRLHDGDPCLYGAISEQIYALAEEGIDVEIIPGISAYQATASELKKELTIPGIVQTIVLSRSGGRTGIPEAEKLENLAKIGASLCLYLSARHVEDVQKTLLTYYPKDTPVAIGYRVTWKDQWLKIVPLNQMAAASRDKGLFRTTLYIISPALKSHDKRSKLYSDEHKHLFRKK

SEQ ID NO: 86608 - DNA, 756 bp, Prochlorococcus marinus subsp. pastoris str. CCMP1986
  CDS (1)..(756): transl_table=11
atggttagaaagatctcatttattggagttggtccaggcgatcctgatttattaacaatcaaagcgttaaaaaaaatagagtctgcagacgttatattttgggctgattctttaattcctgaaaaaattataaatttttcacttaaaggttctgaaaaaataaaaaccagtacgcttactttagaaaaaatcacttcaataatgatagaaagatttaatgaaggtaaaactgtaattagattgcatgatggagatccatgcctgtatggtgcagttaaagaacaactagaaatattaagacaagaaaatatcgagactgaagtaatccctggtgtaagtgcttttcaggtcgctgccgcctatcatcaggccgagcttacaattccagatataactcaaactataattttgactagagcaggaggccgaactggcatgcctgaaaaagaatcacttaaagatcttgccaagcacaaatcctctttatgtctttatttgagtgctagacacataaaaagttctcaaaaaactttattagaattttaccctccagaaaccaaagtaattgttggttatagagtatcttgggatgatggttggacatctttaattgaattgaaggatatggaaaaatttactcttgagaaagaacttattagaactactatttatattgttagtcctgcaattaatactattgcgaataggtctaatctttataatccatcttacaagcatctctttaggggcaaataa

SEQ ID NO: 86609 - protein, 251 aa, Prochlorococcus marinus subsp. pastoris str. CCMP1986
MVRKISFIGVGPGDPDLLTIKALKKIESADVIFWADSLIPEKIINFSLKGSEKIKTSTLTLEKITSIMIERFNEGKTVIRLHDGDPCLYGAVKEQLEILRQENIETEVIPGVSAFQVAAAYHQAELTIPDITQTIILTRAGGRTGMPEKESLKDLAKHKSSLCLYLSARHIKSSQKTLLEFYPPETKVIVGYRVSWDDGWTSLIELKDMEKFTLEKELIRTTIYIVSPAINTIANRSNLYNPSYKHLFRGK

SEQ ID NO: 86610 - DNA, 756 bp, Prochlorococcus marinus str. MIT 9313
  CDS (1)..(756): transl_table=11
atgagcagaatctccatcgttggtgcaggtccaggcgcgactgatctgctaaccctgcgtgccgcagaacatctcaagcaggctgaggtccttgtatggaccgattcactggtttcaccagatattgcagcattggcacctgaatcctgtgaacgaatccgcaccagctcaatgaccctcgaggaagttcttccgcttctggtgaacagggcacaagcaggcaagcgggtggtccgtcttcacgacggagacccctgcctttatggggccctgtctgaacagatctgtggccttgctgacgcaggcattgaagtagaggttgtgccgggtttgagtgcttaccaagcgacagccgcagccctaaatgctgaactcaccatccctggccttgtccaaaccatagttctcagcagagcaggaggacgcaccggtgttcccgagcgcgaaaacctccaacatctggcatcacttggagcctctctatgcctctacctcagtgcacgccatgtagaggaagtacaagccacactgctgcagcactattcagctgaaactccagtagctatcggctacagggtgagctggcccgatcaatggttaagcgtggtgcctttgaagcaaatggctacgacctcccgtgaacacgagctgattcgcaccaccctttatgtcgttagtccggccctagctgcaggacgccaacgttcgaagctgtattctccaagccacaaacatctctttcgccaaaagggctaa

SEQ ID NO: 86611 - protein, 251 aa, Prochlorococcus marinus str. MIT 9313
MSRISIVGAGPGATDLLTLRAAEHLKQAEVLVWTDSLVSPDIAALAPESCERIRTSSMTLEEVLPLLVNRAQAGKRVVRLHDGDPCLYGALSEQICGLADAGIEVEVVPGLSAYQATAAALNAELTIPGLVQTIVLSRAGGRTGVPERENLQHLASLGASLCLYLSARHVEEVQATLLQHYSAETPVAIGYRVSWPDQWLSVVPLKQMATTSREHELIRTTLYVVSPALAAGRQRSKLYSPSHKHLFRQKG

SEQ ID NO: 86612 - DNA, 759 bp, Synechococcus sp. WH 8102
  CDS (1)..(759): transl_table=11
ctgactcaccctgtttgttttgttgggggaggtccaggggctgcagatctcctgacccttcgtgccgctgagcgcattcgtcaggctgatgttctgatctggactgattccctggtttgcccccagatcacagcgcttgctcctgatcattgcgaaaggatccgcaccagcacactgacgctggaagaggtgatccccctgctgatcgatcgacaacgacagggggcaaaggtcgtgcgtctgcacgacggtgacactgccttctacagcgcgatcaacgaacagatctgtgctctgaatgacgccgacattccggtggaggtggtccccggagtaagtgcctatcaagcggccgcggccggactctccagcgaactcaccattccaggagtggttcagacgattgttcttggtcgcgccgggggccgcacgggggttccgccgtcagaagagctcgatcggctcgcagggctcggcgccagcctttgcctctatctcagtgcccgtcatatcgacgacgtgcaggccacccttcaacggcactaccccgacgacaccccggtggccattgcctaccgggtgagctggcccgatgaatggatgtccgtggtccctttggcgcagatggccgctgccagcaaggagcgccaactgatccgcacaaccctatacatcatcagtccggcactcaacggaggtcagcaacggtcccgtttgtattcaccagatcacgaccacctgttccgacaaagacactga

SEQ ID NO: 86613 - protein, 252 aa, Synechococcus sp. WH 8102
MTHPVCFVGGGPGAADLLTLRAAERIRQADVLIWTDSLVCPQITALAPDHCERIRTSTLTLEEVIPLLIDRQRQGAKVVRLHDGDTAFYSAINEQICALNDADIPVEVVPGVSAYQAAAAGLSSELTIPGVVQTIVLGRAGGRTGVPPSEELDRLAGLGASLCLYLSARHIDDVQATLQRHYPDDTPVAIAYRVSWPDEWMSVVPLAQMAAASKERQLIRTTLYIISPALNGGQQRSRLYSPDHDHLFRQRH

SEQ ID NO: 86614 - DNA, 804 bp, Chromobacterium violaceum ATCC 12472
  CDS (1)..(804): transl_table=11
atgaaagtgtatttcatcggcgccggccccggcgccgccgacctgatcacgctgcgcggcagccgcctgctaggcgccgccccgatggtgctgtacgccggctcgctggtgccgaccgagatgctcagccactgccgcccggacgcggaaatccacgacaccgccgagctgaacctggaccagcaggaagcgctgtaccgccgcgcccaggccgagggcaaagacgtggcgcggctgcactccggcgacccggcgatctacggcgccaccaatgagcagatgcgccggctggaagcgctgggcatagactacgaagtggtccccggcgtgtcctcgttcaccgccgccgccgccgcgttgggcagcgaactgacccggcccgaagtgtcgcagtccatcatcctgacccgcaccagcggccgcgccagcgcggtgccggagacggaatccatcgccagcttcgccacccaccgcgcgacgatgtgcatcttcctgtccggccagcggctgaagcagaccgtcgccgacctgtcgctgcactacccgccggataccccggtggcgctggtgcgccgcgccagctggccggaccaatcggtccaccgcagcacgctgggcaggatgctggacgaggtgaagcagaaggactggctgctgaccacgctgctcttggtcggcgaggcgctgtcgcgcgaaggcggcgtcgaatccagcctgtacgcggccggcttcacccacatcttccgcgacggcgacgagcgcaagaccaagcgggccagcctgcagaaagaaagccaggcatga

SEQ ID NO: 86615 - protein, 267 aa, Chromobacterium violaceum ATCC 12472
MKVYFIGAGPGAADLITLRGSRLLGAAPMVLYAGSLVPTEMLSHCRPDAEIHDTAELNLDQQEALYRRAQAEGKDVARLHSGDPAIYGATNEQMRRLEALGIDYEVVPGVSSFTAAAAALGSELTRPEVSQSIILTRTSGRASAVPETESIASFATHRATMCIFLSGQRLKQTVADLSLHYPPDTPVALVRRASWPDQSVHRSTLGRMLDEVKQKDWLLTTLLLVGEALSREGGVESSLYAAGFTHIFRDGDERKTKRASLQKESQA

SEQ ID NO: 86616 - DNA, 762 bp, Gloeobacter violaceus PCC 7421
  CDS (1)..(762): transl_table=11
atgacgactttgcatcctgttcaaattattggtgccggtccgggcgatccggatctcattactgtgcgcggccagcggttgctcgccctcgcggacaccgtcttctacgccggatcgctggtgccggagggattgctcgattggtgccggcccgaggccgaacgcatcgacacccgctcgctcaccctcgaagcgattttgccggatctgctcgcgcgggtgcagaccggtcggcgggtggtgcggctgcactcgggcgatccgtgcctctacggggcggtgcacgagcagatggtggccctggtcgaagcagagatcgaatttgaaatcgtgccggggatcagtgcctttcaggccgctgccgccactctcaaagtcgaactgaccgtgccggggctggtgcagacgattatcctgacgcgggcgagcggccgtaccggcattcccgccgccgaagaactggcgggcctggcggcccaccgcgcctcgctgtgcctgtatctgagcgcccaccacgccaccgagtgtgaggagcgtctgctggcccactatccacccgaaacaccggtggccgtctgctaccgcctgggttggcccgacgagcgcatcgtgcgcacccgcctgggtgaacttgcccgcacgacgcgcgaggagaagctcacccgcacgaccctgtacgtgatcagccctgccctggaagccgccccgtcccgctcccggctgtaccaccctgagcacaaccatctgtttcgggcgaaatga

SEQ ID NO: 86617 - protein, 253 aa, Gloeobacter violaceus PCC 7421
MTTLHPVQIIGAGPGDPDLITVRGQRLLALADTVFYAGSLVPEGLLDWCRPEAERIDTRSLTLEAILPDLLARVQTGRRVVRLHSGDPCLYGAVHEQMVALVEAEIEFEIVPGISAFQAAAATLKVELTVPGLVQTIILTRASGRTGIPAAEELAGLAAHRASLCLYLSAHHATECEERLLAHYPPETPVAVCYRLGWPDERIVRTRLGELARTTREEKLTRTTLYVISPALEAAPSRSRLYHPEHNHLFRAK

SEQ ID NO: 86618 - DNA, 774 bp, Photorhabdus luminescens subsp. laumondii TTO1
  CDS (1)..(774): transl_table=11
atgtctgaatattttgatcctcgaaaagtgtggtttgtcggggccggaccgggtgacaaagagctaatcaccctgaaaggttaccgtttgctgcaacaggcgcaggtggtgatttatgccggttcactgattaataccgaactgctggattattgcccgccggaggctgagtgtcatgacagcgccggcctgacgttggaacagattgttgcactgatggttgatggtgtacgtgcgggtaagctggtggtgcggctgcaaaccggcgatctctcattgtacggttccatacgcgaacaaggcgaagttttgaccgaagcgggtatcagttttgtctcgataccgggtgtcagtgctttccttggggcggcagcgcaattaggggtggagtacaccgtaccggaagtggcgcaaagcttgatcattacccggattgaagggcgcacgccagtgccgccgctcgaacaactggaatccttcgctgctcatcaaacgtcaatggcgatttatctttctgtacagaaaatgagacatgtggctgcgcgtcttcaagctggtggttatccggcaacgacgccggtcgcggtgatctacaaagcgacttgggatgaaagcttaaccgtgcggggtactttggcggatatcgctgaaaaagtacagacagcgggtattcgtaaaaccgctttgattctggttggtgcttttttgggagaggagtaccactattccaagctttatgatgcggggtttagccatgaatatcgccgggcatga

SEQ ID NO: 86619 - protein, 257 aa, Photorhabdus luminescens subsp. laumondii TTO1
MSEYFDPRKVWFVGAGPGDKELITLKGYRLLQQAQVVIYAGSLINTELLDYCPPEAECHDSAGLTLEQIVALMVDGVRAGKLVVRLQTGDLSLYGSIREQGEVLTEAGISFVSIPGVSAFLGAAAQLGVEYTVPEVAQSLIITRIEGRTPVPPLEQLESFAAHQTSMAIYLSVQKMRHVAARLQAGGYPATTPVAVIYKATWDESLTVRGTLADIAEKVQTAGIRKTALILVGAFLGEEYHYSKLYDAGFSHEYRRA

SEQ ID NO: 86620 - DNA, 774 bp, Corynebacterium diphtheriae NCTC 13129
  CDS (1)..(774): transl_table=11
atgacagtttacttcattggtgcaggccccggcgctgcagatcttcttacacttcgtgcgcataacatcatcaaatcggcacaggtgtgcatgtacgctggatcaattgtcccaccagaagtgttggaatcggttccacaaaacgctgaggtgattaatacagcccgtatgccgcttgaccagatcatggaaaaaattgttgctgcgcataagaatgggcatgatgttgctcggctgcagtctggtgacccctcaatttattcggcagtggcagagcaagctcgcaggctcactgcgttggggattgactatcaaattgtcccaggagtacccgcttttgctgctgttgccgcagcattagggcatgagcttaccgtccctactgtcggtcaaacagtcatcctcactcgagtttcgggtcgtgcgtcagctatgccacaaggtgaggacctgcctactttaggtaagagcggcgcaactttgtgtatccatctcgcagcgcatgacattgaccgtgtcgtatcagagctgcttcctcagtatggtgagtattgtccagcggctgtggttgcttacgcctctcgtccagaggaggcaattgtccggggaacacttgctgacattgcagaaaagacgcgaagtgctgagattacccgtacagcaattattgtggtcggaaaagtgctcggagctgaaggtttccccgattcattcctatactccaatgaccgacctcgagatgagcatggtaggacgattccatgcgcgcactaa

SEQ ID NO: 86621 - protein, 257 aa, Corynebacterium diphtheriae NCTC 13129
MTVYFIGAGPGAADLLTLRAHNIIKSAQVCMYAGSIVPPEVLESVPQNAEVINTARMPLDQIMEKIVAAHKNGHDVARLQSGDPSIYSAVAEQARRLTALGIDYQIVPGVPAFAAVAAALGHELTVPTVGQTVILTRVSGRASAMPQGEDLPTLGKSGATLCIHLAAHDIDRVVSELLPQYGEYCPAAVVAYASRPEEAIVRGTLADIAEKTRSAEITRTAIIVVGKVLGAEGFPDSFLYSNDRPRDEHGRTIPCAH

SEQ ID NO: 86622 - DNA, 780 bp, Rhodopseudomonas palustris CGA009
  CDS (1)..(780): transl_table=11
atgaccgtccacttcatcggcgccggccccggcgcgcccgatctgatcaccgtgcgcggccgcgacctggtgatgcgctgcccggtgtgcctctatgccggctcgctagtgccgcgggagatcgtggcgctgtgcccgaaggacgcgcgcgtcgtcgacaccgccccgctcgacctcgacgccatcaccgctgagttcgttgcggctgccgaagccggccacgacatcgcccggctgcactctggcgatctgtcggtgtggagcgcgatgggcgaacagatccgccggctggagcagcacggcattccctacaccgtgacgcctggcgtgccgtcgttcgcggcggccgccgccgtgctcggccgcgaactgaccttgccggaggtcgcccagaccgtggtgctgacccggacctcgggccgcgcatcggcgatgccgccgcgcgagacgctggaagccttcgccgccaccggcgcgacgctggcgatccatctgtcgatccacgtactcgccgatgtcgtcgaacggctgcgcccgcactatggcgacgacggtgcggtcgcggtggtggtacgcgccagctggccggagcagcaggtgatccgcggcacactcagctcgatcgccgcgcaggtcgccgccgaaggcatcgaccgcaccgcgttgatcctggtcggcccgtcactcgccgccaccgatttccgcgagagctcgctctacgcacccgactacgatcgccgttatcgccgctcggcagaggacggccgtgaccgtgactga

SEQ ID NO: 86623 - protein, 259 aa, Rhodopseudomonas palustris CGA009
MTVHFIGAGPGAPDLITVRGRDLVMRCPVCLYAGSLVPREIVALCPKDARVVDTAPLDLDAITAEFVAAAEAGHDIARLHSGDLSVWSAMGEQIRRLEQHGIPYTVTPGVPSFAAAAAVLGRELTLPEVAQTVVLTRTSGRASAMPPRETLEAFAATGATLAIHLSIHVLADVVERLRPHYGDDGAVAVVVRASWPEQQVIRGTLSSIAAQVAAEGIDRTALILVGPSLAATDFRESSLYAPDYDRRYRRSAEDGRDRD

SEQ ID NO: 86624 - DNA, 795 bp, Geobacter sulfurreducens PCA
  CDS (1)..(795): transl_table=11
gtgtcatctgtcgctgataaccccattgtccacttcgtcggcgccggccccggcgatgccgaattgatcaccgtgaagggtgcccggctcctgcgggaggccaaggtggtggtctatgccgggagcctggtggaccgcgaactggtccgcacctacgcccccggcgccgaggtgcatgactccgccgccctgaccctggaggagaccacggcgctcctggcccgggccgtggccgacggccggcgggccgtgcgcctccacaccggcgacccctccatctacggggccatccaggagcagatggttgaactggaccggctcggcatcggctacgaggtggttcccggcgtgacgagcgcctttgccgcagcggcatccctgaagcaggagctgaccctgccggaggtatcacaaacggtcatcataaccaggctggccggtcggaccccggtgcccgagcgggagcggctggcggagatcgcccggatcggggcgacgctcgtcatctacctgtcggtcggcatgatcgagcaggtggtggcggaactcctccagggggcctacacgccggctacccccgcggcggtggtgtcccgggcgtcctggcccgacgagcaggcggtggagggaacccttgccgacatcgccgacaaggtgcggagctccggcatcggcaaacaggcgatcatcctcgtgggggacgtgctgaaggcgcgccgggaagggctgaaggcccggtcgctcctgtacgacggcggattctcgcacgagttccgcacggggattatcacgtag

SEQ ID NO: 86625 - protein, 264 aa, Geobacter sulfurreducens PCA
MSSVADNPIVHFVGAGPGDAELITVKGARLLREAKVVVYAGSLVDRELVRTYAPGAEVHDSAALTLEETTALLARAVADGRRAVRLHTGDPSIYGAIQEQMVELDRLGIGYEVVPGVTSAFAAAASLKQELTLPEVSQTVIITRLAGRTPVPERERLAEIARIGATLVIYLSVGMIEQVVAELLQGAYTPATPAAVVSRASWPDEQAVEGTLADIADKVRSSGIGKQAIILVGDVLKARREGLKARSLLYDGGFSHEFRTGIIT

SEQ ID NO: 86626 - DNA, 756 bp, Mycobacterium avium subsp. paratuberculosis K-10
  CDS (1)..(756): transl_table=11
gtgaccgtctacttcatcggcgcgggcccgggcgccgcggacctgatcaccgtccgcggccaacggctgctgcaaagctgcccggtgtgcctgtacgcgggttcgatcatgcccgacgacctgctggcactgtgcccaccggacgcgagaatcgtcgacaccggcccgctgacgctggatcagatcaccaccgagctccgccgggcgcacgccgccggccacgacgtggcgcggctgcattccggcgacccctcgctgtacagcgcgctggccgagcaatgccgccggctcgacgcactgggcatcggctacgaaatcgtgccgggcgtaccggctttcgccgcggccgcggccgcgctcaagcgggagctcaccgttcccggtgttgcgcagacggtgacgctgagccgggtggccaccttgtccacggcgatgccgcccggcgaagacctggccaccctggcccgaaccggcggcaccctggtgctccatctggccgccgcgcagatcgacagcatcgtcgggcaacttctcgacaacggccgtcaatcccagacaccctgcgcggtagtcgctttcgcgagctggccgcagcaaacggtgctgcgcggcactctcgacgacatcgccgcgcagatgcacgacgcccgcatcaccaagaccgccgtcatcatcgtcggcgacgcgctgaccgccggcggattcaccgacagctacctgtattcgaccggccgcgcccgcggaagcaggcactga

SEQ ID NO: 86627 - protein, 251 aa, Mycobacterium avium subsp. paratuberculosis K-10
MTVYFIGAGPGAADLITVRGQRLLQSCPVCLYAGSIMPDDLLALCPPDARIVDTGPLTLDQITTELRRAHAAGHDVARLHSGDPSLYSALAEQCRRLDALGIGYEIVPGVPAFAAAAAALKRELTVPGVAQTVTLSRVATLSTAMPPGEDLATLARTGGTLVLHLAAAQIDSIVGQLLDNGRQSQTPCAVVAFASWPQQTVLRGTLDDIAAQMHDARITKTAVIIVGDALTAGGFTDSYLYSTGRARGSRH

SEQ ID NO: 86628 - DNA, 750 bp, Treponema denticola ATCC 35405
  CDS (1)..(750): transl_table=11
atggtttattttgtaggagcgggtccgggggatccggatttaattacgataaaagggcgtaagctgattgaaaaagccgatatagttatttatgcaggctctttggtttcagcggagcatatcacgtttgcaaagcctaactgtaaaacttataattcggcttcaatgactcttgaagaagttatcaaagttatggaggaaaactgcaatgctcagattgtgaggcttcacacaggcgacccttcaatttatggggctgtcagggagcagatggatgagcttgataaactcaggatagactatgaggttatcccgggcgtaagctcttgtacggcggcggcggcggcaatcaaaaaagagttcacccttcccgatgtaagccagacaattatcttaacccgcatggaaggccgcacacccgttcctcaggaggaaaagctggcagctcttgcagcacacaaggcctcgatggcgatttttttgtcggtgcaaaatatagaaaatgtagttgcagaacttcttaaaggctataaggatgaagctacccccgctgccgtaatttacaaggcgacttgggaagatcaagaaataataacaggcaccctcggcgatattgctcaaaaagtgaagaaggccggtataaacaaaacagcacaaatcttggtagggaattttattgcgggagattataaaaggtctcagctttacaatcctaaattttctcacgaatttagaaaagcggaaaaatga

SEQ ID NO: 86629 - protein, 249 aa, Treponema denticola ATCC 35405
MVYFVGAGPGDPDLITIKGRKLIEKADIVIYAGSLVSAEHITFAKPNCKTYNSASMTLEEVIKVMEENCNAQIVRLHTGDPSIYGAVREQMDELDKLRIDYEVIPGVSSCTAAAAAIKKEFTLPDVSQTIILTRMEGRTPVPQEEKLAALAAHKASMAIFLSVQNIENVVAELLKGYKDEATPAAVIYKATWEDQEIITGTLGDIAQKVKKAGINKTAQILVGNFIAGDYKRSQLYNPKFSHEFRKAEK

SEQ ID NO: 86630 - DNA, 765 bp, Methanococcus maripaludis S2
  CDS (1)..(765): transl_table=11
atgaaaaaaatgattattgttggagcaggccctggagacaaggaattaatcacgataaaaggaaaaaatgcaatagaaagtgcagatatcttaatttatgcaggttcattagtaaatcctgaagttttagaatataataaaaaaggcgcaaaaatctacaacagtgcaacgatgacccttgatgaagtaatcgaagttgcagtaaatgggattaacagtggattaactgttgtaagggttcacacgggggaccctgcactttacggtgcgataaaagagcagatcgatgaattgaaaaaatatgaaattgacgtagaaataattccgggagtaacttctctttttgcagcggcggcaaccttaaaatctgaattaacacttcctgatgtatcacaaacagtaattatcacaaggcctgaagggagaactccaaaacctgcaaaagaaagcttaatttcgcttgcaaaacacaacgctacaatggcaatttaccttggaactggaatgattgaaaaagtatgcaacgaattaatcgaaggcggatacccagaaaatactgcagtttcagtagtttaccacgcatcatggcctgatgagaaaaaaatcactggaacactaaaagacatatctgaaaaagtaaaaggcgaagggattacaaaaacagcacttataatcgttggaaatgtaactaatcctgaaagttatgattattcaaaactttacgataaagattttgaacacgaatttagaaagcctaaaaattaa

SEQ ID NO: 86631 - protein, 254 aa, Methanococcus maripaludis S2
MKKMIIVGAGPGDKELITIKGKNAIESADILIYAGSLVNPEVLEYNKKGAKIYNSATMTLDEVIEVAVNGINSGLTVVRVHTGDPALYGAIKEQIDELKKYEIDVEIIPGVTSLFAAAATLKSELTLPDVSQTVIITRPEGRTPKPAKESLISLAKHNATMAIYLGTGMIEKVCNELIEGGYPENTAVSVVYHASWPDEKKITGTLKDISEKVKGEGITKTALIIVGNVTNPESYDYSKLYDKDFEHEFRKPKN

SEQ ID NO: 86632 - DNA, 756 bp, Prochlorococcus marinus str. MIT 9515
  CDS (1)..(756): transl_table=11
atggataaaaaaatctcatttattggagttggtccaggcgatcctgatttattaacaattaaagcgttaaaaaaaataaaatcagcagaggttatcttttgggctgattctttaattcctgaaaaaattataaatttttcacttgagggttctgaaaaaataaaaacaagtacgcttactttagaaaaaataacgtcaataatgataaaaagatacaatgaaggtaaaactataattagattgcatgatggagatccatgcctatatggagcagtaaaagaacaaatagaaatactaaagctaaacaacatcaagactgaagtcatccctggtgtaagtgcttttcaagttgctgctgcgtatcatcaggctgagcttacaattccggatattactcaaactataattctgacgagagcaggaggccgaactggtatgcctgagaaagaatctcttaaggaacttgcgaagcacaaatcctctttatgtctttatctaagtgctaggcacgtaaagaattctcaaaaaatcttattagaattttaccctccagaaactaaagtaatcgttggctacagagtctcttgggatgatggttggacatctctaattgaattgaaggatatggaaaaatttactcgtgaaaaagagattattagaactactatttatattgttagtcctgcaattaaaaatattacaaataggtctaatctttataacccttcttacaatcatctctttaggaataaataa

SEQ ID NO: 86633 - protein, 251 aa, Prochlorococcus marinus str. MIT 9515
MDKKISFIGVGPGDPDLLTIKALKKIKSAEVIFWADSLIPEKIINFSLEGSEKIKTSTLTLEKITSIMIKRYNEGKTIIRLHDGDPCLYGAVKEQIEILKLNNIKTEVIPGVSAFQVAAAYHQAELTIPDITQTIILTRAGGRTGMPEKESLKELAKHKSSLCLYLSARHVKNSQKILLEFYPPETKVIVGYRVSWDDGWTSLIELKDMEKFTREKEIIRTTIYIVSPAIKNITNRSNLYNPSYNHLFRNK

SEQ ID NO: 86634 - DNA, 759 bp, Prochlorococcus marinus str. NATL1A
  CDS (1)..(759): transl_table=11
atgaatccgatttcaattgttggcgcaggtccaggcgctttagacttaatgacaataagagctcaacaaagaattaaatcagcagatgttcttctttggacagactctctcattcctatacaaataacaaattttgttaaagatgattgtgaaaagataaagacaagttcattaacactagaagaaatacttttaatcttaattaaaaagcataaggaaggtaaaaaaattgttcgtctccatgatggtgatccttgcttatatggagccatatcagaacaaatatgcagattaaatgatgaagggattgaggtagaagtagtaccgggagtaagcgcatatcaagcaacagcagcaactttaggattcgaactaacagttccagatttaacccaaacaataatactaagcagagctgatggtaggacaggaaaaccagagagggagagccttcaaaagctagcatctattcaatcttctttatgtctctacctaagtgcaagacatgtggaagaagtgcaatccatacttataaagtattatcctgcgaacacccctgtagcaattgcatatagagtaacttggccagacgaatggataaaagtcatacctttgaatgagatggcaaaaacatctcaagaacaaaatttgatcagaacaactttatatataatcagtccaactctaaagatcggtaataatagatcaaagctttataatcctactcattcgcatttatttaggtcgagttcaagataa

SEQ ID NO: 86635 - protein, 252 aa, Prochlorococcus marinus str. NATL1A
MNPISIVGAGPGALDLMTIRAQQRIKSADVLLWTDSLIPIQITNFVKDDCEKIKTSSLTLEEILLILIKKHKEGKKIVRLHDGDPCLYGAISEQICRLNDEGIEVEVVPGVSAYQATAATLGFELTVPDLTQTIILSRADGRTGKPERESLQKLASIQSSLCLYLSARHVEEVQSILIKYYPANTPVAIAYRVTWPDEWIKVIPLNEMAKTSQEQNLIRTTLYIISPTLKIGNNRSKLYNPTHSHLFRSSSR

SEQ ID NO: 86636 - DNA, 756 bp, Prochlorococcus marinus str. MIT 9303
  CDS (1)..(756): transl_table=11
atgagcagaatctccatcgttggtgcaggtccaggcgcgactgatctgctaacactgcgtgccgcagaacatctcaagcaggctgaggtccttgtatggaccgattcactggtttcaccagatattgcagcattggcacctgaatcctgtgaacgaatccgcaccagctcaatgaccctcgaggacgttcttccgcttctggtgaacagggcgcaagcaggcaagcgggtggtccgtcttcacgacggagacccctgcctttatggggccttgtcggaacagatctgtggccttgctgacgcaggcattgaagtagaggttgtgccgggtctgagtgcttaccaagcgacggccgcagccctaaaagctgaactcaccatccctggccttgtccaaaccattgttctcagcagagctggaggacgcaccggtgttcccgagcgcgaaaacctccaacatctggcatcaattggagcctctctatgcctctacctcagtgcacgccatgtggaggaagtacaagccacactgctgcagcactattcagctgaaacaccagtagctatcggctacagggtgagctggcccgatcaatggttaagcgtggtgcctttgaagcaaatggctacgacctcgcgtgaacacgagctgattcgcaccaccctttatgtcgtcagtccggccctagctgcaggacgccaacgttcgaagttgtattctccagaccacaagcatctctttcgccaaaagggctaa

SEQ ID NO: 86637 - protein, 251 aa, Prochlorococcus marinus str. MIT 9303
MSRISIVGAGPGATDLLTLRAAEHLKQAEVLVWTDSLVSPDIAALAPESCERIRTSSMTLEDVLPLLVNRAQAGKRVVRLHDGDPCLYGALSEQICGLADAGIEVEVVPGLSAYQATAAALKAELTIPGLVQTIVLSRAGGRTGVPERENLQHLASIGASLCLYLSARHVEEVQATLLQHYSAETPVAIGYRVSWPDQWLSVVPLKQMATTSREHELIRTTLYVVSPALAAGRQRSKLYSPDHKHLFRQKG

SEQ ID NO: 86638 - DNA, 753 bp, Mycobacterium sp. JLS
  CDS (1)..(753): transl_table=11
gtgacggtctacttcatcggggccggtccgggggccgccgatctgatcacagtgcgcggacaacggctgctcggccggtgtccggtgtgcctgtacgccggttcgatcatgcccgaggacctgttggcgctgtgcccgccggatgcgcgcatcgtcgacaccggcccgctcacgctcgaccagatcgtcgacgaactcgcacaggcgcacgccgacggcaaggacgtggcgcgtctgcactccggggatccgtcgatctacagcgcgctggccgaacagtgccgccgcctcgacgcgctgggcgtggactacgagatcgtgcccggggtgcccgcgttcgcggccgcggcggccgcgctgggccacgaactcaccgtgccgggcgtatcccagaccgtcaccctgagccgggtcgccacactgtcgacggccatgccgcccggtgaggatctgcgcaccctgtccgcgtcgggcggcaccctggtgctgcacctggccgccgcgcagatcgacaacatcgtgcccgaactgctcgccggcggctatcgcccggaaacaccgtgtgccgtcgtggcattcgcgagctggccggaggagatcgtattgcgcggcaccctggccgacatcgccgcgcagatgcacgacgccgccgtcacccgcaccgcggtgatcgtcatcggtgacgtgctggcggccggcggcaccgagagctacctgtactcgtcggggcgcgtgcggcgcgggcggcactga

SEQ ID NO: 86639 - protein, 250 aa, Mycobacterium sp. JLS
MTVYFIGAGPGAADLITVRGQRLLGRCPVCLYAGSIMPEDLLALCPPDARIVDTGPLTLDQIVDELAQAHADGKDVARLHSGDPSIYSALAEQCRRLDALGVDYEIVPGVPAFAAAAAALGHELTVPGVSQTVTLSRVATLSTAMPPGEDLRTLSASGGTLVLHLAAAQIDNIVPELLAGGYRPETPCAVVAFASWPEEIVLRGTLADIAAQMHDAAVTRTAVIVIGDVLAAGGTESYLYSSGRVRRGRH

SEQ ID NO: 86640 - DNA, 753 bp, Clostridium difficile 630
  CDS (1)..(753): transl_table=11
atgaataaagtacattttgtaggagcaggacctggagataaagagctgataacattaaaaggatacaaattattaagtaatgcagatgtagtgatatatgcaggttcacttgttaatcctgaacttttggaatactgtaaagaagattgccaaatacataatagtgcacatatggatttacaagagataatagatgttatgagagaaggtatagaaaataataaatctgttgtaagactgcaaacaggtgatttttctatatatggttcaattagagaacaagtggaagatttaaataaattgaatatagattatgactgtactccaggagtaagttcttttttaggggcagcatcatctttaggggttgaatatacagttccagaaatttctcaaagtgtaattataacaagaatggaaggcagaactccggttccagagaaagaatcaatacaatcatatgctaagcatcagacatctatggtaatatttttatctgttcaagaaattgagaaagttgtgtctaaattactggaaggtggatatccaaaagatactcctatagcagttatatacaaagcaacttgggcagatgaaaaaatagttaaaggaactttaagtgatatagctgtaaaagttaaagaaaacaacataaataagactgctttaataatggttgggagatttttaggagaagagtataataattcaaagttatatgataaggatttcaaacatgaatatagagggtaa

SEQ ID NO: 86641 - protein, 250 aa, Clostridium difficile 630
MNKVHFVGAGPGDKELITLKGYKLLSNADVVIYAGSLVNPELLEYCKEDCQIHNSAHMDLQEIIDVMREGIENNKSVVRLQTGDFSIYGSIREQVEDLNKLNIDYDCTPGVSSFLGAASSLGVEYTVPEISQSVIITRMEGRTPVPEKESIQSYAKHQTSMVIFLSVQEIEKVVSKLLEGGYPKDTPIAVIYKATWADEKIVKGTLSDIAVKVKENNINKTALIMVGRFLGEEYNNSKLYDKDFKHEYRG

SEQ ID NO: 86642 - DNA, 729 bp, Burkholderia vietnamiensis G4
  CDS (1)..(729): transl_table=11
atgacggtgtatttcatcggcgcgggccccggcgacccggagctgatcacggtgaagggccagcgcctcgtgcgcacgtgcccggtgatcctgtacgcaggctcgctcgtgccgcccgccgtgctcgacggccatcgcgcggagcaggtcgtcaataccgccgacctcgatctcgacgcgatcgtcgcattgctcgccgacgcgcatgcgaaagggcaggacgtcgcgcgcgtgcattcgggcgatccgtcgttgtacggcgcgatcggcgagcagatccgccggctcgacgcgctcgggatcccgtatcaaatcgtgccgggcgtgacggcgacggccgcatgcgctgcgacgctcggcgtcgagctgacgctgcccggcgtcgcgcagacggtgatcctcacgcgcttcgcgggcaagacgacgatgccggaaggcgaagcgctcggcgcgctcgccgcgcatcgcgcgacgctcgcgatccatctgggcgtgcgtcacctcgcgcgcatcgtcgacgaagtgctgccgcactacgggcccgattgcccggtcgcggtgatctatcgcgcgagctggcccgacgaggagcgcgtgaccggcacgctggccgacatcgtcgcgaaggtcgaccgcacggccatcgagcgcaccgcgctgatcctgatcggccgcgtgctcgacgcgcacggattcgccgactcgacgctctatgcgagcacgcggtga

SEQ ID NO: 86643 - protein, 242 aa, Burkholderia vietnamiensis G4
MTVYFIGAGPGDPELITVKGQRLVRTCPVILYAGSLVPPAVLDGHRAEQVVNTADLDLDAIVALLADAHAKGQDVARVHSGDPSLYGAIGEQIRRLDALGIPYQIVPGVTATAACAATLGVELTLPGVAQTVILTRFAGKTTMPEGEALGALAAHRATLAIHLGVRHLARIVDEVLPHYGPDCPVAVIYRASWPDEERVTGTLADIVAKVDRTAIERTALILIGRVLDAHGFADSTLYASTR

SEQ ID NO: 86644 - DNA, 762 bp, Bradyrhizobium sp. ORS278
  CDS (1)..(762): transl_table=11
atgaccgtgcacttcatcggcgccggtccgggcgcggccgatctgatcaccgtgcgcggccgcgatctcatcgcgcgatgtccggtgtgtctctatgcgggctcgctggttccgacggcgctgctcgaccattgtccaagaggcgcacgcatcgtcgacaccgcgccgatggcgctcgacgagatcatcgccgaaatggcgcgggccaccgctgccggtgaggacgtggcgcgactgcattcgggcgacctctcgatctggagcgcgctcggcgagcaactgcgccgcctcgacgcgctgaagatcccctacacggtgaccccgggggtgccgtccttttccgccgccgcggccgcgcttggccgtgagttgaccttgccggggctcgcgcagtccgtcgtgctgacgcggacgtccgggcgggcctcggcgatgcccgagacggagcagctctcgctgttcgcgcaatcgcgcgcaacgctcgccatccatctctcgatccatgtgctcgatcaggtcgtcgcggagctccgaccgcattatggcgaggactgcccggtcgcgatcgtgtatcgcgcgagctggccggatcagcagatcatcacggcgacgctcgcgacgatcgtcgatcgcgccgccgcggccaggctggagcggaccgcgctgatcctggtcggccgtgcgctcagcggcagaaatttttgcaacagcgcgctgtatgatgccgattatcagcggcgcttccgcgggaggggcgaatga

SEQ ID NO: 86645 - protein, 253 aa, Bradyrhizobium sp. ORS278
MTVHFIGAGPGAADLITVRGRDLIARCPVCLYAGSLVPTALLDHCPRGARIVDTAPMALDEIIAEMARATAAGEDVARLHSGDLSIWSALGEQLRRLDALKIPYTVTPGVPSFSAAAAALGRELTLPGLAQSVVLTRTSGRASAMPETEQLSLFAQSRATLAIHLSIHVLDQVVAELRPHYGEDCPVAIVYRASWPDQQIITATLATIVDRAAAARLERTALILVGRALSGRNFCNSALYDADYQRRFRGRGE

SEQ ID NO: 86646 - DNA, 768 bp, Synechococcus sp. WH 7803
  CDS (1)..(768): transl_table=11
atgacaaccatctccatcgttggcgccggacccggcgctccagacctgctcacccgcagagctgaacagagaattcaggcggccgatgtcctgatctggactgactcgctggtatcgcctcaaatcgccgccttggcatctgagcaatgcgaacggattcgcaccagcacactcacgctggaagaggtgatccccctgatgattgatcgggcgaaccagggattgcgcgtggtccgcctccacgacggcgacccctgcctttacagcgctctcaacgaacagatctgcgcattggccgatgctgatctcaacgttgaagtggtgcctgggattagtgcctatcaagccaccgcagcagcgattaatgcagagctcacgattccaggcgtggtgcaaacgatcgtgctgggccgcaccgggggccgcactggcgttcctgagcgcgaacagctggatcacctcgccagattgcaggcgtcactgtgtctttatctcagtgcgcggcatgttgacgaggttcagtccacgcttctcaagcactaccccgcagacacaccggtcgcgattggctacagggtgagctggcctgaccagtccatcgatgtggttcccctcaacgccatggccgacgcaacacgggcaaggaagctgattcgcaccaccttgtatgtgatcagtccagcacttcgggagcaaaagggatctgagcggtcgcggctgtactcgcccgatcacgaccatctctttcgacccgcaggcggaaactga

SEQ ID NO: 86647 - protein, 255 aa, Synechococcus sp. WH 7803
MTTISIVGAGPGAPDLLTRRAEQRIQAADVLIWTDSLVSPQIAALASEQCERIRTSTLTLEEVIPLMIDRANQGLRVVRLHDGDPCLYSALNEQICALADADLNVEVVPGISAYQATAAAINAELTIPGVVQTIVLGRTGGRTGVPEREQLDHLARLQASLCLYLSARHVDEVQSTLLKHYPADTPVAIGYRVSWPDQSIDVVPLNAMADATRARKLIRTTLYVISPALREQKGSERSRLYSPDHDHLFRPAGGN

SEQ ID NO: 86648 - DNA, 765 bp, Leptospira interrogans serovar Copenhageni str. Fiocruz L1-130
  CDS (1)..(765): transl_table=11
atgaaagtttatatcattggagcaggtccgggagatcccgaactaattacaattaaaggtgcaaagctcatagaagcttgtccaatcgttctttataccggttcgctcgtaccaaaagccgtaatagaaagaactaaaaaagatgcgattgtattagattcttcgagtatgactttggatgaaatcatttcggtcatattatccgcaaaagaaaacgatcaagacgtggcgagagttcacaccggcgatccttcgatctttggttctattgcggagcagatacgaaaattagattctttgaatattcaatatgaaattgttccaggggtcagttcttttactgccgccgcggctgttttaggtaaagaactgactcttcccgaagtttctcaaactattatcatcactcgcatttcaggaagaacaccggttccagaaagggaaagacttgaaatccttgctcaatctggcgcaactctaactctttttttaagtgttttacatatccgagcaatcgtagaacgactaaccccatattatggagaaaaatgcccagtagcagtcattcaaaaagcgacctggcctgaacaaaaagttgtagtaggaacgttatacgacattgtatctaaggtaaaaagggaaaaaatttcctccacggcaatcatatttataggtccaattttagattgtaacgattttgcagattctagactttattccgcgaatttttcacacggtttcagaaaggccaaaaggaatctatga

SEQ ID NO: 86649 - protein, 254 aa, Leptospira interrogans serovar Copenhageni str. Fiocruz L1-130
MKVYIIGAGPGDPELITIKGAKLIEACPIVLYTGSLVPKAVIERTKKDAIVLDSSSMTLDEIISVILSAKENDQDVARVHTGDPSIFGSIAEQIRKLDSLNIQYEIVPGVSSFTAAAAVLGKELTLPEVSQTIIITRISGRTPVPERERLEILAQSGATLTLFLSVLHIRAIVERLTPYYGEKCPVAVIQKATWPEQKVVVGTLYDIVSKVKREKISSTAIIFIGPILDCNDFADSRLYSANFSHGFRKAKRNL

SEQ ID NO: 86650 - DNA, 774 bp, Desulfovibrio vulgaris subsp. vulgaris str. Hildenborough
  CDS (1)..(774): transl_table=11
gtgaaaggccatgacaccatacgggtatggttcgtgggggcagggccgggagacccggaattgctcaccatcaagggacagcgcatcatcgccggggccgacctcgtactctatgcgggctcgctggtgccgcccgaggtggtggcatgcgcccacgctggcgcacaggtggcggattcctcatccatgacactggaagagacgcactcgctcatgcgggacaccgtccggcgtggggggacagtggcgcgggtgcacacgggcgacccggcgctatacggggccacccgtgagcagatgcggcttctcgatgcggacggcatcgcctatggcgtggtgccgggcgtgacggcagccttcgcggcggcggcacaggcgtgtgtctcgttcaccgcgccggaggtcacgcagagtctcgtcatcacccgtcttgaaggacgcacccccgtgcctgaacgcgaacggctgcgcgcccttgccgcgcatggcagcgcgctggccatctatctttcagcagcgacgcctgaacgcctgcgtgacgaattgctggctgcgggggtcgcaccggagacgtgcgtgctggctgcccaccgggtggggtggcccgacggcagccatgtcatgaccacggtgcaggcgcttgcggagaccatgagcgagacaggttactcgcgccagacggtctttctggtgctgcccggcgagacggggccggagacggtctcacggctgtatgacgagacattcgcccacggctggcgtgaagcccgttga

SEQ ID NO: 86651 - protein, 257 aa, Desulfovibrio vulgaris subsp. vulgaris str. Hildenborough
MKGHDTIRVWFVGAGPGDPELLTIKGQRIIAGADLVLYAGSLVPPEVVACAHAGAQVADSSSMTLEETHSLMRDTVRRGGTVARVHTGDPALYGATREQMRLLDADGIAYGVVPGVTAAFAAAAQACVSFTAPEVTQSLVITRLEGRTPVPERERLRALAAHGSALAIYLSAATPERLRDELLAAGVAPETCVLAAHRVGWPDGSHVMTTVQALAETMSETGYSRQTVFLVLPGETGPETVSRLYDETFAHGWREAR

SEQ ID NO: 86652 - DNA, 750 bp, Listeria monocytogenes str. 4b F2365
  CDS (1)..(750): transl_table=11
atggcagaagtacatttcgtcggagcaggaccaggagataaagagttaattaccttaaaaggatatcaattattaaaagaggcggatgtcgttatttatgcagggtcgctcgtaaacccggagttgctagaatattgtaaaccagactgcgaaatccataatagtgcaagcatgaatttaatcgaaatcatcgactgcatggaagcgggcgtgactgctggtaaagaagtggttcgtttgcaaaccggagacttttctatttatggttcgattcgtgaacaggtcgaggaaatgaaaaagcgttcgattcccttcacatgtacaccgggtgtgagttcattccttggcgcggcaagcagttttggggtggagtatacagttccagaagtaagtcagagtgtaattattacccgaatggctggcagaactccagtaccatcgcgtgaatccctccgttcatacgcggcgcaccaaacttcaatggtaattttcttgtccgttcaaggtattagaaaagtcgtttcagaattaatcaaaggcggttataaaccagaaaccccagcagctgtcatttacaaagcgacttgggcggaagaaaagaaagtaaccggcacgttagaagatatcgcagaaaaagtaacagaagctggaattacgaaaacggcgcttattatggtcggtgatttccttggagaagagttttattattctaagctatacgacaaggatttcaaacatgaatacagataa

SEQ ID NO: 86653 - protein, 249 aa, Listeria monocytogenes str. 4b F2365
MAEVHFVGAGPGDKELITLKGYQLLKEADVVIYAGSLVNPELLEYCKPDCEIHNSASMNLIEIIDCMEAGVTAGKEVVRLQTGDFSIYGSIREQVEEMKKRSIPFTCTPGVSSFLGAASSFGVEYTVPEVSQSVIITRMAGRTPVPSRESLRSYAAHQTSMVIFLSVQGIRKVVSELIKGGYKPETPAAVIYKATWAEEKKVTGTLEDIAEKVTEAGITKTALIMVGDFLGEEFYYSKLYDKDFKHEYR

SEQ ID NO: 86654 - DNA, 972 bp, Propionibacterium acnes KPA171202
  CDS (1)..(972): transl_table=11
gtgagcgaacctcaggccgcacggcccacccagcatgtgtctgagaaggctctggaggatttagaccacaacgtcatcgagccgccgccggtgccccgtcgtgacatccccgaaggagccggcaaggtcgttttcgttggagccggaccgggtgccccagacttggtgagtgtgcgcggcgctcgggtcattgaaaccgccgacatcatcatctgggcctccagcctggtacatcccgacatggttgcccgtcacaaggagggcgctgagctcatcgactccgcctctatccccttggaggaccttgaacctctctacacccgcgcccgcgacgagggcctgatggtggccagggtccacaccggtgacccgtccatctacggggctaccgcagaacagcgtgacctgtgtcgtcgtattggtattgacttcgagaccattcctggcatctctgctttctcggctgccgctgcacggatggacgtcgagatcactgtcccggaagtctctcagtcactcatcctcacccggctcgagggcgggcgcacacccatgcccgacggtgagaccgttgcctccttcgcccgtcatggggcgactatggcaatctacctgtcagcggcccgtaacaaggcgcttcaggaggccttactggagggcggatatctgccggagaccccctgcatcatcgggtatgcggtgacctggcccgaggagatgatgttccgctgcgacctggctcacctgtcggagacgatgcgtaaccacaagctgtggaagcatgcggtcgtcctcgtgggcccggcgctggcagaggggccgatctccacccgcagccacctctatcatcccggttttcgtcacgagtatcgcgcagccgacgctcaggcccacgctgacctcaaggctcacggtacctgcggcgtctaccaccggaactccacgaaccccgacacgaagggcaattcatga

SEQ ID NO: 86655 - protein, 323 aa, Propionibacterium acnes KPA171202
MSEPQAARPTQHVSEKALEDLDHNVIEPPPVPRRDIPEGAGKVVFVGAGPGAPDLVSVRGARVIETADIIIWASSLVHPDMVARHKEGAELIDSASIPLEDLEPLYTRARDEGLMVARVHTGDPSIYGATAEQRDLCRRIGIDFETIPGISAFSAAAARMDVEITVPEVSQSLILTRLEGGRTPMPDGETVASFARHGATMAIYLSAARNKALQEALLEGGYLPETPCIIGYAVTWPEEMMFRCDLAHLSETMRNHKLWKHAVVLVGPALAEGPISTRSHLYHPGFRHEYRAADAQAHADLKAHGTCGVYHRNSTNPDTKGNS

SEQ ID NO: 86656 - DNA, 774 bp, Desulfotalea psychrophila LSv54
  CDS (1)..(774): transl_table=11
atgagagaagaaaagcaaaccgtctattttgtcggggcaggaccaggtgaccccgaactgatcaccgtcaagggccaacgcctcctgcaggaggcagacctgatcatctacaccggtagtctggtgccccgagccctggtggaaaacctggcgggggagagcatcaactcagccccgcttaacctcgatgaggtctttacccttatcaaaactgcccatgccgaaggcaaacgaatcgtccgccttcataccggcgattcggccatcttcggcgccataaacgagcaacttgccctgctccgtgcccatagcattcccttccaggtaattccaggggtcagctcggccctggccacagcggcggctctggagacccagctcaccctgcccgaggttgcgcaaacggtaatctttaccagaagagcaggacgtacccccgtgcccgcaggtgaagatctgatctctctggcccggcacggttcgaccatgatgatctttctcagtatctccatgatatccgaggttgtagcagaactccttgagggcggatatcctgtccataccccggcggccgtggtagagaaggccagctggcccgaggagaggatcctcaggggaacgctcacgaacattgcccagcaggtcaaggatgccggcatcaccaagacggccctgattgccgtgggcccggccatcagccttgaggccccggagatcctctctaaactctatgaccgaggattttcacacgagtacagacaggcaaagccatga

SEQ ID NO: 86657 - protein, 257 aa, Desulfotalea psychrophila LSv54
MREEKQTVYFVGAGPGDPELITVKGQRLLQEADLIIYTGSLVPRALVENLAGESINSAPLNLDEVFTLIKTAHAEGKRIVRLHTGDSAIFGAINEQLALLRAHSIPFQVIPGVSSALATAAALETQLTLPEVAQTVIFTRRAGRTPVPAGEDLISLARHGSTMMIFLSISMISEVVAELLEGGYPVHTPAAVVEKASWPEERILRGTLTNIAQQVKDAGITKTALIAVGPAISLEAPEILSKLYDRGFSHEYRQAKP

SEQ ID NO: 86658 - DNA, 822 bp, Methylococcus capsulatus str. Bath
  CDS (1)..(822): transl_table=11
atgactcccccggttcccgtgagcatggaaaccttggcaggtggcaaagtctggttcgtcggcgccgggccaggcgatcccgacctcatcacggtcaaggggcgccggctcgtcgaatccgccggagccatcctctacgccggttccctggtgtcggaagccgccttggcttgggccagacccggctgcgtggtggaggattccagggacatgacgctggagcagatcgccgaatggctgatccgggaggcgcggcgccaccccgtggtggtgcgcctgcaaaccggcgatccctcgctctacggcgcgctgaccgaaatggtgcgcccgctggacgaggccggcatcgaggtgggcgtggtgcccggcgtctcctcggccatggcctcggccgctgcggccgtggaaagcctgacgctgccggaagtcacccagacggtgatcctcacccgcgtcgagggacgcacccccatgcccgagggcgaatccctgcgggagctggcccgccaccgttgcaccctgtgcctgttcctttcgatcaccctgctgcgcgaggtgcgggaggcactgctcgatgccggctggtccgacgaggcgccggtgctggtggtccacaaggcgagctggccgggcgaggaaaggatcgtgcgcggcacgctggcggacatccgcgagcgctgcaaggccgggcgcatcgccagccaggccatgatcatcgtgagccccgccctcggcgcgcgccactggccggacatccggcgctccaggctctacgacgccggtttttcccatcgcttccgcaaggcggacagaaccgcatga

SEQ ID NO: 86659 - protein, 273 aa, Methylococcus capsulatus str. Bath
MTPPVPVSMETLAGGKVWFVGAGPGDPDLITVKGRRLVESAGAILYAGSLVSEAALAWARPGCVVEDSRDMTLEQIAEWLIREARRHPVVVRLQTGDPSLYGALTEMVRPLDEAGIEVGVVPGVSSAMASAAAAVESLTLPEVTQTVILTRVEGRTPMPEGESLRELARHRCTLCLFLSITLLREVREALLDAGWSDEAPVLVVHKASWPGEERIVRGTLADIRERCKAGRIASQAMIIVSPALGARHWPDIRRSRLYDAGFSHRFRKADRTA

SEQ ID NO: 86660 - DNA, 795 bp, Silicibacter pomeroyi DSS-3
  CDS (1)..(795): transl_table=11
atgaccgttcatttcatcggcgccggacccggcgctgccgacctgctcaccctgcgtggccgcgacatcatcgcctcctgcccggtctgcctttatgccgggtcgctggtgcccgaggagatcctgagccattgccccgagggggctaagatcgtcaacaccgcgccgatggacctggatcagatcatggccgagatcgaggccgcgcatgaggcagggcaagatgtggcgcggctgcattcgggcgacctgtcggtctggtcggccatgggcgagcagatccggcggctgaaacagatggggatcccggtcagcgtgacgcccggcgtgccgtcgtttgccgccgccgccgccgcgctgggcaccgagctgaccctgcccggactggggcaatcggtggtgctgacccgcacgccggggcgggcctcgtccatgcccgagggcgagagcctagagaattttgcccgcactggtgccacgctggccattcacctgtcgatcggcaatctggacaaggtgatcgccgatctggtgccgcattacggcgccgactgccccgtcgcggtggtctatcgcgccagctggccggacgagcgcatcatccgcgccacgctggaaactttgaaagacgcgctggacgaggatatctctcgcaccgcgctgatcctggtcggtccggtgctgaaaggcgagggtttcgacgaaagctgcctttattcccgggaatacgaccgccgttaccggccgcaaagcgccgacagcccgtggtcgagctggagccatggcgatgactaa

SEQ ID NO: 86661 - protein, 264 aa, Silicibacter pomeroyi DSS-3
MTVHFIGAGPGAADLLTLRGRDIIASCPVCLYAGSLVPEEILSHCPEGAKIVNTAPMDLDQIMAEIEAAHEAGQDVARLHSGDLSVWSAMGEQIRRLKQMGIPVSVTPGVPSFAAAAAALGTELTLPGLGQSVVLTRTPGRASSMPEGESLENFARTGATLAIHLSIGNLDKVIADLVPHYGADCPVAVVYRASWPDERIIRATLETLKDALDEDISRTALILVGPVLKGEGFDESCLYSREYDRRYRPQSADSPWSSWSHGDD

SEQ ID NO: 86662 - DNA, 831 bp, Synechococcus elongatus PCC 6301
  CDS (1)..(831): transl_table=11
atgtggttcgtcccgccatttcgggagagtcgcgtagtgagctttagtgcaggcgtttacttcgtcggggtcggcccgggtgacccggagctaatgacggtacgggctcaaaagctgattgccgccgccgatgttctgctctacaccgattccttggtgcccccggcaattttggcggatgcaaggccagacgcagaacgactgccaacggcccatcgcacgctggaagagattttgccaatcctcaaagagcgagtggccgcgggagcgatcgtggcgcggctccacgacggcgatcccagcctctacagcacgatcgcggaacagatcgcagggttgcgatcgcaggacattccctatcaagttattcctggcgtcagcgcctttcaagcagcggccgctcgactcgggcaagaactgactttgccgggactggttcagacgatcatcctgactcgctgtgccggtcgaattggactgcccgatcgcgaatccctctcgtccttagccgcgcatcaagctagcctctgtctctatctgagcgctcgccaagcggaaaaagcgcagacggaattgctggaacattactccccagaaacgccgatcgcagtttgctatcgactgggttggccagatgaagcgatttggctagggaaactgtcggaactggcgcagatcactcaagatcagcaactcgatcgcacggtgctctatctgatcagtcctgctttacaagccgtcgagactgggcgatcgcagctctacaatcccgactatcaccatctgtttcggccagaaactacagcagcacgatcgccccagccatcatga

SEQ ID NO: 86663 - protein, 276 aa, Synechococcus elongatus PCC 6301
MWFVPPFRESRVVSFSAGVYFVGVGPGDPELMTVRAQKLIAAADVLLYTDSLVPPAILADARPDAERLPTAHRTLEEILPILKERVAAGAIVARLHDGDPSLYSTIAEQIAGLRSQDIPYQVIPGVSAFQAAAARLGQELTLPGLVQTIILTRCAGRIGLPDRESLSSLAAHQASLCLYLSARQAEKAQTELLEHYSPETPIAVCYRLGWPDEAIWLGKLSELAQITQDQQLDRTVLYLISPALQAVETGRSQLYNPDYHHLFRPETTAARSPQPS

SEQ ID NO: 86664 - DNA, 750 bp, Pseudomonas syringae pv. syringae B728a
  CDS (1)..(750): transl_table=11
ttgactgtctatttcatcggcgcaggccctggcgatcccgagctgatcaccgtcaagggccaacgcctgattcgcagctgcccggtcattatctacgcaggctcgctggtgcccctcgccgttctggagggccatcaggccgtgcaggtgaccaacagcgccgagctgcacctggagcagatcatcgatctgatcaagcgcgcgcacgcacaaggccaggatgtggcacgcgtgcactccggggacccaagcctgtatggcgctatcggcgagcagatccgccatctgcgcgaactgaacattccgttcgaaatcattccgggggtcaccgcgaccgctgcctgcgctgcgctgctgggcgtcgagctgaccctgccggacgtttcgcagagcgtgattctgacccgctatgccgacaagacctcaatgcccagcggcgaggaactggccagcctggccagccatcgggcaaccatggcgattcatctgggagtgaacaacctgcagcggatcgtcgaggagctcatgccacattacggcgccgattgcccgattgcagtggtgcaccgcgccagctggccggaccaggactgggccgttggcacgctggcggatattgaggaaaaggtacaggccaagggctttcgccgtaccgcactgattctggtcggacgtgtgcttgccgatgacaccttcagcgagtcctcgctgtaccgcgccgggcatgcccacttgttcaggccggtgtag

SEQ ID NO: 86665 - protein, 249 aa, Pseudomonas syringae pv. syringae B728a
MTVYFIGAGPGDPELITVKGQRLIRSCPVIIYAGSLVPLAVLEGHQAVQVTNSAELHLEQIIDLIKRAHAQGQDVARVHSGDPSLYGAIGEQIRHLRELNIPFEIIPGVTATAACAALLGVELTLPDVSQSVILTRYADKTSMPSGEELASLASHRATMAIHLGVNNLQRIVEELMPHYGADCPIAVVHRASWPDQDWAVGTLADIEEKVQAKGFRRTALILVGRVLADDTFSESSLYRAGHAHLFRPV

SEQ ID NO: 86666 - DNA, 747 bp, Pseudomonas fluorescens Pf-5
  CDS (1)..(747): transl_table=11
atgactgtctatttcatcggcgccggccccggcgacccggaactgatcaccgtcaagggccagcgcctgatccatcgttgcccggtgatcatctacgccggctccctggtcccccaggcagtgctcgacgggcaccgcgcggagcgggtgatcaatagcgccgaactgcacctggagcagatcatcgaggccatcaagcaggcccatgcccggggccaggacgtggcccgggtgcattccggcgacccgagcctgtatggcgccatcggcgagcagatccgctgcctgcgggagctggacatccccttcgagatcatccccggggtcaccgccaccgccgcctgcgctgccctgctgggggccgaactgaccctgccggacgtctcccaaagcgtgattcttacccgctacgcggacaagaccgcgatgcctgtcggcgaggatttcgccagcctggcggcccacggcgccaccatggccatccacctgggggtcaatcacctatcgaagatcgttgccgagttgctgccccactacggcgcagactgcccgattgcagtggtgcaccgcgccacctggccggatcaggactgggccctgggaaccctggcggacatcgtcgatcaggtggcggccaaggggtttcggcgcacggcactgatcctggtgggccgggtgctggccacggatgcattcagcgaatcgtcgctgtaccgcgccgggcacgcacacctctaccgcccttga

SEQ ID NO: 86667 - protein, 248 aa, Pseudomonas fluorescens Pf-5
MTVYFIGAGPGDPELITVKGQRLIHRCPVIIYAGSLVPQAVLDGHRAERVINSAELHLEQIIEAIKQAHARGQDVARVHSGDPSLYGAIGEQIRCLRELDIPFEIIPGVTATAACAALLGAELTLPDVSQSVILTRYADKTAMPVGEDFASLAAHGATMAIHLGVNHLSKIVAELLPHYGADCPIAVVHRATWPDQDWALGTLADIVDQVAAKGFRRTALILVGRVLATDAFSESSLYRAGHAHLYRP

SEQ ID NO: 86668 - DNA, 750 bp, Pseudomonas syringae pv. phaseolicola 1448A
  CDS (1)..(750): transl_table=11
ttgactgtctatttcatcggtgccggccctggcgatcccgagctgatcaccgtcaaggggcaacgcctgattcgcacatgcccagtcattatctatgcaggctcactggtgccgctcgccgtgctggaggggcatcaggccgtgcaggtgaccaacagcgccgagctgcatctggagcagatcattgagctgataaagaccgcgcatgcgcagggccaggacgttgctcgtgtgcattccggcgacccgagcctgtatggcgccatcggcgagcagatccgccatctgcgggaactgggtattccattcgaaatcattcccggcgtcaccgcgaccgctgcctgcgctgcgctgctgggcgtcgagctgaccctgccggatgtttcgcaaagcgtgattctgacccgctatgccgacaagacctcaatgcccagcggcgaggaactggccagtctggccagccaccgggcaaccatggcgattcatctgggggtgaacaacctgcagcggattgtcgacgagctcgttccacattacggagccgattgcccgattgccgtggtacaccgcgccagttggccggatcaggactgggcagttggcacactggcggacattcacgacaaagtgcaggccaaaggctttcgtcgcactgcattgattctggtcggacgtgtgcttgccgacgacacgttcagcgagtcctcgctgtaccgcgccgggcatgcacacctgttcagaccgaactga

SEQ ID NO: 86669 - protein, 249 aa, Pseudomonas syringae pv. phaseolicola 1448A
MTVYFIGAGPGDPELITVKGQRLIRTCPVIIYAGSLVPLAVLEGHQAVQVTNSAELHLEQIIELIKTAHAQGQDVARVHSGDPSLYGAIGEQIRHLRELGIPFEIIPGVTATAACAALLGVELTLPDVSQSVILTRYADKTSMPSGEELASLASHRATMAIHLGVNNLQRIVDELVPHYGADCPIAVVHRASWPDQDWAVGTLADIHDKVQAKGFRRTALILVGRVLADDTFSESSLYRAGHAHLFRPN

SEQ ID NO: 86670 - DNA, 810 bp, Dechloromonas aromatica RCB
  CDS (1)..(810): transl_table=11
atggccgggaaaatctggtttgtcggcgccggcccgggcgatcccgacctgatcacggtcaaggggcgcaagctgctcgaagcatccggcgccgtgctctttgccggctcgctggtcgatcaggccgcgacgctgttcgcgccggacggctgcgatatccgcgactccaaggatatgacgctggacgagatgactgcgtggttgatcgagcgcgcccagcttcacgaaaccgtcgttcgcctgcaaaccggtgatccgggactctatggcgcgctgatcgaaatgactcagccgctgaccgccgccggcatcgaatgggccgtggtacccggcgtttcttcggccatggcctcgatggctgcggccggtgaaacactgacgctaccggaagtcacccagaccgtcatcctgacccgcgtcgccggtcgtacgccgatgccgccgggtgaagatctcgaattgctggccgcgcacaagacgaccttgtgcatctatctgtcgatcaccctgctgcacaaggttcaggaggccctgcgggcggccggctgggtcgacgatgcgccgattctggtcgtccagaaagcgagttggccggggcaggaaaaaatcattcgcggcacgctggccgacatcaagcaaaagtgccaggccgagaaagtcggcagccaggccatgatcgtcgccagcccaacgctgggcgcggccgactggccagacctgatccgttccaagctctacgaccccgcctttacgcaccgcttccgcaaggcaagcccggcctctgccgtcaccccggagatcaacccatga

SEQ ID NO: 86671 - protein, 269 aa, Dechloromonas aromatica RCB
MAGKIWFVGAGPGDPDLITVKGRKLLEASGAVLFAGSLVDQAATLFAPDGCDIRDSKDMTLDEMTAWLIERAQLHETVVRLQTGDPGLYGALIEMTQPLTAAGIEWAVVPGVSSAMASMAAAGETLTLPEVTQTVILTRVAGRTPMPPGEDLELLAAHKTTLCIYLSITLLHKVQEALRAAGWVDDAPILVVQKASWPGQEKIIRGTLADIKQKCQAEKVGSQAMIVASPTLGAADWPDLIRSKLYDPAFTHRFRKASPASAVTPEINP

SEQ ID NO: 86672 - DNA, 771 bp, Thermobifida fusca YX
  CDS (1)..(771): transl_table=11
atgacggttcatttcgtgggtgctggccccggcgcagctgacctgctgacgctacgcgcggtcgaactgctgcgcaccactcctgtctgcttgtatgcgggtacctatatcgacgctgagatcctggcccactgccctgacgacgcggaactagtggacacccagcacctcgacctggaccagatcatcgcccacctggtcgacgcggaccggcgcggtttggacgcggtccggctctgctctggagacccgtcgctttatagcgcgctaaccgagcagacacgaaggcttgacgaggcaggggtggcgtgggacgtcacccctggggtgcccgcctatgcggcggccgcggccctgctcggcaccgagttgacggttccggaggtggcgcagacggtggtgcttacccgcacccgggcacgctccacgaaaatgccggaatcggaggcgttggagaacgtcgcgaagatccacgggactctcgtcttgcacttggcgatccgacacatccgggttcttgccgagcagctggtccccgaatacggggctgattgtcctgtggcggtcgtcgctcacgcgacccgacccaacgaactcgtgctccgcggcaccctcaccgatatcgccgaccacgtggaggcggcagggctgcgccataccgcggtcatcctggtggggcgggcgctggccagccgcgagtgggatgtgtcggagatcgtctgctcgcacttgtacgacccggcccgtgagcggaaccgcgaggcgagctaa

SEQ ID NO: 86673 - protein, 256 aa, Thermobifida fusca YX
MTVHFVGAGPGAADLLTLRAVELLRTTPVCLYAGTYIDAEILAHCPDDAELVDTQHLDLDQIIAHLVDADRRGLDAVRLCSGDPSLYSALTEQTRRLDEAGVAWDVTPGVPAYAAAAALLGTELTVPEVAQTVVLTRTRARSTKMPESEALENVAKIHGTLVLHLAIRHIRVLAEQLVPEYGADCPVAVVAHATRPNELVLRGTLTDIADHVEAAGLRHTAVILVGRALASREWDVSEIVCSHLYDPARERNREAS

SEQ ID NO: 86674 - DNA, 753 bp, Prochlorococcus marinus str. NATL2A
  CDS (1)..(753): transl_table=11
atgaatccgatttcaattgttggcgcaggtccaggcgctttagacttaatgacaataagagctcaacaaagacttaaatcagcagatgttcttgtttggacagactctctcattcctatacaaattacaaaacttgttaaagatgattgtgaaaagataaagacaagttcattaacactagaagaaatacttttaatcttaattaaaaagcataaggaaggtaaaaaaattgttcgtctccatgatggtgatccttgcttatatggagccatatcagaacaaatatgcagattaaatgatgaagggattgaggtagaagtagtaccgggagtaagcgcatatcaagcaacagcagcaactttaggattcgaactaacagttccagatttaacccaaacaataatactaagcagagctgatggtaggacaggaaaaccaaagagggagagccttcaaaagctagcatctattcaatcttctttatgtctctacctaagtgcaagacatgtggaagaagtgcaatccatacttataaagtattatcctgcgaacacccctgtagcaattgcatatagagtaacttggccagacgaatggataaaagtcatacctttgactgagatggcaaaaacatctcaagaacaaaatttgatcagaacaactttatatataatcagtccaactctaaaaatcggtaataatagatcaaagctttataatcctactcattcacatttatttaggtcgagttaa

SEQ ID NO: 86675 - protein, 250 aa, Prochlorococcus marinus str. NATL2A
MNPISIVGAGPGALDLMTIRAQQRLKSADVLVWTDSLIPIQITKLVKDDCEKIKTSSLTLEEILLILIKKHKEGKKIVRLHDGDPCLYGAISEQICRLNDEGIEVEVVPGVSAYQATAATLGFELTVPDLTQTIILSRADGRTGKPKRESLQKLASIQSSLCLYLSARHVEEVQSILIKYYPANTPVAIAYRVTWPDEWIKVIPLTEMAKTSQEQNLIRTTLYIISPTLKIGNNRSKLYNPTHSHLFRSS

SEQ ID NO: 86676 - DNA, 729 bp, Methanosarcina barkeri str. Fusaro
  CDS (1)..(729): transl_table=11
atggaaaggaaagtatattttgtgggagcgggcccagggaacccgaaactcattaccgtacttgggcgtgaaatgcttgaaaaagccgaccttgtgatgtatgctggctctctggtaaacccagaggttcttaattacacgcatggagaaacagtggatagttatgggttaaccctcgaagaaaccactaaaataattgcggacgctgtagatgcagggaaattcgttgttcgccttcacagcggagatccatctctttacggttcagtcatagagcagatggaagagctcaggaaacacgacatagaagtcgaaagagttgcgggggtttcctcgatttttgcaagcgctgcagctcttggcactcagttgactcttaacggcgtttcagacactctaattattacccgccctgccggaaaaacccttgaaaaagaccttatccccgagctttctgcctacaacactactatggcaattttccttggtacgcaaaaaatcagggaaattatggaaaaagtccgctgcccgaaggatacgcctgttgcggtagtatttcatgcatcctgggaggacgaagaaatcatcaccggaactgtggaagatatcgcagacaaggtaaaggatgcagggattaaacgctcagcaatgataattattggtggggttgttgaccctaaaaattacaggaggtcctatctatacggagtagcccaggaaccgttgtaa

SEQ ID NO: 86677 - protein, 242 aa, Methanosarcina barkeri str. Fusaro
MERKVYFVGAGPGNPKLITVLGREMLEKADLVMYAGSLVNPEVLNYTHGETVDSYGLTLEETTKIIADAVDAGKFVVRLHSGDPSLYGSVIEQMEELRKHDIEVERVAGVSSIFASAAALGTQLTLNGVSDTLIITRPAGKTLEKDLIPELSAYNTTMAIFLGTQKIREIMEKVRCPKDTPVAVVFHASWEDEEIITGTVEDIADKVKDAGIKRSAMIIIGGVVDPKNYRRSYLYGVAQEPL

SEQ ID NO: 86678 - DNA, 786 bp, Anabaena variabilis ATCC 29413
  CDS (1)..(786): transl_table=11
atgcaaaatcatgtaaatcccctagattccgccgtttatattgtaggagcgggacctggagacccagatttactgacagttaaagcccaaaaactactgtcagtagcagatgtgattttattcgcagattcgttaataccagaggagcttttacagttttgccgaaaagatgcagaaattattcagactgcaaacaaaactctggaggagattatacctttgatgatcgccagggtgcgatcgcacaaatctgtagtacgtctccattccggtgatcccagtctctacagcgccattaatgagcaaatgcagcttctggcagcagctaatattccttttgaagtcattcccggtattagtgctttccaagccgccgcagctaaactgaaggtagagttgactgttcctggtttagtccagactattattctgacgcgcattagtggacgaacacaagtcccacagacagaagaactagctaccctcgcagcacatcaagctagtttatgcttatatctgagtgcgcgtcatgtggaaaatgcccaagctaaactactagaacactatcccccagatacacctgtagctatttgctttcgcataggatggcctgatgaaagaattcgtgtggttcctctccgggagatggcagagtgtactcagcaagaaaatctgattcgcactacgttatatgtgattagccctgcattatcacataccactgggcgatcgcgcttatatcatcctgagcatagtcatctgttccgcactgctggagatagctaa

SEQ ID NO: 86679 - protein, 261 aa, Anabaena variabilis ATCC 29413
MQNHVNPLDSAVYIVGAGPGDPDLLTVKAQKLLSVADVILFADSLIPEELLQFCRKDAEIIQTANKTLEEIIPLMIARVRSHKSVVRLHSGDPSLYSAINEQMQLLAAANIPFEVIPGISAFQAAAAKLKVELTVPGLVQTIILTRISGRTQVPQTEELATLAAHQASLCLYLSARHVENAQAKLLEHYPPDTPVAICFRIGWPDERIRVVPLREMAECTQQENLIRTTLYVISPALSHTTGRSRLYHPEHSHLFRTAGDS

SEQ ID NO: 86680 - DNA, 747 bp, Pseudomonas fluorescens PfO-1
  CDS (1)..(747): transl_table=11
atgaccgtttacttcatcggcgccggccccggcgacccggaattgatcactgtcaaaggccagcggctgatccgccgttgtccggtgatcatctacgcaggttcgctggtgccgacggcagtgctggaaggtcattgcgctgaaacggtggtcaacagcgccgaactgcacctggaacagatcatcgacctgatcaagaccgcccacgccaagggccaggatgtggcgcgggtacattccggggatccgagtctgtatggcgccattggtgagcagattcgttatctgcgtgagctggatattccgttcgagatcattcccggtgtgaccgccaccgccgcgtgcgccgcgctgctgggcgccgaactgaccctgccggacatctcgcaaagcgtgatcctgacccgttatgcggacaagactgcaatgcctgccggcgaagagctcgacaacctggcgcagcacggggcgaccatggcgattcatctgggggtcaatcatctggagaagatcgtcgccgagctgctgccgcattacggcgcggattgcccgatcgcggtgattcatagggcgacatggccggatcaggactgggtgacggggacgctggaagatattgccgagaaggtggcggcgaagggctttcggcgtacggcgttgattctggtcgggcgggtgttgggcagcgatcatttcagcgagtcttcgctgtatcgcgccgggcatgcgcatttgtaccggccataa

SEQ ID NO: 86681 - protein, 248 aa, Pseudomonas fluorescens PfO-1
MTVYFIGAGPGDPELITVKGQRLIRRCPVIIYAGSLVPTAVLEGHCAETVVNSAELHLEQIIDLIKTAHAKGQDVARVHSGDPSLYGAIGEQIRYLRELDIPFEIIPGVTATAACAALLGAELTLPDISQSVILTRYADKTAMPAGEELDNLAQHGATMAIHLGVNHLEKIVAELLPHYGADCPIAVIHRATWPDQDWVTGTLEDIAEKVAAKGFRRTALILVGRVLGSDHFSESSLYRAGHAHLYRP

SEQ ID NO: 86682 - DNA, 783 bp, Rhodobacter sphaeroides 2.4.1
  CDS (1)..(783): transl_table=11
atgaccgtgcatttcatcggagcgggccccggagcgcccgacctcatcacgctgcgcgggcgcgacctgatcgccgcctcgccggtctgtctctatgcgggctcgctggtgcccgagggcgtgctggcccattgcccgcccggctgccgcatcgtgaacacggcgccgctcagcctcgaggccatcgtggaggagatcgccgccgcccatgccgagggcaaggacgtggcgcgtctccattccggcgatctctcggtctggtcggcgatgggcgagcagctgcgccggctgcgcgcgctgggtattccctatgacgtgacgccgggggtgccctccttcgccgcggccgcggccacgctcggggccgagctcacgctgccgggggtcgcgcaatcggtggtgctgacccgcacctcggggcgtgcctctcccatgcccgagggcgagagtctcgcggccttcgcggccacgggcgccgtgctggcgatccatctttcggttcatgtgctggggcgcgtcttggccgagcttctgccgcattacggcgcggattgcccggtggccgtggtctggcgcgcgagctggcccgacgagcgggtggtgcgcgcgaccctgggcagtctcgaggccgcgctcgggccggagctggagcggacggcgctcattctcgtgggccgcagtctcggcgcggaggatttcgccgagagccgcctctatgccggcgactacgaccgccgctaccgccccgtgggcacccatccgcgctttccggaggaggcatga

SEQ ID NO: 86683 - protein, 260 aa, Rhodobacter sphaeroides 2.4.1
MTVHFIGAGPGAPDLITLRGRDLIAASPVCLYAGSLVPEGVLAHCPPGCRIVNTAPLSLEAIVEEIAAAHAEGKDVARLHSGDLSVWSAMGEQLRRLRALGIPYDVTPGVPSFAAAAATLGAELTLPGVAQSVVLTRTSGRASPMPEGESLAAFAATGAVLAIHLSVHVLGRVLAELLPHYGADCPVAVVWRASWPDERVVRATLGSLEAALGPELERTALILVGRSLGAEDFAESRLYAGDYDRRYRPVGTHPRFPEEA

SEQ ID NO: 86684 - DNA, 756 bp, Carboxydothermus hydrogenoformans Z-2901
  CDS (1)..(756): transl_table=11
gtgaaagtttatttagtaggcgccggacctggagatcccgagttaataactgttaaagggaaaaaacttttagaggaagctgatttaattgtttatgcaggctccctggttaatcccggacttttggaatatgccaaaccggaggcggtgaaagttgattcggcgcccaggactttagaagaaatagtggagataatggtcgagtatgctcgagccggaaaagttgtcgtacgcttgcagaccggagacccatccctctatggggcagtagaggaacaaaaaagagctttaaaagcctatggagttgagctggaatgggtgccgggagttagctcttttcttggtgcggctgcccgcctgggttacgaattaaccgttccagacggtacccagacggtaattttaagcagggttgccgggagaacaccggtgccggaaaaagaaaacttagaggaattggctaaaattgggtcaacccttgtgctctttttaagtgtggataaaatcgacgaggttgtcgcccaaatttcccgggtaagagctcttgatactccggtagcggtagtttataaagctacttttcccgaagaaaaaattattaccggtactttagcggatattgctcagaaagtaaaagaagaaaagataaacaaaaccgcccttatctttgtaggggagtttttaaatccgccccctactcgctcaaaattatatgctcccgattttactcatggtgggagaagaaaaggtgattaa

SEQ ID NO: 86685 - protein, 251 aa, Carboxydothermus hydrogenoformans Z-2901
MKVYLVGAGPGDPELITVKGKKLLEEADLIVYAGSLVNPGLLEYAKPEAVKVDSAPRTLEEIVEIMVEYARAGKVVVRLQTGDPSLYGAVEEQKRALKAYGVELEWVPGVSSFLGAAARLGYELTVPDGTQTVILSRVAGRTPVPEKENLEELAKIGSTLVLFLSVDKIDEVVAQISRVRALDTPVAVVYKATFPEEKIITGTLADIAQKVKEEKINKTALIFVGEFLNPPPTRSKLYAPDFTHGGRRKGD

SEQ ID NO: 86686 - DNA, 729 bp, Burkholderia sp. 383
  CDS (1)..(729): transl_table=11
atgacggtgtatttcatcggcgcgggccccggcgacccggagctgatcacggtgaagggccagcgcctcgtacgcacgtgcccggtgatcctgtatgcgggttcgctggtgccggccgccgtgctcgacggccatcgcgcggagcaggtcgtcaatacggccgagctcgacctcgacgccatcgtcgcgctgctcgccggcgcgcacgcgaaagggcaagacgtcgcgcgcgtgcattcgggcgacccgtcgctgtacggcgcgatcggcgagcagattcgccgattgaaagcgctcgggattccatatgaaatcgtgcccggcgtaacggccacggctgcgtgcgcggcgacgctcggcgtcgagctaacgctgcccggcgtcgcgcagacggtgatcctcacgcgcttcgcgggcaagacgacaatgccggaaggcgaagcgctcggctcgctcgccgcgcaccgcgcgacgctcgcgattcatctcggcgtgcgccatctcgcccgcatcgtcgacgaagtgctgccgcattacggtgccgattgcccggtcgcggtgatctatcgcgcaagctggcccgatgaagcccgcgtgaccggcacgctcgccgacatcgtcggcaaggtgcagggcacgcagatcgagcgcacggcgctgatcctgatcgggcgcgtgctcgacgccgaagggttcgcggattcgacgctgtacgcgagcgcgggctga

SEQ ID NO: 86687 - protein, 242 aa, Burkholderia sp. 383
MTVYFIGAGPGDPELITVKGQRLVRTCPVILYAGSLVPAAVLDGHRAEQVVNTAELDLDAIVALLAGAHAKGQDVARVHSGDPSLYGAIGEQIRRLKALGIPYEIVPGVTATAACAATLGVELTLPGVAQTVILTRFAGKTTMPEGEALGSLAAHRATLAIHLGVRHLARIVDEVLPHYGADCPVAVIYRASWPDEARVTGTLADIVGKVQGTQIERTALILIGRVLDAEGFADSTLYASAG

SEQ ID NO: 86688 - DNA, 762 bp, Synechococcus sp. CC9605
  CDS (1)..(762): transl_table=11
ttgagtcacgttgtcagtttcgtcggagcaggcccgggtgctccagacctgctcacccttcgcgcggctgaacgtctgaacaaggccgatgtgctggtctggacggattccctggtctgtcctgccatcgcagatctggctccggcttcttgcgaaaggatccgtaccagcacgaccacgctcgaagacctgatcccgttgctgatcgatcgacagcgccaaggcaaacgggtggtgcggctccatgacggagacacggcgctctacagcgccattaacgagcagatctgcgccttgagtgacgccgaaatccctgtggaagtgatccctgggatcagcgcttatcaagcagcagccgccggacttgccagcgaactcacccttccaggcgtggtgcagaccattgttctcagtcgcgctggaggtcgcaccggcgtgccggaacgggaacagctggatcggctggcagccctgcgcgccagcctttgcatctatctaagtgcacgacacgttgaagaggtgcaaaccactcttctgcagcactaccccgccgacacgcccgtcgccatcggacatcgagtgagctggcccgatcagatgctgaccgtggtccctctcagggagatggctgctgttagccgggaacgcaatctgattcgaacaacgctctacgtggtgagtccggccctcgccggtggtcctcagcgctcacgtctttactcgcctgaccatgaccatctcttccgtccgatggcccaatag

SEQ ID NO: 86689 - protein, 253 aa, Synechococcus sp. CC9605
MSHVVSFVGAGPGAPDLLTLRAAERLNKADVLVWTDSLVCPAIADLAPASCERIRTSTTTLEDLIPLLIDRQRQGKRVVRLHDGDTALYSAINEQICALSDAEIPVEVIPGISAYQAAAAGLASELTLPGVVQTIVLSRAGGRTGVPEREQLDRLAALRASLCIYLSARHVEEVQTTLLQHYPADTPVAIGHRVSWPDQMLTVVPLREMAAVSRERNLIRTTLYVVSPALAGGPQRSRLYSPDHDHLFRPMAQ

SEQ ID NO: 86690 - DNA, 777 bp, Geobacter metallireducens GS-15
  CDS (1)..(777): transl_table=11
gtgaccatcgtccatttcatcggcgccggtcccggcgatgccgaacttataactgtaaagggtgcccggcttctgcgggaggcggatgtggtggtctatgccggaagcctcgtggatcgggagctggtccgcacctacgcccccgatgccgaggtgtgcgattccgctgccatgaccctggaggagaccacggcggtcctggcccaggcggtggcggacgggaagcgggccgtgcggctccacaccggcgatccatccatctacggagccattcaggagcagatggcggagctggaccggctcggtattgcctatgccgtggtgccgggggtgacgagcgcctttgccgccgccgccaccctcaggcaggaactgaccctccctgaagtctcccagaccgtcgtcatcacgcgccttgcggggcggaccccggtgccggagcgggagaagctgaccgaaatcgccaggatcggggcaacgctcgtcatctacctgtcgatctccatggtggagcaggtggtggcggagctcctgcagggggcctacactccggccactccggtagcggtggtgtccagggcgtcgtggcccgacgagcacgtggtggaggggaccctggccgacatcgccggaaaggtccgggacgccggtatcggcaagcaggccatcatcctcgtgggggatgtgctgaaggcccgccgggaagggctcaagagcaaatcgctcctgtacgacaagggattttcccacgagttccgcaaggggatcgttacctag

SEQ ID NO: 86691 - protein, 258 aa, Geobacter metallireducens GS-15
MTIVHFIGAGPGDAELITVKGARLLREADVVVYAGSLVDRELVRTYAPDAEVCDSAAMTLEETTAVLAQAVADGKRAVRLHTGDPSIYGAIQEQMAELDRLGIAYAVVPGVTSAFAAAATLRQELTLPEVSQTVVITRLAGRTPVPEREKLTEIARIGATLVIYLSISMVEQVVAELLQGAYTPATPVAVVSRASWPDEHVVEGTLADIAGKVRDAGIGKQAIILVGDVLKARREGLKSKSLLYDKGFSHEFRKGIVT

SEQ ID NO: 86692 - DNA, 801 bp, Desulfovibrio desulfuricans G20
  CDS (1)..(801): transl_table=11
gtgaccgcaaacccggcggaccccagagtctggtttatcggcgccggccccggcgaccccgagctgatcaccgtaaaggggcagagaatcatctcgcaggcggatctggtgctgtatgcaggctcgctggtgccgccacaggtggttgcctgtgcccgtccggacgccgtggtggccgacagtgcgcccatgaacctgcagcagacacatgccatgatacgcgaaaccgtgcacagcgggggtctagtggccagagtccacaccggcgacccggccctgtacggcgccatccgcgaacagatggccctgctggcgctggaaaacatcgcctgcggcgttgttcccggagtcacatcagcctttgcggcagccgccgcggcaggcgtttcgctcacgctgcccgaaatcacccagtcggtgatcatcacccgcgtgcaggggcgcacccccgtgcccgaagccgagcagctgcggcatcttgcacggcggggaacagccatggccatatatctttccgccgccctgcccgaaaccataaccgaagaactacgcgccggcggactgcccgaaagcacccgcatcatcgccgcatacagggtgggctggccggaccaacgtctggtggaatgcacgctggcaacgctgacggacaccgtgcagcaggaaaagctcaaccggcagacggtctttcttgtcctgccaggcaattccatgcatagtggtatacagcaccccgatgcagcttcaccgccgtgttccagactgtatgatgcagatttttcgcacggctggcgcaagtaa

SEQ ID NO: 86693 - protein, 266 aa, Desulfovibrio desulfuricans G20
MTANPADPRVWFIGAGPGDPELITVKGQRIISQADLVLYAGSLVPPQVVACARPDAVVADSAPMNLQQTHAMIRETVHSGGLVARVHTGDPALYGAIREQMALLALENIACGVVPGVTSAFAAAAAAGVSLTLPEITQSVIITRVQGRTPVPEAEQLRHLARRGTAMAIYLSAALPETITEELRAGGLPESTRIIAAYRVGWPDQRLVECTLATLTDTVQQEKLNRQTVFLVLPGNSMHSGIQHPDAASPPCSRLYDADFSHGWRK

SEQ ID NO: 86694 - DNA, 756 bp, Prochlorococcus marinus str. MIT 9312
  CDS (1)..(756): transl_table=11
atggataaaaaaatatcctttattggagttggtcctggcgatcccgatttattaacactaaaagctttaaaaaagataaaaattgcagatgtcattatttggactgattctctaattcctgaaaagattttagatttttctaaagaaggttctgaaaatataaaaacgagttcgctcaacttagagcaaatcacctcaattatgataaaaaaatttcaggaagggaaaactgttataagattgcatgatggagacccttgtctttttggcgcgattagagaacaaatagaaattttaaaaaaagaaaaaattgaaatcgaagttattccaggtgtaagtgcttttcaagtcgcagcagcatatcatgaggctgagttaactatccctgacgtaacgcaaacaataattttaacaagagcaggaggaagaactgggatgcccgagaaagaatctctgaaagatcttgcgaaacacaattcctctttatgcctttatctaagtgctaggcatgtaaaaaggtctcaagaaactttactagagttttatccctcagagactaaagttattgttggatacagagtatcttgggatgatggttggacatcattaatagaattaaaagatatggaagatttttctattgaaaaaaaattaattagaacaactatttatataattagcccagcaattaataattctcaaaagaggtctaatctatacaatccatcatatagacatctctttagaaataaataa

SEQ ID NO: 86695 - protein, 251 aa, Prochlorococcus marinus str. MIT 9312
MDKKISFIGVGPGDPDLLTLKALKKIKIADVIIWTDSLIPEKILDFSKEGSENIKTSSLNLEQITSIMIKKFQEGKTVIRLHDGDPCLFGAIREQIEILKKEKIEIEVIPGVSAFQVAAAYHEAELTIPDVTQTIILTRAGGRTGMPEKESLKDLAKHNSSLCLYLSARHVKRSQETLLEFYPSETKVIVGYRVSWDDGWTSLIELKDMEDFSIEKKLIRTTIYIISPAINNSQKRSNLYNPSYRHLFRNK

SEQ ID NO: 86696 - DNA, 795 bp, Synechococcus elongatus PCC 7942
  CDS (1)..(795): transl_table=11
gtgagctttagtgcaggcgtttacttcgtcggggtcggcccgggtgacccggagctaatgacggtacgggctcaaaagctgattgccgccgccgatgttctgctctacaccgattccttggtgcccccggcaattttggcggatgcaaggccagacgcagaacgactgccaacggcccatcgcacgctggaagagattttgccaatcctcaaagagcgagtggccgcgggagcgatcgtggcgcggctccacgacggcgatcccagcctctacagcacgatcgcggaacagatcgcagggttgcgatcgcaggacattccctatcaagttattcctggcgtcagcgcctttcaagcagcggccgctcgactcgggcaagaactgactttgccgggactggttcagacgatcatcctgactcgctgtgccggtcgaattggactgcccgatcgcgaatccctctcgtccttagccgcgcatcaagctagcctctgtctctatctgagcgctcgccaagcggaaaaagcgcagacggaattgctggaacattactccccagaaacgccgatcgcagtttgctatcgactgggttggccagatgaagcgatttggctagggaaactgtcggaactggcgcagatcactcaagatcagcaactcgatcgcacggtgctctatctgatcagtcctgctttacaagccgtcgagactgggcgatcgcagctctacaatcccgactatcaccatctgtttcggccagaaactacagcagcacgatcgccccagccatcatga

SEQ ID NO: 86697 - protein, 264 aa, Synechococcus elongatus PCC 7942
MSFSAGVYFVGVGPGDPELMTVRAQKLIAAADVLLYTDSLVPPAILADARPDAERLPTAHRTLEEILPILKERVAAGAIVARLHDGDPSLYSTIAEQIAGLRSQDIPYQVIPGVSAFQAAAARLGQELTLPGLVQTIILTRCAGRIGLPDRESLSSLAAHQASLCLYLSARQAEKAQTELLEHYSPETPIAVCYRLGWPDEAIWLGKLSELAQITQDQQLDRTVLYLISPALQAVETGRSQLYNPDYHHLFRPETTAARSPQPS

SEQ ID NO: 86698 - DNA, 762 bp, Rhodospirillum rubrum ATCC 11170
  CDS (1)..(762): transl_table=11
atgaccgtccatttcatcggcgccggtcccggcgcccccgatctgatcaccctgcgcgggctgaggctgatccagtcctgccccgtggtgctgttcgccggtagcttgatcccgcgcgaggtggtggccgaggccggggcggaggcgcgggtgatcgattcctcggccctacatcttgatgagatcatcgcggtgatggccgaggccacggcgcgcggcgaggatatcgcccgcctgcattcgggcgatcccagcctgtatggggcgatcgccgagcagatccgccgcttgcgcggcctggggatcgcctatgacatctgcccgggcgtgccgtcctatgcggcggcggcggcggcccttggcaatgagctgaccctgcccgaggtctgccagacggtgatcctcacccgtacctcggtccgcgcctcgccgatgcccgccggcgaggatctggaaagcctggggcggagcggcgccctgctcgccatccatctatcgatcgccaatctggccgaggtcgaagccaaactgaccccgctttatggcgccgattgcccggtggcggtggtctatcgggcaagctggcccgatcagacggtggtacgcggcaccctggccgatatcgccggcaagatcgctggcgtcggcatcacccgcaccgcgctgatcctggttgggcgcggcctgggcagcgaggatttcgccaatagccgactgtatgccgccgactgcggccacgcctttcggtcggcctcggcctga

SEQ ID NO: 86699 - protein, 253 aa, Rhodospirillum rubrum ATCC 11170
MTVHFIGAGPGAPDLITLRGLRLIQSCPVVLFAGSLIPREVVAEAGAEARVIDSSALHLDEIIAVMAEATARGEDIARLHSGDPSLYGAIAEQIRRLRGLGIAYDICPGVPSYAAAAAALGNELTLPEVCQTVILTRTSVRASPMPAGEDLESLGRSGALLAIHLSIANLAEVEAKLTPLYGADCPVAVVYRASWPDQTVVRGTLADIAGKIAGVGITRTALILVGRGLGSEDFANSRLYAADCGHAFRSASA

SEQ ID NO: 86700 - DNA, 765 bp, Moorella thermoacetica ATCC 39073
  CDS (1)..(765): transl_table=11
atgaaagtctattttgtcggcgccgggcccggggacccggagttaatcaccgtcaaggggcgccgccttctgggggaggccggggtgattatctacgccggttccttagtcaaccccgaaattttaaaatatgcggccccgggggcagtccgctacgacagcgcctccctgaccctggaagaagtcctggcaattatccgacgggccatcgccggaggccaggtagtggtccgcctgcatacaggcgacccgtctttgtatggagccattcaagaacaaatggacgccctggaacggatgggcatcccctatgaaatagtgcccggcgtcagctcctatgcggccgccgcggccgctataggtcgcgagtataccctgccaggggtgagccagaccctgattttaacccggcggggcggccggacgccggtacctgaaatggaaagcctgacggaactcagccgccaccgggccagcctctgccttttcctcagcagccagtccctggctgcagccacggctgaactggccagcggttatggtccggagacaccggcggcagtggtatataaggcctcctggcccgaagagaaggtaatccggggtaccctgggcgatattgccgccaaagccagggaggcaggcatcgaacggacggccctgctcctggttggtgatttcctggcgggagattacaaacgctctcgcctctacgatcctgccttcagtcacggttatcgtggggccagaaacaataatggctag

SEQ ID NO: 86701 - protein, 254 aa, Moorella thermoacetica ATCC 39073
MKVYFVGAGPGDPELITVKGRRLLGEAGVIIYAGSLVNPEILKYAAPGAVRYDSASLTLEEVLAIIRRAIAGGQVVVRLHTGDPSLYGAIQEQMDALERMGIPYEIVPGVSSYAAAAAAIGREYTLPGVSQTLILTRRGGRTPVPEMESLTELSRHRASLCLFLSSQSLAAATAELASGYGPETPAAVVYKASWPEEKVIRGTLGDIAAKAREAGIERTALLLVGDFLAGDYKRSRLYDPAFSHGYRGARNNNG

SEQ ID NO: 86702 - DNA, 726 bp, Burkholderia thailandensis E264
  CDS (1)..(726): transl_table=11
atgacggtgtatttcatcggcgcgggtccgggcgacccggaactgatcacggtgaagggccagcgcctcgtgcgcaactgcccggtgatcctgtacgcgggttcgctcgtgccggccgcggtgctcgacggccatcgcgccgagctcgtcgtgaacacggccgagctcgatctcgacgcgatcgtcgcgctgctcgtgcaggcgcacggaaaagggcaggacgtcgcgcgcgtgcattccggcgatccttcgctatacggcgcgatcggcgagcagatccgccggctcgcggcgctcgggattccttacgagatcgtgcccggcgtgacggcgacggctgcgtgcgcggcggcgctcggcgtcgagctgacgctgccgggcgtcgcgcagaccgtgatcctcacgcgctacgcgggcaagacgacgatgcccgagggcgaatcgctcgcgagcctcgccgcgcaccgcgcgacgctcgcgatccatctgggcgtgcggcatctcgcgcggatcgtcgaggacgtgctgccgcactacggcgccgattgcccgatcgccgtgatctatcgcgcgagctggcccgacgaggcgcgcgtgacgggcacgctcgccgacatcgtcgacaaggtcgcgggcacgcgcatcgagcgcaccgcactgatcctgatcgggcgcgtgctcgacgccgagggcttcgacgagtcgacgctctacgcgaaggggtga

SEQ ID NO: 86703 - protein, 241 aa, Burkholderia thailandensis E264
MTVYFIGAGPGDPELITVKGQRLVRNCPVILYAGSLVPAAVLDGHRAELVVNTAELDLDAIVALLVQAHGKGQDVARVHSGDPSLYGAIGEQIRRLAALGIPYEIVPGVTATAACAAALGVELTLPGVAQTVILTRYAGKTTMPEGESLASLAAHRATLAIHLGVRHLARIVEDVLPHYGADCPIAVIYRASWPDEARVTGTLADIVDKVAGTRIERTALILIGRVLDAEGFDESTLYAKG

SEQ ID NO: 86704 - DNA, 843 bp, Frankia sp. CcI3
  CDS (1)..(843): transl_table=11
gtgaccgtgcacttcatcggggccggaccgggcgccgccgacctcatcaccgtccgcggccggaatctgatcgcgtcctgcccggtctgcctgtacgccggcagtctcgtcccggtcgagctgctggcacactgcccgcccggggcccgtctcgtcgacaccgcccggatgccgttggacgacatcgtcgcggagctggtcgcggccgacgccgccggtcacgacgtcgcccgcctgcactccggcgacccgtcgctctacagcgccgtcgccgagcagatgcgccggctcgacgcggccgggatcgcctacgacgtgacgccgggtgtccccgccttcgccgcggcggcggcgtcgctgcgccgggagctgacggttcccggcgtcgcccagagcgtggtgctgacccgcacggccgtgctgtccagtcccatgccgcccggcgaggacctcgccaccctcggccggtcgggggcgaccctcgtgctgcacctggccgtgcaccgtatcgagacgctcgtcgccgagctcgtgccgaactacggtacggactgcccggcagccgtcgtcgcctgggccagccgggccgacgagatcgtgttgcgcggcacgctcgccgacatcgccggtcgggcgcgggccgcggggctcaccaggacggccgtgatcatcgtgggtcgcgccctggccgcggagggtttccgggacagctacctgtactcccgggaacgcttcggaccggacggatgcgtgtcgtccgttcccccggcctccccggtttcccaggcctccccggcaaacgccgcgccgtgtggcccggatcccgcccctcgggctcggtga

SEQ ID NO: 86705 - protein, 280 aa, Frankia sp. CcI3
MTVHFIGAGPGAADLITVRGRNLIASCPVCLYAGSLVPVELLAHCPPGARLVDTARMPLDDIVAELVAADAAGHDVARLHSGDPSLYSAVAEQMRRLDAAGIAYDVTPGVPAFAAAAASLRRELTVPGVAQSVVLTRTAVLSSPMPPGEDLATLGRSGATLVLHLAVHRIETLVAELVPNYGTDCPAAVVAWASRADEIVLRGTLADIAGRARAAGLTRTAVIIVGRALAAEGFRDSYLYSRERFGPDGCVSSVPPASPVSQASPANAAPCGPDPAPRAR

SEQ ID NO: 86706 - DNA, 786 bp, Novosphingobium aromaticivorans DSM 12444
  CDS (1)..(786): transl_table=11
atgaccgtccacttcattggcgccggtcccggcgcgcccgatcttctcactttgcgcggacgcgatctgatcgcgggcagcccggtgtgcctttatgccgggtcgctgatcccggtcgccgtgctggatcattgcccgccgggcgcccggatcgtgaacaccgcgccgctggaactggaccagatcatggccgaaatcgccgccgcccatgccgccgggcacgatgtggcgcggctgcattcgggcgatctttcggtgtggtctgccatgggcgagcagttgcgccgcctgcgcgcgctggacattccctttacgatcacacccggcgtcccggctttcgccgccgccgccgctgcgctggaggcagagctgaccctgcccgcgctggcgcaatcgctggtgctgacccgcacaccgggccgcgccagcacgatgccgcccgccgaaagcctggccaactttgccgtgaccggcgcgacgctggccattcacctttcggttcacaatctggcgcaagtggtggcggacctgacgccggcctatggcgcggattgccccgtcgcggtggtctggcgcgccagttggcccgatcagcggatcgtgcgcgccacgctcgacactattgaacaggccatcgccgggagcatggagcgcaccgccctgatcctggtcgggcgggtgctggcggcgcaggattttgccgaaagcagcctctatgcgcccggttatgatcgccggttcaggccgcaggatgccacgtcacgttttggcggtgcggccgaatga

SEQ ID NO: 86707 - protein, 261 aa, Novosphingobium aromaticivorans DSM 12444
MTVHFIGAGPGAPDLLTLRGRDLIAGSPVCLYAGSLIPVAVLDHCPPGARIVNTAPLELDQIMAEIAAAHAAGHDVARLHSGDLSVWSAMGEQLRRLRALDIPFTITPGVPAFAAAAAALEAELTLPALAQSLVLTRTPGRASTMPPAESLANFAVTGATLAIHLSVHNLAQVVADLTPAYGADCPVAVVWRASWPDQRIVRATLDTIEQAIAGSMERTALILVGRVLAAQDFAESSLYAPGYDRRFRPQDATSRFGGAAE

SEQ ID NO: 86708 - DNA, 726 bp, Burkholderia xenovorans LB400
  CDS (1)..(726): transl_table=11
atgacggtgttttttatcggcgcgggtcctggcgacccggaactgatcacggtgaaagggcagcggctcgtgcgcagttgtccggtgatcctgtacgcgggctccctcgtgccggccgcggtgctcgaaggtcatgcagccgtgcaggtggtgaacaccgccgaactcgacctcgatcagatcatcgcgttgctcgaagccgcgcacctcaaagggcaggacgtggcgcgcgtgcattcgggcgatccgtccttgtatggcgcgatcggcgagcagatccgcagactgcgcgagctgaagattccctacgagatcgtgccgggcgttaccgccacggcggcctgcgcggcggcgctgggttgcgaactcacgctgcccgatatctcgcagacgctgattctcacgcgcttcgcgagcaagaccagcatgcccgaaggcgaacagctcgccgacctcgcgcgtcatcgcgcgacgatggcgattcacctcggcgtgcggcatcttgcgcgtattgtcgatgaattgcggccgcattacggcggcgcctgtccgatcgcggtgatctatcgcgcgagctggccggacgaggagaagctcaccggcacgctcgatgatatcgtcggcaaggtgcagtccagttccatcgagcggaccgcgctgattctggtcggccaggtgctcgccgcggaaggtttcgcggattcgacgctgtacgcgaaagattga

SEQ ID NO: 86709 - protein, 241 aa, Burkholderia xenovorans LB400
MTVFFIGAGPGDPELITVKGQRLVRSCPVILYAGSLVPAAVLEGHAAVQVVNTAELDLDQIIALLEAAHLKGQDVARVHSGDPSLYGAIGEQIRRLRELKIPYEIVPGVTATAACAAALGCELTLPDISQTLILTRFASKTSMPEGEQLADLARHRATMAIHLGVRHLARIVDELRPHYGGACPIAVIYRASWPDEEKLTGTLDDIVGKVQSSSIERTALILVGQVLAAEGFADSTLYAKD

SEQ ID NO: 86710 - DNA, 732 bp, Methanococcoides burtonii DSM 6242
  CDS (1)..(732): transl_table=11
atgacagataaagttgttacttttgtgggtgccggtccgggtaacccaaaacttatcacattactcggcaaggaaaagctggaagaggcagaccttgtggtatatgcaggttcacttgtgaaccctgttgtcgtggactactgcaagggagaaaaggttgacagctatggtcttacccttgaagacatatccaagaggatagcaaatgccctggaggaaggaaagaaagtagttcgcctccacagtggagatccatccctttacggtaacgttgttgaacagatggaagagctgaagacgtacggtgttacagtggaacgtgttccaggagtttcttccgtgttcgcaactgctgcagcactcaatacacagcttaccctcaatggtgtttctgacacacttattattacacgtcctgcaggaaagacccttgaagaagataaactcaaggaactttcaaggcacaacgcaacaatggcggtcttccttggaactcagaaaatagaggagatcatggaaaaggtagagtattcagatgatactccagtggctgttgttttccacgcatcatggccagaccagaagatcatttacggaactgttgccgatattgcagagaaggtcaaggaagcaggcatcatacgctctgccatgatcctcattggcggcgtagtagaccctatcgattacaggaggtcacacctatacggagtggcacaagaaccgctgtaa

SEQ ID NO: 86711 - protein, 243 aa, Methanococcoides burtonii DSM 6242
MTDKVVTFVGAGPGNPKLITLLGKEKLEEADLVVYAGSLVNPVVVDYCKGEKVDSYGLTLEDISKRIANALEEGKKVVRLHSGDPSLYGNVVEQMEELKTYGVTVERVPGVSSVFATAAALNTQLTLNGVSDTLIITRPAGKTLEEDKLKELSRHNATMAVFLGTQKIEEIMEKVEYSDDTPVAVVFHASWPDQKIIYGTVADIAEKVKEAGIIRSAMILIGGVVDPIDYRRSHLYGVAQEPL

SEQ ID NO: 86712 - DNA, 795 bp, Silicibacter sp. TM1040
  CDS (1)..(795): transl_table=11
atgaccgttcattttatcggtgccggacccggcgccgccgacctcattaccctgcgcgggcgtgatctgatcgcggcctgccctgtgtgtctttatgcaggctccctggtgcctgaagctctcctgagccattgccccgagggcgccaagatcatcaacacggcccccttgtcgctggatgagatcatggcagaaatcgcaagcgcccatgcccaaggccatgacatcgcccggcttcattcaggtgatctgtcggtctggtcggcgatgggcgagcagctgcgccggctgcgcgatctcgacatcccctatgacatcacccccggtgtcccagcctttgccgcaggggctgccgcacttggcaccgagctcacgctgccgggcgtggcgcaatcgcttgtgctcacacggacgtccgggcgtgcctctgccatgcccgagggcgagacgctggagaactttgccgccaccggcgccaccctcgcgatccacctctcggtgcatgtccttgatgatgtggtggcccggctcacacccgcctatggcgcggactgccccgtggcgatcgtctggcgcgccagctggccggatcaaaagatcgtcaaagccacgctcggcaccgtcatcgaggcgacggacggcgctcgcggacgcacgtcgctgatcctcgtcgggcgcgccctcggcgcggaggactttgcggaaagctgcctctatggcgcggaatatgaccgccgctatcgtccgcaaagtgccgacagcccctggtcggaatggagcgaaggcgatgattga

SEQ ID NO: 86713 - protein, 264 aa, Silicibacter sp. TM1040
MTVHFIGAGPGAADLITLRGRDLIAACPVCLYAGSLVPEALLSHCPEGAKIINTAPLSLDEIMAEIASAHAQGHDIARLHSGDLSVWSAMGEQLRRLRDLDIPYDITPGVPAFAAGAAALGTELTLPGVAQSLVLTRTSGRASAMPEGETLENFAATGATLAIHLSVHVLDDVVARLTPAYGADCPVAIVWRASWPDQKIVKATLGTVIEATDGARGRTSLILVGRALGAEDFAESCLYGAEYDRRYRPQSADSPWSEWSEGDD

SEQ ID NO: 86714 - DNA, 774 bp, Rubrobacter xylanophilus DSM 9941
  CDS (1)..(774): transl_table=11
gtgggtagggtgtggtttatcggggcggggccgggggcgccggatttgctcacgctgcggggggcgcggctgatctccgaggcggacgtcgtggtgtgggccaggagcctggtgcacgagggggtgctggagcacgcccggcccggggccgagatcgtcgagtccaccaccctcccgctggagggggtgcgcggggtctacgagcgggccgccgccgaggacctgaaggtcgcccgcgtccactccggcgaccccagcctctacggggcggtgctggagcagatagagctctgcgaggagctggggctcgcgtgggagatcgtgccgggggtctcctcgctcggggcggcggccgcggcgctggggcgggagctgacggtcccggaggtctcccagtcggtgatcctcacccgccgcgccttccgcaccccgatgccggagaacgagagcatccggggcttcgccgcccacaggacgacgatggcggtcttcctctccgccgcccggccgcgcctcctgcaggaggagctgctctcgggcggctaccccccggagaccccctgcgcggtggtctaccgggcgagctggccggacgagaaggtcatagagtgcccgctcggggagctcgccgagcgcgtccggggggcggggataaagcggcaggcgctcatcctggtgggcccggccctcggggcgggggggaggcgctcccgcctgtacagcccgcgcttctcgcacatgttccgcagggccgagggggagggggatgcctga

SEQ ID NO: 86715 - protein, 257 aa, Rubrobacter xylanophilus DSM 9941
MGRVWFIGAGPGAPDLLTLRGARLISEADVVVWARSLVHEGVLEHARPGAEIVESTTLPLEGVRGVYERAAAEDLKVARVHSGDPSLYGAVLEQIELCEELGLAWEIVPGVSSLGAAAAALGRELTVPEVSQSVILTRRAFRTPMPENESIRGFAAHRTTMAVFLSAARPRLLQEELLSGGYPPETPCAVVYRASWPDEKVIECPLGELAERVRGAGIKRQALILVGPALGAGGRRSRLYSPRFSHMFRRAEGEGDA

SEQ ID NO: 86716 - DNA, 750 bp, Rhodococcus sp. RHA1
  CDS (1)..(750): transl_table=11
atgacggtgtacttcatcggggcaggtcccggcgcggccgacctggtcacggtccgcgcgcagcggatcatcgcggcgagccccgtctgcctgtatgcgggcagtctcgtcccgcaggaactcctggcggaatgccccgagggtgcgcgggtgatcgacacggcgcggctgagcctcgacgagatcgtcgccctgctgatcgaggcggacgcggccggtcaggacgtcgcgcgcctgcattcgggtgacccgtcgatcttcagtgcggtcgccgagcaggtgcgccggctcgaggccgccggcatcgcgtacaccgtggtgcccggggtgcccgcgttcaccgccgcggcggcgtcgctggggcgggagctgaccgttccgggtgtctcgcagtcgatcgtgttgacccgggtgtccacgctgtccaccgcgatgccggagggcgaggacctgcgttccctcggccgcagtggtgccacgatggtggtgcacctgggtgcgcaccggatcgatcagatcgtcgaagagctcaccgagaactacggccgcgactgtcccgccgccgttgtcgcgttcgcctcgcgtcccgacgagatcgtgctccgcggcaccctggcgacgatcgccgatcaggtgaaggcggcgggcgtcacgaagaccgccgtggtgatcgtcgggaaagtgcttgctgccgagggatttccggacagttacctgtattccgccacccgcgagcgcaccacccactga

SEQ ID NO: 86717 - protein, 249 aa, Rhodococcus sp. RHA1
MTVYFIGAGPGAADLVTVRAQRIIAASPVCLYAGSLVPQELLAECPEGARVIDTARLSLDEIVALLIEADAAGQDVARLHSGDPSIFSAVAEQVRRLEAAGIAYTVVPGVPAFTAAAASLGRELTVPGVSQSIVLTRVSTLSTAMPEGEDLRSLGRSGATMVVHLGAHRIDQIVEELTENYGRDCPAAVVAFASRPDEIVLRGTLATIADQVKAAGVTKTAVVIVGKVLAAEGFPDSYLYSATRERTTH

SEQ ID NO: 86718 - DNA, 852 bp, Trichodesmium erythraeum IMS101
  CDS (1)..(852): transl_table=11
gtgcatctaccattccatttatctgaagataaagactcatatccggaaaaattaatgaacgatactaaaagtctcacaccagcagtttacattttaggggcaggccctggagctccggacttattaacggtgaaggctgacaaaatcttaactacagcagatgtaattctatatgcagattctttggtacccaaacaaatgttaaggaatgtgcgtcatgatgctgagattatcacaacggctaataaaactttagaagaaattttacctttaatgattgaccgagtcagaaaaggtctttctgtggtgcgccttcattctggagaccctagtttatatggggcggtttatgaacaaatgcaacttttggctgaagcgggaattgattttgagattgtgcctggaattagtgcatttcaggatgcagcagctaagttaaaggttgagttgactgtgcctgggttggtacagactattattttaacaagaattagtgggaaagcaactgctgttccttcaagggaagaattgggtagtttggcagctcatggagccagtttatgtttatatttgagtgcccgatatgtgtgggaagcacaagaaaagttgatggaacattattcggctgacatacctgtggcgatatgttataggttgggatggcctgatgagaaaatttgggttgtgcctttggagaaaatggcccttatgactgaagagaaacagttagttagaaccacactttatgtgattagtcctgctttggagaagctggaaaaagtaggtcgctctggtctttataatcctgaacataatcatttatttcgaggaaaacataacagaaaaaattaa

SEQ ID NO: 86719 - protein, 283 aa, Trichodesmium erythraeum IMS101
MHLPFHLSEDKDSYPEKLMNDTKSLTPAVYILGAGPGAPDLLTVKADKILTTADVILYADSLVPKQMLRNVRHDAEIITTANKTLEEILPLMIDRVRKGLSVVRLHSGDPSLYGAVYEQMQLLAEAGIDFEIVPGISAFQDAAAKLKVELTVPGLVQTIILTRISGKATAVPSREELGSLAAHGASLCLYLSARYVWEAQEKLMEHYSADIPVAICYRLGWPDEKIWVVPLEKMALMTEEKQLVRTTLYVISPALEKLEKVGRSGLYNPEHNHLFRGKHNRKN

SEQ ID NO: 86720 - DNA, 747 bp, Synechococcus sp. CC9311
  CDS (1)..(747): transl_table=11
gtgtcgattgtcggtgcagggcccggagctcctgatctcctaacgcgacgtgctgagaaccggttgaagtctgcccaggttttgatttggacagattcgttggtgtcgcctcagatcgcggccttagccccagatcactgcgaaacgattcggagtagcactctcacgcttgaggatgtgcttccactgatgattgatcgggccaaaaaaggtcttgaggttgttcgtcttcatgatggtgatccctgcctgtatggagctctttctgagcaaatttgtggattaactgacgctgggatttctgtcgacgtagttccaggaatcagcgcttatcaggcgaccgcctcagcattaggggctgagctcacgattcctggccttgttcagaccattgttctaggaagggctggtggacgcactggggtgcccgaaacggagagtttggagaatcttgcccgccttaaagcatcgctctgcctctatctcagtgctcgccatgttgaggaggtgcaagcaacattgctgaagcattattcgcctgatacaccagttgctatcggtcaccgtgtgagttggcctgatgaatggcttcaagtcgtcccactggaccgcatggcagcgatctctcaagagcaaaatttgatccggaccactctttatgtggtgagtccagcattgaatgcaggtcgccagcgctcaaagctttactcgccagaccacgatcacctgttccgtcctagtcgctaa

SEQ ID NO: 86721 - protein, 248 aa, Synechococcus sp. CC9311
MSIVGAGPGAPDLLTRRAENRLKSAQVLIWTDSLVSPQIAALAPDHCETIRSSTLTLEDVLPLMIDRAKKGLEVVRLHDGDPCLYGALSEQICGLTDAGISVDVVPGISAYQATASALGAELTIPGLVQTIVLGRAGGRTGVPETESLENLARLKASLCLYLSARHVEEVQATLLKHYSPDTPVAIGHRVSWPDEWLQVVPLDRMAAISQEQNLIRTTLYVVSPALNAGRQRSKLYSPDHDHLFRPSR

SEQ ID NO: 86722 - DNA, 759 bp, Rhizobium leguminosarum bv. viciae 3841
  CDS (1)..(759): transl_table=11
atgacggtgcatttcatcggcgcggggccaggtgccgcggatctgatcacggtgcgaggccgcgatctcatcacccgatgcccggtctgcctttatgccggctcgatcgtctcgcctgaactgctgcaatattgtccgccgggtgcgcgtatcgtcgatacggcgccgatgtcgctcgacgagatcgaggcggaatatcttcgcgctgctgcggccggccaggatgtcgcccggctgcattccggcgatctctcggtctggagtgcggtcgccgagcaggtgcgccggcttcaaaagcatggcatcgactatacgatgacgcctggtgttccggcctttgccgctgcggcctcggcgctcggccgagaactgacgatcccggccgtggcccaaagcctggtgctgacccgcgtttccggccgcgcgtcaccgatgccgaacgacgagacactggcgaagttcggcgcgacgggcgccacgctggcgatccatctggctatccacgcgctgaagcaagtggtcgaagagttgacgccgctttgcggctccgactgccctgttgcgatcgtcgtcaaggcctcctggccggacgagcgcatcctgcgcggcacgcttgccgatatcgaggcaaaggttgcggccgaaccgatcgaacgcacggcgatcatcttcgtcggcccctcactcgcggcggaagattttcgcgaaagctcgctctacgatccggcctatcagcgccggttcagaggccgggaataa

SEQ ID NO: 86723 - protein, 252 aa, Rhizobium leguminosarum bv. viciae 3841
MTVHFIGAGPGAADLITVRGRDLITRCPVCLYAGSIVSPELLQYCPPGARIVDTAPMSLDEIEAEYLRAAAAGQDVARLHSGDLSVWSAVAEQVRRLQKHGIDYTMTPGVPAFAAAASALGRELTIPAVAQSLVLTRVSGRASPMPNDETLAKFGATGATLAIHLAIHALKQVVEELTPLCGSDCPVAIVVKASWPDERILRGTLADIEAKVAAEPIERTAIIFVGPSLAAEDFRESSLYDPAYQRRFRGRE

SEQ ID NO: 86724 - DNA, 819 bp, Magnetococcus sp. MC-1
  CDS (1)..(819): transl_table=11
atggtagacgcagacaagccgacggtgtggtttgtgggggcgggtccaggggatcccgatttgattacggtgaaggggcggcgtctgttagagcgggcggatgccgttttgtatgccggttcgttggtggccgagggggcgttggcgtggtgccgcacggagtgtgtggtagcggactccaagggcatggcgttacaggagattaccgactggttgagcgcccatgcgggggtgggcaaggtggtggtgcgcttacagacgggtgatccttcgctgtatggttccttggtggagatggtgcagccgttggatgcagtgggcatcgcgtcacgggtggtgccgggggtttcgtcggcgtttgcctcggcggcggcggcggtggagagcctgaccctgcccgaggtgacgcaaacggtgatgtttacccgcatggaggggcgtacccccatgcccgccggggagcagttggccgatttggcgcggcatggtacgacgctctgcatttttttgtctgtgaccttgttggcccaggtgcagcaggctttgttggcggcgggctggcacgaggaggcccccctgttggtggtctataaagccagttggccgggtgaggagcagattgtacgggggcggttgggggaggatctggtggcccgctgccgggcggcggggattaagagccaaacgatgattatagccagtcccgcgctgggtgcgcgggggcgggtgggtctgaaaaagtcaaaactctacgatgcacacttttcccatggttttagacggggtgtggcagacgacgatcaaggaaagcaaacctaa

SEQ ID NO: 86725 - protein, 272 aa, Magnetococcus sp. MC-1
MVDADKPTVWFVGAGPGDPDLITVKGRRLLERADAVLYAGSLVAEGALAWCRTECVVADSKGMALQEITDWLSAHAGVGKVVVRLQTGDPSLYGSLVEMVQPLDAVGIASRVVPGVSSAFASAAAAVESLTLPEVTQTVMFTRMEGRTPMPAGEQLADLARHGTTLCIFLSVTLLAQVQQALLAAGWHEEAPLLVVYKASWPGEEQIVRGRLGEDLVARCRAAGIKSQTMIIASPALGARGRVGLKKSKLYDAHFSHGFRRGVADDDQGKQT

SEQ ID NO: 86726 - DNA, 756 bp, Mycobacterium avium 104
  CDS (1)..(756): transl_table=11
gtgaccgtctacttcatcggcgcgggcccgggcgccgcggacctgatcaccgtccgcggccaacggctgctgcaaagctgcccggtgtgcctgtacgcgggttcgatcatgcccgacgacctgctggcactgtgcccaccggacgcgagaatcgtcgacaccggcccgctgacgctggatcagatcatcaccgagctcagccaagcgcacgccgccggccacgacgtggcgcggctgcattccggcgacccctcgctgtacagcgcgctggccgagcaatgccgccggctcgacgcactgggcatcgactacgaaatcgtgcccggcgtaccggctttcgccgcggccgcggccgcgctcaagcgcgagctcaccgttcccggtgttgcgcagacggtgacgctgagccgggtggccaccttgtccacggcgatgccgcccggcgaagacctggccaccctggcccgaaccggcggcaccctggtgctccaactggccgccgcgcagatcgacagcatcgtcgggcaacttctcgacaacggccgtcaatcccagacaccctgcgcggtagtcgctttcgcgagctggccgcaggaaacggtgctgcgcggcactctcgacgacatcgccgcgcagatgcacgacgcccacatcaccaagaccgccgtcatcatcgtcggcgacgcgctgaccgccggcggattcaccgacagctacctgtattcgaccggccgcgcccgcggaagcaggcactga

SEQ ID NO: 86727 - protein, 251 aa, Mycobacterium avium 104
MTVYFIGAGPGAADLITVRGQRLLQSCPVCLYAGSIMPDDLLALCPPDARIVDTGPLTLDQIITELSQAHAAGHDVARLHSGDPSLYSALAEQCRRLDALGIDYEIVPGVPAFAAAAAALKRELTVPGVAQTVTLSRVATLSTAMPPGEDLATLARTGGTLVLQLAAAQIDSIVGQLLDNGRQSQTPCAVVAFASWPQETVLRGTLDDIAAQMHDAHITKTAVIIVGDALTAGGFTDSYLYSTGRARGSRH

SEQ ID NO: 86728 - DNA, 756 bp, Mycobacterium smegmatis str. MC2 155
  CDS (1)..(756): transl_table=11
atgacggtctacttcatcggcgcgggccccggcgcggccgatctcatcacggtgcgcggccagcggctgctcggcacctgcaaggtgtgcctgtacgccggatcgatcatgcccgacgatctgctcgcgctgtgcccgccggacgccaaggtgatcgacaccggaccgctgaacctcgatcagatcatcgacgaactcgtcgcggccgacgaggccgggctcgacgtcgcgcggctgcactccggggacccgtcgatctacagcgcgctggccgaacagtgccgcaggctcgacgcgctcggcatcggctacgagatcgtgcccggtgtaccggctttcgccgcggtcgcggccgcgctgggccgcgagctcaccgtgccaggtgtcgcgcagaccgtgacgttgagccgggtcgcgacgctctcgacggccatgcccgaaggcgaggatctgcgcacgctgtccgcaccgggcgccacactggtgctgcacctggccgccgcgcagatcgacaacatcgtcccccaactgatcgagggcggttaccgccccgaaaccccctgtgccgtggtggcgttcgcgagctggccgcaggaggtggtgctgcggggcacgctcgccgacatcgccgagcagatgcacgcggccgacgtgacccgcaccgcggtgatcgtggtgggtgacgtgctggccgccgagggtttcaccgacagttacctgtactcggcgacgcggcgccgagggagcaggcattga

SEQ ID NO: 86729 - protein, 251 aa, Mycobacterium smegmatis str. MC2 155
MTVYFIGAGPGAADLITVRGQRLLGTCKVCLYAGSIMPDDLLALCPPDAKVIDTGPLNLDQIIDELVAADEAGLDVARLHSGDPSIYSALAEQCRRLDALGIGYEIVPGVPAFAAVAAALGRELTVPGVAQTVTLSRVATLSTAMPEGEDLRTLSAPGATLVLHLAAAQIDNIVPQLIEGGYRPETPCAVVAFASWPQEVVLRGTLADIAEQMHAADVTRTAVIVVGDVLAAEGFTDSYLYSATRRRGSRH

SEQ ID NO: 86730 - DNA, 786 bp, Nocardioides sp. JS614
  CDS (1)..(786): transl_table=11
atgacgaagcctgccacgatcgtccacttcgtcggggccggacccggcgccgccgatctgttgacggtgcgcgcgaccaggctgctgggcgaggcggacgtggtgctctatccgggcacctacctcgaccccgacgtcctctcccacgtgagccccggcgccgagctggtggacacccagggtctcgacctcgaccagatcagcgcgtgcctgatcgccgccgcccggacggccaagcaggtggtgcgcctgacctccggggacccctcgctctactccgccctggctgagcagacccggcggctcgccgctgagggagtcgcgtgggatgtgacgcccggggtgccggcgtacgcggcggcggcggcgctcgtcggcaccgagctcacggtgccgttggtgagccagtccgtcgtgctgacccgcacccgggcacgctcgagcgcgatgcccgagaccgaggcactcgcgaccttcgccagcacccgcgcgaccttggtcctccacctcgcgatcacccgggtgcgggcgatcatggccgagatcgagccggagcacggcgccgactgtcccgtcgtggtggtccaccgggccagtcagcccggcgagcgcgtgctgcgcgggacggtcgcgacgatcgccgacctcgtcgacgacgcagacctccggcaggcagccgtgatcctggtcggccgggcactggccgatgacggcggcgagtcctggctctacgccgctcaccgcgacaggagcgtcacgagcccttcgcgtacgcccactgggtga

SEQ ID NO: 86731 - protein, 261 aa, Nocardioides sp. JS614
MTKPATIVHFVGAGPGAADLLTVRATRLLGEADVVLYPGTYLDPDVLSHVSPGAELVDTQGLDLDQISACLIAAARTAKQVVRLTSGDPSLYSALAEQTRRLAAEGVAWDVTPGVPAYAAAAALVGTELTVPLVSQSVVLTRTRARSSAMPETEALATFASTRATLVLHLAITRVRAIMAEIEPEHGADCPVVVVHRASQPGERVLRGTVATIADLVDDADLRQAAVILVGRALADDGGESWLYAAHRDRSVTSPSRTPTG

SEQ ID NO: 86732 - DNA, 774 bp, Nocardioides sp. JS614
  CDS (1)..(774): transl_table=11
gtgagtgctgccgtccacttcgtcggcgccggacccggcgcggccgacctgctgaccgtgcgcgcgactcgcctgctggcgcaggcggacctggtgctctatcccggcacctacctcgatcccgaggtcctggcccacgtcggcccgggcgcagagctcgtcgacacccaagacctcgacctcgacacgatggtcgcccaaatggtccgtgcagccggcgcgggccaggcggtggtgcggctgacgtccggcgatccgtcgctctattccgcgctgcacgagcagacctgccggctcgatgctgctggtgttgcctggtcggtgacgcccggggtgccggcctacgccgccgctgctgcgctggtcggcagcgagctgacggtgccgctggtggcccagtcggtggtgctgacccgcgcccaggctcgctctaccgtgatgccggagtccgagtcgctggcggcgttcgccacgactcgctcgacgctcgtgctgcatctggcgatcacgcgggtgcggccgctcatggccgagctcgaaccggagtacggcggcgactgcccggtggccgtcgtctaccgcgccagccagcccgcagaacaggtgctgcgcggcacggtggcaaccatctcggaggtggtggaggcggcagggctgcgccaggcggccgtgatcctggtcggctgggcactggccggcgagggcggcgagtcctatctctacgacgcggcccgcgaccggacctcgaagcgacgcgacgatcgggggctgtga

SEQ ID NO: 86733 - protein, 257 aa, Nocardioides sp. JS614
MSAAVHFVGAGPGAADLLTVRATRLLAQADLVLYPGTYLDPEVLAHVGPGAELVDTQDLDLDTMVAQMVRAAGAGQAVVRLTSGDPSLYSALHEQTCRLDAAGVAWSVTPGVPAYAAAAALVGSELTVPLVAQSVVLTRAQARSTVMPESESLAAFATTRSTLVLHLAITRVRPLMAELEPEYGGDCPVAVVYRASQPAEQVLRGTVATISEVVEAAGLRQAAVILVGWALAGEGGESYLYDAARDRTSKRRDDRGL

SEQ ID NO: 86734 - DNA, 816 bp, Azoarcus sp. BH72
  CDS (1)..(816): transl_table=11
atgcccggcaccatctggttcgtcggcgccggccccggcgaccccgacctgatcaccgtcaaggggcgccgcctgctcgagcaggccggcgccatcctgttcgccggctcgctggtggaccaggcggcgacgcagtacgcgccgcccggctgcgtgatccgcgattccaaggacatgacgctggaagagatgacggcctggctggtcgaggctgcaggccgccatcagacggtagtccgcctgcagaccggcgaccccggcctgtacggcgcgctggtcgagatgacgcgcccgctcgacgccaccggcattgcctggaaggtggtgcccggggtgtcgtcggcgatggcctcggccgccgccgccggcgaaacgctgaccctgccggaagtgacgcagacggtgatcctcacccgcgtcgccggccgcacgccgatgccggcgggcgaggagctcgaagccctcgccgcccaccgcacgacgctctgcctgttcctgtcgatcaccctgctgcatgaagtccagcgcgcgctgcgcgccgccggctggcccgaggacgcgcccatcgtggtggtgcagaaggcgagctggccgggcgaggaaaaggtggtgcgcggcacgctcgccgacatcaagaaacgctgccaggcggagaagatcgccagccaggccatgatcatcgccagcccggcgctcggcgcccgcgactggcccgggatcgcccgctccaagctctacgaccccgccttcacccaccgcttccgccgcgccgtcgcgcctgcggacgcggcccccgccagcgaggcaccgcaatga

SEQ ID NO: 86735 - protein, 271 aa, Azoarcus sp. BH72
MPGTIWFVGAGPGDPDLITVKGRRLLEQAGAILFAGSLVDQAATQYAPPGCVIRDSKDMTLEEMTAWLVEAAGRHQTVVRLQTGDPGLYGALVEMTRPLDATGIAWKVVPGVSSAMASAAAAGETLTLPEVTQTVILTRVAGRTPMPAGEELEALAAHRTTLCLFLSITLLHEVQRALRAAGWPEDAPIVVVQKASWPGEEKVVRGTLADIKKRCQAEKIASQAMIIASPALGARDWPGIARSKLYDPAFTHRFRRAVAPADAAPASEAPQ

SEQ ID NO: 86736 - DNA, 753 bp, Mycobacterium sp. KMS
  CDS (1)..(753): transl_table=11
gtgacggtctacttcatcggggccggtccgggggccgccgatctgatcaccgtgcgcggacaacggctgctcggccggtgtccggtgtgcctgtacgccggttcgatcatgcccgaggacctgttggcgctgtgcccgccggatgcgcgcatcgtcgacaccggcccgctcacgctcgaccagatcgtcgacgaactcgcacaggcgcacgccgacggcaaggacgtggcgcgtctgcactccggggatccgtcgatctacagcgcgctggccgaacagtgccgccgcctcgacgcgctgggcgtggactacgagatcgtgcccggggtgcccgcgttcgcggccgcggcggccgcgctgggccacgaactcaccgtgccgggcgtatcccagaccgtcaccctgagccgggtcgccactctgtcgacggccatgccgcccggtgaggatctgcgcaccctgtccgcatcgggcggcaccctggtgctgcacctggccgccgcgcatatcgacaacatcgtgcccgaactgctcgccggcggctatggcccggaaacaccgtgtgccgtcgtggcattcgcgagctggccggaggagatcgtattgcgcggcaccctggccgacatcgccgcgcagatgcacgacgccgccgtcacccgtaccgcggtgatcgtcatcggagacgtgctcgctgccggcggcaccgagagctacctgtactcgtcggggcgcgtgcggcgcgggcggcactga

SEQ ID NO: 86737 - protein, 250 aa, Mycobacterium sp. KMS
MTVYFIGAGPGAADLITVRGQRLLGRCPVCLYAGSIMPEDLLALCPPDARIVDTGPLTLDQIVDELAQAHADGKDVARLHSGDPSIYSALAEQCRRLDALGVDYEIVPGVPAFAAAAAALGHELTVPGVSQTVTLSRVATLSTAMPPGEDLRTLSASGGTLVLHLAAAHIDNIVPELLAGGYGPETPCAVVAFASWPEEIVLRGTLADIAAQMHDAAVTRTAVIVIGDVLAAGGTESYLYSSGRVRRGRH

SEQ ID NO: 86738 - DNA, 762 bp, Magnetospirillum magnetotacticum MS-1
  CDS (1)..(762): transl_table=11
atgaccgttcatttcatcggtgccggacccggcgctcccgacctgatcaccgtgcgggggctgaacctgatccgccgttgcccggtggtgctctatgccggttcgctggtcccgcccgagatcgtcgccgaggccatgacggacgcgcgggtgatcgataccgcgccgcttcatctggacgagatcatcgccgagatggagatggcccataatctcgggcagcaggtcgcgcgcgtccattccggtgacccttccatctatggcgccatcgccgagcagatgcgccgtctcgacgcgctgggcattccctatgacgtgacgccgggcgtcccggcctttgcggccgcggcggccgcgctggccaccgagctgacgctccctgatatcagccagacggtgattctgacccggacctcggtgcggtcctcggccatgcccaataacgaggatctggcgacgctgggtaaaagcggcgcgaccctggccatccatttgtcggtgtccaatctggcccatgtggtcaaggagctctcgcccctttacggcgcggattgcccggtggtggtggcctttagggtgggctggcccgatcagagctttatccggggctgcctttcggacatccgcgacaaagtcaaggcagcgggcctgacccgcaccgccctgatcctggtgggccgcgtgctgggtggcgccgagttcaccgattcccggctctatgccgaggaccatacccatgtcttgcgccccgcgaaggggtaa

SEQ ID NO: 86739 - protein, 253 aa, Magnetospirillum magnetotacticum MS-1
MTVHFIGAGPGAPDLITVRGLNLIRRCPVVLYAGSLVPPEIVAEAMTDARVIDTAPLHLDEIIAEMEMAHNLGQQVARVHSGDPSIYGAIAEQMRRLDALGIPYDVTPGVPAFAAAAAALATELTLPDISQTVILTRTSVRSSAMPNNEDLATLGKSGATLAIHLSVSNLAHVVKELSPLYGADCPVVVAFRVGWPDQSFIRGCLSDIRDKVKAAGLTRTALILVGRVLGGAEFTDSRLYAEDHTHVLRPAKG

SEQ ID NO: 86740 - DNA, 762 bp, Fusobacterium nucleatum subsp. vincentii ATCC 49256
  CDS (1)..(762): transl_table=11
atggaaaaagtttactttataggagctggacctggtgacccagaattgataactataaaaggacaaagaatagttaaagaagctgatgttattatttatgctggttcattagttccaaaagaagttatagattgtcataaagagggagcagagatttataattcagcttctatgtcactagatgaagttatagatgttactgtaaaagcaataaaagaaaataaaaaagtagcaagagttcatacaggggaccctgcaatctatggagcacatagagaacaaatggatatgttagatgaacatggaatagaatatgaagttattccaggtgtaagttcatttttagcttctgctgcagctttaaaaaaagaattcacattacctaatgtatctcaaactgtaatttgtacaagaatagagggaagaacagctgttcctgaaagagaaagtttaaaaagtttagcaaaacacagagcctctatggcaatatttttatcagttcaaatgatagataaagttgttgaagcattggctacttcttatcctatgacaacacctgtggctgttgtacaaaaagcaagttgggcagaccaaaaaatagttttaggaactcttgaaactattgagcaaaaagtaaaagaagcagaaataaataaaactgcacaaatattagtcggagattttttaggaaatgaatatgaaaaatcaaaattatatgataaatatttttctcatgaatatagaaagggaataaaaaaataa

SEQ ID NO: 86741 - protein, 253 aa, Fusobacterium nucleatum subsp. vincentii ATCC 49256
MEKVYFIGAGPGDPELITIKGQRIVKEADVIIYAGSLVPKEVIDCHKEGAEIYNSASMSLDEVIDVTVKAIKENKKVARVHTGDPAIYGAHREQMDMLDEHGIEYEVIPGVSSFLASAAALKKEFTLPNVSQTVICTRIEGRTAVPERESLKSLAKHRASMAIFLSVQMIDKVVEALATSYPMTTPVAVVQKASWADQKIVLGTLETIEQKVKEAEINKTAQILVGDFLGNEYEKSKLYDKYFSHEYRKGIKK

SEQ ID NO: 86742 - DNA, 750 bp, Listeria monocytogenes str. 1/2a F6854
  CDS (1)..(750): transl_table=11
atggcagaagtacatttcgtcggagcaggaccaggagataaagagttaatcacattaaaaggatatcaattattaaaaaaggcagatgtcgttatttatgcgggatcactcgtcaatccagagttgctagagtattgtaaagccagctgcgaaatccataatagtgcgagcatgaatttaatcgaaattattgactgtatggaagcaggtgtgactgctggtaaagaagtggttcgtttgcaaacaggggacttttctatttatggttccattcgtgaacaagtcgaggaaatgaaaaagcgttcgattcccttcacttgtacaccaggtgtgagttcattccttggtgcggcaagcagttttggggttgagtatacagttcctgaagtaagtcaaagtgtaattattacccgaatggctggcagaactccagtaccatcacgcgaatcgcttcgttcatacgcggcacaccaaacttcaatggtaattttcttgtctgttcaaggtattagaaaagttgtttcagaattaatcaaaggtggctataaacctgaaacaccagcagcagttatttacaaagcgacttgggcggaagaaaagaaagtaaccggcacgttagaagatatcgcagaaaaagtgacagaagctggaattacgaaaacggcgcttattatggtcggtgatttcctcggagaagagttttattattctaagctatacgataaggatttcaaacatgagtacagataa

SEQ ID NO: 86743 - protein, 249 aa, Listeria monocytogenes str. 1/2a F6854
MAEVHFVGAGPGDKELITLKGYQLLKKADVVIYAGSLVNPELLEYCKASCEIHNSASMNLIEIIDCMEAGVTAGKEVVRLQTGDFSIYGSIREQVEEMKKRSIPFTCTPGVSSFLGAASSFGVEYTVPEVSQSVIITRMAGRTPVPSRESLRSYAAHQTSMVIFLSVQGIRKVVSELIKGGYKPETPAAVIYKATWAEEKKVTGTLEDIAEKVTEAGITKTALIMVGDFLGEEFYYSKLYDKDFKHEYR

SEQ ID NO: 86744 - DNA, 867 bp, Crocosphaera watsonii WH 8501
  CDS (1)..(867): transl_table=11
atgatgcagaaattccttttagtgagttatttaatagaagtaaatctgctagaagtagagctatttatccccgtaatattattcctagtaatgactaatttaaccccttctgtctactttatcggtgccgggcctggtgacccagatttattgacgttaaaagcatacaaaattattagcaaagctgatgttattttgtatgctgattctttggttcctaagcaagttttaaaagatgttcgtgataattgtgagttaattgctacaggaaataaaaccctagaagttatcatgaaaattatgattgatagggttagaaataatcaatctgtggttcgtcttcactcaggggatttaactttatatagtgcaatcaatgaacaaatagcaaggcttttacaagaaaacattgagtttcaattaataccaggaattagtgcattccaggcagcagcagcgaaaataggtacagagttgactatccctgatctagttcagaccattattttaactcgtgttagtggtagtgcttctcaagttcctgatgctgaaaaattagaaagtttagcagcacatcagtcaagtttatgtttatatttagctgcccgtcatgttaggaaatctcaagaaaagttactacaatattatcctgctaatacccctgtcgctatttgtttccgtattggttggtctgatgaaaaaatactaattgttcctttagaaaaaatggcagaagtcactgaagaagaaaacttaattcggacaactttatatattattagtcctgctttaaatactgagcaaaattatcgttctcaactttatcatcctcaacataatcatttatttagaccccataccccttaa

SEQ ID NO: 86745 - protein, 288 aa, Crocosphaera watsonii WH 8501
MMQKFLLVSYLIEVNLLEVELFIPVILFLVMTNLTPSVYFIGAGPGDPDLLTLKAYKIISKADVILYADSLVPKQVLKDVRDNCELIATGNKTLEVIMKIMIDRVRNNQSVVRLHSGDLTLYSAINEQIARLLQENIEFQLIPGISAFQAAAAKIGTELTIPDLVQTIILTRVSGSASQVPDAEKLESLAAHQSSLCLYLAARHVRKSQEKLLQYYPANTPVAICFRIGWSDEKILIVPLEKMAEVTEEENLIRTTLYIISPALNTEQNYRSQLYHPQHNHLFRPHTP

SEQ ID NO: 86746 - DNA, 786 bp, Sulfitobacter sp. EE-36
  CDS (1)..(786): transl_table=11
atgactgttcactttatcggcgcgggccccggtgcccctgatctgctgaccctgcgagggcgcgacctgatcgcggcctgccctgtgtgtctgtatgccggatcgttggtcccgtctgagctgctgtcctactgccctgcggatgcgaagatcgtgaacaccgcgtcgctgtcgctggacgagatcatggcagaaatcaagaccgccgatgatgcggggcaggatgtggcgcggcttcattcgggtgatctgtcggtctggtccgccatgggcgagcagctgcgccgcttgcgcgagctggacatcgagtatgacattacccccggcgtgcccgcctttgccgctgccgccgctgccttggggaacgagctgacgctgcccggtgtggcgcagtcgcttgttctcactcggacatctgggcgggcgtcagccatgcccgagggtgaaacgctcgagaatttcgccgccacgggtgccacgctggcgatccacctgtcggtacatgtgctggatgatgtggtcgcgcggctcacccctcattacggagaggactgccccgtcgccatcgtctggcgcgcaagctggccggatcaacgggtggtgcgggcgaccttgggcagcgtgatcgacgccaccgacggcgaacgcgggcgcacggcgctgatccttgtgggccgcgcgctgacggcagaggagttccgcgaaagctgtctgtacgctggcgattacgaccgccgtttccgccccgtcggcacagagccgcgctttcccgagggcacagaatga

SEQ ID NO: 86747 - protein, 261 aa, Sulfitobacter sp. EE-36
MTVHFIGAGPGAPDLLTLRGRDLIAACPVCLYAGSLVPSELLSYCPADAKIVNTASLSLDEIMAEIKTADDAGQDVARLHSGDLSVWSAMGEQLRRLRELDIEYDITPGVPAFAAAAAALGNELTLPGVAQSLVLTRTSGRASAMPEGETLENFAATGATLAIHLSVHVLDDVVARLTPHYGEDCPVAIVWRASWPDQRVVRATLGSVIDATDGERGRTALILVGRALTAEEFRESCLYAGDYDRRFRPVGTEPRFPEGTE

SEQ ID NO: 86748 - DNA, 795 bp, Roseovarius nubinhibens ISM
  CDS (1)..(795): transl_table=11
atgaccgttcacttcatcggcgcaggccccggcgcgcccgatctgctcaccctgcgcggccgcgacatcatcgccgcctcgccggtctgcctctatgcaggctcgctcgtccccgaggcggtgctcgaccactgtccggagggggccaagatcatcaacaccgcgccgatggatctcgacgcgatcattgccgaatgcgaagccgcccatcgcgccggtcaggacgtggcaaggctccactccggcgatctctcggtctggtccgccatgggcgaacagatccgccgcctcgaggccgcaggcatcccctataccgtgaccccgggcgtgccctccttcgccgccgccgccgcgacgctcggcacggaactcaccctgccgggcgtggcgcaatccgtggtgctgacccgcacaccgggccgggcgagctcgatgcccgatggcgaaacgctggccaatttcggccgcaccggggcgacgctggcgctgcacctgtcgatcggcaatctcgaacgctcggtggacgagctcatcccgcattacggcgccgattgcccggtcgcggtggtctaccgcgcgagctggccggacgagaagatcatccgcgccacccttggcaccgtggcggaaaacatcgacgcctcgatttcgcgcaccgcgttgatcctcgtcggccgcgcgctggcccaagaaggctttgccgagagccggctctacgccgccgattacgaccgccgctaccgcccgcaaaccgccgacagcccgtggagcgaatggcagcatggcgatgactga

SEQ ID NO: 86749 - protein, 264 aa, Roseovarius nubinhibens ISM
MTVHFIGAGPGAPDLLTLRGRDIIAASPVCLYAGSLVPEAVLDHCPEGAKIINTAPMDLDAIIAECEAAHRAGQDVARLHSGDLSVWSAMGEQIRRLEAAGIPYTVTPGVPSFAAAAATLGTELTLPGVAQSVVLTRTPGRASSMPDGETLANFGRTGATLALHLSIGNLERSVDELIPHYGADCPVAVVYRASWPDEKIIRATLGTVAENIDASISRTALILVGRALAQEGFAESRLYAADYDRRYRPQTADSPWSEWQHGDD

SEQ ID NO: 86750 - DNA, 777 bp, Oceanicola batsensis HTCC2597
  CDS (1)..(777): transl_table=11
atgacggtctatttcatcggtgcgggcccgggggatcccgaactcctgacgctcaaggcgcaacgggtgatcgggcagtgcccggtctgcctctatgcgggctcgctcgtcccggccgaagtcgtggcttgcgcgcccgagggggcgcgggtgttggacacggcccctatgacgctggacgaaacccatgccgagatcgtcacggcccacgagcaaggcgaggacgtggcgcgggtgcattcgggcgatccgtcgctctatggcgcgatcgccgagcagatccgccggttgcgggccgatgggatcggctacgagatcatccccggcgtgccggcctatgcggctgcggcggccgcgctcgggcaggaactgaccgtgcccgagatcgcgcagtcgatcgtcctgacccgggtgagcatgaagtcgacctcgatgcccgaaggcgagacgctggccaatttcgcgcggaccggcgcgacgctggcgatccacctcggcgtccgccacctgcgcgagatcgagcggcagctgtcgccgcactacggaagcgattgccccgtggtcgtggcctaccgcgtcggctggccggaccagatgttcattcgcggcacgctggcggacatccacgcaaaggtgcgggccgaaaagatcacgcgcaccgcgctgatcctggtgggtccggtcctgcaagacatccgcgatttccgcgactccgccctttacgaccgggatatcccccatgttctgaggcccagggtcaggctgcgggaaagctga

SEQ ID NO: 86751 - protein, 258 aa, Oceanicola batsensis HTCC2597
MTVYFIGAGPGDPELLTLKAQRVIGQCPVCLYAGSLVPAEVVACAPEGARVLDTAPMTLDETHAEIVTAHEQGEDVARVHSGDPSLYGAIAEQIRRLRADGIGYEIIPGVPAYAAAAAALGQELTVPEIAQSIVLTRVSMKSTSMPEGETLANFARTGATLAIHLGVRHLREIERQLSPHYGSDCPVVVAYRVGWPDQMFIRGTLADIHAKVRAEKITRTALILVGPVLQDIRDFRDSALYDRDIPHVLRPRVRLRES

SEQ ID NO: 86752 - DNA, 768 bp, Synechococcus sp. RS9917
  CDS (1)..(768): transl_table=11
atgacccaaaccgatgctctggtttccatcgtgggagccggtccaggtgctcccgatctgctcaccagacgcgccgaagaccgcatccgctccgccgatgtgctgatctggaccgattcactcgtttcgcccgaaatcgccgccctggcagggccggattgcgaacggatccgcagcagcaccctgaccctcgaggatgtggtgcccctgatgatcgatcgcgtccggcagggcctgcgcgtggtgcgtcttcacgatggcgatccctgtctgtatggcgctcttacggaacagatctgcgggctggccgatgccggcatcgatacggaggtggtgccgggcctcagcgcctaccaggcgacggcctccgcgctgaaggcggaactcaccatccctggcctggtgcaaacaatcgtgctcagccgggccgggggtcgcaccggtgtgccggagaccgagacgctcgagcagctggcgcggttaagggcctcgctctgcctctatctgagtgctcgccatgtcgaggaagtgcaggcgacccttctggagcactatcccgccgacacccccgtcgccatcggctacagggtcagctggcccgaccaatggctgcaggtggtgccgctggagcgcatggcgcagacttcacaggagcggggattgattcgtacaaccctgtacgcgatcagcccagcgctgacggcccacggccatcgctccaagctctattcaccggaacacgaccacctcttccgtccgcagcgctga

SEQ ID NO: 86753 - protein, 255 aa, Synechococcus sp. RS9917
MTQTDALVSIVGAGPGAPDLLTRRAEDRIRSADVLIWTDSLVSPEIAALAGPDCERIRSSTLTLEDVVPLMIDRVRQGLRVVRLHDGDPCLYGALTEQICGLADAGIDTEVVPGLSAYQATASALKAELTIPGLVQTIVLSRAGGRTGVPETETLEQLARLRASLCLYLSARHVEEVQATLLEHYPADTPVAIGYRVSWPDQWLQVVPLERMAQTSQERGLIRTTLYAISPALTAHGHRSKLYSPEHDHLFRPQR

SEQ ID NO: 86754 - DNA, 771 bp, Synechococcus sp. WH 5701
  CDS (1)..(771): transl_table=11
gtgcggatcgtgggtgcaggcccaggcgccatcgatctcatgaccgtgcgggccacccgtgccgtcgaagccgcggacgtactggtgtggaccgattccctggtgtcgccccagattgccgccctggcaccgcagcactgcgagcggatccgcaccagcacgctcacgctggaagaggtgatggagctggtggtggagcgggcgcgggctggattgcgggtggtgcgcctgcacgatggtgatccctgcctctacggagccctggcggagcagatctgccgcctggccgatgctggcctggaggtggaggtggtgcctggcctgagtgcctaccaggccaccgctgcggccctcaaggccgagctcacgatcccgggactggtccagaccatcgtgctcagccgtgccggcgggcgcacgggggtgccggagcgggagtcgctggcacatctggcctccctgcgggcctccctctgcctgtacctgagcgcccgccatgtggagtcggtgcagcaggagttgctggagcactacgccgccgacaccccggtggcgatcggctaccgggtgagctggccggatcagtggctgcaggtggtgcccctggagcagatggcggccgtgagccgggagcgacagctgatccgcaccaccctctatgtggtgagcccagcactggccgcccctgagcaggcccgctcccggctgtactccgccagccatgatcatctgttccgagcggccaccgctgcaggggggtcagagggctga

SEQ ID NO: 86755 - protein, 256 aa, Synechococcus sp. WH 5701
MRIVGAGPGAIDLMTVRATRAVEAADVLVWTDSLVSPQIAALAPQHCERIRTSTLTLEEVMELVVERARAGLRVVRLHDGDPCLYGALAEQICRLADAGLEVEVVPGLSAYQATAAALKAELTIPGLVQTIVLSRAGGRTGVPERESLAHLASLRASLCLYLSARHVESVQQELLEHYAADTPVAIGYRVSWPDQWLQVVPLEQMAAVSRERQLIRTTLYVVSPALAAPEQARSRLYSASHDHLFRAATAAGGSEG

SEQ ID NO: 86756 - DNA, 768 bp, Synechococcus sp. WH 7805
  CDS (1)..(768): transl_table=11
atgacaaccatctccatcgttggagccgggcccggcgctcccgacctgctcacccgcagagccgaacagagaattcaatcggcggatgtactgatctggaccgattcccttgtgtcaccccagattgccgccttggcatcggaccattgcgaacaaattcgtaccagcacactcacgctcgagcaggtcatccccctgatgatcgatcgatcgagccaggggtcgcgtgttgtccgcctgcatgacggcgatccctgcctctacagcgcactgaacgaacaaatctgcgcacttgccgatgctggtatcacagtcgaggttgtgcctgggatcagcgcctatcaagccaccgctgcggccatcaatgcggagctgaccattcccggcgtggtacagacgatcgtgcttggtcgcaccggcggccgcacaggggttcctgagcgagaacagctggatcatctcgccagattgcaagcttcgctttgcctatatctcagtgcgcgtcatgttgatgaggttcagtccacgcttctccagcattacccagctgacacacctgtcgcgatcggctacagggtgagctggcccgatcagtcaatcgatgtggtgccgcttaaggcgatggccgatgcaacaagggcaagaaagctgatccgcaccacgctgtatgtgatcagccctgcacttcgggaacgaaacggttccgagcggtcgcgtctctattctcccgagcacgaccacctgttcagaccgcgcggcggagactga

SEQ ID NO: 86757 - protein, 255 aa, Synechococcus sp. WH 7805
MTTISIVGAGPGAPDLLTRRAEQRIQSADVLIWTDSLVSPQIAALASDHCEQIRTSTLTLEQVIPLMIDRSSQGSRVVRLHDGDPCLYSALNEQICALADAGITVEVVPGISAYQATAAAINAELTIPGVVQTIVLGRTGGRTGVPEREQLDHLARLQASLCLYLSARHVDEVQSTLLQHYPADTPVAIGYRVSWPDQSIDVVPLKAMADATRARKLIRTTLYVISPALRERNGSERSRLYSPEHDHLFRPRGGD

SEQ ID NO: 86758 - DNA, 792 bp, Oceanospirillum sp. MED92
  CDS (1)..(792): transl_table=11
atgacagtttactttatcggtgccggtcccggtgatcctgaattaatgaccctgaaaggtcatcgtgtgctgcaagagtgcccggtcgtgctttatgccggttcgctgatcccgcgcgaagttttagacgcagtggaaggtaaggcggagaagatcatcgataccgcgactatcgatctggatcagattaccgagcatatcgttcaggcccataaagagggtaaagacgttgcgcggcttcagtgtggtgatccttccctttacggtgcgattggtgaacagatccgccgtcttgaagcggaaggtatcgactatgaagtgataccgggtgttagcgcagtagccgcttcagccgcttatctgaagaaagagctgaccctgtccggggtatcccagacgatcattatgacccgttatgaaggcaagacgccgttcccggaacgtgagcgtctgccacagctggcacagagtggcgcaacgctggcgattcacctgggcgtaacgcgtatccacaagattgttgaagagctgattccccattatggcgaagattgcccggtagcggtgtgctatcgcagctcctggccggatcaggacaaagtgaccggcacgctaaaggatattgtcgctaaagtgcgtgaaaagggcttcacccgaaccgcgctgatactggtaggccatgtactggatagcgatgattttgctgattcctacttgtatgacaaggatcaggcccacgtattccgtaagaaagaacacaaagcaaaaattgtaaaagagacaactgagtaa

SEQ ID NO: 86759 - protein, 263 aa, Oceanospirillum sp. MED92
MTVYFIGAGPGDPELMTLKGHRVLQECPVVLYAGSLIPREVLDAVEGKAEKIIDTATIDLDQITEHIVQAHKEGKDVARLQCGDPSLYGAIGEQIRRLEAEGIDYEVIPGVSAVAASAAYLKKELTLSGVSQTIIMTRYEGKTPFPERERLPQLAQSGATLAIHLGVTRIHKIVEELIPHYGEDCPVAVCYRSSWPDQDKVTGTLKDIVAKVREKGFTRTALILVGHVLDSDDFADSYLYDKDQAHVFRKKEHKAKIVKETTE

SEQ ID NO: 86760 - DNA, 762 bp, Xanthobacter autotrophicus Py2
  CDS (1)..(762): transl_table=11
gtgaccgttcatttcatcggcgcgggacccggcgcggcggacctcatcaccgtgcgcgggcgcgatctcatcgcccgctgcccggtctgcctctatgccggctccatcgtcgcgccggaactgctggactactgcccgcccggcgcgcgcatcgtggataccgcccccctcgacctcgaccggatcgaggccgaatatgtgcgcgccttcgcggcgggcgaggatgtggcgcggctgcattccggcgacctctcggtctacagcgcggtggccgagcagatgcgccggctcgaccggctgtccatcccctatacgctgacgcccggcgtgccggccttcgcggcggcggcagcgctgctgaagcgggagttcaccgtgcccgaggtggcccagagcctcgtcatcacccgcgtctcgggccgcgcctccgccatgcctgagagcgaaaagcttaaagccttcgctgccacgggggcgaccctcgccattcatctggccatccatgccctcgacaaggtggtggcggaactgaccccggtgctcggtaccgactgcccggtggcggtggtggccaaggcctcctggccggacgggcgcgtcgtcaccgggaccctcggtgacatcgccggccagcttgaggccgaccccatcccgcgcacggcgctcattctggtggggcgggcgctggcggcgcaggatttccgcgagagcgcgctctacgacaccgcctatgtccgccgctttcgcgggggcggagaatga

SEQ ID NO: 86761 - protein, 253 aa, Xanthobacter autotrophicus Py2
MTVHFIGAGPGAADLITVRGRDLIARCPVCLYAGSIVAPELLDYCPPGARIVDTAPLDLDRIEAEYVRAFAAGEDVARLHSGDLSVYSAVAEQMRRLDRLSIPYTLTPGVPAFAAAAALLKREFTVPEVAQSLVITRVSGRASAMPESEKLKAFAATGATLAIHLAIHALDKVVAELTPVLGTDCPVAVVAKASWPDGRVVTGTLGDIAGQLEADPIPRTALILVGRALAAQDFRESALYDTAYVRRFRGGGE

SEQ ID NO: 86762 - DNA, 816 bp, delta proteobacterium MLMS-1
  CDS (1)..(816): transl_table=11
atgaagcagccgcaaaatataatccacttcgtcggggccggccccggcgatccggagctgatcacggtcaagggcagcaggctgctggccgccgccgagttggtggtctataccggcagcctggtaccccgggagttgctgcggggcctggcagccgaaatccacgattccgccggcctgaccctggcagaggtgatcgacttgctggccgccggctggcgggccggtaaaaaagtggtccggctccataccggcgatcccaccatttacggggcgatcggcgaacagatggcccggctggccgagttggggattccctggcgggtggtgccgggggtcagttcggccaccgccgccgcggcggcgctggatgccgagttgaccctgccggagatctcccagacggtgatcatcacccgccggggcggccgcaccccggtgccggcggcggaagaccttaccgggctggccgcccaccaggccaccatgctgatcctgctcagcgccgggatgatcgagcaggtagttgccgaattgctcgccggcggctacccgtccaccaccccggcggcggtggtggagaaggccagctggcccgagcagcgaatcgtccggggcaccctggcggatatcgccgcgcaaaccacggcggcgggaatcaccaaaacggcgatcatcgcggtgggccgggtactggccgccgccccgccgccggtgctctccaaactctacgatgccggcttcagccatggctaccgcagtggcggagagcagcagacagcggacagaaaaagagaacggaagcgacgtaattga

SEQ ID NO: 86763 - protein, 271 aa, delta proteobacterium MLMS-1
MKQPQNIIHFVGAGPGDPELITVKGSRLLAAAELVVYTGSLVPRELLRGLAAEIHDSAGLTLAEVIDLLAAGWRAGKKVVRLHTGDPTIYGAIGEQMARLAELGIPWRVVPGVSSATAAAAALDAELTLPEISQTVIITRRGGRTPVPAAEDLTGLAAHQATMLILLSAGMIEQVVAELLAGGYPSTTPAAVVEKASWPEQRIVRGTLADIAAQTTAAGITKTAIIAVGRVLAAAPPPVLSKLYDAGFSHGYRSGGEQQTADRKRERKRRN

SEQ ID NO: 86764 - DNA, 858 bp, Desulfitobacterium hafniense DCB-2
  CDS (1)..(858): transl_table=11
gtgcgtaaagctacgcgacttggacaaaattttggatacagaatgataaagagaaggacaggagtgaaaagcttggctgagaatactaattctggcttgggtcaggttctctttgtgggagcgggtcccggggatccggatttaatcacattaaaaggcaaaaaggctcttgaagaagcccagcgggtcatctatgcaggttccctggtcaatccggatatactgcagcattgccgggagggcatagccttatttgatagtgccgggttaaccttggaagagactgtcgctatcatggcggaaggggtccaaagaggggaaaaggtcgttcgcctgcataccggagatcccagtgtctatggagctattcaggaacagatgcaatgcctggaagaaaagggtattgcttacggggtgattccgggagttagctcggtgtttgccgccgccgctgcggtaaaaaaggagtttactctgccggaggtcagccagaccctgattcttacccggttggcgggaagaaccccggtgccggaaaaggaagatttggcattactggctcaacatcaggccagcatggccatttttctcagtgtgcaggatataggggaagtggtggcgaccctaaggaaaggatatcctccccatacacctgtggctgttgtgtatcgggccagctggccggatcagcacatcctggagggtactttggaaaccattgccgatcaggtaaaagaggcaggaatccgcaaacatgcccaaattcttgtgggagactttctccgggatcaaggaacccgttctaagctgtatgacccggaatttactcatgaataccggcaaggacgttctacatga

SEQ ID NO: 86765 - protein, 285 aa, Desulfitobacterium hafniense DCB-2
MRKATRLGQNFGYRMIKRRTGVKSLAENTNSGLGQVLFVGAGPGDPDLITLKGKKALEEAQRVIYAGSLVNPDILQHCREGIALFDSAGLTLEETVAIMAEGVQRGEKVVRLHTGDPSVYGAIQEQMQCLEEKGIAYGVIPGVSSVFAAAAAVKKEFTLPEVSQTLILTRLAGRTPVPEKEDLALLAQHQASMAIFLSVQDIGEVVATLRKGYPPHTPVAVVYRASWPDQHILEGTLETIADQVKEAGIRKHAQILVGDFLRDQGTRSKLYDPEFTHEYRQGRST

SEQ ID NO: 86766 - DNA, 783 bp, Synechococcus sp. RS9916
  CDS (1)..(783): transl_table=11
atgacctcctcctccagcgctgagccctccaccatcgccattgttggcgccgggcctggagctcctgatctgctgacccgacgagcagaagaccgccttcgagctgcggatgtgttgatctggactgattctctggtctcccctcagatcgcagccctggctcccgaaggctgcgaacgcattcgcaccagcactctcacccttgaagatgtgctgccgctgatgatcgatcgcgcccgtcagggcctgcgggtggtgcgtctgcacgatggtgatccctgcctgtatggagctctttcagaacaggtctgcagtcttgccgatgctggcattgcggtcgaagtggtccccggactcagtgcttaccaagccaccgcatcagccttaagcgccgaactcaccattccaggagtggttcagaccatcgtgctcagccgtgcaggcggtcgcaccggtgtgcctgaggcagaagatctgagcaatctggcgaggcttaaagcgtctctctgcctgtatctcagtgcccgccatgtggacgaggttcaagccacccttctcgagcactacccggcagacactcccgtcgcgattggctaccgggtgagctggcccgaccagtggctgaacgtggtgcccctgaatcagatggcagcggtctccaaggaacgtcagctgattcgaaccacgctttatgtagtcagtccagccctcgccaaccagggcgagcgatccaagctttactccccctcccacgaccacctcttccgcccacaagccagctga

SEQ ID NO: 86767 - protein, 260 aa, Synechococcus sp. RS9916
MTSSSSAEPSTIAIVGAGPGAPDLLTRRAEDRLRAADVLIWTDSLVSPQIAALAPEGCERIRTSTLTLEDVLPLMIDRARQGLRVVRLHDGDPCLYGALSEQVCSLADAGIAVEVVPGLSAYQATASALSAELTIPGVVQTIVLSRAGGRTGVPEAEDLSNLARLKASLCLYLSARHVDEVQATLLEHYPADTPVAIGYRVSWPDQWLNVVPLNQMAAVSKERQLIRTTLYVVSPALANQGERSKLYSPSHDHLFRPQAS

SEQ ID NO: 86768 - DNA, 753 bp, Pseudomonas putida GB-1; identical to SEQ ID NO: 85423
  CDS (1)..(753): transl_table=11

SEQ ID NO: 86769 - protein, 250 aa, Pseudomonas putida GB-1; identical to SEQ ID NO: 85424

SEQ ID NO: 86770 - DNA, 1392 bp, Pseudomonas putida GB-1; identical to SEQ ID NO: 85427
  CDS (1)..(1392): transl_table=11

SEQ ID NO: 86771 - protein, 463 aa, Pseudomonas putida GB-1; identical to SEQ ID NO: 85428

SEQ ID NO: 86772 - DNA, 762 bp, Magnetospirillum gryphiswaldense
  CDS (1)..(762): transl_table=11
atgaccgtccatttcatcggcgccggccccggagcccccgacctgatcaccgtgcgcggcctcaacctgatccgcaaatgcccggtctgcctttatgccggttcgctggtcccggccgaggtggtggccgaggcccccaccggcgcccgcgtgctggacaccgcggccatgaacctggacgagatcatcgccgagatggaagaggccgacgacaagggcctggacgtggcccgcgtccattccggcgaccccagcatctatggcgccatcgccgagcagatgcgccggctcgaccaattgggcatcgcctatgacgtcacccccggcgtgccggccttcgccgccgccgccgctgccctgggctcggaactgaccctgcccgacgtcagtcagaccattatcctgacgcggaccgccgtgcgttccagttccatgccggcgggcgaggatctgaccaccttgggcaaaagcggcgccaccttggccatccatctgtccatcgccaatctggcccatgtggtcaaggaactgacgcctctttacggcgccgattgcccggtggccatcgcctatcgggtcagttggcccgatcaggccttcctcaagggcacgctgggcgacatccgcgccaaggtcaaggaagccggcctgacccgcaccgccctgatcctggtgggccgggtgctgggcggggccgaattcaccgattcgcgcctttatgcccccgaccacacccatgtgttgcggccggccaagtcttga

SEQ ID NO: 86773 - protein, 253 aa, Magnetospirillum gryphiswaldense
MTVHFIGAGPGAPDLITVRGLNLIRKCPVCLYAGSLVPAEVVAEAPTGARVLDTAAMNLDEIIAEMEEADDKGLDVARVHSGDPSIYGAIAEQMRRLDQLGIAYDVTPGVPAFAAAAAALGSELTLPDVSQTIILTRTAVRSSSMPAGEDLTTLGKSGATLAIHLSIANLAHVVKELTPLYGADCPVAIAYRVSWPDQAFLKGTLGDIRAKVKEAGLTRTALILVGRVLGGAEFTDSRLYAPDHTHVLRPAKS

SEQ ID NO: 86774 - DNA, 1272 bp, Zea mays
  CDS (1)..(1272)
atggctctcgccgtccgcacgcctcgcttccagcctcgaccggcctccatttctgcgcccacaacacccgcatcgacctccctcgccgccgggaacgcgaggccccgcccctgcgccggcgccgccgttcgcgcctcgcccttcaccgaggccacctcctcctcgcgctaccgccgcgacgcctggtcatacgccgccgatggctcctccaactccgcatccccgtcctccgctgccgctgctgccgcgggccgtcgggatgacgagatcgcgctgcagctgccggaactgcggaggctcctggacgtgctgagggcgtccagggggaggggcgccgaggagggcggcggacccggggaggtggcactggtgggcacagggcccggggaccccgagctgctcacgctcaaggcggtccgggccatcgaggcggcggacctggtgctctacgacaggctggtgtctaacgacgtgttggacttggtcggggagggcgccaggctgctctatgtcggcaagaccgcgggataccacagccgcacccaggaggagattcacgagctgctgctgagctttgcggaggccggtgccaatgttgtgcgcttgaaaggtggcgatcctctggtttttggaaggggtggagaagagatggatttcttacagcaacagggaattaaagttgaagttatcccaggaattacttctgcttcgggtattgcagcagagctaggcattccgttaacccatagaggtgttgctaccagtgtcagatttttaactggccactccagaaatggtgggacagatccactatatgtagctggaaatgcggctgatccagacactactttggttgtgtatatgggtttgtcaacacttccatcacttgctccaaagttaatgaagcacggcctgccaccagatacccctgctgttgcagtagagcgcgggactacaccccaacaacgaacggtgttcgcctcgttgaaggatcttgtggatgaagtcaagtcagccgatctagtttctccaactctaataattattgggaaagtggtatccttgtcacccttctgggttgagtcatctgaacatgatgcactgaaagttcagagctcgtatgcaaatgaggcagatgacaacagattttcttggtttttagtgactggacaatacttgagaaatgcaagatcccagatatgggagcacaggttcgacctggtgtacacagaaacatctcaggaagcatggatcctgaatggcggatggtag

SEQ ID NO: 86775 - protein, 423 aa, Zea mays; identical to SEQ ID NO: 85440

SEQ ID NO: 86776 - DNA, 1464 bp, Ostreococcus tauri
  CDS (1)..(1464)
atgccgcgcgcgacgccgcgcatcgggttcgacgtcatcgcgcgcgcgtcgggatgcgtcgacgcgcgacgcgctcgacgcgcgcgcgcgtggcgtccgcgcgcgtccgccggcggcggcgacgacgacgccgcgcgcgcggacgacggcgacgacgtcgcggatgtcgtgcgcaccgcgcgcgcgggcgtgggtgggatcgaatgggcgacgacgtccacgcgggaagacgcgcgcgacggggcgacgacggcggcgcgcgtgtgcatcgtgggatgcgggccgggagacccgggtctgttaaccttgcgggcgtttcagttgatgcgtcgggcggacgtggtgttgtacgatagattggtgtcgaatgagatattaaacctggtgcgaacagaggcgaggatggtgtacgtcgggaagcgcgcgggatttcacacgcggacgcaagaggagatacacgcgctgttgtcggcgttcgccgagcgcggggcgctcattttgaggttaaagggcggcgatccgttggtattcggacgcggtggcgaagagtttgagtttctacgggagaagaatccggacgtgcgggtggaggtcgttccgggcatcaccgcggcgtcgggcgtggggagcgagctcgggattccgctcacgcatcgaggcgtcgcgacgtcggtgcgattgctcacgggtcatttacgagagggcgcgcgcgagcgcggcgaagacccggtggatttcgcggtgacgagcgcggatgcggacacgactttggtcgtctacatgggtctcggcacgcttcctcgattgagcgaaaaactcatcgagagcggtttccctcgcgacgcgcccgcggtggccgtcgagcgcgggaccacggttgacgaacgccgtgtgttcagctcgatagagcacctccccgaagccgcgcgcgagtgcgagttggtctccccgacgttgatcatcatcggcaagacgtgcgtcctgagtccgcactggccttacgccgcgggcgtccgcgtcggcgtcgacggcgtcccgcgttggatcgcgtccagcggcagcgtccgcgcccccgaggatctcaacgactggcgcgcgtggctcgacgtcgatcttacctgtacgcgtcacgaatcacccgcgaaaacgccaaccctcctcacacgtccgcgcgcgatggctgaggacgacgccgccgtgcgcgaaccgctcgatctcatacggctcgccctggacgagcgcgtgtacgtcaagctcaggggtgatcgcgaggccagagggcgcttacacgcgtacgatcaacacctgaatatgatcctcggtgaggtggaggagacgatcacgagcacggagacggacgaggagacgttcgaagagtttacgaagacgacgaagcgacgcgtcccgtacttgttcattcgaggcgacgcggtgaccctggtgtcgccgccgttgaggaattga

SEQ ID NO: 86777 - protein, 487 aa, Ostreococcus tauri
MPRATPRIGFDVIARASGCVDARRARRARAWRPRASAGGGDDDAARADDGDDVADVVRTARAGVGGIEWATTSTREDARDGATTAARVCIVGCGPGDPGLLTLRAFQLMRRADVVLYDRLVSNEILNLVRTEARMVYVGKRAGFHTRTQEEIHALLSAFAERGALILRLKGGDPLVFGRGGEEFEFLREKNPDVRVEVVPGITAASGVGSELGIPLTHRGVATSVRLLTGHLREGARERGEDPVDFAVTSADADTTLVVYMGLGTLPRLSEKLIESGFPRDAPAVAVERGTTVDERRVFSSIEHLPEAARECELVSPTLIIIGKTCVLSPHWPYAAGVRVGVDGVPRWIASSGSVRAPEDLNDWRAWLDVDLTCTRHESPAKTPTLLTRPRAMAEDDAAVREPLDLIRLALDERVYVKLRGDREARGRLHAYDQHLNMILGEVEETITSTETDEETFEEFTKTTKRRVPYLFIRGDAVTLVSPPLRN

SEQ ID NO: 86778 - DNA, 762 bp, Lactobacillus reuteri
  CDS (1)..(762): transl_table=11
atggcaattgtaagttttgtaggtgcaggtcctggtgaaacagacttaattacgttaaagggatataaattattatctgaggctgatgtagtaatttacgccggttcattaattaacacagacttactagattattgcaaagatggtgctgaaaagtatgatagtgccaaaatgaccttagacgatatcgttgatcgaatggaagaatcagtaaaaaacggtaaatcagtcgtacggctacaaactggtgatttttcaatttatgggtcaattcgtgaacaaattgaagaaatgaaaaaacgcggaataaaatatcaatgtgttcctggggtcagttcatttcttggtgcagcttcaagcatgggtgttgagtatacagtcccagaagttgcgcagagtgtcattattacaagaatggcgggacgtacgccggtaccagaaggcgaatcgcttaaatcattagctcagcaccaaacctcaatggtaattttcctttctgttcagggaattagaaaagtagttgaacaacttgaggaaggcggatacccatcagatacgccagctgcagttatttataaagcaacctggcctgatgaaaaagttgtgcgcggaacactagcagatatagctgaaaaggtccatgacgctgatattcgccggactgcattgattatggttggaaagttccttggggatgaatacaattactcacacctttatgatgcaggctttagtacaatgttccgtaaaaagagtaagtaa

SEQ ID NO: 86779 - protein, 253 aa, Lactobacillus reuteri
MAIVSFVGAGPGETDLITLKGYKLLSEADVVIYAGSLINTDLLDYCKDGAEKYDSAKMTLDDIVDRMEESVKNGKSVVRLQTGDFSIYGSIREQIEEMKKRGIKYQCVPGVSSFLGAASSMGVEYTVPEVAQSVIITRMAGRTPVPEGESLKSLAQHQTSMVIFLSVQGIRKVVEQLEEGGYPSDTPAAVIYKATWPDEKVVRGTLADIAEKVHDADIRRTALIMVGKFLGDEYNYSHLYDAGFSTMFRKKSK

SEQ ID NO: 86780 - DNA, 846 bp, Medicago truncatula; identical to SEQ ID NO: 85445
  CDS (1)..(846)

SEQ ID NO: 86781 - protein, 281 aa, Medicago truncatula; identical to SEQ ID NO: 85446

SEQ ID NO: 86782 - DNA, 774 bp, Escherichia blattae
  CDS (1)..(774): transl_table=11
atgacgcacgctattgatcgtcactgtgtctggtttgtgggggccggtcccggcgactgcgagcttatcaccgtaaaagggctgcgcctgctgcaacaggccgacgtggtgatttacgccggatcgctgattaacccgcaactgctggactactgtccggcacaggcccgctgccacgacagcgccgggctgcacctgcagcagattatcgatctgatgcgcgaaggcattgcggcgggcaagctggtggtgcgcctgcaaaccggcgatctctccctgtacgggtcgattcgcgaacagggggaggccctcagccagttgcagatcccctggcaggtggtgcccggggtgagcgcattccagggggccgccgcccagctggggctggagtacaccgtaccggaagtctcccagagcctgattatcacccgcatggaagggcgcacccctatgcctgcgcgggagtccctggcgggctttgccgcgcaccgcacctcaatggcgatttacctgtcagtgcagcggatcaacaaagttgccgaacagctgatcgccgggggctaccggccagaaaccccggtagccgtggtctacaaggccacctggccggaaagccagaccctgcgcggcacccttgcggatatcagcgagcaggtgcgggcggcggatatccgtaaaacggcccttatcctggtgggggacttcctgggtgatgaataccacaactcaaaactgtacgacgccgcattcagccatgaataccgcaaagcctga

SEQ ID NO: 86783 - protein, 257 aa, Escherichia blattae
MTHAIDRHCVWFVGAGPGDCELITVKGLRLLQQADVVIYAGSLINPQLLDYCPAQARCHDSAGLHLQQIIDLMREGIAAGKLVVRLQTGDLSLYGSIREQGEALSQLQIPWQVVPGVSAFQGAAAQLGLEYTVPEVSQSLIITRMEGRTPMPARESLAGFAAHRTSMAIYLSVQRINKVAEQLIAGGYRPETPVAVVYKATWPESQTLRGTLADISEQVRAADIRKTALILVGDFLGDEYHNSKLYDAAFSHEYRKA

SEQ ID NO: 86784 - DNA, 960 bp, Propionibacterium freudenreichii subsp
  CDS (1)..(960): transl_table=11
atgagcgatacccgctcgcacgagcccgaccccgctgccgggaacgaggcggccccgttgcgcggcaaggtcgtgtttgtgggtgcgggccccggtgccgctgacctgatcagcgtgcggggtgcccacgtcatcgcgcaggccgacatcatcatctgggcatccagcttggtgctgccgacgtggtggccgaccacaagccgggcgccgaaactggtcgattcggcggcactgtcgctggaggacttcgagccgctgctgacccgtgcccatgacgaggacctgctggttgcccgcgtgcacaccggcgatccttcgatctacggcgccaccgccgagcagcgcgacctgtgtcgcagcctcgacctggcgttcgagacggtgccgggcatctcggccttctccgcggccgccgcccggatgaacgtcgagttgacggtgcccgaggtgagccagtcgatcaccatcacgcgcctggagggcggccgtacgccgatgcccgagggggagaccatcgcctctttcgcggcccacggcgccaccatggccgtctacctgtcggcggcacgcaatcgtgcgctccaggaggcgctgatcgagggcggctatgcacccgcgactccgtgcatcatcgggttcgaggtcacatggcccggcgagatgatgatgcgctgccgcctcgacgagctgtccgacaccatgcgcgaacacaagctgtggaagcacaccatcgtgctcgtgggtccggcgctggccgagggccccattgccacgcgcagccacctgtaccaccccggattccgccacgaataccgcgacgccgagccgcaggccagcaaggagctgagggaacagggtgccctcggcatcaatgcggacagttccaaggccatcaaccaacacggcgccggcaacgacaccaccggggcacaccgatcgacagaaggcgagcaggcatga

SEQ ID NO: 86785 - protein, 319 aa, Propionibacterium freudenreichii subsp
MSDTRSHEPDPAAGNEAAPLRGKVVFVGAGPGAADLISVRGAHVIAQADIIIWASSLVLPTWWPTTSRAPKLVDSAALSLEDFEPLLTRAHDEDLLVARVHTGDPSIYGATAEQRDLCRSLDLAFETVPGISAFSAAAARMNVELTVPEVSQSITITRLEGGRTPMPEGETIASFAAHGATMAVYLSAARNRALQEALIEGGYAPATPCIIGFEVTWPGEMMMRCRLDELSDTMREHKLWKHTIVLVGPALAEGPIATRSHLYHPGFRHEYRDAEPQASKELREQGALGINADSSKAINQHGAGNDTTGAHRSTEGEQA

SEQ ID NO: 86786 - DNA, 1110 bp, Arabidopsis thaliana
  CDS (1)..(1110)
atggctcttgttcagcggattccaatttcctcctccagtattcggaattggcaacaagcgaggaccaatttgactcctatttgttgtttacattacaatactgcatcttcttcttcttcaccctttacagagaagcactctgtggagagataccaaagggatcaatggctgtacaaagcggttgaaccaacgccaccatcgactccatctccatcgccatttgaagatgaagtctttgttagggaaaacgacattgcatcgcagctgcctgagctgaagaagcttttggcagtgctgaaagagaagagagttaaaggatgcaaaggtggtgattgtggaccaggagatgtgtatcttgttgggacagggccaggagatcctgagcttttgactcttaaagctgtcagagttattcaaagtgccgatcttttgctttacgacaggcttgtctccaatgatgtcttggagttggttgctcctgatgctaaacttctttatgtcggcaaaactgctggttatcataccaaaactcaggaagagattcatgaactactcctaaattttgctgaagctggtgccactgttgtcaggcttaaaggtggagatcctctggtctttggacggggcggcgaagaaatggactttctgcaacagcaagggattcgagttcaagttataccagggataactgcggcgtcggggatagcagcagagttggggattccactaacacatcgaggtgttgcaactagtgtaaggtttctcactggtcattcaaggaaaggagggacagaccctctgtttgttgcagagaatgcagctgacccggatacaacacttgtcgtttatatgggtttgggaactttaccttctcttgcacaaaaactaatggaccatggtctcccttctgatacaccagctgttgcggttgaacgtggaaccactcctctacagcgtacagtttttgctgagcttaaagattttgcaactgagattcagtcagctggattggtgtcaccaacactcatcatcatagggaaagtcgttgagctctcacctttatggccacattgcacgaaagaatcctcctgccttgtagagacccggtag

SEQ ID NO: 86787 - protein, 369 aa, Arabidopsis thaliana
MALVQRIPISSSSIRNWQQARTNLTPICCLHYNTASSSSSPFTEKHSVERYQRDQWLYKAVEPTPPSTPSPSPFEDEVFVRENDIASQLPELKKLLAVLKEKRVKGCKGGDCGPGDVYLVGTGPGDPELLTLKAVRVIQSADLLLYDRLVSNDVLELVAPDAKLLYVGKTAGYHTKTQEEIHELLLNFAEAGATVVRLKGGDPLVFGRGGEEMDFLQQQGIRVQVIPGITAASGIAAELGIPLTHRGVATSVRFLTGHSRKGGTDPLFVAENAADPDTTLVVYMGLGTLPSLAQKLMDHGLPSDTPAVAVERGTTPLQRTVFAELKDFATEIQSAGLVSPTLIIIGKVVELSPLWPHCTKESSCLVETR

SEQ ID NO: 86788 - DNA, 1437 bp, Rhizobium leguminosarum bv; identical to SEQ ID NO: 85467
  CDS (1)..(1437): transl_table=11

SEQ ID NO: 86789 - protein, 478 aa, Rhizobium leguminosarum bv; identical to SEQ ID NO: 85468

SEQ ID NO: 86790 - DNA, 777 bp, Bacillus megaterium
  CDS (1)..(777): transl_table=11
atgaagttatacataatcggagctggacccggagatccagatttaattaccgtaaaaggcttaaaattacttcagcaagcagatgttgttttatacgctgactcactagtaagtcaagatctaattgctaagtctaaaccaggtgctgaagtgttaaaaacagcgggtatgcatttagaagaaatggtcggtactatgcttgatcgcatgcgtgaagggaaaatggtcgtgagagtacatacgggagatccggctatgtacggagccattatggaacaaatggtgcttttaaaaagagaaggtgttgatattgaaatcgttccgggcgtcacgtccgtattcgctgctgctgcagcggctgaagcagaattaaccattccggatttgactcagaccgttattttaactcgggccgaaggaagaacgcctgtacctgagtttgaaaaattaacggatttagcaaaacataaatgtacgattgcgttatttttaagcgcgacgctcacaaaaaaagtaatgaaagaatttataaatgccggttggagtgaggatacgccggttgtagtagtctataaagcaacgtggcctgatgaaaaaattgttcgcacgacggtaaaagacctagatgatgctatgcgaacaaatggcattcgtaagcaggctatgattttggcgggctgggcacttgacccccatattcatgacaaagattatcgttcaaaactctacgataaaacatttacccacggctttcgcaagggagtgaaatcggaatga

SEQ ID NO: 86791 - protein, 258 aa, Bacillus megaterium
MKLYIIGAGPGDPDLITVKGLKLLQQADVVLYADSLVSQDLIAKSKPGAEVLKTAGMHLEEMVGTMLDRMREGKMVVRVHTGDPAMYGAIMEQMVLLKREGVDIEIVPGVTSVFAAAAAAEAELTIPDLTQTVILTRAEGRTPVPEFEKLTDLAKHKCTIALFLSATLTKKVMKEFINAGWSEDTPVVVVYKATWPDEKIVRTTVKDLDDAMRTNGIRKQAMILAGWALDPHIHDKDYRSKLYDKTFTHGFRKGVKSE

SEQ ID NO: 86792 - DNA, 780 bp, Methanococcus jannaschii
  CDS (1)..(780): transl_table=11
atggataataatagaaaagttataattgttggagcaggtcctggagaccctgagctaataacaatcaaaggtaaaaaagctatagaagaggcggatgtaattatctatgctggttcattagtcaatgaaaagctcttagagtataacaaaaaaaatgctgaaatttacaacagtgcaaacatgaacttagaggaaataattgatgtgatggttaaagcagttaatcaaggaaagaaagtcgttagattacacacaggagacccttctatttacggagctataaaggagcagattgatgagctatctaaatatggaatagatgtagagataattccaggagttagctccttatttgcagcaactgcttcattaaaagttgagctaactctcccagaggtttctcagacagttattatcacaagaccagagggaaggactccaatgccagaaaaagaaaagttgagggatttagctaagcatcaatcaacaatggctatttttttaggcgtttcaatgattgacaaggttgttaaagagctaattgaaggtggctatagagaagaaactccagtggctgttgtttatcacgcttcatgggatgatgaaaaaatagttagagggactttaaaggatatagctgaaaaggtaaaaaaagagggaattaaaaaaactgcactaataattgttggagaggttttaaatccaaagtattatgcatactctaaactctacgataagaattttgagcatgaatatagaaaaagccataaaaaattttga

SEQ ID NO: 86793 - protein, 259 aa, Methanococcus jannaschii
MDNNRKVIIVGAGPGDPELITIKGKKAIEEADVIIYAGSLVNEKLLEYNKKNAEIYNSANMNLEEIIDVMVKAVNQGKKVVRLHTGDPSIYGAIKEQIDELSKYGIDVEIIPGVSSLFAATASLKVELTLPEVSQTVIITRPEGRTPMPEKEKLRDLAKHQSTMAIFLGVSMIDKVVKELIEGGYREETPVAVVYHASWDDEKIVRGTLKDIAEKVKKEGIKKTALIIVGEVLNPKYYAYSKLYDKNFEHEYRKSHKKF

SEQ ID NO: 86794 - DNA, 756 bp, Mycobacterium tuberculosis
  CDS (1)..(756): transl_table=11
atgacggtctatttcatcggagcgggccccggcgccgccgacctaatcaccgtccgcggccaacggctcctgcaacgatgcccggtgtgcctgtatgcgggttcgatcatgcccgacgacctgttggcgcagtgtccgcccggcgcgacgattgtcgacaccggtccgctgaccctcgaacaaatcgtgcgcaaacttgccgacgccgacgccgacggccgcgacgttgcccggctgcattccggcgacccgtcgctgtacagcgcgctggccgaacagtgccgcgaactcgacgcgctgggcatcggctacgaaatcgtgccgggcgtaccggcttttgccgcagccgcggcggcgctaaagcgcgaactcaccgtgccgggcgtggcgcagacggtgacgctcacccgggtggcgacgctgtccacacccataccgcccggtgaggacctggccgcgctcgcccgatcccgcgccactctggtcttgcacctggccgcagcccagatcgacgccatcgttccgcgactgctagacggtggttaccgacccgaaacgccggttgcggtggtggctttcgcgagttggccgcaacagcggacgctacgcggcacgttggccgatatcgccgcgcggatgcacgatgccaagatcaccaggaccgccgtgatcgttgttggcgacgtgctgaccgctgagggctttaccgacagctacctatattcggtggcacggcacggtcggtatgcacagtga

SEQ ID NO: 86795 - protein, 251 aa, Mycobacterium tuberculosis
MTVYFIGAGPGAADLITVRGQRLLQRCPVCLYAGSIMPDDLLAQCPPGATIVDTGPLTLEQIVRKLADADADGRDVARLHSGDPSLYSALAEQCRELDALGIGYEIVPGVPAFAAAAAALKRELTVPGVAQTVTLTRVATLSTPIPPGEDLAALARSRATLVLHLAAAQIDAIVPRLLDGGYRPETPVAVVAFASWPQQRTLRGTLADIAARMHDAKITRTAVIVVGDVLTAEGFTDSYLYSVARHGRYAQ

SEQ ID NO: 86796 - DNA, 753 bp, Pseudomonas aeruginosa
  CDS (1)..(753): transl_table=11
atgaccgtctatttcatcggcgccggtcccggcgaccctgacctgatcaccgtcaaggggcagcgcctgatccgccagtgcccggtgatcctctacgccggctcgctggttccgcaagcgctgctcgaggggcaccaggccggccaggtggtgaacaccgccgagctggacctcgaacagatcgtcgagctactcgcgcaagcccatcgccgcggcctcgacgtagcccgcgtgcattccggcgatccctccctgtacggcgccatcggcgagcagatccgccacctgcgcgaactcggcatcccctatgagatcgtccccggggtcaccgccaccgccgcctgcgccgccctgctcggctgcgagctgaccctgcccgaagtgtcccagacgctgatcctgacccgctacgccgcacgcacgaagatgccggaaggcgagagcctgggcgacctggcgcggcaccgggcgaccctggcgatccacctgggcgtcgcccacctggcgaagatcgtcgaggaactgctgccgcactacggcgccgactgcccggtcgcggtgatccaccgggccagttggcccgaccaggaacaggttcgcggcaccctcggcgacatcctgcccaaggtcgccgccaggaatttccgccgcaccgcgctgatcctggtcggcgaggtgctggccgccgaaggcttcgccgactcttcgctgtaccgcgccgagcatcgacatctctatcgacccggcgaatga

SEQ ID NO: 86797 - protein, 250 aa, Pseudomonas aeruginosa
MTVYFIGAGPGDPDLITVKGQRLIRQCPVILYAGSLVPQALLEGHQAGQVVNTAELDLEQIVELLAQAHRRGLDVARVHSGDPSLYGAIGEQIRHLRELGIPYEIVPGVTATAACAALLGCELTLPEVSQTLILTRYAARTKMPEGESLGDLARHRATLAIHLGVAHLAKIVEELLPHYGADCPVAVIHRASWPDQEQVRGTLGDILPKVAARNFRRTALILVGEVLAAEGFADSSLYRAEHRHLYRPGE

SEQ ID NO: 86798 - DNA, 762 bp, Pseudomonas denitrificans
  CDS (1)..(762): transl_table=11
atgacggtacatttcatcggcgccggcccgggagccgcagacctgatcacggtgcgtggtcgcgacctgatcgggcgctgcccggtctgcctttacgccggctcgatcgtctcgccggagctgctgcgatattgcccgccgggcgcccgcattgtcgatacggcgccgatgtccctcgacgagatcgaggcggagtatgtgaaggccgaagccgaagggctcgacgtggcgcggcttcattcgggcgacctttcggtctggagtgctgtggccgaacagatccgccggctcgagaagcatggcatcgcctatacgatgacgccgggcgttccttcctttgcggcggcggcttcagcgctcggtcgcgaattgaccattccggccgtggcccagagcctggtgctgacccgcgtttcgggccgcgcctcgccgatgccgaactcagaaacgctttccgctttcggcgctacgggatcgacgctggcaatccaccttgcgatccatgcgcttcagcaggtggtcgaggaactgacgccgctctacggtgccgactgcccggtcgccatcgtcgtcaaggcctcctggccggacgaacgcgtggtgcgcggcacgctcggtgacatcgccgccaaggtggcggaagagccgatcgagcgcacggcgctgatcttcgtcggtccggggctcgaagcctccgatttccgtgaaagctcgctctacgatcccgcctatcagcggcgcttcagagggcgcggcgaatag

SEQ ID NO: 86799 - protein, 253 aa, Pseudomonas denitrificans
MTVHFIGAGPGAADLITVRGRDLIGRCPVCLYAGSIVSPELLRYCPPGARIVDTAPMSLDEIEAEYVKAEAEGLDVARLHSGDLSVWSAVAEQIRRLEKHGIAYTMTPGVPSFAAAASALGRELTIPAVAQSLVLTRVSGRASPMPNSETLSAFGATGSTLAIHLAIHALQQVVEELTPLYGADCPVAIVVKASWPDERVVRGTLGDIAAKVAEEPIERTALIFVGPGLEASDFRESSLYDPAYQRRFRGRGE

SEQ ID NO: 86800 - DNA, 786 bp, Rhodobacter capsulatus
  CDS (1)..(786): transl_table=11
atgacggtgcatttcatcggcgcggggccgggggcggcggatctgatcacgatccgcggccgcgatctgatcgcgtcctgtccggtctgcctttacgccggatcgctggtgcccgaagcgctgctggcccattgcccgcccggcgcgaagatcgtcaacaccgcgccgatgagccttgatgcgatcatcgacacgatcgccgaggcccatgccgcgggccaggatgtcgcccggctgcattcgggggatctgtcgatctggtcggcgatgggcgagcagctgcgccgcctgcgcgccctgaacattccctatgatgtgacgcccggtgtgccgtcctttgccgccgccgccgcgacccttggggccgagctgacgcttccgggcgtggcgcaatcggtcattctgacccgcacctcggggcgggcctcggccatgcccgcgggcgagacgctggagaatttcgcccgcaccggggcggttctggccattcacctctccgtgcatgtgcttgacgaggttgtgcaaaaactggtgccgcattacggcgaagattgtccggtcgccatcgtctggcgcgcaagctggcccgatcagcgcgtcgtccgggcgacgctggccacgctgcagaccagccttggcgccgagctggagcgcacggcgctgatcctggtcggccggtcgctggcgaccgaggatttcgacgaaagccgtctttacgcgggcgattacgaccgccgctaccggccgcttggcacgcatccgcgctttccggagggcagcgaatga

SEQ ID NO: 86801 - protein, 261 aa, Rhodobacter capsulatus
MTVHFIGAGPGAADLITIRGRDLIASCPVCLYAGSLVPEALLAHCPPGAKIVNTAPMSLDAIIDTIAEAHAAGQDVARLHSGDLSIWSAMGEQLRRLRALNIPYDVTPGVPSFAAAAATLGAELTLPGVAQSVILTRTSGRASAMPAGETLENFARTGAVLAIHLSVHVLDEVVQKLVPHYGEDCPVAIVWRASWPDQRVVRATLATLQTSLGAELERTALILVGRSLATEDFDESRLYAGDYDRRYRPLGTHPRFPEGSE

SEQ ID NO: 86802 - DNA, 750 bp, Rhodococcus erythropolis; identical to SEQ ID NO: 85469
  CDS (1)..(750): transl_table=11

SEQ ID NO: 86803 - protein, 249 aa, Rhodococcus erythropolis; identical to SEQ ID NO: 85470

SEQ ID NO: 86804 - DNA, 1140 bp, Zea mays; identical to SEQ ID NO: 85495
  CDS (1)..(1140)

SEQ ID NO: 86805 - protein, 379 aa, Zea mays; identical to SEQ ID NO: 85496

SEQ ID NO: 86806 - DNA, 1116 bp, Brassica napus; identical to SEQ ID NO: 85497
  CDS (1)..(1116)

SEQ ID NO: 86807 - protein, 371 aa, Brassica napus; identical to SEQ ID NO: 85498

SEQ ID NO: 86808 - DNA, 1107 bp, Brassica napus; identical to SEQ ID NO: 85499
  CDS (1)..(1107)

SEQ ID NO: 86809 - protein, 368 aa, Brassica napus; identical to SEQ ID NO: 85500

SEQ ID NO: 86810 - DNA, 1140 bp, Zea mays; identical to SEQ ID NO: 85501
  CDS (1)..(1140)

SEQ ID NO: 86811 - protein, 379 aa, Zea mays; identical to SEQ ID NO: 85502

SEQ ID NO: 86812 - DNA, 1140 bp, Zea mays; identical to SEQ ID NO: 85503
  CDS (1)..(1140)

SEQ ID NO: 86813 - protein, 379 aa, Zea mays; identical to SEQ ID NO: 85504

SEQ ID NO: 86814 - DNA, 20 bp, Artificial sequence
  primer
atggattcacaaaactcttc

SEQ ID NO: 86815 - DNA, 20 bp, Artificial sequence
  primer
ttacaataggggacggactg

SEQ ID NO: 86816 - protein, 305 aa, Artificial sequence
  consensus sequence
  Variant (2)..(4): Xaa in position 2 to 4 is any amino acid
  Variant (10)..(12): Xaa in position 10 to 12 is any amino acid
  Variant (14)..(14): Xaa in position 14 is any amino acid
  Variant (16)..(32): Xaa in position 16 to 32 is any amino acid
  Variant (36)..(54): Xaa in position 36 to 54 is any amino acid
  Variant (55)..(62): Xaa in position 55 to 62 is any or no amino acid
  Variant (64)..(74): Xaa in position 64 to 74 is any amino acid
  Variant (75)..(76): Xaa in position 75 to 76 is any or no amino acid
  Variant (78)..(79): Xaa in position 78 to 79 is any amino acid
  Variant (81)..(81): Xaa in position 81 is any amino acid
  Variant (83)..(85): Xaa in position 83 to 85 is any amino acid
  Variant (88)..(95): Xaa in position 88 to 95 is any amino acid
  Variant (98)..(100): Xaa in position 98 to 100 is any amino acid
  Variant (102)..(105): Xaa in position 102 to 105 is any amino acid
  Variant (106)..(107): Xaa in position 106 to 107 is any or no amino acid
  Variant (109)..(113): Xaa in position 109 to 113 is any amino acid
  Variant (116)..(120): Xaa in position 116 to 120 is any amino acid
  Variant (122)..(122): Xaa in position 122 is any amino acid
  Variant (125)..(128): Xaa in position 125 to 128 is any amino acid
  Variant (132)..(132): Xaa in position 132 is any amino acid
  Variant (134)..(135): Xaa in position 134 to 135 is any amino acid
  Variant (136)..(136): Xaa in position 136 is any or no amino acid
  Variant (138)..(142): Xaa in position 138 to 142 is any amino acid
  Variant (144)..(148): Xaa in position 144 to 148 is any amino acid
  Variant (149)..(151): Xaa in position 149 to 151 is any or no amino acid
  Variant (153)..(154): Xaa in position 153 to 154 is any amino acid
  Variant (155)..(158): Xaa in position 155 to 158 is any or no amino acid
  Variant (160)..(163): Xaa in position 160 to 163 is any amino acid
  Variant (164)..(164): Xaa in position 164 is any or no amino acid
  Variant (166)..(174): Xaa in position 166 to 174 is any amino acid
  Variant (176)..(186): Xaa in position 176 to 186 is any amino acid
  Variant (188)..(193): Xaa in position 188 to 193 is any amino acid
  Variant (194)..(196): Xaa in position 194 to 196 is any or no amino acid
  Variant (198)..(199): Xaa in position 198 to 199 is any amino acid
  Variant (200)..(205): Xaa in position 200 to 205 is any or no amino acid
  Variant (207)..(210): Xaa in position 207 to 210 is any amino acid
  Variant (211)..(216): Xaa in position 211 to 216 is any or no amino acid
  Variant (218)..(247): Xaa in position 218 to 247 is any amino acid
  Variant (248)..(294): Xaa in position 248 to 294 is any or no amino acid
  Variant (297)..(302): Xaa in position 297 to 302 is any amino acid
  Variant (303)..(304): Xaa in position 303 to 304 is any or no amino acid
VXXXGAGPGXXXLXTXXXXXXXXXXXXXXXXXSLVXXXXXXXXXXXXXXXXXXXXXXXXXXXLXXXXXXXXXXXXXGXXVXRXXXGDXXXXXXXXEQXXXLXXXXXXIXXXXXPGXXXXXAXAAXXXXELTXPXXXQXXXXXRXXXXXXXXPXXXXXXEXXXXXAXXXXXXXXXLXXXXXXXXXXXLXXXXXXXXXPXXXXXXXXWXXXXXXXXXXLXXXXXXXXXXXXXXXXXXXXXXXXXXXXXXXXXXXXXXXXXXXXXXXXXXXXXXXXXXXXXXXXXXXXXXXXXXXXXLYXXXXXXXXR

SEQ ID NO: 86817 - protein, 28 aa, Artificial sequence
  protein pattern
  Variant (6)..(7): Xaa in position 6 to 7 is any or no amino acid
  Variant (9)..(10): Xaa in position 9 to 10 is any or no amino acid
  Variant (12)..(12): Xaa in position 12 is Ile, Leu, Met or Val
  Variant (14)..(14): Xaa in position 14 is any amino acid
  Variant (15)..(15): Xaa in position 15 is Lys or Arg
  Variant (16)..(16): Xaa in position 16 is Ala or Gly
  Variant (17)..(19): Xaa in position 17 to 19 is any amino acid
  Variant (20)..(20): Xaa in position 20 is Ile, Leu, Met or Val
  Variant (21)..(22): Xaa in position 21 to 22 is any amino acid
  Variant (23)..(23): Xaa in position 23 is Ala, Cys, Ser or Val
  Variant (24)..(26): Xaa in position 24 to 26 is any amino acid
  Variant (27)..(27): Xaa in position 27 is Phe, Ile, Leu, Met or Val
  Variant (28)..(28): Xaa in position 28 is Phe, His, Trp or Tyr
GAGPGXXDXXLXTXXXXXXXXXXXXXXX

SEQ ID NO: 86818 - protein, 27 aa, Artificial sequence
  protein pattern
  Variant (2)..(2): Xaa in position 2 is any or no amino acid
  Variant (4)..(4): Xaa in position 4 is Ile, Leu or Val
  Variant (5)..(5): Xaa in position 5 is any amino acid
  Variant (6)..(6): Xaa in position 6 is Cys, Asp, Ser or Thr
  Variant (9)..(10): Xaa in position 9 to 10 is any amino acid
  Variant (11)..(11): Xaa in position 11 is Phe, Ile, Leu, Met or Val
  Variant (12)..(12): Xaa in position 12 is Phe, Trp or Tyr
  Variant (13)..(13): Xaa in position 13 is Gly or Ser
  Variant (14)..(14): Xaa in position 14 is Ala, Gly, Asn, Ser or Thr
  Variant (15)..(16): Xaa in position 15 to 16 is any amino acid
  Variant (19)..(26): Xaa in position 19 to 26 is any amino acid
  Variant (27)..(27): Xaa in position 27 is Phe, Ile, Leu or Val
VXRXXXGDXXXXXXXXEQXXXXXXXXX

SEQ ID NO: 86819 - protein, 11 aa, Artificial sequence
  protein pattern
  Variant (3)..(3): Xaa in position 3 is Ile or Val
  Variant (4)..(4): Xaa in position 4 is Pro, Ser or Thr
  Variant (5)..(5): Xaa in position 5 is Ala, Ser or Val
  Variant (6)..(7): Xaa in position 6 to 7 is any amino acid
  Variant (8)..(8): Xaa in position 8 is Ala, Asp, Gly, Ser or Val
  Variant (9)..(9): Xaa in position 9 is any amino acid
PGXXXXXXXAA

SEQ ID NO: 86820 - DNA, 1365 bp, Synechocystis sp.
  CDS (1)..(1365): transl_table=11
atggcgatcgccactattaatccggccacgggccaaacggtgcagactttcatcgcccatagtcaggtggaagttaatgccaagttggatttggcccaggaaacattccaaagttttcgccatttaccttttgctcaacgggggcaatggttaagaaaggcggcggatatcctcgaacaacggcgggatgaatgggccgccctgatgaccctggaaatgggcaaatcgatcccacaggcgatcgccgaagtgaataaatgtgccctggtctgtcgtttttatgcggacaaagccgaggaatacttagccgatgaagtggtgaccaccgatgctagccagagtttcattgcttaccagcccctgggggtaattttggcggtgatgccctggaatttccccttttggcaggtgtttcgttttgcggccccagctctgatggccggtaatgtgggtctgctcaaacacgcttccaatgtgccccaatgtgcgttggcgatcgccgaaattttccaaaccgccgggtttcccgaaggagcgtttcaaaccctattgattggaggcaaagtggccagtgagttgatggccgacgaccgcatccaagcaggaactttaaccggtagtgaacccgctggagctagtttcgccagcgccgccgcagggcaaattaaaaaaaccgtgttggaattgggcggttccgatcccttcatcgtcctcgaagatgcggatttagaccaagccctaaaagtagctgtgccagcccggatgcaaaacaacggccaatcttgcattgccgctaaaagattcattgtccaagccagtgttgctgaggaatttttccaacgtttaaccaaagcattccaagctcttaaagtaggagatcccagcctctcaaccaccgatattgggcccctagctacccctgatattttggcggacattgttgcgcaagtagaacaaaccattgctgctggagcccactgtcgttgtggcggccaagccctagaccaaccgggaaattactatcctcccaccctgctcaccgacgttccccccaacgcccctacctaccgtcaggaattttttggccccgtggccctcggatttactgtcgataatttagaggaggcgatcgccttggccaatgacattccctttgggttgggggccagtgcatggacaactaacccggaaaatcaacaaaaactaatccggggcatagaagccggggctgtattcattaacggtatgactaaatctgacccccgcattccctttggaggcatcaagcgctctggctttgggcgggaacttggccgcatgggcattttagaatttgtcaatgctaaaaccgtttggattgcttag

SEQ ID NO: 86821 - protein, 454 aa, Synechocystis sp.
MAIATINPATGQTVQTFIAHSQVEVNAKLDLAQETFQSFRHLPFAQRGQWLRKAADILEQRRDEWAALMTLEMGKSIPQAIAEVNKCALVCRFYADKAEEYLADEVVTTDASQSFIAYQPLGVILAVMPWNFPFWQVFRFAAPALMAGNVGLLKHASNVPQCALAIAEIFQTAGFPEGAFQTLLIGGKVASELMADDRIQAGTLTGSEPAGASFASAAAGQIKKTVLELGGSDPFIVLEDADLDQALKVAVPARMQNNGQSCIAAKRFIVQASVAEEFFQRLTKAFQALKVGDPSLSTTDIGPLATPDILADIVAQVEQTIAAGAHCRCGGQALDQPGNYYPPTLLTDVPPNAPTYRQEFFGPVALGFTVDNLEEAIALANDIPFGLGASAWTTNPENQQKLIRGIEAGAVFINGMTKSDPRIPFGGIKRSGFGRELGRMGILEFVNAKTVWIA

SEQ ID NO: 86822 - DNA, 1675 bp, Oryza sativa; identical to SEQ ID NO: 37811
  CDS (82)..(1575)

SEQ ID NO: 86823 - protein, 497 aa, Oryza sativa; identical to SEQ ID NO: 37812

SEQ ID NO: 86824 - DNA, 1853 bp, Glycine max
  CDS (82)..(1593)
tatttaggataaagaaggagagactggactagctgagttagggtgagttgcaggcagtgtcatctctcctttgacgacaagatgagcatcccaattccccatcggcagttattcatagacggagactggaaagtccccgtcctcaagaatcggattcccatcatcaacccttccacccaacacatcatcggggatatcccagcagctactaaggaagacgttgatctcgctgtcgctgccgccaaagctgccctctcccgcaacaagggcgccgattgggcctccgcttccggctccgttcgggctcgctacctccgcgccatcgctgccaagatcaccgagaaaaagcctgaactagcaaaactcgaagctattgactgtggaaaaccgctcgatgaagccgcctgggacatcgacgatgttgctggttgctttgagttctatgctgaccttgctgaaaaattggacgcacagcaaaaggctcatgtgtctcttcccatggacacattcaagagttatgttcttaaggagccgattggagtcgttgctttaataactccttggaattatcctctgttgatggctacgtggaaggttgctcctgctctggcggccggctgtgctgcaatattgaagccctctgagttggcatctgtgacatgcttggagctggctgaaatttgcaaagaagtcgggcttcctcctggcgtgttgaacattctcactggattaggacctgaagcgggtgctcctttagcagctcatcccgatgtagacaagattgcctttactggaagctctgcaactgggagcaaaattatgacagctgcagctcagctgatcaagcctgtttcactagagcttggtgggaaaagcccaatcattgtttttgaggatgttgaccttgacaaggctgctgaatggaccatatttggttgcttctggacaaatggtcagatatgcagtgcaacttcccgccttattgtacatgaaagtatagcaacagaatttttgaataggattgtgaaatgggtcaaaaacatcaaaatttctgatcccttggaagaaggttgcagactaggccctattgttagtgaaggacagtatgaaaagatattgaagtttatctcaaatgctaagagtgagggtgcaaccattttgactggtgggtctcgcccagagcatctaaagaagggattctttgttgaaccaactgtcataactgatgtaactacctccatgcaaatttggagagaagaagtatttggaccagttctctgtgtaaaaacatttagcactgaggaagaagctattgatctagcaaatgacactgtatatggcttgggttctgctgtaatatcaaatgatctagaaagatgtgagcgcattactaaggcttttaaggctggaattgtgtggattaattgctctcaaccatgcttcactcaagccccatggggaggcattaaacgcagtggttttggtcgtgaattaggagaatggggacttgataattacttgagtgtgaagcaagtgacccaatatatctctgatgaaccgtggggctggtaccagtctccttcaaggctgtgataggtatccaaaagctaacattaataagttgtgggtaatatcaaattatgattatgaccccaaagtcgagaagacatgatgtctatgtataacattgaaatggtttgcactttgcagtcaagattatgttggtagtgtttttatttgatttgtttatggttggctccaccacatgcttctaatgtttgaatttcatcatggaagacttccatcattacattatattgaagcatttcttgcgctcaaaaaaaaaaaaaaaa

SEQ ID NO: 86825 - protein, 503 aa, Glycine max; identical to SEQ ID NO: 38168

SEQ ID NO: 86826 - DNA, 1530 bp, Drosophila melanogaster; identical to SEQ ID NO: 37873
  CDS (1)..(1530)

SEQ ID NO: 86827 - protein, 509 aa, Drosophila melanogaster; identical to SEQ ID NO: 37874

SEQ ID NO: 86828 - DNA, 1467 bp, Bombyx mori; identical to SEQ ID NO: 37875
  CDS (1)..(1467)

SEQ ID NO: 86829 - protein, 488 aa, Bombyx mori; identical to SEQ ID NO: 37876

SEQ ID NO: 86830 - DNA, 1524 bp, Oryza sativa (japonica cultivar-group); identical to SEQ ID NO: 37879
  CDS (1)..(1524)

SEQ ID NO: 86831 - protein, 507 aa, Oryza sativa (japonica cultivar-group); identical to SEQ ID NO: 37880

SEQ ID NO: 86832 - DNA, 1662 bp, Oryza sativa (japonica cultivar-group); identical to SEQ ID NO: 38089
  CDS (1)..(1662)

SEQ ID NO: 86833 - protein, 553 aa, Oryza sativa (japonica cultivar-group); identical to SEQ ID NO: 38090

SEQ ID NO: 86834 - DNA, 1512 bp, Oryza sativa (japonica cultivar-group); identical to SEQ ID NO: 38101
  CDS (1)..(1512)

SEQ ID NO: 86835 - protein, 503 aa, Oryza sativa (japonica cultivar-group); identical to SEQ ID NO: 38102

SEQ ID NO: 86836 - DNA, 1494 bp, Mesorhizobium loti MAFF303099
  CDS (1)..(1494): transl_table=11
atgtccgcgcatttcgcccgctcgcatcgccatgaggcgctcgaccgcctcgccgaccgccgtctgctgcgcgaactcgcctatgtcgacggccactggacggcgagcgaggccgccgaaagctttgaggtcacggatccggcgacgggaagcacggtcgccttcgtcgcggcgctggatgcacggcaaacgacacaagcaatcgacgccgccgcgctcgcttttccggcttggcggtcgctgctgccgcaggagcggtcaagaatcctgcgaaaatggttcgagctgatcatcaccgcgaaagacgacctcgcgttgctgatgaccctggaacagggcaagcccttgcaggaatcgctcggcgaaatcgactatgccgcctctttcgtcgagtggtatgcggaggaagccaagcgcctcaacgccgagagcgtcaccagccatctggcgaacgcagaaatgatggtgcggcgcgagccgctcggcgtcgtcggcatcgtcacgccgtggaatttcccctcggccatgctgacccgcaaggcggccgccgcccttgccgccggctgcaccattgtcgcgcatccgtcctcggaaacgccgctgtcggcgctggcattggccgagcttggcgagcgcgccggactgccggccggtgtcttcaacatcgtcaccggcaaggccgcgacgatcgtcgggcggatgtgcgaagacacacgcgtgcgcgccatgagttttacgggctcgaccgagatcggcaggctgattgccgcgcagagcgcgccgacgatgaagcggctggtgatggagcttggcggccacgctccgctcatcgtgtttgccgatgcggatctcgacaaggcggtgagcatcgccatcgacgccaaattcgccacatcgggccaggattgcctcgccgccaaccgcatctacgtccagcggccgatccacgatcgcttctgcgctgccttcgccaagcggatcgaggcgctgcggaccggcaatggccttgacgacatgaccgacatcgggccgctgctgcatgagcgcgccgtccagaaagtcgaggagcaggtcgccgatgcgctcgcccatggcgcgcgctgccttgccggcggcaagcgacaccaggccgggccgctgttctaccagccgacgctgctggccgacgtttccgacgcggcgctgatcatgcgcgaagagacttttgggccggtcgccgcggtgacgcctttcgacagcgaggacgaggtgatcgcgcgcgccaatgccacggaatatggcctggttgcctatgtcgtgacggataacggtgcccgccagcagcgcatgggccgcgcgctcgactacggcatggtcgccatcaaccgggtgaagatcaccggcgctccgatcccgttcggcggtgtcaagcagtccggcatcggccgcgagggctcgcgccacgggctcgaagcgttcaccgatctcaagtatctctgcctggacgtcgcataa

SEQ ID NO: 86837 - protein, 497 aa, Mesorhizobium loti MAFF303099
MSAHFARSHRHEALDRLADRRLLRELAYVDGHWTASEAAESFEVTDPATGSTVAFVAALDARQTTQAIDAAALAFPAWRSLLPQERSRILRKWFELIITAKDDLALLMTLEQGKPLQESLGEIDYAASFVEWYAEEAKRLNAESVTSHLANAEMMVRREPLGVVGIVTPWNFPSAMLTRKAAAALAAGCTIVAHPSSETPLSALALAELGERAGLPAGVFNIVTGKAATIVGRMCEDTRVRAMSFTGSTEIGRLIAAQSAPTMKRLVMELGGHAPLIVFADADLDKAVSIAIDAKFATSGQDCLAANRIYVQRPIHDRFCAAFAKRIEALRTGNGLDDMTDIGPLLHERAVQKVEEQVADALAHGARCLAGGKRHQAGPLFYQPTLLADVSDAALIMREETFGPVAAVTPFDSEDEVIARANATEYGLVAYVVTDNGARQQRMGRALDYGMVAINRVKITGAPIPFGGVKQSGIGREGSRHGLEAFTDLKYLCLDVA

SEQ ID NO: 86838 - DNA, 1311 bp, Thermoplasma volcanium GSS1
  CDS (1)..(1311): transl_table=11
atgattaagaccttgaatccatatacgggagaggtcatagccagttacaatgaggaagacaaagaacaagtgattaggaaaataaaggatctaagagagtaccaggctaagtggagaaagaatattggtgaacgcatagaggtaataaaggcggcaaaaaagaattttgaaactcaaatagacgatctttcaaagcttatgagcctggaaatgggaaaaccaatttcccagagcatctccgaggtaaagaaatctatttggctaatggactatgtaattgagaacgcagaaaagttcctggcgatcgaagatgtaaagaccgaagcacgaaagagttatgtgagattcgatccaattggagttatcctaattataatgccttggaatttccctgtctggcaggttatgagggctgcaattcctgccttggcagctggaaatacagtcatactcaaacatgcctctatagtttctggaacaagccttaaaattcaagatctgcttaatacagatgcatttagatccgttataacgtctggtgaaactgcttcttcggtaataccagaagtagatggagtgtcttttactggatctacttcgacaggctctaggatagcagagattgcggggaaaaatataaagaagtttgttatggagcttggtggttcagacccatttatagttttggacgattataatttagaagatactgtaaaaaatgctgtttttggtaggcttcagaataatggccaaagttgcatagcttccaagcgtttcatagtaaacagaaagatcggggagaaatttgtggaaatgctaaaggatgaattttcaagggtaaaaataggagatccgctgaactctgatacattcctagggccgctctctagccaggatcaaaaggaaaccgtactaaggcaggtatcggatctcaaaggaaaatcggaattggtaatcggcggagattatcagggtaacatagtaatgccaacaataataaagactgacgtaaggtataatgaggagatctttgggcccgtagcggttgtaaaatactttgacaaaccggaagaagcagtcgagatatccaatgagacaccgttcggtttaggggcttcgatatgggggaatcctgatgaggccgaaaaactcatcccagaaatacaggccggaatggtgtttgtcaacaagatagttgcatcggatccaaggctgccattcggcggtgttaagaaaagcggagttggtagagaattgtccagatatggaatgctagagtttacaaacataaagaccgtctggataaattaa

SEQ ID NO: 86839 - protein, 436 aa, Thermoplasma volcanium GSS1
MIKTLNPYTGEVIASYNEEDKEQVIRKIKDLREYQAKWRKNIGERIEVIKAAKKNFETQIDDLSKLMSLEMGKPISQSISEVKKSIWLMDYVIENAEKFLAIEDVKTEARKSYVRFDPIGVILIIMPWNFPVWQVMRAAIPALAAGNTVILKHASIVSGTSLKIQDLLNTDAFRSVITSGETASSVIPEVDGVSFTGSTSTGSRIAEIAGKNIKKFVMELGGSDPFIVLDDYNLEDTVKNAVFGRLQNNGQSCIASKRFIVNRKIGEKFVEMLKDEFSRVKIGDPLNSDTFLGPLSSQDQKETVLRQVSDLKGKSELVIGGDYQGNIVMPTIIKTDVRYNEEIFGPVAVVKYFDKPEEAVEISNETPFGLGASIWGNPDEAEKLIPEIQAGMVFVNKIVASDPRLPFGGVKKSGVGRELSRYGMLEFTNIKTVWIN

SEQ ID NO: 86840 - DNA, 1536 bp, Mycobacterium tuberculosis H37Rv
  CDS (1)..(1536): transl_table=11
atgcgatcggtgacatgttccgccacgctggtcctgcccgtgatagagcccaccccagccgataggaggccccgacacctcctgctcgggagcgctggccacgttagtggcaggctggacaccggacgatttgtgcaaacccacccagcaaaggatgtcagcgtgcccatcgccaccatcaacccggctaccggcgaaacagtcaagacattcactgcggcgaccgatgacgaagtcgacgcggcaatagcccgggcccaccggcggttcgccgactaccgccagaccagcttcgcccagcgcgcccggtgggccaatgccaccgccgacttgctggaagccgaggccgaccaggccgccgcgatgatgacgctcgagatgggcaagacgctggccgcggccaaagccgaggcactgaagtgcgccaagggttttcgctactacgccgaaaacgccgaggcgttgctggccgacgaacccgccgatgcggccaaggtcggggcgtcggcggcctacggccgataccagccgctcggggtgatcctggcggtgatgccatggaacttccccctgtggcaagcggttcggttcgccgcaccggcactgatggccggaaacgtcggcctgctcaagcacgcgtcgaacgtgccgcaatgcgcgctgtacctggccgacgtcatcgcccgaggcggcttcccggacggctgcttccagacgttgcttgttagctcgggagccgtcgaagccatcctgcgtgatccccgggtcgcggcggccacgctgaccggaagcgagccggccggccaatcggtgggcgctatcgccggtaacgagatcaagccgaccgtgctcgagctcggcggcagcgacccgttcatcgttatgccgtcggccgatctggacgccgcggtcagcaccgccgtcaccggccgggtgcagaacaacggccaatcctgcatcgccgccaagcggttcatcgtccacgccgacatttacgacgatttcgtcgacaagttcgtcgcgcggatggcggcgttacgggtcggcgacccgaccgacccggacaccgacgtgggcccgctggccaccgagcagggccgcaacgaggttgccaagcaagtcgaggatgctgccgcggcgggcgcggtgatccggtgcggcggaaagcgtctcgaccggccgggctggttctacccgccgaccgtgatcaccgacatctccaaggacatggctctctacaccgaggaggtcttcggtccggtcgcctcggtgttccgcgcggcgaacatcgacgaggccgtcgagatcgccaacgccaccaccttcgggctgggatccaacgcctggacccgcgacgagaccgagcaacgacgcttcatcgacgacatcgtggcgggccaggtttttatcaacggcatgacggtgtcctatcccgaattgccgttcggcggggtcaagcgctcgggctatggccgggaactgtccgcacacgggatacgcgagttctgcaacatcaagaccgtctggatcgcctag

SEQ ID NO: 86841 - protein, 511 aa, Mycobacterium tuberculosis H37Rv
MRSVTCSATLVLPVIEPTPADRRPRHLLLGSAGHVSGRLDTGRFVQTHPAKDVSVPIATINPATGETVKTFTAATDDEVDAAIARAHRRFADYRQTSFAQRARWANATADLLEAEADQAAAMMTLEMGKTLAAAKAEALKCAKGFRYYAENAEALLADEPADAAKVGASAAYGRYQPLGVILAVMPWNFPLWQAVRFAAPALMAGNVGLLKHASNVPQCALYLADVIARGGFPDGCFQTLLVSSGAVEAILRDPRVAAATLTGSEPAGQSVGAIAGNEIKPTVLELGGSDPFIVMPSADLDAAVSTAVTGRVQNNGQSCIAAKRFIVHADIYDDFVDKFVARMAALRVGDPTDPDTDVGPLATEQGRNEVAKQVEDAAAAGAVIRCGGKRLDRPGWFYPPTVITDISKDMALYTEEVFGPVASVFRAANIDEAVEIANATTFGLGSNAWTRDETEQRRFIDDIVAGQVFINGMTVSYPELPFGGVKRSGYGRELSAHGIREFCNIKTVWIA

SEQ ID NO: 86842 - DNA, 1362 bp, Halobacterium sp. NRC-1
  CDS (1)..(1362): transl_table=11
atggacgacatcaaccccgcaaccggggcccggatcgacacctacgagacggacactgctgccgacatcgaggccgcgctcgcccgcgctgcggacgccgccaacgactggcgggaccgcccgatccgggagcgcgagcgccacgtcgcggccgcaggggacgtgctccgggagaacacacagacgtacgccgagttgatcaccgcggagatggggaagccgatcacgcaggcccgcgcggagatcgagaagtgtgcggcggtctgtgaccattacgcgacgcacgccagcgcgtacctccagcccgacggccacccgagccccgccggcgcggacgtgcagaccgtctacgagcccctcgggccggtgctggcggtgatgccgtggaacttcccgttctggcaggtgttccggttcgccgcgccggcgctcgcggcgggcaacgtcgcgctcctgaaacacgcctcgaacgtgcccgggtgtgcggaagccatcgcggacgtcttcgaggcggcggggctgccggcgggcgtgttccagacgctgctcgtcggcgccgacgccgtcgaggacgtgattcgggacgaccgggtgcgcgccgcgacgctcaccgggagcgagcccgcaggcagcgcggtcgccgcgaccgccggcgagacactcaagaagaccgtgctcgaactcgggggcagtgacccgttcgtggtgctcgatgacgccgacgtggcggcggccgcggccagcggcgcgtgggcgcgcaccctcaacagcgggcagtcctgcatcgcggccaagcggttcatcgttcacacggacgtctacgaggcgttccgcgacgcgttcgtctccgagatcgactcactcactgtgggcgatccgacgcgcgaggagaccgatgtcggcccgcaagccagcgccgctgggctggacaccacccacgagcaggtgcgggcgtccgtggacgcgggcgcgaccgtggtgaccggcggccagcccagtgaccgcgagggcgcgttctacgagccgacggtgctcaccgacgtgccggcgggctgtcccgccgacaccgaggagctgttcgggccggtggcggcggtcttcgaggtgcccgacgaggcggcggcgatcgcgaaggccaacgccacggcgttcggactcggggccagcgtgtggacggccgaccgggatcgcggccgccgggtcgcccgcgccatggacgccggctgcgcgtacgtgaaccagccggtgacctccgacccccgggttccgttcggcgggatcggacgctccgggtacggccgcgagctggccggtgcgggcatccgggcgttcgtcaaccggaagacgctgtgggtggagtga

SEQ ID NO: 86843 - protein, 453 aa, Halobacterium sp. NRC-1
MDDINPATGARIDTYETDTAADIEAALARAADAANDWRDRPIRERERHVAAAGDVLRENTQTYAELITAEMGKPITQARAEIEKCAAVCDHYATHASAYLQPDGHPSPAGADVQTVYEPLGPVLAVMPWNFPFWQVFRFAAPALAAGNVALLKHASNVPGCAEAIADVFEAAGLPAGVFQTLLVGADAVEDVIRDDRVRAATLTGSEPAGSAVAATAGETLKKTVLELGGSDPFVVLDDADVAAAAASGAWARTLNSGQSCIAAKRFIVHTDVYEAFRDAFVSEIDSLTVGDPTREETDVGPQASAAGLDTTHEQVRASVDAGATVVTGGQPSDREGAFYEPTVLTDVPAGCPADTEELFGPVAAVFEVPDEAAAIAKANATAFGLGASVWTADRDRGRRVARAMDAGCAYVNQPVTSDPRVPFGGIGRSGYGRELAGAGIRAFVNRKTLWVE

SEQ ID NO: 86844 - DNA, 1374 bp, Mycobacterium leprae TN
  CDS (1)..(1374): transl_table=11
atgtcgatcgccaccatcaacccggccaccggcgagacggtcaagacctttacaccgacaacccaggatgaagtcgaggatgcgattgctcgcgcctatgcgcggtttgacaactaccgtcacactaccttcactcaacgggccaagtgggctaacgccaccgccgacctgctcgaagctgaagccaaccaatccgccgccctgatgaccctcgaaatgggtaagacgctgcagtcagctaaggatgaggcaatgaagtgcgccaagggttttcgctactacgctgagaaagccgaaacgttgctcgcagatgagccggccgaagccgccgccgttggtgcgtcgaaagcattagcccgttaccagccgctcggtgtggtactggctgttatgccgtggaactttccgctgtggcagactgttcggttcgctgcaccggcgctgatggcaggcaacgtcggcctcctaaagcacgcgtcaaacgtgccgcagtgcgcgttgtacctcgccgacgtcattgcccgtggcggctttccggaggactgtttccaaacgctgctcatctcggccaatggtgtcgaagccattctgcgtgatccccgggtcgcggcggccaccctcaccggtagcgaaccagccggccaggcggtcggcgccattgcgggcaacgagataaagcccactgtgctagagcttggcggcagcgaccctttcatcgtgatgccctcggcggatttggatgcggcagttgccaccgcggttaccggacgggtgcagaacaacggccaatcctgcatcgccgccaagcggtttatcgcccatgccgacatttacgatgagttcgtcgaaaaattcgtcgccaggatggaaacgctgcgagtgggtgaccctaccgacccggacaccgacgtcggtccgctggccactgagtcgggccgcgcccaagtcgaacaacaagtcgacgccgcagcagcagcaggcgcagtgatccgttgcggcggtaaacgtcccgaccggccggggtggttctacccaccgaccgtgattaccgacatcaccaaggacatggcactctacaccgacgaggtctttggtccggtcgcctcagtatactgtgccacaaacatcgacgacgccatcgaaatcgccaacgctaccccctttgggttgggttccaacgcttggacgcagaacgagtccgagcaacgacacttcatcgacaacatcgtcgccgggcaggtcttcatcaacggtatgacggtatcctatcccgaattgccgttcggcggtatcaaacggtcaggctacggccgagagctgtcgacccatgggatccgtgagttctgcaacatcaagacagtttggatcgcatag

SEQ ID NO: 86845 - protein, 457 aa, Mycobacterium leprae TN
MSIATINPATGETVKTFTPTTQDEVEDAIARAYARFDNYRHTTFTQRAKWANATADLLEAEANQSAALMTLEMGKTLQSAKDEAMKCAKGFRYYAEKAETLLADEPAEAAAVGASKALARYQPLGVVLAVMPWNFPLWQTVRFAAPALMAGNVGLLKHASNVPQCALYLADVIARGGFPEDCFQTLLISANGVEAILRDPRVAAATLTGSEPAGQAVGAIAGNEIKPTVLELGGSDPFIVMPSADLDAAVATAVTGRVQNNGQSCIAAKRFIAHADIYDEFVEKFVARMETLRVGDPTDPDTDVGPLATESGRAQVEQQVDAAAAAGAVIRCGGKRPDRPGWFYPPTVITDITKDMALYTDEVFGPVASVYCATNIDDAIEIANATPFGLGSNAWTQNESEQRHFIDNIVAGQVFINGMTVSYPELPFGGIKRSGYGRELSTHGIREFCNIKTVWIA

SEQ ID NO: 86846 - DNA, 1404 bp, Mycobacterium tuberculosis CDC1551
  CDS (1)..(1404): transl_table=11
gtgcaaacccacccagcaaaggatgtcagcgtgcccatcgccaccatcaacccggctaccggcgaaacagtcaagacattcactgcggcgaccgatgacgaagtcgacgcggcaatagcccgggcccaccggcggttcgccgactaccgccagaccagcttcgcccagcgcgcccggtgggccaatgccaccgccgacttgctggaagccgaggccgaccaggccgccgcgatgatgacgctcgagatgggcaagacgctggccgcggccaaagccgaggcactgaagtgcgccaagggttttcgctactacgccgaaaacgccgaggcgttgctggccgacgaacccgccgatgcggccaaggtcggggcgtcggcggcctacggccgataccagccgctcggggtgatcctggcggtgatgccatggaacttccccctgtggcaagcggttcggttcgccgcaccggcactgatggccggaaacgtcggcctgctcaagcacgcgtcgaacgtgccgcaatgcgcgctgtacctggccgacgtcatcgcccgaggcggcttcccggacggctgcttccagacgttgcttgttagctcgggagccgtcgaagccatcctgcgtgatccccgggtcgcggcggccacgctgaccggaagcgagccggccggccaatcggtgggcgctatcgccggtaacgagatcaagccgaccgtgctcgagctcggcggcagcgacccgttcatcgttatgccgtcggccgatctggacgccgcggtcagcaccgccgtcaccggccgggtgcagaacaacggccaatcctgcatcgccgccaagcggttcatcgtccacgccgacatttacgacgatttcgtcgacaagttcgtcgcgcggatggcggcgttacgggtcggcgacccgaccgacccggacaccgacgtgggcccgctggccaccgagcagggccgcaacgaggttgccaagcaagtcgaggatgctgccgcggcgggcgcggtgatccggtgcggcggaaagcgtctcgaccggccgggctggttctacccgccgaccgtgatcaccgacatctccaaggacatggctctctacaccgaggaggtcttcggtccggtcgcctcggtgttccgcgcggcgaacatcgacgaggccgtcgagatcgccaacgccaccaccttcgggctgggatccaacgcctggacccgcgacgagaccgagcaacgacgcttcatcgacgacatcgtggcgggccaggtttttatcaacggcatgacggtgtcctatcccgaattgccgttcggcggggtcaagcgctcgggctatggccgggaactgtccgcacacgggatacgcgagttctgcaacatcaagaccgtctggatcgcctag

SEQ ID NO: 86847 - protein, 467 aa, Mycobacterium tuberculosis CDC1551
MQTHPAKDVSVPIATINPATGETVKTFTAATDDEVDAAIARAHRRFADYRQTSFAQRARWANATADLLEAEADQAAAMMTLEMGKTLAAAKAEALKCAKGFRYYAENAEALLADEPADAAKVGASAAYGRYQPLGVILAVMPWNFPLWQAVRFAAPALMAGNVGLLKHASNVPQCALYLADVIARGGFPDGCFQTLLVSSGAVEAILRDPRVAAATLTGSEPAGQSVGAIAGNEIKPTVLELGGSDPFIVMPSADLDAAVSTAVTGRVQNNGQSCIAAKRFIVHADIYDDFVDKFVARMAALRVGDPTDPDTDVGPLATEQGRNEVAKQVEDAAAAGAVIRCGGKRLDRPGWFYPPTVITDISKDMALYTEEVFGPVASVFRAANIDEAVEIANATTFGLGSNAWTRDETEQRRFIDDIVAGQVFINGMTVSYPELPFGGVKRSGYGRELSAHGIREFCNIKTVWIA

SEQ ID NO: 86848 - DNA, 1464 bp, Sinorhizobium meliloti 1021
  CDS (1)..(1464): transl_table=11
atgacgtttcatgccaagttttccggctacgccgatcctgccctgcatgccgcgggcctctacattggcggcaaatggcaaagcggcagcggaataaccgttctcgacccttcgaccggtaatctgctggccgaggtcgccgacgcctccatcgaggacgcacagcgcgcagtcgatgccgcggatgccgctgcggccgggtggcgcgccactccagctcgccagcgctcggaaatcctgcgacgctggtatcagctgatgacacagcacgccgaggagcttgcaacgctcatagcactggaaaacggcaaggccctggccgacgcacgcggcgaagtcgcttatgccgccgaattcttccgctggtacgctgaagaggcgacccgcattccgggcgaattccggcacactccctccgggtcgcacaatatcctcgttgaccatgagccgatcggcattgccgtcctgatcacgccctggaatttcccggccgctatggcgacgcgcaagatcgggcccgcccttgccgccggctgcacggtgatcctgaaacctgcctcggagacgccgttgacagcctatgccatggcccgtctcggggaagaggcgggcgtcccgcctggcgtcgtcaacgtgctgaccacaagcaatccaggcggaataacgaatgcaatgctcgccgatccgcgcgttcgaaagctttcattcaccggctcgaccggcgttggccgcgttctacttgccgaagccgccaagtcggtcgtcagctgctcgatggagctcggcggcaacgcgcctttcatcgtgttcgacgacgcggacctcgaggtggcactcgacggtgcgatgatcgccaagatgcgaaacgctggagaagcctgcactgccgccaatcgtttctatgtccaggcgggcatccatgatgcgtttgtcgccggcctcacggcgcggatgaagtcactgaagctcggccccggctacgatcccgagacgcaatgtggacccatgatcacgcaaaacgccgtccgcaagatcgaccggctcgtctcagaggcactcgccgcgggtgcgcgggcaacgaccggcggcaaaccgctcacggaaaacgggtacttctatccgccgacggtactcgaaaacgtccccgtaaacgcgtcgatcgcacgtgaggaaatcttcggaccggtcgcgcctgtctacaagttcgaaagcgacgacgaggcgatccgcctcgcaaacaatacggagtatggcctcgccgcgtacatctacagccgcgatctcaaacgtgcgatgaaggtcggcaagcgcatcgaaaccggcatgctcggcatcaacaggggcctgatgtcagaccccgccgctcccttcggcggcgtcaaacagagcggccttggccgcgaaggcggcgtgacgggcatcctggaattcatggagccgaaatatttcgcagttgattattga

SEQ ID NO: 86849 - protein, 487 aa, Sinorhizobium meliloti 1021
MTFHAKFSGYADPALHAAGLYIGGKWQSGSGITVLDPSTGNLLAEVADASIEDAQRAVDAADAAAAGWRATPARQRSEILRRWYQLMTQHAEELATLIALENGKALADARGEVAYAAEFFRWYAEEATRIPGEFRHTPSGSHNILVDHEPIGIAVLITPWNFPAAMATRKIGPALAAGCTVILKPASETPLTAYAMARLGEEAGVPPGVVNVLTTSNPGGITNAMLADPRVRKLSFTGSTGVGRVLLAEAAKSVVSCSMELGGNAPFIVFDDADLEVALDGAMIAKMRNAGEACTAANRFYVQAGIHDAFVAGLTARMKSLKLGPGYDPETQCGPMITQNAVRKIDRLVSEALAAGARATTGGKPLTENGYFYPPTVLENVPVNASIAREEIFGPVAPVYKFESDDEAIRLANNTEYGLAAYIYSRDLKRAMKVGKRIETGMLGINRGLMSDPAAPFGGVKQSGLGREGGVTGILEFMEPKYFAVDY

SEQ ID NO: 86850 - DNA, 1389 bp, Salmonella typhimurium LT2
  CDS (1)..(1389): transl_table=11
atgaccatgatgactgcaacacaggcgttatccgtgaatcctgcgaccggccagacgctggcggcaatgccctgggctaacgcgcaagagattgaacatgcgctgagtctggcggcgagcggtttcaaaaagtggaaaatgacatcggtagcgcaacgggcgcaaacattacgcgatattggtcaggcgcttcgcgctcatgcagaagagatggcgcaatgtattacgcgtgaaatgggtaaacccataaagcaggcgcgtgcggaagtgacgaaatccgccgcgttatgcgactggtatgcggaacatggcccggcaatgctgaatcctgagcctacgttggtagaaaatcagcaggcggtgattgaataccgtccgctgggcgtcattctggcgataatgccgtggaattttcctttatggcaggtgttacgcggggcagtgccgatactgctggcggggaatagctacttgttaaaacatgcgcccaatgtcacgggttgcgcgcagatgatagcccgaatcttggcggaagccggtactcccgctggcgtctatggatgggtgaacgctaataatgagggcgtgagtcagatgattaacgatccgcgaatcgcggcggtgacggtgaccggtagcgtgcgcgccggcgcggcgattggcgctcaggctggggcggcgctgaaaaagtgcgtactggaactgggtggctcggatccgtttattgtactcaatgatgccgatctcgagttggcggtaaaagctgcggttgccggacgctatcaaaacaccggacaagtctgcgccgccgccaaacgttttattgtcgaagagggcattgcgcaggcgtttaccgatcgttttgtggcggctgccgcagcattaaagatgggtgatcctctggttgaagagaatgacctggggccgatggcgcgctttgatttgcgtgatgaactccatcaacaggtgcaggcttccgtcgccgaaggcgcacggctactgttgggcggggagaaaatcgccggggagggcaactattatgccgcgaccgttctggcggatgttacacctgacatgacggcatttcgtcaggaactttttgggcctgttgccgccattaccgtcgcaaaagatgcggcgcacgccctcgcgctggcgaatgacagtgagtttggcctgtcggcgacgatctttaccgccgacgatacgctggccgcggagatggcggcgcgtcttgagtgcggtggggtattcattaatggttacagcgccagcgatgcgcgtgtggcattcggcggggtgaagaaaagcggcttcggtcgcgagctttcgcactttggtttacacgaattttgtaatgtgcagaccgtctggaagaaccgcgtctaa

SEQ ID NO: 86851 - protein, 462 aa, Salmonella typhimurium LT2
MTMMTATQALSVNPATGQTLAAMPWANAQEIEHALSLAASGFKKWKMTSVAQRAQTLRDIGQALRAHAEEMAQCITREMGKPIKQARAEVTKSAALCDWYAEHGPAMLNPEPTLVENQQAVIEYRPLGVILAIMPWNFPLWQVLRGAVPILLAGNSYLLKHAPNVTGCAQMIARILAEAGTPAGVYGWVNANNEGVSQMINDPRIAAVTVTGSVRAGAAIGAQAGAALKKCVLELGGSDPFIVLNDADLELAVKAAVAGRYQNTGQVCAAAKRFIVEEGIAQAFTDRFVAAAAALKMGDPLVEENDLGPMARFDLRDELHQQVQASVAEGARLLLGGEKIAGEGNYYAATVLADVTPDMTAFRQELFGPVAAITVAKDAAHALALANDSEFGLSATIFTADDTLAAEMAARLECGGVFINGYSASDARVAFGGVKKSGFGRELSHFGLHEFCNVQTVWKNRV

SEQ ID NO: 86852 - DNA, 1371 bp, Salmonella typhimurium LT2
  CDS (1)..(1371): transl_table=11
atggcttaccagacagtgaatcctgccaataatcagctcattaaagagtaccccccgcacacggacgcggatattgaagccgcgctgcaaaaagctgacgcgctctatcactccgattggtccaaaggagagattgaccaacgtctgccggtactgcataagctggctgacttgatcgacagccgtgttgaagaactggcaaaaatcgccagccaggagatgggcaagctcatcgagcagagccgtggcgaagtcaaactgtgtgcgcagatcgctcgctattatgcggataaagcgaagcagtttcttgccccggtgccttataaaaccgagtttggcgacgcgtgggtagaacatcatccgattggcgtcatcatggctgttgagccgtggaacttcccgtactatcagttgatgcgtgtgctggcgccgaacctggccgcaggtaacccggtgctggcgaaacatgccagcatcgtaccgcactgcgccgagacgtttgcccatctggtgcgtgaagccggcgcgccggaaggcgcatggaccaacctgtttatttcctccgatcaggtggcgaacatcatcgccgacccgcgcgtgcagggcgcggcgctcaccggatctgaaaaagcggggagcgccgtggcggcacaggcggcgaagcacattaaaaaatcgacgctggaactgggcgggaacgatgtgttcgtcgtgctggacgatgccgatcttgagaaagcggtgaaaattggcgtgcaggcacggctcactaatgcggggcaggtatgtacggcggcgaagcgctttatcctgcatgagaaaatcgccgatcaattcctcagccagttcaccgaggcgttcaggaaggtgaaggtgggggatcagatggacgcttctaccgaactggggccgctgtcgtcgaaagatgcgctggaaacattgaccagacaggtcgaggaagcggtgaaaaatggcgcgacgctgcacgttggtggcaagccgctggaaagcaaaggcaacttctttgagccgaccattctgacccatattacgcgtgacaacccggcgtactttgaagagttcttcggcccggtggcgcagatgtatgtggtgaaagacgatgacgaggcggtaaaactcgccaacgattcccactacggcctgggcggtgcggtgtttagtcagaatatcgaacgcgctaaacgcatggcctcccggattgaaaccgggatggtttatatcaactggctgaccgacaccgcagcggagctgccgttcggcggcgttaagcgttcgggcttcggacgcgagctatcggatctggggattaaggagtttgtgaaccagaagctggtagtggtgcgccgctaa

SEQ ID NO: 86853 - protein, 456 aa, Salmonella typhimurium LT2
MAYQTVNPANNQLIKEYPPHTDADIEAALQKADALYHSDWSKGEIDQRLPVLHKLADLIDSRVEELAKIASQEMGKLIEQSRGEVKLCAQIARYYADKAKQFLAPVPYKTEFGDAWVEHHPIGVIMAVEPWNFPYYQLMRVLAPNLAAGNPVLAKHASIVPHCAETFAHLVREAGAPEGAWTNLFISSDQVANIIADPRVQGAALTGSEKAGSAVAAQAAKHIKKSTLELGGNDVFVVLDDADLEKAVKIGVQARLTNAGQVCTAAKRFILHEKIADQFLSQFTEAFRKVKVGDQMDASTELGPLSSKDALETLTRQVEEAVKNGATLHVGGKPLESKGNFFEPTILTHITRDNPAYFEEFFGPVAQMYVVKDDDEAVKLANDSHYGLGGAVFSQNIERAKRMASRIETGMVYINWLTDTAAELPFGGVKRSGFGRELSDLGIKEFVNQKLVVVRR

SEQ ID NO: 86854 - DNA, 1368 bp, Nostoc sp. PCC 7120
  CDS (1)..(1368): transl_table=11
atggcgatcgccaccatcaatcccgccactggggaaacgctcaaaacctttgagccgcttaacgatgtagaaattgccgctaaattagatttggcagaccaggcttttgaaaagtaccgtcatacgagttttgcagagcgatcgcaagctctgcaagcagccgcaaatatactggagcaagaaaaagctgactttgcgaagttaatgactttggaaatgggcaagccttacaaagcagccattgccgaagtcgaaaaatgtgctgctgtttgccgctactatgcggaaaatgccgccgattttctggctgatgtcagtgtaaaaactgatgctagtcatagctttgtccgctatcagcccttggggataattttggcagtcatgccgtggaattttcccttctggcaagtgttccgctttgctgcacccgcactcatggcgggtaatgtgggcttactcaaacacgcatcgaatgtaccacagtgcgctttagccatcgaagatattatccaccgggcaggttttcctaaaggtgtatttcaaactctattaatcggtgcagcgaaagttgccgatttaatcgctgatgagcgagtaaaagctgctaccttaaccggaagcgaaccagccggcgcatctctagcggcggcggcgggaaaacaaattaaaaaaacagtcttggaattggggggaagtgacccatttattgtgttagaaagtgctgatgtagaagcagccgccgctacagctacatcagcaaggatgttaaataacggacaatcttgtattgccgcgaaacgcttcattgtggcagaagcgatcgccgatcaatttgaaaagttgctgttagaaaaattcacagcgctaaaaattggcgaccccttacatccagacacagacttagggccactagcaacccccgatatcctccaagatttagaccaacaagtacaaactgccgttaaaagtggcggcaaagtcttgaccggtggctatcctttagcagatcgtcctggcaacttttacccagccacaattatcatagatatcccagttgatcagcccattgcccaagaagaattttttggcccagtggcgttgttattccgtgtcccagatatcgatacagcaattcaactggctaatgctacaccctttggtttaggtgcaagtgcttggacaaataacgaccaagaacgcgatcgcctgatttccgaaattgaagcaggcgcagtatttattaatggtttagtaaaatccgaccccagactaccatttggaggcataaaacgttctgggtatggccgagaattaagcattcaaggcatacacgagttcgttaatgttaaaaccgtttgggttaagtaa

SEQ ID NO: 86855 - protein, 455 aa, Nostoc sp. PCC 7120
MAIATINPATGETLKTFEPLNDVEIAAKLDLADQAFEKYRHTSFAERSQALQAAANILEQEKADFAKLMTLEMGKPYKAAIAEVEKCAAVCRYYAENAADFLADVSVKTDASHSFVRYQPLGIILAVMPWNFPFWQVFRFAAPALMAGNVGLLKHASNVPQCALAIEDIIHRAGFPKGVFQTLLIGAAKVADLIADERVKAATLTGSEPAGASLAAAAGKQIKKTVLELGGSDPFIVLESADVEAAAATATSARMLNNGQSCIAAKRFIVAEAIADQFEKLLLEKFTALKIGDPLHPDTDLGPLATPDILQDLDQQVQTAVKSGGKVLTGGYPLADRPGNFYPATIIIDIPVDQPIAQEEFFGPVALLFRVPDIDTAIQLANATPFGLGASAWTNNDQERDRLISEIEAGAVFINGLVKSDPRLPFGGIKRSGYGRELSIQGIHEFVNVKTVWVK

SEQ ID NO: 86856 - DNA, 1455 bp, Agrobacterium tumefaciens str. C58
  CDS (1)..(1455): transl_table=11
atgatcaagctaaaaaatgcggcgctgttgcgtgatgcctgcctggtgaatggtcgctggctgaaagccgcggatggcaagacgattgcggtggaaaatcccgccaactcgatgatcatcggtcacgttccttcattgtcggcagatgaggttaaagctgcagtcgagtcagcaggcaaggcattttccgagtggagccgccgttctgcgaaggaccgcgctgccatattgcgtcgatggtttgatctcatggtggcgaacgctgacgatcttggtgcgttgatgactgccgagcagggaaagccgtttgcggaagcaaagggcgaagccctttatgcggcatctttcgtggaatggttcgcggaggaagccaaacgtgtttatggcgataccattccttcgccgaccacggacaagcgcattaccatcctgaagcagccgatcggtgtctgcgccgcgatcacgccatggaacttcccggccgcgatgatcacccgcaaggcggccccggcacttgccgcaggctgcgcgatgatcgtcaaaccggctgagcagacccctctcaccgcacttgctctgggtgttctcgccgaagaagcgggcgttcccgccggtgtcttccaggtggtgacgggcgccgcacgcgatatcggcaaggtgtttaccgaaagcgacacggtgcgaaagatctcctttaccggatcgactgaagtcggtcgtctgctgatggcgcaatcggccccgacgatcaagaaactgtcgctggaacttggtggcaatgcgcctttcatcgtctttgatgatgccgatctggatgcggccgttgagggcgcgatcgtgtcgaaataccgcaatgccggacagacctgcgtgtgctccaaccggatctatgtccaggatggtgtttacgacgcattcgcggaaaagctggtcaaaagggtcgaaagcctgtccgtcggtgagggcacggaacctggtgttctgataggtccactgatcgaccaggaggccgtggcaaaggtcgaggatcacgttgctgatgcccttggcaagggagcaaagatcgtcatcggtggaaagcgtcatgctcttggaggcacattctacgaaccaacggttctgactggtgcaacccaggccatgaaggttgcccgtgaggagacctttggacccgtcgccccgctctttcggttcgggacggaagacgaagcggtcgccatggcgaacgataccgaatttggtctggcggcctatttctacaccgagaatgtccgccggacatggcgtgtcgcagaagcgctcgaatacggcatggtgggccacaatacaggcctcatctccaacgaagtcgcaccattcggtggcgtgaagcagtccggcttgggccgcgaaggctcgcactacggcatcgatgaatatcttgaaatcaaatacctgtgctcggccatcggctga

SEQ ID NO: 86857 - protein, 484 aa, Agrobacterium tumefaciens str. C58
MIKLKNAALLRDACLVNGRWLKAADGKTIAVENPANSMIIGHVPSLSADEVKAAVESAGKAFSEWSRRSAKDRAAILRRWFDLMVANADDLGALMTAEQGKPFAEAKGEALYAASFVEWFAEEAKRVYGDTIPSPTTDKRITILKQPIGVCAAITPWNFPAAMITRKAAPALAAGCAMIVKPAEQTPLTALALGVLAEEAGVPAGVFQVVTGAARDIGKVFTESDTVRKISFTGSTEVGRLLMAQSAPTIKKLSLELGGNAPFIVFDDADLDAAVEGAIVSKYRNAGQTCVCSNRIYVQDGVYDAFAEKLVKRVESLSVGEGTEPGVLIGPLIDQEAVAKVEDHVADALGKGAKIVIGGKRHALGGTFYEPTVLTGATQAMKVAREETFGPVAPLFRFGTEDEAVAMANDTEFGLAAYFYTENVRRTWRVAEALEYGMVGHNTGLISNEVAPFGGVKQSGLGREGSHYGIDEYLEIKYLCSAIG

SEQ ID NO: 86858 - DNA, 1464 bp, Brucella melitensis 16M
  CDS (1)..(1464): transl_table=11
atgcttgctttgaaagacccttcgctccttaaatcgcaatgcctcgtgaacggtcgctggatcgacgccgcagatggcacgacgatcaaagtgacaaacccggctgacggctccgtcatcggcacggttccctccctgtctgttgctacgatcaaggaagccatcgacgcctctgccaaggcgctttccggttgggcggcgaaaacagccaaggaacgcgcgggcattctgcgcaaatggttcgaccttatcatcgccaatgccgacgatatcgctcttataatgacgtcggagcagggaaaaccgcttgcggaagcccgcggcgaggttctttatgcggcatccttcattgagtggttcgcggaagaagcaaagcgtgtctatggcgacacgatccctgcaccgcagaacggccagcgcctgaccgtcatccgccagcctgtcggtgtcacggcggcgattacgccgtggaatttcccggcggcaatgattacccgcaaggctgctccggcgcttgcagcaggctgcaccatgatcgtgcgccccgccgacctcaccccgctgaccgcactggcgcttggtattctggccgaaaaggcaggcattccggctggcgtgttgcagatcgtgactggcaaggcccgcgaaatcggcgcggaactcaccagcaatgacaccgtgcgcaaactttccttcaccggatcgacggaagtggggcgccttctgatggcgcagtgcgccccgaccatcaagcgcatctcgctggagcttggcggcaacgcgcccttcatcgtgttcgacgatgccgatcttgatgccgccgtggatggcgcgatggtttccaaatatcgcaatgcgggccagacctgcgtttgcgccaaccgcatttatgtacagcgcggcgtttacgacaagttcgccgaaaagcttgcggccaaggtcaaggaactgaaggtcggcaacggcacggaacccggcgtcgtcatcggcccgatgatcgaagaaaaagccatcaccaaggtgaaggcgcatattgaagacgcggtttccaagggcgcaaagctcatcacaggcggcaaggaactcggcggcctgttcttcgagccgggcatcctgaccggcgtgacctccgatatgctggtcgccaaggaagaaaccttcggcccactcgctccgctttttgccttcgacacggaagaagaagtcattgcccaggccaatgacacgatcttcggtcttgccgcttatttctatacggaaaatttcagccgtgcgatccgggtcagcgaagcgctggaatatggcatggtcggccacaataccggcctcatctccaatgaagtcgcaccctttggcggcgtaaagcagtctggcctcggccgcgaaggctccaaatatggtatcgaggaatatctcgaaaccaaatatatctgtagcgcctataagcggggagccaaaaaatag

SEQ ID NO: 86859 - protein, 487 aa, Brucella melitensis 16M
MLALKDPSLLKSQCLVNGRWIDAADGTTIKVTNPADGSVIGTVPSLSVATIKEAIDASAKALSGWAAKTAKERAGILRKWFDLIIANADDIALIMTSEQGKPLAEARGEVLYAASFIEWFAEEAKRVYGDTIPAPQNGQRLTVIRQPVGVTAAITPWNFPAAMITRKAAPALAAGCTMIVRPADLTPLTALALGILAEKAGIPAGVLQIVTGKAREIGAELTSNDTVRKLSFTGSTEVGRLLMAQCAPTIKRISLELGGNAPFIVFDDADLDAAVDGAMVSKYRNAGQTCVCANRIYVQRGVYDKFAEKLAAKVKELKVGNGTEPGVVIGPMIEEKAITKVKAHIEDAVSKGAKLITGGKELGGLFFEPGILTGVTSDMLVAKEETFGPLAPLFAFDTEEEVIAQANDTIFGLAAYFYTENFSRAIRVSEALEYGMVGHNTGLISNEVAPFGGVKQSGLGREGSKYGIEEYLETKYICSAYKRGAKK

SEQ ID NO: 86860 - DNA, 1482 bp, Schizosaccharomyces pombe 972h-
  CDS (1)..(1482)
atggcccctcaattcaaacgccctgagctctttggctttgataagtctcatgctcaatcttttgttcaaggaaaatggatttcttctcctaacaacaaaacttttgaggttgataacccagctactggtgaaataatcggtaaagtggccgatgtctcagtagaggaaacaaaaaaagccatcagtgccgctaacgaggccttcaaaacttataaaaattttactcatgtccaacgtagtcagttattggaacgctgggcagagcttattatggagaacaaagacgacttggtcaagatgcttaccttagaaaacggcaagcctttgagccaagctgagatggaggtcaccacatgtagcggatatcttaaatggtatgctgctgaagccgttcgtacctttggcgatgtagctccttccagcttacaaagtcaaaactttctcatctccatcaaacagccagttggtgtcagtgccttgattactccttggaacttccccgccgccatgattgctcgtaaaggtggtgccgctttggctgctggttgtaccgctattttcttgcctgctttccgcactccctacgtttgcttaggtttagtcaggttggcgcaagaggccggtttccctgacggtgtcttaaatgtgatcacttcttctgatgcatctgctcatggtaaagaactgactaccaaccctatcgttcgtaaggtttccttcactggtagtactaatgtcggtaaaattcttatgggacaaagtgccagcacaatcaagaaggtttcaatggagttaggaggtaatgcccctttcattgtattccctgacttccccattgatcaggctgtcgaatctttctgcactatcaagtttaactcttgtggtcaagtttgtgtctgccctaacagagtttacgttcacaagaatgtttacgacgaattcgtcagcaagcttaccgaaaaagtcaagaccattaaagtaggagatggatttgactcttcttctgctgttggccctttgatttctcaagatggatgcaaaaaggtcagcaagcacattgaagatgctgtttcaaagggtgccaaaatcactgttggtggaaaggagatttcctcaagcaaaggttatttttttgaaccaaccgtgctctccggtgtaactcaagacatgttggttgctagcgaggaaacattcggcccactcgcctctgtcttcaagttcgacgacaccgaagaggtgatcgaatgggctaacgacagtgatgttggcttggccggttacgtctttaccaataacttgtccacaatgatccacgttgccaaagaactagaggtgggtcttgtaggtgccaatatcgaaatggttgacgaaccatttatttcctttggcggcatcaaacagagcggttttggcaaggaagccggtcgtttgggcgttcaagaatttatggtggttaaggaaatcaatctcaagactctttaa

SEQ ID NO: 86861 - protein, 493 aa, Schizosaccharomyces pombe 972h-
MAPQFKRPELFGFDKSHAQSFVQGKWISSPNNKTFEVDNPATGEIIGKVADVSVEETKKAISAANEAFKTYKNFTHVQRSQLLERWAELIMENKDDLVKMLTLENGKPLSQAEMEVTTCSGYLKWYAAEAVRTFGDVAPSSLQSQNFLISIKQPVGVSALITPWNFPAAMIARKGGAALAAGCTAIFLPAFRTPYVCLGLVRLAQEAGFPDGVLNVITSSDASAHGKELTTNPIVRKVSFTGSTNVGKILMGQSASTIKKVSMELGGNAPFIVFPDFPIDQAVESFCTIKFNSCGQVCVCPNRVYVHKNVYDEFVSKLTEKVKTIKVGDGFDSSSAVGPLISQDGCKKVSKHIEDAVSKGAKITVGGKEISSSKGYFFEPTVLSGVTQDMLVASEETFGPLASVFKFDDTEEVIEWANDSDVGLAGYVFTNNLSTMIHVAKELEVGLVGANIEMVDEPFISFGGIKQSGFGKEAGRLGVQEFMVVKEINLKTL

SEQ ID NO: 86862 - DNA, 1491 bp, Schizosaccharomyces pombe 972h-
  CDS (1)..(1491)
atgtcagaagatttatttgtctccattaatttccctaacggaaaatctgtcaaacaacctatagggctgtatattaatggagagtggcacaaatcagctgaaacatgggagaccgttgacccttccattgaggaggtcattgcaaaagtatatcttgctggtgagaaagaaattgactatgcggtgaaatctgctaaggaagcctttaaaacttggaaaaaggttcctggatctgaaaagggtgaactactaatgaagctagccgagttaactgaaaagcatgcggatactttagctgctattgaagctatggactcaggaaaaccacttgtttcaaatgctcgcggagatgtcgatggaacgattgctcttttacgttattgtgccggttgggctgataaaatatatggtcaagtcatacctactggacctgaaaagttagcttatgcgaaaaggactccaattggtgtatgtggtcagatagtcccatggaattatccattgaatatggccggatggaaaattgcacctgcgcttgctgccggaaattgtataatcattaaatctgctgagacaacaccactatcactgctttactttgcaactttagttgaagaagcaggatttcctaaaggtgtcgtgaatatcataagtggtctcggtacagttgcaggttcatatatggccaaacaccctggaattgataaaattgctttcacaggttctactaaagtcggagttattgttcaacaattagcagcctcaaatttaaaagcagtgactctagaatgcggcgggaaatctccctttttggtttttgaggatgccgatttagatcaagctgtaaagtgggcagcccttggaattatgtataacagcggtcagatttgtacttctaattcaaggatttacgttcaagattctgtttacgataaattcatcgagctgtttaaaaagcacgtcattcaagattatattgttggcatgccttttgacgataatactgttgttggaccggttgttaacaaaactcaatataaccgtataaagaattacatagagcaaggtaaaaaagagggcgcaaagcttgtccttggtgatgagcctttacctttaaagcagggatatttcatttcccccacaattttcgctgattgttcggaaaatatgactatcgtgaaggaggaaatttttggaccagttgttgcaatttcgaaatttaaaacggaggatgaggcaattgagaaagccaacaataccacctacggattggccgccatgtgttttacaaaggatttagaacgagcacatcgtgttagcgatgaacttgaagcaggcatggtgtttatcaattcaactgaaaacagtgatatacaagccccttttggaggaataaagatgagtggaataggtaatgaattgggctccaacggtattgagatgtatacacaaattaaagctgttcatattaattttaataacaaactttga

SEQ ID NO: 86863 - protein, 496 aa, Schizosaccharomyces pombe 972h-
MSEDLFVSINFPNGKSVKQPIGLYINGEWHKSAETWETVDPSIEEVIAKVYLAGEKEIDYAVKSAKEAFKTWKKVPGSEKGELLMKLAELTEKHADTLAAIEAMDSGKPLVSNARGDVDGTIALLRYCAGWADKIYGQVIPTGPEKLAYAKRTPIGVCGQIVPWNYPLNMAGWKIAPALAAGNCIIIKSAETTPLSLLYFATLVEEAGFPKGVVNIISGLGTVAGSYMAKHPGIDKIAFTGSTKVGVIVQQLAASNLKAVTLECGGKSPFLVFEDADLDQAVKWAALGIMYNSGQICTSNSRIYVQDSVYDKFIELFKKHVIQDYIVGMPFDDNTVVGPVVNKTQYNRIKNYIEQGKKEGAKLVLGDEPLPLKQGYFISPTIFADCSENMTIVKEEIFGPVVAISKFKTEDEAIEKANNTTYGLAAMCFTKDLERAHRVSDELEAGMVFINSTENSDIQAPFGGIKMSGIGNELGSNGIEMYTQIKAVHINFNNKL

SEQ ID NO: 86864 - DNA, 1407 bp, Methanosarcina acetivorans C2A
  CDS (1)..(1407): transl_table=11
gtgaattcaatattaataagtgactctttttgggggaagagcatgaaaatcaaatccattaatccttataccgaagaaataaaccggacttatggttcttttcctatcgaagaatgcaggaacaggatcgagaaatcaagggctgctttttcagggtggagttcattgccagcagaggaaagagcaaaatttttcttgaatgttgcggagctgcttcgacggaatactgaaatttatgccgggattattacagaggagatggggaagcccatcaggcagtccagaagtgaagtccaaaaatgtgtcaggctctgtgactattatgcggaaaatgcggctggattattgaaggctgaaattgtggagctcggggctgagaaaagttatgttacttttgagcctctgggagtggttttcgggatcatgccctggaatttccctttctggcaagttttcaggtttgcagtgcctgcaatatgtgcaggaaatgtctgtgtgctcaaacatgcctcaaatgtgccaggatcagctcttgagattgaaaagatctttctggaagccggatttcgggagtatgttttcaaaacccttttaattgactcgaaaactgcaatggaaattattaaagaagaattggtggacggggtttcgcttaccggcagcacaggcgcaggctcgaaaatcggaaaacttgcaggagaagctatcaagcctcaggtactggaacttggagggtcggaccccttcatagtgctcgaggatgccgatatcgagagggctgcacaggcgggtgtaaggtcccgttttctgaacgcaggacagagctataccgctgccaagagatttattgttgtagaagaagttgtgggggattttatcgaggcatttgaactccatatgcaggaactgaaaatcggggatcctattgatgaggaaaccgatatcgggcctcttgcaaaaaaagaattcgtcgaaatacttgaaaaaattctggaagatgcaagaaagaaaggagcagagcctcaaacttacggagaaaagcataaaaaaggttttttcttcaatccgactattatccctgcagccagtacctatatggaagtatgcaatatcgaggttttcgggcctgttgcaccggttatcactgcaaaggatgaggacgaagcagtggaagttgcaaactccatagaattcgggcttggggccaagatctggtcaggagaccttgaaagggccgaaaagctggcaaaaaggatcagggcaggatctgtggctgtcaatggaatgatcaggtctgacccgagactgccttttggcgggaccgggaagtcaggtgtcgggagggagctttcccactacggactcaaggaatttgtgaacataaagactgtagttgttaataaataa

SEQ ID NO: 86865 - protein, 468 aa, Methanosarcina acetivorans C2A
MNSILISDSFWGKSMKIKSINPYTEEINRTYGSFPIEECRNRIEKSRAAFSGWSSLPAEERAKFFLNVAELLRRNTEIYAGIITEEMGKPIRQSRSEVQKCVRLCDYYAENAAGLLKAEIVELGAEKSYVTFEPLGVVFGIMPWNFPFWQVFRFAVPAICAGNVCVLKHASNVPGSALEIEKIFLEAGFREYVFKTLLIDSKTAMEIIKEELVDGVSLTGSTGAGSKIGKLAGEAIKPQVLELGGSDPFIVLEDADIERAAQAGVRSRFLNAGQSYTAAKRFIVVEEVVGDFIEAFELHMQELKIGDPIDEETDIGPLAKKEFVEILEKILEDARKKGAEPQTYGEKHKKGFFFNPTIIPAASTYMEVCNIEVFGPVAPVITAKDEDEAVEVANSIEFGLGAKIWSGDLERAEKLAKRIRAGSVAVNGMIRSDPRLPFGGTGKSGVGRELSHYGLKEFVNIKTVVVNK

SEQ ID NO: 86866 - DNA, 1365 bp, Methanosarcina acetivorans C2A
  CDS (1)..(1365): transl_table=11
atgaaaatcaaatctattaatccttatactgaagaagtaaactgggtttacgatgtattatcttttggagactgcgaagaccagatcaaaaagtccagggctactttttcgggttggagctcgctttctgttgaggaaagaaccaggtatattgcacgtgcagctgaggtactcaggcaaagcaaaagggtgtacgccgaaattatcacaaaagaaatgggaaagccaatcaggcaggcacttggagagattgataattgcgcatgtctctgtgactattatgcggaaaattcggcagagtttctgaaggatgaagttgtggaaacagaagccgaaaagagctatgtcacctttgagcccctgggaattattctcgggatcgcaccctgggattttcctttctggcaggctttcaggtttgcagtgccagcactgactgctggaaatgtgtgcctgctgaagcatgcgtccaatgtgcctatgtcggctcttgaggttgaaaaagtatttaccgaagccggactacctgaaaatgtgtttaagaccctgctgatcgactctaaaactgccatggaaatcgtagatgaggaccttgttgacggggtttcgatcaccgggagccaggtagccggatctgaaataggggagcttgccggaaggttggtcaagccttttgttctggaacttggagggtccgaccccttcattgtgcttgaagatgcggatatagaccgggcttcacagtttgcgatagaatcccgtttccttaatgccgggcagagctgtattgccgccaagaggttcattgtcgttgaagatgtcgtcgtggatttcatcgaggccttcgaactgcatattcaggagctgaaaatcggagaccccatggatgaggaaactgacatcgggcctgtggcaaaaaaagagtgtgtcaacatccttgaaaagatcctgaaggatgcaaaaagaaaaggggcagagcctcatgtgtacggggaagaacatgcgaaaggctttttcttcagaccggcgcttatccccgctgccagtgaagacatgaaagcctgcaattttgaggtcttcggacctatcgcacccgtaatcatagcaaaggacgaggatgaggcagtggagattgcaaactctacggagttcgggtttggagctgagatctggtctgcagacctggaaagagccgaacggctggcaaaaagaatcagggcaggttttgtgaccataaacggaatggtcaaatccgacccaagactgccttttggaggagtcaaaaaatccggaataggaagggaactttcatattacggccttaagcaatttgtgaacataaaaaccgtcgttgttaacaaataa

SEQ ID NO: 86867 - protein, 454 aa, Methanosarcina acetivorans C2A
MKIKSINPYTEEVNWVYDVLSFGDCEDQIKKSRATFSGWSSLSVEERTRYIARAAEVLRQSKRVYAEIITKEMGKPIRQALGEIDNCACLCDYYAENSAEFLKDEVVETEAEKSYVTFEPLGIILGIAPWDFPFWQAFRFAVPALTAGNVCLLKHASNVPMSALEVEKVFTEAGLPENVFKTLLIDSKTAMEIVDEDLVDGVSITGSQVAGSEIGELAGRLVKPFVLELGGSDPFIVLEDADIDRASQFAIESRFLNAGQSCIAAKRFIVVEDVVVDFIEAFELHIQELKIGDPMDEETDIGPVAKKECVNILEKILKDAKRKGAEPHVYGEEHAKGFFFRPALIPAASEDMKACNFEVFGPIAPVIIAKDEDEAVEIANSTEFGFGAEIWSADLERAERLAKRIRAGFVTINGMVKSDPRLPFGGVKKSGIGRELSYYGLKQFVNIKTVVVNK

SEQ ID NO: 86868 - DNA, 1386 bp, Streptomyces coelicolor A3(2)
  CDS (1)..(1386): transl_table=11
atgcccatcgcgacggtgaacccggcgaacggcgagacgctcaggacgtacgaggccatgggcgaggaggagatcgagcgccggatcgagctcgcggaggccaccttccgcacctaccggaccacggggttctacgagcgggccgggctgatgcgccgcgccgccgaccttctcgaggccgatcagaaggagatcgggaaggtcatcaccacggagatgggcaagccggtgaagcaggcccgcgcggaggcggccaagtgcgccaaggcgatgcgctggtacgccgaccacgcggcggagctgctggccgacgaggagcccgccgaggccgacgtgaaggactccggcgcctcccgggccctggtccgctaccggccgctcggcccggtgctcgcggtgatgccgtggaacttcccgctctggcaggtgatcaggttcgcggcgcccgcgctgatggcgggcaacgtcgggctgctcaagcacgcctcgaacgtgccgcagaccgccctctacctggaggacctgttccaccgggcgggcttccccgagggctgcttccagacgctcctcatcggttccgcccaggtcgacgacgtcctgcgcgacgaacgggtacgggccgccaccctcaccggcagcgagcccgcgggccgcgcggtggccgccacggccggggagatgatcaagaagacggtgctcgagctgggcggcagcgacccgttcgtcgtcatgccgtccgccgacgtcgaacgggccgcggaggtggcggtgaccgcgcgcacccagaacgccggtcagtcgtgcatcgccgccaagcggttcatcgtgcacacggacgtctacgacgccttcgcccagcgcttcaccgagggcatgcgggcgctgaaggtcggcgacccgatggacgaggagaccgaggtcggcccgctctccagcgagcagggcctgaacgacctggtggagctggtcgacgacgcggtgcgcggcggcgcgagcgtgctgtgcggcggcgaacgtccggacgggcccggctggtactacccgccgaccgtcctggcgggcgtcacccgcgagctgcgcatccaccgcgaggaggccttcggaccggtcgccacgctctaccgggcggccgacctggacgaggcggtcctgatcgccaacgacacggacttcgggctcagttcgaacgtgtggacgcgcgacgacgcggacgtggaccgtttcgtccgggacctggaggcgggcggcgtgtacgtgaacgggatgacggcgtcccacccggcgttcccgttcggcggggtcaagcggtcgggctacgggcgtgagctgtccgggcacggaatccgcgagttctgcaacatcaccaccgtatggcacggagcgtga

SEQ ID NO: 86869 - protein, 461 aa, Streptomyces coelicolor A3(2)
MPIATVNPANGETLRTYEAMGEEEIERRIELAEATFRTYRTTGFYERAGLMRRAADLLEADQKEIGKVITTEMGKPVKQARAEAAKCAKAMRWYADHAAELLADEEPAEADVKDSGASRALVRYRPLGPVLAVMPWNFPLWQVIRFAAPALMAGNVGLLKHASNVPQTALYLEDLFHRAGFPEGCFQTLLIGSAQVDDVLRDERVRAATLTGSEPAGRAVAATAGEMIKKTVLELGGSDPFVVMPSADVERAAEVAVTARTQNAGQSCIAAKRFIVHTDVYDAFAQRFTEGMRALKVGDPMDEETEVGPLSSEQGLNDLVELVDDAVRGGASVLCGGERPDGPGWYYPPTVLAGVTRELRIHREEAFGPVATLYRAADLDEAVLIANDTDFGLSSNVWTRDDADVDRFVRDLEAGGVYVNGMTASHPAFPFGGVKRSGYGRELSGHGIREFCNITTVWHGA

SEQ ID NO: 86870 - DNA, 1365 bp, Methanosarcina mazei Go1
  CDS (1)..(1365): transl_table=11
atgaaaatcaaatccatagatccttatactgaagaagtaaactggacttacgatgcattatctttcggggactgtgaggaccagatagaaaagtccagagctgctttcttgaaatggggttctctttcggtaaaggaaagaacagcttacatttcacgggtagctgagatactcaggcagaacagacgaatatatgccgggataatcacaaaagaaatgggaaaacctgtaaggcagtcacttgcagagatagaaaaatgcgcatggctgtgtgactattacgcagaaaatgcagccgggtttctggaagatgagcttgtagaaacagaagcagaaaaaagctatgtcacttttgagcccctgggagttattctcgggataatgccatggaattttcctttctggcagactttcagatttgcagtgcctacattgattgcaggaaacgtgtgcctgctgaagcacgcatccaatgtgcccggatcggctcttgagatagaaaaggtttttacaggcgctggacttcctcaagatgtatttaagagcctgcttatagactccagaaccgccatggaaattattgacgaagatcttgttgacgggatttcccttaccggaagtgtgcgagccgggtctgaaattggagaactcgccggaaggacgattaaacccttcgttctggaacttggagggtctgacccttttatagtgcttgaagatgcagatatagaccgggctgctgaggttggagtaagagcccgtttcatcaatacagggcaaagctgcattgctgccaagaggttcattgtagttgaagatgtggtcgtggatttcattgaggcgttcgaactgcacatgcaggagttaaaggtcggagatcccatggatgaagaaaccgacatagggcctgtggcaaaaaaagaatttattgacagccttgagagagtcctgaaggacgcaaagaagaaaggagcagaaccccgcgtctacggcgaagagcataaaaaaggctttttcttcaggccgaccattgtgcctgcagccagcacagacatgaaagtcctgaatatggaagtcttcgggcctattgcgcctgtggtcatggtaaaggatgaagatgaggcagtaaaaattgcaaactcaacagatttcgggctcggagccgagatctggtctgcagacctgaaaagagccgagcatctggcaaaaaggataaagtcgggttttgtaaccataaatggaagagtcaagtctgacccaaggctgcctttcggaggcgtcaaaaaatccggaatcggaagggagctttcacattacgggctgaaagaatttgtaaacataaaaaccgtggttattaataagtaa

SEQ ID NO: 86871 - protein, 454 aa, Methanosarcina mazei Go1
MKIKSIDPYTEEVNWTYDALSFGDCEDQIEKSRAAFLKWGSLSVKERTAYISRVAEILRQNRRIYAGIITKEMGKPVRQSLAEIEKCAWLCDYYAENAAGFLEDELVETEAEKSYVTFEPLGVILGIMPWNFPFWQTFRFAVPTLIAGNVCLLKHASNVPGSALEIEKVFTGAGLPQDVFKSLLIDSRTAMEIIDEDLVDGISLTGSVRAGSEIGELAGRTIKPFVLELGGSDPFIVLEDADIDRAAEVGVRARFINTGQSCIAAKRFIVVEDVVVDFIEAFELHMQELKVGDPMDEETDIGPVAKKEFIDSLERVLKDAKKKGAEPRVYGEEHKKGFFFRPTIVPAASTDMKVLNMEVFGPIAPVVMVKDEDEAVKIANSTDFGLGAEIWSADLKRAEHLAKRIKSGFVTINGRVKSDPRLPFGGVKKSGIGRELSHYGLKEFVNIKTVVINK

SEQ ID NO: 86872 - DNA, 1365 bp, Xanthomonas axonopodis pv. citri str. 306
  CDS (1)..(1365): transl_table=11
atgtcctacgacaccgtcaaccccgccaacggccaggtcgagcatacccagcagaccctggacgccgctgccatcgaagcgcgtctggctgcttccgccaaggcatttccggcctgggccgcgttgccgctggccgagcgtggcgccttgctgcgccgcatcggagaggagctgaccaggcgccgcgaggacctgcaacgcatcatgaccgccgagatgggcaagctgcgccgtgaggcgctggccgagatcgacaagtgcgcgcaggcctgcgcctattacgccgaacacgccgccgactacctggcgccgcgcgacattcctaccgaagcgcaatccagttatgtgcgctacgaaccgctgggctgcgtgttcgcggtcatgccgtggaattttccgttgtggcaggcgttccggtttctggcgccaagcctgatggccggcaacgtgtcgctgctcaagcacgccagcaacgtgccgcgctgcgctgacgccatgaaagaggtgttggacgccgccggcattccgccgggcgtgttcgatgtgctgcatatcgataacgaccaggctgccgatgtactgcgcgatgaccgcattgctgcagtaacgctgaccggcagcgaacgcgccggtcgctcgctggccgccaatgcaggcgaccagctcaagaagtgcgtgatggagctcggcggcagcgacgcgttcgtggtgctcgaagacgccgatctggcgcacaccgtgccatcggccgtgcagtcgcgcttcgacaatagcgggcagacctgcatcgccgccaagcgtttcatcgtggtggatgcgatcgccgaccggttcatcgagcgcttcgtcgcggcggcagcccagcgcgtcgtgggcgacccgcagcaggacagcaccacgctggcgccgatggcgcgtgccgacctgcgcgacgaattgcacaagcaggtgcaggccagcgtggcgaagggcgccaaggtcttgttgggcggcgaaccggtcgccggctcgcatgccggctatccggcgaccattctcgacactgtcgctcccggcatgccggcatacgacgaagaattcttcggcccggtcgcctcgatcatccgggttgccgacgaggcagaagcggtgcgcgtggccaatgacaccaccttcggtctcggcggtagcgtatggacggccgacgccaagcgcggcgagcgcgtggcgcagcagctgcagtgcggcgcggcgttcgtcaactcagtggtcaagagcgatgtgcgcttgccgttcggcggcatcaaacgctccggcttcggccgcgagctggccgagcacggcatccatgagttcatgaacgtcaagacgatctatgtggcttga

SEQ ID NO: 86873 - protein, 454 aa, Xanthomonas axonopodis pv. citri str. 306
MSYDTVNPANGQVEHTQQTLDAAAIEARLAASAKAFPAWAALPLAERGALLRRIGEELTRRREDLQRIMTAEMGKLRREALAEIDKCAQACAYYAEHAADYLAPRDIPTEAQSSYVRYEPLGCVFAVMPWNFPLWQAFRFLAPSLMAGNVSLLKHASNVPRCADAMKEVLDAAGIPPGVFDVLHIDNDQAADVLRDDRIAAVTLTGSERAGRSLAANAGDQLKKCVMELGGSDAFVVLEDADLAHTVPSAVQSRFDNSGQTCIAAKRFIVVDAIADRFIERFVAAAAQRVVGDPQQDSTTLAPMARADLRDELHKQVQASVAKGAKVLLGGEPVAGSHAGYPATILDTVAPGMPAYDEEFFGPVASIIRVADEAEAVRVANDTTFGLGGSVWTADAKRGERVAQQLQCGAAFVNSVVKSDVRLPFGGIKRSGFGRELAEHGIHEFMNVKTIYVA

SEQ ID NO: 86874 - DNA, 1488 bp, Rhizobium etli
  CDS (1)..(1488): transl_table=11
atggcaatctccagcaccctgctaggccgtttaaaggaccagactctcgttcgcgagcagatgctggttggaggaaagtggtcgagcgaaggggtaaacggcacacgcatcaacgtgctaaacccctccacgatggacgtccttgcctctttgcctagcgctggccttgctgaagtgcgagcctctatcgatgctgcaaaggctgcacagaagaagtgggctaaggtttcggcgaaggaacgctcgctgatcatgcggaagttctacgaagaggtggtagctaacgctgaagacctggccgtaattctgacatcggaaatgggcaagccactggcggaagcgcgtggcgagattgcttacggcgcttcctacatcgaatggttcggtgaggaagccaagcgtgtctatggtgacaccattccaggtcaccaggccgacaagcgactgcttgtcatcaagcagccggttggcgttgtggccgccatcgctccttggaactttccgtcggcgatggtgtgccgcaagatcgcgccggcgctcgcgtccggctgcgcgatcgtattcaagcctgctgccgagactccgttatcggcgcttgcattggcgatcctcgcggagcgtgccggaatacccgatggcttgttcagcgtcctcccgacggataatgcaagaatgtttggcgaggaggtctgctccaacccggtcgtcaagaaactgaccttcaccggttcgaccgaagttggccgtatcttgatggcgcaaggcgcccagaagatcatgaagctgagcctggaactcggcggcaatgcgccgtttatcgttttcgacgatgcagatctcgaccaggcggtcgagggggctatgctttctaagtttcgtaacgcgggtcaaacctgcgtgtgcgcgaaccgtatttacgtacagagcgggatccatgacaggttcgtcgagaagctggcaatgcgcgtgagtgccttgcaggttcttgacgggtttgagagcggggcgacgatcggcccgttgatcaacgatgaagcggtagcaaagctctatggtcatatcgatgacgctgtgaccaagggtgcgactgtcgtggttggtggtgaccgcgatgctcgcggaggcacgttcgtccaaccaacgcttctctcgggtgccacaaaggatatgaaggttgcgcgtgaggaaaccttcgcgcctctggctccggtgttcaagttcgatactgtcgaggaagtcatcgaactcgcgaacgatacggaattcggcttggcagcctactttttcgccaacgacctcaggaacgtttggaaggtcacagaggcgctggaatacggcatggttggcgtgaacacgggtctgatttccaccgaattagcgccattcggcggcgtcaagcaatccggcttcggccgagagggctcaaagtacggaatggatgacttcttatccatgaaatacgtctgcatgggcgggatcggcgcatag

SEQ ID NO: 86875 - protein, 495 aa, Rhizobium etli
MAISSTLLGRLKDQTLVREQMLVGGKWSSEGVNGTRINVLNPSTMDVLASLPSAGLAEVRASIDAAKAAQKKWAKVSAKERSLIMRKFYEEVVANAEDLAVILTSEMGKPLAEARGEIAYGASYIEWFGEEAKRVYGDTIPGHQADKRLLVIKQPVGVVAAIAPWNFPSAMVCRKIAPALASGCAIVFKPAAETPLSALALAILAERAGIPDGLFSVLPTDNARMFGEEVCSNPVVKKLTFTGSTEVGRILMAQGAQKIMKLSLELGGNAPFIVFDDADLDQAVEGAMLSKFRNAGQTCVCANRIYVQSGIHDRFVEKLAMRVSALQVLDGFESGATIGPLINDEAVAKLYGHIDDAVTKGATVVVGGDRDARGGTFVQPTLLSGATKDMKVAREETFAPLAPVFKFDTVEEVIELANDTEFGLAAYFFANDLRNVWKVTEALEYGMVGVNTGLISTELAPFGGVKQSGFGREGSKYGMDDFLSMKYVCMGGIGA

SEQ ID NO: 86876 - DNA, 1374 bp, Chlorobium tepidum TLS
  CDS (1)..(1374): transl_table=11
atgatcgttaccatcaatccagcgactggcgagcagctcgccgaatatccggtgatgattgccgggcagattgattcagtgctccgccaggctgacgccgatttccgccgctggcgctcgaccagctttggggagcgccgcacctgcatgaaacggcttgcggaattgctccgtgaacaggcagagaagcacgggcggatcatcacgcttgaaatgggcaagccgttctcgcaggcggtggccgaggtgaacaagtgcgcctgggtgtgcgattacttcgccgaccatgccgaggagtttcttcagcccgaacagagtgagatcgacggcgcgaagggtattgtggctttcgagccgcttggcgtgattctcggcgtgatgccgtggaactttccgtactggcaggtgctgcgcttcgccgcgccgattctcatggcgggcaacggcatcgtggtcaagcacgcgccgaacgtgaccggctgcgccatcgccatcgaaaagctgtttcgcgatgccggcttcccggagcatctttaccgcgcggtgcacatcgacctcgacgaggttgaccggctgaccggtttcatgatcgaccatccggtcatcaaggcagtctccgtgaccggcagcaccggtgcggggcaggctgtagcggccaaagcgggcaaggcgctaaagcgcagcgtgctggagctgggcggcagcgatccctatatcgtgctcgaagatgccgatcttgcgcaggcggtcgatgcgtgcgtcgccggacgcctcctcaacgcgggccagagctgtattgccgccaagcgcttcatcgtgcgcaaggagattatcggcgagttcaccaaaaagattgtgcagcggatgcagacggcggtgatgggcgatcctttcgccaagagcacggaggtcggccccatcgcacgcgaggaccttcgcgatctcgtgcattcgcaggtgcagcgcagcgtcgaggctggcgcggagctgctctggggtggtcacgtgccgaacgcgccgggctggtactatccgccgaccgtgctctctggcgtcaaaccgggaatgcccgcctactcggaggagattttcggcccggtggccacgatcatcgaggtggccgacgacgacgaggcggtcgccatcgccaacgacagcgagttcggcctcggctcggcggtcttttcgcaggatgtggagcgcgcgcttggcatcgcccggcgtcttgaagcagggagctgttttatcaacacgatggtcaagtccgacccgcgcctgccgttcggtggcgtgaaacagtcgggctatggacgcgagctgtcgcaccacggcatccgcgagtttgtcaacatcaagactttttatctgccctga

SEQ ID NO: 86877 - protein, 457 aa, Chlorobium tepidum TLS
MIVTINPATGEQLAEYPVMIAGQIDSVLRQADADFRRWRSTSFGERRTCMKRLAELLREQAEKHGRIITLEMGKPFSQAVAEVNKCAWVCDYFADHAEEFLQPEQSEIDGAKGIVAFEPLGVILGVMPWNFPYWQVLRFAAPILMAGNGIVVKHAPNVTGCAIAIEKLFRDAGFPEHLYRAVHIDLDEVDRLTGFMIDHPVIKAVSVTGSTGAGQAVAAKAGKALKRSVLELGGSDPYIVLEDADLAQAVDACVAGRLLNAGQSCIAAKRFIVRKEIIGEFTKKIVQRMQTAVMGDPFAKSTEVGPIAREDLRDLVHSQVQRSVEAGAELLWGGHVPNAPGWYYPPTVLSGVKPGMPAYSEEIFGPVATIIEVADDDEAVAIANDSEFGLGSAVFSQDVERALGIARRLEAGSCFINTMVKSDPRLPFGGVKQSGYGRELSHHGIREFVNIKTFYLP

SEQ ID NO: 86878 - DNA, 1389 bp, Thermosynechococcus elongatus BP-1
  CDS (1)..(1389): transl_table=11
atggtaatcgcgtccgttaatcccacaacggctgaggtcttaaaaaccttttctcccttaggggctgaggaagtagacagagccattgcccaagcggcgacgacctttgagacctatcgcctgacatcctttgaacagcgtgcccagtggctagaaaacaccgccaatctcctgcaacagcagcgggagactcttgctcgccttatgacccttgagatgggcaaaccaattgcagaggcacgggctgaaattgacaaatgtgcgtgggtttgtcgttactatgccgagcaaggggcagctttcctggagcctgaattcattcccacggaggcaagctacagtgcgattcattaccagccccttggcattattttggcggtgatgccctggaattttcccttttggcaggtgtttcgttttgcggcaccggccttaatggcggggaatgtggccctgctcaagcatgcttctaatgtgcctcagtgcgcactggcgatcgcccagatcttcaggcaagcgggctttcctgagggagtctttcaaaccctgctgattcccggcagtgccgttgctgatctggtggcagatccgcgtattaaggcggctaccctcacgggcagcgaggcagcgggcacaagtctagcccaagcagcgggtcagcacctcaagaaaacagttctcgaactgggggggagtgatccttttattgtgatgcccagcgcgaatatctcccaagcgatcgccaccgccgttcaagcgcgcatgattaacaatggccaatcctgcattgccgcaaaacgctttattgtccatgaggctgtctatgacacctttgccgagggcataaaagccgccttcgagtcatgggtgattggcgatcccttggaacctaccacccaactcggccccctagctaccgccgccatccgcgatgaactccacgctcaagttgaacttgccctgggtcatggtgccaaggcgttttaccgccgctctctggatctaccgacccagtgtcgccaggggtatttctttgggccaacaattttgacggaggtaactcccaataaccccgtatttacccaagagctatttgggcctgtggcaatgctctttcgggtatcgtccctgacggcggcaattgaactggccaatgccacaccctttggtttaggtgccagtgcttggacacaggacagcgatgaagcagagatcctagtgcgggatctcgaagcgggggctgtctttattaacgccatggtcaagtctgatccgcgtttaccctttggcgggattaagacatctggctatggccgcgaactgggacgcgcaggactcttggagtttgttaatatcaaaacagtgtgccgagcgaatactcacagttga

SEQ ID NO: 86879 - protein, 462 aa, Thermosynechococcus elongatus BP-1
MVIASVNPTTAEVLKTFSPLGAEEVDRAIAQAATTFETYRLTSFEQRAQWLENTANLLQQQRETLARLMTLEMGKPIAEARAEIDKCAWVCRYYAEQGAAFLEPEFIPTEASYSAIHYQPLGIILAVMPWNFPFWQVFRFAAPALMAGNVALLKHASNVPQCALAIAQIFRQAGFPEGVFQTLLIPGSAVADLVADPRIKAATLTGSEAAGTSLAQAAGQHLKKTVLELGGSDPFIVMPSANISQAIATAVQARMINNGQSCIAAKRFIVHEAVYDTFAEGIKAAFESWVIGDPLEPTTQLGPLATAAIRDELHAQVELALGHGAKAFYRRSLDLPTQCRQGYFFGPTILTEVTPNNPVFTQELFGPVAMLFRVSSLTAAIELANATPFGLGASAWTQDSDEAEILVRDLEAGAVFINAMVKSDPRLPFGGIKTSGYGRELGRAGLLEFVNIKTVCRANTHS

SEQ ID NO: 86880 - DNA, 1449 bp, Shewanella oneidensis MR-1
  CDS (1)..(1449): transl_table=11
gtgttgcttaacgatccgagtctgctacgtcagcaatgttatatcaatggtcagtggtgcgatgccaactctaaggaaaccgttgcgattactaatccggcaacgggcgcagtgatcgcctgtgtccctgtgatggggcaggccgaaactcaagcggcgattgcggcagctgaggcggcattacccgcatggcgagcattaaccgccaaagagcgcggtgccaagctgcgccgttggttcgaattattgaatgaaaacagtgatgatttagcactgctgatgaccagtgagcagggcaagcctctgactgaagccaaaggtgaagtgacctacgcggcatcttttatcgaatggtttgccgaagaggctaagcgcatctacggcgatactattccggggcatcaaggcgataaacgcattatggtcatcaagcagcctgtcggggtgacagcggcgattacgccatggaactttcctgcagcgatgatcacccgaaaagcggcgcccgcgctagctgcaggttgtactatggtggttaaacctgcgccgcaaacgccctttaccgcattagcattagccgtgttggctgaacgtgcgggtattccggcaggggtctttagtgtgataacgggtgacgctattgccatcggtaatgagatgtgcactaacccgatagtgcgtaagttgtctttcacgggctcaaccaatgttgggattaagttgatggcgcagtgcgcgccaacgctgaaaaaattatctttagaattaggtggtaatgcgccttttattgtattcgatgatgccaatattgatgcggccgttgaaggcgccatgatcgctaaatatcgcaatgcgggccaaacctgcgtttgcgctaaccgcatttatgtgcaggcgggcgtgtatgacgaatttgctgaaaagctcagtatggccgtggctaagttaaaggttggtgaggggattattgcgggtgtgacaaccggaccgctgatcaatgcagcagcggtggaaaaagtgcaaagtcatcttgaagatgccatcaaaaaaggcgcgacagtgcttgccggtgggaaagttcacgaacttggcggtaatttctttgagccaaccgtgctgaccaatgccgataaaagcatgcgtgttgcccgtgaagaaacgtttggcccactcgcgccgttgtttaaatttaacgatgtggatgatgtgatcaaacaagccaatgataccgagtttggtttagcggcatatttctatggccgtgatatttccttggtgtggaaagtcgccgagtcgctcgaatacggcatggtgggggttaatactggcttgatttccaccgaagtggcgccctttggcggaatgaagtcttcagggcttggccgtgaaggttctaagtatggcatcgaagaatatttagaaattaaatatatctgtatgtctgtttaa

SEQ ID NO: 86881 - protein, 482 aa, Shewanella oneidensis MR-1
MLLNDPSLLRQQCYINGQWCDANSKETVAITNPATGAVIACVPVMGQAETQAAIAAAEAALPAWRALTAKERGAKLRRWFELLNENSDDLALLMTSEQGKPLTEAKGEVTYAASFIEWFAEEAKRIYGDTIPGHQGDKRIMVIKQPVGVTAAITPWNFPAAMITRKAAPALAAGCTMVVKPAPQTPFTALALAVLAERAGIPAGVFSVITGDAIAIGNEMCTNPIVRKLSFTGSTNVGIKLMAQCAPTLKKLSLELGGNAPFIVFDDANIDAAVEGAMIAKYRNAGQTCVCANRIYVQAGVYDEFAEKLSMAVAKLKVGEGIIAGVTTGPLINAAAVEKVQSHLEDAIKKGATVLAGGKVHELGGNFFEPTVLTNADKSMRVAREETFGPLAPLFKFNDVDDVIKQANDTEFGLAAYFYGRDISLVWKVAESLEYGMVGVNTGLISTEVAPFGGMKSSGLGREGSKYGIEEYLEIKYICMSV

SEQ ID NO: 86882 - DNA, 1392 bp, Pseudomonas putida KT2440
  CDS (1)..(1392): transl_table=11
atggcttacgccactatcaacccctataacggggaattgctcaagaccttcccagaaaccaccgacgaccaggtcaatcaggcgctggacgacgcacatagcgcgttcctcgactggaaagaacgcagctttaccgaacgcagtgccattctccagcgggcagctgagctgctacgcgcccaggccagcgactatgcccacctgctaaccttagagatgggcaagatcaccgctgaagctttgggcgaagtcgagatttcagcgcgaattttagagtattacgctaagcatgcggaggggctgctagctccagagaaactccctgttgcagaaccgtccgagggagaggcaactttaactcacgagccgctgggaatcattctagccatcgaaccatggaacttcccctactaccaagtagcacgcatcctcgctccgcaattagcagccggcaacaccctactgctcaaacatgcgtcaaacgtaccgcagtgtgctgcagccttcgaacagttgatgctagatgcgggcttaccctcgggagctttccgcaatctctacgcaacgcgtcaacagatcgaaagcattatcagcgatgatcgtgttcatggtgtcgctctgactggctctgaaggagcaggcgccatcattgctgcgcaggccggcaaggcgttgaagaagtcgaccctggaactaggtggtgcagatgccttcgtggtactgcgcgatgccgagctggataagactgtgaagtgggccgtgatcgggcgtcactggaacgctggacaggtgtgtatttcctccaaacgcatgattgtggtggacgaggtctatgaggagtttctgagtcgctacacagaaggagtggcgcagcttaaggctggtgatccctttgcccaggaaaccacgctggcccctttgtcatcgcaggccgccgccgacgagattcgtcagaagatccaggtggcagtcgctcacggcgcgagagccaccgaagtcggccccagagtccctagactgggggccttcgtgcaaccaactatcctgactgacgtagagcccgataatcccgcctattactgggagttcttcggcccagtgtcgatgatcttccgtgccagggacgagcaggacgcggtgcgtattgccaacgattcgccgttcggtctgggcggctcggtattcaccgccgatactaagcatggcgccgaggtggccaaacgcatctccactggtatggtgttcgtcaaccatcccagcacctcgagggccaacctacccttcggtggtatcaaacgctccggctacgggcgcgagctaatcggcttgggcatcaaggaattcgtcaatcacaagctgattagcgtcatcgatattgacgcgccgttctaa

SEQ ID NO: 86883 - protein, 463 aa, Pseudomonas putida KT2440
MAYATINPYNGELLKTFPETTDDQVNQALDDAHSAFLDWKERSFTERSAILQRAAELLRAQASDYAHLLTLEMGKITAEALGEVEISARILEYYAKHAEGLLAPEKLPVAEPSEGEATLTHEPLGIILAIEPWNFPYYQVARILAPQLAAGNTLLLKHASNVPQCAAAFEQLMLDAGLPSGAFRNLYATRQQIESIISDDRVHGVALTGSEGAGAIIAAQAGKALKKSTLELGGADAFVVLRDAELDKTVKWAVIGRHWNAGQVCISSKRMIVVDEVYEEFLSRYTEGVAQLKAGDPFAQETTLAPLSSQAAADEIRQKIQVAVAHGARATEVGPRVPRLGAFVQPTILTDVEPDNPAYYWEFFGPVSMIFRARDEQDAVRIANDSPFGLGGSVFTADTKHGAEVAKRISTGMVFVNHPSTSRANLPFGGIKRSGYGRELIGLGIKEFVNHKLISVIDIDAPF

SEQ ID NO: 86884 - DNA, 1386 bp, Pseudomonas putida KT2440
  CDS (1)..(1386): transl_table=11
atgagcgcgatcagcagcctgacccacgccatctccctcgacccgtacagcggcgagcagatcggcacctacccgttcgacaccgacgccgcactggaagcggcgctgcaacgcgccaaggttggctaccgccagtggcgccaggtgtcgctgggtcagcgcagcgagtacctgctggccctggccgacaccctcgaagccaaggctgaagctttcgcgcacatgatcagccgcgaaattggcaagccgatcgcccaggctcgcggtgaagtcagcaagtgtgtaggcctttgccgctggtacgccgagcacggcccggccatgctcgccgccgagccgacccaggtcgaaaaagcccgtatcgaataccgcccgctgggcccgatcctggccgtgatgccgtggaacttcccggtctggcaggtgctgcgcggcgccgtgccggcgattctggcgggtaacacctacgtgctcaagcacgcaccgaacgtaatgggcagcgcctacctgatggctgagctgttcaaggatgccggcctgccggaaggcgtgttcgaagtgctgaacgtgaccccggatggcgtcacccgcgccatcaacgatccgcgcatcgccgccgtgaccctgaccggcagcgtgcgtgccggcatggcgattggtgcacaggccggcgccgcgctgaagaagtgcgtgttggagctgggaggctccgatcccttcatcgtgctggccgatgccgacctggatgccgccgtccaggccgcggtgataggccgctaccagaacaccggccaggtgtgcgccgccgccaagcgcctgatcgtggaagccagcatcgtcgacgcgttcacccacaagttcgttgaagccactcgccagttgaaagtcggcaacccgctggaggacgacacctatatcggcccgatggcccgctatgacctgcgcgacgagttggatggccaggttcaggcgacgctggccgaaggcgccacgttgctgctgggcggcaacaaggtcgaaggcgtggccaacttctacgcgccgaccgtgttcgccaatgtcaccccggacatgaccgcgttcaagcaggagctgttcggcccggtagcggcgatcatcactgcacgcgatgccgaccatgccgtggaactggccaacgacagcgagtttggcctggcctcgaccatctacacagccgactatgcgctggccgaacgcatgaccgccgcactggataccggtggcgtgttcatcaacggctactgcgcttcggacccccgcgtggcgtttggtggcgtgaagaagagtggtttcggccgtgagctgtcgcactttggtgtgcgcgagttcaccaatgcccagaccgtgtggctggaccgtaactga

SEQ ID NO: 86885 - protein, 461 aa, Pseudomonas putida KT2440
MSAISSLTHAISLDPYSGEQIGTYPFDTDAALEAALQRAKVGYRQWRQVSLGQRSEYLLALADTLEAKAEAFAHMISREIGKPIAQARGEVSKCVGLCRWYAEHGPAMLAAEPTQVEKARIEYRPLGPILAVMPWNFPVWQVLRGAVPAILAGNTYVLKHAPNVMGSAYLMAELFKDAGLPEGVFEVLNVTPDGVTRAINDPRIAAVTLTGSVRAGMAIGAQAGAALKKCVLELGGSDPFIVLADADLDAAVQAAVIGRYQNTGQVCAAAKRLIVEASIVDAFTHKFVEATRQLKVGNPLEDDTYIGPMARYDLRDELDGQVQATLAEGATLLLGGNKVEGVANFYAPTVFANVTPDMTAFKQELFGPVAAIITARDADHAVELANDSEFGLASTIYTADYALAERMTAALDTGGVFINGYCASDPRVAFGGVKKSGFGRELSHFGVREFTNAQTVWLDRN

SEQ ID NO: 86886 - DNA, 1413 bp, Escherichia coli CFT073
  CDS (1)..(1413): transl_table=11
atgactcataaaggagataccccgatgaccattactccggcaactcatgcaatttcgataaatcctgccaccggtgaacaactttctgtgctgccgtgggctggtgttgacgatatcgaaaacgcgcttcagctggcagcagcaggctttcgcgactggcgcgaggcaaatatagattatcgtgctgaaaaactgcgtgatatcggtaaggctctgcgcgcccgtagcgaagaaatggcgcaaatgatcacccgtgaaatgggcaaaccaatcaaccaggcgcgcgctgaagtggcgaaatcggcgaatttgtgtgactggtatgcagaacatggtccagcaatgctgaaagcggaacctacgctggtggaaaatcagcaggcggttattgagtatcgaccgttggggacgattctggcgattatgccgtggaattttccgttatggcaggtgatgcgtggtgctgttcccatcattcttgctggtaacggctacttacttaaacatgcgccgaatgtgatgggctgtgcacagctcattgcccaggtgtttaaagatgcgggtatcccacaaggcgtatatggctggctgaatgccgacaacgacggtgtcagtctgatgattaaagactcgcgcattgctgctgtcacagtgaccggaagtgttcgtgctggagcggctattggcgcacaggctggagcggcactgaaaaaatgcgtactggaactgggtggttcggatccgtttattgtgcttaacgatgccgatctggaactggcggtgaaagcggcggtagccggacgttatcagaataccggacaggtttgtgcagcggcaaaacgctttatcatcgaagagggaattgcttcggcatttaccgaacgttttgtggcagctgcggcagccttgaaaatgggcgatccccgtgatgaagagaacgctctcggaccaatggctcgttttgatttacgtgatgagctgcatcatcaggtggaaaaaacactggcgcagggtgcgcgtttgttactgggcggggaaaagatggctggggcaggtaactactatccgccaacggttctggcgaatgttaccccagaaatgaccgcgtttcgggaagaaatgtttggccccgttgcggcaatcaccattgcgaaagatgcagaacatgcgctggaactggctaatgatagtgagttcggcctttcagcgaccattttcaccaccgacgaaacacaggccagacagatggcggcacgtctggaatgcggtggggtgtttatcaatggttattgtgccagcgatgcgcgagtcgcctttggtggcgtgaagaagagtggctttgggcgtgagctttcccattttggcttacacgaattctgtaatatccagacggtgtggaaagaccggatctga

SEQ ID NO: 86887 - protein, 470 aa, Escherichia coli CFT073
MTHKGDTPMTITPATHAISINPATGEQLSVLPWAGVDDIENALQLAAAGFRDWREANIDYRAEKLRDIGKALRARSEEMAQMITREMGKPINQARAEVAKSANLCDWYAEHGPAMLKAEPTLVENQQAVIEYRPLGTILAIMPWNFPLWQVMRGAVPIILAGNGYLLKHAPNVMGCAQLIAQVFKDAGIPQGVYGWLNADNDGVSLMIKDSRIAAVTVTGSVRAGAAIGAQAGAALKKCVLELGGSDPFIVLNDADLELAVKAAVAGRYQNTGQVCAAAKRFIIEEGIASAFTERFVAAAAALKMGDPRDEENALGPMARFDLRDELHHQVEKTLAQGARLLLGGEKMAGAGNYYPPTVLANVTPEMTAFREEMFGPVAAITIAKDAEHALELANDSEFGLSATIFTTDETQARQMAARLECGGVFINGYCASDARVAFGGVKKSGFGRELSHFGLHEFCNIQTVWKDRI

SEQ ID NO: 86888 - DNA, 1389 bp, Erwinia pyrifoliae
  CDS (1)..(1389): transl_table=11
  misc_feature (1061)..(1061): n is a, g, c or t
  misc_feature (1071)..(1071): r is g or a
  misc_feature (1074)..(1074): s is g or c
  misc_feature (1141)..(1141): k is g or t
  misc_feature (1155)..(1155): r is g or a
atgatgaaaaacgtttcttctgctgtagcggtttcccgcaatccggccacgggtgaggtgtttgcccgttatccttttgcaaccatcgccgaggttgacagcgcgctggcgttaaccaatggtgcatttcaatactggcgtcacagcgcaatgagcgatcgcgttcagctgctgtgcaacgttgcggacgccctgcgtcagcaggcgagagagctggcggagatgatgaccagtgaaatgggcaagcctgtcgatcaggggctggccgaagtcgagaaaagtgccagactgtgcgaatggtacgctgggcatggcccggctttccttcagcgtgagccgaccctggtcgagggtaacaaagcctttgtcgactatctgccgctgggtccggttctgtcggtgatgccgtggaacttccccgtctggcaggtgctgcgcggcgcggtaccgatcctgctggccggtaacagctacctgttgaaaccggcaccgaatgtgatgggatgtgcgctgttgctgcagcaaatcctgacccgtgtcggcgtgccggaagggctttttgcggtggtgaatgcggataatgacggcgtggcgcaggcgattaacgatcggcgtattgctgccgtgaccgtgaccggcagcgtgcgcgccggtgcggcgattgcagccctgtccggtgcagcgataaaaaaatgcgtgctggagctgggcggttctgatgcctttatcgtgctggctgatgcggatattgatgctgcggtaaaaggggcgattgcgggccgctttatgaataacggtcagctgtgtatttccgcgaagcgcatcattgttgaagcgccggtgttcgacgcgttccgggataagttcgtcagtgccgtcaaagagatgaaaataggcgacccgcgcgaatccggcacctggatcggcccgatggcgcgttacgatctgcgcgatgagctggattctcaggtacaggccacgctgaaagagggggctaccctgctgctcggcggccatgttctgccgggcgagggtaactattatgcgccgacggtgcttantgacgtgaarccsggtatgaccagttttgcacaagaactgtttggtccggtggcttcgctgattcaggccgacaatgctkaacatgcggtggcratggcgaatgactcggagttcggcctcggcggcagcatgtggagccgcgatcttgccgtagcgcagaaactggcgtcacgcatcgaaaccggcggtgtctttattaactcaccgagtttctccgatccgcgtgttccgattggtggcgtgaagaaaagcggctttggtcgtgagctgtctcattttggcctgcgcgagtttaccaatactcagacggtgtggatggaagaataa

SEQ ID NO: 86889 - protein, 462 aa, Erwinia pyrifoliae
  misc_feature (354)..(354): The Xaa at location 354 stands for Asn, Ile, Ser, or Thr.
  misc_feature (381)..(381): The Xaa at location 381 stands for Stop, or Glu.
MMKNVSSAVAVSRNPATGEVFARYPFATIAEVDSALALTNGAFQYWRHSAMSDRVQLLCNVADALRQQARELAEMMTSEMGKPVDQGLAEVEKSARLCEWYAGHGPAFLQREPTLVEGNKAFVDYLPLGPVLSVMPWNFPVWQVLRGAVPILLAGNSYLLKPAPNVMGCALLLQQILTRVGVPEGLFAVVNADNDGVAQAINDRRIAAVTVTGSVRAGAAIAALSGAAIKKCVLELGGSDAFIVLADADIDAAVKGAIAGRFMNNGQLCISAKRIIVEAPVFDAFRDKFVSAVKEMKIGDPRESGTWIGPMARYDLRDELDSQVQATLKEGATLLLGGHVLPGEGNYYAPTVLXDVKPGMTSFAQELFGPVASLIQADNAXHAVAMANDSEFGLGGSMWSRDLAVAQKLASRIETGGVFINSPSFSDPRVPIGGVKKSGFGRELSHFGLREFTNTQTVWMEE

SEQ ID NO: 86890 - DNA, 1365 bp, Vibrio vulnificus CMCP6
  CDS (1)..(1365): transl_table=11
atgaccattaccaatccttttaacgatgaagtgattggtacggtgccgaatatgggggaaaaggagacccaagaagtgatcgcgggtgcagacaaagcgtttcagcagtttaaagcactcacggcacaagaacgggccaatctgctgcatcgttggcatcagttgatcctagaacacagcgatgagttggcgcacatcatgacgttagaacaaggtaagccattggctgaagcgaagggagaagtgctttatgccgccagttttattgaatggtttgctgaagaggcgcgcagagcctatggcacgctcgtgccaagccacaaagcaaacgccaagattttggtgaccaaagagccgatcggcgtggtggctgcgattacgccttggaacttccccgcggcgatgatcacccgcaaatgcggcccagcgtttgcggcaggttgcccggtgattttaaaacccgcgccggataccccttttaccgcgcttgcactggctgtgctggcggaaaaagcgggctttcctgctggggtatttaacgtgatcactggcgatgcggttgcgattggtggcgaactgaccagtaacaagcgcgttcgtaaattatcgttcacgggctcaacgccggtaggcaaactgttgatgcgtcaatcggcagacaacatcaaaaagctctctcttgaactgggtggcaatgccccgtttatcgtctttgaagatgccgatttggatgccgccgttgaaggggcaatgatcgccaagttccgcaatgccgggcaaacctgcgtctgtgcaaaccgcctttatgttcagcgctcggtttattctgaattttgtcaaaaactggtggcgaaagtctcggcgcttaaagtgggtaacggctttgaccaaggcgttcatattggcccgttaatcaacgatgccgcagtcgctaaggtggtgcaacacgtcgaagacgcccaaagcaaaggggcgcaaattgaatgtggtcaattacctacggcaggcagtcgacttgtgcagcctttggtactcagtggcgtgacggatgagatgctggtggcgcaggaggaaacctttggcccaatggcaccactgtttgtctttgatagcgaagaggaagtgctggcacgtgccaacaacaccgattttggcctcgcggcgtacttctatacacaatcactctcacgagcttggcgcatgtcggaagcgcttgaagcgggcattgtcggtatcaatgaaggattgatttccaccaccgttgcgccgtttggtggcgtaaaagaatcgggcttagggagagaaggttcattccttggcatggatgattacatggaaagtaagtacatcctgatggggttataa

SEQ ID NO: 86891 - protein, 454 aa, Vibrio vulnificus CMCP6
MTITNPFNDEVIGTVPNMGEKETQEVIAGADKAFQQFKALTAQERANLLHRWHQLILEHSDELAHIMTLEQGKPLAEAKGEVLYAASFIEWFAEEARRAYGTLVPSHKANAKILVTKEPIGVVAAITPWNFPAAMITRKCGPAFAAGCPVILKPAPDTPFTALALAVLAEKAGFPAGVFNVITGDAVAIGGELTSNKRVRKLSFTGSTPVGKLLMRQSADNIKKLSLELGGNAPFIVFEDADLDAAVEGAMIAKFRNAGQTCVCANRLYVQRSVYSEFCQKLVAKVSALKVGNGFDQGVHIGPLINDAAVAKVVQHVEDAQSKGAQIECGQLPTAGSRLVQPLVLSGVTDEMLVAQEETFGPMAPLFVFDSEEEVLARANNTDFGLAAYFYTQSLSRAWRMSEALEAGIVGINEGLISTTVAPFGGVKESGLGREGSFLGMDDYMESKYILMGL

SEQ ID NO: 86892 - DNA, 1392 bp, Bradyrhizobium japonicum USDA 110
  CDS (1)..(1392): transl_table=11
atggcctacgcaaccacctacccctacacgggtgaagtcctcgagacattccccaccgccaccgatgccgaggtcgcccgcgcgatcgacgcggcgcatgcggccttccttgcctggcgcgagacgtcctttgccgcgcgcggcgcgatcctgcaaaaggcagccgacctgctgcgcaaggacgccgacgcctacgcaaagctcctgacgctcgagatgggcaagctgttcaccgaagcgaaggccgaggtcgaattgtccgcgaagatcttcgaatattacgtccagaatgccgaaagcctgctccggccggagaaattgactgtcgccgatcccgccgagggcgaggccgtcatcgtctgcgagccgctcggcgtgctgctcgcgatcgaaccctggaacttcccttactaccagatcgcccgcatcatcgccccgcagctttcggccggcaacaccatgctgctgaagcacgcctccaacgtgccgcagagcgcggcggcgttcgaacggctgatgcgtgaggcggggctgcccgagggcgccttcatcaatctctacgcgacacgctcgcaggtcgagacgatcatcaacgatccgcgcgtccatggcgtggcgctcacgggctcggaagatgccggcgcggtcgtcgccgcgcaggccggcaaggcgctgaagaagtcgaccatggagctcggcggcgccgacgcgttcgtcgtgctcgccgacgccgacatggccaagacgatcaaatgggcggtgttcggccgtcactggaacggcggccaggtctgcgtctcgtccaagcgcatgatcatcgtcgatgcggtctatgacgaatttcttgcgcgctaccgcgagggcgtggccggcctcagggcgggcgaccccttcgcccccgaaaccacgctcgcgccgctctcttcgcaggcggcggccgacgagatcagagagaagatccgccaggccgttgcgcatggcgccaaggccgagcaggtcggcccgcccgtccccaaccagggcgccttcgtgcagccgacgatcctgaccgatgtcgccgacgacaatccggcgcgctactgggaattcttcggccccgtctcgatgctatttcgcgccagggacgagaatgatgccgtgcgcatcgccaatgattccccgttcggcctcggcggctcggtgttcacctccgacacgaagcacggcgcggacgtcgccaggaagatctcgaccggcatggtgttcgtcaaccacccgaccaaggtcgaggccgacctgcccttcggcggcatccgccgctccggctacggacgcgaattgctggggctcggcctcaaggagttcgtcaatcacaagctgatcgacgtcgtcgacatcgacgcccggttctga

SEQ ID NO: 86893 - protein, 463 aa, Bradyrhizobium japonicum USDA 110
MAYATTYPYTGEVLETFPTATDAEVARAIDAAHAAFLAWRETSFAARGAILQKAADLLRKDADAYAKLLTLEMGKLFTEAKAEVELSAKIFEYYVQNAESLLRPEKLTVADPAEGEAVIVCEPLGVLLAIEPWNFPYYQIARIIAPQLSAGNTMLLKHASNVPQSAAAFERLMREAGLPEGAFINLYATRSQVETIINDPRVHGVALTGSEDAGAVVAAQAGKALKKSTMELGGADAFVVLADADMAKTIKWAVFGRHWNGGQVCVSSKRMIIVDAVYDEFLARYREGVAGLRAGDPFAPETTLAPLSSQAAADEIREKIRQAVAHGAKAEQVGPPVPNQGAFVQPTILTDVADDNPARYWEFFGPVSMLFRARDENDAVRIANDSPFGLGGSVFTSDTKHGADVARKISTGMVFVNHPTKVEADLPFGGIRRSGYGRELLGLGLKEFVNHKLIDVVDIDARF

SEQ ID NO: 86894 - DNA, 1413 bp, Lactobacillus plantarum WCFS1
  CDS (1)..(1413): transl_table=11
atggcttatcaaacaattaatccatataccaatgaagttgttaaaacttacgacaacgcaaccactgaccaaatcgaacaggccttaactaccggcgacgccctttatcaccaatggcgtcatgaacccgttagttcccgtgcagccagcctccataagattgccgcactgttacgtgaacataaagatgaattagctaaaattgcaacaatcgacatgggtaaattactgagtgaatctcaaggtgaagtcgaactatgcgccatgattgctgattactatgctgatcacggtgctgaattattggcaccgaccccaatcagcactcaagcaacgggcgatgccgaaattgaaaaacaagcaaccggtgtcctgatgttggtcgaaccttggaacttcccatactaccaaatcatgcgggtcttcgcaccgaactacatggtcggcaatccaatgattttaaagcacgcctctaatacaccgggatcggctgcggccttcgccaagattgtcgaagaagctggtgctcccgctggtagtctaacgaacctcttcttaaactatgatcaagttagcgatattattgccgacccccgcatccaaggcgtcgcactgactggttctaagcgtggtggacaagcggttgccaaagcggccggtgcaaacttgaagaagagttctatggaattaggtggttcggacgctttcgtcgtcttagcggatgctgatattgacgaagcagtcaacttagcatggcgggtccggttatacaacgctgggcaagtctgcacctcatcaaaacgctttattgtcgctgcggatgtgtacgatgatttcttagcaaagttgaaggaacgttttgccaaattagtccctggcgatcctatggacccacaaactaccctggcaccgatgaattccaaacgcgctaaggaaaagctacaagaccaagttgaccgggccattgccggtggtgcaaccgttgcttatggcaacgaaccaatcgacttacctggccaattcttccaaccaaccatcttaacggacattgatcaagacaaccccctcttttacgaagaaatgttcggtccagttgcccaagtcttcaaagttgattctgaacaagcagctatcgatttagccaacaactctgaactgggcttaggtggcatcgtcttcgccggaactgcggcgcatggcaaagcggttgcccaacaaattgaaactgggatggtcttcgttaacaccttcctcagctccttaccagaactaccatttggtggcgtcaagggctccggctatggtcgcgagttaagcagcctgggcttaatggcctttgttaacgaaaaactggttgtcactgctcagaaacctgactacgacaacggtgctggtggcttagttgttttataa

SEQ ID NO: 86895 - protein, 470 aa, Lactobacillus plantarum WCFS1
MAYQTINPYTNEVVKTYDNATTDQIEQALTTGDALYHQWRHEPVSSRAASLHKIAALLREHKDELAKIATIDMGKLLSESQGEVELCAMIADYYADHGAELLAPTPISTQATGDAEIEKQATGVLMLVEPWNFPYYQIMRVFAPNYMVGNPMILKHASNTPGSAAAFAKIVEEAGAPAGSLTNLFLNYDQVSDIIADPRIQGVALTGSKRGGQAVAKAAGANLKKSSMELGGSDAFVVLADADIDEAVNLAWRVRLYNAGQVCTSSKRFIVAADVYDDFLAKLKERFAKLVPGDPMDPQTTLAPMNSKRAKEKLQDQVDRAIAGGATVAYGNEPIDLPGQFFQPTILTDIDQDNPLFYEEMFGPVAQVFKVDSEQAAIDLANNSELGLGGIVFAGTAAHGKAVAQQIETGMVFVNTFLSSLPELPFGGVKGSGYGRELSSLGLMAFVNEKLVVTAQKPDYDNGAGGLVVL

SEQ ID NO: 86896 - DNA, 1392 bp, Pseudomonas syringae pv. tomato str. DC3000
  CDS (1)..(1392): transl_table=11
atgaccactgtttccagcaacacccacgcgatctcgatcaacccggtttcgggcgaacagatcggtagctatgcctttgaatccgatgctgtactgaaccgcacactttcccgcgcggcggcaggctttgcaggctggaagcgtacacctgtccagcaacgcgcgcagttgatcatcgccatgggccaggtgttgcgcgacgacgctgaaaacatcgcccggatgatcagccgggaaatgggcaagcccgtggcgcaggccagaggcgaagtcgagaaatgcgcgcagttgtgcgactggtatgcggcgcacgggccggcgatgctgattgccgaacccacccaggtcgagcatgacaaggcacgcattgaataccgcccgctggggccgattctggcggtgatgccgtggaatttcccgatctggcaggtgctgcgcggtgcgatcccgacgctgctggcgggtaatacctacgtgctcaagcatgcgcccaacgtgatgggctgtgcctacttgatgctgggcgcgttcaagcgtgcaggttttccagaaggtgtgtttgaagtcatcaacgtgaccccggaaggtgtttcaaaagctattgccgacccacgcattgccgctgtcacgctgaccggcagcgtgcgtgccgggcaggcgattggtgcacaggccggtgctgcgctgaagaagtgtgtgctggagctgggcggttccgacccgtttatcgtgctcaatgatgcggatctggatcaagccgtgaaagcagcggtgatcggtcgtttccagaacaccgggcaggtctgtgcggcggccaagcgtttgatcatcgagcaaggcgtggtcgaggaatttacccgcaggttcgttgagcagactcgccagttggtgatcggcgatccgctgtgcggcgagacgtatatcggcccgatggcacgcgttgatctgcgtgacgaactggatgcccaggttcaggacaccctggccgaaggcgcgacgctgttgctgggcggcaggaaggcggatggccagggcaattactacgagccgacggtgctgggcgatgttaccgaccagatgacctcgttcaggcaggaactgttcggcccggtggcttcgatcatcaccgcacgcgacgcgcagcacgccctggaactggccaacgacagcgaattcggcctgaccgcgacggtgtacacccgtgatctggagcttgcgcaacgcatgaccgaagaactggaaaccggtggtgtgtttatcaacggctacagcgcctcagatccacgggtgacctttggcggtgtgaaaaaaagcggctttggtcgcgagctctcgcacttcggtttacgcgaattctgcaatgcacaaaccgtgtggcgcgatcgtcattga

SEQ ID NO: 86897 - protein, 463 aa, Pseudomonas syringae pv. tomato str. DC3000
MTTVSSNTHAISINPVSGEQIGSYAFESDAVLNRTLSRAAAGFAGWKRTPVQQRAQLIIAMGQVLRDDAENIARMISREMGKPVAQARGEVEKCAQLCDWYAAHGPAMLIAEPTQVEHDKARIEYRPLGPILAVMPWNFPIWQVLRGAIPTLLAGNTYVLKHAPNVMGCAYLMLGAFKRAGFPEGVFEVINVTPEGVSKAIADPRIAAVTLTGSVRAGQAIGAQAGAALKKCVLELGGSDPFIVLNDADLDQAVKAAVIGRFQNTGQVCAAAKRLIIEQGVVEEFTRRFVEQTRQLVIGDPLCGETYIGPMARVDLRDELDAQVQDTLAEGATLLLGGRKADGQGNYYEPTVLGDVTDQMTSFRQELFGPVASIITARDAQHALELANDSEFGLTATVYTRDLELAQRMTEELETGGVFINGYSASDPRVTFGGVKKSGFGRELSHFGLREFCNAQTVWRDRH

SEQ ID NO: 86898 - DNA, 1389 bp, Salmonella enterica subsp. enterica serovar Typhi Ty2
  CDS (1)..(1389): transl_table=11
atgaccatgatgactgcaacacaggcgttatccgttaatcctgcgaccggccagacgctggcggcaatgccctgggctaacgcgcaagagattgaacatgcgctgagtctggcggcgagcggtttcaaaaagtggaaaatgacatcggtagcgcaacgggcgcaaacattacgcgatattggtcaggcgcttcgcgctcatgcagaagagatggcgcaatgtattacgcgtgaaatgggtaagcctataaagcaggcgcgtgcggaagtgacgaaatccgctgcgttatgcgactggtatgcggaacatggtccggcaatgctgaatcctgagcctacgctggtagaaaatcagcaggcggtgattgaataccgtccgctgggcgtcattctggcgataatgccgtggaattttcctttatggcaggtgttacgcggggcagtgccgatactgttggcggggaatagctacttgttaaaacatgcgcccaatgtcacgggttgcgcgcagatgatagcccgaatcttgacggaagccggtactcccgctggcgtctatggatgggtgaatgccaataatgagggcgtgagtcagatgattaacgatccgcgaatcgcggcggtgacggtgaccggtagcgtgcgcgccggcgcggcgattggcgctcaggctggggcggcgctgaaaaagtgcgtactggaactgggtggctcggatccgtttattgtactcaatgatgccgatctcgagctggcggtaaaagccgcggttgccggacgctatcaaaacaccggacaagtctgcgccgccgccaaacgttttattgtcgaagagggcattgcgcaggcgtttaacgatcgttttgtggcggctgccgcagcattaaagatgggggatcctctggttgaagagaatgatctggggccgatggcgcgctttgatttgcgtgatgaactccatcaacaggtgcaggcttccgtcgccgaaggcgcacggctactgttgggcggcgagaaaatcgccggggagggcaactattatgccgcgaccgttctggcggatgtcactcctgacatgacggcatttcgtcaggagctttttgggcctgttgccgccattaccgttgcaaaagatgcggagcacgccctcgcgctggcgaatgacagtgagtttggcctgtcggcgacgatctttaccgccgacgatacgctggccgcggagatggcggcgcgtcttgagtgcggtggggtattcattaatgggtacagcgccagcgatgcgcgtgtggcattcggcggggtgaagaaaagcggcttcggtcgcgagctttcgcactttggtttacacgaattttgtaatgtgcagaccgtctggaagaaccgcgtctaa

SEQ ID NO: 86899 - protein, 462 aa, Salmonella enterica subsp. enterica serovar Typhi Ty2
MTMMTATQALSVNPATGQTLAAMPWANAQEIEHALSLAASGFKKWKMTSVAQRAQTLRDIGQALRAHAEEMAQCITREMGKPIKQARAEVTKSAALCDWYAEHGPAMLNPEPTLVENQQAVIEYRPLGVILAIMPWNFPLWQVLRGAVPILLAGNSYLLKHAPNVTGCAQMIARILTEAGTPAGVYGWVNANNEGVSQMINDPRIAAVTVTGSVRAGAAIGAQAGAALKKCVLELGGSDPFIVLNDADLELAVKAAVAGRYQNTGQVCAAAKRFIVEEGIAQAFNDRFVAAAAALKMGDPLVEENDLGPMARFDLRDELHQQVQASVAEGARLLLGGEKIAGEGNYYAATVLADVTPDMTAFRQELFGPVAAITVAKDAEHALALANDSEFGLSATIFTADDTLAAEMAARLECGGVFINGYSASDARVAFGGVKKSGFGRELSHFGLHEFCNVQTVWKNRV

SEQ ID NO: 86900 - DNA, 1368 bp, Coxiella burnetii RSA 493
  CDS (1)..(1368): transl_table=11
atgccaatacgaacgaccaatcccagcacgggagaagttataaaaacctaccaagaaatgacggatcaacaagttgaagacattattaatgatgttcattatgactatgaaaaatggcgaagcgtaggttttaaagaacgtggtggaaaacttcgtcgtattgctgaaaggttacgaaaaaataaaaccgattacgcaaaattaatcgcaacggaaatgggaaaacccataacagcgggcgaagcagaagctgaaaaatgtgcttgggtttgcgattattatgctgatcatgcagaagcgttgctaaaacctcgaatcgttaacacggattggaaaaaaagttacgtgacttaccagcctagcggcgttatttttggcatcatgccgtggaattttcctttgtggcaggtgttccgttttgctgcgcctaatttaatggctggtcacggctgcttgttaaaacatgcttcgatttcaacaggcactgcccttgcgatcgaaaaattaatacaatctgccgatttacccgataatatttttcgaacgcttgtcattaatacggaaaaagcgagcgatgtcatttctcaccctaaaatttctgcggtaaccctaactggcagcgaaggcgccggaaaagcggtaggaagtgctgcgggtaaagcactaaaaaaagtggttttggaactcggcggcaatgatgcttaccttattttaaaagatgccgacttagaaaaagcggcagaagcttgcgtggaatctcgcttgagcaattcgggacaatcttgtattgccgccaaacgcttaattattgttgaaaatgtttatgatgaatttaaagcgctcgtgatagagaaagctcaatcctaccggatgggtgatcccttaaaaaaagagaccgagcttggcccactggcgcgttccgatttgcgcgataccgttcacgggcaagtgagggaatccatagacaaaggcgctcttttagaaacagggggagaaataccggaaagtaaaggcttttactacccccctactgtgctttcaggcgttcgggcgggacaacccgcctttgacgatgaagtattcggaccggtgatcgcgcttattcgcgcaaaagatgaaaaacacgctattgaaatagctaataattcaaaattcggattgggagcggctgtttttacgaatgataatgaacgcggcgaaaaaatagcggctagcgaacttcaggcgggtacctgtgtcgttaatacttttgttaaatccgacccgcggttaccttttgggggtgttaaacattcgggttatggtcgtgaattggcggctgaaggaattcgttcgtttatgaatgtgaaaacggtggtcgttgattag

SEQ ID NO: 86901 - protein, 455 aa, Coxiella burnetii RSA 493
MPIRTTNPSTGEVIKTYQEMTDQQVEDIINDVHYDYEKWRSVGFKERGGKLRRIAERLRKNKTDYAKLIATEMGKPITAGEAEAEKCAWVCDYYADHAEALLKPRIVNTDWKKSYVTYQPSGVIFGIMPWNFPLWQVFRFAAPNLMAGHGCLLKHASISTGTALAIEKLIQSADLPDNIFRTLVINTEKASDVISHPKISAVTLTGSEGAGKAVGSAAGKALKKVVLELGGNDAYLILKDADLEKAAEACVESRLSNSGQSCIAAKRLIIVENVYDEFKALVIEKAQSYRMGDPLKKETELGPLARSDLRDTVHGQVRESIDKGALLETGGEIPESKGFYYPPTVLSGVRAGQPAFDDEVFGPVIALIRAKDEKHAIEIANNSKFGLGAAVFTNDNERGEKIAASELQAGTCVVNTFVKSDPRLPFGGVKHSGYGRELAAEGIRSFMNVKTVVVD

SEQ ID NO: 86902 - DNA, 1395 bp, Streptomyces avermitilis MA-4680
  CDS (1)..(1395): transl_table=11
atgcccatcgcgacggtgaacccggcgaccggcgagacgctcaagacgtacgaagccctggacgccgaggcgatcgagcgcaggctcgcggcggcacagagcgcgttccggacccatcgcacgaccacgttcgccgagcgggcgcggctgctgcacagggcggcggacctgctcgacgaggaccagcgggacatcgcccgggtgatgacgaccgagatgggcaagccggtcaagcaggcccgcgccgaggccgcgaagtgcgcgaaggcgatgcactggtatgccgaccacgccgaggagctgctcgcggacgaggaaccggccgattccgatgtgaaggactccggggcctcgcgcgccctggtccgctatcggccgctgggcccggtgctggccgtgatgccgtggaacttccccctgtggcaggtggtccggttcgccgcgcccgcgctgatggcgggcaacgtgggcctgctcaagcactcctcgaacgtcccgcagaccgccctctacctggaggacctgttccgccgggccggcttccccgacggctgcttccagacgctgctcatcggctccggcgccgtcgagggcatcctgcgcgacccgcgcgtccgggcggccacgctgaccggcagcgaaccggccggccgggccgtggcctcggtcgccggggaccaggtcaagaagacggtcctggagctcggcggcagcgacccgttcgtcgtgatgccgtccgccgacatcgaccgggccgcgaagaccgcggtgaccgcgcgggtccagaacaacgggcagtcgtgcatcgccgcgaagcggttcatcgtgcacacggacgtgttcgacgccttcgccgagcgcttcacggcgggcatggcggcgctgaaggtcggcgacccgctggacgaggacacggaggtcgggccgctctccaccgagcagggccgcaccgatctggaggagctggtcgacgacgcggtcgagaacggcgcgacggtgctgtgcggcggcgagcgccccgaggggtacacggagcgcggctactactacgcgccgaccgtcctcaccgacatcacccccgagatgcgcatccacctcgaggaggcgttcggcccggtcgccacgctctaccgggcggccgatctcgacgaggcggtggccatcgccaacgacacgccgttcggactgagttccaacgtctggacgcgcgaggacgccgaggtcgaccggttcgtacgcgacctggaggccggtggcgtgttcgtcaacgggatgacggcatcccatcccgcgttccccttcggcggggtcaagcggtcgggttacggtcgtgagctgtccggacacggaatccgcgagttctgcaacatcaccaccgtatggcacggagcgtga

SEQ ID NO: 86903 - protein, 464 aa, Streptomyces avermitilis MA-4680
MPIATVNPATGETLKTYEALDAEAIERRLAAAQSAFRTHRTTTFAERARLLHRAADLLDEDQRDIARVMTTEMGKPVKQARAEAAKCAKAMHWYADHAEELLADEEPADSDVKDSGASRALVRYRPLGPVLAVMPWNFPLWQVVRFAAPALMAGNVGLLKHSSNVPQTALYLEDLFRRAGFPDGCFQTLLIGSGAVEGILRDPRVRAATLTGSEPAGRAVASVAGDQVKKTVLELGGSDPFVVMPSADIDRAAKTAVTARVQNNGQSCIAAKRFIVHTDVFDAFAERFTAGMAALKVGDPLDEDTEVGPLSTEQGRTDLEELVDDAVENGATVLCGGERPEGYTERGYYYAPTVLTDITPEMRIHLEEAFGPVATLYRAADLDEAVAIANDTPFGLSSNVWTREDAEVDRFVRDLEAGGVFVNGMTASHPAFPFGGVKRSGYGRELSGHGIREFCNITTVWHGA

SEQ ID NO: 86904 - DNA, 1332 bp, Nitrosomonas europaea ATCC 19718
  CDS (1)..(1332): transl_table=11
ttgcagacatacacaccctattccgaagctatggtgttcagtatgctggagcatgctcatgctgcccatctcgcgtggcgacaagtgcctttacacgagcggacggcgcttttgctgaagctggcagatgttttacgggaaaattccgaatcgtacgcccggctgatgacggaagaaacggggaaaaccatccgtgctgcccgtgctgaaatagagaagtgcgcctgggcgtgtgagatttacgcggataaggctgccgcatggctggctgaagaagagattgcggcggatggcataaagcatcgtgtcgttattgaaccgctgggagtcattctggcggtgatgccatggaattttcctttctggcaagtgatgcgtttcctgatcccggcgctgctggccgggaatggggccttgctgaaacatgcaaccaacgtaaccggctccgcgctgaaaattcaggaagccgtcaatgaagcaggattcccgaaagggctatttgtaaccctgcttgtttctcacacagtagttgaacaagtcatcgctcacccgctttgtcagggcgtttctttgacaggcagcgcagaagcaggccgggcagtcgcttctgttgccggcagacatctgaaaaaagtagtactggagctgggtggttccgatccattcatcgtattgggggatgcagatattccggccgcagcaaaagccgcagtaatcggacggtttcagaacaatggccaaagctgtattgctgcaaagcgcctgatcgttttgaaagaaatcgaagaggtattcaccagtacgttgctggccgaggttgaaaagctggtggtgggtgatccgctcgatgaggcaactgatatcggcccgctcgtcagtgaacaggctgccgagaccatggaacagttcgtactggatgcggttgccaagggagccatggtgagaacgggtggaacacggaaaggtgcgtatttcacaccgacggttctgactggtgttcattcagcaatggaagtcatgacgcaggaagtattcggtccggtcctgccggtcattacggcggataccgtggaggaagcgattacgcttgccaacgccacccggttcggattgggtgcaagtgtgtggagccgggatctggaaaaaggtgagcaggttgcgcgccaactggcggccggcgccacatttgtcaacagcattacaaaatcggatccgcgtatgccttttggtggcatcagagaaagcggtcttggccgggaactttcttactggggggtgcgagagttcgccaatatcaagactgtcaatgtctatggtggggaagaggtttag

SEQ ID NO: 86905 - protein, 443 aa, Nitrosomonas europaea ATCC 19718
MQTYTPYSEAMVFSMLEHAHAAHLAWRQVPLHERTALLLKLADVLRENSESYARLMTEETGKTIRAARAEIEKCAWACEIYADKAAAWLAEEEIAADGIKHRVVIEPLGVILAVMPWNFPFWQVMRFLIPALLAGNGALLKHATNVTGSALKIQEAVNEAGFPKGLFVTLLVSHTVVEQVIAHPLCQGVSLTGSAEAGRAVASVAGRHLKKVVLELGGSDPFIVLGDADIPAAAKAAVIGRFQNNGQSCIAAKRLIVLKEIEEVFTSTLLAEVEKLVVGDPLDEATDIGPLVSEQAAETMEQFVLDAVAKGAMVRTGGTRKGAYFTPTVLTGVHSAMEVMTQEVFGPVLPVITADTVEEAITLANATRFGLGASVWSRDLEKGEQVARQLAAGATFVNSITKSDPRMPFGGIRESGLGRELSYWGVREFANIKTVNVYGGEEV

SEQ ID NO: 86906 - DNA, 1512 bp, Erwinia sp. Ejp 556
  CDS (1)..(1512): transl_table=11
atgttaatcttctttattattcattttaaaagaataactcgcaaggctatgatcggcgctatgctgagtcatggcgcaacagacgctggcttcccacttattctggtttttgataaggcggtaatgatgaaaaacgtttcttctgctgtagcggtttcccgcaatccggccacgggcgaggtgtttgcccgttatccttttgcaaccatcgccgaggttgacagcgcgctggcgttaaccaatggtgcatttcaatactggcgtcacagcgcaatgagcgatcgcgttcagctgctgcgtaacgtggcgggcgctctgcgtcagcaggcgcgtgagctggcggagatgatgaccagtgagatgggcaagcctgtcgatcaggggctggcggaagtcgagaaaagcgccaggctgtgcgaatggtatgctgaacagggcccggctttccttcagcgtgagccgaccctggtcgagggtaacaaagcctttgtcgactatctgccgctgggtccggttctgtcggtgatgccgtggaacttccccgtctggcaggtgctgcgcggcgcggtaccgatcctgctggccggtaacagctacctgttgaaaccggcaccgaatgtgatgggatgtgcgctgttgctgcagcaaatcctgagccgtgtcggcgtgccggaagggctttttgcggtggtgaatgcggataatgacggcgtggcgcaggcgattaacgatcggcgtattgccgccgtgaccgtgaccggcagcgtgcgcgccggtgcggcgattgcagccctgtccggtgcagcgataaaaaaatgcgtgctggagctgggcggttctgatgcctttatcgtgctggctgatgcggatattgatgctgcggtaaaaggggcgattgcgggccgctttatgaataacggtcagctgtgtatttccgcgaagcgcatcattgttgaagcgccggtgttcgacgcgttccgggataagttcgtcagtgccgtcaaagagatgaaaataggcgacccgcgcgaatccggcacctggatcggcccgatggcgcgttacgatctgcgcgatgagctggattctcaggtacaagccacgctgaaagagggggctaccctgctgctcggcggccatgttctgccgggcgagggtaactattatgcgccgacggtgctcagtgacgtgaagccgggtatgaccagttttgcacaagaactgtttggtccggtggcttcgctgattcaggccgacaatgctgaacatgcggtggtaatggcgaatgattctgagttcggcctcggcggcagcttgtggagccgcgatcttgccgtagcgcagaaactggcgtcacgcatcgaaaccggcggtgtctttattaactcaccgagtttctccgatccgcgtgttccgattggtggcgtgaagaaaagcggctttggtcgtgagctgtctcattttggcctgcgcgagtttaccaatactcagacggtgtggatggaagaataa

SEQ ID NO: 86907 - protein, 503 aa, Erwinia sp. Ejp 556
MLIFFIIHFKRITRKAMIGAMLSHGATDAGFPLILVFDKAVMMKNVSSAVAVSRNPATGEVFARYPFATIAEVDSALALTNGAFQYWRHSAMSDRVQLLRNVAGALRQQARELAEMMTSEMGKPVDQGLAEVEKSARLCEWYAEQGPAFLQREPTLVEGNKAFVDYLPLGPVLSVMPWNFPVWQVLRGAVPILLAGNSYLLKPAPNVMGCALLLQQILSRVGVPEGLFAVVNADNDGVAQAINDRRIAAVTVTGSVRAGAAIAALSGAAIKKCVLELGGSDAFIVLADADIDAAVKGAIAGRFMNNGQLCISAKRIIVEAPVFDAFRDKFVSAVKEMKIGDPRESGTWIGPMARYDLRDELDSQVQATLKEGATLLLGGHVLPGEGNYYAPTVLSDVKPGMTSFAQELFGPVASLIQADNAEHAVVMANDSEFGLGGSLWSRDLAVAQKLASRIETGGVFINSPSFSDPRVPIGGVKKSGFGRELSHFGLREFTNTQTVWMEE

SEQ ID NO: 86908 - DNA, 1374 bp, Rhodopirellula baltica SH 1
  CDS (1)..(1374): transl_table=11
atgtcgattacaagcgtcaatccagccaccaacgaaaccattcgcgagttcgaaccgcttcacaaagatgacgcgatgcaagccatcgagactgcccacaaggcatttgaagagtggcgagccacgtcatttgacgagcgcaaaaaatgcattctcaaattcgccgaactcctgcgagcagactccgacgaatacgcccgaatgatcacgctcgacatgggcaagcgaatttcggaatcgcagtatgagattgaatactgtgcgaacatcgctgagttctatgctaatggtgccgaagaattcctcgccgacactccaatggaacgggtcgacgccaacgcctacctgcactatgaaccgattggggtgctgatgggcgtgatgccatggaacttcccgttctaccaagtcgttcggtttgcgacgccgaatatcatggcgggcaacaccgtcatggtcaaacatgccagcaacgtgccgcagtgtgcagccgcgattgaagaactttacaacgactgcgggttgccaaacggcgtctatcaaaacctgttcattccatccgacttcgtcgattccatcatttccgattcgcgagtgcagggcgtttccctgactggaagcgaacctgccggtcgagccgtcgctgctcaagcgggcaagaacctcaagcgaagtgttctcgaactgggcggcaacgatccgttcattgtcctcgaagacgccgacatggaactcgtgatcgagcaggccgcgaaaggccggatggtcaacgctggccagtcctgtgtggcctccaaacgcttcatcgttgtgaaagaagtcgcggagcagttcatgaatggtttcaaagagaaacttcaagcattgaagctcggcgacccaatggacgaagaaaccacactctcgccactctcaaccgaagacgccgcggtcaagctacaggagcaggttcaatcgtccatcaacgccggtgcgactgtcgtgctgggtggagatcggccggaccgcgaaggagcattcttcaatccaaccatcttgaccgatgtcacaccggacaacccgacgttcgatcaagaactgtttggcccggttgcaaccgtttacgtcgtcgacgacgaggccgcagcgattgagctggccaatcattcgtcctatggattgggcggatcggtctacacaacggacatccagcgaggacgccgcgtcgctgaaaaagtggaaacaggaatgatgttcctgaaccaacccaccagctcgcaagcggagttgccttttggtggcatcaagaactccggctacggtcgcgaactttcgcacctgggcatcttggaattcgtcaacaagaaactgattcacttaggagaaaaggaataa

SEQ ID NO: 86909 - protein, 457 aa, Rhodopirellula baltica SH 1
MSITSVNPATNETIREFEPLHKDDAMQAIETAHKAFEEWRATSFDERKKCILKFAELLRADSDEYARMITLDMGKRISESQYEIEYCANIAEFYANGAEEFLADTPMERVDANAYLHYEPIGVLMGVMPWNFPFYQVVRFATPNIMAGNTVMVKHASNVPQCAAAIEELYNDCGLPNGVYQNLFIPSDFVDSIISDSRVQGVSLTGSEPAGRAVAAQAGKNLKRSVLELGGNDPFIVLEDADMELVIEQAAKGRMVNAGQSCVASKRFIVVKEVAEQFMNGFKEKLQALKLGDPMDEETTLSPLSTEDAAVKLQEQVQSSINAGATVVLGGDRPDREGAFFNPTILTDVTPDNPTFDQELFGPVATVYVVDDEAAAIELANHSSYGLGGSVYTTDIQRGRRVAEKVETGMMFLNQPTSSQAELPFGGIKNSGYGRELSHLGILEFVNKKLIHLGEKE

SEQ ID NO: 86910 - DNA, 1356 bp, Chromobacterium violaceum ATCC 12472
  CDS (1)..(1356): transl_table=11
atgaccgccttcaccagttgcaatccctcgtccggcgaagtgtgcttcacccgtccctcctggaacccgtccgccctggaagtcagcctgcggcaactgcgcgatgcccaaggcgcgtgggcggatttgaacgtagagcagcgagcaaaacgcctgctgcgcctggcggatctcttgtcgcagcagcgggaggccctggctgacctggttacgctggaggtaggcaagcgcacatcggaatgcctggcggaaatagacaagtcggctcagttgatacgctattacgcggaactggcgcccgaactgctgcagccgctgcgcatcgccacccaggccagccgcagcggcgtggccttcgaaccgctgggcctggtcctggcggtcatgccctggaactacccggtatggcaggtgctgcgcttcgccatccccgcgctgatgtcgggcaacgcctgcctggtgaagccggcgccgtcggtgccgcaatgcagccagctgctgctggacatcgtccgacaggcgggcctgcgcgtgctagacatcgcctggattgaaaccgagctggtggaggaagcgatccgccaatgcgatgccgtggcgttcaccggctccacccagaccggccgcgcgatcgcctcgctggcaggacgccacctgaagaagacggttttggaactcggcggcagcaaccccttcatcgtgctcgccgacgcggatatcgaggccgctgcgcgcgacgccgccaactcccgtttccgcgacgcgggccagagctgcaacgcagccaagcggatgatcgtggtcccggaaatcgccgacgccttcgtcgaagccttctgcggcgaagcctccaaattgcgcgccggcgatccccgcgacccggccaccaccctgtcgccgctgacccgcgccgatctgcgggaggccctgcacgcgcaagtgctggatgcctgtcatcatggctcggaactgaggctgggcggccagatgccgcatacgccaggcttttactatcccgccaccgtgctggatcgcgtcaatccggactgccgcgtctaccatgaagaagtgttcggcccggtcgccagcatactgcgcgcgacggacgaggccgatgcgatccgcctggccaacgacacgcccttcggcctgggcgccagcatctacagcgccgacaatgagcgcgcctggcaactggcgcgccggatcgaggccggcagcgtattcatcaaccgccacaccagttccgacctgcggctgcccttcggcggcgtcaaggcgtcgggctatggccgcgagctgtccgaattcggcctgtacgaattcgtcaacgtcaaaacctactggcagaaatag

SEQ ID NO: 86911 - protein, 451 aa, Chromobacterium violaceum ATCC 12472
MTAFTSCNPSSGEVCFTRPSWNPSALEVSLRQLRDAQGAWADLNVEQRAKRLLRLADLLSQQREALADLVTLEVGKRTSECLAEIDKSAQLIRYYAELAPELLQPLRIATQASRSGVAFEPLGLVLAVMPWNYPVWQVLRFAIPALMSGNACLVKPAPSVPQCSQLLLDIVRQAGLRVLDIAWIETELVEEAIRQCDAVAFTGSTQTGRAIASLAGRHLKKTVLELGGSNPFIVLADADIEAAARDAANSRFRDAGQSCNAAKRMIVVPEIADAFVEAFCGEASKLRAGDPRDPATTLSPLTRADLREALHAQVLDACHHGSELRLGGQMPHTPGFYYPATVLDRVNPDCRVYHEEVFGPVASILRATDEADAIRLANDTPFGLGASIYSADNERAWQLARRIEAGSVFINRHTSSDLRLPFGGVKASGYGRELSEFGLYEFVNVKTYWQK

SEQ ID NO: 86912 - DNA, 1389 bp, Gloeobacter violaceus PCC 7421
  CDS (1)..(1389): transl_table=11
atggcacagacccaaagcccctcgcgaccgatcgccagcgtcaacccagcgaccggacagacactcaagacatttgcacccctggacgacgccgaaatcgagcagaagcttgccctggcaagtcgcgcttttgcttgccaccgccacacacccctcgccgagcgcgcccgccgtctgcaagccgccgccgatgtgctcacaaccggtcgtgaacgctacgcccggctgatgagtgccgagatgggcaagaccctcgcctctgccttggccgaagtcgacaagtgcgccctggtctgccggttctatgccgagcacggtgcgggttttctggccgacgtgccggtagttaccgacgcgacgcgttccttcgtgcgctaccagccgcttggacccgtcctcgcggtgatgccctggaactttcctttctggcaggtgttccgcttcgcagccccggctttgatggcgggcaacgtcggcctgcttaagcacgcctccaacgtgccccagtgcgccctcgccatcgaagcgatttttttagaggcgggctttgcacccgggtgcttccagacgttgctcgtgggagccgagcgcaccgcggatctgatcgccgatgtgcgggtggtggcggtcaccctcaccggcagtgaaccggcgggccgcagcgttgcttctcaggccggcaaccacctcaaaaagtgcgtcctcgaactggggggcagcgacccatttgtcgtactggagtccgccgatatccaaaaagccgcccagactgcggtgacggcccgcctcatcaacaacggccagtcctgcatcgccgccaagcggttcatcgtcgccgaggcggtggcggatacttttgagaaactcctggttgaacgttttgccgccctcaaagtcggcgatccgctcgatccggctaccgacgtcgggccgctcgccacccccaccatcctcaaaacgctcgatacccaggtgcacgattcggtgtcgcggggggcacgggtgctcatcggcggcaaagcgctccccggccctggcaacttctacgcgccgaccatcctcgcggatatcccgcccgacagccccgcctacggtgaggaattattcggaccggtggcggcgctgtttcgcgtccccggcctggatgcggccattcgcctggccaacgacaccgcctttggtctcggggcaagcgcctggagcaccgacccggccgaaatcgaccggcttgccgaggagatcgaagccggttcggtcttcatcaacggcatggtcaaatccgacccccgtctacccttcggcggcaccaagctctccggctacggccgcgaactcagccgcgaaggcatgctcgaatttgtcaatatcaaaacggtgtgggagttatga

SEQ ID NO: 86913 - protein, 462 aa, Gloeobacter violaceus PCC 7421
MAQTQSPSRPIASVNPATGQTLKTFAPLDDAEIEQKLALASRAFACHRHTPLAERARRLQAAADVLTTGRERYARLMSAEMGKTLASALAEVDKCALVCRFYAEHGAGFLADVPVVTDATRSFVRYQPLGPVLAVMPWNFPFWQVFRFAAPALMAGNVGLLKHASNVPQCALAIEAIFLEAGFAPGCFQTLLVGAERTADLIADVRVVAVTLTGSEPAGRSVASQAGNHLKKCVLELGGSDPFVVLESADIQKAAQTAVTARLINNGQSCIAAKRFIVAEAVADTFEKLLVERFAALKVGDPLDPATDVGPLATPTILKTLDTQVHDSVSRGARVLIGGKALPGPGNFYAPTILADIPPDSPAYGEELFGPVAALFRVPGLDAAIRLANDTAFGLGASAWSTDPAEIDRLAEEIEAGSVFINGMVKSDPRLPFGGTKLSGYGRELSREGMLEFVNIKTVWEL

SEQ ID NO: 86914 - DNA, 1494 bp, Photorhabdus luminescens subsp. laumondii TTO1
  CDS (1)..(1494): transl_table=11
atgagtgatataaacttattacagccagtgatggcctttttgcaacacaatcatgggcattatattaatggtcagccagtcagtggtcaggggagtgaaacattttctgtcataaatcctgcgactgatgaaatcattgcaactgttaatcaaggcggtaaagcggaagttaatgctgctatgcaagcggcacaggcggcatttcatggggtatgggcccaaacttcaccgatggagcgcggtcattgcctgaatcgtctggcagatctattactggcacatcgggaagagttggcgcagttagaaaccctttgctccggtaaaaccatccagttatcccgtatgctggaaattgattcttctgctcaattcctgcgttattttgccggatggtcaagtaagatcagtggcgaaaccttgaatgtctctttgccctcttttaagggtgaacaatacacggcgtttacccgtcgcgagccgattggtgttgtggtagggattattccgtggaatttctccatcatgattgccatctggaaaatggcggctgcactgacttgcggctgtaccattgtgttgaaacccagtgaatacaccccgttgaccatgctcagagtggctgaattagccaaacaagcgggtattcctgatggtgtcattaatgtgattaatggttccggttcggtgcttgggcctgcactgataggtcatccgttatgcgccaaggtgactttcaccggatcggtgccaacgggtattgctgttggtaaatcagcaatggaacagggattgactcgcgccacgttggaattgggtggcaagaacggtgcggcgtttttagcggacatgtctgttgaaaaaattgtcgatggtattctggaagccggttatctcaatcaagggcagatttgtgcggcagcggaacgtttctatattcccgcaagccatatggatgatgtgctgaaattgttgtctgaaagactcgcggcaatgaaaattggctcgcctctggatgactcaacagaaatgggtccgttggcaaacaaagcacactatgacaagatcttgtccctgtttgagcaagcgcgtcaagaaggcagtgagattgtttacggtggtcatgctctggccggaccgggtttctttgtggcaccaaccgtgattcgtgctaacagccctgaagattcattgatgaaggaagagacatttggtcctgttgggactttcctcagctataacgatgaggaagagctgattggcttgatgaatagcactccgtttggtttagcggcgagtttgtggaccaatgatctcagcaaagccatgcgcatgatcccacgtatcgaagcaggaactgtttgggttaatatgcatacattcctcgatccggcattaccatttggtggtaccaaatcctcaggtataggtcgtgaattcggtagcgcctttattgagcactatactgaattgaaatccgtgatggttcgctattga

SEQ ID NO: 86915 - protein, 497 aa, Photorhabdus luminescens subsp. laumondii TTO1
MSDINLLQPVMAFLQHNHGHYINGQPVSGQGSETFSVINPATDEIIATVNQGGKAEVNAAMQAAQAAFHGVWAQTSPMERGHCLNRLADLLLAHREELAQLETLCSGKTIQLSRMLEIDSSAQFLRYFAGWSSKISGETLNVSLPSFKGEQYTAFTRREPIGVVVGIIPWNFSIMIAIWKMAAALTCGCTIVLKPSEYTPLTMLRVAELAKQAGIPDGVINVINGSGSVLGPALIGHPLCAKVTFTGSVPTGIAVGKSAMEQGLTRATLELGGKNGAAFLADMSVEKIVDGILEAGYLNQGQICAAAERFYIPASHMDDVLKLLSERLAAMKIGSPLDDSTEMGPLANKAHYDKILSLFEQARQEGSEIVYGGHALAGPGFFVAPTVIRANSPEDSLMKEETFGPVGTFLSYNDEEELIGLMNSTPFGLAASLWTNDLSKAMRMIPRIEAGTVWVNMHTFLDPALPFGGTKSSGIGREFGSAFIEHYTELKSVMVRY

SEQ ID NO: 86916 - DNA, 1392 bp, Corynebacterium diphtheriae NCTC 13129
  CDS (1)..(1392): transl_table=11
atggcatacgcaaccaccaatccttacaccggcgaagttgtgaaggaattccccacggcaaccgctcaagaggtcgagcaggctatcacgcgggcgcatgacacattcacgcagtggagtcgcaaaccggtagcagaacgcgtggaggttcttgcccgcgccgccgacattttagagacaaagaagcgcgagtacgcggaaattattacccttgagatgggcaaactcattgccgaggccgaagcggaaatcgacatctgcgtcgatatgctgcgctactacgtcgccaacggcgaggcccagctcgctccacgctacctgcccgcgaagggcttcggcgagcacgacgtccagctcgtcaacgaaccactgggtgttctctacgccgtcgagccatggaatttcccctactaccaggtcattcgcatcggcgcgccgcagttcaccgccggcaacacgatcgtgctcaagcacgcctccaacgtgccacaatcggcgctcaaaatggttgagcttttccgcgaggcaggcgcacccgaaggcctcctagtcaacatcttcgcagatcacaacgctaccgagacaatcctttccgacccacgcgtgcgcggcgtcgcactcaccggctccgaaggggcaggagccgcagtctctgcaactgcctccaagtacctcaagaaatccaccctcgaactcggcggcgccgacgccttcatcgtcctaaacgacgccgaactcgacaaagccgtcgactgggccgtctttggacgccattggaatgcagggcaggtgtgctgttcgtcgaaacgcatcatcgtcgaagactcgctttacgacgccttcctcacccagtacacccaaaaagttgccgccctcaccgccggcgaccccatggacccaaacacccaactagcaccactatcctcccaaaccgcagccgatgacctcggcaaactcgtcgacaaagcccgtgccgaaggcgccaccgtcaccgaagtaggcatcgacctccccgaacacggtgccttctaccaacccaccatcctcaccgacatcccactcgactccgacaccgcacactccgaattcttcggccccgtctcccagatctaccgcgcccgcgacatcgaccacgccgtagaaatcgccaactcctccccattcggactcggcggctccgtattcagccaagacgaggccaaagccaaagacatcgcacgtcgcctcgacaccggcatggtgtacatcaaccagcccaccggtgtgaaagcagacatcccattcggcggcacaaagcgctccggattcggccgcgagctcatcgacctcggcctccacgagttcgtgaaccagaaagtcgtggtagtcaccgacatcgacggctccttctag

SEQ ID NO: 86917 - protein, 463 aa, Corynebacterium diphtheriae NCTC 13129
MAYATTNPYTGEVVKEFPTATAQEVEQAITRAHDTFTQWSRKPVAERVEVLARAADILETKKREYAEIITLEMGKLIAEAEAEIDICVDMLRYYVANGEAQLAPRYLPAKGFGEHDVQLVNEPLGVLYAVEPWNFPYYQVIRIGAPQFTAGNTIVLKHASNVPQSALKMVELFREAGAPEGLLVNIFADHNATETILSDPRVRGVALTGSEGAGAAVSATASKYLKKSTLELGGADAFIVLNDAELDKAVDWAVFGRHWNAGQVCCSSKRIIVEDSLYDAFLTQYTQKVAALTAGDPMDPNTQLAPLSSQTAADDLGKLVDKARAEGATVTEVGIDLPEHGAFYQPTILTDIPLDSDTAHSEFFGPVSQIYRARDIDHAVEIANSSPFGLGGSVFSQDEAKAKDIARRLDTGMVYINQPTGVKADIPFGGTKRSGFGRELIDLGLHEFVNQKVVVVTDIDGSF

SEQ ID NO: 86918 - DNA, 1494 bp, Rhodopseudomonas palustris CGA009
  CDS (1)..(1494): transl_table=11
atgtcacccaccgctgccgcacgcgccgccgatcaagccgcctctctgcgcgatcgtctaaaggacccgtcgctgctgcgcgagcagtgctatatcgacggcgcctggtcgggcacgtcgacgatcgcggtgactaatccggcgagcgggcagacgatcgccaaggtgccgcatctcggcgccgccgaggcaactcaggcggtggaggctgccgcgcaagcatttccggcctgggcgaagctcaccgccaagcagcgctccaacatcttgcgcaaatggttcgagctgatcatcgccaaccgcgaggatctggctctgatcctgacctccgagcagggcaagccgctcaccgaggcgctcggtgaagtcgatatcggcgccgcctatgtcgagtttttcgccgaagaggcgcggcgggtgtatggcgaaaccatcccgacccaacgcgccgatgcgcggctgatcgccatcaagcagccgatcggtgtctgcggcgcgatcacgccgtggaacttcccgagctcgatgatcacccgcaaagtctcgccggcgctggcggcgggctgcacagtggtgctgaagccggccgaggaaacgccgctgagtgccttcgcgctggcggcgctggccgaaaaggcgggcgtgccgaagcgcgtgttcaacgtcctcaccggcgatgcgccggcaattggaaaggtactgtgcgaacatccggccgtccggttcgtcggtttcaccggttccaccgaagtcggcaagatcctctacaagcaggcgtcggtcggggtgaagaagctcggattggagctcggcggtaacgcgccgttcatcgtgttcgatgatgccgatgtcgacgctgcggtcgaaggcgcgatggtgtcgaaatatcgcaacatgggccagacctgcgtctgcgctaatcggctctacgtgcaggatggcgtctacgacgcgttcgtcgagaagctcgccgccaaggtcaaggcgatgaaggtcggcgacggcaccgagcagggcgtcacccaggggccgctgatcaatgaggccgccgtcgagaagaccgagcggcacatcgcggatgcgctatccaacggcgccaagatcatcaccggtggaaagcgtcatgcgctcggcggcaccttcttcgagccgaccgtgctggccgatgtccggcccgacgcgctggtggcgcatgaagaaaccttcggcccgctggcgccggtgttccgcttcaaggacgaagccgaagtgatcaagcttgccaacaactcgccgttcggcctcgccagctacttctacgcccgcgatttgggccgcgtctggcgcgttgccgaggcgctggagagcggcatggtcggcgtcaacaccggcctgatcaccaccgaagtcgccccgttcggcggcgtcaaggaatccggcctcggccgcgaaggctcgcatcacggcatcgaagaatatgtcgagattaaatacgtgatgatggcggggatctga

SEQ ID NO: 86919 - protein, 497 aa, Rhodopseudomonas palustris CGA009
MSPTAAARAADQAASLRDRLKDPSLLREQCYIDGAWSGTSTIAVTNPASGQTIAKVPHLGAAEATQAVEAAAQAFPAWAKLTAKQRSNILRKWFELIIANREDLALILTSEQGKPLTEALGEVDIGAAYVEFFAEEARRVYGETIPTQRADARLIAIKQPIGVCGAITPWNFPSSMITRKVSPALAAGCTVVLKPAEETPLSAFALAALAEKAGVPKRVFNVLTGDAPAIGKVLCEHPAVRFVGFTGSTEVGKILYKQASVGVKKLGLELGGNAPFIVFDDADVDAAVEGAMVSKYRNMGQTCVCANRLYVQDGVYDAFVEKLAAKVKAMKVGDGTEQGVTQGPLINEAAVEKTERHIADALSNGAKIITGGKRHALGGTFFEPTVLADVRPDALVAHEETFGPLAPVFRFKDEAEVIKLANNSPFGLASYFYARDLGRVWRVAEALESGMVGVNTGLITTEVAPFGGVKESGLGREGSHHGIEEYVEIKYVMMAGI

SEQ ID NO: 86920 - DNA, 1419 bp, Mycobacterium avium subsp. paratuberculosis K-10
  CDS (1)..(1419): transl_table=11
gtgcccatcgccaccatcaaccccgcaaccggcgagacggtcaaaaccttcaccccggccagcgatgcggaagtcgatgccgccatcgcccgcgcttacgaacgcttcctcgactaccgccactccaccacgttcgcccagcgcgcccagtgggccaacgccaccgccgacctgctcgaggccgaggccgacgaggtggccgccatgatgacgctggagatgggcaagaccctcaagtcggccaaggcggaagcgctcaagtgcgccaagggttttcgctactacgcgcagaacgccgagcagctgctggccgacgagccggccgacgccggcaaggtcggcgcggcccgggcgtacatccgctaccagccgctcggtgtggtactggccgtgatgccgtggaactttccgctgtggcaggcggtgcggttcgccgcgccggcgctgatggccggcaacgtcggcatcctcaagcacgcgtcgaacgtgccgcagagcgcgctgtatctggccgacgtcatcacccgcggcggcttccccgagggctgcttccagaccctgctggtgccgtccagcgcggtcgagcgcatcctgcgtgacccgcgggtggccgcggccaccctgaccggcagcgaaccggccggccagtcggtggcggccatcgccggcgacgagatcaagcccaccgtgctcgagctcggcggcagcgacccgttcatcgtgatgccctcggccgatctggatgaggccgtcaagaccgcggtcaccgcccgggtgcagaacaacggccaatcctgcatcgcggccaagcggttcatcgtgcacaccgacatctacgacgcgttcgtcgacaagttcgtcgaacagatgaaagcgctgaaggtcggcgaccccaccgacccggccaccgacgtgggcccgctggccaccgagtcgggccgcgacgagatcgccaagcaggtcgacgacgccgtggccgcgggcgccacgctgcgctgcggcggcaagccgctcgacgggccgggctggttctacccgccgaccgtggtcaccgacatcaccaaggacatggcgctgtacaccgaggaggtgttcgggccggtcgcgtcgatgtaccgggccgccgacatcgacgaggccatcgagatcgccaacgccaccaccttcgggttggggtcgaacgcctggaccaacgatgcggccgagcagcagcggttcatcgacgacatcgaggccggccaggtcttcatcaacggcatgacggtgtcctacccggagctggggttcggcggcgtcaagcggtccggctacggccgcgagctcgccggcctgggcatccgcgcgttctgcaacgccaagaccgtctggatcgggtcgtcgaagagcggcgacgccggcggcggctcgaaggtcgagtga

SEQ ID NO: 86921 - protein, 472 aa, Mycobacterium avium subsp. paratuberculosis K-10
MPIATINPATGETVKTFTPASDAEVDAAIARAYERFLDYRHSTTFAQRAQWANATADLLEAEADEVAAMMTLEMGKTLKSAKAEALKCAKGFRYYAQNAEQLLADEPADAGKVGAARAYIRYQPLGVVLAVMPWNFPLWQAVRFAAPALMAGNVGILKHASNVPQSALYLADVITRGGFPEGCFQTLLVPSSAVERILRDPRVAAATLTGSEPAGQSVAAIAGDEIKPTVLELGGSDPFIVMPSADLDEAVKTAVTARVQNNGQSCIAAKRFIVHTDIYDAFVDKFVEQMKALKVGDPTDPATDVGPLATESGRDEIAKQVDDAVAAGATLRCGGKPLDGPGWFYPPTVVTDITKDMALYTEEVFGPVASMYRAADIDEAIEIANATTFGLGSNAWTNDAAEQQRFIDDIEAGQVFINGMTVSYPELGFGGVKRSGYGRELAGLGIRAFCNAKTVWIGSSKSGDAGGGSKVE

SEQ ID NO: 86922 - DNA, 1386 bp, Erwinia amylovora
  CDS (1)..(1386): transl_table=11
  misc_feature (19)..(19): n is a, g, c or t
  misc_feature (32)..(32): n is a, g, c or t
  misc_feature (46)..(46): n is a, g, c or t
  misc_feature (50)..(50): n is a, g, c or t
  misc_feature (52)..(52): n is a, g, c or t
  misc_feature (59)..(59): n is a, g, c or t
  misc_feature (67)..(67): n is a, g, c or t
  misc_feature (74)..(74): n is a, g, c or t
  misc_feature (79)..(79): n is a, g, c or t
  misc_feature (88)..(88): n is a, g, c or t
  misc_feature (106)..(106): n is a, g, c or t
  misc_feature (140)..(140): w is a or t
  misc_feature (147)..(147): m is a or c
  misc_feature (168)..(168): s is g or c
  misc_feature (1310)..(1310): n is a, g, c or t
atgaaaaacgtttcttcgncggtagcggtttnccgcaatccggccncggncnaggtgtntgcccgtnatccttntgccnccatcgacnaggttgcccgcgcgctgncgttaacccatggtgcatttcaagactggcgtcwcagcgtmatgagcgatcgcgtccggctsctgcgtaacgtggccggcgccctgcgtcagcaggcgcgtgagctggcggaaatgatgaccagtgagatgggcaagcctgtcgatcaggggctggcagaagtcgagaaaagcgccaggctgtgcgaatggtacgctgagcatgggccggccttcctgcagcgtgaaccaacgctggtcgagggtaacaaagcctttgtcgattacctgccgctgggccccgttctctcggtgatgccgtggaattttcctgtctggcaagtgttgcgcggcgctgtgcccattctgctggcaggtaacagctacctgttgaaaccggcaccgaatgtgatgggatgtgcgctgttactgcagcaaatcctgagccgcgccggcgtgccgcaagggctttttgcggtggtgaacgccgataatgacggcgtggcgcaggcgattaacgaccggcgtattgccgccgtgaccgtgaccggcagtgtgcgggccggtgcggcgatcgctgccctttccggtgcggcgataaaaaaatgtgtgctggagctgggcggttctgatgcctttatcgtgctggcggaggcggatattgatgctgcggtaaaaggtgccatcgcgggccgctttatgaataacggtcagctgtgtatttccgcgaagcgcattatcgttgaagcggcggtattcgaaacgttccgggataaatttgtctgcgcagtcagagagatgaaaatcggcgacccacgcgaatccggaacatggataggcccgatggcgcgttacgatctgcgcgacgaactggatgctcaggtgcaggccacgctaaaagagggggccaccttgctgcttggcggccacgttctgccgggcgagggaaactactatgcgccgacggtactcagtgacgtaaagccgggtatgaccagttttgtacaagaactgtttggtccggtggcttcgctgattatggccgatgatgccggacatgcggtggcgatggctaatgactcggagttcggcctcggcggcagcctgtggagccgcgatcttgccgttgcgcagaaactggcgtcacgtatcgaaaccggtagtgttttcattaactcgccgagcttctccgatccgcgtgttccgattggtggcgtgaagaaaancggctttggtcgtgagctgtctcattttggcctgcgtgagtttaccaatgctcagacggtgtggatggaaggataa

SEQ ID NO: 86923 - protein, 461 aa, Erwinia amylovora
  misc_feature (7)..(7): The Xaa at location 7 stands for Ala, Pro, Ser, or Thr.
  misc_feature (11)..(11): The Xaa at location 11 stands for Cys, Phe, Ser, or Tyr.
  misc_feature (16)..(16): The Xaa at location 16 stands for Ala, Pro, Ser, or Thr.
  misc_feature (17)..(17): The Xaa at location 17 stands for Ala, Asp, Gly, or Val.
  misc_feature (18)..(18): The Xaa at location 18 stands for Stop, Gln, Glu, or Lys.
  misc_feature (20)..(20): The Xaa at location 20 stands for Cys, Phe, Ser, or Tyr.
  misc_feature (23)..(23): The Xaa at location 23 stands for Asn, Asp, His, or Tyr.
  misc_feature (25)..(25): The Xaa at location 25 stands for Cys, Phe, Ser, or Tyr.
  misc_feature (27)..(27): The Xaa at location 27 stands for Ala, Pro, Ser, or Thr.
  misc_feature (30)..(30): The Xaa at location 30 stands for Stop, Gln, Glu, or Lys.
  misc_feature (36)..(36): The Xaa at location 36 stands for Ala, Pro, Ser, or Thr.
  misc_feature (47)..(47): The Xaa at location 47 stands for His, or Leu.
  misc_feature (437)..(437): The Xaa at location 437 stands for Asn, Ile, Ser, or Thr.
MKNVSSXVAVXRNPAXXXVXARXPXAXIDXVARALXLTHGAFQDWRXSVMSDRVRLLRNVAGALRQQARELAEMMTSEMGKPVDQGLAEVEKSARLCEWYAEHGPAFLQREPTLVEGNKAFVDYLPLGPVLSVMPWNFPVWQVLRGAVPILLAGNSYLLKPAPNVMGCALLLQQILSRAGVPQGLFAVVNADNDGVAQAINDRRIAAVTVTGSVRAGAAIAALSGAAIKKCVLELGGSDAFIVLAEADIDAAVKGAIAGRFMNNGQLCISAKRIIVEAAVFETFRDKFVCAVREMKIGDPRESGTWIGPMARYDLRDELDAQVQATLKEGATLLLGGHVLPGEGNYYAPTVLSDVKPGMTSFVQELFGPVASLIMADDAGHAVAMANDSEFGLGGSLWSRDLAVAQKLASRIETGSVFINSPSFSDPRVPIGGVKKXGFGRELSHFGLREFTNAQTVWMEG

SEQ ID NO: 86924 - DNA, 1524 bp, Nasonia vitripennis; identical to SEQ ID NO: 37917
  CDS (1)..(1524)

SEQ ID NO: 86925 - protein, 507 aa, Nasonia vitripennis; identical to SEQ ID NO: 37918

SEQ ID NO: 86926 - DNA, 1572 bp, Anopheles gambiae str. PEST; identical to SEQ ID NO: 37925
  CDS (1)..(1572)

SEQ ID NO: 86927 - protein, 523 aa, Anopheles gambiae str. PEST; identical to SEQ ID NO: 37926

SEQ ID NO: 86928 - DNA, 1494 bp, Magnaporthe grisea 70-15; identical to SEQ ID NO: 37929
  CDS (1)..(1494)

SEQ ID NO: 86929 - protein, 497 aa, Magnaporthe grisea 70-15; identical to SEQ ID NO: 37930

SEQ ID NO: 86930 - DNA, 1491 bp, Magnaporthe grisea 70-15
  CDS (1)..(1491)
atgtctctcgtcacagagctaaagactccggtcacgggcgcttaccagcagcccaccggtgttttcatcaacaacgagtgggtggagggcgtcgacaagaagaccttcgagactatcaaccccagtaccgaggaggttatctgctccgtcagtgaagccaccgagaaggatgttgatattgcagtcaaggctgcccgcaaggcctttgagggcgagtggaagcaaactgctcctggacagcgaagcaagctcttgaccaacctcgccgaacttgtcgagaagaaccttgacctgcttgccgccgttgagtctctcgacaacggaaagtcccttgcgatggccaagggtgacgtcggtgccgtcgccggctgccttaggtactacggtggttgggccgacaagatcgagggcaagaccattgacattgccccggacatgtttcactacacgaggtctgagcctatcggtgtctgcggtcaaattatcccctggaactttcctcttctcatgctggcatggaagctcggacctgccctggccacgggtaacaccatcgtcctgaagaccgccgagcaaacacccctctcagcccttgtcttcgccaacctgatcaaggaggccggtttccccgcaggtgtcgtcaacatcatctctggcttcggcaaggttgccggtgctgccatctccgcacacatggacatcgacaaggttgctttcactggctccaccgtcgttggccgcaccatcatgaaggctgccgcctcgtccaacctcaagaaggtcacccttgagcttggtggcaagtcgcctaacattatcttcaacgacgccgatatcgaggctgccgtcagctgggtcaactttggcatctactacaaccacggccaatgctgctgcgctggttcccgtatctacgttcaggagggcgtctacgacaagttcgttgccgccttcaaggagcgcgccgagaagaacaaggtcggtgacccattcaaggaggacactttccagggtcctcaggtcagcgagctccagttcaaccgcattatggagtacatcaagtcaggaaaggaggagggagctaccgtcgagactggtggtgagaggcacggcgacaagggctacttcatccagcccacgatcttctccaacgtccgcccagagatgaagattatgaaggaggagatctttggccccgtcgtcgccatggccaagttcaagaccgaggaggaggttatcgctcttgccaacgacaccaactacggtctggctgccgccgtccacaccaaggacctcaacacatctatccgtgtcagcaacgccctgaaggccggtaccgtctgggtcaactgctacaacatgctccaccaccagcttccctttggaggtttcaaggagtctggtatcggacgtgagctgggcgaggctgcgctggccaactacacccaaaacaagtcggttgccattcgtcttggcggacccatcttctaa

SEQ ID NO: 86931 - protein, 496 aa, Magnaporthe grisea 70-15
MSLVTELKTPVTGAYQQPTGVFINNEWVEGVDKKTFETINPSTEEVICSVSEATEKDVDIAVKAARKAFEGEWKQTAPGQRSKLLTNLAELVEKNLDLLAAVESLDNGKSLAMAKGDVGAVAGCLRYYGGWADKIEGKTIDIAPDMFHYTRSEPIGVCGQIIPWNFPLLMLAWKLGPALATGNTIVLKTAEQTPLSALVFANLIKEAGFPAGVVNIISGFGKVAGAAISAHMDIDKVAFTGSTVVGRTIMKAAASSNLKKVTLELGGKSPNIIFNDADIEAAVSWVNFGIYYNHGQCCCAGSRIYVQEGVYDKFVAAFKERAEKNKVGDPFKEDTFQGPQVSELQFNRIMEYIKSGKEEGATVETGGERHGDKGYFIQPTIFSNVRPEMKIMKEEIFGPVVAMAKFKTEEEVIALANDTNYGLAAAVHTKDLNTSIRVSNALKAGTVWVNCYNMLHHQLPFGGFKESGIGRELGEAALANYTQNKSVAIRLGGPIF

SEQ ID NO: 86932 - DNA, 1611 bp, Magnaporthe grisea 70-15
  CDS (1)..(1611)
atgtctgccattcgcatgcacaggaatgcatgctcggcctctcggctcgtggctaggacttcggcccccagacgaacggtgccgtttttgagtcctagctatgctcgtctcgcgtctactcaagtacccaagctcaaagacccatccctcttcaagcaaaacgtctgctatgtcaacggcgcctttgtcccagccaaatcgggtgcgacctttgccgtggctgacccgacgacgggcgagcacatcggcgatgctcccgagttcgatgccgcagacaccgaggccgccatcgccgctgccgagaatgcattcaagacctacagattgaccacgggccgtgagcgctccaagctgctgcggaggtggtatgacctcatgatagccaatgccgatgacatcgcgacacttattacgtgggaaaacggcaagacgatcgccgatgcaaagggtgaggtcacctacgcagccaactttttcgagtggtttagcgaggaggcgcctcgcgtgtacggagacaccattcagccgaccttggcggccaatcgggtcgtcacgaggaaggagcctgtgggagtttgttcgctcatcacgccgtggaacttccccgctgccatgggcacacgtaagatcggtcctgccctcgcggccggctgcaccgtggtctgcaaagcacccgcagaaacgccgttcacatcgctggcgctcgccgagctggcccaccgcgccggggtgcctgcaggcgttgtcaactttgtgacatcacactccaacaccaagacggtcggtgaggtgctttgcacacaccaggcggtgcgcaagataagcttcactggctcgacgggcgtcggcaagacactcatgcagcaggcggcgggcactctgaagaagtgctcattcgaactcggcggcaacgcaccgtttatcgtctttgatgatgctgacctcgacgccgctgtagacggcgccatcgcgtgcaagttcaggtcgagcgggcagacatgtgtctgtgccaacaggatttatgtgcaacgcggcatttacgacgcctttgccgaaaggcttgccaagagggtcaaggaaacgttcaagattggaagtgggttcgaccctgaaactacccacggcccactgattcacgatcgcgccgtgtcaaaggttgcctcgcaggtcgaggatgcggtgggcaagggcgccaagctcctggcgggtggcaagcggctgcccgatttgggcccgcactttttcgctcccacggtcctcggtgatatgacaccggagatgtcgattgcgcgagaggaaactttcggcccaatagcgggtttgttcaaatttgacacggaggccgaggtggtgaagatggccaacgacaccgaagttggcttggcgggctacttcttttcaaaagacatccaccgggcgtaccgcgtggccgaagctctcgaggtgggcatggtgggcgtcaacacgggtatcatcagcgacgtggcgagcccctttggtggcgtcaaggagagtgggttcggcagggagggtagcatgtatggaattcacgagtaccaggtcaccaagaccataacctttgggggcatgggtaaggagctgcaggggtga

SEQ ID NO: 86933 - protein, 536 aa, Magnaporthe grisea 70-15
MSAIRMHRNACSASRLVARTSAPRRTVPFLSPSYARLASTQVPKLKDPSLFKQNVCYVNGAFVPAKSGATFAVADPTTGEHIGDAPEFDAADTEAAIAAAENAFKTYRLTTGRERSKLLRRWYDLMIANADDIATLITWENGKTIADAKGEVTYAANFFEWFSEEAPRVYGDTIQPTLAANRVVTRKEPVGVCSLITPWNFPAAMGTRKIGPALAAGCTVVCKAPAETPFTSLALAELAHRAGVPAGVVNFVTSHSNTKTVGEVLCTHQAVRKISFTGSTGVGKTLMQQAAGTLKKCSFELGGNAPFIVFDDADLDAAVDGAIACKFRSSGQTCVCANRIYVQRGIYDAFAERLAKRVKETFKIGSGFDPETTHGPLIHDRAVSKVASQVEDAVGKGAKLLAGGKRLPDLGPHFFAPTVLGDMTPEMSIAREETFGPIAGLFKFDTEAEVVKMANDTEVGLAGYFFSKDIHRAYRVAEALEVGMVGVNTGIISDVASPFGGVKESGFGREGSMYGIHEYQVTKTITFGGMGKELQG

SEQ ID NO: 86934 - DNA, 1506 bp, Magnaporthe grisea 70-15
  CDS (1)..(1506)
atggcatcggcacccgagaaggaccggcacacctttttcgccggcaaggtgcagccgagtccggacagcccgggcacctttaccaccgtcaacccggcgaccgcccagccgatcgccacgatccacacctcgtcgcgagcctcggtcgacgccgccgtcgatgccgcccgcgccgcgttccccgcctggtcgagcactcccgccccggagcgggcgcagatcctgcagcgcgccgtcgccatcctccgcgagcgcaacgacgccctcgcccgcgtcgagaccctagacaccggcaaggccttctccgaaacccaggccgtcgacgtcgtcacgggcgccgacgtcctcgcctactacgccaacctggtcgcgtcggacggcctcaacggcgagtcgttccgcctcaggcccggcgcatgggtctacagcagcaaggagccgctgggcgcgtgcgcagccatcggcgcctggaactaccccatccagatcgcgctgtggaagtcggcgccctgcctggctgccggcaacacgttggtctacaagccgagcgagtacactcctctgcacgcccagtacctcgctgacatttatgccgaggcgggtgtgccgcccggcgttttcaacgtggtctacggcgccggcgatgtcggcgcccagctgtcgtcgcaccccaagatcgccaaggtcagcttcacgggccaggtcagcacgggtcgcaaggtcgcgggcacggcggcgggcgggctcaagtcggtgactatggagctgggcggcaagagcgcgctcgtggtgctgcccgacgccgacgtctcgcaggccgccgacggggcgatgatggccaacttttacagctcgggtcaggtctgcaccaacggcacgagggtgtttgtgcccagggcgctcaaggaggagtttgagcgcgccgtgctggaaaagattgtgcacgtcagggcgggtgacctgtttgacgcaaacaccaactttggcccgctgagcagcaaggtgcactacgaaaaggtggtgagctatgtgaggcatggcatcgagcaggacaaggccaggttgttgtgcggcggcatcggccagccgcgtggcgtgcccaaggagctcggcaaggggttctggatcgagccgacggtctttacggattgcacggatgacatgcgcattgtcaaggaggagatcttcggaccggtcatgtcgattctcacctatgacacgttggaggaagtcgtccagcgagccaacgcgaccgagctgggcttggccgcgggcgtgtttggcaaggacctgaaccagtgccaccaggtcatcgcgcagctcgaggcgggcatcacatggatcaacacctggggcgagtcgccggccgagatggctgtcggtgggtggaagcagagtggcattggtgtcgagaacggccacaagggcttggacgcatgggttcagaacaagagcacgttggtggaaatgggaggtgcggtgccgaccgtgtttgcaaagatatga

SEQ ID NO: 86935 - protein, 501 aa, Magnaporthe grisea 70-15
MASAPEKDRHTFFAGKVQPSPDSPGTFTTVNPATAQPIATIHTSSRASVDAAVDAARAAFPAWSSTPAPERAQILQRAVAILRERNDALARVETLDTGKAFSETQAVDVVTGADVLAYYANLVASDGLNGESFRLRPGAWVYSSKEPLGACAAIGAWNYPIQIALWKSAPCLAAGNTLVYKPSEYTPLHAQYLADIYAEAGVPPGVFNVVYGAGDVGAQLSSHPKIAKVSFTGQVSTGRKVAGTAAGGLKSVTMELGGKSALVVLPDADVSQAADGAMMANFYSSGQVCTNGTRVFVPRALKEEFERAVLEKIVHVRAGDLFDANTNFGPLSSKVHYEKVVSYVRHGIEQDKARLLCGGIGQPRGVPKELGKGFWIEPTVFTDCTDDMRIVKEEIFGPVMSILTYDTLEEVVQRANATELGLAAGVFGKDLNQCHQVIAQLEAGITWINTWGESPAEMAVGGWKQSGIGVENGHKGLDAWVQNKSTLVEMGGAVPTVFAKI

SEQ ID NO: 86936 - DNA, 1413 bp, Magnaporthe grisea 70-15
  CDS (1)..(1413)
atgggttccgtcgaaacgctcaccacaatctcccccaccacaaacgagggcatcctccagcgcacgggcgtgtccctgagtgagctggagcagctacccaagaccgctaccgaagcattcaagtcttggagcaaaacaacccttgcggataggcagatcatcatccgcaaggccctcgaaggcctgtccgccaagaaagatgagctagccaacgagttgaccgtgcagatgggccgccctatcgcttacaccggaggtgaagttgccaccgctatcaagcgcgcagagtacctcttgaagatcagcgatgaggtgctcaaggacacggacggcgaggccgagaagggcttcaagcgtcttatccgcaaggtaccagttggtcccgtcttggtcatcttcgcctggaactacccgtacctcatcttggtcaactcgctcatcccggctctcctggccggcaacactgtgatcctcaagccgtcgccgcagactcccaccatagtcgagcaggtagccggcgtctttgccgatgctggcctgccccagggcgtcatccagtactttcactgcggctcgccgaccctcatggagaccatcgtccgtgacccgctcgtcaagcacgtctgctttacgggctcagtggcaggtggtctggcagttcagaaggctgcttcagatcgtattgtcaacgtcgggctcgagcttggcggcaaggatccggcgtacgtgcgcagcgatgttgacgtcgactgggtggccggggaaattgttgacggcgctgttttcaactcgggccagagctgctgctctatcgagcgcgtctacgtgcatgacgacattcatgacaagttcgtcgcggccgtccagaaagtgctcgagggttatgttctaggtgatccgctagacaagggcacccacgtggggccggtggtgtcaaagcgcagcaaggaggccatcgaggctcacgtcaaagaagcgatcgagaagggagctaaagatgcgactcccaaaaacgaatcttttgatacagtaccttcaagctccaagggcaactttgtcaagcctaccctgttggtgaacgttaatcacagcatgcaggtcatgaaggacgagacctttgggcccgtcatcccagtgatgcgggtcaagagcgacgaggaggcagttcagttgatgaacgacagcgaatttgggttgacggcaagcatatggaccaaggacacagacacagccgccaaactgatcgacgatgtcgaagctggcacggtcttcgtgaaccgatgcgactaccccagcccggatcttgcgtggactggttggaagaactcaggcaaggggcaaacgttgagcaggtttggcttcgatcagtttgtcaaactaaagagctatcacatgaaggattacccgaaataa

SEQ ID NO: 86937 - protein, 470 aa, Magnaporthe grisea 70-15
MGSVETLTTISPTTNEGILQRTGVSLSELEQLPKTATEAFKSWSKTTLADRQIIIRKALEGLSAKKDELANELTVQMGRPIAYTGGEVATAIKRAEYLLKISDEVLKDTDGEAEKGFKRLIRKVPVGPVLVIFAWNYPYLILVNSLIPALLAGNTVILKPSPQTPTIVEQVAGVFADAGLPQGVIQYFHCGSPTLMETIVRDPLVKHVCFTGSVAGGLAVQKAASDRIVNVGLELGGKDPAYVRSDVDVDWVAGEIVDGAVFNSGQSCCSIERVYVHDDIHDKFVAAVQKVLEGYVLGDPLDKGTHVGPVVSKRSKEAIEAHVKEAIEKGAKDATPKNESFDTVPSSSKGNFVKPTLLVNVNHSMQVMKDETFGPVIPVMRVKSDEEAVQLMNDSEFGLTASIWTKDTDTAAKLIDDVEAGTVFVNRCDYPSPDLAWTGWKNSGKGQTLSRFGFDQFVKLKSYHMKDYPK

SEQ ID NO: 86938 - DNA, 1509 bp, Gibberella zeae PH-1
  CDS (1)..(1509)
atgtctcccccctcaatccccctcattgcccccaacggcgtaaaatggtctcaaccaacaggcctcttcatcaacaacgaattcgtctcatcatccagttcccgaaccctcacctccatcgaccccgccacagaaaatgaaatcgctaccgtccaagcagcagacgctcaagacatcgacaaagccgtcaaggccgccaaagcagccctgcgccacccctcatggaaagacctccctgcctcagacagaggccaactgatggcccgtctcgcagaccttattgaggctaagcgagaactctttgctactattgatgcgtgggataatggaaagacgtacatcgagactctcgagaatgatctcgttgaggccgttggtgttatccgttattactccggctgggctgataaaacgtttggccaaactatcaacacgacgcctcaaaagtttgcatacaccattcgtcagcccatcggcgttatcgcacagattattccctggaattatcctctttctatggctacgtggaaactcggtccagcactagcttgcggaaacgcagtcgtcatcaaagcagccgagcaaacacctctaagtcttttagtcctgggcgaactcatcaaagaagctggtttcccgccgggcgtcgtcaacatcgtcaacggtctcggcaaagacacaggcgcagccctggtccaacatcctctggtggacaagatcgcattcacagggtccacagccacagctgccaacatcatgggcgtagcagcaaagacactcaagaacatcaccctcgagaccggcggaaagtcgcctttgatcgtgtttgacgacgcggagatggatcaggcggttaaatggtcgcacttcggcatcatgtccaaccaggggcagatctgcaccgcgacatcgcgcattctcgtgcaagagactatttatgaagaattcatcaaaaagttcattgatacgctcaacacggtcagcaaagtaggtgaccagtgggacaagacaacgtaccagggcccgcaggtatcaaaggtgcaatacgagcgaatcctggagtacatcgagattggcaagaaagaaggcgcaacactcgcagcaggcggcggtcccctcaagatcaacggctcagacaaaggattctacatttcccccacagtctttaccgacgtgaagccctccatgcgtgtcttccgtgaagagatcttcggaccagtggtcgtggtttctacctttaaaacagaggaggaagctattgagttggcgaatgatacgacatatggtctaggtgctgcggcgtttacgaccaaccttgaaaaagcgcatcgagtcgctgcggcgattgaggcgggaatggtctggattaatagtagtcaggattgtgatcctagggtgccgtttggaggtgtgaagcagagtggaattgggagggagcttggtgaggcgggattggaggcgtatacgcagattaagagtgtgcatataaatatgggaaataggctgtag

SEQ ID NO: 86939 - protein, 502 aa, Gibberella zeae PH-1
MSPPSIPLIAPNGVKWSQPTGLFINNEFVSSSSSRTLTSIDPATENEIATVQAADAQDIDKAVKAAKAALRHPSWKDLPASDRGQLMARLADLIEAKRELFATIDAWDNGKTYIETLENDLVEAVGVIRYYSGWADKTFGQTINTTPQKFAYTIRQPIGVIAQIIPWNYPLSMATWKLGPALACGNAVVIKAAEQTPLSLLVLGELIKEAGFPPGVVNIVNGLGKDTGAALVQHPLVDKIAFTGSTATAANIMGVAAKTLKNITLETGGKSPLIVFDDAEMDQAVKWSHFGIMSNQGQICTATSRILVQETIYEEFIKKFIDTLNTVSKVGDQWDKTTYQGPQVSKVQYERILEYIEIGKKEGATLAAGGGPLKINGSDKGFYISPTVFTDVKPSMRVFREEIFGPVVVVSTFKTEEEAIELANDTTYGLGAAAFTTNLEKAHRVAAAIEAGMVWINSSQDCDPRVPFGGVKQSGIGRELGEAGLEAYTQIKSVHINMGNRL

SEQ ID NO: 86940 - DNA, 1479 bp, Gibberella zeae PH-1
  CDS (1)..(1479)
atggctctcaccgtcgagctgtccactcccgttactggtacctaccagcagcccattggcctcttcatcgacggcaagtgggttgagggtgtcgacaagggaaagttcgaggttatcaacccctccaccgaggaggtcatcacctccgtctgtgagggtaccgagaaggatatcgacctagctgtcgccgctgcccgcaaggctttcgatggcgagtggaagaacactgctccccagacccgaggaaaccttctcctcaagctcgccgacctcgccgagaagaacctcgacctcctcgccgccgttgagtctcttgataacggaaagtccatcaccaacgcccgtggtgatgtcggtgccgttgttggctgcctacgatactacggtggttgggccgacaagatcgagggcaagaccattgatattgctcccgatatgttccactacacccgatccgagcccatcggtgtctgcggtcagattatcccctggaacttcccccttctcatgctggcatggaagatcggacctgctctggccactggtaacaccgtcgtcatgaagactgctgagcagactcctctctccgctctcgtcttcactcagttcattgagcaggctggtttccctgctggtgtcttcaaccttgtctctggttacggcaagactgccggtgccgccctctcttctcacatggacgttgacaagatcgccttcactggttctaccgtcattggccgacagatcatgaaggctgctgcttcttccaacctcaagaaggtcaccctcgagcttggtggcaagtcccccaacatcgtcttcgaggatgccgacatcgaggaggccatcaactgggtcaactttggtatctactacaaccacggccagtgctgctgtgctggtacccgtatctttgtccaggagtccatctacgacaagttcctcgctgccttcaagaagcgagctgaggagaacaaggtcggtgaccccttcaacgaggagaccttccagggtccccaggtctctcagctccagtacgaccgtatcatgggctacatcaaggccggtaaggacgagggtgccaccgtcgagatcggtggtgagcgtctcggtgacaagggttacttcatcaagcccaccatcttctccaacgtccgccccgacatgaagatcatgcaggaggagattttcggccccgtctgcgctatttccaagttcaaggacgaggctgaggtcattgaccttgcccacgacaccgcttacggtctcgctgccgctgtccacaccaagaacctcaacactgccctccgcgtttccaacgctctcaaggccggaactgtctgggtgaactgctataacatgctacatcaccagctcccattcggaggctacaaggagagtggaattggacgagaactcggcgaggcagccctcgccaactacacacagaacaagtcggttgccatcaagctgtactaa

SEQ ID NO: 86941 - protein, 492 aa, Gibberella zeae PH-1
MALTVELSTPVTGTYQQPIGLFIDGKWVEGVDKGKFEVINPSTEEVITSVCEGTEKDIDLAVAAARKAFDGEWKNTAPQTRGNLLLKLADLAEKNLDLLAAVESLDNGKSITNARGDVGAVVGCLRYYGGWADKIEGKTIDIAPDMFHYTRSEPIGVCGQIIPWNFPLLMLAWKIGPALATGNTVVMKTAEQTPLSALVFTQFIEQAGFPAGVFNLVSGYGKTAGAALSSHMDVDKIAFTGSTVIGRQIMKAAASSNLKKVTLELGGKSPNIVFEDADIEEAINWVNFGIYYNHGQCCCAGTRIFVQESIYDKFLAAFKKRAEENKVGDPFNEETFQGPQVSQLQYDRIMGYIKAGKDEGATVEIGGERLGDKGYFIKPTIFSNVRPDMKIMQEEIFGPVCAISKFKDEAEVIDLAHDTAYGLAAAVHTKNLNTALRVSNALKAGTVWVNCYNMLHHQLPFGGYKESGIGRELGEAALANYTQNKSVAIKLY

SEQ ID NO: 86942 - DNA, 1455 bp, Gibberella zeae PH-1
  CDS (1)..(1455)
atgtctacaaacagcacaaagactctcaacctcaaggacaactacgtccagatcatcaatggcaaaagcgcccctactcaaaagacccaccagggtataaacccggctactctcgaaaagaagcccgaagttcctgtcgcctcccaagatgacttgaacaacgccgtcgacgctgcgagaaaggccttcaaatcttggtccaaggtcccttgggaggagcgacgacaaaagctctttgcttgggcagatgccgtcgaggctcagaagaaggaatttgctcagcttctcacctcggagcaaggaaagccggtcgcgcaagctaacggcgaggctgatgccgctgttgcttggatcaagggacaagcgagccttgatcttaccgaagaagtcgttgaggatagcgatactcgaaaggttgtcacaagatacacaccccttggcattgtcgctgccatcgttccctggaacttccctcttatgcttgctgcttccaaaatcgcccccgctctgctgacaggaaacgtcatcattgtgaaaccctccccattcaccccatactgtggactgaagctcgttgaacttgcgcagcaattcttcccccctggtgtcgtgcaatcactcagcggagacgacaaccttggaccctggattaccagccatcccggcattgacaagattagctttactgggtctacacatactggaaagctggtcatgcaaagcgctgccaagacactgaagcgtgtgactctcgagctcggcggaaatgatgctgcggttgtctttccagatgttgacatcgactcagtagccgaaaaggtctcaaccctggcattcatgaactccggtcaaatctgcctcaacgtcaaacgcatctacgttcatgaatcaatctatgagaaattccgcgatgccgttgtcaaccatgtcaagaactataagcttggtgatggatcagaagaagtaaccagccacggtcccgttcaaaaccagatgcagtacaacagagtcaaaaccttcttcgaggacatcgagaaacaaggatggaaagttgccaccggtggaaagttcgatcctgagcctaagaatgggtactacatcacaccaactgtgattgacaacccacctgaggattcaagaattgttgtcgaggaaccgtttggccccattcttcctcttctgtcatggaagaatgaagaggaggtcattgagcgcgccaacgatacacgacttggcttgggtgcttcagtctggtcagctgatttagagacagccgagagagtcgcgaagcagctcgatgcagggactgtttgggttaatactcattttgatatcacaccgatggcaccatttggggggcataaagaatccggcattggtgctgaatggggtattaatggccttaagggcatgtgtaatgtacagagtttgttcctgagtaaggttgctgcttag

SEQ ID NO: 86943 - protein, 484 aa, Gibberella zeae PH-1
MSTNSTKTLNLKDNYVQIINGKSAPTQKTHQGINPATLEKKPEVPVASQDDLNNAVDAARKAFKSWSKVPWEERRQKLFAWADAVEAQKKEFAQLLTSEQGKPVAQANGEADAAVAWIKGQASLDLTEEVVEDSDTRKVVTRYTPLGIVAAIVPWNFPLMLAASKIAPALLTGNVIIVKPSPFTPYCGLKLVELAQQFFPPGVVQSLSGDDNLGPWITSHPGIDKISFTGSTHTGKLVMQSAAKTLKRVTLELGGNDAAVVFPDVDIDSVAEKVSTLAFMNSGQICLNVKRIYVHESIYEKFRDAVVNHVKNYKLGDGSEEVTSHGPVQNQMQYNRVKTFFEDIEKQGWKVATGGKFDPEPKNGYYITPTVIDNPPEDSRIVVEEPFGPILPLLSWKNEEEVIERANDTRLGLGASVWSADLETAERVAKQLDAGTVWVNTHFDITPMAPFGGHKESGIGAEWGINGLKGMCNVQSLFLSKVAA

SEQ ID NO: 86944 - DNA, 1503 bp, Gibberella zeae PH-1; identical to SEQ ID NO: 37931
  CDS (1)..(1503)

SEQ ID NO: 86945 - protein, 500 aa, Gibberella zeae PH-1; identical to SEQ ID NO: 37932

SEQ ID NO: 86946 - DNA, 1494 bp, Gibberella zeae PH-1
  CDS (1)..(1494)
atgggttctcgaatgacgccagaggctatcaagcctgttatgctaattgatggccaagctaacgcgtgcttaattcagctggttggggcctcagatggaaactcgtttcccctctttaacccagcaactggtgaaaaagttgcagatgtccctgaagctacagaagatgacaccaacagagctgtcgcggcagcacagcgtgcattcccagagtggtctgccatggatcctgccaagcgtggcagctacctgaagaaactcgcctctctcatcaaagagcataacgaagaacttgctcttctcgaagccaagtcaatgggtcgtcctttggctgagttcttcgagggtcacattgctgcctctagctatgagcactacgctgaagcttggccgcacatccagggccaagcgagtctcaacacacctggctatgtaaccatgaccctacgccagccttttggtgtcgtcgcagctatcattccctggaatgcctctcttctgttcttcgctagcaaatctgctcccgctttgatcgctggaaacacagtggtcgtcaaatctagcgaaaaggctcctctcggcgctgccaagttcgctgagctcattcacaaagctggtttccctcccggagtctttaacgttctatcgggtcatggaaacccctctggcgcgacgcttgcttctcatatggatgtacgggctattagtttcaccggctctagccctactggccgtgcgatccaagaggcagctgccaagtccaacttgaagaaggtcatcctcgagcttggtggtaaatctcctgtcattatttttgacgatgcggatcttgagcaggctgccaaggatactatgtacagtatccagtggaacagcggtcaggtctgcatggcaaattctcgcgtttatgtgcaagactccatcgctgataacttcatccaagcttgcaagaaagcactgtctgccgcaaagtcgggtaatcccacagagaagggcatcaatcacggtcctcaagccgacaaggttcagtatgaaaaagtcatgtcttacattaacgagggcaagaagtccggaacgctggagctcggaggaaatggaaatcttgataagacaggtggtttcttcgtcgagccaactatcttcttaaacacgcctgaggatgcaaaggttatgaaggaggaaatctttggaccggttgtcaacatcaacgtcatcaagacagaagaggaggccatcgaaaaggcaaatgacacagagtatggtctgtatgctgcagtatataccaagaatgtcgacagggcgatgagggtcactcagaagctcaactctggttacgtaggcatcaactgtaccagtcctaccaccgcgagggatctgccctttggaggatacaagtcatcaggccagggccgagagggctggctttacagtttggacaacttcttggaagtcaagagtgtgatgatgaaagtagacagcggttccaagttataa

SEQ ID NO: 86947 - protein, 497 aa, Gibberella zeae PH-1
MGSRMTPEAIKPVMLIDGQANACLIQLVGASDGNSFPLFNPATGEKVADVPEATEDDTNRAVAAAQRAFPEWSAMDPAKRGSYLKKLASLIKEHNEELALLEAKSMGRPLAEFFEGHIAASSYEHYAEAWPHIQGQASLNTPGYVTMTLRQPFGVVAAIIPWNASLLFFASKSAPALIAGNTVVVKSSEKAPLGAAKFAELIHKAGFPPGVFNVLSGHGNPSGATLASHMDVRAISFTGSSPTGRAIQEAAAKSNLKKVILELGGKSPVIIFDDADLEQAAKDTMYSIQWNSGQVCMANSRVYVQDSIADNFIQACKKALSAAKSGNPTEKGINHGPQADKVQYEKVMSYINEGKKSGTLELGGNGNLDKTGGFFVEPTIFLNTPEDAKVMKEEIFGPVVNINVIKTEEEAIEKANDTEYGLYAAVYTKNVDRAMRVTQKLNSGYVGINCTSPTTARDLPFGGYKSSGQGREGWLYSLDNFLEVKSVMMKVDSGSKL

SEQ ID NO: 86948 - DNA, 1473 bp, Gibberella zeae PH-1
  CDS (1)..(1473)
atggcctctccaaagcttagcgacccttcgctcatcaagaacgcatgctacgtcaatggacaatgggtagctgcaaagtccggcaaggacttttctgtcgagaaccctgcaagccttgaaaagcttggaagctgtcccgagttcgacgcaaatgataccgaagccgctatcgctgccgctgacgccgcatacaaaacataccgcaagacaccagcacgacagcgagcccggtacctccgccgctggtatgacctcatgatggaaaatgccgacgatattgcacgactcatcactcttgagaacggcaaagtttggtcggatgccaagacagaggccgtctacgctgcgaacttctttgaatggttctcagaagaggctcctcgaatttatggcgagactatcgaggcatcaaacccatcatgccgtctatcaacgatcaagcaacccgtgggtgtttgcggtctcattgcgccgtggaacttccctgccgccatgattacccgcaaggctggacctgcgctggctgctggctgtaccgttgttatcaaggctcctgccgaggcccctctaacagctcttgcactcgctgaactagcgcatcgcgctggtattcctgccggtgttgtgaacatcattactgcgctggataacactgctgaggttggtaaagtcctgacgacccatcccaagatcaagaaggtttcgtttaccggctcaactggcgtcggtcgactcctcatgaaccagtcttcctcaaccgttaagaagctgtcctttgaactgggcggaaacgccccatttattgtatttgaggatgcagatttggaaaaggctgtcaagggtattatcacctccaagttccgaaactcaggtcagacctgtgtttgcgccaaccgtatctttgtgcatcgcagcatttacgacaagttcgtccagatggtcctcgacgttgtcaagacctttgttattggagacggtttcggcgagaagacgacccacggtcctcttatccacggccgtgcagtggccaaaactgctgagcatgtcgaagatgctatttccaagggagcaaagcttatccatggtggggagcgtctagcggatcttggacccaacttcttcggcctcacgatgttgacagacatgacacctgacatgaagatcttcagtgaagagactttcggtccagtggctgctttctttgcatttgataccgaggaggaggttatcgagcttgccaatgacagcgaagtcggtctgggaggttacttcttcagtgagaacgtgaaccgatgttatcgagtggcagaggctttggaagtcggtatgattggtgtcaactgcggtgtactcagtgatcctgccgcacctttcggtggcatcaagcagagtggattcggaagagaaggaagcaagtacggtatcgatgagtttacagttaccaagatggttatgacaaacattgatccataa

SEQ ID NO: 86949 - protein, 490 aa, Gibberella zeae PH-1
MASPKLSDPSLIKNACYVNGQWVAAKSGKDFSVENPASLEKLGSCPEFDANDTEAAIAAADAAYKTYRKTPARQRARYLRRWYDLMMENADDIARLITLENGKVWSDAKTEAVYAANFFEWFSEEAPRIYGETIEASNPSCRLSTIKQPVGVCGLIAPWNFPAAMITRKAGPALAAGCTVVIKAPAEAPLTALALAELAHRAGIPAGVVNIITALDNTAEVGKVLTTHPKIKKVSFTGSTGVGRLLMNQSSSTVKKLSFELGGNAPFIVFEDADLEKAVKGIITSKFRNSGQTCVCANRIFVHRSIYDKFVQMVLDVVKTFVIGDGFGEKTTHGPLIHGRAVAKTAEHVEDAISKGAKLIHGGERLADLGPNFFGLTMLTDMTPDMKIFSEETFGPVAAFFAFDTEEEVIELANDSEVGLGGYFFSENVNRCYRVAEALEVGMIGVNCGVLSDPAAPFGGIKQSGFGREGSKYGIDEFTVTKMVMTNIDP

SEQ ID NO: 86950 - DNA, 1476 bp, Candida glabrata CBS 138
  CDS (1)..(1476)
atgaaaccagaattgaaaaatccagacctaatcaaaggcctcggttacattaacggtgaatgggtaaaggatagtaatgaattctttgaagttgatgatccatccactggtgagatcattgctaaattgccagaacatgatattgcagttgtagatagagctgtcgatgccgcatatgatgcctttcagaagtacaagaacactctacccagacagcgtgctacttggctaagaaacttattcaatttaatgactgaaaatgctgaggatctagctaagattattacttgggaaaacggtaagtcacttcctgattcccgcgctgaaattaagtacgctgcttcttattacgagtggtacgcagaagaggctcctagaatatatggggcaactattcaaccttcaatcccaaataatagagttattaccaaaaggcaaccagttggagtttgtggtataatttgtccttggaatttcccaagtgccatgattacgagaaaagttggtgctgctctagctgctggctgtactgttgttgttaaacctgattcacacacaccactttccgctcttgcaatgacagtattggttgaaaaggccggattccctaaaggagtattcaatgttgttttatctcaacacaataccccaaaattggggaaaagattatgtgagcatcctaaggttaaaaaggtgacctttactggttcgactagaatcggtaaaacattaatggagcaagcctcttcaaccttgaaaaagtgctcctttgagctagggggtaacgcaccttttatagtttttgatgatgctgacctcgacttggcggttgatcaagcaattgcatcaaagttcaggggtatgggtcaaacttgtgtttgtactaacaggttttatgttcaggatacaatagctgacgaatttgccgagaagttggttactaaagttaaacagtttaagataggagatggtatgaaggaaggtgttactcatggctgtttaactaatgcaaagcaagctgataaagtcgacgaacacaaaaaggatgcaattgaaaaaggagctaaggttttgctcgagggaggtcgtatgccagatttaggtaagaacttctacgctcccgtggtgttaaagaatgtcccacaatcagctatggtggctaaggaagaaacttttggtcctttgtgtccaatctttacatttaaaaccgttgaagaagttcttggttatgctaacgatactgaattaggacttgcttcatacgtttttactaagaatgtcaatacgttattcaccgttagtgaagctcttgaagcaggtatggtttcatgtaatacaggattgttttctgacagctcagttccattcggtggtgttaaagaatcagggtttggtagagagggttcactttatggtattgacgattatactacggttaaaagtataataattggaaatttaccagatagtttatag

SEQ ID NO: 86951 - protein, 491 aa, Candida glabrata CBS 138
MKPELKNPDLIKGLGYINGEWVKDSNEFFEVDDPSTGEIIAKLPEHDIAVVDRAVDAAYDAFQKYKNTLPRQRATWLRNLFNLMTENAEDLAKIITWENGKSLPDSRAEIKYAASYYEWYAEEAPRIYGATIQPSIPNNRVITKRQPVGVCGIICPWNFPSAMITRKVGAALAAGCTVVVKPDSHTPLSALAMTVLVEKAGFPKGVFNVVLSQHNTPKLGKRLCEHPKVKKVTFTGSTRIGKTLMEQASSTLKKCSFELGGNAPFIVFDDADLDLAVDQAIASKFRGMGQTCVCTNRFYVQDTIADEFAEKLVTKVKQFKIGDGMKEGVTHGCLTNAKQADKVDEHKKDAIEKGAKVLLEGGRMPDLGKNFYAPVVLKNVPQSAMVAKEETFGPLCPIFTFKTVEEVLGYANDTELGLASYVFTKNVNTLFTVSEALEAGMVSCNTGLFSDSSVPFGGVKESGFGREGSLYGIDDYTTVKSIIIGNLPDSL

SEQ ID NO: 86952 - DNA, 1575 bp, Candida glabrata CBS 138; identical to SEQ ID NO: 37939
  CDS (1)..(1575)

SEQ ID NO: 86953 - protein, 524 aa, Candida glabrata CBS 138; identical to SEQ ID NO: 37940

SEQ ID NO: 86954 - DNA, 1515 bp, Candida glabrata CBS 138
  CDS (1)..(1515)
atgcctgaagttttcgaagagattaatatcccccaaattgggcgcagttacaaacaacctattggtatatttattgacaatgagtttgtgccatcttctaatggtgaaaagattgaaacaataaatccagctactgaagaagtgattacttctttctatgctgctactgaggatgatgttgacaaggcagtcaagtctgcaagagaatcatatgagaatgtttggtttaagatatcacctgcggagaagagggatatgctattaaaattggcggacttaatagaggaggagaaacctttattagctgctttggagacattggatgctggtaaaccttatcataccaacgctatggatgatattgaccaaatcatccatttaacaaaatattttgcaggtgctactgataaatttactcaaggaaagacaattcccatcgatcatgagaaattggtgtacacccttaaatcgccttatggtgtgtgcggtatgattatcccatggaactatcctttggcaatggctagctggaaaatgcaaggctgtttagctgctggtaacacgctagttatcaagcctgctgagaatacatcactctctttgctatacttggcgcaattgttcaagaaagcaggttttccaaaaggtgttgtgaatgttgttcctggtaagggatctgtagttggcaattctttaggtttacatatggatgttgacaaaatatcttttacaggcagtaccaaggtgggaagctctattcttgaacttgcaggcaagtcaaacatgaaagatgttaccttggaatgtggtggtaagagccccgctgtagtttttcaggatgctgacattgataatgcaattgaatatattgctaacggtatcttctataactcgggccaaaactgcactgctaattcaagagtttatgttcaggaagatatttatgatgactttataaagagattcacagaacataccaaagaaaactggaagtttggttcgaaatgtgatccatttgataaagattgcacagtgggtcctgttgtgtcagagaagcaatttgagacggtgaatgattatattaggcatggaaaggaggaagaaaacctacagattcaccaaactgttgagaaatgtgattgcaagggttattttatttctccaacaatttttactgatgtccctcagggatctaaattgatgaaagaagaaatcttcggtccagttgttgtagtcgccaaattcaaagattacaaagaagcaataaaattggccaatgatacaaattatggtttagcctctatggtcttcactaagaacatttctgttgctaattggtttgctagggacattaaatcaggtactgtgtggatcaactcgtccaatgaagaagatcctacggtgccatttggtggtttcaagcaaagcggtataggtcgtgaactgggtgaaactggtgtggaatcatacatgcaaataaagacggtgcatttaaacatgtcagagaagatttga

SEQ ID NO: 86955 - protein, 504 aa, Candida glabrata CBS 138
MPEVFEEINIPQIGRSYKQPIGIFIDNEFVPSSNGEKIETINPATEEVITSFYAATEDDVDKAVKSARESYENVWFKISPAEKRDMLLKLADLIEEEKPLLAALETLDAGKPYHTNAMDDIDQIIHLTKYFAGATDKFTQGKTIPIDHEKLVYTLKSPYGVCGMIIPWNYPLAMASWKMQGCLAAGNTLVIKPAENTSLSLLYLAQLFKKAGFPKGVVNVVPGKGSVVGNSLGLHMDVDKISFTGSTKVGSSILELAGKSNMKDVTLECGGKSPAVVFQDADIDNAIEYIANGIFYNSGQNCTANSRVYVQEDIYDDFIKRFTEHTKENWKFGSKCDPFDKDCTVGPVVSEKQFETVNDYIRHGKEEENLQIHQTVEKCDCKGYFISPTIFTDVPQGSKLMKEEIFGPVVVVAKFKDYKEAIKLANDTNYGLASMVFTKNISVANWFARDIKSGTVWINSSNEEDPTVPFGGFKQSGIGRELGETGVESYMQIKTVHLNMSEKI

SEQ ID NO: 86956 - DNA, 1554 bp, Candida glabrata CBS 138
  CDS (1)..(1554)
atgttctcccgtactattaccagaactctacgtgctcctgcggtgctacgtttgtactcaactaacgttccattggaagtaccagttactttgccaaatggtatcaagtatatgcaaccaaccggtctgttcatcaacggtgagtttgtgaagtcacacgagggtaagaccttcgatgtgctgaacccatctaccgaagaaacgatcgctacgctatatgaagcccaggctgccgacgtcgacatcgccgtcaaggccgctaaggaggccttcgagaaccactggtccagagaagaccctgaagtgcgtgccagagctttgttcaacttggccgacttagtcgaagctaacttggaaactttggccggtatcgactctctagacaacggtaagtccctgctgtgttcccgtgccgatgtcgcgctagtggccaagtacttgcgttcctgtggtggttgggctgataagatctacggtgacgttatcgacaccggtaagtcccacttcacttactccgtcaaggaaccattgggtgtctgtggtcaaattatcccatggaacttcccattgttgatgtggtcctggaagatcggtccagctttggccaccggtaacaccgtcgttctaaaacctgccgaattgactccattgtccgcccttttcgcttccaaactttgccaagaagctggtatcccagctggtgtagttaacattatcccaggtccaggtaaaaccgtcggtgaaagaatctgtacccaccctgacatcaagaaggttgcattcactggttctaccgctactggttcccgtatcatgaagaccgccgctgacagcatcaagaaggttactcttgaactgggtggtaagtctccaaacatcgtcttcgctgatgctgacttggaacaagctgttgaaaacattgcccatggtattttcttcaactctggtgaagtctgttgtgccggttctagaatctacgttcaagataagtgttatgacgaagtcttggacagattaaagaagtacactgaaagcttgaaggtcggtaacccattcggtgacaacacttaccaaggttctcaaacttcccaacaacaattagacaagattttggaatacgtcgacattggtaagcaagaaggtgccagaattgtcaccggtggtgaaagaatcggtgagaagggttacttcttcaagccaaccgtcttcgccgatgttaaggaaaacatgcgtattgtcaaggatgaaatctttggtccaatcgtcaccgtctcccagttctccactgttgacgaggttatcgccatggctaacgactcccaatacggtctagccgccggtatccacaccaacgatgtcaacaaggccgtcgaagtctccagcagattgaaggccggtaccatctggatcaacacttacaacgcattccaccaaaacgttccattcggtggtttcggtcaatctggtattggccgtgaaatgggttctgccgccttggacaactacactcaagtcaagtctgtcagaatggccatcaccaagccaagagtctaa

SEQ ID NO: 86957 - protein, 517 aa, Candida glabrata CBS 138
MFSRTITRTLRAPAVLRLYSTNVPLEVPVTLPNGIKYMQPTGLFINGEFVKSHEGKTFDVLNPSTEETIATLYEAQAADVDIAVKAAKEAFENHWSREDPEVRARALFNLADLVEANLETLAGIDSLDNGKSLLCSRADVALVAKYLRSCGGWADKIYGDVIDTGKSHFTYSVKEPLGVCGQIIPWNFPLLMWSWKIGPALATGNTVVLKPAELTPLSALFASKLCQEAGIPAGVVNIIPGPGKTVGERICTHPDIKKVAFTGSTATGSRIMKTAADSIKKVTLELGGKSPNIVFADADLEQAVENIAHGIFFNSGEVCCAGSRIYVQDKCYDEVLDRLKKYTESLKVGNPFGDNTYQGSQTSQQQLDKILEYVDIGKQEGARIVTGGERIGEKGYFFKPTVFADVKENMRIVKDEIFGPIVTVSQFSTVDEVIAMANDSQYGLAAGIHTNDVNKAVEVSSRLKAGTIWINTYNAFHQNVPFGGFGQSGIGREMGSAALDNYTQVKSVRMAITKPRV

SEQ ID NO: 86958 - DNA, 1506 bp, Kluyveromyces lactis NRRL Y-1140
  CDS (1)..(1506)
atgtcattgtacgaaacggttaacattccacagttgaacattacatatgagcagccattggggttgttcatcaacaacgagtttgtcaagtccagtgacggtaagaaaattgaaagcatcaacccaagtactgaggaatcgattgtctctttttttgcagcttctgaaaaagatgtcaatagtgctgttacagcagcaagagatgcttttgaaaacaattggtccaagacatcaggcgaacagagaggaattcttttgtcgaagttatttgatttgattgagagagataagttattgctagctgcgattgagacgttagattcggggaagccttaccactctaatagtcttgctgatcttgaacaaatcttgcaattaactcgttactatgctggcggtgctgataagttcaccggaggggaatatattccattaaaccaagacaagtatgcgtataccatgaaggtaccttatggtgttgttgcacaaattgttccatggaattatcccttggctatggctagctggaaaatccaatcgtgtttggctgctggtaacactattgttatcaagccagcagagaacacttctttgtctttgctttacttcgcacaacttgtcaaagaggctggctttcctccaggtgtgttgaatatcttaccaggttatggttccgttacgggaactgcaatggctagccacactgacatagacaagattgcgtttactggttcgaccgctgttggacaaaaagtcatgtcacttgctgcccaatcaaacttgaaagctgttactttggaatgcggtggtaagtctccatgtctaatttttgctgatgccaaccttgatgaagccattccttgggttgctggaggtatcttctataactcagggcagaattgtacagcaaactcgaggatctacgtccacgaggatatttacgaagagtttttaactaaatttgaagaatacgctaaatcaaactggaagttcggagctaaattcgatcctttcgataaagactgtactctagggcctgttatttcaaaagtccaatatgatcgtatccaatcctatgttgaacatggtaaagcctctgagaaactaggcttcaaggagtttgccgaatatccttctaagggttattttatcccacctactatattttcagatgttccaaactcttcgaaactctctcaagaagaaatttttggaccggtgggtgttgtggcatcattttcaacttatgaggaagccatcaagttggcaaatgactcctcttacggtttggcttcttgtgttttctctgaaaatgcccgaacaacagcacaatttgctcgcgatattagggcaggtaccgtttggatcaattcttccaatgacgaagaaatttctgttccatttggtgggttcaaaatgtccggtattggtcgtgaattggggcgtaacggtgttgactcttatttgcaaacaaaagctgttcacgtaaatattgcaaagctgtga

SEQ ID NO: 86959 - protein, 501 aa, Kluyveromyces lactis NRRL Y-1140
MSLYETVNIPQLNITYEQPLGLFINNEFVKSSDGKKIESINPSTEESIVSFFAASEKDVNSAVTAARDAFENNWSKTSGEQRGILLSKLFDLIERDKLLLAAIETLDSGKPYHSNSLADLEQILQLTRYYAGGADKFTGGEYIPLNQDKYAYTMKVPYGVVAQIVPWNYPLAMASWKIQSCLAAGNTIVIKPAENTSLSLLYFAQLVKEAGFPPGVLNILPGYGSVTGTAMASHTDIDKIAFTGSTAVGQKVMSLAAQSNLKAVTLECGGKSPCLIFADANLDEAIPWVAGGIFYNSGQNCTANSRIYVHEDIYEEFLTKFEEYAKSNWKFGAKFDPFDKDCTLGPVISKVQYDRIQSYVEHGKASEKLGFKEFAEYPSKGYFIPPTIFSDVPNSSKLSQEEIFGPVGVVASFSTYEEAIKLANDSSYGLASCVFSENARTTAQFARDIRAGTVWINSSNDEEISVPFGGFKMSGIGRELGRNGVDSYLQTKAVHVNIAKL

SEQ ID NO: 86960 - DNA, 1494 bp, Kluyveromyces lactis NRRL Y-1140
  CDS (1)..(1494)
atggctggtatcactggtattactccggagttcaagaactcagatttgatccgtaaaggtgcatttgttgatggccaatggcttgagactgcttcagaaacgtttaatgtgactgatccagctactttggaagttatcgctactttgccagatcaatccattgaagttatccatgaagccatcgatagtgctgcagaagcgttccgtttgtttaagaaaactacaccaaagaccagatctacatggttgcgtaacttgtacaatttgatgatggaaaacgtcgacgatttggcaaagattattacttgggaaaatggtaaggctctatccgaagctcaaggtgaagttaagtatgcagcatcttatttcgaatggtatgctgaagaagcagttagaatgtatggtactactattcaaccgaataatggatccaatagagctttcaccgttagacaaccagttggtgtctgtggtatcatttgtccatggaatttcccaagcgctatgattaccagaaaggccggtgctgcattggcagctggttgtaccgtggtcgtgaaaccagattctcaaactccattgtccgctttggctttggctcatttggctgaaaaagctggtttccctaaaggtgttttcaacgtcgtattgactgctaccagaactccagaattcggtttggctctatgtgaatctccaaaagttaagaagatttcgttcactgggtcgaccaacgtcggtaagatcttgatgaaacaaagtgcatctactatgaagaaattgtcctttgaattaggtggtaatgctccggtcattgtcttcgacgatgctgatttggagcaagccgttactcaaactattttgtccaaatttagaggcctaggtcaaacttgtgtgtgcgctaacagaatctatgttcaacgtaccatcattgattcatttgctgaaaaattggctaaacaagtgaacgagttcgtcattggccatggtttggactctaagactactcacggatgtctaattaatgaaaatgctataaagaaagttgaagctcatgtaaaggacgccttggaaaagggtgcaaagaccgtcgttgctggtggtcgtttgccagaattaggtccaaacttctacgctccaaccgtactatctcatgttccatccacggctgtggttaataaagatgagactttcggtcctctctgtgccttgattccattcgataccatggaagaagtcgtaggatatgctaacgatactgaattgggtctagcatcatacgtgttctctaagaacattgataccgtatacaccgttgctgaagctttggaaaccggtatggtctcatgcaacactggtttgttcagtgagtgtaccattccattcggcggtgttaaggaatccggattcggtagagagggatctttgcacggtattgaagactatactgtcatcaagactatcaccatcggaaacttgcctgctccactataa

SEQ ID NO: 86961 - protein, 497 aa, Kluyveromyces lactis NRRL Y-1140
MAGITGITPEFKNSDLIRKGAFVDGQWLETASETFNVTDPATLEVIATLPDQSIEVIHEAIDSAAEAFRLFKKTTPKTRSTWLRNLYNLMMENVDDLAKIITWENGKALSEAQGEVKYAASYFEWYAEEAVRMYGTTIQPNNGSNRAFTVRQPVGVCGIICPWNFPSAMITRKAGAALAAGCTVVVKPDSQTPLSALALAHLAEKAGFPKGVFNVVLTATRTPEFGLALCESPKVKKISFTGSTNVGKILMKQSASTMKKLSFELGGNAPVIVFDDADLEQAVTQTILSKFRGLGQTCVCANRIYVQRTIIDSFAEKLAKQVNEFVIGHGLDSKTTHGCLINENAIKKVEAHVKDALEKGAKTVVAGGRLPELGPNFYAPTVLSHVPSTAVVNKDETFGPLCALIPFDTMEEVVGYANDTELGLASYVFSKNIDTVYTVAEALETGMVSCNTGLFSECTIPFGGVKESGFGREGSLHGIEDYTVIKTITIGNLPAPL

SEQ ID NO: 86962 - DNA, 1539 bp, Debaryomyces hansenii CBS767; identical to SEQ ID NO: 37943
  CDS (1)..(1539)

SEQ ID NO: 86963 - protein, 512 aa, Debaryomyces hansenii CBS767; identical to SEQ ID NO: 37944

SEQ ID NO: 86964 - DNA, 1509 bp, Debaryomyces hansenii CBS767
  CDS (1)..(1509)
atgtcattaccactcgaatacaatgttacattaccagacggtaataaatttagtcaaccatcggggttattcattaacaatgaatttgtaaagagcaaatcaggcaagactattgaatcgataaacccttcaacaggtgaagtcaatggatcggtttatgcagcagatgaggaggacgttgattcagcagttaagcatgctagaaatgcgttccatgctgtctggagaaagactacgggtgttgcgagaggtgacttacttaacaagtttgctcaggtcttgcaagaacaaagagacctaattggtgccattgaggcttgggattcgggaaagaccaaagaacagaatgccgtgtatgatattgatgaatgcattaattgttttaaatattttgccggatgggctgacaaaattcaaggaaaagtgatccagaatgatccaaaaaagttggcgtacacagttcatgagccatttggtgtatgtgcacaaattattccttggaattatcctttggctatggctgcatggaaattggctccggcgttggctgccggtaacgttgtggttttgaaatcatccgaagtgactcctttgtcgattttgtatttggcaaagattttcagagatgtaggctttccaccaggtgttgtgaatattttatccggatacggtgcaacatgcggaaaagctttggcttctcatttagatgttgataaaatagccttcacgggttcaactgctaccggaaagttgatacaacaaatggcttcttccaatttgaaagctgtaaccttagaatgcgggggaaagtctccattgattgtgagaaaagatgcagatttggaacaagctgtcaaatgggcagctatcggtatcatgagcaaccaaggtcaaatttgtacgtcaacttctagagtttatgttcatgaatccgtttatgatactttcttaacaatgtacgctaagcatataaaagaggaatatgtacaaggcgatatgtttgaaaagaacgcaattgtaggtccacaggtctccaaacaacaatttgataaaatcttatcttacattgatatcggtaagaaagaaggtgccagagttattttaggcggtgaaaaaaattccgacggaaatatgtcgaaaggattctttgttaaacccaccatatttgccgatgtaaagccagacatgcgaattgttaatgaagaaatatttgggccggttgtcacttgtggaaaatttgcgtctgacgaagaagctataaaatacgctaatcaaacgcaatacggattaggtgcagcgatattcacctcagatataaccaaggctcatagcatggcaagcgatattcaagctggtatggtttggataaactcttccaatgattcagattgccatgttccttttggtggggtgaaaatgagtggggttggtagagaattaggtgaatacggtttatctatgtatacccaagctaaagcaatctacgttaacttgggtacacatttataa

SEQ ID NO: 86965 - protein, 502 aa, Debaryomyces hansenii CBS767
MSLPLEYNVTLPDGNKFSQPSGLFINNEFVKSKSGKTIESINPSTGEVNGSVYAADEEDVDSAVKHARNAFHAVWRKTTGVARGDLLNKFAQVLQEQRDLIGAIEAWDSGKTKEQNAVYDIDECINCFKYFAGWADKIQGKVIQNDPKKLAYTVHEPFGVCAQIIPWNYPLAMAAWKLAPALAAGNVVVLKSSEVTPLSILYLAKIFRDVGFPPGVVNILSGYGATCGKALASHLDVDKIAFTGSTATGKLIQQMASSNLKAVTLECGGKSPLIVRKDADLEQAVKWAAIGIMSNQGQICTSTSRVYVHESVYDTFLTMYAKHIKEEYVQGDMFEKNAIVGPQVSKQQFDKILSYIDIGKKEGARVILGGEKNSDGNMSKGFFVKPTIFADVKPDMRIVNEEIFGPVVTCGKFASDEEAIKYANQTQYGLGAAIFTSDITKAHSMASDIQAGMVWINSSNDSDCHVPFGGVKMSGVGRELGEYGLSMYTQAKAIYVNLGTHL

SEQ ID NO: 86966 - DNA, 1476 bp, Yarrowia lipolytica CLIB122
  CDS (1)..(1476)
atgcaagttactcttcccgacggaaagtcctacgaccagcccaccaagctcttcatcaacaacgagtgggtcgatggtcacggcggctcaattgagtctgtcaaccccgccaccgagcaggtcatctgctccgttgaggccgctgacgagagtgatgtcgacaaggctgttcaggccgctcgaaactgctacgagaacgtctggcgaaaggtcaccggtgccgagcgagcacagctcatgcgcaagcttgccgaccttgtcgagaagaacaaggacctgctcacctccattgaggctgccgactctggaaagcccaagtacggcaactgtgacggagacgtggacgagctcatctacgtcctgcgatactactccggcctggctgagaaggctggcaatggagtcaccatttctacctccaacgaaaagtttgcctacaccatccacgagccttacggagtctgtggccagatcatcccctggaactaccccattgctatggctgcctggaagctaggtccctgtctcgctgccggtaacgtgctggtcatgaagctttccgaatacacccctctgtccatgctggtcatctgcaacctggtcaaggaggctggtttcccccctggcgtggtgaacgtggttaacggctacggcgccaaggccggcaaccgactggctgagcaccccgacgttgacaagattgccttcaccggttctaccgctaccggtcgatctgtcatgaaggctgctaccggaaacatgaaggccgtgaccatggagcttggaggaaagtctcctctgctcattttcgacgactgcgatctcgccaaggccatcgagtgggcccacattggcatcatgtacaacatgggccaggtgtgttccgccacctctcgaatcctggtgcaagaaggcattgccgacaagttcgtcgagggtttcatcaagcagtgtaatgaggcctccattctgggttgtcctttggaccagaagacctctcacggtcctcaggtcaacaagatccagtatgagaaggtgctcggatacattgagaagggtaaggctgagggagccaagtgcattctgggaggtgaggctgccccccaaaacggcaagggctatttcattaagcccaccgccttcaccaacgtcaacaaggacatgaccatctggaaggaggagattttcggccctgtcgtggtaattgacaccttcaagaccgaggaggaggccattgccaaggccaacgatactccgtacggtctggctgccgctctgtttaccgagaacattcggcgagcccaccgggttgtcaaggagctgcgagctggtcaggtctgggtcaactctgataacgactccgatcctcgagttccctttggtggtgtcaagcagagtggtattggtcgagagcttggtgagtatggtctttctatttacacccaggccaaggccgtccacattaacctggattag

SEQ ID NO: 86967 - protein, 491 aa, Yarrowia lipolytica CLIB122
MQVTLPDGKSYDQPTKLFINNEWVDGHGGSIESVNPATEQVICSVEAADESDVDKAVQAARNCYENVWRKVTGAERAQLMRKLADLVEKNKDLLTSIEAADSGKPKYGNCDGDVDELIYVLRYYSGLAEKAGNGVTISTSNEKFAYTIHEPYGVCGQIIPWNYPIAMAAWKLGPCLAAGNVLVMKLSEYTPLSMLVICNLVKEAGFPPGVVNVVNGYGAKAGNRLAEHPDVDKIAFTGSTATGRSVMKAATGNMKAVTMELGGKSPLLIFDDCDLAKAIEWAHIGIMYNMGQVCSATSRILVQEGIADKFVEGFIKQCNEASILGCPLDQKTSHGPQVNKIQYEKVLGYIEKGKAEGAKCILGGEAAPQNGKGYFIKPTAFTNVNKDMTIWKEEIFGPVVVIDTFKTEEEAIAKANDTPYGLAAALFTENIRRAHRVVKELRAGQVWVNSDNDSDPRVPFGGVKQSGIGRELGEYGLSIYTQAKAVHINLD

SEQ ID NO: 86968 - DNA, 1569 bp, Yarrowia lipolytica CLIB122
  CDS (1)..(1569)
atgctccgacgaatcactctcaaccagtttaagggcggcctgcgacggctgtccacccttacccccgtcaagaacgaacctctgaccctgcccaacggcgccaagtacgagcagcccgtcggtctcttcatcaacggcgagttcgtcaagtctcagtccggaaagcgattcgagaccgagaaccccaccaccgagacccccatcatctccgtttacgaggctggtgaggctgatgccaacgcagctgtcgaggctgccaagaatgccttcaagaactggggcttcaagaccgctccttccgagcgaggagtcctgctcaacaagctcgctgatctcattgagcgagatctcgacctcatttctgccattgagaccaccgacaacggtaaggtctttgcccaggcccagggtgacgtcgccctcgtcgtcaaggtgctccgatactacgctggatttgccgacaagattggcggcgacctcgtccagaccaacgacggcttcttcaactacacccgaaaggagcctctcggagtgtgtggccagatcatcccctggaacttccctctgctcatgtgggcctggaagattgcccccgctctgaccactggtaacaccgtggttcttaagaccgccgagtccacccctctgtccgccctgtacgcctgtaagctctcccaggaggctggcttccccaagggtgttctcaacgttgtgtccggttatggccccgttggaggcgttctgtccgcccaccccgacatcaagaagattgctttcaccggctccaccgccactggtaagcaggttgctaagaccgccctgacctccaacctcaagaagaccaccatggagctcggtggtaagtcccccaacattatcttcgacgacgccaacctcgaggacgctctttctgccgccgctctcggtatcttcttcaactccggagaggtctgctgcgccggctctcgactctttgtccaagccggtgtctacgaccaggttgtcgaggccttcaagaagaaggctgagtccgtcaaggtcggtgatcccttcgaccccaactctctccagggtccccagcagaacaagaaccagttcaagaagattctgggatacattgagcagggccagaaggagggcgcccatctcctgtgtggaggatctgcccaggccggtcctaacaagggatacttcatccagcccaccgttttcaccgacgtgaacaacgatatgtccattgtgcgagaggagattttcggccccgtcctgaccatcaccaagttcaacaccgttgacgaagtgattgacatggccaacgactccgagtacggtcttgccgctggtatccacaccactgatatcaacaaggcccactatgttgctgagaacattgcctccggtaccatctgggtcaactgctacaacgccttccacgaggccgttccctttggaggatacaagcagtctggtttcggtaaggagatgggtcgagatggtcttgagaactacctccagaccaaggcagttcgagtcaagcttgatgagcgaaagtgggctgacaagcagtga

SEQ ID NO: 86969 - protein, 522 aa, Yarrowia lipolytica CLIB122
MLRRITLNQFKGGLRRLSTLTPVKNEPLTLPNGAKYEQPVGLFINGEFVKSQSGKRFETENPTTETPIISVYEAGEADANAAVEAAKNAFKNWGFKTAPSERGVLLNKLADLIERDLDLISAIETTDNGKVFAQAQGDVALVVKVLRYYAGFADKIGGDLVQTNDGFFNYTRKEPLGVCGQIIPWNFPLLMWAWKIAPALTTGNTVVLKTAESTPLSALYACKLSQEAGFPKGVLNVVSGYGPVGGVLSAHPDIKKIAFTGSTATGKQVAKTALTSNLKKTTMELGGKSPNIIFDDANLEDALSAAALGIFFNSGEVCCAGSRLFVQAGVYDQVVEAFKKKAESVKVGDPFDPNSLQGPQQNKNQFKKILGYIEQGQKEGAHLLCGGSAQAGPNKGYFIQPTVFTDVNNDMSIVREEIFGPVLTITKFNTVDEVIDMANDSEYGLAAGIHTTDINKAHYVAENIASGTIWVNCYNAFHEAVPFGGYKQSGFGKEMGRDGLENYLQTKAVRVKLDERKWADKQ

SEQ ID NO: 86970 - DNA, 1548 bp, Yarrowia lipolytica CLIB122
  CDS (1)..(1548)
atgccatatatacggtgtctgggggactgtatcggtcccatcaaccaattgctcaacatgtccatctccatttcgctgcccaacggaaacaagtacgaacagcccacgggcattttcatcaacaacgagtggtccgaggcctccgacaagggtaccattcccgtctacaacccgtcgaccggcgacgaggtggtgcaggtggcggctgctactgctgaggacgtggatcgggcagtagttgctgctcgaaaggcgttccagagctggcgagatgtccccggtgaggagcgtgccaagttgctggacaacttcatcaatctggtgtccaagaacctcgacacggtggctgccatcgaggctctcgattccggcaagcctcttcagctcaatgctcggggtgacatcgccggcggcctggccgtctacaagtactacgcagggtgggcggacaaggtgtttggtaagaccattgtcaacaccaccaagaagctggcgtacactcttcacgagccccatggagtgtgtggtcagatcattccctggaactatccgtttctgatggccgcgtggaagattgcgcctgcaattgcggctggcaacgtggtggtgatgaagctcgcggaaaacacccctctgtcgatgctgtatctgtgcaatctgttcaaggaggccgggttccctcccggagtgatcaacatcttcactggccacggcgccaaggctggctcgcgactggctgagcacccggatgtcgacaagattgccttcaccggctccaccgccaccggccgaatcatcatgaagctggccgctaccaacctcaaggccatcactctggaatgtggaggcaagtcgcccatgattgttctgggagatgccgatctcgaccaggccaccaaatgggcccatgccggtattatgaccaaccagggccagatctgctgcggtgtgtcgcgagtgctggttcacgagtccatctacgaccagtttgtcgacaagtacgtcgaggtggtcaagcagcggtctcgagtcggagacatgttccaggacaagattctccaaggcccccaggtctccaaggtccagcaggagaaggtgcttggctacattgagaagggcaaggaggagggcgccaagctggtctactctggcgctgtggctgccgaggcgctcgaaaagggctactttgtgccccccactgtgtttgctgacgtcagagacgacatggtgatttctcgagaggagattttcggacctgtggttgccatcgccaagttctccgacgtggaagacgccatcaaccgagccaacgactccgagtacggtttggccgcgtccgtctacaccaaggacctgaccgaggcccaccgaatctcccgacggctcgaaagtggccaggtgttcatcaacatggcccatatgggcgactaccgaatgccttttggaggatacaaacagagtggaattggacgagagttgggcgagtatggtctcgatacttatactcagtgcaaggcggtgcatattaacatgggtatgaagttgtag

SEQ ID NO: 86971 - protein, 515 aa, Yarrowia lipolytica CLIB122
MPYIRCLGDCIGPINQLLNMSISISLPNGNKYEQPTGIFINNEWSEASDKGTIPVYNPSTGDEVVQVAAATAEDVDRAVVAARKAFQSWRDVPGEERAKLLDNFINLVSKNLDTVAAIEALDSGKPLQLNARGDIAGGLAVYKYYAGWADKVFGKTIVNTTKKLAYTLHEPHGVCGQIIPWNYPFLMAAWKIAPAIAAGNVVVMKLAENTPLSMLYLCNLFKEAGFPPGVINIFTGHGAKAGSRLAEHPDVDKIAFTGSTATGRIIMKLAATNLKAITLECGGKSPMIVLGDADLDQATKWAHAGIMTNQGQICCGVSRVLVHESIYDQFVDKYVEVVKQRSRVGDMFQDKILQGPQVSKVQQEKVLGYIEKGKEEGAKLVYSGAVAAEALEKGYFVPPTVFADVRDDMVISREEIFGPVVAIAKFSDVEDAINRANDSEYGLAASVYTKDLTEAHRISRRLESGQVFINMAHMGDYRMPFGGYKQSGIGRELGEYGLDTYTQCKAVHINMGMKL

SEQ ID NO: 86972 - DNA, 1548 bp, Yarrowia lipolytica CLIB122
  CDS (1)..(1548)
atgttgcgagccctgaataccgtccagcgactttccagcacccgagccatgtccacctcttccatttcgtctctgcttaagaaccccaatcttctgcgaaaccagggctatgtcaatggtcagtgggtctcctccaagaccggagacactttcagcgttgagaacccagccactggcgagactctgggccaggtgcccgagttctctgtcgccgaggccgatgaggctgtccagcacgcacagactgccttcaagaccttcaaacataccactggacgagagcgatccaagatgctgcgaaagtggtacgatctgatgcaggagaatgctggtgatctggccaccctggtgactctggagaacggtaagtccctcgctgacgccaagggcgagattggctacggagcatctttcttcgagtggttctccgaggaagctcctcgaatctacggagacatcattccatccgccaaccccgccaaccgaatctacacaatcaagcagcccatcggagtctgcggaatcatcaccccctggaacttcccctcggccatgatcacccgaaaggctgctgctgctgttgctgctggctgtaccatggtgatcaagcctggttccgaaaccccctactctgcccttgctctggcttacctggctgaacaggccggcatccctaagggtgttgtcaacgtggtcactactaagaagaacactcgagcttttggtaacgccctgtgcgagaacccgaccgtcaaaaaggtttctttcacgggctccactggtgtcggaaagacccttatgggcgcatcggcctccactcttaagaagctgtcctttgagctcggtggcaacgctcccttcattgtgtttgaggacgccgatattgaccgggctgtcgacggagctattgcgtccaagttccgaggcactggccagacctgtgtctgtgcaaaccgaatttatgtgcacgagagcatcgccgagaagtttgctgagcgaatggcagccgtggtcaaggacttcaaggttggaaacggtctcgaccctaacaccacccatggccctcttatccacgagggagccaagggcaagatccaggagcaggttgacgatgctgtcaagaagggaggaaaggtactcattggaggctccgacgcccctgagatcggaaaggcctttttccagcctaccgtcatttccggggccaagtctgatatgctgattgcctccgaggagacgtttggtcccattgctgccatcttcccctttaagaccgacgctgaggtcattgagcttgccaacaaggcagaggtcggtctggccggctacttctactccaaggacgtgtaccgaatccaacaggttgccgaggctctcgaggtcggaatggtcggtgttaacaccggtctgatgacggagtgtgctctgccctttggcggtatcaaggagtctggctttggccgagagggctccaagtacggcctggatgactacatggtgctcaagactattgttgtgtctggcgtcgagccccacattcagccttaa

SEQ ID NO: 86973 - protein, 515 aa, Yarrowia lipolytica CLIB122
MLRALNTVQRLSSTRAMSTSSISSLLKNPNLLRNQGYVNGQWVSSKTGDTFSVENPATGETLGQVPEFSVAEADEAVQHAQTAFKTFKHTTGRERSKMLRKWYDLMQENAGDLATLVTLENGKSLADAKGEIGYGASFFEWFSEEAPRIYGDIIPSANPANRIYTIKQPIGVCGIITPWNFPSAMITRKAAAAVAAGCTMVIKPGSETPYSALALAYLAEQAGIPKGVVNVVTTKKNTRAFGNALCENPTVKKVSFTGSTGVGKTLMGASASTLKKLSFELGGNAPFIVFEDADIDRAVDGAIASKFRGTGQTCVCANRIYVHESIAEKFAERMAAVVKDFKVGNGLDPNTTHGPLIHEGAKGKIQEQVDDAVKKGGKVLIGGSDAPEIGKAFFQPTVISGAKSDMLIASEETFGPIAAIFPFKTDAEVIELANKAEVGLAGYFYSKDVYRIQQVAEALEVGMVGVNTGLMTECALPFGGIKESGFGREGSKYGLDDYMVLKTIVVSGVEPHIQP

SEQ ID NO: 86974 - DNA, 1533 bp, Apis mellifera; identical to SEQ ID NO: 37947
  CDS (1)..(1533)

SEQ ID NO: 86975 - protein, 510 aa, Apis mellifera; identical to SEQ ID NO: 37948

SEQ ID NO: 86976 - DNA, 1455 bp, Aspergillus nidulans FGSC A4
  CDS (1)..(1455)
atgacaacaccaacgccttcggttatccctttgatcatcaacggcaaggaggagctggcttcctcagtgttcgatgtaattagtccttacacaaacaaggcctgctgggccgcagcatctgcttcacctcaagatgccattcgtgccgttgaggcagcccaagcggcgttcccagcatggtcgcagactaagccgactgtccgacgagatatcctcctcaaggcggcagacatccttgagagtagactggagaagtgtgccgagttcatgcggacggagatgggagcagatgctggggcgtcacaattcttcgttgtccccctggcaatccgtatgttgagggaagtggcaagccgcatcacctcaatttgcggcactgtacctgttgtcgaggcggaaggacagagcgcaatcatctataaggagccgatgggagttatcctgggaattgtaccatggaatgcaccgtacgtgttcggtgttcgatctgctgcatgtgctcttgccgccggcaatacgacgattctgaaatcgtccgaactcacgccatgctgttactgggcgctgacccgcgcctttcacgacgccggattgccagacgggtgtctcaaccttgtgtcctgtcgcccgcaggatgcagcagaggtggtcaacgccatgattgagcacccggctgtgatgaagattaactttaccggaagcacggctgttggccggaagatcgctcgtgcttgcgggcagaatcttaagccgtgcctgatggagctagggggtaaaaacagctcaattgtgtgtgctgatgcagatattgaaaccgctgtcaagtccgtaattgccggggcgtatttgaactccggccaaatttgcatggctacagaccggattcttgtgcattcctccattgcaccaacttttgtggaagctctcaagagtgctttgcagtcaatgtctgacccctcatctgagcctccaactctggtcaacgttgcgtccaaggcgcgtgtgcagcggctaatcgagagtgctcttgaagctggtgcccatataattcacggatccgtaactgcagactctgacgcagcaaactcagattctggagtccgtatgccacccgtccttctaggtggagtcaaggaggatatggccgtatggcaggatgaagcgttcgcttcattagcagcttgcatgacattcgacacagaggaagaagcagtccggattgcgaatagcagcgggtatgggctgtccgcggcggtgtttactcaggatctgcgaaaaggtctggcgatcgccaggaaaattcagtctggcgccgtacatatcaacagcatgacgattcacgacgagcccgtactgcctcatggaggcgttaagaacagtggctggggtcgattcaatgcctctcaaggcttggaagaattcttggttacaaaaagtgtgacttggatggactga

SEQ ID NO: 86977 - protein, 484 aa, Aspergillus nidulans FGSC A4
MTTPTPSVIPLIINGKEELASSVFDVISPYTNKACWAAASASPQDAIRAVEAAQAAFPAWSQTKPTVRRDILLKAADILESRLEKCAEFMRTEMGADAGASQFFVVPLAIRMLREVASRITSICGTVPVVEAEGQSAIIYKEPMGVILGIVPWNAPYVFGVRSAACALAAGNTTILKSSELTPCCYWALTRAFHDAGLPDGCLNLVSCRPQDAAEVVNAMIEHPAVMKINFTGSTAVGRKIARACGQNLKPCLMELGGKNSSIVCADADIETAVKSVIAGAYLNSGQICMATDRILVHSSIAPTFVEALKSALQSMSDPSSEPPTLVNVASKARVQRLIESALEAGAHIIHGSVTADSDAANSDSGVRMPPVLLGGVKEDMAVWQDEAFASLAACMTFDTEEEAVRIANSSGYGLSAAVFTQDLRKGLAIARKIQSGAVHINSMTIHDEPVLPHGGVKNSGWGRFNASQGLEEFLVTKSVTWMD

SEQ ID NO: 86978 - DNA, 1509 bp, Aspergillus nidulans FGSC A4
  CDS (1)..(1509)
atgaagcctccctactacatggaaactgggtgcaagcgaaatccggggagcgattcgacgttgaaggtgcgctggaccttgtacacaagactactccagtcggctaaccagggcttgggtatagaccctggctcggggcaggtctttgcctcatgcccgaccaacacggtcgccgatgtggatgcctatgtctcctctgcgcaccgatcattcctctcttatcgggagactaacccacgcgcacgggcaaagatgcttctgaactggcataacctcatcgcccagtccaagaacgacatcgcaaagcttgtcgtgtatgaaacaggtaagcccatggctgaggccgttggtgaggttgactatgctcttggctttgcgtggtggttcgcgggcgaagcagagcgcgttcgcggatccattgcacagccgtctatctcagagcgacgcactttcgtgatcaaacagccgattggggtctgcatcgcgcttgtgccgtggaactttccagtggccatgatcatccgcaaagcagcagcggcattggcggcgggttgtaccgtcgtgatcaaaccgtccccggagacgccactcagtgtgctggcgttggcagatttggcgctgcaggccggctttggccccggagtgatcaatgttctgaccacagacaatttgaatactccggacgttagtgaggcactctgcaagcatccccttgtgcgcaaggtgacgttcactggaagcacggctgtgggacagctgattgcaaggcattgcagcgaggggctgaagaaggtgacgctagagctcggcggaaactgtccgtttattatctttgacgacggggatctggagcaggcattagctgctttgatgattcttaaatggcgcactgccgggcaggcttgcacccatgcaaatcgcgtgtatgtgcagagtggtgtctacgacacgttcttgcgcatgattgtcaatgctacaaaacagctcaaagtcggccatggggcaagccccgggactaccatgggacccctgacaacgagtcgtgggatcgagaagctcgagcggcatgttgcagatgctcttgcaaagggggcccgactagagcttggggggcatcgactgcagttggagggcaactacttccagcctacgatcatctctgggatgtcggcctatatgttgacaacccaggaggaaatattcgggcccctccttggtctgtaccggtttgaaactgaagaggaggctgtccgcatggcaaacgatacgagcatggggcttgcctcgtactttttcaccagggatgttagtcggacgtggcgactgctagagaatctggaagcgggcatgatcggaatgaacactggcaattcgtcagcggcggagtcaccgtttggtggcatcaaagcgtcaggatacggcaaagaagccggcaaagatgtggctattgaagagtatctcattgccaaaacaggaacattgacagttggagctgtctccaagctctag

SEQ ID NO: 86979 - protein, 502 aa, Aspergillus nidulans FGSC A4
MKPPYYMETGCKRNPGSDSTLKVRWTLYTRLLQSANQGLGIDPGSGQVFASCPTNTVADVDAYVSSAHRSFLSYRETNPRARAKMLLNWHNLIAQSKNDIAKLVVYETGKPMAEAVGEVDYALGFAWWFAGEAERVRGSIAQPSISERRTFVIKQPIGVCIALVPWNFPVAMIIRKAAAALAAGCTVVIKPSPETPLSVLALADLALQAGFGPGVINVLTTDNLNTPDVSEALCKHPLVRKVTFTGSTAVGQLIARHCSEGLKKVTLELGGNCPFIIFDDGDLEQALAALMILKWRTAGQACTHANRVYVQSGVYDTFLRMIVNATKQLKVGHGASPGTTMGPLTTSRGIEKLERHVADALAKGARLELGGHRLQLEGNYFQPTIISGMSAYMLTTQEEIFGPLLGLYRFETEEEAVRMANDTSMGLASYFFTRDVSRTWRLLENLEAGMIGMNTGNSSAAESPFGGIKASGYGKEAGKDVAIEEYLIAKTGTLTVGAVSKL

SEQ ID NO: 86980 - DNA, 1506 bp, Aspergillus nidulans FGSC A4; identical to SEQ ID NO: 37951
  CDS (1)..(1506)

SEQ ID NO: 86981 - protein, 501 aa, Aspergillus nidulans FGSC A4; identical to SEQ ID NO: 37952

SEQ ID NO: 86982 - DNA, 1500 bp, Aspergillus nidulans FGSC A4
  CDS (1)..(1500)
atggctcagcaatataagcttcctttcgagctggacaaccctgacttgctccactttgattcctacgtcgggaacgcttgggttacagcaaaaagcggtgcgcgattcgaagtcgtcgaccctggtaccgatctcccctgggcaagttgccctacaaactctgctgaagacgtcgattccgccgtccagatcgcgcacgacgcctttgagaagtttaagaaggtcaacccccgccaacgtgcccagtggctgttgaaatgggactcgctcatccgtgaggccagatccgacctggcgaagatcctcacccatgaaacaggcaagccaatcgccgaatcctatggcgagatcgactacgcgaccggtttcacctggtggtttgcgggtgaggcagaacgtatacaagggtcaatcgccgtgcctgccgcgcctaaccggcgcgtcttcactgtcaagcaaccgatcggtgtcgctgctgcccttgtgccgtggaatttccctattgctatggtgttacggaaggccggtgcagctctcgctgccggttgcacgatgattgtcaagcccagtcccgagactcccctcacagccttggtattagcgcacctagcggagaaggcaggcttccccgccggagtgttcaatgtgcttacgacggatctggaaaacacgccgccgctaagcgaagcgctgtgcaagcacccgctcgtgaagaaggttacgttcactggctcaactcgggttggcaagctgattgcctctcactgtgcacacgggttgaagaaggtcacattggaactgggcggaaattgtccattccttgtgtttgacgacgcggaccttgaccaagcgctggaccagctgatggctctcaaatggcgccacgctggtcaggcttgtattactgcaaaccggatttacgtgcaggctggaatctacgacaaattcgcgcagctgctcaaggagcgcacggccaaattggtgatcggccatggtgctaaagaaggcacgactctgggaccgctcacgaccccgcgcagtatcgacaaggccattagccaagtcgaagacgcgcgacggctgggcgcagacgtgattcttggcgggagccgtgtccaaggaacacagggttacttcttcgagccgacaatcttaaaaaacatgaccaaggacatgttggtgtcgcgcgaggagtcctttgctccgatcgctgctctctatcgctttgagactgaggaagaagccgtcaagctggcgaacgacaccagcatgggcctggctagttatgcgttctcgaagaacattgaccgtatgtggcgactgctggagaacttggaagcgggcatgatcggcatgaacacaggaaactcgtctgcggctgagtcgccgtttggaggaatcaaggaatcgggttatggaaaggagagcggaaaggaagttgccgtgaatgagtacctgattaccaagacaggtactctaacgattgatgggcagtactag

SEQ ID NO: 86983 - protein, 499 aa, Aspergillus nidulans FGSC A4
MAQQYKLPFELDNPDLLHFDSYVGNAWVTAKSGARFEVVDPGTDLPWASCPTNSAEDVDSAVQIAHDAFEKFKKVNPRQRAQWLLKWDSLIREARSDLAKILTHETGKPIAESYGEIDYATGFTWWFAGEAERIQGSIAVPAAPNRRVFTVKQPIGVAAALVPWNFPIAMVLRKAGAALAAGCTMIVKPSPETPLTALVLAHLAEKAGFPAGVFNVLTTDLENTPPLSEALCKHPLVKKVTFTGSTRVGKLIASHCAHGLKKVTLELGGNCPFLVFDDADLDQALDQLMALKWRHAGQACITANRIYVQAGIYDKFAQLLKERTAKLVIGHGAKEGTTLGPLTTPRSIDKAISQVEDARRLGADVILGGSRVQGTQGYFFEPTILKNMTKDMLVSREESFAPIAALYRFETEEEAVKLANDTSMGLASYAFSKNIDRMWRLLENLEAGMIGMNTGNSSAAESPFGGIKESGYGKESGKEVAVNEYLITKTGTLTIDGQY

SEQ ID NO: 86984 - DNA, 1479 bp, Aspergillus nidulans FGSC A4
  CDS (1)..(1479)
atgtcgctcgcctcgttgaaacgcaaagacctcttccagcaacatgggctcatcggcgacaaatgggtctcgtcgtctggcggcggcacattcaccgtcacaaatccagcaactcttgagactctcgctactcttcctgagatgaacggtgcagacactgaatctgccatcacagccgcgcacactgcgttccagtccttcagaaagactactgcccgccaacgcgctacctggctgcggaaatggcatgccctctgcgtcgagaatatcgatgacctggcgctcatcctaaccgtcgagaacggcaagactctcgccgaggcgaaaggcgaggttctatacgctgcatcctttcttgaatggtttgctggtgaagctgagcgagttcacggcgaggtcgtccctgcttcaaatgccaaccagagaatcttgactgtcaagcagcccctcggtgtggctgcttgtcttgcaccctggaattttcctatcgccatgatcacgcgcaaggttggcgctgcgctggcggccgggtgcacgaccgtctggaaaccagcgggtgagacgccgctgagtgcgcttgcgcaggcggtccttgcaagagaagcagggtttccaagcggtactatcaacgtcattacgacgctgaacagtgtcgctgaagtcggagcggcattatgcaattccaagcttgtgcggaagctcagctttacgggctcgacacgcatcggcaagctcctggcaagccagtgcagccaaaaccttaccaagctgtctctggaactcggcggaaacagcccttttattgtttttgatgatgcgaaggttgagacggctgtcgaggcctgtattctcgccaagttcaggaactccgggcagacctgtgtcacggcgaaccgcattttcgtgcaggagggtatctatgaccggttttcggcagcactggtcgagaaggtcaaggcgctgaaggttgggaatggtgtcgaggagggtgtgatcattggacctctgacgcatgagcgcgctgttgaaaaggccgtcgcccatataaaagacgcgcaagaaaagggcgcctccctcctccttggcggctccccgtgccagcccaacaacctgccaggttacttccttgagccaactgtgctaggcaagatgtctaccgaggccctcacaactcgggaagaggtctttgcaccagttgtagcgttgtacccattcaaaacagaagaagaggtgctcgccaaggcaaacgattgtgacgtcgggttaggcagttatgtcattacggagtcgatgccgcgcatgtggagggttgcggagagcctggaggttggtatggttgggattaacatgggcacgctgagtgccgctgagagtccgtttggaggcgtcaaagaatctggctacggacgggaaggcggacgccagggtattgaggaatatatgacagtcaagagtatcttgatgaatgtcgcggcttag

SEQ ID NO: 86985 - protein, 492 aa, Aspergillus nidulans FGSC A4
MSLASLKRKDLFQQHGLIGDKWVSSSGGGTFTVTNPATLETLATLPEMNGADTESAITAAHTAFQSFRKTTARQRATWLRKWHALCVENIDDLALILTVENGKTLAEAKGEVLYAASFLEWFAGEAERVHGEVVPASNANQRILTVKQPLGVAACLAPWNFPIAMITRKVGAALAAGCTTVWKPAGETPLSALAQAVLAREAGFPSGTINVITTLNSVAEVGAALCNSKLVRKLSFTGSTRIGKLLASQCSQNLTKLSLELGGNSPFIVFDDAKVETAVEACILAKFRNSGQTCVTANRIFVQEGIYDRFSAALVEKVKALKVGNGVEEGVIIGPLTHERAVEKAVAHIKDAQEKGASLLLGGSPCQPNNLPGYFLEPTVLGKMSTEALTTREEVFAPVVALYPFKTEEEVLAKANDCDVGLGSYVITESMPRMWRVAESLEVGMVGINMGTLSAAESPFGGVKESGYGREGGRQGIEEYMTVKSILMNVAA

SEQ ID NO: 86986 - DNA, 1536 bp, Aspergillus nidulans FGSC A4
  CDS (1)..(1536)
atggcggacctcttcgtcgacctcgttgcgccaaacggtactcactactcacaacccacaggactctttatcaacaacgccttcgttgcgtccagtggccagacaatcacctcactcgacccagcgacggacaaaccgatcgctaccgtccatgctgccagcgccgaagatgtcgaccgcgcagtgatcgcagccagagcggctctggtgcacccatcgtggaagaagttgccgggcaccgagcgtggccagctcatggctcgtctggccgatcttatggagaaaaacaaagagctgtttgcgaccatagacgcttgggacaacgtactctcactcactgagaagtcaggcaaaccgtaccacatcgcgctcagcgaggatctcgtggaggcgatcgggactattcgatactacagcggctgggcggataagacgtttggacagacaatcagcacgacgccagcgaagtttgcatataccatccgacagcctgttggtgtagttggccagatcatcccgtggaactatcctctctccatggcctgctggaagctagggccggcgctcgcttgcgggaacacggtcgtgctcaagcctgctgaacagacaccgctgagcgtccttgtgttgggcagcctgatcaaggaggctggctttccacccggggttgtgaatattgtgaatgggtatggtcgcgaagccggagcggctctagcaggccacccgctcatcgacaaaattgcgtttacggggtcgaccgtaacagcacgcgagatcatgaagcttgctgcggggactttgaagaacatcaccctagagactggcggaaaatcaccccttctggtcttccctgacgctgacctggagcaagctgttaagtggtcgcactttggtatcatgtccaaccagggacagatctgcaccgccacttcccgaatctacgtccatcaagatatattccagctgttcctgtccaaattcaaggccgcggttgagacgacttccaaaatcggcgaccaatgggacgaatctacctttcaggggccgcagattacacgcgcccagtacgaccggatcctttcctatatcgagaccgcgaagaaaggcggtatggccgtagtcaccggcggctcagcacatgcgccttcgagcgagaagaacaaggacggctatttcatccaaccgactgtgttcaccggcaccgatgactcgcatgctatcgtccgtgaagaggtctttggcccggttgtggtgatcctacccttcgcgtccgaagaggaagccatcaggcgtgcaaatgacacaacatacggacttggggcggcagttttcacgtgcgatctggaacgtgcgcatcgtgttgctgctgagatagaagctggcatggtctgggtcaacagcagtcaggactgtgatccccgggtgccttttgggggcgtcaagcagagcggtattgggcgtgaactgggcgaggcgggcctggaggcttatacacaggttaaggccgtgcatgtgaacatgggcaacaagctttag

SEQ ID NO: 86987 - protein, 511 aa, Aspergillus nidulans FGSC A4
MADLFVDLVAPNGTHYSQPTGLFINNAFVASSGQTITSLDPATDKPIATVHAASAEDVDRAVIAARAALVHPSWKKLPGTERGQLMARLADLMEKNKELFATIDAWDNVLSLTEKSGKPYHIALSEDLVEAIGTIRYYSGWADKTFGQTISTTPAKFAYTIRQPVGVVGQIIPWNYPLSMACWKLGPALACGNTVVLKPAEQTPLSVLVLGSLIKEAGFPPGVVNIVNGYGREAGAALAGHPLIDKIAFTGSTVTAREIMKLAAGTLKNITLETGGKSPLLVFPDADLEQAVKWSHFGIMSNQGQICTATSRIYVHQDIFQLFLSKFKAAVETTSKIGDQWDESTFQGPQITRAQYDRILSYIETAKKGGMAVVTGGSAHAPSSEKNKDGYFIQPTVFTGTDDSHAIVREEVFGPVVVILPFASEEEAIRRANDTTYGLGAAVFTCDLERAHRVAAEIEAGMVWVNSSQDCDPRVPFGGVKQSGIGRELGEAGLEAYTQVKAVHVNMGNKL

SEQ ID NO: 86988 - DNA, 1494 bp, Ustilago maydis 521; identical to SEQ ID NO: 37953
  CDS (1)..(1494)

SEQ ID NO: 86989 - protein, 497 aa, Ustilago maydis 521; identical to SEQ ID NO: 37954

SEQ ID NO: 86990 - DNA, 1566 bp, Ustilago maydis 521
  CDS (1)..(1566)
atggactcatcgcatggtacaacaagccgtagccccgagccggttaccatctcgactccaacaggcaaccagtggcaagttccgtcgggcatctttatcaacaatagctttcacgcgtcggtctctggcaagacatttgactcgatcaatccggccacgggcgaaaagctctgtacgctcgctcttggtggcgctgccgacattgaagcagccgtgaaggcagctcgaactgcattcaagacgacatggggcaaaaaatcgacgcctacgcaacgatcacagctgctgctcaagtttgctgacctggtggacaagaacctcgacgaactggccgagctggaaagcatggacaacggaaagcctgtttggatggcgagcagcttcgacgttcctgattctgccgcgtgtctgcgctactacggtggcttagcggacaagatcgagggcaaaaccatcgagcagaccgaaggagaaaagatcgcctacacgcgcatcgagccgcttggtatctgcggtcagatcatcccgtggaattatcccattcaaatggctgcttggaagttaggacccgcgttggcagcgggcaactgtgtcatcctcaagcccgccgaacagacgccgttgacagcactcaagcttgcccaactctcggttcaggctggtttcccagccggtgtgatctcggttgtcaacggttatggtgccgaagtgggcgaggcaatctcgaggcacatggacatccaaaaggtggccttcaccggttctactgccacgggcaagcgtatcatgaaggctgctgccgagagcaacatgaaaaaggttacgctcgaacttggcggaaagtcgcccgtggtggtgttcgagagtgccgatatccaacaggctgtgcgatgggtctgcttgggaatcctcttcaatcaaggccaagactgcaccgctggctcgcgtctctttgttcaagacaggatctacgagagttttatggagcagctcgtcgcagctttcaaggctcacaaagtaggcgatccatttcaccagcttacattccagggacctcaagtcagccagcagcaacaggaaaagatcctcgacatgatcgaatcaggcaagcgacagggcgccaaagtcgaggttggcggtcaagcgtggaagagcgcagattccaaattcaacaagggcttctttgttgagcccaccatcttttctggatgtcgcaaagggatgcgcatcgtcgatgaagagatcttcgggcccgttctggccgtagccaagttcagcacggaagaagaagcgatccgacttgccaacgagaccgtttacggtctaggagctggcgtcttctccgagaatgccagtcaaatccagcgtatggtatcggcgatcgatgcaggcaccgtatgggtgaacaactacgtggcgctgagcaattcggtgccattcggtggaatgaaggcgagtggattcggtcgagagctcggtgtggatgccatcaaggcctactgtgatgtcaaggcgattcactggaactatggcgagaagctcgattggccgcttcccaaactgtaa

SEQ ID NO: 86991 - protein, 521 aa, Ustilago maydis 521
MDSSHGTTSRSPEPVTISTPTGNQWQVPSGIFINNSFHASVSGKTFDSINPATGEKLCTLALGGAADIEAAVKAARTAFKTTWGKKSTPTQRSQLLLKFADLVDKNLDELAELESMDNGKPVWMASSFDVPDSAACLRYYGGLADKIEGKTIEQTEGEKIAYTRIEPLGICGQIIPWNYPIQMAAWKLGPALAAGNCVILKPAEQTPLTALKLAQLSVQAGFPAGVISVVNGYGAEVGEAISRHMDIQKVAFTGSTATGKRIMKAAAESNMKKVTLELGGKSPVVVFESADIQQAVRWVCLGILFNQGQDCTAGSRLFVQDRIYESFMEQLVAAFKAHKVGDPFHQLTFQGPQVSQQQQEKILDMIESGKRQGAKVEVGGQAWKSADSKFNKGFFVEPTIFSGCRKGMRIVDEEIFGPVLAVAKFSTEEEAIRLANETVYGLGAGVFSENASQIQRMVSAIDAGTVWVNNYVALSNSVPFGGMKASGFGRELGVDAIKAYCDVKAIHWNYGEKLDWPLPKL

SEQ ID NO: 86992 - DNA, 1539 bp, Ustilago maydis 521
  CDS (1)..(1539)
atgtctaccaccatcgccgatagcgccaccatcaactttatcaaccaaccaaccctcccctgcattgtcgacaatgcgcccttcaccccttcgcacacctatgcggtctatcgcaccgatcaaccgtccacgtcatctcgtgaggtaacccacaaggtgcacagcatcgccgtttcggacgtagaccatgtggttgcttcgtcgcaggctgccttgcccggatggcgggcgacgccagtctcacgacgtcgcgagattctgctgaaagcatgttcgcttctgctcgaacgtgtccccgagtatgctgccaacacgatggctgaaacggtactttctcgaggaatggcaggattcgagctcgcggtgcttgcgacgggtcacatccagtcggctgctgagagcatgactcacgcgctcaagagcgaggtgttgccgccgggtgacgatggtgccatgaagatcgtcaagcgcgaaccttttggtgtggtactgggaattgcgccctggaacgcacctttcattttggggttgcgatcggtgctctacgctatcgctgcgggtaacacggcgatcctcaagacgtccgagttcgctcctcgagtccacctgagtgttgcgcagcttctcatcgatgccggcttgcccaagggtgtgctcaacgttgtgcacgtcgaccccgcacatgcacctcaagtcaccgaggcattggtgggtcacccgcgcgtccgcaagatcaacttcaccggctccacacgtgtcggtcgaatcatcgcctccaccgctgccaaatacctgaaaccggtcgtgctcgaattgggcggcaaggcacctctgatcgtcctcgaggatgcggatctggacctggctgccaacggcatcttgttcggaggctatttgaacagcaatcagatctgcatgtctgtcaacaatgttctcgtccactcgtcggtggctgcgaaactcgagcagacgctgcgcgcgctgtttgatgcccaccgcgatatcttcaccgccaagctcgcgcagggcatgcaggacaagcatgcgctacgatcactgttcaccgctgcgtcggcggacaggctcaaggtgctctacgatgacgcaatcagcaagggtgccaaggtggtcgttggagatgctggatttgatggtgcgctggttcaaccaatcgtgctcgctcccgttgacaagagcatgaagatctataccgaagaaactttcggtcctgtgctttccatcatcacattcgactcgatcgaccaggccgtcgagatcgcaaacacccccgaatacggtctcgccgcttccgtgtacaccaagaaccaaaccttgggtctcgaactcgcagaccgcatcgacgccggccaggtccacatcaacgcccaaagcgtccacgacgaccccgtcatgccccacggcggctggaaaaattccggctacggcagattcaacggcgtcgaaggcgtcagagagttcacccagaccaaaggtatcaccctccaacacggtcatcccacacccttccaatacgtctaa

SEQ ID NO: 86993 - protein, 512 aa, Ustilago maydis 521
MSTTIADSATINFINQPTLPCIVDNAPFTPSHTYAVYRTDQPSTSSREVTHKVHSIAVSDVDHVVASSQAALPGWRATPVSRRREILLKACSLLLERVPEYAANTMAETVLSRGMAGFELAVLATGHIQSAAESMTHALKSEVLPPGDDGAMKIVKREPFGVVLGIAPWNAPFILGLRSVLYAIAAGNTAILKTSEFAPRVHLSVAQLLIDAGLPKGVLNVVHVDPAHAPQVTEALVGHPRVRKINFTGSTRVGRIIASTAAKYLKPVVLELGGKAPLIVLEDADLDLAANGILFGGYLNSNQICMSVNNVLVHSSVAAKLEQTLRALFDAHRDIFTAKLAQGMQDKHALRSLFTAASADRLKVLYDDAISKGAKVVVGDAGFDGALVQPIVLAPVDKSMKIYTEETFGPVLSIITFDSIDQAVEIANTPEYGLAASVYTKNQTLGLELADRIDAGQVHINAQSVHDDPVMPHGGWKNSGYGRFNGVEGVREFTQTKGITLQHGHPTPFQYV

SEQ ID NO: 86994 - DNA, 1578 bp, Strongylocentrotus purpuratus; identical to SEQ ID NO: 37959
  CDS (1)..(1578)

SEQ ID NO: 86995 - protein, 525 aa, Strongylocentrotus purpuratus; identical to SEQ ID NO: 37960

SEQ ID NO: 86996 - DNA, 1491 bp, Tribolium castaneum; identical to SEQ ID NO: 37975
  CDS (1)..(1491)

SEQ ID NO: 86997 - protein, 496 aa, Tribolium castaneum; identical to SEQ ID NO: 37976

SEQ ID NO: 86998 - DNA, 1467 bp, Listeria monocytogenes str. 4b F2365
  CDS (1)..(1467): transl_table=11
ttgagtattaaagaaacagccttaccaaaagttcaaacaaaattatttattaatggaaaatggacggatggagataataaagaaacaaaagatattgtaaacccagcaaatggagaagttattgccaaaatcgctcaagctggaccaaacgaaaccaaaaaagccattaaagctgcaaaagaagcatttcctgattgggcaaaaatggaactagctgatcgcgtcaaattattacacaaaattgccgatttaatggaagaaaaagcagatacactagcaaaaattatgacgcttgaacaaggtaaaccgctaaaagaatcaaaaggagaagtcctaactggcgcagaaaacttccgattcgctgcagaagaagcaagaagattatatggggaaactatcccagcgccaaacaatcacgcgtttatcgtcaaaaaacaaccaattggtgtagttgcggccattactccgtggaatttcccaggtggtatggtgacacgaaaacttgctccagcgcttgcaaccggaaatacaatcgtattaaaaccttccggagatacgccgctttcggccctagctatctttgaaatttttgaagaagccggcttgccaaaaggtgttgccaatatcgttatgggtagctccaaagaaatcggtgaaacattaactgacagtgatgatgttcgtaaactaactttcaccggctccacgaaagtcggtcaaacactattcaaacaatcagccgaaacactgaaaaaaatctcgctcgaacttggtggacatgcgccatttatcgtatttgatgatgcaaacctggatgctgctgtaaatgatttagttgccgcaaaattccgcaataacggtcaagtatgtgtatcgccaaaccgaatttttgttgccaaagaaattaaagaaaaattcactaaggcgctagttgctaaagtagaacaactaaaagtaggtaacggtttagatgatgtgaatgttggtccacttatccgcgaagatgcgattgacaaaatcgacaaacaacttaaaaatgccacagataaaggtgccaaagtcctaactggcggcggtcgtttaacaggttccgactatgacaaaggcaacttctacaaaccaactgtcttagataacgttacccgtgaaatggacattttttatgaggaaacatttggtccagtaatcccgcttatcacatttgaaacggaagacgaagcaatcgaaatggcgaatgacagtgaattcggtcttgcttcttacttctacactaaagatttagcacgcgtagaaaaagtgggagcagcactagaatacggaatggtcggagcaaatgaaattgccatctctaatccggaaactccatttggcggcgttaaacattctggtttcggtcgcgaaaatggccactacggaatggaagaatacatccaagtgaaattcattaacttaaaatatcgtgactaa

SEQ ID NO: 86999 - protein, 488 aa, Listeria monocytogenes str. 4b F2365
MSIKETALPKVQTKLFINGKWTDGDNKETKDIVNPANGEVIAKIAQAGPNETKKAIKAAKEAFPDWAKMELADRVKLLHKIADLMEEKADTLAKIMTLEQGKPLKESKGEVLTGAENFRFAAEEARRLYGETIPAPNNHAFIVKKQPIGVVAAITPWNFPGGMVTRKLAPALATGNTIVLKPSGDTPLSALAIFEIFEEAGLPKGVANIVMGSSKEIGETLTDSDDVRKLTFTGSTKVGQTLFKQSAETLKKISLELGGHAPFIVFDDANLDAAVNDLVAAKFRNNGQVCVSPNRIFVAKEIKEKFTKALVAKVEQLKVGNGLDDVNVGPLIREDAIDKIDKQLKNATDKGAKVLTGGGRLTGSDYDKGNFYKPTVLDNVTREMDIFYEETFGPVIPLITFETEDEAIEMANDSEFGLASYFYTKDLARVEKVGAALEYGMVGANEIAISNPETPFGGVKHSGFGRENGHYGMEEYIQVKFINLKYRD

SEQ ID NO: 87000 - DNA, 1389 bp, Acinetobacter sp. ADP1
  CDS (1)..(1389): transl_table=11
atggcctatgcaaccgtaaatccttatacaggtgaaacattaaaagaatttccatttgcgacggaacaagaagttaaagcagcgattgacgcaggttacacggcctttacaacgtggaaagatagctcgtttgccacccgtgctgaagttttaaataaggctgctaaaattttgcgtgataaaacggattattatgcaaaatttcttactttagaaatggggaagttatttaaagaagcacaaggtgaggtcgagatttgtgcgcagatttttgaatactatgcaaaacacgcagaagaattactggcacctaccaaactttcgaccgcaaataaagagattaatgccacgatttactatgaaccgcaaggcattgttatggcagttgagccatggaattttcctttttaccagattgcacgaattctaagtgctcagctcgctgcgggtaacaccgttattcttaagcatgcatcaattgtaccgcaaagtgccaatgcctttgaacagttgctattagatgctggattacctcagggagcttttaagaatttatacatgcagcatgagcatattccactggttttaaatgaccatcgggtgtgtggggtagcactgactgggtctgaaggtgcgggtgcagaagttgctgcccatgcgggtaaagccttgaaaaaatctacacttgagttaggtgggtcagatgcatttattgtattaaaagatgcagatcttgaaaaaacagcccaacttgccgtcagtggacgccatagtaacgcgggtcaggtatgtactgcatccaagcgttttatcgtggtagatgaggtgtatgaccagtttgttgagttatacaaacagggagttgcaaaattaaaagcaggtgatccgatggatcccgatacaacattagcgccattatgttcgcaagatgccgccgatcaattgaaaaaacaggttgaaaaagccaaagctgcgggcgcgactgtggaagcaattggtgcgcctgtacccgagcaaggtgccttttttcagccattactgatgactgatattcaagaggataatgaagcgcgatactgggaattttttgggcctgtcactcagctttatcgtgccaaagatgaagcagatgcaatccgaattgcaaatgattcaccttttgggctagggggctcggtctatactgcagatcatgcgcgtggagttgaagtagcgaaacagatccatacaggcatggtatatattaaccatcccaccacttcgcaggccgatctaccttttggtggagtaggtcgttcaggctatggtcgtgagttaatcgacttaggattaaaggaatttgtaaaccacaaattgattgccatcacagacattgatgccaagctttaa

SEQ ID NO: 87001 - protein, 462 aa, Acinetobacter sp. ADP1
MAYATVNPYTGETLKEFPFATEQEVKAAIDAGYTAFTTWKDSSFATRAEVLNKAAKILRDKTDYYAKFLTLEMGKLFKEAQGEVEICAQIFEYYAKHAEELLAPTKLSTANKEINATIYYEPQGIVMAVEPWNFPFYQIARILSAQLAAGNTVILKHASIVPQSANAFEQLLLDAGLPQGAFKNLYMQHEHIPLVLNDHRVCGVALTGSEGAGAEVAAHAGKALKKSTLELGGSDAFIVLKDADLEKTAQLAVSGRHSNAGQVCTASKRFIVVDEVYDQFVELYKQGVAKLKAGDPMDPDTTLAPLCSQDAADQLKKQVEKAKAAGATVEAIGAPVPEQGAFFQPLLMTDIQEDNEARYWEFFGPVTQLYRAKDEADAIRIANDSPFGLGGSVYTADHARGVEVAKQIHTGMVYINHPTTSQADLPFGGVGRSGYGRELIDLGLKEFVNHKLIAITDIDAKL

SEQ ID NO: 87002 - DNA, 1440 bp, Erwinia carotovora subsp. atroseptica SCRI1043
  CDS (1)..(1440): transl_table=11
atgagcaccacccagaaacgtatgtacatcaacggtgagtttgttgaaaacagaagcgggaagtggattgacgtggtgaacccggctaccgagcaggtcatttcacaggtcccagaaggctccgctgacgacgcaaaaagagcgattgatgcagcagaagctgcacagccgagctgggaagcactgcctgcggttgaacgcggcgtttggctacacaagatagccgctggtattcgcgagcgcgaagccgaactgaccgacaccatcattgcggaaggtggtaaaacccacggcttggcgcagacggaggtgctgttcaccgccgactatctggactacatggccgagtgggcgcgtcgttacgaaggcgaaatcattcagagcgaccgaccgaatgaaaatatcttcgtcttccgtaaagcgattggcgtcacgacgggtattctgccatggaacttccctttcttcctgattgcacgtaaggccgctcctgcgctgattaccggcaataccatcgtcatcaaaccgagcgagatcacgccgaataatgcggtgattttcgccgaaattattcacaaaattggcctaccgaaaggcgtaatcaattttgttaccggctacggtccgacggtagggcaagagctggccggtaacccgaaagtgggcatggtcagcctgactggcagcgtggcggcggggattgctaccatgacggcggcggcacagaacgtgaccaaagtgtcgctagaactgggcggcaaagcgccagccatcgtgatggatgacgccgatctcgatttggccgttaaagcgattgtcagttctcgcgtcattaacagcgggcaggtgtgtaattgcgccgagcgcgtttacgtgcagaaaggcatttacgatgaatttatcatccgtattaaagccgccatggagcaggtgaccttcggcaatacggcggagaaaaaaacgctggatatgggaccgttaatcagtgcggcggcgctacagcgtgtggaagacaaggtcgctaaagcggtatcgcagggcgcgaaggtgctgcttggcggcaagtctgaaagcggtacagggtatttctatccgccgacgctgctggtaaacgtgacgcaagagatgccaatcatgcacgaagaggtgttcggtccggtgctgccagtggcgaccttcgacacgctggaagatgcgattgcgatggcgaacgacagcgaatatggcctgacgtcgtcgatctatactcaaaacatcaacaccgcgatgaaagcgctaaaagggctgaagttcggcgaaacctatattaaccgtgaaaacttcgaggcgatgcagggcttccatgcgggctggcgtaaatccggcgtgggtggcgcggacggcaagcacggcttgcaggaatacctgcaaacgcatgtcgcgtacctgcaatttcactaa

SEQ ID NO: 87003 - protein, 479 aa, Erwinia carotovora subsp. atroseptica SCRI1043
MSTTQKRMYINGEFVENRSGKWIDVVNPATEQVISQVPEGSADDAKRAIDAAEAAQPSWEALPAVERGVWLHKIAAGIREREAELTDTIIAEGGKTHGLAQTEVLFTADYLDYMAEWARRYEGEIIQSDRPNENIFVFRKAIGVTTGILPWNFPFFLIARKAAPALITGNTIVIKPSEITPNNAVIFAEIIHKIGLPKGVINFVTGYGPTVGQELAGNPKVGMVSLTGSVAAGIATMTAAAQNVTKVSLELGGKAPAIVMDDADLDLAVKAIVSSRVINSGQVCNCAERVYVQKGIYDEFIIRIKAAMEQVTFGNTAEKKTLDMGPLISAAALQRVEDKVAKAVSQGAKVLLGGKSESGTGYFYPPTLLVNVTQEMPIMHEEVFGPVLPVATFDTLEDAIAMANDSEYGLTSSIYTQNINTAMKALKGLKFGETYINRENFEAMQGFHAGWRKSGVGGADGKHGLQEYLQTHVAYLQFH

SEQ ID NO: 87004 - DNA, 1470 bp, Yersinia pseudotuberculosis IP 32953
  CDS (1)..(1470): transl_table=11
atgcccgcacaaaatcctttacaacatcaacgacagcacgacggtatataccacattggctattttgtcggtggaaaatggtctcaggcacaggagcaatttgacgtctgcaacccggcaaccggcgagctggtcgccagagtggctaaatccggtaaacaagaaaccgaagcggcgattaaagctgccagcgaggctttccctgcctggcgaaaaacgcccgctaaacagcgagcagagattttacagcgttggtatttgctgataatggaacatcagcaatcattggcagagctgatggtctccgagcaaggtaaacccttaaaagaagccttggtggaagtggcttatgccgccagttttatccaatggtttagtgagcaggccaagcgggctaacggtgaaattatcccgtcagccaaagagggcgcacgtatcctggcgacccgcgaaccgattggtgtggtagccgctatcacaccgtggaatttcccgctcgcgatgctcacccgcaaactggggccagcactggccgccggttgtaccgggctgattaaacctgccaataacacgccattatctgccttcgccttactggcactggcagaacaggctggcgtgccagctggggtactcaatggtgtcgtgggggatactcatgctatcagcgacgcgattatggccagttcagacgtgcgtaaaatctcctttaccggctcaaccaatgtcggtaaaacgctgatgcgcaatgctgctgcaaccatgaagagaatttcgatggagctgggcggtaacgcgccttacatcgtttttgatgatgccgatttagaggcggcggtcgccggtgctatggcgtgtaaattccgtaatgccgggcaggtgtgtgtgtgcgtcaatcgcttctatattcaggatgctatctacgacgagtttgttaaccgcttggctgccgaggtgaaaaaactgaaggtcggcaacgggatggataaagacgtcaacatggggccgttgattaatctggccggtctggagaaagtagaagagcacgtaaaagacgcgcttgagaagggggggcgtcttttagcgggggggcatcgccatgcgctgggcggtaatttcttccagccaacggtgattgcagatgccaatgagcagatgaaagtggcctcggaagagacatttggcccgctggccgcctgcttccgtttcagcactgaagccgaagtgattcaacgggccaataatacgccatttgggctggcggcctatttctatacgcagaacttgcaacgggtgttccgcgtttcagaggcgttggaaagcggtatgattggcgtcaatgaatgctcggtttcgaccgagttggcccctttcggtggtgttaaagagtctggcctaggtcgtgaaggttcggtgctggggttggatgaatttatggaagtgaaaaccctgcatttgggtaacttgtag

SEQ ID NO: 87005 - protein, 489 aa, Yersinia pseudotuberculosis IP 32953
MPAQNPLQHQRQHDGIYHIGYFVGGKWSQAQEQFDVCNPATGELVARVAKSGKQETEAAIKAASEAFPAWRKTPAKQRAEILQRWYLLIMEHQQSLAELMVSEQGKPLKEALVEVAYAASFIQWFSEQAKRANGEIIPSAKEGARILATREPIGVVAAITPWNFPLAMLTRKLGPALAAGCTGLIKPANNTPLSAFALLALAEQAGVPAGVLNGVVGDTHAISDAIMASSDVRKISFTGSTNVGKTLMRNAAATMKRISMELGGNAPYIVFDDADLEAAVAGAMACKFRNAGQVCVCVNRFYIQDAIYDEFVNRLAAEVKKLKVGNGMDKDVNMGPLINLAGLEKVEEHVKDALEKGGRLLAGGHRHALGGNFFQPTVIADANEQMKVASEETFGPLAACFRFSTEAEVIQRANNTPFGLAAYFYTQNLQRVFRVSEALESGMIGVNECSVSTELAPFGGVKESGLGREGSVLGLDEFMEVKTLHLGNL

SEQ ID NO: 87006 - DNA, 1389 bp, Legionella pneumophila subsp. pneumophila str. Philadelphia 1
  CDS (1)..(1389): transl_table=11
atgaatattcaaactgtcaacccgacaactgaagaagttctaaatatctacacatgcttggattttgattcaatagataaaaaaatagcgtgcggatatgaggcttatttaaattggaaaaattctaaattcgacataaggcgctctttaatgctcaatcttgctcagatattaaaagataaaaagcaagagttagcgcatttaatggctttagaaatgggtaaacctattgcagcaggtcgtgctgaaattgagaagtgtgcttgggtatgtgaacattatgctgaaaatgcagaacaatacctaatgccaagaactgttcaaactgaaatgaaaacagcaaaagtttgttacagaccactaggaattgtatttgccataatgccttggaatttcccattttggcaggtttttagattttcagcaccaactatcatggcgggtaatggggctattttaaaacatgctccaatatcgagtggaacagggaataaaatcgaagaattattcagagacgctggatttccttcttcattatttcaacacttaattgtagataatgatggggcatctcatatcattgaaaatcaatttgttaccgcagttactttaactggaagtgaacgtgccggtcaaagtgttgcagcgaatgcaggtaaaaatttgaaaaaatcggttctagaattaggcggttcagatccctatttgattcttgaagatgcggatttagatcttgctgctcaatgcattgtggcttcacgattaaataataccgggcaggtctgcattgcggccaagcgagttatagcacttcaatcgattgaaaaagaattaatttctaaaatcaaagaactcatcagcaaatacaaaatgggagatccattagaccccaatattaatttgggacccatggcaagaaaagatttacgagaaaatttgcattcacaagtagaaaaatctgttaaacaaggtgctaaattattgcttggtggtataattccggagggtaaagggtacttctacccgccgacattattaactgatgttaaacctggaatgacagcttttgatgaggaactatttgggcctgttattgttattattactgctaaaaatgagagtgaggcaattttactggccaatatgagccagtatggtttaggtgctgctgtatttacaaaagatcttaataagggagagcatattgctacttatgaaattgaagcgggaacctgttttgttaatgcttttgtagcctctgatccaagacttccttttgggggaataaagcgatcaggatatggtagagagttatcaagagaaggtatattagagtttgtaaataccaaaacaattgcgattagtgacccaaaacatggtaaaaaatag

SEQ ID NO: 87007 - protein, 462 aa, Legionella pneumophila subsp. pneumophila str. Philadelphia 1
MNIQTVNPTTEEVLNIYTCLDFDSIDKKIACGYEAYLNWKNSKFDIRRSLMLNLAQILKDKKQELAHLMALEMGKPIAAGRAEIEKCAWVCEHYAENAEQYLMPRTVQTEMKTAKVCYRPLGIVFAIMPWNFPFWQVFRFSAPTIMAGNGAILKHAPISSGTGNKIEELFRDAGFPSSLFQHLIVDNDGASHIIENQFVTAVTLTGSERAGQSVAANAGKNLKKSVLELGGSDPYLILEDADLDLAAQCIVASRLNNTGQVCIAAKRVIALQSIEKELISKIKELISKYKMGDPLDPNINLGPMARKDLRENLHSQVEKSVKQGAKLLLGGIIPEGKGYFYPPTLLTDVKPGMTAFDEELFGPVIVIITAKNESEAILLANMSQYGLGAAVFTKDLNKGEHIATYEIEAGTCFVNAFVASDPRLPFGGIKRSGYGRELSREGILEFVNTKTIAISDPKHGKK

SEQ ID NO: 87008 - DNA, 1476 bp, Methylococcus capsulatus str. Bath
  CDS (1)..(1476): transl_table=11
atgagccatgaactccgactcgaccagcccggcctgctgcgtacccggtgcctgatcgacggccaatgggtcgacgccgaccactcaaagactttttccgtgaccgatccggccaccggccgggctctggccgatgtccctgccatgggcgccgccgagaccatgcgggcgatcgccgccgcggaacacgcctggaccggctggcgcggcaagaccgccaaggagcgcgccgcggtcttgcgccgctggtacgagctgatcctgagccataccgaagacctcgctcgcatcctcaccgccgagcagggcaagccactgaccgaggcccgcaacgagatcggctacgccgccggcttcgtcgaatggttcgcggaggaggctggacgcgcctacggcgaaaccatcccctcccccgtcccggacaagcggctgctggtcatccgccagcccatcggtgtatgcgcagccatcacgccctggaatttcccggcggcgatgatcacccgcaagatcgcgccggccctggccgccggttgcaccgtagtggtgaaacccgccgagcagacgccgctgaccgccctcgccctggccgacctagcggtgcaggcgggctttccgcccggcgtgatcaacgtcgtgaccggcgatccggaagcgatcggcggcgaactgacttccaatcccttgatccgcaaactctccttcactggctcgaccgaggtcggacgcctcttgatggcgcaatgcgccgcgacggtgaagaaaatctcgctggagctgggcggcaacgcgcccttcatcgtgttcgaggacgccgatctggatgccgcggtcgagggcgccttgctgtcgaagtaccgcaacaccggccagacctgcgtctgcaccaaccgcttcctgatccaggattcgatctacgacgccttcgccgaacgcctcgcggccaaggtgcgcaggctcgaggtcggcaacggcctggacgagggcgtcgtccaaggaccgctcatcgacgagcaggcgctggccaaggtggagcgacatatcgccgacgccctggacagaggcgcccgggtgctggcgggcggcggacggcaccccctgggcggacggtttttccagcccacggtgctcgtcgatgtcacgccagagatgctgtgcacgcgcgaggaaactttcgggccggtggcgccattgctgcgcttcggttccgaggaagaggccctcgcaatcgccaacgccaccgagtatggactcgccgcctatttctacacccgcgacctggcccgcgccttccgcgtcggcgaagcactggaatacggcatggtcggcatcaacaccggcatgctctcctatgacgtcgcacccttcggcggcgtcaagcagtccggcatcggccgggaaggttcgcaccatggcatggacgaatacctggaactcaaatacctctgtctaggcgggatggcgccatccgcctga

SEQ ID NO: 87009 - protein, 491 aa, Methylococcus capsulatus str. Bath
MSHELRLDQPGLLRTRCLIDGQWVDADHSKTFSVTDPATGRALADVPAMGAAETMRAIAAAEHAWTGWRGKTAKERAAVLRRWYELILSHTEDLARILTAEQGKPLTEARNEIGYAAGFVEWFAEEAGRAYGETIPSPVPDKRLLVIRQPIGVCAAITPWNFPAAMITRKIAPALAAGCTVVVKPAEQTPLTALALADLAVQAGFPPGVINVVTGDPEAIGGELTSNPLIRKLSFTGSTEVGRLLMAQCAATVKKISLELGGNAPFIVFEDADLDAAVEGALLSKYRNTGQTCVCTNRFLIQDSIYDAFAERLAAKVRRLEVGNGLDEGVVQGPLIDEQALAKVERHIADALDRGARVLAGGGRHPLGGRFFQPTVLVDVTPEMLCTREETFGPVAPLLRFGSEEEALAIANATEYGLAAYFYTRDLARAFRVGEALEYGMVGINTGMLSYDVAPFGGVKQSGIGREGSHHGMDEYLELKYLCLGGMAPSA

SEQ ID NO: 87010 - DNA, 1437 bp, Bacillus clausii KSM-K16
  CDS (1)..(1437): transl_table=11
atggatgcacacaattttatttacggccaatgggtgcctgctgtggacggtcaaacagccaagagcattaatcctggcaatctaaacgatacagtcggcacgtatcaggattcgaccgaagccgatgtagaacaggcggtgcaagcagctcaagaagcagcgaagccgtggcgcaagttaagcggcgcagagcggggggctttcctttataaaaccgcagacattatggaagaacggcttgatgaaattgccaagactgcggcacgggaaatgggtaaaacattggcggaaacaaaaggcgaaacgctgcgcggcattgcgattctccgttattatgcaggagaagggctgcgcaaaaatggcgatgtcattcctgcaagcgatgcaaaggcgcttatgtatacaacccgtgtaccccttggcgtcgtagcggtcattacgccatggaattttccgattgcgattcctctttggaaaacggcgcctgctatcattttcggcaatacagtcgtcctcaagcctgcttcagaaacggcagttacgtgcgcaaaagtggttgcatgctttgaagcggccgggttgccccctggcgtcttaaatttcattacaggctcaggggcaaaagttggccaaagccttgttgaacatcatagggtgaacgcgatcacatttactggttcgaacacaactggcaagaaaattggccaaacagcccttgccaggggggcgaagtaccagcttgaaatggggggcaagaaccctgtcattgtggccgccgatgctgacattgagcaagcagtagacgcgacattaagcggagcgtttaaatcaactggccaaaagtgtacagcgacaagcagagcgtttgtcgaccgtgctgtttattccacttttaagaaattgctattagaaaagacaaaagaaatcgtagtaggtgacagccttgatgcaaaaacgtggatgggaccactcgcttcccaaaatcagctagccaattgccttgcctacatagaaaaaggcctgagtgaaaaggcgacgctattaactggcgggcatgccatcgatcaagaaaaaggttcctttatcgagccgacgatttttgaatgccgagatcaccattcctccatcgcccaagaagaaattttcggccctgtcctggctttatttgaagtggacggcatcgaagaagcgcttcgtttggccaatgatgtgccatacgggttaagtgcttcaattttcacaaaaaacattgccaatatgcttgcctttattgaggatatggacgctggtctcattcgggtcaatgccgaaagcgcaggagttgaactgcaagccccatttggcgggatgaaacaatccagctcccattcccgcgaacagggggaagcagcgaaagagttttttacagcgaccaaaacgatttttgtaaaagcataa

SEQ ID NO: 87011 - protein, 478 aa, Bacillus clausii KSM-K16
MDAHNFIYGQWVPAVDGQTAKSINPGNLNDTVGTYQDSTEADVEQAVQAAQEAAKPWRKLSGAERGAFLYKTADIMEERLDEIAKTAAREMGKTLAETKGETLRGIAILRYYAGEGLRKNGDVIPASDAKALMYTTRVPLGVVAVITPWNFPIAIPLWKTAPAIIFGNTVVLKPASETAVTCAKVVACFEAAGLPPGVLNFITGSGAKVGQSLVEHHRVNAITFTGSNTTGKKIGQTALARGAKYQLEMGGKNPVIVAADADIEQAVDATLSGAFKSTGQKCTATSRAFVDRAVYSTFKKLLLEKTKEIVVGDSLDAKTWMGPLASQNQLANCLAYIEKGLSEKATLLTGGHAIDQEKGSFIEPTIFECRDHHSSIAQEEIFGPVLALFEVDGIEEALRLANDVPYGLSASIFTKNIANMLAFIEDMDAGLIRVNAESAGVELQAPFGGMKQSSSHSREQGEAAKEFFTATKTIFVKA

SEQ ID NO: 87012 - DNA, 1344 bp, Neisseria gonorrhoeae FA 1090
  CDS (1)..(1344): transl_table=11
atgtttcacagtgtcaatgtatttacgggcgaaacgctttaccgccgccccgatcaagattatgcggagtttgaacggcggctggcggatttgaaaatgcacggcagggcgttcgcgcaattgggcgtaaccgaacgtgccgcgcgtctgcaaaaatttgccggccgtttggaggcggaaaaagagcgttttgcggaaatggtgtgcgaagaagtcggacgctgcctgcacgaatgccgtgccgaaatcgtcaagtctatcgaactgatacgctattacgcccgccttgcccccgaactgcttgcccacaaaaccattgcgacgcaggcgagtttgagtcaggtgcgcttcgagcctttgggcgtggtgtttgccgtcatgccttggaactatcccgtctggcaggtattgcgtttcgccgttcccgctatgtgcgcgggcaacgcgtgcgccgtcaaacccgcgcccagcgtggcacgcgtcagtcgggcgttgttcgatttggcttcagacggtattcctctggcaggcgcgtggctggatgaggcggacacgctcaaggcagtcgaagataccgatgcgatggcgtttaccggttcgacgcatacggggcgcattcttgcggcacatgcgggcgcaaacctcaagaaaaccgtgttggagctcggcggcagcaacgcctttatcgtgatgcccgatgccgatttggaacgcgccgccgcagaagcctgttattcccgtttccgcgatgcggggcaatcgtgtaacgccgccaagcgcatcatcgtaaccgaagccgcagccgaccgctttattcagctgtttctcgccgaatgcgccaaattgaaaatgggagacccgaaacatcccgataccacgcttgcaccgctgcaccgcgaagatttgcgggaccgggttcacgggcaggttgaagatgccgtttcaaacggcgcggtgtgcctgaccggaggcaaagttccacaggggtcggggtggttttaccctgcgacggttttagacagggtaaatcctgcctgccgcgtctggagagaagaagtattcggccccgtcgccctgattttgcgcgccgaaaacgaagaacacgccatctgccttgccaatgattccccgttcgggctcggtgcctgcatttataccgccgatactgaacgcgcctggcggtttgccgaaaaaatacaggccggatcggtgtttatcaaccgccataccagcagcgatttgcgcctgcctttcggcggagtcaaagattccggttacgggcgcgaactgtccgaattcgggttgtacgagttcgtcaacgtcaaaacctactggcagaaataa

SEQ ID NO: 87013 - protein, 447 aa, Neisseria gonorrhoeae FA 1090
MFHSVNVFTGETLYRRPDQDYAEFERRLADLKMHGRAFAQLGVTERAARLQKFAGRLEAEKERFAEMVCEEVGRCLHECRAEIVKSIELIRYYARLAPELLAHKTIATQASLSQVRFEPLGVVFAVMPWNYPVWQVLRFAVPAMCAGNACAVKPAPSVARVSRALFDLASDGIPLAGAWLDEADTLKAVEDTDAMAFTGSTHTGRILAAHAGANLKKTVLELGGSNAFIVMPDADLERAAAEACYSRFRDAGQSCNAAKRIIVTEAAADRFIQLFLAECAKLKMGDPKHPDTTLAPLHREDLRDRVHGQVEDAVSNGAVCLTGGKVPQGSGWFYPATVLDRVNPACRVWREEVFGPVALILRAENEEHAICLANDSPFGLGACIYTADTERAWRFAEKIQAGSVFINRHTSSDLRLPFGGVKDSGYGRELSEFGLYEFVNVKTYWQK

SEQ ID NO: 87014 - DNA, 1392 bp, Pseudomonas syringae pv. syringae B728a
  CDS (1)..(1392): transl_table=11
atgactactgtcagcagcaacacccatgcaatctcgatcaaccctgccaccggcgagcagatcggccactatgccttcgaatccgccactgcgctggatcaaagcctgtcgcgtgcggctgccggttttgccggctggaagcgcacgccggttcagcaacgtgcgcaactgatcgtcgccatgggccaggccctgcgcgatgacgtcgaaaacattgcccgcatgatcagccaggaaatgggcaagcccgttgcccaggcccgaggcgagatcgagaaatgcgcccagttgtgcgactggtacgcggcacaaggcccggcgatgctggtggccgaagcaactcaggtcgagaacgacaaggcgcggatcgagtaccgtccgctgggcccgattctcgcggtaatgccgtggaattttccgatctggcaagtgctgcgcggcgcgattccgaccctgctggccggtaacacctatgtgctcaagcacgcgcccaacgtaatgggctgcgcttacctgatgctcgacgccttcaagcgtgccggcttcccggagggtgtgttcgaggtcatcaacgtgaccccggacggcgtttcaaacgccattgccgacccgcgcatcgcagctgtcactctgaccggcagcgtgcgtgccggccaggccatcggcgcccaggccggtgcggcactgaagaagtgcgtgctggaactgggcggctccgacccgttcatcgtgctcaatgatgcggacctggatcaggctgtgaaggccgcggtgattggccgcttccagaacaccgggcaggtctgtgcagcggccaagcgtctgatcatcgagcaaggcgtggtcgaggagttcacccgcaggttcgtcgagcaaacgcgtcaactggtaacgggcgatcctctttccggcgaaacctacattggccccatggcgcgcttcgatctgcgccacgagctggatgcccaggtacaggacacgctcgccgaaggcgccacgctgttgctgggcggcaaaaaagctgaaggccagggcaattattacgagccgaccgtgctcggtgacgtcaccgaccggatgacttcgttcaggcaggagctgttcgggccggttgcgtcgatcatcaccgcccgcgacgcgcagcacgctctggagctggccaatgacagtgatttcggcctgaccgcgacggtttatacccgagacctgcaactggccgagcgcatgaccgaggaactggaaaccggcggtgtgttcatcaacggctacagcgcttcagacccgcgcgtgacctttggtggtgtgaagaaaagcggttttggccgtgagctgtcgcacttcggagtacgcgagttctgcaatgcacaaactgtgtggcgggatcgtcactga

SEQ ID NO: 87015 - protein, 463 aa, Pseudomonas syringae pv. syringae B728a
MTTVSSNTHAISINPATGEQIGHYAFESATALDQSLSRAAAGFAGWKRTPVQQRAQLIVAMGQALRDDVENIARMISQEMGKPVAQARGEIEKCAQLCDWYAAQGPAMLVAEATQVENDKARIEYRPLGPILAVMPWNFPIWQVLRGAIPTLLAGNTYVLKHAPNVMGCAYLMLDAFKRAGFPEGVFEVINVTPDGVSNAIADPRIAAVTLTGSVRAGQAIGAQAGAALKKCVLELGGSDPFIVLNDADLDQAVKAAVIGRFQNTGQVCAAAKRLIIEQGVVEEFTRRFVEQTRQLVTGDPLSGETYIGPMARFDLRHELDAQVQDTLAEGATLLLGGKKAEGQGNYYEPTVLGDVTDRMTSFRQELFGPVASIITARDAQHALELANDSDFGLTATVYTRDLQLAERMTEELETGGVFINGYSASDPRVTFGGVKKSGFGRELSHFGVREFCNAQTVWRDRH

SEQ ID NO: 87016 - DNA, 1392 bp, Pseudomonas fluorescens Pf-5
  CDS (1)..(1392): transl_table=11
atgagccttgtttccagccacacccacgccttgtcgatcaaccccgccactggcgagcagatcggcgcctacccctaccagtccgaggctgagcaggacgccgcgctgagccgtgccgccgctggtttcgcccagtggaaacgccagagcatcgccgagcgcgccagccgcctgaacgcactggcccaggccctgcgggacaacagcgaggccatggcccgcatgatcagcctggaaatgggcaagcccctgccccaggcccggggcgaaatcgaaaagtgcgcccagctgtgcctgtggtacgccgagcacggcccggccatgctggccccggaagcgaccctggtagaaaacaacaaggcacgcatcgagtaccggccactgggcccgatcctcgcggtgatgccgtggaacttcccgatctggcaggtgctgcgcggcgcggtgccggcgctgctggcgggcaacacctacgtgctcaagcacgccccgaatgtcatgggcagcgcctacctgctgctggacgccatgcagcgcgccggtttccctgaaggggtgttcgagctgctcaacgtcactccggacggcgtatccagcgccatcgccgaccgccgcatcgccgccgtgaccctcaccggcagcgtgcgcgccggcatcgccatcggcgcccaggccggcgccgcgctgaagaagtgcgtgctggaactgggcggctccgacccctttatcgtgctcaacgacgccgacctcgacgaagcggtcaaggccgcggtgatcggccgctaccagaacaccggccaggtctgcgccgccgccaagcgcctgatcatcgagcaaggggtggtcgcggagttcacccacaagttcgtcgaagccacccgcgccctagtcatgggcgacccgctggccagcgacacctacatcggccccatggcccgcttcgacctgcgtgacgagctgcaccagcaggtccaggcgaccctggccgaaggcgccaccctgctgctgggcggcgacaaggtcgaaggcgccggcaactattaccaacccacggtgctggccaacgtcaccgagcagatgaccgccttcaagcaggaactgttcggcccggtggccgccatcatcagcgcccgggatgcgcaacacgccctggaactggccaacgacagcgagttcggcctcaccgccacgatcttcacccaggacctggaacgggcccggcagatgaccgacgagctggaaaccggcggcgtgttcatcaacggctacagcgccagcgacccccgggtgaccttcggcggagtgaaaaaaagcggcttcgggcgcgagctgtcgcactttggcgtacgcgaattctgcaatgcgcagacggtgtggctggatcgccggtaa

SEQ ID NO: 87017 - protein, 463 aa, Pseudomonas fluorescens Pf-5
MSLVSSHTHALSINPATGEQIGAYPYQSEAEQDAALSRAAAGFAQWKRQSIAERASRLNALAQALRDNSEAMARMISLEMGKPLPQARGEIEKCAQLCLWYAEHGPAMLAPEATLVENNKARIEYRPLGPILAVMPWNFPIWQVLRGAVPALLAGNTYVLKHAPNVMGSAYLLLDAMQRAGFPEGVFELLNVTPDGVSSAIADRRIAAVTLTGSVRAGIAIGAQAGAALKKCVLELGGSDPFIVLNDADLDEAVKAAVIGRYQNTGQVCAAAKRLIIEQGVVAEFTHKFVEATRALVMGDPLASDTYIGPMARFDLRDELHQQVQATLAEGATLLLGGDKVEGAGNYYQPTVLANVTEQMTAFKQELFGPVAAIISARDAQHALELANDSEFGLTATIFTQDLERARQMTDELETGGVFINGYSASDPRVTFGGVKKSGFGRELSHFGVREFCNAQTVWLDRR

SEQ ID NO: 87018 - DNA, 1467 bp, Psychrobacter arcticus 273-4
  CDS (1)..(1467): transl_table=11
atgctaaagactaccctaaatctctctaacccagatttgatcaaacagcagtgtcttatcaaagacggttggtatgctgccaatgatgaagccactattgaagtaagcaatccatttaacggcgatgttatcggtacggtgccaagcttgacgaccgctgatgtcaatgacgccgttacttactctcatgaagcgcaaatcacttgggccgccaaaaccccacaagaacgcgcacagctgctgcaaaaatgggcagatcttatcgatgccaacaaagaagatttggctattattatgaccgctgagcagggcaagcctttggctgaatcacgtggcgagattggttatgccaatagttttattcgctggtttgcagaagaaggcaagcgtgtctatggtgatgtcattccagcaaccaactcacaattacgctatgtggtattaaaacagccagttggtgtttgtgctgctatcacgccttggaactttccagcggcgatgatcactcgtaaagcagctcctgcactggcagcaggctgtaccatcattatcaaacctgcgaccgaaacgccattttctgccttagcactcggtgcattggctgagcaagcgggtattcctgcaggcgttatccaagtcgtgaccggtaaatcatcaactatcggcgatatcctaacgggcgatgcgcgcattcataaactctcgtttacaggctctaccgaagtcggtcgtaccttgatggcgcagtgtgccccaacgattaaaaagctatcattagagcttggcggcaatgcaccgtttatcgtttttgatgatgccgatttggaaaaggcggcggatggtcttatcgcttccaaatatcgtaacgcgggtcaaacctgtgtatgtgccaaccgtgtctatgttcaagacagcattaaagatgaattcttaggtattttcatcaaaaaagtcgctgagttgaaagtcggtaatggcatggaagaaggggtcaatgttggtccattgattaatgaaaaagccctacaaaaagtacaagcgctattaaaagacgcgctagataaaggcgctaccctgattgctggcggtagtacgaataatgcttcagcccttgcttacaatccgaccgtcatcaccgatatcagcgctgatatggacattgccagcgaggagatatttggtcctatcgccccagtctttaccttctcatcggaagaagaagtcattcgcgccgccaacgacactatctacggtctagcggcttatttttatagcagcgactatgcgcgtgcttggcgtgtgaccgaaggtcttgagtatggcatggtcggacacaatactggcatgctctcaacagaagtagcaccatttggcggggtcaaacaatctggctttggtcgtgaaggctcaaaatacggcatcgaagaatatgttgtgaccaaatactggtgttctgatgttagctaa

SEQ ID NO: 87019 - protein, 488 aa, Psychrobacter arcticus 273-4
MLKTTLNLSNPDLIKQQCLIKDGWYAANDEATIEVSNPFNGDVIGTVPSLTTADVNDAVTYSHEAQITWAAKTPQERAQLLQKWADLIDANKEDLAIIMTAEQGKPLAESRGEIGYANSFIRWFAEEGKRVYGDVIPATNSQLRYVVLKQPVGVCAAITPWNFPAAMITRKAAPALAAGCTIIIKPATETPFSALALGALAEQAGIPAGVIQVVTGKSSTIGDILTGDARIHKLSFTGSTEVGRTLMAQCAPTIKKLSLELGGNAPFIVFDDADLEKAADGLIASKYRNAGQTCVCANRVYVQDSIKDEFLGIFIKKVAELKVGNGMEEGVNVGPLINEKALQKVQALLKDALDKGATLIAGGSTNNASALAYNPTVITDISADMDIASEEIFGPIAPVFTFSSEEEVIRAANDTIYGLAAYFYSSDYARAWRVTEGLEYGMVGHNTGMLSTEVAPFGGVKQSGFGREGSKYGIEEYVVTKYWCSDVS

SEQ ID NO: 87020 - DNA, 1392 bp, Pseudomonas syringae pv. phaseolicola 1448A
  CDS (1)..(1392): transl_table=11
atgactactgtcaccagcaacacccacgcaatctcgatcaaccccgcctcaggcgaacagatcggccactacgccttcgaatccgacgccatgctggatcgcagcctgtcgcgtgtgacggccggctttgcagactggaagcgcacgcctgtccagcaacgtgcgcaactgatcatcgccatgggccaggccctgcgcgacgacgccgaaaacattgcccagatgatcagccgggaaatgggcaagcctgtgacgcaggccagaggcgaagtcgagaaatgcgcgcagttatgcgattggtatgcagcgcaaggcccggcaatgctgatggccgaggcgactcaggtcgagcatgacaaggcacgcatcgagtaccgtccgctgggccctgttcttgcggtgatgccgtggaatttcccgatctggcaagtattgcgcggcgcaattccgacattgctggcaggcaatacctacgtgctcaagcatgcacccaacgtcatgggttgcgcatacctgatgctcgactcgttcaagcgcgccggtttcccggagggcgtgtttgaagtcatcaacgtggctgccgagggcgtctcgaaggccattgccgacccacgcattgcggccgtcacgctgaccggcagtgttcgcgctggccaggccattggtgctcaggccggtgcggcgctcaagaagtgcgtgctggagctgggcggttccgacccgttcatcgtgctcaatgacgcggacctggatcaggctgtgaaagcggctgtcatcggtcgtttccagaacaccgggcaggtctgtgccgcggccaagcgtttgatcatcgagcaaggtgtggtcgaggagttcacgcgcaggttcgttgagcagactcgccagttggtgatcggcgatccgttgtccggcgagacctacattggtccgatggcacgcttcgatctgcgcgatgaactggatgctcaggttcaggacacccttgccgaaggcgcgaaactgttgctgggcggcaagaaggctgatggccaaggcaactactacgagccgaccgtactgggcgacgtgaccgaccagatgacttccttcaggcaggagctgttcggcccggtagcgtcgatcattaccgcccgcgacgcgcagcacgctctggagctggccaatgacagcgaattcggcctgaccgcgacggtctacacacgtgatctgcaactggcagagcgcatgaccgaagaactggaaaccggtggtgtgttcatcaacggctacagcgcttcagacccgcgcgtgacgtttggcggcgtgaagaaaagcggctttggccgtgaactctcgcacttcggtgtacgcgagttctgcaatgcacagaccgtatggcgcgatcggcactga

SEQ ID NO: 87021 - protein, 463 aa, Pseudomonas syringae pv. phaseolicola 1448A
MTTVTSNTHAISINPASGEQIGHYAFESDAMLDRSLSRVTAGFADWKRTPVQQRAQLIIAMGQALRDDAENIAQMISREMGKPVTQARGEVEKCAQLCDWYAAQGPAMLMAEATQVEHDKARIEYRPLGPVLAVMPWNFPIWQVLRGAIPTLLAGNTYVLKHAPNVMGCAYLMLDSFKRAGFPEGVFEVINVAAEGVSKAIADPRIAAVTLTGSVRAGQAIGAQAGAALKKCVLELGGSDPFIVLNDADLDQAVKAAVIGRFQNTGQVCAAAKRLIIEQGVVEEFTRRFVEQTRQLVIGDPLSGETYIGPMARFDLRDELDAQVQDTLAEGAKLLLGGKKADGQGNYYEPTVLGDVTDQMTSFRQELFGPVASIITARDAQHALELANDSEFGLTATVYTRDLQLAERMTEELETGGVFINGYSASDPRVTFGGVKKSGFGRELSHFGVREFCNAQTVWRDRH

SEQ ID NO: 87022 - DNA, 1446 bp, Ralstonia eutropha JMP134
  CDS (1)..(1446): transl_table=11
atgaacgtattcctcaaccatatcgacggcgaatggacggcctgccagtcgggccgcaccttcgacaacgtcaacccggccgacaccggcgatatcgtgggccgcttccaggcgtcgtcggcagtggacgcgcaggcggccgtcgccgcggcggcggccgcgttcgccggctggaagaagactccggtcggcaagcgcgctgctgtcctcaaccgcgccgccgatcacctggaagccaatgccgacagcatcgcggccgaactgacccgcgaagagggcaaggcgctgacgctggcccgtgacgaagtcctgcgctcggcacaaacgctgcgcttctacgcggtggaggggcagacctttaccggcgaggtgttcccgaacgacgacccggaccaactcgtcttcagccagcgcgagccgctgggcgtggtgacggtgatcgcgccgtggaatttcccggtgtcgatcccggcgcgcaagatcgctccggcgctggtgacgggcaatacggtggtgttcaaaccgtcatccgaagcgccgctgtcggggtatcgcctggccgaggcgcttatcaaggccggcctgcccaagggagtgctgaacttcatcacgggcagtgcggccgagattggcgccgcgatcaccgaggcgccggtcgtgcgtgcgatttcgttcaccggctcgtcgcgtgccggcgagcagatccaccgcgccgtgccgctgaccacgcgcacgcagatggagctgggcggcaagaacccgctgatcgtgatggaggatgccgatctcgaccgcgcggtggacctgaccatcaagggcggtttctcgttgtccgggcaggcctgcaccggaaccagccgcgtgctggtggcggaatcggtcaaggccgcctacaccgagcgattgctggcaaaggtcgccacgctcaaggtcggcagcggcatgaccgccgggatggacctggggccgctggcatcgcagaagcagatggaaacggtgctgcgctacatcgacatcggcaagtccgaggcgacgctgctatgcggtggagaacggctgaccggcggcgagttcgacaagggctactacgtcgcgccgacggtattcacggacgtgacgcagcagatgcgcatcgcacgcgaggaaatcttcgggccggtgatcgccatcctcggcttcaccgattacgccgacgccatcgccaaagcgaacgataccgagtatggccttgccgcggccatcgtcaccagcaatccgcgctacatccaccactttgccaacgacatcgaagcgggcacggtcaagatcaaccgtaccaccacgggcaacctggtcaacgccccgttcggcggattgaaacgatcgagtacctcgaccttccgcgaatcgggccgcaccgggctggagttctatacgcagatcaagacggtctatcggggcgcctga

SEQ ID NO: 87023 - protein, 481 aa, Ralstonia eutropha JMP134
MNVFLNHIDGEWTACQSGRTFDNVNPADTGDIVGRFQASSAVDAQAAVAAAAAAFAGWKKTPVGKRAAVLNRAADHLEANADSIAAELTREEGKALTLARDEVLRSAQTLRFYAVEGQTFTGEVFPNDDPDQLVFSQREPLGVVTVIAPWNFPVSIPARKIAPALVTGNTVVFKPSSEAPLSGYRLAEALIKAGLPKGVLNFITGSAAEIGAAITEAPVVRAISFTGSSRAGEQIHRAVPLTTRTQMELGGKNPLIVMEDADLDRAVDLTIKGGFSLSGQACTGTSRVLVAESVKAAYTERLLAKVATLKVGSGMTAGMDLGPLASQKQMETVLRYIDIGKSEATLLCGGERLTGGEFDKGYYVAPTVFTDVTQQMRIAREEIFGPVIAILGFTDYADAIAKANDTEYGLAAAIVTSNPRYIHHFANDIEAGTVKINRTTTGNLVNAPFGGLKRSSTSTFRESGRTGLEFYTQIKTVYRGA

SEQ ID NO: 87024 - DNA, 1365 bp, Methanosarcina barkeri str. Fusaro
  CDS (1)..(1365): transl_table=11
atgaaacttaaatccattaacccttatacggaaaaaataaactgggcttatgattccttttctatcggggaatgcagagcccgtattgagaaatccagaactgctttttccttatgggattcactgcctgtagaggaaaaggcgaaacatttcaaaactgctgccgaaattcttcgggagagtaccgatacttatgctgaaattattacaaaagaaatggggaaacctgtaaggcagtccaagaacgaggttcagaaatgcgcccagctctgtgattattatgcagagaactcgactgaactcctgaaagacgaaattgtagatataggaactgagaaaagttatgtaacctttgaacctctgggagtgattttcgggatcatgccctggaattttcctttctggcaggttttcaggtttgcaatacctgcgatgtgtgcaggaaatgtctgtgtgctcaagcacgcttcaaatgtgccaaaatcggcgctggaaatcgaaaatatcctccttgaggccggatttcctgaaaacgttttcaatactctgttaattgactcaaaaactgccatgcagattcttaaagaagagctggtggacgggatttcgttcacaggcagcgtgggcgcaggctcgaaaatcggaaaacttgcagggcgaggtatcaaacctgtagtactggagcttgggggctcggaccctttcatagttcttgaggatgctaacatcgagagggctgctcaggcagctgtaaagtcccgttttctaaatgccggacaaagttgtactgctgccaaacgattgattgtcgtagaagatatcgttatggattttatcgagtcgtttgaattcaaagtgaaggaactgaaaatcggagatcccatggatgagaaaaccgatattgggcctcttgcaaagaaggaattcctcgggagtcttgagcgagtattaaaagatgcaaaaaagaaaggtgcaaaacctcacgtttacggagaagaacataaaaaggggttcttcttcaggccgaccatcattcctgcagccagtacggatatggaagtgtgcaggactgaaattttcgggccaattgccccggtgatcacggtaaaggatgagaatgaagccgtggcgattgcaaactccaccgagtatgggctcggggcgaaaatctggtcaggagatctggatagggctgaaaggctggcaaaaagaataaaatccgggtctgtatctatcaacggaatgatcaaatccgatccgaggcttccttttggcgggactaaaaaatccggggtggggcgagaactctcacactatgggctcagggaatttgtgaatataaaaactgttgttgttaatagataa

SEQ ID NO: 87025 - protein, 454 aa, Methanosarcina barkeri str. Fusaro
MKLKSINPYTEKINWAYDSFSIGECRARIEKSRTAFSLWDSLPVEEKAKHFKTAAEILRESTDTYAEIITKEMGKPVRQSKNEVQKCAQLCDYYAENSTELLKDEIVDIGTEKSYVTFEPLGVIFGIMPWNFPFWQVFRFAIPAMCAGNVCVLKHASNVPKSALEIENILLEAGFPENVFNTLLIDSKTAMQILKEELVDGISFTGSVGAGSKIGKLAGRGIKPVVLELGGSDPFIVLEDANIERAAQAAVKSRFLNAGQSCTAAKRLIVVEDIVMDFIESFEFKVKELKIGDPMDEKTDIGPLAKKEFLGSLERVLKDAKKKGAKPHVYGEEHKKGFFFRPTIIPAASTDMEVCRTEIFGPIAPVITVKDENEAVAIANSTEYGLGAKIWSGDLDRAERLAKRIKSGSVSINGMIKSDPRLPFGGTKKSGVGRELSHYGLREFVNIKTVVVNR

SEQ ID NO: 87026 - DNA, 1368 bp, Anabaena variabilis ATCC 29413
  CDS (1)..(1368): transl_table=11
atggcgatcgccaccatcaatcccgccactggggaaacgctcaaaacctttgagccactcaacgatgcagaaattgccgctaaattagatttggcagaccaggcttttgaaaagtaccgacatacgagttttgcagagcgatcgcaagctttgcaagcagccgccaatatactggagcaagaaaaagctgactttgctaagttaatgaccttggaaatgggcaagccttacaaagcagccattgccgaagtcgaaaaatgtgctgctgtttgccgctactatgcggaaaatgccgccgattttctggctgatgtcagtgtcaaaactgatgccagtcatagctttgtccgctaccaacccttggggataattttggcagtcatgccgtggaatttccccttctggcaagtgttccgctttgctgcacctgcactcatggcaggtaatgtcggcttactcaaacacgcatcgaatgtaccacagtgcgctttagccatcgaagatattatccatcgggcaggttttcctggaggtgtatttcaaactctgttaatcggtgcggcgaaagttgccgatttaatggctgatgagcgagtaaaagctgctaccttaaccggaagcgaaccagccggcgcatctctagcggcggcggcgggaaaacaaattaaaaaaacagtcttggaattggggggaagtgacccatttattgtgttagaaagtgctgatgtagaagcagccgccgctacagctacatcagcacggatgttaaataacggacaatcttgtattgccgcgaaacgcttcattgtggcagaagcgatcgccgatcaatttgaaaagttgctgttagaaaaattcacagcgctaaaaattggcgaccctttacatccagatacagacttagggccactagcaacccccgatattctccaagatttagaccaacaagtacaaactgccgtcaaaagtggcggtaaagtcttgaccggtggctatcctttagccgatcgtcctggcaacttttacccggccacaattatcatagatatcccagttgatcagcccattgcccaagaagaattttttggcccagtggcgttgttatttcgtgtcccagatatcgatacggcaattcaactggccaatgctacaccctttggtttaggtgcaagtgcttggacaaataacgaccaagaacgcgatcgcctgatttccgaaattgaagcaggcgcagtatttattaatggtttagtaaaatccgaccccagactaccatttgggggcataaaacgttctgggtatggccgagaattaagcattcaaggcatacacgagttcgttaatgttaaaaccgtttgggtgaaataa

SEQ ID NO: 87027 - protein, 455 aa, Anabaena variabilis ATCC 29413
MAIATINPATGETLKTFEPLNDAEIAAKLDLADQAFEKYRHTSFAERSQALQAAANILEQEKADFAKLMTLEMGKPYKAAIAEVEKCAAVCRYYAENAADFLADVSVKTDASHSFVRYQPLGIILAVMPWNFPFWQVFRFAAPALMAGNVGLLKHASNVPQCALAIEDIIHRAGFPGGVFQTLLIGAAKVADLMADERVKAATLTGSEPAGASLAAAAGKQIKKTVLELGGSDPFIVLESADVEAAAATATSARMLNNGQSCIAAKRFIVAEAIADQFEKLLLEKFTALKIGDPLHPDTDLGPLATPDILQDLDQQVQTAVKSGGKVLTGGYPLADRPGNFYPATIIIDIPVDQPIAQEEFFGPVALLFRVPDIDTAIQLANATPFGLGASAWTNNDQERDRLISEIEAGAVFINGLVKSDPRLPFGGIKRSGYGRELSIQGIHEFVNVKTVWVK

SEQ ID NO: 87028 - DNA, 1392 bp, Pseudomonas fluorescens PfO-1
  CDS (1)..(1392): transl_table=11
atgagcccgatttccagccagacccacgccatctcgatcaaccccgccaacggcgagcagatcggtcactacgcgttcgaatccgccgaagcccttgacgctgcactgacccgcgccgcattcggcttcaacaagtggaaacgcaaaccgctgcaggatcgctcccgcgccctgaccgcactggccggcgccctgcgtgacagcagcgaagccatggccaccatgatcactcgggaaatgggcaagccgatcgcccaggcccgtggcgaaatcgagaaatgcgccaagctctgcgagtggtacgccgaacacggcccggccatgctcaacgccgaagcgacgctggtcgaaggcggcaaggcgcgcatcgagtatcgtccgctcggaccgatcctcgccgtgatgccgtggaacttcccgatctggcaggtgctgcgcggcgccgtcccggcgctgatcgccggcaacacctacgtgctcaagcatgcgccgaacgtgatgggcagcgcctatctgttgcgcgatgccttcacccgcgccggtttcgccgatggcgtttttgaagtgatcaacgtcaccccggaaggcgtgtccagcgccattgctgatccgcgcattgccgccgtaaccctgaccggcagcgtccgcgccggcatggccattggcgcacaggccggtgccgcgctgaagaaatgtgtactggaactgggcggctccgatccgttcatcgtgctcaatgacgccgatatcgacgaagctgtgcaagcagccgtcatcggtcgttaccagaactcagggcaagtctgcgccgccgccaaacgcctgatcatcgaagaaggcgtggtcgaagaattcacccgcaaattcgtcgacgccacccgtcagttgaagatgggtgacccgttgtccgccgacaactacatcggcccgatggcccgtttcgacctgcgcgacgaactcgaccaacaagtgcgcgacaccctcgaagaaggcgccaccctactgctcggtggcggcaaggccgaaggccccggcaattactacgagccgaccgtgctggccgatgtcaccgaccgcatgacctcgttcaaacaggaactgttcggcccggtggcctcgatcatcaccgcccgcgattgcgctcacgccgtggccctggccaacgacagcgagttcggtctgaccgccacgatctacaccgccaacgtcgccctggctcagcaactgaccagcgaactggaaaccggcggcgtgttcatcaacggctactccgccagcgacccgcgcgtgaccttcggcggcgtgaagaaaagcggtttcggccgcgagctgtcgcacttcggcgtgcgcgagttctgcaacgcgcagacggtgtggctggatcgccgctga

SEQ ID NO: 87029 - protein, 463 aa, Pseudomonas fluorescens PfO-1
MSPISSQTHAISINPANGEQIGHYAFESAEALDAALTRAAFGFNKWKRKPLQDRSRALTALAGALRDSSEAMATMITREMGKPIAQARGEIEKCAKLCEWYAEHGPAMLNAEATLVEGGKARIEYRPLGPILAVMPWNFPIWQVLRGAVPALIAGNTYVLKHAPNVMGSAYLLRDAFTRAGFADGVFEVINVTPEGVSSAIADPRIAAVTLTGSVRAGMAIGAQAGAALKKCVLELGGSDPFIVLNDADIDEAVQAAVIGRYQNSGQVCAAAKRLIIEEGVVEEFTRKFVDATRQLKMGDPLSADNYIGPMARFDLRDELDQQVRDTLEEGATLLLGGGKAEGPGNYYEPTVLADVTDRMTSFKQELFGPVASIITARDCAHAVALANDSEFGLTATIYTANVALAQQLTSELETGGVFINGYSASDPRVTFGGVKKSGFGRELSHFGVREFCNAQTVWLDRR

SEQ ID NO: 87030 - DNA, 1581 bp, Rhodospirillum rubrum ATCC 11170
  CDS (1)..(1581): transl_table=11
ttgatcggcaggcggggaacttcgcgctcgtggcggcgtttcttgggcaatccaacgtcgtgggtcggtctggcgggcgcgggtcgccggcgccgggtcttgccgacccatccccccgccgatcatgccggccgatcccgccttttccaggcgcgggcggtgctggccgaggcgatcgcgatcgcaggagcgcccttcatggcctatcagaccatcaatccctttgacggttccgtcgtgcaaaccttccaggaattctccgatagcgagctggcaagcgccctggatagcgccgccgactgtttcgcaggctggcgccagaccagcttcgccgagcgcgccgccatcgcccataaggcggccggcctgttgcgcgagcaatcgggcgactatgcccggctgatcaccctggaaatgggcaaacgcatcgaagaagccgagggcgaggtggcgctgagcgccgatatcatcgattactatgccgatcatgccgaagccttccttaagcctcagccgttgaagccagagtcgggcgaggcggtgatcgaaagcagcccgctcggcgtgctgtttggcgttcagccgtggaactttccctattaccagctggcccgcttcgccgcgccgaacctgatggcgggcaatgtggtgatggtcaagcatgccggctgcgttccccaatgcgcccaggcctttgaaaagctgtggcgcgatgccggggccccggcgggggcctataccaaccttgtgatctcttatgatcaggtcaacgcggtgatcgacgatccgcggatcaagggcgtggccctgaccggcagcgctgatgctggcaaaagcgtcgccgcccgcgccgggcagaacctgaagaaatccaccatggaactgggcggcagcgatgccttcatcgttctggaagacgccgatcttgataaaacggtcgaatgggcggtctggggcaagatgaacaacatgggccagtgttgcgtggcggccaagcgcttcctggtcgtcgactccctggccgatcgcttccttgaaaagttccaggccgccttggccggcttgaaggccggcgatccgatggaccgggcgacgacgctggcgccgctgtcgacagaaggggcgctgaccaagctggtcgagcaggtcgacaaggcggtttcggacggggcgaccctggtgatgggcggcaagcgcctggatcgcccggggtttttcatggagccgaccatcctgaccgatatcgcccccgataccgccgccttccgcgaggaattcttcggccccgtcgccctgttcttccgcgtcaaagacgaggacgaggcggtggccttggccaatgactccgatttcggcctggggggatcggtgttcacccaggatgtcgcgcgcggcaaacgcgtggccgagcgcatcgaaaccggcatggtcttcatcaaccagccgacctggacggcccccgatctgccctttggcggcatcaacatctcgggctatggccgggaactatcgggcctgggcatccaggaattcgtcaacaagaagctggtccgcgtcgccctgatcgacgccgccgcctga

SEQ ID NO: 87031 - protein, 526 aa, Rhodospirillum rubrum ATCC 11170
MIGRRGTSRSWRRFLGNPTSWVGLAGAGRRRRVLPTHPPADHAGRSRLFQARAVLAEAIAIAGAPFMAYQTINPFDGSVVQTFQEFSDSELASALDSAADCFAGWRQTSFAERAAIAHKAAGLLREQSGDYARLITLEMGKRIEEAEGEVALSADIIDYYADHAEAFLKPQPLKPESGEAVIESSPLGVLFGVQPWNFPYYQLARFAAPNLMAGNVVMVKHAGCVPQCAQAFEKLWRDAGAPAGAYTNLVISYDQVNAVIDDPRIKGVALTGSADAGKSVAARAGQNLKKSTMELGGSDAFIVLEDADLDKTVEWAVWGKMNNMGQCCVAAKRFLVVDSLADRFLEKFQAALAGLKAGDPMDRATTLAPLSTEGALTKLVEQVDKAVSDGATLVMGGKRLDRPGFFMEPTILTDIAPDTAAFREEFFGPVALFFRVKDEDEAVALANDSDFGLGGSVFTQDVARGKRVAERIETGMVFINQPTWTAPDLPFGGINISGYGRELSGLGIQEFVNKKLVRVALIDAAA

SEQ ID NO: 87032 - DNA, 1386 bp, Saccharophagus degradans 2-40
  CDS (1)..(1386): transl_table=11
atgctagcgccagttaatcccactacaggccagccacttgcacaagtggcatcactcaccttgccagaatgtaaccgcgctatagataaaacctacgaagccttccccgcttggagagacacctccattaccgaaagagcctctgcgctaatgagaatagccgcctcattacgtaaaagtaaaaacacacttgccaaactaatggctcaggagatgggcaaacccctttgtgaaggcatcgccgaagtcgaaaaatcggccgcgtgtgccgagtactacaccaataacagcgccgattttttaaaacctgagacgctcgaatctgacgcagcttatagctacgtcacttaccaaccattgggcacaatactaggaatactgccatggaatgccccagtctggctggccctccgttttttagcccccgcgcttatggccggcaatacctgcgtaatgaaagccgaccccaacgtgcctgccactgcagcggcacttaccgcagcatttaacagcgcgggcctacccaaaaatgtaatgaccaacctccccatagaaacagaacttgttggcgaagcaatagatcaccctgccgttaaagccgtatcgtttaccggcagtagcgcagcgggtaaaaaagttgctgctcgggccgctggcggtataaagcccgcggtattagaactaggtggctccgacccctgtattgtattagccgatgcaaatttagataaagcctgcaatgtaatcaccctgtcgcgaatgattaacgcaggccaatcatgtattgccgccaaacgagtgattgtggaagcatcaatttacgacgacgtttgcaatcgcttattcaaaattttcagcaccattactatgggcgatcccagtcaatcgtccacctcagaatgcacagctctgccctatgcaatggggcccattgcacgcaaagatttacaaacacaactgcatcaacaagttaaccaaaccattcaaagcggcgcgcgttgtatacatggtggcgacttaccgtctacctctggtttcttttatccgcccacgctgttaattgatgtacaaccagagatgagcgcctttaccgaagaaacgtttgggcccgtactggccattatcaaagcgaacgattttgaacacgctatacaactggcaaataaaaccgaatacggcttaggcgctagtatatggaccgcagacaaaaccaaagcagaactcgccgccaacaaactgcaagccggccaagtcgccgtaaacggtatagtaaaaacagacccaagattacccagcggcggaattggcctttccggttacggtcgcgaactggggcctcagggaataaaagaatttgtgaatgttaaacaggtgtgggtggggtag

SEQ ID NO: 87033 - protein, 461 aa, Saccharophagus degradans 2-40
MLAPVNPTTGQPLAQVASLTLPECNRAIDKTYEAFPAWRDTSITERASALMRIAASLRKSKNTLAKLMAQEMGKPLCEGIAEVEKSAACAEYYTNNSADFLKPETLESDAAYSYVTYQPLGTILGILPWNAPVWLALRFLAPALMAGNTCVMKADPNVPATAAALTAAFNSAGLPKNVMTNLPIETELVGEAIDHPAVKAVSFTGSSAAGKKVAARAAGGIKPAVLELGGSDPCIVLADANLDKACNVITLSRMINAGQSCIAAKRVIVEASIYDDVCNRLFKIFSTITMGDPSQSSTSECTALPYAMGPIARKDLQTQLHQQVNQTIQSGARCIHGGDLPSTSGFFYPPTLLIDVQPEMSAFTEETFGPVLAIIKANDFEHAIQLANKTEYGLGASIWTADKTKAELAANKLQAGQVAVNGIVKTDPRLPSGGIGLSGYGRELGPQGIKEFVNVKQVWVG

SEQ ID NO: 87034 - DNA, 1383 bp, Burkholderia xenovorans LB400
  CDS (1)..(1383): transl_table=11
atggcatacgcaagcatcaacccgaatagtggcgagaccctgaagcgcttcgacccattgaccgacgcacagctcgaacaatctctcgcgagcgctcaggcatgttcccagacgtggaagcagaccacctacgctcagcgcgccgggatcctcaacaaggcggccgccctgttgcgcactcatgtggatgaattcgcgaagctggcgacgctggaaatgggcaagcgtatcaatgaagcgcgaggcgaggtgaatttcagcgccgatattctcgcctactacgcgaagcatgcggaagcgtttcttgctccgatcagactcgagccgaagattggcgaagcccatatggaaagcagtccgttcggcgtgctcttttgcgtggagccgtggaatttcccgtattaccagttggcgcgagtcgcgggtccgcaattgatggccggcaatgtcctcgtggtcaagcacgcggcctgtgtgccgcaatgcgcgatcgcgttcgaaaagctattgatcgatgcgggcgcacccaaaggcgcttataccaatctgctgatctcgcatgagcaggcccagcgtgtgatcgacgatccgcgtatcaagggcgtggcactgaccggtagcgccgcggccggcaaaagcgtcgccgcgcgagccggacagaacctcaagaaaacctcgatggaattgggcggcagcgatgcattcatcgtgctggatgacgccgacctcgaaaagacgattccgtgggcagtgtggggacgtatgtataacggcggccagacctgctgcgcagcgaaacgctttatcgttctcgattcgattgccgacaggttccttgagaaattcaaggcggcgttgtcggaactcaggccaggcgacccgatggatgaaaagaccacacatggtccgctttcgagcgaatcagcgctcgttcaactgctcaagcaggttgacgatgcggtggcgaacggcgccacgctgttgatgggcggcaagcggatcgatcgccccggctcgttcatggaaatcaccattctgaccgatatcaagccggacaaccctgcctttcgcgacgagtttttcggcccggtggtgtcgttcttccgcgtgaaggatgaagccgcggcgattgccttggcgaacgactccgacttcggtttgggcggttccgtcttcacagaagatatcgtgcgcggcaagcgggttgcgagcagcgtcgagacgggaatgatgttcatcaacaacatcgactggtccgatgcggaactgccgttcggcgggatcaaggactcgggctacggacgcgaactgggcaacatgggcatccaggagttcgtcaacaagaagctggttcgcaccgcgcatctcgacgcgccggtgtga

SEQ ID NO: 87035 - protein, 460 aa, Burkholderia xenovorans LB400
MAYASINPNSGETLKRFDPLTDAQLEQSLASAQACSQTWKQTTYAQRAGILNKAAALLRTHVDEFAKLATLEMGKRINEARGEVNFSADILAYYAKHAEAFLAPIRLEPKIGEAHMESSPFGVLFCVEPWNFPYYQLARVAGPQLMAGNVLVVKHAACVPQCAIAFEKLLIDAGAPKGAYTNLLISHEQAQRVIDDPRIKGVALTGSAAAGKSVAARAGQNLKKTSMELGGSDAFIVLDDADLEKTIPWAVWGRMYNGGQTCCAAKRFIVLDSIADRFLEKFKAALSELRPGDPMDEKTTHGPLSSESALVQLLKQVDDAVANGATLLMGGKRIDRPGSFMEITILTDIKPDNPAFRDEFFGPVVSFFRVKDEAAAIALANDSDFGLGGSVFTEDIVRGKRVASSVETGMMFINNIDWSDAELPFGGIKDSGYGRELGNMGIQEFVNKKLVRTAHLDAPV

SEQ ID NO: 87036 - DNA, 1383 bp, Burkholderia xenovorans LB400
  CDS (1)..(1383): transl_table=11
atgacctatcagagcgtcaacccgaataccggcaagacattgaagagcttcgacgagctgaacgatcagcagcttgaaaaagcgctgtccaccgctcagtcatgcttccatgtgtggaagaaaaccagctatgcgcagcgcgccgcgattatttccagggctgccgggctgatgcgtgcaaatgttgacgaattcgccaaactggcaacgctcgaaatgggcaagcgcattgacgaggcgcggggagaggtcaacttcagcgccgacattctcgactactacgcgaggcatgcggaagcgttcctggcaccgacgaagctccatccgaaagtcggcgaggcccatatggagacgagtccattcggcgtgctgttctgcgtggagccatggaactttccgtactatcagctcgcgcgcgtcgcagggccacaactgatggcgggtaacgtgctggtggtcaagcacgcaggctgcgtaccgcaatgtgcgattgccttcgaaaagcttctgattgacgcgggtgcaccggtgggcgcttacacgaacctcctgatctcgcataaacaggctgaacggatcatcgatgacccgcgcattcagggcgtggcgttgacgggtagcgtcgcggccggcagaagtattgcggcgcgagctggccagaaccttaaaaagacgtcgatggaacttggcggcagcgatgcgttcatcgtgctcgacgacgccgatctggagaagaccattccgtgggcagtttggggccgcatgtataacgccggccagacctgttgcgccgcgaagcgcttcatcgtcctcgattcgattgcggacaggtttctcgagaaattcaaggccgcgctcaacgaactgaagcctggcgatccgatggatgaaaagaccacgcatggtccgctgtcgaccgaggcggccctgacgcaattgctcaagcaggtcgacgatgcggtcgcaaagggtgccacgctggtgatgggcggaaagcgcatcgaccggcccggctcgttcatgcagacgacgatcctgacggatatcaagcccgacaacccggccttccgtgacgagttttttggcccggtcgtctcattcttccgcgtcaaggacgaagccgccgcgattgcactggccaacgactcggactttggtctgggcggctcggtcttcacggcggatgccgcacgcggcaagcgcgtggcgagcggagtcgataccgggatgatgttcatcaacaacatcgactggtccgatgccgaactgccgtttggcggtatcaaatattccggttacgggcgcgaactcggcaacatgggcatccaggagttcgtcaataccaagctggtccgtaccgcccacctcaacgcaccggcctga

SEQ ID NO: 87037 - protein, 460 aa, Burkholderia xenovorans LB400
MTYQSVNPNTGKTLKSFDELNDQQLEKALSTAQSCFHVWKKTSYAQRAAIISRAAGLMRANVDEFAKLATLEMGKRIDEARGEVNFSADILDYYARHAEAFLAPTKLHPKVGEAHMETSPFGVLFCVEPWNFPYYQLARVAGPQLMAGNVLVVKHAGCVPQCAIAFEKLLIDAGAPVGAYTNLLISHKQAERIIDDPRIQGVALTGSVAAGRSIAARAGQNLKKTSMELGGSDAFIVLDDADLEKTIPWAVWGRMYNAGQTCCAAKRFIVLDSIADRFLEKFKAALNELKPGDPMDEKTTHGPLSTEAALTQLLKQVDDAVAKGATLVMGGKRIDRPGSFMQTTILTDIKPDNPAFRDEFFGPVVSFFRVKDEAAAIALANDSDFGLGGSVFTADAARGKRVASGVDTGMMFINNIDWSDAELPFGGIKYSGYGRELGNMGIQEFVNTKLVRTAHLNAPA

SEQ ID NO: 87038 - DNA, 1368 bp, Methanococcoides burtonii DSM 6242
  CDS (1)..(1368): transl_table=11
atgaagaaaatagtctctatgaatccggcaacaggggaagtaaatgaggaaattgaactttattccgaagagaggatcaaccggaccataacaaaggcaagaactacttttcttgaatggaagaaccttgacatttccgaaagagcacattatctaaaaacggcggcaacgcaactaagaaaagacaaggatgaactgggccgtatcataacgatcgagatgggtaaacccatcaaggagtcagttcccgaagtggagaagtgtgcgtgggctctcgaatactacgcagaaaatgcggagaatttccttgcgccggaagctgtggaaaccgatgccctggaatccggggtctcatttgagccaaagggagtgatactcagcataatgccctggaatttcccgttctggcaggcccttcgtttcgctgcaccggcacttgtaggaggtaatacagtcatactgaagcatgccagctccgtgcccatgtgtgctcttgcaattgaaaaggtgtttgctgatgcaggtcttccggaaggagcattccagaccctgattatcgacggcaggaccgcctcggaactcatcgcaagggatgagatcgcagcagtcactttcacaggcagtcttactgcaggcaggaaggtggcggaagctgcaggcaggaatatgaaaaaggccgtgcttgagcttggaggcagtgatccgttcatcgttcttgatgatgccaatgtagagatggccgcaaaggcaggagtgaacagtcgcttccagaacggcggccagagttgcattgcagccaagcgtttcatagttacagaagctgtggccgatgagttcctgcgtatctttattggatccgcacgaaagctacaggtcggagacccaatggacccacaaacagatgttggccccttggtcaatgcgcaacaggtggacatcattgatgcacaagtaaaggattctgtggacaaaggtgccgaactcctgcttgaggggggaagacttgacaggctagggtcattttatgcacctgttatcctcagtaatgtcaacgagaacatgcgtgtgttgaaggaagagacattcggacccgttgcacctgttatcattgtcaaggatgaagaggaggccatacgggttgcaggcaacagcgatttcgggcttggtgccagcctgtggaccgaagatcgggaacatgcaatggaaattgaaaaacatattgaatccggcatattgtcggtgaactcaatggttgcttcggacccccgccttccatttggcggtgttaagaagagcggcataggacgagaactgtataagtatggactttatgagttcatgaacatcaagtcgataaaggtgtattga

SEQ ID NO: 87039 - protein, 455 aa, Methanococcoides burtonii DSM 6242
MKKIVSMNPATGEVNEEIELYSEERINRTITKARTTFLEWKNLDISERAHYLKTAATQLRKDKDELGRIITIEMGKPIKESVPEVEKCAWALEYYAENAENFLAPEAVETDALESGVSFEPKGVILSIMPWNFPFWQALRFAAPALVGGNTVILKHASSVPMCALAIEKVFADAGLPEGAFQTLIIDGRTASELIARDEIAAVTFTGSLTAGRKVAEAAGRNMKKAVLELGGSDPFIVLDDANVEMAAKAGVNSRFQNGGQSCIAAKRFIVTEAVADEFLRIFIGSARKLQVGDPMDPQTDVGPLVNAQQVDIIDAQVKDSVDKGAELLLEGGRLDRLGSFYAPVILSNVNENMRVLKEETFGPVAPVIIVKDEEEAIRVAGNSDFGLGASLWTEDREHAMEIEKHIESGILSVNSMVASDPRLPFGGVKKSGIGRELYKYGLYEFMNIKSIKVY

SEQ ID NO: 87040 - DNA, 1365 bp, Acidobacteria bacterium Ellin345
  CDS (1)..(1365): transl_table=11
atggccatcgcgagtgtgaatcctgccaccggcgaagtactgaagacgtttgaagcgctcaccccagaacagatcgaagcgaagatcgccaaggcgcacgcaactttttctacctaccgactgctgccgtattccaagcgcgcggcatggatgaacaagacggccgaactgctcgaagcggagaagcaggaacttgggcgcattatgactttggagatgggcaagccgctgaaggccgcagtggcagaggcggcgaagtgcgcgaccgcgtgccgctactatgcggagaacaccgaacgcttgatggcggacgagattgtgcagaccagcgcgaaacggagctttgtaaagtaccagccgattgggccggtgctggcgattatgccgtggaattttccgttctggcaggtgtttcggttcgtggctccagcgttgatggcaggaaacgttgggctgctgaagcacgcgtcgaacgtgccgcagtgcgcgctggcaatcgaagacattctgcggcgagcgggatttcccgaaggtgtgtttcagacgctgctaatcggagcgaaggcggtagatgcgattctctcggattcgcgcatcatggccgcgaccctcacgggtagcgaaggcgctgggattgaagttggcgtgtcggctgcgaagcagatcaagaaggttgtgctggagttgggcggaagcgatccgttcatcgtgatgccaagcgccaatttagagaccgcggtggctactgcggtgacggcgcgggtgcagaacaatggacagtcgtgtatcgcggcgaagcgcttcattgttcacgaagcaatcgctgattcgtttactgagaaattcgtggcgaagatggcggggctgaagattggcgacccgatggatgacgcgacggaactcgggccactctcgacaccgagcggggtgacggatctggagcgcgacctgaaagcttcggtggatgcgggagcgcgggtgttgacaggcggagcggtgatcaaacggccgggaaacttttttgcgccgacagtgattaccgatatcccgaaagaatctccggcttataaggaagagttcttcgggccggtggcttcggtatttcgggtgaagaacattgatgaggcgatcgcgattgcgaacgacagtcgctttgggctgggcgcgagtgtgtggacgaacgagccagcggagcaggaacgttttattcgcgatatcgaagcgggcatggtttacgtcaacaagatggtcgcgtcggatccgcggctgccgtttggtggggtgaagcagtcaggacatgggcgcgaactgggcgtgcacgggctgcacgaatttttgaatattaagacggtgtgggtggagtag

SEQ ID NO: 87041 - protein, 454 aa, Acidobacteria bacterium Ellin345
MAIASVNPATGEVLKTFEALTPEQIEAKIAKAHATFSTYRLLPYSKRAAWMNKTAELLEAEKQELGRIMTLEMGKPLKAAVAEAAKCATACRYYAENTERLMADEIVQTSAKRSFVKYQPIGPVLAIMPWNFPFWQVFRFVAPALMAGNVGLLKHASNVPQCALAIEDILRRAGFPEGVFQTLLIGAKAVDAILSDSRIMAATLTGSEGAGIEVGVSAAKQIKKVVLELGGSDPFIVMPSANLETAVATAVTARVQNNGQSCIAAKRFIVHEAIADSFTEKFVAKMAGLKIGDPMDDATELGPLSTPSGVTDLERDLKASVDAGARVLTGGAVIKRPGNFFAPTVITDIPKESPAYKEEFFGPVASVFRVKNIDEAIAIANDSRFGLGASVWTNEPAEQERFIRDIEAGMVYVNKMVASDPRLPFGGVKQSGHGRELGVHGLHEFLNIKTVWVE

SEQ ID NO: 87042 - DNA, 1470 bp, Silicibacter sp. TM1040
  CDS (1)..(1470): transl_table=11
atgagcactccaacttccctctccctgcgcgatccgagcctgctggaaacccgcgcctatgtgaacggccagtggatcaatggcgccaccacttttgatgtcatcgacccagcaaccgggcgactggtggcggaggtggccgatctagatgtggctgccgccgccaaagcggtggacgccgcccacgccgccggaccttcgtgggcagccctcgctggcaaggaacgcagcagtatcctgcgtcgctggcacgatctcttggttgagaacgcagacgaccttgccaccatactcaccgccgagatgggtaaaccctgggctgaagcacgtggcgagatcctctatggcgcctccttcatcgaatggttcgccgaagaagcaaaacgcatctacggcgatgtcattcctggcccgcagcgtgacaagcgcatcatggtgctgaagcaacccatcggcgtcgtgggttccatcacgccatggaattttcccaatgccatgattgcgcgcaaagttggcccggcgctggctgcaggctgcacctttgtcgcccgccccgcagagctgacccccttgtcggcgctggcgatggcggtactggccgagcgggccgggattcctgcgggtgttttcaatgtgatcccttccaatgatgcgccgggggtggggcgagagctctgcaccaatccgaaggtgcgcaagatcacctttaccggctccacgcgtgtcggacgcatcctgatggaacaagcttctggcaccattaagaaaatgtcgctcgagcttggtggaaacgcacccttcatcgtatttgatgatgccgatctcgatgcggcggtcgagggggcgatgatcgcgaagttccgcaacaatggtcagacttgcgtctgcgccaatcgcatttacgtgcaggcctcggtctatgatgcctttgcggagaaactggccggagaggtgaagagcttgcaggtcgggaacggctttgatgacgccacgactgcaggccccctgatcaacgaagccgccctgcgcaaggttgaggcgcatatctccgatgcggtgggcaaaggcgcgcggattgtcaccggcgggcaccgctcggatctgggcggaacgttctttgagcccaccgtgctgcgcgatgtgaacccgcatatggtggtgtgccacgaggaaacctttggcccgcttgccgcgttagtacgctttgacagcgaagaagaggtgatcgccctagccaatgacagcgagtttggtcttgccgcctatttctatgcgcgggatctcagccgggtctggcgggttgccgagtccctcgaaagcgggatggtcggagccaacaccggcctcatctcaaccgaggtcgctccctttggtggcatcaaacaatcgggcctcggacgcgaagggtcaaaatacgggatcgacgattttgttgagctgaagaacatctgtctcgggggaatgagctga

SEQ ID NO: 87043 - protein, 489 aa, Silicibacter sp. TM1040
MSTPTSLSLRDPSLLETRAYVNGQWINGATTFDVIDPATGRLVAEVADLDVAAAAKAVDAAHAAGPSWAALAGKERSSILRRWHDLLVENADDLATILTAEMGKPWAEARGEILYGASFIEWFAEEAKRIYGDVIPGPQRDKRIMVLKQPIGVVGSITPWNFPNAMIARKVGPALAAGCTFVARPAELTPLSALAMAVLAERAGIPAGVFNVIPSNDAPGVGRELCTNPKVRKITFTGSTRVGRILMEQASGTIKKMSLELGGNAPFIVFDDADLDAAVEGAMIAKFRNNGQTCVCANRIYVQASVYDAFAEKLAGEVKSLQVGNGFDDATTAGPLINEAALRKVEAHISDAVGKGARIVTGGHRSDLGGTFFEPTVLRDVNPHMVVCHEETFGPLAALVRFDSEEEVIALANDSEFGLAAYFYARDLSRVWRVAESLESGMVGANTGLISTEVAPFGGIKQSGLGREGSKYGIDDFVELKNICLGGMS

SEQ ID NO: 87044 - DNA, 1416 bp, Myxococcus xanthus DK 1622
  CDS (1)..(1416): transl_table=11
atggccatttccaccatcgacccggcgaccggcaagacgctgcgcaccttcacgcccctctccgccgaggaactggaggcgaagctccagaccgccgccgacacgttccgcacctaccgcgagacgaccttcgcagaccgcgtcacctggctgcggcgcgcggccgacctgctggaggccgaggccgaccgctacggccgcatcatgacgcaggagatgggcaagcccatcgacgccgccaaggccgaggcgaagaagtgcgccacggcctgccgctactacgtggacaagggcgagtccctcctgcgcgacaggctcgtcgacatgggcaccggccgcgccttcgtgcgctaccagcccctggggcccgtgctggccatcatgccgtggaacttccccttctggcaggtggtccgcttcgccgcgcccgcgctgatggcggggaacgtgggcctgctcaagcacgcccacaacgtgccccagtgcgcactggccctggaggaactcttccttcaggcgggcttcccacgcggcgccttccagacgctgctcatcgagacagccgacgtccatcgcgtcatcgaggaccgccgcgtgcgcgcggtgacgctcaccggcagcgagggcgcgggccgagccgtgggcgccgccgcgggcaaggccatcaagaaggtggtgctggagctgggcggcagtgacccgttcatcgtcatgcccagcgcggacatggagaaggcggtggagacggcggtgtccgcgcgcctcatcaacaacggccagtcctgcatcgccgccaagcgcttcatcgtcgccgacgccatctaccccgagttcgagcgccgcttcgtggagcggatgaagcgcgtcacggtgggcgaccccatggatgcgaagacggacctgggtcccctggcgacgcgcggcatcctcgacgggctccatgcccaggtggaggcgagcgtgaaggccggcgcgaggctgctcctgggcggcaagcccctggagggtccggggaacttctacccggccaccgtcctggccgagcccccgccccaggcccccgccttccacgacgagctcttcggccccgtggccacgctgctgcgcgcgcgtgacgtggaccacgccctggagctggccaacgcgacgccgttcggcctgggcgccagcgtgtggacacaagacgaagccgagcagcggcgtttcatcgacggcatcgacgcgggcatggtgttcgtcaacgcgcttgtggcatcggacgccaggcttccgtttggcggcgtgaagcactccggccacgggcgcgagttggcggacgtgggcatccacgagttcgtcaacatcaagtccgtccgcatcgccgcggcggaggagacgaagcagcagcctccgccccgcggcaccatcagcgagtag

SEQ ID NO: 87045 - protein, 471 aa, Myxococcus xanthus DK 1622
MAISTIDPATGKTLRTFTPLSAEELEAKLQTAADTFRTYRETTFADRVTWLRRAADLLEAEADRYGRIMTQEMGKPIDAAKAEAKKCATACRYYVDKGESLLRDRLVDMGTGRAFVRYQPLGPVLAIMPWNFPFWQVVRFAAPALMAGNVGLLKHAHNVPQCALALEELFLQAGFPRGAFQTLLIETADVHRVIEDRRVRAVTLTGSEGAGRAVGAAAGKAIKKVVLELGGSDPFIVMPSADMEKAVETAVSARLINNGQSCIAAKRFIVADAIYPEFERRFVERMKRVTVGDPMDAKTDLGPLATRGILDGLHAQVEASVKAGARLLLGGKPLEGPGNFYPATVLAEPPPQAPAFHDELFGPVATLLRARDVDHALELANATPFGLGASVWTQDEAEQRRFIDGIDAGMVFVNALVASDARLPFGGVKHSGHGRELADVGIHEFVNIKSVRIAAAEETKQQPPPRGTISE

SEQ ID NO: 87046 - DNA, 1398 bp, Rubrobacter xylanophilus DSM 9941
  CDS (1)..(1398): transl_table=11
ttggctatcgcgaccgtgaacccggcgaccggcgaggagctgaagcgcttcgaggccctcgaccgggagcagatagacgagaagatagagcgcgccgtcggggccttccggggctggcgcgagacccccgtgcaggagcgctgccggctcatggcccgggccgcggaggtgctggaggagagggcggaggagttcggccggctcatcaccaccgagatgggcaagccgctcgccgccgccgtcgccgaggtgcgcaagtccgcccgggggtgccgctactacgcgcagaacgccgcgcggtttctcgccgacgaggaggtggagctggagggcgcccgcgccttcgtccgctaccagccgctgggaccggtgctggccgtcatgccgtggaacttcccgttctggcaggtcttccggttcgcggcccccgcgctgaccgccggcaacgtggggctcctcaagcacgcctccaacgtcccgcagtcggcgctggccatagaggaggtcttccgtcaggccggcttccccgagggcgtcttccagacgctgctcataggcgcctcgcaggtgagggatgtgatctccgacccgcgggtgcgggccgccacgctcaccgggagcaccccggccgggcgcgacgtcggcggggaggcgggccggaacataaagccgagcgtgctggagctgggggggagcgacccgttcatcgtgatgccctcggccgacctggaccgggcgctggacaccgcggtgacctcgcgcaccctcaacaacggccagtcgtgcatcaacgccaagcggatcatcgtccaccgccagatcgccgaggagttcacccgccgcttcgtggagaagatggcctcgctcaaggtcggggacccgatggacgagacgacggacatgggcccgctggcgatgccctcgatcctggagggggtggacgagcaggtccgcaggagcgtggaggccggggcgaaggtgctcaccggcggcaagccgctggacgggccgggctacttctaccccccgacggtgctcgcggagatccccgagggtgcgccggcccgggaggaggagatcttcggccccgtcgcctcgctttttaccgcccgggacatcgacgaggcgatccggctggccaacgagacccccttcgggctgggctccagcgcctggactaacgacccggaggagcaggagcgctttgtagatgagatcgaggccggcatggtgtacatcaaccggctggtggagtccacgccggaggtgcccttcggcggggtgaagagctcgggctacgggcgggagctctcccacttcggcatccgggagttcgtgaacgtcaagacggtgtggatcgacgcctccggcggggagcgggggaggggggtggagtag

SEQ ID NO: 87047 - protein, 465 aa, Rubrobacter xylanophilus DSM 9941
MAIATVNPATGEELKRFEALDREQIDEKIERAVGAFRGWRETPVQERCRLMARAAEVLEERAEEFGRLITTEMGKPLAAAVAEVRKSARGCRYYAQNAARFLADEEVELEGARAFVRYQPLGPVLAVMPWNFPFWQVFRFAAPALTAGNVGLLKHASNVPQSALAIEEVFRQAGFPEGVFQTLLIGASQVRDVISDPRVRAATLTGSTPAGRDVGGEAGRNIKPSVLELGGSDPFIVMPSADLDRALDTAVTSRTLNNGQSCINAKRIIVHRQIAEEFTRRFVEKMASLKVGDPMDETTDMGPLAMPSILEGVDEQVRRSVEAGAKVLTGGKPLDGPGYFYPPTVLAEIPEGAPAREEEIFGPVASLFTARDIDEAIRLANETPFGLGSSAWTNDPEEQERFVDEIEAGMVYINRLVESTPEVPFGGVKSSGYGRELSHFGIREFVNVKTVWIDASGGERGRGVE

SEQ ID NO: 87048 - DNA, 1374 bp, Cytophaga hutchinsonii ATCC 33406
  CDS (1)..(1374): transl_table=11
atgtatcaatccatcaatcccttttcaaaggaaaacatacaaaacctcgcgtttgaatcgattgaatccttgaatgaaaaactgatcagatctgattcggcttacaaaaactggaggaaatattccatcaacgaccgtaaaccttattttaaaaatctcatttcagttcttacaaaagaaaaagaactattggcgcgtgagattacgttagagatgggaaaacccctgctggaaagcattgcagaaatagataaatgtatcggtacaacagaatggtatctcaataatgttgatgcgattatacaacaacatctgccaactgtttccattgaacatatcaaaagtcaaatagcatttgaacctattggtgccgtacttggcattatgccctggaactttccatactggcaggttttccggtatgctattccaacgctgcttatcggaaatacggttctgctgaaacatgcgcccaatgtacccggttgtgcgcaatcgctggaaaaaatatttaaactggccggatttccagatgacctgtttctttctctgtacccggctgttgaagatattgaatatatcattgcctcacctgccgtgcaggctgtaactgttacaggcagtgaacgtgcgggccgttctgtggctagccttgcaggaaaacacttaaaaaaatgcgtgcttgaacttggcggcagtgatccgtttattgttctcgctgatgcaccgattaaacaaactgttgcggaagcaattaaaggccgattgcaaaacaacggacaaagctgtattgctgcaaaacggtttattattcacgaacagtgttatgacgcttttttaaaagaacttaaagagcagctaaacgctcgcattatcggtgacccgatgcttaaagaaacgcaccttggccccatggcgcgtgctgatctgaaagaacaattatcaaaacaggtgcagagctctgtagcagcaggtgctgactgtacctacaaacatccgtttgacgattcaaattcaaatttcttttctccgctgatacttgaaaacattccggcaaacagccctgcccgtgccgaagaactgttcggacctgtatttagctgcatacgtgtaacagatacgaatgaagcgattgcggttgcaaatgaaacacgctttggactgggcgccagtatatggagcaatactattacagaagctgaaaagctgtctcaacatattgaagcaggttctgtattcatcaatgggataacgcgctctgatgcccgccttccttttggaggtatcaaacaatcaggttttggcagagaactatctgtatttggcttgcaggaatttgtaaatgtaaaaacgtattgggttaatgaacagtag

SEQ ID NO: 87049 - protein, 457 aa, Cytophaga hutchinsonii ATCC 33406
MYQSINPFSKENIQNLAFESIESLNEKLIRSDSAYKNWRKYSINDRKPYFKNLISVLTKEKELLAREITLEMGKPLLESIAEIDKCIGTTEWYLNNVDAIIQQHLPTVSIEHIKSQIAFEPIGAVLGIMPWNFPYWQVFRYAIPTLLIGNTVLLKHAPNVPGCAQSLEKIFKLAGFPDDLFLSLYPAVEDIEYIIASPAVQAVTVTGSERAGRSVASLAGKHLKKCVLELGGSDPFIVLADAPIKQTVAEAIKGRLQNNGQSCIAAKRFIIHEQCYDAFLKELKEQLNARIIGDPMLKETHLGPMARADLKEQLSKQVQSSVAAGADCTYKHPFDDSNSNFFSPLILENIPANSPARAEELFGPVFSCIRVTDTNEAIAVANETRFGLGASIWSNTITEAEKLSQHIEAGSVFINGITRSDARLPFGGIKQSGFGRELSVFGLQEFVNVKTYWVNEQ

SEQ ID NO: 87050 - DNA, 1419 bp, Rhodococcus sp. RHA1
  CDS (1)..(1419): transl_table=11
atgattgcatcgatcaccaccatcaaccccaccaccgggcaaccgctggccacgtacgaggcgatgtcgccggagcgcatcgacgccctcgtcgacgccgccgcgaccgtgcagaagcattgggcgaccgaggaattcaagacccgcggcgacatcctgcgggccgcggccaccgtcctgcgggagcggtccgaagacctggcccggctggtgacccgggagatgggcaaaccgctcgtcgagtcccgcgccgaggtggacaagtgcgcggtcggcctcgagtactacgccgacaacgccgccaccttcctcgccgacgaggactaccccacctccgccgaccgcagctgggtctcctacgagccggtcgggatcgtgctggcgatcatgccgtggaacttcccgctctggcaggtgttccggttcgccgcccccgccctgatggccggcaacgccgccctgctcaagcactccccgaacaccacgggcagcgccctggcctgccaggacatcctcctcgctgcgggtctgcccgccgggttgttcaccaccttgctgatcgccgaacccgacgtacccgccgccaccgagaaactgatcgccgactcccggatcggggcggtgaccgtcaccggcagtgaacgcgccggcagcgccgtcggctccatcgccggccgggagatcaagaagtcggtcctcgaactcggtgggtctgatccgttcgtgatcctcgccgacgcggaccttccccgcgtggcctccctcgccgcccgcggccggttcctcaacaacgggcagagctgcatctccccgaagcggttcatcgtcgacgccgccgtcgccgaggagttcacccgcctgttcgtcgacaacgtcggccggctgcaggtcggcgacccggaaaccgacggcaccgacgtcgggccgatggcccgcaaggatctgcttgagggcatcgaccggcaggtgcaatccgccgtcgccgccggggccaccgtcctgcacggtgggcgcccgctcgagggcaccgacggattcttctacacccccaccgttctcggtgacgtgcggcccgggatgtcggtctacgccgaggaaaccttcgggccggtcgcgacgatcatcaccgtcgacggaccggacgaggcggtcgcggtggccaacgacaccccgttcgggctcggggccagcgtctggggcgccgacctcgacgccgccatcgccgtcggccggcgcatcgagtccggggcgtgcttcatcaactccgtcgtcgcctccgacgcccggatgccgttcgggggcaccaaacgctccggctacggccgcgaactcgccgcccccggaatccgcgaattcgtcaacatccgcacctggtgggcgatgaacgaacccggcgcccaggccccggtctccgaataa

SEQ ID NO: 87051 - protein, 472 aa, Rhodococcus sp. RHA1
MIASITTINPTTGQPLATYEAMSPERIDALVDAAATVQKHWATEEFKTRGDILRAAATVLRERSEDLARLVTREMGKPLVESRAEVDKCAVGLEYYADNAATFLADEDYPTSADRSWVSYEPVGIVLAIMPWNFPLWQVFRFAAPALMAGNAALLKHSPNTTGSALACQDILLAAGLPAGLFTTLLIAEPDVPAATEKLIADSRIGAVTVTGSERAGSAVGSIAGREIKKSVLELGGSDPFVILADADLPRVASLAARGRFLNNGQSCISPKRFIVDAAVAEEFTRLFVDNVGRLQVGDPETDGTDVGPMARKDLLEGIDRQVQSAVAAGATVLHGGRPLEGTDGFFYTPTVLGDVRPGMSVYAEETFGPVATIITVDGPDEAVAVANDTPFGLGASVWGADLDAAIAVGRRIESGACFINSVVASDARMPFGGTKRSGYGRELAAPGIREFVNIRTWWAMNEPGAQAPVSE

SEQ ID NO: 87052 - DNA, 1368 bp, Trichodesmium erythraeum IMS101
  CDS (1)..(1368): transl_table=11
atgcagatcgctacagttaatccagcaacaggagaagtcctgaaaacttttgaacaaattacagatacacaaatagaggctaaactagagttagcagaaaaaacttttcgtgcctattgtcaaacttctataactcaacgtggagaatggttgttagcagcagcagacattttagaaaaaaatgctgagaaatttggtaagataatgactctagagatgggtaaaactataagtggagcgatcgccgaagctaaaaaatgtgctctagtctgtcgttactatgcagaaaaggctactgagtttctggctgatgttcctgcacaaactgatgctagtaaatcatttgttcgttatcaaccaattggtccagtgctagcggttatgccctggaattttcctttttggcaggttttccgttttgcagcaccagctttaatggcaggaaatgtgggtttattgaaacacgcttctaatgttcctcaatgtgctttggctattgaggaaatttttcaagaagcaggtttcccagaaggtgtatttcaaactcttttgatcagctcagataaagtgtctggtattatgatggatgaccgggtcaaagcaggaactttaactggcagtgaacctgcgggtgcaagtttagcggcaacagcaggtagagctattaaaaaaacggtcttggaacttgggggtagtgacccttttatagtattagaaagtgctgatttagaaacagcagttacaacagcagttacagctaggatgctaaataatggtcaatcttgtattgcagctaaacgttttattttggcagatgcgatcgctgatcaatttcaagagggtttggtagaaaaatttgaggctttaaaagtaggagaccctatgttgccagatactaatattggtcctttggcaactccatctattcttgaagagttaaatgctcaagtggaagcttctgtggagaaaggagcgaaaattctcacaggtggtcatcttttatctgaccttcctggaaatttttaccctccgacaattttagctgagataccaataagttctcctgcttatcaggaagaattttttggtccggtagctttagtctttcgcgttgctaatattgatgaagcaataaatttggcaaataatacaccttttggtttaggtgcaagtgcatggactaaagatacgggagagacggaaagattaatctcagaattagaggctggtgctgtttttatcaacggtttagttaagtctgatccacgtctgccttttggtggaattaaacgttctggttatggtcgggaactgagcagggaaggaattttggaatttgtcaatattaagactgtttgggttaaataa

SEQ ID NO: 87053 - protein, 455 aa, Trichodesmium erythraeum IMS101
MQIATVNPATGEVLKTFEQITDTQIEAKLELAEKTFRAYCQTSITQRGEWLLAAADILEKNAEKFGKIMTLEMGKTISGAIAEAKKCALVCRYYAEKATEFLADVPAQTDASKSFVRYQPIGPVLAVMPWNFPFWQVFRFAAPALMAGNVGLLKHASNVPQCALAIEEIFQEAGFPEGVFQTLLISSDKVSGIMMDDRVKAGTLTGSEPAGASLAATAGRAIKKTVLELGGSDPFIVLESADLETAVTTAVTARMLNNGQSCIAAKRFILADAIADQFQEGLVEKFEALKVGDPMLPDTNIGPLATPSILEELNAQVEASVEKGAKILTGGHLLSDLPGNFYPPTILAEIPISSPAYQEEFFGPVALVFRVANIDEAINLANNTPFGLGASAWTKDTGETERLISELEAGAVFINGLVKSDPRLPFGGIKRSGYGRELSREGILEFVNIKTVWVK

SEQ ID NO: 87054 - DNA, 1473 bp, Synechococcus sp. CC9311
  CDS (1)..(1473): transl_table=11
atgtctccaccacttttccaaagatcctgttcgttggacatagaagttaaaattgagatcacaagccatcattgtgaaaagtatccacgccagagaaaaatgacagagacaacaggtcttcaagcaatcaatcctgccactggagcaatcattgccacatatcctttaatgcatcaagaggagatcatacaagccatagaacaggcgcattctggattcaaacaatggaaacattctgctttttccgaaaggtcaaaagccctcactcacgcctcacaagccttaaaagccaacaacgttgccttggcggaatgcatcacccaagaaatgggaaaacccattcagcaatcatttgcagaagtggagaagtgtgcctgggtctgcgactattttgcaaaatatggtcaacagcacctatctgatgaaacgatcgaactggatcacaagaatgcaatcgtaacagcacaaccacttggggttctatttgcagtaatgccttggaatttcccgctatggcaagcattcagggcgattgccccagccttaatggcaggaaatacgctccttctaaaaggtgcatccaatgtgccgggatgtagcagggccattcaaaatatctttgacagctgcgaaatccctaaaggcgtattcacgaatatgcccattcgatcaacggatgcagaactggtgatttcccatccaaaagtacgagcagtcaccctgacagggagtgaagaggctggtcgagctgtggcatcgattgcaggcgccaatctaaaaaaatgtgttttagagctagggggtcaagacccctacctaatccttcacgatgcagatcttgatttggcagcagatcgttgtgcagcaagtcggatgctttgctccggacaagtttgcattgcagcaaaacgattgattgttgtcaatgatatttacgatcaattctttgaccttctgcaagaaaagttgaattcctatgtcatgggggaccccatgaatcctgcattcaatatcggaccattggcacgattggatctacggcaacaagttcatcagcaggttaaaaaaagtattgaacagggagcaatactacgcaaaggtggcgttctccctgaacaacaaggctggtggtatcccatcaccatcctcgaagacgtcaagccgggaatgcctgcatttgatgatgagatttttggtcctgtgctgagccttgtgcgtgcagagcatgacgaccatgcgatagaactggcctcagagacacgctttggattaggagctgccattttttcagcaaacaccgccaatgcccagcgaatcgccatcgaaaacattgaggcaggatgcatcgcgatcaatgattttgtacgaagtgatcctcgggttccctttggcgggattaaagatagtggttatgggagagagctgggtaagcttggcatccatgaattcatcaacagcaaaagcattgtttga

SEQ ID NO: 87055 - protein, 490 aa, Synechococcus sp. CC9311
MSPPLFQRSCSLDIEVKIEITSHHCEKYPRQRKMTETTGLQAINPATGAIIATYPLMHQEEIIQAIEQAHSGFKQWKHSAFSERSKALTHASQALKANNVALAECITQEMGKPIQQSFAEVEKCAWVCDYFAKYGQQHLSDETIELDHKNAIVTAQPLGVLFAVMPWNFPLWQAFRAIAPALMAGNTLLLKGASNVPGCSRAIQNIFDSCEIPKGVFTNMPIRSTDAELVISHPKVRAVTLTGSEEAGRAVASIAGANLKKCVLELGGQDPYLILHDADLDLAADRCAASRMLCSGQVCIAAKRLIVVNDIYDQFFDLLQEKLNSYVMGDPMNPAFNIGPLARLDLRQQVHQQVKKSIEQGAILRKGGVLPEQQGWWYPITILEDVKPGMPAFDDEIFGPVLSLVRAEHDDHAIELASETRFGLGAAIFSANTANAQRIAIENIEAGCIAINDFVRSDPRVPFGGIKDSGYGRELGKLGIHEFINSKSIV

SEQ ID NO: 87056 - DNA, 1461 bp, Hyphomonas neptunium ATCC 15444
  CDS (1)..(1461): transl_table=11
atgcccttgaaactcaaagattcctcgctcctcaaaagtgaggccttcatcggcggcgcctggcgcgcggccacatctggcgaaactttcgaagttacaaaccccgccaccggcgaaactctgatttccgtccccaaaatgggcgccgacgaaacccgcgaagctatcgacgccgccgccaaagccttccccgaatgggcagccctcctcgccgaaaaacgctccgccatcctgcgccagtggtttgatcttcttatggaaaatcaggccgacctcgccgccctcatgaccgccgagcaaggcaaatccctcaccgaatccaaaggcgaaatcgcctacgccgcctccttcatcgaatggttcagccaggaagcccgccgcacttatggcgacatcatccccagccacacccccaccgcccgcatcctcgtcacccacgaacctgtcggcgttacagccgccatcacgccctggaacttccccgccgccatgatcgcccgcaaggccgctgcagccctctcagtgggctgcacgatggtcgtaaagcccgcctccgccacgccgctgaccgccctcgccatggccgtcctggccgagcgggccggcatccctgctggcgtcctctcggtcatcaccggctctgccggagacatcggcggcgagctcaccagcaatcccaaagtccgcaaggtcagcttcaccggctccacagagaccggcaaaaagctgatgcagcaaagcgcttccaccctgaaacgcctcagcctggaactgggcggcaacgcgcccttcctcgtcttcgatgacgccgacctcgacgccgccgtggaaggcgccatcgcctccaaattccgcaactccggccaaacctgcgtctgcgccaaccgctttctggttcaggacagcatctacgatgccttcgccgaaaaactccagaaagccgtgtcaaaactgaaggttggcaacggcatggacgagggcgtcgaccagggccccctcatcaacgacgacgccgtggaaaccgtcaaagctcacatcgaagacgccgtcaccaaaggcgcccgcatcgcgctgggcggcaagccccacgccctcggcggcaccttcttcgagccgacgatcctcctggacgtccccaaaacagcccgcctcgccagagaagaaaccttcggccctgtcgccgccctcttccgcttcaccgatgaagccgaagccatcgccatggccaacgacaccgagttcggcctcgccgcctacgcctatacgaaagacctcgcccgcgccttccgcgtctccgccgcgctcgactacggcatcgtcggcatgaatgaggggctgatctccactgccatcgccccctttggaggccgcaaggaaagcggcttcggccgcgaaggctcaaagtatggcgtcagcgattatctcgacatcaaatacacgctgatgggcggcctcggctga

SEQ ID NO: 87057 - protein, 486 aa, Hyphomonas neptunium ATCC 15444
MPLKLKDSSLLKSEAFIGGAWRAATSGETFEVTNPATGETLISVPKMGADETREAIDAAAKAFPEWAALLAEKRSAILRQWFDLLMENQADLAALMTAEQGKSLTESKGEIAYAASFIEWFSQEARRTYGDIIPSHTPTARILVTHEPVGVTAAITPWNFPAAMIARKAAAALSVGCTMVVKPASATPLTALAMAVLAERAGIPAGVLSVITGSAGDIGGELTSNPKVRKVSFTGSTETGKKLMQQSASTLKRLSLELGGNAPFLVFDDADLDAAVEGAIASKFRNSGQTCVCANRFLVQDSIYDAFAEKLQKAVSKLKVGNGMDEGVDQGPLINDDAVETVKAHIEDAVTKGARIALGGKPHALGGTFFEPTILLDVPKTARLAREETFGPVAALFRFTDEAEAIAMANDTEFGLAAYAYTKDLARAFRVSAALDYGIVGMNEGLISTAIAPFGGRKESGFGREGSKYGVSDYLDIKYTLMGGLG

SEQ ID NO: 87058 - DNA, 1452 bp, Rhizobium leguminosarum bv. viciae 3841
  CDS (1)..(1452): transl_table=11
atggtcaatctaaaaaaaacggaactcctgcgcgatcgatgcctgatagatggcaaatgggttgccggctctcagaacaacatcgccgtcaagaacccagcgacgggggagattgtcggcaccgttccttcactggaggcgggagatgttgagcaggcggtcgtagcggccgaagttgccttccgttcgtggagcgcgcttgcagcgaaggaaagagcggccgtcctgctccgctggttctatctgataatagaaaacgcggacgatctggccgcgctgatgacggctgaacagggcaagccgctgtccgaagccaggggggaaatgctttacgccgcctcctttatcgaatggtttgccgaggaggcaaagagggtctatggggacatcatacccgcaccaaccaccgacaagcgcatcctggttttcaagcagccgatcggtgtctgcgccgcaatcacgccgtggaacttcccggcagcaatgatcacacgcaaggcggcgcctgcgctggctgccggttgcaccatggtggttaagccggccgagcagacacccctcacggcgctggctctcggcgtactagccgaacaggcgggtattcccgccggcgttttccagattgtgacaggaaaatcacgcgagatcggcaaggtgctgacggaaagcgacatagtcaaaaaactgtctttcaccgggtcgaccgaggtggggcgaattctcatggcgcagtctgcgccgacgataaagaaactgtccatggagctcggcggcaacgcacccttcatcgttttcgacgacgccgacctcgatgccgccgtcgacggtgccgtcgcgtcgaaataccgtaatgctggtcagacctgtgtctgcacaaaccgtatctacgtgcagtcgggtgtttacgatgtcttcgctgaaaagcttgcggcgaaggtttctgcgctgaaagtcggtgaaggcacgcaggtggatgtaacaattggaccgctgattgatgctgaggccatcgccaagatcgaggaccatattagcgatgcgatcgggaagggcgcgaaagtggtcgtaggtggcaagcgacacagcctcggcgggagattcttcgaaccgactgtcctgacaggagcgacacaagcgatgaagatcgcccgcgaggagaccttcgggccagtcgcgcctctcttccgctttgagacagaggaagaggcgctcgctatggccaacgacacggaattcggattggctgcctatttttatactgaaaacatccgccggacatggcgagtggccgaagcgctggaatacggcatggtgggtcataacaccggtcagatctcgaacgaggtggcgccatttggcggcgtcaagcagtccggcctcggacgggaaggctcccgttacggaatcgatgactatctggaaatcaaatatctgtgctcggccatcgcgtaa

SEQ ID NO: 87059 - protein, 483 aa, Rhizobium leguminosarum bv. viciae 3841
MVNLKKTELLRDRCLIDGKWVAGSQNNIAVKNPATGEIVGTVPSLEAGDVEQAVVAAEVAFRSWSALAAKERAAVLLRWFYLIIENADDLAALMTAEQGKPLSEARGEMLYAASFIEWFAEEAKRVYGDIIPAPTTDKRILVFKQPIGVCAAITPWNFPAAMITRKAAPALAAGCTMVVKPAEQTPLTALALGVLAEQAGIPAGVFQIVTGKSREIGKVLTESDIVKKLSFTGSTEVGRILMAQSAPTIKKLSMELGGNAPFIVFDDADLDAAVDGAVASKYRNAGQTCVCTNRIYVQSGVYDVFAEKLAAKVSALKVGEGTQVDVTIGPLIDAEAIAKIEDHISDAIGKGAKVVVGGKRHSLGGRFFEPTVLTGATQAMKIAREETFGPVAPLFRFETEEEALAMANDTEFGLAAYFYTENIRRTWRVAEALEYGMVGHNTGQISNEVAPFGGVKQSGLGREGSRYGIDDYLEIKYLCSAIA

SEQ ID NO: 87060 - DNA, 1407 bp, Leuconostoc mesenteroides subsp. mesenteroides ATCC 8293
  CDS (1)..(1407): transl_table=11
atgagttatcaaacaatcaatccattaacagatgaagtgattaaaacatatgacaatcatgatgatgcctatgtcgaaaaagcaattgcaaagggtcatgcactgtataaaaaatggcgtaatgatcctgttgaaagtcgtgccgcagcgttgaataaagtggctgacgtgatggaagcacaaacggatgagttagccaaagtcttgacccttgaaatgggaaaacgtttcctagaagcgcaaggcgaggttgctatttgtgtatcaattgcacgttattatgccaaaaatgcagcggaatttttgaaaccagaaccaattgaatcatcgattggaccagcccaaaccatttcaagaccaactggtgtcttgatgacagttgagccttggaacttcccatactatcagattatgcgtgtctttgcgcctaacttcatggtgggtaacccaatgctattgaagcatgcaagttacacgccaatggctgctggtgcttttgaaaaagttgttagcgaagcaggcttaccagacggtgcttttactaatctttacgttgactatgatcaagttaatcatattattgcagacgatcgtgttcaaggtgtggcattgacaggatcagaacgcgctggacaactcattgctgcggaagctggtaagagcatgaagcagagttcacttgaacttggtggtagtgatccatttattgtgttggaagatgctgatctttcagaaattaagaaaattattggtggcgcacggttgtataatgctgggcaagtctgcacatcatcaaaacgctttatcgtcacagaaaataactatgatgcagtgttagatatgctcaaaacagcgtttgctgaagcaaaaattggggatccaatggacgcaacgacaacgttggcaccattgagtacttcaaacgctaagcagaacctgacaaagcaagttaagttagccgtagaagcaggggcaacgcttgcgtatggtagcgtagaacaaaacttgccagctgcacaatttgagccagtcattttgacaaacattactaaggaaaacccagcattttatcaagaattctttggtccagttggacaagtatacaaagtcaaggacgaagaagaagcaattgctttagccaatgattcgcactatggtttgagtggtgttgtgtttggtggttcagctgatcatgctgcggaagttgcttcacaactagaaacaggtgcagtctttgtgaacagttttggtgggacattaccagaattaccattcggtggtgttaaaaattcaggatacggtcgtgaattaggtcgcttcggtattgaaacattcgtcaacaaagaaacaattgtgacgaagcatgaaccaattgatttaaatgatgcatttggtgggttcgtttaa

SEQ ID NO: 87061 - protein, 468 aa, Leuconostoc mesenteroides subsp. mesenteroides ATCC 8293
MSYQTINPLTDEVIKTYDNHDDAYVEKAIAKGHALYKKWRNDPVESRAAALNKVADVMEAQTDELAKVLTLEMGKRFLEAQGEVAICVSIARYYAKNAAEFLKPEPIESSIGPAQTISRPTGVLMTVEPWNFPYYQIMRVFAPNFMVGNPMLLKHASYTPMAAGAFEKVVSEAGLPDGAFTNLYVDYDQVNHIIADDRVQGVALTGSERAGQLIAAEAGKSMKQSSLELGGSDPFIVLEDADLSEIKKIIGGARLYNAGQVCTSSKRFIVTENNYDAVLDMLKTAFAEAKIGDPMDATTTLAPLSTSNAKQNLTKQVKLAVEAGATLAYGSVEQNLPAAQFEPVILTNITKENPAFYQEFFGPVGQVYKVKDEEEAIALANDSHYGLSGVVFGGSADHAAEVASQLETGAVFVNSFGGTLPELPFGGVKNSGYGRELGRFGIETFVNKETIVTKHEPIDLNDAFGGFV

SEQ ID NO: 87062 - DNA, 1362 bp, Solibacter usitatus Ellin6076
  CDS (1)..(1362): transl_table=11
atgattgcgagtgtgaatccggcgacgggagagaccgttgcgacgttcgatgcgctggacgctgaggagctggacggccggctcgggcgggctgccgaggcgtatgcaacgtaccggcggacgacgtttggcgagcgggccgggtggctgacgcgcgcagcggagatcctggagagcgagcgcgacgcgttggggcggatcatgaccctggagatggggaagcccatcgaggcggcgcggcaggaggcggcgaaatgcgcggtggcctgtcggtattacgtcgagcatggcgagcggctgctggcggatgaaacggtggagctgggcggaatacggagctttatccggtatcaaccgatcggaccggtgctggcggtgatgccttggaattttccgttctggcaggtcttccggtttctggcgccggcgctgatggcgggcaacgtcggattgctcaagcactcgtccaacgtgccgcagtgcgcgctggcaattgaagacatcgtgcggcgggcaggttttccggcggatgtctttcagacgctgttgatcggctcggagatggtgcagcgagtgatcgacgatccgcgagtgaaggcggcgacgcttacgggcagcgagcctgcggggcgccaggtggcggctcaggcgggcggccagattaagaagacggtgctcgaactcggggggagcgatcctttcgtggtcatgccaagcgccgatctggaagcggcggtgcgcacggcggtgcaggcgcgcgtgatcaacaacgggcaatcctgcattgcggcgaagcgtttcatcgtggacgacacgatcgcaggggagttcgagacgcggttcgtggcggcgatgcagcgcctggtggtaggcgaccctatggtggagacgacgcaggttggtccgctggctacgcgcgccatccgcgacgaattggacggacaggtgaagcgctcggtgctggcgggagctcgggtgctgacgggcgggcacgcgctggaccggctgggcaactattatgcgccgacgttgctggtggatgcggcggagggttctccggcgcgctgcgaggaatttttcgggccggtagcggtggtgctgcgcgccaagagtatcgacgacgcgatacggcttgccaacgatactccgtttgggttgggggcgagtgtatggaccacggatgcggtggagcaggagcgcctgatcgatgagatcgaagcgggcatggtgttcgtcaacggcatggttgcgtccgacccgcggctgccattcgggggggtgaagagttccggatatgggcgcgagctaggagtgtgggggatccgcgagtttgtcaacgttaaatccgtggtcgtacgctaa

SEQ ID NO: 87063 - protein, 453 aa, Solibacter usitatus Ellin6076
MIASVNPATGETVATFDALDAEELDGRLGRAAEAYATYRRTTFGERAGWLTRAAEILESERDALGRIMTLEMGKPIEAARQEAAKCAVACRYYVEHGERLLADETVELGGIRSFIRYQPIGPVLAVMPWNFPFWQVFRFLAPALMAGNVGLLKHSSNVPQCALAIEDIVRRAGFPADVFQTLLIGSEMVQRVIDDPRVKAATLTGSEPAGRQVAAQAGGQIKKTVLELGGSDPFVVMPSADLEAAVRTAVQARVINNGQSCIAAKRFIVDDTIAGEFETRFVAAMQRLVVGDPMVETTQVGPLATRAIRDELDGQVKRSVLAGARVLTGGHALDRLGNYYAPTLLVDAAEGSPARCEEFFGPVAVVLRAKSIDDAIRLANDTPFGLGASVWTTDAVEQERLIDEIEAGMVFVNGMVASDPRLPFGGVKSSGYGRELGVWGIREFVNVKSVVVR

SEQ ID NO: 87064 - DNA, 1419 bp, Mycobacterium avium 104
  CDS (1)..(1419): transl_table=11
gtgcccatcgccaccatcaaccccgcaaccggcgagacggtcaaaaccttcaccccggccagcgatgcggaagtcgatgccgccatcgcccgcgcctacgaacgcttcctcgactaccgccactccaccacgttcgcccagcgcgcccagtgggccaacgccaccgccgacctgctcgaggccgaggccgacgaggtggccgccatgatgacgctggagatgggcaagaccctcaagtcggccaaggcggaagcgctcaagtgcgccaagggttttcgctactacgcgcagaacgccgagcagctgctggccgacgagccggccgacgccggcaaggtcggcgcggcccgggcgtacatccgctaccagccgctcggcgtggtgctggccgtgatgccgtggaactttccgctgtggcaggcggtgcggttcgccgcgccggcgctgatggccggcaacgtcggcatcctcaagcacgcgtcgaacgtgccgcagagcgcgctgtatctggccgacgtcatcacccgcggcggcttccccgagggctgcttccagaccctgctggtgccgtccagcgcggtcgagcgcatcctgcgcgacccgcgggtggccgcggccaccctgaccggcagcgaaccggccggccagtcggtggcggccatcgccggcgacgagatcaagcccaccgtgctcgagctcggcggcagcgacccgttcatcgtgatgccctcggccgatctggatgaggccgtcaagaccgcggtcaccgcccgggtgcagaacaacggccaatcctgcatcgcggccaagcggttcatcgtgcacaccgacatctacgacacgttcgtcgacaagttcgtcgaacagatgaaagcgctgaaggtcggcgaccccaccgacccggccaccgacgtgggcccgctggccaccgagtcgggccgcgacgagatcgccaagcaggtcgacgacgccgtggccgcgggcgccacgctgcgctgcggcggcaagccgctcgacgggcccggctggttctacccgccgaccgtggtcaccgacatcaccaaggacatggcgctgtacaccgaggaggtgttcgggcccgtcgcgtcgatgtaccgggccgccgacatcgacgaggccatcgagatcgccaacgccaccaccttcggattggggtccaacgcctggaccaacgatgcggccgagcagcagcgcttcatcgacgacatcgaggccggccaggtcttcatcaacggcatgacggtgtcctaccccgagcttgggttcggcggcgtcaagcggtccggctacggccgcgagctcgccggcctgggcatccgcgccttctgcaacgccaagaccgtctggatcgggtcgtcgaagagcggcgacgccggaggcggctcgaaggtcgagtga

SEQ ID NO: 87065 - protein, 472 aa, Mycobacterium avium 104
MPIATINPATGETVKTFTPASDAEVDAAIARAYERFLDYRHSTTFAQRAQWANATADLLEAEADEVAAMMTLEMGKTLKSAKAEALKCAKGFRYYAQNAEQLLADEPADAGKVGAARAYIRYQPLGVVLAVMPWNFPLWQAVRFAAPALMAGNVGILKHASNVPQSALYLADVITRGGFPEGCFQTLLVPSSAVERILRDPRVAAATLTGSEPAGQSVAAIAGDEIKPTVLELGGSDPFIVMPSADLDEAVKTAVTARVQNNGQSCIAAKRFIVHTDIYDTFVDKFVEQMKALKVGDPTDPATDVGPLATESGRDEIAKQVDDAVAAGATLRCGGKPLDGPGWFYPPTVVTDITKDMALYTEEVFGPVASMYRAADIDEAIEIANATTFGLGSNAWTNDAAEQQRFIDDIEAGQVFINGMTVSYPELGFGGVKRSGYGRELAGLGIRAFCNAKTVWIGSSKSGDAGGGSKVE

SEQ ID NO: 87066 - DNA, 1383 bp, Mycobacterium smegmatis str. MC2 155
  CDS (1)..(1383): transl_table=11
ttgaccgccaccgcccagctgccgtaccggagcaccaacccggccaccggcgacgttctcgcagagttcgacaccaccaccgacgatcaggtctttgcggcgatcgccgcggccgatgaggcgttccgttcttggcgctcaacgcctctggacgaacgtgccgacgtcgtgcggacggtgggaaagctcctgcgcgaacgtgccgacgacttcgcgaagttggcacagttggagatgggcaagaaacgcggtcaaggcgccggggagacccggttctccgcatcgatcttcgagttctacgccgaccgtggcgccggcctgctcgccgatgaaccgattccgacgttcaccggcgggcaggcggtgatccggcggcaaccggtgggtgtgcttctcggcgtcatgccgtggaatttcccggtctaccagatcgcgcgtttcgcggctccgaacctggtgctgggcaacaccatgctgctcaagcacgccgagtcggttccccagtgcgcgctggccttcgccgagttgatgcgcgacgccggtgtgcccgaaggcgtgtacaccaacctgttcgcgacgttcgatcaggtggcgacgatcatcgccgatccgcgtgtgcagggagtttcggtcaccggttccgagcgtgccggtgcggcaatcgcggggttggccgggcagtccctgaagaagtgcgtgctcgagctgggcgggtcggacccgttcatcgtgctcgacggcgacccgaaggaactggcccgcaccgcctggaacttccgcatgcacaacatgggacaggcgtgtaactccaacaagcgcatcatcgtcctcgacaccatctacgacgactttgtcaccgagttggtcgccgcggcagaggctttcaccggtgaggagatcgcgccgctgtcgtcgcgggcagcggccgagaacctggccgcccaggtcgccgacgcggtcgacaaaggtgcgacgctgcacaccggcggtgtgctggccgaggcgccgaaggcttacttcaccccggccgtgctcaccggtgtgaccccgggaatgcgggcctacaccgaggaactgttcggcccggtcgccgtggtctaccgcgtcgccgatgcggaagaggccgtcgcgctggccaactccacggatttcggcctgggggcgtcggttttcagcgccgacaccgcccgtgccgaagctgtggcccgccgcctcgaagccggcatggtcaacgtcaacaccccgtccggcgacggccccgacatcccgttcggcggcatcaagcggtccgggttcggccgcgaactcggcacgctcggcatcgacgagttcgtcaacaagcaggtctacgtcgtcgccgagtcgtcgtcgtcatcagactga

SEQ ID NO: 87067 - protein, 460 aa, Mycobacterium smegmatis str. MC2 155
MTATAQLPYRSTNPATGDVLAEFDTTTDDQVFAAIAAADEAFRSWRSTPLDERADVVRTVGKLLRERADDFAKLAQLEMGKKRGQGAGETRFSASIFEFYADRGAGLLADEPIPTFTGGQAVIRRQPVGVLLGVMPWNFPVYQIARFAAPNLVLGNTMLLKHAESVPQCALAFAELMRDAGVPEGVYTNLFATFDQVATIIADPRVQGVSVTGSERAGAAIAGLAGQSLKKCVLELGGSDPFIVLDGDPKELARTAWNFRMHNMGQACNSNKRIIVLDTIYDDFVTELVAAAEAFTGEEIAPLSSRAAAENLAAQVADAVDKGATLHTGGVLAEAPKAYFTPAVLTGVTPGMRAYTEELFGPVAVVYRVADAEEAVALANSTDFGLGASVFSADTARAEAVARRLEAGMVNVNTPSGDGPDIPFGGIKRSGFGRELGTLGIDEFVNKQVYVVAESSSSSD

SEQ ID NO: 87068 - DNA, 1386 bp, Nocardioides sp. JS614
  CDS (1)..(1386): transl_table=11
atgaccgctgacccgatcatcaccgtcgaccccgcgaccggccgcgagctgcgtcgctacgaggtcatgacggacaccgacatcgagggcgtgctcgcccaggtgaccgcggcccagagcctctgggccggctcgtccgtcgagatccgcaccggggtgctcctccgggcggccgggatcctgcgggatcgggccgccgagctcggcgccctcgcgaccgccgagatgggcaagccgataacggaggcgatcgcggaggtcgagaagtgtgcgtgggtgtgcgagtactacgccgagacctcgcccgggcagctggcggacgaagaggtctccgccgccgggtcccgcagcttcatccgttacgagccactcggcacggtgctggcgatcatgccgtggaactacccgttctggcaggtgttccgcttcgtcgcgcccacgctcgccgcgggcaacgcgggaatcctcaagcactcgcccaacgtgaccggggtcgcgctcgccatcgagcaggtgctcacccaggcgggcctcccggctggcgtcttccgcacccttctcgtggccgaggctgaggtgcccagggtcgtggacggactcatccaggacgatcgcgttgctgcggtgaccctgaccggcagcaacagggcgggagcgagcgtcgccgcgagtgccggtcgcgccgccaagaagaccgtcctggagctcgggggatccgacccgttcgtcgtgctcgccgacgccgatctggatgtcgtcgttcccaaggcggtggcggggcgcttcctcaataccggccagtcgtgcctgtgtgccaagaggttcatcgtgcacgagtcgctggcaggcgagttcgctcgacgtttcaccgccgcggtggaagacctggcgatcggaccgccgggcgaggaaggcaccaggatcgggccgctcgcccgggctgatctggcggagaacctcgggcgccaggtcgacgagtcggtcgcggccggcgcggtcgtcctcacgggcggcaagcggctggaccggggaccggcctggtacgcccccaccgtcctggtgaacgtcacgcccgacatgccggtcatggccgaagagaccttcggcccggcagcagcggtcgtcgagttcgccacagatgacgaggcggtggcgctcgcgaacgcgaccccgtacggcctcggggccagcgtctggtccgcggatgccggccacgcgctcgaggtcggttcgcggatcagctccggcgcgctcttcgtcaacgccaccaccgcatccgacccgcggctgcccttcgggggggtgaagcagagcggctacggtcgcgagctgggtccactcggcgcacgcgagttcaccaacatccgcaccgtcgtcatcgggtga

SEQ ID NO: 87069 - protein, 461 aa, Nocardioides sp. JS614
MTADPIITVDPATGRELRRYEVMTDTDIEGVLAQVTAAQSLWAGSSVEIRTGVLLRAAGILRDRAAELGALATAEMGKPITEAIAEVEKCAWVCEYYAETSPGQLADEEVSAAGSRSFIRYEPLGTVLAIMPWNYPFWQVFRFVAPTLAAGNAGILKHSPNVTGVALAIEQVLTQAGLPAGVFRTLLVAEAEVPRVVDGLIQDDRVAAVTLTGSNRAGASVAASAGRAAKKTVLELGGSDPFVVLADADLDVVVPKAVAGRFLNTGQSCLCAKRFIVHESLAGEFARRFTAAVEDLAIGPPGEEGTRIGPLARADLAENLGRQVDESVAAGAVVLTGGKRLDRGPAWYAPTVLVNVTPDMPVMAEETFGPAAAVVEFATDDEAVALANATPYGLGASVWSADAGHALEVGSRISSGALFVNATTASDPRLPFGGVKQSGYGRELGPLGAREFTNIRTVVIG

SEQ ID NO: 87070 - DNA, 1368 bp, Nostoc punctiforme PCC 73102
  CDS (1)..(1368): transl_table=11
atggcgatcgctactatcaatcccgccactggggagacgctcaagacctttgaggcgctcaatgatacagaaattctcgctaaactcgatttggctaatcaggcttttgaaaagtatcgccagactgatttttctgagcgatcgcaatggctacaaaaggctgctgatattttagagcaagacaaagcagaatttgctaagttaatgactctggaaatgggtaagccatttaaagctgcgatcgcagaagtcgaaaaatgcgccgttgtctgtcgctactatgccgaacatgcccctagttttttggctgatgtcagtgtaaaaactgatgccagccagagttttgtacgttatcaaccaatgggtgcaattcttgcggtgatgccgtggaattttcccttttggcaagtgttccgctttgctgcaccagcactaatggcgggaaatgtcggcttactcaaacacgcttccaatgtgccgcagtgcgccttggcaattgaagatattatccgacgcgcgggttttcctgaaggtgcgtttcaaactctattaataggcgctgccaaagtcgctgatttaatggctgatgaccgcgtaaaagctgccaccttaactggaagcgaaccagcaggcatatccctcgctgtcgccgccggcaaacaaatcaaaaaaacagttttggaattgggaggaagcgatccatttattgtgttagaaagtgctgacttagagacagcagttgtcacagctactacagcaaggatgttgaataacgggcaatcatgtattgcagcgaaacgttttattgtcgcagaagcgatcgcagataaatttgaaaaattgcttttagaaaaattcgaggcgctaaaagtaggcgatcctatgcaatcggataccgatttaggcccattggcaacacctggtattctccaggatttagatcaacaagtacaagctgctaccaaaattggtggtaaagtcctcaccggcggacatcctttatcagatcgtccagggaacttttatccgccaacgattatcatagatatcccgcctgacacaccaattgcaaaagaagaattctttggtccagtagccttgttgttccgggttcctgatatcgatgctgccattaaactcgctaatgacagcccctttggattaggtgcaagcgcttggacaaagaacgaccaagaatgcgatcgcttgattgaggaaatcgaagccggtgccgtgtttatcaacagtatggtcaaatccgatccccggttgccctttggtggtactaagcgttctggatatggcagagaattgagtatccagggtatacatgagtttgtcaatgtgaaaactgtgtgggttaaatag

SEQ ID NO: 87071 - protein, 455 aa, Nostoc punctiforme PCC 73102
MAIATINPATGETLKTFEALNDTEILAKLDLANQAFEKYRQTDFSERSQWLQKAADILEQDKAEFAKLMTLEMGKPFKAAIAEVEKCAVVCRYYAEHAPSFLADVSVKTDASQSFVRYQPMGAILAVMPWNFPFWQVFRFAAPALMAGNVGLLKHASNVPQCALAIEDIIRRAGFPEGAFQTLLIGAAKVADLMADDRVKAATLTGSEPAGISLAVAAGKQIKKTVLELGGSDPFIVLESADLETAVVTATTARMLNNGQSCIAAKRFIVAEAIADKFEKLLLEKFEALKVGDPMQSDTDLGPLATPGILQDLDQQVQAATKIGGKVLTGGHPLSDRPGNFYPPTIIIDIPPDTPIAKEEFFGPVALLFRVPDIDAAIKLANDSPFGLGASAWTKNDQECDRLIEEIEAGAVFINSMVKSDPRLPFGGTKRSGYGRELSIQGIHEFVNVKTVWVK

SEQ ID NO: 87072 - DNA, 1458 bp, Magnetospirillum magnetotacticum MS-1
  CDS (1)..(1458): transl_table=11
atgatcaagcatctcatcaacggcaagcatgtggagagcgcctccaccatcgccaatctcaaccccgccaccaatgaggtgatctgccagatcgccgccggtggcgaggccgaggtggctagggccgtggcggccgccaaggaagccttccccaaatgggcgggtctggcgcctgcccagcgcgccaagctgctgcgcaaggtgggcgacctgatcaaccagcatgtggacgagatcgccaagctggaaagcctggacacgggacaatcctactggcgcaccaagaagatgctggtgccgcgcgccgccgacaatttctacttcttcgccgacacctgccaacatgtggacggcgagacctatcccaccaacgaccacctgaactacaccatctatcagccggtgggcgtggtgggcctgatctcgccgtggaacgtgcccttcatgacggcgacctggaagacggcgccgtgcctggccttcggcaacaccgccgtcttgaagatgagcgaattgtcgccgctgtcggccgaccgcctgggacagctgatcctggaggcgggcattcccgccggtgtgttcaacatcgtccacggctatggctcggcggtgggtgaagccctggtcaagcacccggatgtgcgcggcgtgtccttcaccggctccaccgccaccggcaaccgcatcatccagagcggcgggctgaagaagtactccatggaactgggcggcaagtcgcccaacatcgtcttcgacgattgcgatttcgagcgcgccgtggatgccgccatcgtcgccgtctacggcaataacggcgaaagctgcaccaacggcacccgcatcctggtccaggacggcatctacgaccgcttcgtcgcggccctggccgagcgcaccaagaaggtggtggtgggcgatcccctcgatgaggccaccaatgtgggccccatgatcacgcgggaccactggaagaaggtgaccggctatatcgaactgggcatcaaggaaggggcacgcgtcgtcgccggtggcctgggcgagcccgagggcctgcccgctcacctgaagaacggcaatttcgtgaagcccaccgtcctggccgatgtggacaattcctggcgcgtcgcccaggaggagatcttcgggcctgtggcctgcgtcatccggttcaaggatgaggccgaggcgctgaagatcgccaatgccaccacctacggcctggcctcctatgtgtggaccgagaacggcgccaaggccatccgcatggccgaaggcatcgaggccggtctggtcttcgtcaattcccagaatgtccgcgacctgcgccagcccttcggcggcatcaagggttcggggaccggccgcgagggcggtcactattcctacgaggcgtttctggaagtgaaaaacgtctgcgtctccaaggggaaccatcacatcccgcgctggggtgtgtga

SEQ ID NO: 87073 - protein, 485 aa, Magnetospirillum magnetotacticum MS-1
MIKHLINGKHVESASTIANLNPATNEVICQIAAGGEAEVARAVAAAKEAFPKWAGLAPAQRAKLLRKVGDLINQHVDEIAKLESLDTGQSYWRTKKMLVPRAADNFYFFADTCQHVDGETYPTNDHLNYTIYQPVGVVGLISPWNVPFMTATWKTAPCLAFGNTAVLKMSELSPLSADRLGQLILEAGIPAGVFNIVHGYGSAVGEALVKHPDVRGVSFTGSTATGNRIIQSGGLKKYSMELGGKSPNIVFDDCDFERAVDAAIVAVYGNNGESCTNGTRILVQDGIYDRFVAALAERTKKVVVGDPLDEATNVGPMITRDHWKKVTGYIELGIKEGARVVAGGLGEPEGLPAHLKNGNFVKPTVLADVDNSWRVAQEEIFGPVACVIRFKDEAEALKIANATTYGLASYVWTENGAKAIRMAEGIEAGLVFVNSQNVRDLRQPFGGIKGSGTGREGGHYSYEAFLEVKNVCVSKGNHHIPRWGV

SEQ ID NO: 87074 - DNA, 1368 bp, Crocosphaera watsonii WH 8501
  CDS (1)..(1368): transl_table=11
atgggtatcgccacagttaacccagcaacgggagaaaccattaaaatttttgaaccccttacagcagaagagattgagattaaactcgctttagctgagtctacgttcaaaaagtatcgtaaaatttccctagaacaaaagagtcaatggttgaatgctgccgccgatattttagaacgagatcaacgtaaactaggggaaataatgaccctagaaatgggtaaaccgatcaaaagtgcgatcgcagaggcgaaaaaatgcgccttagtttgtcgttactacgcagaaaacgcagctaactttctcaaagatgttccggcccaaacggatgccagtcgtagctttatccgttatcaacccttggggattattttagccgttatgccctggaattttcccctctggcaagtgtttcgctttgcggcacctgccttgatggctggaaacattggcattcttaaacacgcttctaatgtccctcaatgcgccttagcagttgaagctatcctgacagaagcagggtttcctcaaggtagtttccaaaccttactgatcggcgcctctcaagtagaagctattatcaatgatcccagagtcaaagcagctaccttaacaggaagtgaacccgccggggccagtttagcttctgcggctggtaaacaaattaagaaaaccgttttagaattagggggcagtgatccttttatcgtcttagaaagtgccgatatcgaagcagcagctaccaccgcagtaacagccaggatgctaaacaatggccagtcttgtattgcagccaaacgctttatcttagccgagtccatcgccgatcgctttcaagctctactcacagaaaaatttaaggcattgacagtaggcgatcccatgcaggaagaaacagacatcgggccactggctaacgcctccatgttattagaattagatcaacaagtgcaagaaacagtcacaaaagggggcaaaatagtaatagggggtaaagcgatcgccgatcaacctggttacttttatccgcccaccattttaacggatattcctgtagattctcccggatattacgatgagttctttggtcctgtggctttactcttccgagttaaagatatagacgaagccattgaattagctaatgataccatctttgggttgggagctagtgcctggagcaatgagccaatggaacaagagcgactgatcgatgagatcgaagctggatgcgtctttattaatggtatggtcaaatccgatcctcgcctacctttcggtggaattaagcgatcgggttacggacgggaattaagtattgaaggaatgcaggaatttctcaatgttaaaaccgtgtggattaagtga

SEQ ID NO: 87075 - protein, 455 aa, Crocosphaera watsonii WH 8501
MGIATVNPATGETIKIFEPLTAEEIEIKLALAESTFKKYRKISLEQKSQWLNAAADILERDQRKLGEIMTLEMGKPIKSAIAEAKKCALVCRYYAENAANFLKDVPAQTDASRSFIRYQPLGIILAVMPWNFPLWQVFRFAAPALMAGNIGILKHASNVPQCALAVEAILTEAGFPQGSFQTLLIGASQVEAIINDPRVKAATLTGSEPAGASLASAAGKQIKKTVLELGGSDPFIVLESADIEAAATTAVTARMLNNGQSCIAAKRFILAESIADRFQALLTEKFKALTVGDPMQEETDIGPLANASMLLELDQQVQETVTKGGKIVIGGKAIADQPGYFYPPTILTDIPVDSPGYYDEFFGPVALLFRVKDIDEAIELANDTIFGLGASAWSNEPMEQERLIDEIEAGCVFINGMVKSDPRLPFGGIKRSGYGRELSIEGMQEFLNVKTVWIK

SEQ ID NO: 87076 - DNA, 1416 bp, Exiguobacterium sibiricum 255-15
  CDS (1)..(1416): transl_table=11
atgatagaacaaaatgtaatcaatggagtatggtatgacacagaggaaacgattccggtcttcaacccggcaacaaaagaattgctcggacacgtcccgagcagtacagcagacgatgcgcaacgtgccgtcgatgcagcaagtacggcattcgtcgactggtcggaacggacggccgatgaccgcgctgataaaatcgatgcctggtaccgcttgattcaggaacaccgcgatgaactggcagacatcatgacacgtgaacaaggaaaaccgttcatcgaagcacgtggagaaatcgattacgggaaccaatacgtccgttggtacgcagaagaagcacgccggatttacggcgaaacgattccggcatctgtgcccggaaaacggctcttcgttgaaaaagagccggttggtgtcgttgcggcgatcacaccatggaacttcccggcggcgatgattacacggaaactcgctccggcgcttgctgcaggctgtacggtcgtcctcaaaccatcggaagaaacaccgtatacagcacttcgcctcgtcgaactggcgattgaagcgggtattccggctggtgccatcaacgtcttgacgggagacgctgcaaccatcagtggtgtctggcaagccgattcccgcgtccggaaaatcacgttcacgggctcgacagcggtcggtaaattaatcatgcgtcaagcggctgatacaatgaaaaaattatcacttgaactcggtggtcacgctccgttcatcgtcacggaaaatgcggatctcgacaaagccgttcaaggtgccatccgctcgaaattccgcaacggcggtcaagcctgtgtcgcaacgaaccgcttttatgtccaggcatcggttctcgacaccttcactgaaaaattcgtcgccgaagtcaagcggttgaaagtcggcaacggactcgatgccgattcaacaatcggaccgttgatcaatgcaaaagctgttgctaaagtcaaagcacatattgacgacgccgtcgcaaaaggcgccacgattttaacaggcggcacaattgacgactccgtcggttatttcgtcgaaccaactgtcctcggtaacgtgacagaagacatgatttgcatgcaggaagaaacgtttggtccgctcgcaccgatttctgtcttcgaaacactcgacgaagtcatcgaacgcgcgaacaacacaccatacggtcttgccgcatatgcgttctctgaaaaaatcgacgaagcgcttcgtctcggtaaaaaactcgagtacggcatcgtcggcttaaatgacggtgctccatccgctgctcaagcaccattcggcggttataaagaaagtggactcggtcgtgaaggcggcgtctacggcatcgaggattacctcgaagtcaaatacttgtcactcggttaa

SEQ ID NO: 87077 - protein, 471 aa, Exiguobacterium sibiricum 255-15
MIEQNVINGVWYDTEETIPVFNPATKELLGHVPSSTADDAQRAVDAASTAFVDWSERTADDRADKIDAWYRLIQEHRDELADIMTREQGKPFIEARGEIDYGNQYVRWYAEEARRIYGETIPASVPGKRLFVEKEPVGVVAAITPWNFPAAMITRKLAPALAAGCTVVLKPSEETPYTALRLVELAIEAGIPAGAINVLTGDAATISGVWQADSRVRKITFTGSTAVGKLIMRQAADTMKKLSLELGGHAPFIVTENADLDKAVQGAIRSKFRNGGQACVATNRFYVQASVLDTFTEKFVAEVKRLKVGNGLDADSTIGPLINAKAVAKVKAHIDDAVAKGATILTGGTIDDSVGYFVEPTVLGNVTEDMICMQEETFGPLAPISVFETLDEVIERANNTPYGLAAYAFSEKIDEALRLGKKLEYGIVGLNDGAPSAAQAPFGGYKESGLGREGGVYGIEDYLEVKYLSLG

SEQ ID NO: 87078 - DNA, 1374 bp, Prosthecochloris aestuarii DSM 271
  CDS (1)..(1374): transl_table=11
atgatcagaaccatcaatcccgctacagaagagctgttggcggaatatcaatctatgaccggatcagagatcgagcaggtgcttgatggtgcccggcatgctgcagccgaatggaaatcgatgagttttgcgtgccgcagtgagctgatgctgcgcctcgcggcactcttgagagaacagaaaaacattcatgccgaaacaatcagtctggaaatgggtaaaccgttttctcaggctcttgccgaggttgaaaagtgtgcctgggtctgtcagtattatgccgagcatgctgaatcctttcttcagcctgaatcgatagatgtcgatggcgttcagggactggtgaccttcgaaccgcttggcgtggttcttggtgttatgccatggaactttccgttctggcaggtatttcgctttgcatcggcggttatgatggcaggcaacggcattgttgtcaagcatgcgcctaacgtgaccggctgtgcgattgccattgagcgtctttttctcgaagcgggttttcccgagcatctttatcgtacgctccatattgatcttgaggatgtcaaccgggtagttggcgatatcatttcccatcctgttattcgcgcggtttccgttacaggaagtaccggcgcaggaatcgcagtggcatcaaaagcgggtatggcgctcaagaggagtgttcttgagctgggaggcaacgatccctatatcgttcttgacgacgcagatcttcgacttgctgtcgatgtatgtattgccgcacgtctgctcaatgccggacagagctgcattgccgcgaaacgtttcatcgttcactctggcgtcaaagagcagtttgaagagatgctgctggcttcgatacgctcgaaaaaaacaggggacccttttgatcctgacgttgccgttggccctatagccagagaggacctgagagatgaacttcatcgtcaagtcatgcagagccgcgaggcaggagcaagaattgtctgcggcggggagattcccgacaggaaaggctatttttaccctccgacgattgtcaccgatgtcaggccaggaatggcggtctatggcgaagaaactttcgggcctgtggctacggtgattgaggcttcggatgacgatgatgctgtcaggatagccaacgactctccttacggtcttggttccgcggtattttcaggggatgataaacgagccctttcgattgccggccgtcttgaggcaggcaactgctacatcaatgcaatggtgaaatcagatccgaggcttcctttcggcgggatcaaacagtcggggtatggacgggagttatcaagttacggtatgagggagttcgtcaatataaaaacgatctattgcggctga

SEQ ID NO: 87079 - protein, 457 aa, Prosthecochloris aestuarii DSM 271
MIRTINPATEELLAEYQSMTGSEIEQVLDGARHAAAEWKSMSFACRSELMLRLAALLREQKNIHAETISLEMGKPFSQALAEVEKCAWVCQYYAEHAESFLQPESIDVDGVQGLVTFEPLGVVLGVMPWNFPFWQVFRFASAVMMAGNGIVVKHAPNVTGCAIAIERLFLEAGFPEHLYRTLHIDLEDVNRVVGDIISHPVIRAVSVTGSTGAGIAVASKAGMALKRSVLELGGNDPYIVLDDADLRLAVDVCIAARLLNAGQSCIAAKRFIVHSGVKEQFEEMLLASIRSKKTGDPFDPDVAVGPIAREDLRDELHRQVMQSREAGARIVCGGEIPDRKGYFYPPTIVTDVRPGMAVYGEETFGPVATVIEASDDDDAVRIANDSPYGLGSAVFSGDDKRALSIAGRLEAGNCYINAMVKSDPRLPFGGIKQSGYGRELSSYGMREFVNIKTIYCG

SEQ ID NO: 87080 - DNA, 1350 bp, Croceibacter atlanticus HTCC2559
  CDS (1)..(1350): transl_table=11
atgaaatctataaatccttatacaggagaaaccatacaaacatttccgcagtttacgccatctcaagtaagtgcttcaataactaaagcacacgaagcttttttttcttggaagaaaacctcatttagtgagcgttctaacttaatgcgttctgtagctaaaggattaagagaacataaagataaatacgctaaaacaatgacccttgaaatgggtaagcccattgctcaagctaaagcagaaattgataaatgtgcttggttatgtgaatactatgcagatactgcagagcaacatttaacttctaagataattaagacagatgctgcaaaaagctatgtaaactacgaacctattggtgttgtcttggcggttatgccatggaattatcctttctggcaagtatttaggttcattgtacctgcattaatggctggaaatgttggcgttttaaagcatgcaagtaatgttatgggctgtgcagaacatatagaagctgtgtttataaatgctggcttcccaaagcattgttttcagaatttaccaataaattcaagcaaggttgaagctattattaggcacaaacatattaaagcggttaccttaacaggtagtaaacctgctggtagtatggttgcaagtgtggcaggcgaagaaattaaaaagtctgtacttgaacttggtggtagtaatgcactggttgtttttaaagatgcagaaatagataatactgtagcaacatgtgtacaagcaagatttcaaaatacagggcaaagttgtatagcaggaaaacgattgttattacataaatctattgaagaagagtttcttgataaattgaaaaaagaagtaattgctttaaaaagcgggaatcctttagaggaagatacctatataggaacaatggccagagaagatttagctgaagaattggaagagcaattaaaagcttcggttaaagaaggcgctaaaattttaataggaggaaagcgaaccaatgcttactttgagccaactatagttactaatgtaacaccagaaatgtcaatttttaaagaagaaacatttggacctgttttatctgtaactatatttaatacagatgaagaggcagttgaattagtaaatcaatcagattttggattaggagtttcgatatttactgaaaacgattctaaaattgaaaaactaattccgttgtttgaagatggtgctgtatttgtaaatgagctggtaaaaagtgatccgcgattaccatttggtggaacaaaaatttcaggttatggtagggagttgtctgaagatggtataaaagagtttgtaaataaaaagacagtttacattaagtag

SEQ ID NO: 87081 - protein, 449 aa, Croceibacter atlanticus HTCC2559
MKSINPYTGETIQTFPQFTPSQVSASITKAHEAFFSWKKTSFSERSNLMRSVAKGLREHKDKYAKTMTLEMGKPIAQAKAEIDKCAWLCEYYADTAEQHLTSKIIKTDAAKSYVNYEPIGVVLAVMPWNYPFWQVFRFIVPALMAGNVGVLKHASNVMGCAEHIEAVFINAGFPKHCFQNLPINSSKVEAIIRHKHIKAVTLTGSKPAGSMVASVAGEEIKKSVLELGGSNALVVFKDAEIDNTVATCVQARFQNTGQSCIAGKRLLLHKSIEEEFLDKLKKEVIALKSGNPLEEDTYIGTMAREDLAEELEEQLKASVKEGAKILIGGKRTNAYFEPTIVTNVTPEMSIFKEETFGPVLSVTIFNTDEEAVELVNQSDFGLGVSIFTENDSKIEKLIPLFEDGAVFVNELVKSDPRLPFGGTKISGYGRELSEDGIKEFVNKKTVYIK

SEQ ID NO: 87082 - DNA, 1377 bp, Sulfitobacter sp. EE-36
  CDS (1)..(1377): transl_table=11
atgtccaagatcacgacaatcaatcccgccaccgaagaagagatccagtcctacgatctgatgagcgaagcagaggctattcagcgggtcgaagcctgtcatgacgcgcatcttgaatggcgcaagctgtcgcacaaagaacgcgcgccctatctgaccaagatcgccgccaagctgcgcgagaacgcggatgaattagccgccctcatgacgcgcgagacaggtaagctgctgaaagatggcaagaccgaggtagagatttgcgcggccatctttgaatataccgccaagaatggccccgacgtgcttgcggatgaagaacgcacccacggtgccgacggcaaacgcggggtcgtgacttatcagcctatcggcgtcatctattcgatccagccgtggaacttcccactgtaccaacccacccgtgtgcttgcggcgaacctgatgaccggcaacggttgtgttctgaaacacgcgagcatctgcaccggctcgggccttcgcctgcgcgaactttgtatcgaggctgggctacccgaagacctattccaagtgatcctcatcgaccacgacaccagcgacaagctgatcgaacaccccaaggtgcgtggcgtgacaatgacgggcagcgatggcgcgggccgtcacatcgggtcggtcgccgcgaagtcgctgaaaaagaccgtgctcgagctcgggtccaacgacgcctatctggtgcttgaggatgctgatatcgaaacagcggtcaaattctcggttatgggtcggctctataacaacggggaaacctgtgtatcggcgaaacgctttattgtcgccgataaggtgcatgacgcctttgttgatgccttcgtcgccgagatgaagaagatcaatatgggcgatccgaccgacgaaaacgttcagctcgggccgttgtccagccaagaccagttcgagaccgtgcgcgatcaggtgaaagaaagcgttgataaaggggccaaggtgctgtgcggtggcgaggtgcctgaccgtacgggggcctattaccccgcgacggtattgtccgacctcaaacccggtatgccggcgtttgacgatgaaatcttcgggcccgtcgcgtcgatcatccgtgcgaaggatgacgacgatgcgatgcgtctggcgaatgacagtcgctacggtctgggcggcgggatattctcgaaggacgaggaccgcgccttgaagctcgcgagagagcatttcgacacaggcatgatccgcatcaactccttcggggctgccgatccgaatatgccctttggcggggtgaaagattccggctatgggcgtgagcatggcggattcggcatgaaggaattcgccaatgccaaggcgattttcctgccctaa

SEQ ID NO: 87083 - protein, 458 aa, Sulfitobacter sp. EE-36
MSKITTINPATEEEIQSYDLMSEAEAIQRVEACHDAHLEWRKLSHKERAPYLTKIAAKLRENADELAALMTRETGKLLKDGKTEVEICAAIFEYTAKNGPDVLADEERTHGADGKRGVVTYQPIGVIYSIQPWNFPLYQPTRVLAANLMTGNGCVLKHASICTGSGLRLRELCIEAGLPEDLFQVILIDHDTSDKLIEHPKVRGVTMTGSDGAGRHIGSVAAKSLKKTVLELGSNDAYLVLEDADIETAVKFSVMGRLYNNGETCVSAKRFIVADKVHDAFVDAFVAEMKKINMGDPTDENVQLGPLSSQDQFETVRDQVKESVDKGAKVLCGGEVPDRTGAYYPATVLSDLKPGMPAFDDEIFGPVASIIRAKDDDDAMRLANDSRYGLGGGIFSKDEDRALKLAREHFDTGMIRINSFGAADPNMPFGGVKDSGYGREHGGFGMKEFANAKAIFLP

SEQ ID NO: 87084 - DNA, 1374 bp, Oceanicola batsensis HTCC2597
  CDS (1)..(1374): transl_table=11
atgagcaaccggatcacgacgatcaaccccgcgaccgaagccgaagtcgcgacttacgaccggatgaccgacgatcaggtgaccgaggcgatcgaggcctgtcacgccgcattcgagacatggaagctggtgtcgctggaggatcgtgcagaaaagatcaaggcgttcggccaggtgctgcgtgacaacaaggaagactttgccgagctcatgacgcgcgaggtaggcaagctgatcggagacggtcgggacgagatcgacctgtgcgccgcgatctgcgatttcacggcagcaaacgggcccaaggaactggcggatgaagagcgtgagatacccggcggcaccggcgtcatcacctatgcccccgtgggcgtcatctacggcatccagccgtggaattttccctgctatcaggtggtgcggtacgcggtggccaacctcatggccgggaacggcatcctgctgaaacacgcggaactgtgcaccggcagcggtctctacctgcgcgatcttttcgaaaaggcgggactgcccaagaacctcttcaccacgttgctgatcgaccatgaccagtcggacaaggtgatcgccaacgaccacgtgcgcggcgtcaccctgacggggagcgacagcgccggccgggtggtggccggagaggcggcgaaggtgctgaagaagaccgttctcgaactcggctcgaacgacgcctatgtggtgctggacgacgccgatctcgatctggcggtggaaagctgcgtccagggccgcctctacaatgcgggccagacttgtgtggcggccaagcggttcatcgtgaccgaggccaattacgacgccttcgtcgaacggttcacggaacacatgaaggcgatggaacccggcgatccgaccgacagctcgacaaagctggggccgatggcgtcgatccagttgcgggacgaccttgccaagcaggtcgaagacagcgtggccaagggcgcgcgcgtgctctgcggcggcgaggtgccggatcgcaagggcgcctactatccggcgaccgtgctcgtcgatgtcgcgcccggccagccggcctatgacgacgaactgttcggccccgtcgcctcggtcatcaaggccggcgatgacgaggacgcgatgcggatcgccaacgacagccgctatggtctgggcggcgggatcttctcgaagaacgagaagcgcgcgcgcgaactggcgtcgcgtcatttcgataccggcatggtctgcatcaacacgtacaacctggcgataccgaacatgcctttcggaggcgtcaagaattcgggctatggccgcgagcatggcggattcggcatgaaagagttcgtgaacgcgaaatcgctgtacatggcctga

SEQ ID NO: 87085 - protein, 457 aa, Oceanicola batsensis HTCC2597
MSNRITTINPATEAEVATYDRMTDDQVTEAIEACHAAFETWKLVSLEDRAEKIKAFGQVLRDNKEDFAELMTREVGKLIGDGRDEIDLCAAICDFTAANGPKELADEEREIPGGTGVITYAPVGVIYGIQPWNFPCYQVVRYAVANLMAGNGILLKHAELCTGSGLYLRDLFEKAGLPKNLFTTLLIDHDQSDKVIANDHVRGVTLTGSDSAGRVVAGEAAKVLKKTVLELGSNDAYVVLDDADLDLAVESCVQGRLYNAGQTCVAAKRFIVTEANYDAFVERFTEHMKAMEPGDPTDSSTKLGPMASIQLRDDLAKQVEDSVAKGARVLCGGEVPDRKGAYYPATVLVDVAPGQPAYDDELFGPVASVIKAGDDEDAMRIANDSRYGLGGGIFSKNEKRARELASRHFDTGMVCINTYNLAIPNMPFGGVKNSGYGREHGGFGMKEFVNAKSLYMA

SEQ ID NO: 87086 - DNA, 1380 bp, Erythrobacter sp. NAP1
  CDS (1)..(1380): transl_table=11
atgagcagtatcaagacgaccaaccccgccactggcgaaaccctcgaagaataccagcaaatgtcgcgcgaagaggcctgtgcgaaagtcgatgcgtgccatgaggcgttcgaaagctggaaactgaaaagcctcgaagagcgcgccgaagtgctgcgcggcctgggtcaggcgctgcgcgacaacaaggaagaactcgcgcagttgatgaccgacgaagtcggcaagctgatcggcgacagccgcgatgaagtcgaactgtgcgcctcgatctgcgactacaccgcagagaacggcccgagcgaactcgccgacgaacagcgcgacccgagcaatgcaggccgcgggatcgtcacctattcgcccatcggcgtcgtctacggcatccagccgtggaacttcccggcctatcaggtcatccgctacgcgatcgccaacctgatgaccggcaacggcgtgctgctgaagcacgcatcgaactgcaccggcagtgggctcaagatcgcagagattttcgagaagggcggccttccggcagacctcttcaccgtgcttgtcatcgaccacgacacttcggacgcgatcatcgcacacgacaaggtgcgcggcgtcacgctcaccggatcggacggcggcggaaagcacgtcgcagaggaagcgggcaaggtcctgaagccgctcgtgttggagctgggttcgaacgatgcctatctcgtccttgaagacgccgacatcgacaaggcagccgaagtgtgcgcccgcgcgcgtctttacaacaacggccagacctgcatcaacggcaagcgcttcatcgtcaccgacgccgtatatgacgagttcgtcgacaaattcgtcgcgaagttcgaagctatcaagatcggcgaccccaattccgacgacagcgacatgggaccgatggctcgcaccgaccttcgcgaagacgtgcagggacaggtcgacaagtcggtcgaaaacggcgcgacaatcgcctgtggcggcaagatccccgatggccccggtgcgtattaccccgcaaccgtcctcaccgatgtcgcccccggccagcctgcctatgatgacgagatcttcggacccgtcgcaagcgtgatccgcgccaaggatgatgaagacgcgatgcgccttgccaatgacagccgctacggccttggcggaggcatcttgtcaggcgacaccgaccgcgcaatcgagatggcgaagaagcatttcgacaccggcatgatcttcatcaacacctatggcgtcgcagacccatcaatgcccttcggcggggtgaagaactcaggctatggccgcgaacatggcggcttcggcgtcaaggagtttgccaacgccaagtcgatcttcgtcggcgcagaataa

SEQ ID NO: 87087 - protein, 459 aa, Erythrobacter sp. NAP1
MSSIKTTNPATGETLEEYQQMSREEACAKVDACHEAFESWKLKSLEERAEVLRGLGQALRDNKEELAQLMTDEVGKLIGDSRDEVELCASICDYTAENGPSELADEQRDPSNAGRGIVTYSPIGVVYGIQPWNFPAYQVIRYAIANLMTGNGVLLKHASNCTGSGLKIAEIFEKGGLPADLFTVLVIDHDTSDAIIAHDKVRGVTLTGSDGGGKHVAEEAGKVLKPLVLELGSNDAYLVLEDADIDKAAEVCARARLYNNGQTCINGKRFIVTDAVYDEFVDKFVAKFEAIKIGDPNSDDSDMGPMARTDLREDVQGQVDKSVENGATIACGGKIPDGPGAYYPATVLTDVAPGQPAYDDEIFGPVASVIRAKDDEDAMRLANDSRYGLGGGILSGDTDRAIEMAKKHFDTGMIFINTYGVADPSMPFGGVKNSGYGREHGGFGVKEFANAKSIFVGAE

SEQ ID NO: 87088 - DNA, 1458 bp, Oceanospirillum sp. MED92
  CDS (1)..(1458): transl_table=11
atgaaactacagttaaatgattccagtctgttacagacacaagcgtttattaacggtgaatgggtgaatggtgatgccggtgagacattcccagtatctaacccagcaacaggcgaagtgattgccgaagtagccagtgttggtgcagaagaaactgcgcgcactatcgatctggctgaagccgcaatgagcgcatggaagaaactggcgccggctgagcgttctggcatcctggagcgttggtatgatttgatcattgaaaatactgatgatctggcagcgatcatgactttagagcagggtaagccgctgtttgaagcgaaaggcgaagtgatgtacggcgcgtcttatctgaaatggtttgctgaagaaggtaagcgcatttatggtgatgttctgccttctccaggtgatcgccgtagcatcgttatcaagcagcctgtgggtgtagttgcagcgattacgccttggaacttcccaaatgcaatgatcactcgtaaggctgcgcctgcactcgcagccggttgttcaattcttcttaagccagcagcggaaactcctctatctgcattggcgttggcagaattgtctaagcgcgctggtgtgccagcgggtctgttcaatgtactgccgactaagtcctcttcgactgtgggtggtgaaatgacctcaaacactaaagttaagaagctgactttcaccggttctacaccgatcggcaagctgctgatcaagcagtgcgcggataccgttaagcgtacctctatggagctgggtggtaatgcgccagttattgtatttgatgatgctgatctggatctggcggtaaaaggtgcgctggcatcaaagtaccgtaactctgggcagacatgtatctgtgcaaaccgtctactggttcaggaaggcatttacgaccagtttgttgagaagtttgctgctgcagttaaagaattcaaactgggccacggttttgatgaagaagcgacgcatggtcctgtggtatctaagaaagcgttgtctgatatcgatgcgatcgttcagaatgcagtagagcagggagcgaatgttgtcgctggtggtaagccatctgagctgggcaactgcttctatgagccgactattctgacagatgtgaatgacaaaatgagcatctttggtgaagagatctttggcccggttgcgcctgtcttcaagttcagtactgaagaggaagcaatcgcaatggcaaatgataccgaatttggcctggcttcctacgtatttactcagaatcttggccgtatctggcgcgtatctgaagggatcgagtacggtatggttggggttaatgaaacagcaattagctcagaagtgatcccatttggcggtgtgaaagagtctggtcagggccgtgaaggttctaagtacggcttggaagattacctggaaacgaagtacatctgtatgggcgggttataa

SEQ ID NO: 87089 - protein, 485 aa, Oceanospirillum sp. MED92
MKLQLNDSSLLQTQAFINGEWVNGDAGETFPVSNPATGEVIAEVASVGAEETARTIDLAEAAMSAWKKLAPAERSGILERWYDLIIENTDDLAAIMTLEQGKPLFEAKGEVMYGASYLKWFAEEGKRIYGDVLPSPGDRRSIVIKQPVGVVAAITPWNFPNAMITRKAAPALAAGCSILLKPAAETPLSALALAELSKRAGVPAGLFNVLPTKSSSTVGGEMTSNTKVKKLTFTGSTPIGKLLIKQCADTVKRTSMELGGNAPVIVFDDADLDLAVKGALASKYRNSGQTCICANRLLVQEGIYDQFVEKFAAAVKEFKLGHGFDEEATHGPVVSKKALSDIDAIVQNAVEQGANVVAGGKPSELGNCFYEPTILTDVNDKMSIFGEEIFGPVAPVFKFSTEEEAIAMANDTEFGLASYVFTQNLGRIWRVSEGIEYGMVGVNETAISSEVIPFGGVKESGQGREGSKYGLEDYLETKYICMGGL

SEQ ID NO: 87090 - DNA, 1353 bp, Flavobacteria bacterium BBFL7
  CDS (1)..(1353): transl_table=11
gtgatacaaacgatcaatccttataacggtaaagagctagagaaatatcaagaagataattcaaaagcaatagaggaaaaactcaataaagcacaggaacagtttgtgcaatggcgattaactagctatgaacacaggtctgaacttattttaaaagttgccgaattattgcggaaaaataccgatcaatatgctttaaaaatgactcgcgaaatggggaagcctattacacaatcgcgcagtgagcttgaaaaatgtgcatggctatgtgagtattatgccgctaatgcagaaagtcatcttaaaaacgaatatgttaatacagatcatttaaaatcctatgtggcttatgaaccactaggcgttgtactagctgttatgccttggaactatccattttggcaagtgatgcgttttattgttcccgcgttaatggctggtaatgtaggtgttcttaaacatgcgagtagtgtaatgggtagtgctgtactgatggaagatatttttatcgaagctggatttcctaaaggttgttttacaaatctagtagtaggtagtaaagcggtagaaaatatcatcaaaaacccaattgttaaagcagtaaccttaacaggttcaaagccagcaggtagtgctgtagctagtactgcaggaagtgagattaagaaaaccgtactagaattaggtggtaataatgccttagtggtgtttaaagatgcagatatcgaacaatctgtcgagacctgtgtggctgcacgctatcaaaatactggacaaagttgtatagcaggtaagaggcttttattgcatgaagatattgcagatgtgtttatggaaaaattcaaaactgctgtaaaagatttaaaagtaggtaatcctgaaaatgatgaaacctacataggagtgatgtctagagaagacctggcagaagagctagaagatcttatgaataagtctatagaaatgggtgcaacgcttgaactaggaggaaagcgagataaagcattttttgagcctactattttaactggtgtgaccaaagatatgcctgtttttaaggaagaaacatttggtcctttaatggcggtaacaacatttaaaaatgacgatgaggctgttgaattggtaaatgattctgaatttggtctaggagtatctctatttacactagatctagaaaaagcagaaaaactcgtctctaggtttgatgatggtgccgtatttgtaaatgctaaggttgcgagccatccagcattaccatttggtggaacaggaatttcaggttatggtagagagttatcgcattttgggattagagagttttgtaatattaaaactgtagtgattgattag

SEQ ID NO: 87091 - protein, 450 aa, Flavobacteria bacterium BBFL7
MIQTINPYNGKELEKYQEDNSKAIEEKLNKAQEQFVQWRLTSYEHRSELILKVAELLRKNTDQYALKMTREMGKPITQSRSELEKCAWLCEYYAANAESHLKNEYVNTDHLKSYVAYEPLGVVLAVMPWNYPFWQVMRFIVPALMAGNVGVLKHASSVMGSAVLMEDIFIEAGFPKGCFTNLVVGSKAVENIIKNPIVKAVTLTGSKPAGSAVASTAGSEIKKTVLELGGNNALVVFKDADIEQSVETCVAARYQNTGQSCIAGKRLLLHEDIADVFMEKFKTAVKDLKVGNPENDETYIGVMSREDLAEELEDLMNKSIEMGATLELGGKRDKAFFEPTILTGVTKDMPVFKEETFGPLMAVTTFKNDDEAVELVNDSEFGLGVSLFTLDLEKAEKLVSRFDDGAVFVNAKVASHPALPFGGTGISGYGRELSHFGIREFCNIKTVVID

SEQ ID NO: 87092 - DNA, 1362 bp, Oceanobacter sp. RED65
  CDS (1)..(1362): transl_table=11
atgttaattgcgaccaatccctacacagagagcaaaattgcagaatacccttcattgaaaggttcgcaaattcatgagcacatccagcttgcccatgatgcatttcctgcctggcgagaccagcctttcagtgagcgcgcaaaaatactcaaagacattgccgcagaacttagaaaacaaaaagatcatcttgcattgttaatggccgatgaaatgggtaagccaattaaagagggtgggccagaagtagaaaaagcggcgacctgcttcgagcattatgcggataaaggtgaaagttatttagacacggagtatctcgaatccgatgccagtgagagctatgtaagttacgaaccattgggtgctctactgggtattttgccatggaatgcgccgttgtggttggcagcacgatatttggcaccggcgctcatggcgggcaatacctgcacattaaaacatgatcctcatgtgcctggctgtgcgcaagccattatcgacgtgatcagtggcgcaggtgctccggaaaacattgtggtgaatctaccgttggagacaccagacgtagaagcggcgattcgtgatccccacataatggcggtatcttttactggttctgccggcggtggtgcaaaggtggcgtccatggcagcgtcggaaatcaagcattcagtattggagttgggtggttcagatccattcattgtgatgtcagatgcggatttagaaaaagctatggatgtagcgaccttgtctcgcattattaacgctggtcagtcatgtatcgctgccaaacgtattctggtagaaaaatcggtctacgagcaatttgtagaaggtgtaaaaagccgattggaaaaattaaagatgggtgatcctactgacattaatacggacataggtcccattgcacgcaaagacttacaagagaatcttcatcgccaagttcaggagtctattaaacaaggtgcgacttgtttgttaggtggtgagatgccaaaagataaaggctatttctatccacccacattgcttaccgacgttaagccaggtacgtgcgcctttttagaagaaacctttggtccagtaatggccataacgcccgtagcggatattgaagaagcaataaccttggctaacgatactgagtatgggttgggagcggcgctttggatgaaagatcaagccaaagctaagctgattgctaagcgcttgtatacgggacaggtttccattaatggcatagtgaaaaccgatccgcgcttgcccagtggcggtgttaagcgttcgggttttggtcgcgagctagggcctcatggtataaaagagtttgttaatgctaagcaagtatgggttaagtag

SEQ ID NO: 87093 - protein, 453 aa, Oceanobacter sp. RED65
MLIATNPYTESKIAEYPSLKGSQIHEHIQLAHDAFPAWRDQPFSERAKILKDIAAELRKQKDHLALLMADEMGKPIKEGGPEVEKAATCFEHYADKGESYLDTEYLESDASESYVSYEPLGALLGILPWNAPLWLAARYLAPALMAGNTCTLKHDPHVPGCAQAIIDVISGAGAPENIVVNLPLETPDVEAAIRDPHIMAVSFTGSAGGGAKVASMAASEIKHSVLELGGSDPFIVMSDADLEKAMDVATLSRIINAGQSCIAAKRILVEKSVYEQFVEGVKSRLEKLKMGDPTDINTDIGPIARKDLQENLHRQVQESIKQGATCLLGGEMPKDKGYFYPPTLLTDVKPGTCAFLEETFGPVMAITPVADIEEAITLANDTEYGLGAALWMKDQAKAKLIAKRLYTGQVSINGIVKTDPRLPSGGVKRSGFGRELGPHGIKEFVNAKQVWVK

SEQ ID NO: 87094 - DNA, 1380 bp, Alteromonadales bacterium TW-7
  CDS (1)..(1380): transl_table=11
atgagcaatacagttaaaacgattaatccggcaactgagcaaaccatcgatacctacacgctactttctcaacatgaggctgagcaagtaatcgaaaaatctcacaaaacatatttaaagtggcgtttaacgtcatttagcgaacgcgcaaaacatttaaatgccctcgcaacactttttgaagaacaaaaagaagccattgctaaattaatgaccgaagaaatgggtaaagtttacgagcaaggctttcaagaagttgaactatgtgccggaatttgtcgttatacagctgaaaacggcccacaagttttagcggacgaagaacgagacatggacggtggccgcgccattattagttaccaacctacgggcgttttattaggcattcaaccttggaacttcccgctttatcaagttattcgctacagcgtagctaacattatggccggtaacacgaccgtacttaagcacgcaggtaacgtttttggcatggctgaaaaaatcgaagccctatttaaacaagccggtttcccggagcattgctttagcaatttacttattgatggtaaaacagcaagcagcctaattgcccacaaagcaattagtggtgtaacctttacaggcagtgatggtacgggtaaaaaagtagccgaagaagccggtaaacacgttaaaaaaacagtactggagcttggcagtaacgatgcttacttagtactggatgatgccgatttagaacttgccgttaaaacctgtgtaacaggacgtatgatcaacaacggtgaaacctgtgtatcagcaaaacgttttgttgtagttgagtcactttacgatgactttaaagcacaaattaaagaacaatttgaagcgttaaaaatgggcgaccccatggccgatgacacagaccttggcccaatggcacgtgaagatttacgcgacggtattcatgaccaagtcatgcaatcggttaaagcaggtgcaaatattgtaacgggtggtgaaattccatcgcaaacgggttactactacccgcctacaattctcgataacttatcgccgggtatgcccgcatacgacgacgaattatttggccctgtcgcttcacttattaaagcaaaagacaacgacgatgctatgcgcattgccaacgactctcgctatggtttaggcggtggtattttttcaaaggatgagaaaaaagccatcgaactggctaaaaaccactttgataccggtatgatcaacattaacggttacggccttgcacagcctaatctaccgtttggtggtgttaaagaaagtggctacggccgagagcatggtggctttggtatgcgcgaatttgtgaatattaaaagcattatgattgccaacgcataa

SEQ ID NO: 87095 - protein, 459 aa, Alteromonadales bacterium TW-7
MSNTVKTINPATEQTIDTYTLLSQHEAEQVIEKSHKTYLKWRLTSFSERAKHLNALATLFEEQKEAIAKLMTEEMGKVYEQGFQEVELCAGICRYTAENGPQVLADEERDMDGGRAIISYQPTGVLLGIQPWNFPLYQVIRYSVANIMAGNTTVLKHAGNVFGMAEKIEALFKQAGFPEHCFSNLLIDGKTASSLIAHKAISGVTFTGSDGTGKKVAEEAGKHVKKTVLELGSNDAYLVLDDADLELAVKTCVTGRMINNGETCVSAKRFVVVESLYDDFKAQIKEQFEALKMGDPMADDTDLGPMAREDLRDGIHDQVMQSVKAGANIVTGGEIPSQTGYYYPPTILDNLSPGMPAYDDELFGPVASLIKAKDNDDAMRIANDSRYGLGGGIFSKDEKKAIELAKNHFDTGMININGYGLAQPNLPFGGVKESGYGREHGGFGMREFVNIKSIMIANA

SEQ ID NO: 87096 - DNA, 1500 bp, marine gamma proteobacterium HTCC2143
  CDS (1)..(1500): transl_table=11
atgctatttttaccggataaatttttggagaagagaatgtcgttattactgaaagacccttccttgctggcaacaggggcttatatcaacggtgaatggatacaggccgacagcggtgaaacacttgcagtgactaacccttctacgggtgagatcatcgctgaggttgcaaagtgcggtgctgcagaaactcgtcgcgccattgaggccgcctaccgagtgcaaaagcagtggaaactgaccacggcgaaagagcgcgctgcgctgctgcgaggttggttcaatttgatcatggacaatcaagatgatttggcagagattttgaccgcggagcaaggcaaaccactgcaggaagcaaaaggtgaaattgcctacggtgcaaattatattgaatggtttgccgaagaggcaaagcgtatttatggcgacactattccacaaccaagcaacgacaaacggttgattgtgattaaacaaccgattggtgtggtgggtgcaataaccccttggaactttccctgtgcgatgttaacgcggaagatagcgccagcgctcgcagcgggttgtaccgtggtatgcaagccggcaaatgcaacaccgctgtctgcttatgcgctggctgttttggcggagcgtgcgggtatccctgccggggtgatacatgttatcactggcaaaaccgctgaaattggcagtgaaattaccggtagtgagctcattcgaaaggtgacctttaccggctctacgccagtgggtaaacagttgatgaaggagtgtgctgacaccgttaaacgcacgtcgatggagttgggtggcaacgccccgttcattgtttttgacgatgcagatattgatgaggctgtagcaggcgcaatggcttcaaagtatcgtaatgccggtcaaacctgtgtttgttcaaatcggctgctggtacaagatgcggtgtatgacgagtttgccaaaaaattactggcggccgtgaatgcgttagtgcttggagacggcaccggcgaaggcgtgactgttggcccgttgatcgatcagaaagcggcacgggacgtctgtgaaatgattgatgacgccgtagcatccggcgcagaggtgatggtcggtggtggcgcctccagcttaggtggtagttttgtcgagccgacaattttaaccaatgtaagccgagatatgcgggtttttaaagaggaaatatttgggccggtggcaccgctgattcgattcagcagtgaggaagaagcgcttgagctggcaaatgatactgaagtcggcctggcgtcttacatttatacgcgggacatcggccgaatttggcgagtttctgaggggcttgaatacggaattgttggtgtcaacgaagggattatttctaatgaaatggcgccctttggcggcgttaaagaatctggaaatggccgcgagggttctaagtatggacttgaggattaccttgaaattaaatacctgtgtctcggtggtattgatcggtaa

SEQ ID NO: 87097 - protein, 499 aa, marine gamma proteobacterium HTCC2143
MLFLPDKFLEKRMSLLLKDPSLLATGAYINGEWIQADSGETLAVTNPSTGEIIAEVAKCGAAETRRAIEAAYRVQKQWKLTTAKERAALLRGWFNLIMDNQDDLAEILTAEQGKPLQEAKGEIAYGANYIEWFAEEAKRIYGDTIPQPSNDKRLIVIKQPIGVVGAITPWNFPCAMLTRKIAPALAAGCTVVCKPANATPLSAYALAVLAERAGIPAGVIHVITGKTAEIGSEITGSELIRKVTFTGSTPVGKQLMKECADTVKRTSMELGGNAPFIVFDDADIDEAVAGAMASKYRNAGQTCVCSNRLLVQDAVYDEFAKKLLAAVNALVLGDGTGEGVTVGPLIDQKAARDVCEMIDDAVASGAEVMVGGGASSLGGSFVEPTILTNVSRDMRVFKEEIFGPVAPLIRFSSEEEALELANDTEVGLASYIYTRDIGRIWRVSEGLEYGIVGVNEGIISNEMAPFGGVKESGNGREGSKYGLEDYLEIKYLCLGGIDR

SEQ ID NO: 87098 - DNA, 1464 bp, marine gamma proteobacterium HTCC2080
  CDS (1)..(1464): transl_table=11
atgaatatagaactgaccaacccaacgcttttcagaaccgaggctttcgtcaatggcgagtggattggagctgataatggcgcccggcttcctgtgaccaacccggcgacaggagcgctgattactgatgtcgctaaaaccggcgcagctgagaccagacgcgccattgcggctgctgaaactgccatgttgagctggcgccagcagcccgccaagcaacgcgctcaagttatgcgccgctggtttgatttgattatggcaaatcaagaggacctagctcgcatcatgacgctagagcaaggcaaaaccttagccgagtctaggggcgaggtcgcctacggtgcctcttacattgagtggtttgcggaacaagccaagcgcatagacggagatgttattcccgcccctagcggcgacaaaagaattatctgtattaagcaacctgttggtgtgtgtgccgctatcacaccttggaattttcccaacgctatgattactcgaaaagccgcaccagctctcgctgccggctgtactattgtaattaagcccgcgagtgaaacgcccctctccgcactggcacttgccgagctagctcatcaggcgggcattccccccggcgtgttaaatgttttggcaggcagttcttcagacatcggcgcagaactcaccagcaatccaaccgtgcgcaagctgtcgttcaccgggtctacacccattggaaaaatgctggaagctcagtgcgtgccaaccctgaaaaaaacttctatggagttgggaggcaatgcacccttcatagtctttgatgatgctgacatcgatagtgctgtacagggcgcattaatttctaagtaccgtaacagcggccaaacctgcgtctgctcaaatcgtctgttagtgcaggccggcattgccgaagagttcactgccaaactggtcgcggccacggagtcgcttaagctaggaaacggtcttgatgaaaacgtcgatctaggacctcttgttaatgcgaaagccgttaacgatgtgcatgagttagtgcaaggatcgatcagcgctggtgccaagctcgtcctgggaggcgcacccagcaatttaggcggctgcttttaccagcccacgattcttacgggagttcgccctgagatgccggtctttcgcaatgagatttttggtcctgtcgcacccatcataagcttcgaaacagaagcagaagccattgagctcgcgaacgacaccgagttcggacttgccagttacttttacactcgggatattggacgagtctggcgagtcgctgaagctctcgaatacggtattgtcggcattaatgagggcatcatctctaatgaaatggcaccttttggtggcgtaaaagagtctgggtcaggtcgcgagggctctaaatacggtatcgatgactatctggaaatcaaatatatgttgatgggcggattaaaccagtaa

SEQ ID NO: 87099 - protein, 487 aa, marine gamma proteobacterium HTCC2080
MNIELTNPTLFRTEAFVNGEWIGADNGARLPVTNPATGALITDVAKTGAAETRRAIAAAETAMLSWRQQPAKQRAQVMRRWFDLIMANQEDLARIMTLEQGKTLAESRGEVAYGASYIEWFAEQAKRIDGDVIPAPSGDKRIICIKQPVGVCAAITPWNFPNAMITRKAAPALAAGCTIVIKPASETPLSALALAELAHQAGIPPGVLNVLAGSSSDIGAELTSNPTVRKLSFTGSTPIGKMLEAQCVPTLKKTSMELGGNAPFIVFDDADIDSAVQGALISKYRNSGQTCVCSNRLLVQAGIAEEFTAKLVAATESLKLGNGLDENVDLGPLVNAKAVNDVHELVQGSISAGAKLVLGGAPSNLGGCFYQPTILTGVRPEMPVFRNEIFGPVAPIISFETEAEAIELANDTEFGLASYFYTRDIGRVWRVAEALEYGIVGINEGIISNEMAPFGGVKESGSGREGSKYGIDDYLEIKYMLMGGLNQ

SEQ ID NO: 87100 - DNA, 1473 bp, Dermatophagoides farinae; identical to SEQ ID NO: 38017
  CDS (1)..(1473)

SEQ ID NO: 87101 - protein, 490 aa, Dermatophagoides farinae; identical to SEQ ID NO: 38018

SEQ ID NO: 87102 - DNA, 1509 bp, Aspergillus niger; identical to SEQ ID NO: 38019
  CDS (1)..(1509)

SEQ ID NO: 87103 - protein, 502 aa, Aspergillus niger; identical to SEQ ID NO: 38020

SEQ ID NO: 87104 - DNA, 1503 bp, Aspergillus niger
  CDS (1)..(1503)
atggctaccgtcactctcaccggcgtcaaaggccgccaaatccaagtccccaccaccctcttcatcaacaatgaattcaccccggcctccaccaccgagaccctgaccatcgagaacccttccaccggcaccccactcgcaaccgtctcctccgccagcccagcggacgtcgaccgcgccgtgcactgcgccacacaagccctccccgcatggaaagccaccccgggcgccatccgcggcaccctcctgcacaaactcgccgatctgatcgagcgcgacgcggaggacttggcatcccttgaagccctggagggtgggctcctctacaccgacagcatgaacatgagcatgccccaatccatctccacccttcgctactatgccggctgggccgacaagatcgacggcaagacgctgcatctccccgacggcggagtggggtacactttccgcgagccattgggtgtctgtgccgccattgtaccctggaatgcgcctctaatgataacaatctggaaactcgccccggccctcgcaacaggaaactgcctgatcatcaaaccctccgaactaaccccgctgtctgccctaaagctcgccctcttaatccgcgaagcaggcttccccgccggcacagtagccatcctcctcggcgacgggcctaaagctggcaatgctctctcctcgcatcccgatatccgcaaactctcattcacgggctccactgtcgccggccgcgccatcctccacgcctcggcatctagtaacctgaagcaaatctccctcgagctgggaggtaaaggcccctcaatcgtattctcagactgcgatctagccaacgcgttactgtggacgcgcatcgggatcacggcgaataacggacagatctgcgcggcagggtcgaggatctatgtccagcggggcatttacgataagttcctggaagagtatgcgcggttatctcgggaggagaagcccgtgatcggggatgcgttggacgagaagacgacgaaggggccggtgtctagtgcggcgcagctgcagaagatcttggggtatgtggaggaggggaagaagaggggagtgagggtgttgtttgggggggagaggatcggggagaaggggtatttcgtgcagaatacggcgtttgcggatgtcggacagggggagaagatgatgagggaggagatttttgggccggttgcttgcattgcccccttcgacaccgaggaggaagccatcgcgttggccaatgattccgcgcacggactcagctccgctatcttcactaatgatgtgaaccgcgcgcatcgcgtcactgcggggatcgaatccggtcaggttactgtgaacgcatggtcaatgctagcggcgaatgcgccgttcggaggagtgaaagagagtgggttcggacgggatatgggagaagaggcgttggagggatggacgacggttaaggtggttaagtataatattctgcctccggcggcggctaagctgtaa

SEQ ID NO: 87105 - protein, 500 aa, Aspergillus niger
MATVTLTGVKGRQIQVPTTLFINNEFTPASTTETLTIENPSTGTPLATVSSASPADVDRAVHCATQALPAWKATPGAIRGTLLHKLADLIERDAEDLASLEALEGGLLYTDSMNMSMPQSISTLRYYAGWADKIDGKTLHLPDGGVGYTFREPLGVCAAIVPWNAPLMITIWKLAPALATGNCLIIKPSELTPLSALKLALLIREAGFPAGTVAILLGDGPKAGNALSSHPDIRKLSFTGSTVAGRAILHASASSNLKQISLELGGKGPSIVFSDCDLANALLWTRIGITANNGQICAAGSRIYVQRGIYDKFLEEYARLSREEKPVIGDALDEKTTKGPVSSAAQLQKILGYVEEGKKRGVRVLFGGERIGEKGYFVQNTAFADVGQGEKMMREEIFGPVACIAPFDTEEEAIALANDSAHGLSSAIFTNDVNRAHRVTAGIESGQVTVNAWSMLAANAPFGGVKESGFGRDMGEEALEGWTTVKVVKYNILPPAAAKL

SEQ ID NO: 87106 - DNA, 1416 bp, Aspergillus niger
  CDS (1)..(1416)
atgtcggtcccaaacatcaccaccatctcccccatcaccaaccgtcccatcctcaaccgcaccggcgccaacccagaagacatcgtaggcatcgccgaatccgcccaagaagcctaccgttccttctccgaatccaccaccctcaaacaacgccaggacatcgtcacccgcgccctagacaagcttgaaaagagaaaagatgacctcgccagacagatcaccgagcaaatgggccggcccatatcatacaccggtgtcgaagtcgccacggccatcaagcgcagccactacctaaaccgcatcagcgactccgtcctcggcgaagcgggcatcgtccccggagaagaagaacagggcttcaagcgctacatcaagcgcaagcctgtcggcgtcgtcctgatcattttcgcctggaattacccctaccttgttctcgttaacagcttaatccccgccattttggccgggaacgcagtcattctgaaaccgtcgccgcagacaccgaccatcgcagaggaagtcgccaatgcgtttgaagaagcgggccttccagagaacgtgattcaatatgtgcattccgggtccccaaccctactggagagtctcgttcgctcgtcctgtgtcaatcacatttgttttacgggctctgtggagggcgggctagctacgcagaaagcggcctctgatcgcatcgtcaacctcggactggaactaggcggcaaggatcctgcgtatgtgcgcgacgacgtcgatatcccctgggcggcggcggagatcgtcgacggagctatcttcaacagtgggcagagctgctgcgctatcgagcgggtctacgtgcatcagaatatctacgataagttcgtggcggaggttaagaaggtgctgagcaatttcgtggttggggacccgttcgataagaagacgcagatcgggcctgtgatatcgaagcgcgcgaaagaggagatcgaggcgcatattgctgatgccgtggagaagggggcaaaggatgagacgccggcgaatgagacgtttgagaatcctccgtctgaggggaattatgttaagcctacgctgttgacgggggtaacgcatgagatgcgggtcatgacggaagagacgtttgggccggtgattccggttatgaaggtggagggggatgatgaggccgttaagtggatgaatagtagtgagtttgggctgacagctagtgtgtggacgaaggatgttgctgccgcggaggagctggttgagcgggtggaggcggggacggtgtttatcaatcgatcggattatcctagtccggacctggcctggacaggctggaagaattcaggacgcggagtaacgctcagtcggttcgggttcgagcaattcgtcaagctgaagagttaccatatcaaggactatcccaaatag

SEQ ID NO: 87107 - protein, 471 aa, Aspergillus niger
MSVPNITTISPITNRPILNRTGANPEDIVGIAESAQEAYRSFSESTTLKQRQDIVTRALDKLEKRKDDLARQITEQMGRPISYTGVEVATAIKRSHYLNRISDSVLGEAGIVPGEEEQGFKRYIKRKPVGVVLIIFAWNYPYLVLVNSLIPAILAGNAVILKPSPQTPTIAEEVANAFEEAGLPENVIQYVHSGSPTLLESLVRSSCVNHICFTGSVEGGLATQKAASDRIVNLGLELGGKDPAYVRDDVDIPWAAAEIVDGAIFNSGQSCCAIERVYVHQNIYDKFVAEVKKVLSNFVVGDPFDKKTQIGPVISKRAKEEIEAHIADAVEKGAKDETPANETFENPPSEGNYVKPTLLTGVTHEMRVMTEETFGPVIPVMKVEGDDEAVKWMNSSEFGLTASVWTKDVAAAEELVERVEAGTVFINRSDYPSPDLAWTGWKNSGRGVTLSRFGFEQFVKLKSYHIKDYPK

SEQ ID NO: 87108 - DNA, 1452 bp, Aspergillus niger
  CDS (1)..(1452)
atgactgcacctccccgccctccggtgatccctttgatcatcaacggtcaagaggaatgcacgggctctaccttcgacgtcattagcccatacaccaaccagacctgttggacaacagcatcagcctcggctcaagatgcaatccgcgcagttgaggccgcagaggcagctttcccttcctggtcgcaaacaaaacccacagttcggcgtgatatcctgttgaaggcagccgacattttggagagccgcctcgagcagaatgccgaatatatgcgaactgagatgggtgcagatgtgggtgcgtcacagcatttcatcgttccactcgggatccgcatgctgagggatatcgcggggcgcatcacttccatttgtggcagcgtccccgttgtcgaagaggaggggcaaagtgccatgatctacaaggagcctatgggggtgatcctcgggattgtgccctggaatgctccatatgtttttggggtccgttctgcagcctgtgcacttgcggcgggcaacacaactatcctgaaatcctctgagctctctccttgctcgtactgggcacttgcgcgagctttccacgatgcaggtctacctgctggttgtctgaacctggtgtcgtgtcgaccccaggatgcccccgaagtggttaacgctatgattgagcacccagccgtgcgcaagattaacttcacaggcagtacggccgttggcagaaagatcgcgggcgcttgtggccagaacctcaagccatgcttgatggaattgggaggcaagaacagcgccatcgtatgtgcggacgctgatatcaaaacggctgtgaagggagtagttgggggcgcttatctgaactctggccaaatctgcatggcaactgatcgcattcttgttcactcctccattgcacccgtcttcattgaggcgcttaaggaagcactcacctccggcgtggaccctgcgtctcagcctccgactttggtgaacatggcttcaaaagcacgagttaacaagctcgtcaaggatgcattggcaggtggggcgcacttgatccacggatcggtagacgaggagtccgctcagtcagacaatggtgttcggatggcgcctgtgctcctcggcggcgtcaatgaaaagatgaacgcttggcaagaagaggcctttgcctccttggcagcatgcatgattgttgagagcgatgaagaggcaatcaagatcgccaatagtagtggctatggtttgtccgcggccgtcttcaccgaggatctgcgaaagggcctggcgatggcacgcaagatccagtcaggtgctgtccacatcaacagtatgaccattcacgacgaagctgtcctgccgcacggtggagtcaagaacagtggttggggacggttcaatgcatcccagggactggaggaattcttggttaccaagagtgtgacgtggatggattaa

SEQ ID NO: 87109 - protein, 483 aa, Aspergillus niger
MTAPPRPPVIPLIINGQEECTGSTFDVISPYTNQTCWTTASASAQDAIRAVEAAEAAFPSWSQTKPTVRRDILLKAADILESRLEQNAEYMRTEMGADVGASQHFIVPLGIRMLRDIAGRITSICGSVPVVEEEGQSAMIYKEPMGVILGIVPWNAPYVFGVRSAACALAAGNTTILKSSELSPCSYWALARAFHDAGLPAGCLNLVSCRPQDAPEVVNAMIEHPAVRKINFTGSTAVGRKIAGACGQNLKPCLMELGGKNSAIVCADADIKTAVKGVVGGAYLNSGQICMATDRILVHSSIAPVFIEALKEALTSGVDPASQPPTLVNMASKARVNKLVKDALAGGAHLIHGSVDEESAQSDNGVRMAPVLLGGVNEKMNAWQEEAFASLAACMIVESDEEAIKIANSSGYGLSAAVFTEDLRKGLAMARKIQSGAVHINSMTIHDEAVLPHGGVKNSGWGRFNASQGLEEFLVTKSVTWMD

SEQ ID NO: 87110 - DNA, 1503 bp, Amaranthus hypochondriacus
  CDS (1)..(1503)
atggcgatccgtgtaccttcgcgccagctattcattgatggagaatggagggaacccatcaagaaaaatcgcatccctatcatcaatccttctactgaggagatcattggtgttattccggctgctactgctgaagatgtggagcttgcagtcgctgcagctagaagagcgcttaagaggaacaaaggagaagattgggcgtctgcatctggagctcatcgtgctaagtaccttcgggccattgctgctaaaataacagagaaaaaagattattttgcaaaacttgaagccatggattgtgggaaaccactggatgaagcagcatgggacattgatgatgttgctggatgttttgaatattatgccgatcaagcagaagcccttgatgctaaacaaaaggctccaattgcccttcctatggacactttcaaatgccatgtgcttaaacaacccattggtgttgttgggttgatttctccttggaattatccgcttctaatggcaacatggaaagttgctccagctcttgctgctggttgctcagctgtacttaagccgtctgaactggcatccgtaacttgcctagaattggctgaagtgtgcagagaagtgggactgcctcctggcgtattaaatattttaacaggattaggtcctgaagctggtgggccgttagcttgccatcctgatgttgacaaggttgcatttactgggagtacagctactggtagcaaggttatgtcatccgctgctcaattggtcaagcctgttacattagaacttggagggaaaagtcctattgttatctttgaagatgttgacttggataaagctgctgaatggactgcttttggctgtttttggacaaatggtcaaatttgcagtgcaacatcgagattacttgtgcatgaaagcatcgcagctgaatttttggataggcttgtaaaatggtgcaaaaacataaagatctctgacccgtttgaggaaggctgtcgacttggtcctgttgtgagtaagagtcagtatgaaaaagttttgaagttcatttcaacagcaaagagtgagggtgcaactattttgtgtggaggttcccgtcccgagcatttgaagaaagggtattatgttgaaccaacaattataagtgatgtctccacttccatgcaaatatggagggaagaagttttcggcccagtcttatgtgtcaaaacctttggttctgaagatgaagccattgaactggctaatgatactcagtatggtttaggggctgctgtgttatcgaaagatcttgatcggtgtgagagaataacaaaggcattgcaagctggaattgtgtgggttaactgctcacaaccatgcttttgccaagctccatggggaggcacgaagcgtagcggttttggacgtgaactcggggaatggggtatcgagaattacttgaatatcaaacaagtgactgaatatatttccgatgaaccatggggatggtacaagtctccttga

SEQ ID NO: 87111 - protein, 500 aa, Amaranthus hypochondriacus
MAIRVPSRQLFIDGEWREPIKKNRIPIINPSTEEIIGVIPAATAEDVELAVAAARRALKRNKGEDWASASGAHRAKYLRAIAAKITEKKDYFAKLEAMDCGKPLDEAAWDIDDVAGCFEYYADQAEALDAKQKAPIALPMDTFKCHVLKQPIGVVGLISPWNYPLLMATWKVAPALAAGCSAVLKPSELASVTCLELAEVCREVGLPPGVLNILTGLGPEAGGPLACHPDVDKVAFTGSTATGSKVMSSAAQLVKPVTLELGGKSPIVIFEDVDLDKAAEWTAFGCFWTNGQICSATSRLLVHESIAAEFLDRLVKWCKNIKISDPFEEGCRLGPVVSKSQYEKVLKFISTAKSEGATILCGGSRPEHLKKGYYVEPTIISDVSTSMQIWREEVFGPVLCVKTFGSEDEAIELANDTQYGLGAAVLSKDLDRCERITKALQAGIVWVNCSQPCFCQAPWGGTKRSGFGRELGEWGIENYLNIKQVTEYISDEPWGWYKSP

SEQ ID NO: 87112 - DNA, 2071 bp, Nicotiana tabacum; identical to SEQ ID NO: 38023
  CDS (55)..(1683)

SEQ ID NO: 87113 - protein, 542 aa, Nicotiana tabacum; identical to SEQ ID NO: 38024

SEQ ID NO: 87114 - DNA, 1503 bp, Kalidium foliatum
  CDS (1)..(1503)
atggcgttccctataccttctcgtcagctattcattgatggagaatggacagaaccaatcaagaaaaatcgtattcctatcatcaaccctgctactgaagagatcattggtgatattcctgctgccactgctgaggatgtggagcttgcagtggctgcagctagaagagcccttaagaggaataagggggaagattgggcatctgcatctggagctcatcgtgctaagtacttacgtgctatcgctgccaagataatggaaagaaaaggtcaaatttcaaagcttgaagccatggattctgggaaaccactggatgaaacagaatgggacattgacgatgttgctgggtgttttgaatactatgccgagcaagcagaagctcttgatgctaaacaaaaggctccaatttcccttcctatggatacattcaagtgccatgtgctcaggcagccaattggcgttgttggtttgatttctccatggaattatccacttctaatggctacatggaaagttgctccagctcttgctgctagctgtgcaactatacttaaaccttcagaaacggcttctgtgacttgtctagagttggctgatgtgtgcagagaagtgggactgccacctggtgtgctgaatatattgacaggattgggtccagaagctggtgccccattagcatgtcatcctgacgttgataaggttgcatttactgggagtaccgcaacgggtagcaaaattatgtcttctgctgcccaaatggtcaagcctgttacattagaacttggagggaaaagtcctattctcgtgtttgaagatgttgatttggataaagctgctgaatgggctgcttttggctgtttttggacaaatggccagatttgcagtgcaacgtctagattacttgtgcatgaaagcattgcagctgactttttggatagacttctaaaatggtgcaaaaacataaaggtttctgatccatttgaagacggctgcaggcttggtcctgttatcagcaaggcacagtacgagaaagttctgaaattcatttcaacagcaaagagcgagggtgcaactgtcttgtgtgggggatcccgccctgagcatctgaagaaaggatattttattgaaccaacaattattagtgatgtctccacatctatgcaaatatggaaagaggaagttttcggtcctgtcttatgtgttaaaacatttcgttctgatgatgaggccgttgagctagcaaatgactcccagtatggtttaggttctgctgtgctatccaaaaatcttgaaaggtgtgagaaagtgacaaaggagttgcaagctggaattgtttgggttaactgcccacaaccatgcttttgccaagctccatggggaggcagcaagcgtagtggttttggacgcgagcttggagaatggggtctcgagaattacttgaatatcaaacaagtgaccgagtatatctccgatgagccatggggttggtacaagtctccttga

SEQ ID NO: 87115 - protein, 500 aa, Kalidium foliatum
MAFPIPSRQLFIDGEWTEPIKKNRIPIINPATEEIIGDIPAATAEDVELAVAAARRALKRNKGEDWASASGAHRAKYLRAIAAKIMERKGQISKLEAMDSGKPLDETEWDIDDVAGCFEYYAEQAEALDAKQKAPISLPMDTFKCHVLRQPIGVVGLISPWNYPLLMATWKVAPALAASCATILKPSETASVTCLELADVCREVGLPPGVLNILTGLGPEAGAPLACHPDVDKVAFTGSTATGSKIMSSAAQMVKPVTLELGGKSPILVFEDVDLDKAAEWAAFGCFWTNGQICSATSRLLVHESIAADFLDRLLKWCKNIKVSDPFEDGCRLGPVISKAQYEKVLKFISTAKSEGATVLCGGSRPEHLKKGYFIEPTIISDVSTSMQIWKEEVFGPVLCVKTFRSDDEAVELANDSQYGLGSAVLSKNLERCEKVTKELQAGIVWVNCPQPCFCQAPWGGSKRSGFGRELGEWGLENYLNIKQVTEYISDEPWGWYKSP

SEQ ID NO: 87116 - DNA, 1618 bp, Beauveria bassiana
  CDS (1)..(1494)
atgactttgacagtgcagctatctacgcccgctacgggcaaatatgaccagccaattggcctgtttatcaacaacgagtgggttgagggtgtcgataagaaaaagtttgaagtcatcaacccctctaccgaggaggtcatcacctctgtctgcgaagctaccgagaaggatgtcgacctcgccgtcgccgccgcccgcaaggccttcgaaaccacttggaaggaaacgaccccggcggaacgcggcgtgttgatgaacaaactcgccgacattgccgagaagaacaccgacctcctcgccgctgtcgagtctctcgacaatggcaagtccatcaccatggccaagggcgatgttggcgcagtcgtcgcctgcatccgctactatgccggctggtccgacaagatccacggcaaaactgtcgacgtcgcccccgacatgcaccactacgtcacgaaggagcctattggtgtctgcggtcagatcattccctggaacttccctcttctcatgctttcctggaagattggccctgccctggccactggcaacaccatcgtcatgaagactactgagcagactcccctctctgccctcgtctttgcccaatttgtcaaggaagctggcttccctcctggtgttttcaacttgatctctggtttcggcaagaccgccggtgccgccctctccgctcacatggacgtagacaagatcgctttcaccggttccaccctcatcggccgcaccatcctcaaagctgctgcattctccaacctcaagaaggtcactcttgagctcggtggcaagtcccccaacatcgtcttcaatgatgccgatattgagtctgccatctcctgggtcaatttcggcatctactacaaccacggtcagtgctgctgtgctggtactcgcatctttgtccaggagggcatttacgacaagttcctcgaggctttcaaaaagcgcgctgccgccaacactgtcggtgacccctttgacaccaaaactttccagggtcctcaggtcagcaagctccagtacgaccgcatcatgagctacatccagtctggcaaggaagagggtgccactgtcgagatcggtggtgagcgtcacggcgacaagggcttcttcatcaagcccaccatcttctccaacgttcgctccgacatgaagattatgcaggaggagatcttcggccccgtctgctccatctccaagttctccaccgaggaggaggtcatcaagcttggcaacgagaccacctacggtctcgccgctgccgttcacaccaaggatctcaacaccagcattcgtgtcagcaacgccctcaaagctggtaccgtctgggtcaactgctacaaccttttgcacgcctcggttccctttggaggcttcaaagagtctggaatcggtcgtgaattgggtgaagcggccctcgataactatctacagacaaagtcagtcactgtccgtctgggaggcccaatgttcggatagaatcaaatttgtacctataaaaagcccagacaagctcttgggacatcaacacaaaaatttgaatctcgctagcctaataaattgacaacttatccatgaaaaaaaaaaaaaaaaaaaaaaaaaa

SEQ ID NO: 87117 - protein, 497 aa, Beauveria bassiana
MTLTVQLSTPATGKYDQPIGLFINNEWVEGVDKKKFEVINPSTEEVITSVCEATEKDVDLAVAAARKAFETTWKETTPAERGVLMNKLADIAEKNTDLLAAVESLDNGKSITMAKGDVGAVVACIRYYAGWSDKIHGKTVDVAPDMHHYVTKEPIGVCGQIIPWNFPLLMLSWKIGPALATGNTIVMKTTEQTPLSALVFAQFVKEAGFPPGVFNLISGFGKTAGAALSAHMDVDKIAFTGSTLIGRTILKAAAFSNLKKVTLELGGKSPNIVFNDADIESAISWVNFGIYYNHGQCCCAGTRIFVQEGIYDKFLEAFKKRAAANTVGDPFDTKTFQGPQVSKLQYDRIMSYIQSGKEEGATVEIGGERHGDKGFFIKPTIFSNVRSDMKIMQEEIFGPVCSISKFSTEEEVIKLGNETTYGLAAAVHTKDLNTSIRVSNALKAGTVWVNCYNLLHASVPFGGFKESGIGRELGEAALDNYLQTKSVTVRLGGPMFG

SEQ ID NO: 87118 - DNA, 1479 bp, Glossina morsitans morsitans; identical to SEQ ID NO: 38029
  CDS (1)..(1479)

SEQ ID NO: 87119 - protein, 492 aa, Glossina morsitans morsitans; identical to SEQ ID NO: 38030

SEQ ID NO: 87120 - DNA, 1557 bp, Pichia angusta; identical to SEQ ID NO: 38031
  CDS (1)..(1557)

SEQ ID NO: 87121 - protein, 518 aa, Pichia angusta; identical to SEQ ID NO: 38032

SEQ ID NO: 87122 - DNA, 1799 bp, Ophiopogon japonicus
  CDS (64)..(1566)
gccaacgtaagcctatcgttcccatacccgtccagttctacacaatttttataaataccaagaatggcgttcccaattcctgctcgtcaactcttcatcgatggagagtggagagaaccccttttaaaaaatcgcatacccatcatcaacccttctactgaagaaatcatcggtgatattcctgcagcaactgcagaggatgtggaggttgcagtggtggcagctagaaaagcctttaagaggaacaaaggcagagattgggctgcaacttctggtgctcatcgtgctaaatatttgcgtgctattgctgctaagataacagagaaaaaagatcattttgttaaactggaaacccttgattctggaaaaccacgggatgaagcagtgttagatattgatgatgttgctacatgctttgaatactttgccggtcaagcagaagctctggatgctaaacaaaaggctccagtcaccctgcctatggaaagatttaaaagtcatgttctcaggcagcccattggtgttgttggattaatatccccatggaattacccacttctaatggctacatggaaaattgctcccgcacttgctgctggatgcacagctgtacttaaaccatcagaattggcatctgtgacttgtctagaattcggtgaagtgtgtaatgaagtgggacttcctccaggtgtgttaaatattttgacaggattaggtcctgatgctggtgccccaatagtatctcatcctgatattgacaaggtagcatttactgggagtagtgccactggaagcaagattatggcttctgctgcccaactagttaagcctgttactttggagcttggaggtaaaagtcctgttatcatgtccgaagatattgatattgaaacagctgttgaatggactctttttggcgttttctggacaaatggtcaaatctgtagtgcaacatctagactgcttgtgcatgaaagcattgcagctgaatttgttgataggatggtgaagtggacaaaaaacataaaaatttctgatccatttgaagaaggatgccggcttggccccgttattagtaaaggacagtacgacaagattatgaagttcatatcgacagcgaagagtgaaggggcaacaattttgtgtggaggctcccgtcctgagcatttgaagaaagggtattatattgaacccaccattataactgatattaccacatccatgcaaatatggaaagaggaagtgtttggccctgtcatatgtgttaaaacatttaaaactgaagatgaagccattgaattggcaaatgatacagagtatggtttagctggtgccgtgttttctaaagatcttgaaagatgtgagagggtaactaaggctctagaagttggagctgtttgggttaattgctcacaaccatgctttgttcatgctccatggggaggagtcaagcgtagtggatttggacgtgaacttggggaatggggtatcgagaattacttgaatatcaagcaggtgacgagtgatatctctgatgaaccatggggatggtacaagtctccttgatccgatcaaattctactgtcaaatcaaatgctaccctcgggttaggttaccacaatgtaatgttgcacggttttatctgcgtgcagtgaagttatacagcggttagattgtaccctttgctggagctctattggtttcttacgcaattctgataattaaatgaacgttttgctaaaattatttttggaaattcgcgaaattcgctaatatcgcttggagaaaaaaaaaaaaaa

SEQ ID NO: 87123 - protein, 500 aa, Ophiopogon japonicus
MAFPIPARQLFIDGEWREPLLKNRIPIINPSTEEIIGDIPAATAEDVEVAVVAARKAFKRNKGRDWAATSGAHRAKYLRAIAAKITEKKDHFVKLETLDSGKPRDEAVLDIDDVATCFEYFAGQAEALDAKQKAPVTLPMERFKSHVLRQPIGVVGLISPWNYPLLMATWKIAPALAAGCTAVLKPSELASVTCLEFGEVCNEVGLPPGVLNILTGLGPDAGAPIVSHPDIDKVAFTGSSATGSKIMASAAQLVKPVTLELGGKSPVIMSEDIDIETAVEWTLFGVFWTNGQICSATSRLLVHESIAAEFVDRMVKWTKNIKISDPFEEGCRLGPVISKGQYDKIMKFISTAKSEGATILCGGSRPEHLKKGYYIEPTIITDITTSMQIWKEEVFGPVICVKTFKTEDEAIELANDTEYGLAGAVFSKDLERCERVTKALEVGAVWVNCSQPCFVHAPWGGVKRSGFGRELGEWGIENYLNIKQVTSDISDEPWGWYKSP

SEQ ID NO: 87124 - DNA, 1507 bp, Atriplex hortensis
  CDS (4)..(1506)
agaatggcgttcccaattcctgctcgtcaactcttcatcgatggagagtggagagaaccccttttaaaaaatcgcatacccatcatcaacccttctactgaagaaatcatcggtgatattcctgcagcaactgcagaggatgtggaggttgcagtggtggcagctagaaaagcctttaagaggaacaaaggcagagattgggctgcaacttctggtgctcatcgtgctaaatatttgcgtgctattgctgctaagataacagagaaaaaagatcattttgttaaactggaaacccttgattctggaaaaccacgggatgaagcagtgttagatattgatgatgttgctacatgctttgaatactttgccggtcaagcagaagctctggatgctaaacaaaaggctccagtcaccctgcctatggaaagatttaaaagtcatgttctcaggcagcccattggtgttgttggattaatatccccatggaattacccacttctaatggctacatggaaaattgctcccgcacttgctgctggatgcacagctgtacttaaaccatcagaattggcatctgtgacttgtctagaattcggtgaagtgtgtaatgaagtgggacttcctccaggtgtgttaaatattttgacaggattaggtcctgatgctggtgccccaatagtatctcatcctgatattgacaaggtagcatttactgggagtagtgccactggaagcaagattatggcttctgctgcccaactagttaagcctgttactttggagcttggaggtaaaagtcctgttatcatgttcgaagatattgatattgaaacagctgttgaatggactctttttggcgttttctggacaaatggtcaaatctgtagtgcaacatctagactgcttgtgcatgaaagcattgcagctgaatttgttgataggatggtgaagtggacaaaaaacataaaaatttctgatccatttgaagaaggatgccggcttggccccgttattagtaaaggacagtacgacaagattatgaagttcatatcaacagcgaagagtgaaggggcaacaattttgtgtggaggctcccgtcctgagcatttgaagaaagggtattatattgaacccaccattataactgatattaccacatccatgcaaatatggaaagaggaagtgtttggccctgtcatatgtgttaaaacatttaaaactgaagatgaagccattgaattggcaaatgatacagagtatggtttagctggtgccgtgttttctaaagatcttgaaagatgtgagagggtaactaaggctctagaagttggagctgtttgggttaattgctcacaaccatgctttgttcatgctccatggggaggagtcaagcgtagtggatttggacgtgaacttggggaatggggtatcgagaattacttgaatatcaagcaggtgacgagtgatatctctgatgaaccatggggatggtacaagtctccttgaa

SEQ ID NO: 87125 - protein, 500 aa, Atriplex hortensis
MAFPIPARQLFIDGEWREPLLKNRIPIINPSTEEIIGDIPAATAEDVEVAVVAARKAFKRNKGRDWAATSGAHRAKYLRAIAAKITEKKDHFVKLETLDSGKPRDEAVLDIDDVATCFEYFAGQAEALDAKQKAPVTLPMERFKSHVLRQPIGVVGLISPWNYPLLMATWKIAPALAAGCTAVLKPSELASVTCLEFGEVCNEVGLPPGVLNILTGLGPDAGAPIVSHPDIDKVAFTGSSATGSKIMASAAQLVKPVTLELGGKSPVIMFEDIDIETAVEWTLFGVFWTNGQICSATSRLLVHESIAAEFVDRMVKWTKNIKISDPFEEGCRLGPVISKGQYDKIMKFISTAKSEGATILCGGSRPEHLKKGYYIEPTIITDITTSMQIWKEEVFGPVICVKTFKTEDEAIELANDTEYGLAGAVFSKDLERCERVTKALEVGAVWVNCSQPCFVHAPWGGVKRSGFGRELGEWGIENYLNIKQVTSDISDEPWGWYKSP

SEQ ID NO: 87126 - DNA, 1961 bp, Vitis pseudoreticulata
  CDS (291)..(1724)
atcataaagttttggagctcatctctgcatctagccatggcggctaggaggatctcctcgttgctctctcgttctctctctgtctcttctgctttttctctttctctaggcaaaaatttcaacagagggaaaagcatccatcgctttagcactgcagcagcagcagttgaagaactcatcactccaactgttcagataaattacactcaacttctaattaatgggcaatttgtagatgcagcatctggtaatcatttttgtgtgggcaatgtttccatcattaatgaatcatgtatgaaaccgatgtcggtatcattacaggaaaaacattccccacctttgaccctcgcacgggagaagtgattgctaatgttgcagaaggtgatgcagaagatatcaatcgggcagtgtctgctgctcgaaaggcgtttgatgaaggaccatggccaaggatgagcccctatgaaaggtcgcggatattgttgcggtttgctgatttagccgagaaacacaatgatgagcttgcagctctagagacatggaataatgggaagccatatgaacaggctgccaaagctgaattgccactgtttgttcgtctatttcgctattatgcaggttgggcagataaaatccatggtttaacagttcaggctgatggcccacaccatgttcagatattgcacgagccaattggtgttgcgggacagattattccctggaattttcctcttatgatgtttgcttggaaagttggacccgcactagcatgtggtaataccattgtcctaaagacagcagagcaaacacctttgactgctctctttgcggcaaagctatttcatgaggctggtcttcctcccggtgttttaaatatcgtgtccggctatggtccgactgctggtgctgctcttgctagtcatatggatgtggacaagattgctttcacggggtcgactgatactggtaagattgtacaagaattggctgcaaaaagcaatcttaaaccagtaacgctagagcttggaggtaaatcacctttcattgtatgtgaggatgctgacattgatcaagctgtagagctagcacactttgctctgttctttaatcagggacaatgctgctgtgctgggtctcggacatttgttcatgagagtgtatacgatgagtttattgagaaagcaaaggcacgtgctctgagtcgcacggtcggtgatcctttcaagaagggcatcgagcaaggtcctcagatcgacccagagcaatttgcaaaggttctcagatacataaaatctggtgttgaaagcaatgccacccttgaatgtggaggtggaagaattggctcaaaaggctactttgtccaacccactgttttctcaaatgttcaggatgatatgctgattgcaaaggatgagatctttggccctgtacaatccatcttgaaatacaaggaccttgatgaagtgattaggagggcaaattcaacgcgatacggtctagcagcaggggtgttcacaaagaacatcaacactgccaacaccttgacaagagcattgagagtggggactgtatgggtgaattgcttcgatgtgtttgatgctgcaatcccatttggtgggtacaagatgagtggagtaggaagggaaaagggaatctacaacctcaataactacttgcaggtgaaggctgtgattactccactgaggaatccagcttggctgtgagtctgtcccagcgtcgcccattacaaataaagatgatcatagatgcatcactgtaattgcgcccatatcatcagaccccctttgcttgttttcactttgactgcctccagagaatatagcaccaactctatcaaacttcagctctgcctcctgccttgtgttatcaagtggtttgcatatgatatattcttgatgagtgaagtctatttttctgccaaaaaaaaaaaaaaaaaaaaa

SEQ ID NO: 87127 - protein, 477 aa, Vitis pseudoreticulata
MYETDVGIITGKTFPTFDPRTGEVIANVAEGDAEDINRAVSAARKAFDEGPWPRMSPYERSRILLRFADLAEKHNDELAALETWNNGKPYEQAAKAELPLFVRLFRYYAGWADKIHGLTVQADGPHHVQILHEPIGVAGQIIPWNFPLMMFAWKVGPALACGNTIVLKTAEQTPLTALFAAKLFHEAGLPPGVLNIVSGYGPTAGAALASHMDVDKIAFTGSTDTGKIVQELAAKSNLKPVTLELGGKSPFIVCEDADIDQAVELAHFALFFNQGQCCCAGSRTFVHESVYDEFIEKAKARALSRTVGDPFKKGIEQGPQIDPEQFAKVLRYIKSGVESNATLECGGGRIGSKGYFVQPTVFSNVQDDMLIAKDEIFGPVQSILKYKDLDEVIRRANSTRYGLAAGVFTKNINTANTLTRALRVGTVWVNCFDVFDAAIPFGGYKMSGVGREKGIYNLNNYLQVKAVITPLRNPAWL

SEQ ID NO: 87128 - DNA, 1887 bp, Vitis pseudoreticulata; identical to SEQ ID NO: 38033
  CDS (37)..(1650)

SEQ ID NO: 87129 - protein, 537 aa, Vitis pseudoreticulata; identical to SEQ ID NO: 38034

SEQ ID NO: 87130 - DNA, 1506 bp, Monascus anka
  CDS (1)..(1506)
atggccgaagcagcagccagaatcctagaagccctccctgcagtttgcgaatatcgctggtcctgcaaggacgcctccaagcgcttcacagtggtgaaccctgcgacaggagagcccatcactgtcgttcaggccggaaatctcgacacggtgcaaggggccatccaggcgtcgcacagggcgttcgagtcgtggcgatggaagactcgccaggagcggtcactctatctcctgcaggcggccgatgagcttcagaagcacagccatgaattggccgtcctgttgtgccttgagaacgggaaacccgtcaaagacgcgtcctttgatgttgggtttctggtgcaggtgtttcggtacttcggatcaattgtcgacaagctaccgtcggaattcttcgaccagggtagcatctactccagcgtgatctacgagccccatggagtgtgcgtgggcatcctgccgttcaactggccgccggtccacgccgggggcaaactggcgccttgtctggcggcgggcaacaccatggtgctgaagcccggcgagcaggccccgctgacactgatgcgcatcgttgagatcttgcagtccgtcttccccgccgacgtcgtccaggcagttccgggactgggtccggagataccgcaggccctgataaaccatccgcttgtcaagatggtctcgttgacaggatccacggcatcgggctcccaggctgcccaaacggccgcggtgaccctgacccccacggtgctcgagctaggcgggaagaatgccttcgtggtctttgaggacgccgacctggagttggtcgtgcgcgacgccatcgatggcgctttcttcaacaagggcgaatcgtgcaccgccgcatcgcggattctggtgcacaaagatctttacccgacgcttgtcagtcgcctgacggctgccgtgaagaaactgcgaacgggcgacggcctcgacgagacgacacacatcggcccggtggtctcgcgggagcgccagcaggaggtcctgtcgtacatcgagcaaggcaaacgcgagggggcgactctagctgcgcaaggagacccgcccacggcgggccgtctgtcgggagggttcttcgtccctcctacgctgtttaccgacgtgacagcagacatgaccattgcacagagggagatctttgggcccgtcgttaccgtcggttcttttgaaacggaggaggaagccgtgaagaccgtcaactcctcccaatacggactttttgcaggggtatactccagcgacttcacccgcgctatgcgtgtgactcggaaattggacgtgggcgttgtgttggtcaacaactacttccgcgccctcttggggacgccattcggaggcgtcaaggacagtggatatggtagggagcactggattggtaccttgagggaatggagccgggtcaaaaacgttcgcttccccagtggactgagtcctatcccagcttgggggggcgcagtcgatgtatgcaagttgtag

SEQ ID NO: 87131 - protein, 501 aa, Monascus anka
MAEAAARILEALPAVCEYRWSCKDASKRFTVVNPATGEPITVVQAGNLDTVQGAIQASHRAFESWRWKTRQERSLYLLQAADELQKHSHELAVLLCLENGKPVKDASFDVGFLVQVFRYFGSIVDKLPSEFFDQGSIYSSVIYEPHGVCVGILPFNWPPVHAGGKLAPCLAAGNTMVLKPGEQAPLTLMRIVEILQSVFPADVVQAVPGLGPEIPQALINHPLVKMVSLTGSTASGSQAAQTAAVTLTPTVLELGGKNAFVVFEDADLELVVRDAIDGAFFNKGESCTAASRILVHKDLYPTLVSRLTAAVKKLRTGDGLDETTHIGPVVSRERQQEVLSYIEQGKREGATLAAQGDPPTAGRLSGGFFVPPTLFTDVTADMTIAQREIFGPVVTVGSFETEEEAVKTVNSSQYGLFAGVYSSDFTRAMRVTRKLDVGVVLVNNYFRALLGTPFGGVKDSGYGREHWIGTLREWSRVKNVRFPSGLSPIPAWGGAVDVCKL

SEQ ID NO: 87132 - DNA, 2082 bp, Azospirillum brasilense
  CDS (200)..(1645): transl_table=11
cggcggacgtcgcgaaactccgcaaggcgacggcggccgcgcgctgagcgcggctccatgcggaacgagggcgggccggcgtgcccgccgtcaccgccgccgggtgcgtgcctgccccggcggcctggctttttctgtcaaccggcgcgcggccgttcgcggcagcgcgcgtttatcgacgcaatgtaggggtgtctggatggctaacgtgacttatacggatacgcaactgctgatcgacggcgagtgggtcgacgccgcgagcggcaagacgatcgacgtcgtgaacccggcgaccggcaagccgatcggcagggtggcccatgcgggcatcgccgatctcgaccgtgcgctcgccgccgcgcaaagcggcttcgaggcatggcgcaaggtgcccgcgcacgagcgcgcggcgacgatgcgcaaggcggccgcgctggtgcgtgaacgcgccgacgcgatcgcgcagctgatgacgcaggagcagggcaagccgctcaccgaagcgcgcgtcgaagtgctgtcggcggcggacatcatcgaatggttcgcggacgaaggccgccgcgtgtacggccggatcgtgccgccgcgcaacctcggcgcacagcagacggtcgtgaaggagccggtcggcccggtcgccgcgttcacgccgtggaatttcccggtcaaccaggtcgtgcgcaagctgagcgccgcgctggcaaccggctgttcgttcctcgtgaaagcgccggaagaaacccccgcgtcgccggccgcgctgctgcgcgccttcgtcgacgcaggcgtgccggccggcgtgatcggcctcgtgtacggcgatccggccgaaatctcgtcgtacctgatcccgcacccggtgatccgcaaggtcacgttcacgggttcgacgccggtcggcaagcagctcgcctcgctggcgggcctgcacatgaagcgcgcgacgatggagctgggcgggcacgcaccggtgatcgtggccgaagacgccgacgttgcgctcgcggtgaaagcggccggcggcgcgaagttccgcaacgcggggcaggtctgcatctcgccgacgcgcttcctcgtgcacaacagcatccgcgacgaattcacgcgcgcgctggtcaagcatgccgaagggctgaaggtcggcaacggcctcgaggaaggcacgacgctcggcgcgctcgcgaacccgcgccggctgaccgcgatggcgtcggtcatcgacaacgcgcgcaaggtcggtgcgagcatcgaaaccggcggcgagcggatcggctcggaaggcaacttcttcgcgccgaccgtgatcgcgaacgtgccgctcgatgcggacgtgttcaacaacgagccgttcggcccggtcgcggcgattcgcggtttcgacaagctcgaagaggcgatcgcggaagcgaaccgtttgccgttcggtcttgccggctacgcgttcacgcgttcgttcgcgaacgtgcacctgctcacgcagcgcctcgaagtcgggatgctgtggatcaaccagccggcgacgccgtggccggaaatgccgttcggcggcgtgaaggactcgggctacggttcggaaggcggcccggaagcgctcgagccgtacctggtcacgaagtcggtgacggtgatggccgtctgacggtcgtcgttcgatcgcgtgcgcggcgcgtttggcgtcgcgcacgcgatcggcgtgggccgggcagtgcgcccggtctcttgcccgcttctcgctccagccgtgcattcgaacggcaaccccctcggtatttcaatgtgcgtgtcagtgcgggcggattgtttcaattccgtcaccgacaacgactcgcgccgcatcccctcgtgaattcaggccggcgccttccgcgcggtaccgttcagctcacgtgaccggcacgctggcaagtccggactgcacctcgtacccgggcgtcacactttttggtatagcttattcacaagaaaccataccaaccggtgcgtcagcatcgacccaacctgagaggaaacggatgcattcgcgctcggcagcgccgtactacgttgtgctggcggggaccttgatcgcgtgcgcgc

SEQ ID NO: 87133 - protein, 481 aa, Azospirillum brasilense
MANVTYTDTQLLIDGEWVDAASGKTIDVVNPATGKPIGRVAHAGIADLDRALAAAQSGFEAWRKVPAHERAATMRKAAALVRERADAIAQLMTQEQGKPLTEARVEVLSAADIIEWFADEGRRVYGRIVPPRNLGAQQTVVKEPVGPVAAFTPWNFPVNQVVRKLSAALATGCSFLVKAPEETPASPAALLRAFVDAGVPAGVIGLVYGDPAEISSYLIPHPVIRKVTFTGSTPVGKQLASLAGLHMKRATMELGGHAPVIVAEDADVALAVKAAGGAKFRNAGQVCISPTRFLVHNSIRDEFTRALVKHAEGLKVGNGLEEGTTLGALANPRRLTAMASVIDNARKVGASIETGGERIGSEGNFFAPTVIANVPLDADVFNNEPFGPVAAIRGFDKLEEAIAEANRLPFGLAGYAFTRSFANVHLLTQRLEVGMLWINQPATPWPEMPFGGVKDSGYGSEGGPEALEPYLVTKSVTVMAV

SEQ ID NO: 87134 - DNA, 1512 bp, Medicago truncatula
  CDS (1)..(1512)
atggatattccgatcccgtctcgacagttattcattaacggtgactggaaatctcccatccttaacaaacgtattcccgtcatcaatccctccactcaacaaaccatcggggatatcccagcggctactaaggaagatgtagacgccgctgttgccgctgctaaaaccgccctctcccgtaataaaggcgctgattgggcttccgcttctggcgccgttcgtgctcgctatctacgcgctattgctgctaaggttactgagaaaaaatcagaactggctaaacttgaagctattgattctggtaaaccactcgatgaagcggcgtgggatatggacgatgttgctggttgttttgagttttatgctgatcttgctgaaaaattggatgcaaagcaaaaggctccggtgtctcttccaatggatacattcaggagtcatgttcttaaggagcctattggtgttgttggattaataactccatggaactatcctatgttgatggctacgtggaaggttgctcctgctcttgctgctggttgtgctgcgatattgaagccatctgaattggcatctttaacctgcttggagttgggcgaaatatgcaaagaagtgggccttcctccgggtgtattaaatattctcactggattaggccctgaagctggtgctcctttggcatcccatcctgatgttgacaagattgcttttactggaagctctgcaactgggagcaaaattatgacagctgcagctcagctggtcaagcctgtttcactggagcttggtggaaaaagcccgttaattgtttttgaggacgttgaccttgataaggctgcggaatgggcaatcttcggttgcttctggacaaatggtcagatatgcagtgcaacttcccgtcttattgtacatgaaagtatagcaacagaatttttgaataggatggtgaaatggatcaaaaacatcaaaatttcagatcccttggaagaaggttgcaggctaggacctgttgttagtgaaggacagtacgaaaaaatattgaagtttgtctcgaacgctaagagtgagggtgcgacaattttgactggtgggtctcgaccagagcatctaaagaaaggattctttgttgaaccaaccatcataactgatgtgactacttccatgcaaatttggaaagaagaagtatttggacctgttctgtgtgtaaaaacgtttagcaccgaggaagaagctattgatctagcaaatgacactatctatggcttaggtgctgctgtaatatcaaatgatctagaaagatgtgagcgtgtaactaaggcatttaaggccggaatagtatgggtcaattgctctcagccatgcttcactcaagcgccatggggaggcattaaacgtagtggttttggccgtgaactaggagaatggggattggacaattacttgagtgtgaagcaagtgactcagtacatctctgatgaaccatggggctggtaccaacctcctgcaaaactgtga

SEQ ID NO: 87135 - protein, 503 aa, Medicago truncatula
MDIPIPSRQLFINGDWKSPILNKRIPVINPSTQQTIGDIPAATKEDVDAAVAAAKTALSRNKGADWASASGAVRARYLRAIAAKVTEKKSELAKLEAIDSGKPLDEAAWDMDDVAGCFEFYADLAEKLDAKQKAPVSLPMDTFRSHVLKEPIGVVGLITPWNYPMLMATWKVAPALAAGCAAILKPSELASLTCLELGEICKEVGLPPGVLNILTGLGPEAGAPLASHPDVDKIAFTGSSATGSKIMTAAAQLVKPVSLELGGKSPLIVFEDVDLDKAAEWAIFGCFWTNGQICSATSRLIVHESIATEFLNRMVKWIKNIKISDPLEEGCRLGPVVSEGQYEKILKFVSNAKSEGATILTGGSRPEHLKKGFFVEPTIITDVTTSMQIWKEEVFGPVLCVKTFSTEEEAIDLANDTIYGLGAAVISNDLERCERVTKAFKAGIVWVNCSQPCFTQAPWGGIKRSGFGRELGEWGLDNYLSVKQVTQYISDEPWGWYQPPAKL

SEQ ID NO: 87136 - DNA, 1476 bp, Aspergillus oryzae
  CDS (1)..(1476)
atggcgacagagtataaactaccgttcgagctgaacgacccaagtctgctccactttgactccttcgtcggcaacagctgggtccaggcgaagaatcccggaaccgacattccttgggccagctgtccgaccaatagtgccgaggacgttccatcagctgtggaaaccgcgcacgccgcgttcgagcaatacaagaaaagtaacccccgccagcgagcacaatggctcctgaaatgggatacgctcatccgggaagccaagcccgacctcgccaagatcctcacacacgagacgggtaagccgctggccgagtcctacggagaaatcgactacgcgaccggtttcacctggtggttcgccggcgaagctgagcgcatccacggcagcatcagcgtgccctcggcgccaaaccgccgggtcttcacggtcaagcaacccattggcgtggcggccgccttagtgccctggaactttcccatcgcgatggtcctgcgcaaggcgggcgcggcgttcgccgcgggttgtaccatgatcgtgaagccgagccccgagacaccgctgacagcgctggtgttggcgcatctagcgcagaaagcgggtttcccggcgggcgtgtttaatgtgctgacgacggatctggagaatacgccgtcgttgagtgaggcgttgtgtaagcatccgttggtgaagaaggtaactttcacaggctctacgcgggtcgggaaattgattgcttcgcactgtgcgcatggactgaagaagttgacgttggagctgggcgggaactgtccgttcctggtgtttgatgatgctaatctggatcaggcgctggatcagctcatggcgttgaagtggcggcatgctggacaggcgtgcatcacagccaaccgggtgtatgtccaggcgggcatctatgatcgctttgcacagttactcaaggagcgtacgcagaagttggtcgtgggtcatggtgccaaagagggcacgacgatgggccccgtgaccactcctcggagcattgacaaggcactcagccaggtcgaagatgcccgtcgacttggagccgacgtgattctgggagggaataaggtcacggataccaaggggtatttctttgagcccacgatcctgacgggcatgaccaaggacatgttggtgtcccgggaggagacctttgcgcctatcgctgccctctataaatttgaaacggaggaagaggcagtgcagctggccaatgacactagcatgggactggccagttacgcgttcaccaagaatattgatcgcatgtggaggttactagagaacttggatgctggcatgattggcatgaacacgggtaactcctcagccgcggagtctccatttggaggcatcaaggagtccgggtatggtaaggaaagtgggaaggaggttgccgtgaatgagtatctggtgacaaagacgggaactcttacgatcgagggacagtattag

SEQ ID NO: 87137 - protein, 491 aa, Aspergillus oryzae
MATEYKLPFELNDPSLLHFDSFVGNSWVQAKNPGTDIPWASCPTNSAEDVPSAVETAHAAFEQYKKSNPRQRAQWLLKWDTLIREAKPDLAKILTHETGKPLAESYGEIDYATGFTWWFAGEAERIHGSISVPSAPNRRVFTVKQPIGVAAALVPWNFPIAMVLRKAGAAFAAGCTMIVKPSPETPLTALVLAHLAQKAGFPAGVFNVLTTDLENTPSLSEALCKHPLVKKVTFTGSTRVGKLIASHCAHGLKKLTLELGGNCPFLVFDDANLDQALDQLMALKWRHAGQACITANRVYVQAGIYDRFAQLLKERTQKLVVGHGAKEGTTMGPVTTPRSIDKALSQVEDARRLGADVILGGNKVTDTKGYFFEPTILTGMTKDMLVSREETFAPIAALYKFETEEEAVQLANDTSMGLASYAFTKNIDRMWRLLENLDAGMIGMNTGNSSAAESPFGGIKESGYGKESGKEVAVNEYLVTKTGTLTIEGQY

SEQ ID NO: 87138 - DNA, 1488 bp, Aspergillus oryzae
  CDS (1)..(1488)
atggcttcaatcactgtgaccggtgccgctgggcgccagattcaagtcccaacgggcctcttcatccataacgaattcgttccttccacgacatcccagactctgaccgtcgagaatccttccaccggcgaatccctcggaaccatttctgccgcttctcccgaagatgtcaacaaggctgtcgaatccgctacgattggcttcaatgtgtggaagaatacctccggcccggcccgcgcgaagcttctcctgaagctggccgacctaatcgagcgagatgcagacgacttcgcatccctcgaggccgtcgatgccggtgtcctctataccgacagcaagggcatgaacatcccccaggcggtgggcaacctccggtattacgccggttgggctgataagatcgatggaaagacccttgccatggagggcggcgtcgccttcacgtatcgggagccgttgggtgtctgtggagccattgtcccttggaatgcacctttgatgatcactatttggaagctagctccggcgcttgcagccggtaactcgcttatcattaaaccgtccgaactatctccgctctacgcccagaagcttgccctgcttatccaggaagctggtttccctgcgggtgtggtgaacattatttccggtgacggcgcatcggccggcagggctttggcagagcacatgactgtgcggaagatctcgttcacgggatccagcgcgacgggccgccagattctgaagactgcagcttcgactaacctcaagcgggtgaaccttgagctcggcggcaaagggccatcgattgttttcgatgactgtgacttggataatgcggtcttgtggaccaggatcggtattacggccaacaatggacagatctgtgcggctggctcgcggatctatgtgcaaaagactatctacgagaagttcctagaggcatacaagaagatggccgaaggtagtccgtcggtcattggcaacccccttgaccctgccactaccaagggaccgattgtcagcgcggcgcagcataacaagatcctgtcgtatatcgagcagggtaagcaatgtggggcccgactcctcttcggaggtgaaaaggtcggcgacaagggttactttgttgagaacaccgcgtttgccgatgtctctgagaatgcgacaatcatgaaggaggagattttcggacctgtcgcgagcattgcgcctttcgagacggaggctgaggttatcgccaaagcgaacgataccctgcatggccttagcgcggccgttttcaccaacgatattagccgtgctcaccgtgtgacggccgccctcgagtctggccaggttactgtgaacgcctgggcgatgcttagccccaatgcacctttcggaggtgtcaaggagagcgggttcgggcgcgacatgggtgaggaggcgctggagggatggacatctgtcaagagcgtcaactggacccttgattttcttggatag

SEQ ID NO: 87139 - protein, 495 aa, Aspergillus oryzae
MASITVTGAAGRQIQVPTGLFIHNEFVPSTTSQTLTVENPSTGESLGTISAASPEDVNKAVESATIGFNVWKNTSGPARAKLLLKLADLIERDADDFASLEAVDAGVLYTDSKGMNIPQAVGNLRYYAGWADKIDGKTLAMEGGVAFTYREPLGVCGAIVPWNAPLMITIWKLAPALAAGNSLIIKPSELSPLYAQKLALLIQEAGFPAGVVNIISGDGASAGRALAEHMTVRKISFTGSSATGRQILKTAASTNLKRVNLELGGKGPSIVFDDCDLDNAVLWTRIGITANNGQICAAGSRIYVQKTIYEKFLEAYKKMAEGSPSVIGNPLDPATTKGPIVSAAQHNKILSYIEQGKQCGARLLFGGEKVGDKGYFVENTAFADVSENATIMKEEIFGPVASIAPFETEAEVIAKANDTLHGLSAAVFTNDISRAHRVTAALESGQVTVNAWAMLSPNAPFGGVKESGFGRDMGEEALEGWTSVKSVNWTLDFLG

SEQ ID NO: 87140 - DNA, 1509 bp, Aspergillus oryzae; identical to SEQ ID NO: 38035
  CDS (1)..(1509)

SEQ ID NO: 87141 - protein, 502 aa, Aspergillus oryzae; identical to SEQ ID NO: 38036

SEQ ID NO: 87142 - DNA, 1446 bp, Aspergillus oryzae
  CDS (1)..(1446)
atgtctgcaaacggtacggacagcaaaggggtaatcccgctcatcattaacaatgaatcgctcgtgacggaaactgtcttcgatgtgcataaccccgcgacgggtgaagtcattgaccgctgtgccagtgcgtccgttgacgatgtcaaccgtgcggtggaggcggcgaaggcagccttccccgcgtggagcaagacaaagccgtacgatcgcagggatatcctgatgagggcggcagacattatgctttcccgaagggaggagttgatcaagtatcaaatggaggagacaggcgcgggcagaatgttcgtggagaagacattcgagctgggtgcgggattcatcaaggatttcgccgcacggattccgtccatcgagggttcagtcccatcggtgtccgaagagggagagtgtgcgatggtctttaaagagccttatggtgtggtcttgggaattgcaccatggaatgctccctatatacttgggacccgcgccatcgctcttccccttgccgcaggcaatacagcaattttaaagggctctgaactgtcccccaagtgtttctgggctattggcgatatcttccgggaagctggtcttcccgcagggtgtctcaatgtggtttaccaccgaccctctgatgcagcgcctgttaccactgctcttattgcccatccagccgttcgcaaaatcagctttaccggcagcactcaagtaggatcaatcattgcatcaaccgccggcaaatatgtgaagcccgttgtcctcgaactgggcggcaaggcgtcagctattgtattagatgatgccaacctggagagggccgccatgtgttgcagtcttggagcattcatgcattccggtcaaatctgcatgtccaccgagcgcatcatcgtgcagcaatccgtcgcagaccgattccgcaccatgctggcagatgcatccgagaaagtattcgggaaacacacaccggcaccagttcttgtagcatcccctgcagtcaagaaaaataagcagttggtgtccgatgcgctttcgaagggtgccgagcttgtttatggagaacgcaatgactctgaggcgtccggcaatagcctgcggcctgtgatcgtgggcaatgtcaccaaggacatggacctctattctgcagaatcattcggccctaccgtttccctgatggtcgtcgacactgaagaagacgccgtggcgctggctaatgacaccgaatacggcctcacatctgcagttttcacagacaatctcttccggggactacgggtagccaagcagattgaatctggggctgtccacatcaactcccttaccgtgcacgacgaaccggtcttgccacacggtggatggaaaagcagcgggtatggccggttcggaggacccgccgcgtacgatgaatggttgcaaaccaagacagttacctgggtgcagtag

SEQ ID NO: 87143 - protein, 481 aa, Aspergillus oryzae
MSANGTDSKGVIPLIINNESLVTETVFDVHNPATGEVIDRCASASVDDVNRAVEAAKAAFPAWSKTKPYDRRDILMRAADIMLSRREELIKYQMEETGAGRMFVEKTFELGAGFIKDFAARIPSIEGSVPSVSEEGECAMVFKEPYGVVLGIAPWNAPYILGTRAIALPLAAGNTAILKGSELSPKCFWAIGDIFREAGLPAGCLNVVYHRPSDAAPVTTALIAHPAVRKISFTGSTQVGSIIASTAGKYVKPVVLELGGKASAIVLDDANLERAAMCCSLGAFMHSGQICMSTERIIVQQSVADRFRTMLADASEKVFGKHTPAPVLVASPAVKKNKQLVSDALSKGAELVYGERNDSEASGNSLRPVIVGNVTKDMDLYSAESFGPTVSLMVVDTEEDAVALANDTEYGLTSAVFTDNLFRGLRVAKQIESGAVHINSLTVHDEPVLPHGGWKSSGYGRFGGPAAYDEWLQTKTVTWVQ

SEQ ID NO: 87144 - DNA, 1440 bp, Klebsiella pneumoniae
  CDS (1)..(1440): transl_table=11
atgacagcacccgttcaacaccctatgtatattgacggccagtttgaacccggccgcggtgatgcgtggattgatgtgatcaacccggcaacggaagcgctgctttcgcggatccccgacggcagcgcggaagatgcgcggcgcgcgattctcgccgccgagcgcgcgcagccgggctgggaggccctgccagcgattgagcgcgcgagatggctgcgcaaaatcgccgccggtatccgcgaacgtgcggaagagatcgccgcgctgatcgtcgctgagggcggaaaaatccagcagctggcggcggtggaggtctcttttaccgccgattatcttgattatatggccgagtgggcgcgccgttatgaaggtgaaattgtgcagagcgaccgcacgggggagaacattctggtatttaagcgcgcgctgggtgtgacgaccggcatcctgccgtggaattttccgttcttcctgattgcccgcaagctggcgccggcgctcattaccggtaataccatcgtgattaaaccgagtgaatttacgccgaataacgccatcgcttttgcgcaaatcgtccatgatatcggcctgccgaaaggggtctttaacctggtgctggggcgcggcgaaaccgtgggccaggagttggcgagcaatccgaaagtggcgatggtcagcatgaccggcagcgttgccgcgggcgagaagattatggccgcggcggcgaaaaacatcaccaaagtgtgtctggagctgggcgggaaagcgcccgctatcgtgatggacgatgcggatcttgagctggcggttaaggcagtggtggattctcgggtcattaatagcgggcaggtgtgtaactgcgttgagcgcgtgtacgtgcaaaaaggcatttacgatcgcttcgttaaccgtctgggcgaagcgctgaaggcggtgcagtttggcgatccggcgtctcgcgacgatatcgcaatgggaccgttgattaacgccgccgcgctggcgcgcgttgagcagaaggtggcaaaagcggtcgcccagggcgcgcgcgtcgcccttggcgggaaagcggtgacgggcaggggctatttttatccgccgacgctgctgctggacgtgcgccaggagatggatatcgtgcatgaagagacattcggtccggtgctaccggtggtggcgtttgatacccttgaagaggcgctggcgatggccaacgacagcgattatgggctgacgtcgtcaatctatacccgcgacctgaacgtcgcgatgaaggcgattaaggggctgaagtttggcgaaacctatattaaccgcgaaaacttcgaagcgatgcagggtttccatgccggatggcgtaaatcgggcgtcggcggcgccgacggacgtcacggcctgaatgagtatctgcaaactcaggtggtctatctgcaggcctga

SEQ ID NO: 87145 - protein, 479 aa, Klebsiella pneumoniae
MTAPVQHPMYIDGQFEPGRGDAWIDVINPATEALLSRIPDGSAEDARRAILAAERAQPGWEALPAIERARWLRKIAAGIRERAEEIAALIVAEGGKIQQLAAVEVSFTADYLDYMAEWARRYEGEIVQSDRTGENILVFKRALGVTTGILPWNFPFFLIARKLAPALITGNTIVIKPSEFTPNNAIAFAQIVHDIGLPKGVFNLVLGRGETVGQELASNPKVAMVSMTGSVAAGEKIMAAAAKNITKVCLELGGKAPAIVMDDADLELAVKAVVDSRVINSGQVCNCVERVYVQKGIYDRFVNRLGEALKAVQFGDPASRDDIAMGPLINAAALARVEQKVAKAVAQGARVALGGKAVTGRGYFYPPTLLLDVRQEMDIVHEETFGPVLPVVAFDTLEEALAMANDSDYGLTSSIYTRDLNVAMKAIKGLKFGETYINRENFEAMQGFHAGWRKSGVGGADGRHGLNEYLQTQVVYLQA

SEQ ID NO: 87146 - DNA, 2195 bp, Zea mays
  CDS (254)..(1903)
cccaaaccaaatccaagcgcaagagggggcaaagccgcaaagggggaggcaccaggcaccggcagccattacttactggtcctcactcccacaccaaccaaccaacctcctctgcctgccgcttctcctgctgcgggcgggcactgctgcaagtactagaggaggacatccgcttccattactgcgcctgcggaggatcggaggaaccagtagcggaggcttcgattttcggcgggcgcaataaatttcccgcatggctcggagggccgcgtcctcgctcgtctcccgctgcctcctggcgagggcccctgccggcgcgccgcccgctgccccctctgcgccgcgcaggacagtgcctgcagatgggatgcacaggctgttgccaggtgtccttcagaggttcagcactgcagcagcagtagaggagcccatcacgccgtcagtccatgtgaactacacaaagctcctcattaatgggaactttgttgattccgcatccggcaagaccttcccaactctggaccctcgtacaggggaggtgattgctcatgtggctgagggtgacgcagaggacattaaccgtgcagtagctgcggctcgcaaggcttttgatgaagggccatggccgaagatgactgcctatgagaggtcccgtatcctactgcggtttgctgatttgatagagaagcacaatgacgagcttgctgctttggagacatgggacaacgggaagccatatgagcaagcagcccagattgaagtacccatggtggcccgtcttatgcgttactatgctggttgggctgataagatccatgggctcattgtgccggctgatggcccacaccatgtacagatcttgcatgagccaattggtgttgcaggtcagatcatcccatggaactttcctcttctgatgtatgcctggaaagttggccctgctttggcatgtggaaatactctcgtgctcaagactgctgaacaaacccctctatcggctttgtatatctccaaattgttgcatgaggctggactacctgagggtgttgtgaatgtcgtttctggttttggccctactgctggtgctgctcttgctagtcacatggatgttgataagatcgcatttactggatctaccgatactggaaaaattattctcgagttggctgcaaagagcaaccttaagacagtgacactggagttaggaggcaagtcccctttcatcataatggacgatgctgatgttgaccatgctgttgagcttgcgcactttgccctgttctttaaccagggacaatgctgctgcgctggatctcgcacgtttgtacatgagcgtgtttatgatgagtttgtggagaaggccaaggctcgtgcattgaagcgcgtcgttggtgatccgttcaggaaaggtgttgaacagggcccgcagattgacgacgagcaattcaacaagatcttgcgctacattaggtatggtgttgacggtggagctacccttgtgacgggtggtgataggttgggtgacaagggtttctacatccagccaacgattttctcagatgtccaggacggcatgaagattgctcaggaggagatatttgggcctgtgcagtcgatcctcaagttcaaagacctcaatgaggttatcaagagggcaaacgcgagccagtatggattggccgccggcgtgttcaccaacagcctggacacggccaacaccctgacgcgcgcgctcagggccgggaccgtctgggtgaactgcttcgacgtcttcgatgctgcgattccgtttggtgggtacaagatgagcggcatcgggagggagaagggcgttgacagcctgaagaactacctgcaggtgaaggcggtcgtcaccccaatcaagaacgccgcgtggttgtagacgctgcaagtgtggccttgtgcacgagaaccacgtatattcatttcctggtcacatccccgaacaatgtgaaggcgttaatcagatagatgacgatgaagaagaacaactataataagatttgccctagcctgggttctcagttatctctaataagttttatggttggtgcctatatattgtgcaatttggttgctcccttttattttgtttctttttgataagactgttctagcaacggatatgcagagttcattatgaaaatgcatttgttagtgtctttgatggttaa

SEQ ID NO: 87147 - protein, 549 aa, Zea mays; identical to SEQ ID NO: 37842

SEQ ID NO: 87148 - DNA, 1497 bp, Gluconobacter oxydans
  CDS (1)..(1497): transl_table=11
atgaatgttgtctcaaagactgtatctttaccgttaaagccgcgtgagttcggattctttattgatggagaatggcgcgcaggtaaggatttcttcgatcgttcctcgccggctcatgatgttcccgtcacccgtattccacgctgcacccgtgaagaccttgatgaggcagtcgctgctgcacgtcgtgctttcgagaacggaagctgggcgggtctggcagccgcggatcgtgcggcggttcttctgaaagccgcgggccttctgcgcgagcgccgtgatgacatcgcttactgggaagttctcgaaaacgggaagcccatcagccaggcgaaaggtgagatcgatcactgtatcgcctgtttcgagatggcggccggcgctgcgcggatgctgcatggtgatacgttcaacaatctgggcgaggggctgtttggcatggtcctgcgggagcccatcggtgtcgtcggtctgattacgccgtggaacttcccgttcatgatcctgtgtgagcgggcgcctttcattctcgcatccggctgcacgctggtcgtcaagcctgccgaagtcacgagtgccacgacccttcttctggcagaaatccttgccgatgccgggctgccgaagggtgtcttcaatgtcgtgacaggcacggggcgcacggtcggtcaggccatgaccgagcatcaggatatcgacatgctgtccttcacgggctccacgggcgtcggcaagtcctgtatccacgcggcggctgacagcaacctgaagaaacttggcctcgaactgggcggcaagaacccgattgtcgtgttcgctgacagcaaccttgaggatgcggccgacgcggtagccttcgggatcagctttaataccgggcagtgctgtgtgtcgtcgagccgcctgatcgtagagcggtccgtggcggagaagttcgagcgcctcgtcgtgccaaaaatggagaagatccgcgttggtgatccgtttgatcccgaaacgcagattggcgccatcacgacggaagcgcagaacaagaccattctggactatatcgcgaaaggcaaggccgagggcgccaagctgctctgtggtggcgggatcgtcgatttcggcaagggacagtatatccagcccacgcttttcacggatgtgaagccctcgatgggcatcgcgcgtgacgagatttttgggccggttctggcgtccttccacttcgataccgtcgatgaggcgatcgcgattgccaatgacacggtttacggcttggccgcatcggtctggagcaaggatatcgacaaggcgcttgccgtgacccgtcgtgttcgtgccggccgcttctgggtgaacaccatcatgagcggtggtcccgagacgccgctgggtggtttcaagcagtcgggctggggccgtgaggccggtctgtacggcgttgaggaatatacgcagatcaaatctgtccatatcgaaactggcaaacgttcgcactggatttcgtaa

SEQ ID NO: 87149 - protein, 498 aa, Gluconobacter oxydans
MNVVSKTVSLPLKPREFGFFIDGEWRAGKDFFDRSSPAHDVPVTRIPRCTREDLDEAVAAARRAFENGSWAGLAAADRAAVLLKAAGLLRERRDDIAYWEVLENGKPISQAKGEIDHCIACFEMAAGAARMLHGDTFNNLGEGLFGMVLREPIGVVGLITPWNFPFMILCERAPFILASGCTLVVKPAEVTSATTLLLAEILADAGLPKGVFNVVTGTGRTVGQAMTEHQDIDMLSFTGSTGVGKSCIHAAADSNLKKLGLELGGKNPIVVFADSNLEDAADAVAFGISFNTGQCCVSSSRLIVERSVAEKFERLVVPKMEKIRVGDPFDPETQIGAITTEAQNKTILDYIAKGKAEGAKLLCGGGIVDFGKGQYIQPTLFTDVKPSMGIARDEIFGPVLASFHFDTVDEAIAIANDTVYGLAASVWSKDIDKALAVTRRVRAGRFWVNTIMSGGPETPLGGFKQSGWGREAGLYGVEEYTQIKSVHIETGKRSHWIS

SEQ ID NO: 87150 - DNA, 1575 bp, Cryptococcus neoformans; identical to SEQ ID NO: 38039
  CDS (1)..(1575)

SEQ ID NO: 87151 - protein, 524 aa, Cryptococcus neoformans; identical to SEQ ID NO: 38040

SEQ ID NO: 87152 - DNA, 1515 bp, Solanum lycopersicum
  CDS (1)..(1515)
atggcaaatcgtaatgtaccaatccctcgtcgacagctgtacatcggcggagaatggagagaaccggtcaagaagaaccggattccgataatcaatccggctactgaagaaatcatcggggatattccggcggctaccgcggaagatgtggatatagctgtggaagcagcacggaaagcgattgcgagggatgactggggttctacaacaggggcacaacgcgcaaaatacctccgtgctattgctgctaaggtactggagaagaaatccgtacttgcaacacttgaatcccttgatagtggaaaaacattgtatgagtctgctgcagatatggatgacgttgcaggatgttttgagtactatgcaggccttgctgaagctttggattcgagaaggatgactccggttaatcttaattcagattcatataaaagttatgttcttagagaacctcttggtgttgtgggattgataactccatggaattatccattgttaatggccatatggaaagttgcccctgctctggctgctggttgtgcagcaatacttaagccatctgaactagcatcaattacctgtttggagttgggtgagatctgtagagagattggtcttccttctggtgcccttaacattttaacaggattggggcctgaagctggtggtcctttggcatctcatcctcatgtggacaagatttcatttacaggaagtggacctacaggatctaagatcatgactgctgcagctcaacttgttaaaccagttagtcttgagcttggtggaaaaagtccaatcgtggtgtttgacgatatcgataaccttgatatagctgctgagtggactctttttggcatctttgcaaatactggtcaagtttgtagtgcaacatcacggcttatagtacaggaaaacattgcttctgcatttatggacagactgcttaagtggaccaaaaacatcaaaatctccgatcctttggaagaagactgcaagcttggtcctgtcgtcagtgctggacaatatgagaaggtattgaagttcatctcaaatgccaaaagtgaaggtgcaaccattctgtgtggtggcgaacggcctcagcacttgaagaaaggatattatgttcagccaacaattattactgatgttaatacctcaatggaaatctggaaagaggaagtattcggacccgttctttgtgtcaaaacattcaaaactgaagagcaagccattgaactagcaaacgacaccaagtatggcttgggtgctgctgttatgtcaaaagacgttaaaaggtgtgagaggtttacaaaggcatttcagacaggtatcatctggattaactgttcacagccaacctttaatgagctaccatggggtggtaaaaagcgtagtggttttggacgtgatctagggaaatggggtcttgaaaatttcttgaacattaagcaggtgacagagtatacttctgctgaaccattggctttttataagtcaccttcaaagaattag

SEQ ID NO: 87153 - protein, 504 aa, Solanum lycopersicum
MANRNVPIPRRQLYIGGEWREPVKKNRIPIINPATEEIIGDIPAATAEDVDIAVEAARKAIARDDWGSTTGAQRAKYLRAIAAKVLEKKSVLATLESLDSGKTLYESAADMDDVAGCFEYYAGLAEALDSRRMTPVNLNSDSYKSYVLREPLGVVGLITPWNYPLLMAIWKVAPALAAGCAAILKPSELASITCLELGEICREIGLPSGALNILTGLGPEAGGPLASHPHVDKISFTGSGPTGSKIMTAAAQLVKPVSLELGGKSPIVVFDDIDNLDIAAEWTLFGIFANTGQVCSATSRLIVQENIASAFMDRLLKWTKNIKISDPLEEDCKLGPVVSAGQYEKVLKFISNAKSEGATILCGGERPQHLKKGYYVQPTIITDVNTSMEIWKEEVFGPVLCVKTFKTEEQAIELANDTKYGLGAAVMSKDVKRCERFTKAFQTGIIWINCSQPTFNELPWGGKKRSGFGRDLGKWGLENFLNIKQVTEYTSAEPLAFYKSPSKN

SEQ ID NO: 87154 - DNA, 1729 bp, Chorispora bungeana
  CDS (64)..(1572)
gatccaccatctccagagcgagagaggacgagagaaagagaggctgtagattcagataagacaatggcgattccgatgcctactcgtcagctattcatcgacggtgaatggagagagcccatcttgaagaagcgaatcccgatcgtcaatccggctaccgaagaggtcattggtgatatccccgctgctacaacggaggatgtcgaagttgcagtcaacgctgctcgaagagctttttcaaggaataaagggaaagattgggccaaagcaccaggagctcttcgtgcaaagcatctacgagctattgctgctaaggtaactgaaagaaagtcggatctggcaaagcttgaggcgcttgattgtggtaaaccattggatgaagcagtctgggatatggaagatgtcgctggatgttttgaattttatgctgaccttgctgaaggattagatgccaagcagaaagcaccggtctcgcttcccatggagaattttaagagttatgttctgaagcaacctattggagttgtgggactgattacaccatggaattacccacttttgatggctgtttggaaggtggctccttcacttgctgcaggatgcactgcgattctcaagccatcagagctggcatcagtcacttgtttggagcttgctgatatttgtcgagaagtcggtcttcctcctggggtcctcaatgttctgactggatatggtgcggaagctggtggtcctttggcatcacatcccggtgtggacaagattgcatttactggaagttttgccacgggaagcaaggtcatgacagctgctgctcagttggtgaagcctgtttcaatggaactcggtgggaagagccctctcattgtgtttgatgacgttgatcttgataaagctgctgaatgggctctcttcggttgcttctggacaaatggtcagatctgcagtgcaacttcccgccttcttgtccatgaaaacattgcacctcaatttatagaaaagcttgtaaaatggagcaagaacattaaaatatcagaccccatggaagagggatgcaggcttggtcctgtcgttagtcaaggacagtacgagaaaatattgaaatttatctcaacggctaaaagtgaaggtgcaacgatcttgcatggtggttcccgacctgagcatcaggaaaagggcttctttattgaaccaaccatcataactgatgtaaccacttcaatgcaaatctggagagaagaagttttcgggcctgttctttgcgtgaaaacatttggcagtgaggatgaggcaattgagctagcaaatgactcccattacggattaggagctgcagtgatatctaatgatacggaaagatgtgaccgtgtcagccaggcctttgaagctgggattgtatggattaactgctcacagccttgctttactcaagctccatggggtggagtcaaacgcagtggatttggacgcgaactaggagaatggggacttgataactacttgagtgtgaagcaagtgactctctacacttcaaacgaaccgtggggatggtacaaatccccctctgcttaagtaatgaaaaccaatagctgtctcttccatctttgtgcctttatcaatttgtcaagtttggtcctgaaactctctatttgtaaaacctttggagataagaacaataatgaataaaatgaaaagatggtttggtgaaaaaaaaaaaaaaaaaaaaaaa

SEQ ID NO: 87155 - protein, 502 aa, Chorispora bungeana
MAIPMPTRQLFIDGEWREPILKKRIPIVNPATEEVIGDIPAATTEDVEVAVNAARRAFSRNKGKDWAKAPGALRAKHLRAIAAKVTERKSDLAKLEALDCGKPLDEAVWDMEDVAGCFEFYADLAEGLDAKQKAPVSLPMENFKSYVLKQPIGVVGLITPWNYPLLMAVWKVAPSLAAGCTAILKPSELASVTCLELADICREVGLPPGVLNVLTGYGAEAGGPLASHPGVDKIAFTGSFATGSKVMTAAAQLVKPVSMELGGKSPLIVFDDVDLDKAAEWALFGCFWTNGQICSATSRLLVHENIAPQFIEKLVKWSKNIKISDPMEEGCRLGPVVSQGQYEKILKFISTAKSEGATILHGGSRPEHQEKGFFIEPTIITDVTTSMQIWREEVFGPVLCVKTFGSEDEAIELANDSHYGLGAAVISNDTERCDRVSQAFEAGIVWINCSQPCFTQAPWGGVKRSGFGRELGEWGLDNYLSVKQVTLYTSNEPWGWYKSPSA

SEQ ID NO: 87156 - DNA, 1581 bp, Oryza sativa
  CDS (1)..(1581)
atggcgagcgagagcgagagcaacggccaccaccacgccggcgacgaggcgcgcgcggagaacagcggcgcggggtgcctccacggcggcgacgacggcggcgggacgcccaggacgacgccggagatcaggtacaccaagctgttcatcaacgggcgcttcgtcgacgcggcctccggtaagacgttcgagaccagggacccccgcaccggcgacgtgatcgcccgcgtcgccgaaggcgacaaggaggacgtcgacctggcggtgaaggcggcgagggaagcattcgaccacggcgaatggcctcgcatgtcgggatcagagagagggagggtcatggcgaagtacgcggaggtggtggagcggcacgcggatgagctggcggcactggagagccttgacgccggcaagccgctcgccgccgccagggcggtggacgtcggcgagtgcgtcggcatcctgcgctacttcgccggcgccgccgacaagatccacggcgagacgctcaagatgtcgaggcagctccagggttacaccctccgcgagcccctcggcgtcgccggcctcatcgtcccctggaacttcccggccatcatgttcttctccaaagtctcaccggcgctcgccgccggctgcaccgtcgtcgtcaagcccgccgagcagacgcccctcagcgccctgttcctcgcccacctatcaaagcaagcaggagtaccggatggggtgatcaacgtggtgacaggattcggcccaacagcgggagctgcaatttcatctcacatggatgttgacgtggtggctttcacgggatctactgaggttggacggcttataatggaggcctccgcgaagagcaacctgaagccggtggcactcgagctcggcggcaagtcgccgttcatcgtcttcgacgacgccgacctggacaaggccgtcgagctcgccatcggcgggaacttcttcaacaagggagaagcctgcgtcgccgggagccgcgtgttcgtgcaggagggcatctacgaccggttcgagcagaagctagcggacaccatgaagagctgggtcgtcggcgaccccttcgatcctcgcgtcaatcaaggaccacaggtggacaaggctcagtatgagagggtgctcgggtacatcgagcaaggcaaggcagaaggggcaactgttctcacgggagggaagccctgcggtaagaaagggtactacatcgagcccaccattttcaccaatgtgaaggacgacatggtcatcgcgagggaggagatcttcggccccgtcatgtgcctgatgaagttcaagacggtggaggaggcgatcgagagggcgaacgggacgaggtacgggctggcggcggggctggtgacgagggacatcgacgtggcgaaccggatggcgaggtcgatccgggcaggggtggtgtgggtgaactgctacttcgccatggacaggagctgcccgttcggtggccgcaagatgagcgggttcggcaaggacgacagcatgcacgcgctcgacaagttcctcgccgtcaagtccgtcgtcacccccgtccatggctccccctggttctga

SEQ ID NO: 87157 - protein, 526 aa, Oryza sativa; identical to SEQ ID NO: 37826

SEQ ID NO: 87158 - DNA, 1892 bp, Zoysia tenuifolia
  CDS (123)..(1646)
cgcggccccgcgcacgcagcgcaccacgccactttcccactcccactttcgccgcgccgcggggagactcgccgttcgttcgttcgagactccgatccccgccgtcgactccgcggaagcacatggccgcggcgccgcgggacgtcccccgccggggcctcttcatcggcggggggtggagggagccgtccctcgggcggcgtctcccggtcgtcaacccggccaccgaaaccaccatcggtgacgtcccggcggccacggcggaggacgtggagctcgcggtcgcagcggcgcgggaagccttcaggcgcgacggcggaaggcactggtcgtgcgcctctggggccgtgcgggccaagttcctcagggcgatcgccgccaagattaaagaaaaaaaatccgatctagctttgctggagacactggattctgggaagcctctggatgaagcaaatgcagacatggacgatgttgcagcatgcttcgagtattatgctgatctggcagaagcttttgatgggaaacaacgtttgccaatctcgctgccaatggaaaatttcaagtcatatgcgctcaaagaaccgattggggttgttggactgatcaccccatggaactatcccctgttgatggcgacgtggaaggttgcacctgccttagctgctggttgtacagctgtgttaaagccatcggagttggcttctctgacttgcttggagctaggtgcaatatgcatagagataggcctacctccaggtgtcttgaacataattactggtctgggtcctgaagctggtgctccattagcctcacacccccatgtggataaggttgcttttactggaagcacagagactggtaagagggtaatgactgctgctgctcaaatggttaagcctgtttcattagagcttggaggcaaaagtccgcttattgtctttgatgacatagacaacattgataatgctgttgaatgggccatgttcgggattttcgcaaatggtggtcaagtctgcagtgcaacttctcgtatacttgtgcatgagaaaattgcaaaacaattcttggatagattggttgcatgggcgaagcacatcaaaatctcagatccactggaggaaggttgcaggctggggtcggttgtcagtgaagggcagtacgaaaagataaagaaattcatctcaactgcaagaaatgaaggtgcgaccattttgtatggaggtgcacgaccacaacacctcagaagagggttctttattgaacctacaatcataacagatgttagtacgtcaatgcaaatttggcgagaggaagtctttggtccagtcgtctgtgtaaaagaattcagtacagagagtgaagctgtggagcttgcaaatgatacccactatggtctagctggtggcgtgatttctaatgatccagagatctgtgagcgccttacaaaggctattcaagctggtattatttggataaattgctctcaaccatgcttcgttcaagctccatggggagggaacaagcggagtggttttggtcgtgagctcggagagtggggccttgataactacatgaccgtgaagcaagtcaccaagtattgctcggatgaaccatggggatggtaccagcctccatcgaagctgtaacgagtcattcatgccaggaaaatggagagcttcatttaactaagacataactatgaattgtctatccttccaaaaaataactgtgaaatgtctattaggagtaagtgcaacgacagagttatataccgtgctattgcaataaaaggacttaacggcagactcgtaatattgtttttggccaaggcataatatagtactactagtaatacaataaaccagtcttatatcaaaaaaaaaaaaaaaaaa

SEQ ID NO: 87159 - protein, 507 aa, Zoysia tenuifolia
MAAAPRDVPRRGLFIGGGWREPSLGRRLPVVNPATETTIGDVPAATAEDVELAVAAAREAFRRDGGRHWSCASGAVRAKFLRAIAAKIKEKKSDLALLETLDSGKPLDEANADMDDVAACFEYYADLAEAFDGKQRLPISLPMENFKSYALKEPIGVVGLITPWNYPLLMATWKVAPALAAGCTAVLKPSELASLTCLELGAICIEIGLPPGVLNIITGLGPEAGAPLASHPHVDKVAFTGSTETGKRVMTAAAQMVKPVSLELGGKSPLIVFDDIDNIDNAVEWAMFGIFANGGQVCSATSRILVHEKIAKQFLDRLVAWAKHIKISDPLEEGCRLGSVVSEGQYEKIKKFISTARNEGATILYGGARPQHLRRGFFIEPTIITDVSTSMQIWREEVFGPVVCVKEFSTESEAVELANDTHYGLAGGVISNDPEICERLTKAIQAGIIWINCSQPCFVQAPWGGNKRSGFGRELGEWGLDNYMTVKQVTKYCSDEPWGWYQPPSKL

SEQ ID NO: 87160 - DNA, 1871 bp, Zoysia tenuifolia
  CDS (119)..(1642)
cctcgtgccgaattcggcacgaggccactttcccactcccactttcgccgcgccgcggggagactcgccgttcgttcgttcgagactccgatccccgccgtcgactccgcggaagcacatggccgcggcgccgcgggacgtcccccgccggggcctcttcatcggcggggggtggagggagccgtccctcgggcggcgtctcccggtcgtcaacccggccaccgaaaccaccatcggtgacgtcccggcggccacggcggaggacgtggagctcgcggtcgcagcggcgcgggaagccttcaggcgcgacggcggaaggcactggtcgtgcgcctctggggccgtgcgggccaagttcctcagggcgatcgccgccaagattaaagaaaaaaaatccgatctagctttgctggagacactggattctgggaagcctctggatgaagcaaatgcagacatggacgatgttgcagcatgcttcgagtattatgctgatctggcagaagcttttgatgggaaacaacatttgccaatctcgctgccaatggaaaatttcaagtcatatgcgctcaaagaaccgattggggttgttggactgatcaccccatggaactatcccctgttgatggcgacgtggaaggttgcacctgccttagctgctggttgtacagctgtgttaaagccatcggagttggcttctctgacttgcttggagctaggtgcaatatgcatagagataggcctacctccaggtgtcttgaacataattactggtctgggtcctgaagctggtgctccattagcctcacacccccatgtggataaggttgcttttactggaagcacagagactggtaagagggtaatgactgctgctgctcaaatggttaagcctgtttcattagagcttggaggcaaaagtccgcttattgtctttgatgacatagacaacattgataatgctgttgaatgggccatgttcgggattttcgcaaatggtggtcaagtctgcagtgcaacttctcgtatacttgtgcatgagaaaattgcaaaacaattcttggatagattggttgcatgggcgaagcacatcaaaatctcagatccactggaggaaggttgcaggctggggtcggttgtcagtgaagggcagtacgaaaagataaagaaattcatctcaactgcaagaaatgaaggtgcgaccattttgtgtggaggtgcacgaccacaacacctcagaagagggttctttattgaacctacaatcataacagatgttagtacgtcaatgcaaatttggcgagaggaagtctttggtccagtcgtctgtgtaaaagaattcagtacagagagtgaagctgtggagcttgcaaatgatacccactatggtctagctggtggcgtgatttctaatgatccagagatctgtgagcgccttacaaaggctattcaagctggtattatttggataaattgctctcaaccatgcttcgttcaagctccatggggagggaacaagcggagtggttttggtcgtgagctcggagagtggggccttgataactacatgaccgtgaagcaagtcaccaagtattgctcggatgaaccatggggatggtaccagcctccatcgaagctgtaacgagtcattcatgccaggaaaatggagagcttcatttaactaagacataactatgaattgtctatccttccaaaaaataactgtgaaatgtctattaggagtaagtgcaacgacagagttatataccgtgctattgcaataaaaggacttaacggcagactcgtaatattgtttttggccaaggcataatatagtactactagtaatacaataaaaaaaaaaaaaaaaa

SEQ ID NO: 87161 - protein, 507 aa, Zoysia tenuifolia
MAAAPRDVPRRGLFIGGGWREPSLGRRLPVVNPATETTIGDVPAATAEDVELAVAAAREAFRRDGGRHWSCASGAVRAKFLRAIAAKIKEKKSDLALLETLDSGKPLDEANADMDDVAACFEYYADLAEAFDGKQHLPISLPMENFKSYALKEPIGVVGLITPWNYPLLMATWKVAPALAAGCTAVLKPSELASLTCLELGAICIEIGLPPGVLNIITGLGPEAGAPLASHPHVDKVAFTGSTETGKRVMTAAAQMVKPVSLELGGKSPLIVFDDIDNIDNAVEWAMFGIFANGGQVCSATSRILVHEKIAKQFLDRLVAWAKHIKISDPLEEGCRLGSVVSEGQYEKIKKFISTARNEGATILCGGARPQHLRRGFFIEPTIITDVSTSMQIWREEVFGPVVCVKEFSTESEAVELANDTHYGLAGGVISNDPEICERLTKAIQAGIIWINCSQPCFVQAPWGGNKRSGFGRELGEWGLDNYMTVKQVTKYCSDEPWGWYQPPSKL

SEQ ID NO: 87162 - DNA, 1822 bp, Zoysia tenuifolia
  CDS (53)..(1576)
gccgttcgttcgttcgagactccgatccccgccgtcgactccgcggaagcacatggccgcggcgccgcgggacgtcccccgccggggcctcttcatcggcggggggtggagggagccgtccctcgggcggcgtctcccggtcgtcaacccggccaccgaaaccaccatcggtgacgtcccggcggccacggcggaggacgtggagctcgcggtcgcagcggcgcgggaagccttcaggcgcgacggcggaaggcactggtcgtgcgcctctggggccgtgcgggccaagttcctcagggcgatcgccgccaagattaaagaaaaaaaatccgatctagctttgctggagacactggattctgggaagcctctggatgaagcaaatgcagacatggacgatgttgcagcatgcttcgagtattatgctgatctggcagaagcttttgatgggaaacaacgtttgccaatctcgctgccaatggaaaatttcaagtcatatgcgctcaaagaaccgattggggttgttggactgatcaccccatggaactatcccctgttgatggcgacgtggaaggttgcacctgccttagctgctggttgtacagctgtgttaaagccatcggagttggcttctctgacttgcttggagctaggtgcaatatgcatagagataggcctacctccaggtgtcttgaacataattactggtctgggtcctgaagctggtgctccattagcctcacacccccatgtggataaggttgcttttactggaagcacagagactggtaagagggtaatgactgctgctgctcaaatggttaagcctgtttcattagagcttggaggcaaaagtccgcttattgtctttgatgacatagacaacattgataatgctgttgaatgggccatgttcgggattttcgcaaatggtggtcaagtctgcagtgcaacttctcgtatacttgtgcatgagaaaattgcaaaacaattcttggatagattggttgcatgggcgaagcacatcaaaatctcagatccactggaggaaggttgcaggctggggtcggttgtcagtgaagggcagtacgaaaagataaagaaattcatctcaactgcaagaaatgaaggtgcgaccattttgtatggaggtgcacgaccacaacacctcagaagagggttctttattgaacctacaatcataacagatgttagtacgtcaatgcaaatttggcgagaggaagtctttgatccagtcgtctgtgtaaaagaattcagtacagagagtgaagctgtggagcttgcaaatgatacccactatggtctagctggtggcgtgatttctaatgatccagagatctgtgagcgccttacaaaggctattcaagctggtattatttggataaattgctctcaaccatgcttcgttcaagctccatggggagggaacaagcggagtggttttggtcgtgagctcggagagtggggccttgataactacatgaccgtgaagcaagtcaccaagtattgctcggatgaaccatggggatggtaccagcctccatcgaagctgtaacgagtcattcatgccaggaaaatggagagcttcatttaactaagacataactatgaattgtctatccttccaaaaaataactgtgaaatgtctattaggagtaagtgcaacgacagagttatataccgtgctattgcaataaaaggacttaacggcagactcgtaatattgtttttggccaaggcataatatagtactactagtaatacaataaaccagtcttatatcaaaaaaaaaaaaaaaaaa

SEQ ID NO: 87163 - protein, 507 aa, Zoysia tenuifolia
MAAAPRDVPRRGLFIGGGWREPSLGRRLPVVNPATETTIGDVPAATAEDVELAVAAAREAFRRDGGRHWSCASGAVRAKFLRAIAAKIKEKKSDLALLETLDSGKPLDEANADMDDVAACFEYYADLAEAFDGKQRLPISLPMENFKSYALKEPIGVVGLITPWNYPLLMATWKVAPALAAGCTAVLKPSELASLTCLELGAICIEIGLPPGVLNIITGLGPEAGAPLASHPHVDKVAFTGSTETGKRVMTAAAQMVKPVSLELGGKSPLIVFDDIDNIDNAVEWAMFGIFANGGQVCSATSRILVHEKIAKQFLDRLVAWAKHIKISDPLEEGCRLGSVVSEGQYEKIKKFISTARNEGATILYGGARPQHLRRGFFIEPTIITDVSTSMQIWREEVFDPVVCVKEFSTESEAVELANDTHYGLAGGVISNDPEICERLTKAIQAGIIWINCSQPCFVQAPWGGNKRSGFGRELGEWGLDNYMTVKQVTKYCSDEPWGWYQPPSKL

SEQ ID NO: 87164 - DNA, 1858 bp, Panax ginseng
  CDS (44)..(1555)
agaaagtagggtaattgattaatcaagggagtgataggtgagaatggcgataagaataccaactcggcagctcttcatcgatggagagtggagagaacctgctaagaagaatcgtatcgctatcatcaaccccgctaccgaacagatcatcgggaatataccggcagctacatctgaggacgtagatattgctgtggaagctgctcgaagagcccttgctcggaatggagggagcgactgggcctcggcctctggagcatatcgtgcaaagtatttgcgggctattgctgcaaagataacagagagaaaatctgaactggcaaagcttgaaaccttagattgtggaaaaccattggaagaagcagcgtgggatattgatgatgtcgctgcatgttttgagtacaatgcagatcttgcagaagctttggatggaaagcaaaagtcccctatttctcttcctatggagacatttaagtcttacattcttaaggaacccattggtgttgtaggtttgattactccatggaattaccctatgctgatggctacgtggaaagtagctcctgctctggctgctggctgtgctgcaatacttaaaccatctgaattggcatctgttacctgtttggagttgggtgaagtgtgtaaagaggttggtcttcctccaggcattcttaatatcttgactgggttaggcccagaagctggtgctcctttggcatcacatcctcatgttgacaagattgcatttactggaagtactgcaacaggaagcaagatcatgactgctgcagcacagcaagtaaagcctgttacactcgaacttggtggaaaaagtcctattttggtgtttgaggatgttgatctcgataaagctgctgagtggactatttttggttgcttttggacaaatggtcaaatttgtagtgcaacctcgcgtcttctagtgcatgaaagcattgcagcagaattcttagacaagcttatgaagtggaccaaaaatattaagatttcagaccccttagaggaaggttgcaggcttgggcctgttgttagtggcggacagtatgagaaggtaatggagtccatctcgacagctaagaaagaaggagcaactatcttgtgtggtggggcaaggcctaagcatttggagaaaggattctttattgagccaactattataagcgatgtaactacctcgatgcaaatttggagggaggaggtttttggaccagttctctgtgttaaaacatttagaaccgaggatgaagctattgaacttgcaaatgacactcgttacggcttgggcggtgctgtaatatctaatgatctggaaaggtgtgagcgtgtaacaaaggctcttcaatcagggattgtctggatcaactgctcccagccgtgcttctgtcaagctccatggggtgggaaaaagcgtagtggttttgggcgtgaactaggagaatggggacttgataactacttaagtgtgaagcaggtcacacagtatgtttctgatgaaccatggggatggtatcaatctccatcaaagctctaaagtttctccgaagccaggggtaaaaaaggcgctctaaacaggaatagtaaggcttaattgctgtatgttcctttgttcgagcggttgtaatttcccttgcctggaacaacagctgtaatagtccaacttaccaacaatataaggatatgtagaataaggcatcattaagttaaggtgtctcatttttatgttcttgtgatcttaaaaattgtatgaatattgagtttcattaaaaatgtgagtggttctgttgagttgagaaataaatttgttccagaaaaaaaaaaaaaaaaaaaaaaaaaa

SEQ ID NO: 87165 - protein, 503 aa, Panax ginseng
MAIRIPTRQLFIDGEWREPAKKNRIAIINPATEQIIGNIPAATSEDVDIAVEAARRALARNGGSDWASASGAYRAKYLRAIAAKITERKSELAKLETLDCGKPLEEAAWDIDDVAACFEYNADLAEALDGKQKSPISLPMETFKSYILKEPIGVVGLITPWNYPMLMATWKVAPALAAGCAAILKPSELASVTCLELGEVCKEVGLPPGILNILTGLGPEAGAPLASHPHVDKIAFTGSTATGSKIMTAAAQQVKPVTLELGGKSPILVFEDVDLDKAAEWTIFGCFWTNGQICSATSRLLVHESIAAEFLDKLMKWTKNIKISDPLEEGCRLGPVVSGGQYEKVMESISTAKKEGATILCGGARPKHLEKGFFIEPTIISDVTTSMQIWREEVFGPVLCVKTFRTEDEAIELANDTRYGLGGAVISNDLERCERVTKALQSGIVWINCSQPCFCQAPWGGKKRSGFGRELGEWGLDNYLSVKQVTQYVSDEPWGWYQSPSKL

SEQ ID NO: 87166 - DNA, 1834 bp, Gossypium hirsutum
  CDS (31)..(1542)
gggaagtgaaactaaaataactgagttaatatggcggtccaagttccgagtcgacaattattcatcgatggcgagtggagagagcccattctcaaggagcgactcccaaccatcaatcctgctactgaagagatcatcggtaacattccagcggctacagctgaagacgtggagcttgcggtggcggctgctcggagagctctttctagaaacaaaggtaaggattgggctaccgctcctggcgctgtccgtgccaagtatttacgtgccatcgctgctaaggtaacagagagaaaaactgagttggctaagcttgaagcaattgattgtgggaaacctcttgatgaagcagtttgggacattgaagatgttgctggatgttttgagtactatgcagaccttgctgaaggcttagatgcaaggcaaaaggctcctgtctctcttcctatggagacatttaagagttatgtgcttaaggaaccaattggggttgttggattgattactccatggaattacccattattaatggctacatggaaagtagctccttccttggctgctggttgtgctgcaatactgaaaccttcggagttggcatctatcacctgcttggagctggcgaaagtggtgaagggaagtcgtcttcctcctggtgtcctgaacattctggctgggctgggccctgaagctggcgctcctttggcatctcatccagatgttgacaagattgcctttactggaagcagtgcaacagggagcaagataatggcagcagctgctcaaatggtgaagcctgtttctttagagcttggtgggaaaagcccaattattgtgtttgaggatgttgacctcgacaaagctgctgaatggactgcatttggttgcttctggacaaatggacagatttgcagtgcaacatcccgtcttattgtacacgaaaacattgcgagagaatttctggacaggcttgtgaaatggactaaaaacattaagatttctgatccctttgaagaaggatgcaggcttggccccgttgttagtggaggacagtatgagaaagtattgaaattcatctcaactgctaagagtgaaggtgctaccattttgagtggtggagttcgtcctgagcatttaaagaagggattttttgttgaaccaactataataactgatgtgacaacttccatgcaaatctggagagaagaagtttttggacctgttctttgtgtcaagacatttaggacagaagaggaagcccttgaactggcaaatgacacccattatggtttgggtgctgccgtgatatcaaatgacctggaaagatgtgatcgtgtaagcaagaatctccaagctggaattgtgtgggtcaattgttcacagccatgcttctgtcaagctccatggggaggcaataaacgcagtggctttgggcgtgaacttggggaatggggtctcgacaattacttgagtgtgaagcaggtcacgcagtatgtctccgatgaaccatgggggtggtatcgctcaccatcaaagctgtgagagtattgggggctgttcgaataaataaaccatcgaggacataaggtaagatccattgaagagtattttatgagaggattggcatgtagtgaggtgattaaagagaaggcaggattatcgttcatagaactcaaatatgagacagactccaacatctatgcatcaagtctactgcaccttgtttttcaaaatatacatatgcatacctatgcatgtatgaatgtattatggtttgtgatctatgagatgaatggattagtttattgaaaaaaaaaaaaaaaaaaaaaaaaaa

SEQ ID NO: 87167 - protein, 503 aa, Gossypium hirsutum
MAVQVPSRQLFIDGEWREPILKERLPTINPATEEIIGNIPAATAEDVELAVAAARRALSRNKGKDWATAPGAVRAKYLRAIAAKVTERKTELAKLEAIDCGKPLDEAVWDIEDVAGCFEYYADLAEGLDARQKAPVSLPMETFKSYVLKEPIGVVGLITPWNYPLLMATWKVAPSLAAGCAAILKPSELASITCLELAKVVKGSRLPPGVLNILAGLGPEAGAPLASHPDVDKIAFTGSSATGSKIMAAAAQMVKPVSLELGGKSPIIVFEDVDLDKAAEWTAFGCFWTNGQICSATSRLIVHENIAREFLDRLVKWTKNIKISDPFEEGCRLGPVVSGGQYEKVLKFISTAKSEGATILSGGVRPEHLKKGFFVEPTIITDVTTSMQIWREEVFGPVLCVKTFRTEEEALELANDTHYGLGAAVISNDLERCDRVSKNLQAGIVWVNCSQPCFCQAPWGGNKRSGFGRELGEWGLDNYLSVKQVTQYVSDEPWGWYRSPSKL

SEQ ID NO: 87168 - DNA, 1653 bp, Zea mays; identical to SEQ ID NO: 38047
  CDS (1)..(1653)

SEQ ID NO: 87169 - protein, 550 aa, Zea mays; identical to SEQ ID NO: 38048

SEQ ID NO: 87170 - DNA, 1431 bp, Pseudomonas paucimobilis
  CDS (1)..(1431): transl_table=11
atgaccgcctatccgtcccttcacatgattatcgacggtgaggccgtcactggcggcgaccgccgcacgcagaccatcgtcaaccccgccacgggcgagacgctgggcgaattgccgctcgccgacactgccgatctcgaccgggcgctcgaaacggcgcagcgcggcttccagcgctggcgcaacagcacgccgcaggagcgggccgccgtcctctccggcgcggcgcggctgctcatggagcggcaggagacgctggcgcgcatcgccaccatggagcagggcaagacgctggcggaatcccgcatcgaagtgatgatggtcgccggcctgttcaatttctacgcgggcgaggtgttccgcctttatgggcgcgcgctcgtgcgtccggccggcacccgctcgaccgtcacttatgagcccgtcggtcccctcgcggccttttccccctggaacttcccgctcggcaatccgggccgcaagctcggcgccccgatcgcggcgggctgctcggtcatcatgaagtcggccgaagaaacgcccgcgtccgcgcttggcgtgcttcagtgcctgctggatgcgggcctgcccagcgacgtggcgcaggccgtgttcggcgtcccggacgaagtgtcgcgctatctgctggcctcgcccgtcatccgcaagctcagcttcaccggatcgacggtggtcggcaagcatctcgcgaagctcgccgccgacgacctcaagcgcacgacgatggagcttggcggccacggcccagtgctcgtcttcaacgatgtcgacgtcgaccgcgtcctcgaggtgatggtcgggcacaaatatcgcaatgccgggcaggtctgcgtctcccccacgcgcttcatcgtgcaggaggatgtctacgagactttccgcgacggctttgccgagcgcgcgaaggcactgcgggtcggcaacggcctcgaggacggcatccagatgggcccgatggccaatgcccgccgtccggacgcgatggaacgcctgaatcgcagcgccgtcgatgccggggcgacgctcaatgccggtggcgagcgaatcggcaaccagggcttcttctacgcgccgtccgtgctgagcgacgttccgctggacgccgagatcatgaacgaggagccgttcggccccgtcgcgctcatcaatccctaccgtacggcggacgagatgatcgcggaagccaatcgcctgccttacggtctcgccgcctatagctggaccaacgacgtgaagatgcagcgccgcatcgcccgcgaggtcgaaaccggcatgctcggcatcaacagcgttgccatcggcggcgcggattcgcccttcggcggtgtcaaatggtcgggtcacggccatgaggacggcccggaaggcgtgcaggcctgcctcgtcaccaaggcggtgcacgagggctaa

SEQ ID NO: 87171 - protein, 476 aa, Pseudomonas paucimobilis
MTAYPSLHMIIDGEAVTGGDRRTQTIVNPATGETLGELPLADTADLDRALETAQRGFQRWRNSTPQERAAVLSGAARLLMERQETLARIATMEQGKTLAESRIEVMMVAGLFNFYAGEVFRLYGRALVRPAGTRSTVTYEPVGPLAAFSPWNFPLGNPGRKLGAPIAAGCSVIMKSAEETPASALGVLQCLLDAGLPSDVAQAVFGVPDEVSRYLLASPVIRKLSFTGSTVVGKHLAKLAADDLKRTTMELGGHGPVLVFNDVDVDRVLEVMVGHKYRNAGQVCVSPTRFIVQEDVYETFRDGFAERAKALRVGNGLEDGIQMGPMANARRPDAMERLNRSAVDAGATLNAGGERIGNQGFFYAPSVLSDVPLDAEIMNEEPFGPVALINPYRTADEMIAEANRLPYGLAAYSWTNDVKMQRRIAREVETGMLGINSVAIGGADSPFGGVKWSGHGHEDGPEGVQACLVTKAVHEG

SEQ ID NO: 87172 - DNA, 1830 bp, Lotus corniculatus; identical to SEQ ID NO: 38049
  CDS (7)..(1635)
  misc_feature (1398)..(1398): s is g or c
  misc_feature (1566)..(1566): y is t or c

SEQ ID NO: 87173 - protein, 542 aa, Lotus corniculatus; identical to SEQ ID NO: 38050

SEQ ID NO: 87174 - DNA, 1377 bp, Arthrobacter nicotinovorans
  CDS (1)..(1377): transl_table=11
atggcaatcgcgaccatcgaccccaccacgggcatcaccctgaaaaccttcgacgcccatacgcccgaagaggtagaaaaccggatcgcccgtgcggaagcagcattccggtcactgcagaacacctcctttgaagaacgtgcccgctggatgcataaggccgctgacatcctcgaaagcgaagccgacgaagtggcccgtctcatcgccaccgagatgggcaaaaccttaacgacagcaaagtacgaggccctcaaatcagccaccggcatgcggcacttcgccgatcacgcccagcgctaccttagcccggaaaccccggtcccggcgtccgaggtcaacgcctccaacctccacgtacaattcgacccgttaggcgtcgttttggccgttatgccctggaattaccccctttggcaggccgtccgcttcgccgcccccgcactaatggcgggcaacacggggctcctcaagcacgcctcaaacgttcctcaatgtgcgctgtacctgggagacctcttcgcccgcggcggttttcctgaaggcgcgtttcagacactgctggttgaaggcaaagacgttattcccctcgtggatgacgcaaggatcagggcggtcaccctgaccggctccgtcgctgccggttccgccattgctgaagcagccggcaggaacatcaaaaggagtgtcctggaactgggaggcatggatgtctttatcgtcatgccctcggccgatattgaaaaggccgctgcccaggcagtaatcgcacgccttcaaaactcggggcagtcctgcatcgcggccaagcgcttctacgttcacgaagatgtctacgaccgctttgaacatctgttcgttacaggtatggccgaagcagttgccggtgaccccttggacgaaagcaccagctttggccccctggccacggagcgaggacgccaggacgttcatgaactggttagggacgcccgcgaaaaaggggcagcagttcagtgtggaggagaaataccggaaggggagggctggtactacccggcgactgtcctcacaggcgtaacagaggacatgcgcatctaccgggaagaatgcttcggccccgtggcttgcctctacaaagtgtcatcactccaggaagccatcgctctcagcaacgactctgattttggtttgagctcaagcgtgtggaccaatgacgagaccgaagcgaccgaagcagctcgatcaatcgaggccgggggcgtcttcatcaacggtctgacggcgtcattcccggcggtgcctttcggcggcctcaaagactccggctacggacgtgagctctccgcctatggaatccgggagttcgtaaacatcaagacggtctggacctcctga

SEQ ID NO: 87175 - protein, 458 aa, Arthrobacter nicotinovorans
MAIATIDPTTGITLKTFDAHTPEEVENRIARAEAAFRSLQNTSFEERARWMHKAADILESEADEVARLIATEMGKTLTTAKYEALKSATGMRHFADHAQRYLSPETPVPASEVNASNLHVQFDPLGVVLAVMPWNYPLWQAVRFAAPALMAGNTGLLKHASNVPQCALYLGDLFARGGFPEGAFQTLLVEGKDVIPLVDDARIRAVTLTGSVAAGSAIAEAAGRNIKRSVLELGGMDVFIVMPSADIEKAAAQAVIARLQNSGQSCIAAKRFYVHEDVYDRFEHLFVTGMAEAVAGDPLDESTSFGPLATERGRQDVHELVRDAREKGAAVQCGGEIPEGEGWYYPATVLTGVTEDMRIYREECFGPVACLYKVSSLQEAIALSNDSDFGLSSSVWTNDETEATEAARSIEAGGVFINGLTASFPAVPFGGLKDSGYGRELSAYGIREFVNIKTVWTS

SEQ ID NO: 87176 - DNA, 1556 bp, Spinacia oleracea
  CDS (22)..(1515)
tttcttcgcatttaaccaagaatggcgttcccaattcctgctcgtcagctattcatcgacggagagtggagagaacccattaaaaaaaatcgcatacccgtcatcaatccgtccactgaagaagtcatcggtgatattccggcagccacggctgaagatgtggaggttgcggtggtggcagctcgaagagcctttaggaggaacaattggtcagcaacatctggggctcatcgtgccacatacttgcgtgctattgctgctaagataacagaaaaaaaagatcatttcgttaaactggaaaccattgattctgggaaaccttttgatgaagcagtgctggacattgatgacgttgcttcacgttttgaatattttgccggacaagcagaagctcttgatggtaaacaaaaggctccagtcaccctgcctatggaaaggttcaaaagtcatgttctcaggcagccccttggtgttgttggattaatatccccatggaattacccacttctaatggctacatggaaaattgctccagcacttgctgctgggtgtacagctgtacttaagccatccgagttggcatctgtgacttgtctagaattcggtgaagtttgcaacgaagtgggacttcctccaggcgtgttgaatatcttgacaggattaggtccagatgctggtgcaccattagtatcacaccccgatgttgacaagattgcctttactgggagtagtgccactggaagcaaggttatggcttctgctgcccaattggttaagcctgttacattagaacttgggggtaaaagtcctattgtagtgtttgaagatgttgatattgataaagttgtggaatggactatttttggctgtttctggacaaatggtcaaatatgtagtgcaacgtctagactgcttgtgcatgaaagtattgcagctgagtttgttgataagcttgtaaaatggacgaaaaacattaaaatttctgacccatttgaagaaggatgccggcttggccctgttattagtaaaggacagtacgacaaaattatgaagttcatatcaacagcaaagagtgagggggcaactattttgtatggaggttcccgtcctgagcatttgaagaaaggttattacattgaacccaccattgtaactgatatctccacatccatgcaaatatggaaagaggaagtttttggccctgtcttgtgtgttaaaacatttagttccgaagatgaagccattgcattggcaaatgatacagagtacggtttagctgctgctgtgttttctaatgatcttgaaagatgtgagaggataacgaaggctctagaagttggagctgtttgggttaattgctcacaaccatgctttgttcaagctccttggggaggcatcaagcgtagtggttttggacgtgaacttggagaatggggtatccagaattacttgaatatcaagcaggtgactcaagatatttctgatgaaccatggggatggtacaagtctccttgaagctatgatcaaatttgaatgacggtgttgtttttgttaag

SEQ ID NO: 87177 - protein, 497 aa, Spinacia oleracea
MAFPIPARQLFIDGEWREPIKKNRIPVINPSTEEVIGDIPAATAEDVEVAVVAARRAFRRNNWSATSGAHRATYLRAIAAKITEKKDHFVKLETIDSGKPFDEAVLDIDDVASRFEYFAGQAEALDGKQKAPVTLPMERFKSHVLRQPLGVVGLISPWNYPLLMATWKIAPALAAGCTAVLKPSELASVTCLEFGEVCNEVGLPPGVLNILTGLGPDAGAPLVSHPDVDKIAFTGSSATGSKVMASAAQLVKPVTLELGGKSPIVVFEDVDIDKVVEWTIFGCFWTNGQICSATSRLLVHESIAAEFVDKLVKWTKNIKISDPFEEGCRLGPVISKGQYDKIMKFISTAKSEGATILYGGSRPEHLKKGYYIEPTIVTDISTSMQIWKEEVFGPVLCVKTFSSEDEAIALANDTEYGLAAAVFSNDLERCERITKALEVGAVWVNCSQPCFVQAPWGGIKRSGFGRELGEWGIQNYLNIKQVTQDISDEPWGWYKSP

SEQ ID NO: 87178 - DNA, 1531 bp, Atriplex centralasiatica
  CDS (20)..(1522)
ggctaagctttcatctaaaatggcgtttcctatgcctgttcgtcaactcttcatcgatggagagtggagagaaccccttttaaaaaatcgcatacccatcatcaacccttctactgaagaaatcatcggtgatattcctgcagcaactgcagaggatgtggaagttgcagtagtagcagctagaaaagcctttaagaggaacaaaggcagagattgggctgcaacttctggtgctcatcgtgctagatacttgcgtgctattgctgctaagataacagaaagaaaagatcatttcgttaaactggaaacccttgattctggaaaaccactggacgaagcagtgttggacattgatgatgttgctacatgctttgaatactttgccggtcaagcagaagctctggatgctaaacaaaaggctccagtcaccctgcctatggacagatttaaaagtcatgttctcaggcagcctattggtgttgttggattaatatccccatggaattacccacttctaatggctacatggaaaattgctcccgcacttgctgctgggtgcacagctgtacttaaaccatcagaattggcatctgtgacttgtctagaatttggtgaagtttgtaacgaagtgggacttcctccaggtgtgttgaatattttgacaggattaggtcctgatgctggtgccccaatagtatctcatcctgatgttgataagattgcatttactgggagtagtgccactggaagcaagattatggcttctgctgcccaactagttaagcctgttacattagagcttggaggtaaaagtcctgttatcatgttcgaagatattgatattgaaacagctgttgaatggactctttttggcgttttctggacaaatggtcaaatctgtagtgcaacatctagactgcttgtgcatgaaagtattgcagctgaatttgttgataggatggtaaagtggacaaaaaatataaaaatttctgacccgtttgaagaaggatgccgacttggtcctgttatcagtaaaggacagtatgacaagattatgaatttcatatcaacagcaaagagtgaaggggcaacaattttgtgtggaggctcccgccctgagcatttgaagaaagggtattacattgaacccaccattataactgatattactacatccatgcaaatatggaaagaggaagtgtttggcccagtcatatgtgttaaaacatttagtactgaagatgaagccattgaattggcaaatgatacagagtatggtttagctggtgccgtgttttctaaagatcttgaaagatgtgagagggtaactaaggctctagaagttggagctgtctgggttaactgctcacaaccatgctttgttcatgctccatggggaggagtcaagcgtagtggatttggacgtgaacttggggaatggggtatcgagaattacttgaatatcaagcaggtgactagcgatatttctgatgaaccatggggctggtacaagtctccttgaagggatccg

SEQ ID NO: 87179 - protein, 500 aa, Atriplex centralasiatica
MAFPMPVRQLFIDGEWREPLLKNRIPIINPSTEEIIGDIPAATAEDVEVAVVAARKAFKRNKGRDWAATSGAHRARYLRAIAAKITERKDHFVKLETLDSGKPLDEAVLDIDDVATCFEYFAGQAEALDAKQKAPVTLPMDRFKSHVLRQPIGVVGLISPWNYPLLMATWKIAPALAAGCTAVLKPSELASVTCLEFGEVCNEVGLPPGVLNILTGLGPDAGAPIVSHPDVDKIAFTGSSATGSKIMASAAQLVKPVTLELGGKSPVIMFEDIDIETAVEWTLFGVFWTNGQICSATSRLLVHESIAAEFVDRMVKWTKNIKISDPFEEGCRLGPVISKGQYDKIMNFISTAKSEGATILCGGSRPEHLKKGYYIEPTIITDITTSMQIWKEEVFGPVICVKTFSTEDEAIELANDTEYGLAGAVFSKDLERCERVTKALEVGAVWVNCSQPCFVHAPWGGVKRSGFGRELGEWGIENYLNIKQVTSDISDEPWGWYKSP

SEQ ID NO: 87180 - DNA, 1491 bp, Triticum aestivum
  CDS (1)..(1491)
atggcggggacgggggtgttcgcggacgtgctggacggcgaggtctacaagtactacgccgacggggagtggcgcgcgtccgcctctggcaagacggtcgccatcgtcaaccccaccacccgccagacgcagtacagggtgcaagcatgcacacaggaggaggtgaacaaggtgatggacgccgccaaggtggcccagaagtcgtgggcgcggactccgctgtggaagcgcgctgagctcctccacaaggcggcggccatcctcaaggagcacaagaccccgatcgccgagagtctggtcaaggagatcgccaagccggccaaggatgccgtttctgaggtggtgcggtccggggatttggtgtcatacacggccgaggagggtgtccggatactgggggagggcaagctgctggtatccgatagcttccccggtaatgagcgcaacaagtactgtttgagctccaaggtacctctcggagtagttttggcaatcccaccatttaactatcctgtcaacctagcggtttctaagattggcccggcgctgattgctggcaattctcttgtgctcaagcctccgactcagggcgcggtggcagcgctccatatggtacactgctttcacctggccggtttcccaaagggcctgattagttgtgttactgggaaaggctctgaaataggtgattttctcacaatgcaccctggagtcaactgcataagtttcacgggaggtgataccggcatagccatttcaaagaaggctgggatggtcccgcttcagatggagctcggaggaaaagatgcctgcattgtgctggaggatgcagacctcgatctagtcgcggcaaacatagtaaaaggaggcttctcatacagtggccagaggtgcactgcagtcaaagtggttctgatcatggaagcggttgccgacaccgtggtggagaaggtcaacgccaagctggcaaagctgaaagtgggcccaccagaggatgacagtgatatcaccccagttgtaacagaatcctcggcaaatttcattgaaggcttggtaatggatgccaaggagaaaggggcaaccttttgccaagagtacaggagagaaggcaaccttatctggccgttgctgctggatcatgtccggcctgacatgaggatcgcctgggaggagccttttggccctgtcttgcccgtgatcaggatcaactcggttgaggaaggcatccaccattgcaacgccagcaactttgggctccagggatgtgtgttcacaagagacatcaacaaggcaatcatgatcagtgatgcaatggagagtggaactgtgcagatcaactccgccccggctcgaggtccggaccatttccccttccagggcctgaaggacagtggaataggatcccaggggataacgaacagcataaacatgatgaccaaggtgaagagcactgtcataaacctcccatctccgtcctacaccatgggctga

SEQ ID NO: 87181 - protein, 496 aa, Triticum aestivum
MAGTGVFADVLDGEVYKYYADGEWRASASGKTVAIVNPTTRQTQYRVQACTQEEVNKVMDAAKVAQKSWARTPLWKRAELLHKAAAILKEHKTPIAESLVKEIAKPAKDAVSEVVRSGDLVSYTAEEGVRILGEGKLLVSDSFPGNERNKYCLSSKVPLGVVLAIPPFNYPVNLAVSKIGPALIAGNSLVLKPPTQGAVAALHMVHCFHLAGFPKGLISCVTGKGSEIGDFLTMHPGVNCISFTGGDTGIAISKKAGMVPLQMELGGKDACIVLEDADLDLVAANIVKGGFSYSGQRCTAVKVVLIMEAVADTVVEKVNAKLAKLKVGPPEDDSDITPVVTESSANFIEGLVMDAKEKGATFCQEYRREGNLIWPLLLDHVRPDMRIAWEEPFGPVLPVIRINSVEEGIHHCNASNFGLQGCVFTRDINKAIMISDAMESGTVQINSAPARGPDHFPFQGLKDSGIGSQGITNSINMMTKVKSTVINLPSPSYTMG

SEQ ID NO: 87182 - DNA, 2159 bp, Sorghum bicolor; identical to SEQ ID NO: 38051
  CDS (223)..(1866)

SEQ ID NO: 87183 - protein, 547 aa, Sorghum bicolor; identical to SEQ ID NO: 38052

SEQ ID NO: 87184 - DNA, 1862 bp, Sorghum bicolor; identical to SEQ ID NO: 38053
  CDS (116)..(1771)

SEQ ID NO: 87185 - protein, 551 aa, Sorghum bicolor; identical to SEQ ID NO: 38054

SEQ ID NO: 87186 - DNA, 2162 bp, Secale cereale; identical to SEQ ID NO: 38055
  CDS (175)..(1824)

SEQ ID NO: 87187 - protein, 549 aa, Secale cereale; identical to SEQ ID NO: 38056

SEQ ID NO: 87188 - DNA, 1881 bp, Zea mays; identical to SEQ ID NO: 38057
  CDS (108)..(1760)

SEQ ID NO: 87189 - protein, 550 aa, Zea mays; identical to SEQ ID NO: 38058

SEQ ID NO: 87190 - DNA, 1757 bp, Zea mays
  CDS (61)..(1572)
gcggccgctgcacctcctttcccacgactcccgagcgctctgcgtgtggcgcgcggcagcatggcgactgcgaacgggagcagcaaggggtcgttcgaggtgcccaaggtggaggtcaggttcaccaagctcttcatcgacggcaagttcgtcgacgccgtctccggcaagacgttcgagacccgggaccctcgcaccggcgaggtgatcgccagcatcgcggagggaggcaaggccgacgtcgacctcgccgtcaaggccgcccgggaggccttcgacaacgggccctggcccaggatgacgggatacgagcgtggtcggatcctccacaggttcgcggacctgatcgacgagcacgtggaggagctggcggcgctggacacggtggacgccggcaagctgttcgccgtgggcaaggcgcgggacatcccgggcgccgcgcacctgctgcgctactacgccggcgccgccgacaaggtgcacggcgcgacgctcaagatggcgcagcggatgcacgggtacacgctcaaggagcccgtgggcgtggtgggccacatcgtgccctggaactaccccaccaccatgttcttcttcaaggtagggcccgcgctcgccgccggctgcgccgtcgtcgtcaagcccgccgagcagacgccgctgtccgcgctcttctacgcgcacctcgccagggaggccggcgtcccagccggcgtgctcaacgtcgtgccgggattcgggcccacggccggggccgccgtcgccgcccacatggacgtcgacaaggtcagcttcaccgggtccacggaggtcggccgcctcgtcatgagggccgcggccgagagcaacctcaagcccgtgtcgctcgagctgggcggcaagtctcccgtcatcgtcttcgacgacgccgacctcgacatggccgttaacctcgtcaacttcgccacctacaccaacaagggcgagatctgtgtggccggcacacgcatctacgtgcaggaagggatctacgacgagttcgtgaagaaggccgccgagctcgccagcaagtccgtggtcggagacccgttcaacccgagtgtcagccagggcccccaggttgacaaggaccagtacgagaaggtcctcaggtacattgacatcggaaagcgcgaaggcgccacgctggtcaccggagggaagccctgcggcgacaataagggctactacatcgagcccaccatcttcacggacgtcaaggacgacatgacgatcgcacaggatgaaatctttgggccggtgatggctctcatgaaattcaagaccgtggaggaggtgatccagaaagcgaacaacacccggtacggcctggccgccggcatcgtgaccaagaacatcgacgtcgccaacaccgtgtcgcggtccatccgcgccggcgccatctggatcaactgctacttcgcgttcgacccggacgcgccgttcggcgggtacaagatgagcgggttcggcaaggacatgggcatggacgcgctcgacaagtacctgcagaccaagaccgtcgtcactccgctgtacaacactccatggctctgaccgaccgacctctcatcctgtccgatgaacagttcaacatcacaaacaagaagaaacatgtcttgtaagatactcctccaaaggatcgggtgcctgtagctgtactcttacacctgcatggattgatgtcttgatgatgtagtgcaatgtagcattcagaacaataaagacatgtttcggactgc

SEQ ID NO: 87191 - protein, 503 aa, Zea mays; identical to SEQ ID NO: 37834

SEQ ID NO: 87192 - DNA, 1455 bp, Agrobacterium tumefaciens
  CDS (1)..(1455): transl_table=11
atgatcaagctaaaaaatgcggcgctgttgcgtgatgcctgcctggtgaatggtcgctggctgaaagctgcggatggcaagacgattgcggtggaaaatcccgccaactcgatgatcatcggtcacgttccttcattgtcggcagatgaggttgaagctgcagtcgagtcagcaaacaaggcattttccgagtggagccgccgggctgcgaaggaccgcgctgccatattgcgtcgatggtttgatctcatggtggcgaacgctgacgatcttggtgcgttgatgactgccgagcaaggaaagccgtttgcggaagcaaggggcgaagccctttatgcggcatctttcgtggaatggttcgcggaggaagccaaacgtgtttacggcgatacaattccttcgccgaccacggacaagcgcattaccatcctgaagcagccgatcggtgtctgcgccgcgatcacgccatggaacttcccggccgcgatgatcacccgcaaggcggccccggcacttgccgcaggctgcacgatgatcgtcaaaccggctgagcagacccctctcaccgcacttgctctgggtgttcttgccgaagaagcgggcgttcccgccggtgtcttccaggtggtgacgggcgccgcacgcgatatcggcaaggtgtttaccgaaagcgacacggtgcgaaagatctcctttaccggatcgaccgaagtcggtcgtctgctgatggcgcaatcggccccgacgatcaagaaactgtcgctggaacttggtggcaatgcgcctttcatcgtctttgatgatgccgatctggatgcggccgttgagggtgcgatcgtgtcgaaataccgcaatgccggacagacctgcgtttgctccaaccggatctatgtccaggatggtgtttacgacgcattcgcggaaaagctggtcaaaagggtcgaaagcctgtccgtcggtgagggcacggaacctggtgttctgatcggtccactgatcgaccaggatgccgtggcaaaggtcgaggatcacgttgctgatgcccttggcaagggagcaaagatcgtcaccggtggaaagcgccatgctcttggaggcacgttttacgaaccaacggttctgactggtgcaacccaggccatgaaggtcgcccgtgaggagacctttggacccgtcgccccgctctttcggttcgggacggaagacgaagcggtcgccatggcgaacgacaccgaatttggtctggcggcctatttctacaccgagaatgtccgccggacatggcgtgtcgcagaagcgctcgaatacggcatggtgggccacaatacaggcctcatctccaacgaagtcgcaccattcggtggcgtgaagcagtccggcttgggccgcgaaggctcgcactacggcatcgatgaatatcttgaaatcaaatacctgtgctcggccatcggctga

SEQ ID NO: 87193 - protein, 484 aa, Agrobacterium tumefaciens
MIKLKNAALLRDACLVNGRWLKAADGKTIAVENPANSMIIGHVPSLSADEVEAAVESANKAFSEWSRRAAKDRAAILRRWFDLMVANADDLGALMTAEQGKPFAEARGEALYAASFVEWFAEEAKRVYGDTIPSPTTDKRITILKQPIGVCAAITPWNFPAAMITRKAAPALAAGCTMIVKPAEQTPLTALALGVLAEEAGVPAGVFQVVTGAARDIGKVFTESDTVRKISFTGSTEVGRLLMAQSAPTIKKLSLELGGNAPFIVFDDADLDAAVEGAIVSKYRNAGQTCVCSNRIYVQDGVYDAFAEKLVKRVESLSVGEGTEPGVLIGPLIDQDAVAKVEDHVADALGKGAKIVTGGKRHALGGTFYEPTVLTGATQAMKVAREETFGPVAPLFRFGTEDEAVAMANDTEFGLAAYFYTENVRRTWRVAEALEYGMVGHNTGLISNEVAPFGGVKQSGLGREGSHYGIDEYLEIKYLCSAIG

SEQ ID NO: 87194 - DNA, 1742 bp, Pisum sativum
  CDS (19)..(1530)
atccagatccaaacaaaaatggcaatcacagtatcaagtagacaattattcatagatggagagtggagagttcctatcctcaacaaaaggattccaaacatcaatccttccactgaaaacatcataggagatatacctgctgcaactaaggaagatgttgatcttgctgtggatgctgctaaaagagccatttccagaaaaaatggtagagattggtctgctgcttctggctctcttcgtgctcgctatcttcgagccattgctgctaagataaaagagaaaaaggatgaactagggaagctggaatcaattgactgtggaaaaccgctggaggaagcactagcggatctggatgatgttgttgcttgttttgagtactatgctgggcttgctgaagagttggattcaaagcaaaaagctcctatatctcttcctatggataccttcaaaagctatattctcaaggagcctattggtgttgttgcgttaataactccatggaactatcctttcttaatggcaacttggaaaattgctccggctctggcggctggttgtgctgcaatattgaagccgtctgaattggcatctgtgacctgtttggagttaggcgaaatatgcaaagaagttggtcttcctcgtggtgttttaaatattgtcaccggattaggccatgaagccggtgcttctttggcatctcatcctgatgtagataagatttcttttactggtagctctgcaactgggagcaagattatgacaactgcggcacagctagtcaagcctgtttcactagagcttggtggaaagagcccgatcgttgtttttgaggatgttgaccttgataaggttgctgagtggactggctttggctgtttctttactaatggtcagatatgcagtgcaacatcccgacttattgtgcacgaaagtatagccgtagaatttgtggataaacttgtcaaatgggccgaaaacatcaaaatttcggatccgttggaagaaggttgcaggcttggacctattgtcagtgaagcacagtataagaaagtattgaattgcatctcatcggctaagagtgagggtgcaacaattttgactggtggccgtcgacccgagcatttaaagaagggatattttgttgaaccaaccatcataaccgatgtgaccacctcgatgcaaatttggagagaagaagtatttggacctgtactcgccgtgaaaacatttagcaccgaggaagaagctattaatctcgcaaatgacactcactatggtttggggtctgctgtaatgtcaaacgatttagaaagatgcgagcgtctatctaaggctcttcaagctggaattgtatggattaattgtgctcagccaagcttcattcaagcaccatggggaggcattaaacgtagcggctttggccgcgaattaggagaatggggacttgagaactacttgagtgtgaagcaagttactaggtatacatcggatgagccgtggggctggtatcaaccaccttcaaagctgtgatagttaatcatatttctaaaatctggcatggaataagggtgtttgtgtgagaaacaccaagttatctggcatggaataagtttgtgtgagaaacaccaagttatgtaataatataccagcaacattgttgtgaattcccatttcccacggtgctttggttgatgatatgatatatagtttgaaatcaaaaaaaaaaaaaaaaaaaaaaaaaa

SEQ ID NO: 87195 - protein, 503 aa, Pisum sativum
MAITVSSRQLFIDGEWRVPILNKRIPNINPSTENIIGDIPAATKEDVDLAVDAAKRAISRKNGRDWSAASGSLRARYLRAIAAKIKEKKDELGKLESIDCGKPLEEALADLDDVVACFEYYAGLAEELDSKQKAPISLPMDTFKSYILKEPIGVVALITPWNYPFLMATWKIAPALAAGCAAILKPSELASVTCLELGEICKEVGLPRGVLNIVTGLGHEAGASLASHPDVDKISFTGSSATGSKIMTTAAQLVKPVSLELGGKSPIVVFEDVDLDKVAEWTGFGCFFTNGQICSATSRLIVHESIAVEFVDKLVKWAENIKISDPLEEGCRLGPIVSEAQYKKVLNCISSAKSEGATILTGGRRPEHLKKGYFVEPTIITDVTTSMQIWREEVFGPVLAVKTFSTEEEAINLANDTHYGLGSAVMSNDLERCERLSKALQAGIVWINCAQPSFIQAPWGGIKRSGFGRELGEWGLENYLSVKQVTRYTSDEPWGWYQPPSKL

SEQ ID NO: 87196 - DNA, 1901 bp, Suaeda liaotungensis
  CDS (67)..(1572)
gcttctcactctttcccttttctctcctcccatttttcatcgtcaactcaatttctttctgcaacaatgtcgatccctataccttctcgtcagctattcattgatggagagtggagagaacccatcaaacgaaatcgtctcccaattattaatccttccactgaagaaaccattggggaaattccagcagcaacagctgaggatgttgaagcagcagtaagtgctgctagaagagcacttaagaggaacaaagggagagattgggctgctacttctggagctcaccgtgctagatacttgcgtgctattgctgctaaggtatcagaaaaaaaagaccattttgttaaacttgaaaccatggattctgggaaaccactggatgaagcagtgttggacatagatgacgtttcgacatgttttgaatattttgctgatcaagcagaagctctggacaacaagcaaaagtatccagtcaaacttcctatggacagatttaaaagtcatgttctcaggcagcctattggtgttgtgggattaatttcgccatggaattacccacttttgatggcgacatggaaaatcgctccagctcttgctgcaggctgtacagctgtacttaagccatccgagttggcatctgtgacttgtctagaattcggtgaagtttgcaacgaagtgggacttcctcctggtgtgttaaatattttgacgggattaggtccagatgcgggtgcaccattagtgtctcatcctgatgttgacaaggttgcattcactgggagtagtgctactggaagcaaggttatgggttctgctgcccaattggttaagcctgtcaccttggaacttggaggtaaaagtcctataatcgtgttcgaagatgttgttgatcttgatgtagctgctgaatggactatctttggtgttttctggacaaatggtcaaatatgtagcgcaacttctagactgcttgtgcatgagagtattgcagctgaatttgttgaaaagcttgtaaaatggtccaagaaaataaagatttctgatccatttgaagaaggatgccggcttggccctgttattagcaagggacagtatgacaaaattatgaagtacatatcgacagcaaagagtgagggggcaactattttgtgtggaggatctcgtcctgagcatctgaagaagggatacttcattgagccaaccattgtaactgatatcaccacatccatgcaaatttggaaggaggaagtttttggccctgtcttatgtgttaaaacatttagtaccgaagaggaagcccttgaattagcaaatgacacagaatatggtttagctgctgctgtgttttctaaagaccttgaaaggtgtgagagggtaacaaaggctctagaagttggggctgtctgggtgaattgctcacagccatgcttttgccatgctccatggggaggcgtcaagcgtagcggttttggacgtgagcttggagaatggggtattgaaaattacttgaacattaagcaagtgactagcgatatttccgatgaaccatgggggtggtacaagtctccttaaaggcaaaagaggatatttgcaagataatgctgttatcaagtgaactgtgacacaagagtgacgaccatgtaatgttgtataacgatctagctcacagtttgtctatttgattaaataagggtcgtgcgatgctggagttccataggcattgattgattttgctatttgtgttattttggaccattgagaaaatttttggaccagggataagatgcttgcatataacattaagcctgttatatttgcaagtttaaattatatttgggtgtgttatgtaactaatgtttcattaataaaattctccttcgtctcgaaaaaaaaaaaaaaaa

SEQ ID NO: 87197 - protein, 501 aa, Suaeda liaotungensis
MSIPIPSRQLFIDGEWREPIKRNRLPIINPSTEETIGEIPAATAEDVEAAVSAARRALKRNKGRDWAATSGAHRARYLRAIAAKVSEKKDHFVKLETMDSGKPLDEAVLDIDDVSTCFEYFADQAEALDNKQKYPVKLPMDRFKSHVLRQPIGVVGLISPWNYPLLMATWKIAPALAAGCTAVLKPSELASVTCLEFGEVCNEVGLPPGVLNILTGLGPDAGAPLVSHPDVDKVAFTGSSATGSKVMGSAAQLVKPVTLELGGKSPIIVFEDVVDLDVAAEWTIFGVFWTNGQICSATSRLLVHESIAAEFVEKLVKWSKKIKISDPFEEGCRLGPVISKGQYDKIMKYISTAKSEGATILCGGSRPEHLKKGYFIEPTIVTDITTSMQIWKEEVFGPVLCVKTFSTEEEALELANDTEYGLAAAVFSKDLERCERVTKALEVGAVWVNCSQPCFCHAPWGGVKRSGFGRELGEWGIENYLNIKQVTSDISDEPWGWYKSP

SEQ ID NO: 87198 - DNA, 2128 bp, Hordeum vulgare; identical to SEQ ID NO: 38061
  CDS (82)..(1731)

SEQ ID NO: 87199 - protein, 549 aa, Hordeum vulgare; identical to SEQ ID NO: 38062

SEQ ID NO: 87200 - DNA, 1808 bp, Pisum sativum
  CDS (126)..(1637)
tagagaataacactttatcttagctcagttgagtgaacaatttcagcaactttcaaggtgagatctgatctatctatctccatatccatcaaatcaataatagattggagagagaaagtactagaatggatattccgatcccaactcgtcagttgttcattaacggcgactggaaagctcccgtccttaacaaacggattcccgtcatcaatcccgccacccaaaacatcatcggcgatatccctgccgctactaaggaagacgtcgacgtcgccgtcgccgccgctaaaactgctctcacgcgtaacaaaggcgctgattgggctaccgcttctggcgctgttcgtgcacgctatctacgcgccattgccgctaaggttactgagaaaaagcctgaactagcgaagcttgagtctattgattgtggaaaaccactcgatgaagccgcgtgggacattgatgatgttgctggttgctttgagtattatgctgatcttgctgaaaaattggatgcaagacaaaaggctccggtgtctcttccaatggatacattcaagagtcatgtgcttagggaacctattggtgttgttggattgataactccatggaattatcctatgttgatggctacgtggaaggttgctcctgctcttgctgcgggctgtgctgcaatattgaagccgtctgaattggcatctctaacctgcttggagttaggcgaaatatgcaaagaagttggtcttcctcgtagtgttttaaatattgtcaccggattaggccatgaagccggtgctcctttggcatctcatcctgatgtagataagatttcttttactggtagctctgcaactgggagcaagattatgacaactgcagctcagctcgttaagcctgtttcactggagcttggtggaaaaagcccattagttgtttttgaggatgttgaccttgataaggctgctgaatgggccatctttggctgcttctggacaaatggtcagatatgcagtgcaacttcccgtcttattttacatgaaagtatagcaacagagtttttgaataggattgtcaaatggatcaaaaacatcaaaatttcagatcccttggaagaaggttgcagactaggacctgttgttagtgaaggacagtatgaaaaaatattgaagtttgtctcaaatgctaagagcgagggtgcaaccattttgactggtgggtctcgaccagagcatctaaagaaaggattctttattgaaccaaccatcataaccgacgtgactactaacatgcaaatttggagagaagaagtatttggacctgtcctctgtgtaaaaacatttagcactgaagaagaagctattgatctagcaaatgacactgtctatggcttaggtgctgctgtaatatcaaatgatctagaaagatgtgaacgcgttactaaggcttttaaggccggaattgtatgggtcaattgctctcaaccatgcttcactcaagctccatggggaggcgtcaaacgtagtggttttggccgtgaactaggagaatggggacttgacaattacttgagcgtgaagcaagtgactcagtatatctctgaggaaccatggggctggtaccagcctcctgcaaaactgtgataggcatctaaaaattcacacgagaataagggttgggtcataccaaattatggccgatcttgaaatgagaaggcatataaagtcttgtaaaacagtgtaactggttgtactcaagtttatgcttgtagtgtttttatttgacttggttttaaaaaaaaaaaaaaaaaaaaa

SEQ ID NO: 87201 - protein, 503 aa, Pisum sativum
MDIPIPTRQLFINGDWKAPVLNKRIPVINPATQNIIGDIPAATKEDVDVAVAAAKTALTRNKGADWATASGAVRARYLRAIAAKVTEKKPELAKLESIDCGKPLDEAAWDIDDVAGCFEYYADLAEKLDARQKAPVSLPMDTFKSHVLREPIGVVGLITPWNYPMLMATWKVAPALAAGCAAILKPSELASLTCLELGEICKEVGLPRSVLNIVTGLGHEAGAPLASHPDVDKISFTGSSATGSKIMTTAAQLVKPVSLELGGKSPLVVFEDVDLDKAAEWAIFGCFWTNGQICSATSRLILHESIATEFLNRIVKWIKNIKISDPLEEGCRLGPVVSEGQYEKILKFVSNAKSEGATILTGGSRPEHLKKGFFIEPTIITDVTTNMQIWREEVFGPVLCVKTFSTEEEAIDLANDTVYGLGAAVISNDLERCERVTKAFKAGIVWVNCSQPCFTQAPWGGVKRSGFGRELGEWGLDNYLSVKQVTQYISEEPWGWYQPPAKL

SEQ ID NO: 87202 - DNA, 1868 bp, Zea mays
  CDS (149)..(1798)
cctcctctgcctgccgcttctcctgctgcgggcgggcactgctgcaagtactagaggaggacatccgcttccattactgcgcctgcggaggatcggaggaaccagtggcggaggcttcgattttcggcgggcgcaataaatttcccgcatggctcggagggccgcgtcctcgctcgtctcccgctgcctcctggcgagggcccctgccggcgcgccgcccgctgccccctctgcgccgcgcaggacagtgcctgcagatgggatgcacaggctgttgccaggtgtccttcagaggttcagcactgcagcagcagtagaggagcccatcacgccgtcagtccatgtgaactacacaaagctcctcattaatgggaactttgttgattccgcatccggcaagaccttcccaactctggaccctcgtacaggggaggtgattgctcatgtggctgagggtgacgcagaggacattaaccgtgcagtagctgcggctcgcaaggcttttgatgaagggccatggccgaagatgactgcctatgagaggtcccgtatcctactgcggtttgctgatttgatagagaagcacaatgacgagcttgctgctttggagacatgggacaacgggaagccatatgagcaagcagcccagattgaagtacccatggtggcccgtcttatgcgttactatgctggttgggctgataagatccatgggctcattgtgccggctgatggcccacaccatgtacagatcttgcatgagccaattggtgttgcaggtcagatcatcccatggaactttcctcttctgatgtatgcctggaaagttggccctgctttggcatgtggaaatactctcgtgctcaagactgctgaacaaacccctctatcggctttgtatatctccaaattgttgcatgaggctggactacctgagggtgttgtgaatgtcgtttctggttttggccctactgctggtgctgctcttgctagtcacatggatgttgataagatcgcatttactggatctaccgatactggaaaaattattctcgagttggctgcaaagagcaaccttaagacagtgacactggagttaggaggcaagtcctctttcatcataatggacgatgctgatgttgaccatgctgttgagcttgcgcactttgccctgttctttaaccagggacaatgctgctgcgctggatctcgcacgtttgtacatgagcgtgtttatgatgagtttgtggagaaggccaaggctcgtgcattgaagcgcgtcgttggtgatccgttcaggaaaggtgttgaacagggcccgcagattgacgacgagcaattcaaaaagatcttgcgctacattaggtatggtgttgacggtggagctacccttgtgacgggtggtgataggttgggtgacaagggtttctacatccagccaacgattttctcagatgtccaggacggcatgaagattgctcaggaggagatatttgggcctgtgcagtcgatcctcaagttcaaagacctcaatgaggttatcaagagggcaaacgcgagccagtatggattggccgccggcgtgttcaccaacagcctggacacggccaacaccctgacgcgcgcgctcagggccgggaccgtctgggtgaactgcttcgacgtcttcgatgctgcgattccgtttggcgggtacaagatgagcggcatggggagggagaagggcgttgacagcctgaagaactacctgcaggtgaaggcggtcgtcaccccaatcaagaacgccgcgtggttgtagacgctgcaagtgtggccttgtgcacgagaaccacgtatattcatttcctggtcacatccccgaacaatgt

SEQ ID NO: 87203 - protein, 549 aa, Zea mays
MARRAASSLVSRCLLARAPAGAPPAAPSAPRRTVPADGMHRLLPGVLQRFSTAAAVEEPITPSVHVNYTKLLINGNFVDSASGKTFPTLDPRTGEVIAHVAEGDAEDINRAVAAARKAFDEGPWPKMTAYERSRILLRFADLIEKHNDELAALETWDNGKPYEQAAQIEVPMVARLMRYYAGWADKIHGLIVPADGPHHVQILHEPIGVAGQIIPWNFPLLMYAWKVGPALACGNTLVLKTAEQTPLSALYISKLLHEAGLPEGVVNVVSGFGPTAGAALASHMDVDKIAFTGSTDTGKIILELAAKSNLKTVTLELGGKSSFIIMDDADVDHAVELAHFALFFNQGQCCCAGSRTFVHERVYDEFVEKAKARALKRVVGDPFRKGVEQGPQIDDEQFKKILRYIRYGVDGGATLVTGGDRLGDKGFYIQPTIFSDVQDGMKIAQEEIFGPVQSILKFKDLNEVIKRANASQYGLAAGVFTNSLDTANTLTRALRAGTVWVNCFDVFDAAIPFGGYKMSGMGREKGVDSLKNYLQVKAVVTPIKNAAWL

SEQ ID NO: 87204 - DNA, 1479 bp, Placopecten magellanicus; identical to SEQ ID NO: 38065
  CDS (1)..(1479)

SEQ ID NO: 87205 - protein, 492 aa, Placopecten magellanicus; identical to SEQ ID NO: 38066

SEQ ID NO: 87206 - DNA, 1659 bp, Cladosporium fulvum
  CDS (61)..(1554)
gagtgagtactactgtgttttcctttgagataccccagcacccaaaagtaattggccatcatgtctctttccgtccagctcgagacgccgtctgccggcaagtacgagcagccaactggccttttcatcaacaatgagtgggtgaagccagtcagcggcaagttcttcgatgtcatcaacccaaccgacgagtccgtcatctgccaagtcgcagaggccgatgagaaggatgtcgacatcgccgtcgccgccgcccgcaaggccttcgagggcccatggagacaagagaccccagagaaccgcggcaagctcctcgtgaagctcgccgagctcttcgagaagaacctcgacctcttcgcctccgtcaaggcgctcgacaacggaaaggcgttcaacatggccaaggttgacattggcatgtgcgctggctgcctccgatactacggtggctgggccgacaagattgagggcaaggtcgtcgacaccactccagataccttcaactacatcaagaaggagccaatcggtgtgtgcggtcagatcatcccatggaacttcccactcctcatgtgggcatggaagattggtccagccgttgccactggtaacaccgttgtcatcaagactgctgagcagactcctcttggtgcctacgttgccgccaacctcatcaaggaggccggcttcccaccaggtgtcgtcaacgtcatctctgggttcggaaaggtcgccggtgccgccattgcatcgcacatggacatcgacaaggttgctttcaccggttccaccgtcactggacgcaccatcctcaaggctgccgctggctccaacttgaagaaggtcaccctcgagctcggtggcaagtcgcccaacattgtcttcgacgatgctgacattgacaacgccatctcatgggtcaacttcggtatcttcttcaaccacggccagcgctgctgtgctggttcgcgtatctacgtccaggagggcatttacgacaagttcttgcagcgattcaaggagcgcgcacagaagaacgttgttggtgacccattcgccgccgacaccttccagggcccacaagtctcgcaggtgcaattcgaccgcatcatgggctacatccaggcaggccgtgacgccggtgccaccgtcgagatcggcggtaaccgcaagggtgacaagggttacttcatcgagccaacaatcttcgccaacgtcaccgaggacatgaagatcatgcaagaggagatcttcggcccagtgtgctccatctccaagttcaagaccaaggaggacgccatcaaggtcggtaacgccaccccctacggtctcgccgccgctgtccacaccaggaacctcaacaccgccatcgaggtctcgaatgctctccgcgccggtaccgtctgggtcaacacctacaacactctgcaccaccagcttccattcggtggcttcaaggagtccggtattggacgtgagcttggtgaggatgcgttggccaactacacacagaccaagactgtgtcgatccgtctgggtgatgctctcttcggttaagcgtatgatgggaaggggggtgagcgatgctcttcgatgtatttacgtcatgaacctatgatgacaggaaagattatgtaaagaagaaattgaacaagagcttcc

SEQ ID NO: 87207 - protein, 497 aa, Cladosporium fulvum
MSLSVQLETPSAGKYEQPTGLFINNEWVKPVSGKFFDVINPTDESVICQVAEADEKDVDIAVAAARKAFEGPWRQETPENRGKLLVKLAELFEKNLDLFASVKALDNGKAFNMAKVDIGMCAGCLRYYGGWADKIEGKVVDTTPDTFNYIKKEPIGVCGQIIPWNFPLLMWAWKIGPAVATGNTVVIKTAEQTPLGAYVAANLIKEAGFPPGVVNVISGFGKVAGAAIASHMDIDKVAFTGSTVTGRTILKAAAGSNLKKVTLELGGKSPNIVFDDADIDNAISWVNFGIFFNHGQRCCAGSRIYVQEGIYDKFLQRFKERAQKNVVGDPFAADTFQGPQVSQVQFDRIMGYIQAGRDAGATVEIGGNRKGDKGYFIEPTIFANVTEDMKIMQEEIFGPVCSISKFKTKEDAIKVGNATPYGLAAAVHTRNLNTAIEVSNALRAGTVWVNTYNTLHHQLPFGGFKESGIGRELGEDALANYTQTKTVSIRLGDALFG

SEQ ID NO: 87208 - DNA, 1455 bp, Agrobacterium tumefaciens
  CDS (1)..(1455): transl_table=11
atgatcaagctaaaaaatgcggcgctgttgcgtgatgcctgcctggtgaatggtcgctggctgaaagccgcggatggcaagacgattgcggtggaaaatcccgccaactcgatgatcatcggtcacgttccttcattgtcggcagatgaggttaaagctgcagtcgagtcagcaggcaaggcattttccgagtggagccgccgttctgcgaaggaccgcgctgccatattgcgtcgatggtttgatctcatggtggcgaacgctgacgatcttggtgcgttgatgactgccgagcagggaaagccgtttgcggaagcaaagggcgaagccctttatgcggcatctttcgtggaatggttcgcggaggaagccaaacgtgtttatggcgataccattccttcgccgaccacggacaagcgcattaccatcctgaagcagccgatcggtgtctgcgccgcgatcacgccatggaacttcccggccgcgatgatcacccgcaaggcggccccggcacttgccgcaggctgcgcgatgatcgtcaaaccggctgagcagacccctctcaccgcacttgctctgggtgttctcgccgaagaagcgggcgttcccgccggtgtcttccaggtggtgacgggcgccgcacgcgatatcggcaaggtgtttaccgaaagcgacacggtgcgaaagatctcctttaccggatcgactgaagtcggtcgtctgctgatggcgcaatcggccccgacgatcaagaaactgtcgctggaacttggtggcaatgcgcctttcatcgtctttgatgatgccgatctggatgcggccgttgagggcgcgatcgtgtcgaaataccgcaatgccggacagacctgcgtgtgctccaaccggatctatgtccaggatggtgtttacgacgcattcgcggaaaagctggtcaaaagggtcgaaagcctgtccgtcggtgagggcacggaacctgttgttctgataggtccactgatcgaccaggaggccgtgccaaaggtcgaggatcacgttgctgatgcccttggcaagggagcaaagatcgtcatcggtggaaagcgtcatgctcttggaggcacattctacgaaccaacggttctgactggtgcaacccaggccatgaaggttgcccgtgaggagacctttggacccgtcgccccgctctttcggttcgggacggaagacgaagcggtcgccatggcgaacgataccgaatttggtctggcggcctatttctacaccgagaatgtccgccggacatggcgtgtcgcagaagcgctcgaatacggcatggtgggccacaatacaggcctcatctccaacgaagtcgcaccattcggtggcgtgaagcagtccgacttgggccgcgaaggctcgcactacggcatcgatgaatatcttgaaatcaaatacctgtgctcggccatcggctga

SEQ ID NO: 87209 - protein, 484 aa, Agrobacterium tumefaciens
MIKLKNAALLRDACLVNGRWLKAADGKTIAVENPANSMIIGHVPSLSADEVKAAVESAGKAFSEWSRRSAKDRAAILRRWFDLMVANADDLGALMTAEQGKPFAEAKGEALYAASFVEWFAEEAKRVYGDTIPSPTTDKRITILKQPIGVCAAITPWNFPAAMITRKAAPALAAGCAMIVKPAEQTPLTALALGVLAEEAGVPAGVFQVVTGAARDIGKVFTESDTVRKISFTGSTEVGRLLMAQSAPTIKKLSLELGGNAPFIVFDDADLDAAVEGAIVSKYRNAGQTCVCSNRIYVQDGVYDAFAEKLVKRVESLSVGEGTEPVVLIGPLIDQEAVPKVEDHVADALGKGAKIVIGGKRHALGGTFYEPTVLTGATQAMKVAREETFGPVAPLFRFGTEDEAVAMANDTEFGLAAYFYTENVRRTWRVAEALEYGMVGHNTGLISNEVAPFGGVKQSDLGREGSHYGIDEYLEIKYLCSAIG

SEQ ID NO: 87210 - DNA, 1377 bp, Zymomonas mobilis
  CDS (1)..(1377): transl_table=11
atggcatatgaatctgtcaatcccgccactggcgaaaccgtcaaaaaatatcctgatttttctgataaacaggttaaagattccgttgatcgggcggcgactgtcttcaaaaatgactggagccagcggacgatcgcggaacggagcaaggtgcttcataaggctgctgaaatcttccgttccgatgtggataaatatgccaagctcctgactatcgacatgggtaaaaagattgctgaagcccgtggcgaggtcaacttatcggctgatatccttgattattacgccaaaaacggcgaaaaatttctggcacctcaaaaagttgaagaaaaaccgggtgcggtcgtcaaagcctttcctctcggattgcttctggccattgagccttggaacttcccttattatcagcttgctcgtatcgcgggaccgtatctgatcgcggggaatgcgcttcttgtgaaacattcctcttcagtgcctcaaagcgcccatgcttttgaagctgttttggaagaagcgggcgcgcccaagggtatttataccaatcttgatgcctcaccagatcaggtcagtcagattatcgaagatcctcgggtgcgtggtgtgaccgtaaccggtagtgcttcggttggggctgaattggccgccaaagccggtaagatgtggaaaaaatcggtcatggagctgggcggtagtgatgccttcatcgttcttgacggtgtcgatatagatgacaagctgattgataaggctgcctatggacggttgtttaacgcagggcaggttttctgcgccgccaagcgttttattatcgttgggcaaaaacgcgctgaacttttcactgaaaagctgaaacagcgctttgaagctctgaaaattggtgatcccatggatgaatctaccgatttggggcctttgtcatcggtcggcgcacgagatcaggttgttaagcaggtcgaaaaagcggttcaaaatggcgcaaagctcgtttgtggcgggaaggcgattgaaggcaagggtgcctttatgaaggctggcatcctgaccgatatcaagcgcgagaatccagcctattttgaagaattctttggccctattgcccagatttatgcggtaaaagatgaggctgaagctatcgagcttgccaatgactctccttatggcttgggcggtgccgtttttgcgcctgatgtggagcagggacgcaaagtggcagagcaaattgaaaccggcatggtggcgatcaacaagcccttgtggactgcgcctgaactgcctttcggtggggtcaaacattccggctatggtcgcgaattatcccatttcggtattcaggaatttatcaactggaaattgatagacgcttctgctgcctaa

SEQ ID NO: 87211 - protein, 458 aa, Zymomonas mobilis
MAYESVNPATGETVKKYPDFSDKQVKDSVDRAATVFKNDWSQRTIAERSKVLHKAAEIFRSDVDKYAKLLTIDMGKKIAEARGEVNLSADILDYYAKNGEKFLAPQKVEEKPGAVVKAFPLGLLLAIEPWNFPYYQLARIAGPYLIAGNALLVKHSSSVPQSAHAFEAVLEEAGAPKGIYTNLDASPDQVSQIIEDPRVRGVTVTGSASVGAELAAKAGKMWKKSVMELGGSDAFIVLDGVDIDDKLIDKAAYGRLFNAGQVFCAAKRFIIVGQKRAELFTEKLKQRFEALKIGDPMDESTDLGPLSSVGARDQVVKQVEKAVQNGAKLVCGGKAIEGKGAFMKAGILTDIKRENPAYFEEFFGPIAQIYAVKDEAEAIELANDSPYGLGGAVFAPDVEQGRKVAEQIETGMVAINKPLWTAPELPFGGVKHSGYGRELSHFGIQEFINWKLIDASAA

SEQ ID NO: 87212 - DNA, 1636 bp, Arabidopsis thaliana
  CDS (1)..(1605)
atggcatcaagaagagtttcttcgctgctctctcgctctttcatgtcctcctcacgttctatcttctctcttagaggcatgaacagaggagctcaaagatacagtaacctcgctgctgctgtcgaaaacactattactccaccagtgaaagttgaacacacacagcttctaatcggtggaagattcgttgatgcagtgtcaggaaaaactttccctactttggatccaagaaatggagaagtgattgctcaagtgtctgaaggtgatgcagaagacgtgaaccgcgcggttgcagctgcacgaaaggcttttgatgaaggaccatggcctaaaatgacagcttatgagagatcaaagatactgtttcgtttcgctgatttaatcgagaaacataatgatgagattgctgctcttgagacttgggataatgggaaaccttatgaacaatctgctcaaattgaagtaccaatgcttgctagggtgttccggtactatgctggttgggcagacaagatacatggaatgacaatgccaggagatggtccacaccatgtgcagaccttacatgagcctataggagtcgctggacaaatcatcccatggaacttccctcttctcatgctttcttggaaacttggaccagctttagcttgcggtaacaccgttgttctcaaaactgctgagcaaactcctctatctgctcttcttgttgggaaactacttcatgaggctggacttcctgatggagttgtgaatatagtttctggatttggggctactgctggtgcagctatagctagtcacatggacgttgataaggttgctttcaccgggtctactgatgttgggaagattattcttgagttagcttcaaaaagcaaccttaaggcagtgactcttgagcttggaggaaagtcaccattcattgtatgtgaagatgctgatgtggatcaggccgttgagcttgcacatttcgctttgttctttaaccagggacaatgttgttgtgctggttcgcgtacatttgtacatgaacgtgtgtatgatgagtttgtagagaaagctaaagctcgtgcactcaagcgaaatgttggagatcccttcaagtcaggcattgagcaaggtccccaggtagactcagagcaattcaacaaaatcctgaagtacatcaaacatggagttgaggctggagccacattacaagctggaggtgacaggcttggttccaagggttactacattcaacctactgtcttctcagatgtgaaagatgacatgctcatagcaacagacgagattttcgggccggttcaaaccatactgaaattcaaggatcttgatgaggtgattgcaagggccaacaactcaaggtacggtttagctgctggagtgttcacacagaatcttgacacagcacaccggctgatgcgagcactcagagttgggactgtttggatcaactgttttgatgtacttgatgcatcaattccatttggagggtataagatgagtggcattggtagagagaaaggtatctacagtctcaacaattacttgcaagtcaaggctgttgttacttccctcaagaaccctgcctggctctaaaccataccaggtggttacacttatttctcga

SEQ ID NO: 87213 - protein, 534 aa, Arabidopsis thaliana; identical to SEQ ID NO: 37846

SEQ ID NO: 87214 - DNA, 1521 bp, Saccharomyces cerevisiae; identical to SEQ ID NO: 38069
  CDS (1)..(1521)

SEQ ID NO: 87215 - protein, 506 aa, Saccharomyces cerevisiae; identical to SEQ ID NO: 38070

SEQ ID NO: 87216 - DNA, 1837 bp, Saccharomyces cerevisiae
  CDS (199)..(1734)
gggaaagaaaaatgtggtgtaagagagaaatgaataatgtaggagtgatgttctggaaatgactctgttcttttataattaatgagtggtgtgtataaaactaccattcaaactgtcctataacaagctacgctgtagtatccaatctggaaacgtcattgtcctctgcgtcatttcaaaagcggcggttttgtaaggatgtctaagtccaagactaagaccgacaagagaaaccaatcttccttgtctagaatcaagttgtccgctttgcactactgtatgtctgacgctgaaccatccattgcctacttgcaagacaactctgctttcattaacaacgaatggcacaacttggttttggaaaagattttcccagtctacaacccatctactgaagaagacatcacccaagtttccgaaaagtctcaacacgactctactgaagaagacatcacccaagtttccgaaaagtctcaacacgacgacgacaaggctgttgttgatatctctgaaagaggtagattgttgaacatcttggctgacttgattgaaagagacagagacatcttggctgccatcgaacacttggacaacggtaagccattcgacgaagcttacttgttggacttggcctctgttttgaaggaattgagatacactgctggttgggccgacaagttgcacggtaccttgagattcgccatcactattccaactttccaagatcttagattcttgagatacactagacacgaaccagttggtgtctgtggtgaaatcattccatggaacatcccattgttgatgtacatttggaagatcggtccagctttggccgctggtaacactgttgtcttgaagccagaagaattgactccattgaccgccttgactgttgctaccttgatcaaggaagctggtttcccaccaggtgttgtcaacgttgtctctggttacggtccaactgccggtgctgcctgtttgtcccacaaggacaacgacaagttggctttcaccggttctactttggttggtaaggttgtcatgaaggctgccgctaagtccaacttgaagaaggttactttggaattgggtggtaagtctccaatgatcgtcttcatcgacgctgacttggactgggccgttgaaaacgcccacttcggtgtcttcttcaaccaaggtcaatgttgtatcgctcaatctagaattactgttcacgaatccatctacgacgaaatcgttgaaagagacttggaaaaggctaagaagcaagttttgggtaacccattcgaatctgacactagatacggtccacaaattttgaagatcgagttcgactccatcccaagattgattaactccgctaaggccgaaggtgctaaggttttgtgtggtggtggtagagacgacagctgtgttggttactacatccaaccaactgttttcgctgacgtcaccgacgaaatgagaatcgctaaggaagaaattttcggtccagttatcactatctcgaggttcaagtctgttgacgaagctattaagagagtcgacaacactaagtacggtttggctgcctacgttttcactaaggacaaggctatcagaatttctgctgccttgaaggctggtactgtttgggtcaactgtgttcacgtcgcttcttaccaaatcccattcggtggtaacaagaactctggtatgggtagagaattgggtgaatacggtttggaataagggggggttagtatgaggctatgagaacggagttagtggagaataagagcccgctttttattttagacgttacgtagtcctataaattagctttaccggtcaa

SEQ ID NO: 87217 - protein, 511 aa, Saccharomyces cerevisiae
MSKSKTKTDKRNQSSLSRIKLSALHYCMSDAEPSIAYLQDNSAFINNEWHNLVLEKIFPVYNPSTEEDITQVSEKSQHDSTEEDITQVSEKSQHDDDKAVVDISERGRLLNILADLIERDRDILAAIEHLDNGKPFDEAYLLDLASVLKELRYTAGWADKLHGTLRFAITIPTFQDLRFLRYTRHEPVGVCGEIIPWNIPLLMYIWKIGPALAAGNTVVLKPEELTPLTALTVATLIKEAGFPPGVVNVVSGYGPTAGAACLSHKDNDKLAFTGSTLVGKVVMKAAAKSNLKKVTLELGGKSPMIVFIDADLDWAVENAHFGVFFNQGQCCIAQSRITVHESIYDEIVERDLEKAKKQVLGNPFESDTRYGPQILKIEFDSIPRLINSAKAEGAKVLCGGGRDDSCVGYYIQPTVFADVTDEMRIAKEEIFGPVITISRFKSVDEAIKRVDNTKYGLAAYVFTKDKAIRISAALKAGTVWVNCVHVASYQIPFGGNKNSGMGRELGEYGLE

SEQ ID NO: 87218 - DNA, 1494 bp, Alternaria alternata
  CDS (1)..(1494)
atgacatctgtaaagctctcaacccctcagacgggcgagttcgagcagcccaccggactcttcatcaacaatgagttcgtaaaggctgttgacggcaagacctttgatgttatcaacccctccactgaggaggtcatctgcagtgttcaggaggccaccgagaaggatgttgacattgctgttgctgccgcccgcaaagccttcaacggcccatggcgaaaggagacaccagagaacaggggaaagctgcttaacaagcttgccgatctgttcgagaagaatgccgacctcattgctgctgtcgaggctctcgacaacggcaaggccttcagcatggccaagaacgtcgatgttcccgccgccgctggttgcctgaggtactacggaggatgggccgacaagattgagggcaaggtcgtcgacacagcacccgacagcttcaactacatccgcaaggagcctattggtgtttgcggtcagatcatcccatggaacttccctattctcatgtggtcatggaagattggtcctgccatcgccactggtaacaccgtcgtcctgaagactgctgagcagacacctctctccgcatacattgcctgcaagctgatccaggaggccggtttcccaccaggtgtcatcaacgtcatcactggtttcggaaagatcgccggtgctgccatgtccgctcacatggacattgacaagattgcctttactggttcaaccgttgtcggccgtcaaatcatgaagtctgccgctggctccaacttgaagaaggtcactcttgagctcggaggcaagagccccaacattgtcttcgccgacgcagatcttgacgaggctatccactgggtcaactttggtatttacttcaaccacggacaggcttgttgtgctggttcgcgtatctacgtccaagaagagatctacgacaagttcatccagcgcttcaaggagcgggctgctcagaacgctgttggtgacccattcgccgcggacaccttccagggtcctcaagtctcgcagctccagttcgaccgtatcatgggctacatcgaggagggcaagaagtctggcgcgaccatcgagactggtggcaaccgtaagggtgacaagggttacttcatcgagcccacaatcttctccaacgtaaccgaggacatgaagattcagcaagaagagatcttcggccccgtctgcacaatctccaagttcaagacaaaggccgacgtcatcaagattggcaacaacaccacatacggtcttgctgccgctgtacacacatccaacctcaccactgccatcgaagttgccaacgcgctccgtgcaggaactgtctgggtcaactcctacaacactcttcactggcagcttcccttcggagggtacaaggagtctggtattgggcgcgagttgggagaggcggcgctggacaactacatccagaccaagaccgtgtctattcgtcttggcgatgttctgttcggttaa

SEQ ID NO: 87219 - protein, 497 aa, Alternaria alternata; identical to SEQ ID NO: 38072

SEQ ID NO: 87220 - DNA, 1975 bp, Bacillus stearothermophilus
  CDS (266)..(1732): transl_table=11
aagaaagcgcgaatacaagacagttgaaaagaagatacgatgagttagtctctttcttgattcgcgataatgaggtgtttgatggcactgtattattaacgggcacatgcatcgttccgcctaaccagttcaccctccaagaaggggatcggattgaaattgagatccctgagatcggggtgttgtccaatccagttcaatcgttggcccaacaagcagtggccaactaaaaataaacgataaaaggagaaggggagaagagaagatgaaggtacaaacagaaatcaaaacgtatttcaactacattaacggcaattgggtcagttcagtgagcaacaacgtagaaccgagcatcaatccggccaatcgacatgacatcgtcggatatgttcaacgctcgacgttagaggatgtcaacgaggcggtaaccgcagcgaacgaggcgcaaacatcatggtggaaacggtccggtgtcgagagaggagagtatttgtacaaagcggctcacattttagaacaatgtctccaggacattgccgaaacaatgacaagggaaatggggaaaacgcttgcggaagcgaaagctgagacgatgagaggcgtgcatatattgcgttactatgcgggggaaggagcacgaaaaatcggtgatgtgatcccatcaagcgacagcgaggggctcctgtttacgacccgtgttccgctcggagttgttggggtcatttcgccgtggaatttccctgtggcaattccgatctggaaaatggcgccggcgcttgtgtatgggaataccgtcgtgctcaaaccggccagcgaaacggcggtgacggcggcgaaagtgatcgaatgcttccatgaggcaggtttcccaaaaggggtcgttaatatggtgtgcggatccggctcggtcgttggccaagggattgcgaaccacccggatattgatggcgtcacctttaccggctcgaacacggttggaaagcaagtggggagagcggcgtttgaacgtggggccaaatatcagctcgagatgggcggaaagaacccggtcattgtggccaaagatgctgatttggatctggcggtcgaaggaacgatcagcggcggtttgcgttcgacggggcaaaaatgtacagcgacgagccgcgtctttattgaacgggaagtgtatgaaccgtttaaagcaaaacttctcgaacgggtgaagcagctgaaaattggaaacggactggacgctgaaacatggatggggccgtgcgcgagcgaatcgcagttccatacggttttgtcctatattgagaaaggaaagtccgaaggagccaagcttatttacggtggaaaccgatgcctcgaaggagaactggccaacggcttttttgtcgagccaacgatttttgaagatgtggatcttcagatgacgattgcccgcgaagaaatcttcggccctgtgctggcgttgattcaagtcgacagtattgaagaggccattaaactggcgaatgatacagagtacgggttgagtgcctcgatttacacaaagaatattgggaatgctttggaattcatcaaagacattgaggcagggttgatcaaagtgaacgcagaaacggcaggagtcgagtttcaagcgccgtttggcggaatgaagcaatcaagctcccattcacgggaacaagggcaggcagctatcgagtttttcacatcgatcaaaacagtatttgtaaaagcttaattgcgcagaaaaaatacctcgatgatgattttcatgcgctttggacgataacaataggtgtcccatttccttggggcaccttcttgtcaaaaagtttagagacggccacaacagaaagggggagagcaggttggcagaacatttatggcaaaagcgggaacaactagttcatcttctcaaggagatgggaaatgtattggttgctttttccggcggggtagatagcacatttttattagcaat

SEQ ID NO: 87221 - protein, 488 aa, Bacillus stearothermophilus
MKVQTEIKTYFNYINGNWVSSVSNNVEPSINPANRHDIVGYVQRSTLEDVNEAVTAANEAQTSWWKRSGVERGEYLYKAAHILEQCLQDIAETMTREMGKTLAEAKAETMRGVHILRYYAGEGARKIGDVIPSSDSEGLLFTTRVPLGVVGVISPWNFPVAIPIWKMAPALVYGNTVVLKPASETAVTAAKVIECFHEAGFPKGVVNMVCGSGSVVGQGIANHPDIDGVTFTGSNTVGKQVGRAAFERGAKYQLEMGGKNPVIVAKDADLDLAVEGTISGGLRSTGQKCTATSRVFIEREVYEPFKAKLLERVKQLKIGNGLDAETWMGPCASESQFHTVLSYIEKGKSEGAKLIYGGNRCLEGELANGFFVEPTIFEDVDLQMTIAREEIFGPVLALIQVDSIEEAIKLANDTEYGLSASIYTKNIGNALEFIKDIEAGLIKVNAETAGVEFQAPFGGMKQSSSHSREQGQAAIEFFTSIKTVFVKA

SEQ ID NO: 87222 - DNA, 1660 bp, Cladosporium herbarum; identical to SEQ ID NO: 38073
  CDS (70)..(1560)

SEQ ID NO: 87223 - protein, 496 aa, Cladosporium herbarum; identical to SEQ ID NO: 38074

SEQ ID NO: 87224 - DNA, 1494 bp, Enchytraeus buchholzi; identical to SEQ ID NO: 38075
  CDS (1)..(1494)

SEQ ID NO: 87225 - protein, 497 aa, Enchytraeus buchholzi; identical to SEQ ID NO: 38076

SEQ ID NO: 87226 - DNA, 1506 bp, Arabidopsis thaliana
  CDS (1)..(1506)
atggcgattccgatgcctactcgccagctattcatcgacggcgaatggagagaacccatcttgaagaagcgaatcccgatcgttaatccagctactgaagaggtcattggtgatattcctgcagctacaacggaggacgtggatgttgctgtcaacgctgctcgaagagcattatcaaggaataaagggaaagattgggccaaagcacctggagctgttcgtgctaagtatttacgtgctattgctgctaaggtaaatgaaagaaagacggatctggcaaagctcgaggcgcttgattgtggtaaaccattggatgaagcagtatgggatatggatgatgttgctggatgttttgaattttatgctgaccttgctgaagggttagatgctaagcagaaagcaccagtctcgcttcccatggagagttttaagagttatgttctgaagcaacctctcggagttgtgggacttattacaccatggaattacccccttttgatggctgtttggaaggtggctccttcccttgctgcagggtgcactgcgattctcaagccatcagagctggcatcagttacttgtttggagcttgctgatatttgtcgagaagttggtcttcctcctggggtcctcaatgttttgactggtttcggttcggaagctggtgctcctttggcatcacatcctggcgtggacaagattgcatttactggaagtttcgccacaggaagtaaggtcatgacagccgctgctcagttggtgaagcctgtttctatggaacttggtgggaagagcccactcattgtgtttgatgacgttgatcttgataaagctgctgaatgggctcttttcggttgcttctggacaaatggtcaaatctgcagtgcaacttcccgccttcttgttcacgaaagcatcgcatctgagttcatagagaagcttgtaaaatggagcaagaacattaaaatttcagaccccatggaagaaggatgcaggcttggtcctgtagttagcaaaggacagtacgagaagatattgaagtttatctcaacggccaagagtgaaggagcaacgatcttgcatggtggttcccgacctgagcatctggaaaagggcttcttcattgaaccaaccatcataactgatgtaaccacttcaatgcaaatatggagagaagaagttttcgggcctgttctttgcgtgaaaacatttgccagtgaggacgaggcaattgagctagcaaatgactctcattacggactaggagctgcagtgatatctaatgacacagaaagatgtgaccgtataagcgaggcctttgaagctgggattgtctggattaactgctcgcagccttgctttacccaagccccatggggtggtgtcaaacgcagtgggtttggacgagaacttggagaatggggacttgataactacttgagtgtgaagcaagtgactctctacacttcaaacgatccctggggatggtacaaatctcccaactaa

SEQ ID NO: 87227 - protein, 501 aa, Arabidopsis thaliana
MAIPMPTRQLFIDGEWREPILKKRIPIVNPATEEVIGDIPAATTEDVDVAVNAARRALSRNKGKDWAKAPGAVRAKYLRAIAAKVNERKTDLAKLEALDCGKPLDEAVWDMDDVAGCFEFYADLAEGLDAKQKAPVSLPMESFKSYVLKQPLGVVGLITPWNYPLLMAVWKVAPSLAAGCTAILKPSELASVTCLELADICREVGLPPGVLNVLTGFGSEAGAPLASHPGVDKIAFTGSFATGSKVMTAAAQLVKPVSMELGGKSPLIVFDDVDLDKAAEWALFGCFWTNGQICSATSRLLVHESIASEFIEKLVKWSKNIKISDPMEEGCRLGPVVSKGQYEKILKFISTAKSEGATILHGGSRPEHLEKGFFIEPTIITDVTTSMQIWREEVFGPVLCVKTFASEDEAIELANDSHYGLGAAVISNDTERCDRISEAFEAGIVWINCSQPCFTQAPWGGVKRSGFGRELGEWGLDNYLSVKQVTLYTSNDPWGWYKSPN

SEQ ID NO: 87228 - DNA, 1513 bp, Atriplex hortensis
  CDS (4)..(1512)
agaatggcgttcccaattcctgctcgtcaactcttcatcgatggagagtggagagaaccccttttaaaaaatcgcatacccatcatcaacccttctactgaagaaatcatcggtgatattcctgcagcaactgcagaggatgtggaggttgcagtggtggcagctagaaaagcctttaagaggaacaaaggcagagattgggctgcactctggtctcatcgtgctaaatatttgcgtgctattgctgctaagataacagagaaaaaagatcattttgttaaactggaaacccttgattctggaaaaccacgggatgaagcagtgttagatattgatgatgttgctacatgctttgaatactttgaatactttgccggtcaagcagaagctctggatgctaaacaaaaggctccagtcaccctgcctatggaaagatttaaaagtcatgttctcaggcagcccattggtgttgttggattaatatccccatggaattacccacttctaatggatacatggaaaattgctcccgcacttgctgctggatgcacgactgtacttaaaccatcagaattggcatctgtgacttgtctagaattcggtgaagtgtgtaatgaagtgggacttcctccaggtgtgttaaatattttgacaggattaggtcctgatgctggtgccccaatagtatctcatcctgatattgacaaggtagcatttactgggagtagtgccactggaagcaagattatggcttctgctgcccaactagttaagcctgttactttggagcttggaggtaaaagtcctgttatcatgttcgaagatattgatattgaaacagctgttgaatggactctttttggcgttttctggacaaatggtcaaatctgtagtgcaacatctagactgcttgtgcatgaaagcattgcagctgaatttgttgataggatggtgaagtggacaaaaaacataaaaatttctgatccatttgaagaaggatgccggcttggccccgttattagtaaaggacagtacgacaagattatgaagttcatatcaacagcgaagagtgaaggggcaacaattttgtgtggaggctcccgtcctgagcatttgaagaaagggtattatattgaacccaccattataactgatattaccacatccatgcaaatatggaaagaggaagtgtttggccctgtcatatgtgttaaaacatttaaaactgaagatgaagccattgaattggcaaatgatacagagtatggtttagctggtgccgtgttttctaaagatcttgaaagatgtgagagggtaactaaggctctagaagttggagctgtttgggttaattgctcacaaccatgctttgttcatgctccatggggaggagtcaagcgtagtggatttggacgtgaacttggggaatggggtatcgagaattacttgaatatcaagcaggtgacgagtgatatctctgatgaaccatggggatggtacaagtctccttgaa

SEQ ID NO: 87229 - protein, 502 aa, Atriplex hortensis
MAFPIPARQLFIDGEWREPLLKNRIPIINPSTEEIIGDIPAATAEDVEVAVVAARKAFKRNKGRDWAALWSHRAKYLRAIAAKITEKKDHFVKLETLDSGKPRDEAVLDIDDVATCFEYFEYFAGQAEALDAKQKAPVTLPMERFKSHVLRQPIGVVGLISPWNYPLLMDTWKIAPALAAGCTTVLKPSELASVTCLEFGEVCNEVGLPPGVLNILTGLGPDAGAPIVSHPDIDKVAFTGSSATGSKIMASAAQLVKPVTLELGGKSPVIMFEDIDIETAVEWTLFGVFWTNGQICSATSRLLVHESIAAEFVDRMVKWTKNIKISDPFEEGCRLGPVISKGQYDKIMKFISTAKSEGATILCGGSRPEHLKKGYYIEPTIITDITTSMQIWKEEVFGPVICVKTFKTEDEAIELANDTEYGLAGAVFSKDLERCERVTKALEVGAVWVNCSQPCFVHAPWGGVKRSGFGRELGEWGIENYLNIKQVTSDISDEPWGWYKSP

SEQ ID NO: 87230 - DNA, 1789 bp, Beta vulgaris
  CDS (36)..(1538)
attttactgaatttcttctactgttttttaaaaaaatgtcgatgccaattccttctcgccagttattcattgatggagagtggagagaacccatcaagaaaaatcgcatccctattatcaacccatctaatgaggagatcatcggtgatattccggcgggcagttccgaggatatagaggttgcggtggcggccgctcgaagagcccttaagaggaataagggaagagagtgggctgctacatctggagctcatcgtgccagatatttgcgtgctattgctgctaaagtgacagaaagaaaagatcattttgttaaacttgaaacgattgattctgggaagccatttgatgaagcagtgttggatattgatgatgtggccacatgttttgaatattttgccggtcaagcagaagccatggacgctaaacaaaaagctcccgtcacccttccaatggagagattcaaaagtcatgttctcaggcagcccattggtgttgttggattgattaccccatggaattacccacttctaatggctacatggaaaattgctccagctcttgctgctgggtgtacggctgtactgaagccatcagagttggcatctataacttgcctagaatttggagaagtttgcaatgaagtgggacttcctccgggggtgttgaatattgtgactggattgggtccagatgccggtgcaccgctagcagctcatcctgatgtcgacaaggttgcatttactggaagtagtgccactggcagcaaagtgatggcttcagctgctcaattagttaagcctgttacattggaacttggaggtaaaagtcctattatcgtgttcgaagatgttgatattgatcaagttgttgaatggaccatgtttggctgtttctggacaaatggtcaaatatgcagtgcaacatccagactccttgtgcatgaaagtattgcagctgaatttattgataggcttgtaaagtggaccaaaaacattaagatatctgatccatttgaggaaggctgtcgacttggccctgttattagtaaggggcagtacgataaaattatgaagttcatatcaacagcaaagagtgagggggcaactatcttgtgtggaggttcccgtcctgagcatttgaagaaagggtatttcatcgaaccaactattataagtgatatctccacatccatgcaaatatggagggaagaagtttttggccctgtcttatgtgttaaaacatttagttctgaagatgaagctcttgaattggcaaatgatacagagtatggtttagcttctgctgtgttttcaaaagaccttgaaaggtgtgaaagggtatcgaagcttttggaatctggagccgtgtgggttaattgctcacaaccatgctttgttcatgctccatggggaggcatcaagcgtagtggttttggacgtgagcttggggaatggggtatcgagaattacttgaacatcaagcaggtcacgtcggatatttctaacgaaccatggggatggtacaagtctccttaaagctactctcctataagaaactttgcacgaatgctgccgttgtaaagtgaacagtggataacttaaggatccagtttagttcttgaatatatgtgattgaataaaggtggtttgatgttggagtaggattagcaaaataattcagacaattgagtttgaccatgaaatccttgtttttcttctagattcatggcatattaaacttgtttgctacttttatttgctggaaaaaaaaaaaaaaaaaaaaaaaa

SEQ ID NO: 87231 - protein, 500 aa, Beta vulgaris
MSMPIPSRQLFIDGEWREPIKKNRIPIINPSNEEIIGDIPAGSSEDIEVAVAAARRALKRNKGREWAATSGAHRARYLRAIAAKVTERKDHFVKLETIDSGKPFDEAVLDIDDVATCFEYFAGQAEAMDAKQKAPVTLPMERFKSHVLRQPIGVVGLITPWNYPLLMATWKIAPALAAGCTAVLKPSELASITCLEFGEVCNEVGLPPGVLNIVTGLGPDAGAPLAAHPDVDKVAFTGSSATGSKVMASAAQLVKPVTLELGGKSPIIVFEDVDIDQVVEWTMFGCFWTNGQICSATSRLLVHESIAAEFIDRLVKWTKNIKISDPFEEGCRLGPVISKGQYDKIMKFISTAKSEGATILCGGSRPEHLKKGYFIEPTIISDISTSMQIWREEVFGPVLCVKTFSSEDEALELANDTEYGLASAVFSKDLERCERVSKLLESGAVWVNCSQPCFVHAPWGGIKRSGFGRELGEWGIENYLNIKQVTSDISNEPWGWYKSP

SEQ ID NO: 87232 - DNA, 1503 bp, Schizosaccharomyces pombe
  CDS (1)..(1503)
atgactatagatttaaatgttatacaaagtgacattatctcagcgcgtcgagctcctgaaaatagtctgtttatagatgggaaattcgtttctcctatcgagccagctgcgaagcccatccctttaatcaatccagcaactgaggagattattggcacttgtgcaaatgcttctgccaaagatgtcgattcagctgtggagaatgcttacaacacttttcgttctggaatatgggccaaatggcctggcaaacaacgtgggttggttttgagaaagatagctaaaatgatgagagaaaagcgtgaacttcttgctggaatagatactattaactgtggaaagccaaccccatacgcattgttcgatatagatagctgcgcagacatgtttgagtattatgctgaagtggcagaaaccgacaaccctacagttaaggttcccttacctaacaatccaggattttgcgcatttgaaaaacgttttcctagaggtgtcatcggtgtcattactccatggaatttccctctgaaaatggctttatggaagctggttccagctattgcaagcggtaattgcgtagttttaaaaccttcagagttagccccatggtcatgccttgaattcgcactgatttgcaaggaagcgggtttgcccgatggtgttttgaatgttatcattggatctggtaaagagtcgggagctgcacttagctgtcatcctaagattgcctatctagcatttacaggatccttggctaccggaaaaaagattatgcatgctgctgctgaaaatattgtcccgttaacccttgaacttgggggtaagtcacctctaataatttgtgaagatgcggatctttctctcgctattccttctgcagcctttgctattttctttaatcaaggtgaagcctgtactgcggcttctcgtttgatcgttcatgaaagtgttgcggatgaagtacttggcggcttagtgagtgaagctaataaactaataattggaaatggattggatcctcaagtaaccttgggccctgtagtgagcaaaacccagtttgaaaaaattgttagctacattcaatcagctataaatgaaggatgtaaatgtgtagtaggtggacttcccagatctgaacaaaaaggttattttattccacccaccgtatttacgaatgtgcaaactcacaacaagatttggagagaggaaatctttgggcctgtcttagctgtgaagacattccatacaaatgaggaagcattggagttggctaatgactctgaatatggacttggttccggtgttttttctacaaatcctaaaacccttgaatttttcagcaataacattgaggcaggtatgtgctcattaaataactatcatgttgttacacacgagcttccatggattggatggaagcactctggattaggtgttggcttatctaagcacggctacaatgagtacatgcgtctcaaacaaatcactcagtatgttggctaa

SEQ ID NO: 87233 - protein, 500 aa, Schizosaccharomyces pombe
MTIDLNVIQSDIISARRAPENSLFIDGKFVSPIEPAAKPIPLINPATEEIIGTCANASAKDVDSAVENAYNTFRSGIWAKWPGKQRGLVLRKIAKMMREKRELLAGIDTINCGKPTPYALFDIDSCADMFEYYAEVAETDNPTVKVPLPNNPGFCAFEKRFPRGVIGVITPWNFPLKMALWKLVPAIASGNCVVLKPSELAPWSCLEFALICKEAGLPDGVLNVIIGSGKESGAALSCHPKIAYLAFTGSLATGKKIMHAAAENIVPLTLELGGKSPLIICEDADLSLAIPSAAFAIFFNQGEACTAASRLIVHESVADEVLGGLVSEANKLIIGNGLDPQVTLGPVVSKTQFEKIVSYIQSAINEGCKCVVGGLPRSEQKGYFIPPTVFTNVQTHNKIWREEIFGPVLAVKTFHTNEEALELANDSEYGLGSGVFSTNPKTLEFFSNNIEAGMCSLNNYHVVTHELPWIGWKHSGLGVGLSKHGYNEYMRLKQITQYVG

SEQ ID NO: 87234 - DNA, 1797 bp, Spinacia oleracea
  CDS (68)..(1561)
cgttgcgtgctcgccttaccctctcaactcaatttcttcaacccaatttcttcgcatttaaccaagaatggcgttcccaattcctgctcgtcagctattcatcgacggagagtggagagaacccattaaaaaaaatcgcatacccgtcatcaatccgtccactgaagaaatcatcggtgatattccggcagccacggctgaagatgtggaggttgcggtggtggcagctcgaagagcctttaggaggaacaattggtcagcaacatctggggctcatcgtgccacatacttgcgtgctattgctgctaagataacagaaaaaaaagatcatttcgttaaactggaaaccattgattctgggaaaccttttgatgaagcagtgctggacattgatgacgttgcttcatgttttgaatattttgccggacaagcagaagctcttgatggtaaacaaaaggctccagtcaccctgcctatggaaaggttcaaaagtcatgttctcaggcagccccttggtgttgttggattaatatccccatggaattacccacttctaatggctacatggaaaattgctccagcacttgctgctgggtgtacagctgtacttaagccatccgagttggcatctgtgacttgtctagaattcggtgaagtttgcaacgaagtgggacttcctccaggcgtgttgaatatcttgacaggattaggtccagatgctggtgcaccattagtatcacaccccgatgttgacaagattgcctttactgggagtagtgccactggaagcaaggttatggcttctgctgcccaattggttaagcctgttacattagaacttgggggtaaaagtcctattgtagtgtttgaagatgttgatattgataaagttgtggaatggactatttttggctgtttctggacaaatggtcaaatatgtagtgcaacgtctagactgcttgtgcatgaaagtattgcagctgagtttgttgataagcttgtaaaatggacgaaaaacattaaaatttctgacccatttgaagaaggatgccggcttggccctgttattagtaaaggacagtacgacaaaattatgaagttcatatcaacagcaaagagtgagggggcaactattttgtatggaggttcccgtcctgagcatttgaagaaaggttattacattgaacccaccattgtaactgatatctccacatccatgcaaatatggaaagaggaagtttttggccctgtcttgtgtgttaaaacatttagttccgaagatgaagccattgcattggcaaatgatacagagtacggtttagctgctgctgtgttttctaatgatcttgaaagatgtgagaggataacgaaggctctagaagttggagctgtttgggttaattgctcacaaccatgctttgttcaagctccttggggaggcatcaagcgtagtggttttggacgtgaacttggagaatggggtatccagaattacttgaatatcaagcaggtgactcaagatatttctgatgaaccatggggatggtacaagtctccttgaagctatgatcaaatttgaatgacggtgttgtttttgttaagtgagcagcggttggactgtaccttgaaatggttcgcagagaaggtcgagtttacagtaaaaatggattgaataaagggttggttgatgcagaagtccaacaagcatagcttaattttgttgtatcatgtaatagtgtgtattatttcagacaattgagttggatcagaaataagatgatacagagtttgacaatg

SEQ ID NO: 87235 - protein, 497 aa, Spinacia oleracea
MAFPIPARQLFIDGEWREPIKKNRIPVINPSTEEIIGDIPAATAEDVEVAVVAARRAFRRNNWSATSGAHRATYLRAIAAKITEKKDHFVKLETIDSGKPFDEAVLDIDDVASCFEYFAGQAEALDGKQKAPVTLPMERFKSHVLRQPLGVVGLISPWNYPLLMATWKIAPALAAGCTAVLKPSELASVTCLEFGEVCNEVGLPPGVLNILTGLGPDAGAPLVSHPDVDKIAFTGSSATGSKVMASAAQLVKPVTLELGGKSPIVVFEDVDIDKVVEWTIFGCFWTNGQICSATSRLLVHESIAAEFVDKLVKWTKNIKISDPFEEGCRLGPVISKGQYDKIMKFISTAKSEGATILYGGSRPEHLKKGYYIEPTIVTDISTSMQIWKEEVFGPVLCVKTFSSEDEAIALANDTEYGLAAAVFSNDLERCERITKALEVGAVWVNCSQPCFVQAPWGGIKRSGFGRELGEWGIQNYLNIKQVTQDISDEPWGWYKSP

SEQ ID NO: 87236 - DNA, 1488 bp, Ommastrephes sloanei; identical to SEQ ID NO: 38079
  CDS (1)..(1488)

SEQ ID NO: 87237 - protein, 495 aa, Ommastrephes sloanei; identical to SEQ ID NO: 38080

SEQ ID NO: 87238 - DNA, 1788 bp, Nicotiana plumbaginifolia
  CDS (102)..(1592)
ggcacgaggtaaaaatatccacaatttctcttcttttttctttgttttctcttactagaagaaatatttctagtaaaaaaagctttgatttattggtaaaaatggcaggtaatggagtttttgtagatataattgagggagatgtgtttaagtactattctgaaggagaatggaagaaatcagcttctggaaaatctgttgcaatcatcaatcctactactagaaaaacacaatataaggttcaagcatgtactcaagaagaggtgaacaaggtaatggaagtagcaaagactgcacaaaaatcatgggctaaaacaccactctggaaaagagcagagctacttcataaggcagctgcaattttgaaagaacacaaagcccctattgcagaatgtcttgtaaaagaaattgcaaaaccagctaaagatgctgtcactgaggttgtaaggtctggagatttggtttcttacactgctgaagaaggagttagaattcttggggagggtaagttcttggtatctgatagtttccctggaaatgaaaggaccaaatattgcctgacatccaagatcccattgggtgtgattttggccattcctcctttcaactatccagtcaatctcgctgtctccaagattgctcctgcactgattgctgggaactctttagttctcaagccaccaactcagggcgctgtggcttgcctccatatggtacattgcttccacttagctggattccctaaaggccttatcagttgcgtgacgggaaaaggttctgaaatcggtgattttctcactatgcatcctggagtacactgtataagcttcactggtggagatactggtgttgcaatctcaaagaaagcaggaatgatccctctacagatggagctcggaggaaaggatgcttgtatcgttcttgaggatgctgatttagatttggccgccggaagtattgtgaaaggaggtttttcttacagtggtcagagatgtacggccgttaaggtcgtgttggtgatggaatcagttgctgacgctcttgttgagaaggtaaatgctaaagtggcaaaattaaccgttgggccaccagaagatgattgtgatatcactccagttgtctccgagtcatctgcaaacttcatcgaggggttggtcatggacgcgaagcagaaaaatgcaactttttgccagcaatacaagagagaaggaaacctcatctggcccttgttgttagacaatgttaggccagacatgaggatcgcatgggaagaaccattcgggccagttttgcccgttattcgcattaactctgtcgaagaaggaattcaccactgcaatgctagcaatttcggtctgcagggttgtgtattcaccaaagacatcaacaaagcaatactgatcagtgatgccatggaaacaggaacagttcagattaactcagctccggctcgtggaccggatcatttcccattccagggaattaaggacagtggaattggatcacaagggataactaacagcattaacatgatgaccaaagtcaagaccactgttatcaacttgccaaccccatcttatactatggggtaaaacactattgctttagaaataagacaataattagtaagctatgttatagattgtagtgaacttgcagccaagttttatttctgagttattgtttatttccccttttgaacttgtcaacgttaataatattggtgacattggggcataatatcgagttaactatttgcttttggatttctgtaaaaaaaaaaaaaaa

SEQ ID NO: 87239 - protein, 496 aa, Nicotiana plumbaginifolia
MAGNGVFVDIIEGDVFKYYSEGEWKKSASGKSVAIINPTTRKTQYKVQACTQEEVNKVMEVAKTAQKSWAKTPLWKRAELLHKAAAILKEHKAPIAECLVKEIAKPAKDAVTEVVRSGDLVSYTAEEGVRILGEGKFLVSDSFPGNERTKYCLTSKIPLGVILAIPPFNYPVNLAVSKIAPALIAGNSLVLKPPTQGAVACLHMVHCFHLAGFPKGLISCVTGKGSEIGDFLTMHPGVHCISFTGGDTGVAISKKAGMIPLQMELGGKDACIVLEDADLDLAAGSIVKGGFSYSGQRCTAVKVVLVMESVADALVEKVNAKVAKLTVGPPEDDCDITPVVSESSANFIEGLVMDAKQKNATFCQQYKREGNLIWPLLLDNVRPDMRIAWEEPFGPVLPVIRINSVEEGIHHCNASNFGLQGCVFTKDINKAILISDAMETGTVQINSAPARGPDHFPFQGIKDSGIGSQGITNSINMMTKVKTTVINLPTPSYTMG

SEQ ID NO: 87240 - DNA, 1631 bp, Pisum sativum
  CDS (79)..(1569)
gcggccgcctacgctcttcttatatatctacattccaaaacttgagagttttcatctcactacatttcatttcctaacatggctgctaccggagttctggcagagattatagatggagatgtatacaaatattatgcagatggtgaatggaagaaatccacctctggtaaaagtgttgccatcatcaaccctactacaagaaaacctcaatacaaagttcaagcttgttcacaagaagaggttaataaggttatggattcagcaaaatcagcgcaaaaatcatgggcgaaaactccactttggaagagagctgaacttcttcacaaggctgcagcaattctgaaagaacacaaagctgcaattgcagaatgtttagtgaaagaaatagcaaagccagctaaagatgcagtcactgaggttgtaagatctggtgatttggtttcttactgtgctgaagaaggagtgaggattcttggagagggaaagtttttggtttctgatagttttcctggaaatgaaaggaccaaatattgtctcacttctaagattccattaggagttattttagccattccgccttttaactatcctgtcaatctcgctgtctcgaaaattgctcctgcattgattgctggaaattctattgtgcttaagcctccaactcagggagctgttgcggctctgcacatggttcattgctttcacttggctggttttccgaaaggcctaatcagctgtgttactggaaaaggctcggaaattggtgactttcttacaatgcatccaggagtcaactgtataagcttcactggtggagatactggcattgcgatttcaaagaagtcgggtatgattcctctacaaatggaattgggaggaaaagatgcttgcattgtacttgaagatgctgatcttgatttggttgctgcaaacatcataaaaggaggtttctcatacagtggtcagaggtgtactgctgtgaaggttgttctggtaatggaatcagtagcggatgctttagtcgagaaagtgaaggttaaggtagcgaaactaagtgttggaccgcccgaggatgactctgatatcacaccagttgtatcggaatcatcggccaatttcatcgaaggcttggtgaatgatgcgaaagagaaaggtgcaacattctgtcaggaatacaagagagaagggaatctcatttggcctttgttacttgataatgttaggccagacatgagaattgcatgggaagagccatttggaccggttttgcctgttattaggatcaattcggttgaagaaggtattcatcattgtaatgctagcaacttcggacttcagggatgtgtattcacgaaggatatcaataaagcaataatgattagtgatgcgatggaatcaggaacagttcagataaactccgcaccagctcgtggaccggatcattttccctttcagggaataaaggacagtggaattggatcccagggaattaccaacagcataaacatgatgacaaaagtgaaaactactgtgataaatttgcctagtccttcttataccatgggctaataataatactatctctatatatatgtcattgtgagcagataaataagtattgttgttggcgg

SEQ ID NO: 87241 - protein, 496 aa, Pisum sativum
MAATGVLAEIIDGDVYKYYADGEWKKSTSGKSVAIINPTTRKPQYKVQACSQEEVNKVMDSAKSAQKSWAKTPLWKRAELLHKAAAILKEHKAAIAECLVKEIAKPAKDAVTEVVRSGDLVSYCAEEGVRILGEGKFLVSDSFPGNERTKYCLTSKIPLGVILAIPPFNYPVNLAVSKIAPALIAGNSIVLKPPTQGAVAALHMVHCFHLAGFPKGLISCVTGKGSEIGDFLTMHPGVNCISFTGGDTGIAISKKSGMIPLQMELGGKDACIVLEDADLDLVAANIIKGGFSYSGQRCTAVKVVLVMESVADALVEKVKVKVAKLSVGPPEDDSDITPVVSESSANFIEGLVNDAKEKGATFCQEYKREGNLIWPLLLDNVRPDMRIAWEEPFGPVLPVIRINSVEEGIHHCNASNFGLQGCVFTKDINKAIMISDAMESGTVQINSAPARGPDHFPFQGIKDSGIGSQGITNSINMMTKVKTTVINLPSPSYTMG

SEQ ID NO: 87242 - DNA, 1710 bp, Arabidopsis thaliana
  CDS (58)..(1644)
ccacgcgtccgcactagtgttcgtcatctttgttcgattgaagtttgggaagtggtgatggtaataggagcagcagcgcgtgtagccatcggcggttgtcgaaagctcatctcgtcacatacctccctcctcctcgtctcttctcagtgtcgccagatgagtatggacgcacaaagcgtttctgaaaagcttaggagttctggtctattacgaactcaaggtctaattggaggcaagtggcttgactcgtatgacaataagacaatcaaggttaacaatccagcaaccggtgaaattatagctgatgttgcatgtatgggaacaaaagagacaaatgatgctattgcttcttcttatgaagcatttacttcttggagcagattgactgctggagagaggagtaaagttttacggagatggtatgacctcctgattgcacacaaggaagaacttggacaacttataactttggagcaaggaaaaccactcaaggaagccatcggagaggtagcatatggggcaagttttattgagtactatgcggaggaggcaaaacgtgtatatggtgatataattcctccgaatctgtctgatcgccgactgttggttctaaaacagcctgtcggtgttgttggtgcaattaccccttggaacttccccttagccatgattactcggaaggtcggccctgctcttgcttctggatgcacggtggttgttaaaccatctgaacttacgcccctaacagcacttgctgcggctgaacttgcacttcaagctggagttcctccgggggcacttaatgtggtcatgggaaatgctcctgaaattggggatgctttgcttacgagtccacaggtgagaaaaatcacgttcacgggatcaacagcagttgggaagaagttgatggcagctgctgcacctaccgtcaagaaggtttctctagaacttggcggcaacgcaccctctatagtatttgatgatgcagacctggatgtagctgtaaaaggaacgcttgcagcgaaatttaggaatagtggtcagacatgtgtttgtgcgaacagagtacttgtgcaagatggtatctatgataaatttgctgaggccttttctgaagcggttcaaaaattagaagtaggagatgggtttagggatgggacaacccagggtccacttataaatgatgcagcagtgcaaaaggtagagacatttgtacaagatgctgtttctaagggagcaaaaatcatcattggtggcaaaaggcacagtctagggatgactttctatgagcctactgttatccgcgatgtttcggataacatgatcatgtctaaggaggagatttttggacctgtagctccccttattcggttcaaaaccgaggaggacgctatcagaattgctaatgacacaattgcaggacttgctgcttatatattcacaaacagtgtccaaagatcttggcgtgtatttgaagcacttgaatatggacttgtaggggtgaacgaaggactcatatcaacagaggtggctccattcgggggagtgaagcagtctggtcttggaagggaaggatccaagtatggtatggacgaataccttgagatcaaatacgtatgcttgggagatatgaatagacactgatttggtttgtttgaaaagctttagaaattgtaagtttttctcctccactcgtatccttctaataaa

SEQ ID NO: 87243 - protein, 528 aa, Arabidopsis thaliana
MVIGAAARVAIGGCRKLISSHTSLLLVSSQCRQMSMDAQSVSEKLRSSGLLRTQGLIGGKWLDSYDNKTIKVNNPATGEIIADVACMGTKETNDAIASSYEAFTSWSRLTAGERSKVLRRWYDLLIAHKEELGQLITLEQGKPLKEAIGEVAYGASFIEYYAEEAKRVYGDIIPPNLSDRRLLVLKQPVGVVGAITPWNFPLAMITRKVGPALASGCTVVVKPSELTPLTALAAAELALQAGVPPGALNVVMGNAPEIGDALLTSPQVRKITFTGSTAVGKKLMAAAAPTVKKVSLELGGNAPSIVFDDADLDVAVKGTLAAKFRNSGQTCVCANRVLVQDGIYDKFAEAFSEAVQKLEVGDGFRDGTTQGPLINDAAVQKVETFVQDAVSKGAKIIIGGKRHSLGMTFYEPTVIRDVSDNMIMSKEEIFGPVAPLIRFKTEEDAIRIANDTIAGLAAYIFTNSVQRSWRVFEALEYGLVGVNEGLISTEVAPFGGVKQSGLGREGSKYGMDEYLEIKYVCLGDMNRH

SEQ ID NO: 87244 - DNA, 2263 bp, Saccharomyces cerevisiae
  CDS (466)..(1959)
tgaactgaatctttttttccggctgtcctcttacagttgagttacaatattttgccagaaatatttacatttttttacccaatctctataataattattttaattcctaatccgcttcaggcccgcggtcgttgaagtgctatagtttatattcagtacattgtctttaatctctcagtattattttatcaatagtaaatacttcaagtccatcgcacggcgtggtggtgataaagggaaaatgcgcgcgggattagcaaaggcggccaatggattaagggtgacaagatagcaccacatcacatcacatcaccatcagtaatggagaggaaatagggtataaatactcgtcagagatcaatagatattatttcgcaacgtcctttattgttctgttcttatttgatcaattaagctagaaaaccagctacattaaaagcaaattttacaaactactatttcaacatgactttgagtaagtattctaaaccaactctaaacgaccctaatttattcagagaatctggttatattgacggaaaatgggttaagggcactgacgaagtttttgaggtggtagaccctgcttccggcgaaatcatagcaagagttcccgaacaaccagtctccgtggttgaggaagcgattgatgttgcctatgaaactttcaagacgtacaagaatacaacaccaagagagagggcaaagtggctcagaaacatgtataacttaatgcttgaaaatttggatgatctggcaaccatcattactttagaaaatggtaaagctctaggggaagctaaaggagaaatcaaatacgcggcttcgtattttgagtggtacgccgaggaagcaccccgtttatatggtgctactattcaacccttgaaccctcacaacagagtattcacaattaggcaacctgttggtgtatgcggtataatttgtccatggaattttccgagcgccatgatcacgagaaaggccgccgctgctttagctgtgggctgcacagtagtcatcaagccagactctcaaacgccgctatctgctttagcaatggcatatttggctgaaaaggcaggctttcccaagggttcgtttaatgttattctttcacatgccaacacaccaaagcttggtaaaacattatgtgaatcaccaaaagtcaagaaagttacttttactggttctacaaacgtcggtaaaatcttgatgaaacaatcttcttctactttgaagaaactgtcttttgagctgggtggtaacgcccctttcatagtctttgaggatgccgatttggatcaagccttggaacaagccatggcttgtaaatttaggggtttgggtcaaacatgtgtgtgcgcaaatagactttacgttcactcatccataattgataaatttgcgaaattactcgcggagagggtcaaaaaattcgtaattggccatggtttggacccaaaaactacacatggttgtgtcattaactccagcgctattgaaaaagttgaaagacataaacaggatgccattgataagggagcaaaagttgtgcttgaaggtggacgtttaactgagttaggtcctaacttttatgctccagtaattttgtcacacgttccctcaacagctattgtttccaaggaggagacttttggtccattatgtccaatcttttcttttgatactatggaagaagttgtcggatatgctaatgatactgagtttggtttagcagcatatgtcttttctaaaaatgtcaacactttatacactgtgtctgaagctttggaaactggtatggtttcatgtaatacaggtgttttttcggattgttctataccatttggtggtgttaaagagtcaggatttggaagagaaggttcgctatatggtattgaagattacactgttttgaagaccatcacaattgggaatttgccaaacagcatttaaagcaatagtaatcgtggacgatacttagaattgaatatgattctttgtaatgattgtatatatctattgcatgtataaatactctactcctcgtatatagaaagttaagtaaatttttgaaagaaaagagttcatatatttacggagttttgaagtttttcacaagcggaataagtgataccattcataaaatatcatatctatctatctatctatttttgtgagatatatggtacgaaaataaatgcctttccttttaagcctttctgtaagcttttatgtatacaacgtttctttatcttta

SEQ ID NO: 87245 - protein, 497 aa, Saccharomyces cerevisiae
MTLSKYSKPTLNDPNLFRESGYIDGKWVKGTDEVFEVVDPASGEIIARVPEQPVSVVEEAIDVAYETFKTYKNTTPRERAKWLRNMYNLMLENLDDLATIITLENGKALGEAKGEIKYAASYFEWYAEEAPRLYGATIQPLNPHNRVFTIRQPVGVCGIICPWNFPSAMITRKAAAALAVGCTVVIKPDSQTPLSALAMAYLAEKAGFPKGSFNVILSHANTPKLGKTLCESPKVKKVTFTGSTNVGKILMKQSSSTLKKLSFELGGNAPFIVFEDADLDQALEQAMACKFRGLGQTCVCANRLYVHSSIIDKFAKLLAERVKKFVIGHGLDPKTTHGCVINSSAIEKVERHKQDAIDKGAKVVLEGGRLTELGPNFYAPVILSHVPSTAIVSKEETFGPLCPIFSFDTMEEVVGYANDTEFGLAAYVFSKNVNTLYTVSEALETGMVSCNTGVFSDCSIPFGGVKESGFGREGSLYGIEDYTVLKTITIGNLPNSI

SEQ ID NO: 87246 - DNA, 1512 bp, Schizosaccharomyces pombe
  CDS (1)..(1512)
atgtctacaaaactcgttgatcacgtcgaaattaccgttcctacaggaaaaacttacattcaacctgtcggtctctttatcaataaccaacatgtcgattccgttcacggtggtcgtgtgaaggtttactctccttctactgagaaacttatttgtgaggtagctgacgccgacgaagaggatgtcgatatcgccgtgaaagttgctcgtgccgctttccagaccgatgctccatggcgcaagttttccagcgctcaacgtggacgttgcctctcccgtctcgctgactgtatcgagcaaaacttggaatacctcgcttctattgagactcttgacaatggtaagagtatcactttggctagaggtgacgttcaagctgctgccgattgtttccgttattatggtggttgggccgataaggattatggtcaaaccattgaaaccgacattaagcgttttgcctatactcgtcacgaacccattggtgtatgtggtcaaatcatcccctggaatttccctttcttgatgtgcgcttggaaaattgctcctgccgtcgcttgtggtaatactattattttgaagactgccgaactcactcctctttccgctctgtgtcttaccaagtttgttcctgaatgtggcttccctccaggtgtcatcaatgttctcagcggtgatggtcgccgttgtggtaacgctattagttctcacatggacattgataaggtggcctttaccggttctaccggtgtcggtcgtatggttatgcgtgctgccgcctcctccaacctgaagaaggtcactcttgaattgggtggtaagtctcccaatattgttttcaacgatgccgatttggactcagctgctgtctggactaactatggtatcttttacaactctggtcaagtctgttgtgcaggtagccgtgtctacgtgcaagaggatgtttacgatgagttcattaaacgcatggttgccaaggccaagactttgaaggttggtgatcctttcgccgaagataccttccaaggtgctcaagttagtaagcaacagtatgaacgtattgttagttatattgagagtggcattgctcatggtgccaaattagagattggtggtaagcgtcatggtaatctcggttactttgtcgaacctactattctctccaacgttaccgaggacatggctgtcggtaaggaggaaatttttggacccgttcttgccgtcattaaattcaagaccatcgaggaggccatccgtcgcggtaacaacagtacatatggtttagctgctggtgtacacactaacaatattaccaatgccatcaaggtcagcaatgctcttgaagccggtactgtttgggtgaattgttataacttacttcatcaccaaattccctttggtggttataaggagagtggcatcggtcgcgaattgggctcttacggtcttaccaattatactcaaacaaaagctgttcacatcaacctgggaatggattctcccatttaa

SEQ ID NO: 87247 - protein, 503 aa, Schizosaccharomyces pombe
MSTKLVDHVEITVPTGKTYIQPVGLFINNQHVDSVHGGRVKVYSPSTEKLICEVADADEEDVDIAVKVARAAFQTDAPWRKFSSAQRGRCLSRLADCIEQNLEYLASIETLDNGKSITLARGDVQAAADCFRYYGGWADKDYGQTIETDIKRFAYTRHEPIGVCGQIIPWNFPFLMCAWKIAPAVACGNTIILKTAELTPLSALCLTKFVPECGFPPGVINVLSGDGRRCGNAISSHMDIDKVAFTGSTGVGRMVMRAAASSNLKKVTLELGGKSPNIVFNDADLDSAAVWTNYGIFYNSGQVCCAGSRVYVQEDVYDEFIKRMVAKAKTLKVGDPFAEDTFQGAQVSKQQYERIVSYIESGIAHGAKLEIGGKRHGNLGYFVEPTILSNVTEDMAVGKEEIFGPVLAVIKFKTIEEAIRRGNNSTYGLAAGVHTNNITNAIKVSNALEAGTVWVNCYNLLHHQIPFGGYKESGIGRELGSYGLTNYTQTKAVHINLGMDSPI

SEQ ID NO: 87248 - DNA, 1389 bp, Escherichia coli
  CDS (1)..(1389): transl_table=11
atgaccattactccggcaactcatgcaatttcgataaatcctgccacgggtgaacaactttctgtgctgccgtgggctggcgctgacgatatcgaaaacgcacttcagctggcggcagcaggctttcgcgactggcgcgagacaaatatagattatcgtgctgaaaaactgcgtgatatcggtaaggctctgcgcgctcgtagcgaagaaatggcgcaaatgatcacccgcgaaatgggcaaaccaatcaaccaggcgcgcgctgaagtggcgaaatcggcgaatttgtgtgactggtatgcagaacatggtccggcaatgctgaaggcggaacctacgctggtggaaaatcagcaggcggttattgagtatcgaccgttggggacgattctggcgattatgccgtggaattttccgttatggcaggtgatgcgtggcgctgttcccatcattcttgcaggtaacggctacttacttaaacatgcgccgaatgtgatgggctgtgcacagctcattgcccaggtgtttaaagatgcgggtatcccacaaggcgtatatggctggctgaatgccgacaacgacggtgtcagtcagatgattaaagactcgcgcattgctgctgtcacggtgaccggaagtgttcgtgcgggagcggctattggcgcacaggctggagcggcactgaaaaaatgcgtactggaactgggcggttcggatccgtttattgtgcttaacgatgccgatctggaactggcggtgaaagcggcggtagccggacgttatcagaataccggacaggtatgtgcagcggcaaaacgctttattatcgaagagggaattgcttcggcatttaccgaacgttttgtggcagctgcggcagccttgaaaatgggcgatccccgtgacgaagagaacgctctcggaccaatggctcgttttgatttacgtgatgagctgcatcatcaggtggagaaaaccctggcgcagggtgcgcgtttgttactgggcggggaaaagatggctggggcaggtaactactatccgccaacggttctggcgaatgttaccccagaaatgaccgcgtttcgggaagaaatgtttggccccgttgcggcaatcaccattgcgaaagatgcagaacatgcactggaactggctaatgatagtgagttcggcctttcagcgaccatttttaccactgacgaaacacaggccagacagatggcggcacgtctggaatgcggtggggtgtttatcaatggttattgtgccagcgacgcgcgagtggcctttggtggcgtgaaaaagagtggctttggtcgtgagctttcccatttcggcttacacgaattctgtaatatccagacggtgtggaaagaccggatctga

SEQ ID NO: 87249 - protein, 462 aa, Escherichia coli
MTITPATHAISINPATGEQLSVLPWAGADDIENALQLAAAGFRDWRETNIDYRAEKLRDIGKALRARSEEMAQMITREMGKPINQARAEVAKSANLCDWYAEHGPAMLKAEPTLVENQQAVIEYRPLGTILAIMPWNFPLWQVMRGAVPIILAGNGYLLKHAPNVMGCAQLIAQVFKDAGIPQGVYGWLNADNDGVSQMIKDSRIAAVTVTGSVRAGAAIGAQAGAALKKCVLELGGSDPFIVLNDADLELAVKAAVAGRYQNTGQVCAAAKRFIIEEGIASAFTERFVAAAAALKMGDPRDEENALGPMARFDLRDELHHQVEKTLAQGARLLLGGEKMAGAGNYYPPTVLANVTPEMTAFREEMFGPVAAITIAKDAEHALELANDSEFGLSATIFTTDETQARQMAARLECGGVFINGYCASDARVAFGGVKKSGFGRELSHFGLHEFCNIQTVWKDRI

SEQ ID NO: 87250 - DNA, 1509 bp, Oryza sativa; identical to SEQ ID NO: 38083
  CDS (1)..(1509)

SEQ ID NO: 87251 - protein, 502 aa, Oryza sativa; identical to SEQ ID NO: 38084

SEQ ID NO: 87252 - DNA, 1584 bp, Oryza sativa; identical to SEQ ID NO: 38085
  CDS (1)..(1584)

SEQ ID NO: 87253 - protein, 527 aa, Oryza sativa; identical to SEQ ID NO: 38086

SEQ ID NO: 87254 - DNA, 1686 bp, Oryza sativa; identical to SEQ ID NO: 38087
  CDS (1)..(1686)

SEQ ID NO: 87255 - protein, 561 aa, Oryza sativa; identical to SEQ ID NO: 38088

SEQ ID NO: 87256 - DNA, 1518 bp, Oryza sativa; identical to SEQ ID NO: 38093
  CDS (1)..(1518)

SEQ ID NO: 87257 - protein, 505 aa, Oryza sativa; identical to SEQ ID NO: 38094

SEQ ID NO: 87258 - DNA, 1650 bp, Oryza sativa; identical to SEQ ID NO: 38095
  CDS (1)..(1650)

SEQ ID NO: 87259 - protein, 549 aa, Oryza sativa; identical to SEQ ID NO: 38096

SEQ ID NO: 87260 - DNA, 1794 bp, Oryza sativa; identical to SEQ ID NO: 38099
  CDS (1)..(1794)

SEQ ID NO: 87261 - protein, 597 aa, Oryza sativa; identical to SEQ ID NO: 38100

SEQ ID NO: 87262 - DNA, 1500 bp, Oryza sativa; identical to SEQ ID NO: 38103
  CDS (1)..(1500)

SEQ ID NO: 87263 - protein, 499 aa, Oryza sativa; identical to SEQ ID NO: 38104

SEQ ID NO: 87264 - DNA, 1530 bp, Oryza sativa
  CDS (1)..(1530)
atggggagcttcgcgaggaaggagcaccagttcctcgccgagcttggcctcgcgccgcggaaccccgggtccttcgcctgcggcgcctggggcggctcgggccccgtcgtcacgtccaccaacccgacgaacaaccaggtcatcgcggaggtcgtggaggcgtccgcgcgtgagtacgaggagggcatgcgcgcctgctacgatgccgccaagacctggatggcgattccagctccaaagcgaggagaaattgttaggcaaattggtgatgcattgagagcaaagctccatcacctgggcaggcttgtgtcacttgagatggggaaaattcttcctgaagggattggagaggttcaggaaatcattgacatgtgtgattatgctgtgggcctaagtcgccagctaaatgggtccatcataccatctgaacgcccgaatcatatgatgatggaggtgtggaatcctcttggagttgttggtgttatcacagcattcaattttccttgtgctgtgctgggttggaatgcctgcatagctttggtatgtggaaactgtgttgtctggaaaggtgctccaactactccgttgatcactattgcaatgactaaaatagttgccagtgtattggagaggaacaacttgccaggctcaatttttacagcattctgtggtggtgctgacattggccaagcaatttctcttgacacaaggatacccttggtttcattcacaggaagcacaaaggttggtctaatggttcagcagcaagtgaatgcaagatttggcaaatgccttcttgaacttagtgggaacaatgccattattgtaatggatgatgcagacattcagctagctgtccgttcagtgttgtttgctgctgttggaacagcaggacaacgctgcactacatgtcgtaggctgcttcttcacgaaagcatataccgaacatttcttgatcaacttgttgaggtttataaacaagtccgaattggggatcctttggagaatggtacgttactggggccattgcacactcctgcttcaagagacgccttcttgaaaggcatccaaaccatcagatctcaggggggaaaaattctttatggaggatctgcaattgaatctgagggaaactttgttcagccaacaattgtggaaatttcaccctctgcaccggttgtgagagaagaactctttggtcctgttctttatgtgatgaaagttcagaatctgaaggaagcagttgaaatcaacaattctgttcctcaaggattgagcagttctatatttacaaagagaccagatattattttcaagtggattgggcctcatggtagtgactgtggcattgttaatgtaaatattcccacaaatggtgctgaaattggtggagcttttggtggagaaaaagctactggtggtggacgagaagcagggagtgattcgtggaagcagtacatgaggagggccacttgtacgatcaactatggaagcgagctgcctctagcacaaggaataaattttggctag

SEQ ID NO: 87265 - protein, 509 aa, Oryza sativa
MGSFARKEHQFLAELGLAPRNPGSFACGAWGGSGPVVTSTNPTNNQVIAEVVEASAREYEEGMRACYDAAKTWMAIPAPKRGEIVRQIGDALRAKLHHLGRLVSLEMGKILPEGIGEVQEIIDMCDYAVGLSRQLNGSIIPSERPNHMMMEVWNPLGVVGVITAFNFPCAVLGWNACIALVCGNCVVWKGAPTTPLITIAMTKIVASVLERNNLPGSIFTAFCGGADIGQAISLDTRIPLVSFTGSTKVGLMVQQQVNARFGKCLLELSGNNAIIVMDDADIQLAVRSVLFAAVGTAGQRCTTCRRLLLHESIYRTFLDQLVEVYKQVRIGDPLENGTLLGPLHTPASRDAFLKGIQTIRSQGGKILYGGSAIESEGNFVQPTIVEISPSAPVVREELFGPVLYVMKVQNLKEAVEINNSVPQGLSSSIFTKRPDIIFKWIGPHGSDCGIVNVNIPTNGAEIGGAFGGEKATGGGREAGSDSWKQYMRRATCTINYGSELPLAQGINFG

SEQ ID NO: 87266 - DNA, 1512 bp, Brassica napus; identical to SEQ ID NO: 38105
  CDS (1)..(1512)

SEQ ID NO: 87267 - protein, 503 aa, Brassica napus; identical to SEQ ID NO: 38106

SEQ ID NO: 87268 - DNA, 1509 bp, Brassica napus; identical to SEQ ID NO: 38107
  CDS (1)..(1509)

SEQ ID NO: 87269 - protein, 502 aa, Brassica napus; identical to SEQ ID NO: 38108

SEQ ID NO: 87270 - DNA, 1614 bp, Brassica napus; identical to SEQ ID NO: 38109
  CDS (1)..(1614)

SEQ ID NO: 87271 - protein, 537 aa, Brassica napus; identical to SEQ ID NO: 38110

SEQ ID NO: 87272 - DNA, 1614 bp, Brassica napus; identical to SEQ ID NO: 38111
  CDS (1)..(1614)

SEQ ID NO: 87273 - protein, 537 aa, Brassica napus; identical to SEQ ID NO: 38112

SEQ ID NO: 87274 - DNA, 1620 bp, Glycine max; identical to SEQ ID NO: 38113
  CDS (1)..(1620)

SEQ ID NO: 87275 - protein, 539 aa, Glycine max; identical to SEQ ID NO: 38114

SEQ ID NO: 87276 - DNA, 1611 bp, Glycine max; identical to SEQ ID NO: 38115
  CDS (1)..(1611)

SEQ ID NO: 87277 - protein, 536 aa, Glycine max; identical to SEQ ID NO: 38116

SEQ ID NO: 87278 - DNA, 1527 bp, Linum usitatissimum; identical to SEQ ID NO: 38117
  CDS (1)..(1527)

SEQ ID NO: 87279 - protein, 508 aa, Linum usitatissimum; identical to SEQ ID NO: 38118

SEQ ID NO: 87280 - DNA, 1437 bp, Zea mays
  CDS (1)..(1437)
atggcggaggagacggtgcgggagctgcgcgcgagcttcgcggcggggcagacgcgcccggccgagtggcgggcggcgcagctcaaggggctcatccggatgatcgacgagaaggaagccgagatcagcgccgcgctccacgaggacctcgccaagccgcatatggagtccttcctccacgagatatcacttacaaagtcgtcgtgcaagtttgcgctcaaggggctcaagaactggatgaagcccgagaaggtacctgcggccataactacattcccgtcctccgcccaaatcgtgccggagcccctccgcgtcgtgctcatcatctcagcctggaactaccctttcatactctctatcgacccagtcattggagcaatcgctgctggaaatgctgttgttctgaagccatcagaaatagcgccagctacctcgtcactgttagcaaagctgctacccgagtatgttgacaactcctgtattaaagttgtggagggaagcgttccagaaacaaccgcactcttggaacagagatgggataagatcttctacacaggtaatggaactgtaggacgtatagtgatggcagcagccgcaaagcatctgaccccggtagctctggagcttggtgggaaatcccctgttatcgtggattcaaatgttgatctccatgttgctgctaagaggattgttgttggcaaatggggatgcaacaacggccaagcatgcattgctccagattacatcataacgacaaaatcatttgcaccggagctggtggcctctttcaaaagagttttggaaaggttctatggggaggatcctctggaatcagcagacttgtctcgtattgtgaattcgaagcagttcaaaagattgacaaatttgatagaagaaaaaagagttgctgacaagattgtgtacggcggcaaggctgatgagaagcaactaaaaatttctcctacactattgttagatgttcctgaagattcagaaattatgacaggcgaaatatttgggcccttgcttcctattgtgacggtcgaaaagattgaggaaagcttcgacttgatcaatgccaagcctaagccactagccgcctaccttttcaccaagaataggaagctgcaagaggagtttgtggcaagcgtccctgcaggagggatgcttgtaaacgacactgcgctacatctcaccaacccgtacatgcccttcggcggcgtcggcgacagcgggatggggtgctaccacggcaagttcggcttcgactgcttcagccacaagaagggagtcctgatccgcggctttggcggggaggcgaacgccaggtacccgccctacacgacggagaagcagaagatcctgaggggcctcatcaacggcagcttcatcgccctcatccttgccctcctgggcttccccagggagaagcgttag

SEQ ID NO: 87281 - protein, 478 aa, Zea mays
MAEETVRELRASFAAGQTRPAEWRAAQLKGLIRMIDEKEAEISAALHEDLAKPHMESFLHEISLTKSSCKFALKGLKNWMKPEKVPAAITTFPSSAQIVPEPLRVVLIISAWNYPFILSIDPVIGAIAAGNAVVLKPSEIAPATSSLLAKLLPEYVDNSCIKVVEGSVPETTALLEQRWDKIFYTGNGTVGRIVMAAAAKHLTPVALELGGKSPVIVDSNVDLHVAAKRIVVGKWGCNNGQACIAPDYIITTKSFAPELVASFKRVLERFYGEDPLESADLSRIVNSKQFKRLTNLIEEKRVADKIVYGGKADEKQLKISPTLLLDVPEDSEIMTGEIFGPLLPIVTVEKIEESFDLINAKPKPLAAYLFTKNRKLQEEFVASVPAGGMLVNDTALHLTNPYMPFGGVGDSGMGCYHGKFGFDCFSHKKGVLIRGFGGEANARYPPYTTEKQKILRGLINGSFIALILALLGFPREKR

SEQ ID NO: 87282 - DNA, 1482 bp, Zea mays; identical to SEQ ID NO: 38119
  CDS (1)..(1482)

SEQ ID NO: 87283 - protein, 493 aa, Zea mays; identical to SEQ ID NO: 38120

SEQ ID NO: 87284 - DNA, 1530 bp, Hordeum vulgare; identical to SEQ ID NO: 38121
  CDS (1)..(1530)

SEQ ID NO: 87285 - protein, 509 aa, Hordeum vulgare; identical to SEQ ID NO: 38122

SEQ ID NO: 87286 - DNA, 1509 bp, Brassica napus; identical to SEQ ID NO: 38123
  CDS (1)..(1509)

SEQ ID NO: 87287 - protein, 502 aa, Brassica napus; identical to SEQ ID NO: 38124

SEQ ID NO: 87288 - DNA, 1530 bp, Brassica napus; identical to SEQ ID NO: 38125
  CDS (1)..(1530)

SEQ ID NO: 87289 - protein, 509 aa, Brassica napus; identical to SEQ ID NO: 38126

SEQ ID NO: 87290 - DNA, 1491 bp, Brassica napus; identical to SEQ ID NO: 38127
  CDS (1)..(1491)

SEQ ID NO: 87291 - protein, 496 aa, Brassica napus; identical to SEQ ID NO: 38128

SEQ ID NO: 87292 - DNA, 1614 bp, Brassica napus; identical to SEQ ID NO: 38129
  CDS (1)..(1614)

SEQ ID NO: 87293 - protein, 537 aa, Brassica napus; identical to SEQ ID NO: 38130

SEQ ID NO: 87294 - DNA, 1614 bp, Brassica napus; identical to SEQ ID NO: 38131
  CDS (1)..(1614)

SEQ ID NO: 87295 - protein, 537 aa, Brassica napus; identical to SEQ ID NO: 38132

SEQ ID NO: 87296 - DNA, 1593 bp, Brassica napus; identical to SEQ ID NO: 38133
  CDS (1)..(1593)

SEQ ID NO: 87297 - protein, 530 aa, Brassica napus; identical to SEQ ID NO: 38134

SEQ ID NO: 87298 - DNA, 1620 bp, Brassica napus; identical to SEQ ID NO: 38135
  CDS (1)..(1620)

SEQ ID NO: 87299 - protein, 539 aa, Brassica napus; identical to SEQ ID NO: 38136

SEQ ID NO: 87300 - DNA, 1506 bp, Brassica napus; identical to SEQ ID NO: 38137
  CDS (1)..(1506)

SEQ ID NO: 87301 - protein, 501 aa, Brassica napus; identical to SEQ ID NO: 38138

SEQ ID NO: 87302 - DNA, 1512 bp, Brassica napus; identical to SEQ ID NO: 38139
  CDS (1)..(1512)

SEQ ID NO: 87303 - protein, 503 aa, Brassica napus; identical to SEQ ID NO: 38140

SEQ ID NO: 87304 - DNA, 1530 bp, Brassica napus; identical to SEQ ID NO: 38141
  CDS (1)..(1530)

SEQ ID NO: 87305 - protein, 509 aa, Brassica napus; identical to SEQ ID NO: 38142

SEQ ID NO: 87306 - DNA, 1491 bp, Brassica napus; identical to SEQ ID NO: 38143
  CDS (1)..(1491)

SEQ ID NO: 87307 - protein, 496 aa, Brassica napus; identical to SEQ ID NO: 38144

SEQ ID NO: 87308 - DNA, 1620 bp, Brassica napus; identical to SEQ ID NO: 38145
  CDS (1)..(1620)

SEQ ID NO: 87309 - protein, 539 aa, Brassica napus; identical to SEQ ID NO: 38146

SEQ ID NO: 87310 - DNA, 1449 bp, Brassica napus
  CDS (1)..(1449)
atggccaaggttttcgaagcagcggacgcgagcaacctgatgacggagctgcgtatgagcttcgatgccggagtaactcgcagttacgagtggagagtctctcagcttaagaagcttcaagtaatctgcgataaccacgagcctgagatcgtctccgctctccacgacgatctcggcaaacctgagctcgagtcttccgtttacgaggtagctctattgagaaactccatcaagttagctcttaagcaactaaagaattggatggcaccagataaggcaaagacttctctaacaacgtttcctgcatcagcagagattgtgtccgagcctcttggagttgtgcttgtaatctcggcttggaattatcctttcctgttgtctattgatcctgttattggcgcaatttctgctgggaatgctgtcgtcttaaagccatcagaactggctccagcttcgtcctctctgctagcaaagttactggaacagtatttagacccttctgcagtgagagttattgaaggtgctgttactgaaacaactctgctgctggagcagaagtgggacaaaatattctacacaggtagttcaaaaattgggcgtatcatcatgatggcagctgctaaacatctcatacctgttgtcctggagctaggaggaaaatctcctgttgttatagactcagacaccaatttgaaaattactgccaaacggataattgcaggcaaatggggttgcaacaatggacaggcatgcatttctccagactacatcttgacaacaaaagaattttctccaaaagtgattgatgcactgaagcaagaattggaggcattttatgggaagaaccctatggagtccaaagatatgtcacgaattgtaaactcgaatcactttgatcgcctgtccaagatgttagaggagaaggaagtttctgacaaaatcgtctatgggggtcaaaagaacagagacaacctgaaaattgctccaaccatcttactcgacgtgccattagattctctgatcatgagtgaagaaatatttggtccactcctcccaatcctcacgctcaacaacttggaagagtgttttgacgtgattcgttctcgacctaagccacttgctgcatacttgtttacccaaaaccagaagctgaaagagagattcgccatgacagtctcagctggaggcattgtggtcaacgacatagctgttcatctttcacttcctacattaccattcggaggcgttggtgaaagtggaatgggttcttaccatggtaaattctcatttgatgccttcagtcataagaaagctgttctatacaaaagctttataggagatgcagcaatcaggtatccaccgtactctagaggaaagcttagattgttaaaggcacttgtcaacagcaatctggtggaagtatttaaagtccttttaggattatcttaa

SEQ ID NO: 87311 - protein, 482 aa, Brassica napus
MAKVFEAADASNLMTELRMSFDAGVTRSYEWRVSQLKKLQVICDNHEPEIVSALHDDLGKPELESSVYEVALLRNSIKLALKQLKNWMAPDKAKTSLTTFPASAEIVSEPLGVVLVISAWNYPFLLSIDPVIGAISAGNAVVLKPSELAPASSSLLAKLLEQYLDPSAVRVIEGAVTETTLLLEQKWDKIFYTGSSKIGRIIMMAAAKHLIPVVLELGGKSPVVIDSDTNLKITAKRIIAGKWGCNNGQACISPDYILTTKEFSPKVIDALKQELEAFYGKNPMESKDMSRIVNSNHFDRLSKMLEEKEVSDKIVYGGQKNRDNLKIAPTILLDVPLDSLIMSEEIFGPLLPILTLNNLEECFDVIRSRPKPLAAYLFTQNQKLKERFAMTVSAGGIVVNDIAVHLSLPTLPFGGVGESGMGSYHGKFSFDAFSHKKAVLYKSFIGDAAIRYPPYSRGKLRLLKALVNSNLVEVFKVLLGLS

SEQ ID NO: 87312 - DNA, 1512 bp, Brassica napus; identical to SEQ ID NO: 38147
  CDS (1)..(1512)

SEQ ID NO: 87313 - protein, 503 aa, Brassica napus; identical to SEQ ID NO: 38148

SEQ ID NO: 87314 - DNA, 1530 bp, Brassica napus; identical to SEQ ID NO: 38149
  CDS (1)..(1530)

SEQ ID NO: 87315 - protein, 509 aa, Brassica napus; identical to SEQ ID NO: 38150

SEQ ID NO: 87316 - DNA, 1491 bp, Brassica napus; identical to SEQ ID NO: 38151
  CDS (1)..(1491)

SEQ ID NO: 87317 - protein, 496 aa, Brassica napus; identical to SEQ ID NO: 38152

SEQ ID NO: 87318 - DNA, 1554 bp, Glycine max; identical to SEQ ID NO: 38153
  CDS (1)..(1554)

SEQ ID NO: 87319 - protein, 517 aa, Glycine max; identical to SEQ ID NO: 38154

SEQ ID NO: 87320 - DNA, 1494 bp, Glycine max; identical to SEQ ID NO: 38155
  CDS (1)..(1494)

SEQ ID NO: 87321 - protein, 497 aa, Glycine max; identical to SEQ ID NO: 38156

SEQ ID NO: 87322 - DNA, 1521 bp, Glycine max
  CDS (1)..(1521)
atggggaaggggcacatcaaattctttatttataacatggagtactctgtggaaactttggaaagagatcttaagaacacgaggaaatactacgggagtggaaaaacaaaggaagcaccatggagagaatcacagcttaaagggttgcacaattttctcgtggaaaaagaggaagaaattgtgacggccctcaagcatgatttggggaagcattacgtggaggcttttagagacgagcttggaacattaatgaagaccttaaacttggcaaccaagtctttgaaaaattggatggcggggaaagaggcaaagctgccacgaatagcactgctctcaagtgcagaaatagttcctgagccacttggtcttgttctcataatctcatcatggaactttccctttggactttccttggagccactgatcggagcagtagctgctgggaacagtgtggttctaaagccttcagagttgtcccctacttgctcttctcttttagccactttcctcccaacttacttggacaataatgccattaaggtcatccaaggtggaccagaagtggggaagctactcttgcagcaaagatgggacaagattttcttcacaggaagtgcaagggtggggcggattgttatgtctgcagcagctgtgcatctgacgcctgtgactttggagttaggtggaaaatgtccagcactaattgactctctttcttcttcttgggacaaagaggtggctgtgaagcgaattttggtggcaaaatttggggcttgtgctgggcaagcatgcattgcaatcgattatgtccttgtggagaagagtttcagttctacattggtgacactaatgaaggaatggattaagaaaatgtttggagaaaaccccaaagcgtccaacagcattgcaaggatagttaataaaaatcatttcatgagactccagaaccttctcactgagccaagggtcaaagaatcggtggtttatggtggttcaatggacgaaaatgacttatttattgaaccgacaatattgctggatccgccacttgattcagcagtcatggctgaggaaatctttggccctgtacttccaataatcaccctggagaagattgaagacagtgttgagttcataagctcgaggcctaaagctttagctatttatgccttcacgaaaaaccaaactctgcagagaagaatggtatctgaaacatcatcaggaagtcttgtattcaacgatgcaattctacaatacgtagcggataccctaccatttggaggagttggtgaatgtgggtttggcaagtaccatggaaagttctcctttgatgcgttcagtcaccataaggctgtggctagaagaagttacttgactgatttttggtttaggttccctccatggactcttgataagctccaactacttgaggtgtcttacaatttagactaccttggaatacttctagttctgctcggcttaaagaaatcaaaacggtcactatttcaggcttgtaactga

SEQ ID NO: 87323 - protein, 506 aa, Glycine max
MGKGHIKFFIYNMEYSVETLERDLKNTRKYYGSGKTKEAPWRESQLKGLHNFLVEKEEEIVTALKHDLGKHYVEAFRDELGTLMKTLNLATKSLKNWMAGKEAKLPRIALLSSAEIVPEPLGLVLIISSWNFPFGLSLEPLIGAVAAGNSVVLKPSELSPTCSSLLATFLPTYLDNNAIKVIQGGPEVGKLLLQQRWDKIFFTGSARVGRIVMSAAAVHLTPVTLELGGKCPALIDSLSSSWDKEVAVKRILVAKFGACAGQACIAIDYVLVEKSFSSTLVTLMKEWIKKMFGENPKASNSIARIVNKNHFMRLQNLLTEPRVKESVVYGGSMDENDLFIEPTILLDPPLDSAVMAEEIFGPVLPIITLEKIEDSVEFISSRPKALAIYAFTKNQTLQRRMVSETSSGSLVFNDAILQYVADTLPFGGVGECGFGKYHGKFSFDAFSHHKAVARRSYLTDFWFRFPPWTLDKLQLLEVSYNLDYLGILLVLLGLKKSKRSLFQACN

SEQ ID NO: 87324 - DNA, 1623 bp, Glycine max; identical to SEQ ID NO: 38157
  CDS (1)..(1623)

SEQ ID NO: 87325 - protein, 540 aa, Glycine max; identical to SEQ ID NO: 38158

SEQ ID NO: 87326 - DNA, 1515 bp, Glycine max; identical to SEQ ID NO: 38159
  CDS (1)..(1515)

SEQ ID NO: 87327 - protein, 504 aa, Glycine max; identical to SEQ ID NO: 38160

SEQ ID NO: 87328 - DNA, 1527 bp, Glycine max; identical to SEQ ID NO: 38161
  CDS (1)..(1527)

SEQ ID NO: 87329 - protein, 508 aa, Glycine max; identical to SEQ ID NO: 38162

SEQ ID NO: 87330 - DNA, 1506 bp, Glycine max; identical to SEQ ID NO: 38163
  CDS (1)..(1506)

SEQ ID NO: 87331 - protein, 501 aa, Glycine max; identical to SEQ ID NO: 38164

SEQ ID NO: 87332 - DNA, 1500 bp, Glycine max; identical to SEQ ID NO: 38165
  CDS (1)..(1500)

SEQ ID NO: 87333 - protein, 499 aa, Glycine max; identical to SEQ ID NO: 38166

SEQ ID NO: 87334 - DNA, 1518 bp, Glycine max; identical to SEQ ID NO: 38169
  CDS (1)..(1518)

SEQ ID NO: 87335 - protein, 505 aa, Glycine max; identical to SEQ ID NO: 38170

SEQ ID NO: 87336 - DNA, 1611 bp, Glycine max; identical to SEQ ID NO: 38171
  CDS (1)..(1611)

SEQ ID NO: 87337 - protein, 536 aa, Glycine max; identical to SEQ ID NO: 38172

SEQ ID NO: 87338 - DNA, 1626 bp, Glycine max
  CDS (1)..(1626)
atgaaaagcctctgccttgggccgtttcttgctgctagtgccccagttggtagaagagcctatggaggccacttaagcagaaagtgctttcaaaagcaacttcacttccactcacgttgtgttgctttctcttcattcatatgttctgcaactatatcagtgatgccagaattagaagagaagcaagtgtttgatggagagaaggctaatttgctagttaaagatctcagaaagagctttgattcaggcatgactaagagctatggatggagggtttcccagttggaagccatagctaagatgttagaagagaaagagaaggaaattactgaagctctatataaggaccttggaaaacctcgacttgaagcatttataaccgagatttcccaggctaaatcctcatgtagtgaagcacttaaagagctgaaagaatggatgaagcctgagaaggtgaatacttcaatcacaacatatccatcatcagcagagattgtgccagaaccactgggggttgtgttggtcatctcaacatggaactttcctttcttgttatcaatggatccagtcattggagccatttccgcaggcaatgctgtggtcctgaaaccatcagaaatttctccagcaacatcatcactgcttgcaaatttgatcgaacaatatctagacaactctaccataagagttgttgaaggggctattcccgaaacatctgcactcctggatcagaagtgggataagatactttatacaggtagtgctagagtaggtcgcattgtcatggctgctgctgcaaagcatcttactccagtgattctggaacttggaggaaagtgcccagctgttgttgaatcagatgtcaacttacaagttactgcaaggaggataatagctggcaagtgggcatgcaatagtggacaagcatgcatttctgttgattatatcatcacaagaaaagagtttgccccaaagctggtagatgccttaaaagaagaattggaacaattttttggtaaagatcctatggagtcaaaagacatgtcaagaattgtgtctccaaaccagtttgcgcggcttgtgaatctcttggatgaggataaggtatctgacaaaattgttttgggaggtcagagggatgagaagaaattaaaaattgccccaactatcatattgggtgttcctgaagatgctatgataatgcaagaggagatatttgggccaataatgccaatcgtcactgtagacaatatagaagattgctacagtataataaaatcaaagccaaaacctcttgctgcatatctcttcacaaacaatgagcagctgaagaaggattatgtggataagatatcttctggagggatgctcatcaatgacgccgtcatccatgttgcaactcgtgggttgccttttggaggagttgaagagagtggaatgggttgttaccatggaaaattctcttttgatagtttcagccacaggaagtcagttctctatagaagttttgatgcagattctaccattaggtaccctccgtatacacctcagaaggaaaaattattgaaggcccttattagtggcaatattgttcaaattattctttctcttttggggtggtcttaa

SEQ ID NO: 87339 - protein, 541 aa, Glycine max
MKSLCLGPFLAASAPVGRRAYGGHLSRKCFQKQLHFHSRCVAFSSFICSATISVMPELEEKQVFDGEKANLLVKDLRKSFDSGMTKSYGWRVSQLEAIAKMLEEKEKEITEALYKDLGKPRLEAFITEISQAKSSCSEALKELKEWMKPEKVNTSITTYPSSAEIVPEPLGVVLVISTWNFPFLLSMDPVIGAISAGNAVVLKPSEISPATSSLLANLIEQYLDNSTIRVVEGAIPETSALLDQKWDKILYTGSARVGRIVMAAAAKHLTPVILELGGKCPAVVESDVNLQVTARRIIAGKWACNSGQACISVDYIITRKEFAPKLVDALKEELEQFFGKDPMESKDMSRIVSPNQFARLVNLLDEDKVSDKIVLGGQRDEKKLKIAPTIILGVPEDAMIMQEEIFGPIMPIVTVDNIEDCYSIIKSKPKPLAAYLFTNNEQLKKDYVDKISSGGMLINDAVIHVATRGLPFGGVEESGMGCYHGKFSFDSFSHRKSVLYRSFDADSTIRYPPYTPQKEKLLKALISGNIVQIILSLLGWS

SEQ ID NO: 87340 - DNA, 1506 bp, Glycine max; identical to SEQ ID NO: 38173
  CDS (1)..(1506)

SEQ ID NO: 87341 - protein, 501 aa, Glycine max; identical to SEQ ID NO: 38174

SEQ ID NO: 87342 - DNA, 1485 bp, Glycine max
  CDS (1)..(1485)
atggagtactctgtggaaactttggaaagagatcttaagaacacgaggaaatactacgggagtggaaaaacaaaggaagcaccatggagagaatcacagcttaaagggttgcacaattttctcgtggaaaaagaggaagaaattgtgacggccctcaagcatgatttggggaagcattacgtggaggcttttagagacgagcttggaacattaatgaagaccttaaacttggcaaccaagtctttgaaaaattggatggcggggaaagaggcaaagctgccacgaatagcactgctctcaagtgcagaaatagttcctgagccacttggtcttgttctcataatctcatcatggaactttccctttggactttccttggagccactgatcggagcagtagctgctgggaacagtgtggttctaaagccttcagagttgtcccctacttgctcttctcttttagccactttcctcccaacttacttggacaataatgccattaaggtcatccaaggtggaccagaagtggggaagctactcttgcagcaaagatgggacaagattttcttcacaggaagtgcaagggtggggcggattgttatgtctgcagcagctgtgcatctgacgcctgtgactttggagttaggtggaaaatgcccagccataattgactctctttcttcttcttgggacaaagaggtggctgtgaagcgaattttggtggcaaaatttggggcttgtgggggacaggcatgcatagcaatcgattatgtccttgtggagaagagcttcagttctacattggtgacattaatgaaggaatggattaagaaaatgtttggagaaaaccccaaagtgtccaacaccattgcaaggatagttaataaaaatcatttcatgagactcaagaatcttctcactgagccaagggtcaaagaatcggtggtttatggtggttcaatggacgaaaatgacttatttattgaaccgacaatattgctggatccgccacttgattcagcagtcatggctgaggaaatctttggccctgtacttccaataatcaccctggagaagattgaagacagtgttgagttcataagctcgaggcctaaagctttagctatttatgccttcacgaaaaaccaaactctgcagagaagaatggtatctgaaacatcatcaggaagtcttgtattcaacgatgcaattctacaatacgtagcggataccctaccatttggaggagttggtgaatgtgggtttggcaagtaccatggaaagttctcctttgatgcgttcagtcaccataaggctgtggctagaagaagttacttgactgatttttggtttaggttccctccatggactcttgataagctccaactacttgaggtgtcttacaatttagactaccttggaatacttctagttctgctcggcttaaagaaatcaaaacggtcactatttcaggcttgtaactga

SEQ ID NO: 87343 - protein, 494 aa, Glycine max
MEYSVETLERDLKNTRKYYGSGKTKEAPWRESQLKGLHNFLVEKEEEIVTALKHDLGKHYVEAFRDELGTLMKTLNLATKSLKNWMAGKEAKLPRIALLSSAEIVPEPLGLVLIISSWNFPFGLSLEPLIGAVAAGNSVVLKPSELSPTCSSLLATFLPTYLDNNAIKVIQGGPEVGKLLLQQRWDKIFFTGSARVGRIVMSAAAVHLTPVTLELGGKCPAIIDSLSSSWDKEVAVKRILVAKFGACGGQACIAIDYVLVEKSFSSTLVTLMKEWIKKMFGENPKVSNTIARIVNKNHFMRLKNLLTEPRVKESVVYGGSMDENDLFIEPTILLDPPLDSAVMAEEIFGPVLPIITLEKIEDSVEFISSRPKALAIYAFTKNQTLQRRMVSETSSGSLVFNDAILQYVADTLPFGGVGECGFGKYHGKFSFDAFSHHKAVARRSYLTDFWFRFPPWTLDKLQLLEVSYNLDYLGILLVLLGLKKSKRSLFQACN

SEQ ID NO: 87344 - DNA, 1614 bp, Glycine max; identical to SEQ ID NO: 38175
  CDS (1)..(1614)

SEQ ID NO: 87345 - protein, 537 aa, Glycine max; identical to SEQ ID NO: 38176

SEQ ID NO: 87346 - DNA, 1611 bp, Glycine max; identical to SEQ ID NO: 38177
  CDS (1)..(1611)

SEQ ID NO: 87347 - protein, 536 aa, Glycine max; identical to SEQ ID NO: 38178

SEQ ID NO: 87348 - DNA, 1626 bp, Glycine max
  CDS (1)..(1626)
atgaaaagcctctgccttgggccgtttcttgctgctagtgccccagttggtagaagagcctatggaggccacttaagcagaaagtgctttcaaaagcaacttcacttccactcacgttgtgttgctttctcttcattcatatgttctgcaactatatcagtgatgccagaattagaagagaagcaagtgtttgatggagagaaggctaatttgctagttaaagatctcagaaagagctttgattcaggcatgactaagagctatggatggagggtttcccagttggaagccatagctaagatgttagaagagaaagagaaggaaattactgaagctctatataaggaccttggaaaacctcgacttgaagcatttataaccgagattttccaggctaaatcctcatgtagtgaagcacttaaagagctgaaagaatggatgaagcctgagaaggtgaatacttcaatcacaacatatccatcatcagcagagattgtgccagaaccactgggggttgtgttggtcatctcaacatggaactttcctttcttgttatcaatggatccagtcattggagccatttccgcaggcaatgctgtggtcctgaaaccatcagaaatttctccagcaacatcatcactgcttgcaaatttgatcgaacaatatctagacaactctaccataagagttgttgaaggggctattcccgaaacatctgcactcctggatcagaagtgggataagatactttatacaggtagtgctagagtaggtcgcattgtcatggctgctgctgcaaagcatcttactccagtgattctggaacttggaggaaagtgcccagctgttgttgaatcagatgtcaacttacaagttactgcaaggaggataatagctggcaagtgggcatgcaatagtggacaagcatgcatttctgttgattatatcatcacaagaaaagagtttgccccaaagctggtagatgccttaaaagaagaattggaacaattttttggtaaagatcctatggagtcaaaagacatgtcaagaattgtgtctccaaaccagtttgcgcggcttgtgaatctcttggatgaggataaggtatctgacaaaattgttttgggaggtcagagggatgagaagaaattaaaaattgccccaactatcatattgggtgttcctgaagatgctatgataatgcaagaggagatatttgggccaataatgccaatcgtcactgtagacaatatagaagattgctacagtataataaaatcaaagccaaaacctcttgctgcatatctcttcacaaacaatgagcagctgaagaaggattatgtggataagatatcttctggagggatgctcatcaatgacgccgtcatccatgttgcaactcgtgggttgccttttggaggagttgaagagagtggaatgggttgttaccatggaaaattctcttttgatagtttcagccacaggaagtcagttctctatagaagttttgatgcagattctaccattaggtaccctccgtatacacctcagaaggaaaaattattgaaggcccttattagtggcaatattgttcaaattattctttctcttttggggtggtcttaa

SEQ ID NO: 87349 - protein, 541 aa, Glycine max
MKSLCLGPFLAASAPVGRRAYGGHLSRKCFQKQLHFHSRCVAFSSFICSATISVMPELEEKQVFDGEKANLLVKDLRKSFDSGMTKSYGWRVSQLEAIAKMLEEKEKEITEALYKDLGKPRLEAFITEIFQAKSSCSEALKELKEWMKPEKVNTSITTYPSSAEIVPEPLGVVLVISTWNFPFLLSMDPVIGAISAGNAVVLKPSEISPATSSLLANLIEQYLDNSTIRVVEGAIPETSALLDQKWDKILYTGSARVGRIVMAAAAKHLTPVILELGGKCPAVVESDVNLQVTARRIIAGKWACNSGQACISVDYIITRKEFAPKLVDALKEELEQFFGKDPMESKDMSRIVSPNQFARLVNLLDEDKVSDKIVLGGQRDEKKLKIAPTIILGVPEDAMIMQEEIFGPIMPIVTVDNIEDCYSIIKSKPKPLAAYLFTNNEQLKKDYVDKISSGGMLINDAVIHVATRGLPFGGVEESGMGCYHGKFSFDSFSHRKSVLYRSFDADSTIRYPPYTPQKEKLLKALISGNIVQIILSLLGWS

SEQ ID NO: 87350 - DNA, 1512 bp, Hordeum vulgare; identical to SEQ ID NO: 38179
  CDS (1)..(1512)

SEQ ID NO: 87351 - protein, 503 aa, Hordeum vulgare; identical to SEQ ID NO: 38180

SEQ ID NO: 87352 - DNA, 1581 bp, Hordeum vulgare; identical to SEQ ID NO: 38181
  CDS (1)..(1581)

SEQ ID NO: 87353 - protein, 526 aa, Hordeum vulgare; identical to SEQ ID NO: 38182

SEQ ID NO: 87354 - DNA, 1491 bp, Hordeum vulgare; identical to SEQ ID NO: 38183
  CDS (1)..(1491)

SEQ ID NO: 87355 - protein, 496 aa, Hordeum vulgare; identical to SEQ ID NO: 38184

SEQ ID NO: 87356 - DNA, 1437 bp, Zea mays
  CDS (1)..(1437)
atggcggaggagacggtgcgggagctgcgcgcgagcttcgcggcggggcagacgcgcccggccgagtggcgggcggcgcagctcaaggggctcatccggatgatcgacgagaaggaagccgagatcagcgccgcgctccacgaggacctcgccaagccgcatatggagtccttcctccacgagatatcacttacaaagtcgtcgtgcaagtttgcgctcaaggggctcaagaactggatgaagcccgagaaggtacctgcggccataactacattcccgtcctccgcccaaatcgtgccggagcccctcggcgtcgtgctcatcatctcagcctggaactaccctttcatactctctatcgacccagtcattggagcaatcgctgctggaaatgctgttgttctgaagccatcagaaatagcgccagctacctcgtcactgttagcaaagctgctacccgagtatgttgacaactcctgtattaaagttgtggagggaagcgttccagaaacaaccgcactcttggaacagagatgggataagatcttctacacaggtaatggaactgtaggacgtatagtgatggcagcagccgcaaagcatctgaccccggtagctctggagcttggtgggaaatcccctgttatcgtggattcaaatgttgatctgcatgttgctgctaagaggattgttgttggcaaatggggatgcaacaacggccaagcatgcattgctccagattacatcataacgacaaaatcatttgcaccggagctggtggcctctttcaaaagagttttggaaaggttctatggggaggatcctctgcaatcagcagacttgtctcgtattgtgaattcgaagcagttcaaaagattgacaaatttgatagaagaaaaaagagttgctgacaagattgtgtacggcggcaaggctgatgagaagcaactaaaaatttctcctacactattgttagatgttcccgaagattcagaaattatgacaggcgaaatatttgggcccttgcttcctattgtgacggtcgaaaagattgaggaaagcttcgacttgatcaatgccaagcctaagccactagccgcctaccttttcaccaagaataggaagctgcaagaggagtttgtggcgagcgtccctgcaggagggatgcttgtaaacgacactgcgctacatctcaccaacccgtacatgcccttcggcggcgtcggcgacagcgggatgggctgctaccacggcaagttcggcttcgactgcttcagccacaagaagggagtcctgatccgcggctttggcggggaggcgaacgccaggtacccgccctacacgacggagaagcaaaagatcctgaggggcctcatcaacggcagcttcatcgccctcatccttgccctcctgggcttccccagggagaagcgttag

SEQ ID NO: 87357 - protein, 478 aa, Zea mays
MAEETVRELRASFAAGQTRPAEWRAAQLKGLIRMIDEKEAEISAALHEDLAKPHMESFLHEISLTKSSCKFALKGLKNWMKPEKVPAAITTFPSSAQIVPEPLGVVLIISAWNYPFILSIDPVIGAIAAGNAVVLKPSEIAPATSSLLAKLLPEYVDNSCIKVVEGSVPETTALLEQRWDKIFYTGNGTVGRIVMAAAAKHLTPVALELGGKSPVIVDSNVDLHVAAKRIVVGKWGCNNGQACIAPDYIITTKSFAPELVASFKRVLERFYGEDPLQSADLSRIVNSKQFKRLTNLIEEKRVADKIVYGGKADEKQLKISPTLLLDVPEDSEIMTGEIFGPLLPIVTVEKIEESFDLINAKPKPLAAYLFTKNRKLQEEFVASVPAGGMLVNDTALHLTNPYMPFGGVGDSGMGCYHGKFGFDCFSHKKGVLIRGFGGEANARYPPYTTEKQKILRGLINGSFIALILALLGFPREKR

SEQ ID NO: 87358 - DNA, 1584 bp, Zea mays; identical to SEQ ID NO: 38185
  CDS (1)..(1584)

SEQ ID NO: 87359 - protein, 527 aa, Zea mays; identical to SEQ ID NO: 38186

SEQ ID NO: 87360 - DNA, 1569 bp, Triticum aestivum; identical to SEQ ID NO: 38187
  CDS (1)..(1569)

SEQ ID NO: 87361 - protein, 522 aa, Triticum aestivum; identical to SEQ ID NO: 38188

SEQ ID NO: 87362 - DNA, 1650 bp, Triticum aestivum
  CDS (1)..(1650)
atggctgctgccgccacgaggagggccgcctcctcgctcgcctcccgctgcctgctcgccaggcccgcagcgtcgcccgccgctgtcccctccgcgctccgcagggcagatggggcacgtggattgttgccaggactccttcagaggttcggcactgcggcagcagcagaggagcccatttcgccttctgtccaagtgggcgagacacagctccttatcaacggcaaattcgtcgatgctgcatctggtaaaactttcccgactgtggaccctcgcaccggggaggtgattgcccgtgtggccgaaggagatgccgaagatgttgaccgtgcggttgtcgctgcccgcaaggcattcgatgaagggccatggcccaggatgactgcctatgagagatcccgtattcttctgcggtttgctgatttgatagagaaacacaatgatgatatcgctgcactggagacgtgggacaacgggaagccctatgagcaagctgcccacatcgaagtgccaatgcttgttcggcttatgcggtactatgcaggctggactgacaagatccatggtctcatcgtaccggctgatggccctcaccatgtacaggtgctgcacgagccgattggtgtcgtgggtcagatcatcccgtggaacttcccacttttgatgtatggctggaaagttggccctgctttggcctgtggtaacactattgttctcaagactgctgaacaaactcctctatctgccctctatgtttctaagctgttgcatgaggctggactacccgaaggtgtcctgaacatcgtatctggtttcggtcctactgctggggctgctcttgctagccacatggatgttgacaagattgcattcactggatcaaccgatactgggaaagttattcttgagttatctgcacggagcaatcttaagccagtgacactggagctaggaggcaagtctccttttatcgtcatggatgatgcagatatcgaccaagccgttgagcttgcgcattttgcgctgttttttaaccagggacaatgctgctgcgctgggtctcgcacgttcgtacatgagcgtgtttatgatgagtttgttgagaagtccaaggctcgcgctttgaagcgtgtagttggtgatccattcaggaaaggtgttgagcagggtcctcagattgatgacgagcaattcaagaagatcttgcggtacattaagtcgggtgtggacagtggagccacccttgtgacgggtggtgacaagttgggtgacaaaggttactacatccagccaacaattttctcagatgtgcaggatggcatgaagattgcccaagaggagatatttgggcctgttcagtcaatcttcaagttcaatgacctcaacgaggtgatcaagagggcgaacgcaagccagtacggattggccgcaggtgttttcaccaacaacctggacacggccaacaccttgacgcgtgccctcagggccggcacggtctgggtgaactgcttcgacatctttgacgccgcgatccccttcggcgggtacaagatgagcggcatcggtagggagaagggcatcgacagcctgaagaactacctgcaagtcaaggcggtcgtcaccgcacttaagaaccccgcatggttgtga

SEQ ID NO: 87363 - protein, 549 aa, Triticum aestivum; identical to SEQ ID NO: 37862

SEQ ID NO: 87364 - DNA, 1491 bp, Triticum aestivum; identical to SEQ ID NO: 38189
  CDS (1)..(1491)

SEQ ID NO: 87365 - protein, 496 aa, Triticum aestivum; identical to SEQ ID NO: 38190

SEQ ID NO: 87366 - DNA, 1503 bp, Triticum aestivum; identical to SEQ ID NO: 38191
  CDS (1)..(1503)

SEQ ID NO: 87367 - protein, 500 aa, Triticum aestivum; identical to SEQ ID NO: 38192

SEQ ID NO: 87368 - DNA, 1437 bp, Zea mays
  CDS (1)..(1437)
atggcggaggagacggtgcaggagctgcgcgcgagcttcgcgtcggggcggacgcgccgggccgagtggcgggcggagcagctcaaggggctcatccggatgatcgacgagaaggaggccgagatcagcgccgcgctccatgaggacctggccaagccgcacatggagtcctacctccacgagatatcgattacaaggtcctcgtgcaagtttgccctcgacgggctcaagagctggatgaagcccgagaagatacctgcggccttaaccacgttcccgtcctctgctcaaatcgtgccggagcccctcggtgtggtgctcatcatctcagcctggaactaccctttcatactctcgatcgacccagtcattggagcaatcgcagctggaaatgctgttgttctgaagccgtcagaaatagcgccagctacctcgtcattgctagcgaagctgctgcccgagtacgttgataactcctgtattaaagtcgtggagggaggcgttgcagaaacaacctcactcctggaacagagatgggataagatcttctacacaggtaatggaaccgtaggacgcatcgtgatggcagcagccgcaaagcatctaactccggtggctctggagcttggtgggaaatcccctgttgttgtggactcaaatgttgaccttcatgttgccgtcaagaggatcgttgttggcaaatggggatgcaacaacggccaagcatgcattgccccagactacatcataacgacaaaatcatttgcgccagagctggtggcctccttgaaaagggttttggaaaggttttacggggaggatcctctgcagtcagcggacctgtctcgtatcgtgaattcgaagcacttcaggagactgacggaattgatagaagagaaaagcgttgctgacaagatcgtgtacggcggcgaggttgatgagaagcagctaaaaattgctcctacactgttgctcgacgtcccccaggattcagcaatcatgaccggggaaatatttgggcccttgcttcctatcgtgacggtggaaaagatcgaggagagcttcgacttgatcaacgccaggcctaagccgcttgccgcctaccttttcaccaagaacaagaagctgcaggaggagtttgtggcggacgtgcctgcaggagggatgcttgtgaacgacaccgtgctacatctcgccaacccgtacatgcccttcggcggcgtcggcgacagcgggatggggtgctaccacggcaagttcgggttcgactgcttcagccacaagaagggggtcctggtccgcggctttggcggcgaggcgaacgccaggtacccgccctacacgacggagaagcagaagatcctgagggggctcatcaacggcagcttcatcgcgctcatccttgccctcctgggcttcccgagggagaagcgttag

SEQ ID NO: 87369 - protein, 478 aa, Zea mays
MAEETVQELRASFASGRTRRAEWRAEQLKGLIRMIDEKEAEISAALHEDLAKPHMESYLHEISITRSSCKFALDGLKSWMKPEKIPAALTTFPSSAQIVPEPLGVVLIISAWNYPFILSIDPVIGAIAAGNAVVLKPSEIAPATSSLLAKLLPEYVDNSCIKVVEGGVAETTSLLEQRWDKIFYTGNGTVGRIVMAAAAKHLTPVALELGGKSPVVVDSNVDLHVAVKRIVVGKWGCNNGQACIAPDYIITTKSFAPELVASLKRVLERFYGEDPLQSADLSRIVNSKHFRRLTELIEEKSVADKIVYGGEVDEKQLKIAPTLLLDVPQDSAIMTGEIFGPLLPIVTVEKIEESFDLINARPKPLAAYLFTKNKKLQEEFVADVPAGGMLVNDTVLHLANPYMPFGGVGDSGMGCYHGKFGFDCFSHKKGVLVRGFGGEANARYPPYTTEKQKILRGLINGSFIALILALLGFPREKR

SEQ ID NO: 87370 - DNA, 1518 bp, Zea mays; identical to SEQ ID NO: 38193
  CDS (1)..(1518)

SEQ ID NO: 87371 - protein, 505 aa, Zea mays; identical to SEQ ID NO: 38194

SEQ ID NO: 87372 - DNA, 1782 bp, Zea mays; identical to SEQ ID NO: 38195
  CDS (1)..(1782)

SEQ ID NO: 87373 - protein, 593 aa, Zea mays; identical to SEQ ID NO: 38196

SEQ ID NO: 87374 - DNA, 1530 bp, Zea mays; identical to SEQ ID NO: 38197
  CDS (1)..(1530)

SEQ ID NO: 87375 - protein, 509 aa, Zea mays; identical to SEQ ID NO: 38198

SEQ ID NO: 87376 - DNA, 1497 bp, Zea mays; identical to SEQ ID NO: 38199
  CDS (1)..(1497)

SEQ ID NO: 87377 - protein, 498 aa, Zea mays; identical to SEQ ID NO: 38200

SEQ ID NO: 87378 - DNA, 1536 bp, Zea mays
  CDS (1)..(1536)
atggcgagcaacggctgcaacggcaacggcaacggcaacggcaacggcaaggcggcgccggcgggtgtggtggtaccggagatcaagttcaccaagctcttcatcaacggcgagttcgtcgacgccgcctccggcaagacattcgataccagggacccacggaccggcgacgtgctggcccacgtagcagaggcagacaaagctgatgtggacctggcggtgaagtccgcccgggacgccttcgagcacggcaagtggccccgcatgtcaggctacgagcgcgggcggatcatgagcaagctggcggacctggtggagcagcacacggaggagctggcggcgctggacggtgccgacgccgggaagctgctgctgctgggcaagatcatcgacatccccgcggccacgcagatgctgcgctactacgccggcgccgccgacaagatccacggcgacgtcctgcgcgtctccggcaggtaccagggctacacgctcaaggagcctatcggcgtcgtgggcgtcatcatcccctggaacttccccaccatgatgttcttcctcaaggtcagcccggcgctcgccgcgggctgcaccgtcgtcgtcaagcccgccgagcagacgccgctctccgcgctctactacgcgcacctcgcaaagatggccggcgtccccgacggagtgatcaacgtcgtccccgggttcggccccaccgccggcgccgcgctcgcctcccacatggacgtcgacagcgtggccttcaccggctccacagaggtgggtcgcctcatcatggagtcggccgcgcggagcaacctcaagacggtctcgctggagctcggcggcaagtcgccgctcatcatcttcgacgacgccgacgtcgacatggccgttaacctgtcgaggcttgccgtcttcttcaacaagggagaggtttgcgtggcgggatcgcgcgtgtacgtgcaggaagggatctatgacgagttcgtcaagaaggccgtggaggccgcgcggagctggaaggttggagacccgttcgatgtcaccagcaacatgggccctcaggttgacaaggaccagtttgagagggtcctaaagtacattgagcatggcaagagcgagggagcgactctgctcaccggcggcaagcctgccgccgacaaagggtactacattgagcccaccatctttgtcgatgtcactgaggacatgaagatcgcgcaggaagagatcttcggccccgtcatgtccctcatgaagttcaagacggttgatgaggtgatcgagaaggccaactgcaccaggtacgggctcgccgccgggatcgtgaccaagagcctggacgtcgccaaccgggtgtcccggtcggtgcgcgccggcaccgtgtgggtgaactgctacttcgccttcgacccggacgcgcccttcggcgggtacaagatgagcggcttcggccgggaccaggggctggcagccatggacaagtacctgcaggtcaagagcgtcatcaccgcgctcccggactcgccatggtactga

SEQ ID NO: 87379 - protein, 511 aa, Zea mays; identical to SEQ ID NO: 38060

SEQ ID NO: 87380 - DNA, 1584 bp, Zea mays; identical to SEQ ID NO: 38201
  CDS (1)..(1584)

SEQ ID NO: 87381 - protein, 527 aa, Zea mays; identical to SEQ ID NO: 38202

SEQ ID NO: 87382 - DNA, 1521 bp, Zea mays; identical to SEQ ID NO: 38205
  CDS (1)..(1521)

SEQ ID NO: 87383 - protein, 506 aa, Zea mays; identical to SEQ ID NO: 38206

SEQ ID NO: 87384 - DNA, 1530 bp, Zea mays; identical to SEQ ID NO: 38207
  CDS (1)..(1530)

SEQ ID NO: 87385 - protein, 509 aa, Zea mays; identical to SEQ ID NO: 38208

SEQ ID NO: 87386 - DNA, 1518 bp, Zea mays; identical to SEQ ID NO: 38209
  CDS (1)..(1518)

SEQ ID NO: 87387 - protein, 505 aa, Zea mays; identical to SEQ ID NO: 38210

SEQ ID NO: 87388 - DNA, 1782 bp, Zea mays; identical to SEQ ID NO: 38211
  CDS (1)..(1782)

SEQ ID NO: 87389 - protein, 593 aa, Zea mays; identical to SEQ ID NO: 38212

SEQ ID NO: 87390 - DNA, 1509 bp, Zea mays; identical to SEQ ID NO: 38215
  CDS (1)..(1509)

SEQ ID NO: 87391 - protein, 502 aa, Zea mays; identical to SEQ ID NO: 38216

SEQ ID NO: 87392 - DNA, 22 bp, Artificial sequence
  primer
atggcgatcgccactattaatc

SEQ ID NO: 87393 - DNA, 23 bp, Artificial sequence
  primer
ctaagcaatccaaacggttttag

SEQ ID NO: 87394 - protein, 517 aa, Artificial sequence
  consensus sequence
  Variant (2)..(28): Xaa in position 2 to 28 is any amino acid
  Variant (29)..(59): Xaa in position 29 to 59 is any or no amino acid
  Variant (61)..(78): Xaa in position 61 to 78 is any amino acid
  Variant (80)..(85): Xaa in position 80 to 85 is any amino acid
  Variant (86)..(94): Xaa in position 86 to 94 is any or no amino acid
  Variant (97)..(138): Xaa in position 97 to 138 is any amino acid
  Variant (139)..(148): Xaa in position 139 to 148 is any or no amino acid
  Variant (150)..(150): Xaa in position 150 is any amino acid
  Variant (153)..(155): Xaa in position 153 to 155 is any amino acid
  Variant (157)..(157): Xaa in position 157 is any amino acid
  Variant (161)..(161): Xaa in position 161 is any amino acid
  Variant (163)..(171): Xaa in position 163 to 171 is any amino acid
  Variant (175)..(176): Xaa in position 175 to 176 is any amino acid
  Variant (178)..(182): Xaa in position 178 to 182 is any amino acid
  Variant (184)..(200): Xaa in position 184 to 200 is any amino acid
  Variant (201)..(202): Xaa in position 201 to 202 is any or no amino acid
  Variant (204)..(204): Xaa in position 204 is any amino acid
  Variant (205)..(208): Xaa in position 205 to 208 is any or no amino acid
  Variant (210)..(210): Xaa in position 210 is any amino acid
  Variant (212)..(235): Xaa in position 212 to 235 is any amino acid
  Variant (236)..(241): Xaa in position 236 to 241 is any or no amino acid
  Variant (245)..(246): Xaa in position 245 to 246 is any amino acid
  Variant (247)..(247): Xaa in position 247 is any or no amino acid
  Variant (249)..(257): Xaa in position 249 to 257 is any amino acid
  Variant (258)..(260): Xaa in position 258 to 260 is any or no amino acid
  Variant (262)..(264): Xaa in position 262 to 264 is any amino acid
  Variant (270)..(271): Xaa in position 270 to 271 is any amino acid
  Variant (273)..(274): Xaa in position 273 to 274 is any amino acid
  Variant (276)..(282): Xaa in position 276 to 282 is any amino acid
  Variant (283)..(286): Xaa in position 283 to 286 is any or no amino acid
  Variant (288)..(299): Xaa in position 288 to 299 is any amino acid
  Variant (300)..(300): Xaa in position 300 is any or no amino acid
  Variant (303)..(303): Xaa in position 303 is any amino acid
  Variant (305)..(308): Xaa in position 305 to 308 is any amino acid
  Variant (310)..(311): Xaa in position 310 to 311 is any amino acid
  Variant (313)..(319): Xaa in position 313 to 319 is any amino acid
  Variant (320)..(320): Xaa in position 320 is any or no amino acid
  Variant (322)..(333): Xaa in position 322 to 333 is any amino acid
  Variant (334)..(336): Xaa in position 334 to 336 is any or no amino acid
  Variant (338)..(339): Xaa in position 338 to 339 is any amino acid
  Variant (340)..(354): Xaa in position 340 to 354 is any or no amino acid
  Variant (357)..(375): Xaa in position 357 to 375 is any amino acid
  Variant (376)..(377): Xaa in position 376 to 377 is any or no amino acid
  Variant (380)..(383): Xaa in position 380 to 383 is any amino acid
  Variant (385)..(393): Xaa in position 385 to 393 is any amino acid
  Variant (394)..(403): Xaa in position 394 to 403 is any or no amino acid
  Variant (406)..(415): Xaa in position 406 to 415 is any amino acid
  Variant (416)..(419): Xaa in position 416 to 419 is any or no amino acid
  Variant (421)..(421): Xaa in position 421 is any amino acid
  Variant (426)..(440): Xaa in position 426 to 440 is any amino acid
  Variant (443)..(446): Xaa in position 443 to 446 is any amino acid
  Variant (449)..(467): Xaa in position 449 to 467 is any amino acid
  Variant (468)..(470): Xaa in position 468 to 470 is any or no amino acid
  Variant (472)..(475): Xaa in position 472 to 475 is any amino acid
  Variant (477)..(485): Xaa in position 477 to 485 is any amino acid
  Variant (486)..(488): Xaa in position 486 to 488 is any or no amino acid
  Variant (493)..(493): Xaa in position 493 is any amino acid
  Variant (495)..(495): Xaa in position 495 is any amino acid
  Variant (498)..(498): Xaa in position 498 is any amino acid
  Variant (499)..(500): Xaa in position 499 to 500 is any or no amino acid
  Variant (504)..(515): Xaa in position 504 to 515 is any amino acid
  Variant (516)..(516): Xaa in position 516 is any or no amino acid
PXXXXXXXXXXXXXXXXXXXXXXXXXXXXXXXXXXXXXXXXXXXXXXXXXXXXXXXXXXRXXXXXXXXXXXXXXXXXXAXXXXXXXXXXXXXXXGKXXXXXXXXXXXXXXXXXXXXXXXXXXXXXXXXXXXXXXXXXXXXXXXXXXXXPXGVXXXIXPWNXPXXXXXXXXXPALXXGXXXXXKXXXXXXXXXXXXXXXXXXXGXXXXXPXGXXXXXXXXXXXXXXXXXXXXXXXXXXXXXXTGSXXXGXXXXXXXXXXXXKXXXLELGGXXPXXVXXXXXXXXXXXAXXXXXXXXXXXXXGQXCXXXXRXXVXXXXXXXXFXXXXXXXXXXXXXXXGXXXXXXXXXXXXXXXXXGPXXXXXXXXXXXXXXXXXXXXXGAXXXXGXXXXXXXXXXXXXXXXXXXPTXXXXXXXXXXXXXXEXFGPVXXXXXXXXXXXXXXXANXXXXGLXXXXXXXXXXXXXXXXXXXXXXGXXXXNXXXXXXXXXXXXPFGGXKXSGXXXGREXXXXXXXXXXXXXK

SEQ ID NO: 87395 - protein, 18 aa, Artificial sequence
  protein pattern
  Variant (2)..(4): Xaa in position 2 to 4 is any amino acid
  Variant (5)..(5): Xaa in position 5 is any or no amino acid
  Variant (9)..(9): Xaa in position 9 is Gly or Ser
  Variant (10)..(10): Xaa in position 10 is any amino acid
  Variant (11)..(11): Xaa in position 11 is Ala, Cys, Asp, Gly, Asn or Ser
  Variant (12)..(12): Xaa in position 12 is Ala, Pro or Ser
  Variant (13)..(13): Xaa in position 13 is any amino acid
  Variant (14)..(14): Xaa in position 14 is Ile, Leu or Val
  Variant (15)..(15): Xaa in position 15 is Ile, Met or Val
  Variant (16)..(17): Xaa in position 16 to 17 is any amino acid
  Variant (18)..(18): Xaa in position 18 is Asp, Glu, Gly, Asn, Ser or Thr
KXXXXELGXXXXXXXXXX

SEQ ID NO: 87396 - protein, 13 aa, Artificial sequence
  protein pattern
  Variant (3)..(3): Xaa in position 3 is any amino acid
  Variant (5)..(6): Xaa in position 5 to 6 is any or no amino acid
  Variant (8)..(8): Xaa in position 8 is any amino acid
  Variant (10)..(10): Xaa in position 10 is Lys or Arg
  Variant (11)..(11): Xaa in position 11 is Asp or Glu
  Variant (12)..(12): Xaa in position 12 is any amino acid
  Variant (13)..(13): Xaa in position 13 is Ala, Gly or Ser
GGXKXXGXGXXXX

SEQ ID NO: 87397 - DNA, 1392 bp, Synechocystis sp.
  CDS (1)..(1392): transl_table=11
atggttagcctcacccccaatccgagttatagcgtcagcctactgttggaactccccaaccacgccggaactttggccagcgttacccaggcgatcgccgatgcggggggcagttttgggcaaatttccctgattgagagtaacttaaaactcacccggcgggaaattgcggtggatgcttccagcagtgagcacgccgaaaaaattattggggcagtgaaagctctggataatgtcaaattgctgaaggtgtccgatcgcacctttgatttacaccgtcagggcaaaattagcgtggttagtcgcattcccctcacctcccaatcggatttggccatggcctataccccaggggtggggcgcatctgtcgggcgatcgccgaagatccggaaaaggtttattccctgaccattaaaagcaatacggtggcggtggtgaccgatggcagtgcggtgttggggttgggtaacctggggccggaagcggctttaccagtgatggaaggcaaggccatgttattcaaggaatttgcccaactggacgcttttcccatctgtttggatacccaggatacggaggaaattattcgcaccgtcaaggcgatcgccccggtgtttggcggcgtaaatttggaagacattgccgctccccggtgttttgaaattgaagcccggctgaaaaaagaattaaatattcctgtatttcacgatgatcagcacggcaccgccattgttaccctggccgctttgttaaatgccctcaaatttgttggtaaagccatggccgctgtccgcattgtcatcaacggcgctggggctgctgggttggcgatcgccgaattgctcaaggaatccggagccaccgatatttggatttgcgactccaagggcattgtgggcaaacatcgcaccgatttaaacagcaaaaaacagagctttgcggtggatgcggaagggactttagccgatgctatggctggagctgatgtgtttttaggggtgagtgcgccgggggtagtgaccaaggaaatggtgcaatccatggccaaggacccgattgtgtttgccatggccaaccctatccccgaaattcagccggaattaatccaagaggatgcggcggttattgccacggggcgcagtgattaccccaaccaaattaacaatgtgcttgcctttccgggggttttccggggagccattgactgtagagctagcattattaccaccaccatgtgcatcgaagcggccaaggcgatcgcctctttggtgcacagcaacaccctagatagtgagcatattattccttcggtttttgacaatcgggtcgccactaccgtagccagtgcagtgcagttggccgcccgcaatgaaggggtggccggtcaataa

SEQ ID NO: 87398 - protein, 463 aa, Synechocystis sp.; identical to SEQ ID NO: 5594

SEQ ID NO: 87399 - DNA, 1713 bp, Oryza sativa (japonica cultivar-group); identical to SEQ ID NO: 6005
  CDS (1)..(1713)

SEQ ID NO: 87400 - protein, 570 aa, Oryza sativa (japonica cultivar-group); identical to SEQ ID NO: 6006

SEQ ID NO: 87401 - DNA, 1839 bp, Bombyx mori; identical to SEQ ID NO: 5563
  CDS (1)..(1839)

SEQ ID NO: 87402 - protein, 612 aa, Bombyx mori; identical to SEQ ID NO: 5564

SEQ ID NO: 87403 - DNA, 2280 bp, Mesorhizobium loti MAFF303099; identical to SEQ ID NO: 5567
  CDS (1)..(2280): transl_table=11

SEQ ID NO: 87404 - protein, 759 aa, Mesorhizobium loti MAFF303099; identical to SEQ ID NO: 5568

SEQ ID NO: 87405 - DNA, 1278 bp, Vibrio cholerae O1 biovar eltor str. N16961; identical to SEQ ID NO: 5575
  CDS (1)..(1278): transl_table=11

SEQ ID NO: 87406 - protein, 425 aa, Vibrio cholerae O1 biovar eltor str. N16961; identical to SEQ ID NO: 5576

SEQ ID NO: 87407 - DNA, 1143 bp, Lactococcus lactis subsp. lactis Il1403
  CDS (1)..(1143): transl_table=11
atggttgattttaataaagttttagatttacacgaattacacacaggtgtattggatattcaagcagacattgatgtcaaaaagccaagtgatctggctgaggcttatacaccgggtgttgccgaactttcaaaattaattcagagtgacccagaagctaaacgcaaatacacaatgagcggaaaactggtggccgttgtgactgatggaacagctgttcttggtcttggaaatatggggcctgctggtggactccctatcgttgaggggaaagcccttctgtacaaggaattagctggtgtcgatgcaataccgattgctgtggaacaaatcggtgctgaaaaaatcatcgaaacaattaaaaatatttcgcaatcttttgctggtattcacttggaagatatctcagctcctcaatgttttgaaattgaggaacgactttctaaaaatttgaatattccagtttatcatgatgaccaagctgggacagctatcgttgtcttagcaggtttgatgaatgcagccaagttagttaataagaaattggaagacttgaagattgtcatcaatggtgttggtgcagctggtgttgcaaccgggcgattatttgctgaggttggcattaaaaatgtgaccttgattgatattgaaggaaaagttaacgataaggtgaaatcttataatcgttatcagttggaattggctaaacgctttaatcaagtagctgggacgactttggatgaagtgattgacggtcaagatgtctttattggtttgtcagatgccaaagttttgactgggacacaagttgaacgcatggcaaaagatgcaattatctttgctttagcaaatccagtgccagaaatcttaccagaagaagcgctcaagcatggagctgcagttgttgcaacaggctctaatcaatggccaaatcaagtcaataatgttttggtgttccctggcttgtttaaaggtttattgagtgcgaatgttcagcacgtagattacaagttgcaagctaatattgcgacagccattgctgatgtcattaaaaatccagatcggaatcacattgttcctggggtatttgatgcaggagttgtagaaagtgtcacaaaagcggtaaaagattcagcaaaataa

SEQ ID NO: 87408 - protein, 380 aa, Lactococcus lactis subsp. lactis Il1403
MVDFNKVLDLHELHTGVLDIQADIDVKKPSDLAEAYTPGVAELSKLIQSDPEAKRKYTMSGKLVAVVTDGTAVLGLGNMGPAGGLPIVEGKALLYKELAGVDAIPIAVEQIGAEKIIETIKNISQSFAGIHLEDISAPQCFEIEERLSKNLNIPVYHDDQAGTAIVVLAGLMNAAKLVNKKLEDLKIVINGVGAAGVATGRLFAEVGIKNVTLIDIEGKVNDKVKSYNRYQLELAKRFNQVAGTTLDEVIDGQDVFIGLSDAKVLTGTQVERMAKDAIIFALANPVPEILPEEALKHGAAVVATGSNQWPNQVNNVLVFPGLFKGLLSANVQHVDYKLQANIATAIADVIKNPDRNHIVPGVFDAGVVESVTKAVKDSAK

SEQ ID NO: 87409 - DNA, 1392 bp, Nostoc sp. PCC 7120; identical to SEQ ID NO: 5597
  CDS (1)..(1392): transl_table=11

SEQ ID NO: 87410 - protein, 463 aa, Nostoc sp. PCC 7120; identical to SEQ ID NO: 5598

SEQ ID NO: 87411 - DNA, 2346 bp, Ralstonia solanacearum GMI1000; identical to SEQ ID NO: 5599
  CDS (1)..(2346): transl_table=11

SEQ ID NO: 87412 - protein, 781 aa, Ralstonia solanacearum GMI1000; identical to SEQ ID NO: 5600

SEQ ID NO: 87413 - DNA, 1308 bp, Pyrococcus furiosus DSM 3638; identical to SEQ ID NO: 5609
  CDS (1)..(1308): transl_table=11

SEQ ID NO: 87414 - protein, 435 aa, Pyrococcus furiosus DSM 3638; identical to SEQ ID NO: 5610

SEQ ID NO: 87415 - DNA, 1179 bp, Corynebacterium glutamicum ATCC 13032; identical to SEQ ID NO: 5611
  CDS (1)..(1179): transl_table=11

SEQ ID NO: 87416 - protein, 392 aa, Corynebacterium glutamicum ATCC 13032; identical to SEQ ID NO: 5612

SEQ ID NO: 87417 - DNA, 1185 bp, Thermoanaerobacter tengcongensis MB4; identical to SEQ ID NO: 5615
  CDS (1)..(1185): transl_table=11

SEQ ID NO: 87418 - protein, 394 aa, Thermoanaerobacter tengcongensis MB4; identical to SEQ ID NO: 5616

SEQ ID NO: 87419 - DNA, 1416 bp, Streptomyces coelicolor A3(2); identical to SEQ ID NO: 5617
  CDS (1)..(1416): transl_table=11

SEQ ID NO: 87420 - protein, 471 aa, Streptomyces coelicolor A3(2); identical to SEQ ID NO: 5618

SEQ ID NO: 87421 - DNA, 1389 bp, Thermosynechococcus elongatus BP-1; identical to SEQ ID NO: 5623
  CDS (1)..(1389): transl_table=11

SEQ ID NO: 87422 - protein, 462 aa, Thermosynechococcus elongatus BP-1; identical to SEQ ID NO: 5624

SEQ ID NO: 87423 - DNA, 1164 bp, Streptococcus agalactiae 2603V/R
  CDS (1)..(1164): transl_table=11
atgagtgaaaatttaggtcaattagctatcaaccaagctagagaaaatggtggaaaattagaagtaatttcaaaagttaaggtggaagataagagggatcttagtattgcctataccccaggggtggcgtcagtatcatcagctattgcagaggatgtggagcttgcatatgagttgacgactaaaaaaaatacagtagccgtagtgagtgatggttcagctgttcttggattaggagatattggtcctgaggcagcaatgccagtcatggaaggtaaagcagcactctttaaacgttttgcaaatgtagatgctgtgccaattgtgttgaaaacaaatgatacagaggaaattatttctatagtaaaagctatttcgccgacttttggagggattaatttagaggatatttcagcaccacgttgtttcgaaattgaacaacgcctaattgaagaatgtgatataccagttttccatgatgaccaacatggtacagcaatcgtagtattagcggctttgtttaacagtttgaagctagttaaaaaagacattgaagacatcagagtagttgttaatggtggaggttcagcgggcttatctataacaaggaagcttctatcagcaggagcaaaacatgtaacggtagttgatcgatttggcattattaacgataaagatcgggagtcattagcccctcatcacaaagcgattgcaaaattgactaatagagaattccaatctggatccttagaagatgctttggagaatgccgatgtttttataggtgtttctgctccggaagcattacatgcagaatggatttccaagatggctgataaacctattgtatttgcaatggcgaatcctattccagaaatttatccagatcaagccttaaaagccggagcttacatagttggaactggtcgtagtgattttccaaatcaaattaataatgttttagcatttccgggtattttcagaggagcattagatgctagagcaaaaacgataactgttgaaatgcaaattgcggcagcgagaggcatagctagtttaataccggaggaagaattaagcacaactcacatcattccaaatgcttttcaaaatgatgtggccgatgtagttgctaaaagcgtcagtaatgctgtacaaaaataa

SEQ ID NO: 87424 - protein, 387 aa, Streptococcus agalactiae 2603V/R
MSENLGQLAINQARENGGKLEVISKVKVEDKRDLSIAYTPGVASVSSAIAEDVELAYELTTKKNTVAVVSDGSAVLGLGDIGPEAAMPVMEGKAALFKRFANVDAVPIVLKTNDTEEIISIVKAISPTFGGINLEDISAPRCFEIEQRLIEECDIPVFHDDQHGTAIVVLAALFNSLKLVKKDIEDIRVVVNGGGSAGLSITRKLLSAGAKHVTVVDRFGIINDKDRESLAPHHKAIAKLTNREFQSGSLEDALENADVFIGVSAPEALHAEWISKMADKPIVFAMANPIPEIYPDQALKAGAYIVGTGRSDFPNQINNVLAFPGIFRGALDARAKTITVEMQIAAARGIASLIPEEELSTTHIIPNAFQNDVADVVAKSVSNAVQK

SEQ ID NO: 87425 - DNA, 1236 bp, Oceanobacillus iheyensis HTE831; identical to SEQ ID NO: 5625
  CDS (1)..(1236): transl_table=11

SEQ ID NO: 87426 - protein, 411 aa, Oceanobacillus iheyensis HTE831; identical to SEQ ID NO: 5626

SEQ ID NO: 87427 - DNA, 2295 bp, Xylella fastidiosa Temecula1
  CDS (1)..(2295): transl_table=11
atgtcaaacgatacatttaaacaggcggcgattgattatcaccgcacgcagccagccggtaagatcaaggtggtcgcaaccaagccaatgctgacgcagcgtgatttgtcgttggcgtattccccaggtgtggcgtttgcttgccaagcgattgtcgaaaatcctcagcaggcaagtgagctcacggcgcgcggtaacttggttgcggtgatttccaacggcactgcggtgttgggtttggggaacattggtccactggcgggtaagccggtgatggaaggcaagggcgtgctgtttcagaagttcgctggcattgatgtgtttgatatcgagattgacgagtctgacccggataagttggtagacattattgccagtctggagccgactttcggtggtgtgaacttagaggacatcaaagccccggaatgtttcatcgtcgagcgtaagttgcgtgagcggatgagtattccggtctttcacgatgatcagcacggtactgcgatcattgtcggtgcggctgtgcttaacgcgatggtcatcactggaaagaagatcggagaggtgaagttggcaaccaccggcatgggagcggcgggtgtctcctgcgtcaatatgctggtttcgctggggttgaacccggataacattctggcttatgaccgggagggggtgatccatactggccgtaccgatttggatccggagaagcagcgttatgcacgggatacggataagcgcactttggcggagattgtggagggtgcggatatttttcttgggctttctgctgctggcatcttgacgccagagatggtggcgacgatggcgcctgacccagtgatctttgccttggccaatcccattccggagatcatgcctgaggtggtatgtgcggtgcgtacggatgccattattggaactgggcgttcggattatccaaatcaaatcaacaatgttttgtgttttccctacttgttccgtggtgcgttggatgtgggtgcgaccacgatcaatgaggagatgaagattgcttgcgttaaggcgattgctgcgttagcacggtgtgaggcttccgatctgggcgctgcttacggtggtgagacgccaagttttggccgggagtatttgattccgcgtccgcttgacccacgtttattagtggaactgtcttcggcggtggcgcaggcggcgatggattctggggtggcgactcgcccgattacggatatgagcgcctaccatgacaagttgagccaatttgtttaccgcaccagcttgatgatgaagccggtttacgatcgtgcgcgtgctgataagcagcgggtggtgtatgccgagggtgaggaagaggtgattctgcgtgcggtgcagaatgtgattgacgaagggttggcgttcccgattctgattggtcgtccggatgtgatcgaaagcaggattcagcgcatggggctgcgcatgaaggttggtgtcgatttcgaggtgaccaatatccacgatgatcctcgcttcaacgattattggcagtactaccatggggtgacggagcgtcgtggggtgacggtcagtgcggcgaaggagttaatgcgttcgcgtcctactctgattgcctcggtgatggttgcacgtggtgaggccgatgcgttgttgactggagccgtcggtcgtttccataagaggctcggttatgcgcgcagtgtgatccctctggaacctcgggtgagttcaacggcggcgatgacaggcgtgattaaccaacatggtgcgtttttctttgtggatacccatgtgcaggaagatccgagcgccgagcagattaccgaggccacgttgcaggcgtgttaccgcttgaggttgtttggcattgagccgagtgtggcgttactgtcgcacagtaattttggtagtcacgattcgcgtgatgcattgaagatgcgccaggtgcgtgagctgctgctcaagcgtagccccaggttgaatattgatggggagatgcaggcggatacagcgtgggatgaggtgctgcgcgagcgcattatgcccaatacaacgttgaaaggtcgggctaatctgtttgtgtttccaaatttggaggcggccaatattgcttacaacttggtgcgtgtgtttaccgatggtgtggcgattggcccgattttgatgggtatttccaaggcagtgcatattttgacgagtagcaccacgtcacggcgggtgatgaatatgacggcaatcgctgcggtggatgcgcagattcgcaagcagtttgaaggcgggaagcgcgggggataa

SEQ ID NO: 87428 - protein, 764 aa, Xylella fastidiosa Temecula1
MSNDTFKQAAIDYHRTQPAGKIKVVATKPMLTQRDLSLAYSPGVAFACQAIVENPQQASELTARGNLVAVISNGTAVLGLGNIGPLAGKPVMEGKGVLFQKFAGIDVFDIEIDESDPDKLVDIIASLEPTFGGVNLEDIKAPECFIVERKLRERMSIPVFHDDQHGTAIIVGAAVLNAMVITGKKIGEVKLATTGMGAAGVSCVNMLVSLGLNPDNILAYDREGVIHTGRTDLDPEKQRYARDTDKRTLAEIVEGADIFLGLSAAGILTPEMVATMAPDPVIFALANPIPEIMPEVVCAVRTDAIIGTGRSDYPNQINNVLCFPYLFRGALDVGATTINEEMKIACVKAIAALARCEASDLGAAYGGETPSFGREYLIPRPLDPRLLVELSSAVAQAAMDSGVATRPITDMSAYHDKLSQFVYRTSLMMKPVYDRARADKQRVVYAEGEEEVILRAVQNVIDEGLAFPILIGRPDVIESRIQRMGLRMKVGVDFEVTNIHDDPRFNDYWQYYHGVTERRGVTVSAAKELMRSRPTLIASVMVARGEADALLTGAVGRFHKRLGYARSVIPLEPRVSSTAAMTGVINQHGAFFFVDTHVQEDPSAEQITEATLQACYRLRLFGIEPSVALLSHSNFGSHDSRDALKMRQVRELLLKRSPRLNIDGEMQADTAWDEVLRERIMPNTTLKGRANLFVFPNLEAANIAYNLVRVFTDGVAIGPILMGISKAVHILTSSTTSRRVMNMTAIAAVDAQIRKQFEGGKRGG

SEQ ID NO: 87429 - DNA, 1170 bp, Clostridium tetani E88; identical to SEQ ID NO: 5641
  CDS (1)..(1170): transl_table=11

SEQ ID NO: 87430 - protein, 389 aa, Clostridium tetani E88; identical to SEQ ID NO: 5642

SEQ ID NO: 87431 - DNA, 1269 bp, Pseudomonas syringae pv. tomato str. DC3000; identical to SEQ ID NO: 5643
  CDS (1)..(1269): transl_table=11

SEQ ID NO: 87432 - protein, 422 aa, Pseudomonas syringae pv. tomato str. DC3000; identical to SEQ ID NO: 5644

SEQ ID NO: 87433 - DNA, 1278 bp, Vibrio parahaemolyticus RIMD 2210633; identical to SEQ ID NO: 5645
  CDS (1)..(1278): transl_table=11

SEQ ID NO: 87434 - protein, 425 aa, Vibrio parahaemolyticus RIMD 2210633; identical to SEQ ID NO: 5646

SEQ ID NO: 87435 - DNA, 2292 bp, Bacteroides thetaiotaomicron VPI-5482; identical to SEQ ID NO: 5649
  CDS (1)..(2292): transl_table=11

SEQ ID NO: 87436 - protein, 763 aa, Bacteroides thetaiotaomicron VPI-5482; identical to SEQ ID NO: 5650

SEQ ID NO: 87437 - DNA, 1434 bp, Streptomyces avermitilis MA-4680
  CDS (1)..(1434): transl_table=11
atggcaacggcgcccagcgtctcctactcgatgacggtccggctggaggtgcccgcgagcggaacagcggtctcccagctcaccacggccgtcgagtcccacggaggctcggtgaccggcctcgacgtcaccgcgtccgggcacgagaagctccggatcgacgtcacgatcgcggcgacctccacctcgcacgccgacgagatcgtcgcgcagctgcgcaccatcgagggcgtcaccctcggcaaggtctccgaccgtacgttcctgatgcacctcggcggcaagatcgagatgcagtccaagcaccccatccgcaaccgtgacgatctctcgatgatctacacgccgggtgtcgcccgcgtctgcatggcgatcgccgagaaccccgaggacgcccgtcgcctcaccatcaagcgcaactccgttgcggtcgtgacggacggctcggccgtgctgggcctcggcaacatcggtccgaaggccgccctcccggtcatggagggcaaggcggccctcttcaagcgcttcgccggcatcgacgcctggccgctgtgcctggacacccaggacaccgacgccatcgtcgagatcgtgaaggcgatcgctcccggcttcgccggcatcaacctcgaggacatctcggcgccccgttgcttcgagatcgaggcccggctgcgcgaggccctcgacatccccgtcttccacgacgaccagcacggcaccgcgatcgtcgtgctcgccgccctcacgaacgccctgcgtgtggcgggtaaggcgatcggcgacatccgcgtcgtcatgtccggcgcgggcgcggccggcacggccatcctcaagctgctgatcgcggccggcgtcaagaacgccgtcgtcgcggacatccacggggtcgtgcacgccgaccgcgaggacctggtgaacgccgcggccgactcgccgctgcgctggatcgccgacaacaccaaccccgagggcctgacgggcacgctcaaggaggccgtgcgcggcgccgacgtgttcgtcggcgtctcggcccccaacgtcctcgacggggacgacgtggccgccatggccgaggacgccatcgtgttcgcgctcgcgaacccggaccccgaggtcgagccggcggtggcccgtcagacggcggccgtggtcgccacgggacgctccgacttcccgaaccagatcaacaacgtgctggtcttcccgggcgtcttccgtggcctcctggacgcccagtcgcgtaccgtcaacacggagatgatgctggccgccgcggccgctctcgcggacgtggtgaccgaggacgagctgaacccgaactacatcatcccgagcgtcttcaacgagaaggttgcgggcgcggtcgccggagcggtgcgcactgccgcgaaggcggccggggtgacggagtcggacagcaaggacgcgtaa

SEQ ID NO: 87438 - protein, 477 aa, Streptomyces avermitilis MA-4680
MATAPSVSYSMTVRLEVPASGTAVSQLTTAVESHGGSVTGLDVTASGHEKLRIDVTIAATSTSHADEIVAQLRTIEGVTLGKVSDRTFLMHLGGKIEMQSKHPIRNRDDLSMIYTPGVARVCMAIAENPEDARRLTIKRNSVAVVTDGSAVLGLGNIGPKAALPVMEGKAALFKRFAGIDAWPLCLDTQDTDAIVEIVKAIAPGFAGINLEDISAPRCFEIEARLREALDIPVFHDDQHGTAIVVLAALTNALRVAGKAIGDIRVVMSGAGAAGTAILKLLIAAGVKNAVVADIHGVVHADREDLVNAAADSPLRWIADNTNPEGLTGTLKEAVRGADVFVGVSAPNVLDGDDVAAMAEDAIVFALANPDPEVEPAVARQTAAVVATGRSDFPNQINNVLVFPGVFRGLLDAQSRTVNTEMMLAAAAALADVVTEDELNPNYIIPSVFNEKVAGAVAGAVRTAAKAAGVTESDSKDA

SEQ ID NO: 87439 - DNA, 1431 bp, Rhodopirellula baltica SH 1; identical to SEQ ID NO: 5659
  CDS (1)..(1431): transl_table=11

SEQ ID NO: 87440 - protein, 476 aa, Rhodopirellula baltica SH 1; identical to SEQ ID NO: 5660

SEQ ID NO: 87441 - DNA, 1269 bp, Haemophilus ducreyi 35000HP; identical to SEQ ID NO: 5661
  CDS (1)..(1269): transl_table=11

SEQ ID NO: 87442 - protein, 422 aa, Haemophilus ducreyi 35000HP; identical to SEQ ID NO: 5662

SEQ ID NO: 87443 - DNA, 2289 bp, Bordetella parapertussis 12822
  CDS (1)..(2289): transl_table=11
atgaaagacaccgaccgccaagccgcactggactaccacgcctatccgcatcccggaaaaatctcggtcacggccaccaagccgctggtcacgcagcgcgacctcagcctggcctactcgccgggcgtggccgccgcctgcgaggagatcgtcgaggacccggccaatgtgttccgctacaccgggcggggcaacctggtgggcgtgatcaccaacggcacggcggtgctggggctgggcaacatcggcgcgctggcctccaagccggtgatggaaggcaaggcggtgctgttcaagaagttcgccgggctggacgtgttcgacatcgagatcaacgagaccgacccggacaagctggtggagatcatcgccggactggaagccaccttcggcggcatcaacctggaagacatcaaggcgccggagtgcttcacggtcgagcgcaagctgcgcgagcgcatgaagatcccggtgttccacgacgaccagcacggcaccgccatcaccgtatgcgcggccgtggtcaacggcctggccgtggccggcaagcgcatcgaggacgtcaagctggtgacctcgggcgccggcgccgccgccctggcctgcctggacttgctggtggacctgggactgccgctggagcatatctgggtcaccgacatcgaaggcgccgtctaccagggccgcaccgccctgatggacccggacaaggcgcgctatgcgcagccgaccgaggcccgcaccctggccgaggtgatcgagggcgcggacgtgttcctgggcctgtcggccggcaacgtgctcaagcccgagatggtggccaccatggcggccaacccgctgattctggcgctggccaaccccaaccccgagatcctgcccgaggccgcgcacgcagtgcgcgacgacatcatcatggccaccggccgttcggactacccgaaccaggtcaacaacgtgctgtgctttccgtacatcttccgcggcgcgctggacgtgggcgcgaccacgatcacgcgcgagatggaaaaggcggcggtcctggccatcgccagcctggcgcgcgaagaacagaacgaggtcgtggccgcggcctacggcacctatgacatttcgtttggccgcgactacctgattcccaagccgttcgatccgcgcctgatcgtgcgcatcgcgccggcggtggccaaggcggccatggagggcggcgtggccacgcgtcccatcgccgacctggacgcctacgccgagcagctgcagcagttcgtctaccactccggcgccttcatgaagccgctgttctcgcaggccaagcagatcgtgcgcgacggcggacgggcccgcatcgtgttcaccgagggcgaggacgagcgcgtgctgcgcgccgtgcaggtcatcgtcgacgagaaagtcgccaagcccatcctggtgggccgcccccaggtgctgctgtcgcgcatcgagaaattcggcctgcgcctgcgcctgggccaggacgtcgaggtctgcaacccggaatacgacgagcgcttccaccagtactggacgacgtattgggagctgatgtgccgcaacggcatcaccaaggagatggcgcgcgtggaaatgcgccgccgcctgaccctgatcggcgccatgatggtgcacctgggcgacgccgacggcatgatctgcggcgcggtcagcggcttccacgaccacctgcgcttcatcgaccaggtcatcggcagaaagcccggcgccaccacctacgcggcgatgaacatcctgctgctggacgagcgcaccgtggccctggtggacacgcacgtcaatgaagaccccagcgccgagcagatcgccgagtacaccgtggcggccgccgaggaaatgcagcgcctgggcctggcgcccaaggtggcgctgctgtcgcgctcgaacttcggctcgggcagctcggcctcgggcgccaaaatgcgccacgcgctggagctggtcaaccgccaggcccccggcctggagatcgacggcgagatgcacggcgactgcgccctggacgaatcgctgcgcctgcgcctgctgcccgactctcccctgaagggttcggccaacctgctggtgtgccccaacgtggactccggcaacatcgcctacaacctgctcaagacggtggccggcaagaacgtggcggtcggtcccatcctgctgggcgccaacgcgccggtgcacatcgtcacctccagcgccaccgtgcgccgcatcatcaacatggcggcgctctgcgtgctggacgccaaccgcccgcagtaa

SEQ ID NO: 87444 - protein, 762 aa, Bordetella parapertussis 12822
MKDTDRQAALDYHAYPHPGKISVTATKPLVTQRDLSLAYSPGVAAACEEIVEDPANVFRYTGRGNLVGVITNGTAVLGLGNIGALASKPVMEGKAVLFKKFAGLDVFDIEINETDPDKLVEIIAGLEATFGGINLEDIKAPECFTVERKLRERMKIPVFHDDQHGTAITVCAAVVNGLAVAGKRIEDVKLVTSGAGAAALACLDLLVDLGLPLEHIWVTDIEGAVYQGRTALMDPDKARYAQPTEARTLAEVIEGADVFLGLSAGNVLKPEMVATMAANPLILALANPNPEILPEAAHAVRDDIIMATGRSDYPNQVNNVLCFPYIFRGALDVGATTITREMEKAAVLAIASLAREEQNEVVAAAYGTYDISFGRDYLIPKPFDPRLIVRIAPAVAKAAMEGGVATRPIADLDAYAEQLQQFVYHSGAFMKPLFSQAKQIVRDGGRARIVFTEGEDERVLRAVQVIVDEKVAKPILVGRPQVLLSRIEKFGLRLRLGQDVEVCNPEYDERFHQYWTTYWELMCRNGITKEMARVEMRRRLTLIGAMMVHLGDADGMICGAVSGFHDHLRFIDQVIGRKPGATTYAAMNILLLDERTVALVDTHVNEDPSAEQIAEYTVAAAEEMQRLGLAPKVALLSRSNFGSGSSASGAKMRHALELVNRQAPGLEIDGEMHGDCALDESLRLRLLPDSPLKGSANLLVCPNVDSGNIAYNLLKTVAGKNVAVGPILLGANAPVHIVTSSATVRRIINMAALCVLDANRPQ

SEQ ID NO: 87445 - DNA, 2286 bp, Chromobacterium violaceum ATCC 12472
  CDS (1)..(2286): transl_table=11
atggacgagcaattgcgccaaagcgcactggagtttcaccagttcccgacaccgggcaagattcaggttgccccgaccaagccgctgaccacccagcgcgatctggcactggcctactcccccggcgtgaccgccccgtgcgacgccatcgtcgaagacccgctcaacgcctacaaatacaccgcccgcggcaacctggtggccgtgatttccaacggcaccgctgtgctcggcctgggcaacatcggcgcgctggccagcaagccggtgatggaaggcaagggcgtattgttcaagaagttcgccggcatcgacgtgttcgacatcgaggtcaacgagctcgatcccgacaagctggtcgacatcatctgctcgctggagccgaccttcggcggcatcaacctggaagacatcaaggcgccggagtgcttctacatcgagaagaagtgccgcgagcgcatgggcattccggtcttccacgacgaccagcacggcaccgccatcgtggcggccgcggctgtgctgaacggcctgcgcctggtgaaaaaggaaatcggcgaagtgcgcgtggtggcctccggcgccggcgccgccgccatcgcctgcctggacctgttggtggccctgggcgtgaagcgcgaaaacatcaccatctgcgactccaagggcgtggtcttcgtcggccgcgacgagaagctggacgaatccaagctgcgctacgccatccaggacaacggctggcgcaagctggccgacgcgatggccggcgccgacatcttcatgggtctgtccggcccgcgcctggtgagccaggacatggtgaagagcatggcccgcgatccgctgatcctggccatggccaacccggaaccggaaatcctgccgccgctggtcaaggaagtgcgcccggacgccatcatcggcaccggccgctcggacttcccgaaccaggtcaacaacgtgctgtgcttccccttcatcttccgcggcgcgctggacgtgggcgcgaccaccatcaatgaagagatgaagctggccaccgtgcgcgcgatcgccgacctggcgatggccgagcagaacgacgtggtcgcctccgcctacggcgaccaggagctgtccttcggtccggaatacgtgattccgaaaccgttcgacccgcgcctgatcgtcaagatcgcccccgccgtggccaaggccgcgatggattccggcgtcgccacccgtccgatccaggacttcgacgcctacgccgaccagttggcccagttcgtctacaagaccaacctgttcatgaagccggtgttcgcccaggccaagaaggatccgaagcgcgtggtgatgaccgagggcgaggacgagcgcgtgctgcacgccacccaggagatcgtcacccagggcctggccaagccgatcctggtgggccgccccagcgtgatcgagaagcgcatcgagaagctgggcctgaagatgcgtccgggcgtggacttcgaactggtcaacaatgaatccgacccgcgcttcaacgactactggcaggactactaccagctgatgaagcgcaagggcgtgtcgcaggagcaggcccgccgccgcgtgatcggcaacaccacgctgatcggcgcgatgatggtgcgccgcggcgacgccgacgcgctgatctgcggcacctacggcccgtaccgccagcacttcgacatcctggagaacgtgctgggctacgccaacaaggacaaggtggccggcgcgatgaacgcgctgatcctgccgaccggcaacatcttcatcaccgacacctacgtcaacgccgagccctccgccgagcagctggccgccatcaccaagatggccgcgcaaagcatccagcgcttcggcatccagccgaaggccgcgctgctgtccaactccagcttcggcgcacttaacaccgcgtcggcgcagaagatgcgcgccgccttcgaccagatccgcgccgcccagccggaactggaaatcgacggcgagatgcagggcgacgccgcgctggtggaaagcatccgccagcaggcgatgccggactccacgctgaagggctcggccaatctgctgatcatgccgaacgtggaagccgccaacatcagctacaacctgctgcgcgtgtcggcgtccgacggcgtgaccatcggcccgatcctgatgggcatggccaagccggcgcacatcctgaccccgatctcgtcggtgcgccgcatcgtcaacatggtggcgctggcctcggtcgacgcccaggtcgccgcgcaacagggctga

SEQ ID NO: 87446 - protein, 761 aa, Chromobacterium violaceum ATCC 12472
MDEQLRQSALEFHQFPTPGKIQVAPTKPLTTQRDLALAYSPGVTAPCDAIVEDPLNAYKYTARGNLVAVISNGTAVLGLGNIGALASKPVMEGKGVLFKKFAGIDVFDIEVNELDPDKLVDIICSLEPTFGGINLEDIKAPECFYIEKKCRERMGIPVFHDDQHGTAIVAAAAVLNGLRLVKKEIGEVRVVASGAGAAAIACLDLLVALGVKRENITICDSKGVVFVGRDEKLDESKLRYAIQDNGWRKLADAMAGADIFMGLSGPRLVSQDMVKSMARDPLILAMANPEPEILPPLVKEVRPDAIIGTGRSDFPNQVNNVLCFPFIFRGALDVGATTINEEMKLATVRAIADLAMAEQNDVVASAYGDQELSFGPEYVIPKPFDPRLIVKIAPAVAKAAMDSGVATRPIQDFDAYADQLAQFVYKTNLFMKPVFAQAKKDPKRVVMTEGEDERVLHATQEIVTQGLAKPILVGRPSVIEKRIEKLGLKMRPGVDFELVNNESDPRFNDYWQDYYQLMKRKGVSQEQARRRVIGNTTLIGAMMVRRGDADALICGTYGPYRQHFDILENVLGYANKDKVAGAMNALILPTGNIFITDTYVNAEPSAEQLAAITKMAAQSIQRFGIQPKAALLSNSSFGALNTASAQKMRAAFDQIRAAQPELEIDGEMQGDAALVESIRQQAMPDSTLKGSANLLIMPNVEAANISYNLLRVSASDGVTIGPILMGMAKPAHILTPISSVRRIVNMVALASVDAQVAAQQG

SEQ ID NO: 87447 - DNA, 1389 bp, Gloeobacter violaceus PCC 7421; identical to SEQ ID NO: 5669
  CDS (1)..(1389): transl_table=11

SEQ ID NO: 87448 - protein, 462 aa, Gloeobacter violaceus PCC 7421; identical to SEQ ID NO: 5670

SEQ ID NO: 87449 - DNA, 2280 bp, Photorhabdus luminescens subsp. laumondii TTO1; identical to SEQ ID NO: 5671
  CDS (1)..(2280): transl_table=11

SEQ ID NO: 87450 - protein, 759 aa, Photorhabdus luminescens subsp. laumondii TTO1; identical to SEQ ID NO: 5672

SEQ ID NO: 87451 - DNA, 2259 bp, Geobacter sulfurreducens PCA; identical to SEQ ID NO: 5679
  CDS (1)..(2259): transl_table=11

SEQ ID NO: 87452 - protein, 752 aa, Geobacter sulfurreducens PCA; identical to SEQ ID NO: 5680

SEQ ID NO: 87453 - DNA, 2298 bp, Bartonella henselae str. Houston-1; identical to SEQ ID NO: 5709
  CDS (1)..(2298): transl_table=11

SEQ ID NO: 87454 - protein, 765 aa, Bartonella henselae str. Houston-1; identical to SEQ ID NO: 5710

SEQ ID NO: 87455 - DNA, 2271 bp, Acinetobacter sp. ADP1; identical to SEQ ID NO: 5713
  CDS (1)..(2271): transl_table=11

SEQ ID NO: 87456 - protein, 756 aa, Acinetobacter sp. ADP1; identical to SEQ ID NO: 5714

SEQ ID NO: 87457 - DNA, 2280 bp, Yersinia pseudotuberculosis IP 32953
  CDS (1)..(2280): transl_table=11
atggacgaacaattgaaacagagtgcgcttgattttcatcaatttcctgttccagggaaaatccaggtttcgccaaccaaaccgttggcgacccaacgggatttggcactggcgtattctcccggcgttgctgcaccctgtctggaaattgctgcagatcctttagctgcctacaaatacactgcccgtggcaatttagtggccgttatctctaacggtaccgccgtgctggggctgggtaatatcggcgcattggccggtaaacccgtgatggaaggtaaaggcgttctgtttaagaaattctcaggcattgatgttttcgatattgaggtggatgaactcgatccagataaactgatcgatattattgcgtctttggaacccacctttggcggtatcaatctggaagatatcaaagcgccagagtgtttttatattgagaaaaaactccgtgaacgcatgaaaatcccagtattccatgacgatcagcatggtacggcgatcatctgcaccgccgcagtactgaacggtttacgggttgtgaagaaagatatcagcgatgtgaaattggtggtctccggcgcaggtgcggcctctatcgcctgcttaaacttgctggtggcgctggggttaaaacagcacaatatcattgcatgtgattctaaaggtgtcatctataaaggccgtgaagcgaatatggccgaaaccaaagcggcctatgctatcgatgataacggccagcgcacattgggggatgtcatgccgggtagcgatattttcctcggctgctctggccccggtgttttaacgccagagatggtgaaaaccatggcaccgaatccgttgattctggccctggcaaacccggaaccggaaatcctaccgccgttagccaaagcggtgcgtcccgatgcaattatttgtactggccgctcggattaccctaatcaggttaataacgtgctgtgtttcccgtttatcttccgtggcgcgctggatgtcggtgccaccaccattaatgaagagatgaagctggcttgtgtccatgctattgctgatctggcgctggctgagcagagtgatgtggtggcttccgcttacggggagcaagacctctccttcggcccggaatacattattcctaaacccttcgatccgcgcttaatcgtaaaaattgcccccgcagtggccaaagcggcgatggcgtcaggagtggcaactcgcccaatcactgacttcaatgcttacgtcgaaaaactgtctgagtttgtctacaaaaccaacctgtttatgaagccaatcttctcgcaagcgaagaaagagatgaaacgggttgtgctggcggaaggggaagaggagcgggtgcttcatgccacgcaagagctgatttcacaagggctggcttatcctatcttgattggccgcccaagcgtaattgagactcggttgaaaaaattgggcttgcaaatcagtgccgggaaagattttgaagtggtcaataatgagtccgatccgcgctttaatgaatactggcacgaatattatcaaatcatgaaacgtcgtggtgtttcgcaggaacaggcccgccgtgcagtgattggtaatccaacgctgattggctcaatcatggttcatcgcggcgaggctgatgcgatgatttgtggcaccatcggtacctatcacgaacactacgatgtggtcgagaaagtgtttggcttccgtgaaggggcgcatgtggctggggcgatgaatgccttgttgctgccgagcggcaatacctttatcgctgatacctatgtcaataacgatccgacggcggaacaactggcagaaattactctgatggcagctgaaaccgtgcgccgttttggtattgagcccaaagtggcgttgttgtcccattccagtttcggcacatcagattgcccggcggcccgtaaaatgcgtcagacgctggcgctggtgaatcagatggcaccggaattggaaattgacggtgaaatgcacggtgacgcggcactggtggagagtattcgccataacctgatgccagatagcccactgaaaggttcagcgaatatcttgattatgccgaacatggaggctgcacgtatcagctacaacctgttgcgtgtcacgtcgtcagaaggggtgaccgtaggcccggtcctgatgggaataacgaaaccggtccatattctgacaccgattgcgtcggtgcggcggattgtgaatatggtggcgttggcggtagtggaggcgattactcttcgtccttga

SEQ ID NO: 87458 - protein, 759 aa, Yersinia pseudotuberculosis IP 32953
MDEQLKQSALDFHQFPVPGKIQVSPTKPLATQRDLALAYSPGVAAPCLEIAADPLAAYKYTARGNLVAVISNGTAVLGLGNIGALAGKPVMEGKGVLFKKFSGIDVFDIEVDELDPDKLIDIIASLEPTFGGINLEDIKAPECFYIEKKLRERMKIPVFHDDQHGTAIICTAAVLNGLRVVKKDISDVKLVVSGAGAASIACLNLLVALGLKQHNIIACDSKGVIYKGREANMAETKAAYAIDDNGQRTLGDVMPGSDIFLGCSGPGVLTPEMVKTMAPNPLILALANPEPEILPPLAKAVRPDAIICTGRSDYPNQVNNVLCFPFIFRGALDVGATTINEEMKLACVHAIADLALAEQSDVVASAYGEQDLSFGPEYIIPKPFDPRLIVKIAPAVAKAAMASGVATRPITDFNAYVEKLSEFVYKTNLFMKPIFSQAKKEMKRVVLAEGEEERVLHATQELISQGLAYPILIGRPSVIETRLKKLGLQISAGKDFEVVNNESDPRFNEYWHEYYQIMKRRGVSQEQARRAVIGNPTLIGSIMVHRGEADAMICGTIGTYHEHYDVVEKVFGFREGAHVAGAMNALLLPSGNTFIADTYVNNDPTAEQLAEITLMAAETVRRFGIEPKVALLSHSSFGTSDCPAARKMRQTLALVNQMAPELEIDGEMHGDAALVESIRHNLMPDSPLKGSANILIMPNMEAARISYNLLRVTSSEGVTVGPVLMGITKPVHILTPIASVRRIVNMVALAVVEAITLRP

SEQ ID NO: 87459 - DNA, 1431 bp, Symbiobacterium thermophilum IAM 14863
  CDS (1)..(1431): transl_table=11
gtggctcagcgactggccagtatgcggatcattgtgcggctggagattgagaatacgggttcgatcttctcctacatcgcaacggcaatcggcgccagcggtggcgacatcgtggcggtggacctcatccagtcccggcgggacgtggtggtgcgcgacatcaccatcgcggtggagaaccgggcgcacggcgaccggatcgtccaggcgctggcggcgctccccggcgtcaaggtggtcaacgtctcggaccggatctttctcgcccacctgggcggcaagatcgaggtcaagccccgggtgcaggtgaagacccgggacgacctgtcggtcgtctacacccccggggtggccgacgtctgccgggcgattgccgaggatccggcgaaggcctttacgctgaccatcaagcggaacacggtggccgtcgtcaccgacggcacggcggtgctggggctcggcaacatcgggccggccgcggccctgccggtgatggaaggcaaggcgatgctcttcaagcagttcgccggcgtcgacgccttcccgatctgcctggacaccacggaccccgacgagatcgtgcgcatcgtgaaggccatcgcgccggccttcggcggcatcaacctggaggacatctcctcgccccgctgctttgagatcgaggagcggctgaaggaggagctggacatcccggtcttccacgatgaccagcacggcacggcggtggtggtgctcgccgggctgatgaacgcggcccgggtggtgggcaaggagctcgcagacctcagggtcgtcgtctgcggcatcggcgcggcgggggtggccatctccaagatgctgatggcagccggcatcaccaacatcgtcggcgtggaccgggtgggcatcatcgagcggggcaagacgtacgaaaaccccatgtggcagtggtacgccgagcacaccaacccggagaaccggcacggcaccctggatgacgcgatcgagggcgccgacgccttcatcggtgtatcggcccccaacgtgctgaaggtcgagcacgtcaagaagatggccaaggatccgatcgtctttgccatggccaacccggtgcccgagatcgaccccgacgaggctgccccgtacgtggccgtcatggccacgggccggtcggactacccgaatcaggtgaacaacctgctctgcttcccgggcatcttccgcggcgccctgaactgccgggcgcggcagatcaacgaagccatgaagctggccgcggcccgggcgatcgcgtccgtcgtgtcggacgaggaactgcacgccgagtatatcatcccctcggtcttcaacaagcgggtcgtcgaggccgtggcggctgcggtggagcaggccgcctacgagaccggcgtcgcccgcagggagcggcagccccggaccggcggcgacgactga

SEQ ID NO: 87460 - protein, 476 aa, Symbiobacterium thermophilum IAM 14863
MAQRLASMRIIVRLEIENTGSIFSYIATAIGASGGDIVAVDLIQSRRDVVVRDITIAVENRAHGDRIVQALAALPGVKVVNVSDRIFLAHLGGKIEVKPRVQVKTRDDLSVVYTPGVADVCRAIAEDPAKAFTLTIKRNTVAVVTDGTAVLGLGNIGPAAALPVMEGKAMLFKQFAGVDAFPICLDTTDPDEIVRIVKAIAPAFGGINLEDISSPRCFEIEERLKEELDIPVFHDDQHGTAVVVLAGLMNAARVVGKELADLRVVVCGIGAAGVAISKMLMAAGITNIVGVDRVGIIERGKTYENPMWQWYAEHTNPENRHGTLDDAIEGADAFIGVSAPNVLKVEHVKKMAKDPIVFAMANPVPEIDPDEAAPYVAVMATGRSDYPNQVNNLLCFPGIFRGALNCRARQINEAMKLAAARAIASVVSDEELHAEYIIPSVFNKRVVEAVAAAVEQAAYETGVARRERQPRTGGDD

SEQ ID NO: 87461 - DNA, 1236 bp, Legionella pneumophila subsp. pneumophila str. Philadelphia 1; identical to SEQ ID NO: 5723
  CDS (1)..(1236): transl_table=11

SEQ ID NO: 87462 - protein, 411 aa, Legionella pneumophila subsp. pneumophila str. Philadelphia 1; identical to SEQ ID NO: 5724

SEQ ID NO: 87463 - DNA, 2277 bp, Azoarcus sp. EbN1
  CDS (1)..(2277): transl_table=11
atggatgaactgattcgcagcgccgctctcgactatcaccgctacccgcagcccggcaagatttcggtcactccgaccaaagtcctgtcgaaccagcgcgacctgtcgctggcatattcccccggtgttgccgcggcctgcgatgcgatcgtcgaggatccggccgaagccgcgacgttgaccgcgcgcagcaacctgatcggcgtcgtcacgaacggcaccgcggtgctcggtctcggcaacatcggcccgcttgcggccaaaccggtgatggaaggcaagggtgtgctgttcaagaagttcgccggcatcgacgtcttcgacctcgagatcgcggagaaagacgccgacaagctgatcgacatgatcgccgcgctcgagccgactttcggcggcatcaacctcgaagacatcaaggcgcccgagtgcttctacatcgagtcgaagctgcgcgagcgcatgaagatcccggtgttccacgacgaccagcacggcactgcgatcgtcgtcggcgcggcggtgctgaacggcctgcatctgctcggcaaggatctgaagaagatcaagctcgtgacttccggagccggagcggcagcgctcgcgtgcctgcggctcctcgagaagctcggcatcccggtcgagaacatctgggtcaccgacatcgaaggcgtggtctatgagggccgcactgcgctgatggacccgatcaaggcgcgctacgcgaaaccgacgccggcgcgcacgctcgccgagatcatcgagggcgcggacgtgctgctcggtctgtcggccggcggcgtcgtcaagcgcgagatggtcgcgaagatggcgccgaagccgctgatcctcgcgctcgcgaacccgattcccgagatcctgccggaagaggtccaggcggtgcgcgacgacgcgatcatcgcgaccgggcgttcggactatccgaaccaggtgaacaacgtgctgtgcttcccgttcatcttccgcggcgcgctcgacgtcggcgcgacgacgatcaccgacgagatgcagctcgccgcagtgaaggcgattgccgagctcgcgcgcgccgagcagagcgacatcgtcgccgcggcctacggcgagaaagtgtccggtttcgggccggagtacatcattccgcgcccgttcgatccgcgcctgatcgtcaagatcgcgccggcggtcgcgatcgccggtatggcgtcgggggtcgcgacgcggccgatcaccgactgggacgcgtaccgcggccagctcaacaacttcgtctggcactcgggcctgatcatgaaaccggtgttcgctgccgcgcgcggcacgggccagcgcatcatcttctccgaaggcgagtccgagcgcgtgctgcgcgcggtgcagaccgtcgtcgacgaaggcctcgcgagcccgatcctgatcggccgtcccgacgtcgttgcgacgaacatcgagcgcttcggcctgcgcatccgtgcggagcatgactttgagctcgtcaatcccgactccgacccgcgcttcaaggagctgtggatggattaccaccggctgatggagcggcacggcgtctcggtcgactacgcgaagaaggaagtgcgccggcgcacgacgctgatcggctcgctgatgctcaagcacggctacggtgacgggatgatctgcggcacgtacgggatgcaccggctgcacctcgagttcatcgagaagatcatcggccgcaagccgggtgtcgagaactgctatgcgctgaacgtcgtgagcttgcccgggcgcacgatgttcctcgccgacacctacgtgaactacgacccgacgcccgagcagatcgtcgagatgacgctgctcgcagccgaggagatgtcgcgcttcggcctgacgccgaaagtggcgctgctgtcgcattcgtcgttcggttcggccgactcgccgacttccgagaagatgcgcgccgcgctgcaactgctgcacgagcgtcatcccgacatcgaggtcgaaggcgagatgcacggcgatgccgcgctcgacgccgagctgcgactgcgcatcttcccgaactcgcgcatgcgtgagccggccaacctgctgattttccccacgctcgatgccgccaacatcgccttcaacctgctcaagacggctgcgggcgaaggcatgacgatcgggccgatcctgctcggtgccgccaagcccgcgcatatcctgacgccgtcggcgacggtgcgccgcatcatcaacatgaccgcactgaccgcggtcgaggcggcgcagggccggtcctga

SEQ ID NO: 87464 - protein, 758 aa, Azoarcus sp. EbN1
MDELIRSAALDYHRYPQPGKISVTPTKVLSNQRDLSLAYSPGVAAACDAIVEDPAEAATLTARSNLIGVVTNGTAVLGLGNIGPLAAKPVMEGKGVLFKKFAGIDVFDLEIAEKDADKLIDMIAALEPTFGGINLEDIKAPECFYIESKLRERMKIPVFHDDQHGTAIVVGAAVLNGLHLLGKDLKKIKLVTSGAGAAALACLRLLEKLGIPVENIWVTDIEGVVYEGRTALMDPIKARYAKPTPARTLAEIIEGADVLLGLSAGGVVKREMVAKMAPKPLILALANPIPEILPEEVQAVRDDAIIATGRSDYPNQVNNVLCFPFIFRGALDVGATTITDEMQLAAVKAIAELARAEQSDIVAAAYGEKVSGFGPEYIIPRPFDPRLIVKIAPAVAIAGMASGVATRPITDWDAYRGQLNNFVWHSGLIMKPVFAAARGTGQRIIFSEGESERVLRAVQTVVDEGLASPILIGRPDVVATNIERFGLRIRAEHDFELVNPDSDPRFKELWMDYHRLMERHGVSVDYAKKEVRRRTTLIGSLMLKHGYGDGMICGTYGMHRLHLEFIEKIIGRKPGVENCYALNVVSLPGRTMFLADTYVNYDPTPEQIVEMTLLAAEEMSRFGLTPKVALLSHSSFGSADSPTSEKMRAALQLLHERHPDIEVEGEMHGDAALDAELRLRIFPNSRMREPANLLIFPTLDAANIAFNLLKTAAGEGMTIGPILLGAAKPAHILTPSATVRRIINMTALTAVEAAQGRS

SEQ ID NO: 87465 - DNA, 1236 bp, Campylobacter jejuni RM1221; identical to SEQ ID NO: 5731
  CDS (1)..(1236): transl_table=11

SEQ ID NO: 87466 - protein, 411 aa, Campylobacter jejuni RM1221; identical to SEQ ID NO: 5732

SEQ ID NO: 87467 - DNA, 1278 bp, Thermococcus kodakarensis KOD1; identical to SEQ ID NO: 5733
  CDS (1)..(1278): transl_table=11

SEQ ID NO: 87468 - protein, 425 aa, Thermococcus kodakarensis KOD1; identical to SEQ ID NO: 5734

SEQ ID NO: 87469 - DNA, 1230 bp, Staphylococcus epidermidis RP62A; identical to SEQ ID NO: 5735
  CDS (1)..(1230): transl_table=11

SEQ ID NO: 87470 - protein, 409 aa, Staphylococcus epidermidis RP62A; identical to SEQ ID NO: 5736

SEQ ID NO: 87471 - DNA, 2277 bp, Dechloromonas aromatica RCB
  CDS (1)..(2277): transl_table=11
gtggaaaaggatctgcgcgaagccgctctcgaataccatcgctggcccaccccgggcaagatttccgtccgcccgaccaagggcctgaccaaccagcgcgatctggcgctggcctactctccgggtgttgccgccgcctgcgatgcgatcgtcgaagatccggccactgctgcctggtatacctcgcgcgccaatctggtgggggttgtgaccaacggtactgccgtgcttggccttggcaatatcggcccgctcgcttccaagccggtcatggaaggcaaaggctgcctgttcaagaaatttgccggtattgacgtgttcgacatcgaactggccgagaacgatccggacaagctgatcgacatgatcgccgccctcgagccgacgctcggcggtatcaaccttgaagacatcaaggcgccggaatgcttctacatcgaagagaagctcaaggcgcggatgaacatcccggtcttccatgacgaccagcacggcaccgcgatcatttccggcgccgccatgctcaacggcctgaaggtcgtcggcaagaagatcgaccaggtcaaggtcgtcgtttccggtgccggtgcggccgccatctcctgcgtcaacctgtggtgtgagctcggcgtcaagcgcgagaacatcaccatttgtgactccaagggcgtcatctacgttggtcgcccgggcggcatggacgagaccaaggcccgctacgcccagaataccgacaagcgtacccttggcgaggcgctggttggtgccgatatcttcctcggcctgtccgctgccggcgtcgtcaagcaggacatggtcaaggccatggccgacaagccgatggtctttgcgctggccaacccgaccccggaaatcatgccggaactggtcaaggaagttcgcccggacgccattatcgccaccggccgttctgactacgtaaaccaggtcaataacgttctgtgcttcccgttcatcttccgcggcgcgctcgatgtcggcgccacgcgtattaccgaagaaatgaagatggcttccgtccgtgccatcgctgaactggccgaagctgaagtgactgacgaagtcgccatggcctatccgggcgctgatctgtctttcggcccggaatacctgatccccaagcctttcgacccgcgtctgatcgtcaagatcgcgccggccgtcgctcaggccgccatggattccggtgtcgcaacccgtccgatcaccgactgggctgcctatcgcgccaagttgtctgaattcgtttatcacaccggtgtcggcatgcgggccatcttccaggccgcccgtcaggccaagggcaagcgcatcattttcgccgaaggtgaagatgaacgcgtcctgcgcgctgcccaggtggtgatcgaagagaagttcgcgcgtccgatcctgatcggtcgtccggaagtgatcgcgcaccgcctcgaaaaggccaagctgcgcatccagccgggtgtcgacttcgatgtcgtcaatccggagtccgacgagcgctatcgcgaatgctggaccgcctaccacaaggccatggcgcgtcagggcattaccccggccatcgccaaggaagccatgcgccgcaagccgaccgtgatcggcgccatgctgctcaagctcggctacgccgacggcatgatctgcggcatgactggacaatatagccaccatctcggcgtaatcagccagatcatcggcaagcgcgccggtgtcagcacgctggcagcaatgaactacctgatgctgccgggccgctcgctgtttatctgcgatacgcatgtgaacgaaaatccgaatgcccaggaaattgccgaaatgacgctgatggcggccgaacaggtcaagcgtttcggtagccatccgaaggtggcgctgctgtcgcattccaatttcggttccgccaattccgaatcggcacgcaagatgagcattgccgctggtctggtctccgccatgtcggccggtgagctggaagtggatggcgaaatgcatggtgactcggcgctgaatgaagatctgcgccgtgaagcgaatccggattcaccgctcaagggtgaagccaatctgctggtcatgccgaacatcgatgccgccaatatctcctacaacctgatcaagatgaccggtggcgaaggcgtgaccatcggccccatcctgctcggtgcggcccgtccggcgcatgtgctgacctcgacggccaccgtccgtcgtctggtcaatatgaccgctctggcagttgtggagtcgatggagcgctaa

SEQ ID NO: 87472 - protein, 758 aa, Dechloromonas aromatica RCB
MEKDLREAALEYHRWPTPGKISVRPTKGLTNQRDLALAYSPGVAAACDAIVEDPATAAWYTSRANLVGVVTNGTAVLGLGNIGPLASKPVMEGKGCLFKKFAGIDVFDIELAENDPDKLIDMIAALEPTLGGINLEDIKAPECFYIEEKLKARMNIPVFHDDQHGTAIISGAAMLNGLKVVGKKIDQVKVVVSGAGAAAISCVNLWCELGVKRENITICDSKGVIYVGRPGGMDETKARYAQNTDKRTLGEALVGADIFLGLSAAGVVKQDMVKAMADKPMVFALANPTPEIMPELVKEVRPDAIIATGRSDYVNQVNNVLCFPFIFRGALDVGATRITEEMKMASVRAIAELAEAEVTDEVAMAYPGADLSFGPEYLIPKPFDPRLIVKIAPAVAQAAMDSGVATRPITDWAAYRAKLSEFVYHTGVGMRAIFQAARQAKGKRIIFAEGEDERVLRAAQVVIEEKFARPILIGRPEVIAHRLEKAKLRIQPGVDFDVVNPESDERYRECWTAYHKAMARQGITPAIAKEAMRRKPTVIGAMLLKLGYADGMICGMTGQYSHHLGVISQIIGKRAGVSTLAAMNYLMLPGRSLFICDTHVNENPNAQEIAEMTLMAAEQVKRFGSHPKVALLSHSNFGSANSESARKMSIAAGLVSAMSAGELEVDGEMHGDSALNEDLRREANPDSPLKGEANLLVMPNIDAANISYNLIKMTGGEGVTIGPILLGAARPAHVLTSTATVRRLVNMTALAVVESMER

SEQ ID NO: 87473 - DNA, 1413 bp, Thermobifida fusca YX
  CDS (1)..(1413): transl_table=11
gtggccagccttcccagcgtctcgtattcgatcacggtccgtctggagatcgacggacgcgctagcgctgtgagcagcctcaccaatgccgtggaacgtgtgggcggtgccgtcaccgcgctcgacgtgaactcctctgggcgcgagcggctgcgtatcgacgtcacctgcgcggcccgcgacaccaaccacgcccaggcgatcgtcgaagccttggacgcggtcgagggcgtcaccgtccacaaggtcagcgaccgcacgttcctcatgcacctgggcggcaagatcgagatgcggtcgaaggtgccgctgcgcaaccgcgacgagctctccatggcctacacccccggggtggcccgggtctccgcggcaatcgcggccaacccggaggatgcccgacgcctcaccgtcaaacgcaacagcgtggccgtggtcaccgacggttcagcggtgctcggcctgggcaatatcggccccgaagcggcactgccggtcatggaaggcaaagcagccctattcaaacggttcgccgacatcgatgcctggccgatcgctttggacacccaggacaccgatgagatcgtgcgcgccgtgcagctcatcgctccggggttcggcggtatcaacctggaagatatttctgctccccgctgctttgaagtagaggcccggctgcgggagctgctggacatcccggtgttccacgacgaccagcacggcaccgcgatcgtggtgctggccgcgctcaagaacgcgctgcgcgtggtcggcaaggagctcggcagtgtgcgcatcgcgatgtcgggcgctggtgcggcagggaccgcgatcctcaaactgctgctccacgccggagcgaaagacgtggtcgtctgcgacgtccacggcgctgtccaccaggggcggggcgacctcgacgccaacctgcggtggatcgccgagcacaccaacccggacggctatgcgggcgacctggcgggcgcggtgcgcggagccgacgtcttcatcggggtgtcggcgcccaacctgctctccggggaggagatcgcggagatgaacgaggacgcgatcatcttcgcgctagccaacccggagccggaggtggacccggagatcgctgccctgcacgccgccgtcgtcgctaccgggcgcagcgactaccccaaccagatcaacaacgtgctggtcttccccgggttcttccgcggcctgctggacgcgcagagccaccgggtgaccccggacatgatgctggctgccgcgagtgcgctcgctgcggtggtcaccgaagaagaattgagcccgcactacatcatccccagcgtcttccacccgggactggcgcagcgggtggcggaagcggtccgcgaagtagcgctccgggagggcggcgtggaaagacacgagaactag

SEQ ID NO: 87474 - protein, 470 aa, Thermobifida fusca YX
MASLPSVSYSITVRLEIDGRASAVSSLTNAVERVGGAVTALDVNSSGRERLRIDVTCAARDTNHAQAIVEALDAVEGVTVHKVSDRTFLMHLGGKIEMRSKVPLRNRDELSMAYTPGVARVSAAIAANPEDARRLTVKRNSVAVVTDGSAVLGLGNIGPEAALPVMEGKAALFKRFADIDAWPIALDTQDTDEIVRAVQLIAPGFGGINLEDISAPRCFEVEARLRELLDIPVFHDDQHGTAIVVLAALKNALRVVGKELGSVRIAMSGAGAAGTAILKLLLHAGAKDVVVCDVHGAVHQGRGDLDANLRWIAEHTNPDGYAGDLAGAVRGADVFIGVSAPNLLSGEEIAEMNEDAIIFALANPEPEVDPEIAALHAAVVATGRSDYPNQINNVLVFPGFFRGLLDAQSHRVTPDMMLAAASALAAVVTEEELSPHYIIPSVFHPGLAQRVAEAVREVALREGGVERHEN

SEQ ID NO: 87475 - DNA, 1284 bp, Methanosarcina barkeri str. Fusaro; identical to SEQ ID NO: 5757
  CDS (1)..(1284): transl_table=11

SEQ ID NO: 87476 - protein, 427 aa, Methanosarcina barkeri str. Fusaro; identical to SEQ ID NO: 5758

SEQ ID NO: 87477 - DNA, 1224 bp, Thiobacillus denitrificans ATCC 25259; identical to SEQ ID NO: 5759
  CDS (1)..(1224): transl_table=11

SEQ ID NO: 87478 - protein, 407 aa, Thiobacillus denitrificans ATCC 25259; identical to SEQ ID NO: 5760

SEQ ID NO: 87479 - DNA, 1392 bp, Anabaena variabilis ATCC 29413; identical to SEQ ID NO: 5761
  CDS (1)..(1392): transl_table=11

SEQ ID NO: 87480 - protein, 463 aa, Anabaena variabilis ATCC 29413; identical to SEQ ID NO: 5762

SEQ ID NO: 87481 - DNA, 1239 bp, Carboxydothermus hydrogenoformans Z-2901; identical to SEQ ID NO: 5769
  CDS (1)..(1239): transl_table=11

SEQ ID NO: 87482 - protein, 412 aa, Carboxydothermus hydrogenoformans Z-2901; identical to SEQ ID NO: 5770

SEQ ID NO: 87483 - DNA, 2349 bp, Burkholderia sp. 383
  CDS (1)..(2349): transl_table=11
atggatcgcgccgggactggcctggcgcccgtgcccggatcggaaaacatgaaacagactgagacacagcagcaggcagcgttcgactatcacgaatttccgaccccgggaaagatctcggtcgtcgccagcaagccgctcgtgacccagcgcgatctcgcgctggcctacacgccgggcgtggcgggcgtgtgcgaagccatcgccgccgatccgctgcaggcgcaccgtttcacgagccgcggcaacctggtgggcgtgatcacgaacggcacggccgtgctgggtctgggcaacatcggcccgctcgcgtccaagccggtgatggaaggcaaggccgtgctgttcaagaagttcgcggggatcgacgtcttcgacatcgagatcaacgaaaccgatccggacaagctggtcgacatcatcgccggtctcgagccgaccttcggcgggatcaacctcgaggacatcaaggcgcccgagtgcttcacggtcgagcagaagctgcgcgatcgcatgaagattcccgtcttccatgacgatcagcacggtaccgccatcaccgtctccgccgcgttcatcaacgggctgaaggtcgtcgggaagtcgatttcggaagtgaaggtcgtgacgtcgggggccggtgccgccgcgctggcttgcctggacctgctggtcgacctcgggctgccggtggaaaacgtctgggtgaccgacatcgaaggcgtcgtctatcgcggccgcaccgcgctgatggacccggccaagtcgcgcttcgcgcaggaaaccgacgcgcgcaagctggccgaagtgatcggcggcgcggacgtgttcctgggcctgtcggtcggcggcatcctgaccgccgacatgctgaaggcgatggcgccgcgcccgctgattctcgcgctggccaatcccaccccggaaatcttcccggaactggcgcatgcgacgcgcgacgacgtcgtcatcgcgacgggccgctcggactacccgaaccaggtcaacaacgtcctgtgcttcccgtacatcttccgcggcgcgctggacgtgggcgcgacgacgatcacccgtgaaatggagatcgccgcggttcacgcgatcgcggggctggccgaggaagagcagaacgaagtcgttgcggcggcctacggcgcgtacgacgtggcgttcggcgcgcaatacctgattccgaagccgttcgacccgcgcctgatcgtgcggatcgcgccggccgtggccaaggcggcgatggaaggcggcgtggcgaagcgcccgctgaccgatctcgatgcgtacgtcgagcaacttcagcaatttgtctaccattccggcgcgttcatgaagccgctgttcgcgacggcgcgccggctggtgcgcgacggtggcaaggcgcggatcgtctttaccgaaggcgaggacgagcgcgtgctccgcgcggtgcaggtgatcgtcgacgagaagctggcgcggccgatcctggtcgggcgcccggaggtgctgctggcgcgcatcgagcgtttcggcctgcggatccggctcggccaggacgtcgaggtgaccaatcccgagtatgacgagcggttcccgcagtactggacgacgtattgggagctgcggtgccgggatggcatctcgaaggagatggcgcgggtcgagatgcggcgccgcctgacgctgatcggcgcgatgatggtgcggctcggcgatgcggacgggatgatctgcgggacggtgggcgagtatcacaaccacctgcggttcgtcgacgaagtgatcgggaagaagccgggtgcgtcgacctatgcggcgatgaacatcctgttgctcgaccagcggacggtcgcgctggtggatacgcacgtcaacgacaaccccgatgcggagcagatcgcggaattcacgattgccgcggcgcgtcagatggaatggctgaatctgacgccgaaggcggcgttgctgtcgcggtcgaacttcgggtcggggagtgcggcgtcgggcgtgaagatgcgccgggcgctggagatcgtccgggagcaggcgccggatatcgaggcggacggcgagatgcatggcgactgcgcgctcgacgagggcttgcgctcgaggctgctgccgatgtcgccgctgaagggggccgccaacctgctcgtttgcccgaacgtggatgcggggaacatcgcgtacaacctgctcaagaccgaggcgggcagcaacgtggcggtggggccgttcctgctgggcgtcaacgcgccggtgaacatcctgacgtcgagcgcgacggtgcggcggatcgtgaacatggcggcgttgacggtgatcgaggcgaatcgcaacgcgtctgcctga

SEQ ID NO: 87484 - protein, 782 aa, Burkholderia sp. 383
MDRAGTGLAPVPGSENMKQTETQQQAAFDYHEFPTPGKISVVASKPLVTQRDLALAYTPGVAGVCEAIAADPLQAHRFTSRGNLVGVITNGTAVLGLGNIGPLASKPVMEGKAVLFKKFAGIDVFDIEINETDPDKLVDIIAGLEPTFGGINLEDIKAPECFTVEQKLRDRMKIPVFHDDQHGTAITVSAAFINGLKVVGKSISEVKVVTSGAGAAALACLDLLVDLGLPVENVWVTDIEGVVYRGRTALMDPAKSRFAQETDARKLAEVIGGADVFLGLSVGGILTADMLKAMAPRPLILALANPTPEIFPELAHATRDDVVIATGRSDYPNQVNNVLCFPYIFRGALDVGATTITREMEIAAVHAIAGLAEEEQNEVVAAAYGAYDVAFGAQYLIPKPFDPRLIVRIAPAVAKAAMEGGVAKRPLTDLDAYVEQLQQFVYHSGAFMKPLFATARRLVRDGGKARIVFTEGEDERVLRAVQVIVDEKLARPILVGRPEVLLARIERFGLRIRLGQDVEVTNPEYDERFPQYWTTYWELRCRDGISKEMARVEMRRRLTLIGAMMVRLGDADGMICGTVGEYHNHLRFVDEVIGKKPGASTYAAMNILLLDQRTVALVDTHVNDNPDAEQIAEFTIAAARQMEWLNLTPKAALLSRSNFGSGSAASGVKMRRALEIVREQAPDIEADGEMHGDCALDEGLRSRLLPMSPLKGAANLLVCPNVDAGNIAYNLLKTEAGSNVAVGPFLLGVNAPVNILTSSATVRRIVNMAALTVIEANRNASA

SEQ ID NO: 87485 - DNA, 1317 bp, Desulfovibrio desulfuricans G20; identical to SEQ ID NO: 5773
  CDS (1)..(1317): transl_table=11

SEQ ID NO: 87486 - protein, 438 aa, Desulfovibrio desulfuricans G20; identical to SEQ ID NO: 5774

SEQ ID NO: 87487 - DNA, 1410 bp, Synechococcus elongatus PCC 7942
  CDS (1)..(1410): transl_table=11
atggcttctgcacttactcctaatgccagtcacagcgtttcggttctggtgcgtatgcccagcaataccgctgccatgctgcatgttgtgcaggcgatcgccacgaccggcgcgaacttaacagagatggaattgctgcagcggactaaccagtggattgaccgtcggctgatagtagaagcggccagtgaagagcaggctgcagcagtggttgaagcgatcgcagcagtgccggatctggagttgctagacagcgaagatcgcacctttgcactacaccgtggtggcaaaattagcgtcgagccaaagctgccgttgaccagtcaagcccagcttgctatggcctatacgcccggtgtgggtcgcgtttgtaaggcgattgcggctaaccccgatcgcgtctacgagctaacggtcaaacaaaacatggtggcgatcgtcaccgatgggaccgccgttcttggccttggtaaccttggcccagccggtgcattgccggtgatggagggcaaagccatgctgttcaaggcgtttggcgatgtcgatgccttcccgatttgtcttgatacccaagacacggatgagattgtcgagacgatgaagcgaatcgcgccggtctttgggggcgtgaatttggaggatattgcggctcctcgttgctttgaaattgaagctcgactgaagcaagagctagatatcccggtgtttcacgacgatcagcatggcaccgcgatcgtcaccctcgcagcacttgaaaacgctctgaagctggtcaagaaatcgctctcacaggtgcggatcgtgatgaatggagccggtgcggccggtctgtccgttgcctcgctgctgcgggaagcgggcgctactaacatcatcatttgtgattctcgcgggattcttagttgcgatcgcagcgatctgacgccccagaagcaagcattcgccattgaagcaggtgggagcttagctgatgctctggtcaatgcggatgtctttatcggtgtcagcgtgccgggggtgctgaccgtcgaaatggtggaaactatggcgagcgatcgcattattttcgcgatggccaaccccatccccgagattcaaccagagctgattcaggggcgggcagccgtcatcgccacgggccgcagtgactacccgaaccagattaataatgtcctggctttcccaggcgtattccgtggagccttggattgtcgggcgaagagcctgaccagcagcatgttcctagccgctgcacgagcgatcgcagctctagtacccccagaaactctttcggcagagcacatcgtccccagtgcttttgattctcgtgtagcgccggctgtcgcagccgccgttgtcgaagcagcacaggcaaatggtctagcgcaaactcttgctgtgactcactag

SEQ ID NO: 87488 - protein, 469 aa, Synechococcus elongatus PCC 7942
MASALTPNASHSVSVLVRMPSNTAAMLHVVQAIATTGANLTEMELLQRTNQWIDRRLIVEAASEEQAAAVVEAIAAVPDLELLDSEDRTFALHRGGKISVEPKLPLTSQAQLAMAYTPGVGRVCKAIAANPDRVYELTVKQNMVAIVTDGTAVLGLGNLGPAGALPVMEGKAMLFKAFGDVDAFPICLDTQDTDEIVETMKRIAPVFGGVNLEDIAAPRCFEIEARLKQELDIPVFHDDQHGTAIVTLAALENALKLVKKSLSQVRIVMNGAGAAGLSVASLLREAGATNIIICDSRGILSCDRSDLTPQKQAFAIEAGGSLADALVNADVFIGVSVPGVLTVEMVETMASDRIIFAMANPIPEIQPELIQGRAAVIATGRSDYPNQINNVLAFPGVFRGALDCRAKSLTSSMFLAAARAIAALVPPETLSAEHIVPSAFDSRVAPAVAAAVVEAAQANGLAQTLAVTH

SEQ ID NO: 87489 - DNA, 1224 bp, Moorella thermoacetica ATCC 39073; identical to SEQ ID NO: 5777
  CDS (1)..(1224): transl_table=11

SEQ ID NO: 87490 - protein, 407 aa, Moorella thermoacetica ATCC 39073; identical to SEQ ID NO: 5778

SEQ ID NO: 87491 - DNA, 1440 bp, Syntrophus aciditrophicus SB; identical to SEQ ID NO: 5781
  CDS (1)..(1440): transl_table=11

SEQ ID NO: 87492 - protein, 479 aa, Syntrophus aciditrophicus SB; identical to SEQ ID NO: 5782

SEQ ID NO: 87493 - DNA, 2256 bp, Silicibacter sp. TM1040; identical to SEQ ID NO: 5791
  CDS (1)..(2256): transl_table=11

SEQ ID NO: 87494 - protein, 751 aa, Silicibacter sp. TM1040; identical to SEQ ID NO: 5792

SEQ ID NO: 87495 - DNA, 1446 bp, Rubrobacter xylanophilus DSM 9941; identical to SEQ ID NO: 5795
  CDS (1)..(1446): transl_table=11

SEQ ID NO: 87496 - protein, 481 aa, Rubrobacter xylanophilus DSM 9941; identical to SEQ ID NO: 5796

SEQ ID NO: 87497 - DNA, 2274 bp, Cytophaga hutchinsonii ATCC 33406; identical to SEQ ID NO: 5799
  CDS (1)..(2274): transl_table=11

SEQ ID NO: 87498 - protein, 757 aa, Cytophaga hutchinsonii ATCC 33406; identical to SEQ ID NO: 5800

SEQ ID NO: 87499 - DNA, 1398 bp, Rhodococcus sp. RHA1
  CDS (1)..(1398): transl_table=11
atgcccagtcctagccccggttattcgatcaccgtccgcgtccatgcaccggttggcgctggcaccacgtcgacgttggcggccgcgatcgcatcggtgaagggtgccatgacggcgctcgatgtagtcgagagccatcccgaccacatggtcatcgacctcacctgcgacgcctcggacgtcgcgcacgccgaccagatctctaccgcgattgccgaggttccgggggtgatcgtcggcaaggtcagcgaccgcaccttccttctgcatttgggcggcaagctcgaggtggtccccacggttccgctcaaacaccgcgacgacctctcccgcgcctacacccccggcgtcgcccgggtgtgtaccgccatcgctgaacaccccgaggacgtgcgccgcctgacgatcaaacgcaacaccgtcgcagtggtcaccgacgggtccgcggtcctgggcctgggcaacatcggtgccgcggcgtcgatcccggtgatggagggcaaggcggcactgttcaaacaattcgccggggtcgacgcctggccggtctgcctggacacccaggaccccgatgccatcgtcgagatcgtccgggccctggcgcccgtctacggcggcatcaaccttgaagatatttccgccccaaggtgtttcgagatcgaggcccggctccgcgatatcctcgacattccggtgttccacgacgaccagcacggcaccgcgatcgtggtcctggccgccctgaccaacgcgctgcgggtggtcggcaagtcgctcgaccgggcccggatcgtggtgtccggcgtcggcgccgccgggcacgccgtcatccggttgctcgtcgcccagggcgcgacgaacatcatcggctgcggacggaagggaattctgtccccggacgacaccgccgacgagtttcgtacctggatcgccgagcacaccaatccggagggtcggacgggatcactgcgggacgcgctggtcggggcggacgtgttcatcggggtctcggcgccgaacattgtcacgggcgacgacatcgcggcgatggccgacgagtcgatcgtgttcgcgctggccaatccggtcccggaggtcgacccggtcgccgccggcgaacatgccaccgtggtggccaccggccggtcggacttcccgaaccagatcaacaacgtgctcgccttcccgggggtgttccgcggtctgctcgacgcgcacgcggtcgacatcaccgacgagatgctgatcgccgcggccggagcgatcgccgacagggtgtcgccgtccgagctcaatgccacctacatcgtgccgagcgtgttcgacgcgggtgtcgcgccagcggtcgccgcggcggtgcgcgaggtggccgagcgggggccacagtccgagaagtga

SEQ ID NO: 87500 - protein, 465 aa, Rhodococcus sp. RHA1
MPSPSPGYSITVRVHAPVGAGTTSTLAAAIASVKGAMTALDVVESHPDHMVIDLTCDASDVAHADQISTAIAEVPGVIVGKVSDRTFLLHLGGKLEVVPTVPLKHRDDLSRAYTPGVARVCTAIAEHPEDVRRLTIKRNTVAVVTDGSAVLGLGNIGAAASIPVMEGKAALFKQFAGVDAWPVCLDTQDPDAIVEIVRALAPVYGGINLEDISAPRCFEIEARLRDILDIPVFHDDQHGTAIVVLAALTNALRVVGKSLDRARIVVSGVGAAGHAVIRLLVAQGATNIIGCGRKGILSPDDTADEFRTWIAEHTNPEGRTGSLRDALVGADVFIGVSAPNIVTGDDIAAMADESIVFALANPVPEVDPVAAGEHATVVATGRSDFPNQINNVLAFPGVFRGLLDAHAVDITDEMLIAAAGAIADRVSPSELNATYIVPSVFDAGVAPAVAAAVREVAERGPQSEK

SEQ ID NO: 87501 - DNA, 1398 bp, Rhodococcus sp. RHA1
  CDS (1)..(1398): transl_table=11
atgcccaatcccagtcccggttactccatcaccgttcgcgtcacggccccggtcggcgcaggtaccacctcgactctcgcgggggcggtggcctccgtgaagggcgccatgaccgcgttggacgtggtggagagccaccccgaccacatggtcatcgacgtgacgtgcgacgcctccgacgtcgagcacgccgagcagatcgcgtccgcgatcgccgacgtgcccggcgtcgtggtcggcaaggtcagtgaccgcacgttcctgctccatctcggcgggaaactcgaagtggtgccgaaggttccgctcaagcaccgcgacgacctgtcccgcgcgtacacccccggcgtcgcccgggtctgcaccgcgatcgcggagaaccccgaggacgtgcggcggctgacgatcaagcgcaacaccgtcgcggtcgtcaccgacggctcggccgtgctggggctgggcaacatcggcgccgccgcgtcgattcccgtgatggagggcaaggcggccctgttcaagcagttcgcggacgtggacgcgtggccggtctgcctggacacccaggacacggacgcgatcgtcgagatcgtccgggccctcgcaccggtgtacggcggaatcaacctcgaggacatctccgccccacgctgcttcgagatcgaggcacggctccgcgacatgctggacatcccggtgttccacgacgatcagcacggcaccgccatcgtggttctcgccgcgctgaccaacgccctgcgggtggtcgagaagagcctcgacacggtgaagatcgtggtgtcgggtgtcggcgccgccggacacgcgatcatccgcctgctggtcgcgcagggggcgacgaacatcgtggcgtgcgggcggaacggaatcctctcgcccgacgacacatccgactcgttccggtcctggatcgcgaacaacaccaacccggaagcgcggtccggatcgctgcgggacgcagtggtcggcgcggacgtgttcatcggtgtctcggcgccggacatcctgaccggcgacgacatcgagacgatgggtcccgactcgatcgtgttcgccctcgcgaatccggtgcccgaggtcgatcccgtcgccgccggcaggcacgcggccgtcgtcgcgaccggacggtcggacttcccgaatcagatcaacaacgtgctcgcgttcccgggcgtggtccggggcctgctcgacgcgcacgccgtcgagatcaccgacgacatgctcatcgcggccgcccgcgcgatctccgattcggtgtctccgtcggaactcaacccgacgtacatcgtgccgagtgtgttcgatgccgcagtcgccccggccgtggcggcggcggtgcgcagcgttgccgacgcaggtggtgaacacgatgtctga

SEQ ID NO: 87502 - protein, 465 aa, Rhodococcus sp. RHA1
MPNPSPGYSITVRVTAPVGAGTTSTLAGAVASVKGAMTALDVVESHPDHMVIDVTCDASDVEHAEQIASAIADVPGVVVGKVSDRTFLLHLGGKLEVVPKVPLKHRDDLSRAYTPGVARVCTAIAENPEDVRRLTIKRNTVAVVTDGSAVLGLGNIGAAASIPVMEGKAALFKQFADVDAWPVCLDTQDTDAIVEIVRALAPVYGGINLEDISAPRCFEIEARLRDMLDIPVFHDDQHGTAIVVLAALTNALRVVEKSLDTVKIVVSGVGAAGHAIIRLLVAQGATNIVACGRNGILSPDDTSDSFRSWIANNTNPEARSGSLRDAVVGADVFIGVSAPDILTGDDIETMGPDSIVFALANPVPEVDPVAAGRHAAVVATGRSDFPNQINNVLAFPGVVRGLLDAHAVEITDDMLIAAARAISDSVSPSELNPTYIVPSVFDAAVAPAVAAAVRSVADAGGEHDV

SEQ ID NO: 87503 - DNA, 1389 bp, Trichodesmium erythraeum IMS101; identical to SEQ ID NO: 5803
  CDS (1)..(1389): transl_table=11

SEQ ID NO: 87504 - protein, 462 aa, Trichodesmium erythraeum IMS101; identical to SEQ ID NO: 5804

SEQ ID NO: 87505 - DNA, 1245 bp, Shewanella sp. MR-7; identical to SEQ ID NO: 5807
  CDS (1)..(1245): transl_table=11

SEQ ID NO: 87506 - protein, 414 aa, Shewanella sp. MR-7; identical to SEQ ID NO: 5808

SEQ ID NO: 87507 - DNA, 2331 bp, Alkalilimnicola ehrlichei MLHE-1; identical to SEQ ID NO: 5809
  CDS (1)..(2331): transl_table=11

SEQ ID NO: 87508 - protein, 776 aa, Alkalilimnicola ehrlichei MLHE-1; identical to SEQ ID NO: 5810

SEQ ID NO: 87509 - DNA, 1143 bp, Mycobacterium smegmatis str. MC2 155
  CDS (1)..(1143): transl_table=11
gtggtcatcgaggactccgagatctttgccgcacatgaaggcggaaagctctctgtcgagttgaagtctccgctggatacccagcgagcgttgtccatcgcctacacccccggtgttgcccaggtcagccgggcgatcgccgcggatgcgacgctggcgaagaagtacacctgggccaaccgcctggtcgcggtggtcagcgacggcagcgccgtgctcggtctcggtgacatcggggccgccgcgtcgcttcccgtgatggagggcaaggccgcgttgttcaagacgttcggcggcctggactccatccccctggtgctcgacaccaacgaccccgacgagatcgtcgagacgctggtccggctgcggccgacgttcggtgcggtgaacctcgaggacatctcggcaccccgctgcttcgagatcgagcgtcgcgtcatcgaggcgctcgactgcccggtgatgcacgacgatcagcacggcacggcgatcgtggtgctcgccgccctgctcggggcggtcaaggtgctcgaccgcgacctggcgagcctcaaggtcgtggtgtccggggccggcgccgcgggcgtcgcgtgcaccaacatcctgcgcaacagcggcatcaccgacatcgtcgtcctcgacagcaagggcatcgtgtccggcggccgcaccgacctgaactcgttcaaggccgaactcgcgcagcgcaccaacccgcgtggcctcacgggcggactggccgaggcgctcgcgggcgccgacgtcttcctcggggtgtcggccgggctggtgcccgaagagctcatcgcgaccatggcgcccaacggcatcgtgttcgcgctgtccaacccggatcccgagatccaccccgacgctgcgcgcaagtacgccgccgtggtcgcgaccgggcgcagcgacttcccgaaccagatcaacaacgtgctcgcgttccccggcgtgttccgcggtgcgctcgacgccggtgcgcgccggatcaccgaggagatgaaagtggctgccgcgcatgccatcttctcggtggtgggcgacgatctgggcgtggaccacatcgtgccgagcgcgcttgacccgcgggtgggcccggccgtggctgccgcggtcgccgaagcctcgggcgtctga

SEQ ID NO: 87510 - protein, 380 aa, Mycobacterium smegmatis str. MC2 155
MVIEDSEIFAAHEGGKLSVELKSPLDTQRALSIAYTPGVAQVSRAIAADATLAKKYTWANRLVAVVSDGSAVLGLGDIGAAASLPVMEGKAALFKTFGGLDSIPLVLDTNDPDEIVETLVRLRPTFGAVNLEDISAPRCFEIERRVIEALDCPVMHDDQHGTAIVVLAALLGAVKVLDRDLASLKVVVSGAGAAGVACTNILRNSGITDIVVLDSKGIVSGGRTDLNSFKAELAQRTNPRGLTGGLAEALAGADVFLGVSAGLVPEELIATMAPNGIVFALSNPDPEIHPDAARKYAAVVATGRSDFPNQINNVLAFPGVFRGALDAGARRITEEMKVAAAHAIFSVVGDDLGVDHIVPSALDPRVGPAVAAAVAEASGV

SEQ ID NO: 87511 - DNA, 1374 bp, Nocardioides sp. JS614
  CDS (1)..(1374): transl_table=11
atggccgccaccgcgtcgtcgtactcgatcaccatgcgcctgcacacggcgcccgaccacggcgtcgtgggcgccgtcgccaccgcgatctcggcggccggcggcatcgtcaccgcgatcgacgtcgccgactccagccacgcccgcctggtcgtggacgtgacctgctcggccagcgacgccgagcacgccgagcggctccacgcggccgccgagtcggtcgagggcgtggcggtgcaccgggtcagcgaccggaccttcctgctgcacatcggcggcaagatcgaggtcacctccaaggtgccgctgcgcaaccgcgacgacctctcgatggcctacacccccggcgtcggccgggtcagcatggcgctggcggagagcccgggggacgtcccccggctgaccgtgaagggcaactcggtcgcggtggtcaccgacggctcggccgtgctcggactcggcaacatcgggcccggtgccgcgctgccggtgatggagggcaaggccgcgctgttcaagcggttcgcggacatcgacgcctggccgatctgcctggcctcccaggacaccgacgagatcgtgcgcgcggtcgagatgatcgcaccgggcttcggcggcatcaacctcgaggacatcgccgcgccccgctgcttcgagatcgaacggcggctgcgcgagagcctggacatcccggtcttccacgacgaccagcacggcaccgcgatcgtggtgctggccgccctcaccaacgcgctgcgggtggtgaagaaggacatcaccgacgtgcgcatcgtcgtgtcgggcggcggcgccgcaggcaccgccatcgtcacgctgctgctcgccgccggcgcgccggacatcgtggtgtgggaccgcgagggctgcctctcgcgcgacgacgacacgctgcccccggcgaagcggcagctcgcggagatgaccaacccgcgcctcgtccggggtgacctccgcgccgggctcgacggcgccgacgtcttcatcggggtcagcggccccggggtgctcgatgccgagtggatcaaggacatggccccggacccggtggtgttcgcgctcgcgaaccccgaccccgaggtcgacccggcggaggcggagaagtacgccgcggtcgtggccagcggccggtccgactacccgaaccagatcaacaacgtgctcgccttccccggggtgttccgcgggctgctcgacgcccgggccagcgagatcaccctcgacatgttgctgcgggcggccgaggcgatcgcgctggtcgtcaaggacgaggagctcaacccggcgttcatcatcccgaccgtcttccaccccgacgtgcagcgcaaggtcgcggccgcggtccgcggcgtctga

SEQ ID NO: 87512 - protein, 457 aa, Nocardioides sp. JS614
MAATASSYSITMRLHTAPDHGVVGAVATAISAAGGIVTAIDVADSSHARLVVDVTCSASDAEHAERLHAAAESVEGVAVHRVSDRTFLLHIGGKIEVTSKVPLRNRDDLSMAYTPGVGRVSMALAESPGDVPRLTVKGNSVAVVTDGSAVLGLGNIGPGAALPVMEGKAALFKRFADIDAWPICLASQDTDEIVRAVEMIAPGFGGINLEDIAAPRCFEIERRLRESLDIPVFHDDQHGTAIVVLAALTNALRVVKKDITDVRIVVSGGGAAGTAIVTLLLAAGAPDIVVWDREGCLSRDDDTLPPAKRQLAEMTNPRLVRGDLRAGLDGADVFIGVSGPGVLDAEWIKDMAPDPVVFALANPDPEVDPAEAEKYAAVVASGRSDYPNQINNVLAFPGVFRGLLDARASEITLDMLLRAAEAIALVVKDEELNPAFIIPTVFHPDVQRKVAAAVRGV

SEQ ID NO: 87513 - DNA, 1386 bp, Nocardioides sp. JS614
  CDS (1)..(1386): transl_table=11
atggcaactcccagtcccggctactcgatcacggtccggatggaggtcccttcgtccgcacgggccaccggagacgtggtcgccgcagtgaccggggccgggggctcggtcaccgctctcgatgtggccgagtccctcgcggaccggctcgtcgtcgacgtcagctgcgacgcctccgacctggagcacgccgacctgatcacggaggcgctcaaccgcgtggacggtgcgacggtccgcaaggtcagcgatcgcaccttcctgctgcacctcgggggcaagctcgaggtcgtgccgaaggtgccgctcaagcaccgtgacgacctctcacgcgcctacaccccgggagtggcgagggtgtgcctggccatcgcgaagaacccggaggacgctcgccgactcaccatcaagcgcaacacggtggccgtggtgaccgacggctcggcggtcctgggactgggcaacctgggccctgcggcggccctgccggtgatggagggcaaggcggcactcttcaagcagttcgccggggtcgacgcgtggccggtctgcctcgacacccaggacaccgaggagatcatcgcgatcgtgaaggcgatcgcgccggtgtacggcggcatcaacctcgaggacatcgccgcgccacggtgcttcgagatcgaggcccggctgcgcgcggagctcgacatccccgtgttccacgacgaccagcacggtacggcgatcgtggtgctcgccgctctcaccaacgccctgcgggtcgtgggcaagcagctgagcgaggtgcgcatcgtcgtcagcggggtgggagcggccggtcacgcgatcatcgagctgctgcacgcccagggcgcgaccgacatcgtggcctgtggccggagcggctcggtgcacggcggacaggagaacctcgactcggcgcgacagtggatcgccgaccacaccaaccgcgaccgcttcgccggctcgctcaggcaggcgatggtcggggcggacgtcttcatcggcgtatcggcgccgaacctgctcaccggcgacgacgtcgcgacgatggccgacgatgcgatcgtcttcgcgctcgcgaaccccgacccggaggtcgacccggtcgccgcgggacagcacgcagcggtggtcgcgaccggtcgctccgactaccccaaccagatcaacaacgtgttggccttcccggggttcttccgcgggatgctcgatgccggcacccacgacatcacccaggaggtcatgctcgcggccgcctccgcgatcgcggacgccgtctcgccgtcggagctgaacgccagctacatcgtgccctcggtcttcgacccccgtgtcgcaaccgcggtggccgatgccgtgcgcgaggccgccacgccggcctga

SEQ ID NO: 87514 - protein, 461 aa, Nocardioides sp. JS614
MATPSPGYSITVRMEVPSSARATGDVVAAVTGAGGSVTALDVAESLADRLVVDVSCDASDLEHADLITEALNRVDGATVRKVSDRTFLLHLGGKLEVVPKVPLKHRDDLSRAYTPGVARVCLAIAKNPEDARRLTIKRNTVAVVTDGSAVLGLGNLGPAAALPVMEGKAALFKQFAGVDAWPVCLDTQDTEEIIAIVKAIAPVYGGINLEDIAAPRCFEIEARLRAELDIPVFHDDQHGTAIVVLAALTNALRVVGKQLSEVRIVVSGVGAAGHAIIELLHAQGATDIVACGRSGSVHGGQENLDSARQWIADHTNRDRFAGSLRQAMVGADVFIGVSAPNLLTGDDVATMADDAIVFALANPDPEVDPVAAGQHAAVVATGRSDYPNQINNVLAFPGFFRGMLDAGTHDITQEVMLAAASAIADAVSPSELNASYIVPSVFDPRVATAVADAVREAATPA

SEQ ID NO: 87515 - DNA, 2310 bp, Acidovorax sp. JS42; identical to SEQ ID NO: 5825
  CDS (1)..(2310): transl_table=11

SEQ ID NO: 87516 - protein, 769 aa, Acidovorax sp. JS42; identical to SEQ ID NO: 5826

SEQ ID NO: 87517 - DNA, 1392 bp, Nostoc punctiforme PCC 73102
  CDS (1)..(1392): transl_table=11
atggcagacctaactccgaattctagttttagtttgacactgcgcttgcagattcccaatcgtgtaggaatgttagcgtcagtaacccaggcgatcgcaactactggcggcaatctcggtcaaattgatttaatagagcaaacccgtaaagagtccacccgcgatattaccgttgatgctgctagtaccgaacatgctgaaaccattgtgcaagcagtgaaagcattaccagatatcaagttactcagtgtctacgatcgcacctttaatttgcatcgtggtggcaaaatcagcattactagcagaattcctttaaagagtgtgtccgatctagcaatggcttacacaccaggagttggtcgaatttgtactgcgatcgctcaagatccagaggaagtttacaagttaaccatcaaacaaaacactgttgctattgttaccgatggtagtgccgttttgggattgggaaatctcggcccggctgctgctctgccagtcatggaaggcaaagcaatgctattcaaggaatttgctgggctagatgcttttcccatttgtctggctacccaagatacagaagagattatccagacagttaagaatatcgcgccagtttttgggggtgtgaatttagaagatatcgctgcacctcgctgctttgaaattgaaaagagattgcgcgaagagttagatatccccgtttttcatgacgatcagcatggtacggcgattgtcaccttggcagcattatttaactctctaaaactggtacataagccaatggcagaaatccgcatcgtgattaacggtgctggggcggcgggagtagcgatcgcgcggttactccgtaaagctggggcagaaaaaatctggatgtgcgactctaaagggattatatctacaagtcgtgccgatttgacagaagaaaaactcgaatttgccgtgaaagctcaaggtacgttagcgggcgcgatgcaaggggcagatgtctttattggtgtcagcgcaccgggagttttgacaccagaaatggtgcattcaatggcgaaagacccaattgtgtttgcaatggcaaatcccattccagagattcagccagaattaatcagtaaagatgttgctgtcattgctaccggtcgcagtgattaccctaatcaaatcaataacgtcctagcttttcctggggtattccgtggtgctttagattgtcgagcaaagacaattacgaccacaatgtatttagaagccgcaaatgcgatcgcttctttagtcaagccttcagatttggatcgcgaacatattattccttcagtctttgatgagcgagtcgtcaatgctgttgctgctgctgtacaacaagcagcgcgtcaagaaggtatcgctcagaattaa

SEQ ID NO: 87518 - protein, 463 aa, Nostoc punctiforme PCC 73102
MADLTPNSSFSLTLRLQIPNRVGMLASVTQAIATTGGNLGQIDLIEQTRKESTRDITVDAASTEHAETIVQAVKALPDIKLLSVYDRTFNLHRGGKISITSRIPLKSVSDLAMAYTPGVGRICTAIAQDPEEVYKLTIKQNTVAIVTDGSAVLGLGNLGPAAALPVMEGKAMLFKEFAGLDAFPICLATQDTEEIIQTVKNIAPVFGGVNLEDIAAPRCFEIEKRLREELDIPVFHDDQHGTAIVTLAALFNSLKLVHKPMAEIRIVINGAGAAGVAIARLLRKAGAEKIWMCDSKGIISTSRADLTEEKLEFAVKAQGTLAGAMQGADVFIGVSAPGVLTPEMVHSMAKDPIVFAMANPIPEIQPELISKDVAVIATGRSDYPNQINNVLAFPGVFRGALDCRAKTITTTMYLEAANAIASLVKPSDLDREHIIPSVFDERVVNAVAAAVQQAARQEGIAQN

SEQ ID NO: 87519 - DNA, 2394 bp, Rickettsia sibirica 246; identical to SEQ ID NO: 5831
  CDS (1)..(2394): transl_table=11

SEQ ID NO: 87520 - protein, 797 aa, Rickettsia sibirica 246; identical to SEQ ID NO: 5832

SEQ ID NO: 87521 - DNA, 1392 bp, Crocosphaera watsonii WH 8501; identical to SEQ ID NO: 5837
  CDS (1)..(1392): transl_table=11

SEQ ID NO: 87522 - protein, 463 aa, Crocosphaera watsonii WH 8501; identical to SEQ ID NO: 5838

SEQ ID NO: 87523 - DNA, 2319 bp, Roseovarius nubinhibens ISM; identical to SEQ ID NO: 5845
  CDS (1)..(2319): transl_table=11

SEQ ID NO: 87524 - protein, 772 aa, Roseovarius nubinhibens ISM; identical to SEQ ID NO: 5846

SEQ ID NO: 87525 - DNA, 2262 bp, Erythrobacter sp. NAP1; identical to SEQ ID NO: 5849
  CDS (1)..(2262): transl_table=11

SEQ ID NO: 87526 - protein, 753 aa, Erythrobacter sp. NAP1; identical to SEQ ID NO: 5850

SEQ ID NO: 87527 - DNA, 1242 bp, Pseudoalteromonas tunicata D2; identical to SEQ ID NO: 5851
  CDS (1)..(1242): transl_table=11

SEQ ID NO: 87528 - protein, 413 aa, Pseudoalteromonas tunicata D2; identical to SEQ ID NO: 5852

SEQ ID NO: 87529 - DNA, 1248 bp, Photobacterium sp. SKA34; identical to SEQ ID NO: 5853
  CDS (1)..(1248): transl_table=11

SEQ ID NO: 87530 - protein, 415 aa, Photobacterium sp. SKA34; identical to SEQ ID NO: 5854

SEQ ID NO: 87531 - DNA, 1248 bp, Oceanospirillum sp. MED92; identical to SEQ ID NO: 5855
  CDS (1)..(1248): transl_table=11

SEQ ID NO: 87532 - protein, 415 aa, Oceanospirillum sp. MED92; identical to SEQ ID NO: 5856

SEQ ID NO: 87533 - DNA, 2313 bp, Flavobacteria bacterium BBFL7; identical to SEQ ID NO: 5857
  CDS (1)..(2313): transl_table=11

SEQ ID NO: 87534 - protein, 770 aa, Flavobacteria bacterium BBFL7; identical to SEQ ID NO: 5858

SEQ ID NO: 87535 - DNA, 1236 bp, Desulfitobacterium hafniense DCB-2; identical to SEQ ID NO: 5861
  CDS (1)..(1236): transl_table=11

SEQ ID NO: 87536 - protein, 411 aa, Desulfitobacterium hafniense DCB-2; identical to SEQ ID NO: 5862

SEQ ID NO: 87537 - DNA, 1242 bp, Alteromonadales bacterium TW-7; identical to SEQ ID NO: 5865
  CDS (1)..(1242): transl_table=11

SEQ ID NO: 87538 - protein, 413 aa, Alteromonadales bacterium TW-7; identical to SEQ ID NO: 5866

SEQ ID NO: 87539 - DNA, 1290 bp, marine gamma proteobacterium HTCC2080; identical to SEQ ID NO: 5869
  CDS (1)..(1290): transl_table=11

SEQ ID NO: 87540 - protein, 429 aa, marine gamma proteobacterium HTCC2080; identical to SEQ ID NO: 5870

SEQ ID NO: 87541 - DNA, 2277 bp, Herbaspirillum seropedicae
  CDS (1)..(2277): transl_table=11
atgacccaacaaatctctgcagccgagcaactcttgcgtgacgccgcacgcgaataccatcgcacgccgtcgcgcggcaagatcgaagtccgtcccaccaagccgctgtcgaaccagcgcgacctgtcgctggcctattcgccgggcgtggcctatccctgcctggatatcgaagccgatcccctgaaggccttcgactacacctcgcgcggcaacctggtggccgtcatcagtaacggtaccgccgtgctgggcctgggcaacatcggtccgctggcttccaagccagtgatggaaggcaagggctgcctgttcaagaaatttgccggcgtggacgtattcgacatcgaactggccgagaacgacccggacaagctggtcgagatcatcgcctcgctggagccgaccctgggcggcatcaacctggaagacatcaaggccccggaatgcttctacatcgagcagaagctgtcggcgcgcatgaacatcccggtcttccacgatgaccagcacggcaccgccatcatctcctcggcagcgctgttgaacggcctggaactggtcggcaaggacatcggcaaggtcaagatcgccgtctccggcgccggtgcggcagcgattgcctgcgtggaagtgatgatcggcctgggtgtgaagcgcgagaacgtctacatggtcgacagcaagggtgtcatctatgaaggccgccccggtggcctggacgcctccaagcagcgctacgccatcaagaccgaggcgcgcaccctggctgacgtggtcaatggcgctgacgtcttcctgggctgctccgcgccgggcgtgctgagcgccgagatggtcaagaccatggccgacaagcccatcatcctggcgctggccaatccggaaccggaaatccgccccgagctggccaagtcggtgcgtccggactgcatcatcgccaccggccgttcggactatccgaaccaggtcaacaacgtcctgtgcttcccctacatcttccgtggcgcgctggactgcggcgccaccaagatcaccgaagccatgaagctggcctgcgtgcgcgagatcgccgacctggccaaggccgagaccagcgccgaagtcagcgccgcctatcccggcaaggaactggtgttcggcgccgactacctgatcccgaccccgttcgattcgcgcctgatcctgaagatcgcccccgccgtggccaaggctgccgccgagtccggcgtagccacccgtcccatcaaggactacgacgcctaccgcgccgagctgacccgcttcatctaccagaccggcatgttcatgcagcccgtcttcaacaccgccaaggtcgcgccgcaacgcgtggtctacgccgacggccaggacgagcgcgtgctgcgcgccgtgcagttcgtggctgacgaaggcctggccgcgcctatcctggtgggcgcacctgcggccatcgaagccggcatcaagaaggccggcctgcgcatcaagatcggtcagaacgtgcaggtgatcgacccggccaccgacgcccgcgtggcgcagtacgccgcccagtacaaggacggcggcgaagccgacgtgcgcgccagcggcagcctcttggccgcgctgatggtcaaggccggcgacgccgacgctatgctgtgcggtctggatggcaactacgacggccacctggcgcatgtggaaaaggtgatcggcctgaagcaaggcgcgcaggaattcgccgccctgaacgctgtgctgctgccggaccagaccctgttcatcaccgacacctacgtcaacgacaccccggacgccgagcaactggcccgcatcgcccaggccgccgccgaagaagtggcgcgtttcggcgtgccgccgaaggtggctttcctgtcgcactccaaccgtggcagctcctcgcgtccgtcggcccgcaagatggcggccgcccatgaggccttcaagaagctggccccggaggtcgaatccgccggcgaactgcatggcgacgccgccctgtcggaaaagatccgcaacaacgccggcctggccgacagcggcctgaccggtgcagccaacgtgctggtctgccccaacctggatgccgccaacatcctcttcaacgtgttgaagaccagcagcggccagggcaccaccatcggccccatcctgctgggtgcggccgctccggtgcatgtgctgaccccgtcgagcacggtgcgccgcgtcatcaacatgaccgccctggcggcggccaaggcgcaggacggcaagtccaaggcctga

SEQ ID NO: 87542 - protein, 758 aa, Herbaspirillum seropedicae
MTQQISAAEQLLRDAAREYHRTPSRGKIEVRPTKPLSNQRDLSLAYSPGVAYPCLDIEADPLKAFDYTSRGNLVAVISNGTAVLGLGNIGPLASKPVMEGKGCLFKKFAGVDVFDIELAENDPDKLVEIIASLEPTLGGINLEDIKAPECFYIEQKLSARMNIPVFHDDQHGTAIISSAALLNGLELVGKDIGKVKIAVSGAGAAAIACVEVMIGLGVKRENVYMVDSKGVIYEGRPGGLDASKQRYAIKTEARTLADVVNGADVFLGCSAPGVLSAEMVKTMADKPIILALANPEPEIRPELAKSVRPDCIIATGRSDYPNQVNNVLCFPYIFRGALDCGATKITEAMKLACVREIADLAKAETSAEVSAAYPGKELVFGADYLIPTPFDSRLILKIAPAVAKAAAESGVATRPIKDYDAYRAELTRFIYQTGMFMQPVFNTAKVAPQRVVYADGQDERVLRAVQFVADEGLAAPILVGAPAAIEAGIKKAGLRIKIGQNVQVIDPATDARVAQYAAQYKDGGEADVRASGSLLAALMVKAGDADAMLCGLDGNYDGHLAHVEKVIGLKQGAQEFAALNAVLLPDQTLFITDTYVNDTPDAEQLARIAQAAAEEVARFGVPPKVAFLSHSNRGSSSRPSARKMAAAHEAFKKLAPEVESAGELHGDAALSEKIRNNAGLADSGLTGAANVLVCPNLDAANILFNVLKTSSGQGTTIGPILLGAAAPVHVLTPSSTVRRVINMTALAAAKAQDGKSKA

SEQ ID NO: 87543 - DNA, 1779 bp, Tigriopus californicus
  CDS (1)..(1779)
atgagttacaagcctttggatcgaattggatccaggccaatggccaccagagtgacagctgatcgaggaacatcagttgcaccctccactgttcccggaatggattacctccgcaatcccaagctcttcaagggcatgggattcagtcttgaagagagacaggctcttggaattcatggcttgctcccaccgaggatcaagactcaagatgagcaagtggacaattgtttgagaaacttgaatcgttacgagaacaaactgaatcaatatgtgtacatgattgatcttttggaccgaaatgagagactcttctacaagcttctgtcggaaaatgtccaaaaactcatgcccattgtgtatacacccactgtgggggaggcatgccagaagtttgggtacactttcaaaagacctcagggcctatttatcactatttacgacaagggacatatttatgacatcttgcaaaactggcccgaaaatgatgttcgagccattgttgtaactgacggagagcgtattttgggtttgggagatttgggggttcacggaatgggaattccggtgggtaaattggctctctacacggctttggccggaatcaagcctcaccaaactctgcccatcaccttggatgtggggaccaataaccaaaagttcttggaagacgccgattatgttggtttgcgccatcgtcgtgtcactggccaagattatgacgacttcatcgacgagtttatggatgcggtggtccagcgatatggccagaacaccttgatccaattcgaggattttggcaatcacaatgccttccgctttctggagaagtaccgcaacaagttctgcaccttcaatgacgacatccaaggaacagcttccgtcgctgtagctggcatcctggctgctctgaaagcaacggacaccaagctctcggaacacaccttcttgttccaaggtgctggagaggctgccattgggatcgcccaacttctggccaaagccatggaaaaacgggaaggcattcccgaggctgaagctcggaagcagatctggatgaaagactccaaaggtctgattgtcaaggatcgacctgagggagggatcagccaacataaggccccatttgctcacgagcacgagcccatgaaggaactggaagacattgtgaagaagttgaagccctcttgcttgattggggctgccgccatatcgggggtatttaaccaaggcatcctggaggacatggcctctttcaacaaaaggcccattgtttttgccttgagcaatcccaccgataaggctgagtgcactgctgaagacgcttacaaacacaccaagggtcaagtagtgtatgcctccggatcgccatttgagccttttgactacgatggcaaacgtgtggagcctggtcaagggaataatgcctacatcttccctggagtgtccttgggtgtgatttgcactggcatccatcatatttccgatgaggtcttcttgggtgcggctgaagccttggctgatatggttacccccgaagatttggcagtgggccgactctatccgcccattgagaaaatcaaggattgttcgatcaagattgcggccaatattgctaatattgcttatgaggaccaaacggcatccacctatccggagcccaaagataaagaagagttcattcggagccagttgtacaactatgagtacgacggggtcagcgctctaccagaacgttatgattggccagaggaggtccaaaagccttttagtaaactgtaa

SEQ ID NO: 87544 - protein, 592 aa, Tigriopus californicus
MSYKPLDRIGSRPMATRVTADRGTSVAPSTVPGMDYLRNPKLFKGMGFSLEERQALGIHGLLPPRIKTQDEQVDNCLRNLNRYENKLNQYVYMIDLLDRNERLFYKLLSENVQKLMPIVYTPTVGEACQKFGYTFKRPQGLFITIYDKGHIYDILQNWPENDVRAIVVTDGERILGLGDLGVHGMGIPVGKLALYTALAGIKPHQTLPITLDVGTNNQKFLEDADYVGLRHRRVTGQDYDDFIDEFMDAVVQRYGQNTLIQFEDFGNHNAFRFLEKYRNKFCTFNDDIQGTASVAVAGILAALKATDTKLSEHTFLFQGAGEAAIGIAQLLAKAMEKREGIPEAEARKQIWMKDSKGLIVKDRPEGGISQHKAPFAHEHEPMKELEDIVKKLKPSCLIGAAAISGVFNQGILEDMASFNKRPIVFALSNPTDKAECTAEDAYKHTKGQVVYASGSPFEPFDYDGKRVEPGQGNNAYIFPGVSLGVICTGIHHISDEVFLGAAEALADMVTPEDLAVGRLYPPIEKIKDCSIKIAANIANIAYEDQTASTYPEPKDKEEFIRSQLYNYEYDGVSALPERYDWPEEVQKPFSKL

SEQ ID NO: 87545 - DNA, 2186 bp, Vitis vinifera; identical to SEQ ID NO: 77974
  CDS (157)..(2079)

SEQ ID NO: 87546 - protein, 640 aa, Vitis vinifera; identical to SEQ ID NO: 5902

SEQ ID NO: 87547 - DNA, 1931 bp, Nicotiana tabacum; identical to SEQ ID NO: 77980
  CDS (69)..(1844)

SEQ ID NO: 87548 - protein, 591 aa, Nicotiana tabacum; identical to SEQ ID NO: 5908

SEQ ID NO: 87549 - DNA, 1737 bp, Drosophila simulans; identical to SEQ ID NO: 5915
  CDS (1)..(1737)

SEQ ID NO: 87550 - protein, 578 aa, Drosophila simulans; identical to SEQ ID NO: 5916

SEQ ID NO: 87551 - DNA, 2169 bp, Hydrilla verticillata
  CDS (106)..(1833)
gaaaaatctcctgctgttaactagaacgcgccacggagtagtctgcagcactcgtcgctcgccgcagttgactacctccccctctcagctccgccgcccctcgcgatggaagggaactcgaacgcgtgcggcggcgtgagggatccctacggcgaggattgcgccacggaggagcagctcgtcacgccctggaccttctccgtcgcgagtggctacaccttgctgagggatccacgccacaacaagggacttgctttcactgagaaagagcgggatgcacattacttgcgaggccttctgccaccagtttgcatcacacaggagcgtcaggagaagaagatcatgcacaaccttcgtaactaccaggttccgcttcagcgttacatggcgatgatggatttacaggagaggaatcagagacttttctacaaacttctcatagataacgttgaggagctgcttcctgttgtttacacacctacagttggcgaagcttgccagaagtatgggtgcatttataggcgtccccagggcctttatatcagtctcaaagaaaagggaaagattcttgaggtgttgaagaactggccagaaaagaacattcaggttattgtggtcactgatggagagagaatattaggtcttggagaccttggaacccagggaatgggcattcctgtgggcaagttagctctttacactgcccttggtggcatccggccttcttcctgtttacccataactattgatgtgggaacaaataacgagacactattgaatgaggaattctatattggtctcaggcagaaaagagcaaccggaaaggaatatgctgatctgctccacgaattcatgatttctgttaagcaaaactacggggaaagagttcttgtacagtttgaggacttcgcaaaccacaatgcatttgaactgctgtctaagtatagtaagacacacctggttttcaatgatgacattcagggtactgcttctgttgtcctagcaggagttgttgcagcactgaaattagttggtggagctttagctgaacacactttcttgttccttggagccggtgaggcaggtactggtatagctgaactcattgcacttgaaatatctaaacagatcaaggcacccgtggaagaaacccgcaagaagatctggctggtggactctaaaggattaattgttagctcacgcaaggaatcacttcagcactttaaaaaaccttgggctcatgagcatgaacctatcaaacatcttgtggatgctgtaaagacaatcaaacctactgtgttggtgggatcttctggtgtgggaagggcttttacaaaagaagttatagaagccatggcatctttcaatgagaaacccatcattcttgctctttcaaaccccacctcccaatcagaatgtaccgcggaagaagcatacacatggacccagggtcgcgcaattttcgccagtggaagtccgtttgatcctgttgaatacgaaggaaaaacatttgttcctggccaggccaataatgcatacatcttccctggatttggtctcggtctgattatagcaggtgcaattcgtgtgcatgatgatatgctgattgctgcatcggaggcactggctaatcaggtatcagaggagaactttgagaaggggcttatctatccaccattctcgaacatcagaaagatttctgccaacattgctgctaacgttgctgcaaaggcctatgagctcggtctggcttcccatcttccacgcccggccaatctcgtaaagtacgccgagagttgcatgtacagtccagtctaccgcacctaccgctgatctgtggatggactctacttcctgagatctcaagtgctccaacaggtgccctgcaaattcaatattcgcacgcatgagttgaatttttctgtgaacaaccatcctctatgctgccaataatttcgacgtgatcaataatgccaaggacccaaggtgatttgccatgaataaggcctgatgaggctatatgtagacttgatactgatgagcatggactttcacatgtcgttatgtaaaatctggtaaggatcctttgaccttctgtgggcactgctgcaatattctttgaccaattatgtcttcatgttcaattatctggccttctgaaaaaaaaaa

SEQ ID NO: 87552 - protein, 575 aa, Hydrilla verticillata; identical to SEQ ID NO: 5936

SEQ ID NO: 87553 - DNA, 2064 bp, Lithospermum erythrorhizon; identical to SEQ ID NO: 78020
  CDS (49)..(1782)

SEQ ID NO: 87554 - protein, 577 aa, Lithospermum erythrorhizon; identical to SEQ ID NO: 5944

SEQ ID NO: 87555 - DNA, 2362 bp, Ricinus communis; identical to SEQ ID NO: 78030
  CDS (73)..(1998)

SEQ ID NO: 87556 - protein, 641 aa, Ricinus communis; identical to SEQ ID NO: 5952

SEQ ID NO: 87557 - DNA, 1737 bp, Drosophila melanogaster; identical to SEQ ID NO: 5953
  CDS (1)..(1737)

SEQ ID NO: 87558 - protein, 578 aa, Drosophila melanogaster; identical to SEQ ID NO: 5954

SEQ ID NO: 87559 - DNA, 1815 bp, Drosophila melanogaster; identical to SEQ ID NO: 5961
  CDS (1)..(1815)

SEQ ID NO: 87560 - protein, 604 aa, Drosophila melanogaster; identical to SEQ ID NO: 5962

SEQ ID NO: 87561 - DNA, 2310 bp, Zea mays
  CDS (90)..(2078)
cggcacgaggaccggaggaggacgcccgttgccactgccgcgccgctcccgcctccctcttctccatccgccgagctcgagaagccaccatgatctccgcgcgcaccgccgcagcttcccccgcttccctgtggaagcagggaggacgaagcgagggcggcggcagctgcgacggatgtcggacttacaggaacactttgcggagggccgcagcagcgaaggtgcgtgccttgccgtcgagggcggtggaggcggtcaaaatgggctccgccgcggagatggagcaggaggaggcggaggtggccgcggccgcggccggcgtcgtcgtcgaggaccactacggcgaggacagcgccaccgaggagctgcccatcctgccctgggccttctccgtcgcaagatatgtttccttcagttggttgaaaaaatacgctgaggagtcttatttctacatcagcggttacaccctcttgagggatccacatcacaacaagggtcttgctttcatggagaaggagagggatgcacaccacttgcgggggctgcttcctcctgcagttgtgcctcaagaactccaaattaagaagatcatgcacaacctgcggcagtaccaggtccctttgcagcgctatatggccatgatggaccttcaggagaggaacgagaggcttttctacaagcttttaattgataacgtggaggagctgcttcctgtggtttatacaccaactgtaggtgaggcctgccagaagtatgggtccatctttcgacaaccacagggtctgtatgtcagcttgagggacaaggggaaggtcctagaagttctaaggaactggccacataggaacattcaagttatctgtgttactgatggtgaggcaatcttgggacttggagatttgggttctcagggaatgggaattcctgtaggcaaacttgctctatacactgctcttggaggagttcgtccatcagcttgtttgcctatcacaatcgatgttggcacaaataatgagaaactgcttaatgatgagttttacattggactccggcaaaaacgtgcaactggcgaggagtatcatgagcttatggaagagttcatggctgctgttaagcaaatctacggcgagaaagtcctcattcagtttgaggacttcgcgaatcataatgcttttaatttgcttgcaaaatatagcaagagccatcttgttttcaatgatgacatccagggcacagcatcagtggtccttgcaggtttgttagcagcactcaaggtggttggtaggaccttggcagagcacacttatttattccttggtgctggggaggctggaactggtattgcagaactcattgctcttgagatttcaaaacagacgtcggctccaattgaagagtgccgcaagaagatttggttggtggactcaaagggtttgattgttgactctcgtaaaaactccgttcagtcattcaaaaaaccttgggcacatgagcatgagcccttgacaaccttgtacgatgctgttcagtccatcaaacctacagttctgattgggacgtctggagttggaagaacattcacaaaagaagttgttgaggccatggcttccttcaatgagaggcctatcatcttttcactgtcaaatccaacctctcattctgaatgtactgctgaagaagcatataactggactcaggtcgtaatatttgccagtggcagtccatttgaccctgtggagtacgatgggaaggtttttgtacctggacagtcgaacaacgcctacattttccctggatttggcctcggtcttgttatctctggagccatccgtgtccacgaggacatgcttcttgccgcctcggaagcactagctgctcaggccacacaggagaacttcgacaagggatcaatcttcccacccttcaccaacattagaaagatctctgcgcgcattgccagagccgtggctgcaaaagcttatgaactcggtttggcgacccgtctgcctcccccaagggacctggtgaaatatgcacagagctgcatgtacactcctgtctaccgtaactaccggtagtgctgctgggatcaattctgcagtaataaaatatgtcgacgcagatgatcctgcaatgttgtagtttattttttcatttgttggccctgctgctgaccacctttgtggctgctagacactgtacctgtctatgatatatgatactggaacatttggcgcgctgtgggcgtccctgtcatgagatcaattgcagaaataaaatgcaatttagatttgagcaccaaaaaaaaaa

SEQ ID NO: 87562 - protein, 662 aa, Zea mays; identical to SEQ ID NO: 5964

SEQ ID NO: 87563 - DNA, 2280 bp, Escherichia coli; identical to SEQ ID NO: 5973
  CDS (1)..(2280): transl_table=11

SEQ ID NO: 87564 - protein, 759 aa, Escherichia coli; identical to SEQ ID NO: 5974

SEQ ID NO: 87565 - DNA, 2280 bp, Salmonella typhimurium; identical to SEQ ID NO: 5979
  CDS (1)..(2280): transl_table=11

SEQ ID NO: 87566 - protein, 759 aa, Salmonella typhimurium; identical to SEQ ID NO: 5980

SEQ ID NO: 87567 - DNA, 1233 bp, Bacillus subtilis; identical to SEQ ID NO: 5981
  CDS (1)..(1233): transl_table=11

SEQ ID NO: 87568 - protein, 410 aa, Bacillus subtilis; identical to SEQ ID NO: 5982

SEQ ID NO: 87569 - DNA, 1622 bp, Bacillus stearothermophilus
  CDS (119)..(1555): transl_table=11
ctgcagaaaggggcatgtacaataagggttgtctttttccggttcataggataacatttgtaccgtaagatgatttactgatttaaacaaaaatagagaaaaggaaggacgattggttatggcattaccaggcggggcagccatgaacattacgattcgtctccagttcgaaaaagatatcgtctcattcagcgatatcgccgccgcgattggcaaagcgggcggggacattgtcgggattgacgtcatttcgtcaagcaaagttcacacggtgcgcgatattaccgtcagcgccctcgatacgaagcagtgcgacttgatcattgaggcgctgaaaaaaattcgcggcgtcaaaattgtgaacgtttccgaccgcacgtttttgatgcacatcggggggaaaattgaaacaaattcaaaaatcccagtgaaaacacgcgacgacttgtcgcgggtatacacgccgggcgtggcgcgcgtctgcacggcgattgccgaagatccgcgaaaggcgtattcgctgacgattaaacggaatacggtcgccgttgtctcggacggcacggcggtgcttgggcttggcgacatcggtccgtacgcggcgatgccagtcatggaagggaaagcgatgctgtttaaggaatttgccggagtggacgcgttcccgatttgtttggatacgaaagacacggaagaaatcattcaaattgtgaaagcgatcgccccggcgtttggcggcattaacctggaggacatttccgccccacgttgttttgaaattgaaaagcggctgaaagaagagctggatattcccgtgtttcatgatgaccagcatggcacggcggtcgtgctcttggcgggactgcttaacgcgctgaaaatcgttgacaaaaagctcgaagacattaaagtcgtcttaaccggcatcggtgcggccggcatcgcctgcacgaaaattttgcttgcggccggcgtgcgcaacattatcggggtcgaccgccatggcgccatccaccgcgatgaaacgtacgaaaatccgtactggcaagagtatgcgcaactcacgaacccggataatctgaaaggaagcttgtccgatgtcatcgccggcgcagatgtatttatcggcgtttcggctccgggcattttaaaagtggaagatgtgaaaaaaatggcgcgcgatccgatcgtgtttgcgatggccaacccgattccggaaattgatccggagctggccgaaccgtacgtgcgcgtcatggcgaccgggcgttccgactatccgaaccaaatcaacaacgtcctttgcttcccgggcattttccgcggggcgcttgactgccgggcgagagaaattaacgaggaaatgaagctcgctgccgcgaaggcgattgcctctgtcgtgacggaggatgaattgaacgaaacatacatcatcccgagcgtcttcaacagcaaagtcgtcgaacgcgtcagacaagcggtcgtcgaagcggcttaccgcactggggtggcgcggaaggacaatatcccggttggcggatatacagggcagtaaagcaaggaatgcgatggaaccgacggacggcttcctttataggggaagccgttttttttggctgcag

SEQ ID NO: 87570 - protein, 478 aa, Bacillus stearothermophilus; identical to SEQ ID NO: 5992

SEQ ID NO: 87571 - DNA, 2142 bp, Mesembryanthemum crystallinum; identical to SEQ ID NO: 78088
  CDS (86)..(1843)

SEQ ID NO: 87572 - protein, 585 aa, Mesembryanthemum crystallinum; identical to SEQ ID NO: 5994

SEQ ID NO: 87573 - DNA, 1491 bp, Oryza sativa
  CDS (1)..(1491)
atgcataacatccgacaataccagctgcctctgcagaaatacatggctatgatggacctccaggaggggaatgagaggcttttctacaagctcctcattgacaatgttgaggagctacttcctgtcgtttacactccaacagttggtgaggcctgccaaaagtatggatccatatttagccgtcctcagggtctttatatcagcttgaaggagaagggaaagatccttgaggtgctaaaaaactggccagagaggagcattcaggttatcgttgttactgatggtgagcgaattttggggcttggagatcttggctgccagggaatggggatccctgttggtaagcttgccctttacactgctctaggaggagtgcgtccatctgcttgtttgccaatcacattggatgttggtacaaataacgaggcgctgctgaatgatgagttctacattggcttaagacaaaagagggccactgctcaggagtatgctgattttcttcatgaattcatgactgccgtgaaacaaaactatggggagaaagtactcattcagtttgaggattttgcaaaccataatgcatttgaactccttgcaaaatatggaacaactcaccttgtattcaatgatgatattcagggaacagcttccgtggtcctttctgggcttgttgcagcactaaaattagttggtggttcattgtcggagcacagttacctgttcctgggagctggagaggctgggacaggcattgcagaacttatagctctcgagatatcaagacagaccaaagcaccaattgaggagtgccgcaagaaaatatggcttgttgattcaaagggcttgattgtcagttcacgaaaggagacccttcaacacttcaagaaaccatgggcccatgagcatgaacctgttggaaatctcttagatgcagtcaaaactatcaaaccaacagtattgattggcacatctggaaaggggcaaactttcactcaggaggttgttgaagccatttcctcatttaatgagaggcctgtcatttttgccttgtccaacccaacatctcagtctgagtgcaccgctgaacaagcgtacacatggagcaagggccgcgcggtgtttgcaagtggaagtccatttgatccggtggagtatgatggcaaaatatacgtgcctggccaggcaaacaacgcctacatcttcccagggtttggccttggtgtggtgatgtctggtgcaatccgtgttcatgatgacatgcttcttgcagcttcggaagcactggctcagcaggtcacacaagagaatttcgacaagggccttacttatcctcccttctcaaacatcagaaagatctctgcccacattgcagccaacgttgcagcaaaggcatatgaacttggtttggcaagcaggcgccctcggccaaaggacctggttaagtatgcagagagctgcatgtacagcccactttaccgcaactaccggtga

SEQ ID NO: 87574 - protein, 496 aa, Oryza sativa
MHNIRQYQLPLQKYMAMMDLQEGNERLFYKLLIDNVEELLPVVYTPTVGEACQKYGSIFSRPQGLYISLKEKGKILEVLKNWPERSIQVIVVTDGERILGLGDLGCQGMGIPVGKLALYTALGGVRPSACLPITLDVGTNNEALLNDEFYIGLRQKRATAQEYADFLHEFMTAVKQNYGEKVLIQFEDFANHNAFELLAKYGTTHLVFNDDIQGTASVVLSGLVAALKLVGGSLSEHSYLFLGAGEAGTGIAELIALEISRQTKAPIEECRKKIWLVDSKGLIVSSRKETLQHFKKPWAHEHEPVGNLLDAVKTIKPTVLIGTSGKGQTFTQEVVEAISSFNERPVIFALSNPTSQSECTAEQAYTWSKGRAVFASGSPFDPVEYDGKIYVPGQANNAYIFPGFGLGVVMSGAIRVHDDMLLAASEALAQQVTQENFDKGLTYPPFSNIRKISAHIAANVAAKAYELGLASRRPRPKDLVKYAESCMYSPLYRNYR

SEQ ID NO: 87575 - DNA, 1758 bp, Oryza sativa; identical to SEQ ID NO: 77832
  CDS (1)..(1758)

SEQ ID NO: 87576 - protein, 585 aa, Oryza sativa; identical to SEQ ID NO: 77833

SEQ ID NO: 87577 - DNA, 1767 bp, Brassica napus; identical to SEQ ID NO: 6009
  CDS (1)..(1767)

SEQ ID NO: 87578 - protein, 588 aa, Brassica napus; identical to SEQ ID NO: 6010

SEQ ID NO: 87579 - DNA, 1767 bp, Brassica napus; identical to SEQ ID NO: 78110
  CDS (1)..(1767)

SEQ ID NO: 87580 - protein, 588 aa, Brassica napus; identical to SEQ ID NO: 78111

SEQ ID NO: 87581 - DNA, 1911 bp, Zea mays; identical to SEQ ID NO: 6011
  CDS (1)..(1911)

SEQ ID NO: 87582 - protein, 636 aa, Zea mays; identical to SEQ ID NO: 6012

SEQ ID NO: 87583 - DNA, 1770 bp, Glycine max; identical to SEQ ID NO: 6013
  CDS (1)..(1770)

SEQ ID NO: 87584 - protein, 589 aa, Glycine max; identical to SEQ ID NO: 6014

SEQ ID NO: 87585 - DNA, 1902 bp, Glycine max; identical to SEQ ID NO: 6015
  CDS (1)..(1902)

SEQ ID NO: 87586 - protein, 633 aa, Glycine max; identical to SEQ ID NO: 6016

SEQ ID NO: 87587 - DNA, 1959 bp, Zea mays; identical to SEQ ID NO: 6017
  CDS (1)..(1959)

SEQ ID NO: 87588 - protein, 652 aa, Zea mays; identical to SEQ ID NO: 6018

SEQ ID NO: 87589 - DNA, 1713 bp, Zea mays; identical to SEQ ID NO: 6019
  CDS (1)..(1713)

SEQ ID NO: 87590 - protein, 570 aa, Zea mays; identical to SEQ ID NO: 6020

SEQ ID NO: 87591 - DNA, 1815 bp, Glycine max; identical to SEQ ID NO: 6021
  CDS (1)..(1815)

SEQ ID NO: 87592 - protein, 604 aa, Glycine max; identical to SEQ ID NO: 6022

SEQ ID NO: 87593 - DNA, 1989 bp, Zea mays; identical to SEQ ID NO: 6023
  CDS (1)..(1989)

SEQ ID NO: 87594 - protein, 662 aa, Zea mays; identical to SEQ ID NO: 6024

SEQ ID NO: 87595 - DNA, 1947 bp, Zea mays; identical to SEQ ID NO: 6025
  CDS (1)..(1947)

SEQ ID NO: 87596 - protein, 648 aa, Zea mays; identical to SEQ ID NO: 6026

SEQ ID NO: 87597 - DNA, 1857 bp, Zea mays; identical to SEQ ID NO: 6027
  CDS (1)..(1857)

SEQ ID NO: 87598 - protein, 618 aa, Zea mays; identical to SEQ ID NO: 6028

SEQ ID NO: 87599 - DNA, 1782 bp, Zea mays; identical to SEQ ID NO: 6029
  CDS (1)..(1782)

SEQ ID NO: 87600 - protein, 593 aa, Zea mays; identical to SEQ ID NO: 6030

SEQ ID NO: 87601 - DNA, 1860 bp, Zea mays; identical to SEQ ID NO: 6031
  CDS (1)..(1860)

SEQ ID NO: 87602 - protein, 619 aa, Zea mays; identical to SEQ ID NO: 6032

SEQ ID NO: 87603 - DNA, 22 bp, Artificial sequence
  primer
atggttagcctcacccccaatc

SEQ ID NO: 87604 - DNA, 21 bp, Artificial sequence
  primer
ttattgaccggccaccccttc

SEQ ID NO: 87605 - protein, 463 aa, Artificial sequence
  consensus sequence
  Variant (2)..(4): Xaa in position 2 to 4 is any amino acid
  Variant (6)..(6): Xaa in position 6 is any amino acid
  Variant (8)..(8): Xaa in position 8 is any amino acid
  Variant (10)..(31): Xaa in position 10 to 31 is any amino acid
  Variant (32)..(49): Xaa in position 32 to 49 is any or no amino acid
  Variant (51)..(51): Xaa in position 51 is any amino acid
  Variant (53)..(55): Xaa in position 53 to 55 is any amino acid
  Variant (57)..(59): Xaa in position 57 to 59 is any amino acid
  Variant (64)..(65): Xaa in position 64 to 65 is any amino acid
  Variant (67)..(74): Xaa in position 67 to 74 is any amino acid
  Variant (75)..(75): Xaa in position 75 is any or no amino acid
  Variant (78)..(79): Xaa in position 78 to 79 is any amino acid
  Variant (81)..(91): Xaa in position 81 to 91 is any amino acid
  Variant (92)..(94): Xaa in position 92 to 94 is any or no amino acid
  Variant (96)..(121): Xaa in position 96 to 121 is any amino acid
  Variant (122)..(148): Xaa in position 122 to 148 is any or no amino acid
  Variant (151)..(156): Xaa in position 151 to 156 is any amino acid
  Variant (158)..(168): Xaa in position 158 to 168 is any amino acid
  Variant (169)..(170): Xaa in position 169 to 170 is any or no amino acid
  Variant (173)..(173): Xaa in position 173 is any amino acid
  Variant (176)..(177): Xaa in position 176 to 177 is any amino acid
  Variant (181)..(184): Xaa in position 181 to 184 is any amino acid
  Variant (186)..(190): Xaa in position 186 to 190 is any amino acid
  Variant (192)..(206): Xaa in position 192 to 206 is any amino acid
  Variant (207)..(209): Xaa in position 207 to 209 is any or no amino acid
  Variant (213)..(213): Xaa in position 213 is any amino acid
  Variant (215)..(220): Xaa in position 215 to 220 is any amino acid
  Variant (222)..(233): Xaa in position 222 to 233 is any amino acid
  Variant (234)..(247): Xaa in position 234 to 247 is any or no amino acid
  Variant (249)..(250): Xaa in position 249 to 250 is any amino acid
  Variant (252)..(255): Xaa in position 252 to 255 is any amino acid
  Variant (256)..(256): Xaa in position 256 is any or no amino acid
  Variant (258)..(274): Xaa in position 258 to 274 is any amino acid
  Variant (275)..(284): Xaa in position 275 to 284 is any or no amino acid
  Variant (286)..(296): Xaa in position 286 to 296 is any amino acid
  Variant (297)..(298): Xaa in position 297 to 298 is any or no amino acid
  Variant (300)..(312): Xaa in position 300 to 312 is any amino acid
  Variant (313)..(314): Xaa in position 313 to 314 is any or no amino acid
  Variant (317)..(318): Xaa in position 317 to 318 is any amino acid
  Variant (319)..(322): Xaa in position 319 to 322 is any or no amino acid
  Variant (324)..(326): Xaa in position 324 to 326 is any amino acid
  Variant (328)..(329): Xaa in position 328 to 329 is any amino acid
  Variant (332)..(333): Xaa in position 332 to 333 is any amino acid
  Variant (334)..(335): Xaa in position 334 to 335 is any or no amino acid
  Variant (337)..(341): Xaa in position 337 to 341 is any amino acid
  Variant (343)..(353): Xaa in position 343 to 353 is any amino acid
  Variant (354)..(355): Xaa in position 354 to 355 is any or no amino acid
  Variant (357)..(360): Xaa in position 357 to 360 is any amino acid
  Variant (361)..(372): Xaa in position 361 to 372 is any or no amino acid
  Variant (374)..(374): Xaa in position 374 is any amino acid
  Variant (377)..(379): Xaa in position 377 to 379 is any amino acid
  Variant (382)..(385): Xaa in position 382 to 385 is any amino acid
  Variant (387)..(391): Xaa in position 387 to 391 is any amino acid
  Variant (393)..(398): Xaa in position 393 to 398 is any amino acid
  Variant (400)..(401): Xaa in position 400 to 401 is any amino acid
  Variant (404)..(405): Xaa in position 404 to 405 is any amino acid
  Variant (407)..(407): Xaa in position 407 is any amino acid
  Variant (409)..(420): Xaa in position 409 to 420 is any amino acid
  Variant (421)..(437): Xaa in position 421 to 437 is any or no amino acid
  Variant (439)..(452): Xaa in position 439 to 452 is any amino acid
  Variant (454)..(456): Xaa in position 454 to 456 is any amino acid
  Variant (458)..(458): Xaa in position 458 is any amino acid
  Variant (459)..(460): Xaa in position 459 to 460 is any or no amino acid
  Variant (462)..(462): Xaa in position 462 is any amino acid
LXXXYXPXVXXXXXXXXXXXXXXXXXXXXXXXXXXXXXXXXXXXXXXXXVXVXXXGXXXLGLGXXGXXXXXXXXXGKXXLXXXXXXXXXXXXXXIXXXXXXXXXXXXXXXXXXXXXXXXXXXXXXXXXXXXXXXXXXXXXXXXXXXXXEDXXXXXXFXXXXXXXXXXXXXVFXDDXXGTAXXXXAXXXXXLXXXXXXXXXXXXXXXXXXGAGXAXXXXXXLXXXXXXXXXXXXXXXXXXXXXXXXXXDXXGXXXXXRXXXXXXXXXXXXXXXXXXXXXXXXXXXLXXXXXXXXXXXXXGXXXXXXXXXXXXXXXMAXXXXXXPXXXAXXNPXXXXEXXXXXAXXXXXXXXXXXXXSXXXXXXXXXXXXXXXXQXNNXXXFPXXXXGXXXXXAXXXXXXMXXAAXXAXAXXXXXXXXXXXXXXXXXXXXXXXXXXXXXPXXXXXXXXXXXXXXVXXXAXXXGXA

SEQ ID NO: 87606 - protein, 23 aa, Artificial sequence
  protein pattern
  Variant (2)..(2): Xaa in position 2 is any amino acid
  Variant (3)..(5): Xaa in position 3 to 5 is any or no amino acid
  Variant (7)..(7): Xaa in position 7 is Gly or Asn
  Variant (9)..(9): Xaa in position 9 is any amino acid
  Variant (12)..(12): Xaa in position 12 is Ala, Cys or Val
  Variant (13)..(14): Xaa in position 13 to 14 is any amino acid
  Variant (17)..(17): Xaa in position 17 is any amino acid
  Variant (18)..(18): Xaa in position 18 is Phe, Ile, Leu or Val
  Variant (19)..(20): Xaa in position 19 to 20 is any amino acid
  Variant (22)..(22): Xaa in position 22 is Ala, Leu or Val
  Variant (23)..(23): Xaa in position 23 is Ile, Leu or Val
GXXXXPXQXNNXXXFPXXXXGXX

SEQ ID NO: 87607 - protein, 20 aa, Artificial sequence
  protein pattern
  Variant (2)..(2): Xaa in position 2 is any amino acid
  Variant (5)..(5): Xaa in position 5 is any or no amino acid
  Variant (7)..(7): Xaa in position 7 is any or no amino acid
  Variant (11)..(11): Xaa in position 11 is any amino acid
  Variant (12)..(12): Xaa in position 12 is Ile or Val
  Variant (13)..(13): Xaa in position 13 is Ala, Cys, Ser, Thr or Val
  Variant (14)..(14): Xaa in position 14 is any amino acid
  Variant (16)..(16): Xaa in position 16 is Ala or Gly
  Variant (17)..(17): Xaa in position 17 is Ile, Leu, Met or Val
  Variant (18)..(18): Xaa in position 18 is any amino acid
  Variant (19)..(19): Xaa in position 19 is Ala, Gly or Asn
  Variant (20)..(20): Xaa in position 20 is Ala, Gly or Ser
FXDDXQXGTAXXXXAXXXXX

SEQ ID NO: 87608 - protein, 15 aa, Artificial sequence
  protein pattern
  Variant (2)..(2): Xaa in position 2 is Ile or Val
  Variant (3)..(3): Xaa in position 3 is Ser or Thr
  Variant (4)..(4): Xaa in position 4 is Asp or Asn
  Variant (6)..(6): Xaa in position 6 is Glu, Ser or Thr
  Variant (7)..(7): Xaa in position 7 is any amino acid
  Variant (8)..(8): Xaa in position 8 is Ile or Val
  Variant (13)..(13): Xaa in position 13 is Asp or Asn
  Variant (14)..(14): Xaa in position 14 is Ile or Leu
VXXXGXXXLGLGXXG

SEQ ID NO: 87609 - protein, 13 aa, Artificial sequence
  protein pattern
  Variant (2)..(2): Xaa in position 2 is Ala, Pro or Ser
  Variant (3)..(3): Xaa in position 3 is Leu, Met or Val
  Variant (4)..(4): Xaa in position 4 is Ala, Ile or Val
  Variant (6)..(6): Xaa in position 6 is Ser or Thr
  Variant (8)..(8): Xaa in position 8 is any amino acid
  Variant (10)..(10): Xaa in position 10 is Ala, Gly or Thr
  Variant (11)..(11): Xaa in position 11 is any amino acid
  Variant (12)..(12): Xaa in position 12 is Ala, Gly, Ile, Pro or Val
  Variant (13)..(13): Xaa in position 13 is Cys, Ser or Val
LXXXYXPXVXXXX

SEQ ID NO: 87610 - DNA, 981 bp, Synechocystis sp.
  CDS (1)..(981): transl_table=11
atgctgatttcccgtgcccctgtccgcattagtttttttggtgggggaaccgattatcctgagtattttctccagcatggtggtgcggttctagctacggcaatcgacaaattttcctacgttactgctagtccttttctgagtcatttatttgactattccattcgcgtttcctaccgcaaagtggaattggttaaaaatcctagcgaaatggagcacgtggtttttcgggaatgcttgaaattctgtggtttagaaaaagatattgagcttcataacgtggcggatttaccagcttttaccggtctggggtcttcctctgcttttacggtttccttgctccaggctctgcactcttttaaaggggaatttatccgtcctttggatttagcctatgaagccatttatgtcgaaaggcatttggtcaaagacaaggtgggttgtcaggatcaactaatggccgccatggggggatttaacttggtggaatttcgcaaggaagacgatattgtggtcagtcgggtcaccatggccccggaaaggatggcggagtttgaagaacatatttttattgtttttaccggcattaaacggcgggcagccaatgtggtggaaaagcaattaaaaagggtgggtgataatcgagaaaccctgaaactgatgcgtgccatggtggacaaaggttgggacattttaactagtaaccaatgtttgtcagccttcggagaattattggatcaagcctggcaggcaaagcgaagtttagatgtgggcatttccaatggcgacattgaccgcatttaccaacagggaagggaagccggggcctggggcggtaaattgctgggggctggagcagggggttttatgttattttttgcccccccatcagtgcatccccgtttggcggaaacttttaaggatcatcaagtcttgtcggtaaaaattaatgcccctggttcccagatcatcttctcttaa

SEQ ID NO: 87611 - protein, 326 aa, Synechocystis sp.
MLISRAPVRISFFGGGTDYPEYFLQHGGAVLATAIDKFSYVTASPFLSHLFDYSIRVSYRKVELVKNPSEMEHVVFRECLKFCGLEKDIELHNVADLPAFTGLGSSSAFTVSLLQALHSFKGEFIRPLDLAYEAIYVERHLVKDKVGCQDQLMAAMGGFNLVEFRKEDDIVVSRVTMAPERMAEFEEHIFIVFTGIKRRAANVVEKQLKRVGDNRETLKLMRAMVDKGWDILTSNQCLSAFGELLDQAWQAKRSLDVGISNGDIDRIYQQGREAGAWGGKLLGAGAGGFMLFFAPPSVHPRLAETFKDHQVLSVKINAPGSQIIFS

SEQ ID NO: 87612 - DNA, 978 bp, Dehalococcoides sp. BAV1
  CDS (1)..(978): transl_table=11
atgattatcagccgtacacccttccggataagctttgcgggcggaggtactgaccttagggctttttattccctgaaagccggtgaggtggtaagcactgctattaacaaatatatgtacataactgtcaacaaacgctttgacagtactatccgtatcagttactcctctaccgagatagtgaatacggtagaggaaatatgccatcccattgtaagggaggctttgaaacttaccggtataagcggtgggatagagattgtttctatagctgatatacctgccggcaccggtctgggttcatccagtacctttacagtcgggctgttaaatgccctgtatgcctatcagggcaaacttttgtcagctgaggaactggccaaacaggcctgccggatagagatagactgcttgaaagagcctatcggcaagcaggatcagtatattgccgcttatgggggtatgtgccattttcggtttgaaccagacgaatatgtgggggtttctcctttgccgctgaagaccgaacttaaggcaaacctcagtgaaagtctgctccttttttataccggttcttcccgtcaggccggtactattctggctgagcaacaggcaaccaccacccgtccggatagtttcaaaaatttaacttacctgactgaactggcagtttcctgccgtgagtgcctgcttgaccatgctgtgccgaaagatatcggggctattttacataaaggctggcttgccaagaagaacctcagccggggtatttcaaacccttatatagataaatgttaccagtctgccctgaatgccggagcttatggaggcaagattttaggggcaggggggggcggttttttgctggtgtgcgcaccgccagacaggcatactgccatacgcaaggcactttccgatttgccgcaggtggactttgagtttgaacctgagggcagcaaaataatttatgttttataa

SEQ ID NO: 87613 - protein, 325 aa, Dehalococcoides sp. BAV1
MIISRTPFRISFAGGGTDLRAFYSLKAGEVVSTAINKYMYITVNKRFDSTIRISYSSTEIVNTVEEICHPIVREALKLTGISGGIEIVSIADIPAGTGLGSSSTFTVGLLNALYAYQGKLLSAEELAKQACRIEIDCLKEPIGKQDQYIAAYGGMCHFRFEPDEYVGVSPLPLKTELKANLSESLLLFYTGSSRQAGTILAEQQATTTRPDSFKNLTYLTELAVSCRECLLDHAVPKDIGAILHKGWLAKKNLSRGISNPYIDKCYQSALNAGAYGGKILGAGGGGFLLVCAPPDRHTAIRKALSDLPQVDFEFEPEGSKIIYVL

SEQ ID NO: 87614 - DNA, 975 bp, Thermoplasma volcanium GSS1
  CDS (1)..(975): transl_table=11
atgataataacgaagacacctcttaggataacctttgttggcggaggaacagatataccagaatattacaggaaaaaaggtggtgccgttgtatcagcagccatcaataagtacatatacgttattgttaacaaaaaattcgacaacaaaattagaatttcttattctaagacagaaatggtagattccgttgaggatatcgaacatccatctgtaagggaatcacttaagctccttggaatagatggaggaatagaaatactgtctatatccgatataccttcgaaagggactggtctgggatccagcagtacgttcctcgtgggtttgttgaatgcacttcacgcctacaaaggagaacttacgtctagggaagaactcgccagggaagctgttttaatcgaaagagaaatactaaaagagccaggaggaaaacaggatcaatacatggctgcttatggcggcataaatctcatgaatttcaaccaagacgaaagtgtttacgtgaggcctttatcaataaacgcaaaatctctggaggatttccgaaatcaccttcttctcttgtacactggaatacaacgaaattcaacggatatccataaaaagcaaagggaagaagtaattaagaaagaagagtactatgatgaaatgaaagagcttgcttatactttctttgaagcagtatacaaggcagaataccccagaataggtgcaataatggatgcaaattggaaaaacaagaaaaagctcaccgatggtattagcaacgatatcatagacaatctttatgaacttgctatgaagaaaggagcatatgggggcaaacttataggtgctggcggtggtggatttctgctatttgtgtgtgaaccttctgattcggatgatataattaaggccctttcacttagaaaaatagattttgattttgattttgaaggttctagaataatatatgtttcaaaagactga

SEQ ID NO: 87615 - protein, 324 aa, Thermoplasma volcanium GSS1
MIITKTPLRITFVGGGTDIPEYYRKKGGAVVSAAINKYIYVIVNKKFDNKIRISYSKTEMVDSVEDIEHPSVRESLKLLGIDGGIEILSISDIPSKGTGLGSSSTFLVGLLNALHAYKGELTSREELAREAVLIEREILKEPGGKQDQYMAAYGGINLMNFNQDESVYVRPLSINAKSLEDFRNHLLLLYTGIQRNSTDIHKKQREEVIKKEEYYDEMKELAYTFFEAVYKAEYPRIGAIMDANWKNKKKLTDGISNDIIDNLYELAMKKGAYGGKLIGAGGGGFLLFVCEPSDSDDIIKALSLRKIDFDFDFEGSRIIYVSKD

SEQ ID NO: 87616 - DNA, 1095 bp, Clostridium acetobutylicum ATCC 824
  CDS (1)..(1095): transl_table=11
ttgattataagagctaaagcaccactaagaataagctttggtggaggcggaactgatgttgagccttattgcaatgaatatggtggggtagtattaaacacaacaatagataagtatgcctactgttcaatagttcccaataacactgatagcatagtagttaattctttagattttgatatgacggttaagtataactgcaatgaaaatctggtatatgatggtaagcttgatttagttaaagctgcattaaaaagaatgaatataaataaaggctgtgaggtttaccttcagtgtgatgctccagcaggctcagggctcggtacatcttctacagtagtagtggcgcttttaggtgctatggcaaaatggaagggtgttgtacttgatcaatatgctctagcatccattgcctatgaggttgaaagaaaagatttgaaaatagacggaggctatcaagatcagtatgccgctgcatttggtggctttaattttatggaggtagacggaagcgatgtggttgtaaaccctttaaaaataaataagggaataactaatgaacttcaatacaatctacttttatgttatacgggaaatgttcacgtttcagctaatatcataaaggatcaggttaataattatgtagagaaaaaggaagaagtagtaaatgctatgcacgagataaaggctttagcatatgcaatgaagaaggagctacttagaaataatttaaataactttggaagtttacttcattacggttgggaaatgaagaagaaaatgagcagcagaatatcaaatccacaaatagatgaactatatgaagcagcattaaaaaaaggagctcttggaggaaagcttttaggagctggtggaggaggataccttttagtttattgtccatataataaaaagcatgttgttgccgaaagtcttgagaagatgggaggacaactaacagattggaactttgatttaggtggaatgcagagctgggtggtagacgattctagatggaattataacgaaattgcagttgccacaacagagggcaaatataaatttggcattaatactatggaggatattggatga

SEQ ID NO: 87617 - protein, 364 aa, Clostridium acetobutylicum ATCC 824
MIIRAKAPLRISFGGGGTDVEPYCNEYGGVVLNTTIDKYAYCSIVPNNTDSIVVNSLDFDMTVKYNCNENLVYDGKLDLVKAALKRMNINKGCEVYLQCDAPAGSGLGTSSTVVVALLGAMAKWKGVVLDQYALASIAYEVERKDLKIDGGYQDQYAAAFGGFNFMEVDGSDVVVNPLKINKGITNELQYNLLLCYTGNVHVSANIIKDQVNNYVEKKEEVVNAMHEIKALAYAMKKELLRNNLNNFGSLLHYGWEMKKKMSSRISNPQIDELYEAALKKGALGGKLLGAGGGGYLLVYCPYNKKHVVAESLEKMGGQLTDWNFDLGGMQSWVVDDSRWNYNEIAVATTEGKYKFGINTMEDIG

SEQ ID NO: 87618 - DNA, 972 bp, Thermoplasma acidophilum DSM 1728
  CDS (1)..(972): transl_table=11
atgataatcactcgaaccccattgaggataacatttgttggtggcggaacagatttgcctgacttctataccaggcatggcggatccgtggtatcggctgcaataaacaggtacatatacataatcgtcaacaagaagttcgatagcaagatcagggtttcatactccagaaccgaaatcgtggataaagtcgatgagataaggcatcccactgtcagggaagccctcaggcttctcgagctggatgggggaattgaaatactttccataagcgatgtgccatcgcagggtacgggtcttggatcatcatcatcgtttctcgtcgggttattgaatgcactgcatgcttataaatcagaatacgtttcaaatgagactcttgcggaagaagcagtgaagatagagagggaaatactcagagaagccggtggaaagcaggatcagtacatggcagcttacggtggcatagacctgctccagttctttcaaaacggtgaagtgcgcgtaaaaccgataccgcttaatacggaacgcttgaaatacctgcgcgacaatacggcattactgtatactggggttgagagatcatcaaccgatatccatactgatcagatatcgaagatagacgatcacatacaggagtatctggagatgaagaagcttgccgaggaattcgctgtgaagctttacgccagcgatataaaggagcttggcgagataatggacaggaactggatgcttaagaggaagctctctggaaagatcacaaatgacctcatagatcgcctctacattagggcaaaggagcttggcgcatacgggggcaagctgataggtgctggaggcggcggctttctgctcttcttcatcgatcacaacaagagggaaaacctgaaggagttgggcttgaggcagatggactatgattttgatttcgagggttcacgcataatctactatcaggacaggtga

SEQ ID NO: 87619 - protein, 323 aa, Thermoplasma acidophilum DSM 1728
MIITRTPLRITFVGGGTDLPDFYTRHGGSVVSAAINRYIYIIVNKKFDSKIRVSYSRTEIVDKVDEIRHPTVREALRLLELDGGIEILSISDVPSQGTGLGSSSSFLVGLLNALHAYKSEYVSNETLAEEAVKIEREILREAGGKQDQYMAAYGGIDLLQFFQNGEVRVKPIPLNTERLKYLRDNTALLYTGVERSSTDIHTDQISKIDDHIQEYLEMKKLAEEFAVKLYASDIKELGEIMDRNWMLKRKLSGKITNDLIDRLYIRAKELGAYGGKLIGAGGGGFLLFFIDHNKRENLKELGLRQMDYDFDFEGSRIIYYQDR

SEQ ID NO: 87620 - DNA, 978 bp, Dehalococcoides ethenogenes 195
  CDS (1)..(978): transl_table=11
atgattatcagccgtacaccattccggataagctttgcggggggcggcacagaccttaaggctttttattcccttaaagcaggtgaggtggtaagcaccgccataaataaatacatgtatattacggtcaacaaacgttttgacagcactatccgggtcagttactcgtccaccgaaatagtaaatacggttgatgaaatatgccatcccattgtcagggaggcgttgaaacttaccggtataagcggggggatagagattgtctctatagcggatatacctgccggtaccgggctgggttcgtccagcacttttacggtcggtctgttaaatgccctttatgcttatcagggtaaactcctttcggctgaagaactggccagacaggcctgccggatagagatagactgcctgaaagagcctatcggcaagcaggaccagtatattgccgcttacgggggcatatgctatttccggtttgaagctgacgaatatgtgggggtttcacccctgccgcttaaggcggagcttaaagcaaacttaaataaaagtctgctccttttctataccggttcttgccgtcaggcaggcagtattctggctgaacagcagtccaataccacccgcccggctaattttaagaatttaacctgccttaccagactggccgcttcttgccgggagtgccttcttgaccatgctttgccggaggacatggggaatattttacataaaggatggctggccaagaagaatctaagcagcggtatttcaaacccgtatatagaccagtgttaccagtctgcattaagtgccggtgcttacgggggcaagcttttgggagcgggcgggggcggctttttgctggtctgcgccccgcccaagagccatgattccgtacgccgggcgctttcagatttgccgcaggtggattttgagtttgaacctgagggcagcaagataatttatgttttgtaa

SEQ ID NO: 87621 - protein, 325 aa, Dehalococcoides ethenogenes 195
MIISRTPFRISFAGGGTDLKAFYSLKAGEVVSTAINKYMYITVNKRFDSTIRVSYSSTEIVNTVDEICHPIVREALKLTGISGGIEIVSIADIPAGTGLGSSSTFTVGLLNALYAYQGKLLSAEELARQACRIEIDCLKEPIGKQDQYIAAYGGICYFRFEADEYVGVSPLPLKAELKANLNKSLLLFYTGSCRQAGSILAEQQSNTTRPANFKNLTCLTRLAASCRECLLDHALPEDMGNILHKGWLAKKNLSSGISNPYIDQCYQSALSAGAYGGKLLGAGGGGFLLVCAPPKSHDSVRRALSDLPQVDFEFEPEGSKIIYVL

SEQ ID NO: 87622 - DNA, 1026 bp, Ralstonia eutropha JMP134
  CDS (1)..(1026): transl_table=11
atgatcatccgatctcgagcgcctttgcgtcttggcctggccggcggcggcacggacgtatcgccgtattccgaccgcttcggtggtcacgtgctcaacgtgaccatcgacaagtacgcctatgccacgatcgtgccgcgcaccgatgggcaggttgagttcattgcggccgacaccgatcgtcgctggattggtgaagccaagcctgaattggagcgggtgccggggttggatctacatgccggcgtctacaacaggctcgtgcgggaattcaaccgaggcgagcccttggccatttctgttaccacgcactccgaggcgcctccgggctctgggctcggttcgtcatcgaccatggtggtggcgctggtgcacgcattctgcgagctgcttgcgctaccgctgggcgagtatgacgtggcccagattgcctacgagattgagcgcgtcgatcttggcatggcgggcggcaagcaggaccagtacgctgcggcatttggtggcttgaacttcatggagttctatggagaccgcgtgatcgtgaaccccctgcgcatcaaggacagcatcaaggcagagctggaatcgtcgctcgtgctgttctataccggcgtgtcgcgcgaatcggcacgcataattgcagctcaggcggcgggcgtcacagacaatgtgcagaaatcggtcgacgcactgcaccgcgtcaaggaggaggccacgcttatgaaggaagccgtgctcaagggtgacatcgaggcactggccacatcaatgcgagcggggtggcagttcaaaaagcagacggcggacacgatcagtaacgcatccatcgatacgatctacgatgcggcgattgaggcaggagcccttgcgggcaaggtctcgggtgccggtggtggagggtttatgatgttttttgccgatcctgctcgccggcctagcgtcatgcgaacgctggccggtttcaatggtcaggtatttacctgcaatttcaccgaaagcggtgctcaatcctggagaaaagcatga

SEQ ID NO: 87623 - protein, 341 aa, Ralstonia eutropha JMP134
MIIRSRAPLRLGLAGGGTDVSPYSDRFGGHVLNVTIDKYAYATIVPRTDGQVEFIAADTDRRWIGEAKPELERVPGLDLHAGVYNRLVREFNRGEPLAISVTTHSEAPPGSGLGSSSTMVVALVHAFCELLALPLGEYDVAQIAYEIERVDLGMAGGKQDQYAAAFGGLNFMEFYGDRVIVNPLRIKDSIKAELESSLVLFYTGVSRESARIIAAQAAGVTDNVQKSVDALHRVKEEATLMKEAVLKGDIEALATSMRAGWQFKKQTADTISNASIDTIYDAAIEAGALAGKVSGAGGGGFMMFFADPARRPSVMRTLAGFNGQVFTCNFTESGAQSWRKA

SEQ ID NO: 87624 - DNA, 984 bp, Solibacter usitatus Ellin6076
  CDS (1)..(984): transl_table=11
atgatcatcacccgcacccctttgcgcatttcccttggaggcggcggcaccgacctcccttcgtattaccgcgagcacggaggcttcgtgctttccgcggccatcgataagtacgtgtacatcacggtgcacgagaccttccagcccgagtacctcattaagtactcgatgaccgaagttgtcgagaccatcgagcagatcaaacacccgatcatccgcgaagctctgaaaatggtgccggttgccgcgcgccacctggaaatcgtcagcatgtccgatattccggccggcaccgggctgggctcctcgggcagtttcacaatcgcactgctgcgggccctgcacactctcaataaggattttgtgccgcggcagcttctggcggagcaggcctgccacatcgaaatcgacctgctgggcgagccggtcgggaaacaggatcagtacatcgcgtcttttggcggcatcacgtcctttgaattccgcagggacggcgccgtcgatgtggtgccgctttccctctcgagcgagaccttgtacaacctggaggacaatctgctgctgttcttcaccggcttcacgcgctccgcctcggcgattcttgccgagcaggatcagaagacgcgcggcggcgacagcggcatgatcgatcaccttcaccagattaagaagtttggctatgagagcaaggaggccatcgagcagggggacctgcgccggttcgccgccatcatgcacgaacattgggagcgcaagaagtaccgttcgcgttcgatgacaaacccgcagatcgacgagtattatgagatcgcgcgcgccaatggggcgttgggcggaaaactgatcggcgcgggcggaggcggcttcctgatgttctacacagaagacaaaacccggctgcgccacgccctccgcgaagccggattacgcgaagtgcgggtgcgcttcgatttcgaaggcaccacgctgatggcccgctcctag

SEQ ID NO: 87625 - protein, 327 aa, Solibacter usitatus Ellin6076
MIITRTPLRISLGGGGTDLPSYYREHGGFVLSAAIDKYVYITVHETFQPEYLIKYSMTEVVETIEQIKHPIIREALKMVPVAARHLEIVSMSDIPAGTGLGSSGSFTIALLRALHTLNKDFVPRQLLAEQACHIEIDLLGEPVGKQDQYIASFGGITSFEFRRDGAVDVVPLSLSSETLYNLEDNLLLFFTGFTRSASAILAEQDQKTRGGDSGMIDHLHQIKKFGYESKEAIEQGDLRRFAAIMHEHWERKKYRSRSMTNPQIDEYYEIARANGALGGKLIGAGGGGFLMFYTEDKTRLRHALREAGLREVRVRFDFEGTTLMARS

SEQ ID NO: 87626 - DNA, 1002 bp, Magnetococcus sp. MC-1
  CDS (1)..(1002): transl_table=11
gtgatcattacccgcacaccgtttcgcatctcctttttcggtggaggtaccgactaccccgcctgggccgaggcccatggtggggccgtgctcgccacagcgatcaacaagtattgctacatctccatacgcgaattgccgcccttttttgaacacaaatatcgcattgcttactcccgtctggaacatgtgcgggagattgatgaaattcaacacccggtggtgcgtgaaggcttgcgtaaatatgccatgcaacatgggctagagatccaccatgacgccgatttgcctgcccgctcgggtttgggctccagctcctcgtttgcagcgggctttcttaaagccctgcatgcttttgaaggtcgcatgatcaccaagctcgaactggccaaagaggccattgatctggaacaaaacctgattggtgaaaacgtgggcagccaagatcagattttggccacctacggggggctcaataaggttgagtttttgcaaaacggcagttttaatgtcattccagttattctccctagggcacgcatcgcagcgtttgaacagtcgttgttactggtctttaccggtcttacccggattgcctcggatgtcgccaaacagaagattgccaacctgcacaagcgcagcacgcaactgcatagcatgcgcgccatggtggatgaaggcttgagtattctcaacgacagcaaacagcccatcgaccgtttggggacgttgctgcacgaaaactggcaactcaaacgcaccctctctgacgttgtaagcaacccccacatcgacgaaatctatgccgaggccatggccgccggggcgaccgggggcaagttgatgggggcaggttccggtggttttatggtgtttgtggtcaaaccggagcgacgcgaacaggtaaaaaaacggctgcataagctgattcatgtaaactgcgccattgataacgatggctcccaggtcattgtgtatgaaccccagactggataccgttga

SEQ ID NO: 87627 - protein, 333 aa, Magnetococcus sp. MC-1
MIITRTPFRISFFGGGTDYPAWAEAHGGAVLATAINKYCYISIRELPPFFEHKYRIAYSRLEHVREIDEIQHPVVREGLRKYAMQHGLEIHHDADLPARSGLGSSSSFAAGFLKALHAFEGRMITKLELAKEAIDLEQNLIGENVGSQDQILATYGGLNKVEFLQNGSFNVIPVILPRARIAAFEQSLLLVFTGLTRIASDVAKQKIANLHKRSTQLHSMRAMVDEGLSILNDSKQPIDRLGTLLHENWQLKRTLSDVVSNPHIDEIYAEAMAAGATGGKLMGAGSGGFMVFVVKPERREQVKKRLHKLIHVNCAIDNDGSQVIVYEPQTGYR

SEQ ID NO: 87628 - DNA, 1017 bp, Mycobacterium avium 104
  CDS (1)..(1017): transl_table=11
atgacacgcccacgaattcgggcacgagcgccgctgcggatctcgttcgccgggggcggcaccgacgtcccgccgttcccgacgaccgagggcggctgcgtgctgtcggcgaccatcgaccgctacgcgcagggatcgctggcgccgcgcaccgaccgccgggtctccatcgagtcggtggacttcaagaccacgcacgagatgacgctcgacagcgagatcctctacgacgggagcctggacctgatcaaggccgcggtgcgcaggttcggccgcgacggcacggacggctacgacctggtgctgcgatccagcgcgccgcccggctcggggctgggctcgtcgtcgaccatgatggtcgcgctcaccggcctgctcgccgagcactaccgggtgccgatgggcgaatacgagaccgcccagttggcgtgcgcgatcgaacgcgaggacctcggcatcgccggcggcatgcaggacatgtacgccgcgacgttcggcgggttcaacttcatcgagttcaccgaccgggtgatcgtcaatccgctgcggatccgtgacgagaccgccttcgaactcgagctcagcctgctgctgtgctacaccggcatcacccgcgactccgcgcgcgtgatcgaggaccaaacccgccgcgccacaacgggttcggacgacacgctggccgggctgcgggcacagaaggagttggcggtcgcgatgaaggcggccctgctgaccggcaagctgaacgacttcggtgcgctgctgggcgaagcgtggaccgagaagaaacgaatgtcgccctacatcaccaatgagcgcatcgacgacctctacgagctggccctgaaaaacggtgcgctgggcggcaagctgaccggcgccggcggcgggggatacatcctgctgttctgtgacttcgccaaaaagcaccggctcatcgaggcgctggaaggagccggggccgccgtcaccgaattcgccttcgagagcaagggattgacgacatggcaggcatga

SEQ ID NO: 87629 - protein, 338 aa, Mycobacterium avium 104
MTRPRIRARAPLRISFAGGGTDVPPFPTTEGGCVLSATIDRYAQGSLAPRTDRRVSIESVDFKTTHEMTLDSEILYDGSLDLIKAAVRRFGRDGTDGYDLVLRSSAPPGSGLGSSSTMMVALTGLLAEHYRVPMGEYETAQLACAIEREDLGIAGGMQDMYAATFGGFNFIEFTDRVIVNPLRIRDETAFELELSLLLCYTGITRDSARVIEDQTRRATTGSDDTLAGLRAQKELAVAMKAALLTGKLNDFGALLGEAWTEKKRMSPYITNERIDDLYELALKNGALGGKLTGAGGGGYILLFCDFAKKHRLIEALEGAGAAVTEFAFESKGLTTWQA

SEQ ID NO: 87630 - DNA, 981 bp, Magnetospirillum magnetotacticum MS-1
  CDS (1)..(981): transl_table=11
atgaccgccgtgcccctgcgcctgtccttcgcgggcggaggtaccgacatcgccgattactatctcaaggaaggcggggccgttctcagcaccaccatcgataaattcgtctatgtcacggtcaagcagcatggaacgctgtaccgcgagccctatcggctcaactattacaacgcggagcatgcccccgatctcgacagcatccgcaacgacatcatgcgcgaatgcctgcgcctggtgccggtggagccgccgctttacgtcagcaccgtggccgacgttccgtcatcttcggggcttggctcgtccagttccttcgcggttgggctgctgcatgctctgcatgtcatgcgcggcgaccgggtatcgctgggccaactggcggaagaggcctgccatatcgagatcaacgtcctgaagcagcccatcggcaagcaggaccagtatgcggcggcgttcggcggcatgaactgcatgcggttcgagaccgacggccgggtggtgttggagccccaggtgatctccgccgagaagatccgcaccctattcgaccacctgatgctgttttggaccaacaccacccgctcggccaccgagattttgaccaagcagcgccaggccatcgacgagcgcatggccaatctgcgcgccatcaagggccattgcgaagaggtccgccgcctgctcaacggcgatttcaaccccgccgccctgggtgaagtgctggaccagacctggcagcaaaagcgcagcatcaccgacgccatcagcaacggccagatcgaccagtggtatgacgccgccatggcggcgggtgcgaccggcggcaagatcgccggggctggcggcggcggcttcctgctgctgatcgtgccgcccgagcggcaaccggctgtggccgaggcgctggccgaactcgaccgcctgccggtccgctacgaagcctccggcacccgcgtcctcattcccctgggacattga

SEQ ID NO: 87631 - protein, 326 aa, Magnetospirillum magnetotacticum MS-1
MTAVPLRLSFAGGGTDIADYYLKEGGAVLSTTIDKFVYVTVKQHGTLYREPYRLNYYNAEHAPDLDSIRNDIMRECLRLVPVEPPLYVSTVADVPSSSGLGSSSSFAVGLLHALHVMRGDRVSLGQLAEEACHIEINVLKQPIGKQDQYAAAFGGMNCMRFETDGRVVLEPQVISAEKIRTLFDHLMLFWTNTTRSATEILTKQRQAIDERMANLRAIKGHCEEVRRLLNGDFNPAALGEVLDQTWQQKRSITDAISNGQIDQWYDAAMAAGATGGKIAGAGGGGFLLLIVPPERQPAVAEALAELDRLPVRYEASGTRVLIPLGH

SEQ ID NO: 87632 - DNA, 996 bp, Magnetospirillum magnetotacticum MS-1
  CDS (1)..(996): transl_table=11
atgtctttcgtggtgacgaaaacgccgttccgcgtgtcgttcttcgggggagggaccgactatccggcctggtatctggccaatggcggggccgttctgtcctcggccatccgccagtactgctacatcacctgccgctatttcccaccctattttccgcacatgcaccgcatcgtctggtcgcatatcgaggtggtgcagtccatcggcgagatcctgcatccagcggtgcgtgccgctttgccggtttatggcttcaatgatgatcgcggggtggagatccatcaccagggcgatcttccggcccgcaccggcatcggttccagttcctccttcgcggtaggcttgattcaggccctgaagaccatgcggggcgaggccatcggcaagcacgatttggccctggccgccatcgacctggagcgcaatatcctgggcgaggcggggggctatcaggatcaggtggcggcggcctatggcgggctcaacatcatccgcttcaataccgacggctccatccgggtcgagccgctgggtctttcggccgagcgcaaggcggcgctggaaggccgtctcatgctgttctacaccggcatgaaccgtttctccgccgaactggccaagaagatcgtcggcaatatggacgccaagaacgagcggctgcttcgcatgcacgccatggtcgacgaggcggcggccattctgcgtcacggcgatctggacgatttcggccgcatgctggacgagacctggcgtctgaagcgtggcctggaaagcggcatcaccacctcggcggtggatgaggtctatgaaaaggccatggcggccggggcgctcggcggcaagctgctgggcgcgggcggggccggtttcatggtgttctacgtgcccgagggcgccgccgccgcggtgcgccgcgccctggggccgctgatcaatgtgccgttcgagatcgacgaggaaggcgcccgcgccatcgaggatgggcggggatag

SEQ ID NO: 87633 - protein, 331 aa, Magnetospirillum magnetotacticum MS-1
MSFVVTKTPFRVSFFGGGTDYPAWYLANGGAVLSSAIRQYCYITCRYFPPYFPHMHRIVWSHIEVVQSIGEILHPAVRAALPVYGFNDDRGVEIHHQGDLPARTGIGSSSSFAVGLIQALKTMRGEAIGKHDLALAAIDLERNILGEAGGYQDQVAAAYGGLNIIRFNTDGSIRVEPLGLSAERKAALEGRLMLFYTGMNRFSAELAKKIVGNMDAKNERLLRMHAMVDEAAAILRHGDLDDFGRMLDETWRLKRGLESGITTSAVDEVYEKAMAAGALGGKLLGAGGAGFMVFYVPEGAAAAVRRALGPLINVPFEIDEEGARAIEDGRG

SEQ ID NO: 87634 - DNA, 981 bp, Crocosphaera watsonii WH 8501
  CDS (1)..(981): transl_table=11
atgttaatttcacgtgcgccagttaggattagtttttttggaggaggaacagactatccagagtattttttacaccatggaggtgctgttttagctacagcaattgataaattttcttacgtcacagctagttcttttcctagtcatttgtttgactatttaattcgagtttcttaccgtaaagttgagttagtcaaaactgttgaagatatcgaacataaagtctatcgtgaatgtttaaaattttgcggtttagataaagatattgaactccacaatgtagccgacttaccagcatttacgggtttaggttcatcttctgcttttacggtatcattattacaagcattacatagttttaaaggagagtttattaaacccttagacttagcctatgaagctatttatgtcgaacgtcatctagttaatgatcgagtcggttgtcaggatcaactaatgtcagctatgggagggtttaacttagttgaatttaggacagaggaagatattgctgttaaccgtgtggctatttctccccaaagattagcagaatttgaatcccatattttcatagttttcacaggaattaaaagaagggcttctaaggttgttgaaaaacagttaaaacgggttgctgataatacagaaacactcaaacagatgagaaaaatggtggatcaaggttggaatattttgaccagtaatcaatctttatccgcttttggtgaattattagacaaagcttgggtagccaaaagaagtctagatacagtcatttctaacccagaaattgataatatgtatcaattaggaaaagaagcaggggcttggggtggtaaactattaggtgctggtgcagggggttttatgctgttttttgcacccccagaagttcatcctaaactagcaaaagcctttgctaatcatcaggtactttctgttaaaattaatgccccaagttcccaaataattttttcctag

SEQ ID NO: 87635 - protein, 326 aa, Crocosphaera watsonii WH 8501
MLISRAPVRISFFGGGTDYPEYFLHHGGAVLATAIDKFSYVTASSFPSHLFDYLIRVSYRKVELVKTVEDIEHKVYRECLKFCGLDKDIELHNVADLPAFTGLGSSSAFTVSLLQALHSFKGEFIKPLDLAYEAIYVERHLVNDRVGCQDQLMSAMGGFNLVEFRTEEDIAVNRVAISPQRLAEFESHIFIVFTGIKRRASKVVEKQLKRVADNTETLKQMRKMVDQGWNILTSNQSLSAFGELLDKAWVAKRSLDTVISNPEIDNMYQLGKEAGAWGGKLLGAGAGGFMLFFAPPEVHPKLAKAFANHQVLSVKINAPSSQIIFS

SEQ ID NO: 87636 - DNA, 1032 bp, Prosthecochloris aestuarii DSM 271
  CDS (1)..(1032): transl_table=11
atgcctatttatcgatcacgcgctcctttacgactcggtctagctggaggcggtacagatgtaagcccatttagtaatacgcatggaggatttgtcttgaatgcaacaattgatctctatgctcaagcaatattagagcctttaaatgatgggagaattgtttttgcagcagaagatcgtgaagaaaatgttgtattagaagcggaaccaatattgcttgacgatgatccacttcgtttacatagaggtatttacaatcgaatagtgaaagaatttaacaatggctatcccttatcttttaaattaactacatttgctgatgcgcctgctgggtctggtcttgggacgtcatcaactatggtggtttgtattattcaggctttttcggaatggcttgggcttagtttaggagagtatgatatcgcacatcttgcttttgaaattgagcgtgaagaacttcttctaactgggggaaagcaggaccagtatgcagctgcatttggtggcttcaactttattgaattcggtcccggtaatcgggttttagtaaatccattgcgaattaaggaggatatccgcaatgaacttgaagcatctactattctctattatacggggcaatcacgtgattcagcaaaaatcatagagcagcaaattctgagttcccaggataaagaatctcgttcgttgaacgccatgtttgctctgaaacaagatgcaataaaaattaaggaagctgttttgcgaggtgatcttgcggtttatgctgatatattgcgtcaatcatgggaggccaaaaagaaccttgcaaaaggtgtaagcaattctgagctggatatgatattcgaaaatgcacttaaatcaggtgccttagcaggaaagctttctggtgctgggggcggtggattttttatgttttttgttccccctgccaaacgtatgcgagttctgcgcgaattaagaaaacatgggggtgaagttatgaattttcattttacttctattggttctcagagttgggttcagtactga

SEQ ID NO: 87637 - protein, 343 aa, Prosthecochloris aestuarii DSM 271
MPIYRSRAPLRLGLAGGGTDVSPFSNTHGGFVLNATIDLYAQAILEPLNDGRIVFAAEDREENVVLEAEPILLDDDPLRLHRGIYNRIVKEFNNGYPLSFKLTTFADAPAGSGLGTSSTMVVCIIQAFSEWLGLSLGEYDIAHLAFEIEREELLLTGGKQDQYAAAFGGFNFIEFGPGNRVLVNPLRIKEDIRNELEASTILYYTGQSRDSAKIIEQQILSSQDKESRSLNAMFALKQDAIKIKEAVLRGDLAVYADILRQSWEAKKNLAKGVSNSELDMIFENALKSGALAGKLSGAGGGGFFMFFVPPAKRMRVLRELRKHGGEVMNFHFTSIGSQSWVQY

SEQ ID NO: 87638 - DNA, 1035 bp, Spirochaeta aurantia
  CDS (1)..(1035): transl_table=11
gtgatcatttcccagaccccgctccgcgtcagtttcttcgggggcggaacggacattgccgagttctaccaacaacacggtggattggtgctgagtagcaccatcgacaagtttgtgtatattatcgtcaaggctcgctacgacgaccgaattgttctcaattactccgagcgcgaggtggtcgactccgtcgatgatattcgccacaacatcttccgagaaacgctcaggttggtggggattacgggcggccttgagattacgagcattgccgacatcccgtcgcagggaagtgggctggggtcttcgagctcgttcacggtgggtcttgtcaacgccttgtatgcgttcttgggggaccaaaagggaccccgtgagatcgcggagattgcgtgccgcatcgagatcgagatcctgaaagaaccaatcggaaagcaggaccagtacgccgcagcgttcggggggtttcgttcctaccgatttctccccacgggcgaggtcgaggttaagagccttgccgtgcgagacaacgagaaactggccctcgagggggtgtgtcgcatgttcttcacgggcatcacccggaaggcctcggcagtgctatccgaccagctcaagaacctctcctcccgcgaagccgaactgctcgcgatcaagcaaatcgcggaaacgtcggcccacgtcttggaacggggcgatgcccggggtttgggtgagttgcttgatcagagctggcaggaaaagcggaggatctcgagcaagatctcctcacccgagatcgatggaatttactcgcgcgccatggaagcgggtgccttacgggggaaagctcctgggtgccggggggggggggttcttcttctttgcagcccccagcgatcgactctctctgttgaaggatgccatgaaagaactggcccaactaccgttctcattcacgcgacatggaaccaagatccttctgaacgtcgaagacaatgtcgtgcggctggtctagcagaggctccttcgggggcatcaatagcgttgtattga

SEQ ID NO: 87639 - protein, 344 aa, Spirochaeta aurantia
MIISQTPLRVSFFGGGTDIAEFYQQHGGLVLSSTIDKFVYIIVKARYDDRIVLNYSEREVVDSVDDIRHNIFRETLRLVGITGGLEITSIADIPSQGSGLGSSSSFTVGLVNALYAFLGDQKGPREIAEIACRIEIEILKEPIGKQDQYAAAFGGFRSYRFLPTGEVEVKSLAVRDNEKLALEGVCRMFFTGITRKASAVLSDQLKNLSSREAELLAIKQIAETSAHVLERGDARGLGELLDQSWQEKRRISSKISSPEIDGIYSRAMEAGALRGKAPGCRGGGVLLLCSPQRSTLSVEGCHERTGPTTVLIHATWNQDPSERRRQCRAAGLAEAPSGASIALY

SEQ ID NO: 87640 - DNA, 1056 bp, Streptomyces hygroscopicus subsp
  CDS (1)..(1056): transl_table=11
atgaccggcgtcacgtcccggctgccggagccggccctcgcggcgtcggcggcccacccgccggacggaccggccgtggtgacggtccgctcgccgctgcgcatctcgctggcgggcggcggcaccgacctgccgagctactcctcccggtacggcgggctggtcgtcggctgcgccatcgaccgctacgtgggggtgaccctcttcccgcgcgacttccggggaaggctgcggaccgcggtcgacaccaccgtcgagtgtgaccgcgccgggaaccacccgcatcccatggtccgggcctgtctgctgcgggccggggtggacgacggctgccagctcgtctccttcagcgacgcgcccagcggcagcgggctcggtggttcggccgccttcgccgtctcggtgctgcacgcggcggcccccggggcgtccgcccggacgctcgccgagacggccgccgcggtggagatcgacgacctcgggcgcgcggtgggcaagcaggaccactatctggcggcgtacggcggcatacggctgctgcgcttccatccctccggacgggtcgacccccagccgctggagctgcccgcggcggtacgggccgggctggaggcccggctgctgctcttctactccggcaccagccgggacgcgggcgcggtgctggccgagcagaacgagcgcacccgcagcggcaacgacgacgcgctgcggcggctgcacgccatccggtcgatcgccgacgagatggtgagcgcgctggagcggcgcgacctgggggcgatcggacatctggtcaatgagcactggtcgctgaagtccgggctcggttcgcggatcagcagcccgcgtctccaggcgctgcacgaccgggcgcgggaggcaggggcgagcggggccaagctgctcgggtcgggcgggggcggtttcctgctgctggtctgccagccggagcggcacgcggaggtccgccggtcgatggtcgcggcgggcctgcgggagctgccgttccggctggccgagggcgggtcccgggcgatccggatgccgctgtga

SEQ ID NO: 87641 - protein, 351 aa, Streptomyces hygroscopicus subsp
MTGVTSRLPEPALAASAAHPPDGPAVVTVRSPLRISLAGGGTDLPSYSSRYGGLVVGCAIDRYVGVTLFPRDFRGRLRTAVDTTVECDRAGNHPHPMVRACLLRAGVDDGCQLVSFSDAPSGSGLGGSAAFAVSVLHAAAPGASARTLAETAAAVEIDDLGRAVGKQDHYLAAYGGIRLLRFHPSGRVDPQPLELPAAVRAGLEARLLLFYSGTSRDAGAVLAEQNERTRSGNDDALRRLHAIRSIADEMVSALERRDLGAIGHLVNEHWSLKSGLGSRISSPRLQALHDRAREAGASGAKLLGSGGGGFLLLVCQPERHAEVRRSMVAAGLRELPFRLAEGGSRAIRMPL

SEQ ID NO: 87642 - DNA, 1029 bp, Escherichia coli
  CDS (1)..(1029): transl_table=11
atgaaagttagaagcaaagcgcctctacgtttaggcattgcaggaggtgggacagatgtttcaccttatagcgatacattcggtgggtgtgtactgaatgcgaccatcaatatgtatgcgtatgcttacattgatgatgagcttgaaggtagtaaagttatttttgaggcaaccgaccttaatatcagagaagagattgatcttaccaatggtgtaacgattgaggggaagctaaaactgcatcgagcagtttaccttcgagtcatgaatgattattttgacggcgaattaaaaccggttcgtatcattactcattctgacgctcctgcaggtagcggtttggggtcatcatcgacggttgttgtttcaatgcttgaaggactacggcaaatgtattctctgcctcttggagaatatgatctggcccagttagcattcaagattgagcgagtagactgtggtttatcaggtggtaaacaagatcagtatgctgcaacatttggtggttttaatttcatggagttttatgaaggtaatcgcgttattgttaacccacttagaattcgtagatatataataaatgagttagagtcatccctgattctttattttacaggggcttcgagagactctgcgaaaattattgatgaccagattagatctttagagagtgacaaagagtctaaactgatggctatgcataaagttaaagaatcagcatatcagattaaagaacacttactcaaatctgatatcgatgctatggccgcgacattcctggatgcatgggaaagtaagaaaaacacctcatcgtcaatcagtaatccgatgattgagaaaatcgagaaggaagtgtttagtatcggtgttaagtcaatgaaagtttcaggtgccggtggcggtggttttatgatgctattcgttgaaccggagcgaaaacagttgatcgaacgtaaactacaagagtttggtggcgaagtctataaattccaatttgtcgaggatggagcatattcatggacaatgtaa

SEQ ID NO: 87643 - protein, 342 aa, Escherichia coli
MKVRSKAPLRLGIAGGGTDVSPYSDTFGGCVLNATINMYAYAYIDDELEGSKVIFEATDLNIREEIDLTNGVTIEGKLKLHRAVYLRVMNDYFDGELKPVRIITHSDAPAGSGLGSSSTVVVSMLEGLRQMYSLPLGEYDLAQLAFKIERVDCGLSGGKQDQYAATFGGFNFMEFYEGNRVIVNPLRIRRYIINELESSLILYFTGASRDSAKIIDDQIRSLESDKESKLMAMHKVKESAYQIKEHLLKSDIDAMAATFLDAWESKKNTSSSISNPMIEKIEKEVFSIGVKSMKVSGAGGGGFMMLFVEPERKQLIERKLQEFGGEVYKFQFVEDGAYSWTM

SEQ ID NO: 87644 - DNA, 1026 bp, Aneurinibacillus thermoaerophilus
  CDS (1)..(1026): transl_table=11
atgatttttcgttcaaaagcaccgctacgcttggggtttgcgggcggtggaacggatgtttctccttacagtgatgaatatggtgggtatgtattaaatgctacagtagatatgtatgcctattgcacaattgaagtaacaaatgataatcgagtatgtttttatgcagcagatcgggaagaaatatttgaaggtaattcgttagaagaatttgagttggacgggaacctagatcttcataaaggaatttacaaccgtgttgtaaagcaatttaaccatggacgaccgctatcttttagaatgactacatactcagatgctcctgcaggttcgggattaggttcttcttctactatggttgtggctattttaaagggatttgtagagtggttaaacttacctctgggtgaatatgatgttgcacatcttgcatatgagattgagcgcatagatgtaggtttaagtggtggaaagcaagatcaatatgctgcaacatttggtggttttaattttattgagttttataaagaagataaggtaattgtaaacccattacgtattaaaaattggattattaatgaattagaaaactcgatgattctttattacactggtgtttcacgagaatcagcaaaaattattgatgagcaaactaagaataccaaagaaaaaaattcccgttcattagaagcgatgcacgaattaaaagctgatgcattgattatgaaagaagctattttaaaaggagacttaaaaacttttgcggaatatcttgggaaatcatgggaagcgaagaagcgtatggcgtcgtccatttctaattcatacttggataaaatttatgaagtagcaattgaaacaggagcgtatgctggtaaagtatcaggtgcaggtggcggcggctttatgatgtttatcgttgatcccacgaagaaaataactgtaagtagagaactaaacaaaatgggtggccatacaatgaattttcattttgtaaaacatggaacacaaggatggagagtataa

SEQ ID NO: 87645 - protein, 341 aa, Aneurinibacillus thermoaerophilus
MIFRSKAPLRLGFAGGGTDVSPYSDEYGGYVLNATVDMYAYCTIEVTNDNRVCFYAADREEIFEGNSLEEFELDGNLDLHKGIYNRVVKQFNHGRPLSFRMTTYSDAPAGSGLGSSSTMVVAILKGFVEWLNLPLGEYDVAHLAYEIERIDVGLSGGKQDQYAATFGGFNFIEFYKEDKVIVNPLRIKNWIINELENSMILYYTGVSRESAKIIDEQTKNTKEKNSRSLEAMHELKADALIMKEAILKGDLKTFAEYLGKSWEAKKRMASSISNSYLDKIYEVAIETGAYAGKVSGAGGGGFMMFIVDPTKKITVSRELNKMGGHTMNFHFVKHGTQGWRV

SEQ ID NO: 87646 - DNA, 987 bp, Thermoplasma acidophilum
  CDS (1)..(987): transl_table=11
gtgatttttacgcggatgataatcactcgaaccccattgaggataacatttgttggtggcggaacagatttgcctgacttctataccaggcatggcggatccgtggtatcggctgcaataaacaggtacatatacataatcgtcaacaagaagttcgatagcaagatcagggtttcatactccagaaccgaaatcgtggataaagtcgatgagataaggcatcccactgtcagggaagccctcaggcttctcgagctggatgggggaattgaaatactttccataagcgatgtgccatcgcagggtacgggtcttggatcatcatcatcgtttctcgtcgggttattgaatgcactgcatgcttataaatcagaatacgtttcaaatgagactcttgcggaagaagcagtgaagatagagagggaaatactcagagaagccggtggaaagcaggatcagtacatggcagcttacggtggcatagacctgctccagttctttcaaaacggtgaagtgcgcgtaaaaccgataccgcttaatacggaacgcttgaaatacctgcgcgacaatacggcattactgtatactggggttgagagatcatcaaccgatatccatactgatcagatatcgaagatagacgatcacatacaggagtatctggagatgaagaagcttgccgaggaattcgctgtgaagctttacgccagcgatataaaggagcttggcgagataatggacaggaactggatgcttaagaggaagctctctggaaagatcacaaatgacctcatagatcgcctctacattagggcaaaggagcttggcgcatacgggggcaagctgataggtgctggaggcggcggctttctgctcttcttcatcgatcacaacaagagggaaaacctgaaggagttgggcttgaggcagatggactatgattttgatttcgagggttcacgcataatctactatcaggacaggtga

SEQ ID NO: 87647 - protein, 328 aa, Thermoplasma acidophilum
MIFTRMIITRTPLRITFVGGGTDLPDFYTRHGGSVVSAAINRYIYIIVNKKFDSKIRVSYSRTEIVDKVDEIRHPTVREALRLLELDGGIEILSISDVPSQGTGLGSSSSFLVGLLNALHAYKSEYVSNETLAEEAVKIEREILREAGGKQDQYMAAYGGIDLLQFFQNGEVRVKPIPLNTERLKYLRDNTALLYTGVERSSTDIHTDQISKIDDHIQEYLEMKKLAEEFAVKLYASDIKELGEIMDRNWMLKRKLSGKITNDLIDRLYIRAKELGAYGGKLIGAGGGGFLLFFIDHNKRENLKELGLRQMDYDFDFEGSRIIYYQDR

SEQ ID NO: 87648 - DNA, 20 bp, Artificial sequence
  primer
atgctgatttcccgtgcccc

SEQ ID NO: 87649 - DNA, 20 bp, Artificial sequence
  primer
ttaagagaagatgatctggg

SEQ ID NO: 87650 - protein, 330 aa, Artificial sequence
  consensus sequence
  Variant (2)..(2): Xaa in position 2 is any amino acid
  Variant (4)..(7): Xaa in position 4 to 7 is any amino acid
  Variant (13)..(20): Xaa in position 13 to 20 is any amino acid
  Variant (23)..(23): Xaa in position 23 is any amino acid
  Variant (25)..(28): Xaa in position 25 to 28 is any amino acid
  Variant (30)..(33): Xaa in position 30 to 33 is any amino acid
  Variant (35)..(85): Xaa in position 35 to 85 is any amino acid
  Variant (86)..(99): Xaa in position 86 to 99 is any or no amino acid
  Variant (101)..(101): Xaa in position 101 is any amino acid
  Variant (103)..(105): Xaa in position 103 to 105 is any amino acid
  Variant (106)..(106): Xaa in position 106 is any or no amino acid
  Variant (113)..(115): Xaa in position 113 to 115 is any amino acid
  Variant (117)..(120): Xaa in position 117 to 120 is any amino acid
  Variant (122)..(131): Xaa in position 122 to 131 is any amino acid
  Variant (132)..(135): Xaa in position 132 to 135 is any or no amino acid
  Variant (137)..(138): Xaa in position 137 to 138 is any amino acid
  Variant (140)..(142): Xaa in position 140 to 142 is any amino acid
  Variant (144)..(151): Xaa in position 144 to 151 is any amino acid
  Variant (153)..(153): Xaa in position 153 is any amino acid
  Variant (157)..(158): Xaa in position 157 to 158 is any amino acid
  Variant (160)..(161): Xaa in position 160 to 161 is any amino acid
  Variant (164)..(168): Xaa in position 164 to 168 is any amino acid
  Variant (170)..(174): Xaa in position 170 to 174 is any amino acid
  Variant (175)..(176): Xaa in position 175 to 176 is any or no amino acid
  Variant (178)..(178): Xaa in position 178 is any amino acid
  Variant (180)..(195): Xaa in position 180 to 195 is any amino acid
  Variant (197)..(198): Xaa in position 197 to 198 is any amino acid
  Variant (201)..(202): Xaa in position 201 to 202 is any amino acid
  Variant (204)..(211): Xaa in position 204 to 211 is any amino acid
  Variant (213)..(252): Xaa in position 213 to 252 is any amino acid
  Variant (253)..(256): Xaa in position 253 to 256 is any or no amino acid
  Variant (258)..(259): Xaa in position 258 to 259 is any amino acid
  Variant (261)..(266): Xaa in position 261 to 266 is any amino acid
  Variant (268)..(268): Xaa in position 268 is any amino acid
  Variant (270)..(272): Xaa in position 270 to 272 is any amino acid
  Variant (274)..(275): Xaa in position 274 to 275 is any amino acid
  Variant (277)..(278): Xaa in position 277 to 278 is any amino acid
  Variant (280)..(282): Xaa in position 280 to 282 is any amino acid
  Variant (285)..(286): Xaa in position 285 to 286 is any amino acid
  Variant (289)..(290): Xaa in position 289 to 290 is any amino acid
  Variant (298)..(325): Xaa in position 298 to 325 is any amino acid
  Variant (326)..(329): Xaa in position 326 to 329 is any or no amino acid
PXRXXXXGGGTDXXXXXXXXGGXVXXXXIXXXXYXXXXXXXXXXXXXXXXXXXXXXXXXXXXXXXXXXXXXXXXXXXXXXXXXXXXXXXXXXXXXXXXXDXPXXXXGLGSSSXXXVXXXXAXXXXXXXXXXXXXXAXXAXXXEXXXXXXXXGXQDQXXAXXGGXXXXXFXXXXXXXVXPXXXXXXXXXXXXXXXXLXXTGXXRXXXXXXXXQXXXXXXXXXXXXXXXXXXXXXXXXXXXXXXXXXXXXXXXXXXXXWXXKXXXXXXIXNXXXDXXYXXAXXXGAXXGKXXGAGGGGFXXXXXXXXXXXXXXXXXXXXXXXXXXXXXXXXG

SEQ ID NO: 87651 - protein, 33 aa, Artificial sequence
  protein pattern
  Variant (2)..(2): Xaa in position 2 is Phe, Leu or Val
  Variant (4)..(4): Xaa in position 4 is Ile, Leu or Val
  Variant (5)..(5): Xaa in position 5 is Gly, Ser or Thr
  Variant (6)..(6): Xaa in position 6 is Phe, Ile or Leu
  Variant (7)..(7): Xaa in position 7 is any amino acid
  Variant (13)..(15): Xaa in position 13 to 15 is any amino acid
  Variant (16)..(16): Xaa in position 16 is any or no amino acid
  Variant (18)..(21): Xaa in position 18 to 21 is any amino acid
  Variant (23)..(23): Xaa in position 23 is any amino acid
  Variant (24)..(24): Xaa in position 24 is any or no amino acid
  Variant (26)..(26): Xaa in position 26 is Leu or Val
  Variant (27)..(27): Xaa in position 27 is Ala, Gly, Asn or Ser
  Variant (28)..(28): Xaa in position 28 is Ala, Cys, Ser, Thr or Val
  Variant (29)..(29): Xaa in position 29 is Ala or Thr
  Variant (30)..(30): Xaa in position 30 is Ile or Val
  Variant (31)..(31): Xaa in position 31 is Asp, Asn or Arg
  Variant (32)..(32): Xaa in position 32 is any amino acid
  Variant (33)..(33): Xaa in position 33 is Phe or Tyr
PXRXXXXGGGTDXXXXYXXXXGXXVXXXXXXXX

SEQ ID NO: 87652 - protein, 31 aa, Artificial sequence
  protein pattern
  Variant (2)..(3): Xaa in position 2 to 3 is any amino acid
  Variant (5)..(6): Xaa in position 5 to 6 is any or no amino acid
  Variant (8)..(9): Xaa in position 8 to 9 is any or no amino acid
  Variant (11)..(17): Xaa in position 11 to 17 is any amino acid
  Variant (18)..(18): Xaa in position 18 is Gly, Ile or Val
  Variant (20)..(20): Xaa in position 20 is any amino acid
  Variant (24)..(25): Xaa in position 24 to 25 is any amino acid
  Variant (26)..(26): Xaa in position 26 is Ala or Ser
  Variant (27)..(27): Xaa in position 27 is Ala, Ser or Thr
  Variant (28)..(28): Xaa in position 28 is any amino acid
  Variant (31)..(31): Xaa in position 31 is Phe, Ile, Leu or Met
AXXAXXIXXEXXXXXXXXGXQDQXXXXXGGX

SEQ ID NO: 87653 - protein, 19 aa, Artificial sequence
  protein pattern
  Variant (3)..(3): Xaa in position 3 is any amino acid
  Variant (4)..(4): Xaa in position 4 is Ala or Gly
  Variant (7)..(7): Xaa in position 7 is Ile, Leu or Val
  Variant (8)..(8): Xaa in position 8 is any amino acid
  Variant (12)..(12): Xaa in position 12 is any or no amino acid
  Variant (14)..(14): Xaa in position 14 is any or no amino acid
  Variant (16)..(16): Xaa in position 16 is Phe or Tyr
  Variant (17)..(17): Xaa in position 17 is Phe, Ile, Leu or Met
  Variant (18)..(18): Xaa in position 18 is Leu, Met or Val
  Variant (19)..(19): Xaa in position 19 is Phe, Leu or Val
GAXXGKXXGAGXGXGXXXX

SEQ ID NO: 87654 - protein, 12 aa, Artificial sequence
  protein pattern
  Variant (3)..(3): Xaa in position 3 is Ala, Ser or Thr
  Variant (4)..(4): Xaa in position 4 is Phe, Met or Val
  Variant (5)..(5): Xaa in position 5 is any amino acid
  Variant (7)..(7): Xaa in position 7 is Ala, Cys, Gly or Ser
  Variant (8)..(8): Xaa in position 8 is Ile, Leu or Met
  Variant (9)..(10): Xaa in position 9 to 10 is any amino acid
  Variant (11)..(11): Xaa in position 11 is Ala, Gly or Leu
  Variant (12)..(12): Xaa in position 12 is Phe, Leu or Met
SSXXXVXXXXXX

SEQ ID NO: 87655 - DNA, 795 bp, Synechocystis sp.
  CDS (1)..(795): transl_table=11
atgaacgctgttgccgcttgttttaatgcccttcgtcaacggggggaatgtgctttgattcctttcctcacagcgggggacccggatttagccaccacagccgaagcgttgcgaattctagaccgggcaggggcggatttaattgagttgggagtgccctattccgatcctttggccgatggcccggtgattcaagcggcggccactagggctttacaaaaaggggtcaagttggatgatgtgctcgccattgtccgagaagttcaccaagatattgccgccccgataattttatttacctattacaatcctattttttatcagggtgtggaggttttcctcgacaaaatcaaggccgctggagtgaagggtttggtggtgccggatttacccctggaggaatctgatcgcctgttggaagcgacagcggaaagggggttggagttaattttgttggtggcccccaccagttccccagaaagacaaacggcgatcgccaaaaagtcccagggctttgtttacttggtcagcgtgacaggggtgacgggggtgagaacggaagtgggatcgagggtggaagctttgttagcagggatgcgccaggtcaccgataaaccgattggagttggttttggtatttcccaaccggaacaggctgagcaggtgaaagcttggggcgcagatgcagtaattgtaggaagcgccatggttaagcgtttagcggaaggaaccccgacggaaggattgcaagctttggaaactttttgccgggaactgaaaacggccatcagttaa

SEQ ID NO: 87656 - protein, 264 aa, Synechocystis sp.
MNAVAACFNALRQRGECALIPFLTAGDPDLATTAEALRILDRAGADLIELGVPYSDPLADGPVIQAAATRALQKGVKLDDVLAIVREVHQDIAAPIILFTYYNPIFYQGVEVFLDKIKAAGVKGLVVPDLPLEESDRLLEATAERGLELILLVAPTSSPERQTAIAKKSQGFVYLVSVTGVTGVRTEVGSRVEALLAGMRQVTDKPIGVGFGISQPEQAEQVKAWGADAVIVGSAMVKRLAEGTPTEGLQALETFCRELKTAIS

SEQ ID NO: 87657 - DNA, 1258 bp, Arabidopsis thaliana
  CDS (334)..(1158)
gatttttacaaaacaaagatggaagagcaagtcagaagtcaaaatagctcgaagatgtaagtgacggcgcctgaatactcttggctggtagatttcacctacctcatttttttcatatatctcaaacgtggaatcgctgttactcagtttttatatataaaaataaacactctctcttcttcaaccaaactcatttccaaaatcccacaagcttttcaaatggcgattgctttcaaatccggcgtcttcttcctccaatccccaaaatctcaaattggattccgccattcttctcctcctgattcatcgctttctttcaagagattcactcccatggcttctctctccacctcttctcctactctcggtctcgctgatactttcacacagctcaaaaaacaaggcaaagtagcattcataccatatatcacagctggtgatccggatctctctactactgctgaagcattgaaagttcttgatgcttgtggttctgacataatcgaattgggtgttccttactctgaccctttagctgatggacctgttattcaggctgcggcaacaaggtcgttggagaggggaacaaacctcgatagcatccttgagatgttggataaggttgttccacaaatatcttgtccgatttcgttgttcacgtattacaacccgattcttaaacgtgggttggggaagttcatgtccagcatcagagctgttggtgtacagggacttgtggttcccgatgttcctcttgaggaaactgagatgctgagaaaagaagccctcaacaacgacattgagctggtcctactcactacaccaaccacaccaacagagcgaatgaagcgaattgttgatgcgtcagaaggatttatttaccttgtgagctcaattggagtgactggtgcacgatcatctgtaagcggaaaggttcagtcgctcttgaaggatatcaaagaggcgacagacaagccggtggcagtcggttttggaatatcaaagccggagcatgtgaaacagatagctggatggggagctgatggagtgatcgtaggcagtgcaatggtaaagctattgggtgatgcaaagtcgccaactgaaggacttaaggagcttgagaaactaaccaagtctcttaaatctgctcttctttgaaacacaaacatttgcagacaacatctttagattgtgtttttgattattatcggtgtgtgacaatgatgtctcaatcttttgatacatttcaagtatgatt

SEQ ID NO: 87658 - protein, 274 aa, Arabidopsis thaliana
MASLSTSSPTLGLADTFTQLKKQGKVAFIPYITAGDPDLSTTAEALKVLDACGSDIIELGVPYSDPLADGPVIQAAATRSLERGTNLDSILEMLDKVVPQISCPISLFTYYNPILKRGLGKFMSSIRAVGVQGLVVPDVPLEETEMLRKEALNNDIELVLLTTPTTPTERMKRIVDASEGFIYLVSSIGVTGARSSVSGKVQSLLKDIKEATDKPVAVGFGISKPEHVKQIAGWGADGVIVGSAMVKLLGDAKSPTEGLKELEKLTKSLKSALL

SEQ ID NO: 87659 - DNA, 1259 bp, Arabidopsis thaliana
  CDS (335)..(1159)
gatttttacaaaacaaagatggaagagcaagtcagaagtcaaaatagctcgaagatgtaagtgacggcgcctgaatactcttggctggtagatttcacctacctcatttttttcatatatctcaaacgtggaatcgctgttactcagtttttatatataaaaataaacactcgctcttcttcaaccaaactcatttccaaaattccacaaagtttttcaaatggcgattgctttcaaatccggcgtcttcttcctccaatccccaaaatctcaaattggattccgccattcttctcctcctgattcatcgctttctttcaagagattcactcccatggcttctctctccacctcttctcctactctcggtctcgctgatactttcacacagctcaaaaaacaaggcaaagtagcattcataccatatatcacagctggtgatccggatctctctactactgctgaagcattgaaagttcttgatgcttgtggttctgacataatcgaattgggtgttccttactctgaccctttagctgatggacctgttattcaggctgcggcaacaaggtcgttggagaggggaacaaacctcgatagcatccttgagatgttggataaggttgttccacaaatatcttgtccgatttcgttgttcacgtattacaacccgattcttaaacgtgggttggggaagttcatgtccagcatcagagctgttggtgtacagggacttgtggttcccgatgttcctcttgaggaaactgagatgctgagaaaagaagccctcaacaacgacattgagctggtcctactcactacaccaaccacaccaacagagcgaatgaagctaattgttgatgcgtcagaaggatttatttaccttgtgagctcaattggagtgactggtgcacgatcatctgtaagcggaaaggttcagtcgctcttgaaggatatcaaagaggcgacagacaagccggtggcagtcggttttggaatatcaaagccggagcatgtgaaacagatagctggatggggagctgatggagtgatcgtaggcagtgcaatggtaaagctattgggtgatgcaaagtcgccaactgaaggacttaaggagcttgagaaactaaccaagtctcttaaatctgctcttctttgaaacacaaacatttgcagacaacatctttagattgtgtttttgattattatcggtgtgtgacaatgatgtctcaatcttttgatacatttcaagtatgatt

SEQ ID NO: 87660 - protein, 274 aa, Arabidopsis thaliana
MASLSTSSPTLGLADTFTQLKKQGKVAFIPYITAGDPDLSTTAEALKVLDACGSDIIELGVPYSDPLADGPVIQAAATRSLERGTNLDSILEMLDKVVPQISCPISLFTYYNPILKRGLGKFMSSIRAVGVQGLVVPDVPLEETEMLRKEALNNDIELVLLTTPTTPTERMKLIVDASEGFIYLVSSIGVTGARSSVSGKVQSLLKDIKEATDKPVAVGFGISKPEHVKQIAGWGADGVIVGSAMVKLLGDAKSPTEGLKELEKLTKSLKSALL

SEQ ID NO: 87661 - DNA, 1215 bp, Zea mays subsp. mays
  CDS (120)..(1079)
acccacccgttttatccacgcacggcgtcgaacaccccgcggtcgctcacgtgaggcgccaccccgcgcacccagtcagcgcccgcctccaccacccacccacacgacaaaaatccgccatggccttcgcgctcaaggccgccgccgcggggtcggcgtcgttctccgccgcggggccgaggcggcgcgccgcggcgactggtagggtctcgttccggagcgccgcgcccgtggtcgccgtcagggccgcggcggcggcggccgccgctgtggcggaggacaagcgcagcatctccggcaccttcgccgagctcaggcagcaggggaagactgccttgattcccttcatcactgctggagaccctgacttggccaccacagcaaaagcactcaggatccttgatgcgtgtggttcagacgtgatcgaactgggtgtgccttactccgatccattggctgacggccctgttattcaggcctccgcgacgcgcgctctggcaaagggcaccacatttgaggatgtcatctccatggtaaagggggtgatacctgatctgtcctgccctgtagcgcttttcacatattacaacccgatcctgaagcgtggtgtccccaacttcatgagtattgttaaagaagctggggtacacggtcttgtggtaccagatgttcctttggaagagacagatgtcttgaggagtgaggctgccaaaaacaacctagagctggtgctattgacaacaccgactacaccaaatgaaagaatggagaaaattgcacaggcttcagaaggatttatttatcttgtaagcactgttggagttactggtacacgtgcaaatgtaagcggcaaggtgcaatctcttcttcaggatatcaagaaggtgacagaaaaacccgtggctgttggctttggtgtgtcgactccagagcatgtccggcagattgcaggatggggcgcagatggtgtgattatcggtagcgcagtgatgaagacgttggaggaagctgcttctccagaagaaggattgaagaagctagaagagttcgccaagaacctgaaggccgcattgccgtgaaccaaccattttcgttagcaaagaaattaagattttttttttcctttcaatcttggctttcagggttgttggttgttgtgtagtgaaaataattgtgtccctatgttgaatgctcaaatgaataaatcaagatccc

SEQ ID NO: 87662 - protein, 319 aa, Zea mays subsp. mays
MAFALKAAAAGSASFSAAGPRRRAAATGRVSFRSAAPVVAVRAAAAAAAAVAEDKRSISGTFAELRQQGKTALIPFITAGDPDLATTAKALRILDACGSDVIELGVPYSDPLADGPVIQASATRALAKGTTFEDVISMVKGVIPDLSCPVALFTYYNPILKRGVPNFMSIVKEAGVHGLVVPDVPLEETDVLRSEAAKNNLELVLLTTPTTPNERMEKIAQASEGFIYLVSTVGVTGTRANVSGKVQSLLQDIKKVTEKPVAVGFGVSTPEHVRQIAGWGADGVIIGSAVMKTLEEAASPEEGLKKLEEFAKNLKAALP

SEQ ID NO: 87663 - DNA, 1198 bp, Triticum aestivum
  CDS (81)..(890)
aaagaaaaagtccacgccacctcactgcagggcacgccgtcgcgcggagccagccagggcggtcgccgccggccgcgaccatggccgacggcaagcgcagcgtcgcggagaccttctccagactccgggagcgcggcaagacggcattcatcccattcatcaccgccggtgaccctgatttggcgaccacatcaaaggcgcttaggatcctagactcctgcggctcaaacgtgatcgagctcggcgtgccctactcggatccgttagctgatggtccagtcattcaggctgcagcatcccgtgcgcttaagaaaggcactaagctcggttctgtcttggcgatgctcacggaggttataccagagctctcttgtccaatagttctcttcacatactacaacccgattctaaaaaatggggtgcgaaacttcatggctaagattaagcaagctggtgtacatggtcttgtcgtacctgatcttcctttggaggagacaacattgttgaggagcgaggccactatgcataacatagagctggtgctacttacaacaccaaccacaccaacagagaggatgaaggaaatcacaaaagcttcagaaggattcgtttatcttgtgagtgctgtcggagttacaggtgcacgctcaaatgtaaacttacgcgttgagcatcttcttaaggagatcaagcaggttacagacaaacctgtggctgttggctttggcatatcaactccagagcatgcgaagcagattgcgggctggggagcggatggtgtgattattggcagtgcgattgttagacagttgggcgaagccgcttctccggaagaaggactgagaagaatagaagagtacgccaagagcatcaaggcggctattccatgagatgggcagttccatcatgaacaagccaattagtagatcgtaagcatgtcgtttatcatctggtagtctgcttgatggacctggaatctgtagttcgtctggcatatttgattccagtgctcaaaacaattatatctttgtgtgttagaatcacaacatgaattaacaaggtaatctggaaatggtacgaagctcgatttctgttgtgaggaaacattgtgagatgtagtgttcttatgtggaaatatggaatgttagaatttggaaggacttgtcctgagaggagcaacaggataagtccatggtgc

SEQ ID NO: 87664 - protein, 269 aa, Triticum aestivum
MADGKRSVAETFSRLRERGKTAFIPFITAGDPDLATTSKALRILDSCGSNVIELGVPYSDPLADGPVIQAAASRALKKGTKLGSVLAMLTEVIPELSCPIVLFTYYNPILKNGVRNFMAKIKQAGVHGLVVPDLPLEETTLLRSEATMHNIELVLLTTPTTPTERMKEITKASEGFVYLVSAVGVTGARSNVNLRVEHLLKEIKQVTDKPVAVGFGISTPEHAKQIAGWGADGVIIGSAIVRQLGEAASPEEGLRRIEEYAKSIKAAIP

SEQ ID NO: 87665 - DNA, 1187 bp, Glycine max
  CDS (76)..(1011)
atgttgcaacagagagacagaaaaaggactcacaatcacgaaggagaagaaacccaataagtgattctcatttttatggctcttgccctgaagtcaagttgcttcttgcaattgaagaaacctgaggctggtttcaatgtttgtttttcatctaagaaagctataatctccgtgaaacgacacactcccgtggctgctatcaggaccatggaagcagtgggactctctgcaacattcaccaggttgaaaaaagaaggaaaagtagctttcatcccgtatgtcactgctggtgatcctgacctttcaaccacagcagaagcactgaaagtgcttgattcatgtgggtctgacataattgagctaggtgttccatactctgatcctttggcagatggtcctgttatccaggctgctgctacaagatctttagcaaaggggaccaatttgaatgcgattattgatatgttgaaggaggttgttccgcaactgtcatgtccaattgcactgtttacatattacaatccaatactgaagcgtggtactgataaatttatgtccactataagagacagtggtgtacatgggcttgtagtcccagatgtccctctggaggagacggaaactttaaggacagaagctaagaaacatggaattgaactggtactcctcacaacacccacaactccaacaaaccgaatgagagccattgttgatgtggcagaaggatttgtgtatcttgtgagctcagtgggggtcactggagcccgagcatcagttagtggttctgttcagtctcttttgaaggaaattaaagaggcaactactaaacctgtggcagttggttttggaatatcaaaacctgagcatgtgaaacaggtagtggtatggggagctgatggtgtgattgttggcagtgctatagtgaaggtgcttggtgaggccaaatctcctcaagagggattgaaagaacttgaagttttcacccgctccttaaaagcggcacttccttaaaaaatatgttttaagagctcgaacttcatgtagttgttgtcgtcatcgtagatattggattcaataaaatgcggttcagttgtttttcttctgttcatgatatagtagttttgacatttttatttccttttcaattatgattggatttcttagttaccaaaaaaaaaaaaaaaaaa

SEQ ID NO: 87666 - protein, 311 aa, Glycine max
MALALKSSCFLQLKKPEAGFNVCFSSKKAIISVKRHTPVAAIRTMEAVGLSATFTRLKKEGKVAFIPYVTAGDPDLSTTAEALKVLDSCGSDIIELGVPYSDPLADGPVIQAAATRSLAKGTNLNAIIDMLKEVVPQLSCPIALFTYYNPILKRGTDKFMSTIRDSGVHGLVVPDVPLEETETLRTEAKKHGIELVLLTTPTTPTNRMRAIVDVAEGFVYLVSSVGVTGARASVSGSVQSLLKEIKEATTKPVAVGFGISKPEHVKQVVVWGADGVIVGSAIVKVLGEAKSPQEGLKELEVFTRSLKAALP

SEQ ID NO: 87667 - DNA, 840 bp, Oryza sativa (japonica cultivar-group)
  CDS (1)..(840)
atggagatggaagatagcggtcgcggcgtcgtgggcgccgggaagcgcggcgtcgcggagaccttctccaggctccgggagcagggcaagactgcattcattccattcatcaccgccagtgaccctgacttggcaaccacatcgaaagcgttgaagatccttgattcctgtggttcagatgtgattgagctgggtgtaccttactcggatccgttggctgatgggccggttattcaggctgcagcaacgcgtgctcttaagaaaggcgctacatttgattccgtcatagctatgctcaagggggttatacctgagttgtcttgtccaatagttatcttcacatactacaacccaattttaaagcgcggagtgagtaacttcatggctatcattaaacaagccggcgtacatggtcttgtagtacctgatcttcctttggaagagacagcgctgttgaggaatgaggctgtcatgcatggcatagagctggtgctgcttacaacaccaaccacaccaacagagaggatgaaggagattgcaaaagcttcagaaggatttatttatcttgtaagttctgttggagttacaggtgcacgctcaaatgtaaatttgcgtgttgagtaccttcttcaggagatcaagaaggttacagacaaacctgttgctgttggctttggcatatcgactccagagcatgtaaagcagattgcaggctggggagcagatggtgtgatcatcggcagcgctattgttagacagttaggagaggctgcttcacctgaagaagggttgaaaagagtagaagagtatgccaagaacatgaaggctgctatgccttga

SEQ ID NO: 87668 - protein, 279 aa, Oryza sativa (japonica cultivar-group)
MEMEDSGRGVVGAGKRGVAETFSRLREQGKTAFIPFITASDPDLATTSKALKILDSCGSDVIELGVPYSDPLADGPVIQAAATRALKKGATFDSVIAMLKGVIPELSCPIVIFTYYNPILKRGVSNFMAIIKQAGVHGLVVPDLPLEETALLRNEAVMHGIELVLLTTPTTPTERMKEIAKASEGFIYLVSSVGVTGARSNVNLRVEYLLQEIKKVTDKPVAVGFGISTPEHVKQIAGWGADGVIIGSAIVRQLGEAASPEEGLKRVEEYAKNMKAAMP

SEQ ID NO: 87669 - DNA, 981 bp, Oryza sativa (japonica cultivar-group)
  CDS (1)..(981)
atggctttcacgacgatgaaggcgtcgccgatgtcggcttcctcctcctcggctccggtgttgcgccggtgcgtcgcgcagccggcgagggttgccgccgcccggaggctcgccgccgcggcagcctcggtcgctctggaggcttcgcccgtgcccgccgccgccgccgccgccgttgagcggcgcatgtcggtgtcgcagaccatgtccaagctcaaggagaagggcaagacggcgttcatcccgtacatcaccgccggcgacccggacatggggacgacagcggaggcgctgcggctgctcgacgcctgcggcgccgacgtcatcgagctcggcgtgcccttctccgacccctatgccgacggccccgtcatccaggcctccgcgtcgcgggcgctcgccgccggcgccacgccggaggccgtcttgtcgatgctcaaggaggtgacgccggagctgtcctgcccggtggtgctcctctcctacctcggccccatcctccggcgaggtgccgccaacttcaccgccgcagccaaagaagctggtgtgcaaggccttatagttcctgatcttccttatgtggacacatgtactttcaggagtgaagccattaagagcaacctagagctggtgctgctaacaacaccagctacaccgggagagaggatgaagatcatcacagaagcttcaggaggatttgtttaccttgttagtgtcaatggagttacgggtccccgtccaaaagtaaacacacgcgttgagcatctccttcaggacatcaagctggtcactgacaaagctgtgtgtgttggctttggcatatcaacccctgaccatgttaggcagatagcagggtggggtgcagatggagtgatcattgggagtgcaatggtgaggcagctaggtgaagcagcttctcccaaacaagggctcaaaaggctggaggagtatgctaggagaatgaaggatgcactgccataa

SEQ ID NO: 87670 - protein, 326 aa, Oryza sativa (japonica cultivar-group)
MAFTTMKASPMSASSSSAPVLRRCVAQPARVAAARRLAAAAASVALEASPVPAAAAAAVERRMSVSQTMSKLKEKGKTAFIPYITAGDPDMGTTAEALRLLDACGADVIELGVPFSDPYADGPVIQASASRALAAGATPEAVLSMLKEVTPELSCPVVLLSYLGPILRRGAANFTAAAKEAGVQGLIVPDLPYVDTCTFRSEAIKSNLELVLLTTPATPGERMKIITEASGGFVYLVSVNGVTGPRPKVNTRVEHLLQDIKLVTDKAVCVGFGISTPDHVRQIAGWGADGVIIGSAMVRQLGEAASPKQGLKRLEEYARRMKDALP

SEQ ID NO: 87671 - DNA, 975 bp, Oryza sativa (japonica cultivar-group)
  CDS (1)..(975)
atggctttcacggtcaaggcgtcgtcgccgtcgtcgccggctgcttcttcttcttcttcctcggcgccagctaagctcggagcggcgccggggagggtcgcggtcaggaagctcaccgcggcggcgacgtcgcttaggctcgatcgggcgcccgcggcgccggcgacggagcgcgggctgtcgtcggtgtcgcggaccatgtcgaggctgatggagaaggggaagacggcgttcatcccgtacatcaccgccggcgacccggacatggggacgacggcggaggcgctgcggctgctcgacgcgtgcggcgccgacgtcatcgagctcggcgtgcccttctccgacccctacaacgacggccccgtcatccaggcctccgccgcgcgggcgctctccgccggcgccacgatggacgggatcatgtcgatgctcgcggaggtgacgccggagctgtcatgcccggtggtgctcttctcctatctcggccccatcgtccggcgaggtccggccaacttcaccgccgcagccaaagaagccggcgtacaaggtctaatagtacctgatcttccttacctagaggcatgctctttcaggagtgaagttatcaagaacaacctagagctggtgctgcttactacaccaactacaccaccagacaggatgaaggcaatcacagccgcctcaggaggatttgtttacctggttagtgtcaatggagttacaggatctcgccaagacgtgaacccgcgtgttgagcatctccttcaggagattaagcaggtcactgacaaagctgtgtgtgttggctatggcatatcaacccctgatcatgttagacagatagcagagtggggtgcagatggggtgatcattggcagtgcaatggtgaggcagctgggtgaagcagcttctcccaagcaagggctgaaaaggctggagaagtatgctaggagcctgaagaatgcacttccatag

SEQ ID NO: 87672 - protein, 324 aa, Oryza sativa (japonica cultivar-group)
MAFTVKASSPSSPAASSSSSSAPAKLGAAPGRVAVRKLTAAATSLRLDRAPAAPATERGLSSVSRTMSRLMEKGKTAFIPYITAGDPDMGTTAEALRLLDACGADVIELGVPFSDPYNDGPVIQASAARALSAGATMDGIMSMLAEVTPELSCPVVLFSYLGPIVRRGPANFTAAAKEAGVQGLIVPDLPYLEACSFRSEVIKNNLELVLLTTPTTPPDRMKAITAASGGFVYLVSVNGVTGSRQDVNPRVEHLLQEIKQVTDKAVCVGYGISTPDHVRQIAEWGADGVIIGSAMVRQLGEAASPKQGLKRLEKYARSLKNALP

SEQ ID NO: 87673 - DNA, 1338 bp, Oryza sativa (japonica cultivar-group)
  CDS (1)..(1338)
atggctttcacggtgaaggcgtcgtcgccgtcgtcgccagctacgacgcgcctcacgggtgcgttgcacggcggcgcggcgcgggtcgcggcgcggaagctcccggcggcggcggtggcggcgtcgctgacgctcgatcgggcgccggcgccggccggcgccgagcgcgggatgtcgtcgtcggtgtcgcggaccatgtcgaggctaagggagaaggggaaggcggcgttcatcccgtacatcaccgccggcgacccggacatggggacgacggcggaggcgctgcgggtgctcgacgcctgcggcgccgacgtcatcgagctcggcgtgcccttctccgacccctacaccgacggccccgtcatccaggcctccgccgcgcgggcgctcgccgccggcgccacgatggacggggtcatgtcgatgctcgcggaggtgacgccggagctttcctgcccggtggtgctcttctcttacttcggccccatcgtccggcgaggtccggccaacttcaccgccgcagccaaagaagccggcgtacaaggtcttatagtaccagatcttccttacgtagagacatccactttcaggagtgaagccatcaagaacaacctagagctggtgctgcttactacaccagctacaccggcagacaggatgaaggcaatcacagcggcttcaggaggatttgtttatctggttagtgtcaatggggttacaggatctatccaaaacgtaaatccgcgtgttgagcatctccttcaggagattaagcaggtcactgacaaagctgtgtgtgttggctttggcatatcaacccctgatcatgttagacagatagcagattggggtgcagatggagtgatcattggcagcgcaatggtgaggcagttgggtgaagcagcttctcccaaacaagggctcaaaaggctggagaagaaaaatgccaccgccctacccttgacccacccaaaccgcaccgcccattccccccacccccgagccgcagccccttctctctcgagagcgacaagggaggcgataccgcgagaggaaacggcggaagcgcacgacggcagcggcggcggcgcacggtgcggcgtaggcgcacagcgcggcggttggggtggtgcacggcggcggagtaggcacacggcgcggcgcatggcgacggagacctccctcgtcctctcgacgcggcggttggggtggtgctacggctttcggcgtcattacagctcacagcagcggggtgatgcagcacggcgacgacggcggaatcagagcacggcaaggttccagatctgtgtacaaggtttccttgaaaaagagtcatga

SEQ ID NO: 87674 - protein, 445 aa, Oryza sativa (japonica cultivar-group)
MAFTVKASSPSSPATTRLTGALHGGAARVAARKLPAAAVAASLTLDRAPAPAGAERGMSSSVSRTMSRLREKGKAAFIPYITAGDPDMGTTAEALRVLDACGADVIELGVPFSDPYTDGPVIQASAARALAAGATMDGVMSMLAEVTPELSCPVVLFSYFGPIVRRGPANFTAAAKEAGVQGLIVPDLPYVETSTFRSEAIKNNLELVLLTTPATPADRMKAITAASGGFVYLVSVNGVTGSIQNVNPRVEHLLQEIKQVTDKAVCVGFGISTPDHVRQIADWGADGVIIGSAMVRQLGEAASPKQGLKRLEKKNATALPLTHPNRTAHSPHPRAAAPSLSRATREAIPREETAEAHDGSGGGARCGVGAQRGGWGGARRRSRHTARRMATETSLVLSTRRLGWCYGFRRHYSSQQRGDAARRRRRNQSTARFQICVQGFLEKES

SEQ ID NO: 87675 - DNA, 990 bp, Oryza sativa (japonica cultivar-group)
  CDS (1)..(990)
atggcgttcgcgctcaaggcctcaactgcctccgccgcggcggcgtccacggcctcggcctcggcctcgtccctgtccgtggctgcggccgcgcccgggaggcgcggcggcgcggcggggagggtctcgttccgcggggtccctgctcccatggtggcgatcagggcggaggcggctgccgtcggggaggacgagcgcgtcatctccggcaccttcgccaagctcaaggagcaggggaagaccgcattcattccattcatcactgctggtgaccctgacttggcgactacagcgaaagcgttgaagattcttgatgcttgtggttcggatctgatcgaattgggcgtgccttactctgacccattggctgatggccccgtcattcaggcttctgctacacgtgcactatcaaaaggcaccacatttgaggatgttatctctatggtaaaggaggtgatacctgagctgtcctgccctgtagcgcttttcacatattataacccgattctgaagcgtggcatcgcaaacttcatgactgttgtaaaagaagccggtgtccatggtcttgtggtacctgatgttcctctggaagagacaaatattttgaggagtgaagctgctaagaacaaccttgagctggtgctactgacaacaccaactacaccaacagaaagaatggagaaaattacaaaagcttctgaaggatttatttatcttgtaagcactgttggagttacaggtgcacgtgcaaatgtcagtggcaaggtgcaatctcttctccaggatatcaagcaggtcacggacaaagctgtggctgttgggttcggtatatcgactccagagcatgtgaagcagattgcgggatggggcgcagatggtgtgatcattgggagcgctatggtgaggcaattgggcgaagctgcttcacccgaagaaggattgaagaagctagaagagctagccaagagcctgaaggctgcattgccctga

SEQ ID NO: 87676 - protein, 329 aa, Oryza sativa (japonica cultivar-group)
MAFALKASTASAAAASTASASASSLSVAAAAPGRRGGAAGRVSFRGVPAPMVAIRAEAAAVGEDERVISGTFAKLKEQGKTAFIPFITAGDPDLATTAKALKILDACGSDLIELGVPYSDPLADGPVIQASATRALSKGTTFEDVISMVKEVIPELSCPVALFTYYNPILKRGIANFMTVVKEAGVHGLVVPDVPLEETNILRSEAAKNNLELVLLTTPTTPTERMEKITKASEGFIYLVSTVGVTGARANVSGKVQSLLQDIKQVTDKAVAVGFGISTPEHVKQIAGWGADGVIIGSAMVRQLGEAASPEEGLKKLEELAKSLKAALP

SEQ ID NO: 87677 - DNA, 828 bp, Arabidopsis thaliana
  CDS (1)..(828)
atggatcttctcaagactccttcctccacggttggtctatcagaaacattcgctaggttaaagtcacaaggcaaagtggctctgattccatatatcacagctggtgatcctgatctttctacaacagcgaaagctcttaaagtgcttgattcgtgtggctccgacataatcgaactcggtgttccatactctgatccattagctgatggtccagcaatccaggctgctgcgagacgttcgttacttaaaggaaccaactttaactccattatctctatgcttaaagaggttattcctcagttatcttgtccaattgcattgtttacatattacaatccaatcctgcgacgaggagtagagaactacatgactgttataaagaatgctggagttcatgggcttctggttcctgatgttccactcgaggagactgaaactctgcggaacgaagctcggaagcatcaaattgagctagtactgctcacaacacccacaactccaaaagaacgaatgaatgccattgttgaagcctctgaaggatttatctatctcgtaagttcagtaggggttactggtacaagagagtctgttaacgaaaaagttcaatctcttctacaacaaatcaaagaggcaactagcaagccagtggcagttggatttggcatatcaaaacctgagcatgtgaaacaggtagctgaatggggagcagacggagtcattgttggtagcgcgatggttaagatcttgggcgagtctgaatcacctgagcaaggacttaaggagctagaattcttcactaaatctttgaagtctgctcttgtctcttga

SEQ ID NO: 87678 - protein, 275 aa, Arabidopsis thaliana
MDLLKTPSSTVGLSETFARLKSQGKVALIPYITAGDPDLSTTAKALKVLDSCGSDIIELGVPYSDPLADGPAIQAAARRSLLKGTNFNSIISMLKEVIPQLSCPIALFTYYNPILRRGVENYMTVIKNAGVHGLLVPDVPLEETETLRNEARKHQIELVLLTTPTTPKERMNAIVEASEGFIYLVSSVGVTGTRESVNEKVQSLLQQIKEATSKPVAVGFGISKPEHVKQVAEWGADGVIVGSAMVKILGESESPEQGLKELEFFTKSLKSALVS

SEQ ID NO: 87679 - DNA, 855 bp, Methanocaldococcus jannaschii DSM 2661
  CDS (1)..(855): transl_table=11
ttggagtggatgattatgaaattagcagaaaaatttgaagagttaaaaaacaaaggagaaaaggcatttgttgcattttatgtgggaggagacccaaacttggaaatttcagaaaaggcattagaagttatttgtaagcatgctgatattgttgagataggtattccattttctgaccctgttgcagatggaattacaatacaaaaagcagatgttagagctttaaacagtggcatgaatccattgaaggcatttgagttggctaaaaaattgaatgaaaaagctccaaatgttccaaaggtgttcttaacctactataacataatatttaagatgggagaggaggagttcgttaaaaaatgtaaagaggctggagtttctgggattatagttccagatttgccaattgaagaggctgatagcttatacaattactgtaaaaagtatggagttgatttaatatttttagttgccccaacaacacctgatgaaaggttaaagaaaattttagaaaagtgtagtgggtttgtttatgttgtttctgtaactgggattactggagcgagagagaaagtagctgaagagacgaaagagttaattaagagagttaaaaagttttcaaaaatccctgcctgtgtagggtttggaatctcaaagagggagcatgttgaggaaataactgaaatagctgatggagctattgtaggaagtgcgattgttaagattgttgaaaaacatttagatgagaatggacaaataaaggatgaggaaaaattcctaaaggagttggaggagtttgttaaaaatctaaaggaagggactaaaaagaaggctaaagtagctataaaaaattaa

SEQ ID NO: 87680 - protein, 284 aa, Methanocaldococcus jannaschii DSM 2661
MEWMIMKLAEKFEELKNKGEKAFVAFYVGGDPNLEISEKALEVICKHADIVEIGIPFSDPVADGITIQKADVRALNSGMNPLKAFELAKKLNEKAPNVPKVFLTYYNIIFKMGEEEFVKKCKEAGVSGIIVPDLPIEEADSLYNYCKKYGVDLIFLVAPTTPDERLKKILEKCSGFVYVVSVTGITGAREKVAEETKELIKRVKKFSKIPACVGFGISKREHVEEITEIADGAIVGSAIVKIVEKHLDENGQIKDEEKFLKELEEFVKNLKEGTKKKAKVAIKN

SEQ ID NO: 87681 - DNA, 813 bp, Nostoc sp. PCC 7120
  CDS (1)..(813): transl_table=11
atgcctaccatttctgaccattttcaatctttacgccaacgtcaacagtgtgcgttgattccttttatcactgctggcgaccctgatttacaaactactgccgaggctttacgcattttagatcgtcatggggctgattttatcgaattgggtgttccctattctgaccctttggcagatgggcctgtgattcaagcagcagcaacccgcgccttgcagcgaggaacgaaattagagcaagttttggagatgctggaaacagttattcccagtctgcaagcaccgataattttattcacttactacaacccaattttacatcgtgggattcagtcgtttttggaaacaattgcggcggttggggtgcggggtctagtagtgccagatttacctttagaagaggcggaagaattaattaaaactgctgctaattttggtattgaggtgattttgctggttgctcctactagttctcagaataggattgaagcgatcgcacgtcaatcacaaggattcatttatttagtaagtgtcacaggcgttacaggtatccgttcccaaatccaagaccgcgtacaacacttaattaccgacttacgccacgtcacagataaacccatcggcgtaggctttggtatctccgcaccagaacaagcccgtcaagttaaagaatggggtgcagatgcggtcatcgttggtagtgcttttgtcaaacgcctcgcagaaggtagcccaagccaaggattacaagcggtagaaaaactctgccaagaactcaagacagctattacccgtgtagaggctagagtttag

SEQ ID NO: 87682 - protein, 270 aa, Nostoc sp. PCC 7120
MPTISDHFQSLRQRQQCALIPFITAGDPDLQTTAEALRILDRHGADFIELGVPYSDPLADGPVIQAAATRALQRGTKLEQVLEMLETVIPSLQAPIILFTYYNPILHRGIQSFLETIAAVGVRGLVVPDLPLEEAEELIKTAANFGIEVILLVAPTSSQNRIEAIARQSQGFIYLVSVTGVTGIRSQIQDRVQHLITDLRHVTDKPIGVGFGISAPEQARQVKEWGADAVIVGSAFVKRLAEGSPSQGLQAVEKLCQELKTAITRVEARV

SEQ ID NO: 87683 - DNA, 801 bp, Nostoc sp. PCC 7120
  CDS (1)..(801): transl_table=11
atgaccgccatttccgatcgctttgaaaccctcaaacagaatcaagagtgcgctctaattccgtttattactgctggtgatcctgatttagaaactacagccgcagccttaaagattttagatagcaatggtgctgattttatcgaattgggtatcccttattcagatcctttggcagatggaccagtaattcaagcagccgctacccgcgctttacaaaatggtacaaagctggaaagggtactggagatgttaaaagctactattcccagtttaagagcgccaattattttatttacctactacaatcccattttgcatcggggaattgacaagtttctggaacaaatcgcggcggttggtgtagccggtttagtagtgcctgatttaccgctagaagaggccgcaggactacttaaaccggctactgaacgggggattgatttaattctattgattgcccctacaagttcatctgagcgaatagaagcgatcgctcattcttctcaagggttcatctatttggtcagtgtcacaggtgttacaggggtgcgatcgcaagtagaagtccgtgtatctgatttattacgacaaattcgtcaggtcacagacaagcccattgctgtaggtttcggcatttctcaaccagaacaagccacccaggtgaaagagtggggagccgatggggcaattgtcgggagcgcctttgtccaacgtttaagcgcaggaacaccagcagaaggactcagtgcgatcgcggaattttgtcaaagtctgaaggcagccatcaaaacatcttga

SEQ ID NO: 87684 - protein, 266 aa, Nostoc sp. PCC 7120
MTAISDRFETLKQNQECALIPFITAGDPDLETTAAALKILDSNGADFIELGIPYSDPLADGPVIQAAATRALQNGTKLERVLEMLKATIPSLRAPIILFTYYNPILHRGIDKFLEQIAAVGVAGLVVPDLPLEEAAGLLKPATERGIDLILLIAPTSSSERIEAIAHSSQGFIYLVSVTGVTGVRSQVEVRVSDLLRQIRQVTDKPIAVGFGISQPEQATQVKEWGADGAIVGSAFVQRLSAGTPAEGLSAIAEFCQSLKAAIKTS

SEQ ID NO: 87685 - DNA, 828 bp, Agrobacterium tumefaciens str. C58
  CDS (1)..(828): transl_table=11
atggacaagcgctttgccgatctgcgggctgaaaatcgccccgccctgatcacctatttcatgggcggcgacccggatttccagacctcgcttggcatcatgaaggccctgccggaagcaggcgccgacgttatcgaactcggcatgccgttttccgatcccatggcggatggcccggccattcagctggccggccagcgcgcgctgaagggtggacagacactgaagaccacgctcgatctcgcccgcgagttccgcaagcaggacaatgcaacgccgatcgtgatgatgggctattataatccgatctatatctatggcgttgaaaagtttctggacgacgcaattgccagtggcattgatggccttatcgtggtcgacctgccgccggaaatggacgatgaactctgcattccggcgcttgcgcgcggcatcaatttcatccgtctggcgacgccgaccacggatggcaagcgcctgccggccgtccttaaaaatacctcaggtttcgtgtattacgtctcgatgaacggtatcaccggttcagcacttcccgatccctcgttgatctcgggcgctgtcggtcgtatcaaggcgcatacggaactgccggtttgtgtcggttttggcgtcaagacggccgatcatgcgaaggcgatcggtgccgtagcggatggtgtggtggtgggttcagccatcgtcaaccagattgcgggcagcctgaccaaggacgggcaggcgaccgccgacactgtgccggcagttacgacgctggtaaaaggactttcaacgggcgtgcgtgcatcgcgcctcgccgctgcggaataa

SEQ ID NO: 87686 - protein, 275 aa, Agrobacterium tumefaciens str. C58
MDKRFADLRAENRPALITYFMGGDPDFQTSLGIMKALPEAGADVIELGMPFSDPMADGPAIQLAGQRALKGGQTLKTTLDLAREFRKQDNATPIVMMGYYNPIYIYGVEKFLDDAIASGIDGLIVVDLPPEMDDELCIPALARGINFIRLATPTTDGKRLPAVLKNTSGFVYYVSMNGITGSALPDPSLISGAVGRIKAHTELPVCVGFGVKTADHAKAIGAVADGVVVGSAIVNQIAGSLTKDGQATADTVPAVTTLVKGLSTGVRASRLAAAE

SEQ ID NO: 87687 - DNA, 939 bp, Arabidopsis thaliana
  CDS (1)..(939)
atggcgattgctttcaaatccggcgtcttcttcctccaatccccaaaatctcaaattggattccgccattcttctcctcctgattcatcgctttctttcaagagattcactcccatggcttctctctccacctcttctcctactctcggtctcgctgatactttcacacagctcaaaaaacaaggcaaagtagcattcataccatatatcacagctggtgatccggatctctctactactgctgaagcattgaaagttcttgatgcttgtggttctgacataatcgaattgggtgttccttactctgaccctttagctgatggacctgttattcaggctgcggcaacaaggtcgttggagaggggaacaaacctcgatagcatccttgagatgttggataaggttgttccacaaatatcttgtccgatttcgttgttcacgtattacaacccgattcttaaacgtgggttggggaagttcatgtccagcatcagagctgttggtgtacagggacttgtggttcccgatgttcctcttgaggaaactgagatgctgagaaaagaagccctcaacaacgacattgagctggtcctactcactacaccaaccacaccaacagagcgaatgaagctaattgttgatgcgtcagaaggatttatttaccttgtgagctcaattggagtgactggtgcacgatcatctgtaagcggaaaggttcagtcgctcttgaaggatatcaaagaggcgacagacaagccggtggcagtcggttttggaatatcaaagccggagcatgtgaaacagatagctggatggggagctgatggagtgatcgtaggcagtgcaatggtaaagctattgggtgatgcaaagtcgccaactgaaggacttaaggagcttgagaaactaaccaagtctcttaaatctgctcttctttga

SEQ ID NO: 87688 - protein, 312 aa, Arabidopsis thaliana
MAIAFKSGVFFLQSPKSQIGFRHSSPPDSSLSFKRFTPMASLSTSSPTLGLADTFTQLKKQGKVAFIPYITAGDPDLSTTAEALKVLDACGSDIIELGVPYSDPLADGPVIQAAATRSLERGTNLDSILEMLDKVVPQISCPISLFTYYNPILKRGLGKFMSSIRAVGVQGLVVPDVPLEETEMLRKEALNNDIELVLLTTPTTPTERMKLIVDASEGFIYLVSSIGVTGARSSVSGKVQSLLKDIKEATDKPVAVGFGISKPEHVKQIAGWGADGVIVGSAMVKLLGDAKSPTEGLKELEKLTKSLKSALL

SEQ ID NO: 87689 - DNA, 2154 bp, Magnaporthe grisea 70-15
  CDS (1)..(2154)
atggaacacatcaaccagacttttgagcggtgcaaggcccgcggcaggccagcgcttgtcacatatgtcaccgctggctaccccaaggccgaggacacgcccggtattatgttggccatggagcagggcggcgccgacgttatcgagctcggtgtccccttcactgaccccattgccgacggaccaacaatccagactgccaacactatcgcgctcaagaaccgcgtcaccctttcctcaacacttcagatggtccgtgacgcaagaaagcagggtctgaaggcgcccgtcatgatgatgggttactacaacccactccgggcgtacggcgaggcaaagctgctgcaggactgcaaggaggccggcgtcaacggcttcatcctcgtcgacttgccacctgaggaggcggtttctttccgcaagctctgcaccgttgctggactctcatacgtacccctgattgcaccagcaacgtccgacgctcgtatgcgactcctctgccagctcgccgactccttcatctacgtcgtctcacggcagggtgttacgggcgcaacgggaaccctcaaccaggcactaccggagctggtggcgcgggtaaagaagtacagtggaaacaggccggcggctgtgggctttggcgtctcgacccgggagcacttcctctcggtcggcgggctggcggacggtgtcgtcgtcggcagccaaatcatcacgacgctggccaaggccgagcctggcaagggcctggaggcggtgcgggagtactgctcctacctgtgcgggcgggcttcggccgaggacgtcgctgaggtcacagttgccccggcggcggaccacagtgagaaggccaagacaggagacgaggtgggcgccaagctctcgggcagcaccgcgggccagggcgagaacgacgcggacctggttgcgcagctcgcggccatgcatggcaagatccccgaccggttcggcgagtttggcggtcagtacgtgcccgagtcgctcatggactgcctgtcggagctggaggagggcttcaacaagatcatcgacgacccggcgttctgggaggagtacaggtcttactacccttacatgggccgaccgggccagctgcatctcgccgagaggctgacggagcatgccggcggtgcccggatctggctgaagcgtgaggacctgaaccacaccggtagccacaagattaacaatgcgctcggccagctgctgctcgcacggaggctgggcaagacgcgcatcattgccgagacgggcgccggtcagcacggtgtcgcgacgggcgacggtgtgtgccaaattcggcatggagtgaacgtctacatgggcgccgaggacgtgcggcggcaagccctcaacgtcttccgcatgcggcttttgggtgcaaaggttgtcccggtcgaggcgggcaccaagactctcagagacgcggtcaatgaggccatgaggtcctgggttgtcgaccttgacaccacgcactacatcatcggttcggccattggaccgcatccgttccccaccattgtgaggacgttccagtccgtcattggtaaggagacaaaggagcagatgatgaagctgaagggcaagctgcccgatgcagtggttgcgtgcgtcggtggcggctccaacgccgtcggcatgttctaccccttcagcaacgacccgagcgtcaagctgctgggagttgaggcggcgggcgacggtgtcgagactctgaggcacagtgcaaccctttcggctggcaccaagggcgttcttcacggcgtgaggacgtatgtgctgcaggacgagcacggtcagatcaccgacacccactcggtgtcggctggtctcgactaccctggtgtgggtcctgagctggcaaactggaaggacagcgagagggccaagttcgtcaacgccacggacgcgcaggcctttacggcctttaggctcatcagccagcttgagggcatcatcccggcactcgagtcggcgcacggcatatacggcgccgtcgagttggcaaagacgatgggcaaggacgaggacgtcgtcatttgcctcagcggacgtggtgacaaggacgtacagagtgttgcggatgagttgccaaggattggccccgtcattggatgggacctcaggttttaa

SEQ ID NO: 87690 - protein, 717 aa, Magnaporthe grisea 70-15
MEHINQTFERCKARGRPALVTYVTAGYPKAEDTPGIMLAMEQGGADVIELGVPFTDPIADGPTIQTANTIALKNRVTLSSTLQMVRDARKQGLKAPVMMMGYYNPLRAYGEAKLLQDCKEAGVNGFILVDLPPEEAVSFRKLCTVAGLSYVPLIAPATSDARMRLLCQLADSFIYVVSRQGVTGATGTLNQALPELVARVKKYSGNRPAAVGFGVSTREHFLSVGGLADGVVVGSQIITTLAKAEPGKGLEAVREYCSYLCGRASAEDVAEVTVAPAADHSEKAKTGDEVGAKLSGSTAGQGENDADLVAQLAAMHGKIPDRFGEFGGQYVPESLMDCLSELEEGFNKIIDDPAFWEEYRSYYPYMGRPGQLHLAERLTEHAGGARIWLKREDLNHTGSHKINNALGQLLLARRLGKTRIIAETGAGQHGVATGDGVCQIRHGVNVYMGAEDVRRQALNVFRMRLLGAKVVPVEAGTKTLRDAVNEAMRSWVVDLDTTHYIIGSAIGPHPFPTIVRTFQSVIGKETKEQMMKLKGKLPDAVVACVGGGSNAVGMFYPFSNDPSVKLLGVEAAGDGVETLRHSATLSAGTKGVLHGVRTYVLQDEHGQITDTHSVSAGLDYPGVGPELANWKDSERAKFVNATDAQAFTAFRLISQLEGIIPALESAHGIYGAVELAKTMGKDEDVVICLSGRGDKDVQSVADELPRIGPVIGWDLRF

SEQ ID NO: 87691 - DNA, 2124 bp, Candida glabrata CBS 138
  CDS (1)..(2124)
atgtctcatcaacttaagcaaacatttgccaatgcgaaaaatgaggggcgtaatgccttggtaacattcatgactgctggttatcctagagtcgcagagaccattccaataatgaagggtttccaagaaggtggtgttgatgtcattgaattgggtatgccattctctgatcctattgcagatggtccaacaattcaagttgccaacaccaaggctttggagaacggtgtcactttggtacaaactttggacttgttaaagaaagctagagatgaaggtgttactgtccctgttatccttatgggttactacaatcctattctaaactatggtgaggaaaaattcattcaagatgcagcggatgcaggtgcaaacggtttcattattgttgatttgccacctgaagaagccattaaagtcagaaacatgatgaagaagcacggattaagtttggttcctctagtggctccttctaccacagattctcgtcttgagcttttggctaaaatcgccgattcgttcgtctatgtcgtgtcaagaatgggtactactggtgtccaatcatcggttgccagtgacctagatactctggtcagcagagttaggaaatacaccaaggaaacccctattgcagtaggttttggtgtctctactagagaacatttcgaatctgttggaagtctatccgacggtgttgtcattggttccaaaatcgttactttatgtggggaagccccagaaggtaagtgtggtgaggtcgcaaagaagtacgtcgaagagatactaaatggtaagaaacacaagattctatctggtgaagagtaccaactaatgaaaacggccaccaatgaactagaatccgattcggaccaccacgaatttgaagaagaccacaaacacccaataagatttggtgacttcggtggccaatacgttccagaagctttacatacatgtttgaaggaactagaagaaggttttgaagatgcaattgctgatcctactttctgggaggaattcaaatccttgtactcttacattggtcgtccatcttctttgcataaggctgaaagattgactgaacactgtggtggtgcccaaatctggttgaagagagaagacttgaatcacactggttcacataagattaacaacgctcttgcccaagttttaattgcaagaagattgggtaagacagaaatcatcgccgaaactggtgctggtcaacacggtgtcgctactgcaacagcatgtgccaagtttggtttaaaatgtactgtttttatgggagctgaagatgttcgtcgtcaagctctgaatgttttcagaatgagaattctaggagctaaggttgtttccgttactaatggtacaaagactttaagagatgctacttctgaagctttcagattctgggtcacaaatttgaagagtacccactacgttgtgggttctgctattggtccacatccttacccaacactggtacgtactttccaaagtgtgataggtaatgaaaccaaagaacaatttgctgctctaaataatggtaagcttccagatgtagtggtggcatgtgttggtggtggttcaaactcaactggtatgttttctccattcgaacatgacacgagcgtcaaacttctgggtgttgaagcaggtggtgatggtatcgatactgactatcatagtgctactttaaccgcaggtagaccaggtgtcttccacggtgtcaagacatacgttctgcaggatcaagatggtcaagtccatgatacacattccgtttcagcagggttggactatcctggtgttggtcctgaactggcattctggaaggcaacgggacgtgccgaattcattgctgctactgatgctcaagctctagaaggtttcaagttgatctcccaacttgaaggtattattccagctttagaatcatcacacgctgtttacggtgcatgtgaaagagcgaagaccatgaaaccagatgaacacttgatcatcaacatttctggtagaggtgacaaggacgtccaaagtgtcgctgaagttcttccaaaactcggtcctcaaatcggctgggacctgagattcgaagaagacccttctgtaggaaattag

SEQ ID NO: 87692 - protein, 707 aa, Candida glabrata CBS 138
MSHQLKQTFANAKNEGRNALVTFMTAGYPRVAETIPIMKGFQEGGVDVIELGMPFSDPIADGPTIQVANTKALENGVTLVQTLDLLKKARDEGVTVPVILMGYYNPILNYGEEKFIQDAADAGANGFIIVDLPPEEAIKVRNMMKKHGLSLVPLVAPSTTDSRLELLAKIADSFVYVVSRMGTTGVQSSVASDLDTLVSRVRKYTKETPIAVGFGVSTREHFESVGSLSDGVVIGSKIVTLCGEAPEGKCGEVAKKYVEEILNGKKHKILSGEEYQLMKTATNELESDSDHHEFEEDHKHPIRFGDFGGQYVPEALHTCLKELEEGFEDAIADPTFWEEFKSLYSYIGRPSSLHKAERLTEHCGGAQIWLKREDLNHTGSHKINNALAQVLIARRLGKTEIIAETGAGQHGVATATACAKFGLKCTVFMGAEDVRRQALNVFRMRILGAKVVSVTNGTKTLRDATSEAFRFWVTNLKSTHYVVGSAIGPHPYPTLVRTFQSVIGNETKEQFAALNNGKLPDVVVACVGGGSNSTGMFSPFEHDTSVKLLGVEAGGDGIDTDYHSATLTAGRPGVFHGVKTYVLQDQDGQVHDTHSVSAGLDYPGVGPELAFWKATGRAEFIAATDAQALEGFKLISQLEGIIPALESSHAVYGACERAKTMKPDEHLIINISGRGDKDVQSVAEVLPKLGPQIGWDLRFEEDPSVGN

SEQ ID NO: 87693 - DNA, 2130 bp, Kluyveromyces lactis NRRL Y-1140
  CDS (1)..(2130)
atgtctgtgttgttgagacaagcgtttgaaaacgctaagaaagaaggccgcaatgcccttgtcacttttatgactgctggatatccaaccctagaggataccattcaaatcatgaagggtttccaagacggtggtgttgatgttattgagttaggcttaccattttctgatccagttgctgatggtccagtgattcaaattgccaatactgttgcattgaagaacggtatcgatatgccaaaagttttggctctagttaagcaagcaagagaagaaggtatcaccgtaccaattgtattgatgggttactataatcctatcttaaactacggtgaagagaaattcattaaggatgctggtgctgctggtgtcaatggtttccttatcgttgatttaccaccagaagaagctttgaaagttagaaactacgtcggtgaaaacggattgagtttaatcccattagtggctccttctacaacagatgaaagattgagtctactgtcccatctcgctgattcattcatctatgttgtctccaggatgggtaccactggtgccagagaatcagtcgctaacgatttaagtgctcttgtccaaaaagttagatcattctctggtgatattccattggctgttgggttcggtatctctaccaaggagcattttgatgtcgttggatctgtttccgatggtgttgtcattggttccaagatcgttactttgatcggtgaggctgctcaagataaacgttatgaaactgcaaagaattacgctgaagaaatctctggtggtaagaaggggaaggttctttctaaagaagagttctggaacattcacaaggccaatgttgcaactgctaaggaaaataaaacagttgccaaagagttcgaagaattccacaagttcccggctcgtttcggagagtttggtggacaatacgttccagaagctctacatgcttgtctaagacaattggaaagaggcttcgaagatgccgtcgctgatccagcattctgggaagaattcaagagtttatacagctatattggtcgtccttcctccttccacaaggctgacagattgactgaatactgtggcggtgctcaaatctggttaaagagagaagatttgaaccacactggttcgcacaagattaacaatgccttggctcaagttttaattgccaagagactgggtaagaaaaaggtcattgctgaaactggtgccggccaacacggtgtggcaactgctaccgcatgtgccaagtttggtctagaatgtacagtcttcatgggtgctgaagatactcgtcgtcaagctttgaacgttttcagaatgagaatattaggtgctaaagtcgttcctgtcactaacggtactcaaactctaagagatgccacttctgaagctttccgttactgggtctctaatttggaatctactcattacattgttggttctgctatcggtccacatccatacccaacgttggtcagaactttccaaagtgtcatcggtaatgaaacaaagcaacaatttgctgcattgaacgacggcaagctaccagacgccatagttgcctgtgttggtggaggttccaactccactggtatgttctctcctttcgagcacgatgcctcggttagacttatcggtgtggaagctggtggtgacggtattgataccgatcatcattctgcaactttgaccgtcggtagacctggtgttctacatggtgtaaagacttacgtcttgcaagactccgatggacaagtgcatgatacccattctgtatccgctggtttggattacccaggtgttggtcctgaacttgctgcctggaaggcttctggtcgtgctgacttcatggctgctactgatgctgaagctctcgaagggtttagacttttatcgcaacttgaaggtatcattccagctctagaatcatctcacgctgtctatggtgctgttcaaatcgccaaaaccatgaaaaaagatcaacatttgattatcaacatctccggtagaggtgataaggatgttcaaagcgttgctgaaattttaccaagattaggccctcaaattggctgggatctaagattcgaaaaggaccctactgcaggaaactag

SEQ ID NO: 87694 - protein, 709 aa, Kluyveromyces lactis NRRL Y-1140
MSVLLRQAFENAKKEGRNALVTFMTAGYPTLEDTIQIMKGFQDGGVDVIELGLPFSDPVADGPVIQIANTVALKNGIDMPKVLALVKQAREEGITVPIVLMGYYNPILNYGEEKFIKDAGAAGVNGFLIVDLPPEEALKVRNYVGENGLSLIPLVAPSTTDERLSLLSHLADSFIYVVSRMGTTGARESVANDLSALVQKVRSFSGDIPLAVGFGISTKEHFDVVGSVSDGVVIGSKIVTLIGEAAQDKRYETAKNYAEEISGGKKGKVLSKEEFWNIHKANVATAKENKTVAKEFEEFHKFPARFGEFGGQYVPEALHACLRQLERGFEDAVADPAFWEEFKSLYSYIGRPSSFHKADRLTEYCGGAQIWLKREDLNHTGSHKINNALAQVLIAKRLGKKKVIAETGAGQHGVATATACAKFGLECTVFMGAEDTRRQALNVFRMRILGAKVVPVTNGTQTLRDATSEAFRYWVSNLESTHYIVGSAIGPHPYPTLVRTFQSVIGNETKQQFAALNDGKLPDAIVACVGGGSNSTGMFSPFEHDASVRLIGVEAGGDGIDTDHHSATLTVGRPGVLHGVKTYVLQDSDGQVHDTHSVSAGLDYPGVGPELAAWKASGRADFMAATDAEALEGFRLLSQLEGIIPALESSHAVYGAVQIAKTMKKDQHLIINISGRGDKDVQSVAEILPRLGPQIGWDLRFEKDPTAGN

SEQ ID NO: 87695 - DNA, 2079 bp, Yarrowia lipolytica CLIB122
  CDS (1)..(2079)
atgtctgctcatctggctgccactttcgagcagtgcaagaaggagggccgtcccgccctcgttaccttcgtcaccgcaggattcccctctgttgaaaaaaccgtgcccattctcgagggcctccagaccggaggagccgacgtgattgagctcggcatccccttcaccgaccctgttgccgacggccctgccatccaggccgccaacaatgtggctcttgccaacggtgtcaccgtccactcgtgtctggaccttgtcaagcaggctcgagccaagggcgtccacgtccccattgtgctcatgggctactacaaccctatccaccattttggtgacgagaagtttgtcaaggctgcccgagacgctggagccaacggtttcattatcgtcgaccttcccccggaggaggctgttgctttcagaggcctctgcactcgtgagggtctgtcttacgtccctctggtcgcccccaccacccccaacgaccgtcttgaggtcctcgcttccatcaccgactctttcatgtacgtcgtctcgcgaatgggcgtcactggcgccaccggcaagctgtctaccgacattgacgagctcgtggctaaggtccgaaagtacactggaggcaagcctctggcagttggctttggagtgtccacccaggagcacttcaaccagctggcccccctggccgacggtattgtcattggatccaagatcattgccaccatcgaggagtccaacggatcccccgaggctgtcgccaagtacctgcagtctgtgactggtggacgagcagcctctgccgctgtgtccaacgaaaacaagtccgacactacccaggccgtcaacaccgacgaggtgctgcgaaagtctgtctaccctgcccgattcggtgttcacggaggccagtacgtacccgagtctctgcaccgatgtctgctggagctcgagacttgcgtcgaggaggcctttgctgatgaatctttctgggaggagttccgatcctactttgcctacatgaaccgaccctcctccttccatgaggccgagcgactcaccgagcactgcggaggagccaagatctggctcaagcgagaggacctcaaccacaccggttctcacaagatcaacaatgccgtcggtcaggtcattcttgccaagcgattgggcaagaaagagctcattgccgagaccggagccggccagcacggtgttgctaccgccactgttgccgccaagttcggcatgaagtgcaaggtctttatgggtgctgaggacgcccgacgacagtctctcaacgtgttccgtatgcgaatgcttggtgccgaggttgtcaaggtcgaggagggctccaagactctgcgagacgccgtcaacgaggctctgcgattctgggtcaccaacctcgagtcaacccactacgtcattggttctgccattggccctcacccctaccccactctggtgcgaactcttcagtccgttattggccgagagaccaaggagcagtttgctgccctcaacaacggtgctctgcctgatgccgttgtcgcctgtgtcggcggtggatccaactcctccggtatgtttgctcccttcgagaacgacaagtctgtgcgacttgttggtgtcgaggctggaggagacggtattgatacacccgcccactctgctaccctcactaagggccaggtcggagtgttccagggagtcaagacctacgttctgcagaacgccgatggtcagatccaggacacacactctatctccgctggtctggactaccccggtgtcggtcctgagctgtcctactggaaggatactggccgagttgagtttgttgctgcctccgatgccgacgctctcaacgccttccgacagctgacccagctggagggtatcattcccgcccttgagtcgtcgcacgccatccacggtgccatggagctggccaagaagctgcccaaggacaagaacgtggtcatctgtctctctggacgaggagacaaggacgtgcagaacgttgctgagcagctgcccaagctcggtcccaagattgactgggacctgcgatttgagtaa

SEQ ID NO: 87696 - protein, 692 aa, Yarrowia lipolytica CLIB122
MSAHLAATFEQCKKEGRPALVTFVTAGFPSVEKTVPILEGLQTGGADVIELGIPFTDPVADGPAIQAANNVALANGVTVHSCLDLVKQARAKGVHVPIVLMGYYNPIHHFGDEKFVKAARDAGANGFIIVDLPPEEAVAFRGLCTREGLSYVPLVAPTTPNDRLEVLASITDSFMYVVSRMGVTGATGKLSTDIDELVAKVRKYTGGKPLAVGFGVSTQEHFNQLAPLADGIVIGSKIIATIEESNGSPEAVAKYLQSVTGGRAASAAVSNENKSDTTQAVNTDEVLRKSVYPARFGVHGGQYVPESLHRCLLELETCVEEAFADESFWEEFRSYFAYMNRPSSFHEAERLTEHCGGAKIWLKREDLNHTGSHKINNAVGQVILAKRLGKKELIAETGAGQHGVATATVAAKFGMKCKVFMGAEDARRQSLNVFRMRMLGAEVVKVEEGSKTLRDAVNEALRFWVTNLESTHYVIGSAIGPHPYPTLVRTLQSVIGRETKEQFAALNNGALPDAVVACVGGGSNSSGMFAPFENDKSVRLVGVEAGGDGIDTPAHSATLTKGQVGVFQGVKTYVLQNADGQIQDTHSISAGLDYPGVGPELSYWKDTGRVEFVAASDADALNAFRQLTQLEGIIPALESSHAIHGAMELAKKLPKDKNVVICLSGRGDKDVQNVAEQLPKLGPKIDWDLRFE

SEQ ID NO: 87697 - DNA, 837 bp, Prochlorococcus marinus str. MIT 9303
  CDS (1)..(837): transl_table=11
atgattgctatggcagatttcttggcacctaaatccaatacacaagccacaatcagcagtcgcttccaacgagtacaagctgagggacgccttgcactcatgcctttcctaatggctggtgatcctgatctggcaaccactgctgaggtattgctcagcctggagcaatctggcgcggacatgatcgagctgggcattccctatagcgatcctctcgccgatggtccggtgattcaggcagctgcttctcgagcactggcttctggtacgacaccagctcgggtcttacagatgttgattgacttgcggggcaaactttccattcctgtgatcctgttcacctacaccaatccattgttcaaccggggcatggagcgtttctgtgatgaagcggctgaggctggagttgccggtcttgtggtcccagatcttccactcgaggaagctgagcgtctttctcccttggcttctgctcgtggacttgatctggttcttctggtggctcctactacacctgcggagcgtatggcaaggattgcagaaagcagcaggggatttacctatttagtaagcgtgacgggagttactggagaacgttctgtcatggaggaacgtgttgaatccttggtgcagcaactcaaattgtccggctccaatcctgtagcagtcggatttggaatttctgggcctcagcaggtacggcaggtgcgaagttggggtgctgatggagccattgttggcagtgctctagtgaaacgaatggctgctgcggctcctggatttgttgctcaagaagcgggtcttttctgcaaagagctgcgcaacgctgctggatga

SEQ ID NO: 87698 - protein, 278 aa, Prochlorococcus marinus str. MIT 9303
MIAMADFLAPKSNTQATISSRFQRVQAEGRLALMPFLMAGDPDLATTAEVLLSLEQSGADMIELGIPYSDPLADGPVIQAAASRALASGTTPARVLQMLIDLRGKLSIPVILFTYTNPLFNRGMERFCDEAAEAGVAGLVVPDLPLEEAERLSPLASARGLDLVLLVAPTTPAERMARIAESSRGFTYLVSVTGVTGERSVMEERVESLVQQLKLSGSNPVAVGFGISGPQQVRQVRSWGADGAIVGSALVKRMAAAAPGFVAQEAGLFCKELRNAAG

SEQ ID NO: 87699 - DNA, 801 bp, Anabaena variabilis ATCC 29413
  CDS (1)..(801): transl_table=11
atgaccgcaatttccgatcgctttgaaaccctcaaacagaatcaagagtgtgcgctgattccgtttattactgctggtgatcctgatttagaaactacggctgccgccttaaagattttagatagtaatggtgctgacataattgaattaggcattccttactccgatcctttggcagatgggccagtaattcaagcagccgctactcgtgctttacaaaatggcacaaaactggaaagtgtgctggaaatgttaaaagtcaccacacccagtttgcaagcaccgattgttttatttacttattacaattctattctgcaccgagggattgacaatttccttgagcaagttgctgctgctggtgtcgccggcttggtagtaccggatttacccttagaagaagccgcaggactacttaaacccgctactgaacgggggattgatttaattctgttgattgcccctacaagttcatctgagagaatagaagcgatcgctcgttcatcacaaggatttatctatttggttagtgtcacaggtgttaccgggatgcgatcgcaagtagaagggcgtgtgcttgatttattacaaaaagttcggcaagtaaccgataaacccctcggtgttggttttggcatatctcaacccgcacaagcaactcaggtgagagattggggagcagatgccgctattgtgggtagcgcttttgtccaacgcctagccacaggaacaccagcagaaggactcagtgcgatcgcggaattttgtcaaagtctgaaggcagccatcaaaacatcttga

SEQ ID NO: 87700 - protein, 266 aa, Anabaena variabilis ATCC 29413
MTAISDRFETLKQNQECALIPFITAGDPDLETTAAALKILDSNGADIIELGIPYSDPLADGPVIQAAATRALQNGTKLESVLEMLKVTTPSLQAPIVLFTYYNSILHRGIDNFLEQVAAAGVAGLVVPDLPLEEAAGLLKPATERGIDLILLIAPTSSSERIEAIARSSQGFIYLVSVTGVTGMRSQVEGRVLDLLQKVRQVTDKPLGVGFGISQPAQATQVRDWGADAAIVGSAFVQRLATGTPAEGLSAIAEFCQSLKAAIKTS

SEQ ID NO: 87701 - DNA, 816 bp, Burkholderia sp. 383
  CDS (1)..(816): transl_table=11
atgaatcgtattcagcagaccttcgccgcgctcgccgaacaaggccgtaagggcctgatcccgttcatcacggccggcgaccccgatcccgccaagaccgtcgaattcatgcatgcgctcgccgaaggcggcgcggacgtgatcgaactcggcgtgccgttctcggacccgatggccgacggccccgtgatccagcgctcgtcggaacgcgcgctcgcgcgcggcgtcacgctcaagagcgtgctcgccgacgtgaagcgttttcgcgaaaccgaccccaaaactcccgtcgtgctgatgggctatgcgaacccgatcgagcggatgggtgtcgacacgttcgcggccgaagcccaggcggccggggtcgacggcgtgctcgtcgtcgactatccgccggaagaagcgggcgtgttcgccgagaaaatgcgtgccgcgcagatcgatccgatcttcctgctcgcgcccacgtcgaccgacgaacgcatcgccgacgtcggcaagatcgcgagcggctacgtgtactacgtgtcgctcaagggcgtgaccggcgcaggaaatctggatgtttcgagcattgcgggtaaaatcccggccatcaagtcgcgcgtgccggttccggtcggcgtcggcttcggtatccgcgacgccgaaacggcgcgcgcagtggccgaagtgtcggacgccgtcgtgatcggcagccgcctcgtgcagctgctcgaaagcgctgcgccggagggtgccgccgccgcgctgaagactttcattgccgagctgcgtgccgccctggacggcgcgggcaagacggcgcgataa

SEQ ID NO: 87702 - protein, 271 aa, Burkholderia sp. 383
MNRIQQTFAALAEQGRKGLIPFITAGDPDPAKTVEFMHALAEGGADVIELGVPFSDPMADGPVIQRSSERALARGVTLKSVLADVKRFRETDPKTPVVLMGYANPIERMGVDTFAAEAQAAGVDGVLVVDYPPEEAGVFAEKMRAAQIDPIFLLAPTSTDERIADVGKIASGYVYYVSLKGVTGAGNLDVSSIAGKIPAIKSRVPVPVGVGFGIRDAETARAVAEVSDAVVIGSRLVQLLESAAPEGAAAALKTFIAELRAALDGAGKTAR

SEQ ID NO: 87703 - DNA, 783 bp, Moorella thermoacetica ATCC 39073
  CDS (1)..(783): transl_table=11
atgggtgttgaaagaataactgctgcctttgccgcccggaaaaaagagggacgcaaagccctcatcgtctatctctgtgccggcgacccttccctggaggttaccgggcaagctgtcagggaactggctggcgccggggtggacctcattgagctgggggtacccttttctgaccccgtggccgatggtccggtcatccaggctgccagcaagcgtgcccttgccgccggggtaaccctgcccgaaatcctggaattggtaaagagcctgcgctcggggttggctgtccccttgatcctcatgagctactataaccctttgctgcaatatggactggaacggttaactgccgatctggccgctgccggggtggatggtttgattgtacccgatctgcccctggaagaaaacccacctttaagacaaaccctggaaccggcggggctggccctgattcccctggtggccccgacgacccccggggaacgtttggcccggattgccgccacagcccggggatttatctactgcgtttcccttaccggggtaacaggcgtccgggaaggcttgccgccgggaatagacgagtacctggcaggggtgcgggcggtaactgacctgcccctgggaataggtttcggcatcggcagtcccgaccaggccaggctcctggcccctatgggcgacggcattattgtcggcagcgccctggtcgacgtcctgtatcaagaaggcttaccggccgccctccggctggtagaaaggctccggcacgctttatag

SEQ ID NO: 87704 - protein, 260 aa, Moorella thermoacetica ATCC 39073
MGVERITAAFAARKKEGRKALIVYLCAGDPSLEVTGQAVRELAGAGVDLIELGVPFSDPVADGPVIQAASKRALAAGVTLPEILELVKSLRSGLAVPLILMSYYNPLLQYGLERLTADLAAAGVDGLIVPDLPLEENPPLRQTLEPAGLALIPLVAPTTPGERLARIAATARGFIYCVSLTGVTGVREGLPPGIDEYLAGVRAVTDLPLGIGFGIGSPDQARLLAPMGDGIIVGSALVDVLYQEGLPAALRLVERLRHAL

SEQ ID NO: 87705 - DNA, 798 bp, Syntrophus aciditrophicus SB
  CDS (1)..(798): transl_table=11
atgaacaggatagcgcagacattccagcgtctgaaagaaagaggggaaaaggccctggtggcctatgtgacggctggtgaccccgatctggataaaacccgggaaatcctcgtcggcctgaaggaaggaggagtggacatcctggaaatcggtgttcccttttccgatcccaccgcggacggccctgtcattcaggccgcggcccagagggccctgaaaacagggaccacgttgagccggattctcgacatgattcaagacctgcgaaagatcatcgatctcccggtggttcttttcggctattacaatcccatctacgcgtacggcacggagcgttttgcggagcgcgctaaggccgccggcgtcgatggtctgcttgtggtcgatcttcctcttgaagaagcggaagaacttcgcgggaaaacggactcaaaaggattggactttattaccctgatcgccccgacgacatcggaggaaaggatgtgtcggatcgcccgcagggcacagggattcatttattacatctccattacaggggtgactggaacggccacaccatcaagggacaacgtcgagcgggagatcagaagaattcggacgcattcggatcttccgcttgtcgtcggatttggcatttctacgccggagcaggctcgggaattggcttctctggcggacggaatcgtcatcggcagtgcttttgtgaggctgatagcggaaaatgcggacagtcccgaactggcagcgagggtctcgtcctttgcccgggagatcaaaaaagcgatgcaggaataa

SEQ ID NO: 87706 - protein, 265 aa, Syntrophus aciditrophicus SB
MNRIAQTFQRLKERGEKALVAYVTAGDPDLDKTREILVGLKEGGVDILEIGVPFSDPTADGPVIQAAAQRALKTGTTLSRILDMIQDLRKIIDLPVVLFGYYNPIYAYGTERFAERAKAAGVDGLLVVDLPLEEAEELRGKTDSKGLDFITLIAPTTSEERMCRIARRAQGFIYYISITGVTGTATPSRDNVEREIRRIRTHSDLPLVVGFGISTPEQARELASLADGIVIGSAFVRLIAENADSPELAARVSSFAREIKKAMQE

SEQ ID NO: 87707 - DNA, 822 bp, Frankia sp. CcI3
  CDS (1)..(822): transl_table=11
gtgcagagtcggttggacgcagtgttcgcggcggcccgcgaggaggggcggtcggtgctggtcggctatctgcccgcgggattcccgacggtggacggggcgatcgaggccatgcgggccatggtggcggcgggagtcgacgttgttgaggtcggcctgccctactccgaccccaccatggatggtccggtgatccaggacgcggcggatgcggccctgcgcggcggggtcacgacgcgggacgtgatccgcaccgtcgaggccgtcgccgcgacgggggccccggccctggtcatgtcctactggaacccgatcgaccgctacggcgcggcctcgtttgcggccgatctggccgccgccgggggcgccggagcaatcactccggacctgccgcccgaggaggccgggccctggctcgacgcgtgcgccgcgcacggcctggccccggtgttcctcgtcgctcccagctcctcggacacccgtctccggctggtcgccggcgtcgcgcgcggcttcgtctatgccgcctcgctgatgggtgtcaccgggacccgggcggcggtcggcgagcgggcggccgatctggtcgcccgggtgcgggccgccaccgagctcccggtggcggtggggctcggggtgagcaccgcggcgcaggccgccgaggtcgcgggcttcgccgacggtgtgatcgtcggctccgcgctggtgaaggtcctgcttgaggcggaacgttccggagccggcgcctcagcgggcctcgccggaatccgtcggctcgccgcggaactcgccggaggggtgcgcgctcccgttccggcgtga

SEQ ID NO: 87708 - protein, 273 aa, Frankia sp. CcI3
MQSRLDAVFAAAREEGRSVLVGYLPAGFPTVDGAIEAMRAMVAAGVDVVEVGLPYSDPTMDGPVIQDAADAALRGGVTTRDVIRTVEAVAATGAPALVMSYWNPIDRYGAASFAADLAAAGGAGAITPDLPPEEAGPWLDACAAHGLAPVFLVAPSSSDTRLRLVAGVARGFVYAASLMGVTGTRAAVGERAADLVARVRAATELPVAVGLGVSTAAQAAEVAGFADGVIVGSALVKVLLEAERSGAGASAGLAGIRRLAAELAGGVRAPVPA

SEQ ID NO: 87709 - DNA, 810 bp, Francisella tularensis subsp. holarctica
  CDS (1)..(810): transl_table=11
atgacaaatagatacacaaccctttttgcaaatttagagaaaagaaatgaaggagcttttataccttttgtaacaattggtgatcctaataaagcgctatcctttgaaattatcgatactttggttagttcaggtgctgatgctcttgagttgggtatacctttttcagatcacttagcagatgggccaacaattcaagaagcaaatattcgcgctctggagagtggaataacccctaaagattgtttcgatattctaactaaaataagagcaaaataccctcatatccctattggtttactactttatgctaatttagtctatgcaaacggtatagagaacttttatcaaaaatgtttagatgcaggtgttgattctatacttatagctgatgtacccgctcacgaatctaaagagtttcgtgatattgctaaaaaagttggtatagcacaaatatttatcgctcctcctgatgctagtgagtcaactcttaagcaaatttctaaacttggtagtggttatacgtatttactatcgagagttggtgtaacagggacagaaactgctgcaaatatgcccgtcgaggatgtattggctaaacttagagaatataatgctcctaaaccagttttaggctttggtatctctaaacctgagcaagtacaacaagctatcaaagctggtgctgctggtgcaatttcaggctcagcaacagtgaaaattattcaaaataatatctctaataaacaaaaaatgcttaatgagcttacatattttgttaaagagatgaaagcagctacattaaactaa

SEQ ID NO: 87710 - protein, 269 aa, Francisella tularensis subsp. holarctica
MTNRYTTLFANLEKRNEGAFIPFVTIGDPNKALSFEIIDTLVSSGADALELGIPFSDHLADGPTIQEANIRALESGITPKDCFDILTKIRAKYPHIPIGLLLYANLVYANGIENFYQKCLDAGVDSILIADVPAHESKEFRDIAKKVGIAQIFIAPPDASESTLKQISKLGSGYTYLLSRVGVTGTETAANMPVEDVLAKLREYNAPKPVLGFGISKPEQVQQAIKAGAAGAISGSATVKIIQNNISNKQKMLNELTYFVKEMKAATLN

SEQ ID NO: 87711 - DNA, 807 bp, Methylobacillus flagellatus KT
  CDS (1)..(807): transl_table=11
atgtctcgtatccaagcaacatttgcgacgctcaagtcgcaaggcaagaaagccctgatcccgtatatcacggcaggtgatccccatcccaagcataccgtagcgttgatgcatgcactggtgcaagccggctcagacattatcgagctgggtgtgccattttccgatcccatggcggacggcccggtaattcagtgcgccaccgagcgtgccctggcccacaaggttggcttgatcaacgtgctggagatggtgcgtgaattccgccgtgtcgatgacaggactcctgttgtgctgatgggatatgccaaccctatagaagcgatggggcaagcaaagtttgccgagcgtgcctgtgcagcaggtgtggatggtgtgctgacagtcgattacccaccagaggaatgccaggattttgtgcagctgctgaaatcgcagcagctggatcccatattcctgctgtcgcctacgtcggacagtagccgtgtcgatatgatcgtgcatcaggcagcaggttttgtctattatgtttcactcaaaggtgtcaccggctctcagaatattgatattgccgaggtcggtaccagggtgaaggcgatacgcagccgcacagatctacctgtaggcgtcggttttggcgtgagggatgcggccacggcaaaggcagtggctgagatagcggatgccgtggtgatcggaagtcgcatgattcaggaaattgaaaactccagcgaagacgcattgctgagtaatgtagcggcattgacgcagagcatgcgtacggcaattgacgatgccaagacttaa

SEQ ID NO: 87712 - protein, 268 aa, Methylobacillus flagellatus KT
MSRIQATFATLKSQGKKALIPYITAGDPHPKHTVALMHALVQAGSDIIELGVPFSDPMADGPVIQCATERALAHKVGLINVLEMVREFRRVDDRTPVVLMGYANPIEAMGQAKFAERACAAGVDGVLTVDYPPEECQDFVQLLKSQQLDPIFLLSPTSDSSRVDMIVHQAAGFVYYVSLKGVTGSQNIDIAEVGTRVKAIRSRTDLPVGVGFGVRDAATAKAVAEIADAVVIGSRMIQEIENSSEDALLSNVAALTQSMRTAIDDAKT

SEQ ID NO: 87713 - DNA, 780 bp, Methanococcoides burtonii DSM 6242
  CDS (1)..(780): transl_table=11
atgagattagctgataaattcaatgaaataaagaacaggaatgagacagcacttcttgcttatgtttgtgcaggagatcccgatattgattcgaccccacgaattgttgattcgctgataaagggtggtgcagatattattgagctgggattgccattctccgatccggtggcagacggacccaccatacaggcagcatcagaaagagcacttacagcaggaatgaacccggacaggtattttgaacttgtggcaaaccttgatgtgcaggtaccacttgtttgtatgacatattataatctgatatacaaacgcggaattgaaaaatttgtaaaggattgtataagttcgggcattagcggattgatcatcccggatctaccggcagaggaaagcgccgaccttgcaaactgctgctcacaagaaggagtagacctgatatttttggtagctccgatcactacggatgagagaatagagatgatattgtctaagacttccggctttgtgtacattgtctcaagatcaggcgttacaggaacaaggtccgacgtcacagctgcgacctccgacataatttcaagagtcagaacagacatcccgaaggctgttggtttcggaatttccaatgcagaacaagctgcaaagatcatagatgcaggtgcggacggagttatagtaggttctgcttttgtagatattatcgcatcaggaaatgatgtcgaaaaaagactggaagaccttacagctgagatcaagtcagtctgtagaagggactga

SEQ ID NO: 87714 - protein, 259 aa, Methanococcoides burtonii DSM 6242
MRLADKFNEIKNRNETALLAYVCAGDPDIDSTPRIVDSLIKGGADIIELGLPFSDPVADGPTIQAASERALTAGMNPDRYFELVANLDVQVPLVCMTYYNLIYKRGIEKFVKDCISSGISGLIIPDLPAEESADLANCCSQEGVDLIFLVAPITTDERIEMILSKTSGFVYIVSRSGVTGTRSDVTAATSDIISRVRTDIPKAVGFGISNAEQAAKIIDAGADGVIVGSAFVDIIASGNDVEKRLEDLTAEIKSVCRRD

SEQ ID NO: 87715 - DNA, 786 bp, Acidobacteria bacterium Ellin345
  CDS (1)..(786): transl_table=11
atggcaatccaatttcacaagcgtccagggctggtcgcgtacatcacgtgcggtgatcccgatgtggataccgcgatcaggatcattcttgcggcggtcgaggccggcgcggatgtgatcgaactcggagtcccattcagcgatccagtcgcggatgggccggtgatccaggcggcaagcgaacgcgcgctgcatggcggcactagtgtgaaagatgtgcttcacgttgcacgagaagtacgccggcacaccgacgcgggattgatcgttttctcgtacatgaaccccttgctgcgttatggcctcgaaaaattctgcgccgatgctgcgaatgccggcgtagatggcgttcttgtgaccgatctgccagtcgaagaagcaggaccgtacctggcggcgatgtcgaagcacaatctcgacccgatttttcttgttgcgccgacaagtcccgacgctcggttgaagctcatcgcagagcacagccgaggttttgtttatgcggtttctcgaaccggtgtgaccggcacgcgccaggaagtcgcaagcgatgctcgcgacctcgtgaaacggttgcggcaatttacgaagttgccgatcgccgtcggctttggggtttcaaacgccgagcagtttgcggaagtgggtcgcttcgccgacgccgccgtaatcggcagcgcgatcatgcagcgtgttttcgataacccgggcagcgagcccgaagcggtgaaggccttcctacgcggacttacttcctcaatgaaaccagcggcggcaaggaagggctga

SEQ ID NO: 87716 - protein, 261 aa, Acidobacteria bacterium Ellin345
MAIQFHKRPGLVAYITCGDPDVDTAIRIILAAVEAGADVIELGVPFSDPVADGPVIQAASERALHGGTSVKDVLHVAREVRRHTDAGLIVFSYMNPLLRYGLEKFCADAANAGVDGVLVTDLPVEEAGPYLAAMSKHNLDPIFLVAPTSPDARLKLIAEHSRGFVYAVSRTGVTGTRQEVASDARDLVKRLRQFTKLPIAVGFGVSNAEQFAEVGRFADAAVIGSAIMQRVFDNPGSEPEAVKAFLRGLTSSMKPAAARKG

SEQ ID NO: 87717 - DNA, 792 bp, Myxococcus xanthus DK 1622
  CDS (1)..(792): transl_table=11
atgagcggcgagattgcacggactttcgcccaggcgaaggcacggggcgaaggcgtactggtgacctatgccatggcgggcgacccggacctgccccgttcggtggacgtgttcgccgcgctggtcgagggcggcgcggacgtgctggagattggcgtggcgttcagcgaccccatcgccgacggccccgtcatccagggcgcggcggagcgagcgctcaaggccggctccacgctcaagcgcgtgctggacgaggtggtgccggcggtacgcaagcgatgtccccagacgccgctggtcatcatgacgtacgtcaacctcatcatggccatgggcgaggcgcgttacgcgaagctcgcacgcgagcgcggcgtgtctggaaccatcctccccgacctgccgcccgaggagagcgcgagcctgcgcgccacgttcgacgcggagggcatggacctgattcccctgtgcgcccccacgacgcccccggcgcgggcgcaggccatcgcgaaggatggccgtggctttgtctattgcgtgtccgtgtcgggcgtgacgggcatgcgcgcggagctgccgccggacctttcacagcgattggatttggtgcgcaaggccgcgaccgtgcccgtggtggcaggctttggcatctccacggcggaacaggcacgcatgctgtctgcccatgcggacggcgtcgtggtgggcagcgcgctggtgcgtgccgcgcacaccgagggcctcgaggcggcgaaggcgctctgcgccgacatcaagcgcgggctgcgacgctga

SEQ ID NO: 87718 - protein, 263 aa, Myxococcus xanthus DK 1622
MSGEIARTFAQAKARGEGVLVTYAMAGDPDLPRSVDVFAALVEGGADVLEIGVAFSDPIADGPVIQGAAERALKAGSTLKRVLDEVVPAVRKRCPQTPLVIMTYVNLIMAMGEARYAKLARERGVSGTILPDLPPEESASLRATFDAEGMDLIPLCAPTTPPARAQAIAKDGRGFVYCVSVSGVTGMRAELPPDLSQRLDLVRKAATVPVVAGFGISTAEQARMLSAHADGVVVGSALVRAAHTEGLEAAKALCADIKRGLRR

SEQ ID NO: 87719 - DNA, 846 bp, Mesorhizobium sp. BNC1
  CDS (1)..(846): transl_table=11
atgaccaccacccgaattgacaggctcttcaccaagctgaaagccgagaacaggccagcgctcgtcacctatttcatgggtggcgaccccgattacgaaacgtcgctctccattatgaaagccctgccggtggccggcagcgacatcatcgagctcggcatgcccttttccgacccgatggccgacgggccggcgatccaggcggcggggctgcgcgcgttgaaaggcggacagacactggacaagacgcttcggatggcgaagagcttccggcaggataacgaccatacgccgatcgtcatgatgggctactacaatcccatctacatctacggtgtagacaggttcctcacggaggcgagagcgtccggcatcgacgggctcatcatcgtcgacctgccgccggagatggacgaagaattgtgcgtgcccgcgttgagggccggcatcaacttcatccggctagcaacgccaacaacggacgacaagcgcctgcccaaggtgctcgaaaacacgtccggattcgtctattacgtgtcgatgaccggcatcaccggctcggcgctgccggacacctccaaggtggctggcgccgtcgcccgcatcaaggggcataccaaactgccggtctgcgtcggctttggcgtaaagacggcgagccaggcgcgtgcgatcggagcggccgcggacggcgtggtggtcggcacggctatcgtgaatgcggttgcgaatgtgctcggccccgacggcaaaacaactgccgacccggcggaagcggtggcaaccctggtgcgcggccttgccgatggcgtgcgcgaggcgcgcatcacggccgccgccgaataa

SEQ ID NO: 87720 - protein, 281 aa, Mesorhizobium sp. BNC1
MTTTRIDRLFTKLKAENRPALVTYFMGGDPDYETSLSIMKALPVAGSDIIELGMPFSDPMADGPAIQAAGLRALKGGQTLDKTLRMAKSFRQDNDHTPIVMMGYYNPIYIYGVDRFLTEARASGIDGLIIVDLPPEMDEELCVPALRAGINFIRLATPTTDDKRLPKVLENTSGFVYYVSMTGITGSALPDTSKVAGAVARIKGHTKLPVCVGFGVKTASQARAIGAAADGVVVGTAIVNAVANVLGPDGKTTADPAEAVATLVRGLADGVREARITAAAE

SEQ ID NO: 87721 - DNA, 798 bp, Trichodesmium erythraeum IMS101
  CDS (1)..(798): transl_table=11
atgatttcagtctccgattgttttgaatctctacgcaataatagtagtcagtgtgctctaattcccttcattaccgcaggggacccagacttagaaacgacagccaaagctctagaggtattggatagaagtggggccaacatgattgagttgggagtcccttattctgaccctttagctgatggtccagtaattcaagccgctgccacccgttccttaaaccgagggactactttagagtcagtattagaggtagtccagaccgttagtccgaaattgcgatcgccaattatcctatttacttattacaacccaattttgtacagaggagtcgagaacttcctaaaaaaaatttatgatgtaggagctagaggtttagtagtaccagacctgccattagaagaagccgatattttattagaaccagcaaaagatattggcatagagctaaccttattagtagcacccacaagtccaaaagagagaataaaggcgatcgctcatcagtcccaaggatttatatatttagtaagtgtaaccggagtaacaggaatgcgtgctcaaatgcagaccagagtagaagacttgctagcacaaatgcgggaagttacagataaacccataggcgtcggctttggtatttctcaaccggaacaagccttacaggtcaaaaagtggggaagcgatgcagtcattgttggtagtgcagtagtaaagcggttagcagagggaagtcccgatgaaggtttaaaagcgatcggcgagttttgtcaaaatttgaaagcagctattaactga

SEQ ID NO: 87722 - protein, 265 aa, Trichodesmium erythraeum IMS101
MISVSDCFESLRNNSSQCALIPFITAGDPDLETTAKALEVLDRSGANMIELGVPYSDPLADGPVIQAAATRSLNRGTTLESVLEVVQTVSPKLRSPIILFTYYNPILYRGVENFLKKIYDVGARGLVVPDLPLEEADILLEPAKDIGIELTLLVAPTSPKERIKAIAHQSQGFIYLVSVTGVTGMRAQMQTRVEDLLAQMREVTDKPIGVGFGISQPEQALQVKKWGSDAVIVGSAVVKRLAEGSPDEGLKAIGEFCQNLKAAIN

SEQ ID NO: 87723 - DNA, 825 bp, Alkalilimnicola ehrlichei MLHE-1
  CDS (1)..(825): transl_table=11
atgaaccgtctggaaaagcgcatgtcggcctgccggaaggcggggcgcaaggccctgatcccctatatcaccgccggcgaccccggcccggagcacaccgtgcccctcatgcacgcgctggtcggggccggcgccgacgtcctcgagctcggcgttccgttctccgatccaatggccgacgggccggtgatccaggccgcctgtgagcgggcactggcccacgggacgaccctgcgcgatgtcttcgatatggtgcgccggttccgtgagcaggatggcgagacccccgtggtcctgatgggttacctcaacccggtggaatacctggggccggcggtctttgctgaggaggcggcggccgcgggggtggacggggtactcacggtggacctcccgccggaggaggcggccccctttacccaggcctttgccgccaatgatttgtgtcccatcttcctggtcgcgccgacaacggcgggtgaacggctggaggccgtgtgtcaggccgcccgcggctttgtctactacgtggccatcaagggcgtcactggcgtggcggaactggatgtggacgatatcgcccgccgggtcagtgccgtgcgggcccgcaccgacctgccagtgggtgtcggcttcggtatccgcgatgccgagagcgcggcgcgggtcggggcggtggccgatgccgttatcgtgggcagtgcgctggtcaatcgcatcgccgggctgaccgagcagccggagcgggtcccggcggtgttggccgaggcgcttggcgagatgcgccgggcgctggacggtcttgccgaggaggtcgcatcgtga

SEQ ID NO: 87724 - protein, 274 aa, Alkalilimnicola ehrlichei MLHE-1
MNRLEKRMSACRKAGRKALIPYITAGDPGPEHTVPLMHALVGAGADVLELGVPFSDPMADGPVIQAACERALAHGTTLRDVFDMVRRFREQDGETPVVLMGYLNPVEYLGPAVFAEEAAAAGVDGVLTVDLPPEEAAPFTQAFAANDLCPIFLVAPTTAGERLEAVCQAARGFVYYVAIKGVTGVAELDVDDIARRVSAVRARTDLPVGVGFGIRDAESAARVGAVADAVIVGSALVNRIAGLTEQPERVPAVLAEALGEMRRALDGLAEEVAS

SEQ ID NO: 87725 - DNA, 828 bp, Hyphomonas neptunium ATCC 15444
  CDS (1)..(828): transl_table=11
atgggccgggaaagaattgaagccgccttcgccaaagcgaagggcgaaaaccgggctgcgcttgtcacctatctgatggcgggcgatccgagccttgaagagagctatacggcgatgtgcgcgctgcgtgacaatggcgctgacattatcgagctgggcgcgccgttcaccgatccgatggcggatggcccggccatccagcgggcgggccttcgcgcgctggccaacggcacgaagctgaccgatgtgctggcgctggctgcgcgtttccggaaggatgatcagacgacgccgctgatcctgatgggctatgccaatccgatccattccatggggtatgaggtttttgccgaggccgccgcggacgccgggattgatggctcgatcatcgtggaccttccgcccgaggaagatgcgggtctgcgcgagatctacagcaagcgcggtctttcggtgatccgcctggcgacgccaacgaccgacgaggcgcgcgctgcaaaggttgccgatggggcgtcgggctttatctactttgtagcggtgacgggtgtgacggggtcgggaagcgctgatcctgcagccattgctgggaaagtggcgatggtccggaaggtgtccggtttgccggtttgtgtcggttttggtgtaaaaaatggtgcacaagccgtagaaatggctaagattgccgacggggtggtggttggttcggcttttgtggaaaaggcgcaggatgcgcatgaatctgggaagtttgagacggcggcacccgcaatgggcgagcttgcaggagaactgcgccgcgcgctcgcaggcgtgtccaaaggctga

SEQ ID NO: 87726 - protein, 275 aa, Hyphomonas neptunium ATCC 15444
MGRERIEAAFAKAKGENRAALVTYLMAGDPSLEESYTAMCALRDNGADIIELGAPFTDPMADGPAIQRAGLRALANGTKLTDVLALAARFRKDDQTTPLILMGYANPIHSMGYEVFAEAAADAGIDGSIIVDLPPEEDAGLREIYSKRGLSVIRLATPTTDEARAAKVADGASGFIYFVAVTGVTGSGSADPAAIAGKVAMVRKVSGLPVCVGFGVKNGAQAVEMAKIADGVVVGSAFVEKAQDAHESGKFETAAPAMGELAGELRRALAGVSKG

SEQ ID NO: 87727 - DNA, 840 bp, Rhizobium leguminosarum bv. viciae 3841
  CDS (1)..(840): transl_table=11
atgaccgcacgcatggacaaacgctttgccgagctgaaggccgagggccgtccggcgcttgtgacctatttcatgggcggcgatcccgactacgacacctcgctcggcatcatgaaggcgctgccggaggcaggctccgacatcatcgagctcggcatgcccttttccgatccgatggccgacggcccggcgatccagctggccggccagcgcgcgctgaaaggcggccagacgctgaagaagacgctgcagctggcggccgatttccgcaagaccaacgatgcgacgccgatcgtgatgatgggttactacaacccgatctatatttacggcgtcgagaaattcctcgacgacgcgctcttagccggcatcgacggcctgatcgttgtcgacctgccacccgagatggatgacgagctctgcattccggcgatccgcaaaggcatcaatttcattcggttggcgacgccgacgacggatgagaagcgcctgccgaaagtcctgaagaacacctcaggcttcgtctactacgtctcgatgaacggcatcaccggttcggcgctgcctgatccgtcgttggtttcgggcgcggtcgagcgcatcaagcagcacaccaagctgcccgtctgcgtcggcttcggcgtcaagacggcggaacacgcaaaagtcatcggcggttcggccgacggcgtcgtcgtcggcaccgcgatcgtcaatcaggtcgcgaccagcttgacgcatgacggaaaggcaacggccgacaccgttcaggcggttgccacgctggtgcgcggcctttccacaggaacacgttcggcgcgccttgttgctgccgaatag

SEQ ID NO: 87728 - protein, 279 aa, Rhizobium leguminosarum bv. viciae 3841
MTARMDKRFAELKAEGRPALVTYFMGGDPDYDTSLGIMKALPEAGSDIIELGMPFSDPMADGPAIQLAGQRALKGGQTLKKTLQLAADFRKTNDATPIVMMGYYNPIYIYGVEKFLDDALLAGIDGLIVVDLPPEMDDELCIPAIRKGINFIRLATPTTDEKRLPKVLKNTSGFVYYVSMNGITGSALPDPSLVSGAVERIKQHTKLPVCVGFGVKTAEHAKVIGGSADGVVVGTAIVNQVATSLTHDGKATADTVQAVATLVRGLSTGTRSARLVAAE

SEQ ID NO: 87729 - DNA, 807 bp, Pseudomonas aeruginosa UCBPP-PA14
  CDS (1)..(807): transl_table=11
atgagccgcctgcagacccgcttcgcccagctcaagcaggaaaaccgcgccgccctggtgaccttcgtcaccgccggcgacccggactacgcgtcttccctggaaatcctcaaaggcctgccggcggccggagccgacgtgatcgaactgggcatgccgttcaccgatccgatggcggacggcccggccatccagttggccaacatccgcgccctcgacggcggccagaccctggccaggacgttgcagatggtccgcgaattccgcagcggcgacagcgagacacccctggtgctgatgggctacttcaacccgatccaccactacggcgtcgagcgcttcatcgccgaggcgaaggaggtgggggtggacggcctgatcgtggtcgacctgccgccggagcacaacgaagacctctgccacccggcccaggccgccggcctcgacttcatccgcctgaccaccccgaccaccggcgaccagcgcctgccgacggtgctcgaaggcagttccgggtttgtctactacgtgtcggtggccggcgtcaccggcgccaacgcggcgaccctggaacacgtcgaggaagcggtggcgcgcctgcgccggcataccgacttgccgatcggtatcggcttcggcatccgcagcgccgaacacgccgccgcggtcgcgcggttggccgacggcgtggtggtcggctcggcgctgatcgaccggatcgccaaggcccgcgacaatgcccaggcggtcaaggatgtcctcgccctgtgcggcgagctggccgaaggcgtgcgcaacgcacgctga

SEQ ID NO: 87730 - protein, 268 aa, Pseudomonas aeruginosa UCBPP-PA14
MSRLQTRFAQLKQENRAALVTFVTAGDPDYASSLEILKGLPAAGADVIELGMPFTDPMADGPAIQLANIRALDGGQTLARTLQMVREFRSGDSETPLVLMGYFNPIHHYGVERFIAEAKEVGVDGLIVVDLPPEHNEDLCHPAQAAGLDFIRLTTPTTGDQRLPTVLEGSSGFVYYVSVAGVTGANAATLEHVEEAVARLRRHTDLPIGIGFGIRSAEHAAAVARLADGVVVGSALIDRIAKARDNAQAVKDVLALCGELAEGVRNAR

SEQ ID NO: 87731 - DNA, 804 bp, Solibacter usitatus Ellin6076
  CDS (1)..(804): transl_table=11
atgacgcgtatcggacgccttttcgactgtttgaagcgggagaaccgcaaggctctgatcgcgtacctgacggcgggcgatccgacgccggatcacacgccggggctagtggaagcgctggtgcgcggcggggcggatttgatcgagctgggcgttccgttcaccgatccgattgcggacggcccggtgatccagcgggcgggcgagcgcgcgctcaaagcggggacgaccctggccagcgtgctcgagatcgcgcgcaagatccgggaaacgtcagaggtaccgctactgttgttcacgtatctcaatccggtgctgcggtatgggctcgaccggctgggagcagatgcggccgcggcgggaatcgacggctgcctgctgacggacgcgagcgtggaagaggcggagagctatgtggcggcaatgcataagcacgggctcgacacagttttcctggcggcaccgacgagcacggcgcggcgcatcgagctggtggcgcggtactcgacgggttttgtttatctggtatcgcggacgggtgtgacgggggagcgcgaatcgctctcggcgtcggtggcgccgttgattcaggcggtgcgcgcggcgactgatttgcctctggcagtgggcttcgggatttcgaagccagagcacgtggcggagctggggagccaggtggaagcggtggtggtgggcagcgcgttcgtgcggctgatcgagcagaacgcggagagcgccgcgctggaaatccaactggaaagtttcacgcgcgaattgaaacgcggttttggagccagggcatga

SEQ ID NO: 87732 - protein, 267 aa, Solibacter usitatus Ellin6076
MTRIGRLFDCLKRENRKALIAYLTAGDPTPDHTPGLVEALVRGGADLIELGVPFTDPIADGPVIQRAGERALKAGTTLASVLEIARKIRETSEVPLLLFTYLNPVLRYGLDRLGADAAAAGIDGCLLTDASVEEAESYVAAMHKHGLDTVFLAAPTSTARRIELVARYSTGFVYLVSRTGVTGERESLSASVAPLIQAVRAATDLPLAVGFGISKPEHVAELGSQVEAVVVGSAFVRLIEQNAESAALEIQLESFTRELKRGFGARA

SEQ ID NO: 87733 - DNA, 810 bp, Acidovorax sp. JS42
  CDS (1)..(810): transl_table=11
atgagccgcatcgctgacacttttgcagagctgcagtccaagggccgcaaggcgctcatcccctacgtcacagcaggctttcccttcgtcgacatcacaccggccctgatgcacggcatggtcgaggccggcgccgatgtgatcgaactgggcgtgcccttttccgacccgatggccgacggccccgtcatccagaaggcgggcgagaaggccctggcactgggcgtgggcctggcccaggtgctggagatggtgcgcagattccgcctgcgcaacagcaccacgcccgtggtgctgatgggctacgcgaatccggtggagcgctacgagcaacgccacggcaagggcgccttcgcccgcgacgcgggcgaagccggcgtggacggtgtgctgatcgtggactacccgcccgaggagtgcgagcagttcgccgccgacctgcgcggccacggcatcgacctgatcttcctgctggcgcctacctccacgccggaacgcatgcagcaggtggctcgcgtagccagcggctacgtctactacgtctcgctcaagggcgtgaccggctccggcgcgctggacacggccgccgtcgaggccatgctgccgcgcatccgcgagcatgtgaaggtccccgtcggcgtgggctttggcattcgcgatgccgccaccgcgcaggccatcggccgcgtggccgatgcggtggtcatcggcagccgcatcatccagctcatcgaagaccagccccatgagaaagtggtcggtatcaccgtggactttctgcgtggggtgcgcaaggcgctggacgcataa

SEQ ID NO: 87734 - protein, 269 aa, Acidovorax sp. JS42
MSRIADTFAELQSKGRKALIPYVTAGFPFVDITPALMHGMVEAGADVIELGVPFSDPMADGPVIQKAGEKALALGVGLAQVLEMVRRFRLRNSTTPVVLMGYANPVERYEQRHGKGAFARDAGEAGVDGVLIVDYPPEECEQFAADLRGHGIDLIFLLAPTSTPERMQQVARVASGYVYYVSLKGVTGSGALDTAAVEAMLPRIREHVKVPVGVGFGIRDAATAQAIGRVADAVVIGSRIIQLIEDQPHEKVVGITVDFLRGVRKALDA

SEQ ID NO: 87735 - DNA, 828 bp, Nostoc punctiforme PCC 73102
  CDS (1)..(828): transl_table=11
atgacctctatctccaattcctttcaaactttacgcgatcgccaacagtgtgctttaatcccctttattacagcaggcgatcctaacttagaaaccactgcccaagctttacgtatcttagatcgcaacggcgctgacttcatcgagttgggtattccctactctgatcctctcgcagatgggcctgttattcaagcagccgcaactcgcgctttgcaaaaaggcacgaaattagaacaagtattagagatgttgcaagctgtaactcctaccctgaaagcgccgataattctatttacttactacaatcccattttgcaccggggtattaagacatttttggcgcaaattgctgctgttggggtgcaagggttggtagtgccagacttgcccttagaagaagcagaagaattaatccaaactgctgcatcttttgggattgaggtaattttactagtagctcctaccagttctaaagataggattttagcgatcgctcgtcaatctcagggttttatctacctggtaagcgtcacaggcgttacaggtatccgcgctcaaatccaagaccgcgtaaaagatttaattaccgacttgcgaagcgtcaccgataaacccatcggcgttggttttggtatttccgggccagaacaagcgcatcaagtaagggaatggggagcagatgccgtgattgttggtagtgcctttgtcaaacggttagctgaaggcagcccaaccgaaagactacaagcagtagaaaagctttgccaagaactgaaagcagcaattaccccagtatccctgcaacaagttgtttccgcaaaataa

SEQ ID NO: 87736 - protein, 275 aa, Nostoc punctiforme PCC 73102
MTSISNSFQTLRDRQQCALIPFITAGDPNLETTAQALRILDRNGADFIELGIPYSDPLADGPVIQAAATRALQKGTKLEQVLEMLQAVTPTLKAPIILFTYYNPILHRGIKTFLAQIAAVGVQGLVVPDLPLEEAEELIQTAASFGIEVILLVAPTSSKDRILAIARQSQGFIYLVSVTGVTGIRAQIQDRVKDLITDLRSVTDKPIGVGFGISGPEQAHQVREWGADAVIVGSAFVKRLAEGSPTERLQAVEKLCQELKAAITPVSLQQVVSAK

SEQ ID NO: 87737 - DNA, 870 bp, Bifidobacterium longum DJO10A
  CDS (1)..(870): transl_table=11
atgaccaatgaagcaaccacgccgtccggccagccgctgggcatcagccacaagcccagcaagtcggtcgctatgttcaccaagttcaaggccgagaacaagcctgccttcatcggctacctgccctacggcttccccaacccggacgtctcgcttgacgccttcaagacgatggtcgagcacggcgtcgacgccgtggagatcggcctgccgtactccgacccggtcatggacggcccggtcatccaggctgccgcctccatcgccctgaacaacggcgagaccatcaagcgcgtgttcgaggccgtcgaaaccgtggccaacgccggcggcgtgccgctcatcatgagctactggaacctcgtgtaccactacggcgtcgagcgtttcgcccgcgacttcgagaacgccggcggcgccggcctcatcaccccggacctcatcccggacgaggcgggggagtggatcgaagcctccgaccgtcacggactcgaccgcatcttcctggtctccccggactcgtccaccgagcgcctcgaaaccgtggcccgcaacgcgcgcggcttcgtgtatgcggccgcccgcatgggcgtcaccggcgaacgcgccaccatcgacgcctcgcccgaactcctcgtggagcgcacccgtcaggccggtgccgagaacgtgtgcgtgggcatcggcgtgtccaccgccgaacagggcgccaaggtcggctcctacgcggacggcgtcatcgtcggctccgcgctcgtgcacaccctgctcgcggacgacaacaagaccgcacgcgacccgaaggaaggcttgaagctgctcgccgccaagagcgaggaactggccgaaggcatccacaacgcccggtga

SEQ ID NO: 87738 - protein, 289 aa, Bifidobacterium longum DJO10A
MTNEATTPSGQPLGISHKPSKSVAMFTKFKAENKPAFIGYLPYGFPNPDVSLDAFKTMVEHGVDAVEIGLPYSDPVMDGPVIQAAASIALNNGETIKRVFEAVETVANAGGVPLIMSYWNLVYHYGVERFARDFENAGGAGLITPDLIPDEAGEWIEASDRHGLDRIFLVSPDSSTERLETVARNARGFVYAAARMGVTGERATIDASPELLVERTRQAGAENVCVGIGVSTAEQGAKVGSYADGVIVGSALVHTLLADDNKTARDPKEGLKLLAAKSEELAEGIHNAR

SEQ ID NO: 87739 - DNA, 795 bp, Crocosphaera watsonii WH 8501
  CDS (1)..(795): transl_table=11
atgacatcggtttctgattgttttcaatccctacgcgatcgcggacaatgcgcccttattcccttcattaccgcaggtgatccggatcttgacaccacagccaaagcattacgggttctcgatgcttcaggtgccgatatcatcgagttaggggttccctattctgatcctttggccgatggtccggttatccaagccgcagccactcgggctttaggtcgaggggtgaagttagaagatgtcctcaaaattgttaaagaggtgcaaccagaaattaaagccccgatcatcttatttacctactataacccgattttttatcgaggggttgaaccctttctacaacaaattaaagctgctggtgtacaagggttagtggttcctgacttacccctagaagaagctgaaactttacttaaacctgctgctgccatggggatcgaagttacattattggttgcccctaccagtcccatagaacgtattcaagcgatcgctactcagtctcaaggctttatctatttagtcagtgtcaccggagtaactggcatgagaacccaagtaggcagcagagtggaagaattactgaaaaatcttcgtagcaccacaaataagcccattggggtcggatttggaatttctgaacctgaacacgctttacaggtcaaaaattgggggtctgatgcagtaattgtcggtagtgcttgcgttaaacgcctagcacaaggaaccccagaagaaggcttaaactcactggctacattttgccaaagtcttaaacaagcacttctatga

SEQ ID NO: 87740 - protein, 264 aa, Crocosphaera watsonii WH 8501
MTSVSDCFQSLRDRGQCALIPFITAGDPDLDTTAKALRVLDASGADIIELGVPYSDPLADGPVIQAAATRALGRGVKLEDVLKIVKEVQPEIKAPIILFTYYNPIFYRGVEPFLQQIKAAGVQGLVVPDLPLEEAETLLKPAAAMGIEVTLLVAPTSPIERIQAIATQSQGFIYLVSVTGVTGMRTQVGSRVEELLKNLRSTTNKPIGVGFGISEPEHALQVKNWGSDAVIVGSACVKRLAQGTPEEGLNSLATFCQSLKQALL

SEQ ID NO: 87741 - DNA, 807 bp, Xylella fastidiosa Ann-1
  CDS (1)..(807): transl_table=11
atgcatcgtatagacgaaacattccgccgtttaagggcgcaatcgcgcaaggcgttgatccctttcatcactgctggcgacccctctttggaggcggctgttccggtgatgcatgctttggtccgtgcgggtgcggatgtgattgagttgggtgtgccgttttcggacccgatggcggatggtccggtgattcagcacagttccgagcgcgcgttgcagcgtggtgtgggtttggcctatgtgttgcagacagtcgatgtgttccgtcagagcgatgcagtgacgccggtggttttgatgggctacctcaatcctttggaaatctatggcattgcgcgttttacacagcaggcactggcttctggagtggatggggtgctgcttgtggatcttcctccggaagaggcggacgagatccgcgcgatcttttcggcggctggtttggcactcatcgttttggcatctccgacgacctctgcctcccgtctggccacgttgagtgaggttgcccaggggtacttgtattacgtgagttttgctggcgtgactggcgctgatcggcttgatgcgcagtcagccggtgatcgcttgcgtggattacgtgcgcagactcaagtcccggtggtggttggctttggtatcagggatgcggccagtgctacggtggtggcggtggatgcggatggggtggtggttggcagtgccttggtgacggccttaagtgatgctccggatgtggacaccgcctgccggcgtgctgatgcgtttttggcaccgttgcgtcaggcgttggatgcggtgaagtag

SEQ ID NO: 87742 - protein, 268 aa, Xylella fastidiosa Ann-1
MHRIDETFRRLRAQSRKALIPFITAGDPSLEAAVPVMHALVRAGADVIELGVPFSDPMADGPVIQHSSERALQRGVGLAYVLQTVDVFRQSDAVTPVVLMGYLNPLEIYGIARFTQQALASGVDGVLLVDLPPEEADEIRAIFSAAGLALIVLASPTTSASRLATLSEVAQGYLYYVSFAGVTGADRLDAQSAGDRLRGLRAQTQVPVVVGFGIRDAASATVVAVDADGVVVGSALVTALSDAPDVDTACRRADAFLAPLRQALDAVK

SEQ ID NO: 87743 - DNA, 846 bp, Xanthobacter autotrophicus Py2
  CDS (1)..(846): transl_table=11
ttgcatccaggcaggcccatgaccacgcgcatctccacccgcttcgccgcgctgaaagaggaaggccgccccggcctcgtcaccttcgtcacggcgggcgatccggacggggagacctccctcgccatcctcaaggcgctgcccggcgccggcgcggacgtgatcgagctgggcattcccttcaccgatcccatggccgacggcccggccatccaggcggcgggcctgcgcgcgctcaagggcggccagaccctggccaagaccatcgagatggtccgggtcttccgcaccgaggacaccaccacgccggtggtgctcatgggctatttcaatcccatctacatctatggcgtggaccgcttcctcaccgacgccaaggtggcgggggtggacggcctcatcgtggtggacctgccgccggaggaggacgacgagctctgcctgccagccctgaacgccgggctcgacttcatccgcctcgccacccccaccaccgacgacaagcgcctgccgacggtgctcgagcacacggcgggcttcgtctattacgtctccatcaccggcatcaccggctcggcgacgccggacgcggatctggtggccgccgccgtcgcccgcatcaagtcccacaccgacctgccggtggccgtgggcttcggcgtgcggacgccggaacaggccaaggccatcgccgccggtgccgacgcggtggtggtgggctccgccctggtggaggtggtgcgccgcaccctcgatgccgagggcaacgccaccgccaacaccctgccgggcgtggaagcgctggtgagcgaactggccgaggcggtgcgcagcatcaagcgctga

SEQ ID NO: 87744 - protein, 281 aa, Xanthobacter autotrophicus Py2
MHPGRPMTTRISTRFAALKEEGRPGLVTFVTAGDPDGETSLAILKALPGAGADVIELGIPFTDPMADGPAIQAAGLRALKGGQTLAKTIEMVRVFRTEDTTTPVVLMGYFNPIYIYGVDRFLTDAKVAGVDGLIVVDLPPEEDDELCLPALNAGLDFIRLATPTTDDKRLPTVLEHTAGFVYYVSITGITGSATPDADLVAAAVARIKSHTDLPVAVGFGVRTPEQAKAIAAGADAVVVGSALVEVVRRTLDAEGNATANTLPGVEALVSELAEAVRSIKR

SEQ ID NO: 87745 - DNA, 816 bp, marine gamma proteobacterium HTCC2080
  CDS (1)..(816): transl_table=11
gtgagcagactcactccatgttttgaagcgcttcgtaactcggggcgcaaggctgttataccttacattgtcgcgggggatcctaccgtggctacaacggtgcccatgctgcacagccttgttgctgctggtgcaaacgtcctcgaattgggcgtgccgttctctgatcccatgtcagaggggccggttatacagcgcggtcatgagcgagcactcgacaatgatgtctctctctcgcaagtgttggacatggtggctgaattccggcaagaggatcagacgacccctgtggttattatgggttatgcaaatccggtggaaagaatgggttacgccgattttgccgcggcgtgtgcagcagccggggtggatgggttaatcactgttgacttgccacctgaggaggttgggcccctcaatgtagagttacaaaaggtagcgatcgacaatatctttttgatttcaccgacgacgccggccccgaggataagcacgatcacggctaacgcttcaggatttatttattatgtggccgtcaaaggcgtaacgggcgcggggcatttagatagctcagatgtttccatgcatctcgatctcattcgtgcagagacgacactccctgtttgtgtggggtttggcattaaagatgcggaatcagcgactgcggtgggagctatggcagatggtgtggttgtgggaagtgccctcatcgatactatggcgggtgctttagaggcgggtggatccctcaatgatggtgttaacaaggcagtagcgctcctagggtctatccgcactggcattgataatatgtaa

SEQ ID NO: 87746 - protein, 271 aa, marine gamma proteobacterium HTCC2080
MSRLTPCFEALRNSGRKAVIPYIVAGDPTVATTVPMLHSLVAAGANVLELGVPFSDPMSEGPVIQRGHERALDNDVSLSQVLDMVAEFRQEDQTTPVVIMGYANPVERMGYADFAAACAAAGVDGLITVDLPPEEVGPLNVELQKVAIDNIFLISPTTPAPRISTITANASGFIYYVAVKGVTGAGHLDSSDVSMHLDLIRAETTLPVCVGFGIKDAESATAVGAMADGVVVGSALIDTMAGALEAGGSLNDGVNKAVALLGSIRTGIDNM

SEQ ID NO: 87747 - DNA, 798 bp, Candidatus Desulfococcus oleovorans Hxd3
  CDS (1)..(798): transl_table=11
atgaaccgtattactgaaacatttgaccgcctggccgcaaaaaaagaaaaggcccttgtggggtttgtcaccgccggagaccctgccattgaaacctccgaggccattatcagggccatgtgcgaagccggtatcgatatcctggagctgggcgtacccttttcagaccccacggccgacgggccggtgatccagcgctcttcccagcgggcccttgccaatggaacgaacctgcaaaccgtttttgatatgacggccaccttgcgcaaaacattccagggtccgatcatcctgttttcctattacaaccccatcttccggtatggagcggaaaacttttaccgtgacgcgaaacaggccggggctgacggggtcctggtggtggacctgccgcccgaagagtcggcggaactcacttcctgctggaagggcgacgattttgccctgatccggctgctggccccaaccacgccggacgggcgcatcggggccatagcggcgtcggcttccgggtttctctaccttgtttccatgaccggggtcacgggcagcagcgggctggacaccacccacatcgccgacctgtgcgcaaaagtccaacgtcacaccgcgcttcccatctgtgtgggctttggcgtgagcaccgccgatgacgtggctaaaatcgcgcaacatgccgacggcgtggtcatcggcagcgcctttgaacggctgatcgaagagagcatcggcaaacccgatatcgcgggaatccttgccgagcgaacacgggaatacaaagcagcgacaaagatgtga

SEQ ID NO: 87748 - protein, 265 aa, Candidatus Desulfococcus oleovorans Hxd3
MNRITETFDRLAAKKEKALVGFVTAGDPAIETSEAIIRAMCEAGIDILELGVPFSDPTADGPVIQRSSQRALANGTNLQTVFDMTATLRKTFQGPIILFSYYNPIFRYGAENFYRDAKQAGADGVLVVDLPPEESAELTSCWKGDDFALIRLLAPTTPDGRIGAIAASASGFLYLVSMTGVTGSSGLDTTHIADLCAKVQRHTALPICVGFGVSTADDVAKIAQHADGVVIGSAFERLIEESIGKPDIAGILAERTREYKAATKM

SEQ ID NO: 87749 - DNA, 831 bp, Marinobacter sp. ELB17
  CDS (1)..(831): transl_table=11
atgagcgcaagtcgtattgatcgttgttttgaagccttgcgccagcaagaccgtgctgccctggttacgtttgtaaccgcaggctatccggactatcagcacagcgcggagattttaaaagggttgcctgaagccggtgccgatatcatcgaactgggaatgccgttcaccgaccctatggccgatggtgcgcccattcagcttgctagccagcgggctttggccggtggtcacaacaccatcaaaaccctgcagatggtgcgtgaatttcgcgagcataatcagcacacaccgattgtactgatgggctattacaacccaatttactgctacggcgtagagcgttttctggacgatgccgcagcatccggtgtagacggcatgatcgtggtggatttgccgccagagcatgacaacgaactgtgcgtgccggcccgcgaagccggtattcactttattcgcctggcaacgcccaccaccgatgccgcccggctgcccggtgtgctggtaaatacctccggctttttgtactacgtttccagcaccggtgttactggctctgcggcacctaccgctgaaaaagtggaaaaagaactggcgcggattcgagagcatacaaacttgccggtggccgtgggcttcggtattcgtaccgcaccccaagctgagcgcattgcgcgttttgcggatgccgtagtggtgggttcggctctggtggagtgcatagccaatgcagataccgaagcccagggccgcgatgatgttttgtcacttacgcgggaactttcggctgcggttagagaggcgcggacgacattgaacgtttcctga

SEQ ID NO: 87750 - protein, 276 aa, Marinobacter sp. ELB17
MSASRIDRCFEALRQQDRAALVTFVTAGYPDYQHSAEILKGLPEAGADIIELGMPFTDPMADGAPIQLASQRALAGGHNTIKTLQMVREFREHNQHTPIVLMGYYNPIYCYGVERFLDDAAASGVDGMIVVDLPPEHDNELCVPAREAGIHFIRLATPTTDAARLPGVLVNTSGFLYYVSSTGVTGSAAPTAEKVEKELARIREHTNLPVAVGFGIRTAPQAERIARFADAVVVGSALVECIANADTEAQGRDDVLSLTRELSAAVREARTTLNVS

SEQ ID NO: 87751 - DNA, 825 bp, Bacillus amyloliquefaciens
  CDS (1)..(825): transl_table=11
atgttttggaaaacggggtggggacacatgtttaatctgcgagattctgaaaaattatttatcccttttattacggctggcgatccgcttcctgacatttctgttgagctggcaatatcattgcagaatgcaggcgcctctgcccttgaaatcggcgttccttacacagatccgcttgcggacggacccgtcatacaacgggcttcaaaacgggctctggaaaacggaatgaatatcgtaaaagcaattgaacttggcggcaaaatgaaaaaaaacggcgttcatattccaattatcctctttacgtattataatcctgtgttacaattagaaaaagaatactttttcgctttactgcgggaaaacgacatagacggtctgcttgtacccgaccttccattagaggaaagcgcccttttgcaaatgacatgcaaaaaggagaacatcgcttatatctcactggttgcgccgacaagtgaagaccgtttgaaaataattactgaacaggcctgcggctttgtgtattgtgtatcctctttaggagtgacgggcgtacgcagcgaattcgatccgtctgtatactctttcatacgtaaggtgaaagaattcagctctgttccggtggcggtcggttttggcatttcaaaccgcaaacaggttgacgggatgaatgaaatatctgacggtgtcgttgtcggcagcgcgcttgtcaaaaaaattgaagagcttaaaacaaagcttgtgaatcccggaacaagagctgatgcgcttcttgaatttgaagaatacgcaaagacgttcggacgactgtacagtgtaaaatga

SEQ ID NO: 87752 - protein, 274 aa, Bacillus amyloliquefaciens
MFWKTGWGHMFNLRDSEKLFIPFITAGDPLPDISVELAISLQNAGASALEIGVPYTDPLADGPVIQRASKRALENGMNIVKAIELGGKMKKNGVHIPIILFTYYNPVLQLEKEYFFALLRENDIDGLLVPDLPLEESALLQMTCKKENIAYISLVAPTSEDRLKIITEQACGFVYCVSSLGVTGVRSEFDPSVYSFIRKVKEFSSVPVAVGFGISNRKQVDGMNEISDGVVVGSALVKKIEELKTKLVNPGTRADALLEFEEYAKTFGRLYSVK

SEQ ID NO: 87753 - DNA, 804 bp, Bacillus subtilis
  CDS (1)..(804): transl_table=11
atgtttaaattagatcttcaagcatcagaaaaattgtttatcccgtttattacagcgggagatccatcgcctgaggtttcggttaaactggcgaagtcactccaaaaagcaggtgccacggcactggagcttggtgttgcatactcagacccgcttgcagacggtccggtgatccagcgtgcttcaaagcgggcgcttgatcatggaatgaatatcgtaaaggcaatcgaattaggcggggaaatgaaaaaaaacggagtgaatattccgattatcctctttacgtattataatcctgtgttacaattgaacaaagaatactttttcgctttactgcggaaaaatcacattgacggtctgcttgttccggatctgccattagaagaaagcgccagccttcaagcggattgcaaaaaccatgaggtaacgtatatttctttagttgcgccgacaagcgaaagccgtttgaaaaccattattgaacaagccgagggcttcgtctactgtgtatcttctctaggtgtgaccggtgtccgcaatgagttcaattcatccgtgtacccgttcatccggacagtgaaggatctcagcactgttccggttgctgtcgggttcggtatatcaaaccgcgaacaggtcatgaagatgaatgaaatttgtgacggtgtcgtagtgggaagtgcgctcgtcagaaaaatagaagagctaaaggaccggctcatcagcactgaaacgagagatcaagcgctgcaggagtttgaagattacgcaagggcgtttggcggcttgtatagtttaaaatga

SEQ ID NO: 87754 - protein, 267 aa, Bacillus subtilis
MFKLDLQASEKLFIPFITAGDPSPEVSVKLAKSLQKAGATALELGVAYSDPLADGPVIQRASKRALDHGMNIVKAIELGGEMKKNGVNIPIILFTYYNPVLQLNKEYFFALLRKNHIDGLLVPDLPLEESASLQADCKNHEVTYISLVAPTSESRLKTIIEQAEGFVYCVSSLGVTGVRNEFNSSVYPFIRTVKDLSTVPVAVGFGISNREQVMKMNEICDGVVVGSALVRKIEELKDRLISTETRDQALQEFEDYARAFGGLYSLK

SEQ ID NO: 87755 - DNA, 2169 bp, Aspergillus oryzae
  CDS (1)..(2169)
atggaagccatcaagaagacatttgccaaggctaagcaggagaagcgcgccgccttggtagcgtacatcactgctggataccctaccgtcgaggagactgtagatatcctcctcggcttggaaaatggaggcgccgatatcattgaaatgggagtgcccttcactgaccccatcgccgacggaccgacaatccagaaggctaacaccaaagcattggagaacggcgtcacagtcacgactgtccttgagaaggtcagggaggcccgccgcagaggtcttaaagtaccgatccttttgatgggctactacaaccctatgatgcgttatggtgaggagcgtatgctcaaggactgcagggaggctggtgtcaatggtttcattatggtcgatttgccccccgaggaagctgtgcgtttcagagaacactgcactagcaatggcctttctttcgtccctctcattgcccccgcgacctcagagtcccgcatgaagctcctgtgcaagatcgccgattctttcatctacgtcgtttcgagaatgggtgtcaccggtgccaccggaaaactcagcgcaaaccttcccgagctcttgtctcgtgttcacaactggtctggcaatgtgcctgctgccctaggattcggtgtcagcactcgcgagcactttctgactgtgcaggatctagctgagggatgtgttattggtagtcagattatcactgtcttgggtcaagcccctgctggtcaggcggctaagcatgccgaggagtatctctccagtgttaccggtcgcaagctcgagagggatgcacagggtgcaattgtacgccaggtcaatgtgatcgatttcgtggagaagaaggagcaggcggccatctcacagcccacagccgtcgtcactgatgtcgatgctccttcggggccgggattggccgatcagctggaagctcttaatggtggaaacccttctgcacaaccacagcgtttcggtgagttcggtggacagtatgtccccgaatccctcatggactgcttggccgagttggagcggggattcgcagaggctttgaacgaccccaagttctgggaggaataccgttcttactacccatacatgggtcgacctagcagccttcaccttgccaaccgtcttacagagcacgttggaggcgcaaacatctggttgaagcgtgaggatctcaaccacactggaagtcacaagatcaacaacgcactaggccagattctccttgcccggagactcggcaagacaagaatcattgctgaaacaggcgctggtcagcacggtgttgctactgcgactgtctgcgctaagtttggcatggagtgtgttgtctacatgggtgcagaagatgttcgccgtcaagccttgaacgttttccgtatgaagctcctcggtgcctccgtggtggctgttgatgctggaagccgtaccctgcgtgatgccgtcaacgaggccctccgtgcctgggttgttgatctggacaccactcactacatcatcggctctgcaattggacctcacccctacccaaccattgtccgtaccttccagtccgtcattggtgacgagaccaagcagcaaatgatggagcaaatcggcaagcttcccgacgcagtcgtcgcctgtgtcggtggtggcagtaacgccgtcggcatgttctaccccttctccaaggacaccagcgtcaagctcctgggtgtcgaagccggaggtgacggtgtcgacaccgacagacactccgccactctttctggcggtagcaagggtgtgttgcacggtgtccgcacctacgttctgcaagacgagcacggccaaatctccgagacccactccatctccgccggtctcgactaccccggtgtcggcccggaactgagcaactggaaggacagcgaccgtgcccagttcgtcgccgccaccgacgcccaagccctcgccggtttccgcgccctcgcccaatacgagggtatcatccctgccctggaatcctctcacgccatccacggcgccatggaactcgccaagaccatgaagaagggcgagaacatcgtcctcaacctcagcggcagaggtgacaaagatgtccagagcgttgccgatgaacttccccgcctgggtcctcagattggctgggatctgcgtttctaa

SEQ ID NO: 87756 - protein, 722 aa, Aspergillus oryzae
MEAIKKTFAKAKQEKRAALVAYITAGYPTVEETVDILLGLENGGADIIEMGVPFTDPIADGPTIQKANTKALENGVTVTTVLEKVREARRRGLKVPILLMGYYNPMMRYGEERMLKDCREAGVNGFIMVDLPPEEAVRFREHCTSNGLSFVPLIAPATSESRMKLLCKIADSFIYVVSRMGVTGATGKLSANLPELLSRVHNWSGNVPAALGFGVSTREHFLTVQDLAEGCVIGSQIITVLGQAPAGQAAKHAEEYLSSVTGRKLERDAQGAIVRQVNVIDFVEKKEQAAISQPTAVVTDVDAPSGPGLADQLEALNGGNPSAQPQRFGEFGGQYVPESLMDCLAELERGFAEALNDPKFWEEYRSYYPYMGRPSSLHLANRLTEHVGGANIWLKREDLNHTGSHKINNALGQILLARRLGKTRIIAETGAGQHGVATATVCAKFGMECVVYMGAEDVRRQALNVFRMKLLGASVVAVDAGSRTLRDAVNEALRAWVVDLDTTHYIIGSAIGPHPYPTIVRTFQSVIGDETKQQMMEQIGKLPDAVVACVGGGSNAVGMFYPFSKDTSVKLLGVEAGGDGVDTDRHSATLSGGSKGVLHGVRTYVLQDEHGQISETHSISAGLDYPGVGPELSNWKDSDRAQFVAATDAQALAGFRALAQYEGIIPALESSHAIHGAMELAKTMKKGENIVLNLSGRGDKDVQSVADELPRLGPQIGWDLRF

SEQ ID NO: 87757 - DNA, 2136 bp, Aspergillus oryzae
  CDS (1)..(2136)
atggagcagattaagcaagtattttcatatgcgaagcagcagaaccgcgctgttttgggggcctatgttaccgcaggatatcccattgtcgaagagacagtagatattctccttggcctggcgaatggtggtgccgatatgatcgaactgggtgtcccattcaccgacccaattgcagatggtccaatcatccaggaagccaatgcgaaagctctaaccaatggcgtgacaatttcgtctgtgttgaatatagtgcgcgaagcaaggcatcgagggctccagattcccgttctgctaatgggttattataacccgatactgcgttacggtgaggaacgcatgctggaagactgcaaagaggcgggtgtcaacgggtttgtaatcgtggatcttcctcttgaggaagccattcgattcagaagactctgcgcgagcaatgggctttcttacgttcccctcattgctccctccacctccgattctcgcatgaaactcctgtgcagtatagccgattcgttcatctatgttgtatcaagaatgggcgtgactggtgcaactaagaaactaaacttgaaccttcctgaacttctaagccgggtccatacttggtctggagatgtaccatccgtgattggctttggtatcagtacgcgcgaacatttcttgtctgtacataacatcgccgaaggttgtgtgattggcagtcaaataatcaccacattacgcgaggcacctactggccaagcagctaagcatgtcgaacagtatctatcgagtatcaccgggcgaaatcatggaagagattcacaggagatgctgacccagccactttcgcctgttccgcagccaaaagccatcctcgccgaaaatgttactcccaacagcctgtcactgatcgatccactcgacacaattcactccgctgcacaatcgtcgcgctttggtgagttcggcggtcaatacgttcctgaagccctgatgggttgtctcgccgagctagagagaggcttcgaggaagtacgacaggatcctagtttttgggaagaataccgttcctactacccttatatcggtagacccagccctctctgttttgcaaaacggcttactgaacatgtcggcggtgcgaatatctggattaaacgagaagatctcaaccatactggaagccacaagatcaataatgccttgggtcagatccttctggctcgacggctgactaaaactcgcattattgctgaaactggtgctggtcaacatggagtcgcaactgcaactgtgtgtgcgaagtttggaatgaagtgcaccgtttatatgggtgctgaggatgtccgtcggcaagccttgaatgtgttccgtatgaagcttcttggtgccgaggtagtggctgttaccagtaaaacgggaagctgtactctacgtgatgccgttaatgaagctctacgggcatgggttactaacctcgaggatacacattatatccttggttctgttgttggaccacatcctttcccaacaattgtacgcacctttcaatctgtgattggcgaagagaccaaacaacaaatgaaagaatccgttggcaagcttcccaatgctgttgttgcatgcgttggaggtggcagcaatgcatctggcatgttctatccctttttacatgagtcaggcgtccagcttttaggcgtggaagctggtggagatggtctcgatacgtctcatcattcagcaacgctttctgcgggcagtaagggtgtgcttcatggagtctacacctatcttttgcaggatgaacatggtcaggtttctggaacgcactctatctctgctggtatggactatccagccgtgggaccagagttgagctcttggaaagacagcgggcgggctcggtttattgctgccacagacgcccaagctctagtcggcttccgggcattggcagagcatgaaggtattatcccggctttggagtcctcgcatgccgtatttggcgccatggaactagccaaaacgatgaagaaaggggaaacggacattgtcctgaatcttagtggcagaggcgacaaggatgttcaaagtgttgctgctgctctgccacggttggggcctgttatcggatgggacttgagattttga

SEQ ID NO: 87758 - protein, 711 aa, Aspergillus oryzae
MEQIKQVFSYAKQQNRAVLGAYVTAGYPIVEETVDILLGLANGGADMIELGVPFTDPIADGPIIQEANAKALTNGVTISSVLNIVREARHRGLQIPVLLMGYYNPILRYGEERMLEDCKEAGVNGFVIVDLPLEEAIRFRRLCASNGLSYVPLIAPSTSDSRMKLLCSIADSFIYVVSRMGVTGATKKLNLNLPELLSRVHTWSGDVPSVIGFGISTREHFLSVHNIAEGCVIGSQIITTLREAPTGQAAKHVEQYLSSITGRNHGRDSQEMLTQPLSPVPQPKAILAENVTPNSLSLIDPLDTIHSAAQSSRFGEFGGQYVPEALMGCLAELERGFEEVRQDPSFWEEYRSYYPYIGRPSPLCFAKRLTEHVGGANIWIKREDLNHTGSHKINNALGQILLARRLTKTRIIAETGAGQHGVATATVCAKFGMKCTVYMGAEDVRRQALNVFRMKLLGAEVVAVTSKTGSCTLRDAVNEALRAWVTNLEDTHYILGSVVGPHPFPTIVRTFQSVIGEETKQQMKESVGKLPNAVVACVGGGSNASGMFYPFLHESGVQLLGVEAGGDGLDTSHHSATLSAGSKGVLHGVYTYLLQDEHGQVSGTHSISAGMDYPAVGPELSSWKDSGRARFIAATDAQALVGFRALAEHEGIIPALESSHAVFGAMELAKTMKKGETDIVLNLSGRGDKDVQSVAAALPRLGPVIGWDLRF

SEQ ID NO: 87759 - DNA, 2079 bp, Aspergillus oryzae
  CDS (1)..(2079)
atggagcatctcaaacaaacatttgcccaatgtcaacaagaaggccgtccagcgctggtcacgtatgtgacggccggattccccacggcggaggaaaccccggacatcatgctgggcatgcaggccggaggagccgacattattgagctgggtctcccattcaccgaccctatcgcagatggtcctaccatccagaaatcgaatctgaaggccctcaaaaatggggtcaccattacctccatgttggagatggtgcgggaggcccgccggaaaggactcaagacccccgtcctcttcatgggctattacaacccccttttacgctatggggagtcccaaatcctggccgattgcaaggatgccggagtcaatggtttcattattgttgatttgccaccagaagacgcgattcgcttccgcaatggctgtaccaagatgggtctctcctacgtcccactgatcgctccttccactacagaagagcgcatgaaggctctctgcagtatggcggattctttcatttatcttgtgtcccgtatgggcgtcaccggtgctacggggaccctcaacacagagcttccggcgctcatccagcgcgtcaagagcctctccggcaatgtccccgtcgcagttggatttggaatcagcacgcgggagcattttctaagcgtgacctccatcgccgacggtgctgtcattggtagtcaagtgatcaacatcctggctgacgccccagccgggcaggccgctcaggcagttgaggactactgttcaaagatcacacaaaggaaagtctctgcagatgcatcgactacaatcagcgggacaaccgaagcaaaggcggtcgccctaaccgatgacgcagaggcagccgtggccgatggaccaggacggttcggtattttcggtggtcaatatgcccccgaggccctgacaacgtgtctcgctgaactcgaggccggtttccaggcagctctcgatgacccgaccttttgggaggaatatcggtcgtactatccttacatgggccgtccatcgagccttcaccaagcgacacgcctgactgagcacatcggtggtgcaaacatctggctaaaacgggaagacctgaaccacaccggatctcacaagattaataatgccttgggtcagatactcatcgctcgtcggttaggtaagacggagattatcgctgaaacgggcgccggtcaacatggtgtcgcgactgccaccgtatgtgctaaatttggcataaaatgtactatctacatgggtgcggaggatgtccgtcgacaggccttgaatgtattccggatccgcttgctaggcgccacggtgatccccgtcgaatcgggatcgcgtaccctccgtgatgccgtaaatgaagccttccgcgcgtggattgtccgtctggataccacccactatattatcgggtctgccattgggccccatcccttccctactatggtcaggactttccagagtgtgatcggtaatgaaaccaaggctcagatgcaagagctgggcaagagtccggatgccgttgttgcctgtgttggtggaggatctaattctgttggcatgttctaccccttttccaaggatctctctgtccagctggttggtgtagaagccgccggagatgggttagacacggaccgacactccgccacactgactggaggctctgtaggcgtgctgcatggcgttcgcacatatatcctacaggacgagcacggccagatctccgacactcattccatttccgccgggctggattaccccggagttggaccggaactggcccactggaaggaaagtaagcgggcaacattcctgtccgctactgatgcccaggcctttgagggcttccgcctcctgagccagttggaaggcattatccctgcgttggaaacttctcacgctgtgtggggtgctattcagacagccaaaaagctgggacctggcaaggacctcgtcttgtgtttgagtggtcgcggagataaggacgtgcagagcgtggctgatggattgcccacgattggaccccagattggatgggacttgcggttctaa

SEQ ID NO: 87760 - protein, 692 aa, Aspergillus oryzae
MEHLKQTFAQCQQEGRPALVTYVTAGFPTAEETPDIMLGMQAGGADIIELGLPFTDPIADGPTIQKSNLKALKNGVTITSMLEMVREARRKGLKTPVLFMGYYNPLLRYGESQILADCKDAGVNGFIIVDLPPEDAIRFRNGCTKMGLSYVPLIAPSTTEERMKALCSMADSFIYLVSRMGVTGATGTLNTELPALIQRVKSLSGNVPVAVGFGISTREHFLSVTSIADGAVIGSQVINILADAPAGQAAQAVEDYCSKITQRKVSADASTTISGTTEAKAVALTDDAEAAVADGPGRFGIFGGQYAPEALTTCLAELEAGFQAALDDPTFWEEYRSYYPYMGRPSSLHQATRLTEHIGGANIWLKREDLNHTGSHKINNALGQILIARRLGKTEIIAETGAGQHGVATATVCAKFGIKCTIYMGAEDVRRQALNVFRIRLLGATVIPVESGSRTLRDAVNEAFRAWIVRLDTTHYIIGSAIGPHPFPTMVRTFQSVIGNETKAQMQELGKSPDAVVACVGGGSNSVGMFYPFSKDLSVQLVGVEAAGDGLDTDRHSATLTGGSVGVLHGVRTYILQDEHGQISDTHSISAGLDYPGVGPELAHWKESKRATFLSATDAQAFEGFRLLSQLEGIIPALETSHAVWGAIQTAKKLGPGKDLVLCLSGRGDKDVQSVADGLPTIGPQIGWDLRF

SEQ ID NO: 87761 - DNA, 1298 bp, Triticum aestivum
  CDS (44)..(1000)
taaatctccaatacacaagaaggtttctgtctcagctagcgaaatggctttcgcgctcaatgcatcttgctacccttcgtctttctcgtcgctgctcccgtggcggatggcagcagcggtgatgataccaaggcggaggaatgttctgcctgtcattaaggcggttgcggtggctccgcccgccccggcgccggcgaagccagcagccgtgaggagccggcccgtgtcggtcaccatggccaagctcatggctaagggcaagacagcgctcatcccgtatatcaccgccggtgatcctgacctggccacaacggcggaggcgctgcgtctcctggatgcgtgtggcgccgacgtcattgagcttggcgtgccatgctccgacccctacgtggacggtccgatcatccaggcttcgagtgcgagggctctggcgggcggtgccacaatggacggcgtgctggcgatgctcaaggaggtgacgccggagctgtcgtgccctgtggtgctcttctcgtactacaggcctatcttgtgtcgagggttggccgaaatcaaagaagccggtgtacacggtcttatagtgcctgatctcccttatgtagccgcgcatgcattatggagtgaagccaagaagaacaacctcgagctggtgctgctcacaacaccagccataccagaagaaagaatgaaggaaatcacgaaagcttcggaaggtttcatttacctggtgaccgtcaatggagttacaggtccccgtgaaaacgtgaaccttcgggttgagtccctcattcaagagataaaaaaggttactgacaaacctgttgctgttggctttggcatatcaaaacctgaacacgtaaagcagattgcaagatggggtgcggatggggtgatcattggcagtgcgatggtgaggcagttgggtgaagcagcttcgcccagagaaggattgaaaaggctagaggcatatgccaggagcatgaagaatgcactaccatgatgaagtgtgtggatggacacagcactagtaataaattgatcggaagcccagtaataaagctactccgactagatcgtcaatatgttatcagcatgtggagttagaaatcggagtactaccgtgtttccagttcagcgagtagatcgtcattgtatcattagcctttggccggccggtgatggtcctgagtaactagttcaccggttacagcaagttggaataagccgtgtatatacaaaaatgtgcttgaatccatgactcggcaaataaaacaagaaaaaaaaaaaaaaaaaaaaaa

SEQ ID NO: 87762 - protein, 318 aa, Triticum aestivum
MAFALNASCYPSSFSSLLPWRMAAAVMIPRRRNVLPVIKAVAVAPPAPAPAKPAAVRSRPVSVTMAKLMAKGKTALIPYITAGDPDLATTAEALRLLDACGADVIELGVPCSDPYVDGPIIQASSARALAGGATMDGVLAMLKEVTPELSCPVVLFSYYRPILCRGLAEIKEAGVHGLIVPDLPYVAAHALWSEAKKNNLELVLLTTPAIPEERMKEITKASEGFIYLVTVNGVTGPRENVNLRVESLIQEIKKVTDKPVAVGFGISKPEHVKQIARWGADGVIIGSAMVRQLGEAASPREGLKRLEAYARSMKNALP

SEQ ID NO: 87763 - DNA, 1308 bp, Triticum aestivum
  CDS (47)..(1006)
aaacaataaatctctacacaggaaggtttctcagtcagctagcgaaatggctttcgcgctcaatgcgtcttgctacccttcgtctttccagtcgtcgctgctcccgaggcggatggcagcagcggtgatgataccgaggcggaggaatgttctgccggtcattagggcggtcgcggtggctccgcccgccctggcgccggctaagccagcagctgtgaggggccggaccgtgtcggacaccatggccaagctcatggctaagggaaagacagcgctcatcccgtatatcaccgccggtgatcctgacctggccacaacggcggaggcgctgcgtctcctggatgcctgtggcgccgacgtcattgagctcggcgtgccatgctccgacccctacgtggacggtccgatcatccaggcttcaagtgcgagggctctggcgggcggtgcgacaatggacggcgtgctggcgatgctcaaggaggtgacgccggagctgtcgtgcccggtggtgctcttctcgtattacaggcctatcttgtgtcgagggttggccgaaatcaaagaagccggtgtgcacggtcttatagtgcctgatctcccttatgtagccgcgcatgcattatggagtgaagccaagaagaacaacctcgagctggtgctgctcacaacaccagccataccagaagaaagaatgaaggaaatcacgaaagcttcagaaggtttcatttacctggtgagcgtcaatggagttacaggtccccgtgaaaacgtgaatctgcgggttgagtccctcattcaagagataaaaaaggttactgacaaacctgttgctgttggctttggcatatcaaaacctgaacacgtaaagcagattgcagggtggggtgcggatggggtgatcattggcagtgcgatggtgaggcagttaggtgaagcagcttcgcccaaagaaggattgaaaagactagaggcatatgccaggagcatgaagaatgcactaccatgatgaagtgtgtggatggacgcagcaccagtaaataaattgatcggaagcctagtaataaagctactccggctagatcgatcgtcatcatattattagcatgtggagttagaaatcggagtactatgtaccgtgattccagttcaacgagtagatcgtcattgtatcgttagcctttagccggtgatggtcctgagtaacaagtttattggaataagccgtgtatatacaaaaaaatgtgcttgaatccatggctcggcaaataaaacaagatgtgctcatgcttcaaaaaaaaaaaaaaaaaa

SEQ ID NO: 87764 - protein, 319 aa, Triticum aestivum
MAFALNASCYPSSFQSSLLPRRMAAAVMIPRRRNVLPVIRAVAVAPPALAPAKPAAVRGRTVSDTMAKLMAKGKTALIPYITAGDPDLATTAEALRLLDACGADVIELGVPCSDPYVDGPIIQASSARALAGGATMDGVLAMLKEVTPELSCPVVLFSYYRPILCRGLAEIKEAGVHGLIVPDLPYVAAHALWSEAKKNNLELVLLTTPAIPEERMKEITKASEGFIYLVSVNGVTGPRENVNLRVESLIQEIKKVTDKPVAVGFGISKPEHVKQIAGWGADGVIIGSAMVRQLGEAASPKEGLKRLEAYARSMKNALP

SEQ ID NO: 87765 - DNA, 1128 bp, Isatis tinctoria
  CDS (52)..(987)
aataatactctcttcctcaaacccattttgcagtctccatagcttcttacaatggcgattgctttcaaatccggcgtctgcttcctccaatccgcaaaaccccaaatcggaatccgccattcttcccctgattcttcgctttcattcaagagattgactcccatagctgccctctccacctcttctcctactctcggtctcgccgatactttcaaagagctcaaaaaacaaggcaaagtagcattcataccgtacatcacagctggtgatccagatctctctactactgcagaagcattgaaagttcttgccgcttctgggtctgacattattgaattgggtgttccttactctgaccctttagctgatggacctgttattcaggctgcggcgacaagggctttggagaatgggaccaaccttgataacatccttgacatgttagataaggttcttccacaagtatcttgtccagtttcgctgttcacgtattacaacccgattcttaaacgtgggttggggaagttcatgtccagcatcagagatgttggtgtacagggacttgtggaaccagatgttcctcttgaggaaaccgagatgctgagaaaagaagcccttaacaacaacattgaactggtcctactcactacaccaaccacaccaacagagcgaatgaagcgaattgttgatgcatcagagggatttatttaccttgtgagttcaatcggagtgactggtgcacgagcatctgtaagcggaaaggttcagtcgctcttgaaggatatcaaagaggcaacagacaagccagtggcggtcggttttggaatatcacagcctgagcatgtgaaacagatagctggttggggagctgatggagtgattgtaggcagtgcaatggtgaggcttttgggagatgccaagtcgccaacggaagggcttaaggagcttgagcgtctcacaaagtctctcaaatctgctcttctttgaaaaacaggaaatatttgcagaaatcattcttgattgtgttttttttactagtatggtgtgataatgatgttccaaacttttgagacatttcaagttacaaagttacctcaatatattgaactttagtgaaaaaaaaaaaaa

SEQ ID NO: 87766 - protein, 311 aa, Isatis tinctoria
MAIAFKSGVCFLQSAKPQIGIRHSSPDSSLSFKRLTPIAALSTSSPTLGLADTFKELKKQGKVAFIPYITAGDPDLSTTAEALKVLAASGSDIIELGVPYSDPLADGPVIQAAATRALENGTNLDNILDMLDKVLPQVSCPVSLFTYYNPILKRGLGKFMSSIRDVGVQGLVEPDVPLEETEMLRKEALNNNIELVLLTTPTTPTERMKRIVDASEGFIYLVSSIGVTGARASVSGKVQSLLKDIKEATDKPVAVGFGISQPEHVKQIAGWGADGVIVGSAMVRLLGDAKSPTEGLKELERLTKSLKSALL

SEQ ID NO: 87767 - DNA, 972 bp, Oryza sativa subsp
  CDS (1)..(972)
atggctttcacggtgaaggcgtcgtcgccgtcgtcgccagctacgacgcgcctcacgggtgcgttgcacggcggcgcggcgcgggtcgcggcgcggaagctcccggcggcggcggtggcggcgtcgctgacgctcgatcgggcgccggcgccggccggcgccgagcgcgggatgtcgtcgtcggtgtcgcggaccatgtcgaggctaagggagaaggggaaggcggcgttcatcccgtacatcaccgccggcgacccggacatggggacgacggcggaggcgctgcgggtgctcgacgcctgcggcgccgacgtcatcgagctcggcgtgcccttctccgacccctacaccgacggccccgtcatccaggcctccgccgcgcgggcgctcgccgccggcgccacgatggacggggtcatgtcgatgctcgcggaggtgacgccggagctttcctgcccggtggtgctcttctcttacttcggccccatcgtccggcgaggtccggccaacttcaccgccgcagccaaagaagccggcgtacaaggtcttatagtaccagatcttccttacgtagagacatccactttcaggagtgaagccatcaagaacaacctagagctggtgctgcttactacaccagctacaccggcagacaggatgaaggcaatcacagcggcttcaggaggatttgtttatctggttagtgtcaatggggttacaggatctatccaaaacgtaaatccgcgtgttgagcatctccttcaggagattaagcaggtcactgacaaagctgtgtgtgttggctttggcatatcaacccctgatcatgttagacagatagcagattggggtgcagatggagtgatcattggcagcgcaatggtgaggcagttgggtgaagcagcttctcccaaacaagggctcaaaaggctggagaagtatgctaggagcctcaaggatgcactaccatag

SEQ ID NO: 87768 - protein, 323 aa, Oryza sativa subsp
MAFTVKASSPSSPATTRLTGALHGGAARVAARKLPAAAVAASLTLDRAPAPAGAERGMSSSVSRTMSRLREKGKAAFIPYITAGDPDMGTTAEALRVLDACGADVIELGVPFSDPYTDGPVIQASAARALAAGATMDGVMSMLAEVTPELSCPVVLFSYFGPIVRRGPANFTAAAKEAGVQGLIVPDLPYVETSTFRSEAIKNNLELVLLTTPATPADRMKAITAASGGFVYLVSVNGVTGSIQNVNPRVEHLLQEIKQVTDKAVCVGFGISTPDHVRQIADWGADGVIIGSAMVRQLGEAASPKQGLKRLEKYARSLKDALP

SEQ ID NO: 87769 - DNA, 1258 bp, Arabidopsis thaliana; identical to SEQ ID NO: 87657
  CDS (220)..(1158)

SEQ ID NO: 87770 - protein, 312 aa, Arabidopsis thaliana
MAIAFKSGVFFLQSPKSQIGFRHSSPPDSSLSFKRFTPMASLSTSSPTLGLADTFTQLKKQGKVAFIPYITAGDPDLSTTAEALKVLDACGSDIIELGVPYSDPLADGPVIQAAATRSLERGTNLDSILEMLDKVVPQISCPISLFTYYNPILKRGLGKFMSSIRAVGVQGLVVPDVPLEETEMLRKEALNNDIELVLLTTPTTPTERMKRIVDASEGFIYLVSSIGVTGARSSVSGKVQSLLKDIKEATDKPVAVGFGISKPEHVKQIAGWGADGVIVGSAMVKLLGDAKSPTEGLKELEKLTKSLKSALL

SEQ ID NO: 87771 - DNA, 1447 bp, Zea mays
  CDS (196)..(1020)
gacactcgcaatcgcaaagtcgcaagcggatcgcaaactcgcaatcaaggctgctcccctccgtctccgtgttcgccactcggttcaccgcccgccgccgccgagacctcctcctcgccggctactcctgaccccacaaaggcagcgctcggaggtggccctctgtcgggtggagtggtggacacatccgcgcccatggccaacggcggcgctgcggccggcaagctcaccgtcgccgagaccttctccaacctcagggagcaaggcaagagtgcattcatcccgttcataactgctggtgatcctgacctggtaaccacatcgaaagcattgaagattctcaattcctgcggttcggatgttatagaggttggcgtaccatactcggatccactggctgatgggccagttattcaggcttctgcaacacgggcgcttaagaaaggcactacacttgattctgtcatagagatgctgaagggggttacacctgagctttcttgccccattgttcttttcacatactataatccaattctgaaacgtggtgtgggaaacttcatgtctactatcaaacaagctggcatacatggacttgtagtgcctgatcttcctttggaggagacgacgttgctgaggagcgaggccattatgcacaacatagagctggtgctgcttacaacgccaaccacgccgacagatcggatgaagggaattgcacaagcttcagaaggatttctctatcttgtgagcgctgtaggggttacaggtgcacgctcaaatgtaaacttacgtgtagaacaccttcttagggagatcaagaaggttacagacaaaccggtagctgttggtttcggtgtatcgactccagagcatgtgaaacagatcgtgggctggggagcggacggtgtgattgttggcagtgcgattgtgaagcagttgtgtgaggctgctactcctgaagagggtctggaaaggctcgaggagtacgccaggagtatgaaggctgctatgccgtgagctgatctcactccccgtcacaggcaaggtaattagaacatggttttagcaatattctgggcatggggttggcatccataactcatctagtgctgtacgggtcgttctccggtggtgagaacgaagtctggctttgcctataatagaaaagggttataaactgagttagtgcgacattttgatgaaaaagtgagcgattgcgagatatcagttcatgcttattggcagatcctttttttggctgaaagattgaaatgttagggatgaggttgccctggcctcttgagaggataggaataagagaggataagttcgttatgatttatatggcttttcgcttgaaccccaccagctggtgtccatggatgcgggcagagcagtgtctgattggctgcactgaaaatgacattaccttcagacaaaaaaa

SEQ ID NO: 87772 - protein, 274 aa, Zea mays
MANGGAAAGKLTVAETFSNLREQGKSAFIPFITAGDPDLVTTSKALKILNSCGSDVIEVGVPYSDPLADGPVIQASATRALKKGTTLDSVIEMLKGVTPELSCPIVLFTYYNPILKRGVGNFMSTIKQAGIHGLVVPDLPLEETTLLRSEAIMHNIELVLLTTPTTPTDRMKGIAQASEGFLYLVSAVGVTGARSNVNLRVEHLLREIKKVTDKPVAVGFGVSTPEHVKQIVGWGADGVIVGSAIVKQLCEAATPEEGLERLEEYARSMKAAMP

SEQ ID NO: 87773 - DNA, 1020 bp, Zea mays
  CDS (1)..(1020)
atggcctccgcgatcaaggctgcatcgacctcctcccggtggtcttcgtccccggcggcagtccactcgtcgccgttatcgaagcggctaccagctgcagtggccatgccggggcggcggaggtctgtggccactgtaagggcggtcgccgcggtagctccggctgccccggcggcgccggccaagctcaccgccggtgccggcggccgatgcctgccggtgtcgcagaccatgtccaggctcagggcgcagggcaagacggcgttcatcccgtacatcaccgccggcgacccggacctggcgacgacggcggaggcgctgcggctcctggacgcctgcggcgccgacgtcatcgagctcggcgttcccttctcggacccctacgccgacgggccggtcatccaggcgtcggcggcgcgggcactggcgagcggcacgacgccggacggcgtgctggcgatgctgaaggaggtgacgccggagctgtcctgccccgtggtgctcttctcctacttcaaccccatcgtgcggtggggcctggccgacttcgccgccgccgtcaaggaagccggcgtgcacggcctcatagttcccgacctcccgtatgggaactcgtgtgctctcactctcaggaccgaagccatcaagaacagcctcgagctggtgctgctcacaacaccatctacgccagcggacaggatggaggagataacacgagcttcacgaggattcgtctatctcgcgaccgtcaatggagttacaggtccacgcgcaaacgtgaacacacgtgtccagtctctcattcaggaggttaaacaggtcactgacatacccgtggctgtcgggtttggcatatcgaaacctgagcatgtaaagcagattgcagagtggggtgcagatggtgtgatcattggtagcgcaatggtgagacagttaggcgaagcagcctctcccaaggaaggattgaagaggctagagaaatacgccaggagcatgaagaacgcgctaccatgccagtga

SEQ ID NO: 87774 - protein, 339 aa, Zea mays
MASAIKAASTSSRWSSSPAAVHSSPLSKRLPAAVAMPGRRRSVATVRAVAAVAPAAPAAPAKLTAGAGGRCLPVSQTMSRLRAQGKTAFIPYITAGDPDLATTAEALRLLDACGADVIELGVPFSDPYADGPVIQASAARALASGTTPDGVLAMLKEVTPELSCPVVLFSYFNPIVRWGLADFAAAVKEAGVHGLIVPDLPYGNSCALTLRTEAIKNSLELVLLTTPSTPADRMEEITRASRGFVYLATVNGVTGPRANVNTRVQSLIQEVKQVTDIPVAVGFGISKPEHVKQIAEWGADGVIIGSAMVRQLGEAASPKEGLKRLEKYARSMKNALPCQ

SEQ ID NO: 87775 - DNA, 789 bp, Aquifex aeolicus
  CDS (1)..(789): transl_table=11
atgggaagaataagcgataagtttacagaattaaaggaaaaaagagaaaaagcccttgtttcttacctcatggtgggttatccagactacgaaacttctcttaaggccttcaaagaagttttaaaaaacggaacggacatactggaaataggatttcccttttcggatcctgtggcggacggccctacaattcaggtagcccatgaggttgccctcaaaaacgggatacgatttgaagacgttctggaactctccgaaacactgagaaaagaatttccggacattccctttctattgatgacttactacaaccctatattcaggatagggcttgaaaagttctgcaggctttcaagggaaaagggaatagacggttttattgttcccgatctaccgccagaagaagcggaagaactaaaagcggtgatgaagaagtacgtactctccttcgttcccttgggtgctcccacgagtacccgaaagcgtataaagctaatatgcgaagctgcggatgagatgacctactttgtttccgttactggaaccacaggggcaagggaaaaactcccatacgaaaggataaagaaaaaggtagaggagtacagggagttgtgcgataagcctgtggtggtgggctttggagtttctaaaaaagaacatgccagagaaataggttcctttgctgacggagtggtcgtgggaagtgctctcgtaaaattagcaggacaaaagaaaatagaggatttaggaaacttggtgaaggaactcaaggaaggattaagagaatga

SEQ ID NO: 87776 - protein, 262 aa, Aquifex aeolicus
MGRISDKFTELKEKREKALVSYLMVGYPDYETSLKAFKEVLKNGTDILEIGFPFSDPVADGPTIQVAHEVALKNGIRFEDVLELSETLRKEFPDIPFLLMTYYNPIFRIGLEKFCRLSREKGIDGFIVPDLPPEEAEELKAVMKKYVLSFVPLGAPTSTRKRIKLICEAADEMTYFVSVTGTTGAREKLPYERIKKKVEEYRELCDKPVVVGFGVSKKEHAREIGSFADGVVVGSALVKLAGQKKIEDLGNLVKELKEGLRE

SEQ ID NO: 87777 - DNA, 777 bp, Bacillus thuringiensis subsp
  CDS (1)..(777): transl_table=11
atgggagtagaaagaattaaagcagcatttgaaaatggtaagaaagcatttattccgtacgtaatgggcggagatggtggccttgaaatattaaaagaaagaattcgttttctagacgaagcgggagcaagcatcgttgaaattggtatcccgttttcagacccagtcgcagatggcccaacgattcaaagagcagggaaacgagcgctagatagcggtgtaacagtaaaaggcatttttcaagcattaatagaggtaagggaagaagtgcaaattccgtttgtactcatgacatatttaaatccagtacttgcattcgggaaagaacgatttatcgagaactgtatggaagcaggtgtagacggcatcatcgttccagacttaccgtatgaagaacaagacattattgctccgttacttcgagaggcaaacattgcgctcattccacttgttactgttacgagcccaattgagcgaatcaaaaaaattacgagtgaatcagaaggatttgtctacgccgttacagtagcgggcgtaacaggagtacgtcaaaattttaaagatgagattcatagttacttagaaaaagtgaaatcgcatacacatttaccggtagtggcagggttcggtatttcaacaaaggaacatgtggaagaaatggttacaatatgtgatggtgttgtcgttggaagtaaagtgattgagctattagaaaatgaaaaacgagaagaaatatgtgaattcatacaggcaacaaaacaaaaagaagaggcgtaa

SEQ ID NO: 87778 - protein, 258 aa, Bacillus thuringiensis subsp
MGVERIKAAFENGKKAFIPYVMGGDGGLEILKERIRFLDEAGASIVEIGIPFSDPVADGPTIQRAGKRALDSGVTVKGIFQALIEVREEVQIPFVLMTYLNPVLAFGKERFIENCMEAGVDGIIVPDLPYEEQDIIAPLLREANIALIPLVTVTSPIERIKKITSESEGFVYAVTVAGVTGVRQNFKDEIHSYLEKVKSHTHLPVVAGFGISTKEHVEEMVTICDGVVVGSKVIELLENEKREEICEFIQATKQKEEA

SEQ ID NO: 87779 - DNA, 804 bp, Bacillus licheniformis
  CDS (1)..(804): transl_table=11
atgttcaatctgaaaaaacagccgtccgataagctatttgttccgtttattacagcgggagacccgctgccagaaatctcgatcgagctggcaaaatctcttcaagaggcgggagcgtccgcccttgaactcggggttccgtattctgatccgctcgctgacggcccggtgattcagcgcgcatcaaaaagggcgcttgacaacgatatgaacatcgtaaaagcgatcaggcttggcggtgaaatgaaaaaaaacggcgtccatattccgattattctctttacgtattataatcctgtgttacaattagatacagatcactttttcgctttactgcgacaaaatcagctagacggactccttgtaccggaccttccttttgaggaaagcgtatatttgcagcagcagtgtaaaaaacacgggattacctatatttcgctggtcgcgccgacaagcgaatcgcgcattcaaaaaataacgcagcaggcggaaggttttgtgtattgcgtttcttcgctcggtgtcacaggtgtgcgcaatgaattcgaagattctgtttcttcatttatcaggtctgttaaaggaatgagctccgtcccggttgccgtcgggtttgggatttccagctccaaacaagtggagatgatgaatgaactggcggacggcgttgtcgtgggaagcgcccttgtcagaaagatcgaggagctgaaagacgaactcgtcgcccctgagacaagggaacaagccttaaaggcgtttgaggcatacgctaagacatttagcggatcgtacatggtaaaatga

SEQ ID NO: 87780 - protein, 267 aa, Bacillus licheniformis
MFNLKKQPSDKLFVPFITAGDPLPEISIELAKSLQEAGASALELGVPYSDPLADGPVIQRASKRALDNDMNIVKAIRLGGEMKKNGVHIPIILFTYYNPVLQLDTDHFFALLRQNQLDGLLVPDLPFEESVYLQQQCKKHGITYISLVAPTSESRIQKITQQAEGFVYCVSSLGVTGVRNEFEDSVSSFIRSVKGMSSVPVAVGFGISSSKQVEMMNELADGVVVGSALVRKIEELKDELVAPETREQALKAFEAYAKTFSGSYMVK

SEQ ID NO: 87781 - DNA, 810 bp, Bacillus clausii
  CDS (1)..(810): transl_table=11
atgaataagcggcttcgtgatgctgtaaaaaagggcaacttgtttattccgttcattaccgccggagacccggtgcgagaagcaaccatcgccctcgcactctcattacagagaagtggggcggatgtgctggagcttggcattccttattctgacccgttggcagatggaccggtcatacaaaacgcctccaaacgtgcactagcaggaggaatgacactggctaaggcgatggcgctcgtcccggaaatgagaaaagaggggcttacaattcctgttattgtctttacttacgccaaccctttgctacaatttgggtttgaacgtttttgtgagaccgcatgcgactacggaattgacggcctcctcgttcccgatttgccgtttgaagagagcgaaacattggctaatgagtgtgaaaaacaagggcttgcccttatatcacttgtggcgccaacatctcagcaacggatcaaagcgattgccagccgcgcccaagggttcctatactgtgtgtcctcgctaggcgtaactggcgcgagaaaaacacttcatccacaagtagaagcttttttaaagctggtaaaagaagcatcgcctgtcccgtttgtagttggatttggcatttccagctacgaacaagttgaggaaatggggcgccatgctgacggtgttgtgatcgggagtgcgattgttgagcaaattggcctcagatgcgaggcgttaaaacaggcggaatcacgagatgaagcagtcaaagaaattgagcaatatgtcaattctcttcttcatcccgctccgacctattaa

SEQ ID NO: 87782 - protein, 269 aa, Bacillus clausii
MNKRLRDAVKKGNLFIPFITAGDPVREATIALALSLQRSGADVLELGIPYSDPLADGPVIQNASKRALAGGMTLAKAMALVPEMRKEGLTIPVIVFTYANPLLQFGFERFCETACDYGIDGLLVPDLPFEESETLANECEKQGLALISLVAPTSQQRIKAIASRAQGFLYCVSSLGVTGARKTLHPQVEAFLKLVKEASPVPFVVGFGISSYEQVEEMGRHADGVVIGSAIVEQIGLRCEALKQAESRDEAVKEIEQYVNSLLHPAPTY

SEQ ID NO: 87783 - DNA, 804 bp, Bacillus subtilis
  CDS (1)..(804): transl_table=11
atgtttaaattggatcttcaaccatcagaaaaattgtttatcccgtttattacggcgggcgatccagttcctgaggtttcgattgaactggcgaagtcactccaaaaagcaggcgccacagcattggagcttggtgttgcatactctgacccgcttgcagacggtccggtgatccagcgggcttcaaagcgggcgcttgatcaaggaatgaatatcgtaaaggcaatcgaattaggcggagaaatgaaaaaaaacggagtgaatattccgattatcctctttacgtattataatcctgtgttacaattgaacaaagaatactttttcgctttactgcgggaaaatcatattgacggtctgcttgttccggatctgccattagaagaaagcaacagccttcaagaggaatgtaaaagccatgaggtgacgtatatttctttagttgcgccgacaagcgaaagccgtttgaaaaccattattgaacaagccgaggggttcgtctactgtgtatcttctctgggtgtgaccggtgtccgcaatgagttcaattcatccgtgtacccgttcattcgtactgtgaagaatctcagcactgttccggttgctgtagggttcggtatatcaaaccgtgaacaggtcataaagatgaatgaaattagtgacggtgtcgtagtgggaagtgcgctcgtcagaaaaatagaagaattaaaggaccggctcatcagcgctgaaacgagaaatcaggcgctgcaggagtttgaggattatgcaatggcgtttagcggcttgtacagtttaaaatga

SEQ ID NO: 87784 - protein, 267 aa, Bacillus subtilis
MFKLDLQPSEKLFIPFITAGDPVPEVSIELAKSLQKAGATALELGVAYSDPLADGPVIQRASKRALDQGMNIVKAIELGGEMKKNGVNIPIILFTYYNPVLQLNKEYFFALLRENHIDGLLVPDLPLEESNSLQEECKSHEVTYISLVAPTSESRLKTIIEQAEGFVYCVSSLGVTGVRNEFNSSVYPFIRTVKNLSTVPVAVGFGISNREQVIKMNEISDGVVVGSALVRKIEELKDRLISAETRNQALQEFEDYAMAFSGLYSLK

SEQ ID NO: 87785 - DNA, 837 bp, Bradyrhizobium japonicum
  CDS (1)..(837): transl_table=11
gtgaccacgcgtatcgacatccgttttgccgagcttgcgaagcagggccgctcggccttcgtgaccttcctgatggccggcgatccggatcccgccacctcgctcgagatcatcaaggcgctgccgaagtccggcgccgacgtgatcgagatcggcatgcccttcaccgatccgatggccgacggtccgtcgatccaggcggcgggcctgcgcgcgctcaaggccggcatgacgctgaagaagacgctcgagctcgtgcgcggcttccgcaaggacgacaatgcgacgccgatcgtgctgatgggctattacaacccgatctacatctacggcgtcgacaagttccttgtcgatgccaagagcgccggcgtcgacggcctcatcatcgtcgatctgccgccggaggaggacgacgagctctgcctgcccgcgatgaaggccggcctgaacttcattcgcctggcgacgccgacgaccgacgacaagcgcctgccggccgtgctcgccaacacctcgggcttcgtctactacgtctcgatcaccggcatcaccggtgctgcggcggcggattcctcggcggtgagcgaagcggttgcccgcatcaagcgtcacaccaagctgccggtctgcgtcggcttcggcatccgcacgccggagaccgcgcgcgccatcgcctcgcatgcgaatggcgcggtggtcggcaccgcgctggtcgatgcgctcaagaacagcctcgatgcagacggccgggccaccgccaaaaccgttaacgccgtcgccgaactgacggcatccctggcccaaggcgtcaaaggcgcacaacaggcggcggaatag

SEQ ID NO: 87786 - protein, 278 aa, Bradyrhizobium japonicum
MTTRIDIRFAELAKQGRSAFVTFLMAGDPDPATSLEIIKALPKSGADVIEIGMPFTDPMADGPSIQAAGLRALKAGMTLKKTLELVRGFRKDDNATPIVLMGYYNPIYIYGVDKFLVDAKSAGVDGLIIVDLPPEEDDELCLPAMKAGLNFIRLATPTTDDKRLPAVLANTSGFVYYVSITGITGAAAADSSAVSEAVARIKRHTKLPVCVGFGIRTPETARAIASHANGAVVGTALVDALKNSLDADGRATAKTVNAVAELTASLAQGVKGAQQAAE

SEQ ID NO: 87787 - DNA, 789 bp, Chromobacterium violaceum
  CDS (1)..(789): transl_table=11
atgtcacgcattgctaactgttttgccgagctcgcgggcaagaaagccctgatcccgttcatcaccgccggcgatccgcatcctggcttgaccgtgtcgctgatgcacggcctggtggacggcggcgccgacatcatcgagttgggcgtgccgttttccgacccgatggccgacggcccggtgatccagcgcgcgtccgagcgcgcgctcaagcacaaggtcggtctgcgccacgtgctggagatggtggccgagttccgtcgcgacaacgcaacgacgcccgtggtgctgatgggttacctgaatccgctgtgcgcgatgggctataccgaatttgccagccgcgccaaggcggccggcgtggatggcgtgctgacggtggattgtccgccggaagaggccgccgagcttgagtccgcgctggacgcccacggcctggacaccgtgttcctggtggcgccgaccacgccgccgtcgcgggtggcggaaatcgccaaattggcgcgcggatacgtctattatgtgtcgctgaaaggcgtgaccggcgccggacatctggacattgaggatgtagcgcgtaaaattgctgccctcagacaacaattgccgctgccgataggcgtgggtttcgggattcgcgacgccgcgactgccaaggccatcgcggccgccgccgacgcggtggtggtgggcagcaggctggtgcaggaaattgaggcggcgacacccgaaactgccagagagcagttaactcgtctggtggccgaattgaaggccgccatccgctag

SEQ ID NO: 87788 - protein, 262 aa, Chromobacterium violaceum
MSRIANCFAELAGKKALIPFITAGDPHPGLTVSLMHGLVDGGADIIELGVPFSDPMADGPVIQRASERALKHKVGLRHVLEMVAEFRRDNATTPVVLMGYLNPLCAMGYTEFASRAKAAGVDGVLTVDCPPEEAAELESALDAHGLDTVFLVAPTTPPSRVAEIAKLARGYVYYVSLKGVTGAGHLDIEDVARKIAALRQQLPLPIGVGFGIRDAATAKAIAAAADAVVVGSRLVQEIEAATPETAREQLTRLVAELKAAIR

SEQ ID NO: 87789 - DNA, 807 bp, Escherichia coli O157
  CDS (1)..(807): transl_table=11
atggaacgctacgaatctctgtttgcccagttgaaggagcgcaaagaaggcgcattcgttcctttcgtcacgctcggtgatccgggcattgagcagtcgctgaaaattatcgatacgctaattgaagccggtgctgacacgctggagttaggcatccccttctccgacccactggcagatggcccgacgattcaaaacgccacactgcgtgcctttgcggcaggtgtgaccccggcgcagtgctttgagatgctggcactcattcgccagaaacacccgaccattcccattggcctgctgatgtatgccaacctggtgtttaacaaaggcattgatgagttttatgcccagtgcgagaaagtcggcgtcgattcggtgctggttgccgatgtgccagttgaagagtccgcgcccttccgccaggccgcgttgcgtcataatgtcgcacctatcttcatctgcccgccaaatgccgatgacgacctgctgcgccagatagcctcttacggtcgtggttacacatatttgctgtcacgagcgggcgtgaccggcgcagaaaaccgcgccgcgttacccctcaatcatctggttgcgaagctgaaagagtacaacgcggcacctccattgcagggatttggtatttccgccccggatcaggtaaaagcagcgattgatgcaggagctgcgggcgcgatttctggttctgcgattgttaaaatcatcgagcaacatattaatgagccaaagaaaatgctggcggcactgaaagcttttgtacaaccgatgaaagcggcgacgcgcagttaa

SEQ ID NO: 87790 - protein, 268 aa, Escherichia coli O157
MERYESLFAQLKERKEGAFVPFVTLGDPGIEQSLKIIDTLIEAGADTLELGIPFSDPLADGPTIQNATLRAFAAGVTPAQCFEMLALIRQKHPTIPIGLLMYANLVFNKGIDEFYAQCEKVGVDSVLVADVPVEESAPFRQAALRHNVAPIFICPPNADDDLLRQIASYGRGYTYLLSRAGVTGAENRAALPLNHLVAKLKEYNAAPPLQGFGISAPDQVKAAIDAGAAGAISGSAIVKIIEQHINEPKKMLAALKAFVQPMKAATRS

SEQ ID NO: 87791 - DNA, 807 bp, Escherichia coli
  CDS (1)..(807): transl_table=11
atggaacgctacgaatctctgtttgcccagttgaaggagcgcaaagaaggcgcattcgttcctttcgtcacgctcggtgatccgggcattgagcagtcattgaaaattatcgatacgctaattgaagccggtgctgacgcgctggagttaggtatccccttctccgacccactggcggatggcccgacgattcaaaacgccactctgcgcgcctttgcggcaggtgtgactccggcacaatgttttgaaatgctggcactgattcgccagaaacacccgaccattcccattggcctgttgatgtatgccaatctggtgtttaacaaaggcattgatgagttttatgcccagtgcgaaaaagtcggcgtcgattcggtgctggttgccgatgtgccagttgaagagtccgcgcccttccgccaggccgcgttgcgtcataatgtcgcacctatcttcatctgcccgccaaatgccgatgacgacctgctgcgccagatagcctcttacggtcgtggttacacctatttgctgtcacgagcaggcgtgaccggcgcagaaaaccgcgccgcgttacccctcaatcatctggttgcgaagctgaaagagtacaacgctgcacctccattgcagggatttggtatttccgccccggatcaggtaaaagcagcgattgatgcaggagctgcgggcgcgatttctggttcggccattgttaaaatcatcgagcaacatattaatgagccagagaaaatgctggcggcactgaaagtttttgtacaaccgatgaaagcggcgacgcgcagttaa

SEQ ID NO: 87792 - protein, 268 aa, Escherichia coli
MERYESLFAQLKERKEGAFVPFVTLGDPGIEQSLKIIDTLIEAGADALELGIPFSDPLADGPTIQNATLRAFAAGVTPAQCFEMLALIRQKHPTIPIGLLMYANLVFNKGIDEFYAQCEKVGVDSVLVADVPVEESAPFRQAALRHNVAPIFICPPNADDDLLRQIASYGRGYTYLLSRAGVTGAENRAALPLNHLVAKLKEYNAAPPLQGFGISAPDQVKAAIDAGAAGAISGSAIVKIIEQHINEPEKMLAALKVFVQPMKAATRS

SEQ ID NO: 87793 - DNA, 795 bp, Geobacter sulfurreducens
  CDS (1)..(795): transl_table=11
atgagcagaattgccggcacatttgccgaattgaagcacaacagccgcaaggccctcgttaccttcatcaccgccggtgacccggacctggccgccacggaagcgctgattccgcttctggctgaaagcggcgccgacatcgtggaacttggcgttcccttttcggatccaatggccgacggccccaccatccagctttcttccgagcgggcccttgctgcggggacgaccctgccgaagatcctcgacatggtgcgccgggtccgtacccgctgccaggtgcccatcgtgctcatgggctactacaatccgattctgatccacggccttgagcgctttgcggcggatgcctcggccgcgggggtcgacggcgtgctcctggttgaccttcccccggaggaggcggccgagttcaaggcatgtgccgaccgccacgggctcgatgttatcttccttctcacccccacctccgacgaagggcgcatccggaaagtggcgcggcaggcccgcgggttcgtctactatgtgtcggtgaccggcgtgaccggcgcgcggagcggcgtggaggcgtccgtttcctccaacgtggccgccattcgcgaggcgatcaccgtgccggtcgtggtcggcttcggcatctcgacgcctgaccaggctgcccaggtggccgcctcggccgacggcgtggtcgtggggagcgccattgtaaaattgttcgagcgtttcacggccgccgagctcgggcgtgaggtcgcaaccttcgtttccgcgctgcgcgaagcgatcggaaattga

SEQ ID NO: 87794 - protein, 264 aa, Geobacter sulfurreducens
MSRIAGTFAELKHNSRKALVTFITAGDPDLAATEALIPLLAESGADIVELGVPFSDPMADGPTIQLSSERALAAGTTLPKILDMVRRVRTRCQVPIVLMGYYNPILIHGLERFAADASAAGVDGVLLVDLPPEEAAEFKACADRHGLDVIFLLTPTSDEGRIRKVARQARGFVYYVSVTGVTGARSGVEASVSSNVAAIREAITVPVVVGFGISTPDQAAQVAASADGVVVGSAIVKLFERFTAAELGREVATFVSALREAIGN

SEQ ID NO: 87795 - DNA, 831 bp, Gloeobacter violaceus
  CDS (1)..(831): transl_table=11
atgtccagtctcgcttcccccggccgcatcgcccgcgtttttgccgccttgcacgcgcggcgggaagtcgcctttatcccgtttatcaccgcgggagacccggatctggagaccaccgccgaggcgctgctcaccctcgaccgcaacggtgccgatctgctggaattgggcctgccttactccgatccgctcgccgacggaccgaccatccaggcggcggccacccgcgccctcgcccggggcaccacccccggcgccgtgttggatctggtggcccgcctcacccccgagttgcgcgcaccgctgattgtcttcacctacttcaacttgatcctggcggtgggaatcgaagcatttgtcgagcggctcgccgccagtggcgccagcggcctgctggtgccggatctgcccgtcgaagaaggcgatgcgctccagacggccgcgaacgtccaggggctcgacgtcatctggctggtggcaccgaccagcccccccgagcggctcagacggatcgccgagcgcaccaccggctttgtctatctggtgagcaccaccggggtgaccggcgcgcgcacccaggtcgcctcctcggtgcgcacgtccctcgcccagttgcgcgccctcaccacccgtccggtggccgtgggttttggcatctccactcctgagcaagcccacgaagtggcttccctgggcgccgacggcgtcattgtcggttccgcctgcgtgcaactgctggccaccgctgccccggaagagcgcctcgggcagctcgctgagttctgtcgccaattgaaaaaggccagtcaaactcttcctgtaaaaagttaa

SEQ ID NO: 87796 - protein, 276 aa, Gloeobacter violaceus
MSSLASPGRIARVFAALHARREVAFIPFITAGDPDLETTAEALLTLDRNGADLLELGLPYSDPLADGPTIQAAATRALARGTTPGAVLDLVARLTPELRAPLIVFTYFNLILAVGIEAFVERLAASGASGLLVPDLPVEEGDALQTAANVQGLDVIWLVAPTSPPERLRRIAERTTGFVYLVSTTGVTGARTQVASSVRTSLAQLRALTTRPVAVGFGISTPEQAHEVASLGADGVIVGSACVQLLATAAPEERLGQLAEFCRQLKKASQTLPVKS

SEQ ID NO: 87797 - DNA, 869 bp, Klebsiella aerogenes
  CDS (60)..(869): transl_table=11
cgcggcgacaaagacattttcaccgtacatgacatcctgaaagcgcgaggggaaatctgatggaacgctatgagacgctgtttgcccaactgaaaaatcgccaggaaggcgccttcgtcccctttgtcacccttggcgatccgggaccggagcagtcgctgaaaattatcgatgcgctgatcgaaggcggcgccgatgcccttgaactggggatccctttctccgacccgctggcggacggcccgaccatccagggcgcggccctgcgcgccttcgccgcgggagtgaccccggcgcagtgctttgagatgctggcggcgatccgccagaagcatccgaccatcccaatcggcctgctgatgtatgccaacctcgtcttcagcccgggcatcgatgcgttctatgcccagtgcgcccgcgtcggcgtcgactcggtgctggtggccgacgtgccggtggaagagtccgccccgttccgccaggcggcgatgcgccataacatcgcgccgattttcatctgcccgcccaatgcggatgacgatttactgcgccagattgcctcttatggccgcggctacacctatctgctgtcgcgcgccggagtgacgggtgcggaaaatcgcgccgcgctgccgctgcaccacctggtggagaagctggcggaatatcacgccgcgccgccgctgcagggctttggtatctccgcgccggagcaggtgagcgccgccattgacgccggagccgccggggctatctccggttccgccatcgtcaaaatcatcgaacgccacctcgatgagccgcagaccatgctggacgagctgaaagccttcgtccagagcctgaaggcagcgaccaaaaccgcctga

SEQ ID NO: 87798 - protein, 269 aa, Klebsiella aerogenes
MERYETLFAQLKNRQEGAFVPFVTLGDPGPEQSLKIIDALIEGGADALELGIPFSDPLADGPTIQGAALRAFAAGVTPAQCFEMLAAIRQKHPTIPIGLLMYANLVFSPGIDAFYAQCARVGVDSVLVADVPVEESAPFRQAAMRHNIAPIFICPPNADDDLLRQIASYGRGYTYLLSRAGVTGAENRAALPLHHLVEKLAEYHAAPPLQGFGISAPEQVSAAIDAGAAGAISGSAIVKIIERHLDEPQTMLDELKAFVQSLKAATKTA

SEQ ID NO: 87799 - DNA, 1044 bp, Zea mays
  CDS (1)..(1044)
atggctttcgcgcccaaaacgtcctcctcctcctcgctctcctcggcgttgcaggcagctcagtcgccgccgctgctcctgaggcggatgtcgtcgaccgcaacaccgagacggaggtacgacgcggccgtcgtcgtcactaccaccaccactgctagagctgctgcggctgctgtcacggttcccgccgccccgccgcaggcgccggcgccggcgccggtgccgccaaagcaagcggcggcacccgccgagaggaggagccgtccggtgtcggacaccatggcggcgctcatggccaagggcaagacggcgttcatcccgtacataaccgccggcgaccccgacctagcgacgacggccgaggcgctgcggctgctggacggctgtggcgccgacgtcatcgagctgggcgtgccctgctcggacccctacatcgacgggcccatcatccaggcgtcggtggcgcgggctctggccagcggcaccaccatggacgccgtgctggagatgctgagggaggtgacgccggagctgtcgtgccccgtggtgctcctctcctactacaagcccatcatgtctcgcagcttggccgagatgaaagaggcgggggtccacggtcttatagtgcctgatctcccgtacgtggccgcgcactcgctgtggagtgaagccaagaacaacaacctggagctggtgctgctgacaacaccagccataccagaagacaggatgaaggagatcaccaaggcttcagaaggcttcgtctacctggtgagcgtgaacggagtgacaggtcctcgcgcaaacgtgaacccacgagtggagtcactcatccaggaggttaagaaggtgactaacaagcccgttgctgttggcttcggcatatccaagcccgagcacgtgaagcagattgcgcagtggggcgctgacggggtgatcatcggcagcgccatggtgaggcagctgggcgaagcggcttctcccaagcaaggcctgaggaggctggaggagtatgccaggggcatgaagaacgcgctgccatga

SEQ ID NO: 87800 - protein, 347 aa, Zea mays
MAFAPKTSSSSSLSSALQAAQSPPLLLRRMSSTATPRRRYDAAVVVTTTTTARAAAAAVTVPAAPPQAPAPAPVPPKQAAAPAERRSRPVSDTMAALMAKGKTAFIPYITAGDPDLATTAEALRLLDGCGADVIELGVPCSDPYIDGPIIQASVARALASGTTMDAVLEMLREVTPELSCPVVLLSYYKPIMSRSLAEMKEAGVHGLIVPDLPYVAAHSLWSEAKNNNLELVLLTTPAIPEDRMKEITKASEGFVYLVSVNGVTGPRANVNPRVESLIQEVKKVTNKPVAVGFGISKPEHVKQIAQWGADGVIIGSAMVRQLGEAASPKQGLRRLEEYARGMKNALP

SEQ ID NO: 87801 - DNA, 816 bp, Methanosarcina mazei
  CDS (1)..(816): transl_table=11
atgaaaactgaacttaaggcggttcttaaaagaccaaaaatttccgaaaaattcgatgaactcagggagaaaaaagaaggagctcttataggttatgtgatggcaggtgatcccacttttgaggcaagctcagaggttgtaaaagccctggcaaaagggggagcagatataatcgaactcgggttcccgttctcagaccctgtagccgacggacctactatccaggtagcaggacagagagcacttgcagaaggcatggatattgaacgctacttcgcgtttgccagagcccttgaggttgatgtccctcttgtgtgcatgacttactataaccctgttttcaggtatggagtagagaaatttgtagaaaatgccgcagaggcaggaattagcggacttataatacccgatatcccggtagaggaagcagctgacctgaaaacaggctgcgatgcccatggacttgaccttatatttctggtcgcacccaccacaacagaagcaagaatccgaaaaatcctgcagagggggtcaggtttcatctaccttgtatcaaggctcggagttacgggagcaagagacgatgttgcaggttcaacaaaagaactgctgtccagagtaaataccgacattccaaaagcagttggcttcgggatttctacgggggagcaggctgccgaggttagaaaagccggagcggatggtgtaattgtaggctcggcatttgtgaggataattgaggaaggaacagacgtaaacgaaagactggaaacccttgcaagggaactcaaatccggtatgcttgaagcgaactga

SEQ ID NO: 87802 - protein, 271 aa, Methanosarcina mazei
MKTELKAVLKRPKISEKFDELREKKEGALIGYVMAGDPTFEASSEVVKALAKGGADIIELGFPFSDPVADGPTIQVAGQRALAEGMDIERYFAFARALEVDVPLVCMTYYNPVFRYGVEKFVENAAEAGISGLIIPDIPVEEAADLKTGCDAHGLDLIFLVAPTTTEARIRKILQRGSGFIYLVSRLGVTGARDDVAGSTKELLSRVNTDIPKAVGFGISTGEQAAEVRKAGADGVIVGSAFVRIIEEGTDVNERLETLARELKSGMLEAN

SEQ ID NO: 87803 - DNA, 786 bp, Neisseria meningitidis serogroup B
  CDS (1)..(786): transl_table=11
atgagcagaatccggcaggcttttgccgctttggatggcggaaaggcattgattgcctatattacggtgggcgaccccgatattcggacaactttggcattgatgcacggcatggttgcaaacggtgcggatattttggagttgggtgtgccgttttccgatccgatggcggatgggccggttattcagcgtgcggcggagcgggcgttggcaaacgggatttcgctgcgcgatgtcttggatgtcgtcagaaaattccgtgaaaccgacacgcaaacgccggttgttttgatgggatatttgaaccctgtacataagatgggttatcgggagtttgctcaggaagccgcaaaggcgggtgtggacggcgtgttgacggtggattcccctgtcgaaaccatcgatccgctctatcgcgagctgaaggataacggggtcgactgtattttcctgattgcgccgacgacgacggaagaccgtattaaaaccattgccgagctggcaggcggatttgtctattatgtttcgctcaagggcgtaacgggcgcggcaagtttggatacggatgaggtttcgcgtaaaatagagtatttgcatcagtatatcgatattcccatcggtgtcggtttcggcatcagcaatgcggaaagtgcacgcaaaatcggccgggttgccgacgcagttattgtcggcagccggattgtgaaagaaatcgaaaacaatacaggcaacgaggctgccgccgtcggtgctttggtaaaagagttgaaggatgccgtgcgctga

SEQ ID NO: 87804 - protein, 261 aa, Neisseria meningitidis serogroup B
MSRIRQAFAALDGGKALIAYITVGDPDIRTTLALMHGMVANGADILELGVPFSDPMADGPVIQRAAERALANGISLRDVLDVVRKFRETDTQTPVVLMGYLNPVHKMGYREFAQEAAKAGVDGVLTVDSPVETIDPLYRELKDNGVDCIFLIAPTTTEDRIKTIAELAGGFVYYVSLKGVTGAASLDTDEVSRKIEYLHQYIDIPIGVGFGISNAESARKIGRVADAVIVGSRIVKEIENNTGNEAAAVGALVKELKDAVR

SEQ ID NO: 87805 - DNA, 801 bp, Nocardia farcinica
  CDS (1)..(801): transl_table=11
gtgagccagcagtcccgcctcgccaacaccttcgccaccgcgcgcgccgagcaccgggccgcgctgatcggctacctgcccgcgggctaccccgacctggccggctccatcgcgacgtgccgggcgatggtcgaatccggttgcgacatcgtggaagtcggcgtcgcctactccgatccggtgatggacggcccgaccatccaggccgcggccgagcaggcgctgcgcggcggcgtgcgggtgcgcgacgtgttctccgtcgtcgaggcgatcaccgccgcgggcgggcaggccgtggtgatgagctactggaatccggtgttgcgctacggcgtggagcggttcgcccgcgatctggccgcggcgggcggggcgggcatcatcacgcccaacctgatccccgaggaggccgacgactggttcatcgcctcggccacccacaatctcgatcgcatcttcctggtcgcgccgtcgtccaccgaggaacggctggtcaagactctcgaagccagccgcggcttcatctacgcggcctcgacgatgggtgtcaccggcgcgcgcgacgcggtctcctcggccgcgcccgcgctgtgcgcgcgcatccgggcgcattccgacatcccgatcggcgtcggcctcggcgtgcgcaacggtgcgcaggcagccgagatcgcctcctacgccgacggcgtgatcgtcggttccgcgctggtcagcgccgcgggcgagggactggacgcggtgcgcgcgctcacctcggagctcgccgagggcgtgcgttcggcgaccgtcgcctcctga

SEQ ID NO: 87806 - protein, 266 aa, Nocardia farcinica
MSQQSRLANTFATARAEHRAALIGYLPAGYPDLAGSIATCRAMVESGCDIVEVGVAYSDPVMDGPTIQAAAEQALRGGVRVRDVFSVVEAITAAGGQAVVMSYWNPVLRYGVERFARDLAAAGGAGIITPNLIPEEADDWFIASATHNLDRIFLVAPSSTEERLVKTLEASRGFIYAASTMGVTGARDAVSSAAPALCARIRAHSDIPIGVGLGVRNGAQAAEIASYADGVIVGSALVSAAGEGLDAVRALTSELAEGVRSATVAS

SEQ ID NO: 87807 - DNA, 810 bp, Pseudomonas putida
  CDS (1)..(810): transl_table=11
atgagccgtcttgaacaacgcttcgccgagctgaaggccgaaggccgctcggcactggtcaccttcgtcacagctggcgacccgggctacgacgcctcgttgcagatcctcaagggcctgccggctgctggcgccgacgtgatcgagctgggcatgccgttcaccgacccgatggccgatggcgtggccatccagctggccaccctgcgcgcccttgaagctggccagaccttggtcaagaccctgcagatggttcgcgaattccgtgtggataaccagaccacgccgatcgtgctgatgggctactacaaccctatccaccgctttggcgtggacacgttcgtgactcaagccaaggaagcgggcgtcgatggcctgatcatcgtcgaccttccgccagagcacgacgccgaactggctaccccggcccaggccgcaggcatcgacttcatccgcctgaccaccccgaccaccgacgacgcgcgcctgccgcgcgtgctggagcgcagctccgggttcgtctactacgtgtcggtggctggtgtgaccggtgccggttcggcgaccaccgagcatgtgaccgaagccattgcccgcctgcgccggcataccgatctgccgatcagcgttggcttcggcattcgcacgccggaacaggctgcgaacattgcccgcttggcggatggtgtggtggtgggctcggcactggtcgacaagatcgcccaggccaaaagcgccgatcaggcggtgaccgatgtattgagcctgtgctcggcattggctgaaggggtgcgtggcgcacgccgctaa

SEQ ID NO: 87808 - protein, 269 aa, Pseudomonas putida
MSRLEQRFAELKAEGRSALVTFVTAGDPGYDASLQILKGLPAAGADVIELGMPFTDPMADGVAIQLATLRALEAGQTLVKTLQMVREFRVDNQTTPIVLMGYYNPIHRFGVDTFVTQAKEAGVDGLIIVDLPPEHDAELATPAQAAGIDFIRLTTPTTDDARLPRVLERSSGFVYYVSVAGVTGAGSATTEHVTEAIARLRRHTDLPISVGFGIRTPEQAANIARLADGVVVGSALVDKIAQAKSADQAVTDVLSLCSALAEGVRGARR

SEQ ID NO: 87809 - DNA, 810 bp, Pseudomonas putida
  CDS (1)..(810): transl_table=11
atgagccgtcttgaacaacgcttcgccgaactgaaggccgaaggccgttcggcactggtcaccttcgtcaccgcaggcgacccgggctacgacgcttcgctgcagatcctcaagggcctgccggccgctggcgccgacgtgatcgaactgggcatgccgttcaccgacccgatggccgacggcgtggccatccagctggccaccctgcgcgccctggaggctggccagacgctggccaagaccctgcagatggttcgcgaattccgtgtggataaccacaccacgccgatcgtgctgatgggctactacaacccgatccaccgctttggcgtggaaaagttcgtggctgaagccaagcaagccggcgtcgatggcctgatcatcgtcgacctgccgcccgagcacgacgccgaactggcgaccccggcccaggctgcgggtatcgacttcatccgcctgaccaccccgaccaccgacgatgcgcgcctgccgcgcgtactggagcgcagctccgggttcgtctactacgtgtcggtggccggtgtaaccggtgccggctcggcgaccaccgagcacgtgaccgaggccattgcccgcctgcgtcggcataccgatctgccgatcagcgttggtttcggcattcgcaccccggagcaggccgcgaacatcgcccgcttggcggatggtgtggtggtggggtcggcgctggtcgacaagattgcccaggccactagtgcggaccaggcagtgaatgatgtgttgagcttgtgctcggcactggctgaaggcgtgcgcggggctcgtcgctaa

SEQ ID NO: 87810 - protein, 269 aa, Pseudomonas putida
MSRLEQRFAELKAEGRSALVTFVTAGDPGYDASLQILKGLPAAGADVIELGMPFTDPMADGVAIQLATLRALEAGQTLAKTLQMVREFRVDNHTTPIVLMGYYNPIHRFGVEKFVAEAKQAGVDGLIIVDLPPEHDAELATPAQAAGIDFIRLTTPTTDDARLPRVLERSSGFVYYVSVAGVTGAGSATTEHVTEAIARLRRHTDLPISVGFGIRTPEQAANIARLADGVVVGSALVDKIAQATSADQAVNDVLSLCSALAEGVRGARR

SEQ ID NO: 87811 - DNA, 840 bp, Rhizobium meliloti
  CDS (1)..(840): transl_table=11
atgaccgcacgcatggagcaacggttcgccgacgtggcggccgaggggcgcccggtcctcgtgacctatttcatgggcggcgacccggatttcgacacgtcgctggcgatcatgaaggcgctgcggcaggcgggtgccgacatcatcgaactcggcgtgcccttttccgacccgatggccgatggaccggcgatccagctcgccggccagcgcgcgctgaaggcggggcagtctctcgccaagacgctggagctcgcccggctcttccgggcggaggaccagcgcacccccatcgtgctgatgggctattacaacccgatctatatctatggcgtcgagcggttcctggcggacgcactcgaggccggcgtcgacggcctgatcgtcgtcgatctgcccccggaaatggacgacgaactctgcattccggcacttgagaagggcatcagcttcatccgcctggcaacgcccacgacggacgatcgccgcctgcccaaggttctcgaaaacacgtcgggtttcgtgtattacgtctcgatgaccgggatcaccggctcggcgctgcccgatccgtcgctgatcgccggagcggtcgcgcgcatcaaggcgcatacgcccttgcctgtctgcgtcggcttcggggtgaagaccgccgaccatgcgcgcgccatcggcgcatccgcagacggcgtcgtcgtcggcacggcgatcgtcaatcagatcgcgtcgagcttgaccgaagaaggccgggcaacggaagcgacggtcccgggtgtcgaagcgctcgtcagggggcttgcggccggcgtacgggcggcacggcttgctgcagccgaataa

SEQ ID NO: 87812 - protein, 279 aa, Rhizobium meliloti
MTARMEQRFADVAAEGRPVLVTYFMGGDPDFDTSLAIMKALRQAGADIIELGVPFSDPMADGPAIQLAGQRALKAGQSLAKTLELARLFRAEDQRTPIVLMGYYNPIYIYGVERFLADALEAGVDGLIVVDLPPEMDDELCIPALEKGISFIRLATPTTDDRRLPKVLENTSGFVYYVSMTGITGSALPDPSLIAGAVARIKAHTPLPVCVGFGVKTADHARAIGASADGVVVGTAIVNQIASSLTEEGRATEATVPGVEALVRGLAAGVRAARLAAAE

SEQ ID NO: 87813 - DNA, 837 bp, Rhodopirellula baltica
  CDS (1)..(837): transl_table=11
atgacgcctctgcaaagcctgtttgaatcccttcgtggtcaaaaccgcaaagccttgatgccgttcctgacgactggcgacccaaacatcgatacgacggaagcggtgatcgcggcagcacgccaagccggggcagatttatgcgaagtcggtgtcccctacagcgacccgattgcggatggcccggtcatccaagcgtcttaccaacgagcactcgacgcaggattcaaacttcaacacgtttgggatctgggtcaacgtctgaccgaaaatcccaaagtcaaagcgatgccgcgtgtcacgatggtcagctactcgatcatctaccgaattggcatggccaagtacgtcgaccaggcaatgcaagccgggtactgcggcgcgatcgtgcctgatttgttggtcgaagaagcagaggatctgagcaaaatctgccgtgagaagggatttgatctgatccaactggttacaccgaccacaacccgagaccgccaatgccgcatcgcggaattgtccagcggatttctgtactacgtttccgtgaccgggatcaccggtgagcgaaccgccttgccgaccaacttggtggacaacgtcggatggctgcgtgagcaaactgaattgcccatctgcatcggttttggaatcagcggtccggaaacggccgcacaactcgcacctgtttctgatggcctgatcgtcggctcagccatcgtccggcgtgtcgccgacgcggtcgaaaaggcgaagagctccggagctgatccggtcaagacggccgcagaagaggccggtgatttctgccattcattgcgacaggcaatcgacgcggcataa

SEQ ID NO: 87814 - protein, 278 aa, Rhodopirellula baltica
MTPLQSLFESLRGQNRKALMPFLTTGDPNIDTTEAVIAAARQAGADLCEVGVPYSDPIADGPVIQASYQRALDAGFKLQHVWDLGQRLTENPKVKAMPRVTMVSYSIIYRIGMAKYVDQAMQAGYCGAIVPDLLVEEAEDLSKICREKGFDLIQLVTPTTTRDRQCRIAELSSGFLYYVSVTGITGERTALPTNLVDNVGWLREQTELPICIGFGISGPETAAQLAPVSDGLIVGSAIVRRVADAVEKAKSSGADPVKTAAEEAGDFCHSLRQAIDAA

SEQ ID NO: 87815 - DNA, 807 bp, Salmonella typhimurium
  CDS (1)..(807): transl_table=11
atggaacgctacgaaaatttatttgcccaactcaacgatcgccgggaaggcgcttttgtccccttcgtgaccctgggcgaccctggcattgaacagtcactgaaaattattgacacactgattgatgccggcgccgacgctctggaactgggggttcccttctccgatccgctggccgatggccctaccatccagaatgcgaacttacgcgccttcgccgctggcgtcacgccggctcagtgttttgaaatgctggcgctgattcgtgaaaaacacccgaccattccgattggcctgctaatgtacgcgaatctggtgttcaataacggcatagatgcgttctatgcccgttgtgaacaggttggcgtagattccgtgctggtcgcagatgtcccggttgaagaatcggcccccttccgccaggcagcgttacggcataatatcgcgccgatcttcatctgcccgccaaatgcggatgacgatcttctgcgccaggtcgcatcttacggccgcggttacacctacctgctttcgcgttcgggtgtcaccggcgcggaaaaccgtggcgcattgccgttgcatcatctcattgagaagcttaaagagtaccatgccgcgcctgcgttacagggcttcggtatctcctcgccggaacaggtgtctgcggccgtgcgtgccggggcggctggcgctatctccggctcagccattgtcaagattatcgagaaaaacctcgcgtctcccaaacagatgttggcggagctcaggtcctttgtctcagccatgaaagccgccagccgcgcataa

SEQ ID NO: 87816 - protein, 268 aa, Salmonella typhimurium
MERYENLFAQLNDRREGAFVPFVTLGDPGIEQSLKIIDTLIDAGADALELGVPFSDPLADGPTIQNANLRAFAAGVTPAQCFEMLALIREKHPTIPIGLLMYANLVFNNGIDAFYARCEQVGVDSVLVADVPVEESAPFRQAALRHNIAPIFICPPNADDDLLRQVASYGRGYTYLLSRSGVTGAENRGALPLHHLIEKLKEYHAAPALQGFGISSPEQVSAAVRAGAAGAISGSAIVKIIEKNLASPKQMLAELRSFVSAMKAASRA

SEQ ID NO: 87817 - DNA, 834 bp, Streptomyces avermitilis
  CDS (1)..(834): transl_table=11
gtgagcggcgccgcattttcccgtcagaggggccaactgctgagcgacaccctcgccgccgcgaaggcggaggggcggtccgccctcatcgcctatctgccggccgggttcccgaccgtcgacgggggcatcgccgccatcaaggccgtcttcgacggcggcgccgatgtcgtcgaggtcggactcccgcacagcgaccccgtcctcgacggccccgtcatccagaccgccgacgacatcgccctgcggggcggcgtcaggatcgccgacgtcatgcggacggtccgggaggcgcacgaggcgacgggcaagccggtcctcgtgatgacgtactggaaccccatcgaccgctacggcgtcgagcggttcaccgccgagctcgcggaagcgggcggagcgggctgcatcctgcccgacctcccggtgcaggagtcggcgctgtggcgggagcacgccgagaagcacggcctcgcgacggtcttcgtggtcgcgcccagcagcaaggacgcccggctcgccgagatcaccgcggcgggctccggcttcgtgtacgcggcctcgctgatgggcgtcaccggtacccgcgcgtccgtgggcgagcaggcgcaggacctggtgcggcgcaccagggccaccaccgacctgcccgtctgcgtcggcctcggcgtctccaacgccacgcaggccgcggaggtcgccggcttcgccgacggcgtgatcgtcgggtcggcgttcgtgaagctgatgctggacgccgaggacgaggcggcgggtcttgaggccgtacgggcgctggccggcgaactggccaagggcgtgcgcggcggcgactga

SEQ ID NO: 87818 - protein, 277 aa, Streptomyces avermitilis
MSGAAFSRQRGQLLSDTLAAAKAEGRSALIAYLPAGFPTVDGGIAAIKAVFDGGADVVEVGLPHSDPVLDGPVIQTADDIALRGGVRIADVMRTVREAHEATGKPVLVMTYWNPIDRYGVERFTAELAEAGGAGCILPDLPVQESALWREHAEKHGLATVFVVAPSSKDARLAEITAAGSGFVYAASLMGVTGTRASVGEQAQDLVRRTRATTDLPVCVGLGVSNATQAAEVAGFADGVIVGSAFVKLMLDAEDEAAGLEAVRALAGELAKGVRGGD

SEQ ID NO: 87819 - DNA, 816 bp, Streptomyces coelicolor
  CDS (1)..(816): transl_table=11
gtgagcgggaacgtacagctgctgaacgacaccctcgccgcggcgaagtccgagggccgcgccgccctgatcgcctacctcccggccgggttcccgaccgtgacgggcggcatcgaggcggtcaaggccgcgctcgacggcggcgccgacgtcgtcgaggtgggcctgccgcacagcgacccggtgctcgacggcccggtgatccagaccgccgacgacatcgcgctgcgcggcggcgtgcggatcgccgacgtgatgcgcacggtccgcgaggcacacgaggccaccggcaagccgatcctcgtcatgacgtactggaaccccatcgaccgctacggcgtggagcgcttcaccgccgagctggccgaggccggcggcgccgggtgcatcctgcccgacctgcccgtccaggagtcggcgctgtggcgggagcacgcggacaagcacgggctcgccacggtcttcgtggtcgcgcccagcagcagggacgcgcgcctcgccgagatcaccgcggtcggcagcggcttcgtctacgccgcctccctcatgggcgtcaccggcacccgcgcgtcggtcggcgcgcaggccgaggacctggtgcgccgcacccgcgccaccaccgacaccccggtctgcgtcggcctcggagtctccaacgccgcccaggccgccgaggtggccggcttcgccgacggcgtgatcgtcggctcggccttcgtcaagcggatgctggacgcgcccgacgacgcggccggcctggagggcgtccgcgcgctcgccgccgacctggcgaagggcgtgcgcggacaggcctga

SEQ ID NO: 87820 - protein, 271 aa, Streptomyces coelicolor
MSGNVQLLNDTLAAAKSEGRAALIAYLPAGFPTVTGGIEAVKAALDGGADVVEVGLPHSDPVLDGPVIQTADDIALRGGVRIADVMRTVREAHEATGKPILVMTYWNPIDRYGVERFTAELAEAGGAGCILPDLPVQESALWREHADKHGLATVFVVAPSSRDARLAEITAVGSGFVYAASLMGVTGTRASVGAQAEDLVRRTRATTDTPVCVGLGVSNAAQAAEVAGFADGVIVGSAFVKRMLDAPDDAAGLEGVRALAADLAKGVRGQA

SEQ ID NO: 87821 - DNA, 840 bp, Symbiobacterium thermophilum
  CDS (1)..(840): transl_table=11
atgagccgcatcgccgaacggttcgccctgctgcgcagtcggggggagaaggggctcatcgcctacctggccgccggcgacccctccctggccaccacccgcaggctggtgcacgccctcgcggaggcgggggtggacatggtcgagctgggcctgccgttttccgacccgctggccgacggtccggtgatccaggcggccagccagcgggccctggcggccggcgccaacaccgataatgtgctggaactggtcgcggcattgcgcgccgacgggttgcagataccgctgctgatcatgacatactacaacctggtgttgcggccgggggttgagaacttctgtcaccgtgcggccgcagccggggtcgacggcctgatcctgcccgacgtgccggtggaggagagcgacgagatccgcgccgcggccggggcggtagggctcgacctcatccagttcgtcgcccccacctcgccgccggagcggatccggcgggcggccgagctggcgcgggggttcatctacgccgtgtcgtccaccggcgtgaccggcgtgcgggaccggctgccgccgcagctcaccgccatggtggaggcggtgaaggcggtcaccgacaccccggtggcggtgggcttcggcatctcccggcccgagcaggtgcgccaggtcacggccgtggctgacgccgccatcgtcggatcggccttcgtgcgccactgcggcgaggggctgccggagcatgaactggtggagcgggtgcggatcctggcggaggagctgaaggcgggcacccggcctggtacgggatgggacagccggtttgtgaaaaacgaggcttga

SEQ ID NO: 87822 - protein, 279 aa, Symbiobacterium thermophilum
MSRIAERFALLRSRGEKGLIAYLAAGDPSLATTRRLVHALAEAGVDMVELGLPFSDPLADGPVIQAASQRALAAGANTDNVLELVAALRADGLQIPLLIMTYYNLVLRPGVENFCHRAAAAGVDGLILPDVPVEESDEIRAAAGAVGLDLIQFVAPTSPPERIRRAAELARGFIYAVSSTGVTGVRDRLPPQLTAMVEAVKAVTDTPVAVGFGISRPEQVRQVTAVADAAIVGSAFVRHCGEGLPEHELVERVRILAEELKAGTRPGTGWDSRFVKNEA

SEQ ID NO: 87823 - DNA, 807 bp, Vibrio metschnikovii
  CDS (1)..(807): transl_table=11
atggatcgttatcaacatttattccaacgtttggctgcgcacaatcaaggcgcttttgttccgtttgttaccattggtgaccctaacccacagcaatcgctgcgcattatgcaaaccttggtcgaagcaggagcggatgcattagagctcggcataccattttcagatccattggcagatggcccaacgattcaaggggcgatatcggcattagactcgggcaccaaaccgatcaggtgctttgaagctgatcaggcaccaattcgagcccaggatatcccgatttacctattaatgtatgcgaacctcgtttacgctcgtggtattgacaatttctatcaacgttgtcaacaggccggtgttgattcagtcctgatcgctgatgtccccactaatgaaagtgctgaatttggtcccgcagcgaaaaaatacgccattcatccgatttttattgcccctcccaccgccagtgatgaaaccttacagtccgttgcagagctaggtagcggctatacctaccttttatctcgctctggggtaacgggcgcggaaaccaaagccaatatgccggtccacgcgttattagagcgccttaaccaattttcagcgcctccacgtcgacttggttttggtatttccgagccagagcaagtgaaacaggccattgagtctggcgctgctggggcaatttctggttcagcggtagtcaaaattattgagcatcatcttgccaaacccgaggccatgctggctgagctgaaaacctttgtttcagcaatgaaaagcgccactaaacacgataagtaa

SEQ ID NO: 87824 - protein, 268 aa, Vibrio metschnikovii
MDRYQHLFQRLAAHNQGAFVPFVTIGDPNPQQSLRIMQTLVEAGADALELGIPFSDPLADGPTIQGAISALDSGTKPIRCFEADQAPIRAQDIPIYLLMYANLVYARGIDNFYQRCQQAGVDSVLIADVPTNESAEFGPAAKKYAIHPIFIAPPTASDETLQSVAELGSGYTYLLSRSGVTGAETKANMPVHALLERLNQFSAPPRRLGFGISEPEQVKQAIESGAAGAISGSAVVKIIEHHLAKPEAMLAELKTFVSAMKSATKHDK

SEQ ID NO: 87825 - DNA, 825 bp, Zymomonas mobilis
  CDS (1)..(825): transl_table=11
atgagccggattgccaatacttttgccaaaacaaaaaaagaaaatcgggctgctttgattgcctttctgacggcaggtgatccctctattgaagcgacccctgccctgttggatagtctggttgaaaatggcgtcgatattatcgaattagggatgcctttttctgatccgatggcagatggccccgctattcagaaagccaatcttcgggctttggcggctaaaactggctataatgacatctttagaatagccacggaatttagaaaacggcatccagaaacgccgcttatccttatgggatatgccaatccgatgacgtttaaaggcagcgacagcttcgccgcctctgcaaaagaagccggtgttgacggcattatctgtgtcgatattccgccagaagaagacgcaacccttggtgtcgcagtgcgcgaaaaaggcatggatatgatccggctcgccaccccgaccagcgatgaagcgcgtttaaaaatcatcctcgatggggcttccggtttcctctattatgtttctgtcgcgggcgttacgggtctgcaacaggcaactgaagccagcattgatgccgcgcttgatcggattaaagctgtaacagatttgccggttgctgtcggtttcggtattcgttcaccagaacaggccgcagcgattgccaaaaaggctgatgcggttgtggtgggttcggcctttgtgtcttgcatcgaaaaggctgtgaccaatcgccaagatcccaatgcagccttagagaaattggctaaagaattaagcacggccatttccgatgcccgtaaggaggccgccctatga

SEQ ID NO: 87826 - protein, 274 aa, Zymomonas mobilis
MSRIANTFAKTKKENRAALIAFLTAGDPSIEATPALLDSLVENGVDIIELGMPFSDPMADGPAIQKANLRALAAKTGYNDIFRIATEFRKRHPETPLILMGYANPMTFKGSDSFAASAKEAGVDGIICVDIPPEEDATLGVAVREKGMDMIRLATPTSDEARLKIILDGASGFLYYVSVAGVTGLQQATEASIDAALDRIKAVTDLPVAVGFGIRSPEQAAAIAKKADAVVVGSAFVSCIEKAVTNRQDPNAALEKLAKELSTAISDARKEAAL

SEQ ID NO: 87827 - DNA, 2094 bp, Schizosaccharomyces pombe
  CDS (1)..(2094)
atgacagagcagattaaaaaaacgtttctcaaagcaaaagaagaaaacaaaaatgttttagtgacatttgtcacttgcggttttcctaatgttgatgaaactatcaaaattatgcaaggtttgcaaaatggaggagcaggaataattgagcttggtattcctttttctgatgccgtcgctgatggtcctacaatttgcaagggaaacgaaattgctttgaagaataatattactttagaaaaagtatttgaaactgtaaagctcgctcgtgatgcaggtgtaactatccctataattttgatgggttactacaatcctattttcagttatggagatgccaaaactattcaaaaggcaaaggaggttggcgctaatggtttcatcatcgttgaccttcctccagaggaggctgtcggctttagagaagaatgtaaaaagcaaggtgttagtttcgttcctcttgttgctccttctactacggacaggcgtatggagctcttggcctctgtggctgactcctttatttacgttgtttctcgtatgggtagtacaggatcatctgctaccggagtaatcaatactgctttgcctcagctctgtcagcgtgttcgtaaatttgctggagatacccctctagcagttggttttggtgttaacaccagtgaacatttccaccaagttggcagcgtgtcagatggtgttgtagttggaagcaaaattatcgatttgattttgaaggcagagcctggcactgctgctaccgtggttgaggaatattgtaaatatcttactaaagaagacccatccgcacctgtacctaaacagtttcaatccggtggttctgttgctactgccccccctgctgctgtggtcgaacctatcaacgaaatgtatcttcctcaaaaatatggcatgtttggtggtatgtatgttccagaagcattaacccagtgcttagttgaacttgaaagtgtattttataaggctttgcatgatgaaaagttttgggaagaatttcgttcttattatgagtatatgggtcgtccaagtgccctcgattatgctaagcgtttaactgagtattgtggtggtgcccatatttggttgaagcgtgaagacttgaatcatggtggttcacacaaaattaacaactgtattgggcaaattcttcttgccaaacgtttaggaaaaaaccgtatcattgctgaaactggtgctggtcagcatggagttgctactgctatctgtgccgctaaatttggtatgaaatgtactatctacatgggtgcagaagattgtcgtcgtcaagcactcaacgtttttcgcatccgtcttttgggagctgaagtcgttccggttacttcaggtacacagacccttcgtgatgctgttaacgaagctttgaaggcgtgggtcgaacaaatagacaccactcattatttaattggatctgcaattggccctcatccattccctaccattgttaaaactttccaaagtgtcattggcgaggaaacgaaagcgcaaatgcaagagaagcgtaaaaaacttcctgatgcagttgttgcttgtgttggtggtggatccaattcgattggaatgttttctcccttcaaagccgataaaagtgtaatgatgttgggttgtgaagctggtggtgatggtgtagatacccccaaacatagtgctacattgactatgggaaaagttggtgtatttcatggagttcgaacatatgttctgcaacgcgaagatggacaaattcaagatactcactctatatctgctggattggattatccaggtgtgggacccgaattatctgaacttaaatataccaatcgcgcagagtttatcgctgtcactgatgctcaatgtttagaaggattccgcgctctatgtcatcttgaaggtatcattcccgctttggaatcttctcatgctgtgtatggtggaatggagcttgctaaaaagttacctaaagataaggatattgtgatcaccatttcaggtcgtggtgacaaggatgttcaaagcgtagctgaacaacttcctattttaggtcctaaaattggatgggaccttcgcttttaa

SEQ ID NO: 87828 - protein, 697 aa, Schizosaccharomyces pombe
MTEQIKKTFLKAKEENKNVLVTFVTCGFPNVDETIKIMQGLQNGGAGIIELGIPFSDAVADGPTICKGNEIALKNNITLEKVFETVKLARDAGVTIPIILMGYYNPIFSYGDAKTIQKAKEVGANGFIIVDLPPEEAVGFREECKKQGVSFVPLVAPSTTDRRMELLASVADSFIYVVSRMGSTGSSATGVINTALPQLCQRVRKFAGDTPLAVGFGVNTSEHFHQVGSVSDGVVVGSKIIDLILKAEPGTAATVVEEYCKYLTKEDPSAPVPKQFQSGGSVATAPPAAVVEPINEMYLPQKYGMFGGMYVPEALTQCLVELESVFYKALHDEKFWEEFRSYYEYMGRPSALDYAKRLTEYCGGAHIWLKREDLNHGGSHKINNCIGQILLAKRLGKNRIIAETGAGQHGVATAICAAKFGMKCTIYMGAEDCRRQALNVFRIRLLGAEVVPVTSGTQTLRDAVNEALKAWVEQIDTTHYLIGSAIGPHPFPTIVKTFQSVIGEETKAQMQEKRKKLPDAVVACVGGGSNSIGMFSPFKADKSVMMLGCEAGGDGVDTPKHSATLTMGKVGVFHGVRTYVLQREDGQIQDTHSISAGLDYPGVGPELSELKYTNRAEFIAVTDAQCLEGFRALCHLEGIIPALESSHAVYGGMELAKKLPKDKDIVITISGRGDKDVQSVAEQLPILGPKIGWDLRF

SEQ ID NO: 87829 - DNA, 2620 bp, Saccharomyces cerevisiae
  CDS (229)..(2352)
ctggtgcatctatgtatccaagatagtaattatctgtataatcttctattctttataccttattacccgaaaggcttttctttttattttttattttttttcacttcttgaccgtggaagaatgactaattttactatttgtcatataagaatcatcgagattcttacactttttatggactgtaaacatcgattgctccaaaaagggacatagcacaccgacagaccatgtcagaacaactcagacaaacatttgctaacgctaaaaaagaaaacaggaacgccttggtcacatttatgaccgcaggttacccaacagtcaaagacactgtccctattctcaagggtttccaggatggtggtgtagatatcatcgaattgggtatgcccttctctgatccaattgcagatggtcctacaattcaattatctaatactgtggctttgcaaaacggtgttaccttgcctcaaactctagaaatggtctcccaagctagaaatgaaggtgttaccgtacccataatcctaatgggttactataaccctattctaaactacggtgaagaaagatttattcaggacgctgccaaggctggtgctaatggttttatcatcgtcgatttgccaccagaggaggcgttgaaggtcagaaactacatcaatgataatggtttgagcctgatcccactagtggctccttctaccaccgacgaaagattggaattactatcgcatattgccgattcgtttgtctacgttgtgtctagaatgggtactactggtgttcaaagttctgtggccagtgatttggatgaactcatctctagagtcagaaagtacaccaaggatactcctttggccgttgggtttggtgtctctaccagagaacatttccaatcagttggtagtgttgctgacggtgtagtgattggttccaaaatcgtcacattatgtggagatgctccagagggcaaaaggtacgacgttgctaaggaatatgtacagggaattctaaatggtgctaagcataaggttctgtccaaggacgaattctttgcctttcaaaaagagtccttgaagtccgcaaacgttaagaaggaaatactggacgaatttgatgaaaatcacaagcacccaattagatttggggactttggtggtcagtatgtcccagaagctcttcatgcatgtctaagagagttggaaaagggttttgatgaagctgtcgccgatcccacattctgggaagacttcaaatccttgtattcttatattggccgtccttcttcactacacaaagctgagagattaactgagcattgtcaaggtgctcaaatctggttgaagagagaagatcttaaccacacgggatctcacaagatcaacaatgctttagcacaagttcttctagctaaaagattaggcaagaagaacgttattgctgaaaccggtgctggtcaacacggtgttgccactgccactgcatgtgctaaatttggcttaacctgtactgtgttcatgggtgcagaagatgttcgtcgccaagctttaaacgtcttcagaatgagaattctcggtgctaaagtaattgctgttactaatggtacaaagactctaagagacgctacttcagaggcattcagattttgggttactaacttgaaaactacttactacgtcgtcggttctgccattggtcctcacccatatccaactttggttagaactttccaaagtgtcattggtaaagaaaccaaggaacagtttgctgccatgaacaatggtaaattacctgacgcagttgttgcatgtgttgggggtggttccaactctacaggtatgttttcaccattcgagcatgatacttccgttaagttattgggtgtggaagccggtggtgatggtgtagatacaaagttccactctgctactctaactgccggtagacctggtgtcttccatggtgtcaagacttatgtcttgcaagatagtgatggtcaagtccatgatactcattctgtttctgctgggttagactacccaggtgtcggtccagaattggcatattggaaatctactggccgtgctcaattcattgcagctactgacgctcaggctctgcttggctttaaattattatctcaattagaaggtattattcccgctttggaatcttctcatgctgtttatggcgcttgcgaattggctaagacgatgaagcctgatcaacatttggttatcaatatttctggtagaggtgataaagatgtccaaagtgtcgctgaagtcttgccgaaattaggtccaaagataggttgggatttgagattcgaagaagacccatctgcctaatgagtaatatctgataaggaacgcttttatttagctttttaactacatagacgaatataatatacgatcgggatacattagcatattcagctcttttacctctcaatttgctcaagattagtatcgtgaccaattttagatcatttcggtcagaacagccacattttcgcgtaatttaaaagttcaattattgtatgcgtgacacactatattagcgtcaactgttaataaggaagtagtggataataacggttcaggttgcttcaca

SEQ ID NO: 87830 - protein, 707 aa, Saccharomyces cerevisiae
MSEQLRQTFANAKKENRNALVTFMTAGYPTVKDTVPILKGFQDGGVDIIELGMPFSDPIADGPTIQLSNTVALQNGVTLPQTLEMVSQARNEGVTVPIILMGYYNPILNYGEERFIQDAAKAGANGFIIVDLPPEEALKVRNYINDNGLSLIPLVAPSTTDERLELLSHIADSFVYVVSRMGTTGVQSSVASDLDELISRVRKYTKDTPLAVGFGVSTREHFQSVGSVADGVVIGSKIVTLCGDAPEGKRYDVAKEYVQGILNGAKHKVLSKDEFFAFQKESLKSANVKKEILDEFDENHKHPIRFGDFGGQYVPEALHACLRELEKGFDEAVADPTFWEDFKSLYSYIGRPSSLHKAERLTEHCQGAQIWLKREDLNHTGSHKINNALAQVLLAKRLGKKNVIAETGAGQHGVATATACAKFGLTCTVFMGAEDVRRQALNVFRMRILGAKVIAVTNGTKTLRDATSEAFRFWVTNLKTTYYVVGSAIGPHPYPTLVRTFQSVIGKETKEQFAAMNNGKLPDAVVACVGGGSNSTGMFSPFEHDTSVKLLGVEAGGDGVDTKFHSATLTAGRPGVFHGVKTYVLQDSDGQVHDTHSVSAGLDYPGVGPELAYWKSTGRAQFIAATDAQALLGFKLLSQLEGIIPALESSHAVYGACELAKTMKPDQHLVINISGRGDKDVQSVAEVLPKLGPKIGWDLRFEEDPSA

SEQ ID NO: 87831 - DNA, 936 bp, Oryza sativa
  CDS (1)..(936)
atggctcttgccctgaagtcaagttgcttattgcaattgaagaaacctgaggctggtttcaatgtttgtttttcatctaagaaagctataatctccgtgaaaagatacactccggtggccgctatcaggatcatggacgcagtgggactctctgcaacattcaccagattgaaaaaagaaggaaaagtggctttcatcccatatatcactgctggtgatcctgacctttcaaccactgcagaagcactgaaattgcttgattcatgcgggtctgacataattgagctaggcattccatactctgatcctttggcagatggtcctgttatccaggctgctgctacaagatctttagcaaaggggacaaattttaatgtgattattgatatgttgaaggaggttgttccgcaactgtcatgtccaattgcactgtttacatattacaatccaatactgaagcgtggtactgagaaatttatgtccaccataagagacactggcgtacatgggcttgtagtgccagatgtccctctggaggagacggaaactttaaggacagaagctaagaaacatggaattgaactggtactcctcacaacacccaccactccaccagaccgaatgaaagccattgttgatgtggcagaaggatttgtgtatcttgtgagctcagtgggggtcactggagcccgcgcatctgttagtggttctgttcagtcccttctacaggaaattaaagaggcaactactaaacctgtcgcagttggttttggaatatcaaaacctgagcatgtgaaacaggtagcgggatggggagctgatggtgtgattgttggcagtgctatagtgaaggtgcttggtgaggccaaatctcctcaagagggactgaaagaactggaagttttaacccgctccttaaaagcagcacttccttga

SEQ ID NO: 87832 - protein, 311 aa, Oryza sativa
MALALKSSCLLQLKKPEAGFNVCFSSKKAIISVKRYTPVAAIRIMDAVGLSATFTRLKKEGKVAFIPYITAGDPDLSTTAEALKLLDSCGSDIIELGIPYSDPLADGPVIQAAATRSLAKGTNFNVIIDMLKEVVPQLSCPIALFTYYNPILKRGTEKFMSTIRDTGVHGLVVPDVPLEETETLRTEAKKHGIELVLLTTPTTPPDRMKAIVDVAEGFVYLVSSVGVTGARASVSGSVQSLLQEIKEATTKPVAVGFGISKPEHVKQVAGWGADGVIVGSAIVKVLGEAKSPQEGLKELEVLTRSLKAALP

SEQ ID NO: 87833 - DNA, 936 bp, Brassica napus
  CDS (1)..(936)
atggcgattgctttcaaatccggcgtctgcttcctccactccccaaaaccccaagtcggaatccgccactcttctcccgattcctccctctctttcaagagattggctcccatcgctgccctctccacctcttcccccaccctcggtctcgctgatactttcaaggagctcaaaaaacaaggcaaagtagcattcataccgtacatcacagctggtgatccagatctctctactaccgcagaagcattgaaagttctcgacgcttgtggttccgacattatcgaactgggtgttccttactctgaccctttagctgatggacctgttattcaggctgcggcgactaggtctttggagaaggggaccaaccttgatagcatccttgacatgttggataaggttcttccagagttatcttgtcctgtttcgctgtttacttattacaacccgattcttaaacgtgggttggggaagttcatgtccagcatcagagatgttggtgtacaggggcttgttgttccagatgttcctctggaggaaactgagtttctgagaaaagaagcacttaacaacaacattgaactggtcctactcactacaccaacaacaccaacagagagaatgaagagaattgttgacgcatcagaaggatttatttaccttgtgagctcaattggagtgacgggtgcacgtgcatctgtaagcgggaaggtccagtcgctcttgaaggatatcaaagaggcaacagacaagccagtggcggtcggttttggaatatcaaagcctgagcatgtgaaacagatagctggatggggagctgatggagtgattgtaggcagtgcaatggtgaggcttttgggagatgctaagtcgccaacggaagggctcaaggagcttgagagtctcacaaagtctctcaaatctgctcttctttga

SEQ ID NO: 87834 - protein, 311 aa, Brassica napus
MAIAFKSGVCFLHSPKPQVGIRHSSPDSSLSFKRLAPIAALSTSSPTLGLADTFKELKKQGKVAFIPYITAGDPDLSTTAEALKVLDACGSDIIELGVPYSDPLADGPVIQAAATRSLEKGTNLDSILDMLDKVLPELSCPVSLFTYYNPILKRGLGKFMSSIRDVGVQGLVVPDVPLEETEFLRKEALNNNIELVLLTTPTTPTERMKRIVDASEGFIYLVSSIGVTGARASVSGKVQSLLKDIKEATDKPVAVGFGISKPEHVKQIAGWGADGVIVGSAMVRLLGDAKSPTEGLKELESLTKSLKSALL

SEQ ID NO: 87835 - DNA, 936 bp, Brassica napus
  CDS (1)..(936)
atggcgattgctttcaaatccggcgtctgcttcctccactccccaaaaccccaagtcggaatccgccactcttctcccgattcctccctctctttcaagagattggctcccatcgctgccctctccacctcttcccccaccctcggtctcgctgatactttcaaggagctcaaaaaacaaggcaaagtagcattcataccgtacatcacagctggtgatccagatctctctactaccgcagaagcattgaaagttctcgacgcttgtggttccgacattatcgaactgggtgttccttactctgaccctttagctgatggacctgttattcaggctgcggcgactaggtctttggagaaggggaccaaccttgatagcatccttgacatgttggataaggttcttccagagttatcttgtcctgtttcgctgttcacgtattacaacccgattcttaaacgtgggttggggaagttcatgtccagcatcagagatgtcggtgtccaggggcttgttgttccagatgttcctcttgaggaaactgagtttctgagaaaagaagcacttaacaacagcattgaactggtcctactcactacaccaacaacaccaacagagagaatgaagagaattgttgacgcatcagaaggatttatttaccttgtgagctcaattggagtgacgggtgcacgtgcatctgtaagcgggaaggtccagtcgctcttgaaggatatcaaagaggcaacagacaagccagtggcggttggttttggtatatcaaagcctgagcatgtgaaacagatagctggatggggagctgatggagtgattgtaggaagtgcaatggtgaggcttttgggagatgctaagtcgccaacggaagggctcaaagagcttgagagtctcacaaagtctctcaaatctgctcttctttga

SEQ ID NO: 87836 - protein, 311 aa, Brassica napus
MAIAFKSGVCFLHSPKPQVGIRHSSPDSSLSFKRLAPIAALSTSSPTLGLADTFKELKKQGKVAFIPYITAGDPDLSTTAEALKVLDACGSDIIELGVPYSDPLADGPVIQAAATRSLEKGTNLDSILDMLDKVLPELSCPVSLFTYYNPILKRGLGKFMSSIRDVGVQGLVVPDVPLEETEFLRKEALNNSIELVLLTTPTTPTERMKRIVDASEGFIYLVSSIGVTGARASVSGKVQSLLKDIKEATDKPVAVGFGISKPEHVKQIAGWGADGVIVGSAMVRLLGDAKSPTEGLKELESLTKSLKSALL

SEQ ID NO: 87837 - DNA, 936 bp, Glycine max
  CDS (1)..(936)
atggctcttgccctgaagtcaagttgcttattgcaattgaagaaacctgaggctggtttcaatgtttgtttttcatctaagaaagctataatctccgtgaaacgacacactcccgtggctgctatcaggaccatggaagcagtgggactctctgcaacattcaccagattgaaaaaagaaggaaaagtggctttcatcccatatatcactgctggtgatcctgacctttcaaccactgcagaagcactgaaattgcttgattcatgcgggtctgacataattgagctaggcattccatactctgatcctttggcagatggtcctgttatccaggctgctgctacaagatctttagcaaaggggaccaattttaatgtgattattgatatgttgaaggaggttgttccgcaactgtcatgtccaattgcactgtttacatattacaatccaatactgaagcgtggtactgagaaatttatgtccaccataagagacactggcgtacatgggcttgtagtgccagatgtccctctggaggagacggaaactttaaggacagaagctaagaaacatggaattgaactggtactcctcacaacacccaccactccaccagaccgaatgaaagccattgttgatgtggcagaaggatttgtgtatcttgtgagctcagtgggggtcactggagcccgcgcatctgttagtggttctgttcagtcccttctacaggaaattaaagaggcaactactaaacctgtcgcagttggttttggaatatcaaaacctgagcatgtgaaacaggtagcgggatggggagctgatggtgtgattgttggcagtgctatagtgaaggtgcttggtgaggccaaatctcctcaagagggactgaaagaactggaagttttaacccgctccttaaaagcagcacttccttga

SEQ ID NO: 87838 - protein, 311 aa, Glycine max
MALALKSSCLLQLKKPEAGFNVCFSSKKAIISVKRHTPVAAIRTMEAVGLSATFTRLKKEGKVAFIPYITAGDPDLSTTAEALKLLDSCGSDIIELGIPYSDPLADGPVIQAAATRSLAKGTNFNVIIDMLKEVVPQLSCPIALFTYYNPILKRGTEKFMSTIRDTGVHGLVVPDVPLEETETLRTEAKKHGIELVLLTTPTTPPDRMKAIVDVAEGFVYLVSSVGVTGARASVSGSVQSLLQEIKEATTKPVAVGFGISKPEHVKQVAGWGADGVIVGSAIVKVLGEAKSPQEGLKELEVLTRSLKAALP

SEQ ID NO: 87839 - DNA, 936 bp, Glycine max
  CDS (1)..(936)
atggctcttgccctgaagtcaagttgcttattgcaattgaagaaacctgaggctggtttcaatgtttgtttttcatctaagaaagctataatctccgtgaaaagatacactccggtggccgctatcaggatcatggacgcagtgggactctctgcaacattcaccagattgaaaaaagaaggaaaagtggctttcatcccatatatcactgctggtgatcctgacctttcaaccactgcagaagcactgaaattgcttgattcatgcgggtctgacataattgagctaggcattccatactctgatcctttggcagatggtcctgttatccaggctgctgctacaagatctttagcaaaggggaccaattttaatgtgattattgatatgttgaaggaggttgttccgcaactgtcatgtccaattgcactgtttacatattacaatccaatactgaagcgtggtactgagaaatttatgtccaccataagagacactggcgtacatgggcctgtagtgccagatgtccctctggaggagacggaaactttaaggacagaagctaagaaacatggaattgaactggtactcctcacaacacccacaactccaacaaaccgaatgagagccattgttgatgtggcagaaggatttgtgtatcttgtgagctcagtgggggtcactggagcccgagcatcagttagtggttctgttcagtctcttttgaaggaaattaaagaggcaactactaaacctgtggcagttggttttggaatatcaaaacctgagcatgtgaaacaggtagtggtatggggagctgatggtgtgattgttggcagtgctatagtgaaggtgcttggtgaggccaaatctcctcaagagggattgaaagaacttgaagttttcacccgctccttaaaagcggcacttccttaa

SEQ ID NO: 87840 - protein, 311 aa, Glycine max
MALALKSSCLLQLKKPEAGFNVCFSSKKAIISVKRYTPVAAIRIMDAVGLSATFTRLKKEGKVAFIPYITAGDPDLSTTAEALKLLDSCGSDIIELGIPYSDPLADGPVIQAAATRSLAKGTNFNVIIDMLKEVVPQLSCPIALFTYYNPILKRGTEKFMSTIRDTGVHGPVVPDVPLEETETLRTEAKKHGIELVLLTTPTTPTNRMRAIVDVAEGFVYLVSSVGVTGARASVSGSVQSLLKEIKEATTKPVAVGFGISKPEHVKQVVVWGADGVIVGSAIVKVLGEAKSPQEGLKELEVFTRSLKAALP

SEQ ID NO: 87841 - DNA, 1020 bp, Zea mays
  CDS (1)..(1020)
atggcctccgcgatcaaggctgcatcgacctcctcccagtggtcttcttccccggcggcagtccactcgtcgccgttatcgaagcggctaccagctgcagtggccatgccgggacggcggaggtctgtggccactgtaagggccgtcgccgcggtagctccggctgccccggcggcgccggccaagctcaccgccggtgccggcggccgatgcctgccggtgtcgcagaccatgtccaggctcagggcgcagggcaagacggcgttcatcccgtacatcaccgccggcgacccggacctggcgacgacggcggaggcgctgcggctcctggacgcctgcggcgccgacgtcatcgagctcggcgttcccttctcggacccctacgccgacgggccggtcatccaggcgtcggcggcgcgggcgctggcgagcggcacgacgccggacggcgtgctggcgatgctgaaggaggtgacgccggagctgtcctgccccgtggtgctcttctcctacttcaaccccatcgtgcggtggggcctggccgacttcgccgccgccgtcaaggaagccggcgtgcacggcctcatagttcccgacctcccgtatgggaactcgtgtgctctcactctcaggaccgaagccatcaagaacagcctcgagctggtgctgctcacaacaccatctacgccagcggacaggatgggggagataacacgagcttcacgaggattcgtctatctcgcgaccgtcaatggagttacaggtccacgcgcaaacgtgaacacacgtgtccagtctctcattcaggaggttaaacaggtcactgacatacccgtggctgtcgggtttggcatatcgaaacctgagcatgtaaagcagattgcagagtggggtgcagatggtgtgatcattggtagcgcaatggtgagacagttaggcgaagcagcctctcccaaggaaggattgaagaggctagagaaatacgccaggagcatgaagaacgcgctaccatgccagtga

SEQ ID NO: 87842 - protein, 339 aa, Zea mays
MASAIKAASTSSQWSSSPAAVHSSPLSKRLPAAVAMPGRRRSVATVRAVAAVAPAAPAAPAKLTAGAGGRCLPVSQTMSRLRAQGKTAFIPYITAGDPDLATTAEALRLLDACGADVIELGVPFSDPYADGPVIQASAARALASGTTPDGVLAMLKEVTPELSCPVVLFSYFNPIVRWGLADFAAAVKEAGVHGLIVPDLPYGNSCALTLRTEAIKNSLELVLLTTPSTPADRMGEITRASRGFVYLATVNGVTGPRANVNTRVQSLIQEVKQVTDIPVAVGFGISKPEHVKQIAEWGADGVIIGSAMVRQLGEAASPKEGLKRLEKYARSMKNALPCQ

SEQ ID NO: 87843 - DNA, 1020 bp, Zea mays
  CDS (1)..(1020)
atggcctccgcgatcaaggctgcatcgacctcctcccggtggtcttcgtccccggcggcagtccactcgtcgccgttatcgaagcggctaccagctgcagtggccatgccggggcggcggaggtctgtggccactgtaagggcggtcgccgcggtagctccggctgccccggcggcgccggccaagctcaccgccggtgccggcggccgatgcctgccggtgtcgcagaccatgtccaggctcagggcgcagggcaagacggcgttcatcccgtacatcaccgccggcgacccggacctggcgacgacggcggaggcgctgcggctcctggacgcctgcggcgccgacgtcatcgagctcggcgttcccttctcggacccctacgccgacgggccggtcatccaggcgtcggcggcgcgggcgctggcgagcggcacgacgccggacggcgtgctggcgatgctgaaggaggtgacgccggagctgtcctgccccgtggtgctcttctcctacttcaaccccatcgtgcggtggggcctggccgacttcgccgccgccgtcaaggaagccggcgtgcacggcctcatagttcccgacctcccgtatgggaactcgtgcgctctcactctcaggaccgaagccatcaagaacaacctcgagctggtgctgctcacaacaccatctacgccagcggacaggatggaggagataacacgagcttcacgaggattcgtctatctcgcgagcgtcaatggagttacaggtccacgcgcaaacgtgaacacacgtgtccagtctctcattcaggaggttaaacaggtcactgacatacccgtggctgtcgggtttggcatatcgaaacctgagcatgtaaagcagattgcagagtggggtgcagatggtgtgatcattggtagcgcaatggtgagacagttaggcgaagcagcctctcccaaagaaggattgaagaggctagagaaatacgccaggatcatgaagaacgcgctaccatgccagtga

SEQ ID NO: 87844 - protein, 339 aa, Zea mays
MASAIKAASTSSRWSSSPAAVHSSPLSKRLPAAVAMPGRRRSVATVRAVAAVAPAAPAAPAKLTAGAGGRCLPVSQTMSRLRAQGKTAFIPYITAGDPDLATTAEALRLLDACGADVIELGVPFSDPYADGPVIQASAARALASGTTPDGVLAMLKEVTPELSCPVVLFSYFNPIVRWGLADFAAAVKEAGVHGLIVPDLPYGNSCALTLRTEAIKNNLELVLLTTPSTPADRMEEITRASRGFVYLASVNGVTGPRANVNTRVQSLIQEVKQVTDIPVAVGFGISKPEHVKQIAEWGADGVIIGSAMVRQLGEAASPKEGLKRLEKYARIMKNALPCQ

SEQ ID NO: 87845 - DNA, 1011 bp, Zea mays
  CDS (1)..(1011)
atggcctccgcgatcaaggctgcatcgacctcctcccagtggtcttcttccccggcggcagtccactcgtcgccgttatcgaagcggctaccagctgcagtggccatgccgggacggcggaggtctgtggccactgtaagggccgtcgccgcggtagctccgggtgccccggccaagctcaccgccggtgccggcggccgatgcctgccggtgtcgcagaccatgtccaggctcagggcgcagggcaagacggcgttcatcccgtacatcaccgccggcgacccggacctggcgacgacggcggaggcgctgcggctcctggacgcctgcggcgccgacgtcatcgagctcggcgttcccttctcggacccctacgccgacgggccggtcatccaggcgtcggcggcgcgggcgctggcgagcggcacgacgccggacggcgtgctggcgatgctgaaggaggtgacgccggagctgtcctgccccgtggtgctcttctcctacttcaaccccatcgtgcggtggggcctggccgacttcgccgccgccgtcaaggaagccggcgtgcacggcctcatagttcccgacctcccgtatgggaactcgtgtgctctcactctcaggaccgaagccatcaagaacagcctcgagctggtgctgctcacaacaccatctacgccagcggacaggatgggggagataacacgagcttcacgaggattcgtctatctcgcgaccgtcaatggagttacaggtccacgcgcaaacgtgaacacacgtgtccagtctctcattcaggaggttaaacaggtcactgacatacccgtggctgtcgggtttggcatatcgaaacctgagcatgtaaagcagattgcagagtggggtgcagatggtgtgatcattggtagcgcaatggtgagacagttaggcgaagcagcctctcccaaggaaggattgaagaggctagagaaatacgccaggagcatgaagaacgcgctaccatgccagtga

SEQ ID NO: 87846 - protein, 336 aa, Zea mays
MASAIKAASTSSQWSSSPAAVHSSPLSKRLPAAVAMPGRRRSVATVRAVAAVAPGAPAKLTAGAGGRCLPVSQTMSRLRAQGKTAFIPYITAGDPDLATTAEALRLLDACGADVIELGVPFSDPYADGPVIQASAARALASGTTPDGVLAMLKEVTPELSCPVVLFSYFNPIVRWGLADFAAAVKEAGVHGLIVPDLPYGNSCALTLRTEAIKNSLELVLLTTPSTPADRMGEITRASRGFVYLATVNGVTGPRANVNTRVQSLIQEVKQVTDIPVAVGFGISKPEHVKQIAEWGADGVIIGSAMVRQLGEAASPKEGLKRLEKYARSMKNALPCQ

SEQ ID NO: 87847 - DNA, 20 bp, Artificial sequence
  primer
atgaacgctgttgccgcttg

SEQ ID NO: 87848 - DNA, 21 bp, Artificial sequence
  primer
ttaactgatggccgttttcag

SEQ ID NO: 87849 - protein, 232 aa, Artificial sequence
  consensus sequence
  Variant (2)..(7): Xaa in position 2 to 7 is any amino acid
  Variant (12)..(22): Xaa in position 12 to 22 is any amino acid
  Variant (24)..(25): Xaa in position 24 to 25 is any amino acid
  Variant (26)..(26): Xaa in position 26 is any or no amino acid
  Variant (28)..(28): Xaa in position 28 is any amino acid
  Variant (30)..(31): Xaa in position 30 to 31 is any amino acid
  Variant (35)..(35): Xaa in position 35 is any amino acid
  Variant (37)..(37): Xaa in position 37 is any amino acid
  Variant (41)..(41): Xaa in position 41 is any amino acid
  Variant (46)..(46): Xaa in position 46 is any amino acid
  Variant (49)..(51): Xaa in position 49 to 51 is any amino acid
  Variant (52)..(52): Xaa in position 52 is any or no amino acid
  Variant (56)..(57): Xaa in position 56 to 57 is any amino acid
  Variant (59)..(76): Xaa in position 59 to 76 is any amino acid
  Variant (77)..(80): Xaa in position 77 to 80 is any or no amino acid
  Variant (82)..(86): Xaa in position 82 to 86 is any amino acid
  Variant (88)..(88): Xaa in position 88 is any amino acid
  Variant (91)..(94): Xaa in position 91 to 94 is any amino acid
  Variant (95)..(98): Xaa in position 95 to 98 is any or no amino acid
  Variant (100)..(101): Xaa in position 100 to 101 is any amino acid
  Variant (102)..(102): Xaa in position 102 is any or no amino acid
  Variant (104)..(108): Xaa in position 104 to 108 is any amino acid
  Variant (109)..(110): Xaa in position 109 to 110 is any or no amino acid
  Variant (112)..(113): Xaa in position 112 to 113 is any amino acid
  Variant (115)..(118): Xaa in position 115 to 118 is any amino acid
  Variant (120)..(120): Xaa in position 120 is any amino acid
  Variant (122)..(122): Xaa in position 122 is any amino acid
  Variant (123)..(124): Xaa in position 123 to 124 is any or no amino acid
  Variant (127)..(143): Xaa in position 127 to 143 is any amino acid
  Variant (145)..(146): Xaa in position 145 to 146 is any amino acid
  Variant (148)..(151): Xaa in position 148 to 151 is any amino acid
  Variant (152)..(152): Xaa in position 152 is any or no amino acid
  Variant (154)..(162): Xaa in position 154 to 162 is any amino acid
  Variant (165)..(165): Xaa in position 165 is any amino acid
  Variant (167)..(167): Xaa in position 167 is any amino acid
  Variant (170)..(171): Xaa in position 170 to 171 is any amino acid
  Variant (176)..(195): Xaa in position 176 to 195 is any amino acid
  Variant (196)..(200): Xaa in position 196 to 200 is any or no amino acid
  Variant (202)..(203): Xaa in position 202 to 203 is any amino acid
  Variant (208)..(220): Xaa in position 208 to 220 is any amino acid
  Variant (221)..(221): Xaa in position 221 is any or no amino acid
  Variant (225)..(227): Xaa in position 225 to 227 is any amino acid
  Variant (231)..(231): Xaa in position 231 is any amino acid
AXXXXXXAGDPXXXXXXXXXXXLXXXGXDXXELGXPXSDPXADGPXIQXXXXRALXXGXXXXXXXXXXXXXXXXXXXXXXPXXXXXYXNPXXXXXXXXGXXXFXXXXXXXGXXGXXXXDXPXXXEEXXXXXXXXXXXXXXXXXLXXPXXXXXRXXXXXXXXXGFXYXVSXXGVTGXXXXXXXXXXXXXXXXXXXXXXXXXPXXVGFGXXXXXXXXXXXXXXADGXXXGSAXV

SEQ ID NO: 87850 - protein, 24 aa, Artificial sequence
  protein pattern
  Variant (2)..(2): Xaa in position 2 is any amino acid
  Variant (4)..(4): Xaa in position 4 is any amino acid
  Variant (5)..(5): Xaa in position 5 is Ile, Leu or Val
  Variant (7)..(7): Xaa in position 7 is Ile, Leu or Val
  Variant (9)..(9): Xaa in position 9 is Phe, Ile, Leu, Met or Val
  Variant (11)..(11): Xaa in position 11 is any amino acid
  Variant (12)..(12): Xaa in position 12 is Ser or Thr
  Variant (15)..(16): Xaa in position 15 to 16 is any amino acid
  Variant (20)..(20): Xaa in position 20 is any amino acid
  Variant (23)..(23): Xaa in position 23 is any amino acid
  Variant (24)..(24): Xaa in position 24 is Ala or Ser
GXDXXEXGXPXXDPXXDGPXIQXX

SEQ ID NO: 87851 - protein, 29 aa, Artificial sequence
  protein pattern
  Variant (2)..(3): Xaa in position 2 to 3 is any amino acid
  Variant (4)..(6): Xaa in position 4 to 6 is any or no amino acid
  Variant (8)..(10): Xaa in position 8 to 10 is any amino acid
  Variant (11)..(11): Xaa in position 11 is Ile or Val
  Variant (12)..(14): Xaa in position 12 to 14 is any amino acid
  Variant (15)..(15): Xaa in position 15 is Ala, Cys, Gly, Ser or Thr
  Variant (16)..(16): Xaa in position 16 is any amino acid
  Variant (18)..(18): Xaa in position 18 is Phe or Tyr
  Variant (19)..(19): Xaa in position 19 is any amino acid
  Variant (21)..(21): Xaa in position 21 is any amino acid
  Variant (22)..(22): Xaa in position 22 is Ala, Ile or Val
  Variant (23)..(23): Xaa in position 23 is Ala, Ser or Thr
  Variant (24)..(25): Xaa in position 24 to 25 is any amino acid
  Variant (27)..(27): Xaa in position 27 is Ile or Val
PXXXXXRXXXXXXXXXGXXYXXXXXGXTG

SEQ ID NO: 87852 - protein, 15 aa, Artificial sequence
  protein pattern
  Variant (2)..(2): Xaa in position 2 is Ile, Leu or Val
  Variant (3)..(3): Xaa in position 3 is any amino acid
  Variant (4)..(4): Xaa in position 4 is Ile, Leu, Met or Val
  Variant (5)..(5): Xaa in position 5 is Phe, Leu or Met
  Variant (6)..(6): Xaa in position 6 is any amino acid
  Variant (8)..(8): Xaa in position 8 is any amino acid
  Variant (10)..(10): Xaa in position 10 is Leu or Pro
  Variant (11)..(11): Xaa in position 11 is Ile, Leu, Met or Val
  Variant (12)..(14): Xaa in position 12 to 14 is any amino acid
  Variant (15)..(15): Xaa in position 15 is Asp, Glu, Gly or Asn
PXXXXXYXNXXXXXX

SEQ ID NO: 87853 - DNA, 1386 bp, Synechocystis sp.
  CDS (1)..(1386): transl_table=11
atgacaaaaaaaacctggagcgatcgttttgaaggcacattgcaccccgccattgccctgtttaatgccagcattggttttgacattgaactaatcgaatatgacctggatggctcgatcgcccatggcaaaatgttggccaagacgggcattatcagcccaggggaagcagaacagctagtgcagggcttggagcaaattcgccaggaataccgagccggtaatttcaatccaggggtagaccaggaagacgttcactttgctgtggaacgccgattaacagaattggtgggggatgtgggcaaaaaactccacactgcccgttcccgcaatgaccaagtaggaaccgatgttcgtctttacctgcgtgcccaaattgatgacatccgccaacggttaagggattttcaagcagtgttgctccaactggcggaaaccaatgtggaaaccttaattcccggctacacccacctacaacgggcccaaccggtcagtttggctcaccatctactggcctatttccagatggcccaacgggattggcaacggttaggggaaattcgagctagaactaacgtttctcccctcggttctggggctttagcaggaacaacttttcccatcgatcgccattacagtgccgaattgttggggtttgcaggggtttacgccaacagcttagatggggtgagcgatcgggattttgccattgaatttctcaacgccgccagtttgatcatggtgcacctcagtcggctgagcgaagaaatgatcctctgggcttcccaggaatttagctttatcagtttgaccgatagctgtgccacaggatcaagcattatgccccaaaagaaaaatccagacgtaccagagttaattcggggtaaagccgggcgggtgatgggtcatctgcaaggaatgctagtactgatgaaaggtttgcccctggcctataacaaggatttgcaggaagacaaggaagccctgtttgatgcagtaaaaacggtgcaagtgagcctggaagccatgaccattttgcttgatgaaggtattgtttttcgtcaagaacggttagcggaggcggtggcggaagatttttccaatgcgacggatgtggcggattacttggcggctaagggagtccccttccgggaagcttataatctggtgggcaaggtggttaaaaccagtttggcggcagggaaattgctcaaggatttaaccctggcggaatggcaagcgctccatcccgcttttgaagaggatatttaccaagctattaccccccagcaagtggtggcggcacgcaatagttacgggggcacgggctttgaacaggtgaaaatggcgatcgccaatgccaaagctgaattaagccagacttaa

SEQ ID NO: 87854 - protein, 461 aa, Synechocystis sp.
MTKKTWSDRFEGTLHPAIALFNASIGFDIELIEYDLDGSIAHGKMLAKTGIISPGEAEQLVQGLEQIRQEYRAGNFNPGVDQEDVHFAVERRLTELVGDVGKKLHTARSRNDQVGTDVRLYLRAQIDDIRQRLRDFQAVLLQLAETNVETLIPGYTHLQRAQPVSLAHHLLAYFQMAQRDWQRLGEIRARTNVSPLGSGALAGTTFPIDRHYSAELLGFAGVYANSLDGVSDRDFAIEFLNAASLIMVHLSRLSEEMILWASQEFSFISLTDSCATGSSIMPQKKNPDVPELIRGKAGRVMGHLQGMLVLMKGLPLAYNKDLQEDKEALFDAVKTVQVSLEAMTILLDEGIVFRQERLAEAVAEDFSNATDVADYLAAKGVPFREAYNLVGKVVKTSLAAGKLLKDLTLAEWQALHPAFEEDIYQAITPQQVVAARNSYGGTGFEQVKMAIANAKAELSQT

SEQ ID NO: 87855 - DNA, 1877 bp, Zea mays
  CDS (120)..(1670)
cattggccaccccgtggcgagcctgtgtggactgtcctcaggacaatcgccaaaaccccccgagccaacacctactacgccgccgcgccgccgcgtcaaacaacggcgagaggacgcctatggcattcacttcccaatccctaatcttccgggcacccgcctcgccctcttgtgcccgcataaccccgtcatccggtcgcgtcaccctccgggaccacagcgccgttttcccgctcgtcgcggcggcctccacctcgatggcgtcctcggagagcgaagataagagggaaaccaagctgtggggcgggcggttcgaggagggcgtcaccgacgccgtggagcgcttcacggagtccatatcctacgactggcagctctacaaatacgacataatgggcagcaaggcccacgcctccatgctcgctggccagggtttgataacagctactgatagggatatcatcttagaggggcttgatcagatagagaggctgatccaagaaggcaaatttgagtggaggaaggaccgggaggatgtgcatatgaacattgaagcggctctaattgaaagggttggtgagccagccaagaagttgcatactgctaggagccgcaatgaccaaattgtgacggatctaaggctatggtgccgtgatgctattgacaagattttgattcgtatcaagcagcttcaggtgtctctggttattttggcttcaaaatatgttgacttaatagtcccaggttatacccatctgcaaagggcgcagcctgttctgctgccacatcttctcttatcatatgttgaacagttggagcgtgatgctggtcggctggtcaactgcagggagcgaatgaatttctgtcctcttggtgcttgtgctttggctggaactggacttcccattgataggtttcaaactgctaaagatttgaaatttacggctccaatgaagaatagcattgatgcagtatcagaccgtgactttgtacttgagtttcttgctgccaattcgattgctgctgttcatctttcgcgaattggtgaagaatgggttctttgggcatcagaggaatttgggtttctgataccaagtgacaaagtttcaactggaagcagcattatgccccagaagaaaaatccagacccaatggagcttgttcgtgggaaatctgctagggttgttggagacctcatgactgttctaaccctctgtaaaggccttccacaggcctacaaccgtgaccttcaggaagacaaggaacccttgtttgatagtgtgaaagctgtattaggaatgcttgaagtatgcacagagtttgctcaaaatatctcttttaattcaaaaagaatacaaagttcacttccagctggttatctggatgcaacgacgctggcggattatctcgtgaagaagggagtccctttcagaacttctcacgagatagttggaaggtctgttgctctatgcgtctccaagaactgtcagctagctgagcttgaattggctgacctaaaatctgtccatcctgtatttgaggatgacgtctatgaatacctgggggttgaaaacgctgtaaacaagttcatatcctatggctctactggttcagaacaagtgaaaaagcagcttgaggattggcgcatccagctcggggtgagctcataagggttggcatggttcaagaaataagctcgcaaattagtgcttgcgatttttgaaggtgtatgttgacgtcgtgaactttttctgtgtgtttgttcatacatttcgaaaactggaatgaatgatgtaaacatgttggacaccttgagcctcttttatatattattattgcactgtgttttattttaaaaaaaaagcggcaaaaagaat

SEQ ID NO: 87856 - protein, 516 aa, Zea mays
MAFTSQSLIFRAPASPSCARITPSSGRVTLRDHSAVFPLVAAASTSMASSESEDKRETKLWGGRFEEGVTDAVERFTESISYDWQLYKYDIMGSKAHASMLAGQGLITATDRDIILEGLDQIERLIQEGKFEWRKDREDVHMNIEAALIERVGEPAKKLHTARSRNDQIVTDLRLWCRDAIDKILIRIKQLQVSLVILASKYVDLIVPGYTHLQRAQPVLLPHLLLSYVEQLERDAGRLVNCRERMNFCPLGACALAGTGLPIDRFQTAKDLKFTAPMKNSIDAVSDRDFVLEFLAANSIAAVHLSRIGEEWVLWASEEFGFLIPSDKVSTGSSIMPQKKNPDPMELVRGKSARVVGDLMTVLTLCKGLPQAYNRDLQEDKEPLFDSVKAVLGMLEVCTEFAQNISFNSKRIQSSLPAGYLDATTLADYLVKKGVPFRTSHEIVGRSVALCVSKNCQLAELELADLKSVHPVFEDDVYEYLGVENAVNKFISYGSTGSEQVKKQLEDWRIQLGVSS

SEQ ID NO: 87857 - DNA, 1371 bp, Listeria monocytogenes
  CDS (1)..(1371): transl_table=11
atggaaaaactatggggcggacgttttcaagggaaaagtgaagcatggattgatgattttggagcttcgatttcttttgatcaaaaaatggcaaaagaagatttggcgggtagcttagcgcacgtcgccatgctcggcaaatgcgggatcattcctgcttcagaagcagctgaaattacggccggattaaaaatcctccaagaaaaattagcgtttggtgagctcgaattcagcactgttaacgaagatattcatctaaatatcgaaaaactattgcacgaggaaattggttctgttgctggaaaacttcatacggcgcgtagtcgaaatgatcaagttgcgacagacatgcatttatatttaaaacaagccgtggcggaaattattcagtcgctaaaacatttacgtgtagtgcttgttcaaaaagcagagttgcatgttgaaacaattatgcctggctatacacatttacaacacgctcagcccctgtcttttgcccatcatttgcttgcttactttggaatgtttacgcgggatttggagcgtttggaagaaagtgtcaagcggattgatatttcaccgctcggttctgcagcgcttgctgggacgacatttccaattgaccgggcttatagcgccgaattacttggcttttctgctgtttatgaaaatagtttggacggcgtgagtgatcgtgattttattattgagtttcttagtaacagttctatcttgatgatgcatttatcgcgtttttgtgaggaattgatactttggacgagtcatgagtttcaatttgtcgaattaacggacgctttttcgacaggaagttcgattatgccgcaaaagaaaaacccagatatggccgagttaattcgcggaaaaactggtcgggtttacggaaaccttttcggcatgctaacggttttaaaagggttgccgctcgcttataataaagatttacaagaagataaggaaggcatgtttgatacgcttgagacggttcagacaagcttagatatattcgcgggaatgattgaaacgatgaaggtcaatacagaaataatggaagaatcgacgcaaaaagatttttccaatgcgacggaactagcagattatttagcgaaaaaaggcgttccatttagagaagcgcatgagattgttgggaaattggtgcttgaatgtacgcaaaatgggatttatttgcaagatgtagcgcttagccactatcaggaaataaatccacttattgaggaagatatttacgtggtgctttcctctaaaactgccgtgcaaaaaagaaattcttacggcgggactggatttgatcaaattaaagtcgctctcgaaaacgcgaaaaaaactttgtaa

SEQ ID NO: 87858 - protein, 456 aa, Listeria monocytogenes
MEKLWGGRFQGKSEAWIDDFGASISFDQKMAKEDLAGSLAHVAMLGKCGIIPASEAAEITAGLKILQEKLAFGELEFSTVNEDIHLNIEKLLHEEIGSVAGKLHTARSRNDQVATDMHLYLKQAVAEIIQSLKHLRVVLVQKAELHVETIMPGYTHLQHAQPLSFAHHLLAYFGMFTRDLERLEESVKRIDISPLGSAALAGTTFPIDRAYSAELLGFSAVYENSLDGVSDRDFIIEFLSNSSILMMHLSRFCEELILWTSHEFQFVELTDAFSTGSSIMPQKKNPDMAELIRGKTGRVYGNLFGMLTVLKGLPLAYNKDLQEDKEGMFDTLETVQTSLDIFAGMIETMKVNTEIMEESTQKDFSNATELADYLAKKGVPFREAHEIVGKLVLECTQNGIYLQDVALSHYQEINPLIEEDIYVVLSSKTAVQKRNSYGGTGFDQIKVALENAKKTL

SEQ ID NO: 87859 - DNA, 1395 bp, Pseudomonas aeruginosa
  CDS (1)..(1395): transl_table=11
atgagcgtagagaagaccaaccagtcctggggcggccgcttcagcgagcccgtcgacgccttcgtcgcccgtttcaccgcctccgtcgacttcgacaagcgtctctaccgccacgacatcatgggttccatcgcccacgccacgatgctggccaaggtcggcgtgctgagcgacgccgagcgcgatgcgatcgtcgacggcctgcaacagatccaggcggaaatcgaagccggcagcttcgactggcgcgtcgacctggaagacgtgcacatgaacatcgaggcgcgcctgaccgaccgcatcggcgtcaccggcaagaagctccacaccggccgctcgcgcaacgaccaggtggccaccgacatccgcctctggctacgcgacgagatcgacaccatcctcgccgagatcacccgcctgcaggagggcctgctgggcctggccgaagcggaagccgacaccatcatgcccggtttcacccacctgcagaccgcccagccggtgaccttcggccaccacctgctggcctggttcgagatgctcggccgcgactacgagcgcctggtcgactgccgcaagcgggtcaaccgcatgccgctcggctcggcggccctggccggcaccacctacccgatccagcgcgagatcacctgccagttgctgggcttcgacgcggttggcggcaactccctggacggcgtctccgaccgcgacttcgccatcgaattctgcgccgccgccagcctggcgatgatgcacctgtcgcgcttctcggaagagctggtgctatggaccagcgcgcagttccagttcatcgacctgcccgaccgcttctgcaccggctcctcgatcatgccgcagaagaagaaccccgacgtgccggagctggtacgcggcaagtccggccgggtgttcggcgccctcaccggcttgctgaccctgatgaagggccagccgctggcctacaacaaggacaaccaggaagacaaggaaccgctgttcgacgccgccgacaccctgcgcgatagcctgcgcgccttcgccgacatggtcccggcgatccggccccggcgcgagatcatgcgcgaggcggcacgccgcggtttctccaccgccaccgacctggcggactacctggtgcgcaagggcctgccgttccgcgactgccacgagatcgtcggccacgcagtgaagtacggcgtagacagcggcaaggacctcgccgagatgagcctcgacgaactgcgccgcttcagcgagcagatcgacgccgacgtcttcgacgtgctgaccctggaaggctcggtcaacgcccgcgaccatatcggcggcaccgcgccgaaccaggtccgtgccgccgtcgcccgcggcagaaaactgctggcacagcgctga

SEQ ID NO: 87860 - protein, 464 aa, Pseudomonas aeruginosa
MSVEKTNQSWGGRFSEPVDAFVARFTASVDFDKRLYRHDIMGSIAHATMLAKVGVLSDAERDAIVDGLQQIQAEIEAGSFDWRVDLEDVHMNIEARLTDRIGVTGKKLHTGRSRNDQVATDIRLWLRDEIDTILAEITRLQEGLLGLAEAEADTIMPGFTHLQTAQPVTFGHHLLAWFEMLGRDYERLVDCRKRVNRMPLGSAALAGTTYPIQREITCQLLGFDAVGGNSLDGVSDRDFAIEFCAAASLAMMHLSRFSEELVLWTSAQFQFIDLPDRFCTGSSIMPQKKNPDVPELVRGKSGRVFGALTGLLTLMKGQPLAYNKDNQEDKEPLFDAADTLRDSLRAFADMVPAIRPRREIMREAARRGFSTATDLADYLVRKGLPFRDCHEIVGHAVKYGVDSGKDLAEMSLDELRRFSEQIDADVFDVLTLEGSVNARDHIGGTAPNQVRAAVARGRKLLAQR

SEQ ID NO: 87861 - DNA, 1392 bp, Bradyrhizobium sp. ORS278
  CDS (1)..(1392): transl_table=11
atgagcaacaagatgtggggcggccggttcacggagcgtcccgacgagatcatggaggacatcaacgtctcgatcgacgtcgatcgccacctttacgcgcaggatatcgccgcgtccaaggcgcacgccgccatgctcgccgcccagggcatcatcacgtcaggtgatgcgaaaaatatggccaggggtctagacacgattctgtcagagatcaccaagggctcgttcgagttcaagcgcgcgctcgaggacatccatatgaatgtcgagagccggctgtccgagctgatcggccccgccgccggccgcctgcacaccgcgcgctcccgcaacgaccaggtcgccaccgattttcgcctgttcgtgcgcgacgagatcgacgacatcgacgcggcgctggccgcctaccagcaggctctcgcgacccgcgcgctcgaattcgccggcaccgtgatgcccggcttcacccatctgcagacggcgcagcccgtcaccttcggccaccatctcctcgcctatgtcgagatggccggccgcgaccgcggccgcttcgccgacgcccgcgagcgcctcaatgaatcgccgctgggcgccgccgcgctcgccggcacctcgttcccgatcgaccgccacgccaccgcgcaagccctcggcttcgaccgcccgatggccaattcgctcgacgccgtctccgaccgcgacttcgtgctggagaccctgtcggcggcgtcgatctgcgccgtgcatctgtcgcgcttcgccgaggagatcgtgatctggacctcgcccttggtcggcctgatcaagctgtcggacaagttcacgaccggctcctcgatcatgccgcagaagcgcaatccggacgccgcggagctcgtccgcgccaagacggggcgcgtcatcggcgcgctcaacgggctcctgatcgtgatgaagggcctgccgctggcctatcaaaaggacatgcaggaggacaagcagggcgcgatggaggcgttcgccgcgctgtcgctggcgatccgcgccatgaccggcatggcgctcgacctggtgccggacgaagcccgcatgaaggccgccgccggcgagggctacgccaccgccaccgatctggccgactggctggtccgcaccctcaagatgccgttccgcgaggcccatcacgtgacggggcgcatcgtcgcgctggcctcgaagcagggcgtcgcgctgcacgagctgccgctcgaggcgatgcaggaggtggagcccaagatcacggccgacgtgctcggcgtgctctcggtcgaggcctcggtgaagagccgcaccagcttcggcggcaccgcaccgaagaacgtcgcgagccaggccaaggcctggctgaagcgtctggaaaaacagcggaagtag

SEQ ID NO: 87862 - protein, 463 aa, Bradyrhizobium sp. ORS278
MSNKMWGGRFTERPDEIMEDINVSIDVDRHLYAQDIAASKAHAAMLAAQGIITSGDAKNMARGLDTILSEITKGSFEFKRALEDIHMNVESRLSELIGPAAGRLHTARSRNDQVATDFRLFVRDEIDDIDAALAAYQQALATRALEFAGTVMPGFTHLQTAQPVTFGHHLLAYVEMAGRDRGRFADARERLNESPLGAAALAGTSFPIDRHATAQALGFDRPMANSLDAVSDRDFVLETLSAASICAVHLSRFAEEIVIWTSPLVGLIKLSDKFTTGSSIMPQKRNPDAAELVRAKTGRVIGALNGLLIVMKGLPLAYQKDMQEDKQGAMEAFAALSLAIRAMTGMALDLVPDEARMKAAAGEGYATATDLADWLVRTLKMPFREAHHVTGRIVALASKQGVALHELPLEAMQEVEPKITADVLGVLSVEASVKSRTSFGGTAPKNVASQAKAWLKRLEKQRK

SEQ ID NO: 87863 - DNA, 1410 bp, Drosophila melanogaster
  CDS (1)..(1410)
atgacccagatccccgagagctgttataagatgtggggtggtaggttcaccgaggggccgcatgaggctctccattcgctgaataacagcctgccctacgattctcgcctctatgcggatgatttggacgccagcaaggcgtatgcagaggcactccatcgagctggtctcatcaactcagccgaggcggataagttggtaaagaatctggagctgttgcgattcgattggatcgagggaactgtgaagattctacccggtgacgaggatgtgcacacggtgaacgagcgattgctggtggagattaccggcgaactgggccagcggcttcacacgggcagaagcagaaatgaccaggtggtcacggacatgaagctatggcttcgcaaggccattcgtgagaccttgggccggctgagtggcatcattgaaactgccaccaggcaggcggaactccacctgggcgtcctcatgccaggatacacgcatctgcagcgggcccagaccgttcagttctcccactggctgctctcgcacgcgtttgcattaagggaagatggccagcggctgttggagctaagggatcgggcgaatgtcctgccccttggaagtggcgctctggcgggaaatccccttggcatcgatcgtttgtggctggccgagaggctgggattctcgggtgtcacagccaacagcatgcacgccgtgggagatcgagattttgtagttgacttcatctactgctgctctatggtgagcctgcatctgtcccgattggcggaggatttgatcatctacagtaccaaggagttcgacttcatcaaactggccgatggcttttccagtggcagcagcctgatgcctcagaaaaggaatccggacagcttggagctgattcgcggcatggccggtgtgatcaccgccaatctgacgggcataatgatgaccattaagggcactccgtccacctacaacaaggacttgcagtacgacaagcaattctgcttccagtccttcgacaagctgtcccaagtgctcgaggttaccgatggtgtcctacagacgattcaggtcaagcaggaatcaatggaggcggcacttagcacagacatgctggccactgactgggcctactatctggtgaagaagggggttccattccgccaggcgcatcacattatcggtcgcgtggtctcggaggccgaaaagcgcggtgtggacatcactgatttgccgctgggagatctccagaaattcagtcctttatttggatcggatatcgttgcagtggcggactactccaacaatgtccagcaatataatgcgattggtggaaccgccagtagcagcatcgtggaacaactgcgtttgctcaagaagtgcgcaagggatttggccaaacagtcgtag

SEQ ID NO: 87864 - protein, 469 aa, Drosophila melanogaster
MTQIPESCYKMWGGRFTEGPHEALHSLNNSLPYDSRLYADDLDASKAYAEALHRAGLINSAEADKLVKNLELLRFDWIEGTVKILPGDEDVHTVNERLLVEITGELGQRLHTGRSRNDQVVTDMKLWLRKAIRETLGRLSGIIETATRQAELHLGVLMPGYTHLQRAQTVQFSHWLLSHAFALREDGQRLLELRDRANVLPLGSGALAGNPLGIDRLWLAERLGFSGVTANSMHAVGDRDFVVDFIYCCSMVSLHLSRLAEDLIIYSTKEFDFIKLADGFSSGSSLMPQKRNPDSLELIRGMAGVITANLTGIMMTIKGTPSTYNKDLQYDKQFCFQSFDKLSQVLEVTDGVLQTIQVKQESMEAALSTDMLATDWAYYLVKKGVPFRQAHHIIGRVVSEAEKRGVDITDLPLGDLQKFSPLFGSDIVAVADYSNNVQQYNAIGGTASSSIVEQLRLLKKCARDLAKQS

SEQ ID NO: 87865 - DNA, 1560 bp, Oryza sativa (japonica cultivar-group)
  CDS (1)..(1560)
atggccgccgccacctcccaatccttcctctcgccggcgcccaacccccttctccgcccgaggatcctccccttccccgccggcgggtccgtgtccctccgcggccgccgccccgccttcccgtccgtcgccgcggcgtccacatcgatggcgtcctcggagagcgaggagaggaaggagaccaagctgtggggcgggcgattcgaggagggcgtcaccgacgccgtggaagggttcaccgagtccatctcctacgactggcagctctacaagtacgacatcatgggcagcaaggcccacgcatccatgctcgccgcgcagggtttgataacggctggcgataaggacatcatcttagaggggcttgatcaaatagagaagctgattcaggatggaaaatttgagtggcggacagaccgggaggatgtccatatgaatattgaggcagctctgatcgaaaaggttggtgaaccagccaagaaactgcatactgctaggagccgcaatgaccaaatcgtgacggatctccgcctgtggtgccgtgatgctattgacaagattttgttccgcatcaaacagtttcaggtgtctcttgttctgttagcttcaaaatatgttgacttaatagttcctggttacactcacctgcaaagggcacagcctgttttgcttccacatctcctcttatcatatgttgaacagttggagcgtgatgctggacggctggtcaactgcagggaacggttgaatttctgtcctcttggtgcttgtgctttggctggtactggacttcctatcgataggttcaaaactgctaaagatttgaagtttacagctccaatgaagaacagtattgatgcagtatcagaccgcgactttgtattggaatttcttgctgccaattcaattgctgctgttcatctttcacgaattggtgaagagtgggtcttatgggcatcagaggagtttggattcctcacaccaagtgactctgtttcaactggaagcagcattatgccacagaagaaaaatccagatccaatggagcttgttcgtggcaaatctgctcgtgtttttggagatctcatgactgtcctcaccctttgtaaaggacttccgcaggcctacaaccgtgatttacaggaagacaaggaacccttgtttgacagcgtgaaggctgtattaggaatgcttgaagtatgtaccgagtttgctcaaaatatctccttcaactcaaaaagaatacaaagttcgctgcctgctggctatttggatgcaacaacactagcagattatcttgtgaagaagggcgtgccgttcagaacctcgcacgagatagttggaaggtctgtagctctatgcgtctcgaagaactgtcagctcgccgaacttggactagacgacctgaaatctgttcaccccgtttttgagggcgatgtgtacgagtatctgggagtggagaacgccgtaaacaagttcatatcttacggctctacaggctcggagcaagtaaaaaaacagctcgaggattggcgcactcagcttggcattagttcataa

SEQ ID NO: 87866 - protein, 519 aa, Oryza sativa (japonica cultivar-group)
MAAATSQSFLSPAPNPLLRPRILPFPAGGSVSLRGRRPAFPSVAAASTSMASSESEERKETKLWGGRFEEGVTDAVEGFTESISYDWQLYKYDIMGSKAHASMLAAQGLITAGDKDIILEGLDQIEKLIQDGKFEWRTDREDVHMNIEAALIEKVGEPAKKLHTARSRNDQIVTDLRLWCRDAIDKILFRIKQFQVSLVLLASKYVDLIVPGYTHLQRAQPVLLPHLLLSYVEQLERDAGRLVNCRERLNFCPLGACALAGTGLPIDRFKTAKDLKFTAPMKNSIDAVSDRDFVLEFLAANSIAAVHLSRIGEEWVLWASEEFGFLTPSDSVSTGSSIMPQKKNPDPMELVRGKSARVFGDLMTVLTLCKGLPQAYNRDLQEDKEPLFDSVKAVLGMLEVCTEFAQNISFNSKRIQSSLPAGYLDATTLADYLVKKGVPFRTSHEIVGRSVALCVSKNCQLAELGLDDLKSVHPVFEGDVYEYLGVENAVNKFISYGSTGSEQVKKQLEDWRTQLGISS

SEQ ID NO: 87867 - DNA, 1554 bp, Arabidopsis thaliana
  CDS (1)..(1554)
atgggagcaattgatctctctttctcacagagtcttctcttctcttcgtcgcgttccaatctttcctcctccacacaccgttccgtctcttttttgccgccgggaagcaagtcacggtgtctgccgccgttgcgttcaatgagtcatgacgacgacacggcctcaaaggaggtgaagctatggggtggaaggttcgaagagagtgtcactgagaaagtggagaagttcactgagtcaatttcatttgataaggttctctacaagcaggacattatgggtagcaaagctcatgcttcaatgcttgctcaccaggggctaataactgatagcgataaagatagcattttgagaggtcttgatgatattgagagacaaattgaagcaaataagtttgaatggaggactgatcgagaagatgtgcatatgaacattgaagcagctcttactgatcttattggtgaacctgcaaagaaacttcatactgcaaggagcagaaatgaccaagttgctactgacttcaggctttggtgtcgtgatgctatcgatacaattattgtcaaaatcagaaatcttcagagagcacttgttgaactggctttgaagaatgaggctttgattgttcctggttatactcatcttcaaagagctcagcctgttttactcccacacgttctcttaacttttgtagagcagctcgaacgtgatgctggtcgttatgtggactgtcgagcaaggctaaatttctcccccctgggagcttgtgctttggctggaactggtctgcctattgataggtttatgactgcaaatgctcttggatttaccgaaccaatgagaaacagtatcgatgcagtctcagaccgagacttcgtgctggagttcttatatacaaatgccaacaccggtattcatttatcacggcttggagaagagtgggtactgtgggcttccgaggagtttgggttcatgactccaagtgattctgtgtcaaccggaagtagtataatgccacagaagaaaaatccagacccaatggaacttgtcagaggaaaatccgcaagagtcataggcgatctggtcactgtcttaacactgtgcaaaggacttccccttgcttacaacagagattttcaagaagacaaagagccgatgttcgatagtaccaagacaataatgggaatgatcgatgtatctgcagaatttgctcagaatgttacattcaacgaagacagaatcaagaaaagtcttcccgcaggacatcttgatgcgactactctcgctgattatcttgtgaagaaggggatgccttttaggtcatctcatgacatagttggaaaactagttggagtttgcgtctcaaaaggctgtgaacttcagaacttaagtcttgaagagatgaaaaagctgagccctgtgtttgaagaagatgtgtttggatttttgggggttgaaaattcagtcaataagttcagttcctatgggtcaacaggatcaaactgtgttgctgagcaacttggctactgggtcaacaagctcaacattacttccacctga

SEQ ID NO: 87868 - protein, 517 aa, Arabidopsis thaliana
MGAIDLSFSQSLLFSSSRSNLSSSTHRSVSFLPPGSKSRCLPPLRSMSHDDDTASKEVKLWGGRFEESVTEKVEKFTESISFDKVLYKQDIMGSKAHASMLAHQGLITDSDKDSILRGLDDIERQIEANKFEWRTDREDVHMNIEAALTDLIGEPAKKLHTARSRNDQVATDFRLWCRDAIDTIIVKIRNLQRALVELALKNEALIVPGYTHLQRAQPVLLPHVLLTFVEQLERDAGRYVDCRARLNFSPLGACALAGTGLPIDRFMTANALGFTEPMRNSIDAVSDRDFVLEFLYTNANTGIHLSRLGEEWVLWASEEFGFMTPSDSVSTGSSIMPQKKNPDPMELVRGKSARVIGDLVTVLTLCKGLPLAYNRDFQEDKEPMFDSTKTIMGMIDVSAEFAQNVTFNEDRIKKSLPAGHLDATTLADYLVKKGMPFRSSHDIVGKLVGVCVSKGCELQNLSLEEMKKLSPVFEEDVFGFLGVENSVNKFSSYGSTGSNCVAEQLGYWVNKLNITST

SEQ ID NO: 87869 - DNA, 1467 bp, Deinococcus radiodurans R1
  CDS (1)..(1467): transl_table=11
ttgttttacgcattccctgaacctagccccgaacttcggcgaggactttttatgaccaaccaaaaacaggaaactaaactctggggcgggcgtttcgccgaaaagaccgccgaactcgtggaactgttcaacgcctcggtcggttttgaccagcgcctcgccgagcaggacattcgcggttcgctggcgcatgtggcgatgctgggggggcagggcatcctgactgccgaggaagtctcccaaatcaccgacggcctgaacggtgtgctggctgacatccgcgccgggaacttcgagtggcgtctggaccgcgaggacgttcacatgaacgtggaagccgccctgcgcgaccgcatcggcccggtggcgggcaagctgcacaccgctcgctcgcgcaacgatcaggtggcggtggatttccggctgttcaccaaggaagccgcgctcgacctcgccgaacagacccgtgccctgcgccgcgtgatgctggccgaggccgaaaagcacctccagaacgaggtcattctgcccggctacacccacctgcaagtggcgcagcccatcctgctggcgcactggttcatggcttacgtggcgatgctggagcgcgacgagggccgtttccgcgacgccgccgagcggatggacgagtcgccgctgggcagctcggcgctggcaggtacgccctggccgctcgaccggcacgcgaccgccgaggcgctgggctttgcgcggcccaccgccaacagtctcgacggcgtgggcagccgcgacttcgcgttggagttcctgagcgcctgtgccatcctgtcggcacacctctcgcgcctctctgaagaactgatcttgtattccaccttcgagttcggcttcatcaccctgcccgactcgcacaccaccgggtccagcatcatgccgcagaagaaaaaccccgacgtgtccgaactggcacgcggcaaggcggggcgcgtcttcggcaatctgatggcgctgctgacggtggtcaaaggtacgccgctcgcctacaacaaggacttgcaggaggacaaggaaggcgtgttcgactcctacgacacgctgagcatcgtcctgcgcctgtatgccgagatgctgcccaagaccgtctggcacgccgacgtgaccaaagcggcggcggcgcgtggctattccaccgccaccgacgtggccgattacctcgcccggcagggtgttcccttccgcgaggcgcacgaggtcgtgggcgggctggtcgggctggcctcgcgctcggaccggcaactgtgggaactgaccgacgccgaactgaaagccgcccacccgctgctcagcgcggaagtggcgcagaaactcaccgtcgaggaaagtgtccgcagccgccagagctacgggggcacggcgcccgagcgggtgcgagaagcggtggaggcggcgaaagaaaagctgcgccaggaaacgggccagccttaa

SEQ ID NO: 87870 - protein, 488 aa, Deinococcus radiodurans R1
MFYAFPEPSPELRRGLFMTNQKQETKLWGGRFAEKTAELVELFNASVGFDQRLAEQDIRGSLAHVAMLGGQGILTAEEVSQITDGLNGVLADIRAGNFEWRLDREDVHMNVEAALRDRIGPVAGKLHTARSRNDQVAVDFRLFTKEAALDLAEQTRALRRVMLAEAEKHLQNEVILPGYTHLQVAQPILLAHWFMAYVAMLERDEGRFRDAAERMDESPLGSSALAGTPWPLDRHATAEALGFARPTANSLDGVGSRDFALEFLSACAILSAHLSRLSEELILYSTFEFGFITLPDSHTTGSSIMPQKKNPDVSELARGKAGRVFGNLMALLTVVKGTPLAYNKDLQEDKEGVFDSYDTLSIVLRLYAEMLPKTVWHADVTKAAAARGYSTATDVADYLARQGVPFREAHEVVGGLVGLASRSDRQLWELTDAELKAAHPLLSAEVAQKLTVEESVRSRQSYGGTAPERVREAVEAAKEKLRQETGQP

SEQ ID NO: 87871 - DNA, 1461 bp, Agrobacterium tumefaciens str. C58
  CDS (1)..(1461): transl_table=11
ttggcggaaggaagcctgaacggcgttttttctgtcatcgaatactccagggcactaaacatggctgacggcacagatcagaaatcctccaaccagatgtggggcggacgttttgcttccgggccatcagccatcatggaagagataaatgcctccatcggcttcgacaagaagctttatgcccaggacatccgcggctctatagcgcacgccaccatgctggcggaaaaaggcattatttcgcaggaagataaagagaagatcgttcacggcctgaacacgatcctgtcagagatcgaagccggcaccttcgaattctcgcgcaagctcgaagatattcacatgaacatcgaggcgcgccttgcaaccctcatcggcacggcggccggccgcctgcacaccgcgcgctcgcgcaacgaccaggtggcgctcgatttccgcctgtgggttaaggaagaattgcagaagaccgagggcatgttgacagccctcatcgccgccttcctcgaccgcgccgaggaaaatgccgataccgtgatgcccggcttcacccatctgcagacggcgcagcccgtcaccttcggccaccattgcatggcctatgtggaaatgttcggccgtgaccgtgcccgtgtgcggcacgccatcgagcatctggacgaaagcccgatcggcgcagccgcgctggccggcaccggctaccccatcgaccgccatatgacagccaaggcgctcggtttccgcgagccgacccgcaactctatcgacaccgtctccgaccgcgatttcgcgctggaattcctgtcgatcgcttcgatctgcgccacgcatctgtcgcgtctcgccgaagaaatcgtcatctggtcgacgccgcaattcggtttcatccgcctctcggatgccttttccaccggctcttcgattatgccgcagaaaaagaaccctgacgccgccgaactggtgcgcgccaagactggtcgcatcaacggctcgctggtggcgctgctgactgtcatgaagggcctgccgcttgcctattccaaggacatgcaggaagacaaggaacaggttttcgactccgccgaaagcctggaattggcgattgccgccatgaccggcatgatacgcgacctcgaggtgcgcaaggaccgtatgcgtgcggccgccggttcgggttattccacagccaccgatctcgccgactggctggtgcgcgaggcgggcctgccgttccgcgatgcccaccatgtgaccggcaatgccgtggcgctggcggagaaaaagggctgcgatctggccgatctttcgctggaggaattgcaggccatccaccccgacatcaccaacggtattttcgacgttctctcggtcgaggcatcggtcgccagccgcacaagctttggcggcaccgctccttcggaagtcaggaagcagatcgcctggtggcgtggacgcaactga

SEQ ID NO: 87872 - protein, 486 aa, Agrobacterium tumefaciens str. C58
MAEGSLNGVFSVIEYSRALNMADGTDQKSSNQMWGGRFASGPSAIMEEINASIGFDKKLYAQDIRGSIAHATMLAEKGIISQEDKEKIVHGLNTILSEIEAGTFEFSRKLEDIHMNIEARLATLIGTAAGRLHTARSRNDQVALDFRLWVKEELQKTEGMLTALIAAFLDRAEENADTVMPGFTHLQTAQPVTFGHHCMAYVEMFGRDRARVRHAIEHLDESPIGAAALAGTGYPIDRHMTAKALGFREPTRNSIDTVSDRDFALEFLSIASICATHLSRLAEEIVIWSTPQFGFIRLSDAFSTGSSIMPQKKNPDAAELVRAKTGRINGSLVALLTVMKGLPLAYSKDMQEDKEQVFDSAESLELAIAAMTGMIRDLEVRKDRMRAAAGSGYSTATDLADWLVREAGLPFRDAHHVTGNAVALAEKKGCDLADLSLEELQAIHPDITNGIFDVLSVEASVASRTSFGGTAPSEVRKQIAWWRGRN

SEQ ID NO: 87873 - DNA, 1485 bp, Drosophila melanogaster
  CDS (1)..(1485)
atggttgtacgacacagtgaagtatctgcgagcagccccagtagtcaaacaactgttacgccaatcggatccatcatgacccagatccccgagagctgttataagatgtggggtggtaggttcaccgaggggccgcatgaggctctccattcgctgaataacagcctgccctacgattctcgcctctatgcggatgatttggacgccagcaaggcgtatgcagaggcactccatcgagctggtctcatcaactcagccgaggcggataagttggtaaagaatctggagctgttgcgattcgattggatcgagggaactgtgaagattctacccggtgacgaggatgtgcacacggtgaacgagcgattgctggtggagattaccggcgaactgggccagcggcttcacacgggcagaagcagaaatgaccaggtggtcacggacatgaagctatggcttcgcaaggccattcgtgagaccttgggccggctgagtggcatcattgaaactgccaccaggcaggcggaactccacctgggcgtcctcatgccaggatacacgcatctgcagcgggcccagaccgttcagttctcccactggctgctctcgcacgcgtttgcattaagggaagatggccagcggctgttggagctaagggatcgggcgaatgtcctgccccttggaagtggcgctctggcgggaaatccccttggcatcgatcgtttgtggctggccgagaggctgggattctcgggtgtcacagccaacagcatgcacgccgtgggagatcgagattttgtagttgacttcatctactgctgctctatggtgagcctgcatctgtcccgattggcggaggatttgatcatctacagtaccaaggagttcgacttcatcaaactggccgatggcttttccagtggcagcagcctgatgcctcagaaaaggaatccggacagcttggagctgattcgcggcatggccggtgtgatcaccgccaatctgacgggcataatgatgaccattaagggcactccgtccacctacaacaaggacttgcagtacgacaagcaattctgcttccagtccttcgacaagctgtcccaagtgctcgaggttaccgatggtgtcctacagacgattcaggtcaagcaggaatcaatggaggcggcacttagcacagacatgctggccactgactgggcctactatctggtgaagaagggggttccattccgccaggcgcatcacattatcggtcgcgtggtctcggaggccgaaaagcgcggtgtggacatcactgatttgccgctgggagatctccagaaattcagtcctttatttggatcggatatcgttgcagtggcggactactccaacaatgtccagcaatataatgcgattggtggaaccgccagtagcagcatcgtggaacaactgcgtttgctcaagaagtgcgcaagggatttggccaaacagtcgtag

SEQ ID NO: 87874 - protein, 494 aa, Drosophila melanogaster
MVVRHSEVSASSPSSQTTVTPIGSIMTQIPESCYKMWGGRFTEGPHEALHSLNNSLPYDSRLYADDLDASKAYAEALHRAGLINSAEADKLVKNLELLRFDWIEGTVKILPGDEDVHTVNERLLVEITGELGQRLHTGRSRNDQVVTDMKLWLRKAIRETLGRLSGIIETATRQAELHLGVLMPGYTHLQRAQTVQFSHWLLSHAFALREDGQRLLELRDRANVLPLGSGALAGNPLGIDRLWLAERLGFSGVTANSMHAVGDRDFVVDFIYCCSMVSLHLSRLAEDLIIYSTKEFDFIKLADGFSSGSSLMPQKRNPDSLELIRGMAGVITANLTGIMMTIKGTPSTYNKDLQYDKQFCFQSFDKLSQVLEVTDGVLQTIQVKQESMEAALSTDMLATDWAYYLVKKGVPFRQAHHIIGRVVSEAEKRGVDITDLPLGDLQKFSPLFGSDIVAVADYSNNVQQYNAIGGTASSSIVEQLRLLKKCARDLAKQS

SEQ ID NO: 87875 - DNA, 1407 bp, Pseudomonas putida KT2440
  CDS (1)..(1407): transl_table=11
atgagtgaatccatgagcaccgagaagaccaatcagtcctggggcggccgcttcagtgagcccgtcgacgccttcgtcgcccgtttcaccgcctcggtagatttcgacaagcgcctgtaccgtcacgacatcatgggttcgattgcccatgccaccatgctggcgcaggtcggcgtgctcagtgatgccgagcgcgacaccatcatcgatggcctgaaaaccatccagggcgagattgaagccggcaacttcgactggcgtgtcgacctcgaagacgtgcacatgaacatcgaagcacgcctgaccgaccgcatcggcatcaccggcaagaagctgcatactgggcgtagccgcaacgaccaggtggccaccgacatccgcctttggctgcgcgacgaaatcgacctgatcctgggcgaaatcacccgcctgcagcagggcctgctggagcaggcagagcgtgaagccgaaaccatcatgcctggtttcacccacctgcagacggcgcagccggtcacctttggccaccacctgctggcgtggttcgaaatgctcagccgcgactatgagcgcctggtcgactgccgcaagcgcaccaaccgcatgccactgggcagcgccgcgctggccggcaccacctacccgatcgaccgtgaactgacctgcaagctgctgggctttgaagccgtggccggcaactcgctggatggcgtgtcggaccgtgatttcgccatcgaattctgcgccgctgccagcgtggcgatgatgcacctttcgcgcttctccgaagagctggtgctgtggaccagcgcgcagttccagttcatcgaccttccggaccgcttctgcactggcagctcgatcatgccgcagaaaaagaacccggacgtgccagagctggtacgtggcaagagcggccgcgtgttcggcgccctgaccggcctgctgaccctgatgaaaggccaaccgctggcctacaacaaggacaaccaggaagacaaggaaccgctgttcgacgccgccgataccctgcgcgactcgctgcgggccttcgctgacatgatcccggcgatcaagcccaagcacgccatcatgcgtgaagcggccctgcgcggtttctccaccgctaccgacctggctgactatctggttcgccgtggcctgccgttccgtgactgccacgagatcgttggccacgcggtgaagtatggtgtggacactggcaaggacctggccgagatgagcctggacgaactgcgccaattcagcgaccagatcgagcaggacgtgtttgccgtgctgacgctggaaggctcggtgaatgcgcgtgaccacattggtggtacggcgccggcgcaggtgcgtgctgccgtcgttcgtggcaaggccctgttggcgtctcgctaa

SEQ ID NO: 87876 - protein, 468 aa, Pseudomonas putida KT2440
MSESMSTEKTNQSWGGRFSEPVDAFVARFTASVDFDKRLYRHDIMGSIAHATMLAQVGVLSDAERDTIIDGLKTIQGEIEAGNFDWRVDLEDVHMNIEARLTDRIGITGKKLHTGRSRNDQVATDIRLWLRDEIDLILGEITRLQQGLLEQAEREAETIMPGFTHLQTAQPVTFGHHLLAWFEMLSRDYERLVDCRKRTNRMPLGSAALAGTTYPIDRELTCKLLGFEAVAGNSLDGVSDRDFAIEFCAAASVAMMHLSRFSEELVLWTSAQFQFIDLPDRFCTGSSIMPQKKNPDVPELVRGKSGRVFGALTGLLTLMKGQPLAYNKDNQEDKEPLFDAADTLRDSLRAFADMIPAIKPKHAIMREAALRGFSTATDLADYLVRRGLPFRDCHEIVGHAVKYGVDTGKDLAEMSLDELRQFSDQIEQDVFAVLTLEGSVNARDHIGGTAPAQVRAAVVRGKALLASR

SEQ ID NO: 87877 - DNA, 1509 bp, Bordetella parapertussis 12822
  CDS (1)..(1509): transl_table=11
atggtgcagattatccgacaagtcggccggcgcgccgttccgtggcgccgccgcggcgcgcgccggccctatataattgcccgcatcatggcaaatacttcccactccagccaggaccagttcgccaacaaggcgcaggcgtggtccgcccgtttctcggaacccgtttccgacctcgtcaaacgctacacggcctcggtcgatttcgacaagcgcatggcgcgccacgacatccgcggctcgctggcgcacgccgacatgctggccgcgcaaggcatcatctcggcccaggacctggccgacatccagcgcggcatgcagcagatcctctcggagatcgacgccggctcgttccagtggctgctggacctggaagacgtgcacctgaacatcgagaagcgcctggtggagctcgtgggcgacgccggcaagcgcctgcacaccggccgctcgcgcaacgaccaggtcgccaccgacatccgcctgtggctgcgcgacgaaatcgacaccctggtcgacctgctgcgccagctgcgccacgcgctggccacggtcgcgctggagaacgccgccaccatcatgccgggcttcacccacctgcaggtggcccagcccgtcacgttcggccaccacctgctggcctatgccgagatgttcggccgcgacgccgagcgcctggccgactgccgccgccgcgtcaaccgcctgccgctgggcgcggccgcgctggccggcaccagctatcccatcgaccgcgagcgcgtggcccgcacgctgggcttcgacggcgtctgccgcaactcgctcgacgccgtctccgaccgcgacttcggcatcgaattctgcgccgccggcgccctgatcatgacgcacatctcgcgtctttccgaggaactggtgctgtggatgagcccgcgcgtgggcttcatcgacctggccgaccgcttctgcaccggcagctcgatcatgccgcagaagaaaaaccccgacgtccccgaactggcgcgcggcaagaccggccgcgtcaacggccacctggtggcgctgctgaccctgatgaagggccagccgctggcctacaacaaggacaaccaggaagacaaggaaggcctgttcgacacggccgacacgctgcgcgacaccctgaccatcttcgccgacatggccggcggcatcaaggtcaaggccgacaacatgcgcgccgccgccctgcagggctttgccaccgccaccgacctggccgactacctggtcaagcgcggcctgccgtttcgcgacgcgcacgaaatcgtcgcccacgcggtgcgcgactgcgagcagcgcggctgcgacctggccgacctgtcgctggccgacctgcaggcctaccatcccagcatcggcgaggacatccaccaggtgctgacgctggaaggctcggtggccgcccgcaagcacatcggcggcaccgcccccgagcgcgtgcgcgaggaagcccagcgcgtgctggccgagaccgccggcgcctga

SEQ ID NO: 87878 - protein, 502 aa, Bordetella parapertussis 12822
MVQIIRQVGRRAVPWRRRGARRPYIIARIMANTSHSSQDQFANKAQAWSARFSEPVSDLVKRYTASVDFDKRMARHDIRGSLAHADMLAAQGIISAQDLADIQRGMQQILSEIDAGSFQWLLDLEDVHLNIEKRLVELVGDAGKRLHTGRSRNDQVATDIRLWLRDEIDTLVDLLRQLRHALATVALENAATIMPGFTHLQVAQPVTFGHHLLAYAEMFGRDAERLADCRRRVNRLPLGAAALAGTSYPIDRERVARTLGFDGVCRNSLDAVSDRDFGIEFCAAGALIMTHISRLSEELVLWMSPRVGFIDLADRFCTGSSIMPQKKNPDVPELARGKTGRVNGHLVALLTLMKGQPLAYNKDNQEDKEGLFDTADTLRDTLTIFADMAGGIKVKADNMRAAALQGFATATDLADYLVKRGLPFRDAHEIVAHAVRDCEQRGCDLADLSLADLQAYHPSIGEDIHQVLTLEGSVAARKHIGGTAPERVREEAQRVLAETAGA

SEQ ID NO: 87879 - DNA, 1728 bp, Strongylocentrotus purpuratus
  CDS (1)..(1728)
atggccatggaaaagagtggtaagctgtggggagggcgtttcactggcgacacagaccccgtcatggagaagttcaacgcctccattgaattcgacaagcgtatgtggaaggctgacatagtgggcagccaagcttatgtcaaggctatctgcaaggtcggtctggtcacagaggaggagagggatttaatcgatgatgggcttactaaggtagcacaggagtgggagaagggggagtttaccattcagcctggagatgaagacattcacactgccaatgaaagaagactgaaagaatacattgggtcagtcgcaggcaaactacacactggcaggagcagaaatgaccagagtggtaagctgtggggagggcgtttcactggcgacacagaccccgtcatggagaagttcaacgcctccattgaatttgacaagcgaatgtggaaggctgacatagtgggcagccaagcttatgtcaaggccatctgcaaggtcggtctggtcacagaggaggagagggacttaatcgatgatgggcttactaaggtagcacaggagtgggagaagggggagtttaccattcagcctggagatgaagacattcacactgccaatgagaggagactgaaagaatacattgggtcagtcgcaggcaaactacacactggcaggagcagaaatgaccagtgtgcaacggacatgaggctgtggctgagagacagtctagaatgcatgtaccccatggttaagaacctcatcaatgtattcatacagagagcgagagaggaggtagatgttctgatgccaggatacactcatatgcagagagcacagcctatcagatggagtcattggcttctaagccacgccacggctttacagagggatgctcagagactgaaggagctccaagcaagggtcaatgtaatgccccttggaggaggtgctcttgctggaaatccatttaatgtagacagagaattcctggcaaaagagctgagatttgcaagtcccgcacccaacagcctggatggtacaagtgggcgtgactttgtcgctgagtttctcttctgggcctctttgacgatggtccatctgagtaaagtctctgaagatctcatcctctattgctccaaggaatttggctttgtcaaattagctgatgcttacagtactggaagtagtctgatgcctcagaagaagaatgcagacagtctggagcttatcagaggaaagacaggaagagtctttggcaagtgcgctggattcctgatgacgatgaagggcctacctagtacatacaacaaggacctccaagaagacaaagaggcaatgtttgattcttacgatacccttacaggtgttatacaggtagctactggtgtgatatccaccttgaccattaacccagagacaatgagagcagccctcagcccagatatgctctcaaccgatctggcttattacctggttaggaaaggggttccattccgtgaagcccatggtttatcaggagagtgtgtagcccttgccgagcagaagacttgttcactcaccgatcttactttgaaagatctccagactatccacccgttatttgaggaagatgttgtgggtgtatgggactacgagaacagcgttgaacagtacaccagctccggaggcaccagcaaacagtgtgttttgacgcaagttgagcagctggaacagtggatcacgtctcattaa

SEQ ID NO: 87880 - protein, 575 aa, Strongylocentrotus purpuratus
MAMEKSGKLWGGRFTGDTDPVMEKFNASIEFDKRMWKADIVGSQAYVKAICKVGLVTEEERDLIDDGLTKVAQEWEKGEFTIQPGDEDIHTANERRLKEYIGSVAGKLHTGRSRNDQSGKLWGGRFTGDTDPVMEKFNASIEFDKRMWKADIVGSQAYVKAICKVGLVTEEERDLIDDGLTKVAQEWEKGEFTIQPGDEDIHTANERRLKEYIGSVAGKLHTGRSRNDQCATDMRLWLRDSLECMYPMVKNLINVFIQRAREEVDVLMPGYTHMQRAQPIRWSHWLLSHATALQRDAQRLKELQARVNVMPLGGGALAGNPFNVDREFLAKELRFASPAPNSLDGTSGRDFVAEFLFWASLTMVHLSKVSEDLILYCSKEFGFVKLADAYSTGSSLMPQKKNADSLELIRGKTGRVFGKCAGFLMTMKGLPSTYNKDLQEDKEAMFDSYDTLTGVIQVATGVISTLTINPETMRAALSPDMLSTDLAYYLVRKGVPFREAHGLSGECVALAEQKTCSLTDLTLKDLQTIHPLFEEDVVGVWDYENSVEQYTSSGGTSKQCVLTQVEQLEQWITSH

SEQ ID NO: 87881 - DNA, 1416 bp, Nasonia vitripennis
  CDS (1)..(1416)
atgaccgagttcaaaagccaaaagttatggggcggtcgcttcgtaacaggcattgacccgacgttgaacaagatcaatgcatctatccacatagacaaacgtatgtacgtggaagacatccaggcgagtatcgcttatgcggaagctttgagcaaagcgaagctattgacggacatcgagaatgagcttatagagaatggtttgaagcagattctaaaggaatgggagaacaacgatttcgctctgacacccgacgacgaagatatccataccgctgtggaacggaggctcacggaactaatcggtgacaccgcacgaaaactgcacaccggaagaagtcgcaatgaccaatgcatcaccgacacgaagctctggcttcgaaaatccatcgattacctgatcgaaacgttagtcgacgttatacaggtaatgacgcttcgcgccgaggagaacatcaacgtaataatgcccggttacacgcacttgcaacgcgctcaaccgattcgatggagtcattggcttctgagctatgcctggagcttgaaaaacgacgcgaacaagctgaagcagatgcggaagaacgtgaacgtaatgccgctgggcagcggagctttagccggaaatccgttcgacatcgatcgcgaagctctggccacgagtctcggctttgacggagccacggaaaatagcatgcacgctgtgggagatcgcgatttcatcgctgattttttgtactggacttccttgacttcgatgcacctcagccggttcgccgaggatgtgataatctacagcagccaagagttcgatttcttgaaaatatccgacagcttttcgaccggtagcagtcttatgccccacaagcgcaaccccgatagcatggaactgatcagaggaaaatctggtacgatgcttggcaagtgtgtaggatttctgactacgctgaaaggtataccttcgacttacaataaggatcttcaagaggacaaggaggcactatttactgcctacgacactgtgacagatttgctcgtcgttgctcgggaaactataaaaactttagaagtgaactccgacaaatgtcgagcagctttgacgctaaatatgctagcaactgatctggcttactatctcgtgcggaaagggattccatttcgaaatgctcatcacattgtcggtcagataatctgtgcaaccgaaaccgaaaagataccgattaaagaatttccagtttcaaaattgaaaaacttttcacccgttttcgatgaggatgtcaaaaatatctggaatttcgaaagcagtgtagaacaatacaagacttgcggtggcacaagtttagcagcagtacaacaacaaattgacaccctcaacaattggttgtcacaaagtaattcgaagcaatataatgaattataa

SEQ ID NO: 87882 - protein, 471 aa, Nasonia vitripennis
MTEFKSQKLWGGRFVTGIDPTLNKINASIHIDKRMYVEDIQASIAYAEALSKAKLLTDIENELIENGLKQILKEWENNDFALTPDDEDIHTAVERRLTELIGDTARKLHTGRSRNDQCITDTKLWLRKSIDYLIETLVDVIQVMTLRAEENINVIMPGYTHLQRAQPIRWSHWLLSYAWSLKNDANKLKQMRKNVNVMPLGSGALAGNPFDIDREALATSLGFDGATENSMHAVGDRDFIADFLYWTSLTSMHLSRFAEDVIIYSSQEFDFLKISDSFSTGSSLMPHKRNPDSMELIRGKSGTMLGKCVGFLTTLKGIPSTYNKDLQEDKEALFTAYDTVTDLLVVARETIKTLEVNSDKCRAALTLNMLATDLAYYLVRKGIPFRNAHHIVGQIICATETEKIPIKEFPVSKLKNFSPVFDEDVKNIWNFESSVEQYKTCGGTSLAAVQQQIDTLNNWLSQSNSKQYNEL

SEQ ID NO: 87883 - DNA, 1407 bp, Magnaporthe grisea 70-15
  CDS (1)..(1407)
atggctgaactaccgtcacacgaaaaaaaggcaaacatgctctggggcgggcgcttcacaggtggcctggacccgctcatggtggcatacaacgagagtatctacttcgataagaacctgtaccgccaggacatcgctggaagcatcgcctttgcgcgagcaaacagcaaagccggtgtcatcacacaggccgagttcgaacagattgagaagggtttgctcgaggttcagaaggagtgggaggctggtacctttaagattgtgccgggtgcagatgaggacattcacactgccaacgaacgacgactaggcgagatcattggcaaggatgttgccggcaagcttcacacaggccgctcgcgcaacgagcaggtggtcaccgacatgcgcatgtggctgcgcgacgaactgcgcaagatcgagtcgtacctcgtcagcttcctgaccgtcaccgccgcccgtgccgagcgggagatcgacctggtcatgcctggatacacacaccttcagcgcgcccagcccatccgctggagccactggatgttgtcttatggactcgtcttcgcctccgacctcgagcgcctgagggaggtgatcaagcgggtcaaccgctcacctctgggctgcggtgcgctggccggcaacccgttcggtatcgaccgcgagatgatggccaaggagttgggctttgatggcctcatgtggaactcaatgggagccgttgccgaccgtgactttgtcgccgagactctgcagtggggtgccatgttgatgcaacacatcagccgatgggctgaggatctgatcatctactcgacggccgagttcggctttgtgcgcctggccgatgcctactcgaccggcagcagcttgatgccgcagaagaagaacccggacagcctggagctgctgcggggcaagagcgggcgtgcctttggccacatggctggcttcatgatggttcaaaagggcctcccgagtacctacaacaaggatctccaggagagcattgagccaatgctggaccacgtccgcaccgtctcggacagcatacagatcgccgagggcgtgcttgccactctggaggcgcggggcgacaagatgcaggccgcattggacccgttcatgctggccaccgatgtggctgactatctggtgcgcaagggcgtgcctttccgtgagacgcaccacatctctggaaggtgcgtggcgctgtcggagcagacgggtgtgccgatggacaagctcacgtacgagcagctgcgggagattgacgagcgatttgagcccgatattgccgagtcgtttgactacgacaagagcgtggagatgaggtctgccaagggcggcacctgcaaagaggctgtgatggagcaggtcaaggtgttgaggaagatgctggagtga

SEQ ID NO: 87884 - protein, 468 aa, Magnaporthe grisea 70-15
MAELPSHEKKANMLWGGRFTGGLDPLMVAYNESIYFDKNLYRQDIAGSIAFARANSKAGVITQAEFEQIEKGLLEVQKEWEAGTFKIVPGADEDIHTANERRLGEIIGKDVAGKLHTGRSRNEQVVTDMRMWLRDELRKIESYLVSFLTVTAARAEREIDLVMPGYTHLQRAQPIRWSHWMLSYGLVFASDLERLREVIKRVNRSPLGCGALAGNPFGIDREMMAKELGFDGLMWNSMGAVADRDFVAETLQWGAMLMQHISRWAEDLIIYSTAEFGFVRLADAYSTGSSLMPQKKNPDSLELLRGKSGRAFGHMAGFMMVQKGLPSTYNKDLQESIEPMLDHVRTVSDSIQIAEGVLATLEARGDKMQAALDPFMLATDVADYLVRKGVPFRETHHISGRCVALSEQTGVPMDKLTYEQLREIDERFEPDIAESFDYDKSVEMRSAKGGTCKEAVMEQVKVLRKMLE

SEQ ID NO: 87885 - DNA, 1365 bp, Gibberella zeae PH-1
  CDS (1)..(1365)
atggccgccaacaataccaacaatgccggtgctcccgctgagggtatgctctggggtggtcgctttacaggcggtattgatcccctgatgcatcaatacaatgccagtatctcttacgataagcacctctacaaggaggacattctcggcagcattgcctttgcccgcgccaatgccaagtcaggcatcatctccaatgatgagttcactgaaatcgagcgtggtctcagagaggtcatgaaggagtgggaggctggtacctttaccatcatgcccaatgatgaggatattcatactgcaaacgagcgacgcctatccgagatcattggtaaggagatcggtggaaagcttcacactggtcgcagccgaaatgagcaggttgttaccgacatgcgaatgtggctgcgcgagcgtattcgtgagattgagagctatcttgttgccttcctccaggtcatcgccggccgcgctgaggccgatatcgaccatatcatgcccgggtacacacatcttcaattggctatgccagtcaagttctcccaatggctcctgtcatacggcttttcctttgcctctgacttggaacgattacgcgaggtcttgaaacgcgtcaacaggagcccactcggtgctggtgctcttgccggcaatgcctttggtattgatcgtcaaatgatggccaaggagctcggctttgaaggaataatgtggaacagcatgggcgccgttgctgaccgtgactttgttactgaattcctgtcttggggtaccatgttcatgggacacatctccaggttcagtgaagacttgatcatttattccactgctgaatttggctttaagaagaaccccgacggcctcgagcttttgaggggcaaggctggcagggcctttggtcattttgccggtgtctatgttgccacaaagggtattccaagtacttacaacaaagacttgcaagagagttgggagcctatgctggatcatgtcaagactgtctccgatagtgtgcagatcgcaaatggcgtccttagcactctcaagcttcgaccagaccgcatgagagcctctctcaaccctttcctccttgcaaccgacgttgcagatgctcttgttcgacttggcgtgcctttccgtgagacacaccacatttcaggacgcgtggtggccaagagcgaggagttgggaatcccaatggaccagctgagcgttgagcaacttcaggccattgatagccgattccccgataacatcaaggacgtattcaactacgaggctagtgttgaatcaaggaacgctcaaggtggcaccagccgagcaggtgtgctggagcagatcgaggtcctcaagggcatgttgaattag

SEQ ID NO: 87886 - protein, 454 aa, Gibberella zeae PH-1
MAANNTNNAGAPAEGMLWGGRFTGGIDPLMHQYNASISYDKHLYKEDILGSIAFARANAKSGIISNDEFTEIERGLREVMKEWEAGTFTIMPNDEDIHTANERRLSEIIGKEIGGKLHTGRSRNEQVVTDMRMWLRERIREIESYLVAFLQVIAGRAEADIDHIMPGYTHLQLAMPVKFSQWLLSYGFSFASDLERLREVLKRVNRSPLGAGALAGNAFGIDRQMMAKELGFEGIMWNSMGAVADRDFVTEFLSWGTMFMGHISRFSEDLIIYSTAEFGFKKNPDGLELLRGKAGRAFGHFAGVYVATKGIPSTYNKDLQESWEPMLDHVKTVSDSVQIANGVLSTLKLRPDRMRASLNPFLLATDVADALVRLGVPFRETHHISGRVVAKSEELGIPMDQLSVEQLQAIDSRFPDNIKDVFNYEASVESRNAQGGTSRAGVLEQIEVLKGMLN

SEQ ID NO: 87887 - DNA, 1386 bp, Candida glabrata CBS 138
  CDS (1)..(1386)
atgtcaggtcaagctaaaacaaaactttggggtggtagatttacagggcagactgacccactaatgcaactttacaatgcctctttaccatacgattatagaatgtacaaggccgatttggaaggcacaaaagtttacaccgctggtctaactaaattgggtctaatcacagagagcgaattggcaaagattcactctggtcttaaggacatcgaaaatgaatgggatgagggcaagtttgtccgtcatgagagtgatgaggacatccacactgctaatgagagaagattgggcgaactaatcggccgtgacatagctggtaaagttcacaccggtagatcaagaaatgaccaagttgtcacggatatgagaatatactgtcgtgagattttaaatgaaaagatcttccctgcgatgaaatccttgattaatgttttagttaacagagctgagaaggagatagatatcctgatgcctggttacacacatctacagagagctcaaccgatcagatgggcacattggttaagctcctatgctacatatttcacagaagaccttaagagactggaacaaattgcagagagattgaacaagtcaccattgggttcgggagctcttgcgggtcatccatatggtattgacagacaattcttggccgaaggacttggatttaacggtgtgattggtaactctctggtagctgtttctgatagagactttgtggtagaattgatgttctgggccacattgttcatgaaccacgtctctcgtttctctgaagatttgatcatatactctactgctgagtttggcttcatcaagctgagtgacgcatactccacaggctcctcgttgatgccacagaagaagaacgccgactccttggaactattgagaggtaaatctggtagagtgtttggtgaattgagtgggttcctaatgagtttgaaaggtatcccatctacatacgacaaggatatgcaagaggacaaagagccattgtttgactgtctaaccaccgtagaacactccatcctgatagcagacggtgttatctctactctaactgtcaacaaggagaagatggagaacgcgttgaccatggacatgctggccaccgacctggcagattacttggtcagaaagggtgttccattcagagagacacacagcatatccggacaatgtgtcgccctggccgaaaaggagaacttgtccggtatagacaaactatccttagagcaattcaagaacatcgatcctcgtttcgagcaagacctttacgagactttcaacttcgagatgagcgtggagagaagagatgccattggtggtactgcaaagtccgctgtgctcgctcaattaaagagcttgaagttataa

SEQ ID NO: 87888 - protein, 461 aa, Candida glabrata CBS 138
MSGQAKTKLWGGRFTGQTDPLMQLYNASLPYDYRMYKADLEGTKVYTAGLTKLGLITESELAKIHSGLKDIENEWDEGKFVRHESDEDIHTANERRLGELIGRDIAGKVHTGRSRNDQVVTDMRIYCREILNEKIFPAMKSLINVLVNRAEKEIDILMPGYTHLQRAQPIRWAHWLSSYATYFTEDLKRLEQIAERLNKSPLGSGALAGHPYGIDRQFLAEGLGFNGVIGNSLVAVSDRDFVVELMFWATLFMNHVSRFSEDLIIYSTAEFGFIKLSDAYSTGSSLMPQKKNADSLELLRGKSGRVFGELSGFLMSLKGIPSTYDKDMQEDKEPLFDCLTTVEHSILIADGVISTLTVNKEKMENALTMDMLATDLADYLVRKGVPFRETHSISGQCVALAEKENLSGIDKLSLEQFKNIDPRFEQDLYETFNFEMSVERRDAIGGTAKSAVLAQLKSLKL

SEQ ID NO: 87889 - DNA, 1386 bp, Kluyveromyces lactis NRRL Y-1140
  CDS (1)..(1386)
atggctgagaaacaaaaattgtggggtggtagattcactggtgagactgatccattgatgcatttatacaatgcatcattaccatatgattataagatgtacaaggcagatttagaaggtactaaagtgtacaccagtggtttgcaaaaaattggcttgttgactgaggatgaattgagtaagattcatgctggtttgaagcaaattgaacaagaatggagcgatggttcgttcgttagagaagcggatgacgaagatatccatactgccaatgaaagaagattgggtgagattattggtcgcggaattgctggtaaggtccataccggtaggtctcgtaacgatcaagtggctactgacatgagaatatactgtcgtgatatcttgaacggtactgtgttgccagctctatcgtctttgattaaggttatcttacaaagagctgaagaagagatagatgtactaatgccagggtacacccatttgcaaagagctcaaccaattagatgggctcactggttgtcctgttatgcgacttatttcacagaagattacaagagactgcaacagatcgtggaaagattgaacgtgtctccattgggtgctggtgcccttgctggtcatccatacggcattgatagggagtttttggctgcaggtttgaatttcaatggtgtcattggtaactctttgactgcagttgctgatagagatttcgttgttgaaattatgttctggggttctttgttcatgaaccatatttcccgtttcgctgaggatctaattatttactccacagcggaattcggtttcatccaattgtccgatgcttattccactggttcttctttaatgccacagaagaagaacccagattctttggaacttttgagaggtaagtcaggtagagtctttggtcaattggctggtttcttgatgtctatcaagtcaatcccttccacgtataacaaggacatgcaagaggacaaagaaccattattcgattgtttgaccactgtggaacattctattctaattgccactggtgttatttccactttggcaattcacaaggagaaaatggaaggtgctctaacaatggatatgttagctacagaccttgcagattatctagtcagaaaaggtgttccattcagagaaacccatcatatctccggccaagccgttgcccttgctgaatctttgaacgtatctggtattgacaagatcaacttgcaacagtacaagtcaattgatgaaagattcgaacaagatgttttcgaagtgtttaacttcgaaaagagcgttgaaagaagagatgccactggtggtactgccaaggttgctgttttgaaacaattgaagaatctagcatctcaattatga

SEQ ID NO: 87890 - protein, 461 aa, Kluyveromyces lactis NRRL Y-1140
MAEKQKLWGGRFTGETDPLMHLYNASLPYDYKMYKADLEGTKVYTSGLQKIGLLTEDELSKIHAGLKQIEQEWSDGSFVREADDEDIHTANERRLGEIIGRGIAGKVHTGRSRNDQVATDMRIYCRDILNGTVLPALSSLIKVILQRAEEEIDVLMPGYTHLQRAQPIRWAHWLSCYATYFTEDYKRLQQIVERLNVSPLGAGALAGHPYGIDREFLAAGLNFNGVIGNSLTAVADRDFVVEIMFWGSLFMNHISRFAEDLIIYSTAEFGFIQLSDAYSTGSSLMPQKKNPDSLELLRGKSGRVFGQLAGFLMSIKSIPSTYNKDMQEDKEPLFDCLTTVEHSILIATGVISTLAIHKEKMEGALTMDMLATDLADYLVRKGVPFRETHHISGQAVALAESLNVSGIDKINLQQYKSIDERFEQDVFEVFNFEKSVERRDATGGTAKVAVLKQLKNLASQL

SEQ ID NO: 87891 - DNA, 1398 bp, Debaryomyces hansenii CBS767
  CDS (1)..(1398)
atgtcgcaagaacaaccagctgaaagcaagttatggggtggtagattcactggagccactgacccattaatggacttgtataattcttcgttaccatatgacaaaagaatgtttgaagctgacttgaactgtacaaaagtgtatacccaaggattgaataagattgggttgattactgatgaagaattagttgctattcataagggattgggtgagattcaaaaggaatgggaagctggtagttttgttgaaaaggctggagatgaagatattcatacagctaatgaaagaagattaggagaaattattggcaagcatattgcagggaaggttcatacaggtagatccagaaatgatcaagttgctactgatatgagaatctatgtccgtgaaaacttgactaagatgcttgaatttttggcgggatttattaagaccatttctaaaagagctaaggaagaaatagacgttttgatgccaggatacacgcatttacaaaaggctcagcctattagatggtctcattggttatctatgtatgctacatatttcactgaagattataaaagattgaagcaaatcttagaaagagtcaatcaatgcccattaggtgccggtgctttagctggccacccttacggtattgatagagagtttttatcgcagggattaggttttgatttccctattggtaattccttgactgctgtcagtgaccgtgattttgtggttgaaactttattctggtcaactttattcatgaatcatatctcccgtttctcagaagatttgataatttattcaactggtgaatttggatttgttaaattagctgacgcttactctaccggctcatcattgatgccacagaaaaagaatcctgactccttagaattattaagaggtaagtcgggtcgtgttttcggttctttatccggtttcttgatgtctattaagtcaatcccttctacttataataaggatatgcaagaagacaaggaaccattattcgatgctttgaccactgttgaacactctgtattgattgccaccggtgtgatatcaaccttggctattaacaaaacaaagatgagagaggctttaacaatggatatgttggctactgatttagccgattatttagttagaagaggtgtaccattcagagaaactcatcatatttctggtgaatgcgttagagttgcagaagatttgaaattgtcaggaattgatcagttatctttgcaacaattcaaggaaattgatgaaagatttgcggacgatgtgacggatgtctttgatttcgaagttagtgtcgaaagaagaactgctatcggtggtacagctaagtcggctgtgttaaagcaattggaacaactagaagctgaattaaaataa

SEQ ID NO: 87892 - protein, 465 aa, Debaryomyces hansenii CBS767
MSQEQPAESKLWGGRFTGATDPLMDLYNSSLPYDKRMFEADLNCTKVYTQGLNKIGLITDEELVAIHKGLGEIQKEWEAGSFVEKAGDEDIHTANERRLGEIIGKHIAGKVHTGRSRNDQVATDMRIYVRENLTKMLEFLAGFIKTISKRAKEEIDVLMPGYTHLQKAQPIRWSHWLSMYATYFTEDYKRLKQILERVNQCPLGAGALAGHPYGIDREFLSQGLGFDFPIGNSLTAVSDRDFVVETLFWSTLFMNHISRFSEDLIIYSTGEFGFVKLADAYSTGSSLMPQKKNPDSLELLRGKSGRVFGSLSGFLMSIKSIPSTYNKDMQEDKEPLFDALTTVEHSVLIATGVISTLAINKTKMREALTMDMLATDLADYLVRRGVPFRETHHISGECVRVAEDLKLSGIDQLSLQQFKEIDERFADDVTDVFDFEVSVERRTAIGGTAKSAVLKQLEQLEAELK

SEQ ID NO: 87893 - DNA, 1395 bp, Yarrowia lipolytica CLIB122
  CDS (1)..(1395)
atgtctgccgaagttccttctaaactcaagctctggggaggccgattcactggcgccaccgatcccctcatgaacctgtacaatgcgtctctgccttacgacaagaagatgtacgaagctgatctcgagggtacccgagtgtacactgcggctctgcgaaagctcgacattctcaacgaccacgagctaagcgagattcaccgaggtctggaagagatcaagaaggagtgggccgccggcaccttcaaggaagaggagggagacgaggacattcacactgccaacgagcgacgactgggcgagattattggccgagacatctctggcaaggtgcacactggccgatctcgaaacgatcaagtcgctaccgacatgcgactgtatgtgcgaaaggagctgggagagatccgaaacctgctggccgacttcatcaaggtgcttatcaaccgaggtaagactgagatggacgtgctcatgccgggatacacccatcttcagcgagcccagcccatccgatgggcccactggctttcatcttacgctacttacttcacctccgacctgcagcgactggaccagctcattgagcgagtcaacatgtctcctctgggctgtggagctctggctggccacccctttggcattgaccgagagtacattgccaccgagcttggctttggcggcatcatcggtaactcccttgttggtgtcggtgaccgagactttgtcaccgagactctcttctggggctctctgctcatgaaccacatttctcgatttgctgaggatctcatcatctactccactgccgagtttggcttcatccagcttgccgatgcctactccaccggttcttctctcatgccccagaagaagaacccggactctctggagcttcttcgaggcaagtctggccgagcttttggccagctggccggcttcatgatgtccgtcaagtccactccttccacctacaacaaggatctgcaggaggacaaggagcccctgtttgacaacctcaccaccgtgtctcactccatccagattgccaccggcgtcatgtccaccctctccatcaacaaggagaagatggagggtgctcttaccatggacatgctggccaccgatctggccgactacctggtccgaaagggcgtccccttccgagagacccaccacatctctggtgaggctgttcgaactgccgaagagctcaaggtgtctggtatcgacaagctgaccctggagcagtacaagaagattgacgagcgattcgaggaggacgttgccaaggtctttgactttgagcagtctgtcgagcgacgaaccgccattggaggaactgccaagtccgccattctccagcagtttgatgctcttgagaaggctctctaa

SEQ ID NO: 87894 - protein, 464 aa, Yarrowia lipolytica CLIB122
MSAEVPSKLKLWGGRFTGATDPLMNLYNASLPYDKKMYEADLEGTRVYTAALRKLDILNDHELSEIHRGLEEIKKEWAAGTFKEEEGDEDIHTANERRLGEIIGRDISGKVHTGRSRNDQVATDMRLYVRKELGEIRNLLADFIKVLINRGKTEMDVLMPGYTHLQRAQPIRWAHWLSSYATYFTSDLQRLDQLIERVNMSPLGCGALAGHPFGIDREYIATELGFGGIIGNSLVGVGDRDFVTETLFWGSLLMNHISRFAEDLIIYSTAEFGFIQLADAYSTGSSLMPQKKNPDSLELLRGKSGRAFGQLAGFMMSVKSTPSTYNKDLQEDKEPLFDNLTTVSHSIQIATGVMSTLSINKEKMEGALTMDMLATDLADYLVRKGVPFRETHHISGEAVRTAEELKVSGIDKLTLEQYKKIDERFEEDVAKVFDFEQSVERRTAIGGTAKSAILQQFDALEKAL

SEQ ID NO: 87895 - DNA, 1386 bp, Apis mellifera
  CDS (1)..(1386)
atgcaggaaaattacgaaaaattatggggaggctgttttacggataatatcgatccaaaatttcatgatctgaacgcatcgattaatattgataaacgaatgtatgcagaagatatagagggaagtgtggcatatgcaaaagcaatacgattggccaatcttctcacagatgaagaattagaaagtatactgaatggtttcaaacaaatgaaagctgaatgggaagagggtcgattcattatacacatcaaagatgaagatatccatgctgcgaatgagcgtcgacttacggaattaatcggagacgttgcaaagaaattacatatcggaagaagccgaaatgatcaaactataactgatacaaaattatggcttcgaaaagctatagacgtgcttttaaagaaattaatgaaattcattcaggttctcgtcgatcgagctgaaaatgaaatagaaattattatgcccggatacactcatatgcaacgtgctcaaccaataaaatggagtcaatggttactcagttacgcatggtatgctaaggcagatattgagagattacaagaaattcgaaaacgggtaaatattttgcctttgggcagtggtgcaatagctgggaatccttttcaaattgatcgacgtattctggccaatgaattggatttttctgaaataacggagaatagcatgtatgctataggagatagagattttgttgttgagtttcttttttggtcttcattaacggtaattcatctaagtcgactttgtgaggatttgatcatttatagcagcgaagaattcggtttcgtgagatttgctgataaattttctacaggtagtagtttgatgcctcaaaaacgtaatccagattgtatggaattaattcgaggaaaagctggcactttacttggaaaatgtatgggtttcatgactactttgaaaggaattccgtctacatataacaaggatcttcaagaagataaagaagctatattttctacattcgatatattagacaatatacttgttatcgctacaaatgcaataaacacgcttgaagtaaaaaacaagaagtgcgaaaaagctttaacatctactatgttagcaactgatatggcatattatcttgttcgaaaagggatatcgtttagagaagctcattacttaactggaaaagctgttgctctgtcagaatcattagaagtatctctttgtaaattgtcgcttaaaaaattacactctataagtcaaaaagatgtgaaggaaatttggaatttttcccatagtattgaacaatataaagttacaggtggaaccagtacgacagcattaatagaacaaattaataaacttcgaacttcattgattaataattctatttaa

SEQ ID NO: 87896 - protein, 461 aa, Apis mellifera
MQENYEKLWGGCFTDNIDPKFHDLNASINIDKRMYAEDIEGSVAYAKAIRLANLLTDEELESILNGFKQMKAEWEEGRFIIHIKDEDIHAANERRLTELIGDVAKKLHIGRSRNDQTITDTKLWLRKAIDVLLKKLMKFIQVLVDRAENEIEIIMPGYTHMQRAQPIKWSQWLLSYAWYAKADIERLQEIRKRVNILPLGSGAIAGNPFQIDRRILANELDFSEITENSMYAIGDRDFVVEFLFWSSLTVIHLSRLCEDLIIYSSEEFGFVRFADKFSTGSSLMPQKRNPDCMELIRGKAGTLLGKCMGFMTTLKGIPSTYNKDLQEDKEAIFSTFDILDNILVIATNAINTLEVKNKKCEKALTSTMLATDMAYYLVRKGISFREAHYLTGKAVALSESLEVSLCKLSLKKLHSISQKDVKEIWNFSHSIEQYKVTGGTSTTALIEQINKLRTSLINNSI

SEQ ID NO: 87897 - DNA, 1476 bp, Aspergillus nidulans FGSC A4
  CDS (1)..(1476)
atgagcgctcccaaagttgccgagaacatgctgtggggaggtcgattcacacagggcctcgaccccctcatggtccagtacaacgagtcactcccctatgaccgcatcctctggaagcaagacatcgccggctcgatcgccttcgcccgcgccaacacaaaatccggcattctctccgcccacgagttctctgagattgagcgcggcttcaagcagatcgccgaggaatggagcacaaacaccttcgttgtcaagcccaatgacgaggacatccacactgccaacgagcgccgtctgtccgagatcatcggcaaggagattggcggaaagctgcacaccggccgctcccgcaacgagcagatcgcaaccgatcttcgtctgtggctgcgcgacgagcttcgcaagctcgatgccttcctcagcgacctcatcaaggtctctattgcccgtgccgagagcgagattgactatatcatgcccggatacacacacctgcagaaggcccagccagtccgctggagtcactggctcttgtcccatgcgactgcgtttgccgacgagctgaagcgactgcgggaggtcacaaagcgggtgaaccgctcgccgctcggtaccggtgcgctcgcgggtaaccccttccacattgaccgagaggctatggctaaggagctgggctttgaggggctcctgtacaactcgatgaatgccgttggcgatcgagactttgcgatggagacgatgcagtggggaagctcgtttatgcttaagatctcgcgctgggcggaggatctgatcatctactccagtctggagtttgggttcgtccgcttgtcggatgcgtactcgactgggtcgtcgttgatgcctcagaagaagaacgctgacagcctcgaactcctccgtggcaaagccggccgcgccttcggccacatggccggcctaatgtgcacgatcaagggtctccctacaacatacaacaaagatctgcaagagagtgtcgagcccctcctcgatcacatcaagaccgtcggcgatagcatccagattgcgactggcgtgctgtccacgctgaccactatcccagagaagatggccgccgccttggcacctgaaatgctcgccaccgagttcgccgactaccttgttcgcaagggcgtgcccttccgcgagggccaccacatttccggccgcgtcgtccagctcgctgagaagcacggcgttcccatggaccagcttagcctggagcagctcaagagcgtggatgacaggtttggcgatgatatccaggagtgcctggactacgagcgggcggttgagttgaaggatgctattggtgggtgcagtaagagggcagtgctggagcagacttcggtgctcaagagcattctcaagcttcgctctagccaggtacaagaagcgtttgctctagaccatgagcaagtgtgcaatgagaaccatgcagtgaaaggcatctga

SEQ ID NO: 87898 - protein, 491 aa, Aspergillus nidulans FGSC A4
MSAPKVAENMLWGGRFTQGLDPLMVQYNESLPYDRILWKQDIAGSIAFARANTKSGILSAHEFSEIERGFKQIAEEWSTNTFVVKPNDEDIHTANERRLSEIIGKEIGGKLHTGRSRNEQIATDLRLWLRDELRKLDAFLSDLIKVSIARAESEIDYIMPGYTHLQKAQPVRWSHWLLSHATAFADELKRLREVTKRVNRSPLGTGALAGNPFHIDREAMAKELGFEGLLYNSMNAVGDRDFAMETMQWGSSFMLKISRWAEDLIIYSSLEFGFVRLSDAYSTGSSLMPQKKNADSLELLRGKAGRAFGHMAGLMCTIKGLPTTYNKDLQESVEPLLDHIKTVGDSIQIATGVLSTLTTIPEKMAAALAPEMLATEFADYLVRKGVPFREGHHISGRVVQLAEKHGVPMDQLSLEQLKSVDDRFGDDIQECLDYERAVELKDAIGGCSKRAVLEQTSVLKSILKLRSSQVQEAFALDHEQVCNENHAVKGI

SEQ ID NO: 87899 - DNA, 1407 bp, Ustilago maydis 521
  CDS (1)..(1407)
atggcctctacatcagacgactttaccaagcggaagctttggggcggtcgctttaccggcaaaaacgatccgctgctctttgcctacaatgaatcactctcctacgacaagcgtatgcatgctcaggacattcgaggctcgcaagcgtacgcacgcgctctcgtaaagacgggcgtgctcaacgagcaagaaaaggacgagatagtcgctggcctcgaaaaggttggtcaggagtggaaagacggctcattcaagatccattcggatgacgaagacattcacaccgccaatgagcgtcgcctcaccgagctcatcggcagtgtcggtggcaagctgcacacaggcaggtccaggaacgatcaggtggccaccgatatgcgtctctggctcatggatgaggtcaaagccatcgagggctacctcaaggatctgatccaggtcatgattgcacgtggtaggcaagaggtcgatgcgctcatgccaggttacacccaccttcaacgagctcagcctatccgatggtcgcatctcctcttatcgcacgccacctactttgcctcggacctcgcgcgcttgcgcgacctgatgccgcgcatttcggtcttgccgctcggctcaggtcccttggccggcaatccattttctggcctcgaccgagacgccatcgccgccgaccttggattccagaccgtgggtcccaactcgatgaacagcgtctcggatcgtgactttgttgtcgagtacctcatgtgggccagtttgactgcggtccatctgagcaagatggccgaggactttatcatctactcgacttccgaattcggtttcatgcagctcagcgacgcctacagcacgggctcgtcgatcatgccccaaaagaagaacccggacagcttggagctgcttcgtggcaagtccggccgcatctttggtcagatgtcgggcttcatgatgtcgctcaagggtattccatcgacgtacaacaaggacctgcaagaggataaggagccgctctttgacgccgtcgacaccaccaagaacggtattcagattgccactggtgtgctttccacgcttaacattttcccagaaaagatgaaggcggcgctgacacccgacatgctcgctaccgatctggcagaatacctggttcgaaagggcatccccttccgtgagacgcatcacatctctggtagcgccgtgcgtctgtccgaacaaaagggttgtctgctgtcgcaactcacgctccaagacttgcaaactctctcggacaaatttgacgacgatgtcatgcaggtctggtcgtttgagcagagcgtcgaacgtcgtgatgccaagggcggtacctcgaagcgcgccgtgctggaacagtgcgatacgcttgaaaagatgctcggctcttgctag

SEQ ID NO: 87900 - protein, 468 aa, Ustilago maydis 521
MASTSDDFTKRKLWGGRFTGKNDPLLFAYNESLSYDKRMHAQDIRGSQAYARALVKTGVLNEQEKDEIVAGLEKVGQEWKDGSFKIHSDDEDIHTANERRLTELIGSVGGKLHTGRSRNDQVATDMRLWLMDEVKAIEGYLKDLIQVMIARGRQEVDALMPGYTHLQRAQPIRWSHLLLSHATYFASDLARLRDLMPRISVLPLGSGPLAGNPFSGLDRDAIAADLGFQTVGPNSMNSVSDRDFVVEYLMWASLTAVHLSKMAEDFIIYSTSEFGFMQLSDAYSTGSSIMPQKKNPDSLELLRGKSGRIFGQMSGFMMSLKGIPSTYNKDLQEDKEPLFDAVDTTKNGIQIATGVLSTLNIFPEKMKAALTPDMLATDLAEYLVRKGIPFRETHHISGSAVRLSEQKGCLLSQLTLQDLQTLSDKFDDDVMQVWSFEQSVERRDAKGGTSKRAVLEQCDTLEKMLGSC

SEQ ID NO: 87901 - DNA, 1401 bp, Cryptococcus neoformans var. neoformans B-3501A
  CDS (1)..(1401)
atggccagcgaacaggatttcacaaagcgaaagctctggggtggccgattcaccggctctaccgaccctttgatgcatgagttcaatcagtcattgaagtatgacaagcgcatgtacgctgcggatgtcaagggctctattgccttctccaaagctttgctcaaagctggcatcctcaatgagcacgagcagcaagagattgctaggggtttaaagatcgtcgaatccgaatgggccgagaacaagtttgtcatccaatccgacgatgaggacatccacactgccaacgagcggaggctcagcgaaattattggcaaggacattggtggtaagctgcacactggccgaagcaggaacgaccaagtcgctaccgacatgcgaatctggcttatggaggagaccaccagggtcgagggttacctcaaggacctcctcaacgtcatggtctctcgagctgagaaggaagttgacgctatcctccctggttacactcatcttcagcgcgcccagcctgtcaggtggtcccacttcctcctttcccatgctcagtccttccttagtgatcttgagcgtctcagacagctgtacccccgtatttccgttcttcccctcggctctgctgctttggctggaaatccttattcccttgacagggagctgttaaggcaagagctcgattttgagagcattggagagaactctatgcacgcagttgccgatagggactttatcgtggagtggttgcagtgggccagtttgactcaggtgcacatgagtaggatggccgaggacttaatcatttactctagtgccgaatttgggtttgtccagctcagtgatgcgtacagcactggctcttctatcatgcctcagaaaaagaaccctgactcccttgaacttctccgaggcaaggccggtcgaacattcggtcaaatggctggtttcatgatgtccctcaagggtgtcccctcaacctacaacaaggatttgcaagaagacaaggagcccttgtttgatgcagttgacaccgtctccgccgcattgaggattgccgaaggtgtgcttgctaccatgtctattaatcctgagaagatggctgctgcccttactatggacatgcttgccactgatattgccgactacctcgtccgcaagggtgtccccttccgtgagactcaccacatctctggccgttcggtcgccctcgccgagaagaccaactgccagatttccgacttgaccatggaacaatggaaggagttggacgagaggtttgacgagactgtcatggaggtctttgactttgagacaagtgtggagaagaggaacgccattggtggtcccgcgagaagcatgattgctagacaggtcgaggtggccaggcagaggattggcaaatag

SEQ ID NO: 87902 - protein, 466 aa, Cryptococcus neoformans var. neoformans B-3501A
MASEQDFTKRKLWGGRFTGSTDPLMHEFNQSLKYDKRMYAADVKGSIAFSKALLKAGILNEHEQQEIARGLKIVESEWAENKFVIQSDDEDIHTANERRLSEIIGKDIGGKLHTGRSRNDQVATDMRIWLMEETTRVEGYLKDLLNVMVSRAEKEVDAILPGYTHLQRAQPVRWSHFLLSHAQSFLSDLERLRQLYPRISVLPLGSAALAGNPYSLDRELLRQELDFESIGENSMHAVADRDFIVEWLQWASLTQVHMSRMAEDLIIYSSAEFGFVQLSDAYSTGSSIMPQKKNPDSLELLRGKAGRTFGQMAGFMMSLKGVPSTYNKDLQEDKEPLFDAVDTVSAALRIAEGVLATMSINPEKMAAALTMDMLATDIADYLVRKGVPFRETHHISGRSVALAEKTNCQISDLTMEQWKELDERFDETVMEVFDFETSVEKRNAIGGPARSMIARQVEVARQRIGK

SEQ ID NO: 87903 - DNA, 1407 bp, Candida albicans SC5314
  CDS (1)..(1407): transl_table=12
atgtcacaacaacaagataaacaacctagtgaaaataaattatggggtggtcgtttcaccggtgccactgatccattgatggatttatataatgcttcattaccttatgataaagttatgtatgatgctgatttaactggtactaaagtatacacacaaggattaaacaaattaggattaattaccactgaagaattgcatttgattcatcaaggattagaacaaatcagacaagaatggcatgataataaattcattattaaggcaggtgatgaggatattcatactgctaatgaacgtcgattaggagaaatcattgggaaaaacatttctggtaaagttcacactggtagatcaagaaatgatcaagttgctaccgatatgagaattttcgttcgtgaatcattacttaatttaagtaaaattttacatcaattcatcacggcaattcttgaacgggcacataaagaaatcgatgtattaatgcctggttatactcatttacaaaaagctcaacctattagatgggcacattggttaagttcatatgcaacttatttcaccgaagattataaacgtttacaagaaattataactcgtgttaaccaatctccattaggatctggtgctttagcaggtcatccttatggtattgatcgtgaatttttagctaaaggattaggatttgatggtgtcattgggaattctttaactgcagtttcagatcgtgattttgttgttgaaagtttattttggagtacattatttatgaatcatatttctcgattctcagaagatctaattatttattctagtggtgaatttgggttcataaaattagctgatgcttattctactggttcttcattgatgccacaaaagaaaaaccctgactcattagaattattacgtgggaaaagtggtagagtatttggtcaattatctggatttttaatgtcgatcaaatctattccatctacttataataaagatatgcaagaggataaagaaccattatttgatgcattgactacagtggaacattcaattttaattgctactggtgtgatttctactttactgattgataaacaaaatatggaaaaagctttaactatggatatgttggctactgatttagctgattatttagttagaaaaggagttccatttagagaaactcatcatatatctggtgaatgtgttagaaaagctgaagaagaaaaattatctggaattgatcaattatcttttgaacaatttcaacaaattgattctcgttttgaaaaagacgttatggaaacttttgattttgaagctagtgtggaaagaagagatgctattggtggtactgctaaaagtgccgttttaaaacaattagaaaatttaaaatcaattttaagttaa

SEQ ID NO: 87904 - protein, 468 aa, Candida albicans SC5314
MSQQQDKQPSENKLWGGRFTGATDPLMDLYNASLPYDKVMYDADLTGTKVYTQGLNKLGLITTEELHLIHQGLEQIRQEWHDNKFIIKAGDEDIHTANERRLGEIIGKNISGKVHTGRSRNDQVATDMRIFVRESLLNLSKILHQFITAILERAHKEIDVLMPGYTHLQKAQPIRWAHWLSSYATYFTEDYKRLQEIITRVNQSPLGSGALAGHPYGIDREFLAKGLGFDGVIGNSLTAVSDRDFVVESLFWSTLFMNHISRFSEDLIIYSSGEFGFIKLADAYSTGSSLMPQKKNPDSLELLRGKSGRVFGQLSGFLMSIKSIPSTYNKDMQEDKEPLFDALTTVEHSILIATGVISTLSIDKQNMEKALTMDMLATDLADYLVRKGVPFRETHHISGECVRKAEEEKLSGIDQLSFEQFQQIDSRFEKDVMETFDFEASVERRDAIGGTAKSAVLKQLENLKSILS

SEQ ID NO: 87905 - DNA, 1623 bp, Tribolium castaneum
  CDS (1)..(1623)
atgccttttaatctggaacacaaaaagttatggggaggtcgtttttcggcatcgaccgactcaaatttagaaaaactgaactcttctattactttcgataaacggatgtatgctgaagatatcgaaggcagtaaggcgtacgctgaagctttgaaaaaaattaatctcttaactgagcatgaaactacacaaatttgcaagggcctagaccgagttaaaatcgaatgggaccaaaatttatttgaaacgaaagaaggagatgaagatatacacacggccaatgaacgacgtctcaaggaaataattggagaaccagctaccaagctccacgttggtcgcagcagaaacgaccaagtggtcaccgacatgaaactttggctccgaagtcatttacaagacttggacaaaatcgtgaaatccttaatcaaagtgattatcaccagatctgcacacgaaattgatataatgatgcctggttatacccacttgcaacgagcccaacctgtgcgatggagtcactacttgttgagccatgcctggaatcttaaaaaagactgcgaccgattggacgacattgtcaagcttatcaacatcatgcccttaggaagtggtgccttggctgggaaccctttcaatattgatagaatgagtttagcttcatcacttgactttgactctgttacccaaaacagcatgcaagcggtgggcgatcgtgactttattgctgaattcttgttttgggcctcaatggttggaattcatttaagtcgtctagctgaagatctgattctctacagctctaaggaattcgaatttgtcacaatcgatgatacctactccactgggagtagcttaatgccccaaaaacgcaatcctgatagtctcgaattaattcgaggtattgggggaagtttatttggacaatgttgtagttttatgatggttctgaaaagtttaccctcgacttacaacaaagacttgcaatatgacaaggaagcaatgtttactactttcgacaaactcaagtccattttagaagtagccacgggtacggtcaagactctcaaagtgaaccaagataagtgtaaaaatgcgttaagttttgagatgttagctaccgacgtggcttattatctggtgcggaaagaagtaccgtttagagatgctcattttttggctggaaaggtcgtagctgaagcggaacgtaaaggagtatccatttgtgatttaacgttggaagaattgaagaacattagttcatcctttgacgtggacattggacgagtttggaactatgaacatagcatcgaacaatataaagctattggtgggacagctaaatcaagtgttgccaaacaaattgagttactcgaaaaatggttgatcctcacacatgggtcaagccatggcacggaggccgtcgtcgtcgaagggatcgcaggcgagacgtggagtgcggtgcgagaggaggctgcaagcgcgctctcgggcgccattgctgtgacgcgcacttgtgttctgttctcgtccagtgacgaccgcccagaaattttgacgtggttactacgtatagcccgcttacccactccgatcgcttcaaactcggtgacgacgaatacgtaa

SEQ ID NO: 87906 - protein, 540 aa, Tribolium castaneum
MPFNLEHKKLWGGRFSASTDSNLEKLNSSITFDKRMYAEDIEGSKAYAEALKKINLLTEHETTQICKGLDRVKIEWDQNLFETKEGDEDIHTANERRLKEIIGEPATKLHVGRSRNDQVVTDMKLWLRSHLQDLDKIVKSLIKVIITRSAHEIDIMMPGYTHLQRAQPVRWSHYLLSHAWNLKKDCDRLDDIVKLINIMPLGSGALAGNPFNIDRMSLASSLDFDSVTQNSMQAVGDRDFIAEFLFWASMVGIHLSRLAEDLILYSSKEFEFVTIDDTYSTGSSLMPQKRNPDSLELIRGIGGSLFGQCCSFMMVLKSLPSTYNKDLQYDKEAMFTTFDKLKSILEVATGTVKTLKVNQDKCKNALSFEMLATDVAYYLVRKEVPFRDAHFLAGKVVAEAERKGVSICDLTLEELKNISSSFDVDIGRVWNYEHSIEQYKAIGGTAKSSVAKQIELLEKWLILTHGSSHGTEAVVVEGIAGETWSAVREEAASALSGAIAVTRTCVLFSSSDDRPEILTWLLRIARLPTPIASNSVTTNT

SEQ ID NO: 87907 - DNA, 1392 bp, Prochlorococcus marinus str. NATL1A
  CDS (1)..(1392): transl_table=11
gtggaaaaagcattgagcaaaacttggagtgacagatttgataaaggacttaatccttttatagaaaaatttaatgcttcaatcgagtttgatatttgtttattagaggaagatttggatggatcaattgcccatgcacgtatgcttggaattcaagggattattaccaaggaagaggcgcttagattagagaatggtcttcaacagattcgaaaagaggcttctgatggcttatttcagcctgtcattgcagatgaagatgtgcattttgcagtagaaaaaaaattaatagacttgataggcccagtagggaaaaaactacatactggtcgtagtcgtaatgatcaagttggaacagatctgagattatggctaagaaaacgtattgatgaaattgatatggatttggtacgtcttcagaaatctctttttttattagcagaggaaaatctgtatacgcttattcctggttatacgcatttacaaagagcccaacctttgtctctggcgcatcacttgttggcatatattgagatggcacaaagagatagaaatagattaaaagatgtaagaaaacgagtgaatatttctccactaggagcagctgctttagctggcacatcgatttctataagcagaaagattacttcttcagaattacactttcaaggtatttattctaatagtttagatgctgtaagtgatagagactttgtcgtagaatttttaggagcttcatcgttaattatggctcatttaagtagattatctgaagaagtaattttgtgggcatctgaagaatttgcctttattcaattaaccgaccgatgtgctactggaagtagtcttatgcctcaaaaaaagaatcctgatgtacctgaacttgttcgaggcaagtcaggaagagtatttggacatttacaagctatgctgactatgattaagggattacctttagcttacaacaaagattttcaagaagacaaagaagctatctttgatagtgttaaaacagttaagaattctttgattgccatatcaattttgtttgaagagggtttaatttttagaaaagaaagacttaatcaagctgtttcctcagatttttcaaatgcgactgatgtcgctgattatttagtggctaaggacatacctttccgagaggcttatcaattagttgggcgaattgtaaaaacttccttggaggaggggattttattaaaagattttcctttagaaagatggaaaacatttcataaattttttgaaaaagatatttatgaaaagcttttgccttcgagtgtagttgagtctcgtttgagtgctggtggaactggatttgagagagttcaagaacagcttctttcttggcgagaaaaattatttaattaa

SEQ ID NO: 87908 - protein, 463 aa, Prochlorococcus marinus str. NATL1A
MEKALSKTWSDRFDKGLNPFIEKFNASIEFDICLLEEDLDGSIAHARMLGIQGIITKEEALRLENGLQQIRKEASDGLFQPVIADEDVHFAVEKKLIDLIGPVGKKLHTGRSRNDQVGTDLRLWLRKRIDEIDMDLVRLQKSLFLLAEENLYTLIPGYTHLQRAQPLSLAHHLLAYIEMAQRDRNRLKDVRKRVNISPLGAAALAGTSISISRKITSSELHFQGIYSNSLDAVSDRDFVVEFLGASSLIMAHLSRLSEEVILWASEEFAFIQLTDRCATGSSLMPQKKNPDVPELVRGKSGRVFGHLQAMLTMIKGLPLAYNKDFQEDKEAIFDSVKTVKNSLIAISILFEEGLIFRKERLNQAVSSDFSNATDVADYLVAKDIPFREAYQLVGRIVKTSLEEGILLKDFPLERWKTFHKFFEKDIYEKLLPSSVVESRLSAGGTGFERVQEQLLSWREKLFN

SEQ ID NO: 87909 - DNA, 1377 bp, Clostridium thermocellum ATCC 27405
  CDS (1)..(1377): transl_table=11
atgaaactttggggcggtagatttgaaaaaaataccgacaaatcggtggatgattttaattcatccataagatttgactgtcgtatgtacaaacaagatatattaggaagcattgcccatgccaaaatgcttggaaaatgtaaaattatttccgaggaagactccattcttattcaaaatactttaagggaaatattaaaagacattgaagaaggaaaagtacagtttgaaattgatgccgaagatattcatatgaacgttgaaaaaatcctcatatcgagaatcggggatgtgggaaagaagcttcacaccggaaggagccgcaatgaccaggttgccctcgatataaggatgtatcttagggatgaggttgttgaaatcaggaaattgctggtgaacctcgaaaggacgcttatagaaatagcaaaaaacaatattgacaccatacttccgggatatacacacctgcagagggctcaacccataactttcgcccatcacatgatggcatattttcagatgttcaaacgggacattgaaaggcttaacgattgctataaaagaataaatgtaatgcccctgggttccggcgccctggcctccacaacctatcctcttgacagatacatggtggcaaaagaactgggatttgactctattaccgaaaacagccttgatgcggtaagcgacagggattttgtcattgagctttccgcctgtctttcaatccttatgatgcatcttagccggttcagtgaagaaatcattttatgggcctcccatgagtttggttttattgaattggatgatgcatacagtaccggaagcagtataatgcctcaaaagaaaaatccggatgtggcagagctggtaaggggcaaaaccggaagggtttacggcgaccttatggcacttttgtcagttatgaaatcgcttcctctagcttacaacaaggatatgcaggaagacaaggaagccatttttgacgctgtggatactgtaaaaatgtgtctgccggtgttcaccaaaatgattgaaaccatgaaaataaaaaaagaaaacatgctccgggcggctcaaggcggatttacaaatgccaccgacatggcagattaccttgttaaaaaaggtattcctttcagaaacgcccatgaaattatcgggaaaatggttctgtactgcatcgaaaacaacaaggctattgaggaacttgacatgagtgagtttaaaagcttctcagagcttatagaagaagatgtgtatgaagaaataagcctgtcaaaatgtgtttccggcagaaatcttcccggaggaccggcaaaggaaagtgtcatggcttctattgaaaacgggcttaagtttttgtccacacaataa

SEQ ID NO: 87910 - protein, 458 aa, Clostridium thermocellum ATCC 27405
MKLWGGRFEKNTDKSVDDFNSSIRFDCRMYKQDILGSIAHAKMLGKCKIISEEDSILIQNTLREILKDIEEGKVQFEIDAEDIHMNVEKILISRIGDVGKKLHTGRSRNDQVALDIRMYLRDEVVEIRKLLVNLERTLIEIAKNNIDTILPGYTHLQRAQPITFAHHMMAYFQMFKRDIERLNDCYKRINVMPLGSGALASTTYPLDRYMVAKELGFDSITENSLDAVSDRDFVIELSACLSILMMHLSRFSEEIILWASHEFGFIELDDAYSTGSSIMPQKKNPDVAELVRGKTGRVYGDLMALLSVMKSLPLAYNKDMQEDKEAIFDAVDTVKMCLPVFTKMIETMKIKKENMLRAAQGGFTNATDMADYLVKKGIPFRNAHEIIGKMVLYCIENNKAIEELDMSEFKSFSELIEEDVYEEISLSKCVSGRNLPGGPAKESVMASIENGLKFLSTQ

SEQ ID NO: 87911 - DNA, 1395 bp, Herminiimonas arsenicoxydans
  CDS (1)..(1395): transl_table=11
atgacagcacaactctccaaaaaaggcgaggcctggtcggcccgcttcaacgaacccgtctctgatctcgtcaagcgctacaccgcctcggtatttttcgacaaacgtctggcgcaggtcgatatccagggttcgctcgcccatgcggagatgctggcgcatcagaatatcatcagtcaggaagaccacgctgaaatccgacgcggcatggcacagatactggaagaaatcacggccggcaaattcgaatggctgctggatctggaagacgtccacctgaacatagaaaaacgcctgaccgagctggtgggtgatgccggcaagcgcctgcacaccggccgttcgcgcaacgatcaggtagccaccgatatccgtctgtacgtccgcagcgaaatcgacaatatcgtcggcctgctgcgcgacttgcgtctggcactgctggatctggcagaacagcatgccgataccatactgcccggcttcacgcacatgcaggtggcgcagccgatcactttcggccatcacatgctggcttacgtcgaaatgttcagccgcgatgccgagcgcatgcaggattgccgcaaacgcgtcaatcgcctgccgctgggtgcggcggcactggcggggaccaccttccctatcgaccgcgaacgcgtggcaaaaacgctgggttttgatgacgtctgccacaattcgctggatgccgtttcagaccgcgactttgcaatcgaattctgcgccgcggccgcactgatcatgacgcacgtctcgcgcatgtcggaagaactggtgatctggatgagcccgcgcattggcttcatcgatatcgccgatcgtttctgcaccggctcgtctatcatgccgcaaaagaaaaatcctgacgtgccggaactggcacgcggcaagaccgggcgcgtcaatggccacctgatcgccttgctgaccttgatgaaaggtcagccactggcctacaacaaggacaatcaggaagacaaggaaccgctgttcgataccgtcgacaccgtcgtcgatacgctgcgcatcttcgccgatatggcgaccggcatcaccgtcaaacccgatgcaatgcgcgctgctgccttgcagggttatgcaaccgctaccgatctggccgactatctggtgaaaaaagggctgcccttccgcgatgcgcatgaggccgtagcacatgcagtacgtgcctgcgtcgatcgcggcatagacctgagcgatctgactctggaagaaatgcaggcattttccaaactgatagaagccgatattttcgcagtgctgacgctggaaggttccgttgcagcacgcaatcatgttggcggaacagcgccacaacaggtacgtgcagccatcgcccggcatcgcgccaagctagcttaa

SEQ ID NO: 87912 - protein, 464 aa, Herminiimonas arsenicoxydans
MTAQLSKKGEAWSARFNEPVSDLVKRYTASVFFDKRLAQVDIQGSLAHAEMLAHQNIISQEDHAEIRRGMAQILEEITAGKFEWLLDLEDVHLNIEKRLTELVGDAGKRLHTGRSRNDQVATDIRLYVRSEIDNIVGLLRDLRLALLDLAEQHADTILPGFTHMQVAQPITFGHHMLAYVEMFSRDAERMQDCRKRVNRLPLGAAALAGTTFPIDRERVAKTLGFDDVCHNSLDAVSDRDFAIEFCAAAALIMTHVSRMSEELVIWMSPRIGFIDIADRFCTGSSIMPQKKNPDVPELARGKTGRVNGHLIALLTLMKGQPLAYNKDNQEDKEPLFDTVDTVVDTLRIFADMATGITVKPDAMRAAALQGYATATDLADYLVKKGLPFRDAHEAVAHAVRACVDRGIDLSDLTLEEMQAFSKLIEADIFAVLTLEGSVAARNHVGGTAPQQVRAAIARHRAKLA

SEQ ID NO: 87913 - DNA, 1938 bp, Colwellia psychrerythraea 34H
  CDS (1)..(1938): transl_table=11
atggctttatggggcggccgctttaaaggcgaagctagcgtacaatttaaaagatttaacgactcactaccagtggattaccgcatggcagtgcaagacattgttggttcaattgcttgggcaggtgctattaatagtgttggcgtaataagtgatgaagagcacatacgtttagtggcagcacttaatgagttaaaagcgtctgttgaagccgatcctgagcaaattttgttatcagatgcggaagatattcacagttgggtggaacttcagttaattgaaaaaaccggtgatttaggtaagaagctccatacaggtcgtagtcgtaatgaccaagtagcaactgatttaaagctgtggtgtaaagaaactggtggcgatttattgtttgcactggtgaatctacagcaagcgatgatgaatttagctgaacgtgaaaaagatactgtgttaccgggttatacccatcttcaaagagcacaaccggttactttcggtcattggtgtttagcgtatgttgaaatgtttaaccgtgatattggtcgtttaaaagatgcgctttatcgtttagatgtttcgccattaggctctggtgctttagcaggtactgcttatccaatagaccgtaatgctttagcacatagcttaggttttagaacggccacgatgaatagccttgatgctgtttctgatagagatcatgttattgaattgttggcttcagccagtatttcgatgatgcatttatcacgttttgcagaagatttaattttctataattcaggtgaagctggttttgtagagatgagtgacttagttagctctggctcctcattaatgccacagaaaaaaaatccggatgcgtgtgaattaattcgtggtaaatcaggacgtgtttttggtgcattaacgggcatgttaaccacaatgaaagcgttggcgcttgcctataataaagatatgcaagaagacaaagaaggtttgtttgacgcgcttgatacgtggcaagaatgtatggaaatggctgtgttagttgctgacggtttaaaagttaatcgttctcgtacattggcggcggctcaacaaggttatgccaatgcgactgagcttgctgattatttagtgggtaaagacattccgttccgtgaagcacatcatattgttggtgaagtggtattagctgccatcgataaaggtgtacctttagaagacttaaccataagtcaactgaaagagtttagtgataaaattgagcaagatgtttatcaacacctttcaattgaatcaacgcttaataagcgtgaagcgcttggtggtacttcacgttcacaagttaaaaaagcgctggcaactacccagtctggcaatgaagctattttaaatgaacaagttgttggcgcaccaggaaaacaacgaattgaaggggcacttaagcaagtaaaacagcgcttaaatgcacaacgcgctgcagctatgtctgtccgtcgagccagaatgtctgatgttgattgtatccatcaactgactaacttttgggctgataaaggtgagattttacctcgaactcgtgacaacataatccatgatatccagaatttcgtcgtagctgaacttgacggtaatgttgttggcaccgcatcgctttacatttatcaaacaggtttagcagaaatacgctctgttgttgtgcaagatgatgcacaaaagcaaggtcaaggtgaggcgcttgttcaatatttgttagaatttgctaatcaaatggaattagaacagattattgttttaacttacattcctcagtattttgaacagcttggttttaacgtaatagataagaactcgctcgccgataatatcattgaagacagtgaaccaagcccgcataaagatcctgctgatgaagtagcgatggaatatattgttggtcaaagtaagtag

SEQ ID NO: 87914 - protein, 645 aa, Colwellia psychrerythraea 34H
MALWGGRFKGEASVQFKRFNDSLPVDYRMAVQDIVGSIAWAGAINSVGVISDEEHIRLVAALNELKASVEADPEQILLSDAEDIHSWVELQLIEKTGDLGKKLHTGRSRNDQVATDLKLWCKETGGDLLFALVNLQQAMMNLAEREKDTVLPGYTHLQRAQPVTFGHWCLAYVEMFNRDIGRLKDALYRLDVSPLGSGALAGTAYPIDRNALAHSLGFRTATMNSLDAVSDRDHVIELLASASISMMHLSRFAEDLIFYNSGEAGFVEMSDLVSSGSSLMPQKKNPDACELIRGKSGRVFGALTGMLTTMKALALAYNKDMQEDKEGLFDALDTWQECMEMAVLVADGLKVNRSRTLAAAQQGYANATELADYLVGKDIPFREAHHIVGEVVLAAIDKGVPLEDLTISQLKEFSDKIEQDVYQHLSIESTLNKREALGGTSRSQVKKALATTQSGNEAILNEQVVGAPGKQRIEGALKQVKQRLNAQRAAAMSVRRARMSDVDCIHQLTNFWADKGEILPRTRDNIIHDIQNFVVAELDGNVVGTASLYIYQTGLAEIRSVVVQDDAQKQGQGEALVQYLLEFANQMELEQIIVLTYIPQYFEQLGFNVIDKNSLADNIIEDSEPSPHKDPADEVAMEYIVGQSK

SEQ ID NO: 87915 - DNA, 1425 bp, Synechococcus elongatus PCC 7942
  CDS (1)..(1425): transl_table=11
ttggccttccgcacaaagattctggtgacccaagctgctgccccacaaccctggagcgatcgcttcgagacagcgctccatccagcgatcgtggttttcaatgccagtatcggttttgatctggcgctgatcgaatatgacctcacggggtcccaggcgcatgcgcaaatgctggcagagcaagacatcatcagccgcgaggaaggtgaggcgatcgtcgctgggcttgagcagattcgcagtgaatatcgcaccggtcaattccagccaggattggatgctgaggatgtccactttgcggtggaacggcgactgacagaactcctcggcgatgttggtaaaaagctccacaccgcccgatcgcgcaatgaccaagtgggtacagatacgcggctctatctgcgcgaccgcgtcgatcacattcgtcagcaattgcgtgactatcagcgtgttctactgagccaagccgagcaacaccttgagacattaattccgggctatacccacctgcaacgcgcccagcccttgagcttggcacatcatctccatgcctacttagagatggcagagcgtgattgggaacgattaggcgacctgcgcaagcgcctgaatacctctcctttgggcgcaggggccttggcggggacaactttcccaatcgatcgccagcgcacggcggcattactcggctttgaacgcatctacgccaacagcttggatgccgtcagcgatcgcgatagtctcgtggaatttctggcagccgccagcttgatcatggtgcacctcagccgcttggctgaggaagtgatcctctgggcttcggaggagtttcgctttgttcgcctcagcgatcgctgcgccactggctccagtatcatgccgcagaagaaaaatcctgatgtgccagagctagtgcggggcaagacgggacgggtgtttgggcatctgcaagcgctgctcgtcgttttgaaaggcttaccgttggcctacaacaaggacttgcaggaagacaaagaaggcttgtttgacgcagtgcaaaccgtggaaagctgcctcgaagccatgacgattttgtttgcagaaggtctgagcttccagcccgatcgcctagcggcagcggtcgaagccgatttttccaatgctacagatgtcgcagactacttggcagcgcggggtgtgcctttccgagaagcctacaacctcgtcggtcgcgtggtgcgcacctgtttggagcaaggcaaactcctgaaggatttgagcttggctgaatggcaggctctacacccgcagtttgaagccgacatctacacagcgatcgcaccgcaacaggttgttgcagcccgcaacagcttgggtggcacgggttttgagcaagtacgatcagccttggcctctgtgcggcaacgcttggaagccacttgttaa

SEQ ID NO: 87916 - protein, 474 aa, Synechococcus elongatus PCC 7942
MAFRTKILVTQAAAPQPWSDRFETALHPAIVVFNASIGFDLALIEYDLTGSQAHAQMLAEQDIISREEGEAIVAGLEQIRSEYRTGQFQPGLDAEDVHFAVERRLTELLGDVGKKLHTARSRNDQVGTDTRLYLRDRVDHIRQQLRDYQRVLLSQAEQHLETLIPGYTHLQRAQPLSLAHHLHAYLEMAERDWERLGDLRKRLNTSPLGAGALAGTTFPIDRQRTAALLGFERIYANSLDAVSDRDSLVEFLAAASLIMVHLSRLAEEVILWASEEFRFVRLSDRCATGSSIMPQKKNPDVPELVRGKTGRVFGHLQALLVVLKGLPLAYNKDLQEDKEGLFDAVQTVESCLEAMTILFAEGLSFQPDRLAAAVEADFSNATDVADYLAARGVPFREAYNLVGRVVRTCLEQGKLLKDLSLAEWQALHPQFEADIYTAIAPQQVVAARNSLGGTGFEQVRSALASVRQRLEATC

SEQ ID NO: 87917 - DNA, 1386 bp, Desulfitobacterium hafniense Y51
  CDS (1)..(1386): transl_table=11
atgaaactttggggtggtcgttttgaaaaatcaacagatgccttagtggaggattttcattcctcaatctcctttgaccaacggttgtacaagcaggatattcaagggagcatcgcccatgcgcggatgctgggagagatcggggtcctgacctcggcagaagcacagcaaatcattgaaggacttaaaggcattttaaccgacattcgggagggaaaaatccaattcgagatcggggccgaagacattcatatgaatgtagagaaactgctcacggagcgggtagggaccgtagggaagaaagttcatacgggacgcagccgcaatgatcaggtagccctggatctgcgtctgtttctgcgggaagaaattgaccatacccaggagctgctgattgctcttctacggaccgttttggaccttgccaaagagcatcaggagacctatatgccgggctatacccacctgcaaaaggcccaacctatttcctttgcccaccatatgatggcctatgcgcaaatgtttctccgtgacttaggccggctaaaggatactcgccaacggcttaatgtatcccctttaggctccggagctttagcgggaaccacctttcccttagagcgggagatggtggcccaagagctgggttttgacggcatcacctggaattccctcgatggggtgagtgaccgggattttgctttggaattcctcagtgcggcttccatcttaatgatgcatctcagccggctttgcgaggaattggttctttggtccacgggagagtttcaatttgtgattatggatgacggttactccaccggctccagcattatgcctcaaaagaagaaccctgatgtggctgaattagttcgcggaaagacgggccgtgtctatggtgatctagtcgctttgcttaccgtaatgaaagggcttcctttagcttataataaggacatgcaggaagataaggaacaggtttttgatgcggtggataccatccagaaatctctccttgtggtagagcccatgctccgcaccatgaaggtcaataaaaaagctatggctgaaggtgccaagggtggcttcaccaacgccacggatttagcggattatctggccaagaaaaatgttcccttcagagaagcccatgaaatcgtgggcaagctggtcctttactgttctaaacggggctgtggcctggaggatctcactttaaaggagttccaggagcattccgacgtatttgctgaagatctttttgaaagcatcggcattgagtactgtgtccgtcaacgccatattcccggcggtccttctcccgaaagcgttgcgcaagctattctctggacggagcatattttggaacaatttacaggtggataa

SEQ ID NO: 87918 - protein, 461 aa, Desulfitobacterium hafniense Y51
MKLWGGRFEKSTDALVEDFHSSISFDQRLYKQDIQGSIAHARMLGEIGVLTSAEAQQIIEGLKGILTDIREGKIQFEIGAEDIHMNVEKLLTERVGTVGKKVHTGRSRNDQVALDLRLFLREEIDHTQELLIALLRTVLDLAKEHQETYMPGYTHLQKAQPISFAHHMMAYAQMFLRDLGRLKDTRQRLNVSPLGSGALAGTTFPLEREMVAQELGFDGITWNSLDGVSDRDFALEFLSAASILMMHLSRLCEELVLWSTGEFQFVIMDDGYSTGSSIMPQKKNPDVAELVRGKTGRVYGDLVALLTVMKGLPLAYNKDMQEDKEQVFDAVDTIQKSLLVVEPMLRTMKVNKKAMAEGAKGGFTNATDLADYLAKKNVPFREAHEIVGKLVLYCSKRGCGLEDLTLKEFQEHSDVFAEDLFESIGIEYCVRQRHIPGGPSPESVAQAILWTEHILEQFTGG

SEQ ID NO: 87919 - DNA, 1407 bp, Methylobacillus flagellatus KT
  CDS (1)..(1407): transl_table=11
atgacagaaaagtccaatcacttgaatcaaccctcttccaaaacctggtccggacgtttcaacgagcccgtggccgagctggtcaagcaatataccgcttcggtgggcttcgactatcggctggcggaatacgatatccagggatcgctggcgcatgcccgcatgcttggtgcccagggcatcatcagccaggatgacgtggcccagatagagcagggcctgggcgagattatggacgagatccgcaatggcgaattcgcctggctgctggatcttgaagatgtacatctcaatatcgagaaacgcctgacagacaagatcggtgatgcaggtaagcgcttgcatacggggcgttctcgcaacgaccaggtagcgaccgatatccgcctctggttgcgttcaatggtggatgatgccttgagccgccttcgcaaattgcaggcctcgctggtggcgctcgcggaacagcacgccgataccgtgatgcccgggttcacgcatttgcaggtggcccagcccgtgaccttcggccatcatctgctggcctatttcgagatgctgcagcgcgatgcggaacgcctggtggatgcccgcaagcgtatcaatcgcctgccactgggcgcggcggcactggctggcaccagctatcccatagaccgtgagcgcgttgcacatgagctcgggttcgaggcggtttgtgaaaactcgctggacgcggtatctgaccgcgatttcgcgatcgaatttaccgcggcggcggcattgatcatgacgcacttgtcccgcctctctgaagagctgatactctggtccagcccgcgcttcggctttatcgacattgccgatcgcttctgcaccggttcgtccatcatgccgcagaagaagaacccggatgtgccggagctggtgcgcggcaagaccgggcgcgtcaacggacatctcgtcgcgttgttgaccttgatgaagagccagccgctggcctacaacaaggataaccaggaagacaaggaaccattgttcgatacagtggataccttgctggtgacgctggaaatctacgcggatatgctgcgcgggatcaaggtcaacaaggacgcgatgcgcctggcggcggcagagggttttgctaccgctaccgacctggccgactatctggtgaagaaaggcatgccgttccgagatgcgcacgaagtggtggcgctggcggtgcgccatgccgtggaacagggctgcgacctggccgacctttccttgtcgcaattgcaaaaatttagtcccgagattgccgaagatgtatatggggtactgacgctggaaggctcgctggccagccgcaaccatcgcggcggcacggcgccagcgcaggtgcgtgaggcattgaagcgtgcccgggccttgctcgggtga

SEQ ID NO: 87920 - protein, 468 aa, Methylobacillus flagellatus KT
MTEKSNHLNQPSSKTWSGRFNEPVAELVKQYTASVGFDYRLAEYDIQGSLAHARMLGAQGIISQDDVAQIEQGLGEIMDEIRNGEFAWLLDLEDVHLNIEKRLTDKIGDAGKRLHTGRSRNDQVATDIRLWLRSMVDDALSRLRKLQASLVALAEQHADTVMPGFTHLQVAQPVTFGHHLLAYFEMLQRDAERLVDARKRINRLPLGAAALAGTSYPIDRERVAHELGFEAVCENSLDAVSDRDFAIEFTAAAALIMTHLSRLSEELILWSSPRFGFIDIADRFCTGSSIMPQKKNPDVPELVRGKTGRVNGHLVALLTLMKSQPLAYNKDNQEDKEPLFDTVDTLLVTLEIYADMLRGIKVNKDAMRLAAAEGFATATDLADYLVKKGMPFRDAHEVVALAVRHAVEQGCDLADLSLSQLQKFSPEIAEDVYGVLTLEGSLASRNHRGGTAPAQVREALKRARALLG

SEQ ID NO: 87921 - DNA, 1518 bp, Rubrobacter xylanophilus DSM 9941
  CDS (1)..(1518): transl_table=11
atgaacgaacttcgctcgttttcccgagacgcgttcccgccggccctccgtctcggctcgggctgcggcggggaggtggctgggtcggctaaactacgctgcgtgagcgagaagggacatctgtggggcgggcggttcggttcggggccggcggaggctttcgagcgcctgaacgcctccatcccctttgacgtgcggctcgcgccctacgacgtgcgcggctccatcgcccacgcccggatgctcggcgagacggggataatctcccgcgaggaggcggaggcgctcgtgggcggcctggagtcggtgctcgaggaggtggaggccggggagttttcgtggagcctcgccgacgaggacgtgcacaccgcggtcgagcgccggctgcgggagaaggtgggcgacgtggcgctcaagctgcacaccgggcgcagccgcaacgaccaggtctcgctcgacctgcacctcttctgccgggacgccgcggagcgcataggggaggggctgctcgaggcaatggccgccctcgtggaggtggcggagaggcactccgacctcgtgctccccggctacacgcacctgcagcgggcgcagccccttctgctctcgcaccacctgctcgcccacttctgggccttcgcgcgcgacctcgggcgtctggacgcggcgagggaggcggccaacgtctccccgctcggggccgcggcgctgggggggacgccccacccggtggacccggcgctcgtggccgccgagctggggatggagccgttcgccaactcgctagacgccgtctccgagcgggacttcgccctcgacctgctctacgcctgcgcggtgctcggggtgcacctctcgcggctcggggaggagtgggtgctgtggaccagccaggagttcgggttcgccgaactcgacgacgcctactcctccggctcctccatcatgccccagaaaaagaaccccgacgcctacgagctcatgcgcggccgggcggggcgcctcatcggggacctgagtgcgctcatggtcaccctgaagggcctgccgctcggctactccaaggatctgcaggaggacaaggagcccctcttcgacgccgtggacggcgtgctggcggtgctcgccgtgctgccggggatgctgaggacggcgcgcttctgcggcgagaggatggagggggccgcgggcgggttcgcgctggccaccgagctcgcggactttctggcggcgcggggcgtgcccttccgggaggcccaccgggtggtcgggcggctcgtgcggcgttgcgaggagctcggggtctcgctggaggaggtgccgcgcgcggagctcgcggcggcgcacccggcgctcggggagctgccggagggcctcctcagaccgcgggggagcgttgcgaacaagaggagccccggctccacctcgcccgcctcggtcgaggagcagctgcggcgggcgagggagctcctgctcgcccgccgcggcggggctcggtcaacagagcacagggggtga

SEQ ID NO: 87922 - protein, 505 aa, Rubrobacter xylanophilus DSM 9941
MNELRSFSRDAFPPALRLGSGCGGEVAGSAKLRCVSEKGHLWGGRFGSGPAEAFERLNASIPFDVRLAPYDVRGSIAHARMLGETGIISREEAEALVGGLESVLEEVEAGEFSWSLADEDVHTAVERRLREKVGDVALKLHTGRSRNDQVSLDLHLFCRDAAERIGEGLLEAMAALVEVAERHSDLVLPGYTHLQRAQPLLLSHHLLAHFWAFARDLGRLDAAREAANVSPLGAAALGGTPHPVDPALVAAELGMEPFANSLDAVSERDFALDLLYACAVLGVHLSRLGEEWVLWTSQEFGFAELDDAYSSGSSIMPQKKNPDAYELMRGRAGRLIGDLSALMVTLKGLPLGYSKDLQEDKEPLFDAVDGVLAVLAVLPGMLRTARFCGERMEGAAGGFALATELADFLAARGVPFREAHRVVGRLVRRCEELGVSLEEVPRAELAAAHPALGELPEGLLRPRGSVANKRSPGSTSPASVEEQLRRARELLLARRGGARSTEHRG

SEQ ID NO: 87923 - DNA, 1422 bp, Mesorhizobium sp. BNC1
  CDS (1)..(1422): transl_table=11
atgaacgagaacaaagccagcaaccgcatgtggggcggacgttttgcctcaggccccgatgccatcatggaagcgatcaatgcatccatcggcttcgatcggaaactctatgcccaggacatccgcggcagcctcgcccatgcggcaatgcttgccgaaactggcataatctccaccgaggacgaaaagaagatcgctcacgggctgaacacaatcctgtcagaaattgaagcaggcaagttcgaattttccaccagacttgaagacatccacatgaatgtcgaagcaaggctggcggagctgatcggcccggccgcgggccggctgcacaccgcgcgctcgcgcaacgaccaggtggcggtcgacttccgcctctgggtcaaggaagagctgttgcggatcgacgtggcgcttggcggcctgatcgaagctttccttgtccgcgccgaggaacatgcggcaaccgtgatgcccggcttcacgcatctgcagacggcgcagccagtaacattcggccatcatttgatggcctatgtggaaatgttcggccgcgaccgtacccgcgtgcgcgatgccgtcgagaggctggacgagagcccgctgggagcagcagcgctcgcgggcacgagctttccaatcgaccgtcacatgaccgcgaagacgttgggctttcgcgagcccacgcgcaattcgatcgatacggtttccgatcgcgatttcgcgctggaattcctctccgtgagcgcaatctgcgcgacgcatctttcgcggcttgcggaggagatcgtcatctggtcgacatcgcagttcggcttcatccgcctgtccgatgccttctccaccggctcctccatcatgccgcagaagaagaacccggatgcggcggagctggtccgcgccaagacgggccgcatcaacgggcatctgatcggcctcttgacggtgatgaagggcctgccgctcgcctattccaaggatatgcaggaagacaaggaggccgtgttcgacgccgcggaaacgctggacctgatgcttgcggcgatgaccggcatgatcggtgatatggaggtgaatgcggccgccatgaagaaagctgctggaagcggcttttccaccgccactgatcttgccgattggctggtgcgcgaggctggcctgcccttccgcgaggcccaccacgtgacgggccgcgccgtggccttggccgaggagcggaaatgcgggctggaaaagctcgcgctttcggacctccaggcgatccacccggccatcaccgagaacatcttttcggttctgtcggtcggcaactccgtgaaaagccgcacatccttcggcggcactgcacccgccgaggtgcgccggcaggtccgctattggaagaagcggctgaaacgggatgcaagtctggagaaaaagggctag

SEQ ID NO: 87924 - protein, 473 aa, Mesorhizobium sp. BNC1
MNENKASNRMWGGRFASGPDAIMEAINASIGFDRKLYAQDIRGSLAHAAMLAETGIISTEDEKKIAHGLNTILSEIEAGKFEFSTRLEDIHMNVEARLAELIGPAAGRLHTARSRNDQVAVDFRLWVKEELLRIDVALGGLIEAFLVRAEEHAATVMPGFTHLQTAQPVTFGHHLMAYVEMFGRDRTRVRDAVERLDESPLGAAALAGTSFPIDRHMTAKTLGFREPTRNSIDTVSDRDFALEFLSVSAICATHLSRLAEEIVIWSTSQFGFIRLSDAFSTGSSIMPQKKNPDAAELVRAKTGRINGHLIGLLTVMKGLPLAYSKDMQEDKEAVFDAAETLDLMLAAMTGMIGDMEVNAAAMKKAAGSGFSTATDLADWLVREAGLPFREAHHVTGRAVALAEERKCGLEKLALSDLQAIHPAITENIFSVLSVGNSVKSRTSFGGTAPAEVRRQVRYWKKRLKRDASLEKKG

SEQ ID NO: 87925 - DNA, 1401 bp, Clostridium perfringens ATCC 13124
  CDS (1)..(1401): transl_table=11
atgaaattatggggcggaagattcactcaccaagttgatgatctagttaacacttttaattcctctatttcttttgattcaagaatgtataaagaagatataattggaagtatagctcatgttactatgcttggtgaagaaaaaattattccaaaggaagatagcaaaaaaattgcttctggtttatatgaaatattaaataaattaaatcaaggagtattaaaaatagataactcttcagaagatatacacagttttatagaaagtactcttacagattacattggtgaagaaggaaaaaaactacatactggtagaagtagaaatgatcaagtaaccttagacacaaaattatatttaaaaggatatattaaaattttaatatgtgaaattttaaaccttgaaaaaactctattaaatctttcttcagaaaataaagaaactattatgccaggatatacccatatgcaaaaggctcaacctattacatttgctcatcatattttagcatatagtgaaatgtttaaaagagatatatctagattactagattgttataaaagacttgatgaaatgcctttaggcagtggtgctttagcaactactacttaccctataaatcgtgaaaaagttgcaaatctactaggcttttcaaaagttacactaaatagtttagattctgtttctgatagggattatgctattgaaacactttcttgcctctctttacttatgatgcatctttctagattttcagaggaaataatcatctggtctactgatgaatttaaatttattgaattagatgatagttatagtactggaagcagtattatgccacaaaaaaagaatcctgatgttgcagaattagtaagaggaaaaacaggacgtgtttatggagatttaatgacgctattaactgttatgaagggacttcctttagcttataataaggatatgcaagaagacaaagaagctttatttgatgggttagatactactctactttctataaaaacttttaatggaatgataaaaacaatgaaaattaataagagtattatgaaaacttcagcttcttctggatttactaacgccactgacgtcgctgattatctagtaaaaaaaggggtagcttttagagatgctcatgagattgtaggaaatttaattctttattgtatagatgaagggaaatctattgataacttatctttatctgaatttaaaactttctcaaataagtttgaaaatgatatatataaagctattaatcttttaacttgtatagaagaaagaaaagtaataggtggaccaagtatttcatctataaacattcaaattgaacatttaaataattttatacaagaaagtaatgaaaaacttaatcttctaaaatag

SEQ ID NO: 87926 - protein, 466 aa, Clostridium perfringens ATCC 13124
MKLWGGRFTHQVDDLVNTFNSSISFDSRMYKEDIIGSIAHVTMLGEEKIIPKEDSKKIASGLYEILNKLNQGVLKIDNSSEDIHSFIESTLTDYIGEEGKKLHTGRSRNDQVTLDTKLYLKGYIKILICEILNLEKTLLNLSSENKETIMPGYTHMQKAQPITFAHHILAYSEMFKRDISRLLDCYKRLDEMPLGSGALATTTYPINREKVANLLGFSKVTLNSLDSVSDRDYAIETLSCLSLLMMHLSRFSEEIIIWSTDEFKFIELDDSYSTGSSIMPQKKNPDVAELVRGKTGRVYGDLMTLLTVMKGLPLAYNKDMQEDKEALFDGLDTTLLSIKTFNGMIKTMKINKSIMKTSASSGFTNATDVADYLVKKGVAFRDAHEIVGNLILYCIDEGKSIDNLSLSEFKTFSNKFENDIYKAINLLTCIEERKVIGGPSISSINIQIEHLNNFIQESNEKLNLLK

SEQ ID NO: 87927 - DNA, 1419 bp, Rhodococcus sp. RHA1
  CDS (1)..(1419): transl_table=11
atgagtgctcacggcaccaacgaaggagccctctggggcggccggttcgagtccggaccggccgccgccatggcggcgctgagcaagtccacccacttcgactgggtgctggccccgtacgacgtgcgcgcgtcccaggcgcatgcccgggtgctgcacaaggccggcctgctcggtgacgaggacctggcgtcgatgctcgacggtctcggcaggctcgcggccgacgtcgcgagcggcgagttcgtcccgagcgaatccgacgaggacgtgcacggggcgctcgagcgcggtctgatcgatcgggtcggtcccgaggtcggggggcgcctgcgcgccgggcgttcgcgcaacgatcaggtggcgacgctgttccggatgtggctgcgggacgcggtccgccgggtggcggcgggtgtcctcgacgtcgtcgacgccctcgcgacgcaggccgcggcgcacccttccgcggtgatgccgggcaagacccacctgcaggccgcgcagccggtgctgctcgcgcaccacctgttggcgcacacacatccgttgcttcgtgacgttcagcggttgcgggacttcgacgtgcgggcggccgtgtcgccgtacggttccggagcgctcgccggctcgtcactcgggctcgatcccgaggcgatcgccgcggaactcgacttcgattcgtcggccgagaactcgatcgacgccacgtcgtcgcgggacttcgcggccgaggcggcgttcgtgctcgcgatgatcggcgtcgacctgtcgcggatggccgaggaggtcatcctctggagcactccggaattcggctacatcacgctcgccgacgcctggtcgaccggctcgtcgatcatgccgcagaagaagaacccggacgtgtccgagctcacccgcggcaagtccgggcgactgatcggcaacctgacgggtctgctggccacgctgaaggcgcagccgctcgcgtacaaccgggatctgcaggaggacaaggagccggtcttcgattcggtggcgcaactcgagttgctgctcccggcgatcaccggactggtctccactctcgaattccacacggaccgaatggcggaactggcaccggcgggattcacgctggccaccgacatcgccgagtggctcgttcgtcagggcgtcccgttccgggtcgcgcacgaggcggcgggggcgtgtgtccgcgttgccgaggcgcggggcgtcggactcgaggatctcaccgacgacgaactcgccggggtcgatccggcgctcactccggacgtgcgggaggtactcaccgtcgagggttcgatcgcctcgcgtaacgcccgcggcggtacggccggtatccgtgtggccgaacagttgggcggggtccgtcagctgtccgagtcgctgcgtgagtggtgtcgatga

SEQ ID NO: 87928 - protein, 472 aa, Rhodococcus sp. RHA1
MSAHGTNEGALWGGRFESGPAAAMAALSKSTHFDWVLAPYDVRASQAHARVLHKAGLLGDEDLASMLDGLGRLAADVASGEFVPSESDEDVHGALERGLIDRVGPEVGGRLRAGRSRNDQVATLFRMWLRDAVRRVAAGVLDVVDALATQAAAHPSAVMPGKTHLQAAQPVLLAHHLLAHTHPLLRDVQRLRDFDVRAAVSPYGSGALAGSSLGLDPEAIAAELDFDSSAENSIDATSSRDFAAEAAFVLAMIGVDLSRMAEEVILWSTPEFGYITLADAWSTGSSIMPQKKNPDVSELTRGKSGRLIGNLTGLLATLKAQPLAYNRDLQEDKEPVFDSVAQLELLLPAITGLVSTLEFHTDRMAELAPAGFTLATDIAEWLVRQGVPFRVAHEAAGACVRVAEARGVGLEDLTDDELAGVDPALTPDVREVLTVEGSIASRNARGGTAGIRVAEQLGGVRQLSESLREWCR

SEQ ID NO: 87929 - DNA, 1392 bp, Trichodesmium erythraeum IMS101
  CDS (1)..(1392): transl_table=11
atgaagcaagatagacaaacatggagccaaagatttgaaaaagcactgcatcctatgatagctagatttaatgctagtattagctttgatattgaattgattgagcatgatataaatggctcagtagctcatacaaaaatgttagctaaaacaggtattatctccgctgaagaaggagaaaaattattgacaggtttagaacaaattcgtcaagaatatataaccggaaattttcatatagttgaagatgctgaagacgttcactttgctgtcgaaaaaagactgatagaaatcactggagatgtaggcaaaaaactacatacagctaggtctagaaatgaccaagtaggaactgatactaggctttatttacgagaaaaaattgaacaaattcggtttttattgatcaaatttcaaaaagttatattagaattagctgagtctaatattgaaactttaatccctggttatactcacttacaaagagcgcaacctttgagtttagctcatcatcttttggcttattttcataaggcggaaagagattgggaaaggctaggagatgtttatcgtcgagttaatatttctccccttggttgtggtgctttagctggtacaacttttcctattgatagacactatactgctgagttattagggtttgaaaaaccttatgctaatagtttagatggcgtaagtgacagagattttgctattgaatttctttgcgcagctagtataattatggtgcatttaagtcgtttggctgaagaaataattgtgtggtcatctgaagaatttaggtttgtaactttaactgatgtttgttccacaggctcgagtattatgcctcaaaaaaagaatcctgatgtaccagagttagttaggggaaaaacaggtcgagtatttggtcatttacaaagtatgttagtggtgatgaagggtctgccactagcatataataaagacttgcaagaagataaagaaggtttgtttgatagtattaaaactgttaaaagttgtctggaggcaatgacaattttattggaggaaggtttggaatttaacagtgatcgcctaacagaagcagtagcagaagatttttctaatgctacagatgtggcagattatttagcagctcgtggtgtaccatttcgagaagcttataatttagtaggtaaggttgtgaaaacttgtatttctggtggtaaattactgaaagatttaactataaaagaatggaaggaattacatcctgtttttgcaagtgacatttatgaagcgataaccccttaccaagtagtgtctgcacgcaatagctatggtggaactggttttaaacaagtaaaaacagaaattgacgttgccaagcaaaaattggcagaaaaataa

SEQ ID NO: 87930 - protein, 463 aa, Trichodesmium erythraeum IMS101
MKQDRQTWSQRFEKALHPMIARFNASISFDIELIEHDINGSVAHTKMLAKTGIISAEEGEKLLTGLEQIRQEYITGNFHIVEDAEDVHFAVEKRLIEITGDVGKKLHTARSRNDQVGTDTRLYLREKIEQIRFLLIKFQKVILELAESNIETLIPGYTHLQRAQPLSLAHHLLAYFHKAERDWERLGDVYRRVNISPLGCGALAGTTFPIDRHYTAELLGFEKPYANSLDGVSDRDFAIEFLCAASIIMVHLSRLAEEIIVWSSEEFRFVTLTDVCSTGSSIMPQKKNPDVPELVRGKTGRVFGHLQSMLVVMKGLPLAYNKDLQEDKEGLFDSIKTVKSCLEAMTILLEEGLEFNSDRLTEAVAEDFSNATDVADYLAARGVPFREAYNLVGKVVKTCISGGKLLKDLTIKEWKELHPVFASDIYEAITPYQVVSARNSYGGTGFKQVKTEIDVAKQKLAEK

SEQ ID NO: 87931 - DNA, 1368 bp, Shewanella sp. MR-7
  CDS (1)..(1368): transl_table=11
atggctttatggggtggaagatttcagggcgaaaccagtgcgctatttaaattattcaacgattcactacctgtggattaccgtttgtttgagcaggatgtggtaggctctatcgcttgggccgatgcaattgccagtgtcggcattatcactgctactgaatgcagcgatttgaagaaagcactgaacgagctgctggtggaagtgaagggcgatcctgcgattattctcgcatcgggcgcggaagatattcacagcttcgtggagtcggcgttgatcgctaaagtcggcgatctgggtaaaaaactccatacgggccgtagccgtaacgaccaagtcgctaccgatttaaaactctggtgccaatccgaaggtgcggcattagtggctcgcctacaaaccttacgcagcgaacttatcgcgcttgctgagcgtgaattcgatgctgttatgccgggctacactcacctgcaacgtgctcagccagtcacgtttggccactggtgcttagcttatgtggagatgattgagcgtgatcttagccgcttaaccgatgccttaaagcgcgccaatacctgtccgctcggttcgggcgccttggcgggcacagcctatcaaatggatagacattcgctggctgtggcactgaactttgcatcgccaaccttaaacagtttggacagcgtgtcggaccgcgaccatgtagttgagctgtgcggagccgcctcaattagcatgatgcacttaagccgtatggccgaagatttgattttcttcaactcgggtgaagcgggctttatctcattaagtgatgaagtgacctcggggtcatcgttaatgccacaaaagaaaaaccccgatgcgctggagcttattcgcggtaaaacgggccgtgtttatggcagcttagtgggcattctcaccactatgaaagccctgcctctggcctacaataaagacatgcaggaagacaaagaaggcctgttcgatgtggtcgacagctgggcaatctgcttagatatggcggcattagtgttatctggcttagtcgttaaccgcccgaatgcgctgttagccgcgcagcaaggttatgccaacgcgaccgaattggcggattatctggtgtctaaaggcatgccattccgcgaagcgcaccatgtggtcggtgtggctgtcgttgccgcgatcgctaagaagatcccgttagaagccttctctctcgctgagtttagaacttttgccgatatcatcgaggcggatgtgtatcccaacctcactatcgaagcctgtttggcaaaacgtgatgtcctcggtggtacggcgctaactcaggtgaagcaagccatcgctgcgaagaaagttatttaa

SEQ ID NO: 87932 - protein, 455 aa, Shewanella sp. MR-7
MALWGGRFQGETSALFKLFNDSLPVDYRLFEQDVVGSIAWADAIASVGIITATECSDLKKALNELLVEVKGDPAIILASGAEDIHSFVESALIAKVGDLGKKLHTGRSRNDQVATDLKLWCQSEGAALVARLQTLRSELIALAEREFDAVMPGYTHLQRAQPVTFGHWCLAYVEMIERDLSRLTDALKRANTCPLGSGALAGTAYQMDRHSLAVALNFASPTLNSLDSVSDRDHVVELCGAASISMMHLSRMAEDLIFFNSGEAGFISLSDEVTSGSSLMPQKKNPDALELIRGKTGRVYGSLVGILTTMKALPLAYNKDMQEDKEGLFDVVDSWAICLDMAALVLSGLVVNRPNALLAAQQGYANATELADYLVSKGMPFREAHHVVGVAVVAAIAKKIPLEAFSLAEFRTFADIIEADVYPNLTIEACLAKRDVLGGTALTQVKQAIAAKKVI

SEQ ID NO: 87933 - DNA, 1407 bp, Alkalilimnicola ehrlichei MLHE-1
  CDS (1)..(1407): transl_table=11
atgaccgataagaacaccagcgagcaactctggacaggccgtttcaccgaggccaccgatgccttcgtcgagcagttcagcgcctccgagcacttcgaccgcaggctctaccgccaggacatcgccggctccatggcccatgcccgtatgctggccgaggtgggcgtactcaccgccgaggaacgcgaccgcatcgtcgacgggctgacccggatccgcgaggagatcgagcacggccagtttcagtggtcccccaagctggaagacgtgcacatgaatatcgagaagcggctgacggacctgatcggcgaagcgggcaaaaagctgcacaccgggcgttcgcgcaacgaccaggtggccaccgatatccggctgtggctgcgcgaggccatcgacggcatcctggacgagctgctgcgactgcaggccggcctggtggagctggcggagctggaggcggacaccatcatgcccggtttcacccacatgcaggtggcgcagccggtcaccttcggccaccacctgctggcctggtacgagatgctggtccgggaccagggccggctggaggactgtcgcaagcggctcaaccagatgccgctgggctgcgcggcgctggcgggcaccagcttccccatcgaccgcgagcagacctgcagcgagctgggcttcgaccgccctacccgcaactccctggactcggtgagcgaccgcgacttcgccattgaattcaacgccgccgcggcgctggtgatgacccacctctcgcgcatggccgaagaggtgatcctgtgggcctcgccccacttcggcttcattgacctgccggaccggttctgcaccggctcgtccatcatgccgcagaagaagaacccggacgtggcggagctggtgcggggcaagaccgcgcgggtgcacggtaatctcaatgccctgctggtgttgatgaagggccagccactggcctacaaccgcgacaaccaggaggacaaggagccgctgttcgacaccgcggataccctccgcgacgcgttgaccgccttcgccgacatgctgccggccatggaggtccagcgcgaggcctgttaccgggccgcccgggcgggctttgccaccgccaccgacctggccgactacctggtgcgcaagggcgtgccgttccgggacgcccacgagatcgtcggccgggcggtgcgctacgccagtgacgaggggcgcgatctgagcgagctggaactggatgaactgcaacagttctcgggcaccatcagcgaggatgtcttcgaggtgctcaccctggagggctcagtggccgcccgcaaccacctgggcggcaccgccccggcacaggtccgggcccgggtggccgaggcgcgggaccggctgcggttgctgatgggcaagtga

SEQ ID NO: 87934 - protein, 468 aa, Alkalilimnicola ehrlichei MLHE-1
MTDKNTSEQLWTGRFTEATDAFVEQFSASEHFDRRLYRQDIAGSMAHARMLAEVGVLTAEERDRIVDGLTRIREEIEHGQFQWSPKLEDVHMNIEKRLTDLIGEAGKKLHTGRSRNDQVATDIRLWLREAIDGILDELLRLQAGLVELAELEADTIMPGFTHMQVAQPVTFGHHLLAWYEMLVRDQGRLEDCRKRLNQMPLGCAALAGTSFPIDREQTCSELGFDRPTRNSLDSVSDRDFAIEFNAAAALVMTHLSRMAEEVILWASPHFGFIDLPDRFCTGSSIMPQKKNPDVAELVRGKTARVHGNLNALLVLMKGQPLAYNRDNQEDKEPLFDTADTLRDALTAFADMLPAMEVQREACYRAARAGFATATDLADYLVRKGVPFRDAHEIVGRAVRYASDEGRDLSELELDELQQFSGTISEDVFEVLTLEGSVAARNHLGGTAPAQVRARVAEARDRLRLLMGK

SEQ ID NO: 87935 - DNA, 1398 bp, Hyphomonas neptunium ATCC 15444
  CDS (1)..(1398): transl_table=11
atggcagatgacaaaggccagatgatgtggggcgggcgttttgccgcgacaccttcagccatcatggaagagatcaatgcctcgctggatattgaccggcggatggcggaagaagatgttgccggtagccgcgcccatgccgacatgctggccgaaatgggcattctgagcgtcgccgataatgaggcgatccagggtggcctcgacgccgtgatcgaggagatgcgggcagggacattccctttccgccgagagctggaagacattcacatgaatgtcgaagcccgcctcaaggagctgatcggcgagccggccgggcgcctgcatacggcgcggtcgcgcaatgatcaggtgatcacagacttccgtctctggacgcggcgggccttggacgagaccggccaactggtggcgggccttcaggcaatgctggtgcgccgggctgacgagaatacgtccaccgtgatgccgggctttacccatttgcagaccgcgcagccggtgacgctcgggcatcacttgctggcctatgtcgagatgctggaacgcgaccgctcccgcctgctcgattgcgcggtgcggctgaatgagtgtccgctgggcgctgccgcgctggccggcactggctttccgatcgaccgcgacatgacggctgaagcgctcggctttgcccggccgatggcaaactcgctggacgcggtttctgcgcgggatttcgcgctggaagcgctctccagcctttcgattgccgccacgcacctttcgcgtctggctgaagagatcgtgctgtggacgagcccgcaattcggctttgcgcggctgagcgatcaatggtcgacggggtcttcgatcatgcctcagaaacgcaatccggatgcggctgagctgatccgggcgaaggcatcactgatcacggggcatttctcggcattgcagggggccatcaaggcgctgccgctggcctatgcgaaggatctgcaggacgacaaacgcctcacttttgacgccttcgacacgtttaatctgtgtgtccgggcaatgaccggcatgatcgaaaccatcagcttcaagcccgacgccatgcgggcagccgcggccaaagggttctctacggcgacggacctggcggactggctggttcgggaactgggaatgccgttccgggatgcccaccatgttacgggccgcattgttgcgcgggccgaggccaagggggttgatctggctgatctgcccctgaaggagatgcaggccgtgcacagcgccatcacacaggaggtatatggcgtgctcagcgttgaagcgtcagctgcatcgcgtacctcatatggcgccacgagccctgttcgcgtggccgaacaggtggcacagtggaaacagagacttcgagtggagtag

SEQ ID NO: 87936 - protein, 465 aa, Hyphomonas neptunium ATCC 15444
MADDKGQMMWGGRFAATPSAIMEEINASLDIDRRMAEEDVAGSRAHADMLAEMGILSVADNEAIQGGLDAVIEEMRAGTFPFRRELEDIHMNVEARLKELIGEPAGRLHTARSRNDQVITDFRLWTRRALDETGQLVAGLQAMLVRRADENTSTVMPGFTHLQTAQPVTLGHHLLAYVEMLERDRSRLLDCAVRLNECPLGAAALAGTGFPIDRDMTAEALGFARPMANSLDAVSARDFALEALSSLSIAATHLSRLAEEIVLWTSPQFGFARLSDQWSTGSSIMPQKRNPDAAELIRAKASLITGHFSALQGAIKALPLAYAKDLQDDKRLTFDAFDTFNLCVRAMTGMIETISFKPDAMRAAAAKGFSTATDLADWLVRELGMPFRDAHHVTGRIVARAEAKGVDLADLPLKEMQAVHSAITQEVYGVLSVEASAASRTSYGATSPVRVAEQVAQWKQRLRVE

SEQ ID NO: 87937 - DNA, 1365 bp, Rhizobium leguminosarum bv. viciae 3841
  CDS (1)..(1365): transl_table=11
atgtggggcggtcgcttcgcctccggcccggacgcgatcatggaggagataaatgcctcgatcggtttcgacaagaagctattcgcgcaggatatccgcggttcgattgcccatgcgacgatgctcgcccatcaggagatcatttccgccgaagataaggacaagatcgttcacgggctaaacacgatcctgtcagaaatcgaaagcggcaatttcgaattctcgcgtcagctcgaagacatccatatgaatgtcgaggcacgcttggcgacgctgatcggaccggccgccggccgcctgcacaccgcccgctcgcgcaatgatcaggtggcgctcgacttccgtctctgggtgaaggaagagctgcagaagaccgagcagatgctgaccggcctgatcgcggccttcctcgaccgcgccgaagaacatgccgaaagcgtcatgccgggcttcacccatctgcagaccgcccagcccgttaccttcggccatcactgcatggcctatgtcgaaatgttcggccgcgatcgctcgcgggtgcgccacgccatcgagcatctggatgaaagcccgatcggtgccgccgcacttgccggcaccggctatccaatcgaccgccacatgacggccaaggcgctcggtttccgcgagccgacccgcaactccatcgatacggtctccgaccgcgacttcgccatcgaattcctgtcgatcgcagcgattgcgggcatgcatctgtcgcgtctggcagaagagatcgtcatctggtcgaccccgcaattcggtttcgtgcgcctctccgacgccttctcgaccggctcgtcgatcatgccgcagaagaagaacccggatgccgccgaactggtgcgcgccaagaccggccgcatcaacggctcgctggtggcgctgctgacgatcatgaagggcctgccgctcgcctattccaaggacatgcaggaagacaaggaacaggtcttcgacgctgccgagagcctggaactggcaatcgccgccatgaccggcatggtgcgcgacatgaccgtcaacaccgcgcgcatgaaggcggcggccggctccggctattcgacggcgaccgatcttgccgactggctggtgcgcgaagcggggctccccttccgcgacgcccatcacgtcaccggccgcgccgtagcactcgccgaaagcaagggctgcgaccttgccgaactgccgctctccgatctgcaggcgatccatgccgacatcaccgacaaggtctacgacgtgctgaccgtcgaggcctcggtcgccagccgcaagagcttcggcggcaccgcgccgtccgaagtgcgcaggcagatcgccttctggcgcgcccgcaactaa

SEQ ID NO: 87938 - protein, 454 aa, Rhizobium leguminosarum bv. viciae 3841
MWGGRFASGPDAIMEEINASIGFDKKLFAQDIRGSIAHATMLAHQEIISAEDKDKIVHGLNTILSEIESGNFEFSRQLEDIHMNVEARLATLIGPAAGRLHTARSRNDQVALDFRLWVKEELQKTEQMLTGLIAAFLDRAEEHAESVMPGFTHLQTAQPVTFGHHCMAYVEMFGRDRSRVRHAIEHLDESPIGAAALAGTGYPIDRHMTAKALGFREPTRNSIDTVSDRDFAIEFLSIAAIAGMHLSRLAEEIVIWSTPQFGFVRLSDAFSTGSSIMPQKKNPDAAELVRAKTGRINGSLVALLTIMKGLPLAYSKDMQEDKEQVFDAAESLELAIAAMTGMVRDMTVNTARMKAAAGSGYSTATDLADWLVREAGLPFRDAHHVTGRAVALAESKGCDLAELPLSDLQAIHADITDKVYDVLTVEASVASRKSFGGTAPSEVRRQIAFWRARN

SEQ ID NO: 87939 - DNA, 1395 bp, Pseudomonas aeruginosa UCBPP-PA14
  CDS (1)..(1395): transl_table=11
atgagcgtagagaagaccaaccagtcctggggcggccgcttcagcgagcccgtcgacgccttcgtcgcccgtttcaccgcctccgtcgacttcgacaagcgtctctaccgccacgacatcatgggttccatcgcccacgccacgatgctggccaaggtcggcgtgctgagcgacgccgagcgcgatgcgatcgtagacggcctgcaacagatccaggcggaaatcgaagccggcagcttcgactggcgcgtcgacctggaagacgtgcacatgaacatcgaggcgcgcctgaccgaccgcatcggcgtcaccggcaagaagctccacaccggtcgctcgcgcaacgaccaggtggccaccgacatccgcctctggctacgcgacgagatcgacaccatcctcgccgagatcacccgcctgcaggagggcctgctgggcctggccgaagcggaagccgacaccatcatgcccggtttcacccacctgcagaccgcccagccggtgaccttcggccaccacctgctggcctggttcgagatgctcggccgcgactacgagcgcctggtcgactgccgcaagcgggtcaaccgcatgccgctcggctcggcggccctggccggcaccacctacccgatccagcgcgagatcacctgccagttgctgggcttcgacgcggttggcggcaactccctggacggcgtctccgaccgcgacttcgccatcgaattctgcgccgccgccagcctggcgatgatgcacctgtcgcgcttctcggaagagctggtgctgtggaccagcgcgcagttccagttcatcgacctgcccgaccgcttctgcaccggctcctcgatcatgccgcagaagaagaaccccgacgtgccggagctggtacgcggcaagtccggccgggtgttcggcgccctcaccggcttgctgaccctgatgaagggccagccgctggcctacaacaaggacaaccaggaagacaaggaaccgctgttcgacgccgccgacaccctgcgcgacagcctgcgcgccttcgccgacatggtcccggcgatccggccccggcgcgagatcatgcgcgaggcggcacgccgcggtttctccaccgccaccgacctggccgactacctggtgcgcaagggcctgccgttccgcgactgccacgagatcgtcggccacgcagtgaagtacggcgtggacagcggcaaggacctcgccgagatgagcctcgacgaactgcgccgcttcagcgagcagatcgacgccgacgtcttcgacgtgctgaccctggaaggctcggtcaacgcccgcgaccatatcggcggcaccgcgccgaaccaggtccgtgccgccgtcgcccgcggccggcagttgctcgcccagcgctga

SEQ ID NO: 87940 - protein, 464 aa, Pseudomonas aeruginosa UCBPP-PA14
MSVEKTNQSWGGRFSEPVDAFVARFTASVDFDKRLYRHDIMGSIAHATMLAKVGVLSDAERDAIVDGLQQIQAEIEAGSFDWRVDLEDVHMNIEARLTDRIGVTGKKLHTGRSRNDQVATDIRLWLRDEIDTILAEITRLQEGLLGLAEAEADTIMPGFTHLQTAQPVTFGHHLLAWFEMLGRDYERLVDCRKRVNRMPLGSAALAGTTYPIQREITCQLLGFDAVGGNSLDGVSDRDFAIEFCAAASLAMMHLSRFSEELVLWTSAQFQFIDLPDRFCTGSSIMPQKKNPDVPELVRGKSGRVFGALTGLLTLMKGQPLAYNKDNQEDKEPLFDAADTLRDSLRAFADMVPAIRPRREIMREAARRGFSTATDLADYLVRKGLPFRDCHEIVGHAVKYGVDSGKDLAEMSLDELRRFSEQIDADVFDVLTLEGSVNARDHIGGTAPNQVRAAVARGRQLLAQR

SEQ ID NO: 87941 - DNA, 1383 bp, Leuconostoc mesenteroides subsp. mesenteroides ATCC 8293
  CDS (1)..(1383): transl_table=11
atgagtgataaattatggggtggtcgttttactgctaaagctgcagaatgggtagatgaatttggtgcttcaattcactttgatcaaaaaatggcagctgaagatattgaaggttcgatagcacatgcgaaaatgcttggcaaacaaggcattatcagtccggaagaatcagaaaaaatcgtttctggtttgaaaatcatcaatgaagaactcattgctggaaaaattgagtttgacgttaaaaacgaagatattcatatgaatatcgaatcattattgaccgagaaaataggtccggtggcaggaaaattgcacactgctcgttcccgtaatgaccaagtagccactgattttcatttatgggtcaagcatcgtttgccccacgttctagaatctctaactgaattgcaagaggagttgttaactttggcgacaactcatgcaggaaccatcatgtctgggtatacgcatttgcaacatgcgcagccaataacttatggtcactatcttcttgcttactttgaaatgtttcaacgtgactatgaacgtttcgaatttaaccaaaagcatacagacattttgccgttaggagcagcggcattagccgggacaactttcccgattgaccgtgaatttgttgcttcagaactgggttttgacagtatttatcacaactcattagatgccgtgtcagatcgtgattttgctttagaattcttgtcaaacgccgctatattaatgatgcacctttccagaatggcagaagagttaattttgtggtcaacttacgaatttaattacattgaactatcagatgatttttcaaccggctcgtcaattatgccacaaaaaaagaatgccgattttgctgaattagttcgtggaaaaacaggaagaagctatggcgcattaatgggtctgttgacaacgatgaagtcattgccactagcctacaacaaagatatgcaagaggataaagagcaggtctttgatattatggatacggttctagcctctgttaaggtgtttacgggtatgctaagtggcttgacggttcataaagagcgtatgctggccacaacacaagatgatttttcgaatgcgactgaactagcggattacttggccactaaaggtgtaccattccgtgaagcccatgcaattgtgggtcaattagtcttgacaggtattcaatcaaaaacgccattacaaaaaatgtctctgtctgatttgcaagccgtagccccacaaatagaagaagacatttacgacaaactacaatctgaaacagcagttaaccgacgcacttcgttaggcggtacggctgttgaaaatgttaaaaaagaaattgtaagaaataaaaaagttttggaggcaaggtaa

SEQ ID NO: 87942 - protein, 460 aa, Leuconostoc mesenteroides subsp. mesenteroides ATCC 8293
MSDKLWGGRFTAKAAEWVDEFGASIHFDQKMAAEDIEGSIAHAKMLGKQGIISPEESEKIVSGLKIINEELIAGKIEFDVKNEDIHMNIESLLTEKIGPVAGKLHTARSRNDQVATDFHLWVKHRLPHVLESLTELQEELLTLATTHAGTIMSGYTHLQHAQPITYGHYLLAYFEMFQRDYERFEFNQKHTDILPLGAAALAGTTFPIDREFVASELGFDSIYHNSLDAVSDRDFALEFLSNAAILMMHLSRMAEELILWSTYEFNYIELSDDFSTGSSIMPQKKNADFAELVRGKTGRSYGALMGLLTTMKSLPLAYNKDMQEDKEQVFDIMDTVLASVKVFTGMLSGLTVHKERMLATTQDDFSNATELADYLATKGVPFREAHAIVGQLVLTGIQSKTPLQKMSLSDLQAVAPQIEEDIYDKLQSETAVNRRTSLGGTAVENVKKEIVRNKKVLEAR

SEQ ID NO: 87943 - DNA, 1395 bp, Magnetococcus sp. MC-1
  CDS (1)..(1395): transl_table=11
atgtcagacggcaaacccatgggtaaattgtggggggggcgctttagcgaacccaccaacgcctttgtggaggcctttagtgcctccatcgactatgacgcccgtctttaccggcacgatattcgtggctccattgcccactgcgccatgctgggccgccaagggattattccccaggcggatgccgagcgcattattcaggggttgcagcaggtacgcggtgaaattgaccggggcgagatgcactacagcaacgccttggaagatatccatatgcatgtggagagccgccttaccgagatcattgggccggtggcgggtaaattgcacaccgcccgttcccgcaatgatcaggtggcgacggactttcgcctttatctacgggatgagttggatgccattgtgcaagccattcgcaccttgcaaggggggttggtgatgctggccgagcagcacgcccatgtgatcatgccgggatttacccacatgcagagcgcccagcccgtcacctttggccaccatatgatggcctattatgagatgctcaagcgggactatgggcggtttagcgatatgcgcccccggcttaaccgtatgccgttgggttctgcggcgctggcgggtaccacctttccgttggatcgggagagtgtggcgcgggagctggaatttgatggtctgtgtgaaaactctttggatgcggtttcggatcgggattttgccattgagatgatggccgcctgcgcaaccctgatgatgcacctatcccgtttttctgaagagctgattttgtggagtgcgccggcctaccgttttatacgtctgcccgatgccttttgcaccggttccagcattatgccgcagaaaaaaaaccccgatgtgccggagctggtgcggggcaaagtggggcgggtctatggggcgctaaccagtgtgttgacgctgatgaaagggctacccctggcctataaccgggatatgcaggaggataaagaggcggtttttgatgccgtggatacggtgcgcgcctgcctgcgggtgtttggggatatggtgccgggcatacagccccaggtggcaaccctgcgtggggcggcgggggcgggttttgccaccgcgaccgatctggcggattatctggtgcgtaagcagattccctttcgggaggcccatgaaattgtgggcaccattgtgcgcatggccgagcagcagggggtggatctggatgggttgactctggctgaccttcagtcggtggatggccggattgagtccgatgtaacggccattttatcggtggaatcctccgtcaatgcccgccaagccattggcggcactgccgttgcaacggtacgcaccgccattgccatggccaaacaggagcttgctctgtaa

SEQ ID NO: 87944 - protein, 464 aa, Magnetococcus sp. MC-1
MSDGKPMGKLWGGRFSEPTNAFVEAFSASIDYDARLYRHDIRGSIAHCAMLGRQGIIPQADAERIIQGLQQVRGEIDRGEMHYSNALEDIHMHVESRLTEIIGPVAGKLHTARSRNDQVATDFRLYLRDELDAIVQAIRTLQGGLVMLAEQHAHVIMPGFTHMQSAQPVTFGHHMMAYYEMLKRDYGRFSDMRPRLNRMPLGSAALAGTTFPLDRESVARELEFDGLCENSLDAVSDRDFAIEMMAACATLMMHLSRFSEELILWSAPAYRFIRLPDAFCTGSSIMPQKKNPDVPELVRGKVGRVYGALTSVLTLMKGLPLAYNRDMQEDKEAVFDAVDTVRACLRVFGDMVPGIQPQVATLRGAAGAGFATATDLADYLVRKQIPFREAHEIVGTIVRMAEQQGVDLDGLTLADLQSVDGRIESDVTAILSVESSVNARQAIGGTAVATVRTAIAMAKQELAL

SEQ ID NO: 87945 - DNA, 1413 bp, Nocardioides sp. JS614
  CDS (1)..(1413): transl_table=11
atgggcacgaacaccgggaagctctggggcggccgcttcgcgggcggcccgtcgccggagctggacgcgctgtcccgctcgacccacttcgactggcggctgacgccctacgacctcgccgggtcgcgggcgcacgccaacgccctgcaccgcgccggtctgctgaccgacgcggacctggccgagctgcgccgcggcctggacgcactgggggagcggtacgccgccggcacgctgcggcccgacccctccgacgaggacgtccacggcgccctcgaacggctgctggtcgacgaggtcggccccgaggtcggtggccggctgcgcgccgggcgcagccgcaacgaccagatcgcgacgctgttcaaggtgttcctccgcgaccatgccgccgtggtcgcgggccaggtgctcgacctcgtggacgcactggccggccaggcccgcgcggccggtgacgcggtgatgcccggccgcacccatctccagcacgcgcagccggtgctgctggcccaccacctgctcgcacactgctgggcgctgctgcgcgacgtcgaccggctccgcgactgggacgcccgcgtggccgcggactcgccgtacggctccggtgcgctggccggctcgagcctcggcctggacccggagggcgtggcggccgagctcggcttcagcggctccagtgccaactcgatcgacgggaccgcgtcacgggacttcgtcgccgagttcgcctacgtcaccgcccagatcggcgtcgacgtcagccggatcgccgaagaggtgatcttgtggtcgacccgcgagttcggcttcgtcacgctgcacgactcctggtccaccgggtccagcatcatgccgcagaagaagaacccggacatcgcggagctggcgcgcggcaaggccggccggctgatcggcaacctgtcgggcctgctggccacgctcaaggcgctccctctcgcatacaaccgcgacctgcaggaggacaaggagccggtgttcgactcggtggacacgctcgaggtgctgctgccggcgttcacgggcctggtggcgaccctcgccttcgacaccgaacggatggccgacctcgcgccccagggattctccctggccaccgacgtcgccgagtggctggtccgcgagggggtgccgttccggatcgcccacgaggtcgcgggcgcctgcgtgcgtcgttgcgaggagctcggcatcgagctcgcggacctcaccgacgagcagttcgccgagatctccccggcgctgacgcccggggtgcgcgaggtgctcagcgtcgccggctccgtctcggcgcgggacggacgcggcggcaccgcgccgatccgggtccgcgagcagctcgccgagctcaccggcctcgtcgacggacaccgtgaccggctcggctga

SEQ ID NO: 87946 - protein, 470 aa, Nocardioides sp. JS614
MGTNTGKLWGGRFAGGPSPELDALSRSTHFDWRLTPYDLAGSRAHANALHRAGLLTDADLAELRRGLDALGERYAAGTLRPDPSDEDVHGALERLLVDEVGPEVGGRLRAGRSRNDQIATLFKVFLRDHAAVVAGQVLDLVDALAGQARAAGDAVMPGRTHLQHAQPVLLAHHLLAHCWALLRDVDRLRDWDARVAADSPYGSGALAGSSLGLDPEGVAAELGFSGSSANSIDGTASRDFVAEFAYVTAQIGVDVSRIAEEVILWSTREFGFVTLHDSWSTGSSIMPQKKNPDIAELARGKAGRLIGNLSGLLATLKALPLAYNRDLQEDKEPVFDSVDTLEVLLPAFTGLVATLAFDTERMADLAPQGFSLATDVAEWLVREGVPFRIAHEVAGACVRRCEELGIELADLTDEQFAEISPALTPGVREVLSVAGSVSARDGRGGTAPIRVREQLAELTGLVDGHRDRLG

SEQ ID NO: 87947 - DNA, 1443 bp, Azoarcus sp. BH72
  CDS (1)..(1443): transl_table=11
atgacagacaccaccccgtcggccgacctcggcgcctcttcccagcaacccgccaaggcttggtccggccgcttctcggaaccggtttccgatctggtcaagcgctacaccgcgtcggtgttcttcgacaaccgcatggccgaacaggacatccgcggctcgctcgcgcacgccaagatgctcgcccgccagggcatcatcggcgcgcaggacctcgccgacatcgagcgcggcatggcgcagatcaagggcgagatcgaacgcggcgagttcaactggaacctcgacgacgaggacgtccacctcaacatcgagaagcgcctcaccgcgctggtcggcgacgccggcaagcgcctgcacaccggccgcagccgcaacgaccaggtcgccaccgacatccgcctgtggctgcgcgacgcgatcgaccagatcctcgcgctgatcggcgacttccagaagaacctgctcgacgtcgccgaagccaacgcggccacgccgatgcccggcttcacccacctgcaggtcgcccagccggtcaccttcggccaccacctgatggcctatttcgagatgacccggcgcgacgccgagcgcttcgccgactgccgcaagcgggtcaaccgcctgccgctgggcagcgccgcgctggccggcaccagctacccgatcgaccgcgagttcgtcgcccgcgaactcggcttcgacgaggtctgctacaactcgctcgacgccgtcagcgaccgcgacttcgcgatcgaattctgcgccgcgtcctcgctgctgatgacgcacctgtcgcgcttctccgaggaactcatcctgtggatgagcccgcgcttcggcttcatcgacctcgccgaccgcttctgcaccggcagctcgatcatgccgcagaagaagaacccggacgtgccggaacttgtgcgtggcaagaccggccgggtgaacggcagcctgatcgcactgctgaccctgatgaaaggccagcccctggcctacaacaaggacaaccaggaagacaaggagccgctgttcgacaccgccgacacggtgatcgacaccctgcgcatctatgccgacatgatcaccggcatccgcgtcaaggccgacaacatgcgcggcgcgctcacccagggctacgccaccgccaccgacctcgccgactacctggtcaagaagggcctgcccttccgcgacgcccacgaagcagtcgcactggccgtgcgtgccgccgaagtgcgcggctgcgacctgccgcagttctcgctcgacgagctgcgggcggcgatggcgcacgtgcccggcgcagccgacaagctcgctgacgacatcttcggcgtgctgaccgtggaaggctcgctcgactcgcgcaatcacatcggcggaaccgcgcccgcccaggtcctggcagcggtcgcgcacgcccgcacccgcctcggctga

SEQ ID NO: 87948 - protein, 480 aa, Azoarcus sp. BH72
MTDTTPSADLGASSQQPAKAWSGRFSEPVSDLVKRYTASVFFDNRMAEQDIRGSLAHAKMLARQGIIGAQDLADIERGMAQIKGEIERGEFNWNLDDEDVHLNIEKRLTALVGDAGKRLHTGRSRNDQVATDIRLWLRDAIDQILALIGDFQKNLLDVAEANAATPMPGFTHLQVAQPVTFGHHLMAYFEMTRRDAERFADCRKRVNRLPLGSAALAGTSYPIDREFVARELGFDEVCYNSLDAVSDRDFAIEFCAASSLLMTHLSRFSEELILWMSPRFGFIDLADRFCTGSSIMPQKKNPDVPELVRGKTGRVNGSLIALLTLMKGQPLAYNKDNQEDKEPLFDTADTVIDTLRIYADMITGIRVKADNMRGALTQGYATATDLADYLVKKGLPFRDAHEAVALAVRAAEVRGCDLPQFSLDELRAAMAHVPGAADKLADDIFGVLTVEGSLDSRNHIGGTAPAQVLAAVAHARTRLG

SEQ ID NO: 87949 - DNA, 1377 bp, Neisseria meningitidis FAM18
  CDS (1)..(1377): transl_table=11
atgcacgacaaaacctggtccggacgtttcaacgaacccgtttccgaactcgtcaaacaatacaccgcctccatcggtttcgaccgacggcttgccgaatgggacattcaaggctcgctggcacacgcgcaaatgttgaaagaaaccggcgtgttggacgaaggcgatttggcagacatccgtcggggcatggcggaaatcctcgaagaaatccgcagcggcaaaatcgaatggtcgtccgatttggaagatgtccacatgaacatcgaacgccgcctgaccgacaaaatcggcgacgcgggcaaacgcctgcacaccggccgcagccgcaacgaccaagtcgccaccgacatccgcctttggctgcgcgaccagattaccgtcatccgaagcctgattcaaagccttcagacggcattgctggatttggcggaacaaaacgccgaaaccgtcatgcccggttttacccatctgcaagtcgcccagcccgtcagcttcggacaccatatgctcgcctacgtcgaaatgctcggacgcgataacgaacggatggcggactgccgctgccgcgtcaaccgtatgccgctcggcgcagccgcccttgccgggacgacctacccgattcagcgcgaaatcaccgccgagctattgggctttgaacaaatctgccagaactcgctcgatgccgtatccgaccgcgatttcgccattgagttcacagccgccgcctcgctggttatggttcacctgagccgcctgtctgaagaattgattttgtggatgagcccgcgtttcggctttatcgacatcgccgaccgcttctgcacaggttcgtccatcatgccgcagaagaaaaaccccgacgtgcccgaactcgtgcgcggcaaatccggccgcgtcatcggacaccttatcggtctgattaccctgatgaaatcccaacccttggcgtacaacaaagacaatcaggaagacaaagaacccttgttcgacaccgccgacacgcttatcgacacgttgcggatttacgccgatatgatgcgcggcgtaaccgtcaaacccgacaatatgcgcgccgccgtgatgcagggcttcgctaccgccaccgacttggcggattatctggtcaaaaaaggcatgcctttccgcgatgcccacgaagtcgtcgcccaagccgtgcgccatgctgatgaagccggcgtcgatttgagcgaactgccgctcgaagtcttacaaggtttcagcgatttgattgccgacgacgtttacggcgtgctgacacccgaaggcagcttaaacgcgcgcaaccacttgggcggcaccgcgcctgaacaagtccgtttccaagtcaaacgctggcgggaaatgttggcttaa

SEQ ID NO: 87950 - protein, 458 aa, Neisseria meningitidis FAM18
MHDKTWSGRFNEPVSELVKQYTASIGFDRRLAEWDIQGSLAHAQMLKETGVLDEGDLADIRRGMAEILEEIRSGKIEWSSDLEDVHMNIERRLTDKIGDAGKRLHTGRSRNDQVATDIRLWLRDQITVIRSLIQSLQTALLDLAEQNAETVMPGFTHLQVAQPVSFGHHMLAYVEMLGRDNERMADCRCRVNRMPLGAAALAGTTYPIQREITAELLGFEQICQNSLDAVSDRDFAIEFTAAASLVMVHLSRLSEELILWMSPRFGFIDIADRFCTGSSIMPQKKNPDVPELVRGKSGRVIGHLIGLITLMKSQPLAYNKDNQEDKEPLFDTADTLIDTLRIYADMMRGVTVKPDNMRAAVMQGFATATDLADYLVKKGMPFRDAHEVVAQAVRHADEAGVDLSELPLEVLQGFSDLIADDVYGVLTPEGSLNARNHLGGTAPEQVRFQVKRWREMLA

SEQ ID NO: 87951 - DNA, 1461 bp, Acidovorax sp. JS42
  CDS (1)..(1461): transl_table=11
atgtcctcttcttccgcctcgcaaccgtcccacgaccagctcgccaccaaggcccaggcctggtcggccttgttctccgagcccatgagcgatctggtcaagcgctatacgtcgagcgtgttcttcgacaagcgcctgtggcaggccgacatcgcgggcagcctggcccatgccgagatgctggccgcgcaaggcatcatcagcgcgcaggaccatgccgacattcagaagggcatggcccagatcacgcaggagatcgcgtccggcgcgttcgagtggaagctggacctggaggacgtgcacctgaacatcgaggcgcgcctgacccagctggtgggcgacgccggcaagcgcctgcacaccggccgcagccgcaacgaccaggtggccaccgacgtgcgcctgtggctgcgcggcgagatcgacctgatcgagggcctgctgagcgagctgcagctgtcgctggtcgaggtggccgagcagaacgtcgaggtgatcctgcccggcttcacccacctgcaggtggcgcagcccgtgagctttgcgcaccacctgctggcttacgtggagatgtttgcacgcgatgccgagcgcatgcgcgacgtgcgccgccgggtgaacgtgctgccgctgggctccgccgcgctggccggcaccacctacccgctggaccgcgagcgcgtggccaagacgctgggcatggagggcgtgtgccagaacagcctggacggcgtgagcgaccgcgacttcgccatcgagttcacggccgccgccagcctgtgcatggtgcacgtgagccgcctgtccgaagaactcatcatctggatgagccagaacttcggcttcatcaagatcgccgaccgcttcaccaccggctcgtcgatcatgccccagaagaagaaccccgacgtgccggagctggcgcgcggcaagaccggccgcgtggtgggccacctgatgggcctgatcacgctgatgaagggccagcccctggcctacaacaaggacaaccaggaagacaaggagccgctgttcgacacggtggacacgctgaaggacacgctgcgcatctttgccgaaatgatcggcggccagatgaaccccgccaccggctgcaaggacgggggcatcaccgtgaacgccgaggccatgcgcgccgcggcgctcaagggctatgccacggcgaccgacctggccgactacctcgtcaagaagggcctgccgttccgcgacgcgcacgagaccgtggcccacgcggtgaaggccgcggtgtcgcacagcgtggacctgtcggagctgccgctggccgtgctgcagggctttcacccggcgatcgagaaggatgtgttcgatgccctgagcctgcagggctcgctgaacgcgcgcaacaccctgggcggcaccgcgcccgcgcaggtgcgcacgcagctggcgcgccaccgtgcgcggctgtccgcctga

SEQ ID NO: 87952 - protein, 486 aa, Acidovorax sp. JS42
MSSSSASQPSHDQLATKAQAWSALFSEPMSDLVKRYTSSVFFDKRLWQADIAGSLAHAEMLAAQGIISAQDHADIQKGMAQITQEIASGAFEWKLDLEDVHLNIEARLTQLVGDAGKRLHTGRSRNDQVATDVRLWLRGEIDLIEGLLSELQLSLVEVAEQNVEVILPGFTHLQVAQPVSFAHHLLAYVEMFARDAERMRDVRRRVNVLPLGSAALAGTTYPLDRERVAKTLGMEGVCQNSLDGVSDRDFAIEFTAAASLCMVHVSRLSEELIIWMSQNFGFIKIADRFTTGSSIMPQKKNPDVPELARGKTGRVVGHLMGLITLMKGQPLAYNKDNQEDKEPLFDTVDTLKDTLRIFAEMIGGQMNPATGCKDGGITVNAEAMRAAALKGYATATDLADYLVKKGLPFRDAHETVAHAVKAAVSHSVDLSELPLAVLQGFHPAIEKDVFDALSLQGSLNARNTLGGTAPAQVRTQLARHRARLSA

SEQ ID NO: 87953 - DNA, 1386 bp, Nostoc punctiforme PCC 73102
  CDS (1)..(1386): transl_table=11
atgaccaaagaacaaacttggagccagaggtttgaatcagccctgcatcccgcgatcgctcgttttaatgccagtataggttttgatattgaattaatagaatacgatctgactggttctcaagcccatgccaaaatgctagctcacacgggcattatctcctcagaagaaggtgagcaactggttgcaggtttagaacaaatccgccaagagcatcgccagggaaaatttcatcctggtgttgatgcagaagatgtacattttgcagttgaaaaacgactgacagaaattgtcggcgatgtgggtaaaaaactgcatacggcgcgatcgcgtaatgaccaagttggtactgatactagactctacctccgcgaccaaatccagcaaattaaaagcgaattgcgagaattccaaggtgttttactggatatagctgaaaagcacgttgaaactttgatcccaggctatacccatctacaacgcgctcaaccagtgagtttagctcaccacctattggcatactttcaaatggcgcaacgcgactgggaacgcttgggagatgtttctcgccgcgtcaatatctcacctttggggtgcggtgctttagcgggaactactttccccatcgatcgccactacacagccaaactattagattttgataatatttatgctaacagcctcgatggagtaagcgatcgtgattttgcgatcgaattcttgtgtgctgctagcttgattatggttcacctcagccgccttgcagaagaagtcattctttggtcatctgaagaatttcgttttgtcatcctcaaagatagctgtgctacaggttccagtatcatgccccaaaagaaaaaccccgatgtaccagaactcgtgcgggggaaaacgggacgtgtatttggtcatctccaggcaatgctagtgattatgaaagggctacctctggcatataacaaagacctgcaagaagataaagaaggtctatttgatagcgttaacacagtcaaagcatctctagaagcaatgacaattttgctcagggaaggcttagaatttcgtacccagcgtttagcacaagccgtaaccgaagatttctccaacgctactgatgtagcagattatcttgcagcacggggcgttcctttccgggaagcttacaacctcgtgggtaaggtggtaaaaactagtattgctgcaggtaaactcctgaaagatttggaattggaagagtggcaacaactacatccggcatttgcagcagatatttatgaggcgatatccccccgtcaagttgtggcagcccgcaacagtcacggtggtactggctttgtacaggttagcaaagcactcatagccgctcgcgctcaaatcgatcaataa

SEQ ID NO: 87954 - protein, 461 aa, Nostoc punctiforme PCC 73102
MTKEQTWSQRFESALHPAIARFNASIGFDIELIEYDLTGSQAHAKMLAHTGIISSEEGEQLVAGLEQIRQEHRQGKFHPGVDAEDVHFAVEKRLTEIVGDVGKKLHTARSRNDQVGTDTRLYLRDQIQQIKSELREFQGVLLDIAEKHVETLIPGYTHLQRAQPVSLAHHLLAYFQMAQRDWERLGDVSRRVNISPLGCGALAGTTFPIDRHYTAKLLDFDNIYANSLDGVSDRDFAIEFLCAASLIMVHLSRLAEEVILWSSEEFRFVILKDSCATGSSIMPQKKNPDVPELVRGKTGRVFGHLQAMLVIMKGLPLAYNKDLQEDKEGLFDSVNTVKASLEAMTILLREGLEFRTQRLAQAVTEDFSNATDVADYLAARGVPFREAYNLVGKVVKTSIAAGKLLKDLELEEWQQLHPAFAADIYEAISPRQVVAARNSHGGTGFVQVSKALIAARAQIDQ

SEQ ID NO: 87955 - DNA, 1371 bp, Listeria monocytogenes str. 1/2a F6854
  CDS (1)..(1371): transl_table=11
atggaaaaactatggggcggacgttttcaagggaaaagtgaagcatggattgacgattttggagcttcgatttctttcgatcaaaaaatggcaaaagaagatttggcgggtagcttagcgcacgtcgccatgctcggcaaatgcgggatcattcctgattcagaagcagcagaaattacaaccggattaaaaattctccaagaaaaattagcgtttggtgagctcgaattcagcactgttaacgaagatattcatctaaatatcgaaaaactattgcacgaggaaattggttctgttgctggaaaacttcatacggcgcgtagtcgaaatgatcaagttgcgacagacatgcatttatatttaaaacaagccgtggcggaaattattcagtcgctaaaacatttacgtgtagtgcttgttcaaaaagcagagttgcatgttgaaacaattatgcctggctatacacatttacaacacgctcagcccctgtcttttgcccatcatttgcttgcttactttggaatgtttacgcgggatttggagcgtttggaagaaagtgtcaagcggattgatatttcaccgctcggttctgcagcgcttgctgggacgacatttccaattgaccgggcttatagcgccgaattacttggcttttctgctgtctatgaaaatagtttggacggcgtgagtgatcgtgattttattattgagtttcttagtaacagttctatcttgatgatgcatttatcgcgtttttgtgaggaattgatactttggacgagtcatgagtttcaatttgtcgaattaacggacgctttttcgacaggaagttcgattatgccgcaaaagaaaaacccagatatggccgagttaattcgcggaaaaactggtcgggtttacggaaacctgttcggcatgttaacggttttaaaagggttgccgctcgcttataataaagatttacaagaagataaagaaggcatgtttgatacacttgagacggttcagacaagcttagatattttcgcagggatgattgaaacgatgaaggtcaacacagaaataatggaagaatctacgcaaaaagatttttccaatgcgacagaactagcagattatttagcgaaaaaaggtgttccatttagagaagcgcatgaaatcgttggaaaattagtactagaatgtacgcaaaacgggatttatttgcaagatgtagcgcttaaccactatcaggaaataaatccacttattgaggaagatatttacgtggtgctttcttccaaaactgccgtgcaaaaaagaaattcgtatggcggaactggatttgatcaaattaaagtcgctctcgaaaacgcgaaaaaaactttgtaa

SEQ ID NO: 87956 - protein, 456 aa, Listeria monocytogenes str. 1/2a F6854
MEKLWGGRFQGKSEAWIDDFGASISFDQKMAKEDLAGSLAHVAMLGKCGIIPDSEAAEITTGLKILQEKLAFGELEFSTVNEDIHLNIEKLLHEEIGSVAGKLHTARSRNDQVATDMHLYLKQAVAEIIQSLKHLRVVLVQKAELHVETIMPGYTHLQHAQPLSFAHHLLAYFGMFTRDLERLEESVKRIDISPLGSAALAGTTFPIDRAYSAELLGFSAVYENSLDGVSDRDFIIEFLSNSSILMMHLSRFCEELILWTSHEFQFVELTDAFSTGSSIMPQKKNPDMAELIRGKTGRVYGNLFGMLTVLKGLPLAYNKDLQEDKEGMFDTLETVQTSLDIFAGMIETMKVNTEIMEESTQKDFSNATELADYLAKKGVPFREAHEIVGKLVLECTQNGIYLQDVALNHYQEINPLIEEDIYVVLSSKTAVQKRNSYGGTGFDQIKVALENAKKTL

SEQ ID NO: 87957 - DNA, 1389 bp, Crocosphaera watsonii WH 8501
  CDS (1)..(1389): transl_table=11
gtgatacaaaaaaagacttggagcgatcgctttgaaggcagtttacaccctgccattgtccaatttaatgctagtattactttcgatatcgaactgattgaatacgatttaactggttctattgcccatgctaaaatgttggctaaaacaggcattattagtgacgcagaagcagaggaattagtcaagggtttagaaacaattcgtcaagaatatcgggatggcaattttaccccagggatcgatcaagaagatgtccactttgctgtggaaagacgcttaacagagttagtgggagatgtgggtaaaaagcttcataccgcccgttcccgtaacgatcaagtaggaacggatatccgtctctatctcagggagcaaattcaacaaatacgccagcaaatcaaagaatttcaacaagtattgttaacccatgctcaagagaatgttgaaactctcatccccggttatacccatcttcaacgggcccaacccatcagcctcgctcatcatcttttagcctacttccaaatggcacaacgggactgggaacgtttaggagaaatttacaacagaacaaatgtttctcctttgggttgtggggctttagctggtacaacctttcctattgatcgccattatagtgcagaattattgggctttggggatgtttatggtaacagtttggatggagtaagcgatcgcgactttgctattgaatttctcaatgcagccagtttaattatggtgcatctcagtcgtttaagcgaagagatgatcctttgggcttctcaagagttcggttttattagtttaaccgatagttgtgcaacgggatctagtattatgccgcaaaagaaaaatcctgatgttcctgaattagttagaggcaaagcagggcgtgtttttgggcatttacagggcttgttagtgctgatgaagggattacccctagcctataataaagacctccaggaagacaaggaagctatctttgacggggtaaaaaccgttaaagggtgtttagaagcgatgacggtgttattaggagaaggtatcaagtttcggaaggaaagattaagtgaagcagtggccgaagacttttctaatgcgacggatgtagctgactatttagcagcaaaaggggttcctttcagagaagcttataatttagtagggaaagttgttaaaaccagtttagctgccggaaaattattaaaagatttgacaatggaagaatggcttgaattacatcctaaatttgaagccgatatctatgatgcgatcgcccctaaacaagtagtaacagcccgtaatagttacggagggacagggtttgaacaaattaaacaggctatagaaagggcgaaaaaacagcttgagttgtcttaa

SEQ ID NO: 87958 - protein, 462 aa, Crocosphaera watsonii WH 8501
MIQKKTWSDRFEGSLHPAIVQFNASITFDIELIEYDLTGSIAHAKMLAKTGIISDAEAEELVKGLETIRQEYRDGNFTPGIDQEDVHFAVERRLTELVGDVGKKLHTARSRNDQVGTDIRLYLREQIQQIRQQIKEFQQVLLTHAQENVETLIPGYTHLQRAQPISLAHHLLAYFQMAQRDWERLGEIYNRTNVSPLGCGALAGTTFPIDRHYSAELLGFGDVYGNSLDGVSDRDFAIEFLNAASLIMVHLSRLSEEMILWASQEFGFISLTDSCATGSSIMPQKKNPDVPELVRGKAGRVFGHLQGLLVLMKGLPLAYNKDLQEDKEAIFDGVKTVKGCLEAMTVLLGEGIKFRKERLSEAVAEDFSNATDVADYLAAKGVPFREAYNLVGKVVKTSLAAGKLLKDLTMEEWLELHPKFEADIYDAIAPKQVVTARNSYGGTGFEQIKQAIERAKKQLELS

SEQ ID NO: 87959 - DNA, 1374 bp, Exiguobacterium sibiricum 255-15
  CDS (1)..(1374): transl_table=11
atgacgaaactatggggcggacgttttacggaaagtgcttccgctcaagcggaggccttcggagcatcgatttcgtttgatcagaaattagcagccgttgatttacaggggagtcttgcgcacgcgcagatgttatatgaacagggaattcttgaaaagaccgagtgggaacaaatcgaagccggtcttaaacagttgcaaacgacactcgagcaacacgtctatacgacagtggatgaagacatccacatgaatctcgagcggttactgacggaacagattggtccggtcgccggtaaactgcatacagcccgcagtcgaaatgaccaggtcgcgactgatctccacctttggatggaacagcatgttttagaactcctgtcgagtcttcgcaacctgcaatccgtcattacggaacaggcggagcaacatgtggagacggtcatgccgggttatacccatctgcaacgggcgcaaccgatctcactcgcgcatcatctgctcgcttatttttggatgtttgaacgggatgccgatcgattgaccgataacctgaaacggattcggatgtcgccgctcggtgccggggcactggcgggaacgactttcccgattgaccgcttcaagtcagccgagttacttgggtttgaacaggtctatccgaacagtttggacgcggtctcagaccgggacttcgtgattgaataccttggcatcgcgtcgacggtcatgatgcatctgtcacgcttttgcgaagaaatcatcatctgggcgtcgcaagaattttcgttcattgagctgtccgatgcgttttcgacgggatcaagcatgatgccgcagaaaaaaaatccagatttcgcggaactgatccgcggcaaaacaggtcgtgtctacggaaatctgatgggtttcctgacgacgatgaaagcattaccactcgcatacaataaagatatgcaggaagataaggaaggtgtctttgacaccgctgataccgtgttacaatccgttcaaatttttacaggcatgatcgaatcggctacgtttaagacagaagcgctcaagaaggcgacgatgcaagacttctcgaatgcaacggaactggcggattatctggtcacaaaagggattccgttccgggaagcacatgaaatcgtcgggaaagccgtcttacattgtgtccaaagcggctgtttcttaaaagatttgacgctgtccacgtatcagacgttccatccggtcattgcagaagatgtctatccgttgttagatccggttcaggcggtcgcacgacggggaagttacggcgggaccggttttacggccgtccgggatcaactcgcattagcgaagaagcaacttgaaaaattataa

SEQ ID NO: 87960 - protein, 457 aa, Exiguobacterium sibiricum 255-15
MTKLWGGRFTESASAQAEAFGASISFDQKLAAVDLQGSLAHAQMLYEQGILEKTEWEQIEAGLKQLQTTLEQHVYTTVDEDIHMNLERLLTEQIGPVAGKLHTARSRNDQVATDLHLWMEQHVLELLSSLRNLQSVITEQAEQHVETVMPGYTHLQRAQPISLAHHLLAYFWMFERDADRLTDNLKRIRMSPLGAGALAGTTFPIDRFKSAELLGFEQVYPNSLDAVSDRDFVIEYLGIASTVMMHLSRFCEEIIIWASQEFSFIELSDAFSTGSSMMPQKKNPDFAELIRGKTGRVYGNLMGFLTTMKALPLAYNKDMQEDKEGVFDTADTVLQSVQIFTGMIESATFKTEALKKATMQDFSNATELADYLVTKGIPFREAHEIVGKAVLHCVQSGCFLKDLTLSTYQTFHPVIAEDVYPLLDPVQAVARRGSYGGTGFTAVRDQLALAKKQLEKL

SEQ ID NO: 87961 - DNA, 1392 bp, Oceanicola batsensis HTCC2597
  CDS (1)..(1392): transl_table=11
atgaccgacacaagcgcgaaccagatgtgggggggccgtttcgccgccggacccgacgcgatcatggaggcgatcaacgcctcgatcgggttcgaccggcgcatggccgcgcaggatatcgcaggctcgcgcgcccatgccgccatgctggccgcgacgggcatcgtcagcgatagcgatgccgaggcgatgagggaagggcttctcacggtgttgtcagagatcgagggcgggtccttcgccttctcgacggcgctcgaggatattcacatgaacgtcgaggcgcggctgaaggaaatcatcggcgaacccgccgggcggctgcacaccgggcggtcgcgcaacgaccaggtggcgacggatttccggctctgggtccgcgatcaggcggatgcggcgatcgacgggctgcaggcgctgatgacggcgctggtcgcgcaggccgagcagggcgccgactgggtgatgccggggttcacgcatcttcagacggcgcagccggtgacctggggccaccacatgatggcctatgtcgagatgttcgggcgcgatctgtcgcggttccgcgacgcgcgggcgcggatgaacgaatcgccgctcggggcggccgcgctggccgggacctcctttcccatcgaccgcgagatgacggcgcgtgccctgggattcgaccggccgatggccaattcgctggatgccgtctcggaccgggatttcgcgttggagttcctcggcgccgcgaccatctgcgcgattcatctgagccgcatggccgaagagctggtgatctggtcctcggcccagttccggttcgtcgtgctgtcggaccgcttctcgaccgggtcgtcgatcatgccgcagaagaagaaccccgacgcggccgaactgatccgggccaagatcggccgcatcttcggcgcgaacgtcgccctgaccatggtgatgaagggcctgccgctggcctattccaaggacatgcaggaggacaaggaacaggtcttcgatgctgccgacaacctgatgctggcgctggcggcgatgaccggcatggtgtcggacatggccgcgaaccgcgaggcgctcgaggcggcggcggggtcgggcttttccaccgcgaccgacctggccgactggctggtgcgtacgctcgacatgccgttccgcgaagcacatcacgtcaccgggtcgctcgtcgccctggccgagcggaagggctgcgacctgccggacctgacgctggccgacatgcagggcgttcacgcggcgatcacggatgacgtcttcggggttttgggggtccacaactcggtcgcctcgcgcacatcctacggcggaacggcgcctgaacgggtgcgggaacagatcctgcgctggaaggatgtgctgaaatga

SEQ ID NO: 87962 - protein, 463 aa, Oceanicola batsensis HTCC2597
MTDTSANQMWGGRFAAGPDAIMEAINASIGFDRRMAAQDIAGSRAHAAMLAATGIVSDSDAEAMREGLLTVLSEIEGGSFAFSTALEDIHMNVEARLKEIIGEPAGRLHTGRSRNDQVATDFRLWVRDQADAAIDGLQALMTALVAQAEQGADWVMPGFTHLQTAQPVTWGHHMMAYVEMFGRDLSRFRDARARMNESPLGAAALAGTSFPIDREMTARALGFDRPMANSLDAVSDRDFALEFLGAATICAIHLSRMAEELVIWSSAQFRFVVLSDRFSTGSSIMPQKKNPDAAELIRAKIGRIFGANVALTMVMKGLPLAYSKDMQEDKEQVFDAADNLMLALAAMTGMVSDMAANREALEAAAGSGFSTATDLADWLVRTLDMPFREAHHVTGSLVALAERKGCDLPDLTLADMQGVHAAITDDVFGVLGVHNSVASRTSYGGTAPERVREQILRWKDVLK

SEQ ID NO: 87963 - DNA, 1404 bp, Prochlorococcus marinus str. MIT 9211
  CDS (1)..(1404): transl_table=11
ttgggattaaaaaatttgggaaaaccttggagcgatcgattcgaagtaggccttcatccttttatagagagttttaatgcttctataaagtttgattttcttcttttgcaagaagatcttgatggatcaatagctcatgcaaggatgctaggcaaaacaggcataattaatgctgatgaagcatctcaacttgaaaaaggcttaaaccagattcgtttagaagcatcccaaggtgtttttaatgctgatcaacctgctgaggatgttcatttcgctgttgagaacagattaatagaacttttaggaccgcttggaaagaaactgcatactggtagaagtagaaatgatcaaatagctacagatataagattatggttgcgacgaaaaattgatgaaatcaattttgatttagaaaatattcaaaagattttgttgggccatgcagaaaagaatttgtatacacttattcctggatatacgcatttgcaaagagctcaacctgtttcattagctcatcatttacttgcatatcttgaaatgtttcagagagatagagatcgtttggtcgaagtcaaaagtcgagttaatacctctcctttgggagcagctgccttagcaggaacttctttaccaattgacaggctatatacagcagatcaattaaattttactagtatttattccaatagtttagatgcagtaagtgatcgtgattttgcagttgaatttattgctgcatcttcattaattatggttcacttaagccgattatcagaagaaataattttttggtctagcgaagaattttcgtttgtaaaattaaccgatcgatgcgcaactggtagcagcataatgcctcaaaaaaagaatcctgatgtacctgaacttgttagaggaaagtcaggaagagtctttggccatctccaagctttgttggtcatgctcaaaggtctgcctcttgcatataacaaagattttcaggaagataaagaggctctttttgacacagtagtgactgttagaaattctcttcaagcaatgtctattctcttagaagagggtttggagttttctttagatcgcctgggatcagccgtggaatcggatttttctaatgcaactgatgtggcagattatttagtttctaaagaagtcccttttagagaggcttatcagattgttggacgtttagtaaagctttgtatgaaagaaggtattttgcttaaggatctttcttttgatcaatggcaggatatgcaccctgcttttgatcaggatatatataaaaggttaactccagaacatgtagtcgcctcgaggattagtcaaggcggaacaggctttgctcaagtgtctgcacagttggaaaattggcaaaatcagttttcttctttgaaagaatga

SEQ ID NO: 87964 - protein, 467 aa, Prochlorococcus marinus str. MIT 9211
MGLKNLGKPWSDRFEVGLHPFIESFNASIKFDFLLLQEDLDGSIAHARMLGKTGIINADEASQLEKGLNQIRLEASQGVFNADQPAEDVHFAVENRLIELLGPLGKKLHTGRSRNDQIATDIRLWLRRKIDEINFDLENIQKILLGHAEKNLYTLIPGYTHLQRAQPVSLAHHLLAYLEMFQRDRDRLVEVKSRVNTSPLGAAALAGTSLPIDRLYTADQLNFTSIYSNSLDAVSDRDFAVEFIAASSLIMVHLSRLSEEIIFWSSEEFSFVKLTDRCATGSSIMPQKKNPDVPELVRGKSGRVFGHLQALLVMLKGLPLAYNKDFQEDKEALFDTVVTVRNSLQAMSILLEEGLEFSLDRLGSAVESDFSNATDVADYLVSKEVPFREAYQIVGRLVKLCMKEGILLKDLSFDQWQDMHPAFDQDIYKRLTPEHVVASRISQGGTGFAQVSAQLENWQNQFSSLKE

SEQ ID NO: 87965 - DNA, 1431 bp, Erythrobacter sp. NAP1
  CDS (1)..(1431): transl_table=11
atgagcgacactccatccaagcctgacaccgccaccaacacgatgtggggcggccggttcgctgaagggcctagcgcgatcatgcgcgaaatcaatgcctcgatcccgttcgacaaggcgctatggcgcgaagatatccgcgcatcgaaggcgcatgtggcgatgctgggggcgcaaggtatcgtcagcgccgaggatgccgagaccatcaccaagggtctgcacgagatcgcagcggagtatgagcgcgacggcgttcccgaggactgggaccttgaagacattcacatgacggtcgaagcgcggctcactgaccttgtcggtcctgtcgcagggcgcctccacaccgcgcgcagccgcaacgaccaggtcgcgaccgatttcaagctgtgggtgcgcgctgccaatgcccgcgcgattgcggcactgggagccttgcggtcggcccttgtggagcgtgcagacgagcattgcggcacgatcatgcccggcttcacgcacctccagaccgcgcagccggtgacgctgggccatcacctcatggcttattacgagatgctcacccgcgacaccgcgcggtttgcggcggcgcaggagcgtctcgatgaatgcccgctcgggtcagctgccttggcgggtacaggctttccgattgatcgcggcgcaacggcttcggcgcttgagttttccgcgcccactcgcaattcgctcgacgcagtttccgaccgcgacttcgcgctcgactacctgatggcggcgagccagtgctccatccacctttcgcgcctcgccgaagagctgatcctctgggcaagccaacctttcgggtttgcctcgctgccggaccagctatcgaccggttcctcgatcatgccgcaaaagcgcaatcccgatgcggccgaactggtgcgtggtcatgccgggcggatcgtgggcgcgtgcacgtcgctcatgatcacgatgaagggcctgccactcgcctattcgaaggacatgcagaacgacaagccgccggtcttcgaagccgccagcctgttcgacctcagccttgcggcgatgaccggcatgattgccgagaccaccttcaagcccgaccgcatgcgcgccgcggcacaggcaggccacgcaaccgcgaccgaccttgccgactggctggtgcgcgaggccgacatcccgttccgcgaagcgcatcacatcacgggagaggccgtgaaacttgccgacaccaaggcatgtagcctcgaggaattgtcgcttgaagacctcaagggcatcgatgatcggatcgacgaacctgtgttcaaagcgctctcgatcgaagcatcggtcgcatcgcgcgcatcctatggcgggaccgcgcctgatcaggtaaggcagcgcgtggccgaggcgcgcgaacgcctcgctgccgagaattcgccggaggattaa

SEQ ID NO: 87966 - protein, 476 aa, Erythrobacter sp. NAP1
MSDTPSKPDTATNTMWGGRFAEGPSAIMREINASIPFDKALWREDIRASKAHVAMLGAQGIVSAEDAETITKGLHEIAAEYERDGVPEDWDLEDIHMTVEARLTDLVGPVAGRLHTARSRNDQVATDFKLWVRAANARAIAALGALRSALVERADEHCGTIMPGFTHLQTAQPVTLGHHLMAYYEMLTRDTARFAAAQERLDECPLGSAALAGTGFPIDRGATASALEFSAPTRNSLDAVSDRDFALDYLMAASQCSIHLSRLAEELILWASQPFGFASLPDQLSTGSSIMPQKRNPDAAELVRGHAGRIVGACTSLMITMKGLPLAYSKDMQNDKPPVFEAASLFDLSLAAMTGMIAETTFKPDRMRAAAQAGHATATDLADWLVREADIPFREAHHITGEAVKLADTKACSLEELSLEDLKGIDDRIDEPVFKALSIEASVASRASYGGTAPDQVRQRVAEARERLAAENSPED

SEQ ID NO: 87967 - DNA, 1374 bp, Pseudoalteromonas tunicata D2
  CDS (1)..(1374): transl_table=11
atggcattatggggtggacggttctcaacaggacccgatcaagcatttaaacaatttaacgactctcttccttttgactaccaactcgcagaacaagatattgaaggctcaatcgcatgggcaggcgcccttgagcaagtgggaattttaacaccgacagaacttgagcaacttgttgcagcactgaatcaattgttagttgaagtaagcgaacagccacagttattacaacaatcagatgctgaagatattcattcttttgttgaagctgcactcattgagaaagtcggtgatttaggtaaaaaattacatacagggcgcagccgtaatgaccaggttgcaacggattttcgtttgtggagccgtaagacagcacagttattattagttgctttaggtgatctaaaacagactattttagcgctggcagagcgtgagtttggtactattttacccggttacacccatttacagcgtgctcaaccggtattatttagccattggtgcatggcctattttgaaatgttaagccgagatgaaagccgtttgcgcggtgcaattgagcgtctaaatgtctgtccgttaggatctggcgcactagccggaacagcttatccgatcgatcggcaacttcttgccactaatttgggttttttatcagcgagtaacaatagcttagatgcagtatcagatcgtgattttgtggttgagttattaagctgtgcctcgatatcaatgatgcatttgtcacgcttagccgaagacatgattttttataatactggcgaagccggatttattgagcttgctgataatgtcacttcaggttcatcattaatgccccaaaagaaaaatccagatgcgctagagctaattcgcggtaaaactggccgtgtttttggcgcatttagcgggatgatgatgacgttaaaagccttacctttggcctataacaaagatatgcaagaagataaagaaggcttgtttgatgcactaccaacttggttggcttgtttgcacatggcgcaagcctgtttatcgggagttaaagtgaacgcaaaacgtactgaacttgcagcgcgtggcgggcatgctaatgcaacagaactggccgactatttagtcaaaaaaggcattccatttcgcgaagggcatcatattgttggtcagttggtacaagttgccattgctgaaaataaaagtttagagcaattaagtattcagcaatttcaagcggtgtgcactgtgattgaacaagatgtttatccggtacttgagctagatgcttgtattaatgcgcgagtggcaaagggcggtacttcaaaacagcaagttagccaagcaatggctgctgcaaaacagcagttcatttaa

SEQ ID NO: 87968 - protein, 457 aa, Pseudoalteromonas tunicata D2
MALWGGRFSTGPDQAFKQFNDSLPFDYQLAEQDIEGSIAWAGALEQVGILTPTELEQLVAALNQLLVEVSEQPQLLQQSDAEDIHSFVEAALIEKVGDLGKKLHTGRSRNDQVATDFRLWSRKTAQLLLVALGDLKQTILALAEREFGTILPGYTHLQRAQPVLFSHWCMAYFEMLSRDESRLRGAIERLNVCPLGSGALAGTAYPIDRQLLATNLGFLSASNNSLDAVSDRDFVVELLSCASISMMHLSRLAEDMIFYNTGEAGFIELADNVTSGSSLMPQKKNPDALELIRGKTGRVFGAFSGMMMTLKALPLAYNKDMQEDKEGLFDALPTWLACLHMAQACLSGVKVNAKRTELAARGGHANATELADYLVKKGIPFREGHHIVGQLVQVAIAENKSLEQLSIQQFQAVCTVIEQDVYPVLELDACINARVAKGGTSKQQVSQAMAAAKQQFI

SEQ ID NO: 87969 - DNA, 1395 bp, Oceanospirillum sp. MED92
  CDS (1)..(1395): transl_table=11
atgagtgataaaaccaaccagcaatggggtggtcgttttaacgaaccaactgatgctttcgttgcacgctttacagcgtctgtggaatttgaccagcgtatgtatctgcaggatattcgcggttctattgctcatgcaaaaatgctgactaaggcgggtgttctgaccgaagctgagcgtgacgacattatccgtggtctgggtgaaattcgcgttgagatcgagcgtggtgagtttgaatggtctgttgcattggaagatgttcatatgaacatcgaagctgcactcactaagaaaattggtattacaggcaaaaaactacataccggtcgatcccgtaacgaccaggtagcgacagatattcgcctgtatctccgtgatgaaattgatctgattctatctgaaattactcgtctgcagcagggcatgttgtcagtggcagagcgtgaagccgatacgattatgccgggctttactcacctgcaaactgcacagccagtaacttttggccaccacttgatggcttggtttgaaatgctaagccgtgatttcagccgctttgaagattgccgtgagcgcgccaacatcatgccgctgggcgctgccgctctggcgggtacgacttatcctattcagcgtgattttacatgtgagttgttggagtttaatgcccctgctgaaaactcgctggatgcggtttctgatcgtgattttgcgatcgagttttgctccgcttccagtattctgttgatgcatttgacccgtatgtctgaagagttggttctatggacctctgcacagtttgatttcatcaatctgccagaccgtttctgcaccggctcatcgatcatgccgcaaaagaaaaacccagatgtgccagaactggttcgtggtaaatcaggtcgagtatttggccacctgatgagcttgctgacgctgatgaaatctcagccgctggcttataacaaggacaatcaggaagataaagagccgctgtttgatgccatcgataccgtgaaaggttgtctgcgtgctttcgctgatatggtgcctgcgctggaagctaaagaagagaatatgcgtgaagctgcgctgcgtggtttctcgacagcaactgacctggctgattatctggtgcgcaagggtatgcctttccgtgatgctcacgaagttgttggtaaatcagttgcttatggtattgagcagagtaaagatctgggtgaaatgagccttgaagagctggttcagttctctgatattatcgagcaggacgtatttgatgtgttgacgctggagggctctgtagcagctcgtgaccatattggtggtactgcgcctaatcaggtccgtgccgcggttaagcgcgcccagcagaaacttgatcagcgcggttag

SEQ ID NO: 87970 - protein, 464 aa, Oceanospirillum sp. MED92
MSDKTNQQWGGRFNEPTDAFVARFTASVEFDQRMYLQDIRGSIAHAKMLTKAGVLTEAERDDIIRGLGEIRVEIERGEFEWSVALEDVHMNIEAALTKKIGITGKKLHTGRSRNDQVATDIRLYLRDEIDLILSEITRLQQGMLSVAEREADTIMPGFTHLQTAQPVTFGHHLMAWFEMLSRDFSRFEDCRERANIMPLGAAALAGTTYPIQRDFTCELLEFNAPAENSLDAVSDRDFAIEFCSASSILLMHLTRMSEELVLWTSAQFDFINLPDRFCTGSSIMPQKKNPDVPELVRGKSGRVFGHLMSLLTLMKSQPLAYNKDNQEDKEPLFDAIDTVKGCLRAFADMVPALEAKEENMREAALRGFSTATDLADYLVRKGMPFRDAHEVVGKSVAYGIEQSKDLGEMSLEELVQFSDIIEQDVFDVLTLEGSVAARDHIGGTAPNQVRAAVKRAQQKLDQRG

SEQ ID NO: 87971 - DNA, 1389 bp, Xanthobacter autotrophicus Py2
  CDS (1)..(1389): transl_table=11
atgagcaacaagatgtggggcgggcgctttacctccgcccccgacgccatcatggaggagatcaacgcctccatcggcttcgaccagcgtctttatgcgcaggacatcgccggatccaaggcccacgcaaagatgctcgcggcccaaggcatcgtggcggcgcaagatgccgacaggatcgcggagggtctagacacgatcctgtcagagatcgaggccggcaatttcaccttcaagcgcgagctcgaggacatccacatgaacgtggagagccgcctcgccgagctgatcggagcctccgccggccgcctccacaccgcccgctcgcgcaacgaccaggtggccaccgacttccgcctctatgtgcgcgacacattggacgccctcgacgcccagctcgccgacctgcagcgggctctggccgagaaggcgctggcccacgccgccaccgtcatgcccggcttcactcatttgcagaccgcccagccggtgaccttcggccaccacctgatggcctatgtggagatggtggcgcgcgaccgcggccgcctcgccgatgcgcgcaagcgcctgaacgagtgcccgctgggctcggcggcgctggccggcacctccttccccatcgacagggacgcgaccgcgaaagcgctcggcttcgaccggcccaccgccaattcgctggacgccgtctccgaccgcgacttcgtcatggagacgctttcagccgcctccatctgcgcggtgcatctctcgcgcttcgccgaggaggtggtgatctggacctcgccgtccttcgccctggtgaagctctcggacaagttcaccaccggctcgtccatcatgccgcagaagcgcaacccggacgcggccgagctggtgcgggccaaggccgggcgcatcatcggcgcgctcaccggcatcctggtggtgatgaagggcctgccgctggcctatgccaaggacatgcaggaggacaaggaaggcgccttcgacgccttctcggctctgtccctggtggtggcggcctcggccggcatggtgcgcgacatcgtcccggacgagaagcgcatggagaaggcggcgggccagggctattccaccgccaccgaccttgccgactggctggtgcgcgccctcaacatcccgttccgggaggcccaccacatcaccgggcgcatcgtcgggctcgcctccgaccgcggcattgcgctgcacaagctgtccctcgacgacatgcagggggtggatgcgcggatcacccaggacgtgttctcggtgctgtccgtggtgcgctccgtgcgcagccgggtgagctatggcggcaccgcgccgacccgggtgcggacccaggccaagcgctggctcaagaagctcggggtcccggcgtga

SEQ ID NO: 87972 - protein, 462 aa, Xanthobacter autotrophicus Py2
MSNKMWGGRFTSAPDAIMEEINASIGFDQRLYAQDIAGSKAHAKMLAAQGIVAAQDADRIAEGLDTILSEIEAGNFTFKRELEDIHMNVESRLAELIGASAGRLHTARSRNDQVATDFRLYVRDTLDALDAQLADLQRALAEKALAHAATVMPGFTHLQTAQPVTFGHHLMAYVEMVARDRGRLADARKRLNECPLGSAALAGTSFPIDRDATAKALGFDRPTANSLDAVSDRDFVMETLSAASICAVHLSRFAEEVVIWTSPSFALVKLSDKFTTGSSIMPQKRNPDAAELVRAKAGRIIGALTGILVVMKGLPLAYAKDMQEDKEGAFDAFSALSLVVAASAGMVRDIVPDEKRMEKAAGQGYSTATDLADWLVRALNIPFREAHHITGRIVGLASDRGIALHKLSLDDMQGVDARITQDVFSVLSVVRSVRSRVSYGGTAPTRVRTQAKRWLKKLGVPA

SEQ ID NO: 87973 - DNA, 1428 bp, marine gamma proteobacterium HTCC2207
  CDS (1)..(1428): transl_table=11
atgagtaaaaacgaaaacagcgaaaccaacaaaactgcagccacgcaaaccaatcaggcttggggtggccgttttaatgagccagtggatgattttgtcgcccgctttactgcctcggtgaattttgatcagcgtctctatcgccaagatattcaaggttctgtggctcatgccagcatgctctgcgaagcgggcgtgctaaccgacgtcgagcgcgatcaaataatactcgggctgcaggagattgaagcgcagatagaggccggtgatttcccctggtcagtggttctggaagatgtgcatatgaacatcgaagcagctctcacggctaaaattggcattgtcggcaagaaattgcacacgggtcgctcacgaaatgatcaggtggcaaccgatattcgtctctggctgcgtgatcaaatagaccatatagcgccgattttgacgcgcttacaagatggcttgatcggactagcagcgcaagaggccaacactattatgccgggcttcacgcacttgcaaactgctcagccggtaacctttggacaccatcttctggcttggaatgaaatgttcgaaagagatttcagccgtctgcaggattgccgcaagcgactcaaccagagccctttgggtgcagcggccctagcgggaacaacctatccaatcgacaggcaatttaccgctcaggccctggcctttgacaagcctacagagaactctctggactctgttagcgatcgcgactttgccatcgagttctgcgcctttgccagtatcttgatgactcatatgtcacgcatgtctgaagaattagtcctctggacctcagcgcaatttcaatttatctatctgcctgaccgcttctgcactggctcatcaattatgccgcagaagaaaaatcccgatgtgcctgaactggtgcgcggtaaaaccggcagggtcaatggtcatctgatttctcttctgacgttaatgaaaagccaacctctggcttacaataaagataatcaggaagataaagagccgctgtttgataccgtggatacagtgcgtgactgcttgcgcgcattcgccgatatgatcccggccatcgagtcgcgcccggacatgatgtatgaggcagcccgccgtggattctcaaccgccacggatctggctgattatctggttcgcaaaggtattgcctttagggattcccatgagattgtcggaaaatccgttgcctatggactggctgaaaataaagatctatcagaaatgtcactcgaggagctgcaacagttttccactgaaatcagtgctgatgtgtttgatgttctcacactagagggatcagttgctgcgcgcgatcatcttggcggcacagcacctgctcaggttatagccgcggctagtcgcgccaaggcgcggcttggtgagcgttaa

SEQ ID NO: 87974 - protein, 475 aa, marine gamma proteobacterium HTCC2207
MSKNENSETNKTAATQTNQAWGGRFNEPVDDFVARFTASVNFDQRLYRQDIQGSVAHASMLCEAGVLTDVERDQIILGLQEIEAQIEAGDFPWSVVLEDVHMNIEAALTAKIGIVGKKLHTGRSRNDQVATDIRLWLRDQIDHIAPILTRLQDGLIGLAAQEANTIMPGFTHLQTAQPVTFGHHLLAWNEMFERDFSRLQDCRKRLNQSPLGAAALAGTTYPIDRQFTAQALAFDKPTENSLDSVSDRDFAIEFCAFASILMTHMSRMSEELVLWTSAQFQFIYLPDRFCTGSSIMPQKKNPDVPELVRGKTGRVNGHLISLLTLMKSQPLAYNKDNQEDKEPLFDTVDTVRDCLRAFADMIPAIESRPDMMYEAARRGFSTATDLADYLVRKGIAFRDSHEIVGKSVAYGLAENKDLSEMSLEELQQFSTEISADVFDVLTLEGSVAARDHLGGTAPAQVIAAASRAKARLGER

SEQ ID NO: 87975 - DNA, 1425 bp, delta proteobacterium MLMS-1
  CDS (1)..(1425): transl_table=11
gtgagcgagcaaaccggcgagagcaagatgtggggcgggcgttttgccgagcagaccgccgcttcggtggaggccttcaccgcctcggtgcattacgaaaccaggctttatcgagatgatatcgccggcagccgggcccatgccaagatgctggcccaccaggggttgatcagcgccgccgagggggagcagatcatcggcggcttaaacgagatcgaagccgagatcgagcgcggtgactttgtcttccggaccgagctggaagatatccatatgaatatcgaaaaggccctggccgagaagatcgggcccgccggcgagaagctgcacaccgcccgcagccgcaacgaccaggtggtgctggatatgcgcctctacctgcggcgggagtgccaccgcctgcgggacttgctgggtcagttgcgccgggtgctggtgggccaggcccggcgctatcagcataccgtgatgccgggctatacccatttacagcgggcccaaccggtgctggtggcccatcatctgctggcctatttcgagatgttcgggcgtgatcggcagcggctgggcgactgcctgaagcggattgaggtgatgcccctgggttcggcggccctggccggcaccgggctgcccattgatcgccagtttgtggcccgtgagctggggtttgccgcggtgtcggccaacagcatggacagtgtggccgatcgcgatttcgtcgtcgagtttgtcgccgccgcctccctgatccaggtccacttaagccggctggccgaggagttggtgctttggagcagtgaagagttctcctttgtcaccctgcccgatgccttttgcaccggcagctccatcatgccccagaagaagaaccccgacatccctgaactggtgcggggtaaaagcggccgggtggtgggccatctgatggccctgctgaccatgctcaaggggttgccgctgacctataaccgtgacctgcaggaagataaggaggcggtgtttgataccgtcgataccgtcggctcgtcgctggccctgatcagcgagttgctggccggtatgcgctttaacgaggagcgtctggcggcggcgctgcaccggggctcgatgaccgccaccgacctggccgattacctggtcaaaaaggatattcctttccgccaggcccacgccatcgtcggccgggccgtggcctacgccctggggcagggccgggaggtggccgagttgagtttggatgaacttaagcgctttgccgactgtatcgacgaggatgtctttgcggtgctctccatcgagggatcggtcaatagccgcaattcccccggcggcaccggcggggagcaggtggccgccgccctggagcgggcggcggcggagttgcagcaacaggagcgcgaggcggcgagcaatgccggatag

SEQ ID NO: 87976 - protein, 474 aa, delta proteobacterium MLMS-1
MSEQTGESKMWGGRFAEQTAASVEAFTASVHYETRLYRDDIAGSRAHAKMLAHQGLISAAEGEQIIGGLNEIEAEIERGDFVFRTELEDIHMNIEKALAEKIGPAGEKLHTARSRNDQVVLDMRLYLRRECHRLRDLLGQLRRVLVGQARRYQHTVMPGYTHLQRAQPVLVAHHLLAYFEMFGRDRQRLGDCLKRIEVMPLGSAALAGTGLPIDRQFVARELGFAAVSANSMDSVADRDFVVEFVAAASLIQVHLSRLAEELVLWSSEEFSFVTLPDAFCTGSSIMPQKKNPDIPELVRGKSGRVVGHLMALLTMLKGLPLTYNRDLQEDKEAVFDTVDTVGSSLALISELLAGMRFNEERLAAALHRGSMTATDLADYLVKKDIPFRQAHAIVGRAVAYALGQGREVAELSLDELKRFADCIDEDVFAVLSIEGSVNSRNSPGGTGGEQVAAALERAAAELQQQEREAASNAG

SEQ ID NO: 87977 - DNA, 1425 bp, delta proteobacterium MLMS-1
  CDS (1)..(1425): transl_table=11
gtgagcgagcaaaccggcgagagcaagatgtggggcgggcgttttgccgagcagaccgccgcttcggtggaggccttcaccgcctcggtgcattacgaaaccaggctttatcgtgatgatatcgccggcagccgggcccatgccaagatgctggcccaccaggggttgatcagcgccgccgagggggagcagatcatcggcggcttaaacgagatcgaagccgagatcgagcgcggtgactttgtcttccggaccgaactggaagatatccatatgaatatcgaaaaggccctggccgagaagatcgggcccgccggcgagaagctgcacaccgcccgcagccgcaacgaccaggtggtgctggatatgcgcctttacctgcggcgggagtgccaccgcctgcgggacttgctgggtcagttgcgccgggtgctggtgggccaggcccggcgctatcagcataccgtgatgccgggctatacccatttacagcgggcccagccggtgctggtggcccatcatctgctggcctatttcgagatgttcgggcgtgatcggcagcggctgggcgactgccttaagcggattgaggtgatgcccctgggttcggcggctctggccggtaccgggctgcccattgatcgccagtttgtggcccgtgagctggggtttgccgcggtgtcggccaacagcatggacagtgtggccgatcgcgatttcgtcgtcgagtttgtcgccgccgcctccctgatccaggtccacttaagccggctggccgaggagttggtgctttggagcagtgaagagttctcctttgtcaccctgcccgatgccttttgcaccggcagctccatcatgccccagaagaagaaccccgacatccctgaactggtgcggggtaaaagcggccgggtggtgggccatctgatggccctgctgaccatgctcaaggggttgccgctgacctataaccgtgacctgcaggaagataaggaggcggtgtttgataccgtcgataccgtcgcctcgtcgctggccctgaccagcgagctgctggccggtatgcgctttaacgaggagcgtctggcggcggcgctgcaccggggctcgatgaccgccaccgacctggccgattacctggtcaaaaaggatattcctttccgccaggcccacgccatcgtcggccgggccgtggcctacgccctggggcagggccgggaggtggccgagttgagtttggatgaacttaagcgctttgccgactgtatcgacgaggatgtctttgcggtgctctccattgaaggttcggtcaacagtcgcaattcccccggcggcaccggcggcgagcaggtggcggccgccctggagcgggcggaggcggagttgcagcaacaggagcgcgaggcggcgagtaatgccgggtag

SEQ ID NO: 87978 - protein, 474 aa, delta proteobacterium MLMS-1
MSEQTGESKMWGGRFAEQTAASVEAFTASVHYETRLYRDDIAGSRAHAKMLAHQGLISAAEGEQIIGGLNEIEAEIERGDFVFRTELEDIHMNIEKALAEKIGPAGEKLHTARSRNDQVVLDMRLYLRRECHRLRDLLGQLRRVLVGQARRYQHTVMPGYTHLQRAQPVLVAHHLLAYFEMFGRDRQRLGDCLKRIEVMPLGSAALAGTGLPIDRQFVARELGFAAVSANSMDSVADRDFVVEFVAAASLIQVHLSRLAEELVLWSSEEFSFVTLPDAFCTGSSIMPQKKNPDIPELVRGKSGRVVGHLMALLTMLKGLPLTYNRDLQEDKEAVFDTVDTVASSLALTSELLAGMRFNEERLAAALHRGSMTATDLADYLVKKDIPFRQAHAIVGRAVAYALGQGREVAELSLDELKRFADCIDEDVFAVLSIEGSVNSRNSPGGTGGEQVAAALERAEAELQQQEREAASNAG

SEQ ID NO: 87979 - DNA, 1392 bp, Oceanobacter sp. RED65
  CDS (1)..(1392): transl_table=11
atgagtcagcccaccaactccgcatggggtggtcgctttagcgaagccaccgacgcctttgttcaacgctttaccgcctctgttgagttcgatcagcgcatgtacgcacaagacattcaaggctcagtggcccatgccaccatgctggcaaaagtcggggtactaaccgagcaagagcgtgacgacattattcaagggctgacagaaatcaaagctgatatcgaagcaggtaactttgagtggtctatcgagcttgaagatgtacacatgaacatcgaagccgctctgaccaagaaaatcggtattactggtaagaaattacatacgggtcgtagccgtaatgaccaagtagccacagatatacgcctatacatgcgtgatgaaatcgatcacttaagcagtgagattacacgcttacaatcgggcttgatcgaactagcagagaaagaagcggataccatcatgccaggttttacgcacctgcagacggctcaacctgtgacctttggccaccatcttctggcttggaacgaaatgctagagcgtgattacgctcgcctacaagattgccgcaagcgtaccaatatcatgcctttgggtgcagctgctttggcgggcaccacttatcccatcgaccgtgaaatgaccgctgagcttttgggcttcgatgcacccactgaaaatagcttggatagcgtatccgatcgtgatttcgcgatcgaattcacggcggcagcatctaccatcatgatgcacctaagtcgcttcagtgaagaattggtactttgggccagcgcacaatttaattttatcgacctgcctgatcgtttttgcacaggctcgtccatcatgccgcaaaagaaaaaccctgatgtacctgaattagtacgcggcaaggccggtcgtatttttggtcatctaatcagtttgctaacactaatgaaaagccaaccattggcctacaacaaagacaaccaagaagacaaagagccgttgttcgacaccatcgacaatgtaagcggcagcttgcgttcgtttgcagatatgatgcctcatgtgaaatccaataaagaagtgatgcgtgaagccgctttacgaggtttctctacggcaacagacctagcagactacttggtgcgcaaaggcgttgctttccgcgatagccatgaaattgtaggcagtgcggttggctatggcgttaaaactggtaaagacttgggcgaaatgtcgcttgaagaacttcaacaatttggcgagatgatcactgaagatgtattcgatgttctgactttagaaggctcggtttccgctcgtgaccatctaggtggtacagcaccaaaacaagttcttgccgctgcgaagcgtgctaaagaaagattagccaatcgttaa

SEQ ID NO: 87980 - protein, 463 aa, Oceanobacter sp. RED65
MSQPTNSAWGGRFSEATDAFVQRFTASVEFDQRMYAQDIQGSVAHATMLAKVGVLTEQERDDIIQGLTEIKADIEAGNFEWSIELEDVHMNIEAALTKKIGITGKKLHTGRSRNDQVATDIRLYMRDEIDHLSSEITRLQSGLIELAEKEADTIMPGFTHLQTAQPVTFGHHLLAWNEMLERDYARLQDCRKRTNIMPLGAAALAGTTYPIDREMTAELLGFDAPTENSLDSVSDRDFAIEFTAAASTIMMHLSRFSEELVLWASAQFNFIDLPDRFCTGSSIMPQKKNPDVPELVRGKAGRIFGHLISLLTLMKSQPLAYNKDNQEDKEPLFDTIDNVSGSLRSFADMMPHVKSNKEVMREAALRGFSTATDLADYLVRKGVAFRDSHEIVGSAVGYGVKTGKDLGEMSLEELQQFGEMITEDVFDVLTLEGSVSARDHLGGTAPKQVLAAAKRAKERLANR

SEQ ID NO: 87981 - DNA, 1866 bp, Alteromonadales bacterium TW-7
  CDS (1)..(1866): transl_table=11
atggcattatggggcggacgtttttctacgggtccagacgaggcgtttaagcaatttaacgactctcttccatttgactaccaactagcagagcaagatattattggctctgttgcatgggctggcgcacttgaacaagttaacgtgttatcaaacgatgagcacaaagaattagtatcggcattatacgagctactcgaagaggtaaaagctgacccaacggctgtagctacctcaggtgctgaagatattcattcgcacgttgaagcggctctaattgagaaagtgggtgacctagctaaaaagttacacacaggtcgcagtcgaaatgaccaagtagccaccgactttagattatggtgccgtgatactgccgatcatattttaaaagccattgcgcaattaaaagctgaatttgttgcgttggctgaacgcgaactaggtactattttacctggttatacccatttgcaacgtgcacaacccgtactatttagccactggtgtatggcgtatgttgaaatgctagaacgcgacgaaagccgtttgcaggacgctaaagcccgtatgaactattgcccgctaggcagtggcgcattggctggcactgcttacccaattgaccgccaaacacttgcacaaggcttaggctttacaggggcgacaaaaaatagccttgatggtgtatctgaccgtgactttgttgttgagctattaagttgtgcttcaatttcaatgattcatttatcgcgtatgtctgaagatttaattttttataactcaggtgaagcgggctttattgaacttgccgacaatgttacatctggctcgtctttaatgccgcaaaaaaagaacccagatgcacttgagcttattcgtggtaaaacaggccgtgtatttggtgcctttagcgccatgatgatgacccttaaagcattaccacttgcttacaataaagatatgcaagaagacaaagaaggcatttttgatgcgatgcccacatggcttgcgtgtattcatatggcacaagcgtgtattaaaggcgtaaaagtaaaaggtgagcgtacattggctgcggcaaaaggcggccatgcaaatgcaaccgagctggctgattacttagttgctaagggggtacctttcagagaggggcatcatattgtaggtgtgttggtacagcttgcaataagtgaagataaaacccttgaggagctctcacttgaacaatataaatcagtaaatgaagtgtttgaagacgatgtttatccggtacttgaaatagacgcctgtattaaagcgcgtcaagcagttggcggcacctccattgagcaagtcactagcgcaattaaagcagccaaaaaaaaacagcagataacggttcgtgatgccaatctagacgacgttgaatcaattgcaaaacttattcaacactgggcaacggtcggcgaaaacttgccgcgtgctaaaagcgacatggtgcattcgattaatgaatttgctgtaaccgaaatagacggcaaagtgtcgggctgtgcatcgctgtatatatacgacacaggtttagctgagatacgctcgttaggcatagacccacaaagtgcagttagcggtcaagggcggcaattagttgaccatttactggttaaagccaaaaaattggcgcttaatcgcgtaattgtgcttactcgcgtgccagacttttttgaaaaacaagattttgctttttgcagtaaagacagcctgcctgaaaaagtgatgaaagattgtgaattgtgccttcgtaaagaaaactgcgacgaagtagcaatggaatacattttaaagccaagtaataaagcggcgatcccgtgtaaattcgtggcttaa

SEQ ID NO: 87982 - protein, 621 aa, Alteromonadales bacterium TW-7
MALWGGRFSTGPDEAFKQFNDSLPFDYQLAEQDIIGSVAWAGALEQVNVLSNDEHKELVSALYELLEEVKADPTAVATSGAEDIHSHVEAALIEKVGDLAKKLHTGRSRNDQVATDFRLWCRDTADHILKAIAQLKAEFVALAERELGTILPGYTHLQRAQPVLFSHWCMAYVEMLERDESRLQDAKARMNYCPLGSGALAGTAYPIDRQTLAQGLGFTGATKNSLDGVSDRDFVVELLSCASISMIHLSRMSEDLIFYNSGEAGFIELADNVTSGSSLMPQKKNPDALELIRGKTGRVFGAFSAMMMTLKALPLAYNKDMQEDKEGIFDAMPTWLACIHMAQACIKGVKVKGERTLAAAKGGHANATELADYLVAKGVPFREGHHIVGVLVQLAISEDKTLEELSLEQYKSVNEVFEDDVYPVLEIDACIKARQAVGGTSIEQVTSAIKAAKKKQQITVRDANLDDVESIAKLIQHWATVGENLPRAKSDMVHSINEFAVTEIDGKVSGCASLYIYDTGLAEIRSLGIDPQSAVSGQGRQLVDHLLVKAKKLALNRVIVLTRVPDFFEKQDFAFCSKDSLPEKVMKDCELCLRKENCDEVAMEYILKPSNKAAIPCKFVA

SEQ ID NO: 87983 - DNA, 1398 bp, marine gamma proteobacterium HTCC2143
  CDS (1)..(1398): transl_table=11
atgaccgatcaggatccagccattaaaccttggggtgggcgtttttcagaacccaccgacgcctttgtagaacgctttacagcctccgtcgagtttgacaagcgcatgtatcatcacgatatcaatggttcattagcgcacgcgaaaatgctcacccacgtcggcgtgctgacagaagaggaacaccagcaaattgtcgacggtctggaaactattcgcagtgaagtcgaattggggcaatttcaatggtcagttgctctcgaagacgtgcacatgaatatagaagcacgtctcactgaaaaaattggtgtgaccggtaaaaagctacataccggacgctctcgcaacgatcaggtagcaaccgatatccgtctttaccttcgggatgaaatcgacagcatcgccgacgcgttaacctttctgcagcgcgggctcatcgccctagccgctcaggaaaccgatactattatgccggggtttacccaccttcaaactgcgcagccagtaacatttggacatcacttgctggcttggaatgaaatgctggaacgagattatggtcgcctgctggattgtcgcaagcgcgctaatcaatcacccctaggggcggcggctcttgccggaacgacttaccctatagaccgagctatgaccgctgaattattgggttttgacgcacccacagaaaactctctcgactctgtcagcgatcgtgattttgccattgaatttaccgcttttgccagtttagtcatgactcatctttcacgttttagcgaagaactggtgttgtggacatctgcacaattcaactttattgaattgccagatcgtttttgcaccggttcatcgataatgccacaaaagaaaaaccccgatgtgcctgaattagtcaggggcaaagtagggcgggtcaatggccacctaatttcactactcaccttgatgaaatcccaacccttggcctacaacaaggataatcaagaagacaaggaaccactgttcgataccatcgataccattaaagattgccttaaggcctatggcgatatggtaccggcaattaagcccaaaagggacgtgatggaggaagccgctcgtcgcggattttctaccgccactgacctggctgattatctggttcgcaaaggtatcccctttcgggatgcccatgagatcgttggtaaatcagtcgcctacggcattgaacagaccaaagatttatcggaaatgtcgctgcaagaactgcagcagttcagcaccaatatcggcgatgatatttttgatgtactcacgttgcagggttcggtcgccgcccgcgatcatattggcggaacggctccagtacaagtagccgccgccgcactcagagccgagaaacgattgcagcaacgctga

SEQ ID NO: 87984 - protein, 465 aa, marine gamma proteobacterium HTCC2143
MTDQDPAIKPWGGRFSEPTDAFVERFTASVEFDKRMYHHDINGSLAHAKMLTHVGVLTEEEHQQIVDGLETIRSEVELGQFQWSVALEDVHMNIEARLTEKIGVTGKKLHTGRSRNDQVATDIRLYLRDEIDSIADALTFLQRGLIALAAQETDTIMPGFTHLQTAQPVTFGHHLLAWNEMLERDYGRLLDCRKRANQSPLGAAALAGTTYPIDRAMTAELLGFDAPTENSLDSVSDRDFAIEFTAFASLVMTHLSRFSEELVLWTSAQFNFIELPDRFCTGSSIMPQKKNPDVPELVRGKVGRVNGHLISLLTLMKSQPLAYNKDNQEDKEPLFDTIDTIKDCLKAYGDMVPAIKPKRDVMEEAARRGFSTATDLADYLVRKGIPFRDAHEIVGKSVAYGIEQTKDLSEMSLQELQQFSTNIGDDIFDVLTLQGSVAARDHIGGTAPVQVAAAALRAEKRLQQR

SEQ ID NO: 87985 - DNA, 1410 bp, marine gamma proteobacterium HTCC2080
  CDS (1)..(1410): transl_table=11
atgagtcaatccaaaaattcagaagctacaaccagcaaattgtggggtggacgcttcgcagagcctaccgacgcctttgtacagcgcttcacggcctctgaggccttcgatcgacgattggcctcgcaagacatacgcggctctttggcccatgcaaagatgttgtgcgcacaagctattttatctccagctgatctcgccgagattgaaacaggccttgaacagatttctgaagaaattgcccagggcaaattcgagtggcgcgttgatcgagaagacgttcatatgaacatcgaagcccgacttacagaaattattggggcaactggaaagaaattgcacacaggtcgatcacgcaacgatcaggtcgctaccgatattagactttggcttcgggagtcaatcgatgtcatcacacaagaacttactcgcctacagcaaggaattgttgagctagctgctcagcatgccgccaccgtcatgccagggtttacccatttacaggtcgctcagcccattacttttgggcatcacctgatggcatggtacgaaatgcttgatcgtgactttggtcggctgcaggattgtaaaacaaggctaaaccagtgtcctctaggcgctgctgctcttgccggcaccaccttcccaattgacagaatgatgacggcggatgcgctaggcttcgaatcacccacgcgaaactccttggattccgtatcagatcgggacttcgcaattgagttcacagctgcggctgcactcatcaccacgcatctttcacgcatgtcggaagaacttgtgctctggacatcagcgcagtttgctttcgttaccattcctgatcgcttttgcaccggctcctccatcatgccgcaaaagaaaaaccccgatgtcccggaattagttcgaggtaaaaccggccgcattaacggtcatctcatcgccctacttaccctcatgaagtctcaacctttggcttacaacaaagacaaccaagaagataaggaacctctttttgatactgtacagacgttgcatgactgcttgcgcgcgtttgctgatatggtgcctgcgctgatccccaatcaggaaaatatgcgcaatgccgctttagagggatttgctactgcaacggatttagccgactaccttgttcggcgtggcgtcgcttttcgtgacgcccatgaggtggtgggaagtgctgtggcccactgcgtggcagagtcctgtcgcctagaggatctgcctttgagcacgctgcagggtttctatcacgacatagatgatgacgtttttgaggtgctcaccctcgaggggtccgtggcggctcgaaatcatattggtggcaccagccctattcaagtcacagcagccgcaacagcagcgctgaaacttttggtcttgcgttag

SEQ ID NO: 87986 - protein, 469 aa, marine gamma proteobacterium HTCC2080
MSQSKNSEATTSKLWGGRFAEPTDAFVQRFTASEAFDRRLASQDIRGSLAHAKMLCAQAILSPADLAEIETGLEQISEEIAQGKFEWRVDREDVHMNIEARLTEIIGATGKKLHTGRSRNDQVATDIRLWLRESIDVITQELTRLQQGIVELAAQHAATVMPGFTHLQVAQPITFGHHLMAWYEMLDRDFGRLQDCKTRLNQCPLGAAALAGTTFPIDRMMTADALGFESPTRNSLDSVSDRDFAIEFTAAAALITTHLSRMSEELVLWTSAQFAFVTIPDRFCTGSSIMPQKKNPDVPELVRGKTGRINGHLIALLTLMKSQPLAYNKDNQEDKEPLFDTVQTLHDCLRAFADMVPALIPNQENMRNAALEGFATATDLADYLVRRGVAFRDAHEVVGSAVAHCVAESCRLEDLPLSTLQGFYHDIDDDVFEVLTLEGSVAARNHIGGTSPIQVTAAATAALKLLVLR

SEQ ID NO: 87987 - DNA, 1401 bp, Candidatus Desulfococcus oleovorans Hxd3
  CDS (1)..(1401): transl_table=11
atgacggaaaaaccatggggcgggcggttttccgaggccaccgacaaacaggtggaggcgttttccgcctccattgacgtggatgcacggctctaccggtgggacattgaaggcagcatggcccattgccgcatgctggcccggcagggcatcattcaaaagaaggaagccgacgccattgtggccggacttgcggccattcaaaaggagatcgacgccggcacctttgtgtttgatccggccctggaagatgtgcacatgaacattgaacaggccctgttcgaccgtatcgggccggcggcccgcaagctgcacacggcccgcagccgcaacgaccaggtggccctggatgtgcggctgtttctgcgggaccggaccctttcggttgtggccgggctggtggctctgcggcagcggatcgcggattttgccggcgcgcatatcgacgtgatcatgccgggatatacccacctgcagcgggcccagcccgtattgttcgcccaccacctgatggcctattacgagatgtttttccgggacacccagcggtttgccgagggcctcaagcggatcaacgtcctgcccctgggcagcgcggccctggccggcaccccctatcccattgaccgggcctataccgccgaactgctggggtttgacgcggtgtcggccaacagcatggacgcggtgtcggaccgggattttgccatcgagtttaccgcttccgccgccatctgcatgatgcatttttcccggctggccgaggagctggtgctctggtcctcgtcggagttcggttttgttgagctttccgacgcggtttccacgggcagcagcatcatgccccagaaaaaaaaccccgacgtgccggagctggtccggggcaagaccggccgggtgttcggcgacctgatgggcctgctgaccctgatgaaatccctgcccctgtgctacaaccgggacatgcaggaggacaaacaccttctgtttgacgcggctgataccctgtccgcctgcctgccggtctgcaccgcactgttcgacaacatgaaggtaaacaacgaggccatggcgcaggccgcggcccggggctacctgaacgccacggacatggctgactacctggtgggcaagggcgtggccttccgggacgctcatgcctgcgtgggcaaggccgtggccgcagccatcgcaaaaggcagggagctgcacgagctgaccctgaaagagctgaaaactttttccgctgccgttgaagccgatctgtttgacgtgctggccccggaaaaggtgattgaacggcgacaggcgttcggcggtacggccaaaaaaacggtgcgggccgccattgcagcggcccggcggcagataaaaaaggaaagaaaaacctatggcctgtaa

SEQ ID NO: 87988 - protein, 466 aa, Candidatus Desulfococcus oleovorans Hxd3
MTEKPWGGRFSEATDKQVEAFSASIDVDARLYRWDIEGSMAHCRMLARQGIIQKKEADAIVAGLAAIQKEIDAGTFVFDPALEDVHMNIEQALFDRIGPAARKLHTARSRNDQVALDVRLFLRDRTLSVVAGLVALRQRIADFAGAHIDVIMPGYTHLQRAQPVLFAHHLMAYYEMFFRDTQRFAEGLKRINVLPLGSAALAGTPYPIDRAYTAELLGFDAVSANSMDAVSDRDFAIEFTASAAICMMHFSRLAEELVLWSSSEFGFVELSDAVSTGSSIMPQKKNPDVPELVRGKTGRVFGDLMGLLTLMKSLPLCYNRDMQEDKHLLFDAADTLSACLPVCTALFDNMKVNNEAMAQAAARGYLNATDMADYLVGKGVAFRDAHACVGKAVAAAIAKGRELHELTLKELKTFSAAVEADLFDVLAPEKVIERRQAFGGTAKKTVRAAIAAARRQIKKERKTYGL

SEQ ID NO: 87989 - DNA, 1395 bp, Pseudomonas putida GB-1
  CDS (1)..(1395): transl_table=11
atgagcaccgacaagaccaatcagtcctggggcggccgcttcagtgagcccgtcgacgccttcgtcgcccgtttcaccgcctcggtcgatttcgacaagcgcctgtaccgccacgacatcatgggttcgatcgcccatgccaccatgctggcgcaggtcggcgtgctcagcgatgccgagcgcgacaccatcatcgatggcctgaaaaccatccagggcgagatcgaagccggtaacttcgactggcgcgtcgacctcgaagacgtgcacatgaacatcgaagcacgcctgactgaccgcatcggcatcaccggtaagaagctgcacacaggccgtagccgcaacgaccaggtggccaccgacatccgcctgtggctgcgcgacgaaatcgacctgatcctggccgaaataacccgcctgcagcagggcctgctggagcaggccgagcgcgaagccgaaaccatcatgcccggcttcactcacctgcaaaccgcgcagccggtcaccttcggccaccacctgctggcctggttcgaaatgctcagccgcgactacgagcgcctggtcgactgccgcaagcgcgccaatcgcatgccactgggcagcgcggcgttggctggtaccacctacccgatcgaccgcgagctcacctgcaagctgctgggcttcgaagccgtggccggcaactcgctggacggcgtgtcggaccgtgacttcgccatcgaattctgcgctgctgccagcgtggcgatgatgcacctgtcgcgcttctccgaagagctggtgctgtggaccagcgcgcagttccagttcatcgacctgcccgaccgcttctgcaccggcagctcgatcatgccgcagaaaaagaacccggacgtgccagagctggtgcgcggcaagaccggccgcgtgtttggcgctttgaccggcctgctgaccctgatgaaaggccagccgttggcctacaacaaggacaaccaggaagacaaggaaccgctgttcgacgccgccgacaccctgcgcgactcgctgcgtgcctttgccgacatgatcccggcgatcaagcccaagcacgccatcatgcgtgaagcggccctgcgcggcttctccaccgccaccgacctggccgactacctggtacgccgtggcctgccgttccgtgactgccacgaaatcgttggccacgcggtgaagtatggtgtggacaccggcaaggacctggccgagatgagcctggacgaactgcgccagttcagcgaccagatcgagcaagacgtgtttgccgtgctcactctggaaggctcggtgaatgcccgtaaccacattggtggtacggcgccggcgcaagtgcgtgcggcggtggttcgcggcaaggcgctgctggcttcgcgctga

SEQ ID NO: 87990 - protein, 464 aa, Pseudomonas putida GB-1
MSTDKTNQSWGGRFSEPVDAFVARFTASVDFDKRLYRHDIMGSIAHATMLAQVGVLSDAERDTIIDGLKTIQGEIEAGNFDWRVDLEDVHMNIEARLTDRIGITGKKLHTGRSRNDQVATDIRLWLRDEIDLILAEITRLQQGLLEQAEREAETIMPGFTHLQTAQPVTFGHHLLAWFEMLSRDYERLVDCRKRANRMPLGSAALAGTTYPIDRELTCKLLGFEAVAGNSLDGVSDRDFAIEFCAAASVAMMHLSRFSEELVLWTSAQFQFIDLPDRFCTGSSIMPQKKNPDVPELVRGKTGRVFGALTGLLTLMKGQPLAYNKDNQEDKEPLFDAADTLRDSLRAFADMIPAIKPKHAIMREAALRGFSTATDLADYLVRRGLPFRDCHEIVGHAVKYGVDTGKDLAEMSLDELRQFSDQIEQDVFAVLTLEGSVNARNHIGGTAPAQVRAAVVRGKALLASR

SEQ ID NO: 87991 - DNA, 1419 bp, Marinobacter sp. ELB17
  CDS (1)..(1419): transl_table=11
atgatgacggataacaaatcgccagagcaggcctcaagctcggaaaaaccttggggtggacgtttcaccgagcctaccgacgcctttgtcgagcgctttaccgcctctgtcggttttgatcagcgcctttatcatcacgacattaccggctccattgcccatgccaccatgctggcagcggtgggcgttctgaccgacgaagagcgcgacaccattctggaagggctgaaggcggtgaaagcagacattgaagctgggacttttcagtggtccatcagtttggaagacgtgcacatgaacatcgaagcgcgtctgaccgatcgcatcggtgttaccggtaaaaagttacacaccggccgcagccgtaacgaccaagtggccaccgacatccggctttatttgcgtgacgagattgacgtgattgccgaggaactcaaacgactgcaggccgggctgctgaacttggctgaacgcgaagccgacaccatcatgccgggctttacccacctgcaaaccgcgcagccggtgacttttggccatcatttgttggcctggtacgaaatgttggtgcgcgatggcgaacgcctgcaggattgccgtaagcgggtgaacatcatgcccctgggcgccgcggcgctggcgggcactacttatcctattgaccgggcgatgaccgcccaactgctgggctttgaccgtgcttcggaaaactcgctggattcggtcagcgaccgcgatttcgccatcgagttctgcagttttgctgcgctgctgatgactcacctttcgcgctttagcgaagagttggtgctgtggacctcggcgcagtttgatttcatcgatttgcctgatcgcttttgcaccggctcgtcgataatgccgcagaagaaaaatccagacgtgccagagttggttcggggcaagacaggccgggtgaatggccacctgatcagtttgcttacgttaatgaaaggccagccgctggcctataacaaagacaaccaggaagataaagagccgctgtttgacaccgtagatacagtaaaaggttgcctgagagcctacgccgacatggtgccagcgattaccgccaaagctgataatatgagggtagcagccaagcggggcttctccaccgcgacggatctggccgattacctggtcaaaaaaggcatgccgttccgcgacgcccacgaagtggtgggcaggtccgtggcctttggcgtagagcagaagcgcgatttgtcagatatgacactggcggagctacagtctttttcgggtactatcagtgaagacgtatttgacgtgctgactcttgagggctcggtgcaggctcgtgaccaccttggcggcaccgcgccggcgcaagttcgggcagccgttaagcgcgcccgtaacgtacttaagcagggttga

SEQ ID NO: 87992 - protein, 472 aa, Marinobacter sp. ELB17
MMTDNKSPEQASSSEKPWGGRFTEPTDAFVERFTASVGFDQRLYHHDITGSIAHATMLAAVGVLTDEERDTILEGLKAVKADIEAGTFQWSISLEDVHMNIEARLTDRIGVTGKKLHTGRSRNDQVATDIRLYLRDEIDVIAEELKRLQAGLLNLAEREADTIMPGFTHLQTAQPVTFGHHLLAWYEMLVRDGERLQDCRKRVNIMPLGAAALAGTTYPIDRAMTAQLLGFDRASENSLDSVSDRDFAIEFCSFAALLMTHLSRFSEELVLWTSAQFDFIDLPDRFCTGSSIMPQKKNPDVPELVRGKTGRVNGHLISLLTLMKGQPLAYNKDNQEDKEPLFDTVDTVKGCLRAYADMVPAITAKADNMRVAAKRGFSTATDLADYLVKKGMPFRDAHEVVGRSVAFGVEQKRDLSDMTLAELQSFSGTISEDVFDVLTLEGSVQARDHLGGTAPAQVRAAVKRARNVLKQG

SEQ ID NO: 87993 - DNA, 1395 bp, Aspergillus oryzae
  CDS (1)..(1395)
atgagcggtcctaaggctgtcgctgagaatatgctctggggaggtcgattcacccagggcctcgaccccctcatggttcaatacaaccagtctctgccctatgaccgcatcttctggaaacaagacattgccggctcaattgcttttgctcgagctaacgtgaagactggtatcctcacgcagcaagagttctccgagattgagcgtggcttcaagcagattgccgaagaatggagcaccaatacattcgccgtcaaggagaacgacgaagatattcacaccgcaaatgagcgtcgactatcagaaatcattggcaaggagattggaggcaagctgcacaccggtcggtcccgcaacgaacaagttgcgactgacatgcggttgtggttgcgggatgagctgcgcaggctggacagtatcctgtgcgacctcattaaggtctcgatctctcgtgcagaggccgagctcgactacctcatgccaggttatacccatttgcaaaaggctcagccagtccggtggagccactggattttgtcgcacgctacggcttttgccagcgagctgcagcgcctgcgtgaagtcaccaagcgtgtcaaccgtagtccccttggtaccggtgctcttgcgggcaaccctttcaacattgaccgcgagtcaatggccaaggagctgggtttcgagggtctgctgtacaactcgatgaacactgtcgccgatcgtgacttcgccatggagaccatgcagtggggtagctcattcatgctcaagatctctcgctgggccgaggatctgatcatctacagcagcttggaattcggctttgttcgcttgtctgatgcttactccactggttcatcgttgatgcctcagaagaagaacgcagacagcctggagcttctgcgcggaaaggccggtcgagcctttggccaaatggccggtctgatgatgacgatcaagggtcttcccactacctacaacaaggatttgcaggagagcattgaacccctcctcgatcacatcaaaaccgttagcgacagcatccagatcgcaactggagtgctctcgactcttaccgttattcccgagaagatgacggctgcattggccccggaaatgctcgctaccgaaattgctgactacctagtccgcaagggcgtccccttccgtgagggtcaccacatctctggccgtgttgtcgccctggcagagaagaccagcgtccccatggatacactgtccctcgagcaactgaagacagttgatgcccgctttgatgaagatgtgcaaacctgtctggattatgagcgtgcagtggagctgaaggatgctgtcggcggcaccagtcggcgggctgtcttggagcagacctctgttctgaggagcctactgtga

SEQ ID NO: 87994 - protein, 464 aa, Aspergillus oryzae
MSGPKAVAENMLWGGRFTQGLDPLMVQYNQSLPYDRIFWKQDIAGSIAFARANVKTGILTQQEFSEIERGFKQIAEEWSTNTFAVKENDEDIHTANERRLSEIIGKEIGGKLHTGRSRNEQVATDMRLWLRDELRRLDSILCDLIKVSISRAEAELDYLMPGYTHLQKAQPVRWSHWILSHATAFASELQRLREVTKRVNRSPLGTGALAGNPFNIDRESMAKELGFEGLLYNSMNTVADRDFAMETMQWGSSFMLKISRWAEDLIIYSSLEFGFVRLSDAYSTGSSLMPQKKNADSLELLRGKAGRAFGQMAGLMMTIKGLPTTYNKDLQESIEPLLDHIKTVSDSIQIATGVLSTLTVIPEKMTAALAPEMLATEIADYLVRKGVPFREGHHISGRVVALAEKTSVPMDTLSLEQLKTVDARFDEDVQTCLDYERAVELKDAVGGTSRRAVLEQTSVLRSLL

SEQ ID NO: 87995 - DNA, 1455 bp, Drosophila melanogaster
  CDS (1)..(1455)
atgagcaacttttgttttaaagataacatggctgtacgacacagtgaagtatctgcgagcagccccagtagtcaaacaactgttacgccaatcggatccatcatgacccagatccccgagagctgttataagatgtggggtggtaggttcaccgaggggccgcatgatttggacgccagcaaggcgtatgcagaggcactccatcgagctggtctcatcaacgcagccgaggcggataagttggtaaagaatctggagctgttgcgattcgattggatcgagggaactgtgaagattctacccggtgacgaggatgtgcacacggtgaacgagcgtttgctggtggagattaccggcgaactgggccagcggcttcacacgggcagaagcagaaatgaccaggtggtcacggacatgaagctatggcttcgcaaggccattcgtgagaccttgggccgactgagtcgcatcattgaaactgccaccaggcaggctgaactccacctgggcgtcctcatgccaggatacacgcatctgcagcgggcccagaccgttcagttctcccactggctgctctcgcacgcgttcgccttaagggaagatggccagcggctgttggagctaagggatcgggcgaatgtcctgccccttggaagtggcgctctggcgggaaatccccttggcatcgatcgtttgtggctggccgagaggctgggattctcgggtgtcacagccaacagcatgcacgccgtgggagatcgagattttgtagttgacttcatctactgctgctctatggtgagcctgcatctgtcccgattggcggaggatttgatcatctacagtaccaaggagttcgacttcatcaaactggccgatggcttttccagtggcagcagcctgatgcctcagaaaaggaatccggacagcttggagctgattcgcggcatggccggtgtgatcaccgccaatctgacgggcataatgatgaccattaagggcactccgtccacctacaacaaggacttgcagtacgacaagcaattctgcttccagtccttcgacaagctgtcccaagtgctcgaggttaccgatggtgtcctacagacgattcaggtcaagcaggaatcaatggaggcggcacttaccacagacatgctggccactgactgggcctactatctggtgaagaagggggttccattccgccaggcgcaccacattatcggtcgcgtggtctcggaggccgaaaagcgcggtgtggacatcactgatttgccgctgggagatctccagaaattcagtcctttatttggatcggatatcgttgcagtggcggactattccaacaatgtccagcaatataatgcgattggtggaaccgccagtagcagcatcgtggaacaactgcgtttgctcaagaagtgcgcaagggatttggccaaacagtcgtag

SEQ ID NO: 87996 - protein, 484 aa, Drosophila melanogaster
MSNFCFKDNMAVRHSEVSASSPSSQTTVTPIGSIMTQIPESCYKMWGGRFTEGPHDLDASKAYAEALHRAGLINAAEADKLVKNLELLRFDWIEGTVKILPGDEDVHTVNERLLVEITGELGQRLHTGRSRNDQVVTDMKLWLRKAIRETLGRLSRIIETATRQAELHLGVLMPGYTHLQRAQTVQFSHWLLSHAFALREDGQRLLELRDRANVLPLGSGALAGNPLGIDRLWLAERLGFSGVTANSMHAVGDRDFVVDFIYCCSMVSLHLSRLAEDLIIYSTKEFDFIKLADGFSSGSSLMPQKRNPDSLELIRGMAGVITANLTGIMMTIKGTPSTYNKDLQYDKQFCFQSFDKLSQVLEVTDGVLQTIQVKQESMEAALTTDMLATDWAYYLVKKGVPFRQAHHIIGRVVSEAEKRGVDITDLPLGDLQKFSPLFGSDIVAVADYSNNVQQYNAIGGTASSSIVEQLRLLKKCARDLAKQS

SEQ ID NO: 87997 - DNA, 1853 bp, Arabidopsis thaliana
  CDS (54)..(1607)
ccagttggagctcgaaacccttcttcatcttcttcttctcctccacctaaccaatgggagcaattgatctctctttctcacagagtcttctcttctcttcgtcgcgttccaatctttcctcctccacacaccgttccgtctcttttttgccgccgggaagcaagtcacggtgtctgccgccgttgcgttcaatgagtcatgacgacgacacggcctcaaaggaggtgaagctatggggtggaaggttcgaagagagtgtcactgagaaagtggagaagttcactgagtcaatttcatttgataaggttctctacaagcaggacattatgggtagcaaagctcatgcttcaatgcttgctcaccaggggctaataactgatagcgataaagatagcattttgagaggtcttgatgatattgagagacaaattgaagcaaataagtttgaatggaggactgatcgagaagatgtgcttatgaacattgaagcagctcttactgatcttattggtgaacctgcaaagaaacttcatactgcaaggagcagaaatgaccaagttgctactgacttcaggctttggtgtcgtgatgctatcgatacaattattgtcaaaataagaaatcttcagagagcacttgttgaactggctttgaagaatgaggctttgattgttcctggttatactcatcttcaaagagctcagcctgttttactcccacacgttctcttaacttttgtagagcagctcgaacgtgatgctggtcgttatgtggactgtcgagcaaggctaaatttctcccccctgggagcttgtgctttggctggaactggtctgcctattgataggtttatgactgcaaatgctcttggatttaccgaaccaatgagaaacagtatcgatgcagtctcagaccgagacttcgtgctggagttcttatatacaaatgccaacaccggtattcatttatcacggcttggagaagagtgggtactgtgggcttccgaggagtttgggttcatgactccaagtgattctgtgtcaaccggaagtagtataatgccacagaagaaaaatccagacccaatggaacttgtcagaggaaaatccgcaagagtcataggcgatctggtcactgtcttaacactgtgcaaaggacttccccttgcttacaacagagattttcaagaagacaaagagccgatgttcgatagtaccaagacaataatgggaatgatcgatgtatctgcagaatttgctcagaatgttacattcaacgaagacagaatcaagaaaagtcttcccgcaggacatcttgatgcgactactctcgctgattatcttgtgaagaaggggatgccttttaggtcatctcatgacatagttggaaaactagttggagtttgcgtctcaaaaggctgtgaacttcagaacttaagtcttgaagagatgaaaaagctgagccctgtgtttgaagaagatgtgtttggatttttgggggttgaaaattcagtcaataagttcagttcctatgggtcaacaggatcaaactgtgttgctgagcaacttggctactgggtcaacaagctcaacattacttccacctgatccggaccaaaccattagcaaaagatttgatgacgtttgtgtaattttcatatttattgaggatttttgtcgttaataccaggaagatttcaagcaacatgttgcagcggtttgagaagacccacaaacaaaataagttttgtaatatttgaaatcgagataatgtggaagagtttggtattcttctcatttcaatgctctctacaatatcaatctttttatattctacgaaaaaaaaaaaaaaaa

SEQ ID NO: 87998 - protein, 517 aa, Arabidopsis thaliana
MGAIDLSFSQSLLFSSSRSNLSSSTHRSVSFLPPGSKSRCLPPLRSMSHDDDTASKEVKLWGGRFEESVTEKVEKFTESISFDKVLYKQDIMGSKAHASMLAHQGLITDSDKDSILRGLDDIERQIEANKFEWRTDREDVLMNIEAALTDLIGEPAKKLHTARSRNDQVATDFRLWCRDAIDTIIVKIRNLQRALVELALKNEALIVPGYTHLQRAQPVLLPHVLLTFVEQLERDAGRYVDCRARLNFSPLGACALAGTGLPIDRFMTANALGFTEPMRNSIDAVSDRDFVLEFLYTNANTGIHLSRLGEEWVLWASEEFGFMTPSDSVSTGSSIMPQKKNPDPMELVRGKSARVIGDLVTVLTLCKGLPLAYNRDFQEDKEPMFDSTKTIMGMIDVSAEFAQNVTFNEDRIKKSLPAGHLDATTLADYLVKKGMPFRSSHDIVGKLVGVCVSKGCELQNLSLEEMKKLSPVFEEDVFGFLGVENSVNKFSSYGSTGSNCVAEQLGYWVNKLNITST

SEQ ID NO: 87999 - DNA, 1512 bp, Drosophila melanogaster
  CDS (1)..(1512)
atgagcaacttttgttttaaagataacatggctgtacgacacagtgaagtatctgcgagcagccccagtagtcaaacaactgttacgccaatcggatccatcatgacccagatccccgagagctgttataagatgtggggtggtaggttcaccgaggggccgcatgaggctctccattcgctgaataacagcctgccctacgattctcgcctctatgcggatgatttggacgccagcaaggcgtatgcagaggcactccatcgagctggtctcatcaacgcagccgaggcggataagttggtaaagaatctggagctgttgcgattcgattggatcgagggaactgtgaagattctacccggtgacgaggatgtgcacacggtgaacgagcgtttgctggtggagattaccggcgaactgggccagcggcttcacacgggcagaagcagaaatgaccaggtggtcacggacatgaagctatggcttcgcaaggccattcgtgagaccttgggccgactgagtcgcatcattgaaactgccaccaggcaggctgaactccacctgggcgtcctcatgccaggatacacgcatctgcagcgggcccagaccgttcagttctcccactggctgctctcgcacgcgttcgccttaagggaagatggccagcggctgttggagctaagggatcgggcgaatgtcctgccccttggaagtggcgctctggcgggaaatccccttggcatcgatcgtttgtggctggccgagaggctgggattctcgggtgtcacagccaacagcatgcacgccgtgggagatcgagattttgtagttgacttcatctactgctgctctatggtgagcctgcatctgtcccgattggcggaggatttgatcatctacagtaccacggagttcgacttcatcaaactggccgatggcttttccagtggcagcagcctgatgcctcagaaaaggaatccggacagcttggagctgattcgcggcatggccggtgtgatcaccgccaatctgacgggcataatgatgaccattaagggcactccgtccacctacaacaaggacttgcagtacgacaagcaattctgcttccagtccttcgacaagctgtcccaagtgctcgaggttaccgatggtgtcctacagacgattcaggtcaagcaggaatcaatggaggcggcacttagcacagacatgctggccactgactgggcctactatctggtgaagaagggggttccattccgccaggcgcaccacattatcggtcgcgtggtctcggaggccgaaaagcgcggtgtggacatcactgatttgccgctgggagatctccagaaattcagtcctttatttggatcggatatcgttgcagtggcggactactccaacaatgtccagcaatataatgcgattggtggaaccgccagtagcagcatcgtggaacaactgcgtttgctcaagaagtgcgcaagggatttggccaaacagtcctag

SEQ ID NO: 88000 - protein, 503 aa, Drosophila melanogaster
MSNFCFKDNMAVRHSEVSASSPSSQTTVTPIGSIMTQIPESCYKMWGGRFTEGPHEALHSLNNSLPYDSRLYADDLDASKAYAEALHRAGLINAAEADKLVKNLELLRFDWIEGTVKILPGDEDVHTVNERLLVEITGELGQRLHTGRSRNDQVVTDMKLWLRKAIRETLGRLSRIIETATRQAELHLGVLMPGYTHLQRAQTVQFSHWLLSHAFALREDGQRLLELRDRANVLPLGSGALAGNPLGIDRLWLAERLGFSGVTANSMHAVGDRDFVVDFIYCCSMVSLHLSRLAEDLIIYSTTEFDFIKLADGFSSGSSLMPQKRNPDSLELIRGMAGVITANLTGIMMTIKGTPSTYNKDLQYDKQFCFQSFDKLSQVLEVTDGVLQTIQVKQESMEAALSTDMLATDWAYYLVKKGVPFRQAHHIIGRVVSEAEKRGVDITDLPLGDLQKFSPLFGSDIVAVADYSNNVQQYNAIGGTASSSIVEQLRLLKKCARDLAKQS

SEQ ID NO: 88001 - DNA, 2225 bp, Pichia pastoris
  CDS (298)..(1695)
acgaaaatatggtacctgccctcacggtggttacggtctaggaacggaacgtatcttagcatggttgtgcgacagattcactgtgaaagactgttcattatacccacgtttcactgggagatgtaagccttaggtgttttaccctgattagataatacaataaccaacagaaatacgagaatctagactaatttcgatgattcatttttctttttaccgcgctgcctcttttggcaattctttcacctatattctaccttctctttccttttgttctaaacttattaccagctatctatgtcgaatcaagaagaaagacttaaactgtggggtggcaggtttactggggctactgaccccttgatggatttgtataacgcttccttaccttacgacaagaaaatgtacaaggtggatttagaaggaacaaaagtttacactgagggcctggagaaaattaatttgctaactaaagacgaactaagtgagattcatcgtggtctcaaattgattgaagcagagtgggcagaagggaagtttgttgagaagccaggggatgaggatattcacactgctaatgaacgtcgcttgggtgagttgattggtcgtggaatctctggtaaggttcataccggaaggtctagaaatgatcaagttgccactgatatgcggttgtatgtcagagacaatctaactcagttggctgactatctgaagcagttcattcaagtaatcatcaagagagctgaacaggaaatagacgtcttgatgcccggttatactcacttgcaaagagctcaaccaatcagatggtctcactggttgagcatgtatgctacctatttcactgaagattatgagagactgaatcaaatcgttaaaaggttgaacaaatccccattgggagctggagctttggctggtcatccttatggaattgatcgtgaatacattgctgagagattagggtttgattctgttattggtaattctttggccgctgtttcagacagagattttgtagtcgaaaccatgttctggtcttcgttgtttatgaatcatatttctcgattctcagaagatttgatcatttactccactggagagtttggatttatcaagttggcagatgcttattctactggatcttctctgatgcctcaaaaaaaaaacccagactctttggagttattgaggggtaaatctggtagatgttttggggccttggctggtttcctcatgtctattaagtccattccgtcaacctataacaaagatatgcaagaggataaggagcctttatttgatactctaatcactgtagagcactcgattttgatagcatccggtgtagtttctaccttgaacattgatgccgaacgaatgaagaatgctctaactatggatatgctggctacagatcttgccgactatttagttagaaggggagttccattcagagaaactcaccacatttctggtgaatgtgtcagacaagccgaggagttgaacctttctggtattgatcagttgtccctcgaacaattgaaatccattgactcccgttttgaggctgatgtggcttcaacgtttgactttgaagccagtgttgaaaaaagaactgccaccggaggaacttctaagactgctgttttaaagcaattggatgcactgaatgaaaagctagagtcttgaaggttttatactgagtttgttaatgatacaataaactgttatagtacatacaattgaaactctcttatctatactgggggaccttctcgcagaatggtataaatatctactaactgactgtcgtacggcctaggggtctcttcttcgattatttgcaggtcggaacatccttcgtctgatgcggatctcctgagacaaagttcacgggtatctagtattctatcagcataaatggaggacctttctaaactaaactttgaatcgtctccagcagcatcctcgcataatccttttgtcatttcctctatgtctattgtcactgtggttggcgcatcaagagtcgtccttctgtaaaccggtacagaattcctaccactagaagcttgaaatggggagggtttcagctttgtatcccgatactgtgctttaaaaagggagtccaaactgaaatctttttcggaatcattggatgatacctctgtattagatctcctatgtatcggtttcctcgggtagatagaactgtcgac

SEQ ID NO: 88002 - protein, 465 aa, Pichia pastoris
MSNQEERLKLWGGRFTGATDPLMDLYNASLPYDKKMYKVDLEGTKVYTEGLEKINLLTKDELSEIHRGLKLIEAEWAEGKFVEKPGDEDIHTANERRLGELIGRGISGKVHTGRSRNDQVATDMRLYVRDNLTQLADYLKQFIQVIIKRAEQEIDVLMPGYTHLQRAQPIRWSHWLSMYATYFTEDYERLNQIVKRLNKSPLGAGALAGHPYGIDREYIAERLGFDSVIGNSLAAVSDRDFVVETMFWSSLFMNHISRFSEDLIIYSTGEFGFIKLADAYSTGSSLMPQKKNPDSLELLRGKSGRCFGALAGFLMSIKSIPSTYNKDMQEDKEPLFDTLITVEHSILIASGVVSTLNIDAERMKNALTMDMLATDLADYLVRRGVPFRETHHISGECVRQAEELNLSGIDQLSLEQLKSIDSRFEADVASTFDFEASVEKRTATGGTSKTAVLKQLDALNEKLES

SEQ ID NO: 88003 - DNA, 1404 bp, Fusarium oxysporum
  CDS (1)..(1404)
atggcggaaaagaagacggacgccccggcaaccaatatgctctggggtggcaggtttacaggtgggattgatccgcttatgcataagtataatgcctctattatatacgataaggctctctatagagaggacgttcttggatcgattgctttcgccagggccaactcaaaggttggtatcattaccgaagacgaatttaagatgatcgagcatggtctgcttgaagtgatggaagaatggaagcagggaaccttcgctattatgccgaatgatgaagacattcatactgcaaacgagcgtcgattgggagagcttatcggaaaggacaccgctggcaagctgcatacaggtcgcagccgcaacgagcaggtcgtttgtgatatgcgcatgtggctacgtgaccgcatccgtgaaatcgacagccaactcgttgctttcctacaagtcctcaccaaacgcgccgaggctgaaatcgactacctcatgcctggctacacccacttacaacgcgcgcagccagttcgctggggtcagtggataatgtcacatgctgcttcgttcaagcaggatctcgagcgattgcgccaggtcttcgaaagggtcaaccttagcccacttggatgtggtgcattagctggtaatgtgtttggcatcgatcgagatgcaatagccgcggagcttggtttcagcggaatcactctgaactccatgaacacttcaggcgaccgtgacttcatcatcgagttcctaacctggaactcgatattcaccagccatatcagcaggtgggctgaagatctcatattatactccacttccgagttcgggttttgtcgtttgtcagatctttatagtaccggcagcagtttaatgccgaataagaagaacgccgacagtttggaactcttgcgcggcaagtcaggtcgtgctttcggtcaaatggctgggctgatgatgagcgtgaaaggcttgccaacttgctacaacaaggaccttcaggagggatgggaacccatgctggattcggtccaaactgttttggacagtctgggcatcgccaacggggttatcgccactatgaccgtgcggcctgagcggatgttggctgccctggataagacgatgcttgccactgatgtcgcggagtggctggtgcgaaacggatgtccttttagggaagctcatcacatttctggacgcgttgttgcattatcggaaaatacggaaaccccgatggataaactaaccctggagcaactgcaagccatcgattctcgattcacagcggacattgtgaaggcattcgaatatgagtcgagtgtggaggcgaaatcggccaggggcggtactagtcgatcagccgtgctgcagcagattcaggaactccatgctatcttagattag

SEQ ID NO: 88004 - protein, 467 aa, Fusarium oxysporum
MAEKKTDAPATNMLWGGRFTGGIDPLMHKYNASIIYDKALYREDVLGSIAFARANSKVGIITEDEFKMIEHGLLEVMEEWKQGTFAIMPNDEDIHTANERRLGELIGKDTAGKLHTGRSRNEQVVCDMRMWLRDRIREIDSQLVAFLQVLTKRAEAEIDYLMPGYTHLQRAQPVRWGQWIMSHAASFKQDLERLRQVFERVNLSPLGCGALAGNVFGIDRDAIAAELGFSGITLNSMNTSGDRDFIIEFLTWNSIFTSHISRWAEDLILYSTSEFGFCRLSDLYSTGSSLMPNKKNADSLELLRGKSGRAFGQMAGLMMSVKGLPTCYNKDLQEGWEPMLDSVQTVLDSLGIANGVIATMTVRPERMLAALDKTMLATDVAEWLVRNGCPFREAHHISGRVVALSENTETPMDKLTLEQLQAIDSRFTADIVKAFEYESSVEAKSARGGTSRSAVLQQIQELHAILD

SEQ ID NO: 88005 - DNA, 1449 bp, Volvox carteri
  CDS (1)..(1449)
atggcacaggcgaccagtgctccggccgctccagctcctagcgacagtacaaagaagctgtggggaggccgcttcactggcaagaccgacccattgatggagaaattcaacgagtcattgcctttcgacaagcgtctttgggccgaggatattaagggcagccaagcgtacgccaaggcgctggctaaggcgggcatcctcacccacgtggaggccgcgtccattgtggacggactgagcaaggtcgcggaggagtggcagtcgggtgtgttcgtggtgaagccgggcgacgaggacatccacacggccaatgagcggcgtctgacggagctgatcggggcggttgggggaaagctgcacacaggcagatccagaaacgaccaggtagccaccgactaccggctctggctgacccatcaggtggcggtgatgaggtcggagctgcaggagctgatccgggtggcggcggacaggtcggaggcggaggtggaggtgctcatgccaggtttcacccacctccagaacgccatggcggtgcggtggagccactggctgatgtgccactgcgcggcctggcagcgggatgacatgcggctgagggacctcacgcctcgggtggccacactgccgctggggtcaggcgctctggccggaaaccccttccgggtggatcgccagttcatagcccgggagctgggcttcgtggggggcgtgtgccccaattccatggacgcggtctccgaccgcgacttcgtgatcgagactgtgttcgcctgcagtctgttgtgcacccacctgtcccgctgggctgaggacctcatcatctactcctcgggaccgttcgggtacgtgcagtgcagtgacgcgtacgccaccgggtccagcctcatgccgcagaagaagaaccccgacgccctggagctgatcaggggcaagggcggtcgtatccagggcaacctgacgggcgtgttggcggtgctcaagggcactcccaccacctacaacaaggacttccaagagtgctgggaactgctgttcgacacggtcgacacggtgcatgatgtcgtacgcattgccacgggggtgctgtccaccatcaaaataagacccgagaagatgaagtcgggtctttccgccgacatgctggccaccgacctggccgagtacctggttcgcaagggggtgcccttccgcgagacacaccacctcagtggagccgctgtcaagatggctgaggaccgcggggtggggctcagcgagctgcgggtggaggacctgcagaccatacacccgctgttcacggaggacgtggtggcggtgtgggatttcaaccgtagtgctgagatgcgcgacactgagggcggcaccagtaagaggtccgtgctggagcaggtcgccaagatgaggagctacctggcgcaggagcaggcggggccagcggcccagtga

SEQ ID NO: 88006 - protein, 482 aa, Volvox carteri
MAQATSAPAAPAPSDSTKKLWGGRFTGKTDPLMEKFNESLPFDKRLWAEDIKGSQAYAKALAKAGILTHVEAASIVDGLSKVAEEWQSGVFVVKPGDEDIHTANERRLTELIGAVGGKLHTGRSRNDQVATDYRLWLTHQVAVMRSELQELIRVAADRSEAEVEVLMPGFTHLQNAMAVRWSHWLMCHCAAWQRDDMRLRDLTPRVATLPLGSGALAGNPFRVDRQFIARELGFVGGVCPNSMDAVSDRDFVIETVFACSLLCTHLSRWAEDLIIYSSGPFGYVQCSDAYATGSSLMPQKKNPDALELIRGKGGRIQGNLTGVLAVLKGTPTTYNKDFQECWELLFDTVDTVHDVVRIATGVLSTIKIRPEKMKSGLSADMLATDLAEYLVRKGVPFRETHHLSGAAVKMAEDRGVGLSELRVEDLQTIHPLFTEDVVAVWDFNRSAEMRDTEGGTSKRSVLEQVAKMRSYLAQEQAGPAAQ

SEQ ID NO: 88007 - DNA, 1392 bp, Agaricus bisporus
  CDS (1)..(1392)
atggcagaacaacccaccaaggcaaaactatggggcggcagattcaccggaaagacagaccctctcatgcacgagttcaatcagtccctcaagtacgaccgacgcatgtatgatgccgatgtaaggggatctgttgcctatgctaaagctttgtcccgtgccggcattcttacgcaagatgaaatggagaaaattatccacgggctctcatctgtcggcaaagagtggatggacggaattttccaagtgaaggaggacgacgaggatatacacactgccaatgaacgtcggctcaccgaactaattggacccctgggaggaaagttgcataccggccgctcccgcaatgatcaagtcgctactgacatgcgcctttggcttctggacgaggttcgagatgttgagcaagggttacgtgcattaatacgcgtgatgattgaacgggccgaccaggagaaggattatctgctccccggatatacgcatttacagcgaggccaacccattcgctggtcgcatctcctactctcacatgcattttcctttcgttccgaccttgagcgtctgcagcaactcatccctcgaatctcggttctaccccttgggtgtggtgctttggctggaaatcctttcgcagttgaccgcgagttcttggccaaggaactcgggttccaacacgtcgcagaaaacagtctttggggagtcggagatcgtgatttcatcgtcgaatttctgcaatggtccagtttaacaatggttcatatcagccgcatggccgaggacttgatcatctattctacggccgaatttggcttcgttaccctgagtgatgcttatagtaccggttcaagcattatgccccagaaaaagaatcctgattctcttgaacttttacgtggaaagtctggacgcatctttggaaacatggctggttttttgatgacgtacaaaggcctaccttccacctacaacaaggatctgcaagaagacaaagaaccactttttgatgctgtggataatgtctctgcatccctcaaaatcgccgagggcgtcatcgcaacacttactgttcaccctgagagaatgcgacaagcgttaacgatggacgttttagctacagacttggctgactatctcgtccgcaaaggggttcctttccgcgagacccatcacatttctggccgagctgttgcgcttgcagagtctcggggatgtcagataagcgacctcagctttggagactacaagaccttgagtgaaaagttttcagaggatattcacaaggtatttgattttgaagcaagcgtggagagacgcgagtcaattggaggtacgagtaggaagatggtcgagcggcaagttcaagtattgcgggatgttctggcgaaataa

SEQ ID NO: 88008 - protein, 463 aa, Agaricus bisporus
MAEQPTKAKLWGGRFTGKTDPLMHEFNQSLKYDRRMYDADVRGSVAYAKALSRAGILTQDEMEKIIHGLSSVGKEWMDGIFQVKEDDEDIHTANERRLTELIGPLGGKLHTGRSRNDQVATDMRLWLLDEVRDVEQGLRALIRVMIERADQEKDYLLPGYTHLQRGQPIRWSHLLLSHAFSFRSDLERLQQLIPRISVLPLGCGALAGNPFAVDREFLAKELGFQHVAENSLWGVGDRDFIVEFLQWSSLTMVHISRMAEDLIIYSTAEFGFVTLSDAYSTGSSIMPQKKNPDSLELLRGKSGRIFGNMAGFLMTYKGLPSTYNKDLQEDKEPLFDAVDNVSASLKIAEGVIATLTVHPERMRQALTMDVLATDLADYLVRKGVPFRETHHISGRAVALAESRGCQISDLSFGDYKTLSEKFSEDIHKVFDFEASVERRESIGGTSRKMVERQVQVLRDVLAK

SEQ ID NO: 88009 - DNA, 1890 bp, Moritella abyssi
  CDS (1)..(1890): transl_table=11
atggcactatggggcggtagattcagtcaagcagctgatgcaagatttaaaagtttcaatgattcactgcggtttgactatcgtttagctgagcaagacattacaggttcagtggcatggtcaaaagcgttggttagtgttggtatcttaacccaagatgagcaactcaccattgaggccgcgttaaacgatcttaaattggcggtattagaaaacccagaacaaattttgcaaagtgatgctgaagatattcacagttgggtggaaacgcagttaattgctaaagtgggtgatctgggtaaaaagctacataccggccgtagtcgtaatgatcaagttgcaaccgatctaaagctgtggtgtaaacagcaaggccagcaactgttgatgcaactggataaaacccagcagcaactagtatcactggcgcgtgaacaccaacatacagtattaccgggttacacccatttacagcgtgcacaaccagtgacattttcccattggtgtttagcgtatgttgaaatgctggaacgtgatttcagtcgtttaacagattgcttaaagcgtcttgatacttgcccacttggttcgggtgcacttgccggtactgcctatccgatggatagaacggaattagcccattcattgggttttggcagtgcgacactaaatagcttagattcagtatcggatcgtgaccatgtgatggagttgatgtgtacggcaagtatgtcaatgatccatttatcccgtttagcagaagatttaattttctataactcgggtgaatctaacttcattgagttggctgatgcggtgacctccggttcatctctgatgccgcaaaagaaaaatccggatgcattagaacttatccgtggtaaaaccggccgggtatttggctcactaagtgccatgttaatgacgcttaaagccctgccgctggcatacaacaaagatatgcaagaagataaagaaggcttatttgatgcgcttgatacctggagtgactgcctagaaatggcggcgatgtcattggttggaatgaagatcaatgaagcgagaaccaaagaagcagcattaggtggttattcgaatgcgacagaactggctgattatcttgttgcgaaaggcgtacccttccgtgattcacatcatattgttggtgaagccgttgttgctgcaattgccaaaggggtgccgttagaagcattaaccttagcggaatttaaagcgtttgatgtactcattgaagacgatgtttatcatcacttatcacttgatgaaacattagcaaaacgtaaagcgctgggtggggtgtctccagtgcaggttgaatttgctttaaccaatgctgaaaaacgtttagaagagcgtgatacatctggtattagtattcgagcggcacgtttgacagatcttgatgatattgaacgtatggtaaattactgggctaatattggtgagaacttaccacgtagtcgttctgatctggttaaagcagtgggaacatttgcggtgacagagaaacataatcaagtgaccggctgtgcgtctatctatgtttacgataccggacttgctgagctccgttcactgggtattgaacctggttatcaaggcggtgggcagggtaaggcggttgtcgaatacatgttacgtaaagccgaacagatggcgatccaaaaagtgtttgtattaacccgtgtgcctgagttctttatgaagctgggctttcgctcaaccagtaaatcaatgctaccagaaaaagtactgaaagattgtgatatgtgcccacgccagcatgcgtgtgatgaagtcgcattagaatttaagctcaatgtggttggccaaacaataaacttaaaagcggaaaaactcgcatcttaa

SEQ ID NO: 88010 - protein, 629 aa, Moritella abyssi
MALWGGRFSQAADARFKSFNDSLRFDYRLAEQDITGSVAWSKALVSVGILTQDEQLTIEAALNDLKLAVLENPEQILQSDAEDIHSWVETQLIAKVGDLGKKLHTGRSRNDQVATDLKLWCKQQGQQLLMQLDKTQQQLVSLAREHQHTVLPGYTHLQRAQPVTFSHWCLAYVEMLERDFSRLTDCLKRLDTCPLGSGALAGTAYPMDRTELAHSLGFGSATLNSLDSVSDRDHVMELMCTASMSMIHLSRLAEDLIFYNSGESNFIELADAVTSGSSLMPQKKNPDALELIRGKTGRVFGSLSAMLMTLKALPLAYNKDMQEDKEGLFDALDTWSDCLEMAAMSLVGMKINEARTKEAALGGYSNATELADYLVAKGVPFRDSHHIVGEAVVAAIAKGVPLEALTLAEFKAFDVLIEDDVYHHLSLDETLAKRKALGGVSPVQVEFALTNAEKRLEERDTSGISIRAARLTDLDDIERMVNYWANIGENLPRSRSDLVKAVGTFAVTEKHNQVTGCASIYVYDTGLAELRSLGIEPGYQGGGQGKAVVEYMLRKAEQMAIQKVFVLTRVPEFFMKLGFRSTSKSMLPEKVLKDCDMCPRQHACDEVALEFKLNVVGQTINLKAEKLAS

SEQ ID NO: 88011 - DNA, 1404 bp, Rhizobium meliloti
  CDS (1)..(1404): transl_table=11
atggctgacggcagttccgagacgaaatcctccaaccagatgtggggcggtcgcttcgcctcgggcccggacgcgatcatggaggagataaatgcctcgatcggcttcgacaagaagctctatgcccaggacatccgcggctcaatagcgcatgcgacgatgctggcgcatcaaggcatcatttccgccgaagacaaagacaagatcgttcacggcctcgacacgatcctgtcagagatcgacagcggcgcattcgaattctcgcgccggctggaagacatccacatgaacatcgaggcgcggctggcggccctcatcggcccggccgccgggcgcctccatacggcgcgctcgcgcaacgaccaggtcgcgctcgatttccgcctgtgggtcaaagaggagctgcagaagaccgagaaggcgctgaccgggctcatcgctgcctttctcgaccgcgccgaggagcatgccgaaacggtaatgcccggcttcacccatttgcaaacggcgcagccggtcaccttcgggcatcactgcatggcctatgtggaaatgttcggccgcgaccgcgcgcgcgttcgccacgcgatcgagcacatggacgaaagcccgatcggcgcagccgcgcttgccggcaccggcttccccatcgaccggcacatgaccgccaaggcactcggcttccgcgagccgacgcgcaattccatcgataccgtctccgaccgcgatttcgcgcttgaattcctgtcgatcgccgcgatcgcggcgacccatctgtcgcggctcgcggaagaaatcgtcatctggtcgacgccgcaattcggcttcatccgcctgtcggacgccttttcgaccggttcgtcgatcatgccgcagaagaagaacccggatgcggccgagctcgtgcgcgccaagaccggccgggtcaacggctcgctggttgcccttctgacggtgatgaagggtctgcccctcgcctattccaaggacatgcaggaagacaaggaacaagtcttcgatgcggccgagagcctcgaactcgcaatcgcggccatgaccggcatgatccgcgacgtgacgatacgcgccgaccggatgaaggccgcagcaggctccggctactcgacagccaccgatctcgccgactggctggtgcgcgaggcgggccttccgttccgcgacgcccaccatgtgaccggccgcgtcgtcgcgcttgcggaacagaagggatgcgatctcgccgacctcccgcttgccgagctgcaggcgatcaattccgcgataacggacaaggtctacggcgtcctgacggtcgaggcctccgtggcaagccgcaccagtttcggcggcactgcgccctccgaggtccgcaagcagatcgcctggtggcgggcgcgcaactag

SEQ ID NO: 88012 - protein, 467 aa, Rhizobium meliloti
MADGSSETKSSNQMWGGRFASGPDAIMEEINASIGFDKKLYAQDIRGSIAHATMLAHQGIISAEDKDKIVHGLDTILSEIDSGAFEFSRRLEDIHMNIEARLAALIGPAAGRLHTARSRNDQVALDFRLWVKEELQKTEKALTGLIAAFLDRAEEHAETVMPGFTHLQTAQPVTFGHHCMAYVEMFGRDRARVRHAIEHMDESPIGAAALAGTGFPIDRHMTAKALGFREPTRNSIDTVSDRDFALEFLSIAAIAATHLSRLAEEIVIWSTPQFGFIRLSDAFSTGSSIMPQKKNPDAAELVRAKTGRVNGSLVALLTVMKGLPLAYSKDMQEDKEQVFDAAESLELAIAAMTGMIRDVTIRADRMKAAAGSGYSTATDLADWLVREAGLPFRDAHHVTGRVVALAEQKGCDLADLPLAELQAINSAITDKVYGVLTVEASVASRTSFGGTAPSEVRKQIAWWRARN

SEQ ID NO: 88013 - DNA, 1467 bp, Rhizobium meliloti
  CDS (1)..(1467): transl_table=11
atgaccgagcccactcagctttggggtggacgattcaagtccggaccatccgaagcgcttgcaaacctgtcccgcgcgccgcgatcttactttcggctttacaaggaagatattgcaggttcgcgcgcccatgcttccgagttgaagcgggccggggtcctggacgagagtgaattctccgcgatacgcgcggccctggaaggcatcgaagccgatgtcggtgccggccgcgaggagccgattgcggctgacgaggatctgcatacctttctcgaacggctgttgatggcgcgcctcggcacgcttggcggcaagcttcgcgccgggcggtcgcgcaacgaccagacggcaaacaatacgcgcctctatctgcggcgcatggcgcgggagctctcccaaggcgtgatcgccatcgaagaagccctgaccgagcaggcatcccggcatacggagaccgtgatgcccggctttacccatcttcagccggcccagccggtcgtgctcggccatcacctgatggcgcacgcgcagtcgctgctgcgcgacctgcagcgctttgccgattgggaccgccgcttcgatcgctcgcctctgggtgcggccgcgctcgccggatccggcattgcgcgccgtcccgacctctccgccatcgatctcggctattcggccgcttgcgagaactcgatcgacgccgtcgccgcgcgcgatcacgtcgccgaattcctcttcatatgctcgctggtggcggtggatctctcgcggcttgcggaggagatctgcctctggagctctaagcagttcagttgggtgcggctgcatgattcctattccaccggctcctcgatcatgccgcagaagaagaaccccgacgtcgccgagctgacgcgcggcatgtcgggcacgctgatcggcaacatcgccggcttcctcgcgaccatgaaggcgatgccgctcgcctataatcgcgatctagccgaggacaagcgcagcctgttcgagacgatcgacgttctcgaactggtcctgcccgcctttgccggtatggtggggacgttggaattcgacgtggagaagctgcgcgaggaggcgccgaagggcttcacgctcgcgaccgaagtggccgactggctggtcggccgggacgtgcccttcgcggaagcgcacgagattaccggcgcagtggtgcgcttttgcgaagagcgcggacacgatcttgccggtctgacggcggaggacctgccggggatcgatccgcggcttcacccggagatgctcgcggcactcgtgctcgaaaaggcgcttgcgagcagaaacggctacggtgcaacggcgccggagaaggttcgcgagcagatcgcccgcttcgaaacggcgcttgccgaatgctgcgccttcgccggcggcccgatcggcggcggggcctttgcgggagcgaaggacggcgcagaggaggcgcgacgccgatga

SEQ ID NO: 88014 - protein, 488 aa, Rhizobium meliloti
MTEPTQLWGGRFKSGPSEALANLSRAPRSYFRLYKEDIAGSRAHASELKRAGVLDESEFSAIRAALEGIEADVGAGREEPIAADEDLHTFLERLLMARLGTLGGKLRAGRSRNDQTANNTRLYLRRMARELSQGVIAIEEALTEQASRHTETVMPGFTHLQPAQPVVLGHHLMAHAQSLLRDLQRFADWDRRFDRSPLGAAALAGSGIARRPDLSAIDLGYSAACENSIDAVAARDHVAEFLFICSLVAVDLSRLAEEICLWSSKQFSWVRLHDSYSTGSSIMPQKKNPDVAELTRGMSGTLIGNIAGFLATMKAMPLAYNRDLAEDKRSLFETIDVLELVLPAFAGMVGTLEFDVEKLREEAPKGFTLATEVADWLVGRDVPFAEAHEITGAVVRFCEERGHDLAGLTAEDLPGIDPRLHPEMLAALVLEKALASRNGYGATAPEKVREQIARFETALAECCAFAGGPIGGGAFAGAKDGAEEARRR

SEQ ID NO: 88015 - DNA, 1386 bp, Anabaena variabilis
  CDS (1)..(1386): transl_table=11
atgactgaaaaacaaacttggagtcagcgatttgaatcggctctacatccagcgatcgctctttttaatgccagtataagctttgacatagaattaatagaatacgaccttacaggctctcaagctcatgcccaaatgttggcgcatacggggattatttcgccggcagaaggagaacaactagttgcaggtttagaacaaattcgtgaagaatatcgccagggtaaatttcagcctggtatcgatgcggaagatgtccattttgcagtggagcgacggttaacagagattgttggagatgtaggtaagaaattacatactgcgcgatcgcgtaacgatcaagtaggtacggatacaagactttacctacgtgaccaaatttcgcaaatcaaaacccaattacgggaatttcagagggtcttactagatatagctgaacaaaacgttgaaactctcattcctggttacactcacctacaacgcgctcagcctgtgagtttagctcatcacttgttggcttatttccacatggcacaacgggactgggaacgcttgggtgatgtttatcgccgggtgaatatttcgcccttggggtgtggtgctttagctgggactacctttcccattgaccgccactacacagccaaactgttgcagtttgagcgtatttacgagaatagcttggatggagtgagcgatcgcgattttgccattgaatttttgtgtgcggctagtttgattatggttcacctgagccgtctttctgaagaaattattctttgggcatcagaagaattccgctttgtcaccctcaaagatagctgtgcaacaggttccagcattatgcctcaaaagaaaaaccccgacgtaccagaattagtcaggggaaaaactgggcgtgtatttggtcatctccaagcaatgttggtaatcatgaaaggattacctctggcctataacaaagacctacaagaagacaaagaaggtttatttgacagcgttaacacagttaaggcttgcctggaagccatgacaatcttgctacaggagggtttggaattccggactcagcgcctagctgaagctgtcacacaagatttctctaacgctaccgatgtcgcagattatctagcagccaggggcgttcccttccgcgaagcttataatatcgtgggtaaagtcgtcaaaaccagtattgctgctggcaaacttttaaaagatttgaccttagaagaatggcaagaaatacatccagcatttgccaccgatatttatgaagccatctcccctcgtcaagttgtagctgcacgtaacagttacggtggtactggttttgcccaggtgagtaaagccgtcagtgcggcgcgtgaggaaattggagagtag

SEQ ID NO: 88016 - protein, 461 aa, Anabaena variabilis
MTEKQTWSQRFESALHPAIALFNASISFDIELIEYDLTGSQAHAQMLAHTGIISPAEGEQLVAGLEQIREEYRQGKFQPGIDAEDVHFAVERRLTEIVGDVGKKLHTARSRNDQVGTDTRLYLRDQISQIKTQLREFQRVLLDIAEQNVETLIPGYTHLQRAQPVSLAHHLLAYFHMAQRDWERLGDVYRRVNISPLGCGALAGTTFPIDRHYTAKLLQFERIYENSLDGVSDRDFAIEFLCAASLIMVHLSRLSEEIILWASEEFRFVTLKDSCATGSSIMPQKKNPDVPELVRGKTGRVFGHLQAMLVIMKGLPLAYNKDLQEDKEGLFDSVNTVKACLEAMTILLQEGLEFRTQRLAEAVTQDFSNATDVADYLAARGVPFREAYNIVGKVVKTSIAAGKLLKDLTLEEWQEIHPAFATDIYEAISPRQVVAARNSYGGTGFAQVSKAVSAAREEIGE

SEQ ID NO: 88017 - DNA, 1374 bp, Aquifex aeolicus
  CDS (1)..(1374): transl_table=11
atggaaaaaccatggtcgggaaggtttaaagaagaaacggataagtttgtggaagatttcacggaaagtgtatcctttgataaagagctcgcctttgaagacatagagcaggatatagcccacgtaaaaacacttcagaaagccggcatcctcacggaagaggaagcgagagaactcatccaagaactcctgaagattaaagaggagatcaaagaagggaagttccagtggaagaaggagctggaagacgttcatatgaacattgaggctgaattaataaacagactcggtgatgtagggaggaaactccacaccgcacgctccagaaacgaccaggtggcaaccgacgaaaaactgtacctgaagaaagaaataaaagaggtactccaactcctgaaagaattgagaaagacgctcgttgagcttgcggaaacaactgtggacttcgtcatgccctcctacacgcacctccagagggcacagcccatcagagtagcccattactttctggcttaccgggagattcttcttaaagactcggagaggttgatggacacgtacagacgggttgacgagcttcctctgggtagcggagctgttgccggtgtagactttcccctcgacaggttctacaccgccgaacttctcggtttcaacagggtaacgaggaactctatgtatgccactgcggaaagggactttataattgaatttctttcaaattgtgcactcatagcccagcatctttcaaggctggcagaagaccttataatctggaacacggaggagtttaacttcgtggagcttcccgacaaactctgcacgggcagttccattatgccccagaaaaaaaaccctgacgttcttgagttgataagagggaaaacgggaaggatttacggaaacctgatcgcccttttgaccaccatgaaagcccttcccatggcctacaacagggacatgcaggaagataaagaacccctatttgacacacttaaaaaccttaaaaacatgataaagggtatgactttagtcctttcagatctgagggttaaagaacagaacatgagaaaggcttctggaaacttcctgcttatcacggatatagcgaactacctcgtagaaaagggtgtacctttcaggacagctcaccacatagcgggaagcatagttgcctacctacttgaaaaaggcaagaagttagaagagatgactttagaggagttcaagcagttctccgaaaagtttgaagaagacgtgtttgatattttgagccctgaaagggcagcggacagaaagagggtttacggaggaactgcgaaagaagaaatcttgaggattattgaggtggcgaaggcagaggaaggtttataa

SEQ ID NO: 88018 - protein, 457 aa, Aquifex aeolicus
MEKPWSGRFKEETDKFVEDFTESVSFDKELAFEDIEQDIAHVKTLQKAGILTEEEARELIQELLKIKEEIKEGKFQWKKELEDVHMNIEAELINRLGDVGRKLHTARSRNDQVATDEKLYLKKEIKEVLQLLKELRKTLVELAETTVDFVMPSYTHLQRAQPIRVAHYFLAYREILLKDSERLMDTYRRVDELPLGSGAVAGVDFPLDRFYTAELLGFNRVTRNSMYATAERDFIIEFLSNCALIAQHLSRLAEDLIIWNTEEFNFVELPDKLCTGSSIMPQKKNPDVLELIRGKTGRIYGNLIALLTTMKALPMAYNRDMQEDKEPLFDTLKNLKNMIKGMTLVLSDLRVKEQNMRKASGNFLLITDIANYLVEKGVPFRTAHHIAGSIVAYLLEKGKKLEEMTLEEFKQFSEKFEEDVFDILSPERAADRKRVYGGTAKEEILRIIEVAKAEEGL

SEQ ID NO: 88019 - DNA, 1389 bp, Bacillus anthracis
  CDS (1)..(1389): transl_table=11
gtgagtaaactttggggcggacgttttacggaagaagcggaagcgtgggttgaagagttcggggcatccatctccttcgatcaacaattagtaaatcaagatataaacgggagtattgcgcacgtaacgatgctagcaaagcaaggcatcgttacgaaagaagaagcagagaaaataaagataggtcttcaatatttattagaagaagcgaaacaaaataaattgcatttttccgttgaagcggaagacattcatttaaatatcgaaaagatgttaatggaaaaaatcggtgaagtaggagggaaacttcatactggccgaagtcgtaatgatcaagtagcgacagatatgcacttatatttaaaagaaaaagtagagcatattataaaagctataaaacaattgcaaactgttcttgttcatcaagcagaaaataatattgaaaccattatgcctggctatacgcacttacagcgtgcccagccaatttcatttgctcatcatattctcgcttacttttggatgttagagcgtgatgtaaatcgttatgaagattcattaaagcgtattaacatttcgccattaggagcaggtgcgttagctggaacgacattcccaattgaccgagaatatagtgcggagctccttggatttaatggaatctatgaaaatagtttagatgcagtaagcgatcgtgatttcatactggagttcctcagtaactcatctatgcttatgatgcacttatcacgcttttgcgaagaacttattttatggagtagccaagagtttcaatttattgaaatgagcgatcaatacgcaactggaagcagcattatgccgcaaaagaaaaatccagatatggcggaacttattcgtggtaaaacaggcagagtgtacggtaatttatttagtttacttacagtcatgaaaggattaccgctcgcttacaataaagatttgcaagaagataaagaaggaatgtttgatacagtgaaaacagtagaaggctgccttcatattatggcaggcatgttagagacaatgactgtaaacaaagaaaaaatggggcaagctgtaacgcaagatttctctaacgcaacagaaattgctgactacttagcaaacaaaggactaccattccgtcaagctcatgaaattgttggaaagctagtgctacactgcacacaaaaaggaatttatttaatagatgtaccacttgcaacatataaagaaatgagcgcgctatttgaagaagatttgtatgaagtgctgtcaccatatgcagctgtaaagcgtcgtaacagtgctggcgggactgggtttgagcaaattgaaaaagctttggagaaggcgaaaggattaacgaaagaagctattaagaattga

SEQ ID NO: 88020 - protein, 462 aa, Bacillus anthracis
MSKLWGGRFTEEAEAWVEEFGASISFDQQLVNQDINGSIAHVTMLAKQGIVTKEEAEKIKIGLQYLLEEAKQNKLHFSVEAEDIHLNIEKMLMEKIGEVGGKLHTGRSRNDQVATDMHLYLKEKVEHIIKAIKQLQTVLVHQAENNIETIMPGYTHLQRAQPISFAHHILAYFWMLERDVNRYEDSLKRINISPLGAGALAGTTFPIDREYSAELLGFNGIYENSLDAVSDRDFILEFLSNSSMLMMHLSRFCEELILWSSQEFQFIEMSDQYATGSSIMPQKKNPDMAELIRGKTGRVYGNLFSLLTVMKGLPLAYNKDLQEDKEGMFDTVKTVEGCLHIMAGMLETMTVNKEKMGQAVTQDFSNATEIADYLANKGLPFRQAHEIVGKLVLHCTQKGIYLIDVPLATYKEMSALFEEDLYEVLSPYAAVKRRNSAGGTGFEQIEKALEKAKGLTKEAIKN

SEQ ID NO: 88021 - DNA, 1392 bp, Bacillus thuringiensis subsp
  CDS (1)..(1392): transl_table=11
gtgagcaaactttggggcggacgttttacagaagaagcggaagcgtgggttgaagagttcggagcatccatctccttcgatcaacaattagtaaatcaagatataaacggaagtattgcacacgtaacgatgctagcaaagcaaggcatcgttacgaaagaagaagcagagaaaataaagataggtcttcaatatttattagaagaagcgaaacaaaataaattgcatttttcggttgaagcggaagacattcatttaaatatcgaaaagatgttaattgaaaaaatcggtgaagtaggagggaaacttcatactggccgaagtcgtaatgatcaagtagcgacagatatgcacttatatttaaaagaaaaagtagagcatattatgaaagctacaaaacaattgcagacggttcttgttcatcaagcagaaaataatattgaaaccattatgcctggctatacgcacttacagcgtgcccagccaatttcatttgctcatcatattctcgcttacttttggatgttagagcgtgatgtaaatcgttatgaagattcattaaagcgtattaacatttcgccattaggagcaggtgcgttagctggaacgacatttccaattgaccgagaatatagtgcggagcttcttggatttaatggaatctatgaaaatagtttagatgcagtaagcgatcgtgatttcatactggagttcctcagtaactcatctatgcttatgatgcacttatcacgcttttgcgaagaacttattttatggagtagccaagagtttcaatttattgaaatgagcgatcaatacgcaactggaagcagcattatgccgcaaaagaaaaatccagatatggcggaacttattcgtggtaaaacaggcagagtgtacggtaatttatttagtttacttacagtcatgaaaggattaccgctcgcttataataaagatttgcaagaagataaagaaggaatgtttgatacagtgaaaacagtagaaggctgccttcatattatggcaggcatgttagagacaatgactgtaaacaaagaaaaaatggggcaagctgtaacgcaagatttctctaacgcaacagaaattgctgactacttagcaaacaaaggactaccattccgccaagctcatgaaattgttggaaagctagtgctacactgcacacaaaaaggaatttatttaatagatgtaccacttgcaacatataaagaaatgagcgcgctatttgaaggagatttgtatgaagttctgtcaccatatgcagctgtaaagcgtcgtaacagtgctggtgggactgggtttgagcaaattgaaaaagctttggagaaggcgaagggattagttggagagattgtaggaattaaatga

SEQ ID NO: 88022 - protein, 463 aa, Bacillus thuringiensis subsp
MSKLWGGRFTEEAEAWVEEFGASISFDQQLVNQDINGSIAHVTMLAKQGIVTKEEAEKIKIGLQYLLEEAKQNKLHFSVEAEDIHLNIEKMLIEKIGEVGGKLHTGRSRNDQVATDMHLYLKEKVEHIMKATKQLQTVLVHQAENNIETIMPGYTHLQRAQPISFAHHILAYFWMLERDVNRYEDSLKRINISPLGAGALAGTTFPIDREYSAELLGFNGIYENSLDAVSDRDFILEFLSNSSMLMMHLSRFCEELILWSSQEFQFIEMSDQYATGSSIMPQKKNPDMAELIRGKTGRVYGNLFSLLTVMKGLPLAYNKDLQEDKEGMFDTVKTVEGCLHIMAGMLETMTVNKEKMGQAVTQDFSNATEIADYLANKGLPFRQAHEIVGKLVLHCTQKGIYLIDVPLATYKEMSALFEGDLYEVLSPYAAVKRRNSAGGTGFEQIEKALEKAKGLVGEIVGIK

SEQ ID NO: 88023 - DNA, 1386 bp, Bacillus subtilis
  CDS (1)..(1386): transl_table=11
atgaagaagctttggggaggccgatttcaaaaaacaccggaaaaatgggtcgacgagttcggcgcgtccatatcatttgaccaaaatttagttgctgaagacattacagggtctctcgcacatgctgccatgctgaaaaaatgcggtattctgacagcagaagaagagttgaaaatccgagagggcctgaatacccttttgcaaaaagcagaggagggagcattggaattctcagtcgattatgaggatattcatttgaacattgagaaaatgctcattgacgaaatcggtcctcttggcggcaagctgcataccggcagaagccggaatgaccaggtggcgactgacatgcatttatacttgaagaatcatgtcggccacatcatcgagctgattgaggcattccaaagtgcgctgattgaaaaggcggaagcgaacgttgaaacgattctgccgggctacacacatttgcagcgcgcccagccgatttcattcgctcaccatctgcttgcgtatttctggatgcttgagcgcgacaaggagcgttttcaggattcaatgaagcggattaacaaatctccgctcggctgcggggcgctcgcgggaacaaccttcccaattgaccgtgattattcagcggaactgctcggctttgatgccatttatgaaaacagcttggacggcgtcagcgacagagacttcattttggagtttttaagcaacagcagtatgctgatgatgcacctatcccgtttctctgaagaaatcattttatggtgctcgcaggagtttaaattcatcgagcttgacgatacgtacgcaacaggaagcagcatgatgccgcaaaagaaaaaccctgatatggcggagctgatccgcggcaaaacaggacgcgtatacggcgatatgatggggctgtttacgatcatgaaaggacttccgctcgcttacaacaaagatctgcaggaagacaaagagggcatgtttgacacggtgaaaacggtggagggcagcctgcaaatcttcacaggcatgatccaaacaatgactgtaaacaaagacgtcatgaagcaagcaacaaaacaagacttttcaaacgcgacggaactggccgattatttagctaaaaaaggaatgccgttcagagaagcgcatgaagtggtcgggaaacttgtgtacacatgcatcgaaagagggatctatttaagcgatatgccgtttggcgagtttcagcaggcgagcacactatttgaagaagatatttacactgtgttagacccttactacgcagttgaaaaaagaatgagcgccgggggcaccggattcaaacaggtggaacaggcgcttgaaaaagcgaaagcttgcgtggcagcaggagtttgttaa

SEQ ID NO: 88024 - protein, 461 aa, Bacillus subtilis
MKKLWGGRFQKTPEKWVDEFGASISFDQNLVAEDITGSLAHAAMLKKCGILTAEEELKIREGLNTLLQKAEEGALEFSVDYEDIHLNIEKMLIDEIGPLGGKLHTGRSRNDQVATDMHLYLKNHVGHIIELIEAFQSALIEKAEANVETILPGYTHLQRAQPISFAHHLLAYFWMLERDKERFQDSMKRINKSPLGCGALAGTTFPIDRDYSAELLGFDAIYENSLDGVSDRDFILEFLSNSSMLMMHLSRFSEEIILWCSQEFKFIELDDTYATGSSMMPQKKNPDMAELIRGKTGRVYGDMMGLFTIMKGLPLAYNKDLQEDKEGMFDTVKTVEGSLQIFTGMIQTMTVNKDVMKQATKQDFSNATELADYLAKKGMPFREAHEVVGKLVYTCIERGIYLSDMPFGEFQQASTLFEEDIYTVLDPYYAVEKRMSAGGTGFKQVEQALEKAKACVAAGVC

SEQ ID NO: 88025 - DNA, 1473 bp, Bifidobacterium longum
  CDS (1)..(1473): transl_table=11
atgactgagaacaacgaacatctggccctgtggggtggtcgctttacgtctggtccgtcgccggaattggcccgactgtccaagtccacgcagttcgactggcgcttggccgacgacgacatcgccggttcccgcgcccacgcccgtgctctcggccgtgcgggacttctgaccgccgacgagctgcagcgcatggaggatgcgctcgacacgctccagcgccacgttgacgatggctccttcgcccccatcgaagacgatgaggacgaggccaccgccctcgaacgcggtctgattgacattgccggcgatgaactcggcggcaagctcagggccggccgttcccgcaacgaccagatcgcctgcctgattcgcatgtggttgcgccgtcactcccgcgtaatcgccggactcctgcttgacctcgtcaacgccctgatcgagcagagcgaaaaggccggccgcaccgtgatgccgggccgcacccacatgcagcacgcccagcccgtgctgctcgcgcaccagctcatggcccacgcttggccgctgattcgcgacgtgcagcgactgatcgactgggacaagcgcatcaacgcctccccgtacggctccggcgcactggccggcaacacgctcggcctcgacccggaggccgtggcgcgtgagctcggcttctcccgcgtgaccgacaactccatcgatggcaccgccgcacgtgatctcgtggccgaattcgcgttcgtggccgccatgaccggcgtggacatctcccgcctgtccgaggagatcatcatctggaacacccaggagttcgccttcgtcaagctcgacgacggctattccaccggctcctccatcatgccgcagaagaagaacccggatatcgccgagctcgcccgcggcaagtccggccgactcatcggcgatctgaccggcctgctggccaccctgaagggcctgcccaccgcctacgctcgcgatctgcaggaagacaaggaggccgtgttcgaccaggtcgatacgctcgaagtgctgctgcccgccttcaccggcatggtcaggaccatgcacttcgacggcgaccgcctggaagaggaagctccgaccggcttcgcgctggccaccgacatcgccgaatggctcgtcaagaacggggtgccgttccgccacgcgcacgagctctctggtgcctgcgtcaagctcgccgaaggccgcggccaggaactgtgggatctgaccgacaatgacttcatcgagaccttcgccgcgttcctgccggccgacaaggctccgggagtacgcgaagtgctctccagccacggttcggtcgactcccgcaacggcaagggcggcaccgcttacggtcgcgtgcgcgagcagatcgccgacgccaaggccgaggtcgaagaactcaagctcttccccgcatccacgtcggatggctccgcctacaaagcccccggcacgttctag

SEQ ID NO: 88026 - protein, 490 aa, Bifidobacterium longum
MTENNEHLALWGGRFTSGPSPELARLSKSTQFDWRLADDDIAGSRAHARALGRAGLLTADELQRMEDALDTLQRHVDDGSFAPIEDDEDEATALERGLIDIAGDELGGKLRAGRSRNDQIACLIRMWLRRHSRVIAGLLLDLVNALIEQSEKAGRTVMPGRTHMQHAQPVLLAHQLMAHAWPLIRDVQRLIDWDKRINASPYGSGALAGNTLGLDPEAVARELGFSRVTDNSIDGTAARDLVAEFAFVAAMTGVDISRLSEEIIIWNTQEFAFVKLDDGYSTGSSIMPQKKNPDIAELARGKSGRLIGDLTGLLATLKGLPTAYARDLQEDKEAVFDQVDTLEVLLPAFTGMVRTMHFDGDRLEEEAPTGFALATDIAEWLVKNGVPFRHAHELSGACVKLAEGRGQELWDLTDNDFIETFAAFLPADKAPGVREVLSSHGSVDSRNGKGGTAYGRVREQIADAKAEVEELKLFPASTSDGSAYKAPGTF

SEQ ID NO: 88027 - DNA, 1479 bp, Bradyrhizobium japonicum
  CDS (82)..(1479): transl_table=11
atggctatcaggggcctcttaatacggctggcggcggccagcaaacgtgaccagcgacaagcaaggcgtgagcaggggatcatgagcaacaagatgtggggcggccggttctcggaacgtcccgatgagatcatggaagagatcaacgtctccatcgacgtcgatcgtcacctctatgcccaggacattgccgcgtccaaggcccacgccgcgatgcttgccacgcagggcatcatcacggcctctgatgcgaaaaatatcggcaagggtctagacacgattttgtcagagatcggcaagggcggcttcacgttcaagcgcgcgctcgaggacattcacatgaatgtcgagagccgcctgtccgagctgatcggccccgccgccggccggctgcacaccgcgcgctcgcgcaacgaccaggtcgccaccgacttccgtctctatgtccgcgacgtcatcgacgagaccgatgccgcgctcgccgcgttccagcaggcgctggtcgcgcgcgcgctggagcatgccggcaccgtgatgcccggcttcacgcatctgcagaccgcgcagcccgtgaccttcggccatcatttgctcgcctatgtcgagatggccgcgcgcgaccgcggccgtttccaggacgcccgcaagcggctcaacgaatcgccgctcggcgccgccgcgcttgccggcacctcgttcccgatcgaccgccacgcgaccgcaaaggcgcttctgttcgaccggccgatggcgaactcgctcgacgcggtctccgaccgcgacttcgtgctggagacgctgtcggcggcttccatctgcgccgtgcacatgtcgcgctttgccgaggagatcgtgatctggacctcgccgctggtcggcctcatccgcctcagcgacaagttcaccaccggctcctcgatcatgccgcagaagcgcaacccggatgccgccgagctcgtacgcgccaagaccggccgcgtcatcggtgcgctcaacggtctcctgatcgtgatgaagggcctgccgctcgcctaccaaaaggacatgcaggaggacaagcagggcgcgatggagggctttgccgcgctgtcgctcgccatccgcgccatgaccggcatggtccgcgacctcgcgcccgatgaggccaagatgaaggccgccgccggcgagggctatgccaccgcgacggatctggccgactggctggtgcggacgctgaagatgccgttccgcgaggcgcaccacgtcaccggccgcatcgtggccaaggccgccgagggcggcgtggcgctgcacgagctgccgctgaaggagatgcaggcgatcgagcccaggatcaccaaggacgtgctcggcgtgctctcggtcgaatcgtcggtgaagagccggaccagcttcggcggtaccgcgccgaagaacgtggcgtcgcaggcaaagagctgggcgaagcggctggaaaaagagcgaaaattgggctga

SEQ ID NO: 88028 - protein, 465 aa, Bradyrhizobium japonicum
MSNKMWGGRFSERPDEIMEEINVSIDVDRHLYAQDIAASKAHAAMLATQGIITASDAKNIGKGLDTILSEIGKGGFTFKRALEDIHMNVESRLSELIGPAAGRLHTARSRNDQVATDFRLYVRDVIDETDAALAAFQQALVARALEHAGTVMPGFTHLQTAQPVTFGHHLLAYVEMAARDRGRFQDARKRLNESPLGAAALAGTSFPIDRHATAKALLFDRPMANSLDAVSDRDFVLETLSAASICAVHMSRFAEEIVIWTSPLVGLIRLSDKFTTGSSIMPQKRNPDAAELVRAKTGRVIGALNGLLIVMKGLPLAYQKDMQEDKQGAMEGFAALSLAIRAMTGMVRDLAPDEAKMKAAAGEGYATATDLADWLVRTLKMPFREAHHVTGRIVAKAAEGGVALHELPLKEMQAIEPRITKDVLGVLSVESSVKSRTSFGGTAPKNVASQAKSWAKRLEKERKLG

SEQ ID NO: 88029 - DNA, 1401 bp, Brucella suis
  CDS (1)..(1401): transl_table=11
atgagcgaacaaaaatcaagcaaccagatgtggggcggccgttttgcctcagggcccgatgcgatcatggaagagatcaatgcatcaatcggtttcgaccgcaagctctatgcgcaggatattcagggctcgctcgcccatgcagccatgctcgcaaagacgggcatcattgcggcagaagaccacaaacaaattgaaaatggcttgaaaaccatccgcaaggaaatagaagagggcaaattcaccttctcgcgcaagctcgaagacattcacatgaacatcgaggcgcggctggcggaattgatcggccctgccgccgggcgcctccacaccgcccgttcgcgcaatgaccaggtggccgtcgatttccgtctctgggtgaagcaggaactggaaaaaaccgcagccgccctcaaaaacctgatcgaagcgtttctggagcgcgcggaagaacacgcggcaacagtcatgccgggtttcacccatctccagaccgcgcagcccgtcaccttcggccatcactgcatggcctatgtggaaatgttcggccgcgatctttcgcgcgtgcgcgacgccatcgagcgcatggacgaatcgcctttgggtgcagccgcccttgcaggcaccggctttcctatcgaccgtcacatgacggcaaaggcgctgggcttccgcgagccgacccgcaattcgctcgacagcgtttccgaccgcgattatgcgctggaattcctgtcgcttgccgcaatctgcgccgggcatctttcgcgccttgccgaagagatcgtcatctggtccacgccgcagttcaatttcgtgcgcctttccgacgccttctccaccggctcctcgatcatgccgcagaagaagaacccggacgccgcagaactggtacgcgccaagacgggccgcatcaatggttcgctggtcgcacttctcaccatcatgaagggcctgccgctcgcctattccaaggacatgcaggaagacaaggaacaggtcttcgacgctgccgaaaatctggaactggcgattgccgcgatggctggaatggtgcgcgatctcaccgtcaatgtcgcagccatgaagaaggccgcaggttccggctattccaccgcgaccgaccttgccgactggctggtgcgcacactgggccttcccttccgcgaagcccatcacgtaacgggccgcgccgtggcgcttgccgaaagccgcaaggtcgatctggcaaagctctcgcttgaggaattgcagtcgatcaaccccgccatcacagcagaggtcttcggctatctgacggtggaaaaatcggtcaaaagccgccaatccttcggcggcaccgccccgcaggaagtgcgccgccagatccgctactggaaaaagcgtattgccaaggcctga

SEQ ID NO: 88030 - protein, 466 aa, Brucella suis
MSEQKSSNQMWGGRFASGPDAIMEEINASIGFDRKLYAQDIQGSLAHAAMLAKTGIIAAEDHKQIENGLKTIRKEIEEGKFTFSRKLEDIHMNIEARLAELIGPAAGRLHTARSRNDQVAVDFRLWVKQELEKTAAALKNLIEAFLERAEEHAATVMPGFTHLQTAQPVTFGHHCMAYVEMFGRDLSRVRDAIERMDESPLGAAALAGTGFPIDRHMTAKALGFREPTRNSLDSVSDRDYALEFLSLAAICAGHLSRLAEEIVIWSTPQFNFVRLSDAFSTGSSIMPQKKNPDAAELVRAKTGRINGSLVALLTIMKGLPLAYSKDMQEDKEQVFDAAENLELAIAAMAGMVRDLTVNVAAMKKAAGSGYSTATDLADWLVRTLGLPFREAHHVTGRAVALAESRKVDLAKLSLEELQSINPAITAEVFGYLTVEKSVKSRQSFGGTAPQEVRRQIRYWKKRIAKA

SEQ ID NO: 88031 - DNA, 1410 bp, Burkholderia cepacia
  CDS (1)..(1410): transl_table=11
atgacgtcccaactgcacaaaaagggcgaggcctggtcggcccgcttctcggaaccgatgtcggagctggtcaagcgctacacgtcgtcggtgtttttcgacaagcgcctggcgctcgtcgacatcgccggctcgctcgcgcacgcgaacatgctcgcggcgcagaagatcatcagcgccgacgatctggccgcgatcgagcgcgggatggcgcagatcaagggcgaaatcgagcgtggcgaattcgaatggcagctcgatctcgaggacgtccacctgaacatcgaagcgcgcctgaccgcgctgatcggcgacgcaggcaagcgcctgcatacgggccgctcgcgcaacgaccaggtcgcgaccgacatccgtctgtggctgcgcggcgaaatcgaccgcatcggcgggttgctgaacgatctgcgcggcgcgctgatcgacctcgcggagcaaaacgcggacacgatcatgccgggcttcacgcacctgcaggtcgcgcagcccgtcacgttcggccatcacctgctcgcgtacgtcgagatgttctcgcgcgacgcggagcgcatgcgcgactgccgcacgcgcgtgaaccgtctgccgctcggcgcggccgcgctcgcgggcacgagctatccgatcgaccgtcatgcagtcgcgaagtcgctcggcttcgacggcatctgcgcgaactcgctcgacgcggtgtccgaccgcgatttcgcgatcgaattcacggctgcggccgcgctcgtgatgacgcacgtatcgcgcttctccgaggaactcgtgctgtggatgagcccgcgcgtcggcttcatcgacatcgccgaccgcttctgcacgggcagctcgatcatgccgcagaagaagaacccggacgtgcccgagctcgcgcgcggcaagacgggccgcgtgaacggccatctgatggcgctgctcacgctgatgaagggccagccgctcgcgtacaacaaggacaaccaggaagacaaggagccgctgttcgacacggtcgataccgtcgccgacacgctgcgcatcttcgcggagatggtcgccggcatcacggtgaagccggacgcgatgcgcgcggccgcgctgcagggcttctcgaccgcgaccgacctcgccgactatctggtcaagcgcgggctgccgttccgcgacgcgcacgaagcggtcgcgcatgcggtgaagatctgcgacgatcgcggcatcgacctcgcggatctgacgctcgacgaaatgaagcgcgagctgccgaacgtcgcgcagctgatcggcgacgacgtgttcgactatctgacgctcgaaggctcggtcgcgagccgcaaccacccgggcggcaccgcgcccgaccaggtgcgtgcggccgcgcaggccgcgcgcgccgcgctcggcaagtaa

SEQ ID NO: 88032 - protein, 469 aa, Burkholderia cepacia
MTSQLHKKGEAWSARFSEPMSELVKRYTSSVFFDKRLALVDIAGSLAHANMLAAQKIISADDLAAIERGMAQIKGEIERGEFEWQLDLEDVHLNIEARLTALIGDAGKRLHTGRSRNDQVATDIRLWLRGEIDRIGGLLNDLRGALIDLAEQNADTIMPGFTHLQVAQPVTFGHHLLAYVEMFSRDAERMRDCRTRVNRLPLGAAALAGTSYPIDRHAVAKSLGFDGICANSLDAVSDRDFAIEFTAAAALVMTHVSRFSEELVLWMSPRVGFIDIADRFCTGSSIMPQKKNPDVPELARGKTGRVNGHLMALLTLMKGQPLAYNKDNQEDKEPLFDTVDTVADTLRIFAEMVAGITVKPDAMRAAALQGFSTATDLADYLVKRGLPFRDAHEAVAHAVKICDDRGIDLADLTLDEMKRELPNVAQLIGDDVFDYLTLEGSVASRNHPGGTAPDQVRAAAQAARAALGK

SEQ ID NO: 88033 - DNA, 1410 bp, Burkholderia mallei
  CDS (1)..(1410): transl_table=11
atgacgtcccaactgcacaaaaagggcgaggcctggtcggcccgcttttcggaaccgatgtccgagctcgtcaagcgctacacgtcgtcggtcttcttcgacaagcggctcgcgctcgtcgacatcgccggctcgctcgcgcacgcaggcatgctcgccgcgcagaagatcatcagcgccgacgacctcgccgcgatcgagcgcgggatggcgcaaatcaagggcgagatcgagcgcggcgaattcgaatggcagctcgatctcgaagacgtccacctgaacatcgaggcgcgcctgaccgcgctcatcggcgatgcgggcaagcgcctgcacacgggccgctcgcgcaacgatcaggtcgcgaccgacatccgcctgtggctgcgcggcgagatcgaccggatcggcggcctgctgaacgacctgcgcggcgcgctgatcgatctcgccgaacagaacgcggacacgatcctgccgggcttcacgcacctgcaggtcgcgcagcctgtcacgttcggccatcacctgcttgcctacgtcgagatgttctcgcgcgacgccgagcgcatgcgcgactgccgcgcgcgcgtgaaccgcctgccgctcggcgcggcggcgctcgcgggcaccagctatccgatcgaccgccacgcggtggcgaagacgctcggcttcgacggcatctgcgcgaactcgctcgacgcggtgtccgatcgcgacttcgcgatcgaattcacggccgcggccgcgctcgtgatgacgcacgtgtcgcgcttctcggaagaactcgtgctgtggatgagcccgcgcgtgggcttcatcgacatcgccgaccgcttctgcaccggcagctcgatcatgccgcagaagaagaacccggacgtgcccgagctcgcgcgcggcaagacgggccgcgtaaacggccacctgatggcgctgctcacgctgatgaagggccagccgctcgcgtacaacaaggacaatcaggaagacaaggaaccgctgttcgacacggtcgacaccgtcgccgacacgctgcggatcttcgcggagatggtcgcgggcatcacggtgaagccggacgcgatgcgcgcggccgcgctgcagggcttctcgaccgcgacggatctcgcggactacctggtcaagcgcgggttgccgttccgcgacgcgcacgaggcggtcgcgcacgcggtgaaggtctgcgacgcgcgcggcatcgacctcgcggatctgacgctcgacgaaatgaagcaggaactgccgaacgtcgcgcatctgatcggcgaggacgtgttcgactatctgacgctcgaaggctcggtcgcgagccgcaatcatccgggcggcaccgcgccggaccaggtgcgcgcggcggcgaaggccgcgcgcgcggcgctcggccagtaa

SEQ ID NO: 88034 - protein, 469 aa, Burkholderia mallei
MTSQLHKKGEAWSARFSEPMSELVKRYTSSVFFDKRLALVDIAGSLAHAGMLAAQKIISADDLAAIERGMAQIKGEIERGEFEWQLDLEDVHLNIEARLTALIGDAGKRLHTGRSRNDQVATDIRLWLRGEIDRIGGLLNDLRGALIDLAEQNADTILPGFTHLQVAQPVTFGHHLLAYVEMFSRDAERMRDCRARVNRLPLGAAALAGTSYPIDRHAVAKTLGFDGICANSLDAVSDRDFAIEFTAAAALVMTHVSRFSEELVLWMSPRVGFIDIADRFCTGSSIMPQKKNPDVPELARGKTGRVNGHLMALLTLMKGQPLAYNKDNQEDKEPLFDTVDTVADTLRIFAEMVAGITVKPDAMRAAALQGFSTATDLADYLVKRGLPFRDAHEAVAHAVKVCDARGIDLADLTLDEMKQELPNVAHLIGEDVFDYLTLEGSVASRNHPGGTAPDQVRAAAKAARAALGQ

SEQ ID NO: 88035 - DNA, 1383 bp, Campylobacter jejuni
  CDS (1)..(1383): transl_table=11
atgaaaaatgaaatgtggtcaggacgttttagtggtgcaagtgatgagcttttaaaagaatttaatgcaagtttaaatgtagataaaactttgttcaatgaagatatacaaggttctatagcacacgctacaatgcttgaaagttgtggtattttaaaaaaagaagaattagatgctattataaaaggtttagagcaggttagaagtgaaatagagcaaggtaaatttatttttgatattaaagatgaagatattcatatggctgtagaaaagcgtttaagcgagattataggtagtgaaattggcggaagactacatactgcaagaagtagaaatgaccaagtggctactgattttaaactttttgtaaaaaaatctcatattgaactcataaagcttttaaaagaattgattcaaaccatgctcgaacatgctaaagtgcataaaaaaactattatgccaagttttacacatttacagcacgctcagcctgtgagtttttctttttatattttagcttatgcttttatgttaatgcgagatattaagcgtttgcaaaatagcctagaacttgcagacttttcaccacttggatcttgtgcatgtgcaggaacaagctatgctatcaatcgtgagttgagtgctaaaattttaggatttaaagatattatgccaaatgctatggatggagtgagtgatagggattttgctcttgatttgctttatgatatagcagttatttttacacacacttcaagactttgtgaggaaatgattttattttcaagctcagaattttcttttataaccataagtgatagtttttcaacgggaagttctattatgcctcagaaaaaaaatcctgatgtttgtgagcttatacgtggaaaaacagggcgtgtttatggaaatttgatttctcttttaactataatgaaagctttacctttagcctataataaagatatgcaagaagataaagaagggatttttgatagtgtaaaaaccgctaaagatagcttaatcatcttaaatgcaatgctaaaagaaatacaaattaataaagaaaatatgcttaatgcttgtaaaaaaggtcatttattggctaccgatttggcagattatttggtgcgtgaaaaaaatattccttttagaaaagcacattttatagtgggaaatgttgttgcacaagctgaagcacaaggtattgatataagtgaaattaaagatctttcaaaaatagatcctgtatttgatgaaaaagctatggaacttttaaattttgaattttctttaaattctaagcaaagtgaaggctcaagttctattgcaagcgtagaaaagcaaattcaaattttggaaggttttattcaaaatttataa

SEQ ID NO: 88036 - protein, 460 aa, Campylobacter jejuni
MKNEMWSGRFSGASDELLKEFNASLNVDKTLFNEDIQGSIAHATMLESCGILKKEELDAIIKGLEQVRSEIEQGKFIFDIKDEDIHMAVEKRLSEIIGSEIGGRLHTARSRNDQVATDFKLFVKKSHIELIKLLKELIQTMLEHAKVHKKTIMPSFTHLQHAQPVSFSFYILAYAFMLMRDIKRLQNSLELADFSPLGSCACAGTSYAINRELSAKILGFKDIMPNAMDGVSDRDFALDLLYDIAVIFTHTSRLCEEMILFSSSEFSFITISDSFSTGSSIMPQKKNPDVCELIRGKTGRVYGNLISLLTIMKALPLAYNKDMQEDKEGIFDSVKTAKDSLIILNAMLKEIQINKENMLNACKKGHLLATDLADYLVREKNIPFRKAHFIVGNVVAQAEAQGIDISEIKDLSKIDPVFDEKAMELLNFEFSLNSKQSEGSSSIASVEKQIQILEGFIQNL

SEQ ID NO: 88037 - DNA, 1407 bp, Candida albicans
  CDS (1)..(1407): transl_table=12
atgtcacaacaacaagataaacaacctagtgaaaataaattatggggtggtcgtttcaccggtgccactgatccattgatggatttgtataatgcttcattaccttatgataaagttatgtatgatgctgatttaactggtactaaagtatacacacaaggattaaacaaattaggattaattaccactgaagaattgaatttgattcatcaaggattagaacaaatcagacaagaatggcatgataataaattcattattaaggctggtgatgaggatattcatactgctaatgaacgtcgattaggagaaatcattgggaaaaacatttctggtaaagttcacactggtagatcaagaaatgatcaagttgctaccgatatgagaattttcgttcgtgaatcattacttaatttaagtaaaattttacatcaattcatcacggcaattcttgaacgagcacataaagaaatcgatgtattaatgcctggttatactcatttacaaaaagctcaacctattagatgggcccattggttaagttcatatgcaacttatttcaccgaagattataaacgtttacaagaaattataactcgtgttaaccaatctccattaggatctggtgctttagcaggtcatccttatggtattgatcgtgaatttttagctaaaggattaggatttgatggtgtcattgggaattctttaactgcagtttcagatcgtgattttgttgttgaaagtttattttggagtacattatttatgaatcatatttctcgattctcagaagatctaattatttattctagtggtgaatttgggttcataaaattagctgatgcttattctactggttcttcattgatgccacaaaagaaaaaccctgactcattagaattattacgtgggaaaagtggtagagtatttggtcagttatctggatttttaatgtcgatcaaatctattccatctacttataataaagatatgcaagaggataaagaaccattatttgatgcattgactacagtagaacattcaattttaattgctactggtgtgatttctactttactgattgataaacaaaatatggaaaaagctttaactatggatatgttggctactgatttagctgattatttagttagaaaaggagttccatttagagaaactcatcatatatctggtgaatgtgttagaaaagctgaagaagaaaaattatctggaattgatcaattatcttttgaacaatttcaacaaattgattctcgttttgaaaaagacgttatggaaacttttgattttgaagctagtgtggaaagaagagatgctcttggtggtactgctaaaagtgccgttttaaaacaattagaaaatttaaaatcaatcttaagttaa

SEQ ID NO: 88038 - protein, 468 aa, Candida albicans
MSQQQDKQPSENKLWGGRFTGATDPLMDLYNASLPYDKVMYDADLTGTKVYTQGLNKLGLITTEELNLIHQGLEQIRQEWHDNKFIIKAGDEDIHTANERRLGEIIGKNISGKVHTGRSRNDQVATDMRIFVRESLLNLSKILHQFITAILERAHKEIDVLMPGYTHLQKAQPIRWAHWLSSYATYFTEDYKRLQEIITRVNQSPLGSGALAGHPYGIDREFLAKGLGFDGVIGNSLTAVSDRDFVVESLFWSTLFMNHISRFSEDLIIYSSGEFGFIKLADAYSTGSSLMPQKKNPDSLELLRGKSGRVFGQLSGFLMSIKSIPSTYNKDMQEDKEPLFDALTTVEHSILIATGVISTLSIDKQNMEKALTMDMLATDLADYLVRKGVPFRETHHISGECVRKAEEEKLSGIDQLSFEQFQQIDSRFEKDVMETFDFEASVERRDALGGTAKSAVLKQLENLKSILS

SEQ ID NO: 88039 - DNA, 1371 bp, Carboxydothermus hydrogenoformans
  CDS (1)..(1371): transl_table=11
atgaagctctggggtggacgctttgaaaaggataccgaccgggaaatgcgggattttcatgcctcaatccactttgactggcggctttacgaagaagatatcagggggagcattgcccatgtgacgatgctggcccggcagggtataatcaccaatgaggaaaaagagaaaattattggggcacttacagaaattttagaggagataaaagccggtaaggtggatttttcccctgaagccgaagacattcacctgaatattgaaacgctattaattaagaaaatcggggacgtggggaaaaaagttcacaccggtcgtagccgtaacgaccaggtggctttagacacccggctttatgtaaagaaagaaggtacggctattattgctcttataaaagagctccaggaaactttaattaatctggccgaagggcatttaaacactatcatgcccggttatactcacctgcagcgggcgcagccggtgaccctggcccatcatcttttggcatatttctggatgtttgaccgggaccgaagccgtttttacgattgtttaaaacgggctgataggtcgccgctgggagccggagcactggccggtaccaccttacctttagaccgggagtttgtttccgaacttttaggttttaatggtgtctgtgaaaatagtcttgatgcggtatcggaccgggactatatcttagaatttctctttgcggcggccactacgatgatgcatttaagccgcttttccgaagaaattgttctttggaatagcaaagaattttcctttgtggaaattgatgaccggtatgctaccggctcttccatgatgccccaaaagaaaaatcccgatgctgccgaacttatccggggtaaaaccggcagggtatacggcaatctaatggcggtattaacgatgatgaaaggtttgcccttagcttataacaaggatatgcaggaagataaggagccgctttttgataccgtcgataccttaaagggaagtttaagggtttttactggaatgctgaaaacaattaaatttaaccagggggctatgtataaggcggctttaaaaggatttcttaatgctaccgacttggccgaatacctggtggaaaaaggagttccttttagagaagctcacaggattactggagaactggtgttaaaagccgaaaaaactggaagggaactgttggagctttccttggatgagcttaaagagatgtcgccattaatcgaagaggatatttacgaaaagcttaaaattgaaaatgtcttagctaaaaggaagcttttcggggggcctgcccctcaggcggtaattgaacagttaagacaagcccgggaagcattagcataa

SEQ ID NO: 88040 - protein, 456 aa, Carboxydothermus hydrogenoformans
MKLWGGRFEKDTDREMRDFHASIHFDWRLYEEDIRGSIAHVTMLARQGIITNEEKEKIIGALTEILEEIKAGKVDFSPEAEDIHLNIETLLIKKIGDVGKKVHTGRSRNDQVALDTRLYVKKEGTAIIALIKELQETLINLAEGHLNTIMPGYTHLQRAQPVTLAHHLLAYFWMFDRDRSRFYDCLKRADRSPLGAGALAGTTLPLDREFVSELLGFNGVCENSLDAVSDRDYILEFLFAAATTMMHLSRFSEEIVLWNSKEFSFVEIDDRYATGSSMMPQKKNPDAAELIRGKTGRVYGNLMAVLTMMKGLPLAYNKDMQEDKEPLFDTVDTLKGSLRVFTGMLKTIKFNQGAMYKAALKGFLNATDLAEYLVEKGVPFREAHRITGELVLKAEKTGRELLELSLDELKEMSPLIEEDIYEKLKIENVLAKRKLFGGPAPQAVIEQLRQAREALA

SEQ ID NO: 88041 - DNA, 2216 bp, Chlamydomonas reinhardtii
  CDS (170)..(1591)
gtcaaattgacgcgaggctgcacttcgatcctgaaagccccagttcaacaagtcggatagccaaatggccccgctcgctctccagcatcaaggggcctctaagtgcctcgcggcaacccagcgcaagtgtgctcgcgttgcggctcgcgtccccgctcgtctcagcgtcatggcccaggcagctgctgcgcctgctgacaacactaagaagctgtggggcggtcgcttcacgggcaagacggacccgctcatggagaagttcaacgagtcgctgccctttgacaagcgcctgtgggctgaggacatcaagggcagccaggcgtacgccaaggctcttgccaaggccggcattctggcacatgacgaggccgtgaccattgtggaggggctggccaaggtggctgaggagtggaaggcgggtgcctttgtgatcaaggcgggtgacgaggacatccacacggccaacgagcggcgcctcacggagctggtgggggcggtgggcggcaagctgcacaccggccgctcgcgcaacgaccaggttgccaccgactaccggctgtggctggtgggtcaggtggaggtgatgcggtccgaggtgggcgagctgatgcgcgtggcggcggaccgctccgaggcagaggtggaggtgctcatgccgggcttcacgcaccttcagaatgccatgactgtgcgctggagccactggctgatgagccacgccgcggcctggcagcgcgacgacatgcggctgcgggacctgctgccgcgggtggccacactgccgctgggctcgggcgccctggccggcaacccctttctggtggaccgccagttcatcgccaaggagttgggtttcggcggcggcgtgtgccccaactccatggacgcggtgtctgaccgcgactttgtgatcgagacggtgtttgcggccagcctgctgtgcgtgcacctgtcgcgctgggcggaggacctcatcatctacagctccggccccttcggctacgtgcagtgcagcgacgcctacgccaccggctcctcgctcatgccgcagaagaagaaccccgacgccctggagctcatcaggggcaagggcggtcgtgtgcagggcaacctgatgggcgtcatggcggtgctcaagggcacgcccaccacatacaacaaggacttccaggagtgttgggagctgctgtttgacacggtggacacggtgcacgacgtggtgcgcatcgccaccggcgtgctgtccaccctgcggatcaagcccgaccgcatgaaggccggcctgtccgccgacatgctcgccacggacttggccgagtacctggtgcgcaagggcgtgccgttccgggagacacaccaccacagcggcgccgccgtgaagatggccgaggaccgcggctgcacgctgttcgacctcaccgtggacgacctcaagaccatccacccgctcttcaccgacgacgtggcggcggtgtgggacttcaaccgcagcgccgagatgcgcgacacggagggcggcaccagcaagcgctcggtgctggagcaggtgcagaagatgcgcacctacctggcggcggagggacagcactgagcgggtcgggggagggggggcgggtgtgtatgtgtgtgtgtgtgcgtgtgtaagtctcggtggaggggtggtcctctatatggcggcggggccacagggggacgggtgtgacagagttacggccggagccagcggagtcccgggatggattaaggatctgggccggagacacaaaagactgggggcgggacttcgcagcttgccacaacgttggggaggcagcgcctgctgcttgggaacgaggaggggcgggcggccgcgctcgaggaggaggatgcggattgcgacgcgcgtgcggatgggggtttgccggtgtctgtgagagcggcctggccacacggccaagcggccaatgaaggaagcgggcgcgcgggttcagagggtgcgcgtgcggtacgtaggcgtggccagggcagcgtgacggaaggctcatcggtggctcggggcttccaccgagggtgcacagaagctgcggtgcgcggttttgtcgccggtgggaacattacctgaatcctgcatgggggctcagcaggagtgggccgggagtgggcggggagtggaagagtcaaacccgcgggtcgagtacggccttgcggttttgggcagtctttttaaatagaacatg

SEQ ID NO: 88042 - protein, 473 aa, Chlamydomonas reinhardtii
MAQAAAAPADNTKKLWGGRFTGKTDPLMEKFNESLPFDKRLWAEDIKGSQAYAKALAKAGILAHDEAVTIVEGLAKVAEEWKAGAFVIKAGDEDIHTANERRLTELVGAVGGKLHTGRSRNDQVATDYRLWLVGQVEVMRSEVGELMRVAADRSEAEVEVLMPGFTHLQNAMTVRWSHWLMSHAAAWQRDDMRLRDLLPRVATLPLGSGALAGNPFLVDRQFIAKELGFGGGVCPNSMDAVSDRDFVIETVFAASLLCVHLSRWAEDLIIYSSGPFGYVQCSDAYATGSSLMPQKKNPDALELIRGKGGRVQGNLMGVMAVLKGTPTTYNKDFQECWELLFDTVDTVHDVVRIATGVLSTLRIKPDRMKAGLSADMLATDLAEYLVRKGVPFRETHHHSGAAVKMAEDRGCTLFDLTVDDLKTIHPLFTDDVAAVWDFNRSAEMRDTEGGTSKRSVLEQVQKMRTYLAAEGQH

SEQ ID NO: 88043 - DNA, 1392 bp, Chlorobium tepidum
  CDS (1)..(1392): transl_table=11
atgtccgatcaatccaatcagaaggagctcttgtggcagagccgtttttcggaaccgtttgaccgggaggcgctgaagttctcctcgtcggtgcatgtggacgggctgctctatcgcgaagacattcaaggctctattgcccatgccaccatgcttggcgagcagggaattatctcgaaagaggaggccgggcaaattgtcaccgggctgaaggcggtcgaaaaggagattgagtcgggcgagctaaccccggtgtgggaggatgaggatattcacacggtgatcgagaaccggctgaaggagctgatcggcccgacggcgggcaagctgcactccgggcgcagccgcaacgaccaggtggcgaccgacacgcgcctctatctgcgccgcaacatcgaccgcatcggcgagttgctcaaggcgatgcaatcgacgctgctcgacaaggcggagcagtacaagcacaccatcatgttcggctacacccacctgcagcgcgcccagccgatctccgcaggccactactacatggcgtggcactcgatgttcgggcgcgacgcccagcgcctcgccgatctgcgcaagcgggccaacatttcgccgctcggcgcggcggctttcgcgggcagcaccctgccgctcgatccggcgcgctcggcggaactgctggagttcgacggtgtcttcaccaacagcatcgatgcggtgagtgaccgcgacctggtgatcgagttcgtttcggcctgctcgatgatcatgatgcacttgtcgcgtttttcggaggatgtaattctctggagctcggcggagttcaactacctgtcgatcagcgacgccttcgcgaccggttcgtcgatcatgccgcagaaaaagaacgccgatatcgccgagctggtgcgcggcaagacgggccgtgtctatggcaacctgatgaaccttctcaccattatgaaagggctgccgctctcctacaaccgcgacatgcaggaggacaagccgcctctgttcgataccgccgaaaccactgcatcgagtctctcggtcttccgccggatgatcgaaaagacctggctgaacgaggagcgcctcgcccgactcaccgccgaagacctgagcctcgccaccgagatcgccgagtacctcgtcaagaagcagattcctttccgcgacgcccaccgcatcaccggcaagatcgtggcgtatgccatcgaacagggcaaaaccctgccgaccatctcgctcgacgagtaccgcactttctctgaagccttcgacgaagggatctacgacgacctcaaacccgacgccagcgtcaactccaagaaaaccgctggcagctgctcgttcaaatcggtcgaagagcagatcgcgcgagcgaaagcggcgcgttga

SEQ ID NO: 88044 - protein, 463 aa, Chlorobium tepidum
MSDQSNQKELLWQSRFSEPFDREALKFSSSVHVDGLLYREDIQGSIAHATMLGEQGIISKEEAGQIVTGLKAVEKEIESGELTPVWEDEDIHTVIENRLKELIGPTAGKLHSGRSRNDQVATDTRLYLRRNIDRIGELLKAMQSTLLDKAEQYKHTIMFGYTHLQRAQPISAGHYYMAWHSMFGRDAQRLADLRKRANISPLGAAAFAGSTLPLDPARSAELLEFDGVFTNSIDAVSDRDLVIEFVSACSMIMMHLSRFSEDVILWSSAEFNYLSISDAFATGSSIMPQKKNADIAELVRGKTGRVYGNLMNLLTIMKGLPLSYNRDMQEDKPPLFDTAETTASSLSVFRRMIEKTWLNEERLARLTAEDLSLATEIAEYLVKKQIPFRDAHRITGKIVAYAIEQGKTLPTISLDEYRTFSEAFDEGIYDDLKPDASVNSKKTAGSCSFKSVEEQIARAKAAR

SEQ ID NO: 88045 - DNA, 1380 bp, Chromobacterium violaceum
  CDS (1)..(1380): transl_table=11
atgcaagactcgcacgcctggtccggccggttttccgagccggtttccgaactcgtcaagcattacaccgcctccatcggcttcgactaccggctggccgaagtggacatcgaaggctcgctcgcccacgccgcgatgctgaaccgatcgggcgtgctcagcgacgccgacctggaagcgatccgacgcggcatggcggacatcctggacgaaatccgcgccggcaagctcgagtggagcgtggacctggaagacgtgcacatgaacatcgagcgccggctgaccgaccgcatcggcgacgccggcaagcggctgcacaccggccgcagccgcaacgaccaggtggccaccgacatccggctgtggctgcgcggcgagatcgacgccaccgtccacctgctggccgggctgcagagcagcctgctggaactggccgagcggcacgccgacaccgtgatgcctggcttcacccatctgcaggtggcgcagccggtgaccttcggccaccacctgctggcctatgtggaaatgctggcgcgcgacgccgaacggatgctggattgccgcaagcgcgtcaaccgcctgcccttgggcgcggcggcgctggccggcaccacctacccgatagaccgccattacaccgcccaactgctgggtttcgacgacgtgtgccacaactcgctggacgcggtgtccgaccgcgacttcgccatcgaattcaccgccgccgccagtctggccatgctccatctgtcgcggctgtcggaagagctgatcctgtggatgagcccgcgcgtcggcttcatcgacatcgccgaccgcttctgcaccggctcgtccatcatgccgcagaagaagaacccggacgtgccggagctggtgcgcggcaagtccggccgcgtcgtcggccacctgatcgcgctgatcacattgatgaaggcccagcccttggcctacaacaaggataatcaggaggacaaggaaccgctgttcgacacggtggacacgctgcagaccacgctgcgcatctacgccgacatgatgcgcggcgtgacggtgaagccggaggcgatgcgcgcggcggtgctgcagggctacgccaccgccaccgacctggcggactacctggtcaagaagggcctgcccttccgcgacagccacgaggtggtggcgctggccgtgcgccatgccgagggcctgggcgtggacctcgccgatctgccgctggccaagctgcgcgaattctcggcgctgatcgaggacgatgtgttcggcgtgctgacgccggagggcagcctggcgcagcgcgaccatgtcggcggcaccgcgccggcgcaggtgagggcgcagatcgcccgccaccgcggccgtctgggctga

SEQ ID NO: 88046 - protein, 459 aa, Chromobacterium violaceum
MQDSHAWSGRFSEPVSELVKHYTASIGFDYRLAEVDIEGSLAHAAMLNRSGVLSDADLEAIRRGMADILDEIRAGKLEWSVDLEDVHMNIERRLTDRIGDAGKRLHTGRSRNDQVATDIRLWLRGEIDATVHLLAGLQSSLLELAERHADTVMPGFTHLQVAQPVTFGHHLLAYVEMLARDAERMLDCRKRVNRLPLGAAALAGTTYPIDRHYTAQLLGFDDVCHNSLDAVSDRDFAIEFTAAASLAMLHLSRLSEELILWMSPRVGFIDIADRFCTGSSIMPQKKNPDVPELVRGKSGRVVGHLIALITLMKAQPLAYNKDNQEDKEPLFDTVDTLQTTLRIYADMMRGVTVKPEAMRAAVLQGYATATDLADYLVKKGLPFRDSHEVVALAVRHAEGLGVDLADLPLAKLREFSALIEDDVFGVLTPEGSLAQRDHVGGTAPAQVRAQIARHRGRLG

SEQ ID NO: 88047 - DNA, 1434 bp, Corynebacterium glutamicum
  CDS (1)..(1434): transl_table=11
atggaacagcacggaaccaatgaaggtgcgctgtggggcggccgcttctccggtggaccctccgaggccatgttcgccttgagtgtctccactcatttcgactgggttttggccccttatgatgtgttggcctccaaggcacacgccaaggttttgcaccaagcagatctactttctgatgaagatctagccaccatgctggctgggcttgatcagctgggcaaggatgtcgccgacggaaccttcggtccgctgccttctgatgaggatgtgcacggcgcgatggaacgcggtctgattgaccgcgttggtcctgaggtgggcggccgtctgcgcgctggtcgttcccgcaacgaccaggtggcaaccctgttccgcatgtgggtccgcgacgcagtgcgcgacatcgcgctgggaacaaccgagcttgtcgacgccctcagcgcccaagctaaggcacatgcaggcgcgatcatgccaggcaagacccacttccaggcagctcagccggtccttctggcacaccagctgctggcacacgcacagcctttgctgcgcgatattgatcgtatccgtgacctggacaagcgtcttgcggtgtctccttacggttccggcgcacttgctggttcctctttgaagctcaaccctgaagcaatcgctgaagaactcggctttgattccgcagcagataactccattgatgccaccagctcccgcgatttcgcatctgaaaccgccttcgtgctggcgcagcttgcagtggatatgtcccgcttggctgaagaaatcatcgcatggtgcaccccagaatttggttacatcaccttgtctgattcctggtccacaggcagctcaatcatgccgcagaagaagaaccctgacgtggcagagctgacccgtggcaagtctggtcgcttgatcggtaacctcaccggtctgctggctaccctgaaggcacagcctttagcgtacaaccgcgacctgcaggaagataaggaaccaatcgtagattccgtggcgcagctcaacctgctgctccctgcaatgactggtttggtttccaccttgaccttcaacaccgagcgcatgcgtgaacttgcaccagcaggtttcacccttgccaccgacttggctgagtggatggtgcgccagggcgttccattccgtgaggcacacgaagcatccggcgcttgcgtgcggatcgcggagtccaggggagtggaccttatcgatctcactgatgaagaactcagtggcgttgatgcacgtctgaccccagaggtacgggaagtgctcaccattgatggtgcagtggcttcccgtgcaacgcgcggtggaaccgcgggcgtgcgggttgcggagcaacgcgcacgtgtcgatgccgcaagtaccgctcacgcggagtgggcacgtgcgggggtacgtcgataa

SEQ ID NO: 88048 - protein, 477 aa, Corynebacterium glutamicum
MEQHGTNEGALWGGRFSGGPSEAMFALSVSTHFDWVLAPYDVLASKAHAKVLHQADLLSDEDLATMLAGLDQLGKDVADGTFGPLPSDEDVHGAMERGLIDRVGPEVGGRLRAGRSRNDQVATLFRMWVRDAVRDIALGTTELVDALSAQAKAHAGAIMPGKTHFQAAQPVLLAHQLLAHAQPLLRDIDRIRDLDKRLAVSPYGSGALAGSSLKLNPEAIAEELGFDSAADNSIDATSSRDFASETAFVLAQLAVDMSRLAEEIIAWCTPEFGYITLSDSWSTGSSIMPQKKNPDVAELTRGKSGRLIGNLTGLLATLKAQPLAYNRDLQEDKEPIVDSVAQLNLLLPAMTGLVSTLTFNTERMRELAPAGFTLATDLAEWMVRQGVPFREAHEASGACVRIAESRGVDLIDLTDEELSGVDARLTPEVREVLTIDGAVASRATRGGTAGVRVAEQRARVDAASTAHAEWARAGVRR

SEQ ID NO: 88049 - DNA, 1389 bp, Dechloromonas aromatica
  CDS (1)..(1389): transl_table=11
atgacttccaacgccaatcaatacacttgggccggccgcttctcggagccggtttccgatctcgtcaaacgttacaccgcctcggtcgatttcgaccagcgcatgtggcgccaggacatccgcggctcgctggcgcacgcccgcatgctggccaagcaaggcatcatcgccgccgccgacctggccgacatcgagcgcggcatggctatcgtcaccgaggaaatcgagtcgggcaaattcgaatggtcgctcgacctcgaagacgtgcacctgaatatcgagaagcgcctgaccgcgctggttggcgatgccggcaagcgcctgcacaccggccgctcgcgcaacgatcaggtcgccaccgacattcgcctctacctgcgtgactcgatcgacgacattctggtgctgatcaaggctttccgttcagccctggttgatctggccgaaaaggaagcggcaacgccgatgcccggcttcacgcacctgcaggtcgcccagccggtcacttttggccaccacatgctggcctacttcgaaatgttcggccgcgacgccgagcgctacgccgactgccgcaagcgcgtcgcccgcctgccgctcggcgccgccgcgctggccggcacgacctacccgatcgaccgcgcctacgttgccgaacagctcggcttcgaaggcgtctgcgaaaactcgctggatgccgtgtcggatcgcgacttcgccatcgaattcaccgccgcctgcgccctgctgatgatgcacatcagtcgcctgtcggaagaactggtcatgtggatgagcccgcgcatcggcttcatccagatcgccgaccgcttctgcaccggctcgtcgatcatgccgcagaagaagaacccggacgtgccggaactggcgcgtggcaagaccggtcgggtctatggccagctgatgagcctgctgaccctgatgaagtcgcagccgctggcctacaacaaggacaatcaggaagacaaggaaccgctgttcgacgccgtagacaccgtcactgacacgctgcgcatctttgccgacatggccggcggcatcaccgtccgcgccgacaacatgaaggccgcactgacccagggcttcgccaccgccaccgacctcgccgactatctggtcaagaagggcctgcctttccgcgatgcccacgaagccgtcggccacgccgtcaaggccgccgagcaaaagggcgtcgacttgccgcaactgacgctggacgaactcaaggccttctgcccacaggtggagagcgacgtattcgccgtgctcaccgtcgaaggctcgctggcttcccgcaaccacattggcggcaccgcgccggagcaggtcagggccgctgttgcgcgcgctcgccagcgcctgagctga

SEQ ID NO: 88050 - protein, 462 aa, Dechloromonas aromatica
MTSNANQYTWAGRFSEPVSDLVKRYTASVDFDQRMWRQDIRGSLAHARMLAKQGIIAAADLADIERGMAIVTEEIESGKFEWSLDLEDVHLNIEKRLTALVGDAGKRLHTGRSRNDQVATDIRLYLRDSIDDILVLIKAFRSALVDLAEKEAATPMPGFTHLQVAQPVTFGHHMLAYFEMFGRDAERYADCRKRVARLPLGAAALAGTTYPIDRAYVAEQLGFEGVCENSLDAVSDRDFAIEFTAACALLMMHISRLSEELVMWMSPRIGFIQIADRFCTGSSIMPQKKNPDVPELARGKTGRVYGQLMSLLTLMKSQPLAYNKDNQEDKEPLFDAVDTVTDTLRIFADMAGGITVRADNMKAALTQGFATATDLADYLVKKGLPFRDAHEAVGHAVKAAEQKGVDLPQLTLDELKAFCPQVESDVFAVLTVEGSLASRNHIGGTAPEQVRAAVARARQRLS

SEQ ID NO: 88051 - DNA, 1395 bp, Desulfotalea psychrophila
  CDS (1)..(1395): transl_table=11
atgacagagcaaaaatcaaagaagttgtggggtggacgttttagcgaagcaatggcagcctcggtggaaaaattcagcgagtccatcagctatgatgtccgtttgtacaagtatgatattgccggctctaaggcccatgcgactatgctcagcagtcagggaattatttccccggaagaacttgagcagatcattgcaggactttccagtattgaggcagatattgaggcaggagtcttcgaatttaagaccgagtatgaagatgttcatatgaacattgagcaggctctggtggatcgcattggcgctgctggctctcgtttgcatgcagctcgtagccgtaatgatcagatcgccctcgacttcaagatgtatcttcgtgatcaatgtgaccatctggtagagcttctcgatggtgcctgtcgtgcctttactgtggttggtcgtaagtatcttggcgatattatgcctggttatacccatactcagcgtgctcagccggtactcatcacccaccatatgctggcctattacgagatgttcagacgtgatcgtgatcgtatcctcgactgccgtaaacgtctcaatctctctccccttggctgtgctgccatggcgggaaccggtctgcccattaatcgtgagcaggtggctaaggctctgggctttgccggtgttaccgcaaactccatggatacctctgcggatcgcgattatgcaattgagctgacctcctgccttactatgattcagctccacctctcccgtcttgccgaagagttggtgacctggtctacctctgagtataagtttgtggatatttccgatagtttctgtaccggatcttccattatgccccagaagaaaaaccctgatattgccgagcttatccgcggtaagtctggccgggttgtgggtagcctgatcagccttatcaccatgatgaagggattgccgctcacctataatcgtgatcagcaggaagataaggaaccggtatttgatgctattgataccgtatctgcctccctttctatcaccgccgagatgatggcgcatatgaagtttaataccgctcgttgcgctgaagccaccgagaccggttttatcacggcaacggatcttgccgactatctggtaatgaaggatgtgccatttcgtcaggcccatcatatcgtcggtagcgcagttgccgcctgtattgccaagggttgcgagcttcccgatcttacccttacggaaatgcaggagttctctccggttattgaaagcgacgttttcgccgtgcttaccgcagagggttctgtcaatagtcgtgtctccaccggtggaacaggccttgtccgggtgacagaagcgctcacccttgctgaaaaatgtgtggggatagcctaa

SEQ ID NO: 88052 - protein, 464 aa, Desulfotalea psychrophila
MTEQKSKKLWGGRFSEAMAASVEKFSESISYDVRLYKYDIAGSKAHATMLSSQGIISPEELEQIIAGLSSIEADIEAGVFEFKTEYEDVHMNIEQALVDRIGAAGSRLHAARSRNDQIALDFKMYLRDQCDHLVELLDGACRAFTVVGRKYLGDIMPGYTHTQRAQPVLITHHMLAYYEMFRRDRDRILDCRKRLNLSPLGCAAMAGTGLPINREQVAKALGFAGVTANSMDTSADRDYAIELTSCLTMIQLHLSRLAEELVTWSTSEYKFVDISDSFCTGSSIMPQKKNPDIAELIRGKSGRVVGSLISLITMMKGLPLTYNRDQQEDKEPVFDAIDTVSASLSITAEMMAHMKFNTARCAEATETGFITATDLADYLVMKDVPFRQAHHIVGSAVAACIAKGCELPDLTLTEMQEFSPVIESDVFAVLTAEGSVNSRVSTGGTGLVRVTEALTLAEKCVGIA

SEQ ID NO: 88053 - DNA, 1383 bp, Desulfovibrio vulgaris
  CDS (1)..(1383): transl_table=11
atggccgaaaagaagatgtggggcggacgcttcaagcagggtaccgccaccctcgtcgaggagtacacggagtcggtctcgtatgaccgggccctctacgcgcaggacatcgcgggctccatggcacatgcgcggatgctcgcccgtcagggggtgctcaccgccgaagaggcggccatcatcgtggatggcctcgccaccgtgcgctctgaaatcgaagcgggcagcttcgtctggcgtcgcgagttcgaagacgtccatatgaacatcgagaaccgcctgaccgaactcgtcggcgacgtgggcaagaaactgcacacgggacgcagccgcaacgaccaggtcgcgctcgacttcaggctcttcgtctccgacagggtgcgcgtatggcgcgaactcgggcgagacctcgtgggcgtcatcgtcgaccaggcacgccagcacaccgccaccctgctgcccggctgcacccacatgcagcccgcacagcccgtgagccttgcacagcacctgctggcctacgcgtggatgctgcgccgcgacatcgaccggcttgaagactgcgacaagcgcgcccgcgtctgccctctgggggcggcggcgctcgccggaacgacctatccgctcgaccccgcatccgtcgccgacgaactgggcatgtacggcaccttccgcaacagcatggatgccgtctctgaccgcgacttcgttctggaggccctgttcgacgggtcggtgatcatggcgcacctctcgcgcctgtgcgaagagttcatcctgtgggccaatccggcattcggctacatcttcctgcctgacgcgtacgccacgggctcgtccatcatgccccagaagaagaaccccgacgtggccgaactcatgcgcggcaagacggggcgggtctacggtgcactcaccaccatgctcaccacggtcaagggacttcccatgacctacaaccgcgaccttcaggaagacaaggaaccgttcatcgacgccgaccgtaccgtcagcgcgtcgcttgaaatcatggccggaatgctgcgggaagtgcgcttcaacaccgcacggatgcgcacggccctgcgttccggcttcctgaacgccaccgaacttgccgactacctcgtgggcaagggcatccccttccgtgaggcacaccaccttaccggggctgccgtggcgcttgccgaagagaagggtgtgaccctcgaagagcttccgctggaagactaccggggcatctgcgaccgcatcgacgaggacgtgtaccccatcctcgaacctgaagccgccgtctcgcgtcgcgagacccccggcggtaccgggccgcgttcggtggcagcccagatcgccgaactcgacagctggctcggccgctag

SEQ ID NO: 88054 - protein, 460 aa, Desulfovibrio vulgaris
MAEKKMWGGRFKQGTATLVEEYTESVSYDRALYAQDIAGSMAHARMLARQGVLTAEEAAIIVDGLATVRSEIEAGSFVWRREFEDVHMNIENRLTELVGDVGKKLHTGRSRNDQVALDFRLFVSDRVRVWRELGRDLVGVIVDQARQHTATLLPGCTHMQPAQPVSLAQHLLAYAWMLRRDIDRLEDCDKRARVCPLGAAALAGTTYPLDPASVADELGMYGTFRNSMDAVSDRDFVLEALFDGSVIMAHLSRLCEEFILWANPAFGYIFLPDAYATGSSIMPQKKNPDVAELMRGKTGRVYGALTTMLTTVKGLPMTYNRDLQEDKEPFIDADRTVSASLEIMAGMLREVRFNTARMRTALRSGFLNATELADYLVGKGIPFREAHHLTGAAVALAEEKGVTLEELPLEDYRGICDRIDEDVYPILEPEAAVSRRETPGGTGPRSVAAQIAELDSWLGR

SEQ ID NO: 88055 - DNA, 1374 bp, Escherichia coli
  CDS (1)..(1374): transl_table=11
atggcactttggggcgggcgttttacccaggcagcagatcaacggttcaaacaattcaacgactcactgcgctttgattaccgtctggcggagcaggatattgttggctctgtggcctggtccaaagccctggtcacggtaggcgtgttaaccgcagaagagcaggcgcaactggaagaggcgctgaacgtgttgctggaagatgttcgcgccaggccacaacaaatccttgaaagcgacgccgaagatatccatagctgggtggaaggcaaactgatcgacaaagtgggccagttaggcaaaaagctgcataccgggcgtagccgtaatgatcaggtagcgactgacctgaaactgtggtgcaaagataccgttagcgagttactgacggctaaccggcagctgcaatcggcgctggtggaaaccgcacaaaacaatcaggacgcggtaatgccaggttacactcacctgcaacgcgcccagccggtgacgttcgcgcactggtgcctggcctatgttgagatgctggcgcgtgatgaaagccgtttgcaggatgcgcttaagcgtctggatgtcagcccgctaggctgtggcgcgctggcgggaacggcctatgaaatcgaccgtgaacagttagcaggctggctgggctttgcttcggcgacccgtaacagtctcgacagcgtttctgaccgtgaccatgtgttggaactgctttctgctgccgctatcggcatggtgcatctgtcgcgttttgctgaagatctgattttctttaacaccggcgaagcggggtttgtggagctttctgaccgcgtgacttccggttcatcattaatgccgcagaagaaaaacccggatgcgctggagctgattcgcggtaaatgcggtcgggtgcagggggcgttaaccggcatgatgatgacgctgaaaggtttgccgctggcttacaacaaagatatgcaggaagacaaagaaggtctgttcgacgcgctcgatacctggctggactgcctgcatatggcggcgctggtgctggacggcattcaggtgaaacgtccacgttgccaggaagcggctcagcagggttacgccaacgccaccgaactggcggattatctggtggcgaaaggcgtaccgttccgcgaggcgcaccatattgttggtgaagcggtggtggaagccattcgtcagggcaaaccgctggaagatctgccgctcagtgagttgcagaaattcagtcaggtgattgacgaagatgtctatccgattctgtcgctgcaatcgtgcctcgacaagcgtgcggcaaaaggcggcgtctcaccgcagcaggtggcgcaggcgattgcttttgcgcaggctcggttggggtaa

SEQ ID NO: 88056 - protein, 457 aa, Escherichia coli
MALWGGRFTQAADQRFKQFNDSLRFDYRLAEQDIVGSVAWSKALVTVGVLTAEEQAQLEEALNVLLEDVRARPQQILESDAEDIHSWVEGKLIDKVGQLGKKLHTGRSRNDQVATDLKLWCKDTVSELLTANRQLQSALVETAQNNQDAVMPGYTHLQRAQPVTFAHWCLAYVEMLARDESRLQDALKRLDVSPLGCGALAGTAYEIDREQLAGWLGFASATRNSLDSVSDRDHVLELLSAAAIGMVHLSRFAEDLIFFNTGEAGFVELSDRVTSGSSLMPQKKNPDALELIRGKCGRVQGALTGMMMTLKGLPLAYNKDMQEDKEGLFDALDTWLDCLHMAALVLDGIQVKRPRCQEAAQQGYANATELADYLVAKGVPFREAHHIVGEAVVEAIRQGKPLEDLPLSELQKFSQVIDEDVYPILSLQSCLDKRAAKGGVSPQQVAQAIAFAQARLG

SEQ ID NO: 88057 - DNA, 1416 bp, Ehrlichia canis
  CDS (1)..(1416): transl_table=11
atgaaaaatcctttatggggaggaagatttactacatcctctagtgatattatgaaaaagattaatgaatcaatatcatttgacaaaacattatacgaagaagatatagcaggatcaatagcacattgcaaaatgctagttaatcaaagaatcattagtaaatatgaaggtcaacttataattcatggattagaggtgatacaaaatcaaatttcatctggtactttcgagtttagtactgatctagaagacatacacatgaatatagaacataatttaaagaaaatggtagggaatattgcagggaaattgcatactgcaagatcacgtaacgatcaagttgcaacagacttcaaactttggatacgtaagtcaatagtaaaaatagaacactacttacatgaattacaagacaccatcattaatcttgctgaatcccattacaataccatcatgccaggatttacacatctacaaattgctcaacctgtaacattaggtcaccacttaatggcatattttgaaatgttcaaaagagatttctcacgctggcaagatttatacaaacgcatgaatcaatgtcctttaggatctgcagcattagcaggaacatcttttccaatagatagacacttcgttgcacaagaactaggattctacagtccaacagaaaattctatagatgcagtatcagatagagactatgctattgaatttctatcaaatgcttcaatttgtataatgcatttatcaagattagcagaagagatcatactttggtgcagttataactttaagttcatcacactttccgataatattacaactggcagctcaataatgccacaaaagaagaacccagatgcagcagagcttatcagaggaaaaactggaagaatttttgcatcattaaatcaaatattagtagtcatgaaaggattaccgttagcatacagcaaagatatgcaagaagataaggaagcattatttgatgctacaaacaatttaatgctatgcatagaagcaatgaacaacatgctaagtaacataataattaataaaaacaacatgctaaaagcagcagaacatgattattcaacagcaacagatcttgcagactggttagtaaaaaatcttaatctttcatttagagaggcccatgaaacgactggtcaaatagttaaacttgctgaacataatcaatgcaaattacatgaattaacattagaacaaataaaaacaattattccttccataaatgacactgtattttcagtattatcagtagaaaattcagttgctagcagaaccagttatggaggtactgcacctactaatgtaatagaagcaataaagaaaggtaaagcataccttagcaatattaaattctcacaaacagacaaaaataatatataa

SEQ ID NO: 88058 - protein, 471 aa, Ehrlichia canis
MKNPLWGGRFTTSSSDIMKKINESISFDKTLYEEDIAGSIAHCKMLVNQRIISKYEGQLIIHGLEVIQNQISSGTFEFSTDLEDIHMNIEHNLKKMVGNIAGKLHTARSRNDQVATDFKLWIRKSIVKIEHYLHELQDTIINLAESHYNTIMPGFTHLQIAQPVTLGHHLMAYFEMFKRDFSRWQDLYKRMNQCPLGSAALAGTSFPIDRHFVAQELGFYSPTENSIDAVSDRDYAIEFLSNASICIMHLSRLAEEIILWCSYNFKFITLSDNITTGSSIMPQKKNPDAAELIRGKTGRIFASLNQILVVMKGLPLAYSKDMQEDKEALFDATNNLMLCIEAMNNMLSNIIINKNNMLKAAEHDYSTATDLADWLVKNLNLSFREAHETTGQIVKLAEHNQCKLHELTLEQIKTIIPSINDTVFSVLSVENSVASRTSYGGTAPTNVIEAIKKGKAYLSNIKFSQTDKNNI

SEQ ID NO: 88059 - DNA, 1377 bp, Geobacter sulfurreducens
  CDS (1)..(1377): transl_table=11
atggcacacgaaaaactgtggggcggccgcttttccgagccgaccgaccaattcgtcgaggaattcaccgcttccatcgacttcgacaagcggctctaccaccaggacatccggggctccatcgcccacgcgcggatgctgggcaagcaaggcatcctccccatggctgaggtcgaaaagatcgtggcggggctccaggaggtccttgcccggatcgaggccgggaaatttgacttctccgtggccctggaagacatccacatgaacatcgaggcgcgtctcacggagaagatcggcgaggccggcaagcggctccacaccggccgttcccgcaacgaccaggttgccctcgacatccgcctctacctgcgggacgagatcgtggagatctccgcctacctggatatgttggtggactccctcatttaccaggcggaagccaacctgggcgtcatcatgcccggctacacccacctgcagaccgcccagcccatcctcttctcccaccacatgatggcctacgtggagatgttcaccagggacaaggggcggatggaggactgcctgcggcggatgaacgtccttccgctcggcgccggcgccctggccgggaccaccttccccatcgaccgggaacacgtggccgagctgctggacttccccggcgtgacccgcaattccctcgattcggtatcggaccgggacttcgccctggagttcatgggggcctcctcgatcctgatgatgcacctctcccgtttctccgaggagctgatcctctggtccaccagcgagttcaagttcgtggagctgaccgattccttctgcaccggctcctcgatcatgccccagaagaagaacccggacgtgccggaactggtccgcggcaaaaccggccgggtctacggcaacctcatggcgctcctcacggtcatgaaggccctgcccctggcttacaacaaggacatgcaggaagacaaggagcctctcttcgacaccatcgacaccgtgaaggggagcctcaagattttcgccgacatggtgcgggagatgcggatcaacgccgggaacatgcgggccgcggccgccaagggtttctccaccgccaccgacgtggccgactacctggtccgccaggggatgcccttccgcgacgcccacgaggtggtggggaagaccgtggcctactgtatcgccaacggcaaggatctcccggatctgaccatggatgaatggcaggggttctcggacaagatcggcgaggacatcttcgacgcgattaccctggaagcgtcggtcaacgcccgcgtcgccaccggcggcacggccctggagcgcgtcaaggcggagatcgagcgggccaaggtggggagatag

SEQ ID NO: 88060 - protein, 458 aa, Geobacter sulfurreducens
MAHEKLWGGRFSEPTDQFVEEFTASIDFDKRLYHQDIRGSIAHARMLGKQGILPMAEVEKIVAGLQEVLARIEAGKFDFSVALEDIHMNIEARLTEKIGEAGKRLHTGRSRNDQVALDIRLYLRDEIVEISAYLDMLVDSLIYQAEANLGVIMPGYTHLQTAQPILFSHHMMAYVEMFTRDKGRMEDCLRRMNVLPLGAGALAGTTFPIDREHVAELLDFPGVTRNSLDSVSDRDFALEFMGASSILMMHLSRFSEELILWSTSEFKFVELTDSFCTGSSIMPQKKNPDVPELVRGKTGRVYGNLMALLTVMKALPLAYNKDMQEDKEPLFDTIDTVKGSLKIFADMVREMRINAGNMRAAAAKGFSTATDVADYLVRQGMPFRDAHEVVGKTVAYCIANGKDLPDLTMDEWQGFSDKIGEDIFDAITLEASVNARVATGGTALERVKAEIERAKVGR

SEQ ID NO: 88061 - DNA, 1407 bp, Gloeobacter violaceus
  CDS (1)..(1407): transl_table=11
atgaccgccaccccctggagcgcccgctttgaagcgggcctgcacccgaccgtcgccgcctttaatgcgagcatcggcttcgacatcgagcttatcgagtacgacctgagcggctcggcggcccacgcccggatgctggcgcatagcggcatcctcagcgaagcggaggctgaggctctagtcggtggtcttgagcagatccgctcggagtggcgcaccggtcagttccgcccgggtcttgaacaggaggatgtgcactatgccgtcgagcggcggctggtggaactggtgggcgaggtgggcaagaaactgcacacggcccgttcgcgcaacgatcaggtgggtaccgacctcaggctgtggctgcgcgagcgtatcgaccggattgtcggccgacttggcgtatttcagcgcaccctgctggatctggccgcttgccacgtcgagacgctcattcccggttacacccacctgcagcgggcacaaccggtgagcctcgcccaccacctgcttgcctacatcgagatgggcgagcgcgacatcgagcggctgacgcagatccgcgagcgcgtcaacgtctgtccgctcggttccggggcgctcgccggaacggtcctacccatcgaccggcactacaccgcccggcttctgggttttgtcgccctcagcgaaaattcgctcgatgcggtgagcgaccgcgactatgtggtcgaatttctggcggcagcgagcctgattgccgtgcacctgagccggctttcagaagaaatcatcctctgggcttcgcaagaatttcgctttcttaccctcaccgatcgctgtgccaccggctccagcctgatgccccagaagaaaaatccggacgtgccggaactggtgcgcggtaagacgggccgcatcttcggccacctgatggggatgctcaccgtgctcaaggggttgccgctcgcctacaacaaagacctgcaggaggacaaagagggcatcttcgacgcggcgcgctcggtcgaaagttctctagaagcgatgacgattctgatggccgaaggcatcgtctttcagcccgaccggcttgccggggctgtcgaagaagatttctccaacgccaccgacgccgccgactatctggtgcgcaagggggtaccctttcgggaggcctacggcgtcatcggcgcagtggtcaagcactgcttaaaatcaaatgcactgctgcgggatctgcccattgcccagtggcggcacttccatccggccttcgacgatgatctctacgcggctatcacccccagaacggtggtggccgcccgcaacagctacggcggcaccggcttcgagcaggtgcgcgccgccctcgggcgcgccgaggcccgctggcaaggacatttcccctccgcttcggcccattaa

SEQ ID NO: 88062 - protein, 468 aa, Gloeobacter violaceus
MTATPWSARFEAGLHPTVAAFNASIGFDIELIEYDLSGSAAHARMLAHSGILSEAEAEALVGGLEQIRSEWRTGQFRPGLEQEDVHYAVERRLVELVGEVGKKLHTARSRNDQVGTDLRLWLRERIDRIVGRLGVFQRTLLDLAACHVETLIPGYTHLQRAQPVSLAHHLLAYIEMGERDIERLTQIRERVNVCPLGSGALAGTVLPIDRHYTARLLGFVALSENSLDAVSDRDYVVEFLAAASLIAVHLSRLSEEIILWASQEFRFLTLTDRCATGSSLMPQKKNPDVPELVRGKTGRIFGHLMGMLTVLKGLPLAYNKDLQEDKEGIFDAARSVESSLEAMTILMAEGIVFQPDRLAGAVEEDFSNATDAADYLVRKGVPFREAYGVIGAVVKHCLKSNALLRDLPIAQWRHFHPAFDDDLYAAITPRTVVAARNSYGGTGFEQVRAALGRAEARWQGHFPSASAH

SEQ ID NO: 88063 - DNA, 1377 bp, Haemophilus ducreyi
  CDS (1)..(1377): transl_table=11
atggcactttggggtgggcgttttcagcaagaagcagatgcaaaatttaaatttttcaatgattcattacgtttcgactatcgtttagcgttacaagatattgatggctcaattggttgggccaaagccattacggcagttggcattttaactgaagcagaatgtgccaaattagtggatgccttaaaaacattacgcgcggaaattgaacccaatattgcaattattctacgtgatgcagctgaagacattcatagttgggtagaatctaaattaattgaaaaagtcggtgatctaggtaagaaattacatactggcagaagccgaaatgatcaagtggcattagatatgaaaatgtggtgtaaagtacaagtaatcgttttacagcaatgtatccgtaacttacagcacaaattagtggcaacggctgaagataatcaacaaacaataatgcccggttatacccatttacaacgagcacagccgattagttttgcacattggtgtatggcgtactatgagatgttagaacgtgattacacccgcttaacagatgcttatcagcgtatgcatacctgtccattaggttgtggtgcattggcgggaagtgcttatcctattgatcgggatcagttagcacaagatcttcattttgagattgctacccgtaatagcttggattcagtgtcagatcgtgatcacctgttagagttacttgccagtgcatcaatcagtatggtgcatttgtcacgttttgcagaagatttgattttctttaatagtggcgaatctgcttttttggaattatctgatcgtgttacgtccggttcttctttaatgccacaaaagaaaaacccagatgcttgcgaattaattagaggcaaatcagggcgcgtatttggggcattgtctggcttattaaccacgctaaaaggcttgccgttagcctataataaagatatgcaagaagataaagaagggatttttgatgcggtcgaaacttggcaggcctgtttagagatggctactttagttttagaagatattaatgttaatgttgtgcgtacgagtgaggctgcccaacagggctattctaatgcaaccgaattagcggattatttagtggctaagggtattccatttcgtgaagcgcatcatattgttggtgaaacagttgtttatgcaattcaacaacgcaaacccttggaagcattatctgtaacagaatttaaacaatttcattcagttattgatcaagatgtttatgccattctttctttaccttcttgtttggcaaaacgcagtgctaaaggcggtgttaacccaagccgtgtgaaagaagcgattgaagtagcgaagcaacatttagcaagttaa

SEQ ID NO: 88064 - protein, 458 aa, Haemophilus ducreyi
MALWGGRFQQEADAKFKFFNDSLRFDYRLALQDIDGSIGWAKAITAVGILTEAECAKLVDALKTLRAEIEPNIAIILRDAAEDIHSWVESKLIEKVGDLGKKLHTGRSRNDQVALDMKMWCKVQVIVLQQCIRNLQHKLVATAEDNQQTIMPGYTHLQRAQPISFAHWCMAYYEMLERDYTRLTDAYQRMHTCPLGCGALAGSAYPIDRDQLAQDLHFEIATRNSLDSVSDRDHLLELLASASISMVHLSRFAEDLIFFNSGESAFLELSDRVTSGSSLMPQKKNPDACELIRGKSGRVFGALSGLLTTLKGLPLAYNKDMQEDKEGIFDAVETWQACLEMATLVLEDINVNVVRTSEAAQQGYSNATELADYLVAKGIPFREAHHIVGETVVYAIQQRKPLEALSVTEFKQFHSVIDQDVYAILSLPSCLAKRSAKGGVNPSRVKEAIEVAKQHLAS

SEQ ID NO: 88065 - DNA, 1419 bp, Helicobacter hepaticus
  CDS (1)..(1419): transl_table=11
atggcaaaattatggggaggacgctttgaattagattcaagcgcgcttttagaggaatttaacgcttcaattttctttgataagcagctatggcaagaagatataaaaggttcaaaagctcacgcaaaaatgcttcataaaattggcgttttgagtgaggaagaaacacaagaaattatcaatggacttgaaattattgcacagcgcattagtagaggtgagtttgtatttaatgcaagtgatgaagatatacatatggcaatagaatctgctcttactgcacttattggtgatgtaggtaaaaagcttcatactgcgcgtagccgtaatgaccaagtggcacttgattttaggttatatgtgttaaaaagcaataaggagattgttaatttgcttttagagcttatggcatctatccttgcaatagcaaaagtgcatactagcacgattatgccgggtatgacgcatttacaacacgcacaaccgattaattttggttttgctcttgtagcgtgggcgtgtaattttaaacgagatgtggaacgattattgagtgattatacgcgcaataataaatgtccgcttggtagtggtgcattagcaggcacaccttatggcaatgatagaatcttccttacccaagagttagggtttgacgaacctacgcttaatgcaatggattcagtaagtgatagagattttgcccttgatatgctttattccctttctatgataatgatgcacatttctcgtgtggcagaggagcttgtgctgtggagtagctcggaatttaaatttatctctttaagtgatgaatatgctacgggaagctctataatgccacaaaaaaagaatcctgatgtgcctgaacttttgcgcggaaagagtgggcgcgtgtatggggagcttatgggactgctttgtgtaatgaaaggattaccctttgcttataataaagatacgcaagaggataaagagggcgtgtttgatgcacttaaaaatgtggggctttgccttagaatcctcaaagaatgtcttaaaactatgagtattcaccctgaaaatatgtataaaatggcgaaaattggacatttgagtgctactgatttggcagattttttagtgcgtgagtgtggtgtggcattccgtgatgcacatcatatcaccgggcaagtcgtagcgtatgcagagagcaaaggtgtagatataagcgatttatccgaaaaagagattatgggtgtagattctcggattaaacaaggtgtaaaagctgtgctgtgtttagagtattctatgaatgcacgtaatactcttggtggcacagcagtaacacaaacttgtcatcaaattgaggtgcttgaatcttttgtgcgtgagcaaatggcgtgtttgcaagtaggaaggagtaaaaatgagtga

SEQ ID NO: 88066 - protein, 472 aa, Helicobacter hepaticus
MAKLWGGRFELDSSALLEEFNASIFFDKQLWQEDIKGSKAHAKMLHKIGVLSEEETQEIINGLEIIAQRISRGEFVFNASDEDIHMAIESALTALIGDVGKKLHTARSRNDQVALDFRLYVLKSNKEIVNLLLELMASILAIAKVHTSTIMPGMTHLQHAQPINFGFALVAWACNFKRDVERLLSDYTRNNKCPLGSGALAGTPYGNDRIFLTQELGFDEPTLNAMDSVSDRDFALDMLYSLSMIMMHISRVAEELVLWSSSEFKFISLSDEYATGSSIMPQKKNPDVPELLRGKSGRVYGELMGLLCVMKGLPFAYNKDTQEDKEGVFDALKNVGLCLRILKECLKTMSIHPENMYKMAKIGHLSATDLADFLVRECGVAFRDAHHITGQVVAYAESKGVDISDLSEKEIMGVDSRIKQGVKAVLCLEYSMNARNTLGGTAVTQTCHQIEVLESFVREQMACLQVGRSKNE

SEQ ID NO: 88067 - DNA, 1404 bp, Lactobacillus plantarum
  CDS (1)..(1404): transl_table=11
atgagtacccagaagctatggggtggccggtttaccgaaacgggtgctaagtatgttgatgactttggggcatcaattagctttgaccagttgcttgccgcagaagatattgctggttcactggcacacgttaaaatgttgaagaaaactggtattttgcccgccgctgatgttgatcaaattgttgctggtttggaaaccttggctgagcgtcaaaaacaaggtgagttggaattttcaacggtcaacgaagacattcatatgaatattgagtcattattgaccgaagagattgggccggtcgctgggaagttgcacacggcccggtcgcggaatgaccaagttgccacggatttccacttgtacttgaagcatcaattaccactaatattggaccggctacatgaactggaaacagtattggtcgataaagcgagtgaaaacgtggagacggtcatgccggggtacacgcatttgcaacacgcccaacccatctcgtacgcgcactacctgttagcttattaccaaatgttcaagcgggacatggaacgcttcgagtttaacctgaagcataccgatatttcgccattgggagccgctgcacttgctggaacgacttttccaatcgaccgggaatatagtgcgaaactattaggattcagtgaagtctatcataatagtttggatgccgtttctgaccgggacttcgtgcttgagtttctcagcaatgcttcgatcctgatgatgcatctctcacggttttgtgaagaaattgtcagctggagcagttatgaattcaagtacatcagtttgagcgatcagttttcaacgggtagttcgattatgccgcaaaagaagaaccctgacatggccgaattgattcggggcaagtccggccgggtttacggcaacttgatgggattgctaactgtcatgaaagggattccgctcgcttacaataaggatctgcaagaagacaaagaaggggcgtttgatacggtcacgaccgtgttaacgagtctccacgtcttcaccggcatgttggcaacgctgaccgttaatgaagatcggatggctgatgccacgactaacgatttctcaaatgcgaccgaactagccgattaccttgcaaacaaaggaatcccatttcgggaggcccatgccattgtggggaagctcgtcttggatggcttgaaaaaacagcggccgttgcaggatattccactcaaagaatatcagtcaatctcaccgctgatccaagaagatgtctaccatgatttgaacgcaaaagttgcggtggaacggcggcattcgctaggtggtactggttttgatcagattagacaagaattgcaacgggcacaaacgcaattgtcagcctatcaatctgaaaccactgattaa

SEQ ID NO: 88068 - protein, 467 aa, Lactobacillus plantarum
MSTQKLWGGRFTETGAKYVDDFGASISFDQLLAAEDIAGSLAHVKMLKKTGILPAADVDQIVAGLETLAERQKQGELEFSTVNEDIHMNIESLLTEEIGPVAGKLHTARSRNDQVATDFHLYLKHQLPLILDRLHELETVLVDKASENVETVMPGYTHLQHAQPISYAHYLLAYYQMFKRDMERFEFNLKHTDISPLGAAALAGTTFPIDREYSAKLLGFSEVYHNSLDAVSDRDFVLEFLSNASILMMHLSRFCEEIVSWSSYEFKYISLSDQFSTGSSIMPQKKNPDMAELIRGKSGRVYGNLMGLLTVMKGIPLAYNKDLQEDKEGAFDTVTTVLTSLHVFTGMLATLTVNEDRMADATTNDFSNATELADYLANKGIPFREAHAIVGKLVLDGLKKQRPLQDIPLKEYQSISPLIQEDVYHDLNAKVAVERRHSLGGTGFDQIRQELQRAQTQLSAYQSETTD

SEQ ID NO: 88069 - DNA, 1371 bp, Listeria innocua
  CDS (1)..(1371): transl_table=11
atggaaaaactatggggcggacgttttcaagggaaaagtgaagcatggattgatgactttggtgcttcgatttcttttgatcaaaaaatggcaaaagaagacttggcgggaagcttggcacatgtcgcaatgctagcaaaatgtggtattatttctgattctgaggcgagtgaaattacagctgggctaaaaatcctccaagaaaaattagcgcttggggaactggaatttagtactgtaaacgaagatattcatttaaatatcgaaaaactgttacacgaggaaatcgggcctgtcgcgggaaaacttcatacggcgcgtagtcggaatgaccaagttgcaacagacatgcatttgtatttaaaagaagcagtcgcagaaattattcaatcgttaaaacatttgcgcgcggtgcttgtccaaaaagcggaggcgaacgtcgaaacgattatgcctggctatacacacttgcaacacgcccaacccatctcttttgcgcatcatttattagcttattttggtatgtttacacgtgatttagagcgtttagaagaaagcgtcaaacggattgatatttcgccacttgggtctgcggcgctcgctggaacgacttttccaattgatcgggcctatagcgctgaacttcttggtttttccgctgtttatgaaaatagcttagacggcgtgagcgatcgtgattttattatcgagtttcttagtaacagttctattttaatgatgcatttatcgcgtttttgtgaagaattgatactttggacgagccatgaatttcaatttgtggaattaacggacgctttttcaacaggaagttcgattatgccacaaaagaaaaatcctgatatggccgaattaattcgtgggaaaacgggtcgtgtttacggaaaccttttcggcatgttaacagttttaaaggggctgccgctcgcttataataaagatttacaagaagataaagaaggcatgtttgatacgcttgagacggttcatacaagcttagatatattcgcaggaatgattgaaacgatgaaggtcaatgcagatataatggaagaatcgacgcaaaaagatttttccaatgcgaccgaactagcggattatctcgcgaaaaaaggcgttccatttagagaagcgcatgagattgttgggaaattggtgcttgaatgtacgcaaaatgggatttatttgcaagacgtcgcatttagccactaccaagaaatccatccgcttattgaggaagacatttatactgttcttgcttcaaaaacagcggttcaaaagagaaattcatatggcggtacggggtttgatcaaatccacgttgcactcgccaatgcgaaaaaaacattataa

SEQ ID NO: 88070 - protein, 456 aa, Listeria innocua
MEKLWGGRFQGKSEAWIDDFGASISFDQKMAKEDLAGSLAHVAMLAKCGIISDSEASEITAGLKILQEKLALGELEFSTVNEDIHLNIEKLLHEEIGPVAGKLHTARSRNDQVATDMHLYLKEAVAEIIQSLKHLRAVLVQKAEANVETIMPGYTHLQHAQPISFAHHLLAYFGMFTRDLERLEESVKRIDISPLGSAALAGTTFPIDRAYSAELLGFSAVYENSLDGVSDRDFIIEFLSNSSILMMHLSRFCEELILWTSHEFQFVELTDAFSTGSSIMPQKKNPDMAELIRGKTGRVYGNLFGMLTVLKGLPLAYNKDLQEDKEGMFDTLETVHTSLDIFAGMIETMKVNADIMEESTQKDFSNATELADYLAKKGVPFREAHEIVGKLVLECTQNGIYLQDVAFSHYQEIHPLIEEDIYTVLASKTAVQKRNSYGGTGFDQIHVALANAKKTL

SEQ ID NO: 88071 - DNA, 1383 bp, Mannheimia succiniciproducens
  CDS (1)..(1383): transl_table=11
atggcactttggggtggacgttttacacaagcggcggatcagcgttttaaagattttaacgattcgttgcgttttgattaccgtcttgcggaacaggatatcgaaggttcggtaggctggtcaaaagctttagttagcgtaggcgtgttaactacggacgaacaacaacaattggaacgggctttaaacgaactgttaattgaagtacgttcgaatccgcaggcaattttgcaggatgatgcggaagatatccacagctgggttgaaagtaagcttatcgacaaagtgggcaatctcggcaaaaaattgcatacgggtcgtagccgtaacgaccaagtggcgcttgatattaaaatgtggtgtaaagcgcaggtaaccgaattgcaatatgccgtacgtgatttacaggcaaaattagtggaaaccgccgagaacaatcaacatgcggtaatgcccggttatactcacttgcaacgagcacaacctattagttttgcccattggtgtatggcttatgtggaaatgttagagcgtgactattcccgccttgccgatgcttataatcgcatggattcatgcccgttaggcagcggtgcgttagcgggaacggcgtacccggtagatcgcgaacaattagccaaagacttaggctttgcttttgccacccggaacagcttagacagcgtatcagatcgggaccatatcatcgaattgctttctaccgcttcactaagtatggttcatctttcccgttttgccgaagatatgattatcttcaatagcggtgaggcggattttgttgaattatccgatcgcgttacttccggttcgtctttaatgccgcaaaagaaaaaccctgacgcctgcgaattaattagaggcaaagccggtcgggttatcggctcgctaacaggtatgatggttaccgtgaaaggtttgccgcttgcctataacaaagatatgcaggaagataaagaaggcattttcgatgcgttagacacatggcacgactgcttaaccatggcggcatttgtgctggaagatattcgcgttaatgttgagcgcactcgcgaagccgctctgaaaggttattccaatgcaacggaactggccgattacctggtggcaaaaggcgtaccgttccgtgattctcaccatattgtaggagaaaccgtcgtttatgccattaaagttcacaaagggctggaagacctgagtattgaagaattccgccaattcagtgatgtggtaggcgaagacgtttacccgattctttccttgcaatcgtgcctggataaacgaagcgcaaaaggcggcgtctcaccgttacgcgtagcggaagccattgcggacgcaaaagcgcgcattgcagcaaagaaataa

SEQ ID NO: 88072 - protein, 460 aa, Mannheimia succiniciproducens
MALWGGRFTQAADQRFKDFNDSLRFDYRLAEQDIEGSVGWSKALVSVGVLTTDEQQQLERALNELLIEVRSNPQAILQDDAEDIHSWVESKLIDKVGNLGKKLHTGRSRNDQVALDIKMWCKAQVTELQYAVRDLQAKLVETAENNQHAVMPGYTHLQRAQPISFAHWCMAYVEMLERDYSRLADAYNRMDSCPLGSGALAGTAYPVDREQLAKDLGFAFATRNSLDSVSDRDHIIELLSTASLSMVHLSRFAEDMIIFNSGEADFVELSDRVTSGSSLMPQKKNPDACELIRGKAGRVIGSLTGMMVTVKGLPLAYNKDMQEDKEGIFDALDTWHDCLTMAAFVLEDIRVNVERTREAALKGYSNATELADYLVAKGVPFRDSHHIVGETVVYAIKVHKGLEDLSIEEFRQFSDVVGEDVYPILSLQSCLDKRSAKGGVSPLRVAEAIADAKARIAAKK

SEQ ID NO: 88073 - DNA, 1398 bp, Methylococcus capsulatus
  CDS (1)..(1398): transl_table=11
atgagtatccagcaaaagctttggggtgggcgattcgaggaggcgaccgatgccttcgtcgaggccttcactgcatcggtggatttcgacaagcggctggcttcccacgacatccggggttcgatcgcgcatgctacgatgctggagcggctggggcttctcacccgtgaggaactgcaggcgatcgtcagtggccttgaagccatcggcgcggaaatcgaggccggccagtttccgtgggaggtgagcctggaagacgtgcacatgaacatcgaggcccgtctgacccagcggatcggcgaggccggcaagaagctgcacaccgggcgttcccgcaacgaccaggtcgccaccgacgtgcgcctgtacttgcgcaccgagatcgaccgtatctgcggaatgatcctgcggctgcagaccgcgctggtggatctggccgagcgcgaggccgccaccatcatgccgggtttcactcatctccaggtggcgcagccggtcactttcggccaccacatgatggcgtggtacgaaatgctgtcgcgcgattacgaccgcctgcgcgattgccgcaagcgggtcaacgtcatgccgctgggggccgcggccctggctggctccagtttcccgctggaccgcgattacacggcggcgctgctggacttctccgggccggcggcgaattcgctggacgccgtcagcgatcgcgatttcgccatcgagttcgcggcctgtgccagtctggtgctgatgcatctctcacgtttttcggaggagctgatcctctggacctcggctcaattcggtttcatcgatctgcccgacgctttctgcaccggctcctcgatcatgccgcagaagaaaaaccccgacgtgcccgaactcatccgcggcaagagcgcacgggtattcggccatttattcgcgctgctgaccctgatgaagagccagccgctcgcctacaacaaggacaaccaagaggacaaggagccgctgttcgatacggtcgacaccctgtccggctgccttcgcgcctttgccgacatgatgccgcacgtgcggccaaaccggtctgccatgtacgcatcggcccgcaagggctatgcgaccgccaccgacctggccgactacctggtccggcgcgggacgcccttccgcgacgcccatgaaatcgtgggcaaggccgtccgcttggggatggagagcagccgcgacctggcggatattccgctggaagagcttcgatccctgtccagcgtcatcgggccggacgtttaccaggtcctgacgctggagggttcggtggcggcgcgttcgcacccgggcggcaccgcaccggactgcgtgaaacgggccgtggccgcggcgcgggtccgcctggcggctctgcaggggagctga

SEQ ID NO: 88074 - protein, 465 aa, Methylococcus capsulatus
MSIQQKLWGGRFEEATDAFVEAFTASVDFDKRLASHDIRGSIAHATMLERLGLLTREELQAIVSGLEAIGAEIEAGQFPWEVSLEDVHMNIEARLTQRIGEAGKKLHTGRSRNDQVATDVRLYLRTEIDRICGMILRLQTALVDLAEREAATIMPGFTHLQVAQPVTFGHHMMAWYEMLSRDYDRLRDCRKRVNVMPLGAAALAGSSFPLDRDYTAALLDFSGPAANSLDAVSDRDFAIEFAACASLVLMHLSRFSEELILWTSAQFGFIDLPDAFCTGSSIMPQKKNPDVPELIRGKSARVFGHLFALLTLMKSQPLAYNKDNQEDKEPLFDTVDTLSGCLRAFADMMPHVRPNRSAMYASARKGYATATDLADYLVRRGTPFRDAHEIVGKAVRLGMESSRDLADIPLEELRSLSSVIGPDVYQVLTLEGSVAARSHPGGTAPDCVKRAVAAARVRLAALQGS

SEQ ID NO: 88075 - DNA, 1395 bp, Moorella thermoacetica
  CDS (1)..(1395): transl_table=11
atgaaactctggggcggacgttttaccaggacaaccgaccggctggtggaggatttccactcctccatcagctttgaccagcgcctctataaagaggatatagccggttctatcgcccacgcccgcatgctggcagcggtgggcctcatcacaccggccgaaggtgaagccattatcaaaggcctggaggaaatccgggccgacatcgaggcgggccgggtgaccttcgacgtgggcgccgaggacatccacatgaacatcgaaaagctcctcaccgagcgcatcggcgaggctggcaagaagctgcacacggctcgcagccgcaacgaccaggtggccctggacctgcggctctatttaaaagaagagattcctgccgtcaaaaagctcctggccggcctgcagcaggtcctggtggatctggccgcgcagcaccttcagacaatcatgcccggctatacccacctgcagaaggcccagcccgtcaccctggcccaccacctgatggcctactttgagatgttctaccgtgaccagcagcgcctggacgattgccttgacagggtcgacgtcatgcccctgggcgccggggccctggccggtaccaccctgcctatcgaccgggagctggttgcccgggagctgggctttaaggctatcagcgccaattccctggacgccgttagcgaccgcgatttcgtggtcgagttcctggcagccgcctcccttattatgatgcacctgagtcgcctggcagaagaggtcattttctggtccagcgaggagttcggttttctggaactggatgacgcctacagcaccggttccagtatgatgccacaaaagaaaaaccctgatgtcgccgaactggtacggggtaagaccggccgggtgtacggccacctcatgggcatgctggcggttttaaagggcctgcccctggcctacaacaaggacctgcaggaggataaggaagccctctttgacaccctggacaccgtcaagggctgtctcatggtctttacccccatgctggccacggccaggttccgggtggagcgcatgcgggccgacgcctcccgggggtttgccgcggctaccgatgtggccgagtacctggtgcgtaagggcctgcccttccgcgaggcccatgccgtggtcggttccctggtcctccactgcctccgggagggccgcagcttccaggatttaagcctggaggagtggcagtccttctcgccgctgtttgacaatgatattttcgggtgcctcgaggccgaggcctgcgtcaacggccgcaacctccccggcggcccggccccggaggccgtggggaaagccatagagcgggccagggagatccttgccgggattcaggctggactttcaagatag

SEQ ID NO: 88076 - protein, 464 aa, Moorella thermoacetica
MKLWGGRFTRTTDRLVEDFHSSISFDQRLYKEDIAGSIAHARMLAAVGLITPAEGEAIIKGLEEIRADIEAGRVTFDVGAEDIHMNIEKLLTERIGEAGKKLHTARSRNDQVALDLRLYLKEEIPAVKKLLAGLQQVLVDLAAQHLQTIMPGYTHLQKAQPVTLAHHLMAYFEMFYRDQQRLDDCLDRVDVMPLGAGALAGTTLPIDRELVARELGFKAISANSLDAVSDRDFVVEFLAAASLIMMHLSRLAEEVIFWSSEEFGFLELDDAYSTGSSMMPQKKNPDVAELVRGKTGRVYGHLMGMLAVLKGLPLAYNKDLQEDKEALFDTLDTVKGCLMVFTPMLATARFRVERMRADASRGFAAATDVAEYLVRKGLPFREAHAVVGSLVLHCLREGRSFQDLSLEEWQSFSPLFDNDIFGCLEAEACVNGRNLPGGPAPEAVGKAIERAREILAGIQAGLSR

SEQ ID NO: 88077 - DNA, 1422 bp, Nocardia farcinica
  CDS (1)..(1422): transl_table=11
atgacgcagagcggcggcacgaacaccggtgcgctgtggggcgggcggttcgcgtccggtccggccgccgcgatggcggcgctgagcaagtccacccacttcgactgggcgctggcgccctacgacatccgcgcctccaaggcgcacgcccgggtgctgcacaaggcggggctgctctccgacgccgacctggacaccatgctggccggcctggacgggctggccgccgacgtcgcgtcgggggcgttcgtgcccgccgagaccgacgaggacgtgcacggcgcgctcgagcgcggtctcatcgaccgggtgggagcggaggtcggcgggcggctgcgcgcgggccgttcccgcaacgaccaggtcgcgaccctgttccggatgtggttgcgcgacggggtgcgccgggtcgccgcgggggtgctcgacgtggtcgacgcgctggtcgagcaggccgccgcccatccggatgcggtgatgccgggcaagacgcacctgcaggccgcccagccggtgctgctggcgcaccatctgctcgcccacgcccatccgctgctgcgcgacatcgagcggttgcgcgatttcgacaagcgcgcggcggtgtcaccgtatggttcgggcgcgctggccgggtcgtcgctggggctcgatccggaggcgatcgccgccgacctggatttcgatgccgccgcggccaactcgatcgacgcgacctcggcccgcgacttcgccgccgaggccgccttcgtgctggccatgatcgccgtcgacctcagccgcatggccgaggaggtgatcatctggagcacgccggaattcggctacgtgacgctggccgacgcctggtccaccggctcctcgatcatgccgcagaagaagaacccggacgtctccgagctcacccgcggcaaggcgggccgcctcatcggcaacctcaccggcctgctggccaccctcaaggcccaaccgctggcctacaaccgggacctgcaggaggacaaggaaccggtcttcgactcggtggcgcagctggaactgctgctgcccgccatcgcgggcctggtcggcacgctcaccttccacaccgaccggatggccgagctggcacccgccgggttcacgctggccaccgacatcgccgaatggcttgtccgcgagggtgtcccgttccgggtcgcgcacgaggcggccggtgcctgcgtgcgggcggcggaggcgcgcggcgtcggactcgacgcgctgaccgatgaggagttcgccgcgatcgatccggcgctcaccccgcgcgtgcgggaggtgctcaccgtgcaggggtccatcgcgtcccggaacgccaagggcggcaccgcgggcacacgggtggccgagcagctggccgaggtgcgcgccgcggcgcagcaggcccgggcctggatcgcctga

SEQ ID NO: 88078 - protein, 473 aa, Nocardia farcinica
MTQSGGTNTGALWGGRFASGPAAAMAALSKSTHFDWALAPYDIRASKAHARVLHKAGLLSDADLDTMLAGLDGLAADVASGAFVPAETDEDVHGALERGLIDRVGAEVGGRLRAGRSRNDQVATLFRMWLRDGVRRVAAGVLDVVDALVEQAAAHPDAVMPGKTHLQAAQPVLLAHHLLAHAHPLLRDIERLRDFDKRAAVSPYGSGALAGSSLGLDPEAIAADLDFDAAAANSIDATSARDFAAEAAFVLAMIAVDLSRMAEEVIIWSTPEFGYVTLADAWSTGSSIMPQKKNPDVSELTRGKAGRLIGNLTGLLATLKAQPLAYNRDLQEDKEPVFDSVAQLELLLPAIAGLVGTLTFHTDRMAELAPAGFTLATDIAEWLVREGVPFRVAHEAAGACVRAAEARGVGLDALTDEEFAAIDPALTPRVREVLTVQGSIASRNAKGGTAGTRVAEQLAEVRAAAQQARAWIA

SEQ ID NO: 88079 - DNA, 2215 bp, Nostoc punctiforme
  CDS (728)..(2113): transl_table=11
gaattcaccgtttgctgagtaaccgccacctgattgagtcagcatcggtgttgattgtcgtggccgggatggaaggcgctttacccagcgttgtcgctggtttagcgagttgtcctgtgattgccgtacccaccagcatcggttatggcgcgagttttggcggtttagcacctttattgacaatgcttaactcttgtgctgcgggagtaggtgtagtaaatatcgataatggttttggtgcagcagtattggcggggcagattttgcgaactgccgagaaattgcggttggcatcggctggatcttgagttaagactttaaagttacacccaatatttcagtacgttatcagtaatttatctgaaaaataaactgatctgaaatttgccaccctcaacctcttaatcaccaaatatgagccatctcagcgatttgacatctcagctactttggcatttgcctgtaaatttgacagcactactagcacaaacaattaccgacccagacctgatgggtcaggttcaaaaatcttggagccactttgtacaaacaggtcaagtgtgggcattgttgattggtttagtcattggctatatgatccggaatttaactagctacggttaaatttaaaagttaggagttgaaagtgaggagtgagaagttaggagtcagaaactcataactcctcactcttaactcttaactctcccccactctcttgatatttatgaccaaagaacaaacttggagccagaggtttgaatcagccctgcatcccgcgatcgctcgttttaatgccagtataggttttgatattgaattaatagaatacgatctgactggttctcaagcccatgccaaaatgctagctcacacgggcattatctcctcagaagaaggtgaacaactggttgcaggtttagaacaaatccgccaagagcatcgccagggaaaatttcatcctggtgttgatgcagaagatgtacattttgcagttgaaagacgactgacagaaattgtcggcgatgtgggtaaaaaactgcatacggcgcgatcgcgtaatgaccaagttggtactgatactagactctacctccgcgaccaaatccagcaaattaaaagcgaattgcgagaattccaaggtgttttactggatatagctgaaaagcacgttgaaactttgatcccaggctatacccatctacaacgcgctcaaccagtgagtttagctcaccacctattggcatactttcaaatggcgcaacgcgactgggaacgcttgggagatgtttctcgccgcgtcaatatctcacctttggggtgcggtgctttagcgggaactactttccccatcgatcgccactacacagccaaactattagattttgataatatttatgctaacagcctcgatggagtaagcgatcgtgattttgcgatcgaattcttgtgtgctgctagcttgattatggttcacctcagccgccttgcagaagaagtcattctttggtcatctgaagaatttcgttttgtcatcctcaaagatagctgtgctacaggttccagtatcatgccccaaaagaaaaaccccgatgtaccagaactcgtgcgggggaaaacgggacgtgtatttggtcatctccaggcaatgctagtgattatgaaagggctacctctggcatataacaaagacctgcaagaagataaagaaggtctatttgatagcgttaacacagtcaaagcatctctagaagcaatgacaattttgctcagggaaggcttagaatttcgtacccagcgtttagcacaagccgtaaccgaaaatttctccaacgctactgatgtagcagattatcttgcagcacggggcgttcctttccgggaagcttacaacctcgtgggtaaggtggtaaaaactagtattgctgcaggtaaactcctgaaagatttggaattggaagagtggcaacaactacatccggcatttgcagcagatatttatgaggcgatatccccccgtcaagttgtggcagcccgcaacagtcacggtggtactggctttgtacaggttagcaaagcactcatagccgctcgcgctcaaatcgatcaataagggaatggggaacagggggtaggggaacaagggggaattattgaataatatctcccctttcttgcttgtccttctttatgcccaattcccaattcccaatcc

SEQ ID NO: 88080 - protein, 461 aa, Nostoc punctiforme
MTKEQTWSQRFESALHPAIARFNASIGFDIELIEYDLTGSQAHAKMLAHTGIISSEEGEQLVAGLEQIRQEHRQGKFHPGVDAEDVHFAVERRLTEIVGDVGKKLHTARSRNDQVGTDTRLYLRDQIQQIKSELREFQGVLLDIAEKHVETLIPGYTHLQRAQPVSLAHHLLAYFQMAQRDWERLGDVSRRVNISPLGCGALAGTTFPIDRHYTAKLLDFDNIYANSLDGVSDRDFAIEFLCAASLIMVHLSRLAEEVILWSSEEFRFVILKDSCATGSSIMPQKKNPDVPELVRGKTGRVFGHLQAMLVIMKGLPLAYNKDLQEDKEGLFDSVNTVKASLEAMTILLREGLEFRTQRLAQAVTENFSNATDVADYLAARGVPFREAYNLVGKVVKTSIAAGKLLKDLELEEWQQLHPAFAADIYEAISPRQVVAARNSHGGTGFVQVSKALIAARAQIDQ

SEQ ID NO: 88081 - DNA, 1410 bp, Novosphingobium aromaticivorans
  CDS (1)..(1410): transl_table=11
atgagcggcaattcgggctccaaccagatgtggggcgggcgcttcgcaggcggtccctcggcgatcatgcgcgagatcaacgcctcgattcccttcgacaaggcgttgtggcggcaggacatcgccgcgtcaaaggcccatgtggacatgctgggcgcgcaagggatcgtctcggccgaggatgcggcgctgatcgccagtgggctcgatcaggtggcagcggagtacgaggccaacggggtgcccgagaactgggacctcgaggacatccacatgaccaccgagagccgccttgccgaactgatcggcccggcggcggggcgcctgcacaccgcgcgcagccgcaacgaccaggtggcgaccgactttcgcctgtgggttcgcgacgcgatggaccaggccgagctgggcctgaagcagttgcaggtcgcgctggtgagccgcgcgggcgagcatgccgcttcgatcatgcccggcttcacgcacctgcagaccgcgcagccggtgacgctgggccaccacctgatggcctattacgagatgatcgggcgcgaccgttcgcgctttgccgatgcgcgggtgcgcatgaaccgcagcccgctcggctcggcggcgctggccggcaccggctttcccatcgaccgcttccgcactgccgaggcgctgggcttcgatgggccgactgacaacagcctcgattcggtgtcggaccgcgacttcgcgttggactacctgatggccgccgcgcagtgctcgctgcacctgtcgcggctggccgaggaattcatcatctgggcgagccagcccttcggcttcgtgacgctgcccgacagcctttcgaccggcagcagcatcatgccgcagaagaagaaccccgacgcggccgaactggtgcgcggccattcgggccggatcgtcggctgcctgaccgcgctgatgatcacgatgaagggcctgccgctggcctattccaaggacatgcaggacgacaagccgccggtgttcgaggccgccagcctgctggcgctgtccatcgcggcaatgaccgggatggtggccgaggcgaagttccggaccgaccgcatgcgcgccgccgccgagcttggctatgccacggcgaccgaccttgccgactggctggtgcggcaggccaacatcccgttccgcgaggcgcaccacatcaccggttccgcggtgaagctggccgaatcgcgcgggatagcgctcgaccagctttcgatcgaggacctcaaggcgatcgacgagcgcatcgacgagcgcgtctatgcggctctgtcggtcgaggcgagcgtggcggcgcgttgcagccatggcggaaccgcgccggacgaggtaaggaagcgcgtggcccaggcgcgcgtggcgctggggctggaggaatcggcttga

SEQ ID NO: 88082 - protein, 469 aa, Novosphingobium aromaticivorans
MSGNSGSNQMWGGRFAGGPSAIMREINASIPFDKALWRQDIAASKAHVDMLGAQGIVSAEDAALIASGLDQVAAEYEANGVPENWDLEDIHMTTESRLAELIGPAAGRLHTARSRNDQVATDFRLWVRDAMDQAELGLKQLQVALVSRAGEHAASIMPGFTHLQTAQPVTLGHHLMAYYEMIGRDRSRFADARVRMNRSPLGSAALAGTGFPIDRFRTAEALGFDGPTDNSLDSVSDRDFALDYLMAAAQCSLHLSRLAEEFIIWASQPFGFVTLPDSLSTGSSIMPQKKNPDAAELVRGHSGRIVGCLTALMITMKGLPLAYSKDMQDDKPPVFEAASLLALSIAAMTGMVAEAKFRTDRMRAAAELGYATATDLADWLVRQANIPFREAHHITGSAVKLAESRGIALDQLSIEDLKAIDERIDERVYAALSVEASVAARCSHGGTAPDEVRKRVAQARVALGLEESA

SEQ ID NO: 88083 - DNA, 1374 bp, Pasteurella multocida
  CDS (1)..(1374): transl_table=11
atggcactttggggtggacgttttacacaagccgcagataagcgttttaaagattttaatgactcattacgtttcgattatcgtctcgcagaacaagatattgaaggttccattggctggtcaaaagctttagtcagcgttggagtattgaccgtgcaggagcaacaacagttagaaagtgcactgaatactctcttaattgaagtgcgatcaaatccacaagcgattttgcaagatgacgctgaagatattcacagctgggtcgaaagtaaattaatcgataaagtcgggaatttaggtaaaaaattacacacgggacgtagccgtaatgatcaggttgcactggacattaagatgtggtgtaaacaacgtgtgattgaactgcaatcctcgcttcacgccttacaatgcaaacttgtcgaaacagccgaaaataaccaacatgcggtgatgccgggttatacacacttacaacgagctcagccgattacttttgcccattggtgcatggcttatgtggaaatgcttgatcgtgattactcccgtttaaccgatgcttaccaacgcatgaatagctgcccactcggcagtggtgccctcgctggcaccgcttacgcgattgatcgtgaacaattagccctcgatctcggttttgacgttgctacacgcaacagtttagacagtgtgtcagaccgcgatcatatcgttgaactgctttctactgcctcactaagcatggcacatctttcacgttttgcggaagatatgatcatttttaacagtggtgaatctaacttcgtggagctttccgatcgcgtgacatctggttcttccttgatgccacagaaaaaaaaccccgatgcttgtgaattaattcgtggtaaagcaggtcgtgtaatgggtgctttaacaggcatgctgatgaccttaaaaggcttgccgcttgcttataacaaagatatgcaggaagacaaagaaggcattttcgacgctctagatacttggcaagactgtatcgacatggcggctcttgtgttagacggcattcaagtcaatgtagaacgtaccaaagaagctgctttaaaaggttattccaatgccactgaactggccgactatttggtcgccaaaggcgtaccattccgtgactctcaccatattgtgggcgaaaccgttgtttatgccatccaacagcacaaagcgcttgaagcactcagcgttgctgaatttaaacaatttagtgatgttgtcgaagaagatgtgtatcagatcctatctctgcaatcttgtttagataaacgctgtgccaaaggtggcgtatcaccacttcgtgttgcagaagccatcgctgaagcgaaagcaaggttgagttaa

SEQ ID NO: 88084 - protein, 457 aa, Pasteurella multocida
MALWGGRFTQAADKRFKDFNDSLRFDYRLAEQDIEGSIGWSKALVSVGVLTVQEQQQLESALNTLLIEVRSNPQAILQDDAEDIHSWVESKLIDKVGNLGKKLHTGRSRNDQVALDIKMWCKQRVIELQSSLHALQCKLVETAENNQHAVMPGYTHLQRAQPITFAHWCMAYVEMLDRDYSRLTDAYQRMNSCPLGSGALAGTAYAIDREQLALDLGFDVATRNSLDSVSDRDHIVELLSTASLSMAHLSRFAEDMIIFNSGESNFVELSDRVTSGSSLMPQKKNPDACELIRGKAGRVMGALTGMLMTLKGLPLAYNKDMQEDKEGIFDALDTWQDCIDMAALVLDGIQVNVERTKEAALKGYSNATELADYLVAKGVPFRDSHHIVGETVVYAIQQHKALEALSVAEFKQFSDVVEEDVYQILSLQSCLDKRCAKGGVSPLRVAEAIAEAKARLS

SEQ ID NO: 88085 - DNA, 1407 bp, Propionibacterium acnes
  CDS (1)..(1407): transl_table=11
atggcgctgtggggtggacgattctctggcggcccgtctgaggcgttggcggcgctgtcagtctccacccaattcgattggcgactagcccgccacgacattgctggatcgagtgctcacgccggggtacttcatgccgcaggtctcctcgatgacgatcagtacgaggggatgatgaaggctcttaacgccttggaggaggacgttgtttcgggccgtttcgtggctcagccagaggacgaggatgtccatactgctctggagcgcggtctcatggagcgtgccgggaaagatctcggaggacggctacgtgccgggcgttcccgcaacgaccagattattgctctgctgcgtcgctaccttcgtgaggaagcccgcagtcttgctggggagcttctgggactcgctcatgtgctaagtcgacaagccgaggacgtcggtgacgcggttatcgctggtcgtacccacatgcagcacgcccagccggtgttgctggctcaccagctgctggcccacgcgtggccgctgctccgcgacgtgcagcgttttcgcgatctcgatgcgcgactggattgttcgccatacggatccggggcactagcaggatcatcattgggtctggatccagaggcggttgcacgtgatctggggttctcgtcgtcagtcccgaattccattgatggtactgcggctcgagacgttgttgctgagttcgccttcgttgccgcccaggtcggagtcgacttatcgcggttgagtgaagagatcatcatctggaatacccgcgagttcggttacgtcactctcgacgattccttctcgacgggttcatcgatcatgccgcaaaaaaagaacccggacatcgctgagcttgcccgcggcaaggcagggcgtctcattggtgatcttgccggtctcatggcttcccttaagggcctgccactggcctacgcccgtgaccttcaggaggataaagagccggttttcgaccagattgaccagctccacctgctgttgccagctatcactggaatggtggacaccgccgtgttcaacaccgatcgcatggccgagatggctggtcaggggttctcattggctaccgacgttgccgagtggttggtacgccagggggttcccttccgggtcgcccacgagttgtccggggcttgcgtgcgcggggcagagtctcagaataaggagttggccgatctcaccgaccaggaacttatcgcgatcgatccccgtctaaccccgcaggtgcgcgaggtcatgacagttcaggggtcagtacgctctcgggccggacgcggtgggaccgcacctgagcgcgtcgctgagcagatcaccgagctgcgcgaggccattgcgggcttgcgcagtttcggagaggccgaaacccgatga

SEQ ID NO: 88086 - protein, 468 aa, Propionibacterium acnes
MALWGGRFSGGPSEALAALSVSTQFDWRLARHDIAGSSAHAGVLHAAGLLDDDQYEGMMKALNALEEDVVSGRFVAQPEDEDVHTALERGLMERAGKDLGGRLRAGRSRNDQIIALLRRYLREEARSLAGELLGLAHVLSRQAEDVGDAVIAGRTHMQHAQPVLLAHQLLAHAWPLLRDVQRFRDLDARLDCSPYGSGALAGSSLGLDPEAVARDLGFSSSVPNSIDGTAARDVVAEFAFVAAQVGVDLSRLSEEIIIWNTREFGYVTLDDSFSTGSSIMPQKKNPDIAELARGKAGRLIGDLAGLMASLKGLPLAYARDLQEDKEPVFDQIDQLHLLLPAITGMVDTAVFNTDRMAEMAGQGFSLATDVAEWLVRQGVPFRVAHELSGACVRGAESQNKELADLTDQELIAIDPRLTPQVREVMTVQGSVRSRAGRGGTAPERVAEQITELREAIAGLRSFGEAETR

SEQ ID NO: 88087 - DNA, 1392 bp, Prochlorococcus marinus
  CDS (1)..(1392): transl_table=11
atggaaaaagcattgagcaaaacttggagtgagagatttgataaaggacttaatccttttatagaaaaatttaatgcttctatcgagtttgatatttgtttattagaggaagatttggatggatcaattgcccatgcacgtatgcttggaattcaagggattattaccaaggaagaggcgctcagattagagaatggtcttcaacagattcgaaaagaggcttctgatggtttatttcaccctgtcatttcagatgaagatgtgcattttgcagtagaaaaaaaattaatagatttgataggcccagtagggaaaaaactacatactggtcgtagtcgtaatgatcaagttggaacagatctgagattatggctaagaaagcgtattgatgaaattgatatggatttggtacgtcttcagaaatctctttttttattagcagaggaaaatttgtatacgcttattcctggttatacgcatttacaaagagcccaacctttgtctctggcgcatcacttgttggcatatattgagatggcacaaagagatagaaatagattaaaagacgtaagaaaacgagtgaatatttctccactaggagcagctgctttagctggcacatcgatttctataagtagaaagattacttcttcagaattacactttcaaggtatttattctaatagtttagatgctgtaagtgatagagactttgttgtagaatttttaggagcctcgtcgttaattatggctcatttaagtagattatctgaagaagtaattttgtgggcatctgaagaatttgcatttattcaattaaccgaccgatgtgctactggaagtagtcttatgcctcaaaaaaagaatcctgatgtaccagagcttgttcgaggcaagtcaggaagagtatttggacatttacaagctatgctgactatgattaaaggattacctttagcttacaacaaagattttcaagaagacaaagaagctatctttgatagcgttaaaacagttaagaattctttgattgccatatcaattttgtttgaagaaggtttaatttttagaaaagaaagacttaatcaagctgtttcctcagacttttcaaatgccactgatgtagctgattatttagtggctaaggacatacctttccgagaggcttatcaattagttgggcgaattgtaaaaacttctttggaggaggggattttattaaaagatattcctttagaaagatggaaaacatttcataaattttttgaaaaagatatttatgaaaagcttttgccttcgagtgtggtcgagtctcgtttgagtgctggtggaactggatttgagagagttcaagaacagcttctttcttggcgagaaaaattatttaattaa

SEQ ID NO: 88088 - protein, 463 aa, Prochlorococcus marinus
MEKALSKTWSERFDKGLNPFIEKFNASIEFDICLLEEDLDGSIAHARMLGIQGIITKEEALRLENGLQQIRKEASDGLFHPVISDEDVHFAVEKKLIDLIGPVGKKLHTGRSRNDQVGTDLRLWLRKRIDEIDMDLVRLQKSLFLLAEENLYTLIPGYTHLQRAQPLSLAHHLLAYIEMAQRDRNRLKDVRKRVNISPLGAAALAGTSISISRKITSSELHFQGIYSNSLDAVSDRDFVVEFLGASSLIMAHLSRLSEEVILWASEEFAFIQLTDRCATGSSLMPQKKNPDVPELVRGKSGRVFGHLQAMLTMIKGLPLAYNKDFQEDKEAIFDSVKTVKNSLIAISILFEEGLIFRKERLNQAVSSDFSNATDVADYLVAKDIPFREAYQLVGRIVKTSLEEGILLKDIPLERWKTFHKFFEKDIYEKLLPSSVVESRLSAGGTGFERVQEQLLSWREKLFN

SEQ ID NO: 88089 - DNA, 1413 bp, Ralstonia eutropha
  CDS (1)..(1413): transl_table=11
atgacgacctcccaacttgccaagaaaggcgaagcctggtccgcccgcttctccgaaccgatgtccgacctggtgaagcgctacaccgcttcggtgttcttcgacaagcgcctggccctgttcgacatccagggctcgctggcgcatgcggccatgctggccaagcaaggcatcatcgccgaggccgaccgcgccgagatcgagcgcggcatggcacagatcaagggcgagatcgaagccggcggcttcgaatggaagctggatctcgaagacgtccacctgaacatcgaagcgcgcctgaccgcgctggtcggcgatgccggcaagcgcctgcatacgggccgctcgcgcaacgaccaggtcgcgaccgacatccgcctgtggctgcgcagcgagatcgacaacatcatcgccctgctcggcgcgctgcgcgggtcgctgctggacctggccgaccagaacgccgacacgatcctgccgggcttcacgcacctgcaggtcgcgcagcccgtgaccttcggccaccacctgctggcctacgtggaaatgttcacgcgcgatgccgagcgcatggccgactgccgcaagcgcgtcaaccgcctgccgctgggcgccgccgcgctcgccggcacgagctacccgatcgaccgcgaattcgtcgcgcagcagctcggcttcgacggcgtgtgccgcaattcgctggatgcggtgtcggaccgcgacttcgcgatcgaattctgcgcagccgccgcgctggtgatgacccacgtgtcgcgcttctcggaagaactggtgctgtggatgagcccgcgcgtcggcttcatcgacatcgccgaccgcttctgcaccggcagctcgatcatgccgcagaagaagaaccccgacgtgccggaactggcccgcggcaagaccggccgcgtcaacggccacctgatcggcctgctgacgctgatgaagggccagccgctcgcatacaacaaggacaaccaggaagacaaggaaccgctgttcgatacggtcgataccgtcgtggacacgctgcgcatcttcgctgacatggtgcctggcatcaccgtcaagcccgaagccatgcgcgccgccgcgctgcagggctacgccacggccaccgacctggccgactacctcgtcaagaagggcctgccgttccgcgacgcgcacgaagccgtggcccacgccgtgcgcgcgtgcgacagccgcaactgcgacctggccgaccttaccgtggccgaactgcgtgaagtctcgggcctcggcgacaagtccgcgctgatcggcgatgacgtgcacaccgtcctgacgctcgaaggttcggtcgctgcgcgtaaccacatcggcggcaccgcaccggaccaggtgcgcgcggcgatcgccgccgcacgcgcagcgctctga

SEQ ID NO: 88090 - protein, 470 aa, Ralstonia eutropha
MTTSQLAKKGEAWSARFSEPMSDLVKRYTASVFFDKRLALFDIQGSLAHAAMLAKQGIIAEADRAEIERGMAQIKGEIEAGGFEWKLDLEDVHLNIEARLTALVGDAGKRLHTGRSRNDQVATDIRLWLRSEIDNIIALLGALRGSLLDLADQNADTILPGFTHLQVAQPVTFGHHLLAYVEMFTRDAERMADCRKRVNRLPLGAAALAGTSYPIDREFVAQQLGFDGVCRNSLDAVSDRDFAIEFCAAAALVMTHVSRFSEELVLWMSPRVGFIDIADRFCTGSSIMPQKKNPDVPELARGKTGRVNGHLIGLLTLMKGQPLAYNKDNQEDKEPLFDTVDTVVDTLRIFADMVPGITVKPEAMRAAALQGYATATDLADYLVKKGLPFRDAHEAVAHAVRACDSRNCDLADLTVAELREVSGLGDKSALIGDDVHTVLTLEGSVAARNHIGGTAPDQVRAAIAAARAAL

SEQ ID NO: 88091 - DNA, 1398 bp, Rhodopseudomonas palustris
  CDS (1)..(1398): transl_table=11
atgagcaacaagatgtggggcggccgattcaccgatcgccccgacgcgatcatggaagagatcaacgtctcgatcgacgtcgatcgccatctctacgcccaggacatcacggcgtccaaggcgcatgcagccatgctggccgcgcagggcatcatcaccgcgaacgatgcgaaaaatatcggcaagggtctagacacgattctgtcagagatcaccgccggcaaattcaccttcaagcgtgcgctcgaagacatccatatgaatgtcgagagccggctggccgaactgatcggcccggcggcggggcgcctgcacaccgcgcgctcgcgcaacgatcaggtcgcgaccgacttccggctttacgtccgcgacgtgctggacgagaccgacgcggcgctggcggcattgcagcaggcgctcgccgaacgcgcgctcgagcaggccgacaccgtgatgcccggcttcacccatctgcagaccgcgcagccggtgaccttcggtcatcacctgatggcctatgtcgagatggtggcgcgcgatcgcggccggttccaggatgcccgcaagcggctgaacgaaagtccgctcggcgccgcggcgctggccggcacctcgttcccgatcgaccgccacgccaccgccgccaagctcggcttcgaccggccgatggcgaactcgctcgatgcggtgtcggaccgcgacttcgtgctggagacactgtcggcggcgtcgatctgcgccgtgcatctgtcgcgctttgccgaagagatcgtgatctggacctcgccgctggtcggcctgatccggctgtcggacaagttcaccaccggctcgtcgatcatgccgcagaagcgtaatccggacgcagccgaactggtccgcgccaagaccggccgggtgatcggcgcgctgaacggcctgttgatcgtgatgaagggcctgccgctcgcctatcaaaaggacatgcaggaagacaaacagggcgcgatggaaggcttcgcggcgctgtcgctggcgatccgcgcgatcaccggcatggtccgcgatctcgagccggagccggagcggatgaagcttgctgcgggcgagggctatgccaccgccaccgatctcgccgactggttggtgcggacgctgaagatgccgttccgcgaggcgcatcacgtcaccggccggatcgtcgggctcgccgccaagaagggcgtggcgctgcacgagctgccgctcgccgagatgcagtcggtcgaaaagcgcatcaccaaggatgtgctggcggttctcagcgtcgaatcctcggtgaagagccgcacctcctacggcggcaccgcgccgaagaacgtccgcagccaggccaaggcctggctcaagcggctcgccaaggacacgaagacgcgctga

SEQ ID NO: 88092 - protein, 465 aa, Rhodopseudomonas palustris
MSNKMWGGRFTDRPDAIMEEINVSIDVDRHLYAQDITASKAHAAMLAAQGIITANDAKNIGKGLDTILSEITAGKFTFKRALEDIHMNVESRLAELIGPAAGRLHTARSRNDQVATDFRLYVRDVLDETDAALAALQQALAERALEQADTVMPGFTHLQTAQPVTFGHHLMAYVEMVARDRGRFQDARKRLNESPLGAAALAGTSFPIDRHATAAKLGFDRPMANSLDAVSDRDFVLETLSAASICAVHLSRFAEEIVIWTSPLVGLIRLSDKFTTGSSIMPQKRNPDAAELVRAKTGRVIGALNGLLIVMKGLPLAYQKDMQEDKQGAMEGFAALSLAIRAITGMVRDLEPEPERMKLAAGEGYATATDLADWLVRTLKMPFREAHHVTGRIVGLAAKKGVALHELPLAEMQSVEKRITKDVLAVLSVESSVKSRTSYGGTAPKNVRSQAKAWLKRLAKDTKTR

SEQ ID NO: 88093 - DNA, 1437 bp, Rhodospirillum rubrum
  CDS (1)..(1437): transl_table=11
atgtcctccagcactccgacgaccccttccatcgagcggaccgccagcaccatctggggtgggcgcttcgacagcggcccctcggcggtgatggaggcgatcaatgcctcgatcggctttgacaaacggctttaccgtcaggatatagcgggctcgaaggcccattgcaccatgctggtcgccaccggcatcctgagcaaagccgatggcgaggcgatcctcggcggcctcgatcgcattctggcggaaatcgaagccggagacttccccttcagcgtcgcgctggaggatatccacatgaatatcgaaagccgcctgaaggacctgatcggcgaggccgccggccgcctgcacaccgcgcgctcgcgcaatgatcaggtggcgaccgacttccgcctgtgggtgcgcgacgccatcgacggcgtcgagggcgcccttgcccgcctgcaagacgtgctgatcacccgggccgaggaacacgccgatacggtgatgcccggcttcacccatctgcaggccgcccagccggtgaccttcggccaccatctgctggcctatgtggaaatgatcggccgcgaccggggccgcttccacgatgcccgcgtccgcctcaacgaaagcccgctgggctcggccgccctggccggcacctccttccccatcgaccgggcgatgaccgcccaaatcctcggcttcgaccgtccctgcgccaattcgctcgatggcgtatcggaccgcgatttcgccctggaattcctggccgccgccagcatcgccagcatccatctgtcgcgactggccgaggaactggtgatctggaccagcgcccagttcggcttcgtccgcctgcccgacgcctattcgacgggcagttcgatcatgccgcaaaagcgcaaccccgacgccgccgaactggtgcgcgccaaggccggccgggtgatcggcgatctcgccagcctgctgatcgtcatgaaggggctgccgctggcctattccaaggacatgcaagacgacaaggagccggtgttcgaggccgccgataccctggaactgtgcatcgcggcgatgaccggcatgatggaaaccatcacccccaaggtcgatcgcctgcgcaccgccgccggtcagggcttcaccaccgccaccgatctcgccgactggctggtccgcgccctcggcacccccttccgccatgcccacgaggtctcgggcgccctggtcaagatggccgagaaaaagggcgtgggcctggaagacctcagcctcgccgagatgcgaaccatcgaaccgcgcctgaccgacgaggcgatcaaggttctgtcggtggattggtcggtgcgcagccgcaccagcttcggcggcaccgcgcccgacaacgtccgcgccgcctgcgccgcggcgcgcgcccgctacgccgccaaggcgccgccgcgatga

SEQ ID NO: 88094 - protein, 478 aa, Rhodospirillum rubrum
MSSSTPTTPSIERTASTIWGGRFDSGPSAVMEAINASIGFDKRLYRQDIAGSKAHCTMLVATGILSKADGEAILGGLDRILAEIEAGDFPFSVALEDIHMNIESRLKDLIGEAAGRLHTARSRNDQVATDFRLWVRDAIDGVEGALARLQDVLITRAEEHADTVMPGFTHLQAAQPVTFGHHLLAYVEMIGRDRGRFHDARVRLNESPLGSAALAGTSFPIDRAMTAQILGFDRPCANSLDGVSDRDFALEFLAAASIASIHLSRLAEELVIWTSAQFGFVRLPDAYSTGSSIMPQKRNPDAAELVRAKAGRVIGDLASLLIVMKGLPLAYSKDMQDDKEPVFEAADTLELCIAAMTGMMETITPKVDRLRTAAGQGFTTATDLADWLVRALGTPFRHAHEVSGALVKMAEKKGVGLEDLSLAEMRTIEPRLTDEAIKVLSVDWSVRSRTSFGGTAPDNVRAACAAARARYAAKAPPR

SEQ ID NO: 88095 - DNA, 1416 bp, Rhodobacter sphaeroides
  CDS (1)..(1416): transl_table=11
atgtccgacgcgcccgacccctcctccgccgccaacaccatgtggggcggccgcttcgccgcgggccccgatgcgatcatgcaggcgatcaacgcctcgatcgggttcgacaagcggctctacgcgcaggatatccgcggctcgcgggcccatgccgcgatgctcgcggcgcagggcatcctgacttctagggatgccgaggccatcggggaaggccttctcaccgttttgtcagagatcgaggccggcggcttccccttccgggtcgagctcgaggacatccacatgaacgtcgaggcccgcctgaaggagctgatcggcgagcccgccggccggctgcatacggcgcgctcgcgcaacgatcaggtggcggtcgatttccgtctctgggtccgcgaccagtgcgatgcggccatctcggggatcgaggcgctgatgcgggccttcctcgcgcaggccgaggcgggggccgactgggtgatgccgggcttcacgcatctgcagaccgcgcagccggtcacctggggccatcacatgctggcctatgtcgagatgctggcgcgcgaccgctcgcgcttcgtggatgcccgcgcgcgcatgaacgaatgcccgctgggcgccgcggcgctggcgggcacgggcttccccatcgaccggcacatgacggcggcggcgctcggcttcgaccggcccaccgccaacagcctcgattcggtctcggaccgcgactttgcgctcgagttcctgtcggcctcggcgatctgcgccctgcatctgtcgcgcttcgcggaagagctggtgatctggtcctcggcccagttccgcttcgtgcgcctgtcggaccgctggaccaccggctcgtcgatcatgccgcagaagaagaaccccgatgcggcggaattgctgcgggccaagatgggccgggtgctgggcgcggccgtcgcgctcttcaccgtgatgaagggcctgccgctgacctattccaaggacatgcaggaggacaaggagcaggtcttcgacgcggccgacacgctgatgctggggcttgccgccatgaccggcatggtgggcgacatgcaggccaaccgcgagagcctcgccgccgccgcggcctcgggcttctcgacggcgaccgatctggcggactggctggtgcgcgagctgaacctgccgttccgcgacgcccatcatgtgacgggcacgctcgtggcccgcgccgaggcccggggctgcgacctgcccgatctctcgctcgccgagatgcaggaggtgcatccgggcatccgcgaggacgtgttcgccgtcctcggcgtcgagaattccgtgcgcagccgcacctcctacggcggcaccgcacccgacaatgtccgcgcgcaggccgcgcgctggaaagagctgctgggagatgccgcatga

SEQ ID NO: 88096 - protein, 471 aa, Rhodobacter sphaeroides
MSDAPDPSSAANTMWGGRFAAGPDAIMQAINASIGFDKRLYAQDIRGSRAHAAMLAAQGILTSRDAEAIGEGLLTVLSEIEAGGFPFRVELEDIHMNVEARLKELIGEPAGRLHTARSRNDQVAVDFRLWVRDQCDAAISGIEALMRAFLAQAEAGADWVMPGFTHLQTAQPVTWGHHMLAYVEMLARDRSRFVDARARMNECPLGAAALAGTGFPIDRHMTAAALGFDRPTANSLDSVSDRDFALEFLSASAICALHLSRFAEELVIWSSAQFRFVRLSDRWTTGSSIMPQKKNPDAAELLRAKMGRVLGAAVALFTVMKGLPLTYSKDMQEDKEQVFDAADTLMLGLAAMTGMVGDMQANRESLAAAAASGFSTATDLADWLVRELNLPFRDAHHVTGTLVARAEARGCDLPDLSLAEMQEVHPGIREDVFAVLGVENSVRSRTSYGGTAPDNVRAQAARWKELLGDAA

SEQ ID NO: 88097 - DNA, 1410 bp, Saccharophagus degradans
  CDS (1)..(1410): transl_table=11
atgactatgagccaagaagagaatcctgttaagccctggggcggacgttttagtgaacccacagacgcctttgttgaacgttttaccgcctcggtaaccttcgaccaacgcctttaccaccacgacattaacggctcgattgcccatgcaaccatgcttgcaagtgttggcgttctttctgaagatgaaaaaacagccattatcgacggcctagaagccattcgcagcgatattgttgagggtaaatttgactggtctatcagcttagaagacgttcacatgaacatcgaagctgaacttaccaagcgcattggcattaccggtaagaaacttcataccggacgttcgcgcaatgaccaagttgccacagatattcggctttatttacgcgatgaaatagacaacatagccaaagaacttacccgcctgcaaagcggtattctggatttggccgaacgcgaagccgacaccattatgcccggctttacccatttgcaaacggcgcagccggtaaccttcggccaccacttaatggcgtggtacgaaatgatgacccgcgattacactcgcctaatggattgtcgtgagcgcttaaaccaaagcccactgggtgcggcggcactagctggcaccacttacccgattgatcgcgagcaaacagctgcgctattgggctttaatcacccaacccgcaactcgctcgactcggtaagcgatcgcgatttcgccatagaatttagcgcttttgccgctattttaatgactcacctttcacgcgccagcgaagagttagtactttgggcttctgcacaatttaactttataaacttaccagaccgcttctgcactggctcatcgattatgccgcaaaagaaaaaccccgatgtgccagagcttgtacgcggtaaaaccggtcgtgttaacggccaccttattagcttgctcacgctaatgaagtcgcagcctttggcatacaacaaagacaaccaagaagacaaagagccgctgtttgacgctatcgacaccgtaaaagattgtttgcgcgctttcgccgatatggtgcccgccatagaaagtaaaaaagaatctatgtacgaagccgccaaacgcgggttctcgacagcgacagacttggccgactacttggtgcgcaaaggtattcccttccgcgattcacacgaagtagtaggtaaggccgttggctacggtgtagaaaccggtaaagacctatctgaaatgacactagaagaattgcagggcttctctaaagagatacagcaagacgtattcgacgtgctcacccttgaaggctctgtagcggcaagaaaccacattggcggaaccgcacctgcacaagtgcgcatagcagtagaaaatgccaagcaggagttagagggaagaaacagctaa

SEQ ID NO: 88098 - protein, 469 aa, Saccharophagus degradans
MTMSQEENPVKPWGGRFSEPTDAFVERFTASVTFDQRLYHHDINGSIAHATMLASVGVLSEDEKTAIIDGLEAIRSDIVEGKFDWSISLEDVHMNIEAELTKRIGITGKKLHTGRSRNDQVATDIRLYLRDEIDNIAKELTRLQSGILDLAEREADTIMPGFTHLQTAQPVTFGHHLMAWYEMMTRDYTRLMDCRERLNQSPLGAAALAGTTYPIDREQTAALLGFNHPTRNSLDSVSDRDFAIEFSAFAAILMTHLSRASEELVLWASAQFNFINLPDRFCTGSSIMPQKKNPDVPELVRGKTGRVNGHLISLLTLMKSQPLAYNKDNQEDKEPLFDAIDTVKDCLRAFADMVPAIESKKESMYEAAKRGFSTATDLADYLVRKGIPFRDSHEVVGKAVGYGVETGKDLSEMTLEELQGFSKEIQQDVFDVLTLEGSVAARNHIGGTAPAQVRIAVENAKQELEGRNS

SEQ ID NO: 88099 - DNA, 1392 bp, Saccharomyces douglasii
  CDS (1)..(1392)
atgtcagatggtactcaaaaactatggggtgggagattcactggtgaaaccgatcctttgatgcacctttacaatgcctctcttccctatgattacaagatgtacaaggcagatttggaaggaaccaaggtatacaccgcgggcttacagaagttgggtctcctaacggatgcagaattggccaagatccatgaaggtttagctgaaatccaaaaagaatgggatgctgacaaatttgtccgtcatccaaacgatgaggatatccatactgcgaatgaaagacgtctcggtgaaataattggtcgtgagattgctggtaaagtccataccggcagatcccgtaacgatcaagttgttaccgatttgagaatatactgtcgtgacgttgtcaatgacacgctctttccagctctaaagggcttggttgatgttctaattaaaagggccgagggcgaaatagatattttgatgccaggctacacgcatttacaaagggcgcaacctattagatggtctcattggttgagctcttacgcaacgtacttcacggaagattacaaaagactgggccaaatactgcatagattgaatcaatcaccactgggtgcaggcgctcttgcaggtcatccttacggtatcgatagggaatttttggctgaaggtctaggtttcaatagtgttattggtaactctttagttgctgtttctgatagggatttcatcgtggagttgatgttttggggaaccttatttatgaaccatatttcccgttttgcggaagatttgattatatattgtacggctgaatttggtttcatacagctaagcgacgcttattcaacaggttcttctttaatgcctcagaagaagaatgcagactctttagagttattgagaggtaaatccggtagagtatttggtgatctaacaggattcttgatgagtttgaagggtatcccatctacctacgataaagacatgcaagaagacaaagaaccactgtttgattgcttgacaactgtagaacactctatgctgattgccacaggtgttatttctaccttaactgtaaataaggataagatggaagctgctctaacgatggatatgctggctaccgacttggcagactacttggtcagaaagggtgttccattcagagagacccatcacatttctggcgagtgtgttgctactgctgaaaacctaggtctaagtggcatcgataaattaactctggaacaatatcaaaagattgattcaagatttgcagaagatctttttgaaacttttaattttgagcaaagcgttgaaaggagaaatgctactggtggaactgctaagtctgctgtattgaaacaattgaataacttgaaatcccaactaaattaa

SEQ ID NO: 88100 - protein, 463 aa, Saccharomyces douglasii
MSDGTQKLWGGRFTGETDPLMHLYNASLPYDYKMYKADLEGTKVYTAGLQKLGLLTDAELAKIHEGLAEIQKEWDADKFVRHPNDEDIHTANERRLGEIIGREIAGKVHTGRSRNDQVVTDLRIYCRDVVNDTLFPALKGLVDVLIKRAEGEIDILMPGYTHLQRAQPIRWSHWLSSYATYFTEDYKRLGQILHRLNQSPLGAGALAGHPYGIDREFLAEGLGFNSVIGNSLVAVSDRDFIVELMFWGTLFMNHISRFAEDLIIYCTAEFGFIQLSDAYSTGSSLMPQKKNADSLELLRGKSGRVFGDLTGFLMSLKGIPSTYDKDMQEDKEPLFDCLTTVEHSMLIATGVISTLTVNKDKMEAALTMDMLATDLADYLVRKGVPFRETHHISGECVATAENLGLSGIDKLTLEQYQKIDSRFAEDLFETFNFEQSVERRNATGGTAKSAVLKQLNNLKSQLN

SEQ ID NO: 88101 - DNA, 1377 bp, Salmonella paratyphi
  CDS (1)..(1377): transl_table=11
atggcactttggggtgggcgttttacacaggcggcagaccagcggtttaaacaattcaatgattcgttgcgcttcgattaccgtctggcggagcaggatattgtcggttctgtggcctggtccaaagcattggtcacggtaggcgtactgactgccgatgagcaacgacagttggaagaagcgctgaacgtgctgctggaggaggttcgcgcgaatccgcagcaaatcctgcaaagcgatgcggaagatatccatagctgggtggaaggtaagctcatcgacaaagtgggccagttgggtaaaaagctgcacaccgggcgcagccgtaacgatcaggtggcgacggacctgaaactgtggtgcaaagagacggtgagggaactgcttaccgctaaccgcctgctacagagcgcgctggtggaaaccgcgcaggtgaaccaggacgcggtaatgccgggatatacccatctgcaacgcgcgcagccagtgactttcgcccactggtgtctcgcgtatgtcgaaatgctggcgcgcgatgaaagccgcctgcaggacacgcttaaacgtctggacgtgagtccgctaggttgcggcgcgttggcgggaacggcctatgaaattgaccgtgaacaattggcaggctggctgggctttgcgtctgcgacccgcaacagcctggacagcgtgtccgatcgtgaccacgtactggaactgctttctgatgcggctatcggcatggtgcatctgtcacgcttcgcggaagatctgattttctttaattctggtgaagcgggttttgtagagctttctgaccgcgtgacttccggttcatcgttaatgccgcagaagaaaaacccggacgcgctggagctgattcgcggtaagtgcggtcgcgtacaaggggcgctaaccggcatgatgatgaccttaaaaggtctgccgctggcgtacaacaaagatatgcaggaagacaaagaagggctgttcgatgcgctcgatacctggcttgactgcctgcatatggcggcgttggtgctggacggtattcaggtgaaacgcccacgttgtcaggaggcggcgcaacaggggtatgctaacgccaccgagctggcggattacctggtcgcgaaaggcgtgccgttccgcgaagcgcaccatattgtcggcgaggcggtggtagaagctattcgccagggtaagccgttggaagcgttgccgctggccgatttacagaaattcagccgcgtgattggcgacgatgtgtatccgatattgtctttgcagtcgtgtctggataaacgggcggcaaaaggcggcgtttctccacagcaggtggcgcaggccatcgacgatgccagggcgcgcctcgcgttgtag

SEQ ID NO: 88102 - protein, 458 aa, Salmonella paratyphi
MALWGGRFTQAADQRFKQFNDSLRFDYRLAEQDIVGSVAWSKALVTVGVLTADEQRQLEEALNVLLEEVRANPQQILQSDAEDIHSWVEGKLIDKVGQLGKKLHTGRSRNDQVATDLKLWCKETVRELLTANRLLQSALVETAQVNQDAVMPGYTHLQRAQPVTFAHWCLAYVEMLARDESRLQDTLKRLDVSPLGCGALAGTAYEIDREQLAGWLGFASATRNSLDSVSDRDHVLELLSDAAIGMVHLSRFAEDLIFFNSGEAGFVELSDRVTSGSSLMPQKKNPDALELIRGKCGRVQGALTGMMMTLKGLPLAYNKDMQEDKEGLFDALDTWLDCLHMAALVLDGIQVKRPRCQEAAQQGYANATELADYLVAKGVPFREAHHIVGEAVVEAIRQGKPLEALPLADLQKFSRVIGDDVYPILSLQSCLDKRAAKGGVSPQQVAQAIDDARARLAL

SEQ ID NO: 88103 - DNA, 1377 bp, Salmonella typhimurium
  CDS (1)..(1377): transl_table=11
atggcactttggggtgggcgttttacacaggcggcagaccagcggtttaaacaattcaatgattcgttgcgcttcgattaccgtctggcggagcaggatattgtcggttctgtggcctggtccaaagcattggtcacggtaggcgtactgactgccgatgagcaacgacagttggaagaagcgctgaacgtgctgctggaagaggttcgcgcgaatccgcagcaaatcctgcaaagcgatgcggaagatatccatagctgggtggaaggtaagctcatcgacaaagtgggtcagttgggtaaaaagctgcacaccgggcgcagccgtaacgatcaagtggcgacggacctgaaactgtggtgcaaagagacggtgagggaactgcttaccgctaaccgccagttacagagcgcgctggtggaaaccgcgcaggcgaaccaggacgcggtaatgccgggatatacccatctgcaacgcgcgcaaccagtgactttcgcccactggtgtctcgcgtatgtcgaaatgctggcgcgcgatgaaagccgcctgcaggacacgcttaaacgtctggacgtgagtccgctaggctgcggcgcgttggcgggaacggcctatgaaattgaccgtgaacaattggcaggctggctgggctttacctctgcgacccgcaacagcctggacagcgtgtccgatcgtgaccacgtactggaactgctttctgatgcggctatcggcatggtgcatctgtcacgcttcgcggaagatctgattttctttaattctggtgaagcgggctttgtagagctttctgaccgcgtgacttccggttcatcgttaatgccgcagaagaaaaacccggacgcgctggagctgattcgcggtaagtgcggtcgcgtacaaggggcgctaaccggcatgatgatgactttaaaaggtctgccgctggcgtataacaaagatatgcaggaagacaaagaagggctgttcgatgcgctcgatacctggcttgactgcctgcatatggcggcgttggtgctggacggtattcaggtgaaacgcccacgttgtcaggacgcggcgcaacaggggtatgccaacgccacggagctggcggattacctggtcgcgaaaggcgtgccgttccgcgaagcgcaccatattgttggcgaagcggtggtagaagctattcgccagggtaagccgctggaagcgttgccgctggccgatttacagaaattcagccgcgtgattggcgacgatgtgtatccgatattgtctttgcagtcgtgtctggataaacgggcggcaaaaggcggcgtttctccgctgcaggtggcgcaggccatcaacgatgcgaaggcgcgcctcgcgttgtaa

SEQ ID NO: 88104 - protein, 458 aa, Salmonella typhimurium
MALWGGRFTQAADQRFKQFNDSLRFDYRLAEQDIVGSVAWSKALVTVGVLTADEQRQLEEALNVLLEEVRANPQQILQSDAEDIHSWVEGKLIDKVGQLGKKLHTGRSRNDQVATDLKLWCKETVRELLTANRQLQSALVETAQANQDAVMPGYTHLQRAQPVTFAHWCLAYVEMLARDESRLQDTLKRLDVSPLGCGALAGTAYEIDREQLAGWLGFTSATRNSLDSVSDRDHVLELLSDAAIGMVHLSRFAEDLIFFNSGEAGFVELSDRVTSGSSLMPQKKNPDALELIRGKCGRVQGALTGMMMTLKGLPLAYNKDMQEDKEGLFDALDTWLDCLHMAALVLDGIQVKRPRCQDAAQQGYANATELADYLVAKGVPFREAHHIVGEAVVEAIRQGKPLEALPLADLQKFSRVIGDDVYPILSLQSCLDKRAAKGGVSPLQVAQAINDAKARLAL

SEQ ID NO: 88105 - DNA, 1386 bp, Schizosaccharomyces pombe
  CDS (1)..(1386)
atggcagaaaaatcaagcaaaaaactatggggaggtagattttcaggagctactgatccactgatggcagaattcaacaaatccatctatagtggaaaggaaatgtgcgaagaagatgttattggttccatggcgtacgcaaaagccttgtgccagaaaaatgtgatatctgaagaagagctgaatagcatcctaaaaggattggaacaaattcaaagagaatggaattcgggtcaattcgttttggaaccatccgacgaagatgttcacacagcaaacgagcgccgattaactgagataatcggtgatgttgctggcaagctacatactggcagaagtcgtaatgaccaagttaccaccgatttgcgtttatggctatgcagaaaaatcaaagaggttgaagtctatgtcattaacttgcttaaagtttttaccaacagagctgagatggagattgatgtaataatgtcaggttatacgcatttacaaagggctcagcctgttcgttggtcccattttctcatgtctcacgccttgcctttattaggtgaccttggcagacttcgtcagctgtatactcgtgtaagtcaattaccgctgggtgctggtgctttagctggcaaccctttcaacgtcgatcgcgagttccttcgtaaagagcttggattcgaaggcattatcatgaattccatgaatgctgttggtgatcgtgattttgtcatcgaatttatgttttgggcaggcatggtaatgcttcacatttctcgctttgctgaagatcttatcatatattcgagctcggaatttggattcgtcacactctccgatgcgtattctacgggaagtagtattatgccccaaaaaaagaaccctgattctttagagctacttcggggtaagagcggtcgtgttttaggtgatatgattggcctcatgataactgttaaaggcacacctacaacctataacaaagatttgcaagaagacaaggaaccactatttgatgcctttaagaccgtctctgactctttgcaaattttgactggcgttgtctcaacccttaccatcaatcctacaaagattgccgaaagcttgacccccgatttactagctaccgatttggctgagtatcttgttcgtaaaggtcttccatttcgccaaactcatcatatttcgggatccgcagttcgcatggctgaagagagaaacactactctcgacaagttatcagtttctgatttgcaatcattgcatcctttatttgatgaagacgtttcaaaagtctttaattacgaagaaagtgttgaaaaaagatgttcaattggtggtactgctaagcattgtgttcaagaacaaatcgagcatatacgatcagcaattctttaa

SEQ ID NO: 88106 - protein, 461 aa, Schizosaccharomyces pombe
MAEKSSKKLWGGRFSGATDPLMAEFNKSIYSGKEMCEEDVIGSMAYAKALCQKNVISEEELNSILKGLEQIQREWNSGQFVLEPSDEDVHTANERRLTEIIGDVAGKLHTGRSRNDQVTTDLRLWLCRKIKEVEVYVINLLKVFTNRAEMEIDVIMSGYTHLQRAQPVRWSHFLMSHALPLLGDLGRLRQLYTRVSQLPLGAGALAGNPFNVDREFLRKELGFEGIIMNSMNAVGDRDFVIEFMFWAGMVMLHISRFAEDLIIYSSSEFGFVTLSDAYSTGSSIMPQKKNPDSLELLRGKSGRVLGDMIGLMITVKGTPTTYNKDLQEDKEPLFDAFKTVSDSLQILTGVVSTLTINPTKIAESLTPDLLATDLAEYLVRKGLPFRQTHHISGSAVRMAEERNTTLDKLSVSDLQSLHPLFDEDVSKVFNYEESVEKRCSIGGTAKHCVQEQIEHIRSAIL

SEQ ID NO: 88107 - DNA, 1374 bp, Shigella flexneri
  CDS (1)..(1374): transl_table=11
atggcactttggggcgggcgttttacccaggcagcagatcaacggttcaaacaattcaacgactcactgcgctttgattaccgtctggcggagcaggatattgttggctctgtggcctggtccaaagccttggtaacggtcggcgtgttaaccgcagaagagcaggcgcaactggaagaggcgctgaacgtgttgctggaagatgttcgcgccaggccacaacaaatccttgaaagcgacgccgaagatatccatagctgggtggaaggcaaactgatcgacaaagtgggccagttaggcaaaaagctgcataccgggcgtagccgtaatgatcaggtagcgactgacctgaaactgtggtgcaaagataccgttagcgagttactgacggctaaccggcagctgcaatcggcgctggtggaaaccgcacaaaacaatcaggacgcggtaatgccaggttacactcacctgcaacgcgcccagccggtgacgttcgcgcactggtgcctggcctatgttgagatgctggcgcgtgatgaaagccgtttgcaggatgcgcttaagcgtctggatgtcagcccattaggctgtggcgcgctggcgggaacggcctatgaaatcgaccgtgaacagttagcaggctggctgggctttgcttcggcgacccgtaacagtctggacagcgtttctgaccgtgaccatgtgttggaactgctttctgctgccgctatcggcatggtgcatctgtcgcgttttgctgaagatctgattttctttaacaccggcgaagcggggtttgtggagctttcggaccgcgtgacttccggttcatcattaatgccgcagaagaaaaacccggatgcgctggagctgattcgcggtaaatgcggccgggtgcagggtgcgttaaccggcatgatgatgacgctgaaaggtttgccgctggcttacaacaaagatatgcaggaagacaaagaaggtctgttcgacgcgctcgatacctggctggactgcctgcatatggcggcgctggtactggacggcattcaggtgaaacgtccgcgttgtcaggaagcggcgcagcaggggtatgcgaacgccactgaactggcggattacctggtggcgaaaggcgtacctttccgcgaggcgcaccatattgtgggtgaagcggtggtggaagccattcgtcagggcaaaccgctggaagatctgccactcagtgagttgcagaaattcagtcaggtgattggcgaagatgtctatccgattctgtcgctacaatcgtgcctcgaaaagcgtgcggcaaaaggcggcgtctcaccgcagcaggtggcgcaggcgattgcttttgcgcaggctcggttagagtaa

SEQ ID NO: 88108 - protein, 457 aa, Shigella flexneri
MALWGGRFTQAADQRFKQFNDSLRFDYRLAEQDIVGSVAWSKALVTVGVLTAEEQAQLEEALNVLLEDVRARPQQILESDAEDIHSWVEGKLIDKVGQLGKKLHTGRSRNDQVATDLKLWCKDTVSELLTANRQLQSALVETAQNNQDAVMPGYTHLQRAQPVTFAHWCLAYVEMLARDESRLQDALKRLDVSPLGCGALAGTAYEIDREQLAGWLGFASATRNSLDSVSDRDHVLELLSAAAIGMVHLSRFAEDLIFFNTGEAGFVELSDRVTSGSSLMPQKKNPDALELIRGKCGRVQGALTGMMMTLKGLPLAYNKDMQEDKEGLFDALDTWLDCLHMAALVLDGIQVKRPRCQEAAQQGYANATELADYLVAKGVPFREAHHIVGEAVVEAIRQGKPLEDLPLSELQKFSQVIGEDVYPILSLQSCLEKRAAKGGVSPQQVAQAIAFAQARLE

SEQ ID NO: 88109 - DNA, 1392 bp, Silicibacter pomeroyi
  CDS (1)..(1392): transl_table=11
atgaccgacaagacctcgaaccagatgtggggcggccgctttgccgccggaccggacgcgatcatggaggcgatcaacgcctcgatcgggttcgacaagcgactggcggcccaggacatcgcgggttcgcgggcccatgcggccatgttggcggccacgggcgttattacggatagtgatgccgaggccattcgggaaggcctgctcaccgttttgtcagagatcgaggcgggagagtttaccttttccaccgcgctggaggacattcacatgaatgtcgaggcgcggctgaaggaaatcatcggcgaaccggcgggccggctgcataccgcgcggtcgcgcaacgaccaggtggcgaccgatttcaaactgtgggtgcgcgatcagttcgatgccgccgaagcgggcctcctcgcgctcttgcgagcgctcctcggccaggccgaggcgggggccgattgggtgatgccgggcttcacccatctccagaccgcacagccggtgacctggggccatcacatgatggcctatgtcgagatgttcggccgcgatctgagccgggtgcgcgacgcccgcgcacggatgaacgaatcgcccctgggttcggcggcgctggcgggaacgtcgttcccgatcgaccggcacatgacggcggcggcgctgggctttgaccggcctaccgccaactcgttggacgcagtgagtgatcgtgatttcgcgctggagttcctgtcggtcgcctcgatctgtgccatgcatctgagccgctttgccgaggagctggtgatctggtccagcgcccagttccgctttgtcacgctcagcgaccggttttcgaccggctcgtcgatcatgccgcagaagaagaaccccgacgcggccgaactgatccgggccaaggtgggccgcatctttggcgccaataccgcgctgatgatggtgatgaaggggctgccgctagcttattccaaggacatgcaggaggacaaggaacaggtcttcgatgctgccgacaactggatgctggcactggcggcgatggaaggcatggtgcgcgacatgaccgccaaccgcgacagcctcgccgcggctgcgggctctggtttctcgaccgcgaccgatctggccgactggctggtgcgtgtgctgggcctgccgttccgggatgcccatcacgtgaccggtgcgctggttgcgctggccgaaagcaaaggctgcgatctgccggacctgagcctggatgagatgcaatcggcccatgccgcgatcaccgaggatgtctatggtgtccttggggtggaaaattcggtaaactcgcgccagagctatggcggcaccgcgcccgcgcaggtgcgcgcgcaggtcgcccgctggaaggagatgctggcatga

SEQ ID NO: 88110 - protein, 463 aa, Silicibacter pomeroyi
MTDKTSNQMWGGRFAAGPDAIMEAINASIGFDKRLAAQDIAGSRAHAAMLAATGVITDSDAEAIREGLLTVLSEIEAGEFTFSTALEDIHMNVEARLKEIIGEPAGRLHTARSRNDQVATDFKLWVRDQFDAAEAGLLALLRALLGQAEAGADWVMPGFTHLQTAQPVTWGHHMMAYVEMFGRDLSRVRDARARMNESPLGSAALAGTSFPIDRHMTAAALGFDRPTANSLDAVSDRDFALEFLSVASICAMHLSRFAEELVIWSSAQFRFVTLSDRFSTGSSIMPQKKNPDAAELIRAKVGRIFGANTALMMVMKGLPLAYSKDMQEDKEQVFDAADNWMLALAAMEGMVRDMTANRDSLAAAAGSGFSTATDLADWLVRVLGLPFRDAHHVTGALVALAESKGCDLPDLSLDEMQSAHAAITEDVYGVLGVENSVNSRQSYGGTAPAQVRAQVARWKEMLA

SEQ ID NO: 88111 - DNA, 1392 bp, Staphylococcus epidermidis
  CDS (1)..(1392): transl_table=11
atgagcaataaagcttggggtggcagatttgaaactcaacccgaagaatgggttgatgatttcaatgcgtcaattgattttgataaaaatttaattaaacaagatgttcaaggtagtattgcacatgcaactatgctcgctaaacaacatattattacagatgatgaagctcaatccatcattaatgagcttaaaaatattcaaagtgactttgaagaaggtaaacttaaatttaaagcttctctcgaagatattcatcttaatattgagcacgagcttattcaacgtattggcgaagctggtggaaaactgcatactggtcgtagccgtaatgatcaagttgccacagatatgcatttgtatactaaagaacaagttcaatacattattgaacttatagcgtcgtttcaagaaacaattgttcaattagcagaccagcacgttgacacaattatgcctggatacacgcatttacaacgtgcacaacccatctcgttcgcacatcatattatgacttacttttggatgttagaaagagacaaaggtagattcatggatagtcttaaacgtatagatatctcaccattaggtgctgcagctttaagtggaactacacaccctatagatagacatctgactcaagaacttctaggatttgcaaatctgtatgaaaatagtttagatgctgtcagtgatcgtgactatatcgttgaaacattgcatcatatttcactcactatggtacatctatcacgttttgcagaagaaatcattttttggtcgactgatgaggcaaaatttatcactttatcagatgcgttttctactggctcatctattatgccacaaaagaaaaaccctgatatggctgaactaataagaggaaaagtcggacgtactacaggacacttgatgagtatgttagtaacacttaaaggcttacccttagcttataataaagacatgcaagaagataaagaaggtttatttgatgctgtacacacacttaaaggctctcttcgaatcttcgaaggtatggttgcatctatgaaagttaattcaaaccgtttaagtcaaacagtaaaaaatgatttttcaaatgcaacagaattagcagactatttagtcagtaaaagtgtaccttttagaaccgctcatgaaatcgttggtaaaatcgtattaaattgtattcataaaggtatatacctattagacgtacctttaagcgaatatcaagaacatcatgagaatattgaggaagatatatatgattatttaacacctgaaaattgtctcaagcgtcgccaaagctatggttcaactggtcaagaatcagtaaaacatcaactaaaagtcgcaaaagcattattaaaagacaacgaatcaaaatag

SEQ ID NO: 88112 - protein, 463 aa, Staphylococcus epidermidis
MSNKAWGGRFETQPEEWVDDFNASIDFDKNLIKQDVQGSIAHATMLAKQHIITDDEAQSIINELKNIQSDFEEGKLKFKASLEDIHLNIEHELIQRIGEAGGKLHTGRSRNDQVATDMHLYTKEQVQYIIELIASFQETIVQLADQHVDTIMPGYTHLQRAQPISFAHHIMTYFWMLERDKGRFMDSLKRIDISPLGAAALSGTTHPIDRHLTQELLGFANLYENSLDAVSDRDYIVETLHHISLTMVHLSRFAEEIIFWSTDEAKFITLSDAFSTGSSIMPQKKNPDMAELIRGKVGRTTGHLMSMLVTLKGLPLAYNKDMQEDKEGLFDAVHTLKGSLRIFEGMVASMKVNSNRLSQTVKNDFSNATELADYLVSKSVPFRTAHEIVGKIVLNCIHKGIYLLDVPLSEYQEHHENIEEDIYDYLTPENCLKRRQSYGSTGQESVKHQLKVAKALLKDNESK

SEQ ID NO: 88113 - DNA, 1434 bp, Streptomyces avermitilis
  CDS (1)..(1434): transl_table=11
gtgagcagcaacagcggtgacgtacggctctggggcggccgtttcgccgacggtcccgccgaggccctggcgaagctgtccgcgtccgtccacttcgactggcggctcgcgccctacgacatcgcaggttcgcgtgcccacgcgcgcgtgctgcacaaggcgaacctcctcacggacgacgagctggaccgtatgctcgcgggcctcgaccggctcgaagccgatgtcgcggacggcaccttcgtgggcaccatcgccgacgaggacgtccacaccgccctggagcgcggcctgctggagcgcctcggccccgacctcggcggcaagctccgcgccggccgctcccggaacgaccaggtcgcgaccctcttccgcatgtacctgcgcgaccacgcccgcgtcatcggcggcctcctcgccgacctccaggacgcgctgatcggactggcggaggcccacccggacgtggcgatgcccggccgcacgcacctccagcacgcccagccggtgctcttcgcccaccacgtcctcgcgcacgtccaggcgctgtcccgggacgccgagcggctgcgccagtgggacgagcgcacggccgtgtcgccgtacggctcgggtgccctcgccggttcctccctcggcctcgacccggagtcggtcgcgaaggacctcggcttcgagcacggctcggtcgccaactccatcgacggcacggcctcccgtgacttcgtcgccgagttcgccttcatcaccgcgatgattggggtgaacctctcccggatcgccgaggaggtcatcatctggaacacgaaggagttctccttcgtcaccctccacgacgccttctccaccggctcgtcgatcatgccgcagaagaagaacccggacatcgccgagctggcgcgcggcaagtcgggccgcctgatcggcaatctgaccggcctgatggcgacgctcaaggccctcccgctcgcgtacaaccgcgacctccaggaggacaaggagccggtcttcgactcctgcgaccagctcgaagtcctgctccccgccttcaccggcatgatggcgacgctgaccgtccaccgtgagcgcatggaggagctggccccggccgggttctcgctcgccaccgacatcgccgagtggctggtcaagcagggcgtgccgttccgggtcgcgcacgaggtcgcgggcgagtgcgtgaaggtcgccgagggcgagggcatcgagctggacggcctcaccgacgagcagttcgcgaagatctcgtcccacctcacccccgaggtgcgcggcgtcctcaacgtcccgggcgccctggcctcccgcgacggccgcggcggtacggcacccagcgcggtcgccgtccagctcgccgaggtcaggacggacgtggcggcacagcacgcctgggccaccgcgaagcagaagaactag

SEQ ID NO: 88114 - protein, 477 aa, Streptomyces avermitilis
MSSNSGDVRLWGGRFADGPAEALAKLSASVHFDWRLAPYDIAGSRAHARVLHKANLLTDDELDRMLAGLDRLEADVADGTFVGTIADEDVHTALERGLLERLGPDLGGKLRAGRSRNDQVATLFRMYLRDHARVIGGLLADLQDALIGLAEAHPDVAMPGRTHLQHAQPVLFAHHVLAHVQALSRDAERLRQWDERTAVSPYGSGALAGSSLGLDPESVAKDLGFEHGSVANSIDGTASRDFVAEFAFITAMIGVNLSRIAEEVIIWNTKEFSFVTLHDAFSTGSSIMPQKKNPDIAELARGKSGRLIGNLTGLMATLKALPLAYNRDLQEDKEPVFDSCDQLEVLLPAFTGMMATLTVHRERMEELAPAGFSLATDIAEWLVKQGVPFRVAHEVAGECVKVAEGEGIELDGLTDEQFAKISSHLTPEVRGVLNVPGALASRDGRGGTAPSAVAVQLAEVRTDVAAQHAWATAKQKN

SEQ ID NO: 88115 - DNA, 1428 bp, Streptomyces coelicolor
  CDS (1)..(1428): transl_table=11
gtgagcagcaacagcggtgacgtccggctctggggcggccgtttcgccgacggtcccgccgaggccctggcgaagctgtccgcgtccgtccacttcgactggcggctcgcgccctacgacatcgccggttcgcgcgcccacgcgcgcgtgctgcacgcggcggggctgctcaccgaggacgagctgacccggatgatcgccggactggaccggctggaggcggacgtcgccgacggctccttcaccggcaccatcgccgacgaggacgtccacacggccctggagcgcgggctgctggagcgcctcggccccgacctcggcggcaagctgcgcgccgggcgctcccgcaacgaccaggtggcgaccctcttccggatgtacctgcgcgaccacgcccggaccgtcggctcgctgatcgccgacctccaggacgcactggtcggcctcgccgaggcccacccggacgtggccatgcccggccgcacccacctccagcacgcccagccggtgctcttcgcccaccacgtgctcgcccacgcccaggcgctgggccgggacgcggagcggctgcgccagtgggacgcgcgcaccgccgtctccccgtacggctcgggcgcgctcgcgggcagcagcctcggcctggacccggaggccgtcgcccgtgacctgggcttcgagcacggcagcgtcggcaactccatcgacgggacggcctcgcgcgacttcgtcgccgagttcgccttcatcaccgcgatgatcggcgtcaacgtctcccggatcgccgaggagatcatcatctggaacacgaaggagttctccttcgtcaccctccacgacgccttctccaccggctcctcgatcatgccgcagaagaagaaccccgacatcgccgagctggcccgcggcaagtccgggaggctgatcggcaacctgaccggcctgatggcgaccctcaaggcgctcccgctcgcgtacaaccgcgacctccaggaggacaaggagccggtcttcgactccatcgaccagctggaggtcctgctccccgccttcaccggcatgatggccaccctcaccgtgcaccgcgagcggatggaggagctggccccggccgggttctcgctcgccaccgacatcgccgagtggctggtcaagcagggtgtgccgttccgcgtcgcgcacgaggtggccggcgagtgcgtcaaggtcgccgaggccgacggcaaggagctggacgagctgaccgacgagcagttcgccaagatctccgagcacctcacccccgaggtgcgcaccgtcctcaacgtccccggcgccctggcctcccgcgacggccgcggcggcacggcgcccagcgcggtcgccgtccagctcgccgaggtcaaggcggacgtggcggcccagcacgcctgggcggacgccaagaagtag

SEQ ID NO: 88116 - protein, 475 aa, Streptomyces coelicolor
MSSNSGDVRLWGGRFADGPAEALAKLSASVHFDWRLAPYDIAGSRAHARVLHAAGLLTEDELTRMIAGLDRLEADVADGSFTGTIADEDVHTALERGLLERLGPDLGGKLRAGRSRNDQVATLFRMYLRDHARTVGSLIADLQDALVGLAEAHPDVAMPGRTHLQHAQPVLFAHHVLAHAQALGRDAERLRQWDARTAVSPYGSGALAGSSLGLDPEAVARDLGFEHGSVGNSIDGTASRDFVAEFAFITAMIGVNVSRIAEEIIIWNTKEFSFVTLHDAFSTGSSIMPQKKNPDIAELARGKSGRLIGNLTGLMATLKALPLAYNRDLQEDKEPVFDSIDQLEVLLPAFTGMMATLTVHRERMEELAPAGFSLATDIAEWLVKQGVPFRVAHEVAGECVKVAEADGKELDELTDEQFAKISEHLTPEVRTVLNVPGALASRDGRGGTAPSAVAVQLAEVKADVAAQHAWADAKK

SEQ ID NO: 88117 - DNA, 1392 bp, Streptococcus pneumoniae
  CDS (1)..(1392): transl_table=11
atggctaagaatacaaaattatggggtggtcgctttgaaggtactgtcgaagactgggtagagcgctttggtgcgagtatatcttttgaccagaaattagctaaatttgatgtgattggttctttagcccacgttcagatgttgggtcagacgggcattttgagtttggaggagtcagaaaagattcaagtaggcttgaaagagcttttagaagagctagaggcaggtcaacttgactttgatatcgcaaacgaagatattcatatgaatatggaagtgttgctgacagaaaaaattggtccccttgcagggaagttacatacggctcgttctcgaaatgaccaagttgcgacagatatgcacttgtatctcaaggaacaactaggctatgtcctagataaactggctcatcttaagggtgttttattagacttggcggaaaatcatgtggcgacgatcatgccgggctatacccatctgcaacatgcccagcctattagttttgcctaccacctgatggcttactacaatatgtttcaaagagacagtgaacgttttgaatttaaccagaagcatacagacctatgccctttaggtgcggcagctttggcaggaacgactttccccattgatcgccaattgtctagcgatttgctggagtttaagcaaccttatacaaattctttggatgctgttagtgaccgcgattttatcttagaatttctatcaaatgccagcatactcatgatgcatatgagtcgtttttgcgaagaaatgattaattggtgtagttttgagtaccaattcattaccttgtcagatacgtttacaataggttcctctattatgccccaaaagaaaaatccagatatggctgagttgattcgaggaaagactggcagagtttatgggcatttgtttggactgttgacagtcatgaagtccttgcctttagcttataataaggatttgcaagaagataaggaaggaatgtttgatacggtcgaaacgattttaaattccctcgatgtgttggcaggtatgttatctagtttgcaggtaaacaaggaaaaaatgcaagaatcaacagagaaggacttttcaaatgcaactgagttggcagattatttggcagggaaaggcttgccatttagagaagctcatgaggttgtgggaagattagtgctagactctatcaagtctgctaaaaatcttcaagattggactttggaggaattacaaacctatcattctctcattaccgaggatatctatgtctacttgcaacctaaaactgctgttcaaagacgaaattccttgggaggcacagggtttgaccaagtcgaataccagattgcagtcgctaagaaagcgaatgaagctaaaaagtga

SEQ ID NO: 88118 - protein, 463 aa, Streptococcus pneumoniae
MAKNTKLWGGRFEGTVEDWVERFGASISFDQKLAKFDVIGSLAHVQMLGQTGILSLEESEKIQVGLKELLEELEAGQLDFDIANEDIHMNMEVLLTEKIGPLAGKLHTARSRNDQVATDMHLYLKEQLGYVLDKLAHLKGVLLDLAENHVATIMPGYTHLQHAQPISFAYHLMAYYNMFQRDSERFEFNQKHTDLCPLGAAALAGTTFPIDRQLSSDLLEFKQPYTNSLDAVSDRDFILEFLSNASILMMHMSRFCEEMINWCSFEYQFITLSDTFTIGSSIMPQKKNPDMAELIRGKTGRVYGHLFGLLTVMKSLPLAYNKDLQEDKEGMFDTVETILNSLDVLAGMLSSLQVNKEKMQESTEKDFSNATELADYLAGKGLPFREAHEVVGRLVLDSIKSAKNLQDWTLEELQTYHSLITEDIYVYLQPKTAVQRRNSLGGTGFDQVEYQIAVAKKANEAKK

SEQ ID NO: 88119 - DNA, 1386 bp, Symbiobacterium thermophilum
  CDS (1)..(1386): transl_table=11
atgaccaagctgtggggaggccgcttcaccaagcccgcggacaagaccgccgaggggttcacctcgtcgctggcctttgaccggcggctgtacaaacaggacatccggggatccatcgctcacgtccgcatgctggggaggcagggcatcatcccggccgccgacgcggcgcgcattgagcaggggctccgggagatcgaggccgagatcgaggcggggcagtttccgttccgccaggagtacgaggacatccacctgaacatcgagaagcggctcatcgagaagatcggaccggccggggggcggctgcacaccgcccgcagccgcaacgaccaggtggtcacggacgtgcacctgtgggtgaaggacgagatcgccgcggtgcagcggctggtgagcgatcttcaggggacgctgctggaccgggcccgggagcagatgggcgccgtcatgcccggctacacccacctgcagcgggcgcagcccgtcctgctgtcgcaccacctgatggcctacttctggatgctggagcgggactacggccgcttcgcggacgcgctgcgacgcgctgacgtctcgcctctgggcgccggggcgctggcgggcaccaccttccccatcgaccgggagttcaccgcggcggagctgggcttcgccggggtgtaccccaactccatggacgcggtcagcgaccgggacttcatcgtggagttcgtggcggctgcggccatctgccagatgcacctctcccggctggcggaggagctggtgatgtggtcctccaccgagttcgggttcgtggagatggatgacgcctacgccaccggttcctccatcatgccgcagaagaagaacccggacgtggcggaactggtgcggggcaagaccggccgcatctacggcgacctgatggccctgctgacggtcctgaaggggctgcccctggcgtaccacaccgacctgcaggaggacaaggagcggctgttcgacgcggtggacaccctgaaggcctgcctgacggtgatgaccggcatgctggcgaccttgaagttcaaccgggagcgcatggcgcaggcggtccgccgggacttctccaacgcgaccgacatggcggactacctggtgaagaagggcatgcccttccgggaggcccacgaggtggtgggcaaggccgtgctctactgcgtcgagcggggcaagttcctggccgatctcaccctggaggagttcaaggcgttctcggcgctgttcgaggcggacatctaccaggccatcgcccccgagacctgcgtcagccagcgcacgtccctcgggggcaccgcccccgccgaggtggagcggcagctggccctggcggcggagatcctctcccggcggatggggtag

SEQ ID NO: 88120 - protein, 461 aa, Symbiobacterium thermophilum
MTKLWGGRFTKPADKTAEGFTSSLAFDRRLYKQDIRGSIAHVRMLGRQGIIPAADAARIEQGLREIEAEIEAGQFPFRQEYEDIHLNIEKRLIEKIGPAGGRLHTARSRNDQVVTDVHLWVKDEIAAVQRLVSDLQGTLLDRAREQMGAVMPGYTHLQRAQPVLLSHHLMAYFWMLERDYGRFADALRRADVSPLGAGALAGTTFPIDREFTAAELGFAGVYPNSMDAVSDRDFIVEFVAAAAICQMHLSRLAEELVMWSSTEFGFVEMDDAYATGSSIMPQKKNPDVAELVRGKTGRIYGDLMALLTVLKGLPLAYHTDLQEDKERLFDAVDTLKACLTVMTGMLATLKFNRERMAQAVRRDFSNATDMADYLVKKGMPFREAHEVVGKAVLYCVERGKFLADLTLEEFKAFSALFEADIYQAIAPETCVSQRTSLGGTAPAEVERQLALAAEILSRRMG

SEQ ID NO: 88121 - DNA, 1389 bp, Thermus thermophilus
  CDS (1)..(1389): transl_table=11
atggcgcataggacctggggggggcgcttcggggaggggccggatgcccttgcggcccgcttcaacgcctcccttgcctttgaccgggccctttggcgggaggacctctggcagaaccgggtccacgcccgcatgcttcacgccgtgggcctcctgagcgcggaggagcttgaggccatcctcaaggggctggaccggatagaggaggagattgaggcgggcaccttcccctggcgggaggagcttgaggacgtccacatgaacctcgaggcccgccttaccgagctcgtcggccccccggggggcaagctccacaccgcccgtagccgcaacgaccaggtggccacggacctgaggctttacctgcggggggccatagacgagctcctggcccttctccttgcgctccggcgggtcctggtgcgggaggccgagaagcacctggaccccctttatgtccttcccggctacacccacctgcagcgggcccagcccgtgctccttgcccactggttcctcgcctactacgagatgcttaagcgggacgcagggcgcctggaggacgccaaagagcgcctcaacgaaagccccctgggggcggccgccctcgcggggacgggcttccccatagaccgccacttcaccgccagggagcttggcttcaaggcccccatgcggaactccctggacgcggtggcctcccgggacttcgccctggaggtcctttccgccttgaacatcggcatgctccacctctcccgcatggcggaggagctcatcctctacagcaccgaggagttcggcttcgtggaggtgcccgacgccttcgccaccgggtcttccatcatgccccagaagaagaacccggacatcctggagctcatccgcgccaaggcggggagggtgctcggggccttggtggggctttccgcggtggtgaagggccttcccctcgcctacaacaaggacctccaggaggacaaggagccccttttggacgccctcgccacctacagggatagcctcaggctcctcgccgccctcctccccgggctcaagtggcgccgggagaggatgtggcgggcggcggaggggggctacaccctcgccacggagctcgccgactatctggcggaaaaggggcttcccttccgggaggcccaccacgtggtggggaggctcgtgcgaaggcttgtggaggaggggcgggccctgaaggacctcaccttggaagaactccaggcccaccaccccctcttcgccgaggacgcccttcccctcctccgcctggagaccgccatccataggcgccgctcctatggcggcacggccccggaggcggtgcgggagaggctagaggaggccaagaaggaggtggggcttgactga

SEQ ID NO: 88122 - protein, 462 aa, Thermus thermophilus
MAHRTWGGRFGEGPDALAARFNASLAFDRALWREDLWQNRVHARMLHAVGLLSAEELEAILKGLDRIEEEIEAGTFPWREELEDVHMNLEARLTELVGPPGGKLHTARSRNDQVATDLRLYLRGAIDELLALLLALRRVLVREAEKHLDPLYVLPGYTHLQRAQPVLLAHWFLAYYEMLKRDAGRLEDAKERLNESPLGAAALAGTGFPIDRHFTARELGFKAPMRNSLDAVASRDFALEVLSALNIGMLHLSRMAEELILYSTEEFGFVEVPDAFATGSSIMPQKKNPDILELIRAKAGRVLGALVGLSAVVKGLPLAYNKDLQEDKEPLLDALATYRDSLRLLAALLPGLKWRRERMWRAAEGGYTLATELADYLAEKGLPFREAHHVVGRLVRRLVEEGRALKDLTLEELQAHHPLFAEDALPLLRLETAIHRRRSYGGTAPEAVRERLEEAKKEVGLD

SEQ ID NO: 88123 - DNA, 1320 bp, Thermoanaerobacter tengcongensis
  CDS (1)..(1320): transl_table=11
atgaagctgtggggaggtaggtttaaaaaggacttggacaaactgatggaggatttcaattcctccatttcttttgatataaggcttttaaagtatgatataatgggctctattgcccatgcaaagggtctttacaaggctggcgttttaacagaagaggagcttaatttgatagaaaaagggcttaaagaaatacttgaggaatccgagttaaaagaaatacctcaggatgaagatgttcattcctatgtagaaaggcttcttgtagagaaaataggcgatgtagggcgtaaacttcacacaggaagaagcagaaacgaccaagttgcgacggatgaaaggctttatttaagagatgagatagacaaaataaaagaggatttaataaagcttatagatactctaaaagaaatggctgaaacttataaagaaacaattatgccgggatatacgcatttacagagggcacagcctgtgacttttggacattatcttcttgcctatgttgaaatgtttaaaagagatttgtcaaggcttgatgatatgatgaaaagagtcaatgtaatgcctttgggttctggtgctcttgcaggtactacctttaatatcgacagatattatgtcgcttctcttttagggttcgatgatataaccttaaacagtatggacggggttagtgatagagattttgtgatagaatttttaagctttgcttctataacaatgatgcatttgagcagattctgtgaggaattaattttgtggtctacaaaggaatttgactttattgaaatggacgatagattttcaacaggaagcagtatgatgccgcaaaagaaaaatcctgatgcagcagaattaataaggggcaaaaccggcagggtttacggcgatttgattacaatacttaccgtgatgaaaggactccctcttgcatataacaaagacatgcaggaggataaagaggccttgtttgacggaatagacactttaaaaatgtctttgaaagtatttacagaaatgataaagacaattaaagtaaaaacagacaacatggaaaaagctgcaaaatatggttatatgaatgctacagattttgcagactatcttgtacaaaaaggtattccttttaggaccgcccatgaaattgcaggcaaagttgtcttatatgcgatagaacgaaacttaccaattgaagagttatcacttgaagaacttaaaaaattcagcgatgtaatagaaaaagatgtatatgaggcgatagatataaaaaatattttaaaaaagagaaagacaataggttcaccgaggatattctaa

SEQ ID NO: 88124 - protein, 439 aa, Thermoanaerobacter tengcongensis
MKLWGGRFKKDLDKLMEDFNSSISFDIRLLKYDIMGSIAHAKGLYKAGVLTEEELNLIEKGLKEILEESELKEIPQDEDVHSYVERLLVEKIGDVGRKLHTGRSRNDQVATDERLYLRDEIDKIKEDLIKLIDTLKEMAETYKETIMPGYTHLQRAQPVTFGHYLLAYVEMFKRDLSRLDDMMKRVNVMPLGSGALAGTTFNIDRYYVASLLGFDDITLNSMDGVSDRDFVIEFLSFASITMMHLSRFCEELILWSTKEFDFIEMDDRFSTGSSMMPQKKNPDAAELIRGKTGRVYGDLITILTVMKGLPLAYNKDMQEDKEALFDGIDTLKMSLKVFTEMIKTIKVKTDNMEKAAKYGYMNATDFADYLVQKGIPFRTAHEIAGKVVLYAIERNLPIEELSLEELKKFSDVIEKDVYEAIDIKNILKKRKTIGSPRIF

SEQ ID NO: 88125 - DNA, 1392 bp, Thiobacillus denitrificans
  CDS (1)..(1392): transl_table=11
atgagcacgtcgtcgacgccgccgcaaggcgcctggtcgggccgcttttccgagcctgtttccgaaatcgtcaaacgctacacggcgtcgattccttttgattatcggctcgccgagttcgatattcagggctcgctcgcgcacgcggcgatgctgcaccacgtcggcgtcctgagcgccgacgacctcgcggcgatccgcggcggcatgggcgagctgctcgaagagatacgcgccgggcgcttcgcctggtcgctggataaggaggatgtgcacctcaacatcgaggcggcgctgacggcgaagatcggcgacgccggcaagcgcctgcacaccggacgcagccgcaacgatcaggtcgcgaccgacatccggctctatctgcgcgacgcgatcgaccgcatcctcgcgggcctcaaggcgtgccagacctcgctcgtcgaccttgccgaggcgcacgccgacaccgtaatgccgggcttcacccacctgcaggtcgcgcagccggtgaccttcggccaccatcttctcgcctatttcgagatgctcgcccgcgacgccgagcgcatggccgactgccgacggcgcgtcaaccgcctcccgctcggcgccgcggcgctcgcgggcacgagctaccccatcgatcgcgcctacgtcgcgcgcgaactcggcttcgaggccgtgtgcgagaactcgctcgacgccgtctccgaccgcgacttcgcgatcgaattcgcggccgcggcggcgctcgtgatgacgcatctgtcgcgcctctcggaagaactgatcctgtggatgagcccgcgcttcggcttcatcgaccttgccgaccgcttctgcaccggctcgtcgatcatgccgcagaagaagaatcctgacgtgcccgaactcgtgcgcggcaagaccgggcgggtcaacggccacctcgtcgcgttgctgaccctgatgaagggccagccgctcgcatacaacaaggacaatcaggaagacaaggaaccgctattcgatacggtcgacaccctggccgacacgcttgcgatctacgccgacatgctgcgcggcgtgacggtcaagcccgacgcgatgcacgcggccgtgatgcaaggcttcgcgaccgccaccgacctcgccgactacctggtcaagaaaggcctgcccttccgcgatgcgcacgaagtcgttgcgcgtgccgtgcgcgtcgccgacgaatccgggcgcgacctggccgacttgccgctcgacgaactgcagacgttcagcccgatcatcggcgacgacgtctacgcactattgaccctcgaaggctcgctcgccgcccgcgaccatttcggcggcaccgcgcccgcgcaggtccgcgcagcggtcgcgcgcgcccgcgggcgactttaa

SEQ ID NO: 88126 - protein, 463 aa, Thiobacillus denitrificans
MSTSSTPPQGAWSGRFSEPVSEIVKRYTASIPFDYRLAEFDIQGSLAHAAMLHHVGVLSADDLAAIRGGMGELLEEIRAGRFAWSLDKEDVHLNIEAALTAKIGDAGKRLHTGRSRNDQVATDIRLYLRDAIDRILAGLKACQTSLVDLAEAHADTVMPGFTHLQVAQPVTFGHHLLAYFEMLARDAERMADCRRRVNRLPLGAAALAGTSYPIDRAYVARELGFEAVCENSLDAVSDRDFAIEFAAAAALVMTHLSRLSEELILWMSPRFGFIDLADRFCTGSSIMPQKKNPDVPELVRGKTGRVNGHLVALLTLMKGQPLAYNKDNQEDKEPLFDTVDTLADTLAIYADMLRGVTVKPDAMHAAVMQGFATATDLADYLVKKGLPFRDAHEVVARAVRVADESGRDLADLPLDELQTFSPIIGDDVYALLTLEGSLAARDHFGGTAPAQVRAAVARARGRL

SEQ ID NO: 88127 - DNA, 1359 bp, Tremblaya princeps
  CDS (1)..(1359): transl_table=11
atgtggtcaggcagattctccagcccagtatgtgcgccagtgcagagttttacagcctcggtgggcttcgacagggctatgtgccactgcgacgctgcggtgcttgctgcacactgcaggtctctgtacctgcggcgcgtaatgagcatcgcagatcttgccgatgttgagagagggcttagcgaagtagcgatgggtgctagggccggagcgatatcatggcggccggagctggaggacgtccataggaacgtggagcacgtccttactgaactcgttggcaaggctggcaggatggctcacactggcaagtcgcgcaacgaccaggtatccacaacagctagggtatggcttaggcacatggcaggcgcagccatatgccgggtggaggagctagagcgggcccttgctgcaaggtcccgcgcatgcctaaacaccatgatgcccgggctaacacatatgcaggtagcgcaacctgtaaccgccgcccactatctaactgcgtatcgctgcatgctttcacgagaccgttcaaggctagtccgctgcacacgaggagcgtgtgttctgactctgggatctggcgcgctcgctgggactaaccacggaggagacaggtacaccacggcagacatgctggggctccattgcgtatcccctaattccctggacgccgtgtcagatagggacttcgtcatggagtacgcgctttgttgtgccgtactcatggtgcacatgtctcggctggctgaggacatgatcgcctggagcagctctatcgtcggcttcgcagtcctaggagacgcgctttgcactgggtcgtccatcatgccacagaagaagaacccagatatacttgagcttgtcagggccaaggctgccgtactaattggtggcgccatgggcatcatggccgtaatgaaggcacaggggctggcatacaacagggacaaccaggaagacaaggccgtccttctgggcgcatcgcgcgcagttaccaggtcgctatcggtgatggctttggctgtacgaagcctgcgtcttaacaagtctaggctgcgcagaaggctagaatcaagcttcgccatagcgacggaccttgctgacagcctagtatggcatggcatgaccttccgcgactctcacgaggccgtagcaagggcagtaggggtagctattcgagctgggcatgcaggactccgtgcgctgcccctgtgttcgcggggcgtagtgccgcccctgcttgctgcacggctggcacgcatagcgcaacccgacgctagggtctcagcgttccgcaaggattcaactgggtcgacgtctcccaagtggtccttcagggccatgaggagggcgtga

SEQ ID NO: 88128 - protein, 452 aa, Tremblaya princeps
MWSGRFSSPVCAPVQSFTASVGFDRAMCHCDAAVLAAHCRSLYLRRVMSIADLADVERGLSEVAMGARAGAISWRPELEDVHRNVEHVLTELVGKAGRMAHTGKSRNDQVSTTARVWLRHMAGAAICRVEELERALAARSRACLNTMMPGLTHMQVAQPVTAAHYLTAYRCMLSRDRSRLVRCTRGACVLTLGSGALAGTNHGGDRYTTADMLGLHCVSPNSLDAVSDRDFVMEYALCCAVLMVHMSRLAEDMIAWSSSIVGFAVLGDALCTGSSIMPQKKNPDILELVRAKAAVLIGGAMGIMAVMKAQGLAYNRDNQEDKAVLLGASRAVTRSLSVMALAVRSLRLNKSRLRRRLESSFAIATDLADSLVWHGMTFRDSHEAVARAVGVAIRAGHAGLRALPLCSRGVVPPLLAARLARIAQPDARVSAFRKDSTGSTSPKWSFRAMRRA

SEQ ID NO: 88129 - DNA, 1377 bp, Vibrio cholerae
  CDS (1)..(1377): transl_table=11
atggcattatggggcggaagatttacccaagcggcagacagtcggttcaaatcattcaacgattccttacgttttgattatcgattggctgagcaagatattgttggatcaatcgcttggtcaaaagccttggtctccgtcaatgtcttgagcgtgcaggagcaacaacagttagagcaggcgttaaatcacctattgcaatcggttcagcaagatccggagcaaatcttagcctctgatgcagaagatattcactcttgggtcgagcagaagctgattgagcaagtcggtgatcttggtaaaaaactgcacacagggcgttcacgtaatgatcaggtcgcaaccgatcttaagctctggtgtcgcgatcagggcgttcatctgctgcttgctctgaaaacgctgcaacaacagttggtggcggtggctgctgaacatcaatcgacagttttgccgggctacacccatttgcaacgcgcgcaaccagtaacttttactcattggtgtttagcttatttggagatgtttgagcgtgatgagtcccgtttgactgatgctctagcgcgtttaaacacctcaccactgggttcaggtgcattagcgggaaccgcttacgcgattgatcgtgaggtgttagcggcggatcttggtttcactcgcgcaacacgtaactcgctggatgcggtctccgatcgcgatcatgtgatggagctgatgtcagtcgcatcgatctctatgctgcatttgtcgcgtctggcggaagatatgatcttctacaccactggtgaagcgggctttattgaattggctgatacggtgacctctggttcttcactgatgccacaaaagaaaaaccccgatgcacttgaattgatccgcggcaaaaccggacgcgtctatggtgcattggctgggatgatgatgacagtcaaagctctgcctctcgcgtacaacaaagacatgcaagaagacaaagaagggctgtttgatgcgctcgacacttggtttgattgcttgcaaatggcgggactttgctttgatggcattaaagtcaatgcggcgcgtacgttagaagcggccaagcaaggctactcgaacgcgactgaattggcggattatctggttgcgaaaggcattccatttcgcgaggcgcaccatattgtcggggtagcggtagtcgcagctattggcaagggtgtagcgttggaagagttgtgtctggcggagctgcaacagttttcgcctttgattgagcaggatgtctatccgatcctgactattgagtcttgtttagagaaacgctgcgcactcggtggggtatcgcccaaacaagtggcgcatgctcttcagcaagctcaagcgcgcgtgaagtcttaa

SEQ ID NO: 88130 - protein, 458 aa, Vibrio cholerae
MALWGGRFTQAADSRFKSFNDSLRFDYRLAEQDIVGSIAWSKALVSVNVLSVQEQQQLEQALNHLLQSVQQDPEQILASDAEDIHSWVEQKLIEQVGDLGKKLHTGRSRNDQVATDLKLWCRDQGVHLLLALKTLQQQLVAVAAEHQSTVLPGYTHLQRAQPVTFTHWCLAYLEMFERDESRLTDALARLNTSPLGSGALAGTAYAIDREVLAADLGFTRATRNSLDAVSDRDHVMELMSVASISMLHLSRLAEDMIFYTTGEAGFIELADTVTSGSSLMPQKKNPDALELIRGKTGRVYGALAGMMMTVKALPLAYNKDMQEDKEGLFDALDTWFDCLQMAGLCFDGIKVNAARTLEAAKQGYSNATELADYLVAKGIPFREAHHIVGVAVVAAIGKGVALEELCLAELQQFSPLIEQDVYPILTIESCLEKRCALGGVSPKQVAHALQQAQARVKS

SEQ ID NO: 88131 - DNA, 1875 bp, Vibrio vulnificus
  CDS (1)..(1875): transl_table=11
atggcattatggggcggaagatttacccaagcggcagataccaggttcaaagattttaacgattcgcttcgctttgattaccgactggccgagcaagacattgtcggctctattgcttggtctaaggcgttgttgtcagtcaatgtactgagtaaagaagagcagcaaaaactggagtttgcgctgaacgaattgaaacttgaggtgatggaagatccgcatcaaattcttcactccgatgcagaagatattcattcgtgggttgaacaacaactgattggaaaagtgggtgacctgggtaaaaagcttcatactggtcgctcgcgcaacgaccaagtcgccacagacctgaaattatggtgtcgccagcaagggcatcagctgctgttaggattggataaattgcagacgcaaatggtgaatgtggcaaaacagcaccaagccacggtcctgccgggttatacccatttacaacgcgctcaaccggtgacgtttgcacattggtgcttggcctatgtggaaatgtttgagcgtgactattcgagattgagcgatgcactgactcgtcttgacacctgcccgttaggttcaggagcgttagcgggcaccgcgtatccgattgatcgtgagcaattggcacaggatttgggtttccgtcgtgcgacacgcaactcactggattcggtctctgatcgcgatcatgtgatggagttgatgtcagttgcttcgatctccatgttgcatttatctcgtcttgcggaagacatgattttctacaactctggcgagtcgggctttattgagttagccgatacggtgacttcaggatcgtccttgatgccacaaaagaaaaaccctgatgcgctagaactgatccgtggcaaaacgggccgcgtgtatggctctcttgcgggcatgatgatgacggtaaaagccttaccactggcgtacaacaaagacatgcaagaagacaaagaagggctgtttgatgctcttgatacttggaacgattgcatggagatggcagcgctttgttttgatgggattaaagtcaatggagagcgtacgcttgaagcggcgaaacaaggttacgccaactcgacggaactggccgattacttggtggccaaagggatcccattccgcgaagcacaccacattgttggtgttgcggtggtcggggctattgcacaaggctgtgcgcttgaagagctatcgcttgagcaattgcaatctttctctcccgtgattgaagccgatgtttaccaaattctgaccatagagtcgtgtcttgaaaagcgcagtgcgttaggtggggtatcaccaaagcaagtggcgtatgcggttgaacaagcggataagcgccttgctgcgcgtgatacgacgttagttaaggtacgtcctgctcgcatcaccgatattgaaactttagagagcatggtggcttattgggcaaacctaggggaaaatttaccgcgtacacgcagcgagattatccgcgatatcggtttgtttgcggtgtcggaacatcaaggtctggtgaccggctgtgcatccctttatatctacgattctggtttggcagagatccgctctttaggcatcgaagcgggttggcagagacaaggtcagggaacggcagtggttcagtatctgattgataaagccaaagacatggccatcaaaaagctgtttgtgctgactcgtgcccctgagttcttcctgaaacagaacttcgtgcaaacctcgaagtcgctgcttcctgagaaagtcttgaaagactgcgatcaatgcccacgacagcatgcgtgtgacgaagtcgcgctcgaattcaatctaagtgagcagattatttctcaggttaaagttgcatag

SEQ ID NO: 88132 - protein, 624 aa, Vibrio vulnificus
MALWGGRFTQAADTRFKDFNDSLRFDYRLAEQDIVGSIAWSKALLSVNVLSKEEQQKLEFALNELKLEVMEDPHQILHSDAEDIHSWVEQQLIGKVGDLGKKLHTGRSRNDQVATDLKLWCRQQGHQLLLGLDKLQTQMVNVAKQHQATVLPGYTHLQRAQPVTFAHWCLAYVEMFERDYSRLSDALTRLDTCPLGSGALAGTAYPIDREQLAQDLGFRRATRNSLDSVSDRDHVMELMSVASISMLHLSRLAEDMIFYNSGESGFIELADTVTSGSSLMPQKKNPDALELIRGKTGRVYGSLAGMMMTVKALPLAYNKDMQEDKEGLFDALDTWNDCMEMAALCFDGIKVNGERTLEAAKQGYANSTELADYLVAKGIPFREAHHIVGVAVVGAIAQGCALEELSLEQLQSFSPVIEADVYQILTIESCLEKRSALGGVSPKQVAYAVEQADKRLAARDTTLVKVRPARITDIETLESMVAYWANLGENLPRTRSEIIRDIGLFAVSEHQGLVTGCASLYIYDSGLAEIRSLGIEAGWQRQGQGTAVVQYLIDKAKDMAIKKLFVLTRAPEFFLKQNFVQTSKSLLPEKVLKDCDQCPRQHACDEVALEFNLSEQIISQVKVA

SEQ ID NO: 88133 - DNA, 1389 bp, Wolinella succinogenes
  CDS (1)..(1389): transl_table=11
atgaaaaaactttgggcagggcgctttcttgaagcaagctctgagcttttggagcgcttcaacgcttcactgccttttgataaggcactctattttgaagatatcaagggctccaaggcgcacgccaagatgctcgccaagcaggaaatcatcaccgccaaagagtgcgaggagattttggcgggattagagaaggttttgggagagattgagcggggtgagtttgttttcaaaattgccgatgaggatattcatatggccattgaggcaagactcacggagcttattggcgcaagtggcaagaagctccatacagcacgcagtcgaaatgaccaagtggcggtcgattttaggatgtttgtgctgcggaaaaatgaagagattcgggcccagattttagagctcatggagacgattctagagattgcttccaaacacatctcgacactgatgcccggcatgacccatcttcagcacgctcagcccgtcagttttggttttcacatgaatgcttatgcgtgcatgttcaagcgtgatgtagagcgcctagaagatagccacaaaagacacaactattgccctttgggttcggctgctctggcgggaaccccttatcccactgatagagagtttctcgccaaggagctcgggtttttggctcccacgcttaatgcgatggattcggtgagtgatcgagatttcgcactagatctgctctatgatatagcgatggtgatgatgcacatctcaaggctagccgaagagatggtgctttggagcagctatgaatttaaattcatcacgcttagcgatgcctattccacgggaagctctatcatgccccaaaagaaaaaccctgatgttcctgaacttctaaggggcaaaagcggtcgagtctatgggaatctcctctcgcttttgacggtgatgaagggactgcccctagcctacaacaaagacactcaagaggataaagagggggtgatggatagtgttgagaccgcacagatcagcctggcgattcttaaagaggcgctaaaaagtgcgactatcaacgccaaagccatggaggaggcgtgcaagagggggcatctcacagccaccgatttggcggatttcctcgtgagaagttgcgaagtcccctttagagaggcacaccatatcacggggcaggtggtcgcctatgccgaatctaaaggcaaagatatctctgagctgagcgaagcggagattcttggaatcgattcaagaatcaaggcgggagtgaaagaggtcttgagcttgaaaaactccatgaatgcgagaaattctctagggggaacttcgagtgcccaaaccaaggctcagatcaaaaccctgcatacttggcttaaaaagaggctcaaatga

SEQ ID NO: 88134 - protein, 462 aa, Wolinella succinogenes
MKKLWAGRFLEASSELLERFNASLPFDKALYFEDIKGSKAHAKMLAKQEIITAKECEEILAGLEKVLGEIERGEFVFKIADEDIHMAIEARLTELIGASGKKLHTARSRNDQVAVDFRMFVLRKNEEIRAQILELMETILEIASKHISTLMPGMTHLQHAQPVSFGFHMNAYACMFKRDVERLEDSHKRHNYCPLGSAALAGTPYPTDREFLAKELGFLAPTLNAMDSVSDRDFALDLLYDIAMVMMHISRLAEEMVLWSSYEFKFITLSDAYSTGSSIMPQKKNPDVPELLRGKSGRVYGNLLSLLTVMKGLPLAYNKDTQEDKEGVMDSVETAQISLAILKEALKSATINAKAMEEACKRGHLTATDLADFLVRSCEVPFREAHHITGQVVAYAESKGKDISELSEAEILGIDSRIKAGVKEVLSLKNSMNARNSLGGTSSAQTKAQIKTLHTWLKKRLK

SEQ ID NO: 88135 - DNA, 1392 bp, Saccharomyces cerevisiae
  CDS (1)..(1392)
atgtcagacggcactcaaaaactatggggtgggagattcactggtgaaaccgatcctttgatgcacctttacaatgcgtctcttccgtatgattataagatgtataaggcagatttagaaggaactaaagtatacacagcgggcttgcagaagttgggtcttctaacggagacagaattggcaaagatccatgaaggtttggctgaaatcaaaaaagaatgggacgctgacaaatttgtccgtcatccaaacgacgaggatatccatactgcgaatgaaagacgtcttggtgaactaattggccgcgatattgctggtaaagtccacaccggtagatcccgtaatgatcaagttgttaccgatttgagaatatactgtcgtgacattgtcaatgacaccctctttccagctttaaagggcttggttgaagttctaattaagagggccgaaggtgagatagatgtcttaatgccaggctacacacatttacaaagggcacaacctattagatggtctcattggttgagctcttatgcaacatacttcaccgaagattacaagagactgggtcaaatactacacagattgaatcaatcaccactgggtgcaggcgctcttgctggtcatccttacggcattgatagagaatttttggctgaaggtttgggtttcaatagtgtaattggtaactccttggttgctgtttctgatagagatttcatcgtggagttgatgttttggggaactttgttcatgaaccatatttctcgttttgctgaagatttgattatatattgtacagcagaatttggtttcatacagttgagcgacgcctattcaacaggttcttctttaatgcctcagaagaagaatgcagactcgttagagttgttaagaggtaaatccggtagagtatttggtgatctgacaggattcttgatgagtttgaagggtatcccatctacttatgataaagacatgcaagaagacaaagagccactattcgattgcttaacaactgtagagcactccatgctgattgccacaggtgttatttctaccttaactgtaaataaggaaaagatggaagctgctctcacgatggatatgctagctaccgacttggcagattacttggtcagaaagggtgttccattcagagagactcatcacatatctggtgagtgtgtcgctactgctgaaagacttggtctaagcggtattgataaattaaccttggagcagtatcaaaagatcgattcgagattcggacaagatctttttgaaacttttaactttgaacaaagcgttgaaagacgagatgctactggtggaaccgctaaatctgctgtattgaagcaattggataatttgaaatcccaattaaattag

SEQ ID NO: 88136 - protein, 463 aa, Saccharomyces cerevisiae
MSDGTQKLWGGRFTGETDPLMHLYNASLPYDYKMYKADLEGTKVYTAGLQKLGLLTETELAKIHEGLAEIKKEWDADKFVRHPNDEDIHTANERRLGELIGRDIAGKVHTGRSRNDQVVTDLRIYCRDIVNDTLFPALKGLVEVLIKRAEGEIDVLMPGYTHLQRAQPIRWSHWLSSYATYFTEDYKRLGQILHRLNQSPLGAGALAGHPYGIDREFLAEGLGFNSVIGNSLVAVSDRDFIVELMFWGTLFMNHISRFAEDLIIYCTAEFGFIQLSDAYSTGSSLMPQKKNADSLELLRGKSGRVFGDLTGFLMSLKGIPSTYDKDMQEDKEPLFDCLTTVEHSMLIATGVISTLTVNKEKMEAALTMDMLATDLADYLVRKGVPFRETHHISGECVATAERLGLSGIDKLTLEQYQKIDSRFGQDLFETFNFEQSVERRDATGGTAKSAVLKQLDNLKSQLN

SEQ ID NO: 88137 - DNA, 1374 bp, Yersinia pseudotuberculosis
  CDS (1)..(1374): transl_table=11
atggcactatggggcggacggtttagtcaggcagcagatcagcgttttaagcaattcaatgattcactgcggtttgattaccggctggcagagcaggatattatcggttctgttgcctggtcgaaagcgctggttactgttggcgtattgaacgctgatgaacagcaacaacttgaacaggcgctgtcagttttactggaagaggtgcaggccaacccacacgctattttggccagtgacgctgaagatatccacagttgggtcgaaaccaaactgatcgataaagtgggtgatttaggcaaaaaattacacactgggcgcagccgtaatgatcaggtagcgaccgatctgaaattgtggtgtaagttccagataaccgaattacagacggcggtacaacaactgcaacaggcgttggtcatgaccgctgaagcgaatcaggatgcggtcatgcctggttatactcacttacagcgtgctcaacccgtgacgtttgcacattggtgtttggcctatgtagaaatgctgtcacgtgatgaaagccgtttacaagataccctgaaacgtctggatgttagcccattaggttgcggtgcgttggcgggcacggcgtatgctatcgatcgtgaacaactggcgggctggttgggctttgcttctgctactcgtaacagcctggacagcgtttctgaccgtgaccatgtgctggagctattatctgacgccagcattggtatggtacatttgtctcgctttgctgaagatttaattttcttcaacagcggtgaagcagcttttgtcgatttatcggatcgcgtgacatcgggttcctccctaatgccacagaagaaaaatccagatgcgctggagctcatccgtggtaaatgtggccgggtgcaaggtgcattaactgggatgacgatgacgctcaaaggcctgcctttggcttataacaaagatatgcaggaagacaaagaagggctgtttgatgcactgaatacctggcttgactgcctgcacatggcggcattggtactggatgggattcaggtaaaacgcccgcgttgtaaagaagcggctgaacagggctatgctaacgcgactgaactggctgattatttggtcgctaaaggcgtaccgttccgtgaagcgcaccatattgtgggtgaagcggtggtagaggcaatccgccagggcaaagctctggaggccttagcgctgagtgatttacagcaattcagttccgtaattggtgatgatgtgtacccgattctggcattgcagtcttgcttagataagcgagtggccaaaggcggcgtttcgccgcagcaggttgcatcggccattgccgaggctaaagcgcggctgttttaa

SEQ ID NO: 88138 - protein, 457 aa, Yersinia pseudotuberculosis
MALWGGRFSQAADQRFKQFNDSLRFDYRLAEQDIIGSVAWSKALVTVGVLNADEQQQLEQALSVLLEEVQANPHAILASDAEDIHSWVETKLIDKVGDLGKKLHTGRSRNDQVATDLKLWCKFQITELQTAVQQLQQALVMTAEANQDAVMPGYTHLQRAQPVTFAHWCLAYVEMLSRDESRLQDTLKRLDVSPLGCGALAGTAYAIDREQLAGWLGFASATRNSLDSVSDRDHVLELLSDASIGMVHLSRFAEDLIFFNSGEAAFVDLSDRVTSGSSLMPQKKNPDALELIRGKCGRVQGALTGMTMTLKGLPLAYNKDMQEDKEGLFDALNTWLDCLHMAALVLDGIQVKRPRCKEAAEQGYANATELADYLVAKGVPFREAHHIVGEAVVEAIRQGKALEALALSDLQQFSSVIGDDVYPILALQSCLDKRVAKGGVSPQQVASAIAEAKARLF

SEQ ID NO: 88139 - DNA, 1383 bp, Schizosaccharomyces pombe
  CDS (1)..(1383)
atggcttcttcacaaaaactttggggcggtagatttactggcgccactgatcccttgatgacagcttataatgagtctattcattatgacaagcgcatgttcaatgccgacattgatggctcgaaagcttatgctaaggcattagaacaacgcggaatcattagtgctgatgaattggataaaatgttagatggtttagaggctgtccgagatgaatggaagacaaataaattcactcttcaaccttctgacgaagatatccatactgctaacgagcgcagattgggagaaataattggtacaggcattgctggtaagcttcatacaggaagaagtcgcaacgatcaagttacgaccgatatgcgcctttggctacgtgatgagttggacatcatccaaaaatctttagttgggttactccaagtttttgttgctcgtgcagagtctgaccttgatatcattatgcccggttacactcatttgcaaagagcccagcctattcgctggtcccatttcttattgtctcatgccttttctatattaaatgacttggatcgcttgaaacaaatttattctagagtcaaccgactccctttaggcgctggtgcacttgctggtaatcctttcgccgtagatcgtaagttcttacaaaaggaacttggttttgaaggggttattatgaattcaatgaatgctgtagctgaccgcgattatgttattgaatttatgttctgggctagtatggtaatgacccatatttcccgtttggcagaggatcttattatatattctacttctgagttcaacttcgttaccctttccgatgcttattcaactggaagtagtattatgcctcaaaaaaaaaatcccgattctttagaacttcttcgtggaaagtctggccgagtttttggcaacatgatgggctttatggtttcggttaaagggattccttcaacatataacaaagacctccaagaagataaagaaccgcttttcgattcttccaaaactgttttggattccattcaaattctaaccggagttctttctactttaactgtaaatccagaaaatattgctaagagcttgactgcggacatgctagcgactgatttggcagaataccttgtgcgtaaaggtgttccctttcgtgaaactcatcatatttccgggtccgctgtccgaatggccgaggaaagaaacactaccattgataagctaagtgttgaagattttaaatcgctacacccattatatgaagaagatgttgcagatgttttcaactatgaatccagtgtggagaagcgttgtgcgattggtggtaccgctaagagttgtgtattagaacaaatccaaaccattaaaaaggccttggagtag

SEQ ID NO: 88140 - protein, 460 aa, Schizosaccharomyces pombe
MASSQKLWGGRFTGATDPLMTAYNESIHYDKRMFNADIDGSKAYAKALEQRGIISADELDKMLDGLEAVRDEWKTNKFTLQPSDEDIHTANERRLGEIIGTGIAGKLHTGRSRNDQVTTDMRLWLRDELDIIQKSLVGLLQVFVARAESDLDIIMPGYTHLQRAQPIRWSHFLLSHAFSILNDLDRLKQIYSRVNRLPLGAGALAGNPFAVDRKFLQKELGFEGVIMNSMNAVADRDYVIEFMFWASMVMTHISRLAEDLIIYSTSEFNFVTLSDAYSTGSSIMPQKKNPDSLELLRGKSGRVFGNMMGFMVSVKGIPSTYNKDLQEDKEPLFDSSKTVLDSIQILTGVLSTLTVNPENIAKSLTADMLATDLAEYLVRKGVPFRETHHISGSAVRMAEERNTTIDKLSVEDFKSLHPLYEEDVADVFNYESSVEKRCAIGGTAKSCVLEQIQTIKKALE

SEQ ID NO: 88141 - DNA, 1551 bp, Zea mays
  CDS (1)..(1551)
atggcattcacttcccaatccctaatcttccgggcacccgcctcgccctcttgtgcccgcataaccccgtcatccggtcgcgtcaccctccgggaccgcagcgccgttttcccgctcgtcgcggcggcctccacctcgatggcgtcctcggagagcgaagataagagggaaaccaagctgtggggcgggcggttcgaggagggcgtcaccgacgccgtggagcgcttcacggagtccatatcctacgactggcagctctacaaatacgacataatgggcagcaaggcccacgcctccatgctcgctggccagggtttgataacagctactgatagggatatcatcttagaggggcttgatcagatagagaggctgatccaagaaggcaaatttgagtggaggaaggaccgggaggatgtgcatatgaacattgaagcggctctaattgaaagggttggtgagccagccaagaagttgcatactgctaggagccgcaatgaccaaattgtgacggatctaaggctatggtgccgtgatgctattgacaggattttgattcgtatcaagcagcttcaggtgtctctggttattttggcttcaaaatatgttgatttaatagtcccaggttatacccatctgcaaagggcgcagcctgttctgctgccacatcttctcttatcatatgttgaacagttggagcgtgatgctggtcggctggtcaactgcagggagcgaatgaatttctgtcctcttggtgcttgtgctttggctggaactggacttcccattgataggtttcaaactgctaaagatttgaaatttacagctccaatgaagaatagcattgatgcagtatcagaccgtgattttgtacttgagtttcttgctgccaattcgattgctgctgtccatctttcgcgaattggtgaagaatgggttctttgggcatcagaggaatttgggtttctgataccaagtgacaaagtttcaactggaagcagcattatgccccagaagaaaaatccagacccaatggagcttgttcgtgggaaatctgctagggttgttggagacctcatgactgttctaaccctctgtaaaggccttccacaggcctacaaccgtgaccttcaggaagacaaggaacccttgtttgatagtgtgaaagctgtattaggaatgcttgaagtatgcacagagtttgctcaaaatatctcttttaattcaaaaagaatacaaagttcacttccagctggttatctggatgcaacgacgctggcggattatctcgtgaagaagggagtccctttcagaacttctcacgagatagttggaaggtctgttgctctatgcgtctccaagaactgtcagctagctgagcttgaattggctgacctaaaatctgtccatcctgtatttgaggatgacgtctatgaatacctgggggttgaaaacgctgtaaacaagttcatatcctatggctctactggttcagaacaagtgaaaaagcagcttgaggattggcgcatccagctcggggtgagctcataa

SEQ ID NO: 88142 - protein, 516 aa, Zea mays
MAFTSQSLIFRAPASPSCARITPSSGRVTLRDRSAVFPLVAAASTSMASSESEDKRETKLWGGRFEEGVTDAVERFTESISYDWQLYKYDIMGSKAHASMLAGQGLITATDRDIILEGLDQIERLIQEGKFEWRKDREDVHMNIEAALIERVGEPAKKLHTARSRNDQIVTDLRLWCRDAIDRILIRIKQLQVSLVILASKYVDLIVPGYTHLQRAQPVLLPHLLLSYVEQLERDAGRLVNCRERMNFCPLGACALAGTGLPIDRFQTAKDLKFTAPMKNSIDAVSDRDFVLEFLAANSIAAVHLSRIGEEWVLWASEEFGFLIPSDKVSTGSSIMPQKKNPDPMELVRGKSARVVGDLMTVLTLCKGLPQAYNRDLQEDKEPLFDSVKAVLGMLEVCTEFAQNISFNSKRIQSSLPAGYLDATTLADYLVKKGVPFRTSHEIVGRSVALCVSKNCQLAELELADLKSVHPVFEDDVYEYLGVENAVNKFISYGSTGSEQVKKQLEDWRIQLGVSS

SEQ ID NO: 88143 - DNA, 1551 bp, Glycine max
  CDS (1)..(1551)
atggtttcaaatggtaggatgctgtgttcaagcttgattacagcacctccgtcatcctccctctccagaactactccatcctacttctgctcatttccttctcgtagaatcatcttcacgccaagaattggatcatctccggccccggcccaggcccaggcccagcccaaggaagccaagctctggggtggcaggttcgaggagggcgtaaccgacgttgtggagaggttcaccgagtcgatctccttcgacaagaagctctacaaacaagacatcacgggaagcagagcacacgcttcaatgctcgctcaccagggtttgataagcgagattgacagagactctattctccaaggattggatgaaatagagaggcgcattgagaatggagagttcaattggagagctgacagggaggatgtgcacatgaacatcgaggccgcgctcaccgacttgatcggtgagcctgccaagaagcttcacactgcgcggagccggaacgatcaggtcttgacggattttcgcctctggtgtcgggacgccattgacaagatcctcctgagcatgaagcagctccaggtctcgctgatcaccctggctttgaacaatcagggcctcattgttcctggctatactcacttgcagcgcgcgcagccggttttgctgcagcatcttctcttggcttatgttgaggagattgagcgtgatgctggtcgtttggtagattgtagggctaggatgaatttctgccccttaggagcttgtgccttggctggtacagggcttcctattgatcgattcatgacttccgaagctttagggtttacggctcctttgaggaatagtatagatgctgtttcagaccgagattttgtactggagtttctttctgctaatgccatcacagctgtgcatctttctcgacttggtgaagagtgggtattgtgggcttcggaggaatttggattcatcacaccaagtgactctgtttcaactggaagtagtataatgcctcagaaaaagaatccagatccgatggaacttgttcgtgggaagtctgccagagtcataggggatcttgttactcttctcacattgtgcaaaggacttcctcatgcttacaaccgcgatttgcaggaagataaagaaccagtatttgacagcgttaaaacaattttggggatgcttgaggtatcagcagaattcgctctaaaaattactttcaattgggaaagaatacaaaaggcattacctgctggtcatcttgatgcaaccacacttgctgattatcttgttaataagggcgtgccatttagaacgtctcacgatatcgctggaaaatctgttgctttatgtacatcgaagaactgccaactgctagacttaagtcttgatgagctgagaagtataaatccagtctttgaggaggatgtgtatgaatttcttggagtagaaaatgcaattaagaaatttgtctcttacggctccaccgggtcagcatgtgttgccagccaacttgattattggctgagaaaacttgaaatgaagtga

SEQ ID NO: 88144 - protein, 516 aa, Glycine max
MVSNGRMLCSSLITAPPSSSLSRTTPSYFCSFPSRRIIFTPRIGSSPAPAQAQAQPKEAKLWGGRFEEGVTDVVERFTESISFDKKLYKQDITGSRAHASMLAHQGLISEIDRDSILQGLDEIERRIENGEFNWRADREDVHMNIEAALTDLIGEPAKKLHTARSRNDQVLTDFRLWCRDAIDKILLSMKQLQVSLITLALNNQGLIVPGYTHLQRAQPVLLQHLLLAYVEEIERDAGRLVDCRARMNFCPLGACALAGTGLPIDRFMTSEALGFTAPLRNSIDAVSDRDFVLEFLSANAITAVHLSRLGEEWVLWASEEFGFITPSDSVSTGSSIMPQKKNPDPMELVRGKSARVIGDLVTLLTLCKGLPHAYNRDLQEDKEPVFDSVKTILGMLEVSAEFALKITFNWERIQKALPAGHLDATTLADYLVNKGVPFRTSHDIAGKSVALCTSKNCQLLDLSLDELRSINPVFEEDVYEFLGVENAIKKFVSYGSTGSACVASQLDYWLRKLEMK

SEQ ID NO: 88145 - DNA, 1551 bp, Glycine max
  CDS (1)..(1551)
atggtttcaaatggtaggatgctgtgttcaagcttgattacagcacctccgtcatcctccctctccagaactactccatcctacttctgctcatttccttctcgtagaatcatcttcacgccaagaattggatcatctccggccccggcccaggcccaggcccagcccaaggaagccaagctctggggtggcaggttcgaggagggcgtaaccgacgttgtggagaggttcaccgagtcgatctccttcgacaagaagctctacaaacaagacatcacgggaagcagagcacacgcttcaatgctcgctcaccagggtttgataagcgagattgacagagactctattctccaaggattggatgaaatagagaggcgcattgagaatggagagttcaattggagagctgacagggaggatgtgcacatgaacatcgaggccgcgctcaccgacttgatcggtgagcctgccaagaagctccacactgcacggagccggaacgatcaggtcttgacggattttcgcctctggtgtcgcgacgccattgacaagatcctcgtgagcatgaaacagcttcaggtctcactgatcaccctggctttgaacaatgagggtctcattgttcctggttatactcacttgcagcgcgctcagccggttttgctgcagcatcttctgttggcttatgttgaggagattgaacgtgatgctggtcgtttggtagattgtagggctaggatgaatttctgccccttaggagcttgtgccttggctggtacagggcttcctattgatcgattcatgacttctgaagctttaggatttacggctcccttgaggaatagtatagatgcagtttcagaccgagattttgtgctggagtttctttctgctaatgccatcacagccgtgcatctttctcggcttggtgaagagtgggtattgtgggcttcggaggaatttggattcatcacaccaagtgactctgtttcaactggaagtagtataatgcctcagaaaaagaatccagatccgatggaacttgttcgtgggaagtctgccagagtcataggggatcttgttactcttctcacattgtgcaaaggacttcctcatgcttacaaccgcgatttgcaggaagataaagaaccagtatttgacagcgttaaaacaattttggggatgcttgaggtatcagcagaattcgctctaaaaattactttcaattgggaaagaatacaaaaggcattacctgctggtcatcttgatgcaaccacacttgctgattatcttgttaataagggcgtgccatttagaacgtctcacgatatcgctggaaaatctgttgctttatgtacatcgaagaactgccaactgctagacttaagtcttgatgagctgagaagtataaatccagtctttgaggaggatgtgtatgaatttcttggagtagaaaatgcaattaagaaatttgtctcttacggctccaccgggtcagcatgtgttgccagccaacttgattattggctgagaaaacttgaaatgaagtga

SEQ ID NO: 88146 - protein, 516 aa, Glycine max
MVSNGRMLCSSLITAPPSSSLSRTTPSYFCSFPSRRIIFTPRIGSSPAPAQAQAQPKEAKLWGGRFEEGVTDVVERFTESISFDKKLYKQDITGSRAHASMLAHQGLISEIDRDSILQGLDEIERRIENGEFNWRADREDVHMNIEAALTDLIGEPAKKLHTARSRNDQVLTDFRLWCRDAIDKILVSMKQLQVSLITLALNNEGLIVPGYTHLQRAQPVLLQHLLLAYVEEIERDAGRLVDCRARMNFCPLGACALAGTGLPIDRFMTSEALGFTAPLRNSIDAVSDRDFVLEFLSANAITAVHLSRLGEEWVLWASEEFGFITPSDSVSTGSSIMPQKKNPDPMELVRGKSARVIGDLVTLLTLCKGLPHAYNRDLQEDKEPVFDSVKTILGMLEVSAEFALKITFNWERIQKALPAGHLDATTLADYLVNKGVPFRTSHDIAGKSVALCTSKNCQLLDLSLDELRSINPVFEEDVYEFLGVENAIKKFVSYGSTGSACVASQLDYWLRKLEMK

SEQ ID NO: 88147 - DNA, 20 bp, Artificial sequence
  primer
atgacaaaaaaaacctggag

SEQ ID NO: 88148 - DNA, 20 bp, Artificial sequence
  primer
ttaagtctggcttaattcag

SEQ ID NO: 88149 - protein, 471 aa, Artificial sequence
  consensus sequence
  Variant (6)..(10): Xaa in position 6 to 10 is any amino acid
  Variant (11)..(18): Xaa in position 11 to 18 is any or no amino acid
  Variant (20)..(22): Xaa in position 20 to 22 is any amino acid
  Variant (24)..(29): Xaa in position 24 to 29 is any amino acid
  Variant (31)..(32): Xaa in position 31 to 32 is any amino acid
  Variant (35)..(35): Xaa in position 35 is any amino acid
  Variant (37)..(40): Xaa in position 37 to 40 is any amino acid
  Variant (42)..(44): Xaa in position 42 to 44 is any amino acid
  Variant (46)..(57): Xaa in position 46 to 57 is any amino acid
  Variant (60)..(74): Xaa in position 60 to 74 is any amino acid
  Variant (75)..(78): Xaa in position 75 to 78 is any or no amino acid
  Variant (81)..(81): Xaa in position 81 is any amino acid
  Variant (83)..(85): Xaa in position 83 to 85 is any amino acid
  Variant (87)..(88): Xaa in position 87 to 88 is any amino acid
  Variant (90)..(93): Xaa in position 90 to 93 is any amino acid
  Variant (95)..(99): Xaa in position 95 to 99 is any amino acid
  Variant (100)..(100): Xaa in position 100 is any or no amino acid
  Variant (104)..(104): Xaa in position 104 is any amino acid
  Variant (112)..(112): Xaa in position 112 is any amino acid
  Variant (115)..(116): Xaa in position 115 to 116 is any amino acid
  Variant (118)..(140): Xaa in position 118 to 140 is any amino acid
  Variant (141)..(141): Xaa in position 141 is any or no amino acid
  Variant (143)..(150): Xaa in position 143 to 150 is any amino acid
  Variant (151)..(152): Xaa in position 151 to 152 is any or no amino acid
  Variant (155)..(155): Xaa in position 155 is any amino acid
  Variant (160)..(160): Xaa in position 160 is any amino acid
  Variant (164)..(167): Xaa in position 164 to 167 is any amino acid
  Variant (169)..(178): Xaa in position 169 to 178 is any amino acid
  Variant (181)..(182): Xaa in position 181 to 182 is any amino acid
  Variant (184)..(189): Xaa in position 184 to 189 is any amino acid
  Variant (191)..(194): Xaa in position 191 to 194 is any amino acid
  Variant (195)..(195): Xaa in position 195 is any or no amino acid
  Variant (199)..(200): Xaa in position 199 to 200 is any amino acid
  Variant (205)..(209): Xaa in position 205 to 209 is any amino acid
  Variant (210)..(210): Xaa in position 210 is any or no amino acid
  Variant (213)..(215): Xaa in position 213 to 215 is any amino acid
  Variant (217)..(218): Xaa in position 217 to 218 is any amino acid
  Variant (222)..(225): Xaa in position 222 to 225 is any amino acid
  Variant (226)..(227): Xaa in position 226 to 227 is any or no amino acid
  Variant (230)..(230): Xaa in position 230 is any amino acid
  Variant (232)..(232): Xaa in position 232 is any amino acid
  Variant (234)..(234): Xaa in position 234 is any amino acid
  Variant (239)..(240): Xaa in position 239 to 240 is any amino acid
  Variant (242)..(251): Xaa in position 242 to 251 is any amino acid
  Variant (253)..(253): Xaa in position 253 is any amino acid
  Variant (256)..(257): Xaa in position 256 to 257 is any amino acid
  Variant (259)..(269): Xaa in position 259 to 269 is any amino acid
  Variant (271)..(271): Xaa in position 271 is any amino acid
  Variant (272)..(274): Xaa in position 272 to 274 is any or no amino acid
  Variant (276)..(278): Xaa in position 276 to 278 is any amino acid
  Variant (283)..(283): Xaa in position 283 is any amino acid
  Variant (292)..(293): Xaa in position 292 to 293 is any amino acid
  Variant (296)..(296): Xaa in position 296 is any amino acid
  Variant (300)..(300): Xaa in position 300 is any amino acid
  Variant (303)..(304): Xaa in position 303 to 304 is any amino acid
  Variant (306)..(306): Xaa in position 306 is any amino acid
  Variant (308)..(314): Xaa in position 308 to 314 is any amino acid
  Variant (316)..(317): Xaa in position 316 to 317 is any amino acid
  Variant (319)..(320): Xaa in position 319 to 320 is any amino acid
  Variant (325)..(325): Xaa in position 325 is any amino acid
  Variant (331)..(332): Xaa in position 331 to 332 is any amino acid
  Variant (335)..(369): Xaa in position 335 to 369 is any amino acid
  Variant (370)..(382): Xaa in position 370 to 382 is any or no amino acid
  Variant (385)..(386): Xaa in position 385 to 386 is any amino acid
  Variant (389)..(389): Xaa in position 389 is any amino acid
  Variant (392)..(393): Xaa in position 392 to 393 is any amino acid
  Variant (394)..(394): Xaa in position 394 is any or no amino acid
  Variant (396)..(396): Xaa in position 396 is any amino acid
  Variant (400)..(401): Xaa in position 400 to 401 is any amino acid
  Variant (403)..(405): Xaa in position 403 to 405 is any amino acid
  Variant (407)..(408): Xaa in position 407 to 408 is any amino acid
  Variant (410)..(433): Xaa in position 410 to 433 is any amino acid
  Variant (434)..(443): Xaa in position 434 to 443 is any or no amino acid
  Variant (445)..(457): Xaa in position 445 to 457 is any amino acid
  Variant (458)..(459): Xaa in position 458 to 459 is any or no amino acid
  Variant (461)..(463): Xaa in position 461 to 463 is any amino acid
  Variant (467)..(470): Xaa in position 467 to 470 is any amino acid
WGGRFXXXXXXXXXXXXXSXXXDXXXXXXDXXGSXAXXXXLXXXGXXXXXXXXXXXXGLXXXXXXXXXXXXXXXXXXXEDXHXXXEXXLXXXXGXXXXXXLHTXRSRNDQVXTDXXLXXXXXXXXXXXXXXXXXXXXXXXXAXXXXXXXXXXPGXTHLQXAQPXXXXHXXXXXXXXXXRDXXRXXXXXXRXXXXXPLGXXALAGXXXXXXDRXXXAXXLGFXXXXXXNSXDXVXDRDFXXEXXXXXXXXXXHXSRXXEXXXXXXXXXXXFXXXXDXXXTGSSXMPQKKNPDXXELXRGKXGRXXGXLXXXXXXXKXXPXXYNKDXQEDKEXXFDXXXXXXXXXXXXXXXXXXXXXXXXXXXXXXXXXXXXXXXXXXXXXXXXATXXADXLVXXXGXPFRXXHXXXGXXVXXXXXXXXXXXXXXXXXXXXXXXXXXXXXXXXXXDXXXXXXXXXXXXXXXRXXXGGTXXXXV

SEQ ID NO: 88150 - protein, 37 aa, Artificial sequence
  protein pattern
  Variant (2)..(3): Xaa in position 2 to 3 is any amino acid
  Variant (4)..(4): Xaa in position 4 is Ala, Cys, Ser or Thr
  Variant (5)..(5): Xaa in position 5 is any amino acid
  Variant (9)..(9): Xaa in position 9 is any or no amino acid
  Variant (11)..(11): Xaa in position 11 is any or no amino acid
  Variant (19)..(20): Xaa in position 19 to 20 is any amino acid
  Variant (23)..(23): Xaa in position 23 is any amino acid
  Variant (25)..(25): Xaa in position 25 is Ala or Gly
  Variant (27)..(27): Xaa in position 27 is any amino acid
  Variant (28)..(28): Xaa in position 28 is Ala or Gly
  Variant (30)..(31): Xaa in position 30 to 31 is any amino acid
  Variant (33)..(35): Xaa in position 33 to 35 is any amino acid
  Variant (36)..(36): Xaa in position 36 is Ala, Gly, Ser or Thr
  Variant (37)..(37): Xaa in position 37 is Phe, Ile, Leu, Met or Val
DXXXXGSSXMXPQKKNPDXXELXRXKXXRXXGXXXXX

SEQ ID NO: 88151 - protein, 31 aa, Artificial sequence
  protein pattern
  Variant (2)..(2): Xaa in position 2 is any amino acid
  Variant (3)..(3): Xaa in position 3 is any or no amino acid
  Variant (8)..(8): Xaa in position 8 is any amino acid
  Variant (12)..(12): Xaa in position 12 is Ile, Leu or Val
  Variant (13)..(14): Xaa in position 13 to 14 is any amino acid
  Variant (15)..(15): Xaa in position 15 is Ala, Gly, Pro or Ser
  Variant (16)..(16): Xaa in position 16 is Phe or His
  Variant (17)..(20): Xaa in position 17 to 20 is any amino acid
  Variant (21)..(21): Xaa in position 21 is Phe, His, Trp or Tyr
  Variant (22)..(27): Xaa in position 22 to 27 is any amino acid
  Variant (28)..(28): Xaa in position 28 is Asp or Glu
  Variant (29)..(30): Xaa in position 29 to 30 is any amino acid
PXXTHLQXAQPXXXXXXXXXXXXXXXXXXXR

SEQ ID NO: 88152 - protein, 17 aa, Artificial sequence
  protein pattern
  Variant (3)..(3): Xaa in position 3 is Ala or Gly
  Variant (11)..(11): Xaa in position 11 is Ala, Gly, Thr or Val
  Variant (12)..(12): Xaa in position 12 is any amino acid
  Variant (14)..(14): Xaa in position 14 is any amino acid
  Variant (15)..(15): Xaa in position 15 is His, Lys or Arg
  Variant (16)..(16): Xaa in position 16 is Ile, Leu or Met
  Variant (17)..(17): Xaa in position 17 is Phe, Trp or Tyr
HTXRSRNDQVXXDXXXX

SEQ ID NO: 88153 - protein, 24 aa, Artificial sequence
  protein pattern
  Variant (2)..(2): Xaa in position 2 is Ala, Gly or Ser
  Variant (3)..(3): Xaa in position 3 is any amino acid
  Variant (4)..(4): Xaa in position 4 is Ala or Pro
  Variant (5)..(5): Xaa in position 5 is any amino acid
  Variant (6)..(6): Xaa in position 6 is Ala, Gly or Thr
  Variant (8)..(9): Xaa in position 8 to 9 is any amino acid
  Variant (11)..(11): Xaa in position 11 is any amino acid
  Variant (17)..(18): Xaa in position 17 to 18 is any amino acid
  Variant (21)..(23): Xaa in position 21 to 23 is any amino acid
  Variant (24)..(24): Xaa in position 24 is Ala, Gly, Asn, Gln, Ser or Thr
KXXXXXYXXDXQEDKEXXFDXXXX

SEQ ID NO: 88154 - protein, 28 aa, Artificial sequence
  protein pattern
  Variant (3)..(3): Xaa in position 3 is Ile, Leu or Met
  Variant (4)..(4): Xaa in position 4 is any amino acid
  Variant (5)..(5): Xaa in position 5 is Ala, Gly, Ser or Thr
  Variant (7)..(7): Xaa in position 7 is Ala, Gly or Ser
  Variant (11)..(11): Xaa in position 11 is any amino acid
  Variant (12)..(12): Xaa in position 12 is Ala, Gly, Ile, Leu or Val
  Variant (13)..(13): Xaa in position 13 is any amino acid
  Variant (15)..(19): Xaa in position 15 to 19 is any amino acid
  Variant (20)..(20): Xaa in position 20 is Ala, Gly, Ser or Thr
  Variant (21)..(24): Xaa in position 21 to 24 is any amino acid
  Variant (25)..(25): Xaa in position 25 is His or Lys
  Variant (26)..(26): Xaa in position 26 is Phe, Ile, Leu, Met or Val
  Variant (28)..(28): Xaa in position 28 is Lys or Arg
NSXXXVXDRDXXXEXXXXXXXXXXXXSX

SEQ ID NO: 88155 - protein, 14 aa, Artificial sequence
  protein pattern
  Variant (3)..(3): Xaa in position 3 is Ala, Cys, Gly, Ser or Thr
  Variant (4)..(4): Xaa in position 4 is Ala, Cys, Gly or Ser
  Variant (9)..(13): Xaa in position 9 to 13 is any amino acid
LGXXALAGXXXXXD

SEQ ID NO: 88156 - protein, 16 aa, Artificial sequence
  protein pattern
  Variant (3)..(3): Xaa in position 3 is Ile or Val
  Variant (5)..(5): Xaa in position 5 is any amino acid
  Variant (6)..(6): Xaa in position 6 is Ala or Asn
  Variant (7)..(7): Xaa in position 7 is any amino acid
  Variant (9)..(10): Xaa in position 9 to 10 is any amino acid
  Variant (12)..(14): Xaa in position 12 to 14 is any amino acid
  Variant (15)..(15): Xaa in position 15 is Ala, Ile, Leu or Val
EDXHXXXEXXLXXXXG

SEQ ID NO: 88157 - protein, 9 aa, Artificial sequence
  protein pattern
  Variant (3)..(3): Xaa in position 3 is Asp, Glu or Thr
  Variant (4)..(4): Xaa in position 4 is Phe, Ile, Leu, Met or Val
  Variant (7)..(7): Xaa in position 7 is any amino acid
  Variant (9)..(9): Xaa in position 9 is Ala or Val
ATXXADXLX

SEQ ID NO: 88158 - DNA, 1335 bp, Synechocystis sp.
  CDS (1)..(1335): transl_table=11
atgactatttcccgtaccatttgccttggtttcattgcggcgatcgccgggggaacattactgttgctgatgccccttgccaccagtactggggagtggggtaatcccttggtggctttgtttactgccacttccgctgtttgtgtgacggggctcagtgtggtggatgtgaacaagtacttttccttttggggagaattgactgtcatgttgctggcccagttgggggggttgggctacatgaccctgaccacttttttgatgatcctgattgggcgcaaatttgacctccagcaacggtttgccatccaagaatcctttgaccatcgttttgcccagggcagcaataatttaatcaaatcagtcattgccaccacgctaatttttgaagttactggtactatagttcttttttttgttttccttcaggactatcctcccccccgggccctttggtatgccgttttccacagcgtcagtgcttttaataatgctggttttagtctttttgccgataacttaatcggctatcaaacctccgtgccccttaatttgaccgtttcagccctaattatttttggtggcattggctaccaggtaattatcgagtcctatttctggttagtgcgaaaggtaaaaaaatcccaacgaccctttgccttttcccttaacctacgggtggtggtgcgggtgactattttcctgctgttgttaggctttttcggcattctgattttagaggcccagggcaatcgagcttttgctcagttttctttccaggatcgtttactggtcgcctggttccagtcggtgactacccggacagcgggctttaacaccattgatttgaatgagctgagttctactagtttggtgctggtgatgttgttgatgttcattggggctagtcccagtggcaccggcggcggaatcaaaaccaccacctttgccattttggccaactgcacccggtcagctctgcggggccaggaaagggtaattattgatgaccgctgtattccaccccagttaattctcaaggcgatcgccgtggtgtttggttcgatggtgacggtgatttccagcataagtttgttgattttcctggagtcggagcaggaagcggtgtccttggcatttgaagcggtgtctgcctttgccacagtagggctttccttgggcactaccccagagctaaaacccctttcccaactggtcttaattgtcaccatgttcattggtcgggtgggcattaccattttgatggcggcgatcgtgggggatcctaagccaagtttgattaaatatccagaggaaaatttgctggtaggctaa

SEQ ID NO: 88159 - protein, 444 aa, Synechocystis sp.
MTISRTICLGFIAAIAGGTLLLLMPLATSTGEWGNPLVALFTATSAVCVTGLSVVDVNKYFSFWGELTVMLLAQLGGLGYMTLTTFLMILIGRKFDLQQRFAIQESFDHRFAQGSNNLIKSVIATTLIFEVTGTIVLFFVFLQDYPPPRALWYAVFHSVSAFNNAGFSLFADNLIGYQTSVPLNLTVSALIIFGGIGYQVIIESYFWLVRKVKKSQRPFAFSLNLRVVVRVTIFLLLLGFFGILILEAQGNRAFAQFSFQDRLLVAWFQSVTTRTAGFNTIDLNELSSTSLVLVMLLMFIGASPSGTGGGIKTTTFAILANCTRSALRGQERVIIDDRCIPPQLILKAIAVVFGSMVTVISSISLLIFLESEQEAVSLAFEAVSAFATVGLSLGTTPELKPLSQLVLIVTMFIGRVGITILMAAIVGDPKPSLIKYPEENLLVG

SEQ ID NO: 88160 - DNA, 1332 bp, Borrelia burgdorferi B31
  CDS (1)..(1332): transl_table=11
ttgtatgatatgttgaaatttgaatttagcgacaggtttttactttttagttattttgttttaattatgtttataggctctcttttgttgatgttgcctatttcctgggaaggtgatggcaaattagcatacattgatgctctttttactgctgtttctgctgtaagtattacgggccttacaacggttaaaatggaaggcttttctacttttggatttattttgataatgttgctaatccagcttgggggacttggatttataagtattactactttttatttgcttatacctaaaaagaaaatgaatttaacagatgcaagaataataaagcagtattccctttcaaatatagaatataatcctattagaattttaaaaagcatattgtttataactttttcaattgaaatgataggtttaatattaatacttatttgttttaaacttaggggagtgaatatttcattcttagaggctttgtttacgacaatttctgctttttgcaatgcaggtttttccatgcattctgagagtatttatgcatggcgagatgttcctgaagctatagttgtggtctctattttaataatttgtggtgggcttgggtttatggtctatagagatgtaaataacactattaaaaacaaaaaaaaactatcgcttcatgccaagatagttttttctttaagcttctttttaattataattggtgcaattttatttttttttacagagatgcataaattaaaagctggttattcaatgagcactttaatatttaattcaattttttattcgattagtaccagaacagctggttttaattatcttgataattctttaataagcggaagaactcaaataatttctctaccattcatgtttattggtggtgcacccggatcaactgcaggagggattaagattacaacattttttttaattgtattggctgttgttaaaaatcaaaacggcaatggatatattattggttcttacaaggtttcaatagatagtataagatttgcacttttattttttgcaagagctatttttattttaagtttttcttttttcatgcttcttttttttgagggaggatctggcaattggaaggttattgatttaggttatgaagtattttctgcttttggaacggttggtctttcagttggagtaactcaggatttgtcattttgggggaaagtcattataatttttactatgtttgcaggacgaatagggcttttttcaatggctgtttttgtttcaagaaagtcgcgttttgaagaatttacaaggccaaggcaagatattttggttggttga

SEQ ID NO: 88161 - protein, 443 aa, Borrelia burgdorferi B31
MYDMLKFEFSDRFLLFSYFVLIMFIGSLLLMLPISWEGDGKLAYIDALFTAVSAVSITGLTTVKMEGFSTFGFILIMLLIQLGGLGFISITTFYLLIPKKKMNLTDARIIKQYSLSNIEYNPIRILKSILFITFSIEMIGLILILICFKLRGVNISFLEALFTTISAFCNAGFSMHSESIYAWRDVPEAIVVVSILIICGGLGFMVYRDVNNTIKNKKKLSLHAKIVFSLSFFLIIIGAILFFFTEMHKLKAGYSMSTLIFNSIFYSISTRTAGFNYLDNSLISGRTQIISLPFMFIGGAPGSTAGGIKITTFFLIVLAVVKNQNGNGYIIGSYKVSIDSIRFALLFFARAIFILSFSFFMLLFFEGGSGNWKVIDLGYEVFSAFGTVGLSVGVTQDLSFWGKVIIIFTMFAGRIGLFSMAVFVSRKSRFEEFTRPRQDILVG

SEQ ID NO: 88162 - DNA, 1332 bp, Aquifex aeolicus VF5
  CDS (1)..(1332): transl_table=11
gtggtaaaaaagttaaacccatctcgtacacttctcttttccttctccctccttatactagtcggtgctttgcttttataccttcccatttccacaactagaccaatatccttcttagatgccctctttaccgcaacctcggcggtaactgttacaggactcgcggttctggacacttactcggactttaccctttttggcaaactcgtaatccttttcctcattcaggtcggcggactcggatacatgacactttcaaccttctttttggttctcctcggacgcagaataggactcaaagagagacttatactcgctgaatctctggaatacccgagtatgcacggattaataagattcctcaagagagtattttcctttgtcttcattacggaactcacgggagcgattttactcagtatttacttttccctaaaaggtgtagaagacccagtttttaacggcatctttcactcggtttccgcgtttaacaacgcgggtttttcaactttcaaaaatggacttctggatttccgtggagatttattcgtaaaccttgttatttctttcctgataatactcggaggaataggttttttcgtggtaaacgatatatacctctggtacacaaaaaaggttccaagactttcagttcatacaaagcttgttatgataacgagtgttttattaatccttctgggaacggtgggacttatattcacggagttcggaaattataaaggactgtggcagtacgactggtacgaaaggattctctcctcttactttatgagcgtttcttcaaggactgcagggtttagtaccgtggatttaatagatatgagtgaatcttcccagtttttattaatgatattaatgtttataggtgcttctccgggaggcacgggaggaggcataaaaacgactacattcgttgttattcttatagccgtttactcctttgtaagaggaagggaacagagcgtgatattcgaaaggagtgttcccgaaagcactataaagaaggctctcgttatactctcgctctcaattttctttataaacttcgttaacctgatgctcgataagtttgagaataaggactttctttacacgatgtttgaagtagtttctgccttttccaccgtagggctttccatcggaaatccggaaggcttgagtttctgtgcggatttttcgccgcttgggaaaattgtgataataattacgatgcttgtgggaaggttgggcattctgggttttgccctagctctcacgggcaggtctgaagtgcagaggattaagtatccggaggcaaggattttagtatga

SEQ ID NO: 88163 - protein, 443 aa, Aquifex aeolicus VF5
MVKKLNPSRTLLFSFSLLILVGALLLYLPISTTRPISFLDALFTATSAVTVTGLAVLDTYSDFTLFGKLVILFLIQVGGLGYMTLSTFFLVLLGRRIGLKERLILAESLEYPSMHGLIRFLKRVFSFVFITELTGAILLSIYFSLKGVEDPVFNGIFHSVSAFNNAGFSTFKNGLLDFRGDLFVNLVISFLIILGGIGFFVVNDIYLWYTKKVPRLSVHTKLVMITSVLLILLGTVGLIFTEFGNYKGLWQYDWYERILSSYFMSVSSRTAGFSTVDLIDMSESSQFLLMILMFIGASPGGTGGGIKTTTFVVILIAVYSFVRGREQSVIFERSVPESTIKKALVILSLSIFFINFVNLMLDKFENKDFLYTMFEVVSAFSTVGLSIGNPEGLSFCADFSPLGKIVIIITMLVGRLGILGFALALTGRSEVQRIKYPEARILV

SEQ ID NO: 88164 - DNA, 1347 bp, Bacillus halodurans C-125
  CDS (1)..(1347): transl_table=11
atggcacgacttttatccaagtcagcattaaaggggaaggtcattcatttaagcccaccgcaaattttagcgcttagctttctcgtgtttattatgatcggcacgctcctattaaaattaccgatcgcatcaactacgtatatttcgtgggttgacgcgatgttcacagcaacatccgctattacagtgaccggtctcgttgttgtcgacacaggaacggactataccgtgtttggccaagtggtgattatgatcttgattcaacttggcggactcggattaatgacgtttgcggtgcttgcggtcatgatgctcggaaagaaaattgggttgcaacaacggattctcatccaagaggcgatgaatcaaacgtcactaggtggcttgattcggctcgttcgggtgctactcctgttcactctggtgatggaaacgatcgcttttattctcttatcaatccgttgggtgcctgaatttggctggcgcgaagggatgtatcaaagtttattccatacaatctcagcctttaacaatgcaggtttctccctttggtctgacagtttatctgcatacgtaggcgaccctgcgatcaacctgatcattacgattcttttcattacgggcgggatcggctttaccgtgttagcggatctttggtacaaaaagacattccgtgccctttcgctacattcgaaaattatgctgctcggtacgttagctttaaattgcattgcctttattgcgatctttattcttgagtacgccaacccgcacaccttagggggactggctcagtcggaccggttttggggcgcttatttccaagcggttactccgagaacggcaggatttaatacgcttgagattgccgatatgacgacggcctcaattgttttgattttgttgcttatgtttatcggtgccggaagtgcttcgacggcgagtggaattaaggttaccacgtttttcgtgatgatccttgccacttggtcgtttttaaaagggcgtgccgaaacggttgtctttgaacggacgatcaaactgcatacgatcttacgtgccctagcgattatcgtcattagtatgatgattgtatttattgctgttttcatattggccatcaccgaagacgctccatttatcgtaaaagtatttgaggtgttttcggcctttggtaccgttggtctatcgatgggacttacaggtgagctgacgacccttggcaaaatgaccattatggtcgttatgtttatcggaagggttggaccgctcacaatggctttcacgcttgcgaggccaaagcagtcaaacatacgttaccctgaagatgaagtgtttacagggtaa

SEQ ID NO: 88165 - protein, 448 aa, Bacillus halodurans C-125
MARLLSKSALKGKVIHLSPPQILALSFLVFIMIGTLLLKLPIASTTYISWVDAMFTATSAITVTGLVVVDTGTDYTVFGQVVIMILIQLGGLGLMTFAVLAVMMLGKKIGLQQRILIQEAMNQTSLGGLIRLVRVLLLFTLVMETIAFILLSIRWVPEFGWREGMYQSLFHTISAFNNAGFSLWSDSLSAYVGDPAINLIITILFITGGIGFTVLADLWYKKTFRALSLHSKIMLLGTLALNCIAFIAIFILEYANPHTLGGLAQSDRFWGAYFQAVTPRTAGFNTLEIADMTTASIVLILLLMFIGAGSASTASGIKVTTFFVMILATWSFLKGRAETVVFERTIKLHTILRALAIIVISMMIVFIAVFILAITEDAPFIVKVFEVFSAFGTVGLSMGLTGELTTLGKMTIMVVMFIGRVGPLTMAFTLARPKQSNIRYPEDEVFTG

SEQ ID NO: 88166 - DNA, 1377 bp, Deinococcus radiodurans R1
  CDS (1)..(1377): transl_table=11
atgacccggaacgccgcgctgccggagcccgcccccggacgccgctggcgcctgacgccgccgcaactgctcgcgctggtgtacgccctgggcatcctgctcggcgccgcgctgctgcacctgcccggcgtgcagcgccccggcgcggccctcaacagcatcgacctgctgtttaccgccacctccgccatctgcatcaccgggctgacggtggccgacaccggcgaggcgtttacccgctttggacaggtcctcatcatcctgctggtacagataggcgggctgggcatcctcactttcggcacggtgttcgccttcatgaccgggcggcgggtgaacttcaccgagcgccagcacctcgtcgcgcagctcaacgcgctggacgtgggcagcgtgctggggctggtgcggaccattttgctctacaccttcgtcaccgaggctctcggcgccgcgctgctcgccctgcgcttcgtgccgcagttcggctggggcgaggggctgtatcaggccgcctttcacgcggtcagcgcctacaacaacggcggcttcgtggtgctgtcaggtggactcgcgccctacgcgcaggacccgctggtgtgcctgaccctcgccgggctggtgattctgggcgggctggggtttctggtgcagctcaacgtggtggcgcatctgcgcaaccggcgccgcagccgcctgctggtgtattccaaactgacgctgctcaccaccgccgtgctgctcacgctgggcaccctggtcttgctggggctggaatggaacaaccccagcaccctggcccgcctgagcgcccccggcaagctgctcgccgcctttttccagagcatgacgccgcgctcggcgggcttttccaccgtcaatatcgaggggttgcagaccgccagcctctttaccctgatcggcctgatgtacatcggcgcgggcagcggctccaccgggggcggcatcaagacctccaccctcgccatcctggtcggcagcgcgtggaacatggtgcgcgggcgcggcgaactcatcttgttcgagcgccgggtgatgaacgacaacctcgtgcgggcgggcgcgattaccacgctctacacgctgctggtggcgacggccttttttgccatgctcgccaccaacccgaagctgggctttacccacctgctgttcgaaactgtgagcgcggcggccaccgtgggcctgagcatgaacaccacccacaagctcaacgacgccgggctgctcatcctgaccgcgctgatgtacctcgggcgcatcgggccgctgaccttcgcggtggccttcaacctgcggcccacccgcagccgctgggtcaagtacccgcccgaacacgacattctggtggggtag

SEQ ID NO: 88167 - protein, 458 aa, Deinococcus radiodurans R1
MTRNAALPEPAPGRRWRLTPPQLLALVYALGILLGAALLHLPGVQRPGAALNSIDLLFTATSAICITGLTVADTGEAFTRFGQVLIILLVQIGGLGILTFGTVFAFMTGRRVNFTERQHLVAQLNALDVGSVLGLVRTILLYTFVTEALGAALLALRFVPQFGWGEGLYQAAFHAVSAYNNGGFVVLSGGLAPYAQDPLVCLTLAGLVILGGLGFLVQLNVVAHLRNRRRSRLLVYSKLTLLTTAVLLTLGTLVLLGLEWNNPSTLARLSAPGKLLAAFFQSMTPRSAGFSTVNIEGLQTASLFTLIGLMYIGAGSGSTGGGIKTSTLAILVGSAWNMVRGRGELILFERRVMNDNLVRAGAITTLYTLLVATAFFAMLATNPKLGFTHLLFETVSAAATVGLSMNTTHKLNDAGLLILTALMYLGRIGPLTFAVAFNLRPTRSRWVKYPPEHDILVG

SEQ ID NO: 88168 - DNA, 1380 bp, Streptococcus pneumoniae TIGR4
  CDS (1)..(1380): transl_table=11
atgttattcaaattatctaaggaaaaaatagagctaggcttatctcgtttatcgccagcccgtcgtatttttttgagttttgccttggtcattttactaggctctcttcttttgagcttgccctttgtccaagttgaaagctcacgagcgacttattttgatcatcttttcactgctgtctctgcagtctgtgtgacgggtctctcaacccttccagtagctcacacctataatatctggggtcaaataatctgtttgctcttgattcagatcggtggtctagggctcatgacctttattggggttttctatatccagagcaagcaaaagcttagtcttcgtagccgtgcaactattcaggatagttttagttatggagaaactcgatctttgagaaagtttgtctattctatttttctcacgacctttttggttgagagcttgggagctattttgcttagttttcgccttattcctcaacttggctggggacgtggtctttttagttccatttttctagcgatctcagccttctgtaatgccggttttgataatttagggagcaccagtttatttgcttttcagaccgatttactggtcaatctggtgattgcaggcttgattattacaggcggccttggttttatggtctggtttgatttggctggtcatgtaggaagaaagaaaaaaggacgtctgcactttcatacgaagcttgtactattattgactataggtttgttgttatttggaacagcaactactctctttcttgagtggaacaatgctggaacgattggcaatctccctgttgccgataaggttttagttagcttttttcaaacagtgacgatgcgaacagctggcttttctacgatagattatactcaggctcatcctgtgactcttttgatttatatcttacagatgtttctaggtggggcacctggaggaacagctgggggactcaagattacgacattttttgtcctcttggtctttgcacgaagtgagcttctaggcttgcctcatgccaatgttgcgagacgaacgatcgcgccgcgaacggttcaaaaatcctttagtgtctttattatctttttgatgagcttcttgataggattgattctgctagggataacagccaaaggcaatcctccctttatccacctcgtatttgaaaccatttcagctcttagtacagttggtgtaacggcaaatctgactcctgaccttgggaaattggctctcagtgttatcatgccacttatgtttatgggacgaattggtcccttgaccttgtttgttagcttggcagattaccatccagaaaagaaagatatgattcactatatgaaagcagatattagtattggttaa

SEQ ID NO: 88169 - protein, 459 aa, Streptococcus pneumoniae TIGR4
MLFKLSKEKIELGLSRLSPARRIFLSFALVILLGSLLLSLPFVQVESSRATYFDHLFTAVSAVCVTGLSTLPVAHTYNIWGQIICLLLIQIGGLGLMTFIGVFYIQSKQKLSLRSRATIQDSFSYGETRSLRKFVYSIFLTTFLVESLGAILLSFRLIPQLGWGRGLFSSIFLAISAFCNAGFDNLGSTSLFAFQTDLLVNLVIAGLIITGGLGFMVWFDLAGHVGRKKKGRLHFHTKLVLLLTIGLLLFGTATTLFLEWNNAGTIGNLPVADKVLVSFFQTVTMRTAGFSTIDYTQAHPVTLLIYILQMFLGGAPGGTAGGLKITTFFVLLVFARSELLGLPHANVARRTIAPRTVQKSFSVFIIFLMSFLIGLILLGITAKGNPPFIHLVFETISALSTVGVTANLTPDLGKLALSVIMPLMFMGRIGPLTLFVSLADYHPEKKDMIHYMKADISIG

SEQ ID NO: 88170 - DNA, 1308 bp, Staphylococcus aureus subsp. aureus Mu50
  CDS (1)..(1308): transl_table=11
atgaacaaagtccacaaacctttatatttttatttaatgcttttcttctctacaactatcataggtgctcttttattatatttacctttcactggtaaaaagccaatatcttttttagatgccctatttatagcttcaagtgcatttacagttactggcctatccccagttgatataggatcacagtttaatatacttggtgaaatagtaatactattattaattcaaataggtggtctgggtatcgtgaccgtaaccctattgacactagtatttttaaatagaaagatatcaatgaaaaatagattcttgattatggttacatggaatattgacgaacctggtggtgttattaagctaattaaacacttggctatttatagtttagtcactgaattaattggtatgatttgtttgtgtttatcttttataccaaaatttggtataggcaaaggtttatttttaagcttattcacatcagtatcagcttttaataatgctggatttgccctttttaagaataacttaatagattattctagtgatccaattgtcattattacaatctcaatactcataatatttggaggtattggacattttgtcgtaatagactttattaattgtaaaaaaatgagtaaattatctttacattctaaattagtcttaactacaactagtatcctaataattataggagctattacattctttttattagaacagtttaatactatgcaacatatgggactagttgaaaaaatcggaaattcttttttccaatcagtaacaacacgaacagcgggttttaacagtattgatatagcaagcattaacaaatctaccgccttaatgttaatgttacttatgtttattggtggtgcccctctcagtgcagctggaggaattaaaataactacttttgcagtggcgtttatatttgttttaaattatatacgtaaagaaaataatgtttcagtattcaataaagaaatatctgacaaacatataaaactatctattgttaccattaatatctcatttctatttatcagtatcattacttttatattatcgataattaatccgaacatatcattaatcaagttattattcgaagtggtttctgcattcggaacagtcgggttaagtatgaaccttaccacagaatatcatggtattactaaaataattattatattcgttatgctttgcggtaaagtaggactattaactttattaagaacatttataccaccaaaaagtcctaaaaattaccgctacactaaaggacaaatttatctataa

SEQ ID NO: 88171 - protein, 435 aa, Staphylococcus aureus subsp. aureus Mu50
MNKVHKPLYFYLMLFFSTTIIGALLLYLPFTGKKPISFLDALFIASSAFTVTGLSPVDIGSQFNILGEIVILLLIQIGGLGIVTVTLLTLVFLNRKISMKNRFLIMVTWNIDEPGGVIKLIKHLAIYSLVTELIGMICLCLSFIPKFGIGKGLFLSLFTSVSAFNNAGFALFKNNLIDYSSDPIVIITISILIIFGGIGHFVVIDFINCKKMSKLSLHSKLVLTTTSILIIIGAITFFLLEQFNTMQHMGLVEKIGNSFFQSVTTRTAGFNSIDIASINKSTALMLMLLMFIGGAPLSAAGGIKITTFAVAFIFVLNYIRKENNVSVFNKEISDKHIKLSIVTINISFLFISIITFILSIINPNISLIKLLFEVVSAFGTVGLSMNLTTEYHGITKIIIIFVMLCGKVGLLTLLRTFIPPKSPKNYRYTKGQIYL

SEQ ID NO: 88172 - DNA, 1338 bp, Listeria innocua Clip11262
  CDS (1)..(1338): transl_table=11
gtgttagcgcgtatgacacccgttcaagtaattatcgcgtattattttattgcggttacgatttctactatcgtcttaagtttgccgttcactttacaaaaaggggttaaggtgtcgtttattgatactttattcacagcggcgagttctgttagtgttaccgggcttgcgacagtagatgttagccagacgtatagtactgctggaatttgggtcttaatggcgattttccaaattggtggattgggcgttatgatgattagcacgttcttctatttgattttgaagagacggattggactgaaacagcgccaacttattatgacagatacgaatcaatttacgatgagtggaatggttcggatgttgcgcgaaattcttgtcttgatttttggaattgaattagtgggcgcgttgattttagggatttattttatccctctgtatcctaatttttgggaagcgatgttccaaggtttatataactcagtttcgcttgttaccaatgctggtgtggatattactggtaaatcgctaataccattcgcaaatgattattttgtccaatttatttcgatattactaattattgctggtgcgattgggtttccggttttactggaaacaagacgatttttatttgagaaaaatacgctaataccgtttcgtttttcgttgtttgtaaaggtgactacacttacttattttgtacttttgattgtcggcggcttactcatttggttgtttgaatacaatcacttctttagtggcaaaagttgggactttggtttctttaactcgatgttcttatcggcgacatccagaagtgctggactccaaacaatggacagcggggcgctttcagtttctacccttttacttgtgtcgttcttgatgtttatcggagcttcgccaagttctgttggtggtgggatacgaacgactacttttgcgattaccattttatttatttattcggttattcgcggtcggaagcatgtttatatttttgggcgagaattgcatcaagaagatgttcgcaagtcgcttgcagtcacgcttgttgcaggatttctcagtatttctgcgatagtcatactcatgcaaacagaaacggcctcgctcatttcagttatttttgaagtgttctcggcgtttggaacgtcaggtttatcagttggtttgacgcctgatttgtccaccccaggtaaattaattattatcgtcttgatgttcattggacgggttggcatcatgtattcaatgcttagtttaagaaataaaaatcaacccaaaaatgccattcgattaccaaaagaaaaaattattactggctaa

SEQ ID NO: 88173 - protein, 445 aa, Listeria innocua Clip11262
MLARMTPVQVIIAYYFIAVTISTIVLSLPFTLQKGVKVSFIDTLFTAASSVSVTGLATVDVSQTYSTAGIWVLMAIFQIGGLGVMMISTFFYLILKRRIGLKQRQLIMTDTNQFTMSGMVRMLREILVLIFGIELVGALILGIYFIPLYPNFWEAMFQGLYNSVSLVTNAGVDITGKSLIPFANDYFVQFISILLIIAGAIGFPVLLETRRFLFEKNTLIPFRFSLFVKVTTLTYFVLLIVGGLLIWLFEYNHFFSGKSWDFGFFNSMFLSATSRSAGLQTMDSGALSVSTLLLVSFLMFIGASPSSVGGGIRTTTFAITILFIYSVIRGRKHVYIFGRELHQEDVRKSLAVTLVAGFLSISAIVILMQTETASLISVIFEVFSAFGTSGLSVGLTPDLSTPGKLIIIVLMFIGRVGIMYSMLSLRNKNQPKNAIRLPKEKIITG

SEQ ID NO: 88174 - DNA, 1335 bp, Nostoc sp. PCC 7120
  CDS (1)..(1335): transl_table=11
atgaccgtttcgcgcacagtttgcttgggatttatagctgtcatcgtagtaggaactatcttgttgatgatgcctttctccactagcaatggtaattggaatgaccctattgtggcaattttcacatcaacttcagcagtttgtgtaactggtttagcagtagttgatactggtacttatttttctttttggggacagttctttattgccctattagcgcaaattggtggtttaggctatatgacaactaccacctttttgattctgctgattggtcgcaaatttgacctccggcaaaaaatcgctattcaacaagctttagaccgccctggtatgagtggtagcacccaagttattcgttcaattattgccacaaccctaatttttgaaattacaggtgtctttttattgttaccagcttttgtccctgattatggctggaatcaaggactatggttagccatatttcatagtgttaatgcttggaataacgctggttttagtttgtttaaagataaccttattagttatcaatcttcttctttagtcgttttcacaatcacaggattaattatctttgggggaattggttatcaggtaattttagaaacatatatttggttgcgcgatcgcatcctcaaaaaaaaggaaactttggtattttcattagactttaaagtcgctactagcacgacactaatacttttatttctaggcacaatcgccttcttttgcatagaagtaagaaacccacaaacctttggttcactcaatttaagggatcaatttttagtagcttggtttcaatcagttactcccagaactgctggctttaacaccattgacattggcaaaatgacaacggcgggtctatttatcacaattgccctcatgtttattggtgcaagtcctggaggtactggaggaggaatgaaaaccaccacactgagagttttaactagctgtactaaaacaattcttcagggtaaagaagaagttttattatatgaacgtaagatagcagttgctctcattttaaaagcagttggtgttttagttggttctatagcaaccgtcattttagccacaattctcatatctcttacagacccaaaactagattttattcaaattctatttgaagtagtatcagccttcgctaccgtaggtctttcaactggtattacagctagcgtctccccagcagcaaagctagttttaattatcactatgtatgtaggtagagtaggagttttactactaatgtctgctatattaggagatccgcgaccgacaaggattcactaccctgaagaaaacttactcgtagggtaa

SEQ ID NO: 88175 - protein, 444 aa, Nostoc sp. PCC 7120
MTVSRTVCLGFIAVIVVGTILLMMPFSTSNGNWNDPIVAIFTSTSAVCVTGLAVVDTGTYFSFWGQFFIALLAQIGGLGYMTTTTFLILLIGRKFDLRQKIAIQQALDRPGMSGSTQVIRSIIATTLIFEITGVFLLLPAFVPDYGWNQGLWLAIFHSVNAWNNAGFSLFKDNLISYQSSSLVVFTITGLIIFGGIGYQVILETYIWLRDRILKKKETLVFSLDFKVATSTTLILLFLGTIAFFCIEVRNPQTFGSLNLRDQFLVAWFQSVTPRTAGFNTIDIGKMTTAGLFITIALMFIGASPGGTGGGMKTTTLRVLTSCTKTILQGKEEVLLYERKIAVALILKAVGVLVGSIATVILATILISLTDPKLDFIQILFEVVSAFATVGLSTGITASVSPAAKLVLIITMYVGRVGVLLLMSAILGDPRPTRIHYPEENLLVG

SEQ ID NO: 88176 - DNA, 1335 bp, Thermoanaerobacter tengcongensis MB4
  CDS (1)..(1335): transl_table=11
atgataaaaataaaactgacacctacgcaagtacttgctttaggatttgcgactattatattgattgggactttattactaatgctacctgtggcaactaaaagtggagaaggtgcagattttataactgcactatttacagccacatcagccacgtgtgttactggccttgtagttgttgacacggaaacttattggtctacttttgggcaaatagtgataatgttgctgatacaagttggcggtttaggtattatgaccatgtcaacgcttttcgcgttgatccttggtaggagaattacctttaaagagagattggtaatgcaagaagctttcaatacaaatagccttggaggcattgtgaaatttgccaagtatatactaatggtttcttttttatttgaaagcattggcgcaattatattgactttgagatttttacctcagatgggattaaaaaaagcagtgtattacggcttgttccattctatttctgcgtttaataatgctggtttcgatcttatgggtaactttaggagtctaacgggttatgtttctgactgggtggtaaacctggttataatgagtttgataatatttggcgggctaggattttatgttttacttgatatatacgaacatagacattttagcaaacttacattgcattcaaaagctgttataactattacattgtttttgattgctggtggagcactgcttatatttttatttgaatacaataatccaaaaacattaaaaccattggactttcctacaaagatacttgcatcattatttcaagctgtgacacctaggacagctggttttaatacgctatcgctttctgacatgaccatagcgtctaaatttttgacaataatactcatgtttattggtgcttctccagctggaacagggggaggtatcaagacaactacttttggagttatactatatactgtattatcagttataaagggtgaagaagagacagtactttataagcgcactattagcagaaacatagtctataaagctgtagctatatcctttataagcgtttttattattttctctgtgactatggttttatctattactgaaacatccgactttttgaccttgttatacgagacaacctcagcttttggaactgtaggattatcactcgggcttacacctgaattgactacagtgggcagaattattataatatttacaatgtatactggcagagttggtcctttaacattggcgttagcattggcacaaaggcagaagaaacctaaacctattatgaagtatgtggaagaaaaaattatggtaggttaa

SEQ ID NO: 88177 - protein, 444 aa, Thermoanaerobacter tengcongensis MB4
MIKIKLTPTQVLALGFATIILIGTLLLMLPVATKSGEGADFITALFTATSATCVTGLVVVDTETYWSTFGQIVIMLLIQVGGLGIMTMSTLFALILGRRITFKERLVMQEAFNTNSLGGIVKFAKYILMVSFLFESIGAIILTLRFLPQMGLKKAVYYGLFHSISAFNNAGFDLMGNFRSLTGYVSDWVVNLVIMSLIIFGGLGFYVLLDIYEHRHFSKLTLHSKAVITITLFLIAGGALLIFLFEYNNPKTLKPLDFPTKILASLFQAVTPRTAGFNTLSLSDMTIASKFLTIILMFIGASPAGTGGGIKTTTFGVILYTVLSVIKGEEETVLYKRTISRNIVYKAVAISFISVFIIFSVTMVLSITETSDFLTLLYETTSAFGTVGLSLGLTPELTTVGRIIIIFTMYTGRVGPLTLALALAQRQKKPKPIMKYVEEKIMVG

SEQ ID NO: 88178 - DNA, 1365 bp, Thermosynechococcus elongatus BP-1
  CDS (1)..(1365): transl_table=11
atgttgacggttccacgaacaatttgcctgggatttttagcagtgatcatggtggggacgtgcctactctggctgccttggtccaccagtaatgggcattggaatcccttcgttattgccctatttacagccacttccgcggtttgtgtcacaggtcacatcattgttgatacggccacccatttttccccctttggccaattggtgattctgctcttgattcaagtgggtggtctggggtacatgacggccacgacatttttaattattttactaggacggaagtttaacctacggcaaaaaatagcgttacagcaggccttggatcggcggggcattgagggggcacggcaactggtgcgctcaattttgggcttgacctttctctttgaattgacgggtacctttttgctgtggctcatttttcgccaagactttagggatccacaggccctgtggcttgcggtgtttcacagtatcagtgcttggaataatgccgggtttagtctctttagcaacagtttaatggggtatcaaacctcagtgcctttgaatttggtgatttccctactgattatttttggtggcattggctatgaggtcatctttgagttttacctttggctacgggagcatctgcgctactggggcaaacccgcctacttgatccgcaaggccagccagatgacgtttagcctcaatttcaaaattgtaacaagtacaacagcgactctcctcattttgggaacagtcatgctgttcctgacggagatgcgatcgcccgcgcgatttggtcttttttcttgggatcagaagctcctcttggcgtggtttcagtcggttacggcgcgcacagcgggctttaataccgtcaacattggtgaattcaataatagcgggctatttattatgattgccctaatgtttattggcggcagccccggtggcacggcagggggcattaaaacaaccacgttacggattctggcagggattaccaagtcggcgctccaagggaaagaggtggtactgctctaccgccggcaagtgcccccctccctgatcatgaaggccgtcgccgttgcctttggctcaatgtttacggtgctggtttcaaccactctgattgcgatcgccgacccggaagagaatttcatcaatatcctctttgaaacggtttccgcctttgccaccgttgggctttccactggtattaccagtgatctcagcatcttttccaagttggtcttgattgtaacgatgtatgctggacgggtgggtatcctgctgctaatggctgcaattatcggtgatccccagccttctaacgttcaatatcccgaggagaatctgctagtgggttag

SEQ ID NO: 88179 - protein, 454 aa, Thermosynechococcus elongatus BP-1
MLTVPRTICLGFLAVIMVGTCLLWLPWSTSNGHWNPFVIALFTATSAVCVTGHIIVDTATHFSPFGQLVILLLIQVGGLGYMTATTFLIILLGRKFNLRQKIALQQALDRRGIEGARQLVRSILGLTFLFELTGTFLLWLIFRQDFRDPQALWLAVFHSISAWNNAGFSLFSNSLMGYQTSVPLNLVISLLIIFGGIGYEVIFEFYLWLREHLRYWGKPAYLIRKASQMTFSLNFKIVTSTTATLLILGTVMLFLTEMRSPARFGLFSWDQKLLLAWFQSVTARTAGFNTVNIGEFNNSGLFIMIALMFIGGSPGGTAGGIKTTTLRILAGITKSALQGKEVVLLYRRQVPPSLIMKAVAVAFGSMFTVLVSTTLIAIADPEENFINILFETVSAFATVGLSTGITSDLSIFSKLVLIVTMYAGRVGILLLMAAIIGDPQPSNVQYPEENLLVG

SEQ ID NO: 88180 - DNA, 1362 bp, Shewanella oneidensis MR-1
  CDS (1)..(1362): transl_table=11
gtggttcaatggcatccttcgctcccccttgagcaaactcagaaagccggtaaaaaactctttggcgcgccgccctttatcttaagtgcaagctttgctctgctgatcttggttggcacttgtttgcttaaactgcctatcgccacagagacccccatttcctggctgcaaagcctatttaccgttacctctgcagtgacggttaccggattggtggtagtcgatacgggcactgtatttaccccctttggccaagtgattgtcgcactcttaatccaatgcggtggattaggattaatgacctttgccatcgttaccctcattgcccttggcggaaaaatcggtttcttgcaacaaaccgtggcaaaagaggcatttaatcaaactgacacctccaccttagtctcgacggctaaagcggttttggtgttttcactgctggtcgaagccgtagggatgttgattttatctgtccattggagcgacgagctaggttggcaaaccagcctgtttcatggcttcttttataccattagcgcttttaataacgcgggttttgccctaagcgcagatagcttgatgccctatgtggccgaccccgtagtcaacctcaccatcacaggattatttatcgtcggcggcctagggttttcggtgtggattgatcttcgccgccataaacgttggtcaaaattaaccgtctacagccgcatgatgatcaccggcaccatactgatcaacgccgtagccctgattgccatttacttgattgaatacaacaaccccaacaccctcgcgcccttaagcgaactcggcaaatggctggcctcttggtttcaagccgttaccccgcgcaccgcaggctttaataccctgcccatagataaactcgaagatggctcagccctgttaatactggtgctcatgtttatcggcggaggctccctcagtaccgccagcggcattaaagtggtgacctttatggtgttaattctggccacctatagttatttacgtcgtgatgaagccgcttatgcctttaaacgagaaatcccgaaagagacaatcagtaaggcattagcactcaccatgatctctataggcgtgacatggctggcgattttcgccctcgtactcaccgaaaaagcacccattttggatatcgccttcgaggctgtatcggcattcggtacagtgggactctcccgtggattaaccagcaatttatcgggtgcaggccaagggattatcatctttatgatgtatatggggcgcctaggcccactgatgctggcctacttccttgccaacccaagggtcaagaaattgcgctatgcagaaactaaattggcgattgggtaa

SEQ ID NO: 88181 - protein, 453 aa, Shewanella oneidensis MR-1
MVQWHPSLPLEQTQKAGKKLFGAPPFILSASFALLILVGTCLLKLPIATETPISWLQSLFTVTSAVTVTGLVVVDTGTVFTPFGQVIVALLIQCGGLGLMTFAIVTLIALGGKIGFLQQTVAKEAFNQTDTSTLVSTAKAVLVFSLLVEAVGMLILSVHWSDELGWQTSLFHGFFYTISAFNNAGFALSADSLMPYVADPVVNLTITGLFIVGGLGFSVWIDLRRHKRWSKLTVYSRMMITGTILINAVALIAIYLIEYNNPNTLAPLSELGKWLASWFQAVTPRTAGFNTLPIDKLEDGSALLILVLMFIGGGSLSTASGIKVVTFMVLILATYSYLRRDEAAYAFKREIPKETISKALALTMISIGVTWLAIFALVLTEKAPILDIAFEAVSAFGTVGLSRGLTSNLSGAGQGIIIFMMYMGRLGPLMLAYFLANPRVKKLRYAETKLAIG

SEQ ID NO: 88182 - DNA, 1359 bp, Lactobacillus plantarum WCFS1
  CDS (1)..(1359): transl_table=11
atgattatgagacaattagcacattttaaattttttgatacgctatctaagaaaatggtagccggttttattatcttaattctgattgggacagtcttactgagcctcccatgggcgacgccagcaaacgtgcacacgtcgttgatcgatgtgttgtttacgtcggcatcagcgacatgtattactgggctgaccgtcgtcaatactgctgcgcactggacaacgtttggtcaattggtgattctggtactttcggaggtcggtgcgctgggctacatgacctttgcggtactcctctttaatattatgcgtcgtcagatcggtctctctacgcagttgatggtcaaggcctccctgaatttggaacgattgagtgatactaaaagcgttatgaagtatgtcgtgggtttgtcactgctctttcagctaggcggtcttgggttgctcgcaattgattttgtacctcgatttggttggcgtcacggattgtatgtgtcactataccatgcggttatgtcattttgtaatgccggttttgatgtgtttggcgatagtctgcaaggctttcgtaatgatccatacgtcttgacggtcacgatgatcctaattattgcgggtggccttggatttttagtttggcgtgacgtgctgctgtaccatacgcgtaagcgactgactttaaattccaaactgaccttactcacaactttcagtttatttgtcatcggttttgtcttgttgttgatcactgaacgtgacttggaactgttgccaaccggaatgtcgtgggtcaaccgaacgatcaatacgctgtttttaagtgttaccccccggacagcgggtttaatcacaatgcctactcaaggattgcaagcggggagtttattggtcattatgattctgatgttcgttggtgggacgcctggatcgactgcgggtgggatcaagacgacaacgtttggcgttttgatgttccaaagtattgcccagctacgtggtcgccgtgatgttgagtttagtcatcgtcgttttagtcaggagaatatcaatcgggcgctaatgctgattttcttggctagtattgtgctgacagtggcaacactgatcttaacgcagactgaaaaaattccgaagggcttcgggttggaatacgttttgtttgaagtgttatcagcatttggaaccgtcggactcagtttgggattgacgcccaatctgactttgattgggaagattgtaatcatgatgctaatgtttattggccgggtggggatcttcacgtcactctacgcgctttccagacgtcaagctagggtgaacttgatccgttatccggcagaaaatattttgattggttag

SEQ ID NO: 88183 - protein, 452 aa, Lactobacillus plantarum WCFS1
MIMRQLAHFKFFDTLSKKMVAGFIILILIGTVLLSLPWATPANVHTSLIDVLFTSASATCITGLTVVNTAAHWTTFGQLVILVLSEVGALGYMTFAVLLFNIMRRQIGLSTQLMVKASLNLERLSDTKSVMKYVVGLSLLFQLGGLGLLAIDFVPRFGWRHGLYVSLYHAVMSFCNAGFDVFGDSLQGFRNDPYVLTVTMILIIAGGLGFLVWRDVLLYHTRKRLTLNSKLTLLTTFSLFVIGFVLLLITERDLELLPTGMSWVNRTINTLFLSVTPRTAGLITMPTQGLQAGSLLVIMILMFVGGTPGSTAGGIKTTTFGVLMFQSIAQLRGRRDVEFSHRRFSQENINRALMLIFLASIVLTVATLILTQTEKIPKGFGLEYVLFEVLSAFGTVGLSLGLTPNLTLIGKIVIMMLMFIGRVGIFTSLYALSRRQARVNLIRYPAENILIG

SEQ ID NO: 88184 - DNA, 1368 bp, Enterococcus faecalis V583
  CDS (1)..(1368): transl_table=11
atgaaacatcagatcaaaagaaggttgtatatttcacctgttcaaacaattgtcttaggcttttttctattaattgttgtaggcacgatcttattaatgatgcctttttctgcacaagctggacaaaaaacgcaatggattgatgcttttttcgtggcaacttccgccgtctgtgttacagggctttcgcctttgaatacggcggaacattggagtcctatcgggcaagttattattatgattttgattgaattaggcggcttaggctttttaaccgttgccacgattttctttagtttgctgcggaaaaaagcgtcactaagtgtacggatgttgtatcaagaagctttaaatgttagtgaagtttccggagtttttcgtttaatgaaatatattatgaagtttgcggccattattcaattacttggagccttcttgttgtcctttcaatttgtgccaacatttgggtggaaaaaagggttgttttttagtctcttccatgccgtttcggcattttgtaatgctggctttgatttgctaggggatagtatggttccttatcaaaattcgccttatcttttactagtcattagctttttaattatagctggtggtttaggatttattgtgtggcgcgatatttttgcaatgattaaaggctataaaaataaaattaagcaccgtgttagtattcatacacgccttgctttaacggtgaccgccacctttttagtcttagggaccgttattttttacatttcagaatatcgccattttccagctgacatgtctttttggcagcgtcttgtcaacagttggttcttgtcggttacaccaagaacggctggcttttattcggttgattatttgaaaatgagtaatccaggcctgattgtcacgattttgtggatgtttattggtggcacttcaggatcaaccgctggcggcttgaaaaccactacgtttggtgtgttatttttacaatttcgtgcaatttttaaagggaaacagcgagtggaattccatgaacgcacaattcctgagcgagtagtgctccaagcatttactttgttcttcttggcaacttttttatgtgtaactgcttcggttattctctcgtttacagaaacattacctttaaaaaacgggattgagtatattgtttttgaagtgatttctgcatttggaacggtcggtttaacaatggggttaacaccagatttaactgtttttggtaaactggtgattatttttctaatgttcgtcggtcgtgtgggtgtgtacacggtgttattgtcattaattaagaaaggcttggaaagtcagtcgaaagttcaatatccaaaagaatcagtgatgattggttaa

SEQ ID NO: 88185 - protein, 455 aa, Enterococcus faecalis V583
MKHQIKRRLYISPVQTIVLGFFLLIVVGTILLMMPFSAQAGQKTQWIDAFFVATSAVCVTGLSPLNTAEHWSPIGQVIIMILIELGGLGFLTVATIFFSLLRKKASLSVRMLYQEALNVSEVSGVFRLMKYIMKFAAIIQLLGAFLLSFQFVPTFGWKKGLFFSLFHAVSAFCNAGFDLLGDSMVPYQNSPYLLLVISFLIIAGGLGFIVWRDIFAMIKGYKNKIKHRVSIHTRLALTVTATFLVLGTVIFYISEYRHFPADMSFWQRLVNSWFLSVTPRTAGFYSVDYLKMSNPGLIVTILWMFIGGTSGSTAGGLKTTTFGVLFLQFRAIFKGKQRVEFHERTIPERVVLQAFTLFFLATFLCVTASVILSFTETLPLKNGIEYIVFEVISAFGTVGLTMGLTPDLTVFGKLVIIFLMFVGRVGVYTVLLSLIKKGLESQSKVQYPKESVMIG

SEQ ID NO: 88186 - DNA, 1401 bp, Helicobacter hepaticus ATCC 51449
  CDS (1)..(1401): transl_table=11
atgacaaacctaaagagtatgcaaattctcatcataggctatgtggggattatcatacttggagctttgcttttgtttttaccttgtatgcactcctcttctcttagttttatagaagccctttttacgagcacttcagcttttacttgcacagggcttattataaaagatacggcacttgattttacaccttttggacaagctgtgattttagctcttatttggcttggcggattgggatatatgagtatgcttggtatcgtgtatgtattccttcgaaagcgactttcaaatagggaacgcaatatgataaaagaatcacttaattatccttcctatgatggtatgatgagttttttaaaaaaagtcttgttttttgtaattttaattgaatcctttggtgctttggcgctttttatttatttttattttgtgcaagattttagcgttttcactgctttgtgggcaggtatatttcacgctatttcggcttttaataatgcaggattctctatttttagcactaatcttatggcttatcgccaaagcgtgtttgttaatagtgtgatatgttttcttattatcgctggaggaatgggttatattgtgcttattgaactccatacctttataaagtcgcgtttatacatattttggaatatttgtctagcttttatgcgcaataaaccattatcaaatctgcacacaattcgcttgagtttgcatagtaagattgttgtaagttatacatttgtgcttttaactttgggatttagctttatatttgtgcttgaatatcacaatccaaagagtatgggtaattttgagttttttgacaaaatactctcaagtttttttatgtcggtaaattatcgcacctctggatttaatagcattgatttgggaggattgaaagattctacaatgtttttctcttctttgcttatgattataggaggggctccgggtggcacagcaggaggtattaaagtaaccactctcgcaacactttttgctttttgtgccgcgcttttttatgatacacaaccacgattatttaaacgtaggattatggaaaaaagtgtaaaaaaagccattggtgtaggtattattgctatgatttgtatcactttagcaaatttcattattgctgctttacaagaggatacgcgttttatgcttattatgtttgaggtttcatcagcttttgcaactacgggcgtgtctgcaggcaatggtggcacattaagcttaagtgcgaatttctccccactctcgcaaatagtaattattgggcttatgctaatgggaaaagtaggtattttagctttttggctggcatttgtgggcaaacgtaagcagagttatattactctacaagaggagcgcgtgattatttag

SEQ ID NO: 88187 - protein, 466 aa, Helicobacter hepaticus ATCC 51449
MTNLKSMQILIIGYVGIIILGALLLFLPCMHSSSLSFIEALFTSTSAFTCTGLIIKDTALDFTPFGQAVILALIWLGGLGYMSMLGIVYVFLRKRLSNRERNMIKESLNYPSYDGMMSFLKKVLFFVILIESFGALALFIYFYFVQDFSVFTALWAGIFHAISAFNNAGFSIFSTNLMAYRQSVFVNSVICFLIIAGGMGYIVLIELHTFIKSRLYIFWNICLAFMRNKPLSNLHTIRLSLHSKIVVSYTFVLLTLGFSFIFVLEYHNPKSMGNFEFFDKILSSFFMSVNYRTSGFNSIDLGGLKDSTMFFSSLLMIIGGAPGGTAGGIKVTTLATLFAFCAALFYDTQPRLFKRRIMEKSVKKAIGVGIIAMICITLANFIIAALQEDTRFMLIMFEVSSAFATTGVSAGNGGTLSLSANFSPLSQIVIIGLMLMGKVGILAFWLAFVGKRKQSYITLQEERVII

SEQ ID NO: 88188 - DNA, 1329 bp, Wolinella succinogenes DSM 1740
  CDS (1)..(1329): transl_table=11
atggatataagaagcgttcggattcttttgcttagctatatgctcatcgcgctccttggcgctcttttgctctccttgcctcccatgcagagggctcctttaccttttgttgatcttcttttcacttccacctcggctgtttgtgtgacgggactcatcgttcaaaataccgcgagcgacttcactttttggggacaattggtgattttgctccttattcaggtgggtgggtttggctatatgacgcttgccacgcttctctatctagtgctacgccgtcgcttgggctttcgcgagaagcaggtgctcaaagagacgctcgattatcctacgatggatggcttgattcgcttcatgaggcgaatcgtcttttttgtgctctatatcgagttagtcggtgcgctgttgctttttgggcgattctctcttgataaggagatggaggaggcgctttggctagcgatttttcatgcggtctcggcctttaacaatgcaggattttcgctttttgagagcaatctcatggagtatcgtggggatgtagccatcaatcttatcatcacctcgctcatcattattggggggcttggctattttgtcctccttgagcttcgagagcatcacaaaaagcgctttttccacctctcgcttcacaccaaagtggtcgtgacgatgacggcggcgcttttggtttttgcggctttggtggtgctgattttggagtggaacaaccctagaaccctaggggagctccctgtttgggagcgcttcatggcggcctatttcgcctcggtcaatttccgaacagcgggctttaatacgcttgatattggagggtttcgtgatgcaaccatgttcttctcctcggtctttatgagcattggaggagcgcctggaggaacggctgggggaatcaaggtcaccactgtggcggtgttgcttctctatggctgggcctctttgcgtcaaggcgagccagtgatctttaagcgcaaagtggcggacgaggtggtacaaaagtcctttgtgattcttttaggggcagcgatttacatcatcctctcggccatggcactctccatgattgaggagggggtctcctttttgcctttgttgcttgaagtctcctccgcctttggcaccgtggggctctctgcaggagatggaggcgtgctcagtctatcggccaattttgatacttttggcaagttttttatgattgttttgatgttgttggggcgggtgggagtgttggctttcactatcgtcttttttggggcatcatccccgcgaagagtccaatatcctgaggggagaatcatcttatga

SEQ ID NO: 88189 - protein, 442 aa, Wolinella succinogenes DSM 1740
MDIRSVRILLLSYMLIALLGALLLSLPPMQRAPLPFVDLLFTSTSAVCVTGLIVQNTASDFTFWGQLVILLLIQVGGFGYMTLATLLYLVLRRRLGFREKQVLKETLDYPTMDGLIRFMRRIVFFVLYIELVGALLLFGRFSLDKEMEEALWLAIFHAVSAFNNAGFSLFESNLMEYRGDVAINLIITSLIIIGGLGYFVLLELREHHKKRFFHLSLHTKVVVTMTAALLVFAALVVLILEWNNPRTLGELPVWERFMAAYFASVNFRTAGFNTLDIGGFRDATMFFSSVFMSIGGAPGGTAGGIKVTTVAVLLLYGWASLRQGEPVIFKRKVADEVVQKSFVILLGAAIYIILSAMALSMIEEGVSFLPLLLEVSSAFGTVGLSAGDGGVLSLSANFDTFGKFFMIVLMLLGRVGVLAFTIVFFGASSPRRVQYPEGRIIL

SEQ ID NO: 88190 - DNA, 1362 bp, Gloeobacter violaceus PCC 7421
  CDS (1)..(1362): transl_table=11
atgcccaccctctcgcccgcccgcaccatctgcctggggtttttgctggttatcgcgatcggtacctcgctgctgctgttgccctggtcgacggcctcgggcgagtggaccccctggttggtagcattgtttaccagcacttccgccgtctgcgtcaccggattggcggtggtcgatacgggcagctactactcgtttttcggccagctggtcatcttgttgctcattcaggtgggtggcctcggctacatgagcgccaccacgtttttgttgttgctggtcgggcgtcgcatcagcctgagaaaccgtcttgctctgcaggaggcgttgggtagtcttggcgataaggctgtgccgcgcctggtggcccgcgtcgccatcctgacgctcggcttcgaactggtgggggcgcttgtgattgccccgaccatggttcggcaggaaggactgctccccgggctatggtcggcgattttccacagcgtcagcgccttcaataacgccgggttcgggctcagaagcgacaacctgattccctggcagaacaatttttgggttctgggggggctgggatttttgatcctggcgggggggctcggctaccaggtgtggatcgagttgtacgaaaaaatcttgctgcggctggtgcggcagatcttcggcaagcagcccgccccgcccgcgccgctatcgctgcatacgcgggtggtgctgctcacctcggcaattttggtggtggtgggttcggtcggtttttttctcatcgagcggaccaatgccctcaccctgggcaggctcagccttgatgcgcaggtggcgggtgctatcttccattcgattagcgcccgtaccgccggcttcaacgccgtccctttcgatggcctgctggaagcagggctattctggattattttgctgatgctcatcggggcctcgcctgcttccaccggggggggcctgaagaccaccaccttcgccattctcgtcagcaacatgctggccgtgattcaaggtcgggaggatgtgctgctattcgatcggcgcctcggagtgggtgcggtgcgcaaggcgagcgcggtgctgctcggctcgattgccgcgattgccgtcgccctggtgggcctcaccctcagcgatccggagcccggctttgtgcaggtgctcttcgaggcggtctccgccttctgcaccgtgggactttcgaccggcatcaccccgaagctgtcggtggtaggacagctcatcctggtcttcagcatgtacctgggccgggtgggcgtgctgctgctcgccgaggcgctgctgtcgcagaagccgaccttcccgtaccgccagccggaagaacagattctgataggttag

SEQ ID NO: 88191 - protein, 453 aa, Gloeobacter violaceus PCC 7421
MPTLSPARTICLGFLLVIAIGTSLLLLPWSTASGEWTPWLVALFTSTSAVCVTGLAVVDTGSYYSFFGQLVILLLIQVGGLGYMSATTFLLLLVGRRISLRNRLALQEALGSLGDKAVPRLVARVAILTLGFELVGALVIAPTMVRQEGLLPGLWSAIFHSVSAFNNAGFGLRSDNLIPWQNNFWVLGGLGFLILAGGLGYQVWIELYEKILLRLVRQIFGKQPAPPAPLSLHTRVVLLTSAILVVVGSVGFFLIERTNALTLGRLSLDAQVAGAIFHSISARTAGFNAVPFDGLLEAGLFWIILLMLIGASPASTGGGLKTTTFAILVSNMLAVIQGREDVLLFDRRLGVGAVRKASAVLLGSIAAIAVALVGLTLSDPEPGFVQVLFEAVSAFCTVGLSTGITPKLSVVGQLILVFSMYLGRVGVLLLAEALLSQKPTFPYRQPEEQILIG

SEQ ID NO: 88192 - DNA, 1371 bp, Vibrio vulnificus YJ016
  CDS (1)..(1371): transl_table=11
atgaagcctttctctcacaacaacggcttgttttatctcgccgataaaacatcgaaacagagcaaagggaatgagcctcgcatcattctgcttagctttttggcggtactattaccctccgcaatcctgctgacattgcccgttttttctgtctcgggcttgtcgataaccgacgcgctttttaccgcaacttccgccattagtgtgactggacttggtgtggtggatactggtgaacacttcaccttagcaggaaaaatcttgctgatgctgctgatgcaaatcggtggtttgggacaaatgacgctttctgccgtgctactttatatgtttggtgtgaaactgagccttcgccaacaagcgttagccaaagaggcgctagggcaagatcgacaagtgaatctgcgtcgattggtgaaaaaaatcgtcatcttcgcttgtgtcgcagagttgatcggttttgtgttattggcgtttcgctgggtgccggaaatgggctggcaaagcgggctgttttacgcccttttccactccatttctgcatttaacaatgccggctttgcgctcttttctgacagcatgatgagcttcgttgacgatcctctggtcatcttcaccctcgctgcgctgtttattttcggtggtttggggttcactgtggtgggcgacgtgtggatgaactggcgacgcggttttcacttcctgcatttgcacaccaaaatcatgttagtcgccacccctgcactgctcattattggtacgctcttgttcttcgtcttagagcagcacaatgccaatacgatgggcgagttaagcacttctgggcagtggcttgccgcctttttccaatccgccagcgcacgaacagcgggattcaacagtgtcgacctcgcccagttcacgcaaccagcgttgctgatcatgatcatcttgatgctgattggtgcaggttccacttcgactggcggtgggatcaaagtctccaccttcgccgtcgcgtttatggcgacctgggcatttttgcgtcaaaagaaacatgtggtgatgttccagcgcaccgtaaactggccaaccgtgaccaaatctctcgcgatcattgtggtcagcggcgcgatccttaccacggcgatgttcctactcatgatcaccgagcaagctcagtttgacaaagtgatgtttgaaaccatctctgcgtttgctacagtcggtttaacggcaggcttaaccgctgagctttcggaaccgggcaagtacatcatgattgtggtgatgatcattgggcgaattgggccactaacgctggcttacatgctggcaaggccggaacccactctgatcaaataccctgaagacaccgtattgacgggctag

SEQ ID NO: 88193 - protein, 456 aa, Vibrio vulnificus YJ016
MKPFSHNNGLFYLADKTSKQSKGNEPRIILLSFLAVLLPSAILLTLPVFSVSGLSITDALFTATSAISVTGLGVVDTGEHFTLAGKILLMLLMQIGGLGQMTLSAVLLYMFGVKLSLRQQALAKEALGQDRQVNLRRLVKKIVIFACVAELIGFVLLAFRWVPEMGWQSGLFYALFHSISAFNNAGFALFSDSMMSFVDDPLVIFTLAALFIFGGLGFTVVGDVWMNWRRGFHFLHLHTKIMLVATPALLIIGTLLFFVLEQHNANTMGELSTSGQWLAAFFQSASARTAGFNSVDLAQFTQPALLIMIILMLIGAGSTSTGGGIKVSTFAVAFMATWAFLRQKKHVVMFQRTVNWPTVTKSLAIIVVSGAILTTAMFLLMITEQAQFDKVMFETISAFATVGLTAGLTAELSEPGKYIMIVVMIIGRIGPLTLAYMLARPEPTLIKYPEDTVLTG

SEQ ID NO: 88194 - DNA, 1335 bp, Corynebacterium diphtheriae NCTC 13129
  CDS (1)..(1335): transl_table=11
gtgcgtaagactcctgctcggctcgttgccggttgttttgcagcgttggtgctgttaggcactgtgctgttgttgttgcctgtgtctcgtgaaggccatgcccaggctgacgtcgttacggctctttttactgcgacgtcggctgtgtgcctgacggggctcacggtggtggatactgccacctattggtcccactttggtcaattggttattttggcgttgatccaagtgggtggtttgggcattatgaccttaacgacgttcgccggctgggtgctggtggggcgtatcggggtcaaggggcgcttgaacgcggcggcggaggggcgtggtcgtgaactaggggaggtaactggcctacttattgccactattggttttactcttgtggtggaatctgcggtggctgtggcgttgaccttgcgttttcacgctatgggttttgattggtgggcgagtctgtgggagggggttttccacgcggtttcggcctttaacaatgccggttttggtttgaggtctaataatttgatgccgtatgtgggcgatggttggattattttgcctatctcggcagcggtgatcgtaggtggtttgggttttcccatgctgttggagttgcatcggcgggcaacgtttcgccgtcaaggccaagcgattcgccggatgtcgttgacttcgttgtttactattgcgggcacgattgtgttgctcgctgctggcaccgtgggcattgcggtgttggagtggcgtggtgtgcttgccccgtttgatggtccaacgaagatgctggctgcatttttccattcggtgacctcgcgtacggcggggtttaattcgattgatatgtcgcagttgcatccgacgagcttgctgctcacggattcgttgatgtttattggtggcggttctggtggtaccgcaggtggcatcaagatcactactgttggcgtgttgttggcagtgatggttgcggagatccgtggtgatgatcagattctgattcggggacgacgcattccgaaccgaactgtgcgccaagcgttggcggtgaccatgttggcggtgctcacggtgggcgtcgctgttggcttggtgctggttttggcccctgagtttggtgttttagatctgtcttttgaggtggttagcgcttttgccactgtgggtttgagcacgggtattacgggctcgttgccgagtgctgcgcagttggttttggtggtgttgatgtatgccggcaggatcgggccagtatccttggtggcggcgctggctgcgcgttcaagtaagaggcagtattcctatcctgtagaaaggctgatcattggttag

SEQ ID NO: 88195 - protein, 444 aa, Corynebacterium diphtheriae NCTC 13129
MRKTPARLVAGCFAALVLLGTVLLLLPVSREGHAQADVVTALFTATSAVCLTGLTVVDTATYWSHFGQLVILALIQVGGLGIMTLTTFAGWVLVGRIGVKGRLNAAAEGRGRELGEVTGLLIATIGFTLVVESAVAVALTLRFHAMGFDWWASLWEGVFHAVSAFNNAGFGLRSNNLMPYVGDGWIILPISAAVIVGGLGFPMLLELHRRATFRRQGQAIRRMSLTSLFTIAGTIVLLAAGTVGIAVLEWRGVLAPFDGPTKMLAAFFHSVTSRTAGFNSIDMSQLHPTSLLLTDSLMFIGGGSGGTAGGIKITTVGVLLAVMVAEIRGDDQILIRGRRIPNRTVRQALAVTMLAVLTVGVAVGLVLVLAPEFGVLDLSFEVVSAFATVGLSTGITGSLPSAAQLVLVVLMYAGRIGPVSLVAALAARSSKRQYSYPVERLIIG

SEQ ID NO: 88196 - DNA, 1386 bp, Prochlorococcus marinus str. NATL1A
  CDS (1)..(1386): transl_table=11
gtgagtattaggcaagaaacttatagaaggcttacggttccgcagtttacagtggtaacaggtttacttgtgattgcttttggaacattattattggctacacctttttgttctaatgcaaatgtaggtctatgggaggcattatttacggcaacttctgctgtcacagttacggggttatctattattgatataggaatagatttgacattttttggacaagtaattttagcgattatgttgttaactgggggccttggtttaatggctattactacatttttgcagggctttattgttagtggaacagaattaaaaacacgtcttgatagagggaaaactcttgatgaatttggagtcgggggtgtgggtacaacgtttaaaggtattgcgattacagcatctatacttatttttcttggttctattactttgtattttttcggctttaaaaatataactagctcaagtgaaaggatttgggcatcaatttttcatagtatatctgcttacaataatgctgggttcagtttatggtcaagcagcttacaaaattatagaggtaattgggtagtgaattttgttttaattactttaattatattaggtggttttggatggagagtaactaatgatatttggataaatcgtagatctttaaaattaagaaatttaagtcttcatacacgtttagtaattagatcatctttcatattgattgctctgggattctttggattgatttttactgaatcgttagctaggggtagcttcttttcgttaattaatttcgatgatcgtattttaaccgctttatttacttctgttagttcacgaactgcaggctttacgaatttgcccatatcaattgaaagtgtctctgactcaggtctcttgttgataatgtttcttatgtttattggggcaagtccaggaggcactggaggcggaattaagacgacaactattgctgcattaatggcagccacaagagcaactctacgtggtcaaaatgaaattattattcggaatcgtcagatatctgacaaagtaattcttaaagctgttggtataactgttggttcatttttatttgtgttgattatggctttattattaagtttgagtaatggattcaatagtggagagaatttttcatttttagaaatgcttttcacttgtatttctgcttttgcaactgtaggttttgatctgggcgtaacctctaagttaggacatgtcggtcaattaattctgattattggaatgtttgttggcagactaggaatccttttattcttgagcgctgtatggcaagctcttaataaaagtaagattcaacatcgcaatcgaattggctatccgaaggaggatctctatgtttaa

SEQ ID NO: 88197 - protein, 461 aa, Prochlorococcus marinus str. NATL1A
MSIRQETYRRLTVPQFTVVTGLLVIAFGTLLLATPFCSNANVGLWEALFTATSAVTVTGLSIIDIGIDLTFFGQVILAIMLLTGGLGLMAITTFLQGFIVSGTELKTRLDRGKTLDEFGVGGVGTTFKGIAITASILIFLGSITLYFFGFKNITSSSERIWASIFHSISAYNNAGFSLWSSSLQNYRGNWVVNFVLITLIILGGFGWRVTNDIWINRRSLKLRNLSLHTRLVIRSSFILIALGFFGLIFTESLARGSFFSLINFDDRILTALFTSVSSRTAGFTNLPISIESVSDSGLLLIMFLMFIGASPGGTGGGIKTTTIAALMAATRATLRGQNEIIIRNRQISDKVILKAVGITVGSFLFVLIMALLLSLSNGFNSGENFSFLEMLFTCISAFATVGFDLGVTSKLGHVGQLILIIGMFVGRLGILLFLSAVWQALNKSKIQHRNRIGYPKEDLYV

SEQ ID NO: 88198 - DNA, 1377 bp, Clostridium difficile 630
  CDS (1)..(1377): transl_table=11
ttgaaaacaatagttagaagacttattctctacgcagatggaatgcgtcctactcaaataatggtatctgggtttgctgcgattattgtaatcggagcattgttgttaacactcccgatagcgtcgcagagtggagagagtataggcttattaaatgctctatttacggctacttcagcggtttgtgttactggtctagttatggtagatacagcaacttattggagtttatttggacagatagttataataacattgatacaaattggtggtcttggatttatgaccgtagccacaatgttttcacttatggcacgaaaaaaaatacaactaagagaaagattattaatacaagagtcattaaatcaagctgatttatcgggacttgtaagacttacaagatttgtattaataataaccataacaatagagggaataggtgcactggttttatcaactgtctttattccacaatttggtttgtctaaagggatatggtatagtgtatttcacgcaatatcagcgttttgtaatgccggatttgacttgatgggcagtgtaagtggcccatttacatcgttaaattcttatgtaaacaactttacagtatcaatgactgtttgcgcacttatagtgcttggagggctaggattccctgttgtacttgatattgtaagaaaaagaagattttcaaaattaaatgtgcattctaaggttgtattgttttcaactgctacacttatttttgtgggtgcattatttatttttcttatagaatttaatcaaaaagctactatggcggacttgcctttaaagggaaaagtactatcagcaatatttcaatcagtaacagcaagaactgctggttttaatacgcttgatttagctactttacgagaaagtagtgtatttgtaatgataattttgatgtttattggagcatcacctgcatcaactggtgggggtataaaaacaacaacactagctgttttaatcattacagttagaagttttctatcaggaaaatcagatatagaagcttttgaaagaagattagctccatcaactataaaaaaatctcttggtatatttgtaatcagtatatcagcagttatttttggaacattgattatttcaataactcagcctaattttacattagttcaatcagcttttgaggttacatcagcacttgctacagttggttcaagtttagctggaactccaaacttaaatgctttaggtaagattataataataatctttatgtttatgggtagagttggttctcttactttatttatggctatactttctggtggtagaagaaagagtcaaccaatcagatatgcagaaggtaaaattatggttggttaa

SEQ ID NO: 88199 - protein, 458 aa, Clostridium difficile 630
MKTIVRRLILYADGMRPTQIMVSGFAAIIVIGALLLTLPIASQSGESIGLLNALFTATSAVCVTGLVMVDTATYWSLFGQIVIITLIQIGGLGFMTVATMFSLMARKKIQLRERLLIQESLNQADLSGLVRLTRFVLIITITIEGIGALVLSTVFIPQFGLSKGIWYSVFHAISAFCNAGFDLMGSVSGPFTSLNSYVNNFTVSMTVCALIVLGGLGFPVVLDIVRKRRFSKLNVHSKVVLFSTATLIFVGALFIFLIEFNQKATMADLPLKGKVLSAIFQSVTARTAGFNTLDLATLRESSVFVMIILMFIGASPASTGGGIKTTTLAVLIITVRSFLSGKSDIEAFERRLAPSTIKKSLGIFVISISAVIFGTLIISITQPNFTLVQSAFEVTSALATVGSSLAGTPNLNALGKIIIIIFMFMGRVGSLTLFMAILSGGRRKSQPIRYAEGKIMVG

SEQ ID NO: 88200 - DNA, 1338 bp, Lactococcus lactis
  CDS (1)..(1338): transl_table=11
atggtgcttttcaagacgttgacttattctcaaaaaatagttttgggatttattctattaggattggtaggaaccattttattggcattgcctatttcatccaaaacaggtaactggactccactacttgatagcttatttacttcaattagtgcattatgtgtcacaggattgactgtttatgatacctttactcattggtcttttttgggacagttggtaattctatgtctaattcaggttggtgggattggtttcatgacagttattatcagtatatctacgggattaggacataaaatcggtttacatgagcgacaactattggttgaatcatcaggacttttacattccgcaaatctctcatttttagtaaagcgtatcacgattttcgtaataatgatagaagccattggagcagccttactttcaatacgttttattccagaatttggtataaaaacgggaatttactatggggtatttcattcaatttcggcattttgtaatgctggatttgacctcatggggcgatttggaaaatatagctccttaactccctatagtactgattcattagtaatattaacagttagtattctgatatttttaggaggtctaggttttattgtctgggatgatattttacgctataaactaaatttaaaaaaatactctttgcatacaaaaatagtgcttattacttcaattgccttcactttagtcggaagtattttattccttcttattgaaaataatcatatttttaaagaggtgggagtaaagggaaaaatactatccagtttatttttgtctatctcccctagaacagcgggtttcaatgctgtagatttaccaatgcttaccaatgctagtatttttttaacgatccttttaatgattgttggaggttcatccggatcaacagcgggtggtttaaaagttactactgttgctgttttgtttttcagcgcttttgataattcgaggcggagaccaacatcttctatattgaaacggagattttccgataatacaatcaaacaagctagcgcaatgtttactttttacttaattattggaagcgttggagctctcatattaagttctcttaattcctctactttggaagaaattgtttttgaagtgttctcggctttaggaacagtgggaattacacttggtattactcctaatttaggagcactgtctaaagtaactttagtagttttaatgtttgtaggtcgagtgggctggatgttattaatttttgccattgttggtagaaatcaacaagcgccaataagtagagtttcagaagaaatcattgttggatag

SEQ ID NO: 88201 - protein, 445 aa, Lactococcus lactis
MVLFKTLTYSQKIVLGFILLGLVGTILLALPISSKTGNWTPLLDSLFTSISALCVTGLTVYDTFTHWSFLGQLVILCLIQVGGIGFMTVIISISTGLGHKIGLHERQLLVESSGLLHSANLSFLVKRITIFVIMIEAIGAALLSIRFIPEFGIKTGIYYGVFHSISAFCNAGFDLMGRFGKYSSLTPYSTDSLVILTVSILIFLGGLGFIVWDDILRYKLNLKKYSLHTKIVLITSIAFTLVGSILFLLIENNHIFKEVGVKGKILSSLFLSISPRTAGFNAVDLPMLTNASIFLTILLMIVGGSSGSTAGGLKVTTVAVLFFSAFDNSRRRPTSSILKRRFSDNTIKQASAMFTFYLIIGSVGALILSSLNSSTLEEIVFEVFSALGTVGITLGITPNLGALSKVTLVVLMFVGRVGWMLLIFAIVGRNQQAPISRVSEEIIVG

SEQ ID NO: 88202 - DNA, 1338 bp, Desulfovibrio vulgaris subsp. vulgaris str. Hildenborough
  CDS (1)..(1338): transl_table=11
atggcgtaccataaacacttcgggccactggcccttccggtgctctcgttcgctgccgtcattctcgcgggggcagtgctgctcacgcttgaggcctgcggcaccggaaaggccgtctcgttcgtagacgccctgttcacggcaacatcggcggtatgcgtgacggggcttgctgtcgtcgacaccggcacgacctactccacgatggggcagatggtcattcttgcgctcatccagcttggcggcctcggcatcaccacctattcgagcctcatcttcttcctctggcgacgccgggtctccatcaccgacaggctggccgtggggcaggcactgctgcacgacccgtcgttccacctcggcacgttcctgcaacgcgtggtggtggtcgtgctatgcatcgaattcagcggtgccgcggcgctcttcatcttcggagaagggcgcattgatgtctatgccgccatcttccatgccatctcggcattctgtaacgcgggcttcggcctcatgcccgacaacctcgtctcgttccgcgacaacgtgggcgtcaacgccaccatcatgttgctcatcatcttcggcgggttgggcttctctgtgctggacgaatgcctttcagcgcttcgcgaccgttcggtcaggctgtcgaggcacagccgccttgtgctccgcacctcggcgctgctcatcgtgggcggtgccgccgccatctggtgcatcgaggcgtggcgttccggcaacggcatgagccgcgccgacctcgtgctgcccgcgctcttccagtccgtgtcggcccgtacggcgggattcaacaccatcgacctcggtgccgtcacccacaccacgctgctggtcatcatcttcctcatgttcgtgggcgggtcgccgggttcgtgcgcaggcggcatcaagacgaccacgttcagggtgcttgccggcttcgtcaccgcccagttcaagggacgacggcagatcatcctcatggacagggccgtagacagggcgaccatcgaaaaggcgctgacgctctttctcttcgccaccctcaccgtggtgggaggggtcaccatactcaccctcaccaccgacgcagtggtcgacccgtcagccccccgcttcgacttcatcgacctcctgttcgagaccgtctcggccttcggcacggtcggactctccaccggggtcacgccgcacctgactacaggcggcaaactgtgcatcaccctcatcatgttcgtcggtcgcctcggcccgctatggcttctgaccacgttgcagagcctgcagaccgaacccaagtaccgctggcccgaaatggacatgcccatcggctag

SEQ ID NO: 88203 - protein, 445 aa, Desulfovibrio vulgaris subsp. vulgaris str. Hildenborough
MAYHKHFGPLALPVLSFAAVILAGAVLLTLEACGTGKAVSFVDALFTATSAVCVTGLAVVDTGTTYSTMGQMVILALIQLGGLGITTYSSLIFFLWRRRVSITDRLAVGQALLHDPSFHLGTFLQRVVVVVLCIEFSGAAALFIFGEGRIDVYAAIFHAISAFCNAGFGLMPDNLVSFRDNVGVNATIMLLIIFGGLGFSVLDECLSALRDRSVRLSRHSRLVLRTSALLIVGGAAAIWCIEAWRSGNGMSRADLVLPALFQSVSARTAGFNTIDLGAVTHTTLLVIIFLMFVGGSPGSCAGGIKTTTFRVLAGFVTAQFKGRRQIILMDRAVDRATIEKALTLFLFATLTVVGGVTILTLTTDAVVDPSAPRFDFIDLLFETVSAFGTVGLSTGVTPHLTTGGKLCITLIMFVGRLGPLWLLTTLQSLQTEPKYRWPEMDMPIG

SEQ ID NO: 88204 - DNA, 1338 bp, Acinetobacter sp. ADP1
  CDS (1)..(1338): transl_table=11
atgaaaaaacaaaaaattaatcaaaaaacatttaatttaagcccaccgtcaatgctggcgctgggttttttaagcttcattgtcgcaggtacgttactgctcaaacttcctatttcgaataatggtcacttaagctggatggatgccttttttaccgcgacatccgcggtgaccattacaggactttctgtcataaatattggacaatcccttacccatgtcggtcaaatcattttattgtttttgattcaatgtggggggctaggttttatgacctttgccatactggctgcgcttagtttagctccccaacttggcttaaaacagcagctcatggctcaagattctatgggtcaaaccagtctatctaaagtcacttttattgcacaggccgtattcatttataccctaatctttgaattaatggggacttgtatcttaacgtttgcatggatgaatcaattcggattttttcatgcattgtattatgcttttttttatagtatttcagctttcaataatgcaggattttcattatttccaaataatctaatgaattttcagacgcactatattgcctgtttaaccatcagctttctctatatcttaggcggtcttggctttctggtgatcatggatattaaagagcgtaaacgctggaaaaaactcagtcctaatagcaaaattgtgatcattagtatcgctattttgaacacctctgcttttcttattatctggttattagaagtcaataatcccctcaccttatactcgatgagctttagcgagcaagcactcaatgcatggtttcaagcgactgttccaaggtcatctggattcaataccattgatattgcatctatgaacaatagttccacccttttgaccatgtttcttatgtttattggcggaggttcactcagtaccgctggcgggataaaagtaggaacctttgtaattctagtatttagtgtgattgcttttttaaagcgtcatgatgaagttcggatcttcaatcactctatctcctatgaaaatacatttaaagccttagccgttgtcgtgattaccctgattttgatctttatcggcttttttagcattctgattcttgagccacacaaaaattttctggatctgttttttgaaatagtatcggcggcatgtactgtcggattatcaagaggtattacccctcagttaaataatagtagtctttttgtgctgtcattattgatgtatgcgggacgacttgggcctttaacgctggcttatctgattgcaacaccaaagaaaagccgacttaaacatccgtcggctgatattcaaattggttaa

SEQ ID NO: 88205 - protein, 445 aa, Acinetobacter sp. ADP1
MKKQKINQKTFNLSPPSMLALGFLSFIVAGTLLLKLPISNNGHLSWMDAFFTATSAVTITGLSVINIGQSLTHVGQIILLFLIQCGGLGFMTFAILAALSLAPQLGLKQQLMAQDSMGQTSLSKVTFIAQAVFIYTLIFELMGTCILTFAWMNQFGFFHALYYAFFYSISAFNNAGFSLFPNNLMNFQTHYIACLTISFLYILGGLGFLVIMDIKERKRWKKLSPNSKIVIISIAILNTSAFLIIWLLEVNNPLTLYSMSFSEQALNAWFQATVPRSSGFNTIDIASMNNSSTLLTMFLMFIGGGSLSTAGGIKVGTFVILVFSVIAFLKRHDEVRIFNHSISYENTFKALAVVVITLILIFIGFFSILILEPHKNFLDLFFEIVSAACTVGLSRGITPQLNNSSLFVLSLLMYAGRLGPLTLAYLIATPKKSRLKHPSADIQIG

SEQ ID NO: 88206 - DNA, 1371 bp, Symbiobacterium thermophilum IAM 14863
  CDS (1)..(1371): transl_table=11
atggcactgcagcaccggaggagggggccgacgtttacgccgccgcaggccctggcggcggggtttgcgctgctgatcctcatcggcaccgtcctgctggccctgcccgtcgcccacgagcccggccaccggttgtccttgacggatgcgttgttcatggccacgtcggccgtctgcgtcaccggcctggccgtggtggacgtgtccaccaccttcagcgccttcggcgaggtcgtgctcctgctgctggtccaggcgggcggcctgggcatcatgagtctgtcggcgctgatgttcctgctcacgggccggcgcatcggcctgcacgagcggctgatgatgcaggaggcgctgggctccctctccatcgccggggtggtgcggctcacccgcaccatcatcgccggcaccctggccgtcgaggcgatcggggctgcgctgctctccctgcgcttcctcgcctactatcccccggcgcaggcgctctacttcggcatcttccactccatcacggcgttcaacaacgcgggtttcgacctcacctcccggtccctgcgcccgttccagcacgacccggctgtcctgctggtgatggcgggcctgatcctgatgggcggcatgggcttcgtggtgctgcaggacgtgtggcaccacaggcggtgggagcggttcagcctgcagaccaagctggtgctggccgtcacgggcgtgctcgtgggcgcagccacgctgctggtgctggcgctggagtggggcaacccggccacgctgggcgggctgccggtgccggagaagctgctcaatgccttcttcactgcggtcacgttccgcaccgcgggctttgagtcgattcccacggccggcatggcctccgcggcgctgctcctggccatggtgctcatgttcatcggcggctcccccggcggcaccggcggcggcatccgcaccaccaccttcgcggtcatcgccctggcggtgcgggccacggtgcggggcaccgaggacattcaggcgatgggccggcggctgccccgggagctgctggaccgggcgatcgccatcgtggcgatgtccatggccgtgatcgtcgcggtgggcgggcttctcctcgtgaccgaggggcacctcgtcaccgcgcccggaaacccgttcggcgcggccgacgtcttattcgagagcacatctgccttcaccaccatggggctgtccaccggcgtcaccccgcacctgagcatggccggccggctcctgctgacggtgaccatgtacgtcggccgcatcgggccgctcaccgctgcggtggccctggcccagcggcggcgggagcgggtgaacatcgactatccggaagagcgggtgatgatcgggtga

SEQ ID NO: 88207 - protein, 456 aa, Symbiobacterium thermophilum IAM 14863
MALQHRRRGPTFTPPQALAAGFALLILIGTVLLALPVAHEPGHRLSLTDALFMATSAVCVTGLAVVDVSTTFSAFGEVVLLLLVQAGGLGIMSLSALMFLLTGRRIGLHERLMMQEALGSLSIAGVVRLTRTIIAGTLAVEAIGAALLSLRFLAYYPPAQALYFGIFHSITAFNNAGFDLTSRSLRPFQHDPAVLLVMAGLILMGGMGFVVLQDVWHHRRWERFSLQTKLVLAVTGVLVGAATLLVLALEWGNPATLGGLPVPEKLLNAFFTAVTFRTAGFESIPTAGMASAALLLAMVLMFIGGSPGGTGGGIRTTTFAVIALAVRATVRGTEDIQAMGRRLPRELLDRAIAIVAMSMAVIVAVGGLLLVTEGHLVTAPGNPFGAADVLFESTSAFTTMGLSTGVTPHLSMAGRLLLTVTMYVGRIGPLTAAVALAQRRRERVNIDYPEERVMIG

SEQ ID NO: 88208 - DNA, 1320 bp, Bacillus cereus E33L
  CDS (1)..(1320): transl_table=11
atgaaacggattaacattcgcatgagtcctccccgtgttcttactttgtcttttattatgttatcaattatcggcacatgcttattaaagttgccaattgctacaacgacgtctatttcatggctcgatgctttatttacaaccgtttctgcttgtacggttacaggtcttggtgttgtggacactgggaaagtatttaccttatttggccaatgtgtcattttaacacttatacaagtgggtggacttggcattatgagctttgccgttttaattgcgattatgctaggtagaaaaattggtcttcaaaaccgaattttactgcaacaagcgttaaatcaaacgaatataggcggtgtcattcgtcttgccaaagcattatttttattctcttttacagtcgaatgtatcgctactttgattctttcttttgaatggataccgaaatatgggattgctaaagggctctattatagcttttttcattccatctctgcttttaacaatgctggtttttctgtatggagcgataatttaatgtcccattctcatagcattcttgtcaatctcgttatttcctccctcattattttaggcgggattggttttacagtaatcgtagatataaagaaaaagaaaaattttaaaaaccttacattacactcaaaacttatgctctcttctactctaatcgtcaatattattgcgactgtttttatttttatattcgagttccacaattccctttctatgagaggatttaccccctttgaagagggaatggctgcttatttccaggcagtttcaactcgcactgccgggtttaatacagttgatatttctgccttatcaaagccttccctactattaatgatgctccttatgtttattggcgctggtagtgcttcaactggtggtgggattaagttgacaacatttttaatcatgttttttggggtatttaaatttttacaagaacaagatgatattgtcgtgtttaaaaaatccattaaagatactctcattgtcaaatcattgaccatcgctattatttctatttcatttattttttttgctattttaattttaagtattactgagcgtgttcctctattgatgagtgctttcgaagtattttcagcatttgggactgtcggtctcagtatgaatttcacaccacacttaactatgatcggaaaagctattattatctttatgatgttctttgggaagatgggacctttaacattggctttttcatttgcaagtaaaaagaaccgaaaaataaaatatccgaatgaagacattttaacaggttga

SEQ ID NO: 88209 - protein, 439 aa, Bacillus cereus E33L
MKRINIRMSPPRVLTLSFIMLSIIGTCLLKLPIATTTSISWLDALFTTVSACTVTGLGVVDTGKVFTLFGQCVILTLIQVGGLGIMSFAVLIAIMLGRKIGLQNRILLQQALNQTNIGGVIRLAKALFLFSFTVECIATLILSFEWIPKYGIAKGLYYSFFHSISAFNNAGFSVWSDNLMSHSHSILVNLVISSLIILGGIGFTVIVDIKKKKNFKNLTLHSKLMLSSTLIVNIIATVFIFIFEFHNSLSMRGFTPFEEGMAAYFQAVSTRTAGFNTVDISALSKPSLLLMMLLMFIGAGSASTGGGIKLTTFLIMFFGVFKFLQEQDDIVVFKKSIKDTLIVKSLTIAIISISFIFFAILILSITERVPLLMSAFEVFSAFGTVGLSMNFTPHLTMIGKAIIIFMMFFGKMGPLTLAFSFASKKNRKIKYPNEDILTG

SEQ ID NO: 88210 - DNA, 1335 bp, Azoarcus sp. EbN1
  CDS (1)..(1335): transl_table=11
ttgagaattcgagagatccagcatccggctcgcgtcgtcccactggcattcctgatcaccatcctgatcgggactgggttgctcatgttgccgatctcccgtcccgatgcggtaagcgctccatggatcgtggccctgttcacgtccgtctcggccgtgtgcgtcacaggtttgatcaccgtggacaccggcacctactggtcgccgtttgggcagtgggtgatcatggcgctgttccaggtaggcgggttcggcatgatgacagctgccacgctgctcgggctgatggtgaaccgctccttccggctgcgtacgcggctcaccgctcaggccgaaacgcacacgctgggcatcggggaggtctccagcgtggccaggctggtgctgttcgtgacactgatcgttgaggggatcgcagcgctggcgctgatcgtgcggctgcgtacgggttatgaactgccttgggccgaggcggcctggagcggtctctttcacgccgtttccgccttcaacaacgctggtttctccatccatgcggacagcttgatgcgctacgcgtccgatggcttcctgctgacgccaatcatgctggcgattttgatcggtggactgggcttcccggtcctgcatgatttgcgcagaaaacttcggagtccgcaccactggtcggtacacaccaagctgacgctggtcggcaccggcgtgctgctggcaggtggcacgatcattctgctcgccttcgagtggtcgaacccgcgcacgctcggtccgatggcggtggccgacaaggtgctgtcggcgatcttcgcgtccgtgtctgcacgcacggccgggttcaattcagtcgacatcggcgctctgacgcatgaaagccttggcctgcactacttactgatgttcatcggtggcggtagcgcaggcacggcgggtggcgtcaaggtgggaaccgcgatgattctggtgatgctggtcattgccgagatcagaggccggatggataccgaggcgtttggccggcgtatcagccattcggcccagcgccaggccatcaccgtgcttgtcctcggcagcgccgtagtcgttctgggtacggtgttcatcctgcacactactcgaatcgccacggatagagtcatcttcgaggtggtctcagcctttggaaccgtcggtttgtccactggcatcacggccgagctgcccgcctccgcacaactcattctggccctactcatgtatatcggccgggttggcaccatcaccctcgcggcgtcgcttgcgctgggagagcaccgcatgccgttccgctatccagaggagcatcccgttgttggctag

SEQ ID NO: 88211 - protein, 444 aa, Azoarcus sp. EbN1
MRIREIQHPARVVPLAFLITILIGTGLLMLPISRPDAVSAPWIVALFTSVSAVCVTGLITVDTGTYWSPFGQWVIMALFQVGGFGMMTAATLLGLMVNRSFRLRTRLTAQAETHTLGIGEVSSVARLVLFVTLIVEGIAALALIVRLRTGYELPWAEAAWSGLFHAVSAFNNAGFSIHADSLMRYASDGFLLTPIMLAILIGGLGFPVLHDLRRKLRSPHHWSVHTKLTLVGTGVLLAGGTIILLAFEWSNPRTLGPMAVADKVLSAIFASVSARTAGFNSVDIGALTHESLGLHYLLMFIGGGSAGTAGGVKVGTAMILVMLVIAEIRGRMDTEAFGRRISHSAQRQAITVLVLGSAVVVLGTVFILHTTRIATDRVIFEVVSAFGTVGLSTGITAELPASAQLILALLMYIGRVGTITLAASLALGEHRMPFRYPEEHPVVG

SEQ ID NO: 88212 - DNA, 1344 bp, Synechococcus elongatus PCC 6301
  CDS (1)..(1344): transl_table=11
atgcaaaggtcttggcgactgacagtgcctaggacaattagtctaggttttctggcagttattttggcaggcacatttttgttgatgttgccatggtcacaatcaagcgggcagtggggcgggtggctgcctgctctgttcacctcaacttctgcagtctgtgtaacgggactatcggttgttgatgttgggacctacttttctccctttggtcaattagttctgatcctgctcattcaagtcggtggattaggctatatgactgctacaacttttctgctgatgctactgggactgcgctttggtctacgcgataaagttgctattcagcagtctctcgatcgatcaggcatggctcaaattcggcaggttctcagagcgattgcgatcgcaacattagcttgtgaaactgttggagcgatcgctctttttaccccgctcatgtcacgccatgagacattgatgggagcagcgtggtcggcaatcttccatagtgtaagtgcattcaacaatgctggcttcagcatctatcctgataacctagttggatttgtcggatctcttcgggtcaattggatcatcgcgattctaattgttcttggagggattggttatcctgttattttagaaggctggcagttgttaaaaggcaaacggcgcttatcacctcttagcctgcattttcgtttggctattctcactaccttgggattgttgataggaggttggctcctgtttcctggtgctgaacatttgaatcccaaaacgttgggccctctaccgattaacgatccaatgctcgcggcttggtttcaaaccgtgacaccccgtacagcaggatttaacaccattgatcaaactcaaatgagtttatttgcacagatggtgacgatcgctctcatgttcataggtgcaagtcctggtgggacagggggcggtgtgaaaacaacggctctagctatcttgattggctgtacaatttcagtcctgcgaggtcgtgagtcagttctaatgtttcaacggcaaattcctcagaggattgttcaaaaagcaacagcagtcgtggttggctcttcctttacaattattttgggaacgctaatcatggcagtttttgatcgggacttggaatttattcaacttctcttcgaggcagtttctgcatttgcaacagtcggccttgatctgggagtgacagcgacagccaatgcaggtgttcaactcgttttaattgctttaatgtacatcggcagggttggaatcttactactcatgcaagctttgcttggagatccccaccgatcgcgtctgcgttatcccgaagaagaattactcgttggttaa

SEQ ID NO: 88213 - protein, 447 aa, Synechococcus elongatus PCC 6301
MQRSWRLTVPRTISLGFLAVILAGTFLLMLPWSQSSGQWGGWLPALFTSTSAVCVTGLSVVDVGTYFSPFGQLVLILLIQVGGLGYMTATTFLLMLLGLRFGLRDKVAIQQSLDRSGMAQIRQVLRAIAIATLACETVGAIALFTPLMSRHETLMGAAWSAIFHSVSAFNNAGFSIYPDNLVGFVGSLRVNWIIAILIVLGGIGYPVILEGWQLLKGKRRLSPLSLHFRLAILTTLGLLIGGWLLFPGAEHLNPKTLGPLPINDPMLAAWFQTVTPRTAGFNTIDQTQMSLFAQMVTIALMFIGASPGGTGGGVKTTALAILIGCTISVLRGRESVLMFQRQIPQRIVQKATAVVVGSSFTIILGTLIMAVFDRDLEFIQLLFEAVSAFATVGLDLGVTATANAGVQLVLIALMYIGRVGILLLMQALLGDPHRSRLRYPEEELLVG

SEQ ID NO: 88214 - DNA, 1344 bp, Campylobacter jejuni RM1221
  CDS (1)..(1344): transl_table=11
ttgaaacaatttggactagatagacgaacttttaaaattttactagctggttatattattattgcattgtttggggctttattgctacattcaagttgggcacatacaacccctattgattttttagatgccttttttacaagcacatctgctgttagtatgacaggattagtagttaaaaacactgcggttgattttactttagcagggcaaattattatcttagctttagtacaaattggcggtttaggatatatgggtataggtttatttgtttatatactcatacgcaaaaaagttggttttagtgcaagaaatttactaaaagagtctttattttatccatcaatggatggtttatttaaattttttaaaaaggtgttgctgttcatttttactatagaattgataggtgctatacttctcaccatgcgttttgcccttgaaatgaattttaagaaagctttatggtttggaatttttcattctattagcgcttttaataattctgggtttactatatttgaacatgggcttatagcttataaacatgatataacaattaatcttattatcacttctttgattattattggagggcttggatattttgttttggttgaattatacttttttcaaagaaaaaaattgcaaaatttaagcctacatacaaaaatagttgttgttgcaagtatttttcttatactctcttcaacacttattatttttgcttttgaatactcaaatcctcaaactataggacatttttcattttttgataaaattttaagctcatattttatcgctattaactaccgtacagcaggatttaataccttagatatgggacatttgcatgatgcaagcttattttttggatcattgtttatggttattggtggtgcaccaggtggaacagctgggggtatgaaagtaacaactgtaatggttttattgctctatgcttattggagtatccgcgatggaagagttagaatttttggacatgaaattccaagagaaactatatctaaagcttttatcatagctgtaggttcagctgtttatatagtaatagctgttattttgctttccttgctagagtcaaaatttgattttatagccttgctttttgaaacttcttcagcttttgcaactgtaggaatttcagtaggaaatggtggaactttatctttatgcgctttgtttagtgatcctagcaaggtaattatcatcattatgatgctaagtggtaggataggtgtttttgcttttttactctcggtattcaaacaagacaaatctattcatttaaaattccctgaaggaaaggttaatttataa

SEQ ID NO: 88215 - protein, 447 aa, Campylobacter jejuni RM1221
MKQFGLDRRTFKILLAGYIIIALFGALLLHSSWAHTTPIDFLDAFFTSTSAVSMTGLVVKNTAVDFTLAGQIIILALVQIGGLGYMGIGLFVYILIRKKVGFSARNLLKESLFYPSMDGLFKFFKKVLLFIFTIELIGAILLTMRFALEMNFKKALWFGIFHSISAFNNSGFTIFEHGLIAYKHDITINLIITSLIIIGGLGYFVLVELYFFQRKKLQNLSLHTKIVVVASIFLILSSTLIIFAFEYSNPQTIGHFSFFDKILSSYFIAINYRTAGFNTLDMGHLHDASLFFGSLFMVIGGAPGGTAGGMKVTTVMVLLLYAYWSIRDGRVRIFGHEIPRETISKAFIIAVGSAVYIVIAVILLSLLESKFDFIALLFETSSAFATVGISVGNGGTLSLCALFSDPSKVIIIIMMLSGRIGVFAFLLSVFKQDKSIHLKFPEGKVNL

SEQ ID NO: 88216 - DNA, 1356 bp, Carboxydothermus hydrogenoformans Z-2901
  CDS (1)..(1356): transl_table=11
ttggcaatcaatacgaaaaaagaaataaacttttttagacgattaactccttcgcaaatcctggtattgggatttgcaggagttattcttttaggtacagttttattaatgctgccgatttcaaccaaagatggtacggttactcccttcttagatgccttatttaccgccacttcggcggtctgcgttacaggtcttgtggtagttgatacgggaacgtactggtcgctttttgggcaaattgttatcctgctgttaatccaggtgggcggcctgggttttatgactattgcaacgctgtttgctattcttttgggccgccggattaacttacgtgagcggatagttattcaggaagcattaaatcaggccagtttagagggaattattaaattaaccaaacaggttattttatttacctttagttttgagggagtttttgcagttattttggggttaagattttctttagattacggctttattaagggaatgtggtttggagtttttcatgcggtgtccgcctttaataacgctggttttgatttaatcggaaattttaaaagcttaaccccttatgttggggatgttatagttaacctttcaattgctattttgattattgccggaggaattggtttttacgttatttccgagctttttaatttgagaaaaaaaggacggttatccctgcattccaaaataacgttaatgactaccggacttttacttttggtcggtactttggttatctttgtcatggaatacaacaacgataaaaccctgggagctttaccttttggtgagaaaattttggcggcttttttccaagcggttacgcctcgaacggctggatttaatactgtagatattgcggctcttcatccggcaacccagtattttattattatcctgatgtttatcggggcttcaccggggtcgacaggaggtggtgttaaaaccactacttttgcggtattaacattagcggtgatcaatattattcttggtcgggatgagatcctggtttataaccggcgtttgcccagggaacaaatttttaaagcaattgccattgtcatgatttccctgtcattaataaatattgttacttttattctcacctttactgaaggacacaatattttgatgaatatgtttgaaactgtttccgcttttggcacggtagggctatcgatgggtttaacgccgaagttatcggaacttggcaggattttaataatattaatgatgttttttggcagggttggtccgcttaccattacttatgcccttgcgcagcggcggaaaaaagctttgtttactttgccggaagaaaaggtaatggttggatag

SEQ ID NO: 88217 - protein, 451 aa, Carboxydothermus hydrogenoformans Z-2901
MAINTKKEINFFRRLTPSQILVLGFAGVILLGTVLLMLPISTKDGTVTPFLDALFTATSAVCVTGLVVVDTGTYWSLFGQIVILLLIQVGGLGFMTIATLFAILLGRRINLRERIVIQEALNQASLEGIIKLTKQVILFTFSFEGVFAVILGLRFSLDYGFIKGMWFGVFHAVSAFNNAGFDLIGNFKSLTPYVGDVIVNLSIAILIIAGGIGFYVISELFNLRKKGRLSLHSKITLMTTGLLLLVGTLVIFVMEYNNDKTLGALPFGEKILAAFFQAVTPRTAGFNTVDIAALHPATQYFIIILMFIGASPGSTGGGVKTTTFAVLTLAVINIILGRDEILVYNRRLPREQIFKAIAIVMISLSLINIVTFILTFTEGHNILMNMFETVSAFGTVGLSMGLTPKLSELGRILIILMMFFGRVGPLTITYALAQRRKKALFTLPEEKVMVG

SEQ ID NO: 88218 - DNA, 1344 bp, Synechococcus elongatus PCC 7942
  CDS (1)..(1344): transl_table=11
atgcaaaggtcttggcgactgacagtgcctaggacaattagtctaggttttctggcagttattttggcaggcacatttttgttgatgttgccatggtcacaatcaagcgggcagtggggcgggtggctgcctgctctgttcacctcaacttctgcagtctgtgtaacgggactatcggttgttgatgttgggacctacttttctccctttggtcaattagttctgatcctgctcattcaagtcggtggattaggctatatgactgctacaacttttctgctgatgctactgggactgcgctttggtctacgcgataaagttgctattcagcagtctctcgatcgatcaggcatggctcaaattcggcaggttctcagagcgattgcgatcgcaacattagcttgtgaaactgttggagcgatcgctctttttaccccgctcatgtcacgccatgagacattgatgggagcagcgtggtcggcaatcttccatagtgtaagtgcattcaacaatgctggcttcagcatctatcctgataacctagttggatttgtcggatctcttcgggtcaattggatcatcgcgattctaattgttcttggagggattggttatcctgttattttagaaggctggcagttgttaaaaggcaaacggcgcttatcacctcttagcctgcattttcgtttggctattctcactaccttgggattgttgataggaggttggctcctgtttcttggtgctgaacatttgaatcccaaaacgttgggccctctaccgattaacgatcaaatgctcgcggcttggtttcaaaccgtgacaccccgtacagcaggatttaacaccattgatcaaactcaaatgagtttatttgcacagatggtgacgatcgctctcatgttcataggtgcaagtcctggtgggacagggggcggtgtgaaaacaacggctctagctatcttgattggctgtacaatttcagtcctgcgaggtcgtgagtcagttctaatgtttcaacggcaaattcctcagaggattgttcaaaaagcaacagcagtcgtggttggctcttcctttacaattattttgggaacgctaatcatggcagtttttgatcgggacttggaatttattcaacttctcttcgaggcagtttctgcatttgcaacagtcggccttgatctgggagtgacagcgacagccaatgcaggtgttcaactcgttttaattgctttaatgtacatcggcagggttggaatcttactactcatgcaagctttgcttggagatccccaccgatcgcgtctgcgttatcccgaagaagaattactcgttggttaa

SEQ ID NO: 88219 - protein, 447 aa, Synechococcus elongatus PCC 7942
MQRSWRLTVPRTISLGFLAVILAGTFLLMLPWSQSSGQWGGWLPALFTSTSAVCVTGLSVVDVGTYFSPFGQLVLILLIQVGGLGYMTATTFLLMLLGLRFGLRDKVAIQQSLDRSGMAQIRQVLRAIAIATLACETVGAIALFTPLMSRHETLMGAAWSAIFHSVSAFNNAGFSIYPDNLVGFVGSLRVNWIIAILIVLGGIGYPVILEGWQLLKGKRRLSPLSLHFRLAILTTLGLLIGGWLLFLGAEHLNPKTLGPLPINDQMLAAWFQTVTPRTAGFNTIDQTQMSLFAQMVTIALMFIGASPGGTGGGVKTTALAILIGCTISVLRGRESVLMFQRQIPQRIVQKATAVVVGSSFTIILGTLIMAVFDRDLEFIQLLFEAVSAFATVGLDLGVTATANAGVQLVLIALMYIGRVGILLLMQALLGDPHRSRLRYPEEELLVG

SEQ ID NO: 88220 - DNA, 1332 bp, Moorella thermoacetica ATCC 39073
  CDS (1)..(1332): transl_table=11
ttgcgggaatggcccttccgtttacggccgccccagataatggtcctgggtttcggactggtaatcgccaccggtacgctgttactcagcctgccggtggccagccagaccgggcacccggtggcggtcattgacgccctgtttacagccacgtcggctaccgctgtaacggggttgaatactgtcgatacccaaactacctattccctttttggagaactggtaatcctcgctttaatacagaccggcggcctgggcttcatgaccctgtcaaccctggtcgctttacttattggtaagcgcattaccctgcgggagaggctggtcatgcaggaagccatgaaccagctgacggtagaaggggtagtgcgcctgagcaagtacgttttggtatttaccctgctggccgaaggcctgggggccgttatcttaagtatgcgttttagccggcaaatgcccctgggacaggccatctattttggcattttccactctgtttccgccttttgtaatgccggttttgatcttttctccaagagcctggtggattaccgtggcgactgggtggtcaacctggttattaccggtctgattatcaccgggggcattggtttcagcgtcgtggcagatatttataccaaacgctcctggcagcgcctttccctgcacagcaaaattgttattcggactacattatggttaatcctcgcaggtacgctaattatactggcgctggagtatactaatgccaagagcctggctcctttgcccttgagcgagaaggtgctggccgcctatttccaggcagttacccccaggacggccggatttaataccctcagtatcgccgatttaagaccggtaaccctgttattcatcataattctgatgtttatcggcgcttcgccggggtcgacgggcggtggtattaaaacaagtacctttgcggccatcgccgcggccgtctggaccattatccggggtaacgtggatattgaagtcttcggccggcggttaccacgggacacggtattgaaggccctggcgatagtggctgtttccatgctcctggtagttacggttacgggtatcttgttgattaccgaaggggctgagctggagacggtactttttgaagtaacttcggcctttggtactgtcggtctttccatgggcttgacacctcgcctgacggttattggcaaattgttgatttctgctaccatgtttacgggtcgcgtcggtcccctgaccctggcctttgccattgcccaacgcctgggtcgtcagggagtaaaacattatcctgaggagaggattattgttggctaa

SEQ ID NO: 88221 - protein, 443 aa, Moorella thermoacetica ATCC 39073
MREWPFRLRPPQIMVLGFGLVIATGTLLLSLPVASQTGHPVAVIDALFTATSATAVTGLNTVDTQTTYSLFGELVILALIQTGGLGFMTLSTLVALLIGKRITLRERLVMQEAMNQLTVEGVVRLSKYVLVFTLLAEGLGAVILSMRFSRQMPLGQAIYFGIFHSVSAFCNAGFDLFSKSLVDYRGDWVVNLVITGLIITGGIGFSVVADIYTKRSWQRLSLHSKIVIRTTLWLILAGTLIILALEYTNAKSLAPLPLSEKVLAAYFQAVTPRTAGFNTLSIADLRPVTLLFIIILMFIGASPGSTGGGIKTSTFAAIAAAVWTIIRGNVDIEVFGRRLPRDTVLKALAIVAVSMLLVVTVTGILLITEGAELETVLFEVTSAFGTVGLSMGLTPRLTVIGKLLISATMFTGRVGPLTLAFAIAQRLGRQGVKHYPEERIIVG

SEQ ID NO: 88222 - DNA, 1371 bp, Syntrophus aciditrophicus SB
  CDS (1)..(1371): transl_table=11
atgagactgacggcattgcaacttaaaatgtccatatccggttatctgacgccggcaagaagctttattttgagttttgccgccgttatcctggctggaacactgctgctctggtcgcccttttcctcgagcggtaaacccctgagttttatcgacgccctctttacctctgcctccgcggtctgcgtaacgggactggccgtcgtcgatatcggcagggatctgtctcttcccggacaactcattacccttctgctctttcagatcggtggattggggatcattaccttttccgtgcttttcttcggaattatgggacggggtatatccttccgcgggcgggagattgtccagtcgacttttctccataccccccgacgggatttttttatgatcctcaagtgggttttgctcatgaccctgattatcgaatccataggaacactcttgctgttttcccgtttcattcaggattttcctcttcccagggccttgtatctttctgtttatcacgcggtgtccgccttcaataactgcggatattccctcttttccaacagtcttatggattatcgctccgactggatcgtcaatttgacgataatgagtctgattgtgctgggcggtatcggatttattgtcctctatgagatcatttccagagtgcggggtaatcagaaaaaactatccctgcacagccggatcgcccttttgatgaccggctttctcattcttcttggagctgttctgttttacttttttgaaatgcatcatgttctaaggggggcatcctggcaggaaaatctgctggtttcactttttcagtcggtgacatcccgaacgagcggcttcaatacggtggatatcggtcaactgacaaatgccacgatcctgctgttaatgggccttatgttcatcggcgcttctccgggttcaacggggggaggcatcaagaccacaagctttaccctgctgctgatgatgatctggaaccgtatccaggggagcgaacaggtgaccatcttcaaccgcagcatccccgaagaaattacgacccgcacgatttccattgtttttgcctcagccttttccgtcgcgctgatctcatcgattcttcttttcggaagcccggactctctccccccggcaagcagccggcacttatttgtggagtatgtctttgaaaccgtttcagcctatggaacggtggggctgtccatgggaataacggcaaaactgagtgaactccagaaactggctataatcctcatgatgtttgcggggcgtgtcggtcccctgaccctcgcctttgcctggagtaaatcgaaaaggaaaatcatctatgcggaagaatccgtgatggtgggataa

SEQ ID NO: 88223 - protein, 456 aa, Syntrophus aciditrophicus SB
MRLTALQLKMSISGYLTPARSFILSFAAVILAGTLLLWSPFSSSGKPLSFIDALFTSASAVCVTGLAVVDIGRDLSLPGQLITLLLFQIGGLGIITFSVLFFGIMGRGISFRGREIVQSTFLHTPRRDFFMILKWVLLMTLIIESIGTLLLFSRFIQDFPLPRALYLSVYHAVSAFNNCGYSLFSNSLMDYRSDWIVNLTIMSLIVLGGIGFIVLYEIISRVRGNQKKLSLHSRIALLMTGFLILLGAVLFYFFEMHHVLRGASWQENLLVSLFQSVTSRTSGFNTVDIGQLTNATILLLMGLMFIGASPGSTGGGIKTTSFTLLLMMIWNRIQGSEQVTIFNRSIPEEITTRTISIVFASAFSVALISSILLFGSPDSLPPASSRHLFVEYVFETVSAYGTVGLSMGITAKLSELQKLAIILMMFAGRVGPLTLAFAWSKSKRKIIYAEESVMVG

SEQ ID NO: 88224 - DNA, 1332 bp, Novosphingobium aromaticivorans DSM 12444
  CDS (1)..(1332): transl_table=11
ttgccccttagacttactcatccagcgcgtcttgttccgttggtcttctccgcggcaattgtccttggcacggtcattctcatgctgccgatcgcgcgcgcgggggcaggtagcgccccctttctgacggctctcttcacgtccacttcagccatctgcgttaccggtctgatagtacaggacaccccagtttactggtcctcatttggccaatgggtgatcctcctgctcttccaggtcggcggattcgggatcatgtcagccgcaacattgctggggctgctggttggccggggcttccgattaagtgatcggctgcgcacgcgcgtagagcgcagccacttcgatttacacgatgcccgcagcgttctgcgcctgatcctgctggttacgatagtcgtcgagggtacgcttgcccttttgctcactcttcggttgcactttggtcatggctacgactgggcggatgccgcatggcacggcatctttcatgctgtttcagcgttcaacaatgccggattttcgactttctccgacagcctgatgggcttccagaacgactggctcttcctcgtcccggttatgcttgcgattgtcctcagttcactcggatttccggtcctgcacgaaatccgcaatcgccgcgacgggccggggccatggacgttgcacagcaagattaccgtcttgggaacaggcatgctactgatagtcggattcctcgctgttcttatggcggaatggagcaatcccgccacgcttggcgcaatgccccttggcgataaaatcctgaatggtgccttccagtccgtcacgacccgcacgacaggattcaatgccttggatattggagcacttcaggaagaaacactgcttgtcacttatatcctgatgttcattggcggaggtagcgctggcactgcaggaggcataaaggtcaccactttcttcctccttgggattgtcgtctggtcggaagcgcgcggagaacgcgacgcagctattttcgggcgccggataggcccggcaattgagcgacaagccctgacggttgtattgctttccaccgcacttatcggtgtgggcactctgatcatcttgtccgcgacacacctgccgctgcaggccgtactgttcgagacgatttcggcattcgccaccgtggggctctccacaggtatcacggcgcagcttggaccgattggccaggttgttctgatcatcctgatgttcatcggcagggttggcaccatcaccatttctactgctcttgccatgggcatgggccgaacagctttccgctatccagaggagcgcccgatcgttggctag

SEQ ID NO: 88225 - protein, 443 aa, Novosphingobium aromaticivorans DSM 12444
MPLRLTHPARLVPLVFSAAIVLGTVILMLPIARAGAGSAPFLTALFTSTSAICVTGLIVQDTPVYWSSFGQWVILLLFQVGGFGIMSAATLLGLLVGRGFRLSDRLRTRVERSHFDLHDARSVLRLILLVTIVVEGTLALLLTLRLHFGHGYDWADAAWHGIFHAVSAFNNAGFSTFSDSLMGFQNDWLFLVPVMLAIVLSSLGFPVLHEIRNRRDGPGPWTLHSKITVLGTGMLLIVGFLAVLMAEWSNPATLGAMPLGDKILNGAFQSVTTRTTGFNALDIGALQEETLLVTYILMFIGGGSAGTAGGIKVTTFFLLGIVVWSEARGERDAAIFGRRIGPAIERQALTVVLLSTALIGVGTLIILSATHLPLQAVLFETISAFATVGLSTGITAQLGPIGQVVLIILMFIGRVGTITISTALAMGMGRTAFRYPEERPIVG

SEQ ID NO: 88226 - DNA, 1341 bp, Desulfitobacterium hafniense Y51
  CDS (1)..(1341): transl_table=11
atgatgtttttagggaaattcagagccaattccatacagatgatcgcgcttggttttgccggtatcatattgataggaacgcttcttctatcgctccccgccgccagcagggacggagcttctctcccgtttatcgatgctttgtttacttccgcttccgccacctgcgtgacagggttggttgtgcatgatacatatacgcaattcagcctgttcggccagatcgtgatcttatgcctgattcaaatcggcggattgggttttatgacggtggctactctctttttgatgatggcccggcgcaagatcggtcttgcggaacggggtgttttgacggagtcggtcagcgcttttcaaataggcggtattgtgcgattgattcgacgcataatcatctgtactgcgatagttgagggcatgggtgcgatattgttggctattcgcttttgtcctcagatgggtgtagcgacaggcgtttattatgccgtattccattcgatatccgccttttgcaatgcgggctttgacctgatgggaagatttgccccatacacatctctgataccttatcagagcgatgtgctggtcaatctgacgattatgacgctgatcgtcatcggcggacttgggtttgtggtctgggatgatatcatggagcacaagctgcgttatgtacgctataagcttcataccaagattgttctgctgtcgacggcgtttttaattatcggcggcgcaattctgttctatgccatggaacagggcaacgtgctcgcggcgatgcacccgatcgataagctgctggcctcgctcttccaatcgatcacgccaagaacagccggttttaacacggtggatactgctgcgttaactgaaggcggcacggttttgtccatgctgctgatgttaatcggagcatctcccggttctacaggcggcggtatcaagacgaccacgatcatggtcatcttgctggcgacgatatcctacatcaggaatacggacgacatcaatattttccacagaagattggagaacaatacgatcaaacgggcctattgcagtacgacaatatacattatgttatcgattttgggcatatttttgctcattactacgcagggattgcctgcgaaagatgcggcttttgaaacgctgtcggcccttggcacggtagggctgtccacagggatcacacgagaattggatacgctgtcacgcatggtcatcatactgctcatgtacagcgggcgcgtaggcagcctgacattgttaatggctgtaatgatgggaacgaaatcgaagcttagaaatccggaagaaaagattatcatcggctag

SEQ ID NO: 88227 - protein, 446 aa, Desulfitobacterium hafniense Y51
MMFLGKFRANSIQMIALGFAGIILIGTLLLSLPAASRDGASLPFIDALFTSASATCVTGLVVHDTYTQFSLFGQIVILCLIQIGGLGFMTVATLFLMMARRKIGLAERGVLTESVSAFQIGGIVRLIRRIIICTAIVEGMGAILLAIRFCPQMGVATGVYYAVFHSISAFCNAGFDLMGRFAPYTSLIPYQSDVLVNLTIMTLIVIGGLGFVVWDDIMEHKLRYVRYKLHTKIVLLSTAFLIIGGAILFYAMEQGNVLAAMHPIDKLLASLFQSITPRTAGFNTVDTAALTEGGTVLSMLLMLIGASPGSTGGGIKTTTIMVILLATISYIRNTDDINIFHRRLENNTIKRAYCSTTIYIMLSILGIFLLITTQGLPAKDAAFETLSALGTVGLSTGITRELDTLSRMVIILLMYSGRVGSLTLLMAVMMGTKSKLRNPEEKIIIG

SEQ ID NO: 88228 - DNA, 1329 bp, Rubrobacter xylanophilus DSM 9941
  CDS (1)..(1329): transl_table=11
gtgctcccccgcccctcggcggcgagggccatagcgctcgccttcgcggcgctcatcgccgcggggacgggcctcctgaagctgccggcggccaacaacggcctctcgtgggaggacgcgctgttcatgtcggtgagcgcggtcaccgtcaccagcctccagtcggtggacccggcgacggccctcaccccgctcgggcaggcgctgctggcggggctggtgcaggtcgggggcctggggatcatgacggtcaccaccgtcgcggccctcctggtgggctaccggctggggttcagggagctgctgctgctccgggaggagctcgcgagccccgaggccccgcgcaacgtgctgcggctcgccgggcaggtggcgctcatcaccgcgctggtggagctctccgggctcctcgtgctggcgggccgctttctgctgctgggctacggcccggcggaggccctcggctacgcgaccttcaacgccatagccgccttctgcaacgcgggcttcaacgtcttcgaggaggggctctcccccttcgcgggcgactgggccgtaaacctcgcgctggtctacctgatcgtcgccgggggcctggggttcccggtgctggcgaacctctaccgctaccgcaggatgcggcggctcaccctccagtcccgcctcgtgctcacgaccagcgcgctcctcgtcgcggcgggggcgctcagcgtggcgctcctggagtgggacaacccgcagaccctcggcgggaggccgctgcacacccggctgctgatgtcgctgctgcagggcgtcaccccgcggacggcgggctatgccaccgtggactacgccgagatgcgcgaccccaccctcgcgatccagacggcgctcatgttcgtggggacgggccccgtctccacggggggcggcatcaaggtcaccacgctcgccctgctcttcctcatcgtgctcgcccaggtgcgtggccgggaggaggtctccgccttcggtcggaccgtcgggcggaccgtgatctcccgcagcctcgccctgctctcgctcgccgcgctgctcgtcggcggctcctccgtggcgctcatgatcctggagggcgtgcccttcctcccggccgtcttcgaggtcacctcggccttcggcaccgtggggctctccctcggccccccgcccggcctctcatccgagctcgggtggtccggtaaactactgctggagctggtgatgttcgccgggaggctcggccccgttaccgtggcgctggccttcagcgagcgcagccggccccggcggtacggctacccggaggaggacatagccataggatga

SEQ ID NO: 88229 - protein, 442 aa, Rubrobacter xylanophilus DSM 9941
MLPRPSAARAIALAFAALIAAGTGLLKLPAANNGLSWEDALFMSVSAVTVTSLQSVDPATALTPLGQALLAGLVQVGGLGIMTVTTVAALLVGYRLGFRELLLLREELASPEAPRNVLRLAGQVALITALVELSGLLVLAGRFLLLGYGPAEALGYATFNAIAAFCNAGFNVFEEGLSPFAGDWAVNLALVYLIVAGGLGFPVLANLYRYRRMRRLTLQSRLVLTTSALLVAAGALSVALLEWDNPQTLGGRPLHTRLLMSLLQGVTPRTAGYATVDYAEMRDPTLAIQTALMFVGTGPVSTGGGIKVTTLALLFLIVLAQVRGREEVSAFGRTVGRTVISRSLALLSLAALLVGGSSVALMILEGVPFLPAVFEVTSAFGTVGLSLGPPPGLSSELGWSGKLLLELVMFAGRLGPVTVALAFSERSRPRRYGYPEEDIAIG

SEQ ID NO: 88230 - DNA, 1341 bp, Clostridium perfringens ATCC 13124
  CDS (1)..(1341): transl_table=11
atgtacattaaactgacaaaaaagataaaatttagtgccgttcagattttagctttaggtttttctatggttattttattaggtgctataatattaagtcttccaatatcatctaaaagtggtgagtttactccttttttagatagtttatttacttcaacttcagctgtatgtgttacgggacttataacattaaatacagcggcacattggaactattttgggaaaactgtcataataatcttaatacaaataggtggattgggattcatgtcctttacaactttatttgccttaatggttaagaaaaaaataaccttaagggaaagacttcttatacaagaagctatgaatacctttggaatacaggggttagttagaatgattagatatatcttagcatttacattttcagtagaaatgttaggtgcactattattatctactcaatttatacccaagtttggattcttaaaaggaatatactatagtatttggcattctatatcagctttttgtaatgcagggtttgatttatttggagataatctagttggatatgctaacaataaaactgtaatattaacaattgcagccttaatagtaattggtggtttaggatttactgtttggtcagaattatataattataagggatataagaaattatctttacactctaaagttgtaataatgataacagctatccttttaattgggggagctattcttatgttcatatttgaatataataatcctaatactctaaagtatatgagttttggagataaattaactaatgcattctttgcttcagcaaccacaaggactgctggatttaactctgtttctactgcggatatgactttagctggaaaattcttaactatattattaatgtttgtaggtggatcaccagggtcaacagcagggggaattaaaactgctacctttggtatagtagtacttactctaatctctataataagaggaagagaagatactgaagtatttaaaaagagaatttcaaaagaattagtgtataaggcttttgctgttttatttataggttttggtatagtggtacttggaacattaattttagcagtaacagaaccaggattttcattagaatatattctatatgaagttacatcagcttttgctacagttggattaactcttggattaactccatatctttcagtaataggaaaaataataataataataactatgtatttaggaagagtgggccctatgactgttgttctagctttagctaatagaaagaaaccaagtgcatacaaatacccagaagataaaatattaataggataa

SEQ ID NO: 88231 - protein, 446 aa, Clostridium perfringens ATCC 13124
MYIKLTKKIKFSAVQILALGFSMVILLGAIILSLPISSKSGEFTPFLDSLFTSTSAVCVTGLITLNTAAHWNYFGKTVIIILIQIGGLGFMSFTTLFALMVKKKITLRERLLIQEAMNTFGIQGLVRMIRYILAFTFSVEMLGALLLSTQFIPKFGFLKGIYYSIWHSISAFCNAGFDLFGDNLVGYANNKTVILTIAALIVIGGLGFTVWSELYNYKGYKKLSLHSKVVIMITAILLIGGAILMFIFEYNNPNTLKYMSFGDKLTNAFFASATTRTAGFNSVSTADMTLAGKFLTILLMFVGGSPGSTAGGIKTATFGIVVLTLISIIRGREDTEVFKKRISKELVYKAFAVLFIGFGIVVLGTLILAVTEPGFSLEYILYEVTSAFATVGLTLGLTPYLSVIGKIIIIITMYLGRVGPMTVVLALANRKKPSAYKYPEDKILIG

SEQ ID NO: 88232 - DNA, 1332 bp, Trichodesmium erythraeum IMS101
  CDS (1)..(1332): transl_table=11
atgactgtagctcgaaggatttgtcaaggctttgttattgtcattactattggcagtatattactaatgctacctatctctatgagtaatgggaattggagtcatcctgtaactgctttatttacagctacttctgctgtttgtgtaactggactatctgttgtaaatgtgggggaatattattcattttggggacagttattcctgttattattggttcaaattggagctttgggttatatgactgctacgactgttcttttgttgttgctgggtcataaatttggtcttcggcaaaaagttgctgttcagcaatctttggaacaggtgggactagcaggtgtggagggtttaattaagtcaattttagcaacaacaattgtgtttgagttgactggtattttgttattattgttagtttttgtgccaatttatggctttcaagaaggtctttggtattctatttttcatagtgttaattcttttaataatgctggttttagtttgtattcggatagctttgttcaatttgtaaagtctcctttactaaattttgtgattactggtttgattatatttggtggattgggctatcaggtgattatggaaatgtattcatgggttaaagatcgttgccaaggaaaacaagcttttcactctttttctctacattttaaagtagttactagtactactatttttctgttaatagttggtttgattgcgttttttattgctgaatttcataatcctaatactctagaaaatttaaatttaggggaaaaattaattgctgcttggtttcaatctgttactactagaactgctggttttcatactattgatattgataattttactgatgctggtttgtttttgacaattgctttaatgtttattggtgctagtccgggtagcactggaggaggtattaaaactacaacttttactatattatttaatagtactaaagcagctctacaaggtagggatgaagtattatgttatcaacgcaagattcctatgatagttattattaaggctattggtatagtttttgcatcaagtttattagtggtttttgctactactgtaattgcatttactgaccgacagttagaattgactgagattttctttgaggttgtatctgcttttgctacggtgggtttatctaaaggggtgacttctaattttacaattccaggacaattagttttaattacaataatgtatataggtagagtgggtgtattattgttggtttctactgtttttgcgcaacaaaaacctagtgcggttgaatatccagaggaaaatttatttgtataa

SEQ ID NO: 88233 - protein, 443 aa, Trichodesmium erythraeum IMS101
MTVARRICQGFVIVITIGSILLMLPISMSNGNWSHPVTALFTATSAVCVTGLSVVNVGEYYSFWGQLFLLLLVQIGALGYMTATTVLLLLLGHKFGLRQKVAVQQSLEQVGLAGVEGLIKSILATTIVFELTGILLLLLVFVPIYGFQEGLWYSIFHSVNSFNNAGFSLYSDSFVQFVKSPLLNFVITGLIIFGGLGYQVIMEMYSWVKDRCQGKQAFHSFSLHFKVVTSTTIFLLIVGLIAFFIAEFHNPNTLENLNLGEKLIAAWFQSVTTRTAGFHTIDIDNFTDAGLFLTIALMFIGASPGSTGGGIKTTTFTILFNSTKAALQGRDEVLCYQRKIPMIVIIKAIGIVFASSLLVVFATTVIAFTDRQLELTEIFFEVVSAFATVGLSKGVTSNFTIPGQLVLITIMYIGRVGVLLLVSTVFAQQKPSAVEYPEENLFV

SEQ ID NO: 88234 - DNA, 1404 bp, Synechococcus sp. CC9311
  CDS (1)..(1404): transl_table=11
atgccaattccctacgccattcaccgcactcaggcctggtatcgccgcctaacaattccccagttcaccgttgtaacggggttacttgtcatcgcagccggcacactgatcctcgcgacaccactgtgttcaagctccagagtgggcctgtgggaagccttcttcacagccacatcagccgtgacagtgacagggctttcggtgatcgacatccgcgaagatctgacccgccctgggcaaatcgtgctggccatgatgatcatggtcggaggcctgggattgatggcggtcacgacatttctgcaggggtttgtggttcgcggaaccgctcttcggcgtcgcctcgatcgtggtcaaaccctcgatgaatttggcgtagggggtgtaggaaccacctttcgcggcattgcactcactgctgtagtgctgatcttgattggggcgttcatgctctatgtctttggctttacagacattgcgcctggaggagaacgtctatgggccgctctctttcacagcatttctgcgtacaacaacgctggttttggactctggaacgacagtcttgagagttatcgcaccaacaacactgtgaacgcagtgatcatggtgttggtaatcctgggcggactgggctggcgtgtcaccaatgacctatggatcaatcgccaacggcttagacgacgtcatctcagcctgcacacgcgcctcgttctgcgcacctctggtcttctcatcctgatcgggaccttcggattaatgctgacggaatccctctcgctaggccatgtgctcacagatatggggtggggagaacggttaatgagcgccctttttgaatcagtgagttcaagaaccgctggattcaccacggttcccctctctctgaacagcatttccgattcaggcctgttgttggtgatgaccctgatgttcatcggtgcgagtccgggaggaacaggaggtggaatcaaaacaacaacggtggcagcccttatggccgctacgcgctctaccctgcgaggtcacaatgatgtagtaattcgccatcgacagatctccgacaaagttgtgctgcgcgctttaagcatcacagttgcctcacttctgtttgtgctggggatggccctcctattggcactaagcagcaatctcagcggagaagaacccttcactttcctggagctggtttttacgtgtatttccgcctttgccaccgtgggattggatctaggcgttacaaggcagctggctccttttggtcagtttgtgcttgtgatgggaatgtttgtgggacgcctgggaatcctcttgcttttgagcgccatttgggagagtttcaaccgtggacacctacagcgcgagaatcgcgttggttatccccgtgaagatctctatgtctga

SEQ ID NO: 88235 - protein, 467 aa, Synechococcus sp. CC9311
MPIPYAIHRTQAWYRRLTIPQFTVVTGLLVIAAGTLILATPLCSSSRVGLWEAFFTATSAVTVTGLSVIDIREDLTRPGQIVLAMMIMVGGLGLMAVTTFLQGFVVRGTALRRRLDRGQTLDEFGVGGVGTTFRGIALTAVVLILIGAFMLYVFGFTDIAPGGERLWAALFHSISAYNNAGFGLWNDSLESYRTNNTVNAVIMVLVILGGLGWRVTNDLWINRQRLRRRHLSLHTRLVLRTSGLLILIGTFGLMLTESLSLGHVLTDMGWGERLMSALFESVSSRTAGFTTVPLSLNSISDSGLLLVMTLMFIGASPGGTGGGIKTTTVAALMAATRSTLRGHNDVVIRHRQISDKVVLRALSITVASLLFVLGMALLLALSSNLSGEEPFTFLELVFTCISAFATVGLDLGVTRQLAPFGQFVLVMGMFVGRLGILLLLSAIWESFNRGHLQRENRVGYPREDLYV

SEQ ID NO: 88236 - DNA, 1374 bp, Hyphomonas neptunium ATCC 15444
  CDS (1)..(1374): transl_table=11
atgcgcgctccgcgaatgatcggggccatccgcaagcctcttgcggttgcctccctgtatgctcatcgcctgatgcgccgggttcatccggcgaagctgatctttgctggctatgcgttttacatggcgctcggctgcgcactcctctgcctgccattctctcaatctgtcccggtgcatctgctggacaatctgttcacggcggtgtccgccgtatcgacaaccggtcttgtgacggttgatccgggaacttcttacactttcatgggcgagctggtgatcctgctgctgattcaggcaggcgggattggctatatgacggtcagctcgttcgtgatgatggcgacggttcaacatctgtcgccactgcgggagcgtcttgcgcgcgccgccttcatccttccggaagatgtcagcatcgggatctttatccggactgtggtcatctacacattttccgtggagataatgggcgcaattctgctgtttatccagttctcagccagcggcgtggacaacgccatctggaacgcgatttttcactccgtctcggctttctgcacagcgggcttcagccttaaccccaacagcctggaagacttccgcggcgatgtcggcgtcaatgccaccatctcggcgctgtctatcctcggcgcgatgggctttctgattgcctgggatgtctggcgtagcctgacgcggcgcagtttcgtgctgagctttaccagcaaggtgatccttaagctcacgggggcgttcctgctcgcgggaacggcgattttctttgtagcagatcctggaatttcggcgctgccatccggggagcgcctgatggcgtctttcttccagacgatgacggcgaccaccactgtgggcttcaacacccatccgatcagcgcgctgacgcctgccgtcattgtgctgctgttcttcctgatggccatcggcgcctcgccttcgggcacgggcggggggctcaagacgacgacctttgccgcgatgatcggccttgtgcgatccacagtgcgccggcggccggagatcacattcttcaaccgcgtcatcgcgccggcacggcttcagctggccatggcttcttcagcttacttcgtgatgctcatgacacctgcggttttcgtcctgtgtctgacggaaccaggcaaggaatttcagatgctcctgttcgaggcaatctctgcaatcggcacagtgggcctttccatgggcatcacgggttcactgagcgatataggcaagctcaccatcatcctgctgatgtttgcaggccgggtgggcatcctcaccttcggcattgcgctggcctccaaggatgaggaaaccgaggtgcggcggcaggaagatttgttggtgtga

SEQ ID NO: 88237 - protein, 457 aa, Hyphomonas neptunium ATCC 15444
MRAPRMIGAIRKPLAVASLYAHRLMRRVHPAKLIFAGYAFYMALGCALLCLPFSQSVPVHLLDNLFTAVSAVSTTGLVTVDPGTSYTFMGELVILLLIQAGGIGYMTVSSFVMMATVQHLSPLRERLARAAFILPEDVSIGIFIRTVVIYTFSVEIMGAILLFIQFSASGVDNAIWNAIFHSVSAFCTAGFSLNPNSLEDFRGDVGVNATISALSILGAMGFLIAWDVWRSLTRRSFVLSFTSKVILKLTGAFLLAGTAIFFVADPGISALPSGERLMASFFQTMTATTTVGFNTHPISALTPAVIVLLFFLMAIGASPSGTGGGLKTTTFAAMIGLVRSTVRRRPEITFFNRVIAPARLQLAMASSAYFVMLMTPAVFVLCLTEPGKEFQMLLFEAISAIGTVGLSMGITGSLSDIGKLTIILLMFAGRVGILTFGIALASKDEETEVRRQEDLLV

SEQ ID NO: 88238 - DNA, 1374 bp, Magnetococcus sp. MC-1
  CDS (1)..(1374): transl_table=11
gtgttgatacgtaacgaagtggacggcgtccgcttggtggtccaatcctttgcgatggtcatcatcatcggtgcgctgctgctgtttaccccctggtcggcagccgatcccgctggccatccggtttcctggctggatgccctgtttacctccacttctgccgtctgcgtgaccgggctggtcactctggataccgggcaggatttttcctttctgggtcaagctgtcattctggcgctgatccaggtcggtggattgggtttcctgacctttaccaacttttttatcgccattcaggggggacggctcgatttcatgcgcagggccatgttggccaccacccacggtacactccctggggaggtccatcccggtgccctgctgcggcacatcgtgctcttcacttttgccctggagggcgttggcgcggtgctactgaccgggcgtttcgccttggagatgccctttaccgaggcgctctggatgggaattttctactccatctccgccttctgcaacgcgggttttggcctgctctcggacagcctgatgccctaccgggacgatccgctggtcaacctgaccattatgggattgatcgtcaccggcggattgggatttgttgtcttcaccgacctctctcatcgtctggtgctctggcggcggggacaaccggggcggctctccctacacagccggatggtcctgatcatgaccggtattctggttccgcttggcacggtgctgttcttcctgctggagcagggtggcacagcggccggggagaacggggtctcgtcggcgttgtcggcgctgttcctctcgatcacctcccgcaccgctggtttcaataccatcgacaccgcccgcttgaccgcgcctaccctctacctggtgatcctgttcatggcggtgggcggctcgccgggctccacggcggggggtatgaaaaccaccacggtgggaattatggcggccatgctgatgtcgcggctgcgcaaccgtgagggggttgaatttctagaccgaacaatccccgctcaggcggtactcaccgccatgctgaccttcgcggctttcgcggtactggcggtggctggatttcttgccctgttgatcagcgaaacggggttgcaggcttacgaccccgcccacgaccgaagtctggcgttgctgttcgagacggtctccgccttggcgaccgtgggattgtccaccggggtgacagcggggctctctgccatcggcaaagtaatcatcattgtgttgatgtttgtgggtcgcctgggtcctctggtattggggctaacgctgatgggacgacggccccgggagcgctacaaactgcctgacgagtccgtcaacgttggatag

SEQ ID NO: 88239 - protein, 457 aa, Magnetococcus sp. MC-1
MLIRNEVDGVRLVVQSFAMVIIIGALLLFTPWSAADPAGHPVSWLDALFTSTSAVCVTGLVTLDTGQDFSFLGQAVILALIQVGGLGFLTFTNFFIAIQGGRLDFMRRAMLATTHGTLPGEVHPGALLRHIVLFTFALEGVGAVLLTGRFALEMPFTEALWMGIFYSISAFCNAGFGLLSDSLMPYRDDPLVNLTIMGLIVTGGLGFVVFTDLSHRLVLWRRGQPGRLSLHSRMVLIMTGILVPLGTVLFFLLEQGGTAAGENGVSSALSALFLSITSRTAGFNTIDTARLTAPTLYLVILFMAVGGSPGSTAGGMKTTTVGIMAAMLMSRLRNREGVEFLDRTIPAQAVLTAMLTFAAFAVLAVAGFLALLISETGLQAYDPAHDRSLALLFETVSALATVGLSTGVTAGLSAIGKVIIIVLMFVGRLGPLVLGLTLMGRRPRERYKLPDESVNVG

SEQ ID NO: 88240 - DNA, 1335 bp, Nostoc punctiforme PCC 73102
  CDS (1)..(1335): transl_table=11
atgactgttgctcggacaatttgtttgggatttttggctgtcattgctgttggtgctatcctgttgatgatgcctttttcgactagcaatggtacatggaataacctgattgtggcactattcacctcgacatccgcagtttgtgtcacaggtttatcagtagttgatcctggtacttatttttccttttggggccaattgtttattgcactattagctcagattggcggtttgggctacatgacaactaccacatttctaattttgctcattggtcgtaggtttgatatgcggcagaaaatagcaattcaacaagctttagaccgaccagggatgagtggtagtgcccaagttatccgttcaattattgccacaactttaatttttgaaattacaggcacattcttacttctgcctgctttcgttcctgaatatggatggagtaaagggctttggttagccatttttcatagtatcaacgcttggaataatgctggttttagtttatttaaagataacttaattggctatcagtcatctttcttagtagtctttaccatcacaatgttaattatctttgggggaattggctatcaggtaattttggaaatgtacctttggttgcgcgattgccttttcaaaaaaaatcataaccaaatattttctctagattttaaagttgcaactagcacaactattatattgttagtaataggagtaattgcattcttttgtatagagattagaaacccagaaacatttggttctctaaattttcgtgaccagatattactagcttggtttcaatcagttactcctagaactgctggttttaataccatcgatattagcaaaatgactaccgcaggtttatttattacgattgcgatgatgtttattggtgcaagtccaggtggtacaggaggaggcatgaaaacaacaactcttagagtcttgaccagttgtaccaaggcaattcttcagggaaaagaagaagttttattatacgatcgcaaaatagcaatatctttaattttgaaagccgtaggtgtgttagtgggttcaatagcaacagtaattttagctactatcttaatcagccttacagatccaactttggattttattcaaattttgtttgaagtggtatcagccttcgccactgtggggctttcaacaggtattacaggaagtatctctataatagcaaagctcatcctcattataactatgtacattggacgagtaggtgttttactactgatgtccgcagtactaggagacccccgccccaccagaattcactatcctgaagaaaatctcctcgtgggatag

SEQ ID NO: 88241 - protein, 444 aa, Nostoc punctiforme PCC 73102
MTVARTICLGFLAVIAVGAILLMMPFSTSNGTWNNLIVALFTSTSAVCVTGLSVVDPGTYFSFWGQLFIALLAQIGGLGYMTTTTFLILLIGRRFDMRQKIAIQQALDRPGMSGSAQVIRSIIATTLIFEITGTFLLLPAFVPEYGWSKGLWLAIFHSINAWNNAGFSLFKDNLIGYQSSFLVVFTITMLIIFGGIGYQVILEMYLWLRDCLFKKNHNQIFSLDFKVATSTTIILLVIGVIAFFCIEIRNPETFGSLNFRDQILLAWFQSVTPRTAGFNTIDISKMTTAGLFITIAMMFIGASPGGTGGGMKTTTLRVLTSCTKAILQGKEEVLLYDRKIAISLILKAVGVLVGSIATVILATILISLTDPTLDFIQILFEVVSAFATVGLSTGITGSISIIAKLILIITMYIGRVGVLLLMSAVLGDPRPTRIHYPEENLLVG

SEQ ID NO: 88242 - DNA, 1320 bp, Haemophilus somnus 2336
  CDS (1)..(1320): transl_table=11
atgaaatttgaacatatcaacacaaagccaccctatgtattagcgggcggttttctctttatcattttaattggcacattattattggaattaccctttgctcaccataaaagtatttcatggctacatgccttatttacttcaacatcagcggtaacggtaacggggctaagtgtcgaagatacagcaaatttcaccctattcggacaagttgttttaatgtgcttaattcaaattggcggattgggatttatgacgtttgctatttacatagcaagacgaatgggtgccagaattggcttattcggcaatgcaattgctcaagaagcactgggtgatgtgccttttaatttacttctacatactgccaaaaacgttctaaaatttgcactgacttttgaacttatcgcaatgattattcttactgttcatttttatggtgatgtttctttttttcaagcactgtatcaaagtctgttttacagtatttccgcttttaacaatgccggttttgcactgagttcagaaagtttaatgccttatgtggatgacattgttgtcaatatagtcatcaccgtattgattattattggcgggttgggatttgtggtactcatggatatcaaaaatcaacgccaatataaaaaattctcactaaatacgaaggtagtactttgggcaacctgtattttaaatatcgtttcctttctaatattttatattttagaacgacaaaacccgttaacatttggaccgctaagcgaaacaggtaagttgtttgccgcttggtttcaagcgataacaccaagaactgcagggtttaatactgttgatacggcaggattaactgatgccagtagtctgctgactatgttcttaatgtttattggcggaggttccttatccactgcaagcggtataaaaatcggcacattctgtattatagtggtagcgacattcgcctatttacacaaagaatcccatgtcaatttgtttaaacataatttgcctgatgaactaatcaaaaagtcctttgctttattttttaccagccttagttgtattggtattagtagctttttactcttggcagttgaaccgcaatttcatttccttgatgttttatttgaagttgtttcggctttaggtacagtcggactttcacgaggaattactgctgaactttcaccgttcggagagtcaattttaattatcttaatgtttatcggtcgagtaggattgctcactatgatttatctcattatgcaaccgcactccagtaaaattaaatatccaaaagaatatatacaaataggctaa

SEQ ID NO: 88243 - protein, 439 aa, Haemophilus somnus 2336
MKFEHINTKPPYVLAGGFLFIILIGTLLLELPFAHHKSISWLHALFTSTSAVTVTGLSVEDTANFTLFGQVVLMCLIQIGGLGFMTFAIYIARRMGARIGLFGNAIAQEALGDVPFNLLLHTAKNVLKFALTFELIAMIILTVHFYGDVSFFQALYQSLFYSISAFNNAGFALSSESLMPYVDDIVVNIVITVLIIIGGLGFVVLMDIKNQRQYKKFSLNTKVVLWATCILNIVSFLIFYILERQNPLTFGPLSETGKLFAAWFQAITPRTAGFNTVDTAGLTDASSLLTMFLMFIGGGSLSTASGIKIGTFCIIVVATFAYLHKESHVNLFKHNLPDELIKKSFALFFTSLSCIGISSFLLLAVEPQFHFLDVLFEVVSALGTVGLSRGITAELSPFGESILIILMFIGRVGLLTMIYLIMQPHSSKIKYPKEYIQIG

SEQ ID NO: 88244 - DNA, 1347 bp, Fusobacterium nucleatum subsp. vincentii ATCC 49256
  CDS (1)..(1347): transl_table=11
atgagaaaactaagtctattaaaaaagtgggacagtttatctccttatagaaaattaatttttggttttttagtagcaatttttattggagtgatacttttaaaactgcctttttcattaagagaaaatcaaaatattacagttttagactctttgttcacaatagtttctgctatcagtgtaacaggtttatctgttgtagatataagtcaagtttttactccaacaggacaattaataattttgtttttcatccaattaggtggacttggagttatgaccgtttcaataataatttttttattgattggtaaaaaaatgagctttgaaacaagggaacttttaaaagaagaaagaaattctaatagcaatggaggtattacaaattttataaaacatctattgctgacagtatttgtaattgaaatattaggagcttcaattttagcttatggtttttctaaatattatccattaaaaagatcaattttttatggattatttcattcagtgtcggcattttgtaatgcaggattttctttatttactaataatttagaaattttcaaatatgataaattaatcagtctaactgtttcatttttaattatcttaggcggaataggttttgtaacaataaattcaatttttataattaaaaagaaaaaatttagagatttaagtttaacttcaaaattatctttaattattacagcttttttactttttattgggacaatactatttttaatatttgaatacaataatttaagcaccttaaaaggtatggactttttggacaaatttttaaattcatttttccaaagtgtaacattgaggacagcaggttttaatacagtgtcacttactaatataagacctgcaacagtttttatttcatatatttttatgtttattggagcatcaccaggttcgacaggtggagggataaaaacaacaacctttggaattttaatattctatgcacttggtgttctaaaaagaagagaatatgttgaagtttttaaaagaagaatagattgggaattgattaataaagcattagcaatagtagttatatcagtattctatattattgctgttacaacagttatattatcagtagaaagtttttcaacagataaagtggtatatgaagttatttcagccttttcaacaacaggtttaagtatgggaataacagcaggattagggataatttctaaacttttaatagttattacaatgtttataggaagattagggcctatgacagttgcattggcttttacaaataataagaaaagtttaataaaatatccaaaagaagatatattaattgggtag

SEQ ID NO: 88245 - protein, 448 aa, Fusobacterium nucleatum subsp. vincentii ATCC 49256
MRKLSLLKKWDSLSPYRKLIFGFLVAIFIGVILLKLPFSLRENQNITVLDSLFTIVSAISVTGLSVVDISQVFTPTGQLIILFFIQLGGLGVMTVSIIIFLLIGKKMSFETRELLKEERNSNSNGGITNFIKHLLLTVFVIEILGASILAYGFSKYYPLKRSIFYGLFHSVSAFCNAGFSLFTNNLEIFKYDKLISLTVSFLIILGGIGFVTINSIFIIKKKKFRDLSLTSKLSLIITAFLLFIGTILFLIFEYNNLSTLKGMDFLDKFLNSFFQSVTLRTAGFNTVSLTNIRPATVFISYIFMFIGASPGSTGGGIKTTTFGILIFYALGVLKRREYVEVFKRRIDWELINKALAIVVISVFYIIAVTTVILSVESFSTDKVVYEVISAFSTTGLSMGITAGLGIISKLLIVITMFIGRLGPMTVALAFTNNKKSLIKYPKEDILIG

SEQ ID NO: 88246 - DNA, 1365 bp, Crocosphaera watsonii WH 8501
  CDS (1)..(1365): transl_table=11
atgacaattgctaggacgatttgttgcggttttctggtggttattgcggtaggaacactattattaatgttaccttttgctactgatgatggtagttggaatagtcctttagttgccttgtttacggcaacttctgctgtttgtgtcaccggattaattgttgttgatacaggaagtgatttttctttctggggtcaattaattattttattgttaattcaagtaggagggttaggttatatgactaccacaaccttcctgattttattattagggcgaagatttgatctcagacaaaagttagctatacaagagtcttttgatcgcccttttttacatggtaatagtaggacgttgattcgttctattattgctacaactctggtttttgagattttaggtattctcctgatgcttaacgtattctctaaaaagtatggaactatgaaaggtttatggtatgcaatttttcatagtatcagtgcttggaataatgcagggtttagcctattttctgatagtttaacgggtttggatgattcgttaaccattaattttattattcctttattaattatttttgggggtattggttatcaagttattatggaactttatatggctattgttcattttgttactagaaaacgagaaagattagttttttctttgaattttaaggtagtaatcagtaccacagcaattttattattatcgggaaccataatattttttttggttgaatatcctaaccccgatactttgggaaatcttgatttaagggggaaaatactaacagcctggtttcaatctgtgaccacaagaactgcgggttttaatagtattgatattggttcaatgacctttgctggtttattattaactataggattaatgtttattggagccagtcctagtggtacaggaggaggtattaaaacaacaaccttaaggattttaactaactgtactcgttctgttttgagaggtaatgatgaggtagtaatgtttgagcgagaaatttctgtaccgttaattttaaaagcagtagcagtggtttttggctctactaatatggtagtgttaataacttttttgatctacttaaatgaagggattttccatcctagcttttttgaatctggtggtacttccttacaagttttatttgaagttatttcagcttttgctaccgtaggattatccgcaggaattacagataagttatcagctatttctcaactcttattaattttaactatgtatactgggagagtgggaattctggtatttatggcagcgatcgcaggggaaactcgtccacgagttgtccaatatccagaagaaactttattagtaggatag

SEQ ID NO: 88247 - protein, 454 aa, Crocosphaera watsonii WH 8501
MTIARTICCGFLVVIAVGTLLLMLPFATDDGSWNSPLVALFTATSAVCVTGLIVVDTGSDFSFWGQLIILLLIQVGGLGYMTTTTFLILLLGRRFDLRQKLAIQESFDRPFLHGNSRTLIRSIIATTLVFEILGILLMLNVFSKKYGTMKGLWYAIFHSISAWNNAGFSLFSDSLTGLDDSLTINFIIPLLIIFGGIGYQVIMELYMAIVHFVTRKRERLVFSLNFKVVISTTAILLLSGTIIFFLVEYPNPDTLGNLDLRGKILTAWFQSVTTRTAGFNSIDIGSMTFAGLLLTIGLMFIGASPSGTGGGIKTTTLRILTNCTRSVLRGNDEVVMFEREISVPLILKAVAVVFGSTNMVVLITFLIYLNEGIFHPSFFESGGTSLQVLFEVISAFATVGLSAGITDKLSAISQLLLILTMYTGRVGILVFMAAIAGETRPRVVQYPEETLLVG

SEQ ID NO: 88248 - DNA, 1392 bp, Exiguobacterium sibiricum 255-15
  CDS (1)..(1392): transl_table=11
atgttttctcataaaagacgttcgcggctcgcgaagttcggacggttcggggaactgatttatcatcagttattcgataaaccggcccgttttatcgcgaccggttttacgttgaccatcttattgggtggatttttactgtggttaccgattgctcaacaggacggtcaggacataccgttcatcgactgtttgtttgtcgcgacttcggccgggacggtcaccggtctttcgacggtcaatatcgccgaatcctttaatctgttgggacaaatcattatgatgctgctgattcaggtcgggggactcggattcatgacgattgcgcttgtcctgttgagcgtaacaggacggaagatcggaatccggcaacgcatcatcattcaagagatgtttaatctcgacagtccgggcggtacgatccgtctggcccggaacattattctgacgactgtcgtcgtcgaattgatcgggatgctgttgattgcgcttgatctgttcattcaatataagtacacgttcggtaagtccttgtattacggattgttccatgctgtatcggccttcaataatgcgggctttgcgttatggggcgataatctggtcggttttcaacaggatacgacgttcatcctgacgatttcagcattactgatgatcggtggactcggttttaccgtcatcgcggatatatcggctaaacggaatttcaagaagatctccttacattcgaaattgatgctcttatcacttgtcgtcatcaacggtcttggggttcttgcgatgatgatttatgagtgggtatcacatctcggatcgcttcacgataaatctttttttgcagcattgcacatcgtcttcttccaagtcgttacgacgcggacggcagggttccaaacgatcgatttaacgacgatggtcccgttatcaatcggcttgatgatggtcttgatgtatatcggggcaggttctgcttcgacaggatccggaatcaaggtcacgacggcagcggtcatcttgaaaaacgtctggacgtacctgcgcggacaacgggaaaccgtcttgatgcggcgaactgtccggccgcaggcaattcaaaaagcttacgccatcgccgtgttcagtctgttgttcatcgctctcgtgacgacgttgcttgctttgtcccaaccgaatctctcctttgtcggtctgtttttcgagacggtgtccgcattcgggacagttggtctgtcgttgaatgtcacggcggaattaaacgacttcgggaaagccttgatcatgtttatgatgttactcggacgtgtcggatcgttaacgattctgtttacgtttgccgctcaacacgatcgtttgattcgttatccgaaagaaaatatgctgattggctga

SEQ ID NO: 88249 - protein, 463 aa, Exiguobacterium sibiricum 255-15
MFSHKRRSRLAKFGRFGELIYHQLFDKPARFIATGFTLTILLGGFLLWLPIAQQDGQDIPFIDCLFVATSAGTVTGLSTVNIAESFNLLGQIIMMLLIQVGGLGFMTIALVLLSVTGRKIGIRQRIIIQEMFNLDSPGGTIRLARNIILTTVVVELIGMLLIALDLFIQYKYTFGKSLYYGLFHAVSAFNNAGFALWGDNLVGFQQDTTFILTISALLMIGGLGFTVIADISAKRNFKKISLHSKLMLLSLVVINGLGVLAMMIYEWVSHLGSLHDKSFFAALHIVFFQVVTTRTAGFQTIDLTTMVPLSIGLMMVLMYIGAGSASTGSGIKVTTAAVILKNVWTYLRGQRETVLMRRTVRPQAIQKAYAIAVFSLLFIALVTTLLALSQPNLSFVGLFFETVSAFGTVGLSLNVTAELNDFGKALIMFMMLLGRVGSLTILFTFAAQHDRLIRYPKENMLIG

SEQ ID NO: 88250 - DNA, 1323 bp, Erythrobacter sp. NAP1
  CDS (1)..(1323): transl_table=11
atgctgcgcgatccgatccgattgataccgctgctttttctggcgctgatcctggtcggaacggcgcttctcgccctaccggtcgcgaccagcgatggaaacgccgcgccgctgctcacagccttcttcaccgccacctctgccgtatcggtcacagggctgatcgtggtcgacacgccggtctactggtcaatgttcggccagatcacgatcctcgtcctgttccagatcggcggcttcgggatcatgaccgcggcgaccttgttcgggctgatgctcgggcgcgggcttgggcttcgagagcgcatggcaacacaggtcgagcgcaaccggatcgagcgcggcgatgcggtctccgtgattaagctggtgctcgccatcacgctggtgatcgaggtagtggtcgcagcgatcctgactgcacgcttccatctcacgcacgacttcgcgctcggctcggcgctgtggcacggcattttccattcggtgagcgcgttcaacaatgccgggttctcaagcttttccgacagcgtgatgagttttcagggcgaccccgtcatcctctcgccaatcatgctcgcggtcatcatcaccgcgctcggctttccggtcatgcaggacttgcgcgccgaaaagctcaaatggtcgagatacacgctccacaccaagattaccctgctcgcgaccggggttctgctcgtcaccgggtttattgccatgctcggcatggaatggggcaatcccgacacgctcggcccgatggcgctcggcgagaaagcgctcaacgccgcgttccattcggtcatgccgcgcaccgcgggcttcaacagcctcgatgtcggcagtttccgcgatgagacgatcacggtgaattacctgctcatgttcatcggcggcggcagcgcgggcaccgccggcggcatcaagatcaccacattcgtcgtgcttatcgcggtggtcgtttccgagatccgcggtcagcgcgactcgggcattttcgaccgccgcttcggctcgcatatcgaacgccaggcgcttgccgttaccgtgctggccggatcgctgatcttcctcgcaacgctctacatcgcctcgatcaccgacctcgcgttcgagcgggtcctgttcgaaactatctcagccttttcgaccgttggcctgtcgatgggcatcaccggcgacctgccgccgagtgcgcaattcgtgatcaccgtcctgatgtttgtgggccgcgtgggaaccattacggtggctacagcgcttgcattgggaagcggttcgcgaactttccgctatccagaggagaacccgattgtcggctaa

SEQ ID NO: 88251 - protein, 440 aa, Erythrobacter sp. NAP1
MLRDPIRLIPLLFLALILVGTALLALPVATSDGNAAPLLTAFFTATSAVSVTGLIVVDTPVYWSMFGQITILVLFQIGGFGIMTAATLFGLMLGRGLGLRERMATQVERNRIERGDAVSVIKLVLAITLVIEVVVAAILTARFHLTHDFALGSALWHGIFHSVSAFNNAGFSSFSDSVMSFQGDPVILSPIMLAVIITALGFPVMQDLRAEKLKWSRYTLHTKITLLATGVLLVTGFIAMLGMEWGNPDTLGPMALGEKALNAAFHSVMPRTAGFNSLDVGSFRDETITVNYLLMFIGGGSAGTAGGIKITTFVVLIAVVVSEIRGQRDSGIFDRRFGSHIERQALAVTVLAGSLIFLATLYIASITDLAFERVLFETISAFSTVGLSMGITGDLPPSAQFVITVLMFVGRVGTITVATALALGSGSRTFRYPEENPIVG

SEQ ID NO: 88252 - DNA, 1338 bp, Synechococcus sp. WH 5701
  CDS (1)..(1338): transl_table=11
gtgcctcagttcacggtgctcaccggcctgctggtgatcgccgtgggcaccttgctgatggccctgcccgtgttctcttccgagcaggtcggcctctgggaggccatgttcacggtgatctccgccatcacagtgacgggactttcggtggtggacgtgggccaggagctcacctttcctgggcaggtgctccttgccctgttgatcctcaccggcggcctggggttgatggccatcaccacctttctgcagggcttcgtgcaacggggctcgaggctgcgccgccggcttgatcgcggccgggccatggacgaattcggtgtgggcggcatcggcgacaccttccactcgatcctgatcaccgcagcctgggtgatcggcatgggcactctcgtgctctacaccatcggtttccgtgacatccccgtgccgcgtgagcggctgtgggcctccctgttccactgcatcagcgcttacaacaacgccggcttcggcctctggagcgacagcctgatggattatcgcgccagtccggtcgtgaacctggtgatcatggtgatgatcgtctcggggggaatcggctaccgggtcaccaacgacctctggcagaaccggttcaaggtgcgtctgatccgcagtttcagcctgcacacccgcctggtgctgcgctggacgatcggcctgatcctgatcggcgcggcagggatgctgttcaccgagcatttcacccgctccagcggactgacgcccctgccctggtgggaggaactgcaggtggtgtttttccagtcggtgagcacccgcacggccggcttcaacaccgtgcccctctcggtggaggtcatctccgaagcgggtctgctgctgatgatgacgctgatgttcatcggcgccagtcccggagggaccggcggcggcatcaagaccaccaccttcgcgtgcctggtggcggccacccgctccaccctcaggggcgaagacactgtggtgatccggcgccgggcgatctccgacaaggtggttctgcgggccgttggggtcaccctcgcctcactgctgttcgtgctgttgatggctctggtgctgggtctcgaccgcggggtcggcaccgacggtcagcccttcagcttcctggagaaactgttcacctgcatctccgccttcgccaccgtgggactcgatgtgggggtcaccgcagagctgaaccgctggggccagctggtgctgatggtggggatgttcgtgggccggatcggcatcctgctgctgctctcggcggtcttcggcagccacaccacctcacgcatctcctaccagcacgaggagctgtacctctga

SEQ ID NO: 88253 - protein, 445 aa, Synechococcus sp. WH 5701
MPQFTVLTGLLVIAVGTLLMALPVFSSEQVGLWEAMFTVISAITVTGLSVVDVGQELTFPGQVLLALLILTGGLGLMAITTFLQGFVQRGSRLRRRLDRGRAMDEFGVGGIGDTFHSILITAAWVIGMGTLVLYTIGFRDIPVPRERLWASLFHCISAYNNAGFGLWSDSLMDYRASPVVNLVIMVMIVSGGIGYRVTNDLWQNRFKVRLIRSFSLHTRLVLRWTIGLILIGAAGMLFTEHFTRSSGLTPLPWWEELQVVFFQSVSTRTAGFNTVPLSVEVISEAGLLLMMTLMFIGASPGGTGGGIKTTTFACLVAATRSTLRGEDTVVIRRRAISDKVVLRAVGVTLASLLFVLLMALVLGLDRGVGTDGQPFSFLEKLFTCISAFATVGLDVGVTAELNRWGQLVLMVGMFVGRIGILLLLSAVFGSHTTSRISYQHEELYL

SEQ ID NO: 88254 - DNA, 1413 bp, Synechococcus sp. WH 7805
  CDS (1)..(1413): transl_table=11
atgaaacggatgcctctcccccgggcgattcatcgcactcaggcgtggtaccgacgcctcaccgtgcctcagttcacagtggtgacaggtctactggtgatcgccaccgggacccttcttctcgcaaccccgctgtgctcctccacggatgtggggctctgggaagcgctgtttacagcgacctccgccgtcacggtgaccgggctgacagtgatcgatgtcggacgtgatctgacgcctttcggccagggccttttggccttcatgatcctggtgggcgggctgggattgatggcgatcacaacctttctgcaggggttcgtggtgcgtggtgcgtcccttcgcaggcgactggatcgaggtcagaccctggatcaattcggcgtcggcggcgtcggcagcaccttccgcagcatcgctctcacagcggctgttctgattctggttggtgctttggtgctgtacgccttcggattttcagacctgcccgcgggaggaaccaggatctgggcctctctctttcacagcatttcggcttacaacaatgccggcttcggactctggaacgacagtctcgagggatatcgaaccaaccgcgtcgtgaacgctgtgatcatgcttctgatcgtgctgggtggtcttggctggagagtgaccaacgatctttggagcaacaggcagcgactcaagcgtcgaaatctgagcctgcacacccggctcgtgctccgcacatcagcactcctgattctgattggcatgctcggactgctgctgaccgaatccctgtcaaaaggccacgccctcacctcaatgggatggcaagagagagtcatgagtgccctgtttggatccgtgagctcacgcacagcaggcttcaccaccgtgcctctttccatccaaagcatttctgattcaggcctattgctgctgatgacgctgatgttcattggtgccagtcccggtggcaccggtggaggaatcaaaaccaccacattggctgcgctgatggccaccacccgctccaccctgcgaggacacgatgatgtggtgattcgtcatcgtcagattcctgacaaggtggtgcttagagccgtgagcatcacggtggcctccctgctgttcgtactggtgatggccttgctgctcgctttgatcagcgaccccacaggcgaggacccgttgtcgtttctggaactgatgttcacgtgcatctcggccttcgcgactgtgggcctcgatctgggcgtgacagaacagcttggacatctcggacagctgatcttggtggtcggaatgttcgtggggcggctgggcattctgctgttgctcagcgcgatctgggagagcttcgagcgcgaccagatccaccgccagaatcgtgtcggctatccccgcgaggatctatatgtctga

SEQ ID NO: 88255 - protein, 470 aa, Synechococcus sp. WH 7805
MKRMPLPRAIHRTQAWYRRLTVPQFTVVTGLLVIATGTLLLATPLCSSTDVGLWEALFTATSAVTVTGLTVIDVGRDLTPFGQGLLAFMILVGGLGLMAITTFLQGFVVRGASLRRRLDRGQTLDQFGVGGVGSTFRSIALTAAVLILVGALVLYAFGFSDLPAGGTRIWASLFHSISAYNNAGFGLWNDSLEGYRTNRVVNAVIMLLIVLGGLGWRVTNDLWSNRQRLKRRNLSLHTRLVLRTSALLILIGMLGLLLTESLSKGHALTSMGWQERVMSALFGSVSSRTAGFTTVPLSIQSISDSGLLLLMTLMFIGASPGGTGGGIKTTTLAALMATTRSTLRGHDDVVIRHRQIPDKVVLRAVSITVASLLFVLVMALLLALISDPTGEDPLSFLELMFTCISAFATVGLDLGVTEQLGHLGQLILVVGMFVGRLGILLLLSAIWESFERDQIHRQNRVGYPREDLYV

SEQ ID NO: 88256 - DNA, 1368 bp, Pseudoalteromonas tunicata D2
  CDS (1)..(1368): transl_table=11
atgactctttgggatccgcggtactcaccttataaaagtaaaaaaattaccagtcgtcataaaaccccgcttaatccaccacgcgttttatttttagggtttttattccttatttttataggcgcaatgctactaaaactaaccgtagcaactacaactcctatttcttggctacaagctgtttttacggcaacatcggctgtgacagtaactggcctagtattatttgatactggcagtcaatttactgtttttggccaagttactattgcattattgattcaagttggtggtttaggatttatgacttttgccattttggccgcgctcagtgtgggtgctcgctttgacattggtaaacagttgattgctcaagaagcctttggccaaattagttttgataaactgatagaaacagcaaaatatgtattctttttttctctcgttatagagtttataggctttgttctgttattgctgtgttggttgcctgaaattggattcaacagcgccagctatcaggcatttttttatactatctcagcgtttaataatgccgggtttgccttaaacagcgacagtctcaccccataccaaggcgacattggcattaatttgattattacaggactatttattatcggtgggatcggttttattgttcttattgaccttaaaaataattgccgttggcataaattatcaacaaacagcaaattagttcttaaatcgacccttatcattaatttaatcgctttttttgccatttggttacttgaagcaaataatcccgaaacattggccaatctatcggtaaaaaatcaagctttatccgcttggtttcaagcggtatctcctcgcacggcaggatttaatactgtgccgattgagtcattaagccaaggcagtacggtgctaattttgttactgatgtttattggtggcggctctttaagtactgccagcggattaaagatttcgacgtttgtggtacttatttttgcggtttatcattacttacgtcagcgcgaacaagttcacattatgggccgtacaattgaacaaaccaccatcaacaaatcattttcactatttgcaatatatgtcttagccttgtttttaagtatctttattctttcaatcactgaacatgcaaccttagtcgatgtcgtttttgaagctgtatcggcaatcggcactgtgggtttatctcgtgggcttacatcaaacttatcaagctcaggtgaatgggtcattattgtgctaatgctgatcggacgtttggggcctttaacctttatttatctcatcacgagtccaaaaaagaaatacagctattttgcgacggcacagatcaaagttggttaa

SEQ ID NO: 88257 - protein, 455 aa, Pseudoalteromonas tunicata D2
MTLWDPRYSPYKSKKITSRHKTPLNPPRVLFLGFLFLIFIGAMLLKLTVATTTPISWLQAVFTATSAVTVTGLVLFDTGSQFTVFGQVTIALLIQVGGLGFMTFAILAALSVGARFDIGKQLIAQEAFGQISFDKLIETAKYVFFFSLVIEFIGFVLLLLCWLPEIGFNSASYQAFFYTISAFNNAGFALNSDSLTPYQGDIGINLIITGLFIIGGIGFIVLIDLKNNCRWHKLSTNSKLVLKSTLIINLIAFFAIWLLEANNPETLANLSVKNQALSAWFQAVSPRTAGFNTVPIESLSQGSTVLILLLMFIGGGSLSTASGLKISTFVVLIFAVYHYLRQREQVHIMGRTIEQTTINKSFSLFAIYVLALFLSIFILSITEHATLVDVVFEAVSAIGTVGLSRGLTSNLSSSGEWVIIVLMLIGRLGPLTFIYLITSPKKKYSYFATAQIKVG

SEQ ID NO: 88258 - DNA, 1368 bp, Photobacterium sp. SKA34
  CDS (1)..(1368): transl_table=11
atgagtttcattccaaacaggggcatgtatgtccctatcaaaactgacaaccgtaagaaaagatggtctgaacctaagatcatcattcttagttttttagccattttaataccagcagcaatcctacttacattaccggcattttcagtttcagggctgagttttgttgatgccctatttactgcgacctctgcaatcagtgtaactggtttaggtgtagttgatacaggctcacatttttctattagtggtaaagtattattaatgctactcatgcaaattggcggtttaggacaaatgacattgtctgccgttttactttacatgtttggcttgcggttaagtcttcgtcaacaagcattaacgaaagaacaattaggacaagataaattcacaaatattcgccgccttgtaaaacacatcattatttttgtgcttatttgtgaattgatcggtatattttttctgtcgctacgatgggtacctcagatgggttgggagcaaggtttattctttgctgttttccattcaatttcagcctttaacaatgctggtttttctttattctctgatagcttaacgcgttatgttgatgatccactcgttatcattacgatttcatcactattcatattgggtggtttaggctttactgttatctctgacattagacgaaatgctcatcgagggttccactttttatctttgcattcaaaaataatgataattgcaaccccgatcctattatttgtcggtaccataatgatttggcttttagagcaccataatagccatactttagggccacttaatcagtcaggacaatggctagcagcctttttccaatctgctacggcacgtacagccggtttcaacagtatagatattagtcagtttactgaaccaactatgttagtcatgatgttattaatgcttgtaggtgcaggttcaacatctacaggtggtgggattaaggtatcaacctttgtcgtagccgttttggcaacatggtcattcttaaaacaacgtgatcgtgtagtgctatttaagcgcacaatttcaaaccaaacggtgacaaaatcattagctatcattgttgttagtggcattgtacttaccattgcaatgtttgccttaatgatcactgaaaaagcgccgttctatgaggtaatgtttgaaaccatttcagcatttgcaaccgtaggcgttactgctggtttaactgcaaccttatctgaacccggtaaatacatcatgatagtagtcatgattatcggtcgtttaggcccactaaccttggcatacatgttagctcgtcctaaaccaaccttgcttagataccctgaagacaacgtcgctgcaggctaa

SEQ ID NO: 88259 - protein, 455 aa, Photobacterium sp. SKA34
MSFIPNRGMYVPIKTDNRKKRWSEPKIIILSFLAILIPAAILLTLPAFSVSGLSFVDALFTATSAISVTGLGVVDTGSHFSISGKVLLMLLMQIGGLGQMTLSAVLLYMFGLRLSLRQQALTKEQLGQDKFTNIRRLVKHIIIFVLICELIGIFFLSLRWVPQMGWEQGLFFAVFHSISAFNNAGFSLFSDSLTRYVDDPLVIITISSLFILGGLGFTVISDIRRNAHRGFHFLSLHSKIMIIATPILLFVGTIMIWLLEHHNSHTLGPLNQSGQWLAAFFQSATARTAGFNSIDISQFTEPTMLVMMLLMLVGAGSTSTGGGIKVSTFVVAVLATWSFLKQRDRVVLFKRTISNQTVTKSLAIIVVSGIVLTIAMFALMITEKAPFYEVMFETISAFATVGVTAGLTATLSEPGKYIMIVVMIIGRLGPLTLAYMLARPKPTLLRYPEDNVAAG

SEQ ID NO: 88260 - DNA, 1341 bp, Desulfitobacterium hafniense DCB-2
  CDS (1)..(1341): transl_table=11
atgatgtttttagggaaattcagagccaattccatacagatgatcgcgcttggttttgccggtatcatattgataggaacgcttcttctatcgctccccgccgccagcagggacggagcttctctcccgtttatcgatgctttgtttacttccgcttccgccacctgcgtgacagggttggttgtgcatgatacatatacgcaattcagcctgttcggccagatcgtgatcttatgcctgattcaaatcggcggattgggttttatgacggtggctactctctttttgatgatggcccggcgcaagatcggtcttgcggaacggggtgttttgacggagtcggtcagcgcttttcaaataggcggtattgtgcgattgattcgacgcataatcatctgtactgcgatagttgagggcatgggtgcgatattgttggctattcgcttttgtcctcagatgggtgtagcgacaggcgtttattatgccgtattccattcgatatccgccttttgcaatgcgggctttgacctgatgggaagatttgccccatacacatctctgataccttatcagagcgatgtgctggtcaatctgacgattatgacgctgatcgtcatcggcggacttgggtttgtggtctgggatgatatcatggagcacaagctgcgttacgtacgctataagcttcataccaagattgttctgctgtcgacggcgtttttaattatcggcggcgcaattctgttctatgccatggaacagggcaacgtgctcgcggcgatgcacccgatcgataagctgctggcctcgctcttccaatcgatcacgccaagaacagccggttttaacacggtggatactgctgcgttaactgaaggcggcacggttttgtccatgctgctgatgttaatcggagcatctcccggttctacaggcggcggtatcaagacgaccaccatcatggtcatcttgctggcgacgatatcctacatcaggaatacggacgacatcaatattttccacaggagattggagaacaatacgatcaaacgggcctattgcagtacgacaatatacattatgttatcgattttgggcatatttttgctcattactacgcagggattgcctgtgaaagatgcggcttttgaaacgctgtcggcccttggcacggtagggctgtccacagggatcacacgagaattggatacgctgtcacgcatggtcatcatactgctcatgtacagcgggcgcgtaggcagcctgacattgttaatggctgtaatgatgggaacgaaatcgaagcttagaaatccggaagaaaagattatcatcggctag

SEQ ID NO: 88261 - protein, 446 aa, Desulfitobacterium hafniense DCB-2
MMFLGKFRANSIQMIALGFAGIILIGTLLLSLPAASRDGASLPFIDALFTSASATCVTGLVVHDTYTQFSLFGQIVILCLIQIGGLGFMTVATLFLMMARRKIGLAERGVLTESVSAFQIGGIVRLIRRIIICTAIVEGMGAILLAIRFCPQMGVATGVYYAVFHSISAFCNAGFDLMGRFAPYTSLIPYQSDVLVNLTIMTLIVIGGLGFVVWDDIMEHKLRYVRYKLHTKIVLLSTAFLIIGGAILFYAMEQGNVLAAMHPIDKLLASLFQSITPRTAGFNTVDTAALTEGGTVLSMLLMLIGASPGSTGGGIKTTTIMVILLATISYIRNTDDINIFHRRLENNTIKRAYCSTTIYIMLSILGIFLLITTQGLPVKDAAFETLSALGTVGLSTGITRELDTLSRMVIILLMYSGRVGSLTLLMAVMMGTKSKLRNPEEKIIIG

SEQ ID NO: 88262 - DNA, 23 bp, Artificial sequence
  primer
atgactatttcccgtaccatttg

SEQ ID NO: 88263 - DNA, 21 bp, Artificial sequence
  primer
ttagcctaccagcaaattttc

SEQ ID NO: 88264 - protein, 456 aa, Artificial sequence
  consensus sequence
  Variant (2)..(7): Xaa in position 2 to 7 is any amino acid
  Variant (9)..(10): Xaa in position 9 to 10 is any amino acid
  Variant (13)..(13): Xaa in position 13 is any amino acid
  Variant (14)..(14): Xaa in position 14 is any or no amino acid
  Variant (16)..(26): Xaa in position 16 to 26 is any amino acid
  Variant (27)..(31): Xaa in position 27 to 31 is any or no amino acid
  Variant (35)..(36): Xaa in position 35 to 36 is any amino acid
  Variant (39)..(40): Xaa in position 39 to 40 is any amino acid
  Variant (45)..(47): Xaa in position 45 to 47 is any amino acid
  Variant (49)..(55): Xaa in position 49 to 55 is any amino acid
  Variant (56)..(56): Xaa in position 56 is any or no amino acid
  Variant (58)..(63): Xaa in position 58 to 63 is any amino acid
  Variant (65)..(65): Xaa in position 65 is any amino acid
  Variant (67)..(67): Xaa in position 67 is any amino acid
  Variant (72)..(72): Xaa in position 72 is any amino acid
  Variant (74)..(121): Xaa in position 74 to 121 is any amino acid
  Variant (122)..(122): Xaa in position 122 is any or no amino acid
  Variant (124)..(125): Xaa in position 124 to 125 is any amino acid
  Variant (127)..(129): Xaa in position 127 to 129 is any amino acid
  Variant (131)..(144): Xaa in position 131 to 144 is any amino acid
  Variant (145)..(150): Xaa in position 145 to 150 is any or no amino acid
  Variant (153)..(154): Xaa in position 153 to 154 is any amino acid
  Variant (158)..(158): Xaa in position 158 is any amino acid
  Variant (163)..(168): Xaa in position 163 to 168 is any amino acid
  Variant (169)..(174): Xaa in position 169 to 174 is any or no amino acid
  Variant (176)..(190): Xaa in position 176 to 190 is any amino acid
  Variant (192)..(194): Xaa in position 192 to 194 is any amino acid
  Variant (197)..(197): Xaa in position 197 is any amino acid
  Variant (199)..(200): Xaa in position 199 to 200 is any amino acid
  Variant (202)..(227): Xaa in position 202 to 227 is any amino acid
  Variant (228)..(250): Xaa in position 228 to 250 is any or no amino acid
  Variant (252)..(254): Xaa in position 252 to 254 is any amino acid
  Variant (256)..(262): Xaa in position 256 to 262 is any amino acid
  Variant (264)..(279): Xaa in position 264 to 279 is any amino acid
  Variant (280)..(284): Xaa in position 280 to 284 is any or no amino acid
  Variant (286)..(290): Xaa in position 286 to 290 is any amino acid
  Variant (292)..(292): Xaa in position 292 is any amino acid
  Variant (297)..(314): Xaa in position 297 to 314 is any amino acid
  Variant (315)..(316): Xaa in position 315 to 316 is any or no amino acid
  Variant (319)..(319): Xaa in position 319 is any amino acid
  Variant (322)..(326): Xaa in position 322 to 326 is any amino acid
  Variant (328)..(328): Xaa in position 328 is any amino acid
  Variant (331)..(331): Xaa in position 331 is any amino acid
  Variant (333)..(333): Xaa in position 333 is any amino acid
  Variant (336)..(356): Xaa in position 336 to 356 is any amino acid
  Variant (357)..(357): Xaa in position 357 is any or no amino acid
  Variant (359)..(398): Xaa in position 359 to 398 is any amino acid
  Variant (399)..(408): Xaa in position 399 to 408 is any or no amino acid
  Variant (411)..(412): Xaa in position 411 to 412 is any amino acid
  Variant (415)..(416): Xaa in position 415 to 416 is any amino acid
  Variant (421)..(422): Xaa in position 421 to 422 is any amino acid
  Variant (424)..(424): Xaa in position 424 is any amino acid
  Variant (425)..(430): Xaa in position 425 to 430 is any or no amino acid
  Variant (432)..(433): Xaa in position 432 to 433 is any amino acid
  Variant (435)..(445): Xaa in position 435 to 445 is any amino acid
  Variant (446)..(449): Xaa in position 446 to 449 is any or no amino acid
  Variant (451)..(452): Xaa in position 451 to 452 is any amino acid
  Variant (455)..(455): Xaa in position 455 is any amino acid
FXXXXXXGXXLLXXPXXXXXXXXXXXXXXXXLFTXXSAXXVTGLXXXDXXXXXXXXGXXXXXXLXQXGGLGXMXXXXXXXXXXXXXXXXXXXXXXXXXXXXXXXXXXXXXXXXXXXXXXXXXEXXGXXXLXXXXXXXXXXXXXXXXXXXXFHXXSAFXNAGFXXXXXXXXXXXXLXXXXXXXXXXXXXXXLXXXGGXGXXVXXXXXXXXXXXXXXXXXXXXXXXXXXXXXXXXXXXXXXXXXXXXXXXXXLXXXGXXXXXXXEXXXXXXXXXXXXXXXXXXXXXFXXXXXRXTAGFXXXXXXXXXXXXXXXXXXXXLMXIGXXXXXTXGGXKXTTXXXXXXXXXXXXXXXXXXXXXXRXXXXXXXXXXXXXXXXXXXXXXXXXXXXXXXXXXXXXXXXXXXXXXXXXXFEXXSAXXTVGLXXGXXXXXXXTXXLXXXXXXXXXXXXXXXMXXGRXG

SEQ ID NO: 88265 - protein, 13 aa, Artificial sequence
  protein pattern
  Variant (2)..(2): Xaa in position 2 is any amino acid
  Variant (3)..(3): Xaa in position 3 is Ala, Ser or Thr
  Variant (4)..(4): Xaa in position 4 is Ile or Val
  Variant (7)..(7): Xaa in position 7 is Phe, Trp or Tyr
  Variant (8)..(8): Xaa in position 8 is Cys or Asn
  Variant (9)..(9): Xaa in position 9 is Asn or Thr
  Variant (10)..(10): Xaa in position 10 is Ala, Gly or Ser
  Variant (13)..(13): Xaa in position 13 is Ala, Asp, Gly, Ser, Thr or Val
FXXXSAXXXXGFX

SEQ ID NO: 88266 - protein, 19 aa, Artificial sequence
  protein pattern
  Variant (3)..(3): Xaa in position 3 is any amino acid
  Variant (4)..(4): Xaa in position 4 is Ile or Val
  Variant (6)..(6): Xaa in position 6 is Ala, Gly or Thr
  Variant (7)..(7): Xaa in position 7 is Ala, Gly, Ser or Thr
  Variant (8)..(8): Xaa in position 8 is Pro or Ser
  Variant (9)..(9): Xaa in position 9 is any amino acid
  Variant (10)..(10): Xaa in position 10 is Gly or Ser
  Variant (11)..(11): Xaa in position 11 is Ala, Cys or Thr
  Variant (12)..(12): Xaa in position 12 is Ala or Gly
  Variant (13)..(13): Xaa in position 13 is Gly or Ser
  Variant (15)..(15): Xaa in position 15 is Ile, Leu, Met or Val
  Variant (17)..(18): Xaa in position 17 to 18 is any or no amino acid
LMXXGXXXXXXXXGXKXXT

SEQ ID NO: 88267 - protein, 15 aa, Artificial sequence
  protein pattern
  Variant (2)..(4): Xaa in position 2 to 4 is any amino acid
  Variant (5)..(5): Xaa in position 5 is Ile, Leu, Met or Val
  Variant (6)..(7): Xaa in position 6 to 7 is any amino acid
  Variant (8)..(8): Xaa in position 8 is Phe, Ile or Leu
  Variant (9)..(9): Xaa in position 9 is any amino acid
  Variant (11)..(11): Xaa in position 11 is any amino acid
  Variant (14)..(14): Xaa in position 14 is Phe, Ile or Leu
GXXXXXXXXQXGGXG

SEQ ID NO: 88268 - protein, 14 aa, Artificial sequence
  protein pattern
  Variant (3)..(4): Xaa in position 3 to 4 is any or no amino acid
  Variant (6)..(7): Xaa in position 6 to 7 is any or no amino acid
  Variant (9)..(9): Xaa in position 9 is any amino acid
  Variant (10)..(10): Xaa in position 10 is Cys, Ser or Thr
  Variant (11)..(11): Xaa in position 11 is Ile, Leu, Met or Val
FTXXSXXAXXXTGL

SEQ ID NO: 88269 - protein, 19 aa, Artificial sequence
  protein pattern
  Variant (2)..(2): Xaa in position 2 is Glu or Thr
  Variant (3)..(3): Xaa in position 3 is Ala, Cys, Thr or Val
  Variant (4)..(4): Xaa in position 4 is any amino acid
  Variant (7)..(7): Xaa in position 7 is any amino acid
  Variant (8)..(8): Xaa in position 8 is Ala, Cys, Gly or Ser
  Variant (12)..(15): Xaa in position 12 to 15 is any or no amino acid
  Variant (17)..(17): Xaa in position 17 is Ala, Asp, Gly, Ser or Thr
  Variant (18)..(18): Xaa in position 18 is any amino acid
  Variant (19)..(19): Xaa in position 19 is Asp, Glu, Gly, Asn or Thr
FXXXSAXXTVGXXXXLXXX

SEQ ID NO: 88270 - protein, 14 aa, Artificial sequence
  protein pattern
  Variant (2)..(2): Xaa in position 2 is Phe, Ile or Val
  Variant (3)..(3): Xaa in position 3 is Phe, Ile, Leu or Val
  Variant (4)..(4): Xaa in position 4 is any amino acid
  Variant (7)..(7): Xaa in position 7 is Phe, Ile, Leu or Met
  Variant (9)..(9): Xaa in position 9 is Phe, His, Trp or Tyr
  Variant (10)..(10): Xaa in position 10 is any amino acid
  Variant (12)..(13): Xaa in position 12 to 13 is any amino acid
  Variant (14)..(14): Xaa in position 14 is Asp, Glu or Asn
LXXXGGXGXXVXXX

SEQ ID NO: 88271 - DNA, 864 bp, Synechocystis sp.
  CDS (1)..(864): transl_table=11
atgcgccaacgctacatttgttcggcccaggaaaatttggccagtttgggggtaaaggccggccaaaaagccctggccatggcgggactacaaccggaagacctggatttaattattctggccacctccacccccgatgatttatttggcactgcagcccaaattcaagggggattgggggccaccagagcctttgcctttgacataacggcggcctgttctggttttgtggtggggttgaacgtagcagcccaatttttacgcaccggggtttaccaaagggttttaatagtgggaggggatgtactttcccgttgggtggactggtcggaccgcaccacctgtgtgttattcggtgatggagccggagccgtggtgctacaacgccaagcccaggacaatttgctcgcctttgaaatgtacaccgatggcactggcaatggctgtcttaatttgtcctatcaagcaaaccctcaacctttaacagcagaaaaaaccgttgcccagggcacctatcaagccatcaccatgaacggccgggaagtgtaccgttttgccgtggctaaggtgcccgaaatcatcgaaaaagtactgtttaaagcccagttgaccacctccgacttggactgggtaattcttcaccaagccaatcaacgcattatggatgcggtgggcgatcgcctgggtattccatccgagaaaatcatcagtaatgtaggggaatacggcaacacttcggcagcttccattcccctggctttggatcaagcggtgcgggaagggaaaattaaagagggagacctaatcgccctggccggctttggggccggcttaacctgggctgctagcatagtgcggtggtaa

SEQ ID NO: 88272 - protein, 287 aa, Synechocystis sp.
MRQRYICSAQENLASLGVKAGQKALAMAGLQPEDLDLIILATSTPDDLFGTAAQIQGGLGATRAFAFDITAACSGFVVGLNVAAQFLRTGVYQRVLIVGGDVLSRWVDWSDRTTCVLFGDGAGAVVLQRQAQDNLLAFEMYTDGTGNGCLNLSYQANPQPLTAEKTVAQGTYQAITMNGREVYRFAVAKVPEIIEKVLFKAQLTTSDLDWVILHQANQRIMDAVGDRLGIPSEKIISNVGEYGNTSAASIPLALDQAVREGKIKEGDLIALAGFGAGLTWAASIVRW

SEQ ID NO: 88273 - DNA, 1866 bp, Glycine max
  CDS (222)..(1415)
cccacgcgtccgggttggaaaaagcccacacatacccgctcattgccgaagatcattgttggcctcgcttctctctctctgcgatgcattcatttcttcgttcttctccaccatttaatacatattattatactacaaaaacataacctccagaacacatttatatattcccttgttgcatatatactttgttgttgttgttgttgttgttcttcttgtaaatggcgaatgcatctgggttcttcagcccttcggttccccacttcaaagtgagggttaagcctctcaccactgccattggattctccgccaaagtcgtttgcgttggaaacatcgaaggagctgaaaaacatgcttccaccgtttccccttcttcccaatctccaatacccaggcttgtcagcaaagggtgcaagttagttggatgtggctctgctgtgccagctcttcagatttctaatgacgatctttcgaaaatggttgatactaatgatgaatggatatctgttcgcaccgggattcgtagacggcgtgttctttcaggcaaagataacttgacaggtttagcagtagaggcagctaggaaagctcttgagatggcaaaggtagaccctgatgatcttgacctaatattgatgtgcacatctacgccagaggatctttttggtagtgctccacagattcaaaaacaacttggctgcaaagcaaatccattgtcttatgacattacagctgcatgtagtggatttgtgttgggtttaatatcagctgcttgtcacattaggggaggtggatttaataatgttctagttattggggcggatgctctctcacgatatgttgattggacagacagagggacctgtattctttttggggatgctgctggtgctgtactagtacaggcctgcaacagtgaagaagatggtttatttggttttgatttgcatagtgatggcagtggtcaaaggcacttgaatgcttccattaaagaaaatgagtcaaataatgcattggattcaaatggttctgtgtttggctttcctcccaagcagtcctcatattcatgcattcaaatgaacggcaaagaagtctttcgctttgctgtacgatgtgtaccacagtcaattgaatctgcccttgaaaaggctggtctccctgcatctagcattgattggctacttctccatcaggcaaaccagaggattattgacgcagttgccactcggttagaactcccctcagaacgtgtgatatcaaatttggctaattatggtaacacaagtgcagcttccattcccttggctttagatgaagcggttcgaagcggtaaggttaaggcaggccaaactattgcaacggctggcttcggtgctggtcttacttggggttcagcaattcttcgttggggctgaatgcttttctttcacggcagaattgcaaatagagaagaatcagttgcaagtgcagctgtccaaataccccacattcttacacaattgtagaaaatggggtttggggaatttgcaaaaggattgatatcattaacatccagcactccctaaacttgtccctttcttttgtcttaaatttattttgtcttcaatttacattttccttgggcttcctttctcaattaccaatttttctttttccgagtcatgtatttgtcattcagatttattttaaacgaggcttactatttatgtttgtcaatggtacttgtaattaaaaatgcagcatgccaagtgtttgcttgcttgtacttcaaaaaaacttgtcaacaccaagccaccccctttaatttagttatttgtttttggatctaaaaaattaaaatgggaagcaaaaaaaaaaaaaaaaaaa

SEQ ID NO: 88274 - protein, 397 aa, Glycine max
MANASGFFSPSVPHFKVRVKPLTTAIGFSAKVVCVGNIEGAEKHASTVSPSSQSPIPRLVSKGCKLVGCGSAVPALQISNDDLSKMVDTNDEWISVRTGIRRRRVLSGKDNLTGLAVEAARKALEMAKVDPDDLDLILMCTSTPEDLFGSAPQIQKQLGCKANPLSYDITAACSGFVLGLISAACHIRGGGFNNVLVIGADALSRYVDWTDRGTCILFGDAAGAVLVQACNSEEDGLFGFDLHSDGSGQRHLNASIKENESNNALDSNGSVFGFPPKQSSYSCIQMNGKEVFRFAVRCVPQSIESALEKAGLPASSIDWLLLHQANQRIIDAVATRLELPSERVISNLANYGNTSAASIPLALDEAVRSGKVKAGQTIATAGFGAGLTWGSAILRWG

SEQ ID NO: 88275 - DNA, 1215 bp, Brassica napus
  CDS (1)..(1215)
atggcgaatgcatctggatttttcacccatcccgtacccagaaatttgggatctaaaattcacgtgcctgtaggactatcaggaagcggtttttgtgtgagtctctttatatctaaaagagttctctgttcttctgtggaggttgacaaggatgctagcgcctctccttctcgtagcgagtatcaacgtcctttagtttctcgcggttgcaagctaattggatgtggatcagcagttccaagtcttctgatttctaatgatgatctcgctaaaatagttgatactaatgatgaatggattgctactcgtactggtattcgcacccgtcgagttgtatcagccaaagatagcttggttggcttagcagtagaagcagcaaccaaagctcttgaaatggctgaggttgttcctgaagatattgacttagtcttgatgtgtacttccactcctgatgatctgtttggtgctgctccacagattcaaaaggcacttggttgcacaaagaacccattggcttatgatatcacagctgcttgtagtggatttgttttgggtctagtttcagctgattgtcatataagaggaggtggttttaagaatgttttagtgattggagctgattctttatctcggtttgttgattggactgatagaggatcttgcatcctctttggggacgccgctggtgctgttgttgttcaggcatgcgatattgaggatgatgggttatttagtttcgatgtacacagcgatggagatggtcgtaggcatttgaatgcttctattaaagactcccaaaccaatggtgagttgagctccaacggatctgtgttgggagacttccaaccgagacaagcttcatattcttgcattcagatgaatggaaaagaggtctttcgctttgctgtcaaatgtgttcctcaatctattgaatctgctttacaaaaagccggtcttcctgcttctgccatcgactggctcctcctccaccaggcgaaccagagaataatagactctgtggctacaagtctgcatttcccaccagagcgagtcatatcgaatttggctaattacggtaacacgagcgctgcttcgattccgctggctcttgatgaggcagtgagaagcggaaaagttaaaccaggacataccatagcgacatccggttttggagccggtttaacgtggggatcagcaattgtcaagtggggttga

SEQ ID NO: 88276 - protein, 404 aa, Brassica napus
MANASGFFTHPVPRNLGSKIHVPVGLSGSGFCVSLFISKRVLCSSVEVDKDASASPSRSEYQRPLVSRGCKLIGCGSAVPSLLISNDDLAKIVDTNDEWIATRTGIRTRRVVSAKDSLVGLAVEAATKALEMAEVVPEDIDLVLMCTSTPDDLFGAAPQIQKALGCTKNPLAYDITAACSGFVLGLVSADCHIRGGGFKNVLVIGADSLSRFVDWTDRGSCILFGDAAGAVVVQACDIEDDGLFSFDVHSDGDGRRHLNASIKDSQTNGELSSNGSVLGDFQPRQASYSCIQMNGKEVFRFAVKCVPQSIESALQKAGLPASAIDWLLLHQANQRIIDSVATSLHFPPERVISNLANYGNTSAASIPLALDEAVRSGKVKPGHTIATSGFGAGLTWGSAIVKWG

SEQ ID NO: 88277 - DNA, 1793 bp, Zea mays
  CDS (165)..(1370)
atcaccgccgcggcctctatttctcccccatcccccctcgcatgccccgctcgccgccgctacctcctcccgcccctaggtgacggtgactcactgactccctacttccgtcgcccaaatttctatctcactatctccgccgcgagatctccggctgcccgcccatggtcgccgcctccggcctcgcgctgccgcgggtatccgcaccatgcccggtgcgcacgcgtggtggcctccgccccgccttcctccgagtcgcgcagcccgtgacgctgccaccgccccagctccggtgctgcgcgtccaccgtcgacgatggcgtggtgtccgctgcggcttccaagccccgcctccccagggtggttggtatgggttcaaagctcgttggatgtggatcagccatcccaacacttagcgtttcaaatgatgacctttcgaagatagttgaaacatcagatgaatggattgcggctcgaactgggattcgtaacaggcgagttctttcaggagatgaaacattgcggggactctcgatacaagcagctcaaagggcacttgagatggccggagtaaaagctgaagatgtcgacctcgttcttctttgtacatctactccagatgatctgtttggaggtgctgctcaggtgctgtccgaagtggggtgcacaaaagcttttggatttgatattacagctgcttgtagtgggtttttagtcggcttaatcacagctactcgctttatcaaaggcggaggttttcagaatgtcttagtaattggtgcagatgctctttcaaaatacgtggattggacagacagaggtacatgcattctttttggtgatgctgctggtgctgtgttggtacaggcatgcagtgctgatgaagatggcatgcttggtttttgtgttcaaagtgatggcaatggacaaaagcacctaagtgccatagcggctaatgacgagtctatcttgtccaataccaatggtgttccaggatttccgccaaagaaggcaacctactcatgcattcaaatgaacggaaaggaagtttttcgctttgctgtccgatgcgtgccacagtccattgagaaggcactccaagaagctggtttgcctgcctccagtatcgactggttgttgttacatcaagctaatcagcgtattattgatgctgctgccagtagattagatatcccatccgacaaggttatttcaaatcttgctaattacggcaataccagtgcggcatccatcccattagcattggatgaggctgttcgcagtggcaaggtgaagactggtgatattattgccgcatcaggttttggcgctggacttacctggggttcagctattgtcaaatggggctaattattctacgtgagccataacaacatcaatgagatcttcataggccttggggacctacatctatttggtctctccccccttccacccattttctgtgcaacatttttctatcgcatgtgtcggtcttccttgcacatgaaaatctagtgccattttaccgtattcctttggctcattacacaactgagagtagattggtggatgaaaatggttgaattttgcatcgaggatgattgtggtggtactaaagatgagattacactgtaaagttaatgagcctttttgtcagggaattttactgaataagcatgtacaaggagaggtgggccgtggacatatgctgtaggacaattcttagtaattttgttctgcttttattatacacctattgttagtatattttgttcaaaaaaaaaaaaaaaa

SEQ ID NO: 88278 - protein, 401 aa, Zea mays
MVAASGLALPRVSAPCPVRTRGGLRPAFLRVAQPVTLPPPQLRCCASTVDDGVVSAAASKPRLPRVVGMGSKLVGCGSAIPTLSVSNDDLSKIVETSDEWIAARTGIRNRRVLSGDETLRGLSIQAAQRALEMAGVKAEDVDLVLLCTSTPDDLFGGAAQVLSEVGCTKAFGFDITAACSGFLVGLITATRFIKGGGFQNVLVIGADALSKYVDWTDRGTCILFGDAAGAVLVQACSADEDGMLGFCVQSDGNGQKHLSAIAANDESILSNTNGVPGFPPKKATYSCIQMNGKEVFRFAVRCVPQSIEKALQEAGLPASSIDWLLLHQANQRIIDAAASRLDIPSDKVISNLANYGNTSAASIPLALDEAVRSGKVKTGDIIAASGFGAGLTWGSAIVKWG

SEQ ID NO: 88279 - DNA, 1227 bp, Oryza sativa (japonica cultivar-group)
  CDS (1)..(1227)
atggtcaccgcctccggcctcgcgccaccgcggctggcggtctcctgcccgcgtgcggcggggcgcggctgcggcggacaccaccgggttggcttcctccgatccgctcccgtggcgttggcggggcccgcggccgcgcagctccggtgctgcgcctccaccgtcgacgacggcgtcgtctccgccgcggcggcccccaagccccgcctccccagggtcgtcggtatgggttcaaaactcattggatgcggatcggccactccatcgcttagcgtttcaaatgatgacctttctaaaatagttgaaacatcagatgaatggatcgcagcacggactgggattcggaataggcgagttctttcaggaaatgagacactgcgcgagctttcagtacaggcagcaaaaaaagctcttgagatggctcaagtaaatgctgatgatgttgaccttgttctcctttgcacgtctaccccagatgatctgtttggaggtgctgctcaggtgctggcggaggtgggatgcgcaaatgcatttggctttgatatcactgctgcatgtagtgggtttattattggtttaattacggctactcgttttatcaaaggtggaggcatccggaatattctagtaattggtgccgatgctctttcacaatttgtggattggacagacagaggtacatgcatcctctttggtgatgctgctggtgctgttttggttcaggcatgcagtgctgatgaagatggcttgctaggtttttgcgttcaaagtgatggcaacggacaaaagcacttaaattgtgtctcgtcgcatgttgagtctatcctgtcgaagaccaatggtgtccctagcttcccacctaaaaaggcaaccttctccaacattgaaatgaatggaaaggaggtttttcgctttgctgtgcgatgtgtgccacaatctattgagaaggcattggaagaggctggtttacctgcttccagtattgattggttgttgctgcatcaagctaatcagcggattattgatgctgctgccagtaggttggatatcccatctgacaaagttatttcaaatcttgctaattacggaaacaccagtgcggcctcaattccattagcattagatgaggctgttcgagctggcaaggtgaaggcaggcgatgttattgcagcatcaggttttggtgctggacttacatggggttcagctattgtcaaatggtgctaa

SEQ ID NO: 88280 - protein, 408 aa, Oryza sativa (japonica cultivar-group)
MVTASGLAPPRLAVSCPRAAGRGCGGHHRVGFLRSAPVALAGPAAAQLRCCASTVDDGVVSAAAAPKPRLPRVVGMGSKLIGCGSATPSLSVSNDDLSKIVETSDEWIAARTGIRNRRVLSGNETLRELSVQAAKKALEMAQVNADDVDLVLLCTSTPDDLFGGAAQVLAEVGCANAFGFDITAACSGFIIGLITATRFIKGGGIRNILVIGADALSQFVDWTDRGTCILFGDAAGAVLVQACSADEDGLLGFCVQSDGNGQKHLNCVSSHVESILSKTNGVPSFPPKKATFSNIEMNGKEVFRFAVRCVPQSIEKALEEAGLPASSIDWLLLHQANQRIIDAAASRLDIPSDKVISNLANYGNTSAASIPLALDEAVRAGKVKAGDVIAASGFGAGLTWGSAIVKWC

SEQ ID NO: 88281 - DNA, 1140 bp, Deinococcus radiodurans R1
  CDS (1)..(1140): transl_table=11
gtggggagaggcgtgtcctgcgggatgcgcctttttcttttgcgggtgggtagcgcccttgaacccggttcagacagccccattttcctgtcgggcgggccgggcaggtgttacggtcacgtcatgacggcatccctttctgcgcctgccatcggcatcctggcggtgggcgcctacgccccggcggcagtgatcaccaacgcccactacgcgacgcgcctcgacacctccgacgactggatcacctcgcgcaccggcatccgcgagcggcgccacgcggctcccgacgagagcagcagcgtgctcggcatccgggcgacgcaggacctcgccgggcgcttccctggcgccttggacggcgtgaacctggtgatctgcgcgacgagcagccccgacgccatgtttccctccacggcggcgctgatcgccgggggcacgggcctgcgcggggccgccgccttcgacgtgagcgtggcgtgcagcggctttctgtacgccctgagcgtgggctacggcatgatccgggccgggctggcgaaaaaagcattgattgtcggcagcgaggtgatgagcggcgcggtggaccagaacgaccgcaacaccgccatcctcttcggtgacggcgcgggctgcgtggtgatcggggaagtgccgcaaggctacggttttcagtcctttgtgctgggtgccgacagcgcgggcgggccgcacctctacctgcgcggcgcggcgctgcggctgcccgagggcacggaaatggggccgcacctgacgcaaaacgggcgcgaggtcttcaagttcgccgtccgtaccctgggcgacagcgccgagcaggccatgcggcaggcgggcaaaaccactgccgacatcgactggctcgttccccatcaggccaatatccgcatcattgaggccgcctgcgagcgcttcgggctgcctatcgagcgggcggtgaccaatctcgaccgctacggcaacaccagcgcggcgagtattccgctggccctggccgaggcccaggcgcagggccgcttcaaagacggcgaccaactgctgctcgccggtttcggcggtggcctgagctggggagcggcggcgctgaagtggtggagcgggcctactgggaaacagtcgtcctga

SEQ ID NO: 88282 - protein, 379 aa, Deinococcus radiodurans R1
MGRGVSCGMRLFLLRVGSALEPGSDSPIFLSGGPGRCYGHVMTASLSAPAIGILAVGAYAPAAVITNAHYATRLDTSDDWITSRTGIRERRHAAPDESSSVLGIRATQDLAGRFPGALDGVNLVICATSSPDAMFPSTAALIAGGTGLRGAAAFDVSVACSGFLYALSVGYGMIRAGLAKKALIVGSEVMSGAVDQNDRNTAILFGDGAGCVVIGEVPQGYGFQSFVLGADSAGGPHLYLRGAALRLPEGTEMGPHLTQNGREVFKFAVRTLGDSAEQAMRQAGKTTADIDWLVPHQANIRIIEAACERFGLPIERAVTNLDRYGNTSAASIPLALAEAQAQGRFKDGDQLLLAGFGGGLSWGAAALKWWSGPTGKQSS

SEQ ID NO: 88283 - DNA, 1086 bp, Agrobacterium tumefaciens str. C58
  CDS (1)..(1086): transl_table=11
atgaggttgccgggatcgttaccgatgtcgcatcggcaaaatcttacggcgtcggcaaatgaaaatggtgatgtccagaccattgcgaaagtcctgacaatgcagacacgttcttcccgcatggccggttttggtcatgccgttccggcccgttgcgtcgacaatgccgaaatagaggccagtctggggctggaagccgggtggatcgagcgacggaccggcattcgctcccgttattgggcggaggcgggcgacacgctgagcggtcttgccgaaagggctggccggatggcgctggaggatgcgaagatcaatgccgatgacatcgcgctgacgctgcttgccacctccacgccggatcatcttctgccgccttccgcgccactgcttgcgcataggctgggtttgacgcgctcgggtgcgatcgatcttgccggggcctgttccgggtttctttatgcgcttaccctcgcggatggttttgtccgcacctacggccgcgccgtcctcgtcgtcgccgccaatattctcagccgccgcatcaatccggcggaaagggcgagcgccgtcctgtttgccgatgccgccggtgccgtggtgctgaccccgtgtccggaggtgaaacggggggtgttatcggccgatctcgttgccgatggcagcggttacgatctcatccagatcgcggcaggcggcagcagccagcccttttctgccggtatgattgcagaagatgccctgatgacgatgcgcgatggccgggaggttttctctcgcgccgtggcgctgatgacaaacacctctcagcgcgtgctgcatgaggcggaactgaccgcagccgatatcagccgtttcgtgccacatcaggccaatgcccgcatgtccgacgccgtttgcggtaatctcggaatcgagcgggaaaagacggtccgcaccataggaagcttcggcaattcttccgctgctaccatcccgctttcgttgtccatcaccaatgccgagcggccccttgcgggcggcgaaaccctgcttctgacggcggcgggtgcaggcatgacgggcggggcggtggtttatcgcgtctaa

SEQ ID NO: 88284 - protein, 361 aa, Agrobacterium tumefaciens str. C58
MRLPGSLPMSHRQNLTASANENGDVQTIAKVLTMQTRSSRMAGFGHAVPARCVDNAEIEASLGLEAGWIERRTGIRSRYWAEAGDTLSGLAERAGRMALEDAKINADDIALTLLATSTPDHLLPPSAPLLAHRLGLTRSGAIDLAGACSGFLYALTLADGFVRTYGRAVLVVAANILSRRINPAERASAVLFADAAGAVVLTPCPEVKRGVLSADLVADGSGYDLIQIAAGGSSQPFSAGMIAEDALMTMRDGREVFSRAVALMTNTSQRVLHEAELTAADISRFVPHQANARMSDAVCGNLGIEREKTVRTIGSFGNSSAATIPLSLSITNAERPLAGGETLLLTAAGAGMTGGAVVYRV

SEQ ID NO: 88285 - DNA, 987 bp, Agrobacterium tumefaciens str. C58
  CDS (1)..(987): transl_table=11
atgcagacacgttcttcccgcatggccggttttggtcatgccgttccggcccgttgcgtcgacaatgccgaaatagaggccagtctggggctggaagccgggtggatcgagcgacggaccggcattcgctcccgttattgggcggaggcgggcgacacgctgagcggtcttgccgaaagggctggccggatggcgctggaggatgcgaagatcaatgccgatgacatcgcgctgacgctgcttgccacctccacgccggatcatcttctgccgccttccgcgccactgcttgcgcataggctgggtttgacgcgctcgggtgcgatcgatcttgccggggcctgttccgggtttctttatgcgcttaccctcgcggatggttttgtccgcacctacggccgcgccgtcctcgtcgtcgccgccaatattctcagccgccgcatcaatccggcggaaagggcgagcgccgtcctgtttgccgatgccgccggtgccgtggtgctgaccccgtgtccggaggtgaaacggggggtgttatcggccgatctcgttgccgatggcagcggttacgatctcatccagatcgcggcaggcggcagcagccagcccttttctgccggtatgattgcagaagatgccctgatgacgatgcgcgatggccgggaggttttctctcgcgccgtggcgctgatgacaaacacctctcagcgcgtgctgcatgaggcggaactgaccgcagccgatatcagccgtttcgtgccacatcaggccaatgcccgcatgtccgacgccgtttgcggtaatctcggaatcgagcgggaaaagacggtccgcaccataggaagcttcggcaattcttccgctgctaccatcccgctttcgttgtccatcaccaatgccgagcggccccttgcgggcggcgaaaccctgcttctgacggcggcgggtgcaggcatgacgggcggggcggtggtttatcgcgtctaa

SEQ ID NO: 88286 - protein, 328 aa, Agrobacterium tumefaciens str. C58
MQTRSSRMAGFGHAVPARCVDNAEIEASLGLEAGWIERRTGIRSRYWAEAGDTLSGLAERAGRMALEDAKINADDIALTLLATSTPDHLLPPSAPLLAHRLGLTRSGAIDLAGACSGFLYALTLADGFVRTYGRAVLVVAANILSRRINPAERASAVLFADAAGAVVLTPCPEVKRGVLSADLVADGSGYDLIQIAAGGSSQPFSAGMIAEDALMTMRDGREVFSRAVALMTNTSQRVLHEAELTAADISRFVPHQANARMSDAVCGNLGIEREKTVRTIGSFGNSSAATIPLSLSITNAERPLAGGETLLLTAAGAGMTGGAVVYRV

SEQ ID NO: 88287 - DNA, 930 bp, Pseudomonas putida KT2440
  CDS (1)..(930): transl_table=11
atgattggcatcaaaagcattgcgagttacgtgcccaccgctggcctggacaactacgttcagggtgcgaagttcggcaaggacgaagagttcatgttcggcaagatcggtgcgtcgttcctgccgcgcaaggccgaagagcaagaaacctccgacttgtgcgtagaggccgcccaggcactgttcgccagcaaccccgaccttgatccgcaatcgatcgatgcgttgatcgtggtcacccagaacggcgacgaagaaggtctgccgcacaccgcagccatcgtccagagcaaacttggcctgtctacccgcgtggcggcgttcgacgtgtcgcttggctgctccggctatgtgtatggcctgtatgcgatcaaaggcttcatggaggcggcaggcctgaagaacggcctgctgatcaccgccgacccgtattcgaagatcgtcgacccggaagaccgcaacaccaccatgctgttcggcgacgccgccacggcaacctggatgggtgaaaacgcggtttggaacctgggccaggcgcgtttcggcactgacggttccggtgccgagcacctgaaagtcagtgacggcaagttcttcatgaacggccgccaggtattcaacttcgccctgatcaaggtgccagcgcacctgcacgagctgctggatgccagcggcctgaagtcgtcggatatcgacgccttctgcatccaccagggcagtgcggcgattgtcgacgccgtggcgcgacgctttgaagagcaacacccggagaagttcgtcaaggacatgctggaaaccggcaatacggtgtcctccagtgttccgctgctgctgcagaagcacatgctcgatggcagctggaagcgcgtggcgatcagtggctttggcgtgggcctgtcgtggggctcggccatcctgtaccgcgactga

SEQ ID NO: 88288 - protein, 309 aa, Pseudomonas putida KT2440
MIGIKSIASYVPTAGLDNYVQGAKFGKDEEFMFGKIGASFLPRKAEEQETSDLCVEAAQALFASNPDLDPQSIDALIVVTQNGDEEGLPHTAAIVQSKLGLSTRVAAFDVSLGCSGYVYGLYAIKGFMEAAGLKNGLLITADPYSKIVDPEDRNTTMLFGDAATATWMGENAVWNLGQARFGTDGSGAEHLKVSDGKFFMNGRQVFNFALIKVPAHLHELLDASGLKSSDIDAFCIHQGSAAIVDAVARRFEEQHPEKFVKDMLETGNTVSSSVPLLLQKHMLDGSWKRVAISGFGVGLSWGSAILYRD

SEQ ID NO: 88289 - DNA, 1179 bp, Rhodopirellula baltica SH 1
  CDS (1)..(1179): transl_table=11
atgatcgaaacttcctcgaacgtcaccgccaatgacttggccgcgaaatctgtgaacgaagaatcctccgctgaatcgactgctgttccaaccgaagctgtttcggcagtgatgccgggcaatgcgacaactcgcggtcggatgggaaatttgaaaggcgttcgcattgccggcacgggatcgtacgttcccgaacgcattgtcacgaatgaagacttggccgctctgggttgcgacagcgattggatcgttcgccgcaccggcatcttgcaacgtcgacacgcggagcctgggcaagcgaccagcgatctttgttacgaggcggcgcttcgttgtcttgagaacgcgaatgtttcggtcgacgagattgacttgatcctggttgccacgatcacacccgaccatcccactccatcgacggcttgtcacttgcaacgtcgtctcggtgcggttgcacccgcaatggacatcggtgctgcgtgtgctggattcatgtacgcgttggtcactggtgcccagttcgtttccaacggcaatgctcgcaacgttttggtcatcggtgctgacctgatgagtcgcacggtggatcctgaggacaagaaaacctatccgttgtttggtgatgccgctggcgcagccctgctggtgccatcgacccaagacgaatgccaatcaacagaatgcaacggttcagcagctgattccacgatccaaaccgatggtcttttggcctatcagttaggcagtgaaggatgcggtggcgaaatgctgtgcattcctgcgggcggatcccgaacgccaattaccaccgatggcgaagactcagccagccgttatttgcagatggatggtcgtggtgtcttcaagtgggcagtgcgagtctttgacgagagtgccaaggacgtcttgcgagcggccaacgtttcttcggatcaactcagcttggttgtgttgcaccaagccaatcaacgaatcattgattcagcggtttccgacttgaacgttccgcctgaaaaagtgttcgtcaatctcgacaagtatggcaatacctccggagccagcattccactcgccctggacgaagccgctcgagccggccgtttgaaagaaggcgatctagtgctgctgtgcggcttcggtgcaggtttggcctggggcaccgcgctgtttcgttggtag

SEQ ID NO: 88290 - protein, 392 aa, Rhodopirellula baltica SH 1
MIETSSNVTANDLAAKSVNEESSAESTAVPTEAVSAVMPGNATTRGRMGNLKGVRIAGTGSYVPERIVTNEDLAALGCDSDWIVRRTGILQRRHAEPGQATSDLCYEAALRCLENANVSVDEIDLILVATITPDHPTPSTACHLQRRLGAVAPAMDIGAACAGFMYALVTGAQFVSNGNARNVLVIGADLMSRTVDPEDKKTYPLFGDAAGAALLVPSTQDECQSTECNGSAADSTIQTDGLLAYQLGSEGCGGEMLCIPAGGSRTPITTDGEDSASRYLQMDGRGVFKWAVRVFDESAKDVLRAANVSSDQLSLVVLHQANQRIIDSAVSDLNVPPEKVFVNLDKYGNTSGASIPLALDEAARAGRLKEGDLVLLCGFGAGLAWGTALFRW

SEQ ID NO: 88291 - DNA, 1017 bp, Synechococcus sp. WH 8102
  CDS (1)..(1017): transl_table=11
ttggtcgagcagctccacaggaccggcggtgtgatgttccgtggcagcggtagcgctactccacagcgttccatcagcaacactgagctgggacaacgggtggaaaccagcgatgactggatccgcagtcgcaccggcatcgcagcccgacgtgtcatcggggccgacgaaagcctgggtgaactgagcggccttgcggcagaacgtgcactggccatggcgggatggtcggcggacagcctggatctgatcctgctggccacctccacacccgatgatctgttcggatccgcaccgcggctgcaggcccgcatcggtgcggtgaacgccgcggccttcgatctcactgccgcctgcagcggttttctgttcgcagtggtcacggcggcccagtacctgcgcagcggggcgatgcaacggatcctggtggtgggcgccgaccagctcagtcgctgggtcgactgggacgaccgccgctcctgtgtgctgttcggggatgccgccggtgccgtggtgatggaagcctccgatgagcaggacgacctccaggggttcctgctgcgctccgatggcggccgcggtgcggtgttgcagctgccccagagcagcgaacgagcacctctggtgggcgatgccagccatcagcgcggtggctttgagccaattcagatgaacggacaggaggtctacaaattcgccgtacgggaagtgccggcgattttggaagcgctgctgcagaaaaccgagacccaagcggattccctcgactggctgttgttgcatcaggccaaccaacgcatcctcgatgccgtggctgagcggttctcgattccgaacgaaaaggtcctgagcaacctggcccactacggcaacacgtcagccgccaccatccccttgatgctggatgaagcggtgcgggacggacggatcgaaccgggccaccgcatcgccagcagcggcttcggcgcaggactgagctggggtgcagccctgctgcgttggagcgggcccgcgtaa

SEQ ID NO: 88292 - protein, 338 aa, Synechococcus sp. WH 8102
MVEQLHRTGGVMFRGSGSATPQRSISNTELGQRVETSDDWIRSRTGIAARRVIGADESLGELSGLAAERALAMAGWSADSLDLILLATSTPDDLFGSAPRLQARIGAVNAAAFDLTAACSGFLFAVVTAAQYLRSGAMQRILVVGADQLSRWVDWDDRRSCVLFGDAAGAVVMEASDEQDDLQGFLLRSDGGRGAVLQLPQSSERAPLVGDASHQRGGFEPIQMNGQEVYKFAVREVPAILEALLQKTETQADSLDWLLLHQANQRILDAVAERFSIPNEKVLSNLAHYGNTSAATIPLMLDEAVRDGRIEPGHRIASSGFGAGLSWGAALLRWSGPA

SEQ ID NO: 88293 - DNA, 993 bp, Wolinella succinogenes DSM 1740
  CDS (1)..(993): transl_table=11
ttgtacgcatcactccgctccataggagcttatataccccagaaagccttcaccaatgccgatatggagaagatggtggagaccagcgatgagtggattaaaaagcgcacgggaatcaagacgcgccattttgctgaggccaacgaggctacaagcgatctagcgaccaaggcggccaaagtcgccatggagcgcgctggtgtgaagcctgaagagattgatatgctcatcacggcgaccatctctcctgattacctctgtatgccctccactgcctgtgtgatcgcgcacaatttggggatagaggacaagcctgctttcgacatttcagcggcttgcagtgggttcatctatctcctctctatcgccaaagcctacattgaatcgggcatggccaagacgattttagtgattggggcagagaagctgagcgccatcactgactttaccgatcgaagcacctgtgtgctctttggcgatggagcaggagccgcgattattggggtgacagactccaaagaagaggcgattctagatgtcaatattgcagccaatggcaaatatcaagacttcctgatgacacctggctgtggaagtcgccatcccgcttcccaagaggtgatcgaccagcgattgcagttcatgaagatgaaaggcaatgagacctttaagttggcggttaagaccctctctaatgatgtcaaagagattttggagcgcaatcatctcacctccaaagagattcaccactttatccctcatcaagccaactatcgtattattaaagcagtgggtgatcttttggatttcacgcccgagcagatcgctatcacagtggatcgcttcggaaacacttccgccgcctcgattcccatggcgatgaacgctctttatgaagaggggcgactcaaaaatggagagaaggttcttctagatgcttttgggggcgggctcacttgggggtcggcgattctcaccttctgcggtcgctag

SEQ ID NO: 88294 - protein, 330 aa, Wolinella succinogenes DSM 1740
MYASLRSIGAYIPQKAFTNADMEKMVETSDEWIKKRTGIKTRHFAEANEATSDLATKAAKVAMERAGVKPEEIDMLITATISPDYLCMPSTACVIAHNLGIEDKPAFDISAACSGFIYLLSIAKAYIESGMAKTILVIGAEKLSAITDFTDRSTCVLFGDGAGAAIIGVTDSKEEAILDVNIAANGKYQDFLMTPGCGSRHPASQEVIDQRLQFMKMKGNETFKLAVKTLSNDVKEILERNHLTSKEIHHFIPHQANYRIIKAVGDLLDFTPEQIAITVDRFGNTSAASIPMAMNALYEEGRLKNGEKVLLDAFGGGLTWGSAILTFCGR

SEQ ID NO: 88295 - DNA, 996 bp, Bdellovibrio bacteriovorus HD100
  CDS (1)..(996): transl_table=11
atggcaggaatgtatcgatctcgagtttcagggataggctcctatctaccggaaaagattctttcaaataaggatctggaaaaaatggtagaaaccaacgatcagtggatcgttgaaagaaccgggatcgaacgccgccatatcgcctctgaagatcaggccacttctgatctttgtgtcatcgccgccaagcgcgctctggaagacgctaatcttaaagtcgaagatatcgatatgattctggtgggcaccgtcactggtgaccatcagatgccgtccactgcgtgctttgtccaagcgaaacttggagcaaaaaacatcatggctgtggatttgaacgcagcttgctccggcttcctttacggcgtcagcattgccgaccaattcatccgcacaggcatgtataaaaacatcctggttatcggtgcggaagtcctttcccgctacatgaactacaaagaccgcgaaacctgcattcttttcggagacggtgctggtgcgtgggtcatgtcccgtgcagccgaaggccagacaaacgttattgaaagctctcacctgcgtgccgacggcactctggcggatcttctgatccttccagccggtggcagcaaaatcccgcaatctcacgaggctatcgacaaaggtctgaacttcatgaccatgaagggccgtgatatcttcaagaacgcggttcgcacgatggcgtcctgttgccaggaggctctggagcacaacaaggttgcacctgaacaggtcgactggattgttcctcaccaggccaacaagcgcattattgaagcggttgctgatcaatttaaattcccaatggaacgcgtgattgtctaccttcaggaaactggtaacacatccgctgcttccatccctcttgcattcgattgggctgttaaaaacggcaagatcaaacggggtcagactattttgcttaccgccttcggtgcaggtcttacttccggcagtattctattgaggtactaa

SEQ ID NO: 88296 - protein, 331 aa, Bdellovibrio bacteriovorus HD100
MAGMYRSRVSGIGSYLPEKILSNKDLEKMVETNDQWIVERTGIERRHIASEDQATSDLCVIAAKRALEDANLKVEDIDMILVGTVTGDHQMPSTACFVQAKLGAKNIMAVDLNAACSGFLYGVSIADQFIRTGMYKNILVIGAEVLSRYMNYKDRETCILFGDGAGAWVMSRAAEGQTNVIESSHLRADGTLADLLILPAGGSKIPQSHEAIDKGLNFMTMKGRDIFKNAVRTMASCCQEALEHNKVAPEQVDWIVPHQANKRIIEAVADQFKFPMERVIVYLQETGNTSAASIPLAFDWAVKNGKIKRGQTILLTAFGAGLTSGSILLRY

SEQ ID NO: 88297 - DNA, 933 bp, Bacillus cereus ATCC 10987
  CDS (1)..(933): transl_table=11
gtgaacgtgggcattttagggatcggaagatatgtgccggaaaaagtagtcacaaatcacgatttagagaaaataatggatacatccgatgaatggattcgtacgagaacaggtattgcggaaagacgcattgccgatgatacaatagatacttcatatatggccgtagaggcctctaaaaaagcacttgaagatgcagggattagcggagaggatatcgatcttattttagtagcaacagtaacgccagatcgtgcttttccagcagtagcttgtgttattcaagaagcgattggcgcaaaacatgcagctgcaatggatttaagtgcagcgtgtgctggttttatgtacggaatgattacagcgcagcaatttattcaaacgggaacttataaaaatatactagtagttggtagtgataaactatctaaaattgtagactggaacgatcgaaatacagcagtactatttggagacggagctggtgcgatcgtaatgggagctgtttcagaaggtaaaggtgttctatctttcgaattaggagcggacggaagtggcggtaagcatctttatcaagacgagtatgttatgatgaatggcagagaagtctttaaatttgccgttcgtcaacttggggattcttgtcttcgcgttttagataaagcgggtcttacgaaagaagatgtggatttcttagtaccgcatcaagcgaacattcgtattatggaatctgcaagagagagattaaatttaccacaagaaaaaatgagtatgacaattgagaagttcggtaatacatcagcttcttccattccgattgcgatggtagaggaattgcaaaacggacgtattcaagatggtgatttaattatacttgttggttttggcggcggattaacatggggagcagtcgctcttcgttggggtaaataa

SEQ ID NO: 88298 - protein, 310 aa, Bacillus cereus ATCC 10987
MNVGILGIGRYVPEKVVTNHDLEKIMDTSDEWIRTRTGIAERRIADDTIDTSYMAVEASKKALEDAGISGEDIDLILVATVTPDRAFPAVACVIQEAIGAKHAAAMDLSAACAGFMYGMITAQQFIQTGTYKNILVVGSDKLSKIVDWNDRNTAVLFGDGAGAIVMGAVSEGKGVLSFELGADGSGGKHLYQDEYVMMNGREVFKFAVRQLGDSCLRVLDKAGLTKEDVDFLVPHQANIRIMESARERLNLPQEKMSMTIEKFGNTSASSIPIAMVEELQNGRIQDGDLIILVGFGGGLTWGAVALRWGK

SEQ ID NO: 88299 - DNA, 978 bp, Prochlorococcus marinus str. AS9601
  CDS (1)..(978): transl_table=11
gtgtcattcaagggaagtggaagttatgtacctgatcaaatcctaaccaatcaaaaaattagtcaaaaggttgatacaagcaatgaatggatacaatctagaactggtatttctgagagaagaatctcgagcgtagaagataatgttactgagatgggctataaggctgctctaactgctatagaaatggctaattgggatattaaaacgattgatttgattgttttagctacttctactcctcatgatttatttggatcagctccatccattcaagctaaattaggggcagctaatgctgtagctttcgatttaactgcagcttgtagtggctttttatttgccttaataacagcctcacaatttttaaaagggggtagttttaaaagggctattgttattggagcagatcaattatcaagttttgttgattggaatgatagaagaagttgtattctctttggagatggtgccggtgcattagcaattgaagccacaaatgaatttgataattttataggttttgatatgagaactgatggggggaggggttcttttcttaatcttccatcaataaataataaggattcaatagttgatgaaattgactttttaagtggaggtttttctccaattcagatgaatggtcaggaagtttataaattcgcagttaaagaagttcccctaattcttcaaaagttgttgaaaaaaatgaaatataattctgatcaagttgattggctcttgttgcatcaagctaatcaaagaatattggattctgtaggagaaaggttaaaaattcccagagaaaagattcttagcaatttagaaaaatatggcaatacgtcagcagcaacaattccactaatgatggatgaggctgtaagagattatagaattaaacaaaatgatattattgctacaagtggtttcggtgctgggctaagttggggtgcagccctaattaaatggggttaa

SEQ ID NO: 88300 - protein, 325 aa, Prochlorococcus marinus str. AS9601
MSFKGSGSYVPDQILTNQKISQKVDTSNEWIQSRTGISERRISSVEDNVTEMGYKAALTAIEMANWDIKTIDLIVLATSTPHDLFGSAPSIQAKLGAANAVAFDLTAACSGFLFALITASQFLKGGSFKRAIVIGADQLSSFVDWNDRRSCILFGDGAGALAIEATNEFDNFIGFDMRTDGGRGSFLNLPSINNKDSIVDEIDFLSGGFSPIQMNGQEVYKFAVKEVPLILQKLLKKMKYNSDQVDWLLLHQANQRILDSVGERLKIPREKILSNLEKYGNTSAATIPLMMDEAVRDYRIKQNDIIATSGFGAGLSWGAALIKWG

SEQ ID NO: 88301 - DNA, 1008 bp, Prochlorococcus marinus str. MIT 9515
  CDS (1)..(1008): transl_table=11
ttggaagtaataaattcaaatcaaattggagtttcatttaaaggcagtggaagttatgtacctcatcaaatcctaacgaatcatgaaattagcaaaaaagtagatactagtgatgaatggataaaatctagaacaggtatctctcagagaagaatctctggattatccgaaaatgttagtgagatgggttataaagcaggattggccgcaattgagatggctaaatgggatattgaaacaattgatctgataattttagctacatcaactccacatgatttatttggttctgctccagaaattcaatcaaaactcggcgcaaataatgctgtggcttttgatttgacagctgcttgcagcggttttttatttgctgtaataacggctactcaatttttaaaagcaggaagttacaggagagctatagtaataggctctgatcaactttcaagttatgtagattggaatgataggagaagttgtatcttatttggagatggagcgggtgcattagcaattgaagctacaaatgaatttgataatttaattggttttagtatgagaactgatggtcagagaggttctttcttaaatcttccatctcaaaaaaataatgatcaaattattgataatattaatttctcaagtgggggtttttctacaattgcgatgaatggacaagaagtatataaatttgcagttagagaggtaccattaattattgataatttatttaaaaaaacaaattttaattctgagaaaattaattggcttctattacatcaagcaaatcaaagaatactagattctgttggagacagattaaatatttcatcagaaaagattctcagtaatttaagtaactatggaaacacttcagcagcaacaattcctttaatgctagatgaggctataagaaataagaaaattaaagaaaatgatattattgccactagtggttttggtgctgggttaagttggggtgcagccctgattcgatggggttaa

SEQ ID NO: 88302 - protein, 335 aa, Prochlorococcus marinus str. MIT 9515
MEVINSNQIGVSFKGSGSYVPHQILTNHEISKKVDTSDEWIKSRTGISQRRISGLSENVSEMGYKAGLAAIEMAKWDIETIDLIILATSTPHDLFGSAPEIQSKLGANNAVAFDLTAACSGFLFAVITATQFLKAGSYRRAIVIGSDQLSSYVDWNDRRSCILFGDGAGALAIEATNEFDNLIGFSMRTDGQRGSFLNLPSQKNNDQIIDNINFSSGGFSTIAMNGQEVYKFAVREVPLIIDNLFKKTNFNSEKINWLLLHQANQRILDSVGDRLNISSEKILSNLSNYGNTSAATIPLMLDEAIRNKKIKENDIIATSGFGAGLSWGAALIRWG

SEQ ID NO: 88303 - DNA, 981 bp, Prochlorococcus marinus str. MIT 9303
  CDS (1)..(981): transl_table=11
gtgggctgcggcagtgccacaccatcccaacggattagcaacgaccaactcggccaaagggttgacaccagcgatgcatggatccgtagccgcactggaatcagtgcccgacgtgttatcggaccggatgaaacgctgacaggcctaagccatcaagctgcagccaacgccctaacaatggctggctgggaatccgaaagtgttgatctgatcatcctggccacatcaactcctgatgatctctttggttcagccccgcaactgcaagccattttgggagctcgccaagcagtggcttttgatctcacagccgcttgtagtggttttctattcgccctaatcactgccgcccagttccttcgcactggtgcgatgcggcgagcactcgtgatcggtgcggaccaactaagccgctgggtcgactgggacgatcgtcgcagttgtgtgctgtttggcgatggagccggcgctgtggctctggaagcaacgagtgctgctcagaacgggctgctgggctttcagttgaaatctgacggcagccgcggcgactgcctcaacctgccgcaagttcaaaactatctatccctggtagcgggcaatagccatcagcaaggcggttttaagccaattcagatgaacggacaggaggtctacaaattcgctgtccgagaagtacctgccatcctccaagcccttctcaaagccaccaacacagccccggagtcactggactggctcctgcttcatcaagccaatcaacgcatcctcgatgctgtaggggatcgattcgccattccgcaggccaaggtgctcagcaacctggctgaatacggcaacacatcggcagccaccatcccactcatgcttgatgaagccgtacaagacgggagaattaaacctggtcaactgatcgcaagcagcggttttggagctggtctcagttggggtgcagcgttaatccgctggcaagggcccatctag

SEQ ID NO: 88304 - protein, 326 aa, Prochlorococcus marinus str. MIT 9303
MGCGSATPSQRISNDQLGQRVDTSDAWIRSRTGISARRVIGPDETLTGLSHQAAANALTMAGWESESVDLIILATSTPDDLFGSAPQLQAILGARQAVAFDLTAACSGFLFALITAAQFLRTGAMRRALVIGADQLSRWVDWDDRRSCVLFGDGAGAVALEATSAAQNGLLGFQLKSDGSRGDCLNLPQVQNYLSLVAGNSHQQGGFKPIQMNGQEVYKFAVREVPAILQALLKATNTAPESLDWLLLHQANQRILDAVGDRFAIPQAKVLSNLAEYGNTSAATIPLMLDEAVQDGRIKPGQLIASSGFGAGLSWGAALIRWQGPI

SEQ ID NO: 88305 - DNA, 999 bp, Candidatus Protochlamydia amoebophila UWE25
  CDS (1)..(999): transl_table=11
atggcaaatcaaataattgctcggataacaggcgtaggatcttatttacctgaacgcgtgctttctaatcaagatttagagaaaatggtcgagacttcagatgattggatcgtatctagaacgggaatacgtgaaagacgcttagcagatgcgaaagaatttccttccgatatgggaacttacgctgctcaaaaagctcttaaaactgccaatttgaaagctgagcaaattgacatgattttagttgccacaatgagtcctgattatatttcacccagtacagctaatctaattcaagcaaatctaggagcaagtaaagcagccgctatggatattcaggcagcttgtacaggatttttatatggtttgtcagtagcaaaagcttatattgaatctaatatgtatcggcatgttcttgttattgcaacagaaaaaatgtctgcctttattgattataaggatcggacgacatgtgttttgttcggtgatggagcagcggcggctgttgttaaaggagaaggggaagggttgaagattgattccttgtgtttgggtgcggatggagaattagctaatttagttttaattcccggcggtggatcgagaaaacccgcctcaatagaaacggtttcggaagggttacattactttaaaatgtcaggtaatgaggtttttaaacatgctgttaggcgcatgagtgcagcggcacgcgaatgtttagttcgagctgagctccaagaatctgatgtgagttggcttattcctcatcaagcaaataaaaggattattgatgccatagctaaaaattttaatttccccgatgaaaaagtttatcaaactgttcacaaatatggaaatacttctgcttcaagcatcgcaattgctttggatgaattaatcaaagaacatagctttgagaatggtgagcattttctcttaaccgctttcggtggaggattaacttggggtgcttcaattttgaccaaaacaacaaggtaa

SEQ ID NO: 88306 - protein, 332 aa, Candidatus Protochlamydia amoebophila UWE25
MANQIIARITGVGSYLPERVLSNQDLEKMVETSDDWIVSRTGIRERRLADAKEFPSDMGTYAAQKALKTANLKAEQIDMILVATMSPDYISPSTANLIQANLGASKAAAMDIQAACTGFLYGLSVAKAYIESNMYRHVLVIATEKMSAFIDYKDRTTCVLFGDGAAAAVVKGEGEGLKIDSLCLGADGELANLVLIPGGGSRKPASIETVSEGLHYFKMSGNEVFKHAVRRMSAAARECLVRAELQESDVSWLIPHQANKRIIDAIAKNFNFPDEKVYQTVHKYGNTSASSIAIALDELIKEHSFENGEHFLLTAFGGGLTWGASILTKTTR

SEQ ID NO: 88307 - DNA, 975 bp, Bartonella quintana str. Toulouse
  CDS (1)..(975): transl_table=11
atgattcgatcagttattcgtggtgtaggtagtgccttaccaaaaaaaagcttatcgaatgatgagattgcgaagtttgttgaaacatcagattcgtggattgttcagcgtacaggaatacgtcaacgttacattgctaatgaaaatgaaacaactgtttctttaggcgtagaagctgcacgagttgcgcttataaatgctaatctaacgataaaagatattgattgtattattttagcaacctcaacaccaaaccatacttttcctgcttctgctgttgaaattcagcatgctttgggaatgagtcatggatttgcttttgatattcaagctgtttgctctggttttatttttgctttaacaacaggagatgcttatttacgctctggagtagccaagaggattttggttattggatctgaaacattttctcgaattttagattggaaagatcgcacgacatgtgttttgtttggcgatggggcgggtgctgttgtgttggaagcacaggaaattcagagtgatgttgctttggagtgtggcatcttgtctgcgaaattgtactctaatggtgcgtatgtgaataagctttatgttgatggtggaccttcaacaactcaaacgacgggctatttacgtatggaagggcgagaagtttttaaatatgcagtttgtatgataactgatgccgttgatgattgttttgcagctgcaggtatcaattcttcacaattagattggtttgtgcctcatcaggccaataaacgtattattgaggcatcagctaaaaaattgggaatttctatggataaagttataattactgttgatcaacacggtaatacgtctgcggcatcagttccattggctttaacaacagctatttgcgatggaagaattaaaaaaggagatcttgtcatgttagaggctatgggaggtggatttacatggggagcaattcttattcgttggtga

SEQ ID NO: 88308 - protein, 324 aa, Bartonella quintana str. Toulouse
MIRSVIRGVGSALPKKSLSNDEIAKFVETSDSWIVQRTGIRQRYIANENETTVSLGVEAARVALINANLTIKDIDCIILATSTPNHTFPASAVEIQHALGMSHGFAFDIQAVCSGFIFALTTGDAYLRSGVAKRILVIGSETFSRILDWKDRTTCVLFGDGAGAVVLEAQEIQSDVALECGILSAKLYSNGAYVNKLYVDGGPSTTQTTGYLRMEGREVFKYAVCMITDAVDDCFAAAGINSSQLDWFVPHQANKRIIEASAKKLGISMDKVIITVDQHGNTSAASVPLALTTAICDGRIKKGDLVMLEAMGGGFTWGAILIRW

SEQ ID NO: 88309 - DNA, 975 bp, Bartonella henselae str. Houston-1
  CDS (1)..(975): transl_table=11
atgattcgatctgttgtgcgtggtataggaggtgccttacccaaaaaaagcttatcgaatgatgatattgcgaagtttgttgaaacatcagattcttggattgttcagcgtacgggaatacgccaacgctacattgccaatgaaaaggaaacaacagtttctttgggagtagaagctgcacaagctgcacttataaatgctggtttaacaattaaagatattgattgtattattttggcgacatcaacaccaaatcacacttttcccgcttctgctgtcgaaattcaacatgctttgggaatgagccatggatttgcgtttgatattcaggctgtttgctcgggttttatttttgctttaacaacaggagatgcttatttacgctgtggaacagccaaaaggattttggttatcggatctgacacattttctcgaattttagattggcaagatcgtacgacatgtgttttgttcggtgatggtgcgggtgctgctgttttagaagcacaagaaattgagagaggcgttgcttctgatcatggcattttatctacaaaattgcgctctaatggtgcgtatatggataaactttatgttgatggtggtccttcaacaacgcaaaaaactggctatttacgtatggaaggacgagaagtttttaaatatgcagttggtatgataaccgatgtagttgatgagtgttttgcagctgcaggtatggattcttcacaattagattggtttgtacctcatcaggccaataaacgtattattgaagcgtcagctaaaaaactaggaatttctatagataaagtggtaatcaccgttgatcgacacggtaatacgtctgcagcatctgtgccattggctttaacaatggctatttgcgatggaaaaattaaaaaaggagatcttgtcatgttagaagctatgggaggagggtttacatggggtgcaattcttattcgttggtag

SEQ ID NO: 88310 - protein, 324 aa, Bartonella henselae str. Houston-1
MIRSVVRGIGGALPKKSLSNDDIAKFVETSDSWIVQRTGIRQRYIANEKETTVSLGVEAAQAALINAGLTIKDIDCIILATSTPNHTFPASAVEIQHALGMSHGFAFDIQAVCSGFIFALTTGDAYLRCGTAKRILVIGSDTFSRILDWQDRTTCVLFGDGAGAAVLEAQEIERGVASDHGILSTKLRSNGAYMDKLYVDGGPSTTQKTGYLRMEGREVFKYAVGMITDVVDECFAAAGMDSSQLDWFVPHQANKRIIEASAKKLGISIDKVVITVDRHGNTSAASVPLALTMAICDGKIKKGDLVMLEAMGGGFTWGAILIRW

SEQ ID NO: 88311 - DNA, 993 bp, Symbiobacterium thermophilum IAM 14863
  CDS (1)..(993): transl_table=11
atgaagatacgccccgtcggcatcaccggcctgggcatggcggttcccgagcgggtcctgaccaatcacgacctggagcggatggtggacacctccgacgagtggatccgcacccgcaccggcatccgggagcggcggatcgcggcgccccacgaggccagctcggactacgcgcttcgtgcggcccgggaggcgatggcgcaggcgggggtgacgccggagcagatcgacctgatcatctgcgccacggtcaccccggacatgcccatgccggccacggccgccctggtgcaggctgccctgggcgcacaccgggctgccgcgttcgacctgtccgccgcctgccccggctggatctacggcgtggtgatggcgcagcagtccattgccacggggctctacgactgcgccctggtcatcggggtggagctgctgtccaagatggtgaactggcaggaccgcaagacctgcgtgctgttcggcgatgcggccggcgcggcggtgctgcagccggtgtcggaggggcgcggcatcctctcctccgtgctgggggccgagggggcgggccactgccacctctacacgcctgcgggcggctcccgcctgcccgcctcgccggagacggtggcgcaggggctgcactacgtgcacatgaacgggcccgaggtgttcaagttcgcagtgcgggtcatggacgaggccacggtgcaggtggtcgaaaaggccggcctcacggtgggcgacatcgacctgctggtgccgcaccaggccaacgtccgcatcattgacagcgcggtgaagcggctggggctggcgccggagaaggtggtggtcaacctggatcgctatggcaacacctcgtccgcgtcgatcccggtggccctcaccgaggcgctcacggaggggcgggtgcgggacggcgacctggtggtctgcgtgtcgttcggagccggtctggtatggggcgccctggcgctgcgctgggggcgataa

SEQ ID NO: 88312 - protein, 330 aa, Symbiobacterium thermophilum IAM 14863
MKIRPVGITGLGMAVPERVLTNHDLERMVDTSDEWIRTRTGIRERRIAAPHEASSDYALRAAREAMAQAGVTPEQIDLIICATVTPDMPMPATAALVQAALGAHRAAAFDLSAACPGWIYGVVMAQQSIATGLYDCALVIGVELLSKMVNWQDRKTCVLFGDAAGAAVLQPVSEGRGILSSVLGAEGAGHCHLYTPAGGSRLPASPETVAQGLHYVHMNGPEVFKFAVRVMDEATVQVVEKAGLTVGDIDLLVPHQANVRIIDSAVKRLGLAPEKVVVNLDRYGNTSSASIPVALTEALTEGRVRDGDLVVCVSFGAGLVWGALALRWGR

SEQ ID NO: 88313 - DNA, 939 bp, Bacillus licheniformis ATCC 14580
  CDS (1)..(939): transl_table=11
atgaaagctggaattattggaatcggccggtacatccctgaaaaggtgctgaccaatttcgacttggaaaaaatggttgaaacttctgacgagtggattcgtacaagaacaggcatagaagaaagaagaatcgcagccgaagatgagaaaacgtccgatatggctgtggccgccgcaagaagagcgatggaagatgcaaacatcgagccggaagatcttgatatgattctcgtcgccaccgttactcctgatcaggcattcccgacagtgtcctgcatgattcaagaaaagctcggtgcattcaatgcctgtgcaatggatatcagcgcagcgtgcgccggttttatgtacggcttagtcactggaaaacagtttatcgaagccggcacatataagcatgtgcttgtcatcggagttgaaaagctttcaggcattacggactgggatgaccgcaataccgccgttctgttcggagacggtgcgggcgccgcggttgtcggccctgtcagcgacgataaagggattctgtcctttgaactaggtgcagacggcagaggcggaaaacacttgtacttggatgaaaaagatcatacaatcatgaatggcagagaagtgttcaagtttgccgtccgccaaatgggtgaatccagtgtaaatgttattgaaaaagcgggattatccaaagaggatgtcgactttttggtgccgcaccaagccaacatccggatcatggaagcggcgcgcgaacgtttggagcttccggtcgaaaaaatgtcgaaaacggttcataaatacggaaacacatcagctgcttctattccgatttctcttgtggaagagcttgaagctggtaaaataaaagacggtgacgtcattgtgatggtcggcttcggcggaggtttgacatggggagccatcgccatgcgctggggccgctaa

SEQ ID NO: 88314 - protein, 312 aa, Bacillus licheniformis ATCC 14580
MKAGIIGIGRYIPEKVLTNFDLEKMVETSDEWIRTRTGIEERRIAAEDEKTSDMAVAAARRAMEDANIEPEDLDMILVATVTPDQAFPTVSCMIQEKLGAFNACAMDISAACAGFMYGLVTGKQFIEAGTYKHVLVIGVEKLSGITDWDDRNTAVLFGDGAGAAVVGPVSDDKGILSFELGADGRGGKHLYLDEKDHTIMNGREVFKFAVRQMGESSVNVIEKAGLSKEDVDFLVPHQANIRIMEAARERLELPVEKMSKTVHKYGNTSAASIPISLVEELEAGKIKDGDVIVMVGFGGGLTWGAIAMRWGR

SEQ ID NO: 88315 - DNA, 954 bp, Legionella pneumophila subsp. pneumophila str. Philadelphia 1
  CDS (1)..(954): transl_table=11
atgaaaaatgctgttattaatggcactggaagttactctccagagagacaaatgactaatgctgaactggaaaccatgcttgatactagcgatgaatggattgttaccaggactggtattagtagccgtagtgttgctcaagaacatgaaacaacatcttatatggcttccagagcagcagagcaagcactagaggcatcaggccttgatgctgaagaaattgatttgatattagtagcaacatgtaccccagattatttttttcctagcgttgcctgtcacgtacaacatgctttaggaatcaaaagacctattccggcttttgacattggagctgcatgcagcggttttgtttatgcgatggatgtagcgaaacaatacattgctacaggggctgccaaacacgttcttgtcgtaggcagcgagagcatgtcaagagcggtagattggactgatcgttctatttgtgtcttattcggagatggcgcaggcgctgttgttttaagcgcaagtgatcgccaagggattatgggtagtgttttacattctgcctatgactctgataaattactagtccttcgtaattcaacttttgaacaagatcgtgcaacgattggaatgcgaggtaatgaggtattcaaaattgctgttaatattatgggtaatattgttgatgaagtattagaagcaagtcatttaaaaaaatctgatattgattggctgatacctcatcaagccaatatacgcatcatacaagccatagctaaaaaattatctcttcctatgtcacatgttattgttacaattggtaaccaaggtaacacatcggctgcttctattcccttagcacttgattattctattaaaaataatcagattaaaagggatgaaatattattaattgaatcctttggtggtggaatgacctggggcgctatggttattcgttactaa

SEQ ID NO: 88316 - protein, 317 aa, Legionella pneumophila subsp. pneumophila str. Philadelphia 1
MKNAVINGTGSYSPERQMTNAELETMLDTSDEWIVTRTGISSRSVAQEHETTSYMASRAAEQALEASGLDAEEIDLILVATCTPDYFFPSVACHVQHALGIKRPIPAFDIGAACSGFVYAMDVAKQYIATGAAKHVLVVGSESMSRAVDWTDRSICVLFGDGAGAVVLSASDRQGIMGSVLHSAYDSDKLLVLRNSTFEQDRATIGMRGNEVFKIAVNIMGNIVDEVLEASHLKKSDIDWLIPHQANIRIIQAIAKKLSLPMSHVIVTIGNQGNTSAASIPLALDYSIKNNQIKRDEILLIESFGGGMTWGAMVIRY

SEQ ID NO: 88317 - DNA, 990 bp, Burkholderia pseudomallei K96243
  CDS (1)..(990): transl_table=11
atggcccaatcgaccctctattcccgcgtgctcggcacgggtagctatctgccgcccgatcgcgtcacgaatcaagaactcgccgatcgtctcgcgaaggacggcatcgagacgagcgacgagtggatcgtcgcgcgcacgggcatccgcgcgcggcacttcgccgcgcccgacgtgacgacgagcgatctcgcgctcgtcgccgcgcagcgcgcgatcgaggcggccgacgtcgatccgcagtcgatcgacctcatcatcgtcgcgacgtcgacgcctgatttcgttttcccgagcaccgcgtgcctgctgcagaacaagctcggcatcaagaacggcggcgccgcgttcgacgtgcaggcggtatgttcgggcttcgcctacgcgctcgcgacggccgacagcttcatccgcacggggcagcaccgcacggcgctcgtcatcggcgcggagacgttctcgcgcattctcgatttcaaggaccgtacgacctgcgtgctgttcggcgacggcgcgggcgccgtcgtgctgtcggcgtccgaagagccgggcatcctcggcagcgcgctgcatgcggacggcagctattcgaacatcctctgcacgccgggcaacgtgaatcgcggcgtcatcgcgggcagcgcgttcctgcacatggacggccaggccgtcttcaagcttgccgtgaacgtgctcgagaaagtcgcggtcgaagcgctgtcgaaggcggagctcgcgtcggaacaggtcgattggctgattccgcaccaggccaatatccgtatcatgacaagcacgtgccgcaagctcggcctgccgcaggaacgcatgatcgtcaccgtcgacgagcacggcaacacgtccgccgcatcgattccgctcgcactcgacgtcgccgtgcgcgacggccgcatcaagcgcggccagcacgtgctgatcgaaggcgtcggcggcggcttcacgtggggcgcgtcggtcttccgcttctga

SEQ ID NO: 88318 - protein, 329 aa, Burkholderia pseudomallei K96243
MAQSTLYSRVLGTGSYLPPDRVTNQELADRLAKDGIETSDEWIVARTGIRARHFAAPDVTTSDLALVAAQRAIEAADVDPQSIDLIIVATSTPDFVFPSTACLLQNKLGIKNGGAAFDVQAVCSGFAYALATADSFIRTGQHRTALVIGAETFSRILDFKDRTTCVLFGDGAGAVVLSASEEPGILGSALHADGSYSNILCTPGNVNRGVIAGSAFLHMDGQAVFKLAVNVLEKVAVEALSKAELASEQVDWLIPHQANIRIMTSTCRKLGLPQERMIVTVDEHGNTSAASIPLALDVAVRDGRIKRGQHVLIEGVGGGFTWGASVFRF

SEQ ID NO: 88319 - DNA, 966 bp, Methylococcus capsulatus str. Bath
  CDS (1)..(966): transl_table=11
gtgagccgttactcccgcatcgcgggcaccggcggctaccttccccggcaggtggtgaccaacgacgatctcgccatgcgggtcgagacgtcggacgaatggatcgtcgagcgcactggcatccgccgccgacacatcgcggctgctgacgaaacggcctccagcatggccgagattgcctcccggcaggcactggaggctgccgccatcgatccccacgatctcgatctgatcatcctcgcgaccagttcgccggaccgggtttttcccagcacggcatgcctcctgcagcagcgcttgggcgtgcgcagctgtgcggctttcgacgtgcaggcggcgtgttcggggttcatcttcgcgttgagcatcgccgaccagtacatttccgccggcaatgccaaccgcgtgttggtggtcggtacggaggtcaattcgcgttccgtggattgggacgaccgctcgacttgcattctgttcggtgacggtgccggggccgtggtgctcgaatctgccaccgagcccggcatcatgagcacccatatccattccgacggccattaccaagatctgctctatctgcccaatcccgccagcaacggcgaaggcagcgacgagagccgcaccatccggatgcagggcagcgaggttttcaaggtcgcggtcaacacactcggtcgcatcgtcgatgaaaccctggaacagaacggccttcagaaatctgacgtcgactggctggtgccccatcaggccaacatccgcatcatcgcggcgaccgcgaagaagctccagttgcccatggagcgggtggtcgtgacggtggacgagcagggcaacacttcttcggcatcgattcctctggctttcgacgaggccgttcgcgacggccgcatcaagcgcggacaaaccgtgcttatggaagccttcggcggcgggttcgcctggggctccgctcttctgcgctattaa

SEQ ID NO: 88320 - protein, 321 aa, Methylococcus capsulatus str. Bath
MSRYSRIAGTGGYLPRQVVTNDDLAMRVETSDEWIVERTGIRRRHIAAADETASSMAEIASRQALEAAAIDPHDLDLIILATSSPDRVFPSTACLLQQRLGVRSCAAFDVQAACSGFIFALSIADQYISAGNANRVLVVGTEVNSRSVDWDDRSTCILFGDGAGAVVLESATEPGIMSTHIHSDGHYQDLLYLPNPASNGEGSDESRTIRMQGSEVFKVAVNTLGRIVDETLEQNGLQKSDVDWLVPHQANIRIIAATAKKLQLPMERVVVTVDEQGNTSSASIPLAFDEAVRDGRIKRGQTVLMEAFGGGFAWGSALLRY

SEQ ID NO: 88321 - DNA, 966 bp, Azoarcus sp. EbN1
  CDS (1)..(966): transl_table=11
atgatctacgcacggatcgccggaactggcagctttctgccgggcgagccgataaccaacgatgacctggtggcgcgcggtatcgatacgtcggaccaatggatcatcgaacggaccggaatccgcagccgacatctggcgtcggcggaaatgtcgtcgagcgatctggccaagacggcgagcgagcgcgccctcgacgcggcaggagtgcggcccgacgacatcgacctgatcatcgtcgcgacctccacgcccgactgcatctttcccagcaccgccgcactgctccagtcgaagctcggcattcgcaatggcgctgccgcgttcgacgtgcaggcggtttgcagcggttttgtctatgggctgacgatcgccgagaagttcatccgctccggtagccacaagcgcgcgctggtcgtcggcgccgaagtgttctcgcgcattctcgactggtcggatcgcggcacctgcgtcctgttcggtgacggcgccggcgcggtcgtgctcgaagcggccgaggcgccgggaatcctcgcgagcgcgctgcatgccgacggaagccatcatccgattctctgcgttccgggtgcggtggcggccggccaggtcgtcggcgacccgttcctgcgcatggacggccaggccgtgttcaagttcgcggtccgggtgctgggcgacgtcgcgctggaagtgctcgatcaggcaggtgtcacggtggactccgtggactggctgattccccatcaggcgaatatccgcatcctgcaggcgactgcgcgccgtctcggcgtttcgatggacaaagtgatcacgaccgtcgatcaccacggcaacacttccgcggcatcgattccgctggcgctcgacctcgccgtccgcgatggccgtatccggccggggcaccgcttcatcatcgaaggggtaggcgggggcttcacgtggggcgcggcgctgctccaattctga

SEQ ID NO: 88322 - protein, 321 aa, Azoarcus sp. EbN1
MIYARIAGTGSFLPGEPITNDDLVARGIDTSDQWIIERTGIRSRHLASAEMSSSDLAKTASERALDAAGVRPDDIDLIIVATSTPDCIFPSTAALLQSKLGIRNGAAAFDVQAVCSGFVYGLTIAEKFIRSGSHKRALVVGAEVFSRILDWSDRGTCVLFGDGAGAVVLEAAEAPGILASALHADGSHHPILCVPGAVAAGQVVGDPFLRMDGQAVFKFAVRVLGDVALEVLDQAGVTVDSVDWLIPHQANIRILQATARRLGVSMDKVITTVDHHGNTSAASIPLALDLAVRDGRIRPGHRFIIEGVGGGFTWGAALLQF

SEQ ID NO: 88323 - DNA, 975 bp, Campylobacter jejuni RM1221
  CDS (1)..(975): transl_table=11
atgcttaaagccggtcttaaaagtatagcttcttatattccagaaaaaattttaagcaatgctgatcttgaaaaaatagtagataccaccgatgaatggatcactagacgcacaggtattaaagaaagacgcattgctagtgaaaatgaaaattctagcgatttgggcacaaaagctgcattaaaagccatagaaagagcaaatttaaaacctgaagatattgatgcgattcttgtagccactttaagtcctgattattttactatgccttcaacggcttgtaaaattgcttcaaatttaggacttgtaaatattagtgcttttgatatttcagcagcttgttctggttttatctatttgcttgaacaagctaaagccttagtagaaagtggtttgaaaaaaaatgttttaatcgtaggagctgaaaaaacaagttcaattatggattacaatgacagaagcatttgcatactctttggagacggtgcgggtgctggagttgtaagtttggacaatgaaaatcatatccttgatgtacatactgcaagcaatggtaattatggagatcttttaatgactcaaagatcgcaaaaatcaagtctatgtcaaacactttctatgcaaatgaaaggcaatgaagtttttaaaatagcagtaaacacgcttagcaatgatgttgtagaaattttagctaaaaataacattttagcacaagaaattgatctttttattcctcatcaagctaatctacgcatcattaaagccgtccaagaaaaactcaatctaagcgatgaaaaatgtgtgattaccgtacaaaaatatggcaatacttcagctgcttctatacctatggcaatgaatgatgcctatgaagaaggacgacttaaaaaaggaaatctgatcttactagatgcttttggcggtggttttacttggggatctgcgcttttaaaatttggaggagagaatttttaa

SEQ ID NO: 88324 - protein, 324 aa, Campylobacter jejuni RM1221
MLKAGLKSIASYIPEKILSNADLEKIVDTTDEWITRRTGIKERRIASENENSSDLGTKAALKAIERANLKPEDIDAILVATLSPDYFTMPSTACKIASNLGLVNISAFDISAACSGFIYLLEQAKALVESGLKKNVLIVGAEKTSSIMDYNDRSICILFGDGAGAGVVSLDNENHILDVHTASNGNYGDLLMTQRSQKSSLCQTLSMQMKGNEVFKIAVNTLSNDVVEILAKNNILAQEIDLFIPHQANLRIIKAVQEKLNLSDEKCVITVQKYGNTSAASIPMAMNDAYEEGRLKKGNLILLDAFGGGFTWGSALLKFGGENF

SEQ ID NO: 88325 - DNA, 960 bp, Ehrlichia ruminantium str. Welgevonden
  CDS (1)..(960): transl_table=11
atgagaagttctaggatattgggaataggttcttatttacctaaaagtttggtaacaaatgatgatcttgcttgtactgttgcaacgagtgatgaatggatagtcaaaaggactggtattagacagagatatattgctgcagatgatcaaatgacatcagatatggctgtagaggcagcaaaacttgctttgaatgattcaggtattaataaacaggatgttgatttaattgttgttgctactactacaccagataggacgtttcctagttgtgctactatagttcagtctaagttggagtgtaagaatgcttttgcgtttgatattcaggctgtttgttctggattcatatatgctatggctattgctgataattttataaaatctggtcaggttaatgtgtcacttgtaataggggctgaagtaatgtctagaattttagattggaaggataggtctacatgtgtattatttggtgatggtgcaggtgcagttgttttaagtaataattctgcacgaaatactggtgttatatctactattttgtattctgatggaactcttcataatttattgtatacaagtggtggtacagcatacaatggtgttgcaggtacaatatgtatgaatggtacagttgtgtttgaacatgcaattgaaaaattaagtgcttctatagttgaaattctaaataaaaataatttgagcatagatgaggttaactggtttgtgttgcatcaagctaatattcgtatcattgaattagtagcaagaagattaaaaataccttctgagaaaatggtaattagtattaatcaacatgctaacacatctgcagcttcaataccattagcattatcttatgcaaaaaattcaggaaagttaaaacaagatgatcttgttgttttggcagcaataggtgctggtattacttggggtgtatgtttagtgagaatgtag

SEQ ID NO: 88326 - protein, 319 aa, Ehrlichia ruminantium str. Welgevonden
MRSSRILGIGSYLPKSLVTNDDLACTVATSDEWIVKRTGIRQRYIAADDQMTSDMAVEAAKLALNDSGINKQDVDLIVVATTTPDRTFPSCATIVQSKLECKNAFAFDIQAVCSGFIYAMAIADNFIKSGQVNVSLVIGAEVMSRILDWKDRSTCVLFGDGAGAVVLSNNSARNTGVISTILYSDGTLHNLLYTSGGTAYNGVAGTICMNGTVVFEHAIEKLSASIVEILNKNNLSIDEVNWFVLHQANIRIIELVARRLKIPSEKMVISINQHANTSAASIPLALSYAKNSGKLKQDDLVVLAAIGAGITWGVCLVRM

SEQ ID NO: 88327 - DNA, 963 bp, Neisseria gonorrhoeae FA 1090
  CDS (1)..(963): transl_table=11
atgcagtatgcaaaaatttccggcacgggcagctatcttcctgccaaccgcgtcagcaatgacgaccttgcccaaaaggtagatacctctgacgagtggattaccgcgcgtacgggcatcaaattccgccatattgcagccgaaaacgaaaaaaccagcgatcttgcagccgaagcggcgcggcgcgctttggcagatgccaaattaaatataaacgacattgatttgattatcgtggcgacggcaacgccggatatgcagtttccttctaccgccaccatcgtgcagcaaaaattgggcatcaccaacggctgccccgcgtttgacgtgcaggcggtgtgcgcaggctttatgtacgcgctgactacggcaaatgcctacattaaaagcggtatggcgaaaaacgcgctggtcatcggcgcggaaaccttcagccgcatcgtcgattggaacgaccgcacaacctgcgtgctgttcggcgacggcgcgggcgcggtggttttaagcgcgtccgacaaaccgggcatcatccacagcaaactcaaagccgacggcaattatctgaaactcttaaacgtccccgggcaaatcgcctgcggcaaagtttccggttcgccgtacatttcgatggacggtcccggcgtgttcaagtttgccgtcaaaatgctgtccaaaatcgccgatgacgttatcgaagaagcaggttacaccgccgaacaaatcgactggattgttccccatcaggcaaaccgccgcattatcgaatcgaccgcgaaacatttgggtttgagtatggacaaagtcgtcctgaccgtccaagaccacggcaacacgtccgccgcatccattccgctggctttggacgcgggcatccgcagcggacaaatcaaacgcggtcaaaacctgctgctcgaaggcataggcggcggtttcgcgtggggcgcggtgctgttgcaatattga

SEQ ID NO: 88328 - protein, 320 aa, Neisseria gonorrhoeae FA 1090
MQYAKISGTGSYLPANRVSNDDLAQKVDTSDEWITARTGIKFRHIAAENEKTSDLAAEAARRALADAKLNINDIDLIIVATATPDMQFPSTATIVQQKLGITNGCPAFDVQAVCAGFMYALTTANAYIKSGMAKNALVIGAETFSRIVDWNDRTTCVLFGDGAGAVVLSASDKPGIIHSKLKADGNYLKLLNVPGQIACGKVSGSPYISMDGPGVFKFAVKMLSKIADDVIEEAGYTAEQIDWIVPHQANRRIIESTAKHLGLSMDKVVLTVQDHGNTSAASIPLALDAGIRSGQIKRGQNLLLEGIGGGFAWGAVLLQY

SEQ ID NO: 88329 - DNA, 960 bp, Dechloromonas aromatica RCB
  CDS (1)..(960): transl_table=11
atgtatgcacgcctgagtggcaccggcagttatctgccgggtaatcctgtcagcaacagcgatctagctgcgcgcggtatcgataccagcgacgagtggatcgtcactcgtaccggcattcgcagtcgctatctcgctccaccgggtactacttcgagcgaacttggcttgatcgccgcgcaaaaagcgctggaaatggccggcgtggcaggcgccgaccttgatctgatcatcgttgctacctcgactcccgatttcatctttccgagcactgcctgcctaatccaaggaaaacttggcaacaagggggctgcagcctttgatgttcaggcagtctgcgccggttttacctacgctctgggtattgccgaaaaattcatttgctccggcagccacaagaaagccttggttattggtgccgaggtgttttcgcgcatccttgactggaacgatagggggacctgcgtcctgtttggcgatggcgccggggctgtggttcttgaggccgctgataaaccaggcattctggctacggccatgcatgccgacggtagccagagcggtatcctgaatgtgccggggcaaatttgcggcggtcaggtgactggtgaccctttcctgcgcatggacggccaggcagtcttcaaatttgctgtgcgcgtgctggccgatatagccgagaaagtctgtcaagccgccgatattcaaaccagtgatgttgattggttgattcctcatcaggcaaatattcgaattatcgaagctaccggcaagaagctgggggtcgatcgcgataaggtgatcgttactgttgaccgccatggcaacacttccgccgcttctgtaccgctggcgctagatgaagcggtgcgcgacgggcgtatccagcgaggccagaaggtacttcttgaaggcgttggtggcggctttacttggggcgcagccctgcttgaattctga

SEQ ID NO: 88330 - protein, 319 aa, Dechloromonas aromatica RCB
MYARLSGTGSYLPGNPVSNSDLAARGIDTSDEWIVTRTGIRSRYLAPPGTTSSELGLIAAQKALEMAGVAGADLDLIIVATSTPDFIFPSTACLIQGKLGNKGAAAFDVQAVCAGFTYALGIAEKFICSGSHKKALVIGAEVFSRILDWNDRGTCVLFGDGAGAVVLEAADKPGILATAMHADGSQSGILNVPGQICGGQVTGDPFLRMDGQAVFKFAVRVLADIAEKVCQAADIQTSDVDWLIPHQANIRIIEATGKKLGVDRDKVIVTVDRHGNTSAASVPLALDEAVRDGRIQRGQKVLLEGVGGGFTWGAALLEF
